United States Patent Application Publication US 2020/0163878 A1 - sequence listing, part 23

SEQ ID NO: 83404 - RNA, 1410 nt, Artificial Sequence; identical to SEQ ID NO: 80623
  derived and/or modified CDS sequence (opt1) from neuraminidase__InfluenzaA__ADL39326

SEQ ID NO: 83405 - RNA, 1413 nt, Artificial Sequence; identical to SEQ ID NO: 82954
  derived and/or modified CDS sequence (opt1) from neuraminidase__InfluenzaA__ADL39392

SEQ ID NO: 83406 - RNA, 1410 nt, Artificial Sequence
  derived and/or modified CDS sequence (opt1) from neuraminidase__InfluenzaA__ADL39403
augaaccccaaccagaagaucaucaccaucggcagcgugucccugaccaucagcacgaucugcuucuucaugcagaucgccauccucaucaccaccgucacccugcacuucaagcaguacgaguucaacccgccgcccaacaaccaggugaugcugugcgagcccacgaucaucgagcgcaacaucaccgagaucguguaccucaccaacaccacgaucgagaaggagaucugccccaagcuggccgaguaccggaacugguccaagccccagugcgacaucaccggguucgcgcccuucagcaaggacaacuccauccgccugagcgccggcggggacaucugggucacccgggagcccuacguguccugcgacccggacaagugcuaccaguucgcccucggccaggggaccacgcugaacaacgugcacagcaacaacaccguccgcgaccggacccccuaccgcacccugcucaugaacgagcugggcgugcccuuccaccugggcacgaagcaggucugcaucgccugguccagcuccagcugccacgacgggaaggccuggcuccacgugugcaucaccggcgacgacaagaacgcgaccgccuccuucaucuacaacgggcggcugguggacagcguggucuccuggagcaaggagauccugcgcacccaggaguccgagugcgugugcaucaacggcacgugcaccguggucaugaccgacgggagcgccuccggcaaggccgacaccaagauccucuucaucgaggagggcaagaucgugcacacgagcacccugagcggguccgcgcagcacguggaggagugcagcugcuacccccgguacccgggcguccgcugcgugugccgggacaacuggaagggguccaaccgccccaucguggacaucaacaucaaggaccacagcaucgucuccagcuacgugugcuccggccuggugggcgacacgccccggaagaacgacagcuccagcuccagccacugccucgaccccaacaacgaggagggcgggcacggggucaagggcugggccuucgacgacgggaacgacguguggaugggccgcaccaucuccgagaagucccggcugggcuacgagaccuucaaggucaucgagggguggagcaaccacaagagcaagcugcagaucaaccgccaggugaucguggaccggggcaaccgcuccggguacagcggcaucuucuccgucgagggcaagagcugcaucaaccggugcuucuacguggagcucauccgcgggcggaaggaggagaccgaggugcuguggaccagcaacuccaucgucguguucugcggcaccagcgggacguacggcaccggguccuggccggacggcgccgaccugaaccucaugcccaucuga

SEQ ID NO: 83407 - RNA, 1413 nt, Artificial Sequence; identical to SEQ ID NO: 81485
  derived and/or modified CDS sequence (opt1) from neuraminidase__InfluenzaA__ADL39425

SEQ ID NO: 83408 - RNA, 1413 nt, Artificial Sequence
  derived and/or modified CDS sequence (opt1) from neuraminidase__InfluenzaA__ADL39447
augaaccccaaccagaagaucaucaccaucggcagcaucuccaucgccaucgggaucaucagccugaugcuccagaucggcuccaucaucagcaucugggccucccacagcauccagaccgggucccagaacaacacgggcaucugcaaccagcgcaucaucaccuacgagaacagcaccugggugaaccacaccuacgucaacaucaacaacacgaacgugguggcgggggaggacaagaccuccgucacccugaccggcaacagcucccugugcagcaucuccggcugggccaucuacacgaaggacaacagcauccggaucggguccaagggcgacguguucgugauccgcgagccguucaucagcugcucccaccucgagugccggaccuucuuccugacccagggggcccugcucaacgacaagcacagcaacggcaccgucaaggaccgcucccccuaccgggcccugaugagcugcccccugggggaggcccccagcccguacaacuccaaguucgagagcguggcgugguccgccagcgccugccacgacggcaugggcuggcucacgaucgggaucuccggccccgacaacggggccguggcgguccugaaguacaacggcaucaucaccggcaccaucaagagcuggaagaagcagauccugcgcacccaggaguccgagugcgugugcaugaacgggagcugcuucacgaucaugaccgacggccccuccaacaaggccgccagcuacaagaucuucaagaucgagaaggggaaggugaccaaguccaucgagcucaacgcccccaacuucuacuacgaggagugcagcugcuacccggacaccggcaucgucaugugcgugugccgggacaacuggcacggguccaaccgccccugggugagcuucaaccagaaccuggacuaccagaucggcuacaucugcuccggcgucuucggggacaacccccggcccgaggacggcgaggggagcugcaacccggugacgguggacggcgccaacggggucaagggcuucuccuacaaguacggcaacgggguguggaucggccgcaccaagagcaaccggcugcgcaagggguucgagaugaucugggaccccaacggcuggaccaacaccgacuccgacuucagcgugaagcaggacgucguggcgaucacggacuggagcggguacuccggcagcuucgugcagcaccccgagcucaccggccuggacugcauccggcccugcuucugggucgagcuggugcgcgggcucccgcgggagaacaccaccaucuggacguccggcagcuccaucagcuucugcggggucaacuccgacaccgccaacuggagcuggcccgacggcgccgagcugcccuucaccaucgacaaguga

SEQ ID NO: 83409 - RNA, 1413 nt, Artificial Sequence; identical to SEQ ID NO: 81485
  derived and/or modified CDS sequence (opt1) from neuraminidase__InfluenzaA__ADL39458

SEQ ID NO: 83410 - RNA, 1413 nt, Artificial Sequence
  derived and/or modified CDS sequence (opt1) from neuraminidase__InfluenzaA__ADL39469
augaaccccaaccagaagaucaucaccaucggcagcaucuccaucgccaucgggaucaucagccugaugcuccagaucggcuccaucaucagcaucugggccucccacagcauccagaccgggucccagaacaacacgggcaucugcaaccagcgcaucaucaccuacgagaacagcaccugggugaaccacaccuacgucaacaucaacaacacgaacgugguggcgggggaggacaagaccuccgucacccuggccggcaacagcucccugugcagcaucuccggcugggccaucuacaccaaggacaacagcauccggaucggguccaagggcgacguguucgugauccgcgagccguucaucagcugcucccaccucgagugccggacguucuuccugacccagggggcccugcucaacgacaagcacagcaacggcaccgucaaggaccgcucccccuaccgggcccugaugagcugcccccugggggaggcgcccagcccguacaacuccaaguucgagagcguggccugguccgccagcgccugccacgacggcaugggcuggcucaccaucgggaucuccggccccgacaacggggcgguggccguccugaaguacaacggcaucaucacgggcaccaucaagagcuggaagaagcagauccugcgcacccaggaguccgagugcgugugcaugaacgggagcugcuucaccaucaugacggacggccccuccaacaaggccgccagcuacaagaucuucaagaucgagaaggggaaggugaccaaguccaucgagcucgacgcccccaacuucuacuacgaggagugcagcugcuacccggacaccggcaucgucaugugcgugugccgggacaacuggcacggguccaaccgccccugggugagcuucaaccagaaccuggacuaccagaucggcuacaucugcuccggcgucuucggggacaacccccggcccgaggacggcgaggggagcugcaacccggugaccguggacggcgcgaacggggucaagggcuucuccuacaaguacggcaacgggguguggaucggccgcaccaagagcaaccggcugcgcaagggguucgagaugaucugggaccccaacggcuggacgaacaccgacuccgacuucagcgugaagcaggacgucguggccaucaccgacuggagcggguacuccggcagcuucgugcagcaccccgagcucacgggccuggacugcauccggcccugcuucugggucgagcuggugcgcgggcucccgcgggagaacaccaccaucuggaccuccggcagcuccaucagcuucugcggggucaacuccgacacggccaacuggagcuggcccgacggcgccgagcugcccuucaccaucgacaaguga

SEQ ID NO: 83411 - RNA, 1413 nt, Artificial Sequence
  derived and/or modified CDS sequence (opt1) from neuraminidase__InfluenzaA__ADL39480
augaaccccaaccagaagaucaucaccaucggcagcaucuccaucgccaucgggaucaucagccugaugcuccagaucggcuccaucaucagcaucugggccucccacagcauccagaccgggucccagaacaacacgggcaucugcaaccagcgcaucaucaccuacgagaacagcaccugggugaaccacaccuacgucaacaucaacaacacgaacgugguggcgggggaggacaagaccuccgucacccuggccggcaacagcucccugugcagcaucuccggcugggccaucuacaccaaggacaacagcauccggaucggguccaagggcgacguguucgugauccgcgagccguucaucagcugcucccaccucgagugccggacguucuuccugacccagggggcccugcucaacgacaagcacagcaacggcaccgucaaggaccgcucccccuaccgggcccugaugagcugcccccugggggaggcgcccagcccguacaacuccaaguucgagagcguggccugguccgccagcgccugccacgacggcaugggcuggcucaccaucgggaucuccggccccgacaacggggcgguggccguccugaaguacaacggcaucaucacgggcaccaucaagagcuggaagaagcagauccugcgcacccaggaguccgagugcgugugcaugaacgggagcugcuucaccaucaugacggacggccccuccaacaaggccgccagcuacaagaucuucaagaucgagaaggggaaggugaccaaguccaucgagcucaacgcccccaacuucuacuacgaggagugcagcugcuacccggacaccggcaucgucaugugcgugugccgggacaacuggcacggguccaaccgccccugggugagcuucaaccagaaccuggacuaccagaucggcuacaucugcuccggcgucuucggggacaacccccggcccgaggacggcgaggggagcugcaacccggugaccguggacggcgcgaacggggucaagggcuucuccuacaaguacggcaacgggguguggaucggccgcaccaagagcaaccggcugcgcaagggguucgagauggugugggaccccaacggcuggacgaacaccgacuccgacuucagcgucaagcaggacgugguggccaucaccgacuggagcggguacuccggcagcuucguccagcaccccgagcucacgggccuggacugcauccggcccugcuucuggguggagcugguccgcgggcucccgcgggagaacaccaccaucuggaccuccggcagcuccaucagcuucugcggggugaacuccgacacggccaacuggagcuggcccgacggcgccgagcugcccuucaccaucgacaaguga

SEQ ID NO: 83412 - RNA, 1410 nt, Artificial Sequence
  derived and/or modified CDS sequence (opt1) from neuraminidase__InfluenzaA__ADL39491
augaaccccaaccagaagaucaucaccaucggcagcgugucccugaccaucagcacgaucugcuucuucaugcagaucgccauccucaucaccaccgucacccugcacuucaagcaguacgaguucaacuccagcccgaacaaccaggugaugcugugcgagcccacgaucaucgagcgcaacaucaccgagaucguguaccucaccaacaccacgaucgagaaggagaucugccccaagcuggccgaguaccggaacugguccaagccccagugcgacaucaccggguucgcgccguucagcaaggacaacuccauccgccugagcgccggcggggacaucugggucacccgggagcccuacguguccugcgaccccgacaagugcuaccaguucgcccucggccaggggaccacgcugaacaacgugcacagcaacaacaucguccgcgaccggacccccuaccgcacccugcucaugaacgagcugggcgugccguuccaccugggcaccaagcaggucugcaucgccugguccagcuccagcugccacgacgggaaggccuggcuccacgugugcaucacgggcgacgacaagaacgcgaccgccuccuucaucuacaacgggcggcugguggacagcaucguguccuggagcaaggagauccugcgcacccaggaguccgagugcgucugcaucaacgggaccugcacgguggugaugaccgacgggagcgccagcggcaaggccgacaccaagauccucuucaucgaggagggcaagaucguccacaccuccacgcugagcggguccgcgcagcacguggaggagugcagcugcuacccccgguaccccggcgugcgcugcgucugccgggacaacuggaagggguccaaccgccccaucguggacaucaacaucaaggaccacagcaucguguccagcuacgucugcuccggccuggugggcgacaccccgcggaagaacgacagcuccagcuccagccacugccucgaccccaacaacgaggagggcggccacggggugaagggcugggccuucgacgacgggaacgacgucuggaugggccgcaccaucuccgagaagucccggcugggcuacgagaccuucaaggugaucgagggguggagcaaccccaagagcaagcugcagaucaaccgccaggucaucguggaccggggcaaccgcuccggguacagcggcaucuucagcguggaggggaaguccugcaucaaccggugcuucuacgucgagcucauccgcggccggaaggaggagacggaggugcuguggaccagcuccagcaucguggucuucugcggcaccuccgggaccuacggcacggggagcuggcccgacggcgccgacaucaaccugaugccgaucuga

SEQ ID NO: 83413 - RNA, 1410 nt, Artificial Sequence; identical to SEQ ID NO: 80762
  derived and/or modified CDS sequence (opt1) from neuraminidase__InfluenzaA__ADL41165

SEQ ID NO: 83414 - RNA, 1410 nt, Artificial Sequence
  derived and/or modified CDS sequence (opt1) from neuraminidase__InfluenzaA__ADL41175
augaaccccaaccagaagaucaucaccaucggcagcgugugcaugaccaucgggauggccaaccugauccuccagaucggcaacaucaucuccacguggaucagccacuccauccagcuggggaaccagaaccagaucgagaccugcaaccagagcgucaucaccuacgagaacaacaccugggugaaccagacguacgugaacaucuccaacaccaacuucgccgcgggccagagcgucguguccgugaagcuggccgggaacagcucccucugcccggucagcggcugggccaucuacuccaaggacaacagcgugcgcaucggcuccaagggggacguguucgucauccgggagcccuucaucagcugcagcccccuggagugccgcaccuucuuccugacccagggcgcccuccugaacgacaagcacuccaacgggacgaucaaggaccggucccccuaccgcacccugaugagcugcccgaucggcgaggugcccucccccuacaacagccgguucgagagcguggccugguccgcgagcgccugccacgacgggaucaacuggcucaccaucggcaucuccggccccgacaacggggccgucgccgugcugaaguacaacggcaucaucaccgacacgaucaagagcuggcgcaacaacauccugcggacccaggaguccgagugcgcgugcgugaacgggagcugcuucaccgucaugaccgacggcccguccaacggccaggccagcuacaagaucuuccgcaucgagaaggggaagaucgugaaguccguggagaugaacgcccccaacuaccacuacgaggagugcagcugcuaccccgacuccagcgagaucacgugcgucugccgggacaacuggcacggcuccaaccgccccugggugagcuucaaccagaaccucgaguaccagaucggguacaucugcuccggcaucuucggggacaacccgcggcccaacgacaagaccggcagcugcggccccguguccagcaacggggccaacggcgucaagggguucuccuucaaguacggcaacgggguguggaucggccgcaccaagagcaucagcucccggaacggcuucgagaugaucugggaccccaacggguggaccggcacggacaacaacuucagcaucaagcaggacaucguggggaucaacgagugguccggcuacagcggguccuucguccagcacccggagcugaccggccuggacugcauccgccccugcuucuggguggagcucauccggggccgccccaaggagaacaccaucuggaccagcggguccagcaucuccuucugcggcgucaacagcgacacgguggggugguccuggcccgacggcgccgagcugccguucaccaucgacaaguga

SEQ ID NO: 83415 - RNA, 1413 nt, Artificial Sequence
  derived and/or modified CDS sequence (opt1) from neuraminidase__InfluenzaA__ADL60255
augaaccccaaccagaagaucaucaccaucggcagcaucuccaucgccaucgggaucaucagccugaugcuccagaucggcaacaucaucuccaucugggccagccacuccauccagaccgggagccagaacaacacgggcaucugcaaccagcgcaucaucaccuacgagaacuccaccugggugaacuacaccuacgucaacaucaacaacacgaacgugguggcgggggaggacaagaccagcgucacccuggccggcaacuccagccugugcuccaucagcggcugggccaucuacaccaaggacaacuccauccggaucgggagcaagggcgacguguucgugauccgcgagccguucaucuccugcagccaccucgagugccggacguucuuccugacccagggggcccugcucaacgacaagcacuccaacggcaccgucaaggaccgcagccccuaccgggcccugauguccugcccccugggggaggcgcccagcccguacaacagcaaguucgaguccguggccuggagcgccuccgccugccacgacggcaugggcuggcucaccaucgggaucagcggccccgacaacggggcgguggccguccugaaguacaacggcaucaucacgggcaccaucaaguccuggaagaagcagauccugcgcacccaggagagcgagugcgugugcaugaacggguccugcuucaccaucaugacggacggccccagcaacaaggccgccuccuacaagaucuucaagaucgagaaggggaaggugaccaagagcaucgagcucaacgcccccaacuuccacuacgaggagugcuccugcuacccggacaccggcaucgucaugugcgugugccgggacaacuggcacgggagcaaccgccccuggguguccuucaaccagaaccuggacuaccagaucggcuacaucugcagcggcgucuucggggacaacccccggcccaaggacggccgcggguccugcaacccggugaccguggacggcgcgaacggggucaagggcuucagcuacaaguacgacaacggcguguggaucgggcggacgaaguccaaccgccugcggaagggcuucgagaugaucugggaccccaacggguggaccaacaccgacagcgacuucuccgugaagcaggacgucguggccaucaccgacuggagcggcuacagcggguccuucgugcagcaccccgagcucacgggccuggacugcauccgccccugcuucugggucgagcuggugcggggccucccgcgcgagaacaccaccaucuggaccagcggguccagcaucuccuucugcggcgucaacagcgacacggccaacugguccuggcccgacggggccgagcugcccuucaccaucgacaaguga

SEQ ID NO: 83416 - RNA, 1413 nt, Artificial Sequence
  derived and/or modified CDS sequence (opt1) from neuraminidase__InfluenzaA__ADL60277
augaaccccaaccagcgcaucaucaccaucggcagcaucuccaucgccaucgggaucaucagccugaugcuccagaucggcaacaucaucuccaucugggccagccacuccauccagaucgggagccagaacaacaccggcaucugcaaccagcggaucaucacguacgagaacuccaccugggugaaccacaccuacgucaacaucaacaacaccaacgugguggcgggggaggacaagacgccggucacccuggccggcaacagcucccugugcagcaucuccggcugggccaucuacaccaaggacaacagcauccgcaucggguccaagggcgacguguucgugauccgggagcccuucaucagcugcucccaccucgagugccgcaccuucuuccugacgcagggggcccugcucaacgacaagcacagcaacggcaccgccaaggaccggucccccuaccgcgcgcugaugagcugcccccugggggaggccccgucccccuacaacagcaaguucgagagcgucgccugguccgccagcgcgugccacgacggcaugggcuggcucaccaucgggaucuccggccccgacaacggggccguggccgugcugaaguacaacggcaucaucaccggcacgaucaagagcuggaagaagcagauccugcggacccaggaguccgagugcgucugcaugaacgggagcugcuucaccaucaugaccgacggccccuccaacaaggccgccagcuacaagaucuucaagaucgagaaggggaaggugacgaaguccaucgagcucaacgcgccgaacuucuacuacgaggagugcagcugcuaccccgacaccggcaucgugaugugcgucugccgcgacaacuggcacggguccaaccggcccugggugagcuucaaccagaaccuggacuaccagaucggcuacaucugcuccggcguguucggggacaacccccgcccggaggacggcgaggggagcugcaaccccgucaccguggacggcgccaacggggugaagggcuucuccuacaaguacggcaacggggucuggaucggccggaccaagagcaaccgccugcggaagggguucgagaugaucugggaccccaacggcuggacgaacaccgacuccgacuucagcgugaagcaggacguggucgccaucaccgacugguccggguacagcggcagcuucgugcagcaccccgagcucaccggccuggacugcauccgcccgugcuucuggguggagcugguccgggggcucccccgcgagaacacgaccaucuggaccuccggcagcuccaucagcuucugcggggugaacuccgacaccgccaacuggagcuggcccgacggcgccgagcugcccuucacgaucgacaaguga

SEQ ID NO: 83417 - RNA, 1413 nt, Artificial Sequence
  derived and/or modified CDS sequence (opt1) from neuraminidase__InfluenzaA__ADL60288
augaaccccaaccagaagaucaucaccaucggcagcaucuccaucgccaucgggaucaucagccugaugcuccagaucggcaacaucaucuccaucugggccagccacuccauccagaccgggagccagaacaacacgggcaucugcaaccagcgcaucaucaccuacgagaacuccaccugggugaaccacaccuacgucaacaucaacaacacgaacgugguggcgggggaggacaagaccagcgucacccuggccggcaacuccagccugugcuccaucagcggcugggccaucuacaccaaggacaacuccauccggaucgggagcaagggcgacguguucgugauccgcgagccguucaucuccugcagccaccucgagugccggacguucuuccugacccagggggcccugcucaacgacaagcacuccaacggcaccgucaaggaccgcagccccuaccgggcccugauguccugcccccugggggaggcgcccagcccguacaacagcaaguucgaguccguggccuggagcgccuccgccugccacgacggcaugggcuggcucaccaucgggaucagcggccccgacaacggggcgguggccguccugaaguacaacggcaucaucacgggcaccaucaaguccuggaagaagcagauccugcgcacccaggagagcgagugcgugugcaugaacggguccugcuucaccaucaugacggacggccccagcaacaaggccgccuccuacaagaucuucaagaucgagaaggggaaggugaccaagagcaucgagcucaacgcccccaacuucuacuacgaggagugcuccugcuacccggacaccggcaucgucaugugcgugugccgggacaacuggcacgggagcaaccgccccuggguguccuucaaccagaaccuggacuaccagaucggcuacaucugcagcggcgucuucggggacaacccccggcccaaggacggcaagggguccugcaacccggugaccguggacggcgcgaacggggucaagggcuucagcuacaaguacggcaacgggguguggaucggccgcacgaaguccaaccggcugcgcaagggguucgagaugaucugggaccccaacggcuggaccaacaccgacagcgacuucuccgugaagcaggacgucguggccaucaccgacuggagcggguacagcggcuccuucgugcagcaccccgagcucacgggccuggacugcauccggcccugcuucugggucgagcuggugcgcgggcucccgcgggagaacaccaccaucuggaccagcggcuccagcaucuccuucugcggggucaacagcgacacggccaacugguccuggcccgacggcgccgagcugcccuucaccaucgacaaguga

SEQ ID NO: 83418 - RNA, 1413 nt, Artificial Sequence
  derived and/or modified CDS sequence (opt1) from neuraminidase__InfluenzaA__ADL60299
augaaccccaaccagaagaucaucaccaucggcagcaucuccaucgccaucgggaucaucagccugaugcuccagaucggcaacaucaucuccaucugggccagccacuccauccagaccgggagccagaacaacacgggcaucugcaaccagcgcaucaucaccuacgagaacuccaccugggugaaccacaccuacgucagcaucaacaacacgaacgugguggcggggaaggacaagaccuccgucacccuggccggcaacagcucccugugcagcaucuccggcugggccaucuacaccaaggacaacagcauccggaucggguccaagggcgacguguucgugauccgcgagccguucaucagcugcucccaccucgagugccggacguucuuccugacccagggggcccugcucaacgacaagcacagcaacggcaccgucaaggaccgcucccccuaccgggcccugaugagcugcccccugggggaggcgcccagcccguacaacuccaaguucgagagcguggccugguccgccagcgccugccacgacggcaugggcuggcucaccaucgggaucuccggccccgacaacggggcgguggccguccugaaguacaacggcaucaucacgggcaccaucaagagcuggaagaagcagauccugcgcacccaggaguccgagugcgugugcaugaacgggagcugcuucaccaucaugacggacggccccuccaacaaggccgccagcuacaagaucuucaagaucgagaaggggaaggugaccaaguccaucgagcucaacgcccccaacuucuacuacgaggagugcagcugcuacccggacaccggcaucgucaugugcgugugccgggacaacuggcacggguccaaccgccccugggugagcuucaaccaggaccuggacuaccagaucggcuacaucugcuccggcgucuucggggacaacccccggcccaaggacggcaaggggagcugcaacccggugaccguggacggcgcgaacggggucaagggcuucuccuacaaguacggcaacgggguguggaucggccgcaccaagagcaaccggcugcgcaagggguucgagaugaucugggaccccaacggcuggacgaacaccgacuccgacuucagcgugaagcaggacgucguggccaucaccgacuggagcggguacuccggcagcuucgugcagcaccccgagcucacgggccuggacugcauccggcccugcuucugggucgagcuggugcgcgggcucccgcgggagaacaccaccaucuggaccuccggcagcuccaucagcuucugcggggucaacuccgacacggccaacuggagcuggcccgacggcgccgagcugcccuucaccaucgacaaguga

SEQ ID NO: 83419 - RNA, 1413 nt, Artificial Sequence; identical to SEQ ID NO: 80656
  derived and/or modified CDS sequence (opt1) from neuraminidase__InfluenzaA__ADL60310

SEQ ID NO: 83420 - RNA, 1413 nt, Artificial Sequence
  derived and/or modified CDS sequence (opt1) from neuraminidase__InfluenzaA__ADL60321
augaaccccaaccagaagaucaucaccaucggcagcaucuccaucgccaucgggaucaucagccugaugcuccagaucggcaacaucaucuccaucugggccagccacuccauccagaccgggagccagaacaacacgggcaucugcaaccagcgcaucaucaccuacgagaacuccaccugggugaaccacaccuacgucaacaucaacaacacgaacgugguggcgggggaggacaagaccagcgucacccuggccggcaacuccagccugugcuccaucagcggcugggccaucuacaccaaggacaacuccauccggaucgggagcaagggcgacguguucgugauccgcgagccguucaucuccugcagccaccucgagugccggacguucuuccugacccagggggcccugcucaacgacaagcacuccaacggcaccgucaaggaccgcagccccuaccgggcccugauguccugcccccugggggaggcgcccagcccguacaacagcaaguucgaguccguggccuggagcgccuccgccugccacgacggcaugggcuggcucaccaucgggaucagcggccccgacaacggggcgguggccguccugaaguacaacggcaucaucacgggcaccaucaaguccuggaagaagcagauccugcgcacccaggagagcgagugcgugugcaugaacggguccugcuucaccaucaugacggacggccccagcaacaaggccgccuccuacaagaucuucaagaucgagaaggggaaggugaccaagagcaucgagcucaacgcccccaacuuccacuacgaggagugcuccugcuacccggacaccggcauggucaugugcgugugccgggacaacuggcacgggagcaaccgccccuggguguccuucaaccagaaccuggacuaccagaucggcuacaucugcagcggcgucuucggggacaacccccggcccgaggacggcgagggguccugcaacccggugaccguggacggcgcgaacggggucaagggcuucagcuacaaguacgacaacggcguguggaucgggcgcacgaaguccaaccggcugcgcaagggcuucgagaugaucugggaccccaacggguggaccaacaccgacagcgacuucuccgugaagcaggacgucguggccaucaccgacuggagcggcuacagcggguccuucgugcagcaccccgagcucacgggccuggacugcauccggcccugcuucugggucgagcuggugcgcggccucccgcgggagaacaccaccaucuggaccagcggguccagcaucuccuucugcggcgucaacagcgacacggccaacugguccuggcccgacggggccgagcugcccuucaccaucgacaaguga

SEQ ID NO: 83421 - RNA, 1413 nt, Artificial Sequence
  derived and/or modified CDS sequence (opt1) from neuraminidase__InfluenzaA__ADL60332
augaaccccaaccagaagaucaucaccaucggcagcaucuccaucgccaucgggaucaucagccugaugcuccagaucggcaacaucaucuccaucugggccagccacuccauccagaccgggagccagaacaacacgggcaucugcaaccagcgcaucaucaccuacgagaacuccaccugggugaaccacaccuacgucaacaucaacaacacgaacgugguggcgggggaggacaagaccagcgucacccuggccggcaacuccagccugugcuccaucagcggcugggccaucuacaccaaggacaacuccauccggaucgggagcaagggcgacguguucgugauccgcgagccguucaucuccugcagccaccucgagugccggacguucuuccugacccagggggcccugcucaacgacaagcacuccaacggcaccgucaaggaccgcagccccuaccgggcccugauguccugcccccugggggaggcgcccagcccguacaacagcaaguucgaguccguggccuggagcgccuccgccugccacgacggcaugggcuggcucaccaucgggaucagcggccccgacaacggggcgguggccguccugaaguacaacggcaucaucacgggcaccaucaaguccuggaagaagcagauccugcgcacccaggagagcgagugcgugugcaugaacggguccugcuucaccaucaugacggacggccccagcaacaaggccgccuccuacaagaucuucaagaucgagaaggggaaggugaccaagagcaucgagcucaacgcccccaacuuccacuacgaggagugcuccugcuacccggacaccggcaucgucaugugcgugugccgggacaacuggcacgggagcaaccgccccuggguguccuucaaccagaaccuggacuaccagaucggcuacaucugcagcggcgucuucggggacaacccccggcccaaggacggccgcggguccugcaacccggugaccguggacggcgcgaacggggucaagggcuucagcuacaaguacgacaacggcguguggaucgggcggacgaaguccaaccgccugcggaagggcuucgagaugaucugggaccccaacggguggaccaacaccgacagcgacuucuccgugaagcaggacgucguggccaucaccgacuggagcggcuacagcggguccuucgugcagcaccccgagcucacgggccuggacugcauccgccccugcuucugggucgagcuggugcggggccucccgcgcgagaacaccaccaucuggaccagcggguccagcaucuccuucugcggcgucaacagcgacacggccaacugguccuggcccgacggggccgagcugcccuucaccaucgacaaguga

SEQ ID NO: 83422 - RNA, 1413 nt, Artificial Sequence; identical to SEQ ID NO: 80656
  derived and/or modified CDS sequence (opt1) from neuraminidase__InfluenzaA__ADL60343

SEQ ID NO: 83423 - RNA, 1413 nt, Artificial Sequence
  derived and/or modified CDS sequence (opt1) from neuraminidase__InfluenzaA__ADL60354
augaaccccaaccagcgcaucaucaccaucggcagcaucuccaucgccaucgggaucaucagccugaugcuccagaucggcaacaucaucuccaucugggccagccacuccauccagaucgggagccagaacaacaccggcaucugcaaccagcggaucaucacguacgagaacuccaccugggugaaccacaccuacgucaacaucaacaacaccaacgugguggcgggggaggacaagacgagcgucacccuggccggcaacuccagccugugcuccaucagcggcugggccaucuacaccaaggacaacuccauccgcaucgggagcaagggcgacguguucgugauccgggagccguucaucuccugcagccaccucgagugccgcaccuucuuccugacgcagggggcccugcucaacgacaagcacuccaacggcaccgccaaggaccggagccccuaccgcgcgcugauguccugcccccugggggaggcccccagcccguacaacagcaaguucgaguccgucgccuggagcgccuccgcgugccacgacggcaugggcuggcucaccaucgggaucagcggccccgacaacggggccguggccgugcugaaguacaacggcaucaucaccggcacgaucaaguccuggaagaagcagauccugcggacccaggagagcgagugcgucugcaugaacggguccugcuucaccaucaugaccgacggccccagcaacaaggccgccuccuacaagaucuucaagaucgagaaggggaaggugaccaagagcaucgagcucaacgcgcccaacuucuacuacgaggagugcuccugcuacccggacacgggcaucgugaugugcgucugccgcgacaacuggcacgggagcaaccggcccuggguguccuucaaccagaaccuggacuaccagaucggcuacaucugcagcggcguguucggggacaacccccgccccaaggacggcaagggguccugcaacccggucaccguggacggcgccaacggggugaagggcuucagcuacaaguacggcaacggggucuggaucggccggaccaaguccaaccgccugcggaagggguucgagaugaucugggaccccaacggcuggacgaacaccgacagcgacuucuccgugaagcaggacguggucgccaucaccgacuggagcggguacagcggcuccuucgugcagcaccccgagcucaccggccuggacugcauccgccccugcuucuggguggagcugguccgggggcucccgcgcgagaacacgaccaucuggaccagcggcuccagcaucuccuucugcggggugaacagcgacaccgccaacugguccuggcccgacggcgccgagcugcccuucacgaucgacaaguga

SEQ ID NO: 83424 - RNA, 1410 nt, Artificial Sequence
  derived and/or modified CDS sequence (opt1) from neuraminidase__InfluenzaA__ADL60365
augaaccccaaccagaagaucaucaccaucggcagcgugucccugaccaucagcacgaucugcuucuucaugcagaucgccauccucaucaccaccgucacccugcacuucaagcaguacgaguucaacuccagcccgaacaaccaggugaugcugugcgagcccacgaucaucgagcgcaacaucaccgagaucguguaccucaccaacaccacgaucgagaaggagaucucccccaagcuggccgaguaccggaacuggagcaagccccagugcgacaucaccggguucgcgccguucuccaaggacaacagcauccgccuguccgccggcggggacaucugggucacccgggagcccuacgugagcugcgaccccgacaagugcuaccaguucgcccucggccaggggaccacgcugaacaacgugcacuccaacaacaucguccgcgaccggacccccuaccgcacccugcucaugaacgagcugggcgugccguuccaccugggcaccaagcaggucugcaucgccuggagcuccagcuccugccacgacgggaaggccuggcuccacgugugcaucacgggcgacgacaagaacgcgaccgccagcuucaucuacaacgggcggcugguggacuccaucgugagcugguccaaggagauccugcgcacccaggagagcgagugcgucugcaucaacgggaccugcacgguggugaugaccgacgggagcgccuccggcaaggccgacaccaagauccucuucaucgaggagggcaagaucguccacaccagcacgcuguccgggagcgcgcagcacguggaggagugcuccugcuacccccgguaccccggcgugcgcugcgucugccgggacaacuggaaggggagcaaccgccccaucguggacaucaacaucaaggaccacuccaccgugagcuccuacgucugcagcggccuggugggcgacaccccgcggaagaacgacuccagcuccagcucccacugccucgaccccaacaacgaggagggcggccacggggugaagggcugggccuucgacgacgggaacgacgucuggaugggccgcaccaucagcgagaagucccggcugggcuacgagacguucaaggugaucgagggguggagcaaccccaaguccaagcugcagaucaaccgccaggucaucguggaccggggcaaccgcagcggguacagcggcaucuucuccguggagggcaagagcugcaucaaccggugcuucuacgucgagcucauccgcgggcggaaggaggagaccgaggugcuguggaccuccaacagcaucguggucuucugcggcaccuccgggacguacggcaccgggagcuggcccgacggcgccgacaucaaccugaugccgaucuga

SEQ ID NO: 83425 - RNA, 1413 nt, Artificial Sequence
  derived and/or modified CDS sequence (opt1) from neuraminidase__InfluenzaA__ADL60376
augaaccccaaccagaagaucaucaccaucggcagcaucuccaucgccaucgggaucaucagccugaugcuccagaucggcaacaucaucuccaucugggccagccacuccauccagaccgggagccagaacaacacgggcaucugcaaccagcgcaucaucaccuacgagaacuccaccugggugaaccacaccuacgucaacaucaacaacacgaacgugguggcgggggaggacaagaccagcgucacccuggccggcaacuccagccugugcuccaucagcggcugggccaucuacaccaaggacaacuccauccggaucgggagcaagggcgacguguucgugauccgcgagccguucaucuccugcagccaccucgagugccggacguucuuccugacccagggggcccugcucaacgacaagcacuccaacggcaccgggaaggaccgcagccccuaccgggcccugauguccugcccccugggcgaggcgcccagcccguacaacagcaaguucgaguccgucgccuggagcgccuccgccugccacgacggcaugggguggcucaccaucggcaucagcgggcccgacaacggcgcgguggccgugcugaaguacaacggcaucaucacggggaccaucaaguccuggaagaagcagauccugcgcacccaggagagcgagugcgucugcaugaacggcuccugcuucaccaucaugacggacgggcccagcaacaaggccgccuccuacaagaucuucaagaucgagaagggcaaggugaccaagagcaucgagcucaacgcccccaacuuccacuacgaggagugcuccugcuacccggacaccgggaucgugaugugcgucugccgggacaacuggcacggcagcaaccgccccuggguguccuucaaccagaaccuggacuaccagaucggcuacaucugcagcgggguguucggcgacaacccccggcccaaggacgggaagggcuccugcaacccggucaccguggacggggcgaacggcgugaagggcuucagcuacaaguacgacaacggggucuggaucggccgcacgaaguccaaccggcugcgcaagggguucgagaugaucugggaccccaacggcuggaccaacaccgacagcgacuucuccgugaagcaggacguggucgccaucaccgacuggagcggguacagcggcuccuucgugcagcaccccgagcucacgggccuggacugcauccggcccugcuucuggguggagcugguccgcgggcucccgcgggagaacaccaccaucuggaccagcggcuccagcaucuccuucugcggggugaacagcgacacggccaacugguccuggcccgacggcgccgagcugcccuucaccaucgacaaguga

SEQ ID NO: 83426 - RNA, 1410 nt, Artificial Sequence; identical to SEQ ID NO: 80762
  derived and/or modified CDS sequence (opt1) from neuraminidase__InfluenzaA__ADM07137

SEQ ID NO: 83427 - RNA, 1410 nt, Artificial Sequence; identical to SEQ ID NO: 80762
  derived and/or modified CDS sequence (opt1) from neuraminidase__InfluenzaA__ADM07146

SEQ ID NO: 83428 - RNA, 1410 nt, Artificial Sequence; identical to SEQ ID NO: 80762
  derived and/or modified CDS sequence (opt1) from neuraminidase__InfluenzaA__ADM07156

SEQ ID NO: 83429 - RNA, 1410 nt, Artificial Sequence; identical to SEQ ID NO: 80762
  derived and/or modified CDS sequence (opt1) from neuraminidase__InfluenzaA__ADM07165

SEQ ID NO: 83430 - RNA, 1413 nt, Artificial Sequence; identical to SEQ ID NO: 81485
  derived and/or modified CDS sequence (opt1) from neuraminidase__InfluenzaA__ADM07474

SEQ ID NO: 83431 - RNA, 1413 nt, Artificial Sequence; identical to SEQ ID NO: 81485
  derived and/or modified CDS sequence (opt1) from neuraminidase__InfluenzaA__ADM07485

SEQ ID NO: 83432 - RNA, 1410 nt, Artificial Sequence
  derived and/or modified CDS sequence (opt1) from neuraminidase__InfluenzaA__ADM07496
augaaccccaaccagaagaucaucaccaucggcagcgugucccugaccaucagcacgaucugcuucuucaugcagaucgccauccucaucaccaccgucacccugcacuucaagcaguacgaguucaacuccccgcccaacaaccaggugaugcugugcgagcccacgaucaucgagcgcaacaucaccgagaucguguaccucaccaacaccacgaucgagaaggagaucugccccaagcuggccgaguaccggaacuggagcaagccgcagugcgacaucaccggguucgcgcccuucuccaaggacaacagcauccgccuguccgccggcggggacaucugggucacccgggagcccuacgugagcugcgaccccgacaagugcuaccaguucgcccucggccaggggaccacgcugaacaacgugcacuccaacaacaccguccgcgaccggaccccguaccgcacccugcucaugaacgagcugggcgugcccuuccaccugggcacgaagcaggucugcaucgccuggagcuccagcuccugccacgacgggaaggccuggcuccacgugugcaucaccggcgacgacaagaacgcgaccgccagcuucaucuacaacgggcggcugguggacuccguggucagcugguccaaggagauccugcgcacccaggagagcgagugcgugugcaucaacggcacgugcaccguggucaugaccgacggguccgccagcggcaaggccgacaccaagauccucuucaucgaggagggcaagaucgugcacacgagcacccuguccgggagcgcgcagcacguggaggagugcuccugcuacccccgguaccccggcguccgcugcgugugccgggacaacuggaaggggagcaaccgcccgaucguggacaucaacaucaaggaccacuccaucgucagcuccuacgugugcagcggccuggugggcgacacgccccggaagaacgacuccagcuccagcucccacugccucgaccccaacaacgaggagggcgggcacggggucaagggcugggccuucgacgacgggaacgacguguggaugggccgcaccaucagcgagaagucccggcugggcuacgagaccuucaaggucaucgagggguggagcaaccccaaguccaagcugcagaucaaccgccaggugaucguggaccggggcaaccgcagcggguacuccggcaucuucagcgucgagggcaagagcugcaucaaccggugcuucuacguggagcucauccgcgggcggaaggaggagaccgaggugcuguggaccuccaacagcaucgucguguucugcggcaccuccgggacguacggcaccgggagcuggccggacggcgccgacaucaacaucaugcccaucuga

SEQ ID NO: 83433 - RNA, 1410 nt, Artificial Sequence
  derived and/or modified CDS sequence (opt1) from neuraminidase__InfluenzaA__ADM07507
augaaccccaaccagaagaucaucaccaucggcagcgugucccugaccaucagcacgaucugcuucuucaugcagaccgccauccucaucaccaccgucacgcugcacuucaagcaguucgaguucaacuccccgcccaacaaccaggugaugcugugcgagcccgccaucaucgagcgcaacaucaccgagaucguguaccucaccaacaccacgaucgagaaggagaucugccccaagcuggcggaguaccggaacuggagcaagccgcagugcgacaucaccggguucgcccccuucuccaaggacaacagcauccgccuguccgccggcggggacaucugggucacccgggagcccuacgugagcugcgaccccgacaagugcuaccaguucgcccucggccaggggaccacgcugaacaacgugcacuccaacaacaccguccgcgaccggaccccguaccgcacccugcucaugaacgagcugggcgugcccuuccaccugggcacgaagcaggucugcaucgccuggagcuccagcuccugccacgacgggaaggcguggcuccacgugugcaucaccggcgacgacaagaacgccaccgccagcuucaucuacaacgggcggcugguggacuccguggucagcugguccaaggagauccugcgcacccaggagagcgagugcgugugcaucaacggcacgugcaccguggucaugaccgacggguccgccagcggcaaggcggacaccaagauccucuucaucgaggagggcaagaucgugcacacgagcacccuguccgggagcgcccagcacguggaggagugcuccugcuacccccgguaccccggcguccgcugcgugugccgggacaacuggaaggggagcaaccgcccgaucguggacaucaacaucaaggaccacuccaucgucagcuccuacgugugcagcggccuggugggcgacacgccccggaagaacgacuccagcuccagcucccacugccucgaccccaacaacgaggagggcgggcacggggucaagggcugggccuucgacgacgggaacgacguguggaugggccgcaccaucagcgagaagucccggcugggcuacgagaccuucaaggucaucgagggguggagcaaccccaaguccaagcugcagaucaaccgccaggugaucguggaccggggcaaccgcagcggguacuccggcaucuucagcgucgagggcaagagcugcaucaaccggugcuucuacguggagcucauccgcgggcggaaggaggagaccgaggugcuguggaccuccaacagcaucgucguguucugcggcaccuccgggacguacggcaccgggagcuggccggacggcgccgacaucaaccugaugcccaucuga

SEQ ID NO: 83434 - RNA, 1410 nt, Artificial Sequence
  derived and/or modified CDS sequence (opt1) from neuraminidase__InfluenzaA__ADM12820
augaaccccaaccagaagaucaucaccaucggcagcgugucccugaccaucagcacgaucugcuucuucaugcagaucgccauccucaucaccaccgucacccugcacuucaagcaguacaaguucaacuccccgcccaacaaccaggugaugcugugcgagcccacgaucaucgagcgcaacaucaccgagaucguguaccucaccaacaccacgaucgagaaggagaucugccccaagcuggccgaguaccggaacuggagcaagccgcagugcgacaucaccggguucgcgcccuucuccaaggacaacagcauccgccuguccgccggcggggacaucugggucacccgggagcccuacgugagcugcgaccccgacaagugcuaccaguucgcccucggccaggggaccacgcugaacaacgugcacuccaacaacaccguccgcgaccggaccccguaccgcacccugcucaugaacgagcugggcgugcccuuccaccugggcacgaagcaggucugcaucgccuggagcuccagcuccugccacgacgggaaggccuggcuccacgugugcaucaccggcgacgacaagaacgcgaccgccagcuucaucuacaacgggcggcugguggacuccguggucagcugguccaaggagauccugcgcacccaggagagcgagugcgugugcaucaacggcacgugcaccguggucaugaccgacggguccgccagcggcaaggccgacaccaagauccucuucaucgaggagggcaagaucgugcacacgagcacccuguccgggagcgcgcagcacguggaggagugcuccugcuacccccgguaccccggcguccgcugcgugugccgggacaacuggaaggggagcaaccgcccgaucguggacaucaacaucaaggaccacuccaucgucagcuccuacgugugcagcggccuggugggcgacacgccccggaagaacgacuccagcuccagcucccacugccucgaccccaacaacgaggagggcgggcacggggucaagggcugggccuucgacgacgggaacgacguguggaugggccgcaccaucaacgagaccagccggcugggcuacgagaccuucaaggucaucgaggggugguccaaccccaagagcaagcugcagaucaaccgccaggugaucguggaccggggcaaccgcuccggguacagcggcaucuucuccgucgagggcaagagcugcaucaaccggugcuucuacguggagcucauccgcgggcggaaggaggagaccgaggugcuguggaccagcaacuccaucgucguguucugcggcacgagcgggaccuacggcaccggguccuggccggacggcgccgaccugaaccucaugcccaucuga

SEQ ID NO: 83435 - RNA, 1410 nt, Artificial Sequence; identical to SEQ ID NO: 83434
  derived and/or modified CDS sequence (opt1) from neuraminidase__InfluenzaA__ADM12831

SEQ ID NO: 83436 - RNA, 1410 nt, Artificial Sequence; identical to SEQ ID NO: 83434
  derived and/or modified CDS sequence (opt1) from neuraminidase__InfluenzaA__ADM12842

SEQ ID NO: 83437 - RNA, 1410 nt, Artificial Sequence; identical to SEQ ID NO: 83434
  derived and/or modified CDS sequence (opt1) from neuraminidase__InfluenzaA__ADM12853

SEQ ID NO: 83438 - RNA, 1410 nt, Artificial Sequence; identical to SEQ ID NO: 80762
  derived and/or modified CDS sequence (opt1) from neuraminidase__InfluenzaA__ADM12864

SEQ ID NO: 83439 - RNA, 1410 nt, Artificial Sequence; identical to SEQ ID NO: 80762
  derived and/or modified CDS sequence (opt1) from neuraminidase__InfluenzaA__ADM12874

SEQ ID NO: 83440 - RNA, 1410 nt, Artificial Sequence; identical to SEQ ID NO: 80762
  derived and/or modified CDS sequence (opt1) from neuraminidase__InfluenzaA__ADM12884

SEQ ID NO: 83441 - RNA, 1410 nt, Artificial Sequence
  derived and/or modified CDS sequence (opt1) from neuraminidase__InfluenzaA__ADM12894
augaaccccaaccagaagaucaucaccaucggcagcgugugcaugaccaucgggauggccaaccugauccuccagaucggcaacaucaucuccaucuggaucagccacuccauccagcuggggaaccagaaccagaucgagacgugcaaccagagcgucaucaccuacgagaacaacaccugggugaaccagaccuacgugaacaucuccaacacgaacuucgccgcgggccagagcgucguguccgugaagcuggccgggaacagcucccucugcccggucagcggcugggccaucuacuccaaggacaacagcauccgcaucggcuccaagggggacguguucgugauccgggagcccuucaucagcugcagcccccuggagugccgcaccuucuuccugacccagggcgcccuccugaacgacaagcacuccaacgggaccaucaaggaccggucccccuaccgcacgcugaugagcugcccgaucggcgagguccccucccccuacaacagccgguucgagagcguggccugguccgcgagcgccugccacgacgggaucaacuggcucaccaucggcaucuccggccccgacaacggggccguggccguccugaaguacaacggcaucaucaccgacaccaucaagagcuggcgcaacaacauccugcggacgcaggaguccgagugcgcgugcgugaacgggagcugcuucaccgugaugaccgacggcccguccgacggccagagcuccuacaagaucuuccgcaucgagaaggggaagaucgucaagagcguggagaugaacgcccccaacuaccacuacgaggagugcuccugcuaccccgacagcuccgagaucacgugcgugugccgggacaacuggcacggcagcaaccgccccugggucuccuucaaccagaaccucgaguaccagaucggguacaucugcagcggcaucuucggggacaacccgcggcccaacgacaagaccggcuccugcggccccgugagcuccaacggggccaacggcgugaagggguucagcuucaaguacggcaacggggucuggaucggccgcaccaagagcaucuccagccggaacggcuucgagaugaucugggaccccaacggguggaccggcaccgacaacaacuucuccaucaagcaggacaucguggggaucaacgaguggagcggcuacuccgggagcuucgugcagcacccggagcugacgggccuggacugcauccgccccugcuucugggucgagcucauccggggccgccccaaggagaacaccaucuggaccuccgggagcuccaucagcuucugcggcgugaacuccgacaccgucggguggagcuggcccgacggcgccgagcugccguucacgaucgacaaguga

SEQ ID NO: 83442 - RNA, 1410 nt, Artificial Sequence; identical to SEQ ID NO: 80762
  derived and/or modified CDS sequence (opt1) from neuraminidase__InfluenzaA__ADM12904

SEQ ID NO: 83443 - RNA, 1410 nt, Artificial Sequence
  derived and/or modified CDS sequence (opt1) from neuraminidase__InfluenzaA__ADM12914
augaaccccaaccagaagaucaucaccaucggcagcgugugcaugaccaucgggauggccaaccugauccuccagaucggcaacaucaucuccaucuggaucagccacuccauccagcuggggaaccagaaccagaucgagacgugcaaccagagcgucaucaccuacgagaacaacaccugggugaaccagaccuacgugaacaucuccaacacgaacuucgccgcgggccagagcgucguguccgugaagcuggccgggaacagcucccucugcccggucagcggcugggccaucuacuccaaggacaacagcauccgcaucggcuccaagggggacguguucgugauccgggagcccuucaucagcugcagcccccuggagugccgcaccuucuuccugacccagggcgcccuccugaacgacaagcacuccaacgggaccaucaaggaccggucccccuaccgcacgcugaugagcugcccgaucggcgagguccccucccccuacaacagccgguucgagagcguggccugguccgcgagcgccugccacgacgggaucaacuggcucaccaucggcaucuccggccccgacaacggggccguggccguccugaaguacaacggcaucaucaccgacaccaucaagagcuggcgcaacaacauccugcggacgcaggaguccgagugcgcgugcgugaacgggagcugcuucaccgugaugaccgacggcccguccgacggccaggccagcuacaagaucuuccgcaucgagaaggggaagaucgucaaguccguggagaugaacgcccccaacuaccacuacgaggagugcagcugcuaccccgacuccagcgagaucacgugcgugugccgggacaacuggcacggcuccaaccgccccugggucagcuucaaccagaaccucgaguaccagaucggguacaucugcuccggcaucuucggggacaacccgcggcccaacgacaagaccggcagcugcggccccguguccagcuacggggccaacggcgugaagggguucuccuucaaguacggcaacggggucuggaucggccgcaccaagagcaucagcucccggaacggcuucgagaugaucugggaccccaacggguggaccggcaccgacaacaacuucagcaucaagcaggacaucguggggaucaacgagugguccggcuacagcggguccuucgugcagcacccggagcugacgggccuggacugcauccgccccugcuucugggucgagcucauccggggccgccccaaggagaacaccaucuggaccagcggguccagcaucuccuucugcggcgugaacagcgacaccgucgggugguccuggcccgacggcgccgagcugccguucacgaucgacaaguga

SEQ ID NO: 83444 - RNA, 1410 nt, Artificial Sequence; identical to SEQ ID NO: 80762
  derived and/or modified CDS sequence (opt1) from neuraminidase__InfluenzaA__ADM12924

SEQ ID NO: 83445 - RNA, 1410 nt, Artificial Sequence; identical to SEQ ID NO: 80762
  derived and/or modified CDS sequence (opt1) from neuraminidase__InfluenzaA__ADM12934

SEQ ID NO: 83446 - RNA, 1410 nt, Artificial Sequence; identical to SEQ ID NO: 80762
  derived and/or modified CDS sequence (opt1) from neuraminidase__InfluenzaA__ADM12944

SEQ ID NO: 83447 - RNA, 1410 nt, Artificial Sequence; identical to SEQ ID NO: 80762
  derived and/or modified CDS sequence (opt1) from neuraminidase__InfluenzaA__ADM12954

SEQ ID NO: 83448 - RNA, 1410 nt, Artificial Sequence; identical to SEQ ID NO: 80762
  derived and/or modified CDS sequence (opt1) from neuraminidase__InfluenzaA__ADM12964

SEQ ID NO: 83449 - RNA, 1410 nt, Artificial Sequence; identical to SEQ ID NO: 82050
  derived and/or modified CDS sequence (opt1) from neuraminidase__InfluenzaA__ADM12974

SEQ ID NO: 83450 - RNA, 1410 nt, Artificial Sequence
  derived and/or modified CDS sequence (opt1) from neuraminidase__InfluenzaA__ADM12984
augaaccccaaccagaagaucaucaccaucggcagcgugugcaugaccaucgggauggccaaccugauccuccagaucggcaacaucaucuccaucuggaucagccacuccauccagcuggggaaccagaaccagaucgagacgugcaaccagagcgucaucaccuacgagaacaacaccugggugaaccagaccuacgugaacaucuccaacacgaacuucgccgcgggccagagcgucguguccgugaagcuggccgggaacagcucccucugcccggucagcggcugggccaucuacuccaaggacaacagcauccgcaucggcuccaagggggacguguucgugauccgggagcccuucaucagcugcagcccccuggagugccgcaccuucuuccugacccagggcgcccuccugaacgacaagcacuccaacgggaccaucaaggaccggucccccuaccgcacgcugaugagcugcccgaucggcgagguccccucccccuacaacagccgguucgagagcguggccugguccgcgagcgccugccacgacgggaucaacuggcucaccaucggcaucuccggccccgacaacggggccguggccguccugaaguacaacggcaucaucaccgacaccauccgcagcuggcggaacaacauccugcgcacgcaggaguccgagugcgcgugcgugaacgggagcugcuucaccgugaugaccgacggcccguccgacggccaggccagcuacaagaucuuccggaucgagaaggggaagaucgucaaguccguggagaugaacgcccccaacuaccacuacgaggagugcagcugcuaccccgacuccagcgagaucacgugcgugugccgcgacaacuggcacggcuccaaccggcccugggucagcuucaaccagaaccucgaguaccagaucggguacaucugcuccggcaucuucggggacaacccgcgccccaacgacaagaccggcagcugcggccccguguccagcaacggggccaacggcgugaagggguucuccuucaaguacggcaacggggucuggaucggccggaccaagagcaucagcucccgcaacggcuucgagaugaucugggaccccaacggguggaccggcaccgacaacaacuucagcaucaagcaggacaucguggggaucaacgagugguccggcuacagcggguccuucgugcagcacccggagcugacgggccuggacugcauccggcccugcuucugggucgagcucauccgcggccggcccaaggagaacaccaucuggaccagcggguccagcaucuccuucugcggcgugaacagcgacaccgucgggugguccuggcccgacggcgccgagcugccguucacgaucgacaaguga

SEQ ID NO: 83451 - RNA, 1410 nt, Artificial Sequence; identical to SEQ ID NO: 80762
  derived and/or modified CDS sequence (opt1) from neuraminidase__InfluenzaA__ADM12994

SEQ ID NO: 83452 - RNA, 1410 nt, Artificial Sequence; identical to SEQ ID NO: 80762
  derived and/or modified CDS sequence (opt1) from neuraminidase__InfluenzaA__ADM13004

SEQ ID NO: 83453 - RNA, 1410 nt, Artificial Sequence; identical to SEQ ID NO: 80762
  derived and/or modified CDS sequence (opt1) from neuraminidase__InfluenzaA__ADM13014

SEQ ID NO: 83454 - RNA, 1410 nt, Artificial Sequence
  derived and/or modified CDS sequence (opt1) from neuraminidase__InfluenzaA__ADM13034
augaaccccaaccagaagaucaucaccaucggcagcgugugcaugaccaucgggauggccaaccugauccuccagaucggcaacaucaucuccaucuggaucagccacuccauccagcuggggaaccagaaccagaucgagacgugcaaccagagcgucaucaccuacgagaacaacaccugggugaaccagaccuacgugaacaucuccaacacgaacuucgccgcgggccagagcgucguguccgugaagcuggccgggaacagcucccucugcccggucagcggcugggccaucuacuccaaggacaacagcauccgcaucggcuccaagggggacguguucgugauccgggagcccuucaucagcugcagcccccuggagugccgcaccuucuuccugacccagggcgcccuccugaacgacaagcacuccaacgggaccaucaaggaccggucccccuaccgcacgcugaugagcugcccgaucggcgagguccccucccccuacaacagccgguucgagagcguggccugguccgcgagcgccugccacgacgggaucaacuggcucaccaucggcaucuccggccccgacaacggggccguggccguccugaaguacaacggcaucaucaccgacaccaucaagagcuggcgcaacaacauccugcggacgcaggaguccgagugcgcgugcgugaacgggagcugcuucaccgugaugaccgacggcccguccgacggccaggccagcuacaagaucuuccgcaucgagaaggggaagaucgucaaguccguggagaugaacgcccccaacuaccacuacgaggagugcagcugcuaccccgacuccagcgagaucacgugcgugugccgggacaacuggcacggcuccaaccgccccugggucagcuucaaccagaaccucgaguaccagaucggguacaucugcuccggcaucuucggggacaacccgcggcccaacgacaagaccggcaacugcggccccgugagcuccaacggggccaacggcgugaagggguucagcuucaaguacggcaacggggucuggaucggccgcaccaaguccaucagcagccggaacggcuucgagaugaucugggaccccaacggguggaccggcaccgacaacaacuucuccaucaagcaggacaucguggggaucaacgaguggagcggcuacuccgggagcuucgugcagcacccggagcugacgggccuggacugcauccgccccugcuucugggucgagcucauccggggccgccccaaggagaacaccaucuggaccuccgggagcuccaucagcuucugcggcgugaacuccgacaccgucggguggagcuggcccgacggcgccgagcugccguucacgaucgacaaguga

SEQ ID NO: 83455 - RNA, 1410 nt, Artificial Sequence; identical to SEQ ID NO: 82675
  derived and/or modified CDS sequence (opt1) from neuraminidase__InfluenzaA__ADM13044

SEQ ID NO: 83456 - RNA, 1410 nt, Artificial Sequence; identical to SEQ ID NO: 81588
  derived and/or modified CDS sequence (opt1) from neuraminidase__InfluenzaA__ADM13054

SEQ ID NO: 83457 - RNA, 1410 nt, Artificial Sequence; identical to SEQ ID NO: 81939
  derived and/or modified CDS sequence (opt1) from neuraminidase__InfluenzaA__ADM13064

SEQ ID NO: 83458 - RNA, 1410 nt, Artificial Sequence
  derived and/or modified CDS sequence (opt1) from neuraminidase__InfluenzaA__ADM13074
augaaccccaaccagaagaucaucaccaucggcagcgugugcaugaccaucgggauggccaaccugauccuccagaucggcaacaucaucuccaucuggaucagccacuccauccagcuggggaaccagaaccagaucgagacgugcaaccagagcgucaucaccuacgagaacaacaccugggugaaccagaccuacgugaacaucuccaacacgaaccuggccgcgggccagagcgucguguccgugaagcucgccgggaacagcucccugugcccggucagcggcugggccaucuacuccaaggacaacagcauccgcaucggcuccaagggggacguguucgugauccgggagcccuucaucagcugcagcccccuggagugccgcaccuucuuccucacccagggcgcccugcugaacgacaagcacuccaacgggaccaucaaggaccggucccccuaccgcacgcucaugagcugcccgaucggcgagguccccucccccuacaacagccgguucgagagcguggccugguccgcgagcgccugccacgacgggaucaacuggcugaccaucggcaucuccggccccgacaacggggccguggccguccugaaguacaacggcaucaucaccgacaccaucaagagcuggcgcaacaacauccuccggacgcaggaguccgagugcgcgugcgugaacgggagcugcuucaccgugaugaccgacggcccguccgacggccaggccagcuacaagaucuuccgcaucgagaaggggaagaucgucaaguccguggagaugaacgcccccaacuaccacuacgaggagugcagcugcuaccccgacuccagcgagaucacgugcgugugccgggacaacuggcacggcuccaaccgccccugggucagcuucaaccagaaccuggaguaccagaucggguacaucugcuccggcaucuucggggacaacccgcggcccaacgacaagaccggcagcugcggccccguguccagcaacggggccaacggcgugaagggguucuccuucaaguacggcaacggggucuggaucggccgcaccaagagcaucagcucccggaacggcuucgagaugaucugggaccccaacggguggaccggcaccgacaacaaguucagcaucaagcaggacaucguggggaucaacgagugguccggcuacagcggguccuucgugcagcacccggagcugacgggccucgacugcauccgccccugcuucugggucgagcugauccggggccgccccaaggagaacaccaucuggaccagcggguccagcaucuccuucugcggcgugaacagcgacaccgucgggugguccuggcccgacggcgccgagcugccguucacgaucgacaaguga

SEQ ID NO: 83459 - RNA, 1410 nt, Artificial Sequence; identical to SEQ ID NO: 81939
  derived and/or modified CDS sequence (opt1) from neuraminidase__InfluenzaA__ADM13084

SEQ ID NO: 83460 - RNA, 1410 nt, Artificial Sequence
  derived and/or modified CDS sequence (opt1) from neuraminidase__InfluenzaA__ADM13094
augaaccccaaccagaagaucaucaccaucggcagcgugugcaugaccaucgggauggccaaccugauccuccagaucggcaacacgaucuccaucuggaucagccacuccauccagcuggggaaccagaaccagaucgagaccugcaaccagagcgucaucaccuacgagaacaacaccugggugaaccagacguacgugaacaucuccaacaccaacuucgccgcgggccagagcgucguguccgccaagcuggccgggaacagcucccucugcccggugagcggcugggccaucuacuccaaggacaacagcauccgcaucggcuccaagggggacgucuucgugauccgggagcccuucaucagcugcagcccccuggagugccgcaccuucuuccugacccagggcgcccuccugaacgacaagcacuccaacgggacgaucaaggaccggucccccuaccgcacccugaugagcugcccgaucggcgaggugcccucccccuacaacagccgguucgagagcgucgcgugguccgccagcgccugccacgacgggaucaacuggcucaccaucggcaucuccggccccgacaacggggccguggcggugcugaaguacaacggcaucaucaccgacacgaucaagagcuggcgcaacaacauccugcggacccaggaguccgagugcgccugcgucaacgggagcugcuucaccgugaugaccgacggcccguccgacggccaggccagcuacaagaucuuccgcaucgagaaggggaagaucgugaaguccgucgagaugaacgcccccaacuaccacuacgaggagugcagcugcuaccccgacuccagcgagaucacgugcgugugccgggacaacuggcacggcuccaaccgccccugggugagcuucaaccagaaccucgaguaccagaucggguacaucugcuccggcaucuucggggacaacccgcggcccaacgacaagaccggcagcugcggccccgucuccagcaacggggccaacggcgugaagggguucuccuucaaguacggcaacgggguguggaucggccgcaccaagagcaucagcucccggaacggcuucgagaugaucugggaccccaacggguggaccggcacggacaacaacuucagcaucaagcaggacaucgucgggaucaacgagugguccggcuacagcggguccuucgugcagcacccggagcugaccggccuggacugcauccgccccugcuucuggguggagcucauccggggccgccccaaggagaacaccaucuggaccagcggguccagcaucuccuucugcggcgucaacagcgacacgguggggugguccuggcccgacggcgcggagcugccguucaccaucgacaaguga

SEQ ID NO: 83461 - RNA, 1410 nt, Artificial Sequence; identical to SEQ ID NO: 81939
  derived and/or modified CDS sequence (opt1) from neuraminidase__InfluenzaA__ADM13104

SEQ ID NO: 83462 - RNA, 1410 nt, Artificial Sequence; identical to SEQ ID NO: 82664
  derived and/or modified CDS sequence (opt1) from neuraminidase__InfluenzaA__ADM13124

SEQ ID NO: 83463 - RNA, 1410 nt, Artificial Sequence
  derived and/or modified CDS sequence (opt1) from neuraminidase__InfluenzaA__ADM13134
augaaccccaaccagaagaucaucaccaucggcagcgugugcaugaccaucgggauggccaaccugauccuccagaucggcaacaucaucuccaucuggaucagccacuccauccagcuggggaaccagaaccagaucgagacgugcaaccagagcgucaucaccuacgagaacaacaccugggugaaccagaccuacgugaacaucuccaacacgaacuucgccgcgggccagagcgucguguccgugaagcuggccgggaacagcucccucugcccggucagcggcugggccaucuacuccaaggacaacagcauccgcaucggcuccaagggggacguguucgugauccgggagcccuucaucagcugcagcccccuggagugccgcaccuucuuccugacccagggcgcccuccugaacgacaagcacuccaacgggaccaucaaggaccggucccccuaccgcacgcugaugagcugcccgaucggcgagguccccucccccuacaacagccgguucgagagcguggccugguccgcgagcgccugccacgacgggaucaacuggcucaccaucggcaucuccggccccgacaacggggccguggccguccugaaguacaacggcaucaucaccgacaccaucaagagcuggcgcaacaacacgcugcggacccaggaguccgagugcgcgugcgugaacgggagcugcuucaccgugaugaccgacggcccguccgacggccaggccagcuacaagaucuuccgcaucgagaaggggaagaucgucaaguccguggagaugaacgcccccaacuaccacuacgaggagugcagcugcuaccccgacuccagcgagaucacgugcgugugccgggacaacuggcacggcuccaaccgccccugggucagcuucaaccagaaccucgaguaccagaucggguacaucugcuccggcaucuucggggacaacccgcggcccaacgacaagaagggcagcugcggccccguguccagcaacggggccaacggcgugaagggguucuccuucaaguacggcaacggggucuggaucggccgcaccaagagcaucagcucccggaacggcuucgagaugaucugggaccccaacggguggaccggcaccgacaacaacuucagcaucaagcaggacaucguggggaucaacgagugguccggcuacagcggguccuucgugcagcacccggagcugacgggccuggacugcauccgccccugcuucugggucgagcucauccggggccgccccaaggagaacaccaucuggaccagcggguccagcaucuccuucugcggcgugaacagcgacaccgucgggugguccuggcccgacggcgccgagcugccguucacgaucgacaaguga

SEQ ID NO: 83464 - RNA, 1410 nt, Artificial Sequence
  derived and/or modified CDS sequence (opt1) from neuraminidase__InfluenzaA__ADM13154
augaaccccaaccagaagaucaucaccaucggcagcgugugcaugaccaucgggauggccaaccugauccuccagaucggcaacaucaucuccaucuggaucagccacuccauccagcuggggaaccagaagcagaucgagacgugcaaccagagcgucuucaccuacgagaacaacaccugggugaaccagaccuacgugaacaucuccaacacgaacuucgccgcgggccagagcgucguguccgugaagcuggccgggaacagcucccucugcccggucagcggcugggccaucuacuccaaggacaacagcauccgcaucggcuccaagggggacguguucgugauccgggagcccuucaucagcugcagcccccuggagugccgcaccuucuuccugacccagggcgcccuccugaacgacaagcacuccaacgggaccaucaaggaccggucccccuaccgcacgcugaugagcugcccgaucggcgagguccccucccccuacaacagccgguucgagagcguggccugguccgcgagcgccugccacgacgggaucaacuggcucaccaucggcaucuccggccccgacaacggggccguggccguccugaaguacaacggcaucaucaccgacaccaucaagagcuggcgcaacaacauccugcggacgcaggaguccgagugcgcgugcgugaacgggagcugcuucaccgugaugaccgacggcccguccgacggccaggccagcuacaagaucuucaagaucgagaaggggaagaucgucaaguccguggagaugaacgcccccaacuaccacuacgaggagugcagcugcuaccccgacuccagcgagaucacgugcgugugccgcgacaacuggcacggcuccaaccggcccugggucagcuucaaccagaaccucgaguaccagaucggguacaucugcuccggcaucuucggggacaacccgcgccccaacgacaagaccggcagcugcggccccguguccagcaacggggccaacggcgugaagggguucuccuucaaguacggcaacggggucuggaucggccggaccaagagcaucagcucccgcaacggcuucgagaugaucugggaccccaacggguggaccggcaccgacaacaacuucagcaucaagcaggacaucguggggaucaacgagugguccggcuacagcggguccuucgugcagcacccggagcugacgggccuggacugcauccggcccugcuucugggucgagcucauccgcggccggcccaaggagaacaccaucuggaccagcggguccagcaucuccuucugcggcgugaacagcgacaccgucgggugguccuggcccgacggcgccgagcugccguucacgaucgacaaguga

SEQ ID NO: 83465 - RNA, 1410 nt, Artificial Sequence; identical to SEQ ID NO: 82192
  derived and/or modified CDS sequence (opt1) from neuraminidase__InfluenzaA__ADM13164

SEQ ID NO: 83466 - RNA, 1410 nt, Artificial Sequence; identical to SEQ ID NO: 80762
  derived and/or modified CDS sequence (opt1) from neuraminidase__InfluenzaA__ADM13174

SEQ ID NO: 83467 - RNA, 1410 nt, Artificial Sequence; identical to SEQ ID NO: 80762
  derived and/or modified CDS sequence (opt1) from neuraminidase__InfluenzaA__ADM13184

SEQ ID NO: 83468 - RNA, 1410 nt, Artificial Sequence; identical to SEQ ID NO: 80762
  derived and/or modified CDS sequence (opt1) from neuraminidase__InfluenzaA__ADM13194

SEQ ID NO: 83469 - RNA, 1410 nt, Artificial Sequence; identical to SEQ ID NO: 80762
  derived and/or modified CDS sequence (opt1) from neuraminidase__InfluenzaA__ADM13204

SEQ ID NO: 83470 - RNA, 1410 nt, Artificial Sequence; identical to SEQ ID NO: 81939
  derived and/or modified CDS sequence (opt1) from neuraminidase__InfluenzaA__ADM13214

SEQ ID NO: 83471 - RNA, 1410 nt, Artificial Sequence
  derived and/or modified CDS sequence (opt1) from neuraminidase__InfluenzaA__ADM13224
augaaccccaaccagaagaucaucaccaucggcagcgugugcaugaccaucgggauggccaaccugauccuccagaucggcaacaucaucuccaucuggaucagccacuccauccagcuggggaaccagaaccagaucgagacgugcaaccagagcgucaucaccuacgagaacaacaccugggugaaccagaccuacgugaacaucuccaacacgaacuucgccgcgggccagagcgucguguccgugaagcuggccgggaacagcucccucugcccggucagcggcugggccaucuacuccaaggacaacagcauccgcaucggcuccaagggggacguguucgugauccgggagcccuucaucagcugcagcccccuggagugccgcaccuucuuccugacccagggcgcccuccugaacgacaagcacuccaacgggaccaucaaggaccggucccccuaccgcacgcugaugagcugcccgaucggcgagguccccucccccuacaacagccgguucgagagcguggccugguccgcgagcgccugccacgacgggaucaacuggcucaccaucggcaucuccggccccgacaacggggccguggccguccugaaguacaacggcaucaucaccgacaccauccgcagcuggcggaacaacauccugcgcacgcaggaguccgagugcgcgugcgugaacgggagcugcuucaccgugaugaccgacggcccguccgacggccaggccagcuacaagaucuuccggaucgagaaggggaagaucgucaaguccguggagaugaacgcccccaacuaccacuacgaggagugcagcugcuaccccgacuccagcaagaucacgugcgugugccgcgacaacuggcacggcuccaaccggcccugggucagcuucaaccagaaccucgaguaccagaucggguacaucugcuccggcaucuucggggacaacccgcgccccaacgacaagaccggcagcugcggccccguguccagcaacggggccaacggcgugaagggguucuccuucaaguacggcaacggggucuggaucggccggaccaagagcaucagcucccgcaacggcuucgagaugaucugggaccccaacggguggaccggcaccgacaacaacuucagcaucaagcaggacaucguggggaucaacgagugguccggcuacagcggguccuucgugcagcacccggagcugacgggccuggacugcauccggcccugcuucugggucgagcucauccgcggccggcccaaggagaacaccaucuggaccagcggguccagcaucuccuucugcggcgugaacagcgacaccgucgggugguccuggcccgacggcgccgagcugccguucacgaucgacaaguga

SEQ ID NO: 83472 - RNA, 1410 nt, Artificial Sequence; identical to SEQ ID NO: 80762
  derived and/or modified CDS sequence (opt1) from neuraminidase__InfluenzaA__ADM13234

SEQ ID NO: 83473 - RNA, 1410 nt, Artificial Sequence; identical to SEQ ID NO: 82050
  derived and/or modified CDS sequence (opt1) from neuraminidase__InfluenzaA__ADM13244

SEQ ID NO: 83474 - RNA, 1410 nt, Artificial Sequence; identical to SEQ ID NO: 81116
  derived and/or modified CDS sequence (opt1) from neuraminidase__InfluenzaA__ADM13254

SEQ ID NO: 83475 - RNA, 1410 nt, Artificial Sequence; identical to SEQ ID NO: 81939
  derived and/or modified CDS sequence (opt1) from neuraminidase__InfluenzaA__ADM13264

SEQ ID NO: 83476 - RNA, 1410 nt, Artificial Sequence; identical to SEQ ID NO: 80762
  derived and/or modified CDS sequence (opt1) from neuraminidase__InfluenzaA__ADM13274

SEQ ID NO: 83477 - RNA, 1410 nt, Artificial Sequence; identical to SEQ ID NO: 80762
  derived and/or modified CDS sequence (opt1) from neuraminidase__InfluenzaA__ADM13284

SEQ ID NO: 83478 - RNA, 1410 nt, Artificial Sequence
  derived and/or modified CDS sequence (opt1) from neuraminidase__InfluenzaA__ADM13294
augaaccccaaccagaagaucaucaccaucggcagcgugugcaugaccaucgggauggccaaccugauccuccagaucggcaacaucaucuccaucuggaucagccacuccauccagcuggggaaccagaaccagaucgagacgugcaaccagagcgucaucaccuacgagaacaacaccugggugaaccagaccuacgugaacaucuccaacacgaacuucgccgcgggccagagcgucguguccgugaagcuggccgggaacagcucccucugcccggucagcggcugggccaucuacuccaaggacaacagcauccgcaucggcuccaagggggacguguucgugauccgggagcccuucaucagcugcagcccccuggagugccgcaccuucuuccugacccagggcgcccuccugaacgacaagcacuccaacgggaccaucaaggaccggucccccuaccgcgcccugaugagcugcccgaucggcgagguccccucccccuacaacagccgguucgagagcguggcgugguccgccagcgccugccacgacgggaucaacuggcucacgaucggcaucuccggccccgacaacggggccguggcgguccugaaguacaacggcaucaucaccgacaccaucaagagcuggcgcaacaacauccugcggacccaggaguccgagugcgccugcgugaacgggagcugcuucacggugaugaccgacggcccguccgacggccaggccagcuacaagaucuuccgcaucgagaaggggaagaucgucaaguccguggagaugaacgcccccaacuaccacuacgaggagugcagcugcuaccccgacuccagcgagaucacgugcgugugccgggacaacuggcacggcuccaaccgccccugggucagcuucaaccagaaccucgaguaccagaucggguacaucugcuccggcaucuucggggacaacccgcggcccaacgacaagaccggcagcugcggccccguguccagcaacggggccaacggcgugaagggguucuccuucaaguacggcaacggggucuggaucggccgcaccaagagcaucagcucccggaacggcuucgagaugaucugggaccccaacggguggaccggcaccgacaacagcuucuccaucaagcaggacaucguggggaucaacgaguggagcggcuacuccgggagcuucgugcagcacccggagcugaccggccuggacugcauccgccccugcuucugggucgagcucauccggggccgccccaaggagaacacgaucuggaccuccgggagcuccaucagcuucugcggcgugaacuccgacaccgucggguggagcuggcccgacggcgcggagcugccguucaccaucgacaaguga

SEQ ID NO: 83479 - RNA, 1410 nt, Artificial Sequence; identical to SEQ ID NO: 80762
  derived and/or modified CDS sequence (opt1) from neuraminidase__InfluenzaA__ADM13304

SEQ ID NO: 83480 - RNA, 1410 nt, Artificial Sequence; identical to SEQ ID NO: 82224
  derived and/or modified CDS sequence (opt1) from neuraminidase__InfluenzaA__ADM13314

SEQ ID NO: 83481 - RNA, 1410 nt, Artificial Sequence; identical to SEQ ID NO: 80762
  derived and/or modified CDS sequence (opt1) from neuraminidase__InfluenzaA__ADM13324

SEQ ID NO: 83482 - RNA, 1410 nt, Artificial Sequence
  derived and/or modified CDS sequence (opt1) from neuraminidase__InfluenzaA__ADM13344
augaaccccaaccagaagaucaucaucaucggcagcgugugcaugaccaucgggauggccaaccugauccuccagaucggcaacaucaucuccaucuggauccugcacagcauccagcuggggaaccagaaccagaucgagaccugcaaccaguccgucaucacguacgagaacaacaccugggugaaccagaccuacgugaacaucagcaacaccaacuucgccgcgggccaguccgucgugagcgugaagcucgccgggaacuccagccugugcccggucuccggcugggccaucuacagcaaggacaacuccauccgcaucggcagcaagggggacguguucgugauccgggagcccuucaucuccugcagcccccuggagugccgcacguucuuccucacccagggcgcccugcugaacgacaagcacuccaacgggaccaucaaggaccggagccccuaccgcacccucauguccugcccgaucggcgagguccccagccccuacaacucccgguucgagagcguggccuggagcgcguccgccugccacgacgggaucaacuggcugacgaucggcaucagcggccccgacaacggggccguggccguccugaaguacaacggcaucaucaccgacaccaucaaguccuggcgcaacaacauccuccggacccaggagagcgagugcgcgugcgugaacggguccugcuucacggugaugaccgacggcccgagcgacggccaggccuccuacaagaucuuccgcaucgagaaggggaagaucgucaagagcguggagaugaacgcccccaacuaccacuacgaggagugcuccugcuaccccgacagcuccgagaucacgugcgugugccgggacaacuggcacggcagcaaccgccccugggucuccuucaaccagaaccuggaguaccagaucggguacaucugcagcggcaucuucggggacaacccgcggcccaacgacaagaccggcuccugcggccccgugagcuccaacggggccaacggcgugaagggguucagcuucaaguacggcaacggggucuggaucggccgcaccaaguccaucagcagccggaacggcuucgagaugaucugggaccccaacggguggaccggcaccgacaacaacuucgccaucaagcaggacaucguggggaucaacgagugguccggcuacagcggguccuucgugcagcacccggagcugaccggccucgacugcauccgccccugcuucugggucgagcugauccggggccgccccaaggagaacacgaucuggaccagcggguccagcaucuccuucugcggcgugaacagcgacaccgucgggugguccuggcccgacggcgcggagcugccguucaccaucgacaaguga

SEQ ID NO: 83483 - RNA, 1410 nt, Artificial Sequence; identical to SEQ ID NO: 82664
  derived and/or modified CDS sequence (opt1) from neuraminidase__InfluenzaA__ADM13354

SEQ ID NO: 83484 - RNA, 1410 nt, Artificial Sequence; identical to SEQ ID NO: 81939
  derived and/or modified CDS sequence (opt1) from neuraminidase__InfluenzaA__ADM13363

SEQ ID NO: 83485 - RNA, 1410 nt, Artificial Sequence
  derived and/or modified CDS sequence (opt1) from neuraminidase__InfluenzaA__ADM13464
augaaccccaaccagaagaucaucaccaucggcagcgugucccugaccaucgccacggucugcuuccucaugcagaucgccauccuggugaccaccgugacccugcacuucaagcaguacgagugcgacagcccggcguccaaccaggucaugcccugcgagcccaucaucaucgagcgcaacaucacggagaucguguaccucaacaacaccaccaucgagaaggagaucugccccaagguggucgaguaccggaacuggagcaagccgcagugccagaucaccggguucgcccccuucuccaaggacaacagcauccgccuguccgccggcggggacaucugggugacgcgggagcccuacgugagcugcgaccacggcaagugcuaccaguucgcccuggggcagggcaccacccucgacaacaagcacuccaacgacaccauccacgaccgcaucccccaccggacgcugcugaugaacgagcucggcgucccguuccaccuggggacccgccaggugugcaucgccuggagcuccagcuccugccacgacggcaaggcguggcugcacgugugcaucaccgggaacgacaagaacgccaccgccagcuucaucuacgacggccggcucgucgacuccaucgggagcuggucccagaacauccugcgcacgcaggagagcgagugcgugugcaucaacgggaccugcaccguggucaugaccgacggcuccgccagcggccgggcggacacgcgcauccuguucaucgaggagggcaagaucgugcacaucagcccccucuccgggagcgcccagcacguggaggagugcuccugcuacccccgguaccccggcguccgcugcaucugccgggacaacuggaagggcagcaaccgcccggugguggacaucaacauggaggacuacuccaucgacagcuccuacgucugcagcgggcuggugggcgacacgccccggaacgacgaccgcuccagcaacuccaacugccggaaccccaacaacgagcgcgggaaccagggcgugaaggggugggccuucgacaacggcgacgacgucuggaugggccggaccaucagcaaggaccugcgcuccggguacgagaccuucaaggugaucggcggguggagcacccccaacuccaagagccagaucaaccggcaggucaucguggacuccgacaaccgcagcggcuacuccgggaucuucagcguggagggcaagagcugcaucaaccgcugcuucuacgucgagcucauccggggccgcgagcaggagacccgggugugguggaccuccaacagcaucguggucuucugcgggaccuccggcacguacgggaccggcagcuggccggacggggccaacaucaacuucaugcccaucuga

SEQ ID NO: 83486 - RNA, 1410 nt, Artificial Sequence
  derived and/or modified CDS sequence (opt1) from neuraminidase__InfluenzaA__ADM13465
augaaccccaaccagaagaucaucaccaucggcagcgugucccugaccaucgccacggucugcuuccucaugcagaucgccauccuggugaccaccgugacccugcacuucaagcaguacgagugcgacagcccggcguccaaccaggucaugcccugcgagcccaucaucaucgagcgcaacaucacggagaucguguaccucaacaacaccaccaucgagaaggagaucugccccaagguggucgaguaccggaacuggagcaagccgcagugccagaucaccggguucgcccccuucuccaaggacaacagcauccgccuguccgccggcggggacaucugggugacgcgggagcccuacgugagcugcgaccacggcaagugcuaccaguucgcccuggggcagggcaccacccucgacaacaagcacuccaacgacaccauccacgaccgcaucccccaccggacgcugcugaugaacgagcucggcgucccguuccaccuggggacccgccaggugugcaucgccuggagcuccagcuccugccacgacggcaaggcguggcugcacgugugcaucaccggggacgacaagaacgccaccgccagcuucaucuacgacggccggcucgucgacuccaucgggagcuggucccagaacauccugcgcacgcaggagagcgagugcgugugcaucaacgggaccugcaccguggucaugaccgacggcuccgccagcggccgggcggacacgcgcauccuguucaucgaggagggcaagaucgugcacaucagcccccucuccgggagcgcccagcacguggaggagugcuccugcuacccccgguaccccggcguccgcugcaucugccgggacaacuggaagggcagcaaccgcccggugguggacaucaacauggaggacuacuccaucgacagcuccuacgucugcagcgggcuggugggcgacacgccccggaacgacgaccgcuccagcaacuccaacugccggaaccccaacaacgagcgcgggaaccagggcgugaaggggugggccuucgacaacggcgacgacgucuggaugggccggaccaucagcaaggaccugcgcuccggguacgagaccuucaaggugaucggcggguggagcacccccaacuccaagagccagaucaaccggcaggucaucguggacuccgacaaccgcagcggcuacuccgggaucuucagcguggagggcaagagcugcaucaaccgcugcuucuacgucgagcucaugcggggccgcaagcaggagacccgggugugguggaccuccaacagcaucguggucuucugcgggaccuccggcacguacgggaccggcagcuggccggacggggccaacaucaacuucaugcccaucuga

SEQ ID NO: 83487 - RNA, 1410 nt, Artificial Sequence; identical to SEQ ID NO: 78119
  derived and/or modified CDS sequence (opt1) from neuraminidase__InfluenzaA__ADM13466

SEQ ID NO: 83488 - RNA, 1410 nt, Artificial Sequence
  derived and/or modified CDS sequence (opt1) from neuraminidase__InfluenzaA__ADM13467
augaaccccaaccagaagaucaucaccaucggcagcgugucccugaccaucgccacggucugcuuccucaugcagaucgccauccuggugaccaccgugacccugcacuucaagcaguacgagugcgacagcccggcguccaaccaggucaugcccugcgagcccaucaucaucgagcgcaacaucacggagaucguguaccucaacaacaccaccaucgagaaggagaucugccccaagguggucgaguaccggaacuggagcaagccgcagugccagaucaccggguucgcccccuucuccaaggacaacagcauccgccuguccagcggcggggacaucugggugacgcgggagcccuacguguccugcgaccacggcaagugcuaccaguucgcccuggggcagggcaccacccucgacaacaagcacagcaacgacaccauccacgaccgcaucccccaccggacgcugcugaugaacgagcucggcgucccguuccaccuggggacccgccaggugugcaucgccugguccagcuccagcugccacgacggcaaggccuggcugcacgugugcaucaccggggacgacaagaacgcgaccgccuccuucaucuacgacggccggcucgucgacagcaucggguccuggagccagaacauccugcgcacgcaggaguccgagugcgugugcaucaacgggaccugcaccguggucaugaccgacggcagcgccagcggccgggccgacacgcgcauccuguucaucgaggagggcaagaucgugcacaucagcccccucuccggguccgcgcagcacguggaggagugcagcugcuacccccgguaccccggcguccgcugcaucugccgggacaacuggaagggcuccaaccgcccggugguggacaucaacauggaggacuacagcaucgacuccagcuacgucugcuccgggcuggugggcgacacgccccggaacgacgaccgcagcuccaacagcaacugccggaaccccaacaacgagcgcgggaaccagggcgugaaggggugggccuucgacaacggcgacgacgucuggaugggccggaccaucuccaaggaccugcgcagcggguacgagaccuucaaggugaucggcgggugguccacccccaacagcaagucccagaucaaccggcaggucaucguggacagcgacaaccgcuccggcuacagcgggaucuucagcguggagggcaaguccugcaucaaccgcugcuucuacgucgagcucauccggggccgcaagcaggagacccgggugugguggaccagcaacuccaucguggucuucugcgggaccagcggcacguacgggaccggcuccuggccggacggggccaacaucaacuucaugcccaucuga

SEQ ID NO: 83489 - RNA, 1410 nt, Artificial Sequence; identical to SEQ ID NO: 78119
  derived and/or modified CDS sequence (opt1) from neuraminidase__InfluenzaA__ADM13468

SEQ ID NO: 83490 - RNA, 1410 nt, Artificial Sequence
  derived and/or modified CDS sequence (opt1) from neuraminidase__InfluenzaA__ADM13469
augaaccccaaccagaagaucaucaccaucggcagcgugucccugaccaucgccacggccugcuuccucaugcagaucgcgauccuggucaccaccgugacccugcacuucaagcaguacgagugcgacagcccggccuccaaccaggugaugcccugcgagcccaucaucaucgagcgcaacaucacggagaucgucuaccucaacaacaccaccaucgagaaggagaucugccccaaggugguggaguaccggaacuggagcaagccgcagugccagaucaccggguucgcccccuucuccaaggacaacagcauccgccuguccgccggcggggacaucugggucacgcgggagcccuacgugagcugcgaccacggcaagugcuaccaguucgcccuggggcagggcaccacccucgacaacaagcacuccaacgacaccauccacgaccgcaucccccaccggacgcugcugaugaacgagcucggcgugccguuccaccuggggacccgccaggucugcaucgcguggagcuccagcuccugccacgacggcaaggccuggcugcacgugugcaucaccggggacgacaagaacgccaccgccagcuucaucuacgacggccggcucguggacuccaucgggagcuggucccagaacauccugcgcacgcaggagagcgagugcgucugcaucaacgggaccugcaccguggugaugaccgacggcuccgcgagcggccgggccgacacgcgcauccuguucaucgaggagggcaagaucguccacaucagcccccucuccgggagcgcccagcacguggaggagugcuccugcuacccccgguaccccggcgugcgcugcaucugccgggacaacuggaagggcagcaaccgcccggucguggacaucaacauggaggacuacuccaucgacagcuccuacgugugcagcgggcuggucggcgacacgccccggaacgacgaccgcuccagcaacuccaacugccggaaccccaacaacgagcgcgggaaccagggcgugaaggggugggccuucgacaacggcgacgacguguggaugggccggaccaucagcaaggaccugcgcuccggguacgagaccuucaaggucaucggcggguggagcacccccaacuccaagagccagaucaaccgccaggugaucgucgacuccgacaaccggagcggcuacuccgggaucuucagcguggagggcaagagcugcaucaaccgcugcuucuacguggagcucauccggggccgcaagcaggagacccgggucugguggaccuccaacagcaucgugguguucugcgggaccuccggcacguacgggaccggcagcuggccggacggggccaacaucaacuucaugcccaucuga

SEQ ID NO: 83491 - RNA, 1410 nt, Artificial Sequence
  derived and/or modified CDS sequence (opt1) from neuraminidase__InfluenzaA__ADM13470
augaaccccaaccagaagaucaucaccaucggcagcgugucccugaccaucgccacggucugcuuccucaugcagaucgccauccuggugaccaccgugacccugcacuucaagcaguacgagugcgacagcccggcguccaaccaggucaugcccugcgagcccaucaucaucgagcgcaacaucacggagaucguguaccucaacaacaccaccaucgagaaggagaucugccccaagguggucgaguaccggaacuggagcaagccgcagugccagaucaccggguucgcccccuucuccaaggacaacagcauccgccuguccgccggcggggacaucugggugacgcgggagcccuacgugagcugcgaccacggcaagugcuaccaguucgcccuggggcagggcaccacccucgacaacaagcacuccaacgacaccauccacgaccgcaucccccaccggacgcugcugaugaacgagcucggcgucccguuccaccuggggacccgccaggugugcaucgccuggagcuccagcuccugccacgacggcaaggcguggcugcacgugugcaucaccggggacgacaagaacgccaccgccagcuucaucuacgacggccggcucgucgacuccaucgggagcuggucccagaacauccugcgcacgcaggagagcgagugcgugugcaucaacgggaccugcaccguggucaugaccgacggcuccgccagcggccgggcggacacgcgcauccuguucaucgaggagggcaagaucgugcacaucagcccccucuccgggagcgcccagcacguggaggagugcuccugcuacccccgguaccccggcguccgcugcaucugccgggacaacuggaagggcagcaaccgcccggugguggacaucaacauggaggacuacuccaucgacagcuccuacgucugcagcgggcuggugggcgacacgccccggaacgacgaccgcuccagcaacuccaacugccggaaccccaacaacgagcgcgggaaccagggcgugaaggggugggccuucgacaacggcgacgacgucuggaugggccggaccaucagcaaggaccugcgcuccggguacgagaccuucaaggugaucggcggguggagcacccccaacuccaagagccagaucaaccggcaggucaucaucgacuccgacaaccgcagcggcuacuccgggaucuucagcguggagggcaagagcugcaucaaccgcugcuucuacguggagcucauccggggccgcaagcaggagacccgggucugguggaccuccaacagcaucgugguguucugcgggaccuccggcacguacgggaccggcagcuggccggacggggccaacaucaacuucaugcccaucuga

SEQ ID NO: 83492 - RNA, 1410 nt, Artificial Sequence
  derived and/or modified CDS sequence (opt1) from neuraminidase__InfluenzaA__ADM13471
augaaccccaaccagaagaucaucaccaucggcagcgugucccugaccaucgccacggucugcuuccucaugcagaucgccauccuggugaccaccgugacccugcacuucaagcaguacgagugcgacagcccggcguccaaccaggucaugcccugcgagcccaucaucaucgagcgcaacaucacggagaucguguaccucaacaacaccaccaucgagaaggagaucugccccaagguggucgaguaccggaacuggagcaagccgcagugccagaucaccggguucgcccccuucuccaaggacaacagcauccgcaucuccgccggcggggacaucugggugacgcgggagcccuacgugagcugcgaccacggcaagugcuaccaguucgcccuggggcagggcaccacccuggacaacaagcacuccaacgacaccauccacgaccgcaucccccaccggacgcuccugaugaacgagcugggcgucccguuccaccucgggacccgccaggugugcaucgccuggagcuccagcuccugccacgacggcaaggcguggcugcacgugugcaucaccggggacgacaagaacgccaccgccagcuucaucuacgacggccggcuggucgacuccaucgggagcuggucccagaacauccuccgcacgcaggagagcgagugcgugugcaucaacgggaccugcaccguggucaugaccgacggcuccgccagcggccgggcggacacgcgcauccuguucaucgaggagggcaagaucgugcacaucagcccccuguccgggagcgcccagcacguggaggagugcuccugcuacccccgguaccccggcguccgcugcaucugccgggacaacuggaagggcagcaaccgcccggugguggacaucaacauggaggacuacuccaucgacagcuccuacgucugcagcgggcucgugggcgacacgccccggaacgacgaccgcuccagcaacuccaacugccggaaccccaacaacgagcgcgggaaccagggcgugaaggggugggccuucgacaacggcgacgacgucuggaugggccggaccaucagcaaggaccugcgcuccggguacgagaccuucaaggugaucggcggguggagcacccccaacuccaagagccagaucaaccggcaggucaucguggacuccgacaaccgcagcggcuacuccgggaucuucagcguggagggcaagagcugcaucaaccgcugcuucuacgucgagcugauccggggccgcaagcaggagacccgggugugguggaccuccaacagcaucguggucuucugcgggaccuccggcacguacgggaccggcagcuggccggacggggccaacaucaacuucaugcccaucuga

SEQ ID NO: 83493 - RNA, 1410 nt, Artificial Sequence; identical to SEQ ID NO: 80532
  derived and/or modified CDS sequence (opt1) from neuraminidase__InfluenzaA__ADM13472

SEQ ID NO: 83494 - RNA, 1410 nt, Artificial Sequence; identical to SEQ ID NO: 78119
  derived and/or modified CDS sequence (opt1) from neuraminidase__InfluenzaA__ADM13473

SEQ ID NO: 83495 - RNA, 1410 nt, Artificial Sequence; identical to SEQ ID NO: 80527
  derived and/or modified CDS sequence (opt1) from neuraminidase__InfluenzaA__ADM13474

SEQ ID NO: 83496 - RNA, 1410 nt, Artificial Sequence
  derived and/or modified CDS sequence (opt1) from neuraminidase__InfluenzaA__ADM14469
augaaccccaaccagaagaucaucaccaucggcagcgugugcaugaccaucgggauggccaaccugauccuccagaucggcaacaucaucuccaucuggaucagccacuccauccagcuggggaaccagaaccagaucgagacgugcaaccagagcgucaucaccuacgagaacaacaccugggugaaccagaccuacgugaacaucuccaacacgaacuucgccgcgggccagagcgucguguccgugaagcuggccgggaacagcucccucugcccggucagcggcugggccaucuacuccaaggacaacagcaugcgcaucggcuccaagggggacguguucgugauccgggagcccuucaucagcugcagcccccuggagugccgcaccuucuuccugacccagggcgcccuccugaacgacaagcacuccaacgggaccaucaaggaccggucccccuaccgcacgcugaugagcugcccgaucggcgagguccccucccccuacaacagccgguucgagagcguggccugguccgcgagcgccugccacgacgggaucaacuggcucaccaucggcaucuccggccccgacaacggggccguggccguccugaaguacaacggcaucaucaccgacaccaucaagagcuggcgcaacaacauccugcggacgcaggaguccgagugcgcgugcgugaacgggagcugcuucaccgugaugaccgacggcccguccgacggccaggccagcuacaagaucuuccgcaucgagaaggggaagaucgucaaguccguggagaugaacgcccccaacuaccacuacgaggagugcagcugcuaccccgacuccagcgagaucacgugcgugugccgggacaacuggcacggcuccaaccgccccugggucagcuucaaccagaaccucgaguaccagaucggguacaucugcuccggcaucuucggggacaacccgcggcccaacgacaagaccggcagcugcggccccguguccagcaacggggccaacggcgugaagggguucuccuucaaguacggcaacggggucuggaucggccgcaccaagagcaucagcucccggaccggcuucgagaugaucugggaccccaacggguggaccggcacggacaacaacuucagcaucaagcaggacaucguggggaucaacgagugguccggcuacagcggguccuucgugcagcacccggagcugaccggccuggacugcauccgccccugcuucugggucgagcucauccggggccgccccaaggagaacaccaucuggaccagcggguccagcaucuccuucugcggcgugaacagcgacacggucgggugguccuggcccgacggcgccgagcugccguucaccaucgacaaguga

SEQ ID NO: 83497 - RNA, 1410 nt, Artificial Sequence; identical to SEQ ID NO: 80762
  derived and/or modified CDS sequence (opt1) from neuraminidase__InfluenzaA__ADM14479

SEQ ID NO: 83498 - RNA, 1410 nt, Artificial Sequence; identical to SEQ ID NO: 80762
  derived and/or modified CDS sequence (opt1) from neuraminidase__InfluenzaA__ADM14499

SEQ ID NO: 83499 - RNA, 1410 nt, Artificial Sequence; identical to SEQ ID NO: 82275
  derived and/or modified CDS sequence (opt1) from neuraminidase__InfluenzaA__ADM14518

SEQ ID NO: 83500 - RNA, 1410 nt, Artificial Sequence; identical to SEQ ID NO: 83100
  derived and/or modified CDS sequence (opt1) from neuraminidase__InfluenzaA__ADM14527

SEQ ID NO: 83501 - RNA, 1410 nt, Artificial Sequence; identical to SEQ ID NO: 82193
  derived and/or modified CDS sequence (opt1) from neuraminidase__InfluenzaA__ADM14537

SEQ ID NO: 83502 - RNA, 1410 nt, Artificial Sequence; identical to SEQ ID NO: 80762
  derived and/or modified CDS sequence (opt1) from neuraminidase__InfluenzaA__ADM14546

SEQ ID NO: 83503 - RNA, 1410 nt, Artificial Sequence
  derived and/or modified CDS sequence (opt1) from neuraminidase__InfluenzaA__ADM14555
augaaccccaaccagaagaucaucaccaucggcagcgugugcaugaccaucgggauggccaaccugauccuccagaucggcaacaucaucuccaucuggaucagccacuccauccagcuggggaaccagaaccagaucgagacgugcaaccagagcgucaucaccuacgagaacaacaccugggugaaccagaccuacgugaacaucuccaacacgaacuucgccgcgggccagagcgucguguccgugaagcuggccgggaacagcucccucugcccggucagcggcugggccaucuacuccaaggacaacagcauccgcaucggcuccaagggggacguguucgugauccgggagcccuucaucagcugcagcccccuggagugccgcaccuucuuccugacccagggcgcccuccugaacgacaagcacuccaacgggaccaucaaggaccggucccccuaccgcacgcugaugagcugcccgaucggcgagguccccucccccuacaacagccgguucgagagcguggccugguccgcgagcgccugccacgacgggaucaacuggcucaccaucggcaucuccggccccgacaacggggccguggccguccugaaguacaacggcaucaucaccgacaccaucaagagcuggcgcaacaacauccugcggacgcaggaguccgagugcgcgugcgugaacgggagcugcuucaccgugaugaccgacggcccguccgacggccaggccagcuacaagaucuuccgcaucgagaaggggaagaucgucaaguccguggagaugaacgcccccaacuaccacuacgaggagugcagcugcuaccccgacuccagcgagaucacgugcgugugccgggacaacuggcacggcuccaaccgccccugggucagcuucaaccagaaccucgaguaccagaucggguacaucugcuccggcaucuucggggacaacccgcggcccaacgacaagaccggcagcugcggccccguguccagcaacggggccaacggcgugaagggguucuccuuccgcuacggcaacggggucuggaucggccggaccaagagcaucagcucccgcaacggcuucgagaugaucugggaccccaacggguggaccggcaccgacaacaacuucagcaucaagcaggacaucguggggaucaacgagugguccggcuacagcggguccuucgugcagcacccggagcugacgggccuggacugcauccggcccugcuucugggucgagcucauccgcggccggcccaaggagaacaccaucuggaccagcggguccagcaucuccuucugcggcgugaacagcgacaccgucgggugguccuggcccgacggcgccgagcugccguucacgaucgacaaguga

SEQ ID NO: 83504 - RNA, 1410 nt, Artificial Sequence; identical to SEQ ID NO: 80762
  derived and/or modified CDS sequence (opt1) from neuraminidase__InfluenzaA__ADM14573

SEQ ID NO: 83505 - RNA, 1410 nt, Artificial Sequence; identical to SEQ ID NO: 80762
  derived and/or modified CDS sequence (opt1) from neuraminidase__InfluenzaA__ADM14582

SEQ ID NO: 83506 - RNA, 1410 nt, Artificial Sequence; identical to SEQ ID NO: 80762
  derived and/or modified CDS sequence (opt1) from neuraminidase__InfluenzaA__ADM14591

SEQ ID NO: 83507 - RNA, 1410 nt, Artificial Sequence
  derived and/or modified CDS sequence (opt1) from neuraminidase__InfluenzaA__ADM14601
augaaccccaaccagaagaucaucaccaucggcagcgugugcaugaccaucgggauggccaaccugauccuccagaucggcaacaucaucuccaucuggaucagccacuccauccagcuggggaaccagaaccagaucgagacgugcaaccagagcgucaucaccuacgagaacaacaccugggugaaccagaccuacgugaacaucuccaacacgaacuucgccgcgggccagagcgucguguccgugaagcuggccgggaacagcucccucugcccggucaacggcugggccaucuacagcaaggacaacuccgugcgcaucggcagcaagggggacguguucgucauccgggagcccuucaucuccugcagcccccuggagugccgcaccuucuuccugacccagggcgcccuccugaacgacaagcacuccaacgggaccaucaaggaccggagccccuaccgcacgcugauguccugcccgaucggcgaggugcccagccccuacaacucccgguucgagagcguggccuggagcgcguccgccugccacgacgggaucaacuggcucaccaucggcaucagcggccccgacaacggggccgucgccgugcugaaguacaacggcaucaucaccgacaccaucaaguccuggcgcaacaacauccugcggacgcaggagagcgagugcgcgugcgugaacggguccugcuucaccgucaugaccgacggcccgagcgacggccaggccuccuacaagaucuuccgcaucgagaaggggaagaucgucaagagcguggagaugaacgcccccaacuaccacuacgaggagugcuccugcuaccccgacagcuccgagaucacgugcgugugccgggacaacuggcacggcagcaaccgccccuggguguccuucaaccagaaccucgaguaccagaucggguacaucugcagcggcaucuucggggacaacccgcggcccaacgacaagaccggcuccugcggccccgugagcuccaacggggccaacggcgucaagggguucagcuucaaguacggcaacgggguguggaucggccgcaccaaguccaucagcagccggaacggcuucgagaugaucugggaccccaacggguggaccggcaccgacaacaacuucuccaucaagcaggacaucguggggaucaacgaguggagcggcuacuccgggagcuucguccagcacccggagcugacgggccuggacugcauccgccccugcuucuggguggagcucauccggggccgccccaaggagaacaccaucuggaccuccgggagcuccaucagcuucugcggcgucaacuccgacaccgugggguggagcuggcccgacggcgccgagcugccguucacgaucgacaaguga

SEQ ID NO: 83508 - RNA, 1410 nt, Artificial Sequence
  derived and/or modified CDS sequence (opt1) from neuraminidase__InfluenzaA__ADM14611
augaaccccaaccagaagaucaucaccaucggcagcgugugcaugaccaucgggauggccaaccugauccuccagaucggcaacaucaucuccaucuggaucagccacuccauccagcuggggaaccagaaccagaucgagacgugcaaccagagcgucaucaccuacgagaacaacaccugggugaaccagaccuacgugaacaucuccaacacgaacuucgccgcgggccagagcgucguguccgugaagcugagcgggaacuccagccucugcccggucuccggcugggccaucuacagcaaggacaacuccauccgcaucggcagcaagggggacguguucgugauccgggagcccuucaucuccugcagcccccuggagugccgcaccuucuuccugacccagggcgcccuccugaacgacaagcacuccaacgggaccaucaaggaccggagccccuaccgcacgcugauguccugcccgaucggcgagguccccagccccuacaacagccgguucgaguccguggccuggagcgccuccgcgugccacgacgggaucaacuggcucaccaucggcaucagcggccccgacaacggggccguggccguccugaaguacaacggcaucaucaccgacaccaucaaguccuggcgcaacaacauccugcggacgcaggagagcgagugcgccugcgugaacggguccugcuucaccgugaugaccgacggcccgagcgacggccaggcguccuacaagaucuuccgcaucgagaaggggaagaucgucaagagcguggagaugaacgcccccaacuaccacuacgaggagugcuccugcuaccccgacagcuccgagaucacgugcgugugccgggacaacuggcacggcagcaaccgccccugggucuccuucaaccagaaccucgaguaccagaucggguacaucugcagcggcaucuucggggacaacccgcggcccaacgacaagaccggcuccugcggccccgugagcuccaacggggccaacggcgugaagggguucagcuucaaguacggcaacggggucuggaucggccgcaccaagagcaucuccagccggaacggcuucgagaugaucugggaccccaacggguggaccggcaccgacaacaacuucuccaucaagcaggacaucguggggaucaacgaguggagcggcuacuccgggagcuucgugcagcacccggagcugacgggccuggacugcauccgccccugcuucugggucgagcucauccggggccgccccaaggagaacaccaucuggaccuccgggagcuccaucagcuucugcggcgugaacuccgacaccgucggguggagcuggcccgacggcgccgagcugccguucacgaucgacaaguga

SEQ ID NO: 83509 - RNA, 1410 nt, Artificial Sequence; identical to SEQ ID NO: 80762
  derived and/or modified CDS sequence (opt1) from neuraminidase__InfluenzaA__ADM14620

SEQ ID NO: 83510 - RNA, 1410 nt, Artificial Sequence; identical to SEQ ID NO: 80762
  derived and/or modified CDS sequence (opt1) from neuraminidase__InfluenzaA__ADM14629

SEQ ID NO: 83511 - RNA, 1410 nt, Artificial Sequence; identical to SEQ ID NO: 80762
  derived and/or modified CDS sequence (opt1) from neuraminidase__InfluenzaA__ADM14639

SEQ ID NO: 83512 - RNA, 1410 nt, Artificial Sequence; identical to SEQ ID NO: 80762
  derived and/or modified CDS sequence (opt1) from neuraminidase__InfluenzaA__ADM14657

SEQ ID NO: 83513 - RNA, 1410 nt, Artificial Sequence; identical to SEQ ID NO: 80762
  derived and/or modified CDS sequence (opt1) from neuraminidase__InfluenzaA__ADM14666

SEQ ID NO: 83514 - RNA, 1410 nt, Artificial Sequence; identical to SEQ ID NO: 80762
  derived and/or modified CDS sequence (opt1) from neuraminidase__InfluenzaA__ADM14684

SEQ ID NO: 83515 - RNA, 1410 nt, Artificial Sequence
  derived and/or modified CDS sequence (opt1) from neuraminidase__InfluenzaA__ADM14693
augaaccccaaccagaagaugaucaccaucggcagcgugugcaugaccaucgggauggccaaccugauccuccagaucggcaacaucaucuccaucuggaucagccacuccauccagcuggggaaccagaaccagaucgagacgugcaaccagagcgucaucaccuacgagaacaacaccugggugaaccagaccuacgugaacaucuccaacacgaacuucgccgcgggccagagcgucguguccgugaagcuggccgggaacagcucccucugcccggucagcggcugggccaucuacuccaaggacaacagcauccgcaucggcuccaagggggacguguucgugauccgggagcccuucaucagcugcagcccccuggagugccgcaccuucuuccugacccagggcgcccuccugaacgacaagcacuccaacgggaccaucaaggaccggucccccuaccgcacgcugaugagcugcccgaucggcgagguccccucccccuacaacagccgguucgagagcguggccugguccgcgagcgccugccacgacgggaucaacuggcucaccaucggcaucuccggccccgacaacggggccguggccguccugaaguacaacggcaucaucaccgacaccaucaagagcuggcgcaacaacauccugcggacgcaggaguccgagugcgcgugcgugaacgggagcugcuucaccgugaugaccgacggcccguccgacggccaggccagcuacaagaucuuccgcaucgagaaggggaagaucgucaaguccguggagaugaacgcccccaacuaccacuacgaggagugcagcugcuaccccgacuccagcgagaucacgugcgugugccgggacaacuggcacggcuccaaccgccccugggucagcuucaaccagaaccucgaguaccagaucggguacaucugcuccggcaucuucggggacaacccgcggcccaacgacaagaccggcagcugcggccccguguccagcaacggggccaacggcgugaagggguucuccuucaaguacggcaacggggucuggaucggccgcaccaagagcaucagcucccggaacggcuucgagaugaucugggaccccaacggguggaccggcaccgacaacaacuucagcaucaagcaggacaucguggggaucaacgagugguccggcuacagcggguccuucgugcagcacccggagcugacgggccuggacugcauccgccccugcuucugggucgagcucauccggggccgccccaaggagaacaccaucuggaccagcggguccagcaucuccuucugcggcgugaacagcgacaccgucgggugguccuggcccgacggcgccgagcugccguucacgaucgacaaguga

SEQ ID NO: 83516 - RNA, 1410 nt, Artificial Sequence
  derived and/or modified CDS sequence (opt1) from neuraminidase__InfluenzaA__ADM14702
augaaccccaaccagaagaucaucaccaucggcagcgugugcaugaccaucgggauggccaaccugauccuccagaucggcaacaucaucuccaucuggaucagccacuccauccagcuggggaaccagaaccagaucgagacgugcaaccagagcgucaucaccuacgagaacaacaccugggugaaccagaccuacgugaacaucuccaacacgaacuucgccgcgggccagagcgucguguccgugaagcuggccgggaacagcucccucugcccggucagcggcugggccaucuacuccaaggacaacagcauccgcaucggcuccaagggggacguguucgugauccgggagcccuucaucagcugcucccaccuggagugccgcaccuucuuccugacccagggcgcccuccugaacgacaagcacagcaacgggaccaucaaggaccggucccccuaccgcacgcugaugagcugccccaucggcgaggucccgucccccuacaacagccgguucgagagcguggccugguccgcgagcgccugccacgacgggaucaacuggcucaccaucggcaucuccggccccgacaacggggccguggccguccugaaguacaacggcaucaucaccgacaccaucaagagcuggcgcaacaacauccugcggacgcaggaguccgagugcgcgugcgugaacgggagcugcuucaccgugaugaccgacggccccuccgacggccaggccagcuacaagaucuuccgcaucgagaaggggaagaucgucaaguccguggagaugaacgccccgaacuaccacuacgaggagugcagcugcuaccccgacuccagcgagaucacgugcgugugccgggacaacuggcacggcuccaaccgccccugggucagcuucaaccagaaccucgaguaccagaucggguacaucugcuccggcaucuucggggacaacccccggccgaacgacaagaccggcagcugcggccccguguccagcaacggggccaacggcgugaagggguucuccuucaaguacggcaacggggccuggaucggccgcaccaagagcaccagcucccggaacggcuucgagaugaucugggaccccaacggguggaccggcacggacaacaacuucagcaucaagcaggacaucgucgggaucaacgagugguccggcuacagcggguccuucgugcagcaccccgagcugaccggccuggacugcauccgcccgugcuucuggguggagcucauccggggccgccccaaggagaacaccaucuggaccagcggguccagcaucuccuucugcggcgucaacagcgacacgguggggugguccuggcccgacggcgcggagcugcccuucaccaucgacaaguga

SEQ ID NO: 83517 - RNA, 1410 nt, Artificial Sequence; identical to SEQ ID NO: 82664
  derived and/or modified CDS sequence (opt1) from neuraminidase__InfluenzaA__ADM14711

SEQ ID NO: 83518 - RNA, 1410 nt, Artificial Sequence
  derived and/or modified CDS sequence (opt1) from neuraminidase__InfluenzaA__ADM14720
augaaccccaaccagaagaucaucaccaucggcagcgugugcaugaccaucgggauggccaaccugauccuccagaucggcaacaucaucuccaucuggaucagccacuccauccagcuggggaaccagaaccagaucgagacgugcaaccagagcgucaucaccuacgagaacaacaccugggugaaccagaccuacgugaacaucuccaacacgaacuucgccgcgggccagagcgucguguccgugaagcuggccgggaacagcucccucugcccggucagcggcugggccaucuacuccaaggacaacagcauccgcaucggcuccaagggggacguguucgugauccgggagcccuucaucagcugcagcccccuggagugccgcaccuucuuccugacccagggcgcccuccugaacgacaagcacuccaacgggaccaucaaggaccggucccccuaccgcacgcugaugagcugcccgaucggcgagguccccucccccuacaacagccgguucgagagcguggccugguccgcgagcgccugccacgacgggaucaacuggcucaccaucggcaucuccggccccgacaacggggccguggccguccugaaguacaacggcaucaucaccgacaccaucaagagcuggcgcaacaacauccugcggacgcaggaguccgagugcgcgugcgugaacgggagcugcuucaccgugaugaccgacggcccguccgacggccaggccagcuacaagaucuuccgcaucgagaaggggaagaucgucaaguccguggagaugaacgcccccaacuaccacuacgaggagugcagcugcuaccccgacuccagcgagaucacgugcgugugccgggacaacuggcacggcuccaaccgccccugggucagcuucaaccagaaccucgaguaccagaucggguacaucugcuccggcguguucggggacaacccgcggcccaacgacaagaccggcagcugcggccccguguccagcaacggggccaacggcgucaagggguucuccuucaaguacggcaacgggguguggaucggccgcaccaagagcaucagcucccggaacggcuucgagaugaucugggaccccaacggguggaccggcaccgacaacaacuucagcaucaagcaggacaucguggggaucaacgagugguccggcuacagcggguccuucguccagcacccggagcugacgggccuggacugcauccgccccugcuucuggguggagcucauccggggccgccccaaggagaacaccaucuggaccagcggguccagcaucuccuucugcggcgucaacagcgacaccguggggugguccuggcccgacggcgccgagcugccguucacgaucgacaaguga

SEQ ID NO: 83519 - RNA, 1410 nt, Artificial Sequence
  derived and/or modified CDS sequence (opt1) from neuraminidase__InfluenzaA__ADM14730
augaaccccaaccagaagaucaucaccaucggcagcgugugcaugaccaucgggauggccaaccugauccuccagaucggcaacaucaucuccaucuggaucagccacuccauccagcuggggaaccagaaccagaucgagacgugcaaccagagcaucaucaccuacgagaacaacaccugggucaaccagaccuacgugaacaucuccaacacgaacuucgccgcgggccagagcguggucuccgugaagcuggccgggaacagcucccucugcccggugagcggcugggccgucuacuccaaggacaacagcauccgcaucggcuccaagggggacgugcuggugauccgggagcccuucaucagcugcagcccccuggagugccgcaccuucuuccucacccagggcgcccugcugaacgacaagcacuccaacgggaccaucaaggaccggucccccuaccgcacgcucaugagcugcccgaucggcgagguccccucccccuacaacagccgguucgagagcguggccugguccgcgagcgccugccacgacgggaucaacuggcugaccaucggcaucuccggccccgacaacggggccguggccguccugaaguacaacggcaucaucaccgacaccaucaagagcuggcgcaacaacauccuccggacgcaggaguccgagugcgcgugcgugaacgggagcugcuucaccgugaugaccgacggcccguccgacggccaggccagcuacaagaucuuccgcaucgagaaggggaagaucgucaaguccguggagaugaacgcccccaacuaccacuacgaggagugcagcugcuaccccgacuccagcgagaucacgugcgugugccgggacaacuggcacggcuccaaccgccccugggucagcuucaaccagaaccuggaguaccagaucggguacaucugcuccggcaucuucggggacaacccgcggcccaacgacaagaccggcagcugcggccccguguccagcaacggggccaacggcgugaagggguucuccuucaaguacggcaacggggucuggaucggccgcaccaagagcaucagcucccggagcggcuucgagaugaucugggaccccaacggguggaccggcaccgacaacaacuucuccaucaagcaggacaucguggggaucaacgaguggagcggcuacuccgggagcuucgugcagcacccggagcugacgggccucgacugcauccgccccugcuucugggucgagcugauccggggccgccccaaggagaacaccaucuggaccuccgggagcuccaucagcuucugcggcgugaacuccgacaccgucggguggagcuggcccgacggcgccgagcugccguucacgaucgacaaguga

SEQ ID NO: 83520 - RNA, 1350 nt, Artificial Sequence
  derived and/or modified CDS sequence (opt1) from neuraminidase__InfluenzaA__ADM14748
augaaccccaaccagaagaucaucaccaucggcagcgugugcaugaccaucgggauggccaaccugauccuccagaucggcaacaucaucuccaucuggaucagccacuccauccagcuggggaaccagaaccagaucgagacgugcaaccagagcgucaucaccuacgagaacaacaccugggugaaccagaccuacgugaacaucuccaacacgaacuucgccgcgggccagagcgucguguccgugaagcuggccgggaacagcucccucugcccggucagcggcugggccaucuacuccaaggacaacagcauccgcaucugccggaccuucuuccugacccagggcgcccugcucaacgacaagcacuccaacgggaccaucaaggaccgcagccccuaccggacgcugauguccugccccaucggcgaggugcccagcccguacaacucccgcuucgagagcguggccugguccgcgagcgccugccacgacgggaucaacuggcugaccaucggcaucagcgggcccgacaacggcgccgucgccgugcucaaguacaacggcaucaucaccgacaccaucaaguccuggcggaacaacauccugcgcacgcaggagagcgagugcgcgugcgugaacggguccugcuucaccgucaugaccgacggccccagcgacgggcaggccuccuacaagaucuuccggaucgagaagggcaagaucgucaagagcguggagaugaacgcccccaacuaccacuacgaggagugcuccugcuacccggacagcuccgagaucacgugcgugugccgcgacaacuggcacggcagcaaccggcccuggguguccuucaaccagaaccuggaguaccagaucggguacaucugcagcggcaucuucggggacaacccccgccccaacgacaagaccggcuccugcgggccggugagcuccaacggcgccaacggcgucaagggguucagcuucaaguacggcaacgggguguggaucggccggaccaaguccaucagcucccgcaacggguucgagaugaucugggaccccaacggcuggaccggcaccgacaacaacuucagcaucaagcaggacaucguggggaucaacgaguggagcggcuacuccgggagcuucguccagcaccccgagcucacgggccuggacugcauccggcccugcuucuggguggagcugauccgcgggcggccgaaggagaacaccaucuggaccuccggcagcuccaucagcuucugcggcgugaacuccgacaccgucggguggagcuggcccgacggcgccgagcuccccuucacgaucgacaaguga

SEQ ID NO: 83521 - RNA, 1410 nt, Artificial Sequence
  derived and/or modified CDS sequence (opt1) from neuraminidase__InfluenzaA__ADM14758
augaaccccaaccagaagaucaucaccaucggcagcgugugcaugaccaucgggauggccaaccugauccuccagaucggcaacaucaucuccaucuggaucagccacuccauccagcuggggaaccagaaccagaucgagacgugcaaccagagcgucaucaccuacgagaacaacaccugggugaaccagaccuacgugaacaucuccaacacgaacuucgccgcgggccagagcgucguguccgugaagcuggccgggaacagcucccucugcccggucagcggcugggccaucuacuccaaggacaacagcauccgcaucggcuccaagggggacguguucgugauccgggagcccuucaucagcugcagcccccuggagugccgcaccuucuuccugacccagggcgcccuccugaacgacaagcacuccaacgggaccaucaaggaccggucccccuaccgcacgcugaugagcugcccgaucggcgagguccccucccccuacaacagccgguucgagagcguggccugguccgcgagcgccugccacgacgggaucaacuggcucaccaucggcaucuccggccccgacaacggggccguggccguccugaaguacaacggcaucaucaccgacaccaucaagagcuggcgcaacaacauccugcggacgcaggaguccgagugcgcgugcgugaacgggagcugcuucaccgugaugaccgacggcccguccgacggccaggccagcuacaagaucuuccgcaucgagaaggggaagaucgucaaguccguggagaucaacgcccccaacuaccacuacgaggagugcagcugcuaccccgacuccagcgagaucacgugcgugugccgggacaacuggcacggcuccaaccgccccugggucagcuucaaccagaaccucgaguaccagaucggguacaucugcuccggcaucuucggggacaacccgcggcccaacgacaagaccggcagcugcggccccguguccagcaacggggccaacggcgugaagggguucuccuucaaguacggcaacggggucuggaucggccgcaccaagagcaucagcucccggaacggcuucgagaugaucugggaccccaacggguggaccggcaccgacaacaacuucagcaucaagcaggacaucguggggaucaacgagugguccggcuacagcggguccuucgugcagcacccggagcugacgggccuggacugcauccgccccugcuucugggucgagcucauccggggccgccccaaggagaacaccaucuggaccagcggguccagcaucuccuucugcggcgugaacagcgacaccgucgggugguccuggcccgacggcgccgagcugccguucacgaucgacaaguga

SEQ ID NO: 83522 - RNA, 1410 nt, Artificial Sequence; identical to SEQ ID NO: 83521
  derived and/or modified CDS sequence (opt1) from neuraminidase__InfluenzaA__ADM14767

SEQ ID NO: 83523 - RNA, 1410 nt, Artificial Sequence; identical to SEQ ID NO: 80762
  derived and/or modified CDS sequence (opt1) from neuraminidase__InfluenzaA__ADM14777

SEQ ID NO: 83524 - RNA, 1410 nt, Artificial Sequence; identical to SEQ ID NO: 80762
  derived and/or modified CDS sequence (opt1) from neuraminidase__InfluenzaA__ADM14814

SEQ ID NO: 83525 - RNA, 1410 nt, Artificial Sequence; identical to SEQ ID NO: 80762
  derived and/or modified CDS sequence (opt1) from neuraminidase__InfluenzaA__ADM14823

SEQ ID NO: 83526 - RNA, 1410 nt, Artificial Sequence; identical to SEQ ID NO: 82385
  derived and/or modified CDS sequence (opt1) from neuraminidase__InfluenzaA__ADM14841

SEQ ID NO: 83527 - RNA, 1410 nt, Artificial Sequence; identical to SEQ ID NO: 82385
  derived and/or modified CDS sequence (opt1) from neuraminidase__InfluenzaA__ADM14859

SEQ ID NO: 83528 - RNA, 1410 nt, Artificial Sequence; identical to SEQ ID NO: 81899
  derived and/or modified CDS sequence (opt1) from neuraminidase__InfluenzaA__ADM14868

SEQ ID NO: 83529 - RNA, 1410 nt, Artificial Sequence; identical to SEQ ID NO: 82385
  derived and/or modified CDS sequence (opt1) from neuraminidase__InfluenzaA__ADM14878

SEQ ID NO: 83530 - RNA, 1410 nt, Artificial Sequence; identical to SEQ ID NO: 80762
  derived and/or modified CDS sequence (opt1) from neuraminidase__InfluenzaA__ADM14887

SEQ ID NO: 83531 - RNA, 1410 nt, Artificial Sequence
  derived and/or modified CDS sequence (opt1) from neuraminidase__InfluenzaA__ADM14896
augaaccccaaccagaagaucaucaccaucggcagcgugugcaugaccaucgggauggccaaccugauccuccagaucggcaacaucaucuccaucuggaucagccacuccauccagcuggggaaccagaaccagaucgagacgugcaaccagagcgucaucaccuacgagaacaacaccugggugaaccagaccuacgugaacaucuccaacacgaacuucgccgcgggccagagcgucguguccgugaagcuggccgggaacagcucccucugcccggucagcggcugggccaucuacuccaaggacaacagcauccgcaucggcuccaagggggacgugcuggugauccgggagcccuucaucagcugcagcccccuggagugccgcaccuucuuccucacccagggcgcccugcugaacgacaagcacuccaacgggaccaucaaggaccggucccccuaccgcacgcucaugagcugcccgaucggcgagguccccucccccuacaacagccgguucgagagcguggccugguccgcgagcgccugccacgacgggaucaacuggcugaccaucggcaucuccggccccgacaacggggccguggccguccugaaguacaacggcaucaucaccgacaccaucaagagcuggcgcaacaacauccuccggacgcaggaguccgagugcgcgugcgugaacgggagcugcuucaccgugaugaccgacggcccguccgacggccaggccagcuacaagaucuuccgcaucgagaaggggaagaucgucaaguccguggagaugaacgcccccaacuaccacuacgaggagugcagcugcuaccccgacuccagcgagaucacgugcgugugccgggacaacuggcacggcuccaaccgccccugggucagcuucaaccagaaccuggaguaccagaucggguacaucugcuccggcaucuucggggacaacccgcggcccaacgacaagaccggcagcugcggccccguguccagcaacggggccaacggcgugaagggguucuccuucaaguacggcaacggggucuggaucggccgcaccaagagcaucagcucccggaacggcuucgagaugaucugggaccccaacggguggaccggcaccgacaacaacuucagcaucaagcaggacaucguggggaucaacgagugguccggcuacagcggguccuucgugcagcacccggagcugacgggccucgacugcauccgccccugcuucugggucgagcugauccggggccgccccaaggagaacaccaucuggaccagcggguccagcaucuccuucugcggcgugaacagcgacaccgucgggugguccuggcccgacggcgccgagcugccguucacgaucgacaaguga

SEQ ID NO: 83532 - RNA, 1410 nt, Artificial Sequence; identical to SEQ ID NO: 80762
  derived and/or modified CDS sequence (opt1) from neuraminidase__InfluenzaA__ADM14905

SEQ ID NO: 83533 - RNA, 1410 nt, Artificial Sequence; identical to SEQ ID NO: 80762
  derived and/or modified CDS sequence (opt1) from neuraminidase__InfluenzaA__ADM14923

SEQ ID NO: 83534 - RNA, 1410 nt, Artificial Sequence; identical to SEQ ID NO: 82050
  derived and/or modified CDS sequence (opt1) from neuraminidase__InfluenzaA__ADM14932

SEQ ID NO: 83535 - RNA, 1410 nt, Artificial Sequence; identical to SEQ ID NO: 80762
  derived and/or modified CDS sequence (opt1) from neuraminidase__InfluenzaA__ADM14950

SEQ ID NO: 83536 - RNA, 1410 nt, Artificial Sequence; identical to SEQ ID NO: 81780
  derived and/or modified CDS sequence (opt1) from neuraminidase__InfluenzaA__ADM14959

SEQ ID NO: 83537 - RNA, 1410 nt, Artificial Sequence
  derived and/or modified CDS sequence (opt1) from neuraminidase__InfluenzaA__ADM14977
augaaccccaaccagaagaucaucaccaucggcagcgugugcaugaccaucgggauggccaaccugauccuccagaucggcaacaucaucuccaucuggaucagccacuccauccagcuggggaaccagaaccagaucgagacgugcaaccagagcgucaucaccuacgagaacaacaccugggugaaccagaccuacgugaacaucuccaacacgaacuucgccgcgggccagagcgucguguccgugaagcuggccgggaacagcucccucugcccggucaacggcugggccaucuacagcaaggacaacuccgugcgcaucggcagcaagggggacguguucgucauccgggagcccuucaucuccugcagcccccuggagugccgcaccuucuuccugacccagggcgcccuccugaacgacaagcacuccaacgggaccaucaaggaccggagccccuaccgcacgcugauguccugcccgaucggcgaggugcccagccccuacaacucccgguucgagagcguggccuggagcgcguccgccugccacgacgggaucaacuggcucaccaucggcaucagcggccccgacaacggggccgucgccgugcugaaguacaacggcaucaucaccgacaccaucaaguccuggcgcaacaacauccugcggacgcaggagagcgagugcgcgugcgugaacggguccugcuucaccgucaugaccgacggcccgagcaacggccaggccuccuacaagaucuuccgcaucgagaaggggaagaucgucaagagcguggagaugaacgcccccaacuaccacuacgaggagugcuccugcuaccccgacagcuccgagaucacgugcgugugccgggacaacuggcacggcagcaaccgccccuggguguccuucaaccagaaccucgaguaccagaucggguacaucugcagcggcaucuucggggacaacccgcggcccaacgacaagaccggcuccugcggccccgugagcuccaacggggccaacggcgucaagggguucagcuucaaguacggcaacgggguguggaucggccgcaccaaguccaucagcagccggaacggcuucgagaugaucugggaccccaacggguggaccggcaccgacaacaacuucuccaucaagcaggacaucguggggaucaacgaguggagcggcuacuccgggagcuucguccagcacccggagcugacgggccuggacugcauccgccccugcuucuggguggagcucauccggggccgccccaaggagaacaccaucuggaccuccgggagcuccaucagcuucugcggcgucaacuccgacaccgugggguggagcuggcccgacggcgccgagcugccguucacgaucgacaaguga

SEQ ID NO: 83538 - RNA, 1410 nt, Artificial Sequence; identical to SEQ ID NO: 82385
  derived and/or modified CDS sequence (opt1) from neuraminidase__InfluenzaA__ADM14987

SEQ ID NO: 83539 - RNA, 1410 nt, Artificial Sequence; identical to SEQ ID NO: 81929
  derived and/or modified CDS sequence (opt1) from neuraminidase__InfluenzaA__ADM26787

SEQ ID NO: 83540 - RNA, 1410 nt, Artificial Sequence; identical to SEQ ID NO: 82508
  derived and/or modified CDS sequence (opt1) from neuraminidase__InfluenzaA__ADM26798

SEQ ID NO: 83541 - RNA, 1410 nt, Artificial Sequence
  derived and/or modified CDS sequence (opt1) from neuraminidase__InfluenzaA__ADM26809
augaaccccaaccagaagaucaucaccaucggcagcgugucccugaccaucagcacgaucugcuucuucaugcagaucgccauccucaucaccaccgucacccugcacuucaagcaguacgaguucaacuccccgcccaacaaccaggugaugcugugcgagcccacgaucaucgagcgcaacaucaccgagaucguguaccucaccaacaccacgaucgagaaggagaucugccccaagcuggccgaguaccggaacuggagcaagccgcagugcgacaucaccggguucgcgcccuucuccaaggacaacagcauccgccuguccgccggcggggacaucugggucacccgggagcccuacgugagcugcgaccccgacaagugcuaccaguucgcccucggccaggggaccacggugaacaacguccacuccaacaacaccgugcgcgaccggaccccguaccgcacccugcugaugaacgagcucggcgugcccuuccaccugggcacgaagcaggucugcaucgccuggagcuccagcuccugccacgacgggaaggccuggcugcacgugugcaucaccggcgacgacaagaacgcgaccgccagcuucaucuacaacgggcggcucguggacuccgucgugagcugguccaaggagauccugcgcacccaggagagcgagugcgugugcaucaacggcacgugcaccgucgugaugaccgacggguccgccagcggcaaggccgacaccaagauccuguucaucgaggagggcaagaucgugcacacgagcacccucuccgggagcgcgcagcacgucgaggagugcuccugcuacccccgguaccccggcgugcgcugcgugugccgggacaacuggaaggggagcaaccgcccgaucgucgacaucaacaucaaggaccacuccaucgugagcuccuacgugugcagcggccuggucggcgacacgccccggaagaacgacuccagcuccagcucccacugccuggaccccaacaacgaggagggcgggcacggggugaagggcugggccuucgacgacgggaacgacgucuggaugggccgcaccaucagcgagaagucccggcucggcuacgagaccuucaaggugaucgagggguggagcaaccacaaguccaagcugcagaucaaccgccaggugaucgucgaccggggcaaccgcagcggguacuccggcaucuucagcguggagggcaagagcugcaucaaccggugcuucuacguggagcugauccgcgggcggaaggaggagaccgagguccucuggaccuccaacagcaucgugguguucugcggcaccuccgggacguacggcaccgggagcuggcccgacggcgccgaccugaaccugaugccgaucuga

SEQ ID NO: 83542 - RNA, 1410 nt, Artificial Sequence
  derived and/or modified CDS sequence (opt1) from neuraminidase__InfluenzaA__ADM26820
augaaccccaaccagaagaucaucaccaucggcagcgugucccugaccaucagcacgaucugcuucuucaugcagaucgccauccucaucaccaccgucacccugcacuucaagcaguacgaguucaacuccccgcccaacaaccaggugaugcugugcgagcccacgaucaucgagcgcaacaucaccgagaucguguaccucaccaacaccacgaucgagaaggagaucugccccaagcuggccgaguaccggaacuggagcaagccgcagugcgacaucaccggguucgcgcccuucuccaaggacaacagcauccgccuguccgccggcggggacaucugggucacccgggagcccuacgugagcugcgaccccgacaagugcuaccaguucgcccucggccaggggaccacgcugaacaacgugcacuccaacaacaccguccgcgaccggaccccguaccgcacccugcucaugaacgagcugggcgugcccuuccaccugggcacgaagcaggucugcaucgccuggagcuccagcuccugccacgacgggaaggccuggcuccacgugugcaucaccggcgacgacaagaacgcgaccgccagcuucaucuacaacgggcggcugguggacuccguggucagcugguccaaggagauccugcgcacccaggagagcgagugcgugugcaucaacggcacgugcaccguggucaugaccgacggguccgccagcggcaaggccgacaccaagauccucuucaucgaggagggcaagaucgugcacacgagcacccuguccgggagcgcgcagcacguggaggagugcuccugcuacccccgguaccccggcguccgcugcgugugccgggacaacuggaaggggagcaaccgcccgaucguggacaucaacaucaaggaccacuccaucgucagcuccuacgugugcagcggccuggugggcgacacgccccggaagaacgacuccagcuccagcucccacugccucgaccccaacaacgaggagggcgggcacggggucaagggcugggccuucgacgacgggaacgacguguggaugggccgcaccaucaacgagaccagccggcugggcuacgagaccuucaaggucaucgaggggugguccaaccccaagagcaagcugcagaucaaccgccaggugaucguggaccggggcaaccgcuccggguacagcggcaucuucuccgucgagggcaagagcugcaucaaccggugcuucuacguggagcucauccgcgggcggaaggaggagaccgaggugcuguggaccagcaacuccaucgucguguucugcggcacgagcgggaccuacggcaccggguccuggccggacggcgccgaccugaaccucaugcccaucuga

SEQ ID NO: 83543 - RNA, 1350 nt, Artificial Sequence
  derived and/or modified CDS sequence (opt1) from neuraminidase__InfluenzaA__ADM31427
augaaccccaaccagaagaucaucaccaucggcagcgugugcaugaucaucgggaucgucucccugaugcuccagaucggcaacaugaucagcaucugggugucccacagcauccagaccgggaaccagcaccaggccgagccgauccgcaacacgaacuuccugaccgagaacgccguggcguccgucacccuggccggcaacagcucccucugccccauccgggggugggccgugcacagcaaggacaacuccauccgcaucggcagcaagggcgacguguucgucauccgggagcccuucaucuccugcagccacauggagugccgcaccuucuuccugacgcagggggcccugcucaacgacaagcacuccaacggcaccgugaaggaccggagcccccaccgcacccugauguccugcccggugggggaggcccccagccccuacaacucccgguucgagagcgucgcgugguccgccagcgccugccacgacggcaucagcuggcugaccaucgggaucuccggccccgacaacggcgccguggcggugcucaaguacaacgggaucaucacggacaccaucaagagcuggggcaacaacauccugcgcacccaggaguccgagugcgccugcgucaacgggagcugcuucaccgugaugacggacggcccguccaacggccaggccagcuacaagaucuucaagaucgagaaggggaagguggucaaguccguggagcugaacgcccccaacuaccacuacgaggagugcagcugcuaccccgacuccggcgagaucaucugcgugugccgggacaacuggcacgggagcaaccgccccugggucuccuucaaccagaaccucgaguaccagaucggcuacaucugcagcgggguguucggcgacaacccgcggcccaacgacggcaccggguccugcggccccaugagccccaacggggccuacggcaucaagggguucuccuucaaguacggcaacggcguguggaucgggcgcaccaagagcaccaacucccggagcggcuucgagaugaucugggacccgaacggguggacgggcaccgacuccgaguucagcgucaagcaggacaucguggcgaucaccgacuggagcggguacuccggcagcuucgugcagcaccccgagcugaccggccuggacugcauccgccccugcuucugggucgagcucauccgggggcgccccaaggaguccacgaucuggaccagcggcuccagcaucuccuucugcggggugaacagcgacaccgucuccuggagcuggccggacggcgccgagcugcccuucaccaucgacaaguga

SEQ ID NO: 83544 - RNA, 1410 nt, Artificial Sequence
  derived and/or modified CDS sequence (opt1) from neuraminidase__InfluenzaA__ADM31481
augaaccccaaccagaagaucaucaccaucggcagcgugugcaugaccaucgggauggccaaccugauccuccagaucggcaacaucaucuccaucuggaucagccacuccauccagcuggggaaccagaaccagaucgagacgugcaaccagagcgucaucaccuacgagaacaacaccugggugaaccagaccuacgugaacaucuccaacacgaacuucgccgcgggccagagcgucguguccgugaagcuggccgggaacagcucccucugcccggucagcggcugggccaucuacuccaaggacaacagcauccgcaucggcuccaagggggacguguucgugauccgggagcccuucaucagcugcagcccccuggagugccgcaccuucuuccugacccagggcgcccuccugaacgacaagcacuccaacgggaccaucaaggaccggucccccuaccgcacgcugaugagcugcccgaucggcgagguccccucccccuacaacagccgguucgagagcguggccugguccgcgagcgccugccacgacgggaucaacuggcucaccaucggcaucuccggccccgacaagggggccguggccguccugaaguacaacggcaucaucaccgacaccaucaagagcuggcgcaacaacauccugcggacgcaggaguccgagugcgcgugcgugaacgggagcugcuucaccgugaugaccgacggcccguccgacggccaggccagcuacaagaucuuccgcaucgagaaggggaagaucgucaaguccguggagaugaacgcccccaacuaccacuacgaggagugcagcugcuaccccgacuccagcgagaucacgugcgugugccgggacaacuggcacggcuccaaccgccccugggucagcuucaaccagaaccucgaguaccagaucggguacaucugcuccggcaucuucggggacaacccgcggcccaacgacaagaccggcagcugcggccccguguccagcaacggggccaacggcgugaagggguucuccuucaaguacggcaacggggucuggaucggccgcaccaagagcaucagcucccggaacggcuucgagaugaucugggaccccaacggguggaccggcaccgacaacaacuucagcaucaagcaggacaucguggggaucaacgagugguccggcuacagcggguccuucgugcagcacccggagcugacgggccuggacugcauccgccccugcuucugggucgagcucauccggggccgccccaaggagaacaccaucuggaccagcggguccagcaucuccuucugcggcgugaacagcgacaccgucgggugguccuggcccgacggcgccgagcugccguucacgaucgacaaguga

SEQ ID NO: 83545 - RNA, 1410 nt, Artificial Sequence; identical to SEQ ID NO: 81345
  derived and/or modified CDS sequence (opt1) from neuraminidase__InfluenzaA__ADM31491

SEQ ID NO: 83546 - RNA, 1410 nt, Artificial Sequence; identical to SEQ ID NO: 82967
  derived and/or modified CDS sequence (opt1) from neuraminidase__InfluenzaA__ADM31501

SEQ ID NO: 83547 - RNA, 1410 nt, Artificial Sequence; identical to SEQ ID NO: 80762
  derived and/or modified CDS sequence (opt1) from neuraminidase__InfluenzaA__ADM31511

SEQ ID NO: 83548 - RNA, 1410 nt, Artificial Sequence; identical to SEQ ID NO: 82963
  derived and/or modified CDS sequence (opt1) from neuraminidase__InfluenzaA__ADM31521

SEQ ID NO: 83549 - RNA, 1410 nt, Artificial Sequence; identical to SEQ ID NO: 80762
  derived and/or modified CDS sequence (opt1) from neuraminidase__InfluenzaA__ADM31531

SEQ ID NO: 83550 - RNA, 1410 nt, Artificial Sequence; identical to SEQ ID NO: 82050
  derived and/or modified CDS sequence (opt1) from neuraminidase__InfluenzaA__ADM31541

SEQ ID NO: 83551 - RNA, 1410 nt, Artificial Sequence; identical to SEQ ID NO: 80762
  derived and/or modified CDS sequence (opt1) from neuraminidase__InfluenzaA__ADM31551

SEQ ID NO: 83552 - RNA, 1410 nt, Artificial Sequence; identical to SEQ ID NO: 80762
  derived and/or modified CDS sequence (opt1) from neuraminidase__InfluenzaA__ADM31561

SEQ ID NO: 83553 - RNA, 1410 nt, Artificial Sequence; identical to SEQ ID NO: 80762
  derived and/or modified CDS sequence (opt1) from neuraminidase__InfluenzaA__ADM31571

SEQ ID NO: 83554 - RNA, 1410 nt, Artificial Sequence; identical to SEQ ID NO: 81939
  derived and/or modified CDS sequence (opt1) from neuraminidase__InfluenzaA__ADM31581

SEQ ID NO: 83555 - RNA, 1410 nt, Artificial Sequence; identical to SEQ ID NO: 80762
  derived and/or modified CDS sequence (opt1) from neuraminidase__InfluenzaA__ADM31601

SEQ ID NO: 83556 - RNA, 1410 nt, Artificial Sequence; identical to SEQ ID NO: 82050
  derived and/or modified CDS sequence (opt1) from neuraminidase__InfluenzaA__ADM31611

SEQ ID NO: 83557 - RNA, 1410 nt, Artificial Sequence
  derived and/or modified CDS sequence (opt1) from neuraminidase__InfluenzaA__ADM31621
augaaccccaaccagaagaucaucaccaucggcagcgugugcaugaccaucgggauggccaaccugauccuccagaucggcaacaucaucuccaucuggaucagccacuccauccagcuggggaaccagaaccagaucgagacgugcaaccagagcgucaucaccuacgagaacaacaccugggugaaccagaccuacgugaacaucuccaacacgaacuucgccgcgggccagagcgucguguccgugaagcuggccgggaacagcucccucugcccggucagcggcugggccaucuacuccaaggacaacagcauccgcaucggcuccaagggggacguguucgugauccgggagcccuucaucagcugcuccagccuggagugccgcaccuucuuccugacccagggcgcccuccugaacgacaagcacuccaacgggaccaucaaggaccggagccccuaccgcacgcugauguccugccccaucggcgaggucccgagccccuacaacagccgguucgaguccguggccuggagcgcguccgccugccacgacgggaucaacuggcucaccaucggcaucagcggccccgacaacggggccguggccguccugaaguacaacggcaucaucaccgacaccaucaaguccuggcgcaacaacauccugcggacgcaggagagcgagugcgcgugcgugaacggguccugcuucaccgugaugaccgacggccccagcgacggccaggccuccuacaagaucuuccgcaucgagaaggggaagaucgucaagagcguggagaugaacgccccgaacuaccacuacgaggagugcuccugcuaccccgacagcuccgagaucacgugcgugugccgggacaacuggcacggcagcaaccgccccugggucuccuucaaccagaaccucgaguaccagaucggguacaucugcagcggcaucuucggggacaacccccggccgaacgacaagaccggcuccugcggccccgugagcuccaacggggccaacggcgugaagggguucagcuucaaguacggcaacggggucuggaucggccgcaccaagagcaucuccagccggaacggcuucgagaugaucugggaccccaacggguggaccggcaccgacaacaacuucuccaucaagcaggacaucguggggaucaacgaguggagcggcuacuccgggagcuucgugcagcaccccgagcugacgggccuggacugcauccgcccgugcuucugggucgagcucauccggggccgccccaaggagaacaccaucuggaccuccgggagcuccaucagcuucugcggcgugaacuccgacaccgucggguggagcuggcccgacggcgccgagcugcccuucacgaucgacaaguga

SEQ ID NO: 83558 - RNA, 1410 nt, Artificial Sequence; identical to SEQ ID NO: 82050
  derived and/or modified CDS sequence (opt1) from neuraminidase__InfluenzaA__ADM31631

SEQ ID NO: 83559 - RNA, 1410 nt, Artificial Sequence; identical to SEQ ID NO: 81939
  derived and/or modified CDS sequence (opt1) from neuraminidase__InfluenzaA__ADM31641

SEQ ID NO: 83560 - RNA, 1410 nt, Artificial Sequence; identical to SEQ ID NO: 82224
  derived and/or modified CDS sequence (opt1) from neuraminidase__InfluenzaA__ADM31651

SEQ ID NO: 83561 - RNA, 1410 nt, Artificial Sequence; identical to SEQ ID NO: 81939
  derived and/or modified CDS sequence (opt1) from neuraminidase__InfluenzaA__ADM31661

SEQ ID NO: 83562 - RNA, 1410 nt, Artificial Sequence
  derived and/or modified CDS sequence (opt1) from neuraminidase__InfluenzaA__ADM31671
augaaccccaaccagaagaucaucaccaucggcagcgugugcaugaccaucgggauggccaaccugauccuccagaucggcaacaucaucuccaucuggaucagccacuccacgcagcuggggaaccagaaccagaucgagaccugcaaccagagcgucaucaccuacgagaacaacaccugggugaaccagacguacgugaacaucuccaacaccaacuucgccgcgggccagagcgucguguccgccaagcuggccgggaacagcucccucugcccggugagcggcugggccaucuacuccaaggacaacagcauccgcaucggcuccaagggggacgucuucgugauccgggagcccuucaucagcugcagcccccuggagugccgcaccuucuuccugacccagggcgcccuccugaacgacaagcacuccaacgggacgaucaaggaccggucccccuaccgcacccugaugagcugcccgaucggcgaggugcccucccccuacaacagccgguucgagagcgucgcgugguccgccagcgccugccacgacgggaucaacuggcucaccaucggcaucuccggccccgacaacggggccguggcggugcugaaguacaacggcaucaucaccgacacgaucaagagcuggcgcaacaacauccugcggacccaggaguccgagugcgccugcgucaacgggagcugcuucaccgugaugaccgacggcccguccgacggccaggccagcuacaagaucuuccgcaucgagaaggggaagaucgugaaguccgucgagaugaacgcccccaacuaccacuacgaggagugcagcugcuaccccgacuccagcgagaucacgugcgugugccgggacaacuggcacggcuccaaccgccccugggugagcuucaaccagaaccucgaguaccagaucggguacaucugcuccggcaucuucggggacaacccgcggcccaacgacaagaccggcagcugcggccccgucuccagcaacggggccaacggcgugaagggguucuccuucaaguacggcaacgggguguggaucggccgcaccaagagcaucagcucccggaacggcuucgagaugaucugggaccccaacggguggaccggcacggacaacaacuucagcaucaagcaggacaucgucgggaucaacgagugguccggcuacagcggguccuucgugcagcacccggagcugaccggccuggacugcauccgccccugcuucuggguggagcucauccggggccgccccaaggagaacaccaucuggaccagcggguccagcaucuccuucugcggcgucaacagcgacacgguggggugguccuggcccgacggcgcggagcugccguucaccaucgacaaguga

SEQ ID NO: 83563 - RNA, 1410 nt, Artificial Sequence; identical to SEQ ID NO: 82050
  derived and/or modified CDS sequence (opt1) from neuraminidase__InfluenzaA__ADM31681

SEQ ID NO: 83564 - RNA, 1410 nt, Artificial Sequence
  derived and/or modified CDS sequence (opt1) from neuraminidase__InfluenzaA__ADM31691
augaaccccaaccagaagauccugaccaucggcagcgugugcaugaccaucgggauggccaaccucauccugcagaucggcaacaucaucuccaucuggaucagccacuccauccagcuggggaaccagaaccagacggagaccugcaaccagagcgucaucaccuacgagaacaacaccugggugaaccagacguacgugaacaucuccaacaccaacuucgccgcgggccagagcgucguguccgugaagcucgccgggaacagcucccugugcccggucagcggcugggccaucuacuccaaggacaacagcauccgcaucggcuccaagggggacguguucgugauccgggagcccuucaucagcugcagcccccuggagugccgcaccuucuuccucacccagggcgcccugcugaacgacaagcacuccaacgggacgaucaaggaccggucccccuaccgcacccucaugagcugcccgaucggcgagguccccucccccuacaacagccgguucgagagcguggccugguccgcgagcgccugccacgacgggaucaacuggcugaccaucggcaucuccggccccgacaacggggccguggccguccugaaguacaacggcaucaucaccgacacgaucaagagcuggcgcaacaacauccuccggacccaggaguccgagugcgcgugcgugaacgggagcugcuucaccgugaugaccgacggcccguccgacggccaggccagcuacaagaucuuccgcaucgagaaggggaagaucgucaaguccguggagaugaacgcccccaacuaccacuacgaggagugcagcugcuaccccgacuccagcgagaucacgugcgugugccgggacaacuggcacggcuccaaccgccccugggucagcuucaaccagaaccuggaguaccagaucggguacaucugcuccggcaucuucggggacaacccgcggcccaacgacaagaccggcagcugcggccccguguccagcaacggggccaacggcgugaagggguucuccuucaaguacggcaacggggucuggaucggccgcaccaagagcaucagcucccggaacggcuucgagaugaucugggaccccaacggguggaccggcacggacaacaacuucagcaucaagcaggacaucguggggaucaacgagugguccggcuacagcggguccuucgugcagcacccggagcugaccggccucgacugcauccgccccugcuucugggucgagcugauccggggccgccccaaggagaacaccaucuggaccagcggguccagcaucuccuucugcggcgugaacagcgacacggucgggugguccuggcccgacggcgccgagcugccguucaccaucgacaaguga

SEQ ID NO: 83565 - RNA, 1410 nt, Artificial Sequence; identical to SEQ ID NO: 80762
  derived and/or modified CDS sequence (opt1) from neuraminidase__InfluenzaA__ADM31701

SEQ ID NO: 83566 - RNA, 1410 nt, Artificial Sequence; identical to SEQ ID NO: 80762
  derived and/or modified CDS sequence (opt1) from neuraminidase__InfluenzaA__ADM31711

SEQ ID NO: 83567 - RNA, 1410 nt, Artificial Sequence; identical to SEQ ID NO: 82050
  derived and/or modified CDS sequence (opt1) from neuraminidase__InfluenzaA__ADM31721

SEQ ID NO: 83568 - RNA, 1410 nt, Artificial Sequence
  derived and/or modified CDS sequence (opt1) from neuraminidase__InfluenzaA__ADM31731
augaaccccaaccagaagaucaucaucaucggcagcgugugcaugaccaucgggauggccaaccugauccuccagaucggcaacaucaucuccaucuggaucagccacuccauccagcuggggaaccagaaccagaucgagaccugcaaccagagcgucaucacguacgagaacaacaccugggugaaccagaccuacgugaacaucuccaacaccaacuucgccgcgggccagagcgucguguccgugaagcuggccgggaacagcucccucugcccggucagcggcugggccaucuacuccaaggacaacagcauccgcaucggcuccaagggggacguguucgugauccgggagcccuucaucagcugcagcccccuggagugccgcacguucuuccugacccagggcgcccuccugaacgacaagcacuccaacgggaccaucaaggaccggucccccuaccgcacccugaugagcugcccgaucggcgagguccccucccccuacaacagccgguucgagagcguggccugguccgcgagcgccugccacgacgggaucaacuggcucacgaucggcaucuccggccccgacaacggggccguggccguccugaaguacaacggcaucaucaccgacaccaucaagagcuggcgcaacaacauccugcggacccaggaguccgagugcgcgugcgugaacgggagcugcuucacggugaugaccgacggcccguccgacggccaggccagcuacaagaucuuccgcaucgagaaggggcggaucgucaaguccguggagaugaacgcccccaacuaccacuacgaggagugcagcugcuaccccgacuccagcgagaucacgugcgugugccgcgacaacuggcacggcuccaaccggcccugggucagcuucaaccagaaccucgaguaccagaucggguacaucugcuccggcaucuucggggacaacccgcgccccaacgacaagaccggcagcugcggccccguguccagcaacggggccaacggcgugaagggguucuccuucaaguacggcaacggggucuggaucggccggaccaagagcaucagcucccgcaacggcuucgagaugaucugggaccccaacggguggaccggcaccgacaacaacuucagcaucaagcaggacaucguggggaucaacgagugguccggcuacagcggguccuucgugcagcacccggagcugaccggccuggacugcauccggcccugcuucugggucgagcucauccgcggccggcccaaggagaacacgaucuggaccagcggguccagcaucuccuucugcggcgugaacagcgacaccgucgggugguccuggcccgacggcgccgagcugccguucaccaucgacaaguga

SEQ ID NO: 83569 - RNA, 1410 nt, Artificial Sequence; identical to SEQ ID NO: 83137
  derived and/or modified CDS sequence (opt1) from neuraminidase__InfluenzaA__ADM31741

SEQ ID NO: 83570 - RNA, 1410 nt, Artificial Sequence; identical to SEQ ID NO: 80762
  derived and/or modified CDS sequence (opt1) from neuraminidase__InfluenzaA__ADM31751

SEQ ID NO: 83571 - RNA, 1410 nt, Artificial Sequence
  derived and/or modified CDS sequence (opt1) from neuraminidase__InfluenzaA__ADM31761
augaaccccaaccagaagaucaucaccaucggcagcgugugcaugaccaucgggauggccaaccugauccuccagaucggcaacaucaucuccaucuggaucagccacuccauccagcuggggaaccagaaccagaucgagacgugcaaccagagcgucaucaccuacgagaacaacaccugggugaaccagaccuacgugaacaucuccaacacgaacuucgccgcgggccagagcgucguguccgugaagcuggccgggaacagcucccucugcccggucagcggcugggccaucuacuccaaggacaacagcauccgcaucggcuccaagggggacguguucgugauccgggagcccuucaucagcugcagcccccuggagugccgcaccuucuuccugacccagggcgcccuccugaacgacaagcacuccaacgggaccaucaaggaccggucccccuaccgcacgcugaugagcugcccgaucggcgagguccccucccccuacaacagccgguucgagagcguggccugguccgcgagcgccugccacgacgggaucaacuggcucaccaucggcaucuccggccccgacaacggggccguggccguccugaaguacaacggcaucaucaccgacaccaucaagagcuggcgcaacaacauccugcggacgcaggaguccgagugcgcgugcgugaacgggagcugcuucaccgugaugaccgacggcccguccgacggccaggccagcuacaagaucuuccgcaucgagaaggggaagaucgucaaguccguggagaugaacgcccccaacuaccacuacgaggagugcagcugcuaccccgacuccagcgagaucacgugcgugugccgggacaacuggcacggcuccaaccgccccugggucagcuucaaccacaaccucgaguaccagaucggguacaucugcuccggcaucuucggggacaacccgcggcccaacgacaagaccggcagcugcggccccguguccagcaacggggccaacggcgugaagggguucuccuucaaguacggcaacggggucuggaucggccgcaccaagagcaucagcucccggaacggcuucgagaugaucugggaccccaacggguggaccggcaccgacaacaaguucagcaucaagcaggacaucguggggaucuccgaguggagcggcuacuccgggagcuucgugcagcacccggagcugacgggccuggacugcauccgccccugcuucugggucgagcucauccggggccgccccaaggagaacaccaucuggaccuccgggagcuccaucagcuucugcggcgugaacuccgacaccgucggguggagcuggcccgacggcgccgagcugccguucacgaucgacaaguga

SEQ ID NO: 83572 - RNA, 1410 nt, Artificial Sequence
  derived and/or modified CDS sequence (opt1) from neuraminidase__InfluenzaA__ADM31771
augaaccccaaccagaagauccugaccaucggcagcgugugcaugaccaucgggauggccaaccucauccugcagaucggcaacaucaucuccaucuggaucagccacuccauccagcuggggaaccagaaccagacggagaccugcaaccagagcgucaucaucuacgagaacaacaccugggugaaccagaccuacgugaacaucuccaacacgaacuucgccgcgggccagagcgucguguccgugaagcucgccgggaacagcucccugugcccggucagcggcugggccaucuacuccaaggacaacagcauccgcaucggcuccaagggggacguguucgugauccgggagcccuucaucagcugcagcccccuggagugccgcaccuucuuccucacccagggcgcccugcugaacgacaagcacuccaacgggaccaucaaggaccggucccccuaccgcacgcucaugagcugcccgaucggcgagguccccucccccuacaacagccgguucgagagcguggccugguccgcgagcgccugccacgacgggaucaacuggcugaccaucggcaucuccggccccgacaacggggccguggccguccugaaguacaacggcaucaucaccgacaccaucaagagcuggcgcaacaacauccuccggacgcaggaguccgagugcgcgugcgugaacgggagcugcuucaccgugaugaccgacggcccguccgacggccaggccagcuacaagaucuuccgcaucgagaaggggaagaucgucaaguccguggagaugaacgcccccaacuaccacuacgaggagugcagcugcuaccccgacuccagcgagaucacgugcgugugccgggacaacuggcacggcuccaaccgccccugggucagcuucaaccagaaccuggaguaccagaucggguacaucugcuccggcaucuucggggacaacccgcggcccaacgacaagaccggcagcugcggccccguguccagcaacggggccaacggcgugaagggguucuccuucaaguacggcaacggggucuggaucggccgcaccaagagcaucagcucccggaacggcuucgagaugaucugggaccccaacggguggaccggcaccgacaacaacuucagcaucaagcaggacaucguggggaucaacgagugguccggcuacagcggguccuucgugcagcacccggagcugacgggccucgacugcauccgccccugcuucugggucgagcugauccggggccgccccaaggagaacaccaucuggaccagcggguccagcaucuccuucugcggcgugaacagcgacaccgucgggugguccuggcccgacggcgccgagcugccguucacgaucgacaaguga

SEQ ID NO: 83573 - RNA, 1410 nt, Artificial Sequence
  derived and/or modified CDS sequence (opt1) from neuraminidase__InfluenzaA__ADM31801
augaaccccaaccagaagaucaucaccaucggcagcgugugcaugaccaucgggauggccaaccugauccuccagaucggcaacaucaucuccaucuggaucagccacuccauccagcuggggaaccagaaccagaucgagacgugcaaccagagcgucaucaccuacgagaacaacaccugggugaaccagaccuacgugaacaucaacaacacgaacuucgccgcgggccaguccgucgugagcgugaagcuggccgggaacuccagccucugcccggucuccggcugggccaucuacagcaaggacaacuccauccgcaucggcagcaagggggacguguucgugauccgggagcccuucaucuccugcagcccccuggagugccgcaccuucuuccugacccagggcgcccuccugaacgacaagcacuccaacgggaccaucaaggaccggagccccuaccgcacgcugauguccugcccgaucggcgagguccccagccccuacaacucccgguucgagagcguggccuggagcgcguccgccugccacgacgggaucaacuggcucaccaucggcaucagcggccccgacaacggggccguggccguccugaaguacaacggcaucaucaccgacaccaucaaguccuggcgcaacaacauccugcggacgcaggagagcgagugcgcgugcgugaacggguccugcuucaccgugaugaccgacggcccgagcgacggccaggccuccuacaagaucuuccgcaucgagaaggggaagaucgucaagagcguggagaugaacgcccccaacuaccacuacgaggagugcuccugcuaccccgacagcuccgagaucacgugcgugugccgggacaacuggcacggcagcaaccgccccugggucuccuucaaccagaaccucgaguaccagaucggguacaucugcagcggcaucuucggggacaacccgcggcccaacgacaagaccggcuccugcggccccgugagcuccaacggggccaacggcgugaagggguucagcuucaaguacggcaacggggucuggaucggccgcaccaaguccaucagcagccggaacggcuucgagaugaucugggaccccaacggguggaccggcaccgacaacaaguucuccaucaagcaggacaucguggggaucaacgaguggagcggcuacuccgggagcuucgugcagcacccggagcugacgggccuggacugcauccgccccugcuucugggucgagcucauccggggccgccccaaggagaacaccaucuggaccuccgggagcuccaucagcuucugcggcgugaacuccgacaccgucggguggagcuggcccgacggcgccgagcugccguucacgaucgacaaguga

SEQ ID NO: 83574 - RNA, 1410 nt, Artificial Sequence
  derived and/or modified CDS sequence (opt1) from neuraminidase__InfluenzaA__ADM31811
augaaccccaaccagaagaucaucaccaucggcagcgugugcaugaccaucgggauggccaaccugauccuccagaucggcaacaucaucuccaucuggaucagccacuccauccagcuggggaaccagaaccagaucgagacgugcaaccagagcgucaucaccuacgagaacaacaccugggugaaccagaccuacgugaacaucuccaacacgaacuucgccgcgggccagagcgucguguccgugaaguucgccgggaacagcucccugugcccggucagcggcugggccaucuacuccaaggacaacagcauccgcaucggcuccaagggggacguguucgugauccgggagcccuucaucagcugcagcccccucgagugccgcaccuucuuccugacccagggcgcccugcucaacgacaagcacuccaacgggaccaucaaggaccggucccccuaccgcacgcugaugagcugcccgaucggcgagguccccucccccuacaacagccgguucgagagcguggccugguccgcgagcgccugccacgacgggaucaacuggcugaccaucggcaucuccggccccgacaacggggccguggccguccucaaguacaacggcaucaucaccgacaccaucaagagcuggcgcaacaacauccugcggacgcaggaguccgagugcgcgugcgugaacgggagcugcuucaccgugaugaccgacggcccguccgacggccaggccagcuacaagaucuuccgcaucgagaaggggaagaucgucaaguccguggagaugaacgcccccaacuaccacuacgaggagugcagcugcuaccccgacuccagcgagaucacgugcgugugccgggacaacuggcacggcuccaaccgccccugggucagcuucaaccagaaccuggaguaccagaucggguacaucugcuccggcaucuucggggacaacccgcggcccaacgacaagaccggcagcugcggccccguguccagcaacggggccaacggcgugaagggguucuccuucaaguacggcaacggggucuggaucggccgcaccaagagcaucagcucccggaacggcuucgagaugaucugggaccccaacggguggaccggcaccgacaacaaguucagcaucaagcaggacaucguggggaucaacgagugguccggcuacagcggguccuucgugcagcacccggagcucacgggccuggacugcauccgccccugcuucugggucgagcugauccggggccgccccaaggagaacaccaucuggaccagcggguccagcaucuccuucugcggcgugaacagcgacaccgucgggugguccuggcccgacggcgccgagcucccguucacgaucgacaaguga

SEQ ID NO: 83575 - RNA, 1410 nt, Artificial Sequence; identical to SEQ ID NO: 81939
  derived and/or modified CDS sequence (opt1) from neuraminidase__InfluenzaA__ADM31821

SEQ ID NO: 83576 - RNA, 1410 nt, Artificial Sequence; identical to SEQ ID NO: 80762
  derived and/or modified CDS sequence (opt1) from neuraminidase__InfluenzaA__ADM31831

SEQ ID NO: 83577 - RNA, 1410 nt, Artificial Sequence; identical to SEQ ID NO: 80762
  derived and/or modified CDS sequence (opt1) from neuraminidase__InfluenzaA__ADM31841

SEQ ID NO: 83578 - RNA, 1410 nt, Artificial Sequence
  derived and/or modified CDS sequence (opt1) from neuraminidase__InfluenzaA__ADM31851
augaaccccaaccagaagauccugaccaucggcagcgugugcaugaccaucgggauggccaaccucauccugcagaucggcaacaucaucuccaucuggaucagccacuccauccagcuggggaaccagaaccagacggagaccugcaaccagagcgucaucaccuacgagaacaacaccugggugaaccagacguacgugaacaucuccaacaccaacuucgccgcgggccagagcgucguguccgugaagcucgccgggaacagcucccugugcccggucagcggcugggccaucuacuccaaggacaacagcauccgcaucggcuccaagggggacguguucgugauccgggagcccuucaucagcugcagcccccuggagugccgcaccuucuuccucacccagggcgcccugcugaacgacaagcacuccaacgggacgaucaaggaccggucccccuaccgcacccucaugagcugcccgaucggcgagguccccucccccuacaacagccgguucgagagcguggccugguccgcgagcgccugccacgacgggaucaacuggcugaccaucggcaucuccggccccgacaacggggccguggccguccugaaguacaacggcaucaucaccgacacgaucaagagcuggcgcaacaacauccuccggacccaggaguccgagugcgcgugcgugaacgggagcugcuucaccgugaugaccgacggcccguccgacggccaggccagcuacaagaucuuccgcaucgagcgggggaagaucgucaaguccguggagaugaacgcccccaacuaccacuacgaggagugcagcugcuaccccgacuccagcgagaucacgugcgugugccgcgacaacuggcacggcuccaaccggcccugggucagcuucaaccagaaccuggaguaccagaucggguacaucugcuccggcaucuucggggacaacccgcgccccaacgacaagaccggcagcugcggccccguguccagcaacggggccaacggcgugaagggguucuccuucaaguacggcaacggggucuggaucggccggaccaagagcaucagcucccgcaacggcuucgagaugaucugggaccccaacggguggaccggcacggacaacaacuucagcaucaagcaggacaucguggggaucaacgagugguccggcuacagcggguccuucgugcagcacccggagcugaccggccucgacugcauccggcccugcuucugggucgagcugauccgcggccggcccaaggagaacaccaucuggaccagcggguccagcaucuccuucugcggcgugaacagcgacacggucgggugguccuggcccgacggcgccgagcugccguucaccaucgacaaguga

SEQ ID NO: 83579 - RNA, 1410 nt, Artificial Sequence; identical to SEQ ID NO: 80762
  derived and/or modified CDS sequence (opt1) from neuraminidase__InfluenzaA__ADM31861

SEQ ID NO: 83580 - RNA, 1410 nt, Artificial Sequence; identical to SEQ ID NO: 80762
  derived and/or modified CDS sequence (opt1) from neuraminidase__InfluenzaA__ADM31871

SEQ ID NO: 83581 - RNA, 1410 nt, Artificial Sequence
  derived and/or modified CDS sequence (opt1) from neuraminidase__InfluenzaA__ADM31881
augaaccccaaccagaagaucaucaccaucggcagcgugugcaugaccaucgggauggccaaccugauccuccagaucggcaacacgaucuccaucuggaucagccacuccauccagcuggggaaccagaaccagaucgagaccugcaaccagagcgucaucaccuacgagaacaacaccugggugaaccagacguacgugaacaucuccaacaccaacuucgccgcgggccagagcgucguguccgugaagcuggccgggaacagcucccucugcccggucagcggcugggccaucuacuccaaggacaacagcauccgcaucggcuccaagggggacguguucgugauccgggagcccuucaucagcugcagcccccuggagugccgcaccuucuuccugacccagggcgcccuccugaacgacaagcacuccaacgggacgaucaaggaccggucccccuaccgcacccugaugagcugcccgaucggcgagguccccucccccuacaacagccgguucgagagcguggccugguccgcgagcgccugccacgacgggaucaacuggcucaccaucggcaucuccggccccgacaacggggccguggccguccugaaguacaacggcaucaucaccgacacgaucaagagcuggcgcaacaacauccugcggacccaggaguccgagugcgcgugcgugaacgggagcugcuucaccgugaugaccgacggcccguccgacggccaggccagcuacaagaucuuccgcaucgagaaggggaagaucgucaaguccguggagaugaacgcccccaacuaccacuacgaggagugcagcugcuaccccgacuccagcgagaucacgugcgugugccgggacaacuggcacggcuccaaccgccccugggucagcuucaaccagaaccucgaguaccagaucggguacaucugcuccggcaucuucggggacaacccgcggcccaacgacaagaccggcagcugcggccccguguccagcaacggggccaacggcgugaagggguucuccuucaaguacggcaacggggucuggaucggccgcaccaagagcaucagcucccggaacggcuucgagaugaucugggaccccaacggguggaccggcacggacaacaacuucagcaucaagcaggacaucguggggaucaacgagugguccggcuacagcggguccuucgugcagcacccggagcugaccggccuggacugcauccgccccugcuucugggucgagcucauccggggccgccccaaggagaacaccaucuggaccagcggguccagcaucuccuucugcggcgugaacagcgacacggucgggugguccuggcccgacggcgccgagcugccguucaccaucgacaaguga

SEQ ID NO: 83582 - RNA, 1410 nt, Artificial Sequence; identical to SEQ ID NO: 80762
  derived and/or modified CDS sequence (opt1) from neuraminidase__InfluenzaA__ADM31891

SEQ ID NO: 83583 - RNA, 1410 nt, Artificial Sequence; identical to SEQ ID NO: 80752
  derived and/or modified CDS sequence (opt1) from neuraminidase__InfluenzaA__ADM31901

SEQ ID NO: 83584 - RNA, 1410 nt, Artificial Sequence; identical to SEQ ID NO: 81985
  derived and/or modified CDS sequence (opt1) from neuraminidase__InfluenzaA__ADM31911

SEQ ID NO: 83585 - RNA, 1410 nt, Artificial Sequence; identical to SEQ ID NO: 81985
  derived and/or modified CDS sequence (opt1) from neuraminidase__InfluenzaA__ADM31921

SEQ ID NO: 83586 - RNA, 1410 nt, Artificial Sequence; identical to SEQ ID NO: 82443
  derived and/or modified CDS sequence (opt1) from neuraminidase__InfluenzaA__ADM31931

SEQ ID NO: 83587 - RNA, 1410 nt, Artificial Sequence; identical to SEQ ID NO: 80752
  derived and/or modified CDS sequence (opt1) from neuraminidase__InfluenzaA__ADM31941

SEQ ID NO: 83588 - RNA, 1410 nt, Artificial Sequence; identical to SEQ ID NO: 82443
  derived and/or modified CDS sequence (opt1) from neuraminidase__InfluenzaA__ADM31951

SEQ ID NO: 83589 - RNA, 1410 nt, Artificial Sequence
  derived and/or modified CDS sequence (opt1) from neuraminidase__InfluenzaA__ADM31961
augaaccccaaccagaagaucaucaccaucggcagcgugugcauggccaucgggauggccaaccugauccuccagaucggcaacaucaucuccaucuggaucagccacuccauccagcuggggaaccagaaccagaucgagaccugcaaccagagcgucaucacguacgagaacaacaccugggugaaccagaccuacgugaacaucuccaacaccaacuucgcggccggccagagcgucguguccgugaagcuggccgggaacagcucccucugcccggucagcggcugggccaucuacuccaaggacaacagcauccgcaucggcuccaagggggacguguucgugauccgggagcccuucaucagcugcagcccccuggagugccgcacguucuuccugacccagggcgcccuccugaacgacaagcacuccaacgggaccaucaaggaccggucccccuaccgcacccugaugagcugcccgaucggcgagguccccucccccuacaacagccgguucgagagcguggcgugguccgccagcgccugccacgacgggaucaacuggcucacgaucggcaucuccggccccgacaacggggccguggcgguccugaaguacaacggcaucaucaccgacaccaucaagagcuggcgcaacaacauccugcggacccaggaguccgagugcgccugcgugaacgggagcugcuucacggugaugaccgacggcccguccgacggccaggccagcuacaagaucuuccgcaucgagaaggggaagaucgucaaguccguggagaugaacgcccccaacuaccacuacgaggagugcagcugcuaccccgacuccagcgagaucacgugcgugugccgggacaacuggcacggcuccaaccgccccugggucagcuucaaccagaaccucgaguaccagaucggguacaucugcuccggcaucuucggggacaacccgcggcccaacgacaagaccggcagcugcggccccguguccagcaacggggccaacggcgugaagggguucuccuucaaguacggcaacggggucuggaucggccgcaccaagagcaucagcucccggaacggcuucgagaugaucugggaccccaacggguggaccggcaccgacaacaacuucagcaucaagcaggacaucguggggaucaacgagugguccggcuacagcggguccuucgugcagcacccggagcugaccggccuggacugcauccgccccugcuucugggucgagcucauccggggccgccccaaggagaacacgaucuggaccagcggguccagcaucuccuucugcggcgugaacagcgacaccgucgggugguccuggcccgacggcgcggagcugccguucaccaucgacaaguga

SEQ ID NO: 83590 - RNA, 1410 nt, Artificial Sequence
  derived and/or modified CDS sequence (opt1) from neuraminidase__InfluenzaA__ADM31971
augaaccccaaccagaagaucaucaccaucggcagcgugugcaugaccaucgggauggccaaccugauccuccagaucggcaacaucaucuccaucuggaucagccacuccauccagcuggggaaccagaaccagaucgagacgugcaaccagagcgucaucaccuacgagaacaacaccugggugaaccagaccuacgugaacaucuccaacacgaacuucgccgcgggccagagcgucguguccaugaagcuggccgggaacagcucccucugcccggugagcggcugggccaucuacuccaaggacaacagcguccgcaucggcuccaagggggacguguucgugauccgggagcccuucaucagcugcagcccccuggagugccgcaccuucuuccugacccagggcgcccuccugaacgacaagcacuccaacgggaccaucaaggaccggucccccuaccgcacgcugaugagcugcccgaucggcgagguccccucccccuacaacagccgguucgagagcguggccugguccgcgagcgccugccacgacgggaucaacuggcucaccaucggcaucuccggccccgacaacggggccguggccguccugaaguacaacggcgugaucaccgacaccaucaagagcuggcgcaacaacauccugcggacgcaggaguccgagugcgcgugcgugaacgggagcugcuucaccgucaugaccgacggcccguccaacggccaggccagcuacaagaucuuccgcaucgagaaggggaagaucgugaaguccguggagaugaacgcccccaacuaccacuacgaggagugcagcugcuaccccgacuccagcgagaucacgugcgucugccgggacaacuggcacggcuccaaccgccccugggugagcuucaaccagaaccucgaguaccagaucggguacaucugcuccggcaucuucggggacaacccgcggcccaacgacaagaccggcagcugcggccccguguccagcaacggggccaacggcgucaagggguucuccuucaaguacggcaacgggguguggaucggccgcaccaagagcaucagcucccggaacggcuucgagaugaucugggaccccaacggguggaccggcaccgacaacaacuucagcaucaagcaggacaucguggggaucaacgagugguccggcuacagcggguccuucguccagcacccggagcugacgggccuggacugcauccgccccugcuucuggguggagcucauccggggccgccccaaggagaacaccaucuggaccagcggguccagcaucuccuucugcggcgucaacagcgacaccguggggugguccuggcccgacggcgccgagcugccguucacgaucgacaaguga

SEQ ID NO: 83591 - RNA, 1410 nt, Artificial Sequence; identical to SEQ ID NO: 81985
  derived and/or modified CDS sequence (opt1) from neuraminidase__InfluenzaA__ADM31981

SEQ ID NO: 83592 - RNA, 1410 nt, Artificial Sequence; identical to SEQ ID NO: 80752
  derived and/or modified CDS sequence (opt1) from neuraminidase__InfluenzaA__ADM31991

SEQ ID NO: 83593 - RNA, 1410 nt, Artificial Sequence; identical to SEQ ID NO: 80752
  derived and/or modified CDS sequence (opt1) from neuraminidase__InfluenzaA__ADM32001

SEQ ID NO: 83594 - RNA, 1410 nt, Artificial Sequence; identical to SEQ ID NO: 80752
  derived and/or modified CDS sequence (opt1) from neuraminidase__InfluenzaA__ADM32011

SEQ ID NO: 83595 - RNA, 1410 nt, Artificial Sequence; identical to SEQ ID NO: 80762
  derived and/or modified CDS sequence (opt1) from neuraminidase__InfluenzaA__ADM32021

SEQ ID NO: 83596 - RNA, 1410 nt, Artificial Sequence; identical to SEQ ID NO: 81732
  derived and/or modified CDS sequence (opt1) from neuraminidase__InfluenzaA__ADM32031

SEQ ID NO: 83597 - RNA, 1410 nt, Artificial Sequence; identical to SEQ ID NO: 82486
  derived and/or modified CDS sequence (opt1) from neuraminidase__InfluenzaA__ADM32051

SEQ ID NO: 83598 - RNA, 1410 nt, Artificial Sequence; identical to SEQ ID NO: 80762
  derived and/or modified CDS sequence (opt1) from neuraminidase__InfluenzaA__ADM32061

SEQ ID NO: 83599 - RNA, 1410 nt, Artificial Sequence; identical to SEQ ID NO: 80762
  derived and/or modified CDS sequence (opt1) from neuraminidase__InfluenzaA__ADM32071

SEQ ID NO: 83600 - RNA, 1410 nt, Artificial Sequence; identical to SEQ ID NO: 80762
  derived and/or modified CDS sequence (opt1) from neuraminidase__InfluenzaA__ADM32081

SEQ ID NO: 83601 - RNA, 1410 nt, Artificial Sequence; identical to SEQ ID NO: 81985
  derived and/or modified CDS sequence (opt1) from neuraminidase__InfluenzaA__ADM32091

SEQ ID NO: 83602 - RNA, 1410 nt, Artificial Sequence; identical to SEQ ID NO: 80762
  derived and/or modified CDS sequence (opt1) from neuraminidase__InfluenzaA__ADM32101

SEQ ID NO: 83603 - RNA, 1410 nt, Artificial Sequence; identical to SEQ ID NO: 80762
  derived and/or modified CDS sequence (opt1) from neuraminidase__InfluenzaA__ADM32111

SEQ ID NO: 83604 - RNA, 1410 nt, Artificial Sequence; identical to SEQ ID NO: 82443
  derived and/or modified CDS sequence (opt1) from neuraminidase__InfluenzaA__ADM32554

SEQ ID NO: 83605 - RNA, 1410 nt, Artificial Sequence; identical to SEQ ID NO: 80752
  derived and/or modified CDS sequence (opt1) from neuraminidase__InfluenzaA__ADM32564

SEQ ID NO: 83606 - RNA, 1410 nt, Artificial Sequence; identical to SEQ ID NO: 81985
  derived and/or modified CDS sequence (opt1) from neuraminidase__InfluenzaA__ADM32574

SEQ ID NO: 83607 - RNA, 1410 nt, Artificial Sequence; identical to SEQ ID NO: 80762
  derived and/or modified CDS sequence (opt1) from neuraminidase__InfluenzaA__ADM32584

SEQ ID NO: 83608 - RNA, 1410 nt, Artificial Sequence; identical to SEQ ID NO: 82443
  derived and/or modified CDS sequence (opt1) from neuraminidase__InfluenzaA__ADM32594

SEQ ID NO: 83609 - RNA, 1410 nt, Artificial Sequence; identical to SEQ ID NO: 80762
  derived and/or modified CDS sequence (opt1) from neuraminidase__InfluenzaA__ADM32604

SEQ ID NO: 83610 - RNA, 1410 nt, Artificial Sequence; identical to SEQ ID NO: 80762
  derived and/or modified CDS sequence (opt1) from neuraminidase__InfluenzaA__ADM32614

SEQ ID NO: 83611 - RNA, 1410 nt, Artificial Sequence; identical to SEQ ID NO: 80762
  derived and/or modified CDS sequence (opt1) from neuraminidase__InfluenzaA__ADM32624

SEQ ID NO: 83612 - RNA, 1410 nt, Artificial Sequence; identical to SEQ ID NO: 82443
  derived and/or modified CDS sequence (opt1) from neuraminidase__InfluenzaA__ADM32634

SEQ ID NO: 83613 - RNA, 1410 nt, Artificial Sequence; identical to SEQ ID NO: 80762
  derived and/or modified CDS sequence (opt1) from neuraminidase__InfluenzaA__ADM32644

SEQ ID NO: 83614 - RNA, 1410 nt, Artificial Sequence; identical to SEQ ID NO: 80762
  derived and/or modified CDS sequence (opt1) from neuraminidase__InfluenzaA__ADM32664

SEQ ID NO: 83615 - RNA, 1410 nt, Artificial Sequence; identical to SEQ ID NO: 81985
  derived and/or modified CDS sequence (opt1) from neuraminidase__InfluenzaA__ADM32674

SEQ ID NO: 83616 - RNA, 1410 nt, Artificial Sequence; identical to SEQ ID NO: 80762
  derived and/or modified CDS sequence (opt1) from neuraminidase__InfluenzaA__ADM32684

SEQ ID NO: 83617 - RNA, 1410 nt, Artificial Sequence; identical to SEQ ID NO: 80752
  derived and/or modified CDS sequence (opt1) from neuraminidase__InfluenzaA__ADM32694

SEQ ID NO: 83618 - RNA, 1410 nt, Artificial Sequence; identical to SEQ ID NO: 80762
  derived and/or modified CDS sequence (opt1) from neuraminidase__InfluenzaA__ADM32704

SEQ ID NO: 83619 - RNA, 1410 nt, Artificial Sequence; identical to SEQ ID NO: 82486
  derived and/or modified CDS sequence (opt1) from neuraminidase__InfluenzaA__ADM32714

SEQ ID NO: 83620 - RNA, 1410 nt, Artificial Sequence; identical to SEQ ID NO: 82486
  derived and/or modified CDS sequence (opt1) from neuraminidase__InfluenzaA__ADM32724

SEQ ID NO: 83621 - RNA, 1410 nt, Artificial Sequence; identical to SEQ ID NO: 80762
  derived and/or modified CDS sequence (opt1) from neuraminidase__InfluenzaA__ADM32734

SEQ ID NO: 83622 - RNA, 1410 nt, Artificial Sequence; identical to SEQ ID NO: 81985
  derived and/or modified CDS sequence (opt1) from neuraminidase__InfluenzaA__ADM32744

SEQ ID NO: 83623 - RNA, 1410 nt, Artificial Sequence; identical to SEQ ID NO: 82486
  derived and/or modified CDS sequence (opt1) from neuraminidase__InfluenzaA__ADM32754

SEQ ID NO: 83624 - RNA, 1410 nt, Artificial Sequence; identical to SEQ ID NO: 81985
  derived and/or modified CDS sequence (opt1) from neuraminidase__InfluenzaA__ADM32764

SEQ ID NO: 83625 - RNA, 1410 nt, Artificial Sequence
  derived and/or modified CDS sequence (opt1) from neuraminidase__InfluenzaA__ADM32774
augaaccccaaccagaagaucaucaucaucggcagcgugugcaugaccaucgggauggccaaccugauccuccagaucggcaacaucaucuccaucuggaucagccacuccauccagcuggggaaccagaaccagaucgagaccugcaaccagagcgucacgaccuacgagaacaacaccugggugaaccagaccuacgugaacaucuccaacacgaacuucgccgcgggccagagcgucguguccgugaagcuggccgggaacagcucccucugcccggucagcggcugggccaucuacuccaaggacaacagcauccgcaucggcuccaagggggacguguucgugauccgggagcccuucaucagcugcagcccccuggagugccgcaccuucuuccugacccagggcgcccuccugaacgacaagcacuccaacgggaccaucaaggaccggucccccuaccgcacgcugaugagcugcccgaucggcgagguccccucccccuacaacagccgguucgagagcguggccugguccgcgagcgccugccacgacgggaucaacuggcucaccaucggcaucuccggccccgacaacggggccguggccguccugaaguacaacggcaucaucaccgacaccaucaagagcuggcgcaacaacauccugcggacgcaggaguccgagugcgcgugcgugaacgggagcugcuucaccgugaugaccgacggcccguccgacggccaggccagcuacaagaucuuccgcaucgagaaggggaagaucgucaaguccguggagaugaacgcccccaacuaccacuacgaggagugcagcugcuaccccgacuccagcgagaucacgugcgugugccgggacaacuggcacggcuccaaccgccccugggucagcuucaaccagaaccucgaguaccagaucggguacaucugcuccggcaucuucggggacaacccgcggcccaacgacaagaccggcagcugcggccccguguccagcaacggggccaacggcgugaagggguucuccuucaaguacggcaacggggucuggaucggccgcaccaagagcaucagcucccggaacggcuucgagaugaucugggaccccaacggguggaccggcaccgacaacaacuucagcaucaagcaggacaucguggggaucaacgagugguccggcuacagcggguccuucgugcagcacccggagcugacgggccuggacugcauccgccccugcuucugggucgagcucauccggggccgccccaaggagaacaccaucuggaccagcggguccagcaucuccuucugcggcgugaacagcgacaccgucgggugguccuggcccgacggcgccgagcugccguucacgaucgacaaguga

SEQ ID NO: 83626 - RNA, 1410 nt, Artificial Sequence; identical to SEQ ID NO: 81732
  derived and/or modified CDS sequence (opt1) from neuraminidase__InfluenzaA__ADM32784

SEQ ID NO: 83627 - RNA, 1410 nt, Artificial Sequence; identical to SEQ ID NO: 81985
  derived and/or modified CDS sequence (opt1) from neuraminidase__InfluenzaA__ADM32794

SEQ ID NO: 83628 - RNA, 1410 nt, Artificial Sequence
  derived and/or modified CDS sequence (opt1) from neuraminidase__InfluenzaA__ADM32804
augaaccccaaccagaagaucaucaccaucggcagcgugugcaugaccaucgggauggccaaccugauccuccagaucggcaacaucaucuccaucuggaucagccacuccauccagcuggggaaccagaaccagaucgagacgugcaaccagagcgucaucaccuacgagaacaacaccugggugaaccagaccuacgugaacaucuccaacacgaacuucgccgcgggccagagcgucguguccgugaagcuggucgggaacagcucccucugcccggugagcggcugggccaucuacuccaaggacaacagcgugcgcaucggcuccaagggggacgucuucgugauccgggagcccuucaucagcugcagcccccuggagugccgcaccuucuuccugacccagggcgcccuccugaacgacaagcacuccaacgggaccaucaaggaccggucccccuaccgcacgcugaugagcugcccgaucggcgaggugcccucccccuacaacagccgguucgagagcgucgccugguccgccagcgcgugccacgacgggaucaacuggcucaccaucggcaucuccggccccgacaacggggccguggccgugcugaaguacaacggcaucaucaccgacaccaucaagagcuggcgcaacaacauccugcggacgcaggaguccgagugcgccugcgucaacgggagcugcuucaccgugaugaccgacggcccguccaacggccaggcgagcuacaagaucuuccgcaucgagaaggggaagaucgugaaguccgucgagaugaacgcccccaacuaccacuacgaggagugcagcugcuaccccgacuccagcgagaucacgugcgugugccgggacaacuggcacggcuccaaccgccccugggugagcuucaaccagaaccucgaguaccagaucggguacaucugcuccggcaucuucggggacaacccgcggcccaacgacaagaccggcagcugcggccccgucuccagcaacggggccaacggcgugaagggguucuccuucaaguacggcaacgggguguggaucggccgcaccaagagcaucagcucccggaacggcuucgagaugaucugggaccccaacggguggaccggcaccgacaacaacuucagcaucaagcaggacaucgucgagaucaacgagugguccggguacagcggcuccuucgugcagcacccggagcugacggggcuggacugcauccgccccugcuucugggucgagcucauccggggccgccccaaggagaacaccaucuggaccagcggcuccagcaucuccuucugcggggugaacagcgacaccgugggcugguccuggcccgacggggccgagcugccguucacgaucgacaaguga

SEQ ID NO: 83629 - RNA, 1410 nt, Artificial Sequence
  derived and/or modified CDS sequence (opt1) from neuraminidase__InfluenzaA__ADM32814
augaaccccaaccagaagaucaucaccaucggcagcgugugcaugaccaucgggauggccaaccugauccuccagaucggcaacaucaucuccaucuggaucagccacuccauccagcuggggaaccagaaccaggucgagacgugcaaccagagcgugaucaccuacgagaacaacaccugggugaaccagaccuacgucaacaucuccaacacgaacuucgccgcgggccagagcgugguguccgucaagcuggccgggaacagcucccucugcccggugagcggcugggccaucuacuccaaggacaacagcauccgcaucggcuccaagggggacguguucgucauccgggagcccuucaucagcugcagcccccuggagugccgcaccuucuuccugacccagggcgcccuccugaacgacaagcacuccaacgggaccaucaaggaccggucccccuaccgcacgcugaugagcugcccgaucggcgaggugcccucccccuacaacagccgguucgagagcguggccugguccgcgagcgccugccacgacgggaucaacuggcucaccaucggcaucuccggccccgacaacggggccgucgccgugcugaaguacaacggcaucaucaccgacaccaucaagagcuggcgcaacaacauccugcggacgcaggaguccgagugcgcgugcgugaacgggagcugcuucaccgucaugaccgacggcccguccgacggccaggccagcuacaagaucuuccgcaucgagaaggggaagaucgugaaguccguggagaugaacgcccccaacuaccacuacgaggagugcagcugcuaccccgacuccagcgagaucacgugcgucugccgggacaacuggcacggcuccaaccgccccugggugagcuucaaccagaaccucgaguaccagaucggguacaucugcuccggcaucuucggggacaacccgcggcccaacgacaagaccggcagcugcggccccguguccagcaacggggccaacggcgucaagggguucuccuucaaguacggcaacgggguguggaucggccgcaccaagagcaucagcucccggaacggcuucgagaugaucugggaccccaacggguggaccggcaccgacaacaacuucagcaucaagcaggacaucguggggaucaacgagugguccggcuacagcggguccuucguccagcacccggagcugacgggccuggacugcauccgccccugcuucuggguggagcucauccggggccgccccaaggagaacaccaucuggaccagcggguccagcaucuccuucugcggcgucaacagcgacaccguggggugguccuggcccgacggcgccgagcugccguucacgaucgacaaguga

SEQ ID NO: 83630 - RNA, 1410 nt, Artificial Sequence; identical to SEQ ID NO: 80762
  derived and/or modified CDS sequence (opt1) from neuraminidase__InfluenzaA__ADM32824

SEQ ID NO: 83631 - RNA, 1410 nt, Artificial Sequence; identical to SEQ ID NO: 81985
  derived and/or modified CDS sequence (opt1) from neuraminidase__InfluenzaA__ADM32834

SEQ ID NO: 83632 - RNA, 1410 nt, Artificial Sequence; identical to SEQ ID NO: 80752
  derived and/or modified CDS sequence (opt1) from neuraminidase__InfluenzaA__ADM32844

SEQ ID NO: 83633 - RNA, 1410 nt, Artificial Sequence
  derived and/or modified CDS sequence (opt1) from neuraminidase__InfluenzaA__ADM32854
augaaccccaaccagaagaucaucaccaucggcagcgugugcaccacgaucgggauggccaaccugauccuccagaucggcaacaucaucuccaucuggaucagccacuccauccaguucgggaaccagaaccagaucgagaccugcaaccagagcgucaucaccuacgagaacaacaccugggugaaccagacguacgugaacaucuccaacaccaacuucgccgcgggccagagcgucguguccgugaagcuggucgggaacagcucccugugcccggugagcggcugggccaucuacuccaaggacaacagcgugcgcaucggcuccaagggggacgucuucgugauccgggagcccuucaucagcugcagcccccucgagugccgcaccuucuuccugacccagggcgcccugcucaacgacaagcacuccaacgggacgaucaaggaccggucccccuaccgcacccugaugagcugcccgaucggcgaggugcccucccccuacaacagccgguucgagagcgucgccugguccgccagcgcgugccacgacgggaucaacuggcugaccaucggcaucuccggccccgacaacggggccguggccgugcucaaguacaacggcaucaucaccgacacgaucaagagcuggcgcaacaacauccugcggacccaggaguccgagugcgccugcgucaacgggagcugcuucaccgugaugaccgacggcccguccaacggccaggcgagcuacaagaucuuccgcaucgagaaggggaagaucgugaaguccgucgagaugaacgcccccaacuaccacuacgaggagugcagcugcuaccccgacuccagcgagaucacgugcgugugccgggacaacuggcacggcuccaaccgccccugggugagcuucaaccagaaccuggaguaccagaucggguacaucugcuccggcaucuucggggacaacccgcggcccaacgacaagaccggcagcugcggccccgucuccagcaacggggccaacggcgugaagggguucuccuucaaguacggcaacgggguguggaucggccgcaccaagagcaucagcucccggaacggcuucgagaugaucugggaccccaacggguggaccggcacggacaacaacuucagcaucaagcaggacaucgucgggaucaacgagugguccggcuacagcggguccuucgugcagcacccggagcucaccggccuggacugcauccgccccugcuucugggucgagcugauccggggccgccccaaggagaacaccaucuggaccagcggguccagcaucuccuucugcggcgugaacagcgacacgguggggugguccuggcccgacggcgccgagcucccguucaccaucgacaaguga

SEQ ID NO: 83634 - RNA, 1410 nt, Artificial Sequence; identical to SEQ ID NO: 80752
  derived and/or modified CDS sequence (opt1) from neuraminidase__InfluenzaA__ADM32864

SEQ ID NO: 83635 - RNA, 1410 nt, Artificial Sequence; identical to SEQ ID NO: 80762
  derived and/or modified CDS sequence (opt1) from neuraminidase__InfluenzaA__ADM32874

SEQ ID NO: 83636 - RNA, 1410 nt, Artificial Sequence
  derived and/or modified CDS sequence (opt1) from neuraminidase__InfluenzaA__ADM32884
augaaccccaaccagaagaucaucaccaucggcagcgugugcaugaccaucgggauggccaaccugauccuccagaucggcaacaucaucuccaucuggaucagccacuccauccagcuggggaaccagaaccagaucgagacgugcaaccagagcgucaucaccuacgagaacaacaccugggugaaccagaccuacgugaacaucuccaacacgaacuucgccgucggccagagcgugguguccgucaagcuggcggggaacagcucccucugcccggugagcggcugggccaucuacuccaaggacaacagcauccgcaucggcuccaagggggacguguucgucauccgggagcccuucaucagcugcagcccccuggagugccgcaccuucuuccugacccagggcgcccuccugaacgacaagcacuccaacgggaccaucaaggaccggucccccuaccgcacgcugaugagcugcccgaucggcgaggugcccucccccuacaacagccgguucgagagcguggccugguccgccagcgcgugccacgacgggaucaacuggcucaccaucggcaucuccggccccgacaacggggccgucgccgugcugaaguacaacggcaucaucaccgacaccaucaagagcuggcgcaacaacauccugcggacgcaggaguccgagugcgccugcgugaacgggagcugcuucaccgucaugaccgacggcccguccgacggccaggcgagcuacaagaucuuccgcaucgagaaggggaagaucgugaaguccguggagaugaacgcccccaacuaccacuacgaggagugcagcugcuaccccgacuccagcgagaucacgugcgucugccgggacaacuggcacggcuccaaccgccccugggugagcuucaaccagaaccucgaguaccagaucggguacaucugcuccggcaucuucggggacaacccgcggcccaacgacaagaccggcagcugcggccccguguccagcaacggggccaacggcgucaagggguucuccuucaaguacggcaacgggguguggaucggccgcaccaagagcaucagcucccggaacggcuucgagaugaucugggaccccaacggguggaccggcaccgacaacaaguucagcaucaagcaggacaucguggggaucaacgagugguccggcuacagcggguccuucguccagcacccggagcugacgggccuggacugcauccgccccugcuucuggguggagcucauccggggccgccccaaggagaacaccaucuggaccagcggguccagcaucuccuucugcggcgucaacagcgacaccguggggugguccuggcccgacggcgccgagcugccguucacgaucgacaaguga

SEQ ID NO: 83637 - RNA, 1410 nt, Artificial Sequence; identical to SEQ ID NO: 80762
  derived and/or modified CDS sequence (opt1) from neuraminidase__InfluenzaA__ADM32921

SEQ ID NO: 83638 - RNA, 1410 nt, Artificial Sequence; identical to SEQ ID NO: 80762
  derived and/or modified CDS sequence (opt1) from neuraminidase__InfluenzaA__ADM32931

SEQ ID NO: 83639 - RNA, 1410 nt, Artificial Sequence
  derived and/or modified CDS sequence (opt1) from neuraminidase__InfluenzaA__ADM32941
augaaccccaaccagaagaucaucaucaucggcagcgugugcaugaccaucgggauggccaaccugauccuccagaucggcaacaucaucuccaucuggaucagccacuccauccagcuggggaaccagaaccagaucgagaccugcaaccagagcgucaucacguacgagaacaacaccugggugaaccagaccuacgugaacaucuccaacaccaacuucgccgcgggccagagcgucguguccgugaagcuggccgggaacagcucccucugcccggucagcggcugggccaucuacuccaaggacaacagcauccgcaucggcuccaagggggacguguucgugauccgggagcccuucaucagcugcagcccccuggagugccgcacguucuuccugacccagggcgcccuccugaacgacaagcacuccaacgggaccaucaaggaccggucccccuaccgcacccugaugagcugcccgaucggcgagguccccucccccuacaacagccgguucgagagcguggccugguccgcgagcgccugccacgacgggaucaacuggcucacgaucggcaucuccggccccgacaacggggccguggccguccugaaguacaacggcaucaucaccgacaccaucaagagcuggcgcaacaacauccugcggacccaggaguccgagugcgcgugcgugaacgggagcugcuucacggugaugaccgacggcccguccgacggccaggccagcuacaagaucuuccgcaucgagaaggggaagaucgucaaguccguggagaugaacgcccccaacuaccacuacgaggagugcagcugcuaccccgacuccagcgagaucacgugcgugugccgggacaacuggcacggcuccaaccgccccugggucagcuucaaccagaaccucgaguaccagaucggguacaucugcuccggcaucuucggggacaacccgcggcccaacgacaagaccggcagcugcggccccguguccagcaacggggccaacggcgugaagggguucuccuucaaguacggcaacggggucuggaucggccgcaccaagagcaucaacagccggaacggcuucgagaugaucugggaccccaacggguggaccggcaccgacaacaacuucuccaucaagcaggacaucguggggaucaacgaguggagcggcuacuccgggagcuucgugcagcacccggagcugaccggccuggacugcauccgccccugcuucugggucgagcucauccggggccgccccaaggagaacacgaucuggaccuccgggagcuccaucagcuucugcggcgugaacuccgacaccgucggguggagcuggcccgacggcgccgagcugccguucaccaucgacaaguga

SEQ ID NO: 83640 - RNA, 1410 nt, Artificial Sequence; identical to SEQ ID NO: 80762
  derived and/or modified CDS sequence (opt1) from neuraminidase__InfluenzaA__ADM32951

SEQ ID NO: 83641 - RNA, 1410 nt, Artificial Sequence; identical to SEQ ID NO: 81345
  derived and/or modified CDS sequence (opt1) from neuraminidase__InfluenzaA__ADM32960

SEQ ID NO: 83642 - RNA, 1410 nt, Artificial Sequence; identical to SEQ ID NO: 80762
  derived and/or modified CDS sequence (opt1) from neuraminidase__InfluenzaA__ADM32969

SEQ ID NO: 83643 - RNA, 1410 nt, Artificial Sequence; identical to SEQ ID NO: 80762
  derived and/or modified CDS sequence (opt1) from neuraminidase__InfluenzaA__ADM32979

SEQ ID NO: 83644 - RNA, 1410 nt, Artificial Sequence; identical to SEQ ID NO: 82664
  derived and/or modified CDS sequence (opt1) from neuraminidase__InfluenzaA__ADM32988

SEQ ID NO: 83645 - RNA, 1410 nt, Artificial Sequence; identical to SEQ ID NO: 82664
  derived and/or modified CDS sequence (opt1) from neuraminidase__InfluenzaA__ADM32997

SEQ ID NO: 83646 - RNA, 1410 nt, Artificial Sequence; identical to SEQ ID NO: 80762
  derived and/or modified CDS sequence (opt1) from neuraminidase__InfluenzaA__ADM33006

SEQ ID NO: 83647 - RNA, 1410 nt, Artificial Sequence; identical to SEQ ID NO: 82664
  derived and/or modified CDS sequence (opt1) from neuraminidase__InfluenzaA__ADM33015

SEQ ID NO: 83648 - RNA, 1410 nt, Artificial Sequence
  derived and/or modified CDS sequence (opt1) from neuraminidase__InfluenzaA__ADM33025
augaaccccaaccagaagaucaucaccaucggcagcgugugcaugaccaucgggauggccaaccugauccuccagaucggcaacaucaucuccaucuggaucagccacuccauccagcuggggaaccagaaccagaucgagacgugcaaccagagcgucaucaccuacgagaacaacaccugggugaaccagaccuacgugaacaucuccaacacgaacuucgccgcgggccagagcgucguguccgugaagcuggccgggaacagcucccucugcccggucagcggcugggccaucuacuccaaggacaacagcauccgcaucggcuccaagggggacguguucgugauccgggagcccuucaucagcugcagcccccuggagugccgcaccuucuuccugacccagggcgcccuccugaacgacaagcacuccaacgggaccaucaaggaccggucccccuaccgcacgcugaugagcugcccgaucggcgagguccccucccccuacaacagccgguucgagagcguggccugguccgcgagcgccugccacgacgggaucaacuggcucaccaucggcaucuccggccccgacaacggggccguggccguccugaaguacaacggcaucaucaccgacaccaucaagagcuggcgcuccaacauccugcggacgcaggagagcgagugcgcgugcgugaacggguccugcuucaccgugaugaccgacggcccgagcgacggccaggccuccuacaagaucuuccgcaucgagaaggggaagaucgucaagagcguggagaugaacgcccccaacuaccacuacgaggagugcuccugcuaccccgacagcuccgagaucacgugcgugugccgggacaacuggcacggcagcaaccgccccugggucuccuucaaccagaaccucgaguaccagaucggguacaucugcagcggcaucuucggggacaacccgcggcccaacgacaagaccggcuccugcggccccgugagcuccaacggggccaacggcgugaagggguucagcuucaaguacggcaacggggucuggaucggccgcaccaagagcaucuccagccggaacggcuucgagaugaucugggaccccaacggguggaccggcaccgacaacaacuucuccaucaagcaggacaucguggggaucaacgaguggagcggcuacuccgggagcuucgugcagcacccggagcugacgggccuggacugcauccgccccugcuucugggucgagcucauccggggccgccccaaggagaacaccaucuggaccuccgggagcuccaucagcuucugcggcgugaacuccgacaccgucggguggagcuggcccgacggcgccgagcugccguucacgaucgacaaguga

SEQ ID NO: 83649 - RNA, 1410 nt, Artificial Sequence; identical to SEQ ID NO: 80762
  derived and/or modified CDS sequence (opt1) from neuraminidase__InfluenzaA__ADM33042

SEQ ID NO: 83650 - RNA, 1410 nt, Artificial Sequence; identical to SEQ ID NO: 80762
  derived and/or modified CDS sequence (opt1) from neuraminidase__InfluenzaA__ADM33062

SEQ ID NO: 83651 - RNA, 1410 nt, Artificial Sequence
  derived and/or modified CDS sequence (opt1) from neuraminidase__InfluenzaA__ADM33071
augaaccccaaccagaagaucaucaccaucggcagcgugugcaugaccaucgggauggccaaccugauccuccagaucggcaacaucaucuccaucuggaucagccacuccauccagcuggggaaccagaaccagaucgagacgugcaaccagagcgucaucaccuacgagaacaacaccugggugaaccagaccuacgugaacaucuccaacacgaacuucgccgcgggccagagcgucguguccgugaagcuggccgggaacagcucccucugcccggucagcggcugggccaucuacuccaaggacaacagcauccgcaucggcuccaagggggacguguucgugauccgggagcccuucaucagcugcagcccccuggagugccgcaccuucuuccugacccagggcgcccuccugaacgacaagcacuccaacgggaccaucaaggaccggucccccuaccgcacgcugaugagcugcccgaucggcgagguccccucccccuacaacagccgguucgagagcguggccugguccgcgagcgccugccacgacgggaucaacuggcucaccaucggcaucuccggccccgacaacggggccguggccguccugaaguacaacggcaucaucaccgacaccaucaagagcuggcgcaacaacauccugcggacgcaggaguccgagugcgcgugcgugaacgggagcugcuucaccgugaugaccgacggcccguccgacggccaggccagcuacaagaucuuccgcaucgagaaggggaagaucgucaaguccguggagaugaacgcccccaacuaccacuacgaggagugcagcugcuaccccgacuccagcaagaucacgugcgugugccgggacaacuggcacggcuccaaccgccccugggucagcuucaaccagaaccucgaguaccagaucggguacaucugcuccggcaucuucggggacaacccgcggcccaacgacaagaccggcagcugcggccccguguccagcaacggggccaacggcgugaagggguucuccuucaaguacggcaacggggucuggaucggccgcaccaagagcaucagcucccggaacggcuucgagaugaucugggaccccaacggguggaccggcaccgacaacaacuucagcaucaagcaggacaucguggggaucaacgagugguccggcuacagcggguccuucgugcagcacccggagcugacgggccuggacugcauccgccccugcuucugggucgagcucauccggggccgccccaaggagaacaccaucuggaccagcggguccagcaucuccuucugcggcgugaacggggacaccgucggcuggagcuggcccgacggcgccgagcugccguucacgaucgacaaguga

SEQ ID NO: 83652 - RNA, 1410 nt, Artificial Sequence; identical to SEQ ID NO: 80762
  derived and/or modified CDS sequence (opt1) from neuraminidase__InfluenzaA__ADM33081

SEQ ID NO: 83653 - RNA, 1410 nt, Artificial Sequence; identical to SEQ ID NO: 81835
  derived and/or modified CDS sequence (opt1) from neuraminidase__InfluenzaA__ADM33091

SEQ ID NO: 83654 - RNA, 1410 nt, Artificial Sequence; identical to SEQ ID NO: 81835
  derived and/or modified CDS sequence (opt1) from neuraminidase__InfluenzaA__ADM33101

SEQ ID NO: 83655 - RNA, 1410 nt, Artificial Sequence; identical to SEQ ID NO: 81835
  derived and/or modified CDS sequence (opt1) from neuraminidase__InfluenzaA__ADM33111

SEQ ID NO: 83656 - RNA, 1410 nt, Artificial Sequence; identical to SEQ ID NO: 80762
  derived and/or modified CDS sequence (opt1) from neuraminidase__InfluenzaA__ADM33121

SEQ ID NO: 83657 - RNA, 1410 nt, Artificial Sequence; identical to SEQ ID NO: 80762
  derived and/or modified CDS sequence (opt1) from neuraminidase__InfluenzaA__ADM33130

SEQ ID NO: 83658 - RNA, 1410 nt, Artificial Sequence; identical to SEQ ID NO: 80762
  derived and/or modified CDS sequence (opt1) from neuraminidase__InfluenzaA__ADM33139

SEQ ID NO: 83659 - RNA, 1410 nt, Artificial Sequence; identical to SEQ ID NO: 80762
  derived and/or modified CDS sequence (opt1) from neuraminidase__InfluenzaA__ADM33149

SEQ ID NO: 83660 - RNA, 1410 nt, Artificial Sequence; identical to SEQ ID NO: 80762
  derived and/or modified CDS sequence (opt1) from neuraminidase__InfluenzaA__ADM33159

SEQ ID NO: 83661 - RNA, 1410 nt, Artificial Sequence; identical to SEQ ID NO: 80762
  derived and/or modified CDS sequence (opt1) from neuraminidase__InfluenzaA__ADM33169

SEQ ID NO: 83662 - RNA, 1410 nt, Artificial Sequence; identical to SEQ ID NO: 80762
  derived and/or modified CDS sequence (opt1) from neuraminidase__InfluenzaA__ADM33179

SEQ ID NO: 83663 - RNA, 1410 nt, Artificial Sequence; identical to SEQ ID NO: 80762
  derived and/or modified CDS sequence (opt1) from neuraminidase__InfluenzaA__ADM33188

SEQ ID NO: 83664 - RNA, 1410 nt, Artificial Sequence; identical to SEQ ID NO: 80762
  derived and/or modified CDS sequence (opt1) from neuraminidase__InfluenzaA__ADM33197

SEQ ID NO: 83665 - RNA, 1410 nt, Artificial Sequence; identical to SEQ ID NO: 80762
  derived and/or modified CDS sequence (opt1) from neuraminidase__InfluenzaA__ADM33206

SEQ ID NO: 83666 - RNA, 1410 nt, Artificial Sequence; identical to SEQ ID NO: 80762
  derived and/or modified CDS sequence (opt1) from neuraminidase__InfluenzaA__ADM33215

SEQ ID NO: 83667 - RNA, 1410 nt, Artificial Sequence; identical to SEQ ID NO: 80762
  derived and/or modified CDS sequence (opt1) from neuraminidase__InfluenzaA__ADM33224

SEQ ID NO: 83668 - RNA, 1410 nt, Artificial Sequence; identical to SEQ ID NO: 80762
  derived and/or modified CDS sequence (opt1) from neuraminidase__InfluenzaA__ADM33234

SEQ ID NO: 83669 - RNA, 1410 nt, Artificial Sequence; identical to SEQ ID NO: 81186
  derived and/or modified CDS sequence (opt1) from neuraminidase__InfluenzaA__ADM33243

SEQ ID NO: 83670 - RNA, 1410 nt, Artificial Sequence; identical to SEQ ID NO: 80762
  derived and/or modified CDS sequence (opt1) from neuraminidase__InfluenzaA__ADM33253

SEQ ID NO: 83671 - RNA, 1410 nt, Artificial Sequence; identical to SEQ ID NO: 81186
  derived and/or modified CDS sequence (opt1) from neuraminidase__InfluenzaA__ADM33262

SEQ ID NO: 83672 - RNA, 1410 nt, Artificial Sequence; identical to SEQ ID NO: 80792
  derived and/or modified CDS sequence (opt1) from neuraminidase__InfluenzaA__ADM33272

SEQ ID NO: 83673 - RNA, 1410 nt, Artificial Sequence; identical to SEQ ID NO: 80792
  derived and/or modified CDS sequence (opt1) from neuraminidase__InfluenzaA__ADM33282

SEQ ID NO: 83674 - RNA, 1410 nt, Artificial Sequence; identical to SEQ ID NO: 80762
  derived and/or modified CDS sequence (opt1) from neuraminidase__InfluenzaA__ADM33292

SEQ ID NO: 83675 - RNA, 1410 nt, Artificial Sequence; identical to SEQ ID NO: 80762
  derived and/or modified CDS sequence (opt1) from neuraminidase__InfluenzaA__ADM33302

SEQ ID NO: 83676 - RNA, 1410 nt, Artificial Sequence; identical to SEQ ID NO: 80752
  derived and/or modified CDS sequence (opt1) from neuraminidase__InfluenzaA__ADM33312

SEQ ID NO: 83677 - RNA, 1410 nt, Artificial Sequence; identical to SEQ ID NO: 80792
  derived and/or modified CDS sequence (opt1) from neuraminidase__InfluenzaA__ADM33322

SEQ ID NO: 83678 - RNA, 1410 nt, Artificial Sequence; identical to SEQ ID NO: 80792
  derived and/or modified CDS sequence (opt1) from neuraminidase__InfluenzaA__ADM33332

SEQ ID NO: 83679 - RNA, 1410 nt, Artificial Sequence; identical to SEQ ID NO: 80792
  derived and/or modified CDS sequence (opt1) from neuraminidase__InfluenzaA__ADM33342

SEQ ID NO: 83680 - RNA, 1410 nt, Artificial Sequence
  derived and/or modified CDS sequence (opt1) from neuraminidase__InfluenzaA__ADM33367
augaaccccaaccagaagaucaucaccaucggcagcgugugcaugaccaucgggauggccaaccugauccuccagaucggcaacaucaucuccaucuggaucagccacuccauccagcuggggaaccagaaccagaucgagacgugcaaccagagcgucgugaccuacgagaacaacaccugggugaaccagaccuacgucaacaucuccaacacgaacuucgccgcgggccagagcgugguguccgucaagcuggccgggaacagcucccucugcccggugggcggcugggccaucuacagcaaggacaacuccgugcgcaucgggagcaagggcgacgucuucgugauccgggagcccuucaucuccugcagcccccuggagugccgcaccuucuuccugacccagggggcccuccugaacgacaagcacuccaacggcaccaucaaggaccggagccccuaccgcacgcugauguccugcccgaucggggaggugcccagccccuacaacucccgguucgagagcgucgccuggagcgcguccgccugccacgacggcaucaacuggcucaccaucggcaucagcgggcccgacaacggcgccguggccgugcugaaguacaacgggaucaucaccgacaccaucaaguccuggcgcaacaacauccugcggacgcaggagagcgagugcgcgugcgucaacggcuccugcuucaccgugaugaccgacggcccgagcaacgggcaggccuccuacaagaucuuccgcaucgagaagggcaagaucgucaagagcguggagaugaacgcccccaacuaccacuacgaggagugcuccugcuaccccgacagcuccgagaucacgugcgugugccgggacaacuggcacgggagcaaccgccccuggguguccuucaaccagaaccucgaguaccagaucggcuacaucugcagcgggaucuucggcgacaacccgcggcccaacgacaagaccggcuccugcgggcccgucagcuccaacggcgccaacggggugaagggcuucagcuucaaguacgggaacggcguguggaucggccgcaccaaguccaucagcagccggaacggguucgagaugaucugggaccccaacggcuggaccgggaccgacaacaacuucuccaucaagcaggacaucgucggcaucaacgaguggagcggguacuccggcagcuucgugcagcacccggagcugacgggccuggacugcauccgccccugcuucugggucgagcucauccgggggcgccccaaggagaacaccaucuggaccuccggcagcuccaucagcuucugcggggugaacuccgacaccgugggcuggagcuggcccgacggcgccgagcugccguucacgaucgacaaguga

SEQ ID NO: 83681 - RNA, 1410 nt, Artificial Sequence; identical to SEQ ID NO: 80792
  derived and/or modified CDS sequence (opt1) from neuraminidase__InfluenzaA__ADM33377

SEQ ID NO: 83682 - RNA, 1410 nt, Artificial Sequence; identical to SEQ ID NO: 80792
  derived and/or modified CDS sequence (opt1) from neuraminidase__InfluenzaA__ADM33387

SEQ ID NO: 83683 - RNA, 1410 nt, Artificial Sequence; identical to SEQ ID NO: 80762
  derived and/or modified CDS sequence (opt1) from neuraminidase__InfluenzaA__ADM33397

SEQ ID NO: 83684 - RNA, 1410 nt, Artificial Sequence; identical to SEQ ID NO: 80762
  derived and/or modified CDS sequence (opt1) from neuraminidase__InfluenzaA__ADM33407

SEQ ID NO: 83685 - RNA, 1410 nt, Artificial Sequence; identical to SEQ ID NO: 80792
  derived and/or modified CDS sequence (opt1) from neuraminidase__InfluenzaA__ADM33417

SEQ ID NO: 83686 - RNA, 1410 nt, Artificial Sequence; identical to SEQ ID NO: 80762
  derived and/or modified CDS sequence (opt1) from neuraminidase__InfluenzaA__ADM33427

SEQ ID NO: 83687 - RNA, 1410 nt, Artificial Sequence
  derived and/or modified CDS sequence (opt1) from neuraminidase__InfluenzaA__ADM33437
augaaccccaaccagaagaucaucaccaucggcagcgugugcaugaccaucgggauggccaaccugauccuccagaucggcaacaucaucuccaucuggaucagccacuccauccagcuggggaaccagaaccagaucgagacgugcaaccagagcgucaucaccuacgagaacaacaccugggugaaccagaccuacgugaacaucuccaacacgaacuucgccgcgggccagagcgucguguccgugaagcuggccgggaacagcucccucugcccggucagcggcugggccaucuacuccaaggacaacagcauccgcaucggcuccaagggggacguguucgugauccgggagcccuucaucagcugcagcccccuggagugccgcaccuucuuccugacccagggcgcccuccugaacgacaagcacuccaacgggaccaucaaggaccggucccccuaccgcacgcugaugagcugcccgaucggcgagguccccuccgccuacaacagccgguucgagagcguggcgugguccgccagcgccugccacgacgggaucaacuggcucaccaucggcaucuccggccccgacaacggggccguggcgguccugaaguacaacggcaucaucaccgacaccaucaagagcuggcgcaacaacauccugcggacgcaggaguccgagugcgccugcgugaacgggagcugcuucaccgugaugaccgacggccccuccgacggccaggccagcuacaagaucuuccgcaucgagaaggggaagaucgucaaguccguggagaugaacgccccgaacuaccacuacgaggagugcagcugcuaccccgacuccagcgagaucacgugcgugugccgggacaacuggcacggcuccaaccgccccugggucagcuucaaccagaaccucgaguaccagaucggguacaucugcuccggcaucuucggggacaacccccggccgaacgacaagaccggcagcugcggccccguguccagcaacggggccaacggcgugaagggguucuccuucaaguacggcaacggggucuggaucggccgcaccaagagcaucagcucccggaacggcuucgagaugaucugggaccccaacggguggaccggcaccgacaacaacuucagcaucaagcaggacaucguggggaucaacgagugguccggcuacagcggguccuucgugcagcaccccgagcugacgggccuggacugcauccgcccgugcuucugggucgagcucauccggggccgccccaaggagaacaccaucuggaccagcggguccagcaucuccuucugcggcgugaacagcgacaccgucgggugguccuggcccgacggcgcggagcugcccuucacgaucgacaaguga

SEQ ID NO: 83688 - RNA, 1410 nt, Artificial Sequence; identical to SEQ ID NO: 81116
  derived and/or modified CDS sequence (opt1) from neuraminidase__InfluenzaA__ADM33443

SEQ ID NO: 83689 - RNA, 1410 nt, Artificial Sequence; identical to SEQ ID NO: 80762
  derived and/or modified CDS sequence (opt1) from neuraminidase__InfluenzaA__ADM52446

SEQ ID NO: 83690 - RNA, 1410 nt, Artificial Sequence; identical to SEQ ID NO: 80762
  derived and/or modified CDS sequence (opt1) from neuraminidase__InfluenzaA__ADM52456

SEQ ID NO: 83691 - RNA, 1410 nt, Artificial Sequence; identical to SEQ ID NO: 82967
  derived and/or modified CDS sequence (opt1) from neuraminidase__InfluenzaA__ADM52466

SEQ ID NO: 83692 - RNA, 1410 nt, Artificial Sequence; identical to SEQ ID NO: 80762
  derived and/or modified CDS sequence (opt1) from neuraminidase__InfluenzaA__ADM52486

SEQ ID NO: 83693 - RNA, 1410 nt, Artificial Sequence; identical to SEQ ID NO: 80752
  derived and/or modified CDS sequence (opt1) from neuraminidase__InfluenzaA__ADM52496

SEQ ID NO: 83694 - RNA, 1410 nt, Artificial Sequence; identical to SEQ ID NO: 80762
  derived and/or modified CDS sequence (opt1) from neuraminidase__InfluenzaA__ADM52506

SEQ ID NO: 83695 - RNA, 1410 nt, Artificial Sequence; identical to SEQ ID NO: 80752
  derived and/or modified CDS sequence (opt1) from neuraminidase__InfluenzaA__ADM52516

SEQ ID NO: 83696 - RNA, 1410 nt, Artificial Sequence; identical to SEQ ID NO: 80752
  derived and/or modified CDS sequence (opt1) from neuraminidase__InfluenzaA__ADM52527

SEQ ID NO: 83697 - RNA, 1410 nt, Artificial Sequence; identical to SEQ ID NO: 81985
  derived and/or modified CDS sequence (opt1) from neuraminidase__InfluenzaA__ADM52537

SEQ ID NO: 83698 - RNA, 1410 nt, Artificial Sequence; identical to SEQ ID NO: 82486
  derived and/or modified CDS sequence (opt1) from neuraminidase__InfluenzaA__ADM52547

SEQ ID NO: 83699 - RNA, 1410 nt, Artificial Sequence; identical to SEQ ID NO: 80752
  derived and/or modified CDS sequence (opt1) from neuraminidase__InfluenzaA__ADM52557

SEQ ID NO: 83700 - RNA, 1410 nt, Artificial Sequence; identical to SEQ ID NO: 80752
  derived and/or modified CDS sequence (opt1) from neuraminidase__InfluenzaA__ADM52567

SEQ ID NO: 83701 - RNA, 1410 nt, Artificial Sequence; identical to SEQ ID NO: 80752
  derived and/or modified CDS sequence (opt1) from neuraminidase__InfluenzaA__ADM52577

SEQ ID NO: 83702 - RNA, 1410 nt, Artificial Sequence; identical to SEQ ID NO: 80762
  derived and/or modified CDS sequence (opt1) from neuraminidase__InfluenzaA__ADM52587

SEQ ID NO: 83703 - RNA, 1410 nt, Artificial Sequence; identical to SEQ ID NO: 80762
  derived and/or modified CDS sequence (opt1) from neuraminidase__InfluenzaA__ADM52597

SEQ ID NO: 83704 - RNA, 1410 nt, Artificial Sequence; identical to SEQ ID NO: 80752
  derived and/or modified CDS sequence (opt1) from neuraminidase__InfluenzaA__ADM52607

SEQ ID NO: 83705 - RNA, 1410 nt, Artificial Sequence; identical to SEQ ID NO: 80752
  derived and/or modified CDS sequence (opt1) from neuraminidase__InfluenzaA__ADM52617

SEQ ID NO: 83706 - RNA, 1410 nt, Artificial Sequence; identical to SEQ ID NO: 82443
  derived and/or modified CDS sequence (opt1) from neuraminidase__InfluenzaA__ADM52627

SEQ ID NO: 83707 - RNA, 1410 nt, Artificial Sequence; identical to SEQ ID NO: 81985
  derived and/or modified CDS sequence (opt1) from neuraminidase__InfluenzaA__ADM52637

SEQ ID NO: 83708 - RNA, 1410 nt, Artificial Sequence; identical to SEQ ID NO: 81985
  derived and/or modified CDS sequence (opt1) from neuraminidase__InfluenzaA__ADM52647

SEQ ID NO: 83709 - RNA, 1410 nt, Artificial Sequence; identical to SEQ ID NO: 80752
  derived and/or modified CDS sequence (opt1) from neuraminidase__InfluenzaA__ADM52657

SEQ ID NO: 83710 - RNA, 1410 nt, Artificial Sequence; identical to SEQ ID NO: 81985
  derived and/or modified CDS sequence (opt1) from neuraminidase__InfluenzaA__ADM52667

SEQ ID NO: 83711 - RNA, 1410 nt, Artificial Sequence; identical to SEQ ID NO: 80752
  derived and/or modified CDS sequence (opt1) from neuraminidase__InfluenzaA__ADM52687

SEQ ID NO: 83712 - RNA, 1410 nt, Artificial Sequence; identical to SEQ ID NO: 80752
  derived and/or modified CDS sequence (opt1) from neuraminidase__InfluenzaA__ADM52697

SEQ ID NO: 83713 - RNA, 1410 nt, Artificial Sequence; identical to SEQ ID NO: 82443
  derived and/or modified CDS sequence (opt1) from neuraminidase__InfluenzaA__ADM52707

SEQ ID NO: 83714 - RNA, 1410 nt, Artificial Sequence
  derived and/or modified CDS sequence (opt1) from neuraminidase__InfluenzaA__ADM52717
augaaccccaaccagaagaucaucaccaucggcagcgugugcaugaccaucgggauggccaaccugauccuccagaucggcaacaucaucuccaucuggaucagccacuccauccagcuggggaaccagaaccagaucgagacgugcaaccagagcgucaucaccuacgagaacaacaccugggugaaccagaccuacgugaacaucuccaacacgaacuucgccgcgggccagagcgccgucuccgugaagcugguggggaacagcucccucugcccggucagcggcugggccaucuacuccaaggacaacagcgugcgcaucggcuccaagggggacguguucgucauccgggagcccuucaucagcugcagcccccuggagugccgcaccuucuuccugacccagggcgcccuccugaacgacaagcacuccaacgggaccaucaaggaccggucccccuaccgcacgcugaugagcugcccgaucggcgaggugcccucccccuacaacagccgguucgagagcguggccugguccgcgagcgccugccacgacgggaucaacuggcucaccaucggcaucuccggccccgacaacggggccgucgccgugcugaaguacaacggcaucaucaccgacaccaucaagagcuggcgcaacaacauccugcggacgcaggaguccgagugcgcgugcgugaacgggagcugcuucaccgucaugaccgacggcccguccaacggccaggccagcuacaagaucuuccgcaucgagaaggggaagaucgugaaguccguggagaugaacgcccccaacuaccacuacgaggagugcagcugcuaccccgacuccagcgagaucacgugcgucugccgggacaacuggcacggcuccaaccgccccugggugagcuucaaccagaaccucgaguaccagaucggguacaucugcuccggcaucuucggggacaacccgcggcccaacgacaagaccggcagcugcggccccguguccagcaacggggccaacggcgucaagggguucuccuucaaguacggcaacgggguguggaucggccgcaccaagagcaucagcucccggaacggcuucgagaugaucugggaccccaacggguggaccggcaccgacaacaacuucagcaucaagcaggacaucguggggaucaacgagugguccggcuacagcggguccuucguccagcacccggagcugacgggccuggacugcauccgccccugcuucuggguggagcucauccggggccgccccaaggagaacaccaucuggaccagcggguccagcaucuccuucugcggcgucaacagcgacaccguggggugguccuggcccgacggcgccgagcugccguucacgaucgacaaguga

SEQ ID NO: 83715 - RNA, 1410 nt, Artificial Sequence
  derived and/or modified CDS sequence (opt1) from neuraminidase__InfluenzaA__ADM86402
augaaccccaaccagaagaucaucaccaucggcagcgugugcaugaccaucgggauggccaaccugauccuccagaucggcaacaucaucuccaucuggaucagccacuccauccagcuggggaaccagaaccagaucgagacgugcaaccagagcgucaucaccuacgagaacaacaccugggugaaccagaccuacgugaacaucuccaacacgaacuucgccgcgggccagagcgucgccuccgugaagcuggccgggaacagcucccucugcccggugagcggcugggccaucuacuccaaggacaacagcguccgcaucggcuccaagggggacguguucgugauccgggagcccuucaucagcugcagcccccuggagugccgcaccuucuuccugacccagggcgcccuccugaacgacaagcacuccaacgggaccgucaaggaccggucccccuaccgcacgcugaugagcugcccgaucggcgaggugcccucccccuacaacagccgguucgagagcguggcgugguccgccagcgccugccacgacgggaucaacuggcucaccaucggcaucuccggccccgacaacggggccgucgcggugcugaaguacaacggcaucaucaccgacaccaucaagagcuggcgcaacaacauccugcggacgcaggaguccgagugcgccugcgugaacgggagcugcuucaccgucaugaccgacggcccguccgacggccaggccagcuacaagaucuuccgcaucgagaaggggaagaucgugaaguccguggagaugaacgcccccaacuaccacuacgaggagugcagcugcuaccccgacuccagcgagaucacgugcgucugccgggacaacuggcacggcuccaaccgccccugggugagcuucaaccagaaccucgaguaccagaucggguacaucugcuccggcaucuucggggacaacccgcggcccaacgacaagaccggcagcugcggccccguguccagcaacggggccaacggcgucaagggguucuccuucaaguacggcaacgggguguggaucggccgcaccaagagcaucagcucccggaacggcuucgagaugaucugggaccccaacggguggaccggcaccgacaacaacuucagcaucaagcaggacaucguggggaucaacgagugguccggcuacagcggguccuucguccagcacccggagcugacgggccuggacugcauccgccccugcuucuggguggagcucauccggggccgccccaaggagaacaccaucuggaccagcggguccagcaucuccuucugcggcgucaacagcgacaccguggggugguccuggcccgacggcgcggagcugccguucacgaucgacaaguga

SEQ ID NO: 83716 - RNA, 1410 nt, Artificial Sequence; identical to SEQ ID NO: 80762
  derived and/or modified CDS sequence (opt1) from neuraminidase__InfluenzaA__ADM86412

SEQ ID NO: 83717 - RNA, 1410 nt, Artificial Sequence
  derived and/or modified CDS sequence (opt1) from neuraminidase__InfluenzaA__ADM86422
augaaccccaaccagaagaucaucaccaucggcagcgugugcaugaccaucgggauggccaaccugauccuccagaucggcaacaucaucuccaucuggaucagccacuccauccagcuggggaaccagaaccagaucgagacgugcaaccagagcgucaucaccuacgagaacaacaccugggugaaccagaccuacgugaacaucuccaacacgaacuucgucgccggccagagcgugguguccgucaagcuggcggggaacagcucccucugcccggugagcggcugggccaucuacuccaaggacaacagcauccgcaucggcuccaagggggacguguucgucauccgggagcccuucaucagcugcagcccccuggagugccgcaccuucuuccugacccagggcgcccuccugaacgacaagcacuccaacgggaccaucaaggaccggucccccuaccgcacgcugaugagcugcccgaucggcgaggugcccucccccuacaacagccgguucgagagcguggccugguccgccagcgcgugccacgacgggaucaacuggcucaccaucggcaucuccggccccgacaacggggccgucgccgugcugaaguacaacggcaucaucaccgacaccaucaagagcuggcgcaacaacauccugcggacgcaggaguccgagugcgccugcgugaacgggagcugcuucaccgucaugaccgacggcccguccgacggccaggcgagcuacaagaucuuccgcaucgagaaggggaagguggugaaguccgucgagaugaacgcccccaacuaccacuacgaggagugcagcugcuaccccgacuccagcgagaucacgugcgugugccgggacaacuggcacggcuccaaccgccccugggugagcuucaaccagaaccucgaguaccagaucggguacaucugcuccggcaucuucggggacaacccgcggcccaacgacaagaccggcagcugcggccccgucuccagcaacggggccaacggcgugaagggguucuccuucaaguacggcaacgggguguggaucggccgcaccaagagcaucagcucccggaacggcuucgagaugaucugggaccccaacggguggaccggcaccgacaacaacuucagcaucaagcaggacaucgucgggaucaacgagugguccggcuacagcggguccuucgugcagcacccggagcugacgggccuggacugcauccgccccugcuucugggucgagcucauccggggccgccccaaggagaacaccaucuggaccagcggguccagcaucuccuucugcggcgugaacagcgacaccguggggugguccuggcccgacggcgccgagcugccguucacgaucgacaaguga

SEQ ID NO: 83718 - RNA, 1410 nt, Artificial Sequence; identical to SEQ ID NO: 81616
  derived and/or modified CDS sequence (opt1) from neuraminidase__InfluenzaA__ADM86432

SEQ ID NO: 83719 - RNA, 1410 nt, Artificial Sequence
  derived and/or modified CDS sequence (opt1) from neuraminidase__InfluenzaA__ADM86443
augaaccccaaccagaagaucaucaccaucggcagcgugugcaugaccaucgggauggccaaccugauccuccagaucggcaacaucaucuccaucuggaucagccacuccauccagcuggggaaccagaaccagaucgagacgugcaaccagagcgucaucaccuacgagaacaacaccugggugaaccagaccuacgugaacaucuccaacacgaacuucgccgcgggccagagcgucguguccgugaagcuggccgggaacagcucccucugcccggucagcggcugggccaucuacuccaaggacaacagcauccgcaucggcuccaagggggacguguucgugauccgggagcccuucaucagcugcagcccccuggagugccgcaccuucuuccugacccagggcgcccuccugaacgacaagcacuccaacgggaccaucaaggaccggucccccuaccgcacgcugaugagcugcccgaucggcgagguccccucccccuacaacagccgguucgagagcguggccugguccgcgagcgccugccacgacgggaucaacuggcucaccaucggcaucuccggccccgacaacggggccguggccguccugaaguacaacggcaucaucaccgacaccaucaagagcuggcgcaacaacauccugcggacgcaggaguccgagugcgugugcgugaacgggagcugcuucaccgucaugaccgacggcccguccgacggccaggcgagcuacaagaucuuccgcaucgagaaggggaagaucgugaaguccguggagaugaacgcccccaacuaccacuacgaggagugcagcugcuaccccgacuccagcgagaucacgugcgucugccgggacaacuggcacggcuccaaccgccccugggugagcuucaaccagaaccucgaguaccagaucggguacaucugcuccggcaucuucggggacaacccgcggcccaacgacaagaccggcagcugcggccccguguccagcaacggggccaacggcgucaagggguucuccuucaaguacggcaacgggguguggaucggccgcaccaagagcaucagcucccggaacggcuucgagaugaucugggaccccaacggguggaccggcaccgacaacaacuucagcaucaagcaggacaucguggggaugaacgagugguccggcuacagcggguccuucguccagcacccggagcugacgggccuggacugcauccgccccugcuucuggguggagcucauccggggccgccccaaggagaacaccaucuggaccagcggguccagcaucuccuucugcggcgucaacagcgacaccguggggugguccuggcccgacggcgccgagcugccguucacgaucgacaaguga

SEQ ID NO: 83720 - RNA, 1410 nt, Artificial Sequence; identical to SEQ ID NO: 81345
  derived and/or modified CDS sequence (opt1) from neuraminidase__InfluenzaA__ADM86453

SEQ ID NO: 83721 - RNA, 1350 nt, Artificial Sequence
  derived and/or modified CDS sequence (opt1) from neuraminidase__InfluenzaA__ADM95377
augaaccccaaccagaagaucaucaccaucggcagcaucugcauggugaccgggaucgucucccugaugcuccaggugggcagcaugaucuccaucugggugagccacuccauccacacggggaaccagcaccaggccgagccgaucagcaacaccaacuuccugaccgagaaggccgucgcguccgugaagcuggccggcaacagcucccucugccccaucaacgggugggccguguacagcaaggacaacuccauccgcaucggcagcaagggcgacgucuucgugauccgggagcccuucaucuccugcagccaccuggagugccgcaccuucuuccugacgcagggggcccuccugaacgacaagcacuccaacggcaccgugaaggaccggagcccccaccgcacccugauguccugcccgaugggggaggcccccagccccuacaacucccgguucgagagcgucgcguggagcgccuccgccugccacgacggcaccagcuggcucacgaucgggaucuccggccccgacaacggcgccguggcggugcugaaguacaacgggaucaucaccgacaccaucaagagcuggcgcaacaacauccugcggacccaggaguccgagugcgccugcgucaacggcagcugcuucacggugaugaccgacgggccguccaacggccaggccagccacaagaucuucaagauggagaagggcaaggugaucaaguccgucgagcucgacgcccccaacuaccacuacgaggagugcagcugcuaccccgacgccggggagaucacgugcgugugccgcgacaacuggcacggcuccaaccggcccugggugagcuucaaccagaaccuggaguaccagaucggguacaucugcuccggcgucuucggggacaacccgcgccccaacgacggcaccggcagcugcgggcccguguccagcaacggcgcguacggggugaagggcuucuccuucaaguacgggaacggcgucuggaucggccggaccaagagcaccaacucccgcagcggguucgagaugaucugggaccccaacggcuggaccgagaccgacagccgguucuccgugaagcaggacaucguggccaucacggacuggagcggguacuccggcagcuucguccagcacccggagcugaccgggcucgacugcauccgccccugcuucuggguggagcugauccggggccgccccaaggaguccaccaucuggaccagcggcuccagcaucuccuucugcggggucaacagcgacacggugggcugguccuggcccgacggggccgagcugccguucaccaucgacaaguga

SEQ ID NO: 83722 - RNA, 1410 nt, Artificial Sequence; identical to SEQ ID NO: 80762
  derived and/or modified CDS sequence (opt1) from neuraminidase__InfluenzaA__ADM95650

SEQ ID NO: 83723 - RNA, 1410 nt, Artificial Sequence; identical to SEQ ID NO: 80762
  derived and/or modified CDS sequence (opt1) from neuraminidase__InfluenzaA__ADM95651

SEQ ID NO: 83724 - RNA, 1410 nt, Artificial Sequence
  derived and/or modified CDS sequence (opt1) from neuraminidase__InfluenzaA__ADM95652
augaaccccaaccagaagaucaucaccaucggcagcgugugcaugaccaucgggauggccaaccugauccuccagaucggcaacaucaucuccaucuggaucagccacuccauccagcuggggaaccagaaccagaucgagacgugcaaccagagcgucaucaccuacgagaacaacaccugggugaaccagaccuacgugaacaucuccaacacgaacuucgccgcgggccagagcgucguguccgugaaguucgccgggaacagcucccugugcccggucagcggcugggccaucuacuccaaggacaacagcauccgcaucggcuccaagggggacguguucgugauccgggagcccuucaucagcugcagcccccucgagugccgcaccuucuuccugacccagggcgcccugcucaacgacaagcacuccaacgggaccaucaaggaccggucccccuaccgcacgcugaugagcugcccgaucggcgagguccccucccccuacaacagccgguucgagagcguggccugguccgcgagcgccugccacgacgggaucaacuggcugaccaucggcaucuccggccccgacaacggggccguggccguccucaaguacaacggcaucaucaccgacaccaucaagagcuggcgcaacaacauccugcggacgcaggaguccgagugcgcgugcgugaacgggagcugcuucaccgugaugaccgacggcccguccgacggccaggccagcuacaagaucuuccgcaucgagaaggggaagaucgucaaguccguggagaugaacgcccccaacuaccacuacgaggagugcagcugcuaccccgacuccagcgagaucacgugcgugugccgggacaacuggcacggcuccaaccgccccugggucagcuucaaccagaaccuggaguaccagaucggguacaucugcuccggcaucuucggggacaacccgcggcccaacgacaagaccggcaacugcggccccgugagcuccaacggggccaacggcgugaagggguucagcuucaaguacggcaacggggucuggaucggccgcaccaaguccaucagcagccggaacggcuucgagaugaucugggaccccaacggguggaccggcaccgacaacaacuucuccaucaagcaggacaucguggggaucaacgaguggagcggcuacuccgggagcuucgugcagcacccggagcucacgggccuggacugcauccgccccugcuucugggucgagcugauccggggccgccccaaggagaacaccaucuggaccuccgggagcuccaucagcuucugcggcgugaacuccgacaccgucggguggagcuggcccgacggcgccgagcucccguucacgaucgacaaguga

SEQ ID NO: 83725 - RNA, 1410 nt, Artificial Sequence
  derived and/or modified CDS sequence (opt1) from neuraminidase__InfluenzaA__ADM95654
augaaccccaaccagaagaucaucaccaucggcagcgugugcaugaccaucgggauggccaaccugauccuccagaucggcaacaucaucuccaucuggaucagccacuccauccagcuggggaaccagaaccagaucgagacgugcaaccagagcgucaucaccuacgagaacaacaccugggugaaccagaccuacgugaacaucuccaacacgaacuucgccgcgggccagagcgucguguccgugaagcuggccgggaacagcucccucugcccggucagcggcugggccaucuacuccaaggacaacagcauccgcaucggcuccaagggggacguguucgugauccgggagcccuucaucagcugcagcccccuggagugccgcaccuucuuccugacccagggcgcccuccugaacgacaagcacuccaacgggaccaucaaggaccggucccccuaccgcacgcugaugagcugcccgaucggcgagguccccucccccuacaacagccgguucgagagcguggccugguccgcgagcgccugccacgacgggaucaacuggcucaccaucggcaucuccggccccgacaacggggccguggccguccugaaguacaacggcaucaucaccgacaccaucaagagcuggcgcaacaacauccugcggacgcaggaguccgagugcgcgugcgugaacgggagcugcuucaccgugaugaccgacggcccguccgacggccaggccagcuacaagaucuuccgcaucgagaaggggaagaucgucaaguccguggagaugaacgcccccaacuaccacuacgaggagugcagcugcuaccccgacuccagcgagaucacgugcgugugccgggacaacuggcacggcuccaaccgccccugggucagcuucaaccagaaccucgaguaccagaucggguacaucugcuccggcaucuucggggacaacccgcggcccaacgacaagaccggcagcugcggccccguguccagcaacggggccaacggcgugaagggguucuccuucaaguacggcaacggggucuggaucggccgcaccaagagcaucagcucccggcacggcuucgagaugaucugggaccccaacggguggaccggcaccgacaacaacuucagcaucaagcaggacaucguggggacgaacgagugguccggcuacagcggguccuucgugcagcacccggagcugaccggccuggacugcauccgccccugcuucugggucgagcucauccggggccgccccaaggagaacaccaucuggaccagcggguccagcaucuccuucugcggcgugaacagcgacacggucgggugguccuggcccgacggcgccgagcugccguucaccaucgacaaguga

SEQ ID NO: 83726 - RNA, 1410 nt, Artificial Sequence
  derived and/or modified CDS sequence (opt1) from neuraminidase__InfluenzaA__ADM95655
augaaccccaaccagaagaucaucaccaucggcagcgugugcaugaccaucgggauggccaaccugauccuccagaucggcaacaucaucuccaucuggaucagccacuccauccagcuggggaaccagaaccagaucgagacgugcaaccagagcgucaucaccuacgagaacaacaccugggugaaccagaccuacgugaacaucuccaacacgaacuucgccgcgggccagagcgucguguccgugaagcuggccgggaacagcucccucugcccggucagcggcugggccaucuacuccaaggacaacagcauccgcaucggcuccaagggggacguguucgugauccgggagcccuucaucagcugcagcccccuggagugccgcaccuucuuccugacccagggcgcccuccugaacgacaagcacuccaacgggaccaucaaggaccggucccccuaccgcacgcugaugagcugcccgaucggcgagguccccucccccuacaacagccgguucgagagcguggccugguccgcgagcgccugccacgacgggaucaacuggcucaccaucggcaucuccggccccgacaacggggccguggccguccugaaguacaacggcaucaucaccgacaccaucaagagcuggcgcaacaacauccugcggacgcaggaguccgagugcgcgugcgugaacgggagcugcuucaccgugaugaccgacggcccguccgacggccaggccagcuacaagaucuuccgcaucgagaaggggaagaucgucaaguccguggagaugaacgcccccaacuaccacuacgaggagugcagcugcuaccccgacuccagcgagaucacgugcgugugccgggacaacuggcacggcuccaaccgccccugggucagcuucaaccagaaccucgaguaccagaucggguacaucugcuccggcaucuucggggacaacccgcggcccagcgacaagaccggcuccugcggccccgugagcuccaacggggccaacggcgugaagggguucagcuucaaguacggcaacggggucuggaucggccgcaccaagagcaucuccagccggaacggcuucgagaugaucugggaccccaacggguggaccggcaccgacaacgacuucuccaucaagcaggacaucguggggaucaacgaguggagcggcuacuccgggagcuucgugcagcacccggagcugacgggccuggacugcauccgccccugcuucugggucgagcucauccggggccgccccaaggagaacaccaucuggaccuccgggagcuccaucagcuucugcggcgugaacuccgacaccgucggguggagcuggcccgacggcgccgagcugccguucacgaucgacaaguga

SEQ ID NO: 83727 - RNA, 1410 nt, Artificial Sequence; identical to SEQ ID NO: 82374
  derived and/or modified CDS sequence (opt1) from neuraminidase__InfluenzaA__ADM95656

SEQ ID NO: 83728 - RNA, 1410 nt, Artificial Sequence; identical to SEQ ID NO: 81939
  derived and/or modified CDS sequence (opt1) from neuraminidase__InfluenzaA__ADM95658

SEQ ID NO: 83729 - RNA, 1410 nt, Artificial Sequence
  derived and/or modified CDS sequence (opt1) from neuraminidase__InfluenzaA__ADM95659
augaaccccaaccagaagaucaucaccaucggcagcgugugcaugaccaucgggauggccaaccugauccuccagaucggcaacaucaucuccaucuggaucagccacuccauccagcuggggaaccagaaccagaucgagacgugcaaccagagcgucaucaccuacgagaacaacaccugggugaaccagaccuacgugaacaucuccaacacgaacuucgccgcgggccagagcgucguguccgugaagcuggccgggaacagcucccucugcccggucagcggcugggccaucuacuccaaggacaacagcauccgcaucggcuccaagggggacguguucgugauccgggagcccuucaucagcugcagcccccuggagugccgcaccuucuuccugacccagggcgcccuccugaacgacaagcacuccaacgggaccaucaaggaccggucccccuaccgcacgcugaugagcugcccgaucggcgagguccccucccccuacaacagccgguucgagagcguggccugguccgcgagcgccugccacgacgggaucaacuggcucaccaucggcaucuccggccccgacaacggggccguggccguccugaaguacaacggcaucaucaccgacaccaucaagagcuggcgcaacaacauccugcggacgcaggaguccgagugcgcgugcgugaacgggagcugcuucaccgugaugaccgacggcccguccgacggccaggccagcuacaagaucuuccgcaucgagaaggggaagaucgucaaguccguggagaugaacgcccccaacuaccacuacgaggagugcagcugcuaccccgacuccagcgagaucacgugcgugugccgggacaacuggcacggcuccaaccgccccugggucagcuucaaccagaaccucgaguaccagaucggguacaucugcuccggcaucuucggggacaacccgcggcccaacgacaagaccggcagcugcggccccguguccagcaacggggccaacggcgugaagggguucuccuucaaguacggcaacggggucuggaucggccgcaccaagagcaucagcucccggagcggcuucgagaugaucugggaccccaacggguggaccggcaccgacaacaacuucuccaucaagcaggacaucaucgggacgaacgaguggagcggcuacuccgggagcuucgugcagcacccggagcugaccggccuggacugcauccgccccugcuucuggguggagcucauccggggccgccccaaggagaacaccaucuggaccuccgggagcuccaucagcuucugcggcgucaacuccgacacggugggguggagcuggcccgacggcgccgagcugccguucaccaucgacaaguga

SEQ ID NO: 83730 - RNA, 1410 nt, Artificial Sequence; identical to SEQ ID NO: 80762
  derived and/or modified CDS sequence (opt1) from neuraminidase__InfluenzaA__ADM95660

SEQ ID NO: 83731 - RNA, 1410 nt, Artificial Sequence
  derived and/or modified CDS sequence (opt1) from neuraminidase__InfluenzaA__ADM95661
augaaccccaaccagaagaucaucaccaucggcagcgugugcaugaccaucgggauggccaaccugauccuccagaucggcaacaucaucuccaucuggaucagccacuccauccagcuggggaaccagaaccagaucgagacgugcaaccagagcgucaucaccuacgagaacaacaccugggugaaccagaccuacgugaacaucuccaacacgaacuucgccgcgggccagagcgucguguccgugaagcuggccgggaacagcucccucugcccggucagcggcugggccaucuacuccaaggacaacagcauccgcaucggcuccaagggggacguguucgugauccgggagcccuucaucagcugcagcccccuggagugccgcaccuucuuccugacccagggcgcccuccugaacgacaagcacuccaacgggaccaucaaggaccggucccccuaccgcacgcugaugagcugcccgaucggcgagguccccucccccuacaacagccgguucgagagcguggccugguccgcgagcgccugccacgacgggaucaacuggcucaccaucggcaucuccggccccgacaacggggccguggccguccugaaguacaacggcaucaucaccgacaccaucaagagcuggcgcaacaacauccugcggacgcaggaguccgagugcgcgugcgugaacgggagcugcuucaccgugaugaccgacggcccguccgacggccaggccagcuacaagaucuuccgcaucgagaaggggaagaucgucaaguccguggagaugaacgcccccaacuaccacuacgaggagugcagcugcuaccccgacuccagcgagaucacgugcgugugccgggacaacuggcacggcuccaaccgccccugggucagcuucaaccagaaccucgaguaccagaucggguacaucugcuccggcaucuucggggacaacccgcggcccaacgacaagaccggcagcugcggccccguguccagcaacggggccaacggcgugaagggguucuccuucaaguacggcaacggggucuggaucggccgcaccaagagcaucagcucccggaacggcuucgagaugaucugggaccccaacggguggaccggcaccgacaacaacuucagcaucaagcaggacaucguggggacgaacgagugguccggcuacagcggguccuucgugcagcacccggagcugaccggccuggacugcauccgccccugcuucugggucgagcucauccggggccgccccaaggagaacaccaucuggaccagcggguccaucaucagcuucugcggcgugaacuccgacacggucggguggagcuggcccgacggcgccgagcugccguucaccaucgacaaguga

SEQ ID NO: 83732 - RNA, 1410 nt, Artificial Sequence; identical to SEQ ID NO: 82374
  derived and/or modified CDS sequence (opt1) from neuraminidase__InfluenzaA__ADM95662

SEQ ID NO: 83733 - RNA, 1410 nt, Artificial Sequence
  derived and/or modified CDS sequence (opt1) from neuraminidase__InfluenzaA__ADM95663
augaaccccaaccagaagaucaucaccaucggcagcgugugcaugaccaucgggauggccaaccugauccuccagaucggcaacaucaucuccaucuggaucagccacuccauccagcuggggaaccagaaccagaucgagacgugcaaccagagcgucaucaccuacgagaacaacaccugggugaaccagaccuacgugaacaucuccaacacgaacuucgccgcgggccagagcgucguguccgugaagcuggccgggaacagcucccucugcccggucaacggcugggccaucuacagcaaggacaacuccauccgcaucggcagcaagggggacguguucgugauccgggagcccuucaucuccugcagcccccuggagugccgcaccuucuuccugacccagggcgcccuccugaacgacaagcacuccaacgggaccaucaaggaccggagccccuaccgcacgcugauguccugcccgaucggcgagguccccagccccuacaacucccgguucgagagcguggccuggagcgcguccgccugccacgacgggaucaacuggcucaccaucggcaucagcggccccgacaacggggccguggccguccugaaguacaacggcaucaucaccgacaccaucaaguccuggcgcaacaacauccugcggacgcaggagagcgagugcgcgugcgugaacggguccugcuucaccgugaugaccgacggcccgagcgacggccaggccuccuacaagaucuuccgcaucgagaaggggaagaucgucaagagcaucgagaugaacgcccccaacuaccacuacgaggagugcuccugcuaccccgacagcuccgagaucacgugcgugugccgggacaacuggcacggcagcaaccgccccuggguguccuucaaccagaaccucgaguaccagaucggguacaucugcagcggcaucuucggggacaacccgcggcccaacgacaagaccggcuccugcggccccgucagcuccaacggggccaacggcgugaagggguucagcuucaaguacggcaacgggguguggaucggccgcaccaaguccaucagcagccggaacggcuucgagaugaucugggaccccaacggguggaccggcaccgacaacaacuucuccaucaagcaggacaucgucgggacgaacgaguggagcggcuacuccgggagcuucgugcagcacccggagcugaccggccuggacugcauccgccccugcuucuggguggagcucauccggggccgccccaaggagaacaccaucuggaccuccgggagcaucaucuccuucugcggcgucaacagcgacacgguggggugguccuggcccgacggcgccgagcugccguucaccaucgacaaguga

SEQ ID NO: 83734 - RNA, 1410 nt, Artificial Sequence; identical to SEQ ID NO: 82374
  derived and/or modified CDS sequence (opt1) from neuraminidase__InfluenzaA__ADM95664

SEQ ID NO: 83735 - RNA, 1410 nt, Artificial Sequence; identical to SEQ ID NO: 82374
  derived and/or modified CDS sequence (opt1) from neuraminidase__InfluenzaA__ADM95665

SEQ ID NO: 83736 - RNA, 1410 nt, Artificial Sequence
  derived and/or modified CDS sequence (opt1) from neuraminidase__InfluenzaA__ADM95666
augaaccccaaccagaagaucaucaccaucggcagcgugugcaugaccaucgggauggccaaccugauccuccagaucggcaacaucaucuccaucuggaucagccacuccauccagcuggggaaccagaaccagaucgagacgugcaaccagagcgucaucaccuacgagaacaacaccugggugaaccagaccuacgugaacaucuccaacacgaacuucgccgcgggccagagcgucguguccgugaagcuggccgggaacagcucccucugcccggucaacggcugggccaucuacagcaaggacaacuccauccgcaucggcagcaagggggacguguucgugauccgggagcccuucaucuccugcagcccccuggagugccgcaccuucuuccugacccagggcgcccuccugaacgacaagcacuccaacgggaccaucaaggaccggagccccuaccgcacgcugauguccugcccgaucggcgagguccccagccccuacaacucccgguucgagagcguggccuggagcgcguccgccugccacgacgggaucaacuggcucaccaucggcaucagcggccccgacaacggggccguggccguccugaaguacaacggcaucaucaccgacaccaucaaguccuggcgcaacaacauccugcggacgcaggagagcgagugcgcgugcgugaacggguccugcuucaccgugaugaccgacggcccgagcgacggccaggccuccuacaagaucuucaagaucgagaaggggaagaucgucaagagcguggagaugaacgcccccaacuaccacuacgaggagugcuccugcuaccccgacagcuccgagaucacgugcgugugccgcgacaacuggcacggcagcaaccggcccugggucuccuucaaccagaaccucgaguaccagaucggguacaucugcagcggcaucuucggggacaacccgcgccccaacgacaagaccggcuccugcggccccgugagcuucaacggggccaacggcgugaagggguucuccuucaaguacggcaacggggucuggaucggccggaccaagagcaucuccagccgcaacggcuucgagaugaucugggaccccaacggguggaccggcaccgacaacaacuucagcaucaagcaggacaucguggggacgaacgagugguccggcuacagcggguccuucgugcagcacccggagcugaccggccuggacugcauccggcccugcuucugggucgagcucauccgcggccggcccaaggagaacaccaucuggaccagcggguccaucaucagcuucugcggcgugaacuccgacacggucggguggagcuggcccgacggcgccgagcugccguucaccaucgacaaguga

SEQ ID NO: 83737 - RNA, 1410 nt, Artificial Sequence; identical to SEQ ID NO: 82374
  derived and/or modified CDS sequence (opt1) from neuraminidase__InfluenzaA__ADM95667

SEQ ID NO: 83738 - RNA, 1410 nt, Artificial Sequence; identical to SEQ ID NO: 82374
  derived and/or modified CDS sequence (opt1) from neuraminidase__InfluenzaA__ADM95668

SEQ ID NO: 83739 - RNA, 1410 nt, Artificial Sequence; identical to SEQ ID NO: 80762
  derived and/or modified CDS sequence (opt1) from neuraminidase__InfluenzaA__ADM95669

SEQ ID NO: 83740 - RNA, 1410 nt, Artificial Sequence; identical to SEQ ID NO: 80762
  derived and/or modified CDS sequence (opt1) from neuraminidase__InfluenzaA__ADM95670

SEQ ID NO: 83741 - RNA, 1410 nt, Artificial Sequence
  derived and/or modified CDS sequence (opt1) from neuraminidase__InfluenzaA__ADM95672
augaaccccaaccagaagaucaucaccaucggcagcgugugcaugaccaucgggauggccaaccugauccuccagaucggcaacaucaucuccaucuggaucagccacacgauccagcuggggaaccagaaccagaucgagaccugcaaccaguccgucaucaccuacgagaacaacaccugggugaaccagacguacgugaacaucagcaacaccaacuucgccgcgggccaguccgucgugagcgugaagcuggccgggaacuccagccucugcccggucuccggcugggccaucuacagcaaggacaacuccauccgcaucggcagcaagggggacguguucgugauccgggagcccuucaucuccugcagcccccuggagugccgcaccuucuuccugacccagggcgcccuccugaacgacaagcacuccaacgggacgaucaaggaccggagccccuaccgcacccugauguccugcccgaucggcgagguccccagccccuacaacucccgguucgagagcguggccuggagcgcguccgccugccacgacgggaucaacuggcucaccaucggcaucagcggccccgacaacggggccguggccguccugaaguacaacggcaucaucaccgacacgaucaaguccuggcgcaacaacauccugcggacccaggagagcgagugcgcgugcgugaacggguccugcuucaccgugaugaccgacggcccgagcgacggccaggccuccuacaagaucuuccgcaucgagaaggggaagaucgucaagagcguggagaugaacgcccccaacuaccacuacgaggagugcuccugcuaccccgacagcuccgagaucacgugcgugugccgggacaacuggcacggcagcaaccgccccugggucuccuucaaccagaaccucgaguaccagaucggguacaucugcagcggcaucuucggggacaacccgcggcccaacgacaagaccggcuccugcggccccgugagcuccaacggggccaacggcgugaagggguucagcuucaaguacggcaacggggucuggaucggccgcaccaaguccaucagcagccggaacggcuucgagaugaucugggaccccaacggguggaccggcacggacaacaacuucuccaucaagcaggacaucguggggaccaacgaguggagcggcuacuccgggagcuucgugcagcacccggagcugaccggccuggacugcauccgccccugcuucugggucgagcucauccggggccgccccaaggagaacaccaucuggacguccgggagcuccaucagcuucugcggcgugaacuccgacaccgucggguggagcuggcccgacggcgccgagcugccguucaccaucgacaaguga

SEQ ID NO: 83742 - RNA, 1410 nt, Artificial Sequence; identical to SEQ ID NO: 80762
  derived and/or modified CDS sequence (opt1) from neuraminidase__InfluenzaA__ADM95673

SEQ ID NO: 83743 - RNA, 1410 nt, Artificial Sequence; identical to SEQ ID NO: 82374
  derived and/or modified CDS sequence (opt1) from neuraminidase__InfluenzaA__ADM95674

SEQ ID NO: 83744 - RNA, 1410 nt, Artificial Sequence; identical to SEQ ID NO: 80762
  derived and/or modified CDS sequence (opt1) from neuraminidase__InfluenzaA__ADM95675

SEQ ID NO: 83745 - RNA, 1410 nt, Artificial Sequence
  derived and/or modified CDS sequence (opt1) from neuraminidase__InfluenzaA__ADM95677
augaaccccaaccagaagaucaucaccaucggcagcgugugcaugaccaucgggauggccaaccugauccuccagaucggcaacaucaucuccaucuggaucagccacuccauccagcuggggaaccagaaccagaucgagacgugcaaccagagcgucaucaccuacgagaacaacaccugggugaaccagaccuacgugaacaucuccaacacgaacuucgccgcgggccagagcgucguguccgugaagcuggccgggaacagcucccucugcccggucaacggcugggccaucuacagcaaggacaacuccauccgcaucggcagcaagggggacguguucgugauccgggagcccuucaucuccugcagcccccuggagugccgcaccuucuuccugacccagggcgcccuccugaacgacaagcacuccaacgggaccaucaaggaccggagccccuaccgcacgcugauguccugcccgaucggcgagguccccagccccuacaacucccgguucgagagcguggccuggagcgcguccgccugccacgacgggaucaacuggcucaccaucggcaucagcggccccgacaacggggccguggccguccugaaguacaacggcaucaucaccgacaccaucaaguccuggcgcaacaacauccugcggacgcaggagagcgagugcgcgugcgugaacggguccugcuucaccgugaugaccgacggcccgagcgacggccaggccuccuacaagaucuuccgcaucgagaaggggaagaucgucaagagcguggagaugaacgcccccaacuaccacuacgaggagugcuccugcuaccccgacagcuccgagaucacgugcgugugccgggacaacuggcacggcagcaaccgccccugggucuccuucaaccagaaccucgaguaccagaucggguacaucugcagcggcaucuucggggacaacccgcggcccaacgacaagaccggcuccugcggccccgugagcuccaacggggccaacggcgugaagggguucagcuucaaguacggcaacggggucuggaucggccgcaccaaguccaucagcagccggaacggcuucgagaugaucugggaccccaacggguggaccggcaccgacaacaacuucuccaucaagcaggacaucguggggacgaacgaguggagcggcuacuccgggagcuucgugcagcacccggagcugaccggccuggacugcauccgccccugcuucugggucgagcucauccggggccgccccaaggagaacaccaucuggaccuccgggagcaucaucuccuucugcggcgugaacagcgacacggucgggugguccuggcccgacggcgccgagcugccguucaccaucgacaaguga

SEQ ID NO: 83746 - RNA, 1410 nt, Artificial Sequence
  derived and/or modified CDS sequence (opt1) from neuraminidase__InfluenzaA__ADM95678
augaaccccaaccagaagaucaucaccaucggcagcgugugcaugaccaucgggauggccaaccugauccuccagaucggcaacaucaucuccaucuggaucagccacuccauccagcuggggaaccagaaccagaucgagacgugcaaccagagcgucaucaccuacgagaacaacaccugggugaaccagaccuacgugaacaucuccaacacgaacuucgccgcgggccagagcgucguguccgugaaguucgccgggaacagcucccugugcccggucagcggcugggccaucuacuccaaggacaacagcauccgcaucggcuccaagggggacguguucgugauccgggagcccuucaucagcugcagcccccucgagugccgcaccuucuuccugacccagggcgcccugcucaacgacaagcacuccaacgggaccaucaaggaccggucccccuaccgcacgcugaugagcugcccgaucggcgagguccccucccccuacaacagccgguucgagagcguggccugguccgcgagcgccugccacgacgggaucaacuggcugaccaucggcaucuccggccccgacaacggggccguggccguccucaaguacaacggcaucaucaccgacaccaucaagagcuggcgcaacaacauccugcggacgcaggaguccgagugcgcgugcgugaacgggagcugcuucaccgugaugaccgacggcccguccgacggccaggccagcuacaagaucuuccgcaucgagaaggggaagaucgucaaguccguggagaugaacgcccccaacuaccacuacgaggagugcagcugcuaccccgacuccagcgagaucacgugcgugugccgggacaacuggcacggcuccaaccgccccugggucagcuucaaccagaaccuggaguaccagaucggguacaucugcuccggcaucuucggggacaacccgcggcccaacgacaagaccggcagcugcggccccguguccagcaacggggccaacggcgugaagggguucuccuucaaguacggcaacggggucuggaucggccgcaccaagagcaucagcucccggaacggcuucgagaugaucugggaccccaacggguggaccggcaccgacaacaacuucagcaucaagcaggacaucguggggaucaacgagugguccggcuacagcggguccuucgugcagcacccggagcucacgggccuggacugcauccgccccugcuucugggucgagcugauccggggccgccccaaggagaacaccaucuggaccagcggguccagcaucuccuucugcggcgugaacagcgacaccgucgggugguccuggcccgacggcgccgagcucccguucacgaucgacaaguga

SEQ ID NO: 83747 - RNA, 1410 nt, Artificial Sequence; identical to SEQ ID NO: 83745
  derived and/or modified CDS sequence (opt1) from neuraminidase__InfluenzaA__ADM95679

SEQ ID NO: 83748 - RNA, 1410 nt, Artificial Sequence; identical to SEQ ID NO: 83745
  derived and/or modified CDS sequence (opt1) from neuraminidase__InfluenzaA__ADM95680

SEQ ID NO: 83749 - RNA, 1410 nt, Artificial Sequence; identical to SEQ ID NO: 80762
  derived and/or modified CDS sequence (opt1) from neuraminidase__InfluenzaA__ADM95681

SEQ ID NO: 83750 - RNA, 1410 nt, Artificial Sequence
  derived and/or modified CDS sequence (opt1) from neuraminidase__InfluenzaA__ADM95682
augaaccccaaccagaagaucaucaccaucggcagcgugugcaugaccaucgggauggccaaccugauccuccagaucggcaacaucaucuccaucuggaucagccacuccauccagcuggggaaccagaaccagaucgagaucugcaaccagagcgucaucacguacgagaacaacaccugggugaaccagaccuacgugaacaucuccaacaccaacuucgccgcgggccagagcgucguguccgugaagcuggccgggaacagcucccucugcccggucagcggcugggccaucuacuccaaggacaacagcauccgcaucggcuccaagggggacguguucgugauccgggagcccuucaucagcugcagcccccuggagugccgcacguucuuccugacccagggcgcccuccugaacgacaagcacuccaacgggaccaucaaggaccggucccccuaccgcacccugaugagcugcccgaucggcgagguccccucccccuacaacagccgguucgagagcguggccugguccgcgagcgccugccacgacgggaucaacuggcucacgaucggcaucuccggccccgacaacggggccguggccguccugaaguacaacggcaucaucaccgacaccaucaagagcuggcgcaacaacauccugcggacccaggaguccgagugcgcgugcgugaacgggagcugcuucacggugaugaccgacggcccguccgacggccaggccagcuacaagaucuuccgcaucgagaaggggaagaucgucaaguccguggagaugaacgcccccaacuaccacuacgaggagugcagcugcuaccccgacuccagcgagaucacgugcgugugccgggacaacuggcacggcuccaaccgccccugggucagcuucaaccagaaccucgaguaccagaucggguacaucugcuccggcaucuucggggacaacccgcggcccaacgacaagaccggcagcugcggccccguguccagcaacggggccaacggcgugaagggguucuccuucaaguacggcaacggggucuggaucggccgcaccaagagcaucagcucccggaacggcuucgagaugaucugggaccccaacggguggaccggcaccgacaacaacuucagcaucaagcaggacaucguggggaccaacgagugguccggcuacagcggguccuucgugcagcacccggagcugacgggccuggacugcauccgccccugcuucugggucgagcucauccggggccgccccaaggagaacaccaucuggaccagcggguccagcaucuccuucugcggcgugaacagcgacaccgucgggugguccuggcccgacggcgccgagcugccguucacgaucgacaaguga

SEQ ID NO: 83751 - RNA, 1410 nt, Artificial Sequence
  derived and/or modified CDS sequence (opt1) from neuraminidase__InfluenzaA__ADM95683
augaaccccaaccagaagaucaucaccaucggcagcgugugcaugaccaucgggauggccaaccugauccuccagaucggcaacaucaucuccaucuggaucagccacuccauccagcuggggaaccagaaccagaucgagacgugcaaccagagcgucaucaccuacgagaacaacaccugggugaaccagaccuacgugaacaucuccaacacgaacuucgccgcgggccagagcgucguguccgugaagcuggccgggaacagcucccucugcccggucagcggcugggccaucuacuccaaggacaacagcauccgcaucggcuccaagggggacguguucgugauccgggagcccuucaucagcugcagcccccuggagugccgcaccuucuuccugacccagggcgcccuccugaacgacaagcacuccaacgggaccaucaaggaccggucccccuaccgcacgcugaugagcugcccgaucggcgagguccccucccccuacaacagccgguucgagagcguggccugguccgcgagcgccugccacgacgggaucaacuggcucaccaucggcaucuccggccccgacaacggggccguggccguccugaaguacaacggcaucaucaccgacaccaucaagagcuggcgcaacaacauccugcggacgcaggaguccgagugcgcgugcgugaacgggagcugcuucaccgugaugaccgacggcccguccgacggccaggccagcuacaagaucuuccgcaucgagaaggggaagaucgucaaguccguggagaugaacgcccccaacuaccacuacgaggagugcagcugcuaccccgacuccagcgagaucacgugcgugugccgggacaacuggcacggcuccaaccgccccugggucagcuucaaccagaaccucgaguaccagaucggguacaucugcuccggcaucuucggggacaacccgcggcccaacgacaagaccggcagcugcggccccguguccagcaacggggccaacggcgugaagggguucuccuucaaguacggcaacggggucuggaucggccgcaccaagagcaucagcucccggaacggcuucgagaugaucugggaccccaacggguggaccggcaccgacaacaacuucagcaucaagcaggacaucguggggaucaacgagugguccggcuacagcggguccuucgugcagcacccggagcugacgggccuggacugcauccgccccugcuucugggucgagcucauccggggccgccccaaggagaacaccaucuggaccagcggguccagcauguccuucugcggcgugaacagcgacaccgucgggugguccuggcccgacggcgccgagcugccguucacgaucgacaaguga

SEQ ID NO: 83752 - RNA, 1410 nt, Artificial Sequence; identical to SEQ ID NO: 80762
  derived and/or modified CDS sequence (opt1) from neuraminidase__InfluenzaA__ADM95684

SEQ ID NO: 83753 - RNA, 1410 nt, Artificial Sequence
  derived and/or modified CDS sequence (opt1) from neuraminidase__InfluenzaA__ADM95685
augaaccccaaccagaagaucaucaccaucggcagcgugugcaugaccaucgggauggccaaccugauccuccagaucggcaacaucaucuccaucuggaucagccacuccauccagcuggggaaccagaaccagaucgagacgugcaaccagagcgucaucaccuacgagaacaacaccugggugaaccagaccuacgugaacaucuccaacacgaacuucgccgcgggccagagcgucguguccgugaagcuggccgggaacagcucccucugcccggucagcggcugggccaucuacuccaaggacaacagcauccgcaucggcuccaagggggacguguucgugauccgggagcccuucaucagcugcagcccccuggagugccgcaccuucuuccugacccagggcgcccuccugaacgacaagcacuccaacgggaccaucaaggaccggucccccuaccgcacgcugaugagcugcccgaucggcgagguccccucccccuacaacagccgguucgagagcguggccugguccgcgagcgccugccacgacgggaucaacuggcucaccaucggcaucuccggccccgacaacggggccguggccguccugaaguacaacggcaucaucaccgacaccaucaagagcuggcgcaacaacauccugcggacgcaggaguccgagugcgcgugcgugaacgggagcugcuucaccgugaugaccgacggcccguccgacggccaggccagcuacaagaucuuccgcaucgagaaggggaagaucgucaaguccguggagaugaacgcccccaacuaccacuacgaggagugcagcugcuaccccgacuccagcgagaucacgugcgugugccgggacaacuggcacggcuccaaccgccccugggucagcuucaaccagaaccucgaguaccagaucggguacaucugcuccggcaucuucggggacaacccgcggcccaacgacaagaccggcagcugcggccccguguccagcaacggggccaacggcgugaagggguucuccuucaaguacggcaacggggucuggaucggccgcaccaagagcaucagcucccggcacggcuucgagaugaucugggaccccaacggguggaccggcaccgacaacaacuucagcaucaagcaggacaucguggggacgaacgagugguccggcuacagcggguccuucgugcagcacccggagcugaccggccuggacugcauccgccccugcuucugggucgagcucauccggggccgccccaaggagaacaccguguggaccagcggguccagcaucuccuucugcggcgucaacagcgacacgguggggugguccuggcccgacggcgccgagcugccguucaccaucgacaaguga

SEQ ID NO: 83754 - RNA, 1410 nt, Artificial Sequence
  derived and/or modified CDS sequence (opt1) from neuraminidase__InfluenzaA__ADM95686
augaaccccaaccagaagaucaucaccaucggcagcgugugcaugaccaucgggauggccaaccugauccuccagaucggcaacaucaucuccaucuggaucagccacuccauccagcuggggaaccagaaccagaucgagacgugcaaccagagcgucaucaccuacgagaacaacaccugggugaaccagaccuacgugaacaucuccaacacgaacuucgccgcgggccagagcgucguguccgugaagcuggccgggaacagcucccucugcccggucagcggcugggccaucuacuccaaggacaacagcauccgcaucggcuccaagggggacguguucgugauccgggagcccuucaucagcugcagcccccuggagugccgcaccuucuuccugacccagggcgcccuccugaacgacaagcacuccaacgggaccaucaaggaccggucccccuaccgcacgcugaugagcugcccgaucggcgagguccccucccccuacaacagccgguucgagagcguggccugguccgcgagcgccugccacgacgggaucaacuggcucaccaucggcaucuccggccccgacaacggggccguggccguccugaaguacaacggcaucaucaccgacaccaucaagagcuggcgcaacaacauccugcggacgcaggaguccgagugcgcgugcgugaacgggagcugcuucaccgugaugaccgacggcccguccgacggccaggccagcuacaagaucuuccgcaucgagaaggggaagaucgucaaguccguggagaugaacgcccccaacuaccacuacgaggagugcagcugcuaccccgacuccagcgagaucacgugcgugugccgggacaacuggcacggcuccaaccgccccugggucagcuucaaccagaaccucgaguaccagaucggguacaucugcuccggcaucuucggggacaacccgcggcccaacgacaagaccggcagcugcggccccguguccagcaacggggccaacggcgugaagggguucuccuucaaguacggcaacggggucuggaucggccgcaccaagagcaucagcucccggaacggcuucgagaugaucugggaccccaacggguggaccggcaccgacaacgacuucagcaucaagcaggacaucguggggaucaacgagugguccggcuacagcggguccuucgugcagcacccggagcugacgggccuggacugcauccgccccugcuucugggucgagcucauccggggccgccccaaggagaacaccaucuggaccagcggguccagcaucuccuucugcggcgugaacagcgacaccgucgggugguccuggcccgacggcgccgagcugccguucacgaucgacaaguga

SEQ ID NO: 83755 - RNA, 1410 nt, Artificial Sequence; identical to SEQ ID NO: 80762
  derived and/or modified CDS sequence (opt1) from neuraminidase__InfluenzaA__ADM95687

SEQ ID NO: 83756 - RNA, 1410 nt, Artificial Sequence
  derived and/or modified CDS sequence (opt1) from neuraminidase__InfluenzaA__ADM95688
augaaccccaaccagaagaucaucaccaucggcagcgugugcaugaccaucgggauggccaaccugauccuccagaucggcaacaucaucuccaucuggaucagccacuccauccagcuggggaaccagaaccagaucgagacgugcaaccagagcgucaucaccuacgagaacaacaccugggugaaccagaccuacgugaacaucuccaacacgaacuucgccgcgggccagagcgucguguccgugaagcuggccgggaacagcucccucugcccggucagcggcugggccaucuacuccaaggacaacagcauccgcaucggcuccaagggggacguguucgugauccgggagcccuucaucagcugcagcccccuggagugccgcaccuucuuccugacccagggcgcccuccugaacgacaagcacuccaacgggaccaucaaggaccggucccccuaccgcacgcugaugagcugcccgaucggcgagguccccucccccuacaacagccgguucgagagcguggccugguccgcgagcgccugccacgacgggaucaacuggcucaccaucggcaucuccggccccgacaacggggccguggccguccugaaguacaacggcaucaucaccgacaccaucaagagcuggcgcaacaacauccugcggacgcaggaguccgagugcgcgugcgugaacgggagcugcuucaccgugaugaccgacggcccguccgacggccaggccagcuacaagaucuuccgcaucgagaaggggaagaucgucaaguccguggagaugaacgcccccaacuaccacuacgaggagugcagcugcuaccccgacuccagcgagaucacgugcgugugccgggacaacuggcacggcuccaaccgccccugggucagcuucaaccagaaccucgaguaccagaucggguacaucugcuccggcaucuucggggacaacccgcggcccaacgacaagaccggcagcugcggccccguguccagcaacggggccaacggcgugaagggguucuccuucaaguacggcaacggggucuggaucggccgcaccaagagcaucagcucccggaacggcuucgagaugaucugggaccccaacggguggaccggcaccgacaacaacuucagcaucaagcaggacaucguggggacgaacgagugguccggcuacagcggguccuucgugcagcacccggagcugacccgccuggacugcauccggcccugcuucugggucgagcucauccgcggccggcccaaggagaacaccaucuggaccagcggcuccaucaucagcuucugcggggugaacuccgacacggucggcuggagcuggcccgacggggccgagcugccguucaccaucgacaaguga

SEQ ID NO: 83757 - RNA, 1410 nt, Artificial Sequence; identical to SEQ ID NO: 83754
  derived and/or modified CDS sequence (opt1) from neuraminidase__InfluenzaA__ADM95689

SEQ ID NO: 83758 - RNA, 1410 nt, Artificial Sequence
  derived and/or modified CDS sequence (opt1) from neuraminidase__InfluenzaA__ADM95690
augaaccccaaccagaagaucaucaccaucggcagcgugugcaugaccaucgggauggccaaccugauccuccagaucggcaacaucaucuccaucuggaucagccacuccauccagcuggggaaccagaaccagaucgagacgugcaaccagagcgucaucaccuacgagaacaacaccugggugaaccagaccuacgugaacaucuccaacacgaacuucgccgcgggccagagcgucguguccgugaagcuggccgggaacagcucccucugcccggucagcggcugggccaucuacuccaaggacaacagcauccgcaucggcuccaagggggacguguucgugauccgggagcccuucaucagcugcagcccccuggagugccgcaccuucuuccugacccagggcgcccuccugaacgacaagcacuccaacgggaccaucaaggaccggucccccuaccgcacgcugaugagcugcccgaucggcgagguccccucccccuacaacagccgguucgagagcguggccugguccgcgagcgccugccacgacgggaucaacuggcucaccaucggcaucuccggccccgacaacggggccguggccguccugaaguacaacggcaucaucaccgacaccaucaagagcuggcgcaacaacauccugcggacgcaggaguccgagugcgcgugcgugaacgggagcugcuucaccgugaugaccgacggcccguccgacggccaggccagcuacaagaucuuccgcaucgagaaggggaagaucgucaaguccguggagaugaacgcccccaacuaccacuacgaggagugcagcugcuaccccgacuccagcgagaucacgugcgugugccgggacaacuggcacggcuccaaccgccccugggucagcuucaaccagaaccucgaguaccagaucggguacaucugcuccggcaucuucggggacaacccgcggcccaacgacaagaccggcagcugcggccccguguccagcaacggggccaacggcgugaagggguucuccuucaaguacggcaacggggucuggaucggccgcaccaagagcaucagcucccggaacggcuucgagaugaucugggaccccaacggguggaccggcaccgacaacaacuucagcaucaagcaggacaucaucgggacgaacgagugguccggcuacagcggguccuucgugcagcacccggagcugaccggccuggacugcauccgccccugcuucuggguggagcucauccggggccgccccaaggagaacaccaucuggaccagcggguccagcaucuccuucugcggcgucaacagcgacacgguggggugguccuggcccgacggcgccgagcugccguucaccaucgacaaguga

SEQ ID NO: 83759 - RNA, 1410 nt, Artificial Sequence; identical to SEQ ID NO: 80762
  derived and/or modified CDS sequence (opt1) from neuraminidase__InfluenzaA__ADM95691

SEQ ID NO: 83760 - RNA, 1410 nt, Artificial Sequence
  derived and/or modified CDS sequence (opt1) from neuraminidase__InfluenzaA__ADM95692
augaaccccaaccagaagaucaucaccaucggcagcgugugcaugaccaucgggauggccaaccugauccuccagaucggcaacaucaucuccaucuggaucagccacuccauccagcuggggaaccagaaccagaucgagacgugcaaccagagcgucaucaccuacgagaacaacaccugggugaaccagaccuacgugaacaucaucaacacgaacuucgccgcgggccaguccgucgugagcgugaagcuggccgggaacuccagccucugcccggucuccggcugggccaucuacagcaaggacaacuccauccgcaucggcagcaagggggacguguucgugauccgggagcccuucaucuccugcagcccccuggagugccgcaccuucuuccugacccagggcgcccuccugaacgacaagcacuccaacgggaccaucaaggaccggagccccuaccgcacgcugauguccugcccgaucggcgagguccccagccccuacaacucccgguucgagagcguggccuggagcgcguccgccugccacgacgggaucaacuggcucaccaucggcaucagcggccccgacaacggggccguggccguccugaaguacaacggcaucaucaccgacaccaucaaguccuggcgcaacaacauccugcggacgcaggagagcgagugcgcgugcgugaacggguccugcuucaccgugaugaccgacggcccgagcgacggccaggccuccuacaagaucuuccgcaucgagaaggggaagaucgucaagagcguggagaugaacgcccccaacuaccacuacgaggagugcuccugcuaccccgacagcuccgagaucacgugcgugugccgggacaacuggcacggcagcaaccgccccugggucuccuucaaccagaaccucgaguaccagaucggguacaucugcagcggcaucuucggggacaacccgcggcccaacgacaagaccggcuccugcggccccgugagcuccaacggggccaacggcgugaagggguucagcuucaaguacggcaacggggucuggaucggccgcaccaaguccaucagcagccggaacggcuucgagaugaucugggaccccaacggguggaccggcaccgacaacaacuucuccaucaagcaggacaucguggggaucaacgaguggagcggcuacuccgggagcuucgugcagcacccggagcugacgggccuggacugcauccgccccugcuucugggucgagcucauccggggccgccccaaggagaacaccaucuggaccuccgggagcuccaucagcuucugcggcgugaacuccgacaccgucggguggagcuggcccgacggcgccgagcugccguucacgaucgacaaguga

SEQ ID NO: 83761 - RNA, 1410 nt, Artificial Sequence; identical to SEQ ID NO: 80762
  derived and/or modified CDS sequence (opt1) from neuraminidase__InfluenzaA__ADM95693

SEQ ID NO: 83762 - RNA, 1410 nt, Artificial Sequence; identical to SEQ ID NO: 80762
  derived and/or modified CDS sequence (opt1) from neuraminidase__InfluenzaA__ADM95694

SEQ ID NO: 83763 - RNA, 1410 nt, Artificial Sequence; identical to SEQ ID NO: 80762
  derived and/or modified CDS sequence (opt1) from neuraminidase__InfluenzaA__ADM95695

SEQ ID NO: 83764 - RNA, 1410 nt, Artificial Sequence; identical to SEQ ID NO: 83754
  derived and/or modified CDS sequence (opt1) from neuraminidase__InfluenzaA__ADM95696

SEQ ID NO: 83765 - RNA, 1410 nt, Artificial Sequence; identical to SEQ ID NO: 82374
  derived and/or modified CDS sequence (opt1) from neuraminidase__InfluenzaA__ADM95697

SEQ ID NO: 83766 - RNA, 1413 nt, Artificial Sequence
  derived and/or modified CDS sequence (opt1) from neuraminidase__InfluenzaA__ADM95698
augaaccccaaccagaagaucaucaccaucggcagcaucuccaucgccaucgggaucaucagccugaugcuccagaucggcaacaucaucuccaucugggccagccacuccauccagaccgggagccagaacaacacgggcaucugcaaccagcgcaucaucaccuacgagaacaacaccugggugaaccacaccuacgucaacaucaacaacacgaacgugguggcggaggaggacaagaccuccgucacccuggccgggaacagcucccugugcagcaucuccggcugggccaucuacaccaaggacaacagcauccggaucggcuccaagggggacguguucgugauccgcgagccguucaucagcugcucccaccucgagugccggacguucuuccugacccagggcgcccugcucaacgacaagcacagcaacgggaccgucaaggaccgcucccccuaccgggcccugaugagcugcccccugggcgaggcgcccuccccguacaacagcaaguucgagagcguggccugguccgccagcgccugccacgacgggaugggcuggcucaccaucggcaucuccgggcccgacaacggcgcgguggccguccugaaguacaacgggaucaucacgggcaccaucaagagcuggaagaagcagauccugcgcacccaggaguccgagugcgugugcaugaacggcagcugcuucaccaucaugacggacgggcccuccaacaaggccgccagcuacaagaucuucaagaucgagaagggcaaggugaccaaguccaucgagcucaacgcccccaacuuccacuacgaggagugcagcugcuacccggacaccgggaucgucaugugcgugugccgggacaacuggcacggcuccaaccgccccugggugagcuucaaccagaaccuggacuaccagaucggguacaucugcuccggcgucuucggcgacaacccccggcccgaggacggggagggcagcugcaacccggugaccguggacggggcgaacggcgucaagggguucuccuacaaguacgacaacggcguguggaucggccgcaccaagagcaaccggcugcgcaagggguucgagaugaucugggaccccaacggcuggacgaacaccgacuccgacuucagcgugaagcaggacgucguggccaucaccgacugguccggguacagcggcagcuucgugcagcaccccgagcucacggggcuggacugcauccggcccugcuucugggucgagcuggugcgcggccagccgcgggagaacaccaccaucuggaccuccggcagcuccaucagcuucugcggggucaacuccgacacggccaacuggagcuggcccgacggcgccgagcuccccuucaccaucgacaaguga

SEQ ID NO: 83767 - RNA, 1413 nt, Artificial Sequence
  derived and/or modified CDS sequence (opt1) from neuraminidase__InfluenzaA__ADM95699
augaaccccaaccagaagaucaucaccaucggcagcaucuccaucgccaucgggaucaucagccugaugcuccagaucggcaacaucaucuccaucugggccagccacuccauccagaccgggagccagaacaacacgggcaucugcaaccagcgcaucaucaccuacgagaacaacaccugggugaaccacaccuacgucaacaucaacaacacgaacgugguggcggaggaggacaagaccuccgucacccuggccgggaacagcucccugugcagcaucuccggcugggccaucuacaccaaggacaacagcauccggaucggcuccaagggggacguguucgugauccgcgagccguucaucagcugcucccaccucgagugccggacguucuuccugacccagggcgcccugcucaacgacaagcacagcaacgggaccgucaaggaccgcucccccuaccgggcccugaugagcugcccccugggcgaggcgcccuccccguacaacagcaaguucgagagcguggccugguccgccagcgccugccacgacgggaugggcuggcucaccaucggcaucuccgggcccgacaacggcgcgguggccguccugaaguacaacgggaucaucacgggcaccaucaagagcuggaagaagcagauccugcgcacccaggaguccgagugcgugugcaugaacggcagcugcuucaccaucaugacggacgggcccuccaacaaggccgccagcuacaagaucuucaagaucgagaagggcaaggugaccaaguccaucgagcucaacgcccccaacuucuacuacgaggagugcagcugcuacccggacaccgggaucgucaugugcgugugccgggacaacuggcacggcuccaaccgccccugggugagcuucaaccagaaccuggacuaccagaucggguacaucugcuccggcgucuucggcgacaacccccggcccgaggacggggagggcagcugcaacccggugaccguggacggggcgaacggcgucaagggguucuccuacaaguacgacaacggcguguggaucggccgcaccaagagcaaccggcugcgcaagggguucgagaugaucugggaccccaacggcuggacgaacaccgacuccgacuucagcgugaagcaggacgucguggccaucaccgacugguccggguacagcggcagcuucgugcagcaccccgagcucacggggcuggacugcauccggcccugcuucugggucgagcuggugcgcggccucccgcgggagaacaccaccaucuggaccuccggcagcuccaucagcuucugcggggucaacuccgacacggccaacuggagcuggcccgacggcgccgagcugcccuucaccaucgacaaguga

SEQ ID NO: 83768 - RNA, 1413 nt, Artificial Sequence
  derived and/or modified CDS sequence (opt1) from neuraminidase__InfluenzaA__ADM95701
augaaccccaaccagaagaucaucaccaucggcagcaucuccaucgccaucgggaucaucagccugaugcuccagaucggcaacaucaucuccaucugggccagccacuccauccagaccgggagccagaacaacacgggcaucugcaaccagcgcaucaucaccuacgagaacaacaccugggugaaccacaccuacgucaacaucaacaacacgaacgugguggcggaggaggacaagaccuccgucacccuggccgggaacagcucccugugcagcaucuccggcugggccaucuacaccaaggacaacagcauccggaucggcuccaagggggacguguucgugauccgcgagccguucaucagcugcucccaccucgagugccggacguucuuccugacccagggcgcccugcucaacgacaagcacagcaacgggaccgucaaggaccgcucccccuaccgggcccugaugagcugcccccugggcgaggcgcccuccccguacaacagcaaguucgagagcguggccugguccgccagcgccugccacgacgggaugggcuggcucaccaucggcaucuccgggcccgacaacggcgcgguggccguccugaaguacaacgggaucaucacgggcaccaucaagagcuggaagaagcagauccugcgcacccaggaguccgagugcgugugcaugaacggcagcugcuucaccaucaugacggacgggcccuccaacaaggccgccagcuacaagaucuucaagaucgagaagggcaaggugaccaaguccaucgagcucaacgcccccaacuuccacuacgaggagugcagcugcuacccggacaccgggaucgucaugugcgugugccgggacaacuggcacggcuccaaccgccccugggugagcuucaaccagaaccuggacuaccagaucggguacaucugcuccggcgucuucggcgacaacccccggcccgaggacggggagggcagcugcaacccggugaccguggacggggcgaacggcgucaagggguucuccuacaaguacgacaacggcguguggaucggccgcaccaagagcaaccggcugcgcaagggguucgagaugaucugggaccccaacggcuggacgaacaccgacuccgacuucagcgugaagcaggacgucguggccaucaccgacugguccggguacagcggcagcuucgugcagcaccccgagcucacggggcuggacugcauccggcccugcuucugggucgagcuggugcgcggccucccgcgggagaacaccaccaucuggaccuccggcagcuccaucagcuucugcggggucaacuccgacacggccaacuggagcuggcccgacggcgccgagcugcccuucaccaucgacaaguga

SEQ ID NO: 83769 - RNA, 1413 nt, Artificial Sequence
  derived and/or modified CDS sequence (opt1) from neuraminidase__InfluenzaA__ADM95702
augaaccccaaccagaagaucaucaccaucggcagcaucuccaucgccaucgggaucaucagccugaugcuccagaucggcaacaucaucuccaucugggccagccacuccauccagaccgggcgccagaacaacacgggcaucugcaaccagcggaucaucaccuacgagaacagcaccugggugaaccacaccuacgucaacaucaacaacacgaaggugguggcgggggaggacaagaccuccgucacccuggccggcaacagcucccugugcagcaucuccggcugggccaucuacaccaaggacaacagcauccgcaucggguccaagggcgacguguucgugauccgggagccguucaucagcugcucccaccucgagugccgcacguucuuccugacccagggggcccugcucaacgacaagcacagcaacggcaccgucaaggaccggucccccuaccgcgcccugaugagcugcccccugggggaggcgcccuccccguacaacagcaaguucgagagcguggccugguccgccagcgccugccacgacggcaugggcuggcucaccaucgggaucuccggccccgacaacggggcgguggccguccugaaguacaacggcaucaucacgggcaccaucaagagcuggaagaagcagauccugcggacccaggaguccgagugcgugugcaugaacgggagcugcuucaccaucaugacggacggccccuccaacaaggccgccagcuacaagaucuucaagaucgagaaggggaaggugaccaaguccaucgagcucaacgcccccaacuucuacuacgaggagugcagcugcuacccggacaccggcaucgucaugugcgugugccgcgacaacuggcacggguccaaccggcccugggugagcuucaaccagaaccuggacuaccagaucggcuacaucugcuccggcgucuucggggacaacccccgccccgaggacggcgaggggagcugcaacccggugaccguggacggcgcgaacggggucaagggcuucuccuacaaguacggcaacgggguguggaucggccggaccaagagcaaccgccugcggaagggguucgaggugaucugggaccccaacggcuggacgaacaccgacuccgacuucagcgucaagcaggacgugguggccaucaccgacugguccggguacagcggcagcuucguccagcaccccgagcucacgggccuggacugcauccgccccugcuucuggguggagcugguccgggggcucccgcgcgagaacaccaccaucuggaccuccggcagcuccaucagcuucugcggggugaacuccgacacggccaacuggagcuggcccgacggcgccgagcugcccuucaccaucgacaaguga

SEQ ID NO: 83770 - RNA, 1413 nt, Artificial Sequence
  derived and/or modified CDS sequence (opt1) from neuraminidase__InfluenzaA__ADM95704
augaaccccaaccagaagaucaucaccaucggcagcaucuccaucgccaucgggaucaucagccugaugcuccagaucggcaacaucguguccaucugggccagccacuccauccagaccgggagccagaacaacacgggcaucugcaaccagcgcaucaucaccuacgagaacaacaccugggucaaccacaccuacgugaacaucaacaacacgaacguggucgcggaggaggacaagaccuccgugacccuggccgggaacagcucccugugcagcaucuccggcugggccaucuacaccaaggacaacagcauccggaucggcuccaagggggacguguucgucauccgcgagccguucaucagcugcucccaccucgagugccggacguucuuccugacccagggcgcccugcucaacgacaagcacagcaacgggaccgugaaggaccgcucccccuaccgggcccugaugagcugcccccugggcgaggcgcccuccccguacaacagcaaguucgagagcguggccugguccgccagcgccugccacgacgggaugggcuggcucaccaucggcaucuccgggcccgacaacggcgcggucgccgugcugaaguacaacgggaucaucacgggcaccaucaagagcuggaagaagcagauccugcgcacccaggaguccgagugcgugugcaugaacggcagcugcuucaccaucaugacggacgggcccuccaaccgggccgccagcuacaagaucuucaagaucgagaagggcaaggucaccaaguccaucgagcucaacgcccccaacuuccacuacgaggagugcagcugcuacccggacaccgggaucgugaugugcgugugccgcgacaacuggcacggcuccaaccggcccugggucagcuucaaccagaaccuggacuaccagaucggguacaucugcuccggcguguucggcgacaacccccgccccgaggacggggagggcagcugcaacccggugaccgucgacggggcgaacggcgugaagggguucuccuacaaguacgacaacggcguguggaucggccggaccaagagcaaccgccugcggaagggguucgagaugaucugggaccccaacggcuggacgaacaccgacuccgacuucagcgucaagcaggacgugguggccaucaccgacugguccggguacagcggcagcuucguccagcaccccgagcucacggggcuggacugcauccgccccugcuucuggguggagcugguccggggccucccgcgcgagaacaccaccaucuggaccuccggcagcuccaucagcuucugcggggugaacuccgacacggccaacuggagcuggcccgacggcgccgagcugcccuucaccaucgacaaguga

SEQ ID NO: 83771 - RNA, 1413 nt, Artificial Sequence
  derived and/or modified CDS sequence (opt1) from neuraminidase__InfluenzaA__ADM95705
augaaccccaaccagaagaucaucaccaucggcagcaucuccaucgccaucgggaucaucagccugaugcuccagaucggcaacaucaucuccaucugggccagccacuccauccagaccgggcgccagaacaacacgggcaucugcaaccagcggaucaucaccuacgagaacagcaccugggugaaccacaccuacgucaacaucaacaacacgaaggugguggcgggggaggacaagaccuccgucacccuggccggcaacagcucccugugcagcaucuccggcugggccaucuacaccaaggacaacagcauccgcaucggguccaagggcgacguguucgugauccgggagccguucaucagcugcucccaccucgagugccgcacguucuuccugacccagggggcccugcucaacgacaagcacagcaacggcaccgucaaggaccggucccccuaccgcgcccugaugagcugcccccugggggaggcgcccuccccguacaacagcaaguucgagagcguggccugguccgccagcgccugccacgacggcaugggcuggcucaccaucgggaucuccggccccgacaacggggcgguggccguccugaaguacaacggcaucaucacgggcaccaucaagagcuggaagaagcagauccugcggacccaggaguccgagugcgugugcaugaacgggagcugcuucaccaucaugacggacggccccuccaacaaggccgccagcuacaagaucuucaagaucgagaaggggaaggugaccaaguccaucgagcucaacgcccccaacuucuacuacgaggagugcagcugcuacccggacaccggcaucgucaugugcgugugccgcgacaacuggcacggguccaaccggcccugggugagcuucaaccagaaccuggacuaccagaucggcuacaucugcuccggcgucuucggggacaacccccgccccgaggacggcgaggggagcugcaacccggugaccguggacggcgcgaacggggucaagggcuucuccuacaaguacggcaacgggguguggaucggccggaccaagagcaaccgccugcggaagggguucgagaugaucugggaccccaacggcuggacgaacaccgacuccgacuucagcgugaagcaggacgucguggccaucaccgacugguccggguacagcggcagcuucgugcagcaccccgagcucacgggccuggacugcauccgccccugcuucugggucgagcuggugcgggggcucccgcgcgagaacaccaccaucuggaccuccggcagcuccaucagcuucugcggggucaacuccgacacggccaacuggagcuggcccgacggcgccgagcugcccuucaccaucgacaaguga

SEQ ID NO: 83772 - RNA, 1413 nt, Artificial Sequence; identical to SEQ ID NO: 83771
  derived and/or modified CDS sequence (opt1) from neuraminidase__InfluenzaA__ADM95706

SEQ ID NO: 83773 - RNA, 1413 nt, Artificial Sequence; identical to SEQ ID NO: 83771
  derived and/or modified CDS sequence (opt1) from neuraminidase__InfluenzaA__ADM95707

SEQ ID NO: 83774 - RNA, 1413 nt, Artificial Sequence; identical to SEQ ID NO: 81485
  derived and/or modified CDS sequence (opt1) from neuraminidase__InfluenzaA__ADM95708

SEQ ID NO: 83775 - RNA, 1410 nt, Artificial Sequence
  derived and/or modified CDS sequence (opt1) from neuraminidase__InfluenzaA__ADM95710
augaaccccaaccagaagaucaucaccaucggcagcgugucccugaccaucagcacgaucugcuucuucaugcagaucgccauccucaucaccaccgucacccugcacuucaagcaguacgaguucaacuccccgcccaacaaccaggugaugcugugcgagcccacgaucaucgagcgcaacaucaccgagaucguguaccucaccaacaccacgaucgagaaggagaucugccccaagcuggccgaguaccggaacuggagcaagccgcagugcgacaucaccggguucgcgcccuucuccaaggacaacagcauccgccuguccgccggcggggacaucugggucacccgggagcccuacgugagcugcgaccccgacaagugcuaccaguucgcccucggccaggggaccacgcugaacaacgugcacuccaacaacaccguccgcgaccggaccccguaccgcacccugcucaugaacgagcugggcgugcccuuccaccugggcacgaagcaggucugcaucgccuggagcuccagcuccugccacgacgggaaggccuggcuccacgugugcaucaccggcgacgacaagaacgcgaccgccagcuucaucuacaacgggcggcugguggacuccguggucagcugguccaaggagauccugcgcacccaggagagcgagugcgugugcaucaacggcacgugcaccguggucaugaccgacggguccgccagcggcaaggccgacaccaagauccucuucaucgaggagggcaagaucgugcacacgagcacccuguccgggagcgcgcagcacguggaggagugcuccugcuacccccgguaccccggcguccgcugcgugugccgggacaacuggaaggggagcaaccgcccgaucguggacaucaacaucaaggaccacaacaucgucuccagcuacgugugcuccggccuggugggcgacacgccccggaagaacgacagcuccagcuccagccacugccucgaccccaacaacgaggagggcgggcacggggucaagggcugggccuucgacgacgggaacgacguguggaugggccgcaccaucuccgagaagucccggcugggcuacgagaccuucaaggucaucgagggguggagcaaccccaagagcaagcugcagaucaaccgccaggugaucguggaccggggcaaccgcuccggguacagcggcaucuucuccgucgagggcaagagcugcaucaaccggugcuucuacguggagcucauccgcgggcggaaggaggagaccgacgugcuguggaccagcaacuccaucgucguguucugcggcaccagcgggacguacggcaccggguccuggccggacggcgccgacaucaaccugaugcccaucuga

SEQ ID NO: 83776 - RNA, 1410 nt, Artificial Sequence; identical to SEQ ID NO: 80623
  derived and/or modified CDS sequence (opt1) from neuraminidase__InfluenzaA__ADM95711

SEQ ID NO: 83777 - RNA, 1410 nt, Artificial Sequence; identical to SEQ ID NO: 80623
  derived and/or modified CDS sequence (opt1) from neuraminidase__InfluenzaA__ADM95712

SEQ ID NO: 83778 - RNA, 1410 nt, Artificial Sequence; identical to SEQ ID NO: 80623
  derived and/or modified CDS sequence (opt1) from neuraminidase__InfluenzaA__ADM95713

SEQ ID NO: 83779 - RNA, 1410 nt, Artificial Sequence
  derived and/or modified CDS sequence (opt1) from neuraminidase__InfluenzaA__ADM95714
augaaccccaaccagaagaucaucaccaucggcagcgugucccugaccaucagcacgaucugcuucuucaugcagaucgccauccucaucaccaccgucacccugcacuucaagcaguacgaguucaacuccccgcccaacaaccaggugaugcugugcgagcccacgaucaucgagcgcaacaucaccgagaucguguaccucaccaacaccacgaucgagaaggagaucugccccaagcuggccgaguaccggaacuggagcaagccgcagugcgacaucaccggguucgcgcccuucuccaaggacaacagcauccgccuguccgccggcggggacaucugggucacccgggagcccuacgugagcugcgaccccgacaagugcuaccaguucgcccucggccaggggaccacgcugaacaacgugcacuccaacaacaccguccgcgaccggaccccguaccgcacccugcucaugaacgagcugggcgugcccuuccaccugggcacgaagcaggucugcaucgccuggagcuccagcuccugccacgacgggaaggccuggcuccacgugugcaucaccggcgacgacaagaacgcgaccgccagcuucaucuacaacgggcggcugguggacuccguggucagcugguccaaggagauccugcgcacccaggagagcgagugcgugugcaucaacggcacgugcaccguggucaugaccgacggguccgccagcggcaaggccgacaccaagauccucuucaucgaggagggcaagaucgugcacacgagcacccuguccgggagcgcgcagcacguggaggagugcuccugcuacccccgguaccccggcguccgcugcgugugccgggacaacuggaaggggagcaaccgcccgaucguggacaucaacaucaaggaccacuccaucgucagcuccuacgugugcagcggccuggugggcgacacgccccggaagaacgacuccagcuccagcucccacugccucgaccccaacaacgaggagggcgggcacggggucaagggcugggccuucgacgacgggaacgacguguggaugggccgcaccaucagcgagaagucccggcugggcuacgagaccuucaaggucaucgagggguggagcaaccccaaguccaagcugcagaucaaccgccaggugaucguggaccggggcaaccgcagcggguacuccggcaucuucagcgucgagggcaagagcugcaucaaccggugcuucuacguggagcucauccgcgggcggaaggaggagaccgacgugcuguggaccuccaacagcaucgucguguucugcggcaccuccgggacguacggcaccgggagcuggccggacggcgccgacaucaaccugaugcccaucuga

SEQ ID NO: 83780 - RNA, 1410 nt, Artificial Sequence; identical to SEQ ID NO: 80623
  derived and/or modified CDS sequence (opt1) from neuraminidase__InfluenzaA__ADM95715

SEQ ID NO: 83781 - RNA, 1410 nt, Artificial Sequence; identical to SEQ ID NO: 83779
  derived and/or modified CDS sequence (opt1) from neuraminidase__InfluenzaA__ADM95716

SEQ ID NO: 83782 - RNA, 1410 nt, Artificial Sequence; identical to SEQ ID NO: 83779
  derived and/or modified CDS sequence (opt1) from neuraminidase__InfluenzaA__ADM95717

SEQ ID NO: 83783 - RNA, 1410 nt, Artificial Sequence; identical to SEQ ID NO: 80623
  derived and/or modified CDS sequence (opt1) from neuraminidase__InfluenzaA__ADM95718

SEQ ID NO: 83784 - RNA, 1410 nt, Artificial Sequence
  derived and/or modified CDS sequence (opt1) from neuraminidase__InfluenzaA__ADM95719
augaaccccaaccagaagaucaucaccaucggcagcgugucccugaccaucagcacgaucugcuucuucaugcagaucgccauccucaucaccaccgucacccugcacuucaagcaguacgaguucaacuccccgcccaacaaccaggugaugcugugcgagcccacgaucaucgagcgcaacaucaccgagaucguguaccucaccaacaccacgaucgagaaggagaucugccccaagcuggccgaguaccggaacuggagcaagccgcagugcgacaucaccggguucgcgcccuucuccaaggacaacagcauccgccuguccgccggcggggacaucugggucacccgggagcccuacgugagcugcgaccccgacaagugcuaccaguucgcccucggccaggggaccacgcugaacaacgugcacuccaacaacaccguccgcgaccggaccccguaccgcacccugcucaugaacgagcugggcgugcccuuccaccugggcacgaagcaggucugcaucgccuggagcuccagcuccugccacgacgggaaggccuggcuccacgugugcaucaccggcgacgacaagaacgcgaccgccagcuucaucuacaacgggcggcugguggacuccguggucagcugguccaaggagauccugcgcacccaggagagcgagugcgugugcaucaacggcacgugcaccguggucaugaccgacggguccgccagcggcaaggccgacaccaagauccucuucaucgaggagggcaagaucgugcacacgagcacccuguccgggagcgcgcagcacguggaggagugcuccugcuacccccgguaccccggcguccgcugcgugugccgggacaacuggaaggggagcaaccgcccgaucguggacaucaacaucaaggaccacuccaucgucagcuccuacgugugcagcggccuggugggcgacacgccccggaagaacgacuccagcuccagcucccacugccucgaccccaacaacgaggagggcgggcacggggucaagggcugggccuucgacgacgggaacgacguguggaugggccgcaccaucagcgagaagucccggagcggcuacgagaccuucaaggucaucgaggggugguccaaccccaagagcaagcugcagaucaaccgccaggugaucguggaccggggcaaccgcuccggguacagcggcaucuucagcgucgaggggaaguccugcaucaaccggugcuucuacguggagcugauccgcggccggaaggaggagaccgaggugcucuggaccagcaacuccaucgucguguucugcggcaccagcgggacguacggcaccggguccuggccggacggcgccgacaucaaccugaugcccaucuga

SEQ ID NO: 83785 - RNA, 1410 nt, Artificial Sequence; identical to SEQ ID NO: 80623
  derived and/or modified CDS sequence (opt1) from neuraminidase__InfluenzaA__ADM95720

SEQ ID NO: 83786 - RNA, 1410 nt, Artificial Sequence; identical to SEQ ID NO: 80623
  derived and/or modified CDS sequence (opt1) from neuraminidase__InfluenzaA__ADM95721

SEQ ID NO: 83787 - RNA, 1410 nt, Artificial Sequence; identical to SEQ ID NO: 80623
  derived and/or modified CDS sequence (opt1) from neuraminidase__InfluenzaA__ADM95723

SEQ ID NO: 83788 - RNA, 1410 nt, Artificial Sequence
  derived and/or modified CDS sequence (opt1) from neuraminidase__InfluenzaA__ADM95724
augaaccccaaccagaagaucaucaccaucggcagcgugucccugaccaucagcacgaucugcuucuucaugcagaucgccauccucaucaccaccgucacccugcacuucaagcaguacgaguucaacuccccgcccaacaaccaggugaugcugugcgagcccacgaucaucgagcgcaacaucaccgagaucguguaccucaccaacaccacgaucgagaaggagaucugccccaagcuggccgaguaccggaacuggagcaagccgcagugcgacaucaccggguucgcgcccuucuccaaggacaacagcauccgccuguccgccggcggggacaucugggucacccgggagcccuacgugagcugcgaccccgacaagugcuaccaguucgcccucggccaggggaccacgcugaacaacgugcacuccaacaacaccguccgcgaccggaccccguaccgcacccugcucaugaacgagcugggcgugcccuuccaccugggcacgaagcaggucugcaucgccuggagcuccagcuccugccacgacgggaaggccuggcuccacgugugcaucaccggcgacgacaagaacgcgaccgccagcuucaucuacaacgggcggcugguggacuccguggucagcugguccaaggagauccugcgcacccaggagagcgagugcgugugcaucaacggcacgugcaccguggucaugaccgacggguccgccagcggcaaggccgacaccaagauccucuucaucgaggagggcaagaucgugcacacgagcacccuguccgggagcgcgcagcacguggaggagugcuccugcuacccccgguaccccggcguccgcugcgugugccgggacaacuggaaggggagcaaccgcccgaucguggacaucaacaucaaggaccacuccaucgucagcuccuacgugugcagcggccuggugggcgacacgccccggaagaacgacuccagcuccagcucccacugccucgaccccaacaacgaggagggcgggcacggggucaagggcugggccuucgacgacgggaacgacguguggaugggccgcaccaucagcgagaagucccggcugggcuacgagaccuucaaggucaucgagggguggagcaaccccaacuccaagcugcagaucaaccgccaggugaucguggaccggggcaaccgcagcggguacuccggcaucuucagcgucgagggcaagagcugcaucaaccggugcuucuacguggagcucauccgcgggcggaaggaggagaccgaggugcuguggaccuccaacagcaucgucguguucugcggcaccuccgggacguacggcaccgggagcuggccggacggcgccgacaucaaccugaugcccaucuga

SEQ ID NO: 83789 - RNA, 1410 nt, Artificial Sequence
  derived and/or modified CDS sequence (opt1) from neuraminidase__InfluenzaA__ADM95725
augaaccccaaccagaagaucaucaccaucggcagcgugucccugaccaucagcacgaucugcuucuucaugcagaucgccauccucaucaccaccgucacccugcacuucaagcaguacgaguucaacccgccgcccaacaaccaggugaugcugugcgagcccacgaucaucgagcgcaacaucaccgagaucguguaccucaccaacaccacgaucgagaaggaggucugcccgaagcuggccgaguaccggaacugguccaagccccagugcgacaucaccggguucgcgcccuucagcaaggacaacuccauccgccugagcgccggcggggacaucugggugacccgggagcccuacguguccugcgacccggacaagugcuaccaguucgcccucggccaggggaccacgcugaacaacguccacagcaacaacaccgugcgcgaccggacccccuaccgcacccugcucaugaacgagcugggcgugcccuuccaccugggcacgaagcaggucugcaucgccugguccagcuccagcugccacgacgggaaggccuggcuccacgugugcaucaccggcgacgacaagaacgcgaccgccuccuucaucuacaacgggcggcugguggacagcgucguguccuggagcaaggagauccugcgcacccaggaguccgagugcgugugcaucaacggcacgugcaccgucgugaucaccgacgggagcgccuccggcaaggccgacaccaagauccucuucaucgaggagggcaagaucgugcacacgagcacccugagcggguccgcgcagcacgucgaggagugcagcugcuacccccgguacccgggcgugcgcugcgugugccgggacaacuggaagggguccaaccgccccaucgucgacaucaacaucaaggaccacagcaucguguccagcuacgugugcuccggccuggucggcgacacgccccggaagaacgacagcuccagcuccagccacugccucgaccccaacaacgaggagggcgggcacggggugaagggcugggccuucgacgacgggaacgacgucuggaugggccgcaccaucuccgagaagucccggcugggcuacgagaccuucaaggugaucgagggguggagcaaccccaagagcaagcugcagaucaaccgccaggugaucgucgaccggggcaaccgcuccggguacagcggcaucuucuccguggagggcaagagcugcaucaaccggugcuucuacguggagcucauccgcgggcggaaggaggagaccgacguccuguggaccagcaacuccaucgugguguucugcggcaccagcgggacguacggcaccggguccuggcccgacggcgccgacaucaaccugaugcccaucuga

SEQ ID NO: 83790 - RNA, 1410 nt, Artificial Sequence
  derived and/or modified CDS sequence (opt1) from neuraminidase__InfluenzaA__ADM95726
augaaccccaaccagaagaucaucaccaucggcagcgugucccugaccaucagcacgaucugcuucuucaugcagaucgccauccucaucaccgccgucacccugcacuucaagcaguacgaguucaacuccccgcccaacaaccaggugaugcugugcgagcccaccaucaucgagcgcaacaucacggagaucguguaccucaccaacaccaccaucgagaaggagaucugccccaagcuggcggaguaccggaacuggagcaagccgcagugcgacaucacgggguucgcccccuucuccaaggacaacagcauccgccuguccgccggcggggacaucugggucacccgggagcccuacgugagcugcgaccccgacaagugcuaccaguucgcccucggccaggggaccacccugaacaacgugcacuccaacaacacgguccgcgaccggaccccguaccgcacccugcucaugaacgagcugggcgugcccuuccaccugggcaccaagcaggucugcaucgccuggagcuccagcuccugccacgacgggaaggcguggcuccacgugugcaucacgggcgacgacaagaacgccaccgccagcuucaucuacaacgggcggcugguggacuccguggucagcugguccaaggagauccugcgcacccaggagagcgagugcgugugcaucaacgggaccugcacgguggucaugaccgacggguccgccagcggcaaggcggacaccaagauccucuucaucgaggagggcaagaucgugcacaccagcacgcuguccgggagcgcccagcacguggaggagugcuccugcuacccccgguaccccggcguccgcugcgugugccgggacaacuggaaggggagcaaccgcccgaucguggacaucaacaucaaggaccacuccaucgucagcuccuacgugugcagcggccuggugggcgacacgccccggaagaacgacuccagcuccagcucccacugccucgaccccaacaacgaggagggcggccacggggucaagggcugggccuucgacgacgggaacgacguguggaugggccgcaccaucagcgagaagucccggcugggcuacgagaccuucaaggucaucgagggguggagcaaccccaaguccaagcugcagaucaaccgccaggugaucguggaccggggcaaccgcagcggguacuccggcaucuucagcgucgagggcaagagcugcaucaaccggugcuucuacguggagcucauccgcgggcggaaggaggagaccgacgugcuguggaccuccaacagcaucgucguguucugcggcaccuccgggaccuacggcacggggagcuggccggacggcgccgacaucaaccugaugcccaucuga

SEQ ID NO: 83791 - RNA, 1410 nt, Artificial Sequence; identical to SEQ ID NO: 80623
  derived and/or modified CDS sequence (opt1) from neuraminidase__InfluenzaA__ADM95727

SEQ ID NO: 83792 - RNA, 1410 nt, Artificial Sequence
  derived and/or modified CDS sequence (opt1) from neuraminidase__InfluenzaA__ADM95728
augaaccccaaccagaagaucaucaccaucggcagcgugucccugaccaucagcacgaucugcuucuucaugcagaucgccauccucaucaccaccgucacccugcacuucaagcaguacgaguucaacuccccgcccaacaaccaggugaugcugugcgagcccacgaucaucgagcgcaacaucaccgagaucguguaccucaccaacaccacgaucgagaaggagaucugccccgagcuggccgaguaccggaacuggagcaagccgcagugcgacaucaccggguucgcgcccuucuccaaggacaacagcauccgccuguccgccggcggggacaucugggucacccgggagcccuacgugagcugcgaccccgacaagugcuaccaguucgcccucggccaggggaccacgcugaacaacgugcacuccaacaacaccguccgcgaccggaccccguaccgcacccugcucaugaacgagcugggcgugcccuuccaccugggcacgaagcaggucugcaucgccuggagcuccagcuccugccacgacgggaaggccuggcuccacgugugcaucaccggcgacgacaagaacgcgaccgccagcuucaucuacaacgggcggcugguggacuccguggucagcugguccaaggagauccugcgcacccaggagagcgagugcgugugcaucaacggcacgugcaccguggucaugaccgacggguccgccagcggcaaggccgacaccaagauccucuucaucgaggagggcaagaucgugcacacgagcacccuguccgggagcgcgcagcacguggaggagugcuccugcuacccccgguaccccggcguccgcugcgugugccgggacaacuggaaggggagcaaccgcccgaucguggacaucaacaucaaggaccacuccaucgucagcuccuacgugugcagcggccuggugggcgacacgccccggaagaacgacuccagcuccagcucccacugccucgaccccaacaacgaggagggcgggcacggggucaagggcugggccuucgacgacgggaacgacguguggaugggccgcaccaucagcgagaagucccggcugggcuacgagaccuucaaggucaucgagggguggagcaaccccaaguccaagcugcagaucaaccgccaggugaucguggaccggggcaaccgcagcggguacuccggcaucuucagcgucgagggcaagagcugcaucaaccggugcuucuacguggagcucauccgcgggcggaaggaggagaccgaggugcuguggaccuccaacagcaucgucguguucugcggcaccuccgggacguacggcaccgggagcuggccggacggcgccgacaucaaccugaugcccaucuga

SEQ ID NO: 83793 - RNA, 1410 nt, Artificial Sequence
  derived and/or modified CDS sequence (opt1) from neuraminidase__InfluenzaA__ADM95729
augaaccccaaccagaagaucaucaccaucggcagcgugucccugaccaucagcacgaucugcuucuucaugcagaucgccauccucaucaccaccgucacccugcacuucaagcaguacgaguucaacuccccgcccaacaaccaggugaugcugugcgagcccacgaucaucgagcgcaacaucaccgagaucguguaccucaccaacaccacgaucgagaaggagaucugccccaagcuggccgaguaccggaacuggagcaagccgcagugcgacaucaccggguucgcgcccuucuccaaggacaacagcauccgccuguccgccggcggggacaucugggucacccgggagcccuacgugagcugcgaccccgacaagugcuaccaguucgcccucggccaggggaccacgcugaacaacgugcacuccaacaacaccguccgcgaccggaccccguaccgcacccugcucaugaacgagcugggcgugcccuuccaccugggcacgaagcaggucugcaucgccuggagcuccagcuccugccacgacgggaaggccuggcuccacgugugcaucaccggcgacgacaagaacgcgaccgccagcuucaucuacaacgggcggcugguggacuccguggucagcugguccaaggagauccugcgcacccaggagagcgagugcgugugcaucaacggcacgugcaccguggucaugaccgacggguccgccagcggcaaggccgacaccaagauccucuucaucgaggagggcaagaucgugcacacgagcacccuguccgggagcgcgcagcacguggaggagugcuccugcuacccccgguaccccggcguccgcugcgugugccgggacaacuggaaggggagcaaccgcccgaucguggacaucaacaucaaggaccacuccaucgucagcuccuacgugugcagcggccuggugggcgacacgccccggaagaacgacuccagcucccgcagccacugccucgaccccaacaacgaggagggcgggcacggggucaagggcugggccuucgacgacgggaacgacguguggaugggccggaccaucuccgagaagucccgccugggcuacgagaccuucaaggucaucgagggguggagcaaccccaagagcaagcugcagaucaaccgccaggugaucguggaccggggcaaccgguccggguacagcggcaucuucuccgucgagggcaagagcugcaucaaccgcugcuucuacguggagcucauccgggggcgcaaggaggagaccgaggugcuguggaccagcaacuccaucgucguguucugcggcaccagcgggacguacggcaccggguccuggccggacggcgccgacaucaaccugaugcccaucuga

SEQ ID NO: 83794 - RNA, 1410 nt, Artificial Sequence
  derived and/or modified CDS sequence (opt1) from neuraminidase__InfluenzaA__ADM95730
augaaccccaaccagaagaucaucaccaucggcagcgugucccugaccaucagcacgaucugcuucuucaugcagaucgccauccucaucaccaccgucacccugcacuucaagcaguacgaguucaacuccccgcccagcaaccaggugaugcugugcgagcccacgaucaucgagcgcaacaucaccgagaucguguaccucaccaacaccacgaucgagaaggagaucugccccaagcuggccgaguaccggaacugguccaagccgcagugcgacaucaccggguucgcgcccuucagcaaggacaacuccauccgccugagcgccggcggggacaucugggucacccgggagcccuacguguccugcgaccccgacaagugcuaccaguucgcccucggccaggggaccacgcugaacaacgugcacagcaacaacaccguccgcgaccggaccccguaccgcacccugcucaugaacgagcugggcgugcccuuccaccugggcacgaagcaggucugcaucgccugguccagcuccagcugccacgacgggaaggccuggcuccacgugugcaucaccggcgacgacaagaacgcgaccgccuccuucaucuacaacgggcggcugguggacagcguggucuccuggagcaaggagauccugcgcacccaggaguccgagugcgugugcaucaacggcacgugcaccguggucaugaccgacgggagcgccagcggcaaggccgacaccaagauccucuucaucgaggagggcaagaucgugcacacguccacccugagcggguccgcgcagcacguggaggagugcagcugcuacccccgguaccccggcguccgcugcgugugccgggacaacuggaagggguccaaccgcccgaucguggacaucaacaucaaggaccacagcaucgucuccagcuacgugugcuccggccuggugggcgacacgccccggaagaacgacagcuccagcuccagccacugccucgaccccaacaacgaggagggcgggcacggggucaagggcugggccuucgacgacgggaacgacguguggaugggccgcaccaucuccgagaagucccggcugggcuacgagaccuucaaggucaucgagggguggagcaaccccaagagcaagcugcagaucaaccgccaggugaucguggaccggggcaaccgcuccggguacagcggcaucuucagcgucgaggggaaguccugcaucaaccggugcuucuacguggagcucauccgcggccggaaggaggagaccgaggugcuguggaccagcaacuccaucgucguguucugcggcaccagcgggacguacggcaccggguccuggccggacggcgccgacaucaaccugaugcccaucuga

SEQ ID NO: 83795 - RNA, 1410 nt, Artificial Sequence
  derived and/or modified CDS sequence (opt1) from neuraminidase__InfluenzaA__ADM95732
augaaccccaaccagaagaucaucaccaucggcagcgugucccugaccaucagcacgaucugcuucuucaugcagaucgccauccucaucaccaccgucacccugcacuucaagcaguacgaguucaacuccccgcccaacaaccaggugaugcugugcgagcccacgaucaucgagcgcaacaucaccgagaucguguaccucaccaacaccacgaucgagaaggagaucugccccaagcuggccgaguaccggaacuggagcaagccgcagugcgacaucaccggguucgcgcccuucuccaaggacaacagcauccgccuguccgccggcggggacaucugggucacccgggagcccuacgugagcugcgaccccgacaagugcuaccaguucgcccucggccaggggaccacgcugaacaacgugcacuccaacgacaccguccgcgaccggaccccguaccgcacccugcucaugaacgagcugggcgugcccuuccaccugggcacgaagcaggucugcaucgccuggagcuccagcuccugccacgacgggaaggccuggcuccacgugugcaucaccggcgacgacaagaacgcgaccgccagcuucaucuacaacgggcggcugguggacuccaucgugagcugguccaaggagauccugcgcacccaggagagcgagugcgucugcaucaacggcacgugcaccguggugaugaccgacggguccgccagcggcaaggccgacaccaagauccucuucaucgaggagggcaagaucguccacacgagcacccuguccgggagcgcgcagcacguggaggagugcuccugcuacccccgguaccccggcgugcgcugcgucugccgggacaacuggaaggggagcaaccgcccgaucguggacaucaacaucaaggaccgguccaucgugagcuccuacgucugcagcggccuggugggcgacacgccccgcaagaacgacuccagcuccagcucccacugccucgaccccaacaacgaggagggcgggcacggggugaagggcugggccuucgacgacgggaacgacgucuggaugggccggaccaucagcgagaagucccgccugggcuacgagaccuucaaggugaucgagggguggagcaaccacaaguccaagcugcagaucaaccggcaggucaucguggaccgcggcaaccggagcggguacuccggcaucuucagcguggagggcaagagcugcaucaaccgcugcuucuacgucgagcucauccgggggcgcaaggaggagaccgaggugcuguggaccuccaacagcaucguggucuucugcggcaccuccgggacguacggcaccgggagcuggcccgacggcgccgacaucaaccugaugccgaucuga

SEQ ID NO: 83796 - RNA, 1410 nt, Artificial Sequence; identical to SEQ ID NO: 80623
  derived and/or modified CDS sequence (opt1) from neuraminidase__InfluenzaA__ADM95733

SEQ ID NO: 83797 - RNA, 1410 nt, Artificial Sequence; identical to SEQ ID NO: 80623
  derived and/or modified CDS sequence (opt1) from neuraminidase__InfluenzaA__ADM95734

SEQ ID NO: 83798 - RNA, 1410 nt, Artificial Sequence; identical to SEQ ID NO: 80623
  derived and/or modified CDS sequence (opt1) from neuraminidase__InfluenzaA__ADM95735

SEQ ID NO: 83799 - RNA, 1410 nt, Artificial Sequence; identical to SEQ ID NO: 80623
  derived and/or modified CDS sequence (opt1) from neuraminidase__InfluenzaA__ADM95736

SEQ ID NO: 83800 - RNA, 1410 nt, Artificial Sequence
  derived and/or modified CDS sequence (opt1) from neuraminidase__InfluenzaA__ADM95737
augaaccccaaccagaagaucaucaccaucggcagcgugucccugaccaucagcacgaucugcuucuucaugcagaucgccauccucaucaccaccgucacccugcacuucaagcaguacgaguucaacuccccgcccaacaaccaggugaugcugugcgagcccacgaucaucgagcgcaacaucaccgagaucguguaccucaccaacaccacgaucgagaaggagaucugccccaagcuggccgaguaccggaacuggagcaagccgcagugcgacaucaccggguucgcgcccuucuccaaggacaacagcauccgccuguccgccggcggggacaucugggucacccgggagcccuacgugagcugcgaccccgacaagugcuaccaguucgcccucggccaggggaccacgcugaacaacgugcacuccaacaacaccguccgcgaccggaccccguaccgcacccugcucaugaacgagcugggcgugcccuuccaccugggcacgaagcaggucugcaucgccuggagcuccagcuccugccacgacgggaaggccuggcuccacgugugcaucaccggcgacgacaagaacgcgaccgccagcuucaucuacaacgggcggcugguggacuccguggucagcugguccaaggagauccugcgcacccaggagagcgagugcgugugcaucaacggcacgugcaccguggucaugaccgacggguccgccagcggccgggccgacaccaagauccucuucaucgaggagggcaagaucgugcacacgagcacccuguccgggagcgcgcagcacguggaggagugcuccugcuacccccgcuaccccggcguccggugcgugugccgcgacaacuggaaggggagcaaccggccgaucguggacaucaacaucaaggaccacuccaucgucagcuccuacgugugcagcggccuggugggcgacacgccccgcaagaacgacuccagcuccagcucccacugccucgaccccaacaacgaggagggcgggcacggggucaagggcugggccuucgacgacgggaacgacguguggaugggccggaccaucagcgagaagucccgccugggcuacgagaccuucaaggucaucgagggguggagcaaccccaaguccaagcugcagaucaaccgccaggugaucguggaccggggcaaccggagcggguacuccggcaucuucagcgucgagggcaagagcugcaucaaccgcugcuucuacguggagcucauccgggggcgcaaggaggagaccgacgugcuguggaccuccaacagcaucgucguguucugcggcaccuccgggacguacggcaccgggagcuggccggacggcgccgacaucaaccugaugcccaucuga

SEQ ID NO: 83801 - RNA, 1410 nt, Artificial Sequence; identical to SEQ ID NO: 80623
  derived and/or modified CDS sequence (opt1) from neuraminidase__InfluenzaA__ADM95738

SEQ ID NO: 83802 - RNA, 1410 nt, Artificial Sequence; identical to SEQ ID NO: 80623
  derived and/or modified CDS sequence (opt1) from neuraminidase__InfluenzaA__ADM95739

SEQ ID NO: 83803 - RNA, 1410 nt, Artificial Sequence
  derived and/or modified CDS sequence (opt1) from neuraminidase__InfluenzaA__ADM95740
augaaccccaaccagaagaucaucaccaucggcagcgugucccugaccaucagcacgaucugcuucuucaugcagaucgccauccucaucaccaccgucacccugcacuucaagcaguacgaguucaacuccccgcccaacaaccaggugaugcugugcgagcccacgaucaucgagcgcaacaucaccgagaucguguaccucaccaacaccacgaucgagaaggagaucugccccaagcuggccgaguaccggaacuggagcaagccgcagugcgacaucaccggguucgcgcccuucuccaaggacaacagcauccgccuguccgccggcggggacaucugggucacccgggagcccuacgugagcugcgaccccgacaagugcuaccaguucgcccucggccaggggaccacgcugaacaacgugcacuccaacaacaccguccgcgaccggaccccguaccgcacccugcucaugaacgagcugggcgugcccuuccaccugggcacgaagcaggucugcaucgccuggagcuccagcuccugccacgacgggaaggccuggcuccacgugugcaucaccggcgacgacaagaacgcgaccgccagcuucaucuacaacgggcggcugguggacuccguggucagcugguccaaggagauccugcgcacccaggagagcgagugcgugugcaucaacggcacgugcaccguggucaugaccgacggguccgccagcggcaaggccgacaccaagauccucuucaucgaggagggcaagaucgugcacacgagcacccuguccgggagcgcgcagcacguggaggagugcuccugcuacccccgguaccccggcguccgcugcgugugccgggacaacuggaaggggagcaaccgcccgaucguggacaucaacaucaaggaccacuccaucgucagcuccuacgugugcagcggccuggugggcgacacgccccggaagaacgacuccagcuccagcucccacugccucgaccccaacgacgaggagggcgggcacggggucaagggcugggccuucgacgacgggaacgacguguggaugggccgcaccaucagcgagaagucccggcugggcuacgagaccuucaaggucaucgagggguggagcaaccccaaguccaagcugcagaucaaccgccaggugaucguggaccggggcaaccgcagcggguacuccggcaucuucagcgucgagggcaagagcugcaucaaccggugcuucuacguggagcucauccgcgggcggaaggaggagaccaaggugcuguggaccuccaacagcaucgucguguucugcggcaccuccgggacguacggcaccgggagcuggccggacggcgccgacaucaaccugaugcccaucuga

SEQ ID NO: 83804 - RNA, 1410 nt, Artificial Sequence; identical to SEQ ID NO: 83779
  derived and/or modified CDS sequence (opt1) from neuraminidase__InfluenzaA__ADM95741

SEQ ID NO: 83805 - RNA, 1410 nt, Artificial Sequence; identical to SEQ ID NO: 80623
  derived and/or modified CDS sequence (opt1) from neuraminidase__InfluenzaA__ADM95742

SEQ ID NO: 83806 - RNA, 1410 nt, Artificial Sequence
  derived and/or modified CDS sequence (opt1) from neuraminidase__InfluenzaA__ADM95743
augaaccccaaccagaagaucaucaccaucggcagcgugucccugaccaucagcacgaucugcuucuucaugcagaucgccauccucaucaccaccgucacccugcacuucaagcaguacgaguucaacuccagcccgaacaaccaggugaugcugugcgagcccacgaucaucgagcgcaacaucaccgagaucguguaccucaccaacaccacgaucgagaaggagaucugccccaagcuggccgaguaccggaacugguccaagccccagugcgacaucaccggguucgcgccguucagcaaggacaacuccauccgccugagcgccggcggggacaucugggucacccgggagcccuacguguccugcgaccccgacaagugcuaccaguucgcccucggccaggggaccacgcugaacaacgugcacagcaacaacaccguccgcgaccggacccccuaccgcacccugcucaugaacgagcugggcgugccguuccaccugggcacgaagcaggucugcaucgccugguccagcuccagcugccacgacgggaaggccuggcuccacgugugcaucaccggcgacgacaagaacgcgaccgccuccuucaucuacaacgggcggcugguggacagcguggucuccuggagcaaggagauccugcgcacccaggaguccgagugcgugugcaucaacggcacgugcaccguggucaugaccgacgggagcgccagcggcaaggccgacaccaagauccucuucaucgaggagggcaagaucgugcacacguccacccugagcggguccgcgcagcacguggaggagugcagcugcuacccccgguaccccggcguccgcugcgugugccgggacaacuggaagggguccaaccgccccaucguggacaucaacaucaaggaccacagcaucgucuccagcuacgugugcuccggccuggugggcgacaccccgcggaagaacgacagcuccagcuccagccacugccucgaccccaacaacgaggagggcgggcacggggucaagggcugggccuucgacgacgggaacgacguguggaugggccgcaccaucuccgagaagucccggcugggcuacgagacguucaaggucaucgagggguggagcaaccccaagagcaagcugcagaucaaccgccaggugaucguggaccggggcaaccgcuccggguacagcggcaucuucagcgucgaggggaaguccugcaucaaccggugcuucuacguggagcucauccgcggccggaaggaggagaccgaggugcuguggaccagcaacuccaucgucguguucugcggcaccagcgggacguacggcaccggguccuggcccgacggcgccgacaucaaccugaugccgaucuga

SEQ ID NO: 83807 - RNA, 1410 nt, Artificial Sequence; identical to SEQ ID NO: 80623
  derived and/or modified CDS sequence (opt1) from neuraminidase__InfluenzaA__ADM95744

SEQ ID NO: 83808 - RNA, 1410 nt, Artificial Sequence; identical to SEQ ID NO: 80762
  derived and/or modified CDS sequence (opt1) from neuraminidase__InfluenzaA__ADN05229

SEQ ID NO: 83809 - RNA, 1413 nt, Artificial Sequence; identical to SEQ ID NO: 81485
  derived and/or modified CDS sequence (opt1) from neuraminidase__InfluenzaA__ADN06292

SEQ ID NO: 83810 - RNA, 1413 nt, Artificial Sequence; identical to SEQ ID NO: 82954
  derived and/or modified CDS sequence (opt1) from neuraminidase__InfluenzaA__ADN06303

SEQ ID NO: 83811 - RNA, 1413 nt, Artificial Sequence
  derived and/or modified CDS sequence (opt1) from neuraminidase__InfluenzaA__ADN06314
augaaccccaaccagaagaucaucaccaucggcagcaucuccaucgccaucgggaucaucagccugaugcuccagaucggcaacaucaucuccaucugggccagccacuccauccagaccgggagccagaacaacacgggcaucugcaaccagcgcaucaucaccuacgagaacuccaccugggugaaccacaccuacgucaacaucaacaacacgaacgugguggcgggggaggacaagaccagcgucacccuggccggcaacuccagccugugcuccaucagcggcugggccaucuacaccaaggacaacuccauccggaucgggagcaagggcgagguguucgugauccgcgagccguucaucuccugcagccaccucgagugccggacguucuuccugacccagggggcccugcucaacgacaagcacuccaacggcaccgucaaggaccgcagccccuaccgggcccugauguccugcccccugggggaggcgcccagcccguacaacagcaaguucgaguccguggccuggagcgccuccgccugccacgacggcaugggcuggcucaccaucgggaucagcggccccgacaacggggcgguggccguccugaaguacaacggcaucaucacgggcaccaucaaguccuggaagaagcagauccugcgcacccaggagagcgagugcgugugcaugaacggguccugcuucaccaucaugacggacggccccagcaacaaggccgccuccuacaagaucuucaagaucgagaaggggaaggugaccaagagcaucgagcucaacgcccccaacuucuacuacgaggagugcuccugcuacccggacaccggcaucgucaugugcgugugccgggacaacuggcacgggagcaaccgccccuggguguccuucaaccagaaccuggacuaccagaucggcuacaucugcagcggcgucuucggggacaacccccggcccgaggacggcgagggguccugcaacccggugaccguggacggcgcgaacggggucaagggcuucagcuacaaguacggcaacgggguguggaucggccgcacgaaguccaaccggcugcgcaagggguucgagaugaucugggaccccaacggcuggaccaacaccgacagcgacuucuccgugaagcaggacgucguggccaucaccgacuggagcggguacagcggcuccuucgugcagcaccccgagcucacgggccuggacugcauccggcccugcuucugggucgagcuggugcgcgggcucccgcgggagaacaccaccaucuggaccagcggcuccagcaucuccuucugcggggucaacggcgacacggccaacuggagcuggcccgacggcgccgagcugcccuucaccaucgacaaguga

SEQ ID NO: 83812 - RNA, 1413 nt, Artificial Sequence; identical to SEQ ID NO: 82954
  derived and/or modified CDS sequence (opt1) from neuraminidase__InfluenzaA__ADN06325

SEQ ID NO: 83813 - RNA, 1413 nt, Artificial Sequence
  derived and/or modified CDS sequence (opt1) from neuraminidase__InfluenzaA__ADN06347
augaaccccaaccagaagaucaucaccaucggcagcaucuccaucgccaucgggaucaucagccugaugcuccagaucggcaacaucaucuccaucugggccagccacuccauccagaccgagagccagaacaacacggggaucugcaaccagcgcaucaucaccuacgagaacuccaccugggugaaccacaccuacgucaacaucaacaacacgaacgugguggcgggcgaggacaagaccagcgucacccuggccgggaacuccagccugugcuccaucagcggcugggccaucuacaccaaggacaacuccauccggaucggcagcaagggggacguguucgugauccgcgagccguucaucuccugcagccaccucgagugccggacguucuuccugacccagggcgcccugcucaacgacaagcacuccaacgggaccgucaaggaccgcagccccuaccgggcccugauguccugcccccugggcgaggcgcccagcccguacaacagcaaguucgaguccguggccuggagcgccuccgccugccacgacgggaugggcuggcucaccaucggcaucagcgggcccgacaacggcgcgguggccguccugaaguacaacgggaucaucacgggcaccaucaaguccuggaagaagcagauccugcgcacccaggagagcgagugcgugugcaugaacggcuccugcuucaccaucaugacggacgggcccagcaacaaggccgccuccuacaagaucuucaagaucgagaagggcaaggugaccaagagcaucgagcucaacgcccccaacuucuacuacgaggagugcuccugcuacccggacaccgggaucgucaugugcgugugccgggacaacuggcacggcagcaaccgccccuggguguccuucaaccagaaccuggacuaccagaugggguacaucugcagcggcgucuucggcgacaacccccggcccgaggacggggagggcuccugcaacccggugaacguggacggggcgaacggcgucaagggguucagcuacaaguacggcaacggcguguggaucgggcgcaccaaguccaaccggcugcgcaagggcuucgagaugaucugggaccccaacggguggacgaacaccgacagcgacuucuccgugaagcaggacgucguggccaucaccgacuggagcggcuacagcggguccuucgugcagcaccccgagcucaccggccuggacugcauccggcccugcuucugggucgagcuggugcgcggccucccgcgggagaacacgaccaucuggaccagcggguccagcaucuccuucugcggcgucaacagcgacaccgccaacugguccuggcccgacggggccgagcugcccuucacgaucgacaaguga

SEQ ID NO: 83814 - RNA, 1410 nt, Artificial Sequence; identical to SEQ ID NO: 83434
  derived and/or modified CDS sequence (opt1) from neuraminidase__InfluenzaA__ADN06369

SEQ ID NO: 83815 - RNA, 1410 nt, Artificial Sequence; identical to SEQ ID NO: 80762
  derived and/or modified CDS sequence (opt1) from neuraminidase__InfluenzaA__ADN26031

SEQ ID NO: 83816 - RNA, 1410 nt, Artificial Sequence; identical to SEQ ID NO: 80762
  derived and/or modified CDS sequence (opt1) from neuraminidase__InfluenzaA__ADN26032

SEQ ID NO: 83817 - RNA, 1410 nt, Artificial Sequence; identical to SEQ ID NO: 80762
  derived and/or modified CDS sequence (opt1) from neuraminidase__InfluenzaA__ADN26033

SEQ ID NO: 83818 - RNA, 1410 nt, Artificial Sequence; identical to SEQ ID NO: 80762
  derived and/or modified CDS sequence (opt1) from neuraminidase__InfluenzaA__ADN26034

SEQ ID NO: 83819 - RNA, 1410 nt, Artificial Sequence; identical to SEQ ID NO: 80762
  derived and/or modified CDS sequence (opt1) from neuraminidase__InfluenzaA__ADN26035

SEQ ID NO: 83820 - RNA, 1410 nt, Artificial Sequence; identical to SEQ ID NO: 80762
  derived and/or modified CDS sequence (opt1) from neuraminidase__InfluenzaA__ADN26036

SEQ ID NO: 83821 - RNA, 1410 nt, Artificial Sequence
  derived and/or modified CDS sequence (opt1) from neuraminidase__InfluenzaA__ADN26037
augaaccccaaccagaagaucaucaccaucggcagcgugugcaugaccaucgggauggccaaccugauccuccagaucggcaacaucaucuccaucuggaucagccacuccauccagcuggggaaccagaaccagaucgagacgugcaaccagagcgucaucaccuacgagaacaacaccugggugaaccagaccuacgugaacaucuccaacacgaacuucgccgcgggccagagcgucguguccgugaagcuggccgggaacagcucccucugcccggucagcggcugggccaucuacuccaaggacaacagcgugcgcaucggcuccaagggggacguguucgucauccgggagcccuucaucagcugcagcccccuggagugccgcaccuucuuccugacccagggcgcccuccugaacgacaagcacuccaacgggaccaucaaggaccggucccccuaccgcacgcugaugagcugcccgaucggcgaggugcccucccccuacaacagccgguucgagagcguggccugguccgcgagcgccugccacgacgggaucaacuggcucaccaucggcaucuccggccccgacaacggggccgucgccgugcugaaguacaacggcaucaucaccgacaccaucaagagcuggcgcaacaacauccugcggacgcaggaguccgagugcgcgugcgugaacgggagcugcuucaccgucaugaccgacggcccguccaacggccaggccagcuacaagaucuuccgcaucgagaaggggaagaucgugaaguccguggagaugaacgcccccaacuaccacuacgaggagugcagcugcuaccccgacuccagcgagaucacgugcgucugccgggacaacuggcacggcuccaaccgccccugggugagcuucaaccagaaccucgaguaccagaucggguacaucugcuccggcaucuucggggacaacccgcggcccaucgacaagaccggcagcugcggccccguguccagcaacggggccaacggcgucaagggguucuccuucaaguacggcaacgggguguggaucggccgcaccaagagcaucagcucccggaacggcuucgagaugaucugggaccccaacggguggaccggcaccgacaacaacuucagcaucaagcaggacaucguggggaucaacgagugguccggcuacagcggguccuucguccagcacccggagcugacgggccuggacugcauccgccccugcuucuggguggagcucauccggggccgccccaaggagaacaccaucuggaccagcggguccagcaucuccuucugcggcgucaacagcgacaccguggggugguccuggcccgacggcgccgagcugccguucacgaucgacaaguga

SEQ ID NO: 83822 - RNA, 1410 nt, Artificial Sequence; identical to SEQ ID NO: 80762
  derived and/or modified CDS sequence (opt1) from neuraminidase__InfluenzaA__ADN26038

SEQ ID NO: 83823 - RNA, 1410 nt, Artificial Sequence; identical to SEQ ID NO: 80762
  derived and/or modified CDS sequence (opt1) from neuraminidase__InfluenzaA__ADN26041

SEQ ID NO: 83824 - RNA, 1410 nt, Artificial Sequence; identical to SEQ ID NO: 80762
  derived and/or modified CDS sequence (opt1) from neuraminidase__InfluenzaA__ADN26042

SEQ ID NO: 83825 - RNA, 1410 nt, Artificial Sequence
  derived and/or modified CDS sequence (opt1) from neuraminidase__InfluenzaA__ADN26043
augaaccccaaccagaagaucaucaccaucggcagcgugugcaugaccaucgggauggccaaccugauccuccagaucggcaacaucaucuccaucuggaucagccacuccauccagcuggggaaccagaaccagaucgagacgugcaaccagagcgucaucaccuacgagaacaacaccugggugaaccagaccuacgugaacaucuccaacacgaacuucgccgcgggccagagcgucguguccgugaagcuggccgggaacagcucccucugcccggucagcggcugggccaucuacuccaaggacaacagcauccgcaucggcuccaagggggacguguucgugauccgggagcccuucaucagcugcagcccccuggagugccgcaccuucuuccugacccagggcgcccuccugaacgacaagcacuccaacgggaccaucaaggaccggucccccuaccgcacgcugaugagcugcccgaucggcgagguccccucccccuacaacagccgguucgagagcguggccugguccgcgagcgccugccacgacgggaucaacuggcucaccaucggcaucuccggccccgacaacggggccguggccguccugaaguacaacggcaucaucaccgacaccaucaagagcuggcgcaacaacauccugcggacgcaggaguccgagugcgcgugcgugaacgggagcugcuucaccgugaugaccgacggcccguccgacggccaggccagcuacaagaucuuccgcaucgagaaggggaagaucgucaaguccguggagaugaacgcccccaacuaccacuacgaggagugcagcugcuaccccgacuccagcgagaucacgugcgugugccgggacaacuggcacggcuccaaccgccccugggucagcuucaaccagaaccucgaguaccaggugggguacaucugcuccggcaucuucggggacaacccgcggcccaacgacaagaccggcagcugcggccccguguccagcaacggggccaacggcgucaagggguucuccuucaaguacggcaacgggguguggaucggccgcaccaagagcaucagcucccggaacggcuucgagaugaucugggaccccaacggguggaccggcaccgacaacaacuucagcaucaagcaggacaucguggggaucaacgagugguccggcuacagcggguccuucguccagcacccggagcugacgggccuggacugcauccgccccugcuucuggguggagcucauccggggccgccccaaggagaacaccaucuggaccagcggguccagcaucuccuucugcggcgucaacagcgacaccguggggugguccuggcccgacggcgccgagcugccguucacgaucgacaaguga

SEQ ID NO: 83826 - RNA, 1410 nt, Artificial Sequence; identical to SEQ ID NO: 80762
  derived and/or modified CDS sequence (opt1) from neuraminidase__InfluenzaA__ADN26044

SEQ ID NO: 83827 - RNA, 1410 nt, Artificial Sequence; identical to SEQ ID NO: 80762
  derived and/or modified CDS sequence (opt1) from neuraminidase__InfluenzaA__ADN26045

SEQ ID NO: 83828 - RNA, 1410 nt, Artificial Sequence
  derived and/or modified CDS sequence (opt1) from neuraminidase__InfluenzaA__ADN26047
augaaccccaaccagaagaucaucaccaucggcagcgugugcaugaccaucgggauggccaaccugauccuccagaucggcaacaucaucuccaucuggaucagccacuccauccagcuggggaaccagaaccagaucgagacgugcaaccagagcgucaucaccuacgagaacaacaccugggugaaccagaccuacgugaacaucuccaacacgaacuucgccgcgggccagagcauggucuccgugaagcugaccgggaacagcucccucugcccggugagcggcugggccaucuacuccaaggacaacagcguccgcaucggcuccaagggggacguguucgugauccgggagcccuucaucagcugcagcccccuggagugccgcaccuucuuccugacccagggcgcccuccugaacgacaagcacuccaacgggacgaucaaggaccggucccccuaccgcacccugaugagcugcccgaucggcgagguccccucccccuacaacagccgguucgagagcguggccugguccgccagcgcgugccacgacgggaucaacuggcucaccaucggcaucuccggccccgacaacggggccguggccguccugaaguacaacggcaucaucaccgacacgaucaagagcuggcgcaacaacauccugcggacccaggaguccgagugcgccugcgugaacgggagcugcuucaccgugaugaccgacggcccguccaacggccaggcgagcuacaagaucuuccgcaucgagaaggggaagaucgucaaguccguggagaugaacgcccccaacuaccacuacgaggagugcagcugcuaccccgacuccagcgagaucacgugcgugugccgggacaacuggcacggcuccaaccgccccugggucagcuucaaccagaaccucgaguaccagaucggguacaucugcuccggcaucuucggggacaacccgcggcccaacgacaagaccggcagcugcggccccguguccagcaacggggccaacggcgugaagggguucuccuucaaguacggcaacggggucuggaucggccgcaccaagagcaucagcucccggaacggcuucgagaugaucugggaccccaacggguggaccggcacggacaacaacuucagcaucaagcaggacaucguggggaucaacgagugguccggcuacagcggguccuucgugcagcacccggagcugaccggccuggacugcauccgccccugcuucugggucgagcucauccggggccgccccaaggagaacaccaucuggaccagcggguccagcaucuccuucugcggcgugaacagcgacacggucgggugguccuggcccgacggcgccgagcugccguucaccaucgacaaguga

SEQ ID NO: 83829 - RNA, 1410 nt, Artificial Sequence; identical to SEQ ID NO: 80762
  derived and/or modified CDS sequence (opt1) from neuraminidase__InfluenzaA__ADN26048

SEQ ID NO: 83830 - RNA, 1410 nt, Artificial Sequence; identical to SEQ ID NO: 80762
  derived and/or modified CDS sequence (opt1) from neuraminidase__InfluenzaA__ADN26049

SEQ ID NO: 83831 - RNA, 1410 nt, Artificial Sequence; identical to SEQ ID NO: 80762
  derived and/or modified CDS sequence (opt1) from neuraminidase__InfluenzaA__ADN26050

SEQ ID NO: 83832 - RNA, 1410 nt, Artificial Sequence; identical to SEQ ID NO: 80762
  derived and/or modified CDS sequence (opt1) from neuraminidase__InfluenzaA__ADN26051

SEQ ID NO: 83833 - RNA, 1410 nt, Artificial Sequence; identical to SEQ ID NO: 80762
  derived and/or modified CDS sequence (opt1) from neuraminidase__InfluenzaA__ADN26052

SEQ ID NO: 83834 - RNA, 1410 nt, Artificial Sequence; identical to SEQ ID NO: 80752
  derived and/or modified CDS sequence (opt1) from neuraminidase__InfluenzaA__ADN26053

SEQ ID NO: 83835 - RNA, 1410 nt, Artificial Sequence; identical to SEQ ID NO: 80762
  derived and/or modified CDS sequence (opt1) from neuraminidase__InfluenzaA__ADN26054

SEQ ID NO: 83836 - RNA, 1410 nt, Artificial Sequence; identical to SEQ ID NO: 80762
  derived and/or modified CDS sequence (opt1) from neuraminidase__InfluenzaA__ADN26057

SEQ ID NO: 83837 - RNA, 1410 nt, Artificial Sequence; identical to SEQ ID NO: 80762
  derived and/or modified CDS sequence (opt1) from neuraminidase__InfluenzaA__ADN26058

SEQ ID NO: 83838 - RNA, 1410 nt, Artificial Sequence; identical to SEQ ID NO: 80762
  derived and/or modified CDS sequence (opt1) from neuraminidase__InfluenzaA__ADN26059

SEQ ID NO: 83839 - RNA, 1410 nt, Artificial Sequence; identical to SEQ ID NO: 81129
  derived and/or modified CDS sequence (opt1) from neuraminidase__InfluenzaA__ADN26060

SEQ ID NO: 83840 - RNA, 1410 nt, Artificial Sequence; identical to SEQ ID NO: 80762
  derived and/or modified CDS sequence (opt1) from neuraminidase__InfluenzaA__ADN26061

SEQ ID NO: 83841 - RNA, 1410 nt, Artificial Sequence; identical to SEQ ID NO: 80762
  derived and/or modified CDS sequence (opt1) from neuraminidase__InfluenzaA__ADN26063

SEQ ID NO: 83842 - RNA, 1410 nt, Artificial Sequence; identical to SEQ ID NO: 80762
  derived and/or modified CDS sequence (opt1) from neuraminidase__InfluenzaA__ADN26064

SEQ ID NO: 83843 - RNA, 1410 nt, Artificial Sequence; identical to SEQ ID NO: 81835
  derived and/or modified CDS sequence (opt1) from neuraminidase__InfluenzaA__ADN26065

SEQ ID NO: 83844 - RNA, 1410 nt, Artificial Sequence; identical to SEQ ID NO: 80762
  derived and/or modified CDS sequence (opt1) from neuraminidase__InfluenzaA__ADN26066

SEQ ID NO: 83845 - RNA, 1410 nt, Artificial Sequence; identical to SEQ ID NO: 80762
  derived and/or modified CDS sequence (opt1) from neuraminidase__InfluenzaA__ADN26067

SEQ ID NO: 83846 - RNA, 1410 nt, Artificial Sequence; identical to SEQ ID NO: 80762
  derived and/or modified CDS sequence (opt1) from neuraminidase__InfluenzaA__ADN26069

SEQ ID NO: 83847 - RNA, 1410 nt, Artificial Sequence; identical to SEQ ID NO: 80762
  derived and/or modified CDS sequence (opt1) from neuraminidase__InfluenzaA__ADN26070

SEQ ID NO: 83848 - RNA, 1410 nt, Artificial Sequence; identical to SEQ ID NO: 80762
  derived and/or modified CDS sequence (opt1) from neuraminidase__InfluenzaA__ADN26072

SEQ ID NO: 83849 - RNA, 1410 nt, Artificial Sequence; identical to SEQ ID NO: 80762
  derived and/or modified CDS sequence (opt1) from neuraminidase__InfluenzaA__ADN26073

SEQ ID NO: 83850 - RNA, 1410 nt, Artificial Sequence; identical to SEQ ID NO: 80762
  derived and/or modified CDS sequence (opt1) from neuraminidase__InfluenzaA__ADN26075

SEQ ID NO: 83851 - RNA, 1410 nt, Artificial Sequence; identical to SEQ ID NO: 80762
  derived and/or modified CDS sequence (opt1) from neuraminidase__InfluenzaA__ADN26076

SEQ ID NO: 83852 - RNA, 1410 nt, Artificial Sequence; identical to SEQ ID NO: 80762
  derived and/or modified CDS sequence (opt1) from neuraminidase__InfluenzaA__ADN26077

SEQ ID NO: 83853 - RNA, 1410 nt, Artificial Sequence; identical to SEQ ID NO: 80762
  derived and/or modified CDS sequence (opt1) from neuraminidase__InfluenzaA__ADN26078

SEQ ID NO: 83854 - RNA, 1410 nt, Artificial Sequence; identical to SEQ ID NO: 80762
  derived and/or modified CDS sequence (opt1) from neuraminidase__InfluenzaA__ADN26079

SEQ ID NO: 83855 - RNA, 1410 nt, Artificial Sequence; identical to SEQ ID NO: 80762
  derived and/or modified CDS sequence (opt1) from neuraminidase__InfluenzaA__ADN26080

SEQ ID NO: 83856 - RNA, 1410 nt, Artificial Sequence; identical to SEQ ID NO: 80762
  derived and/or modified CDS sequence (opt1) from neuraminidase__InfluenzaA__ADN26081

SEQ ID NO: 83857 - RNA, 1410 nt, Artificial Sequence; identical to SEQ ID NO: 80762
  derived and/or modified CDS sequence (opt1) from neuraminidase__InfluenzaA__ADN26082

SEQ ID NO: 83858 - RNA, 1410 nt, Artificial Sequence; identical to SEQ ID NO: 80762
  derived and/or modified CDS sequence (opt1) from neuraminidase__InfluenzaA__ADN26083

SEQ ID NO: 83859 - RNA, 1410 nt, Artificial Sequence; identical to SEQ ID NO: 82664
  derived and/or modified CDS sequence (opt1) from neuraminidase__InfluenzaA__ADN26084

SEQ ID NO: 83860 - RNA, 1410 nt, Artificial Sequence; identical to SEQ ID NO: 80762
  derived and/or modified CDS sequence (opt1) from neuraminidase__InfluenzaA__ADN26085

SEQ ID NO: 83861 - RNA, 1410 nt, Artificial Sequence; identical to SEQ ID NO: 80762
  derived and/or modified CDS sequence (opt1) from neuraminidase__InfluenzaA__ADN26086

SEQ ID NO: 83862 - RNA, 1410 nt, Artificial Sequence; identical to SEQ ID NO: 80762
  derived and/or modified CDS sequence (opt1) from neuraminidase__InfluenzaA__ADN26087

SEQ ID NO: 83863 - RNA, 1410 nt, Artificial Sequence; identical to SEQ ID NO: 80762
  derived and/or modified CDS sequence (opt1) from neuraminidase__InfluenzaA__ADN26088

SEQ ID NO: 83864 - RNA, 1410 nt, Artificial Sequence; identical to SEQ ID NO: 80762
  derived and/or modified CDS sequence (opt1) from neuraminidase__InfluenzaA__ADN26090

SEQ ID NO: 83865 - RNA, 1410 nt, Artificial Sequence; identical to SEQ ID NO: 80762
  derived and/or modified CDS sequence (opt1) from neuraminidase__InfluenzaA__ADN26091

SEQ ID NO: 83866 - RNA, 1410 nt, Artificial Sequence; identical to SEQ ID NO: 80762
  derived and/or modified CDS sequence (opt1) from neuraminidase__InfluenzaA__ADN26092

SEQ ID NO: 83867 - RNA, 1410 nt, Artificial Sequence; identical to SEQ ID NO: 80762
  derived and/or modified CDS sequence (opt1) from neuraminidase__InfluenzaA__ADN26093

SEQ ID NO: 83868 - RNA, 1410 nt, Artificial Sequence
  derived and/or modified CDS sequence (opt1) from neuraminidase__InfluenzaA__ADN26094
augaaccccaaccagaagaucaucaccaucggcagcgugugcaugaccaucgggauggccaaccugauccuccagaucggcaacaucaucuccaucuggaucagccacuccauccagcuggggaaccagaaccagaucgagacgugcaaccagagcgucaucaccuacgagaacaacaccugggugaaccagaccuacgugaacaucuccaacacgaacuucgccgcgggccagagcgucguguccgugaagcuggccgggaacagcucccucugcccggucagcggcugggccaucuacuccaaggacaacagcauccgcaucggcuccaagggggacguguucgugauccgggagcccuucaucagcugcagcccccuggagugccgcaccuucuuccugacccagggcgcccuccugaacgacaagcacuccaacgggaccaucaaggaccggucccccuaccgcacgcugaugagcugcccgaucggcgagguccccucccccuacaacagccgguucgagagcguggccugguccgcgagcgccugccacgacgggaucaacuggcucaccaucggcaucuccggccccgacaacggggccguggccguccugaaguacaacggcaucaucaccgacaccaucaagagcuggcgcaacaacauccugcggacgcaggaguccgagugcgcgugcgugaacgggagcugcuucaccgugaugaccgacggcccguccgacggccaggccagcuacaagaucuuccgcaucgagaaggggaagaucgucaaguccguggagaugaacgcccccaacuaccacuacgaggagugcagcugcuaccccgacuccagcgagaucacgugcgugugccgggacaacuggcacggcuccaaccgccccugggucagcuucaaccagaaccucgaguaccagaucggguacaucugcuccggcaucuucggggacaacccgcggcccaacgacaagaccggcagcugcggccccguguccagcaacggggccaacggcgugaagggguucuccuucaaguacggcaacggggucuggaucggccgcaccaagagcaucagcucccggaacggcuucgagaugaucugggaccccaacggguggaccggcaaggacaacaacuucagcaucaagcaggacaucguggggaucaacgagugguccggcuacagcggguccuucgugcagcacccggagcugaccggccuggacugcauccgccccugcuucugggucgagcucauccggggccgccccaaggagaacacgaucuggaccagcggguccagcaucuccuucugcggcgugaacagcgacaccgucgggugguccuggcccgacggcgccgagcugccguucaccaucgacaaguga

SEQ ID NO: 83869 - RNA, 1410 nt, Artificial Sequence; identical to SEQ ID NO: 82664
  derived and/or modified CDS sequence (opt1) from neuraminidase__InfluenzaA__ADN26095

SEQ ID NO: 83870 - RNA, 1410 nt, Artificial Sequence
  derived and/or modified CDS sequence (opt1) from neuraminidase__InfluenzaA__ADN26096
augaaccccaaccagaagaucaucaccaucggcagcgugugcaugaccaucgggauggccaaccugauccuccagaucggcaacaucaucuccaucuggaucagccacuccauccagcuggggaaccagaaccagaucgagacgugcaaccagagcgucaucaccuacgagaacaacaccugggugaaccagaccuacgugaacaucuccaacacgaacuucgccgcgggccagagcgucguguccgugaagcuggccgggaacagcucccucugcccggucaacggcugggccaucuacagcaaggacaacuccauccgcaucggcagcaagggggacguguucgugauccgggagcccuucaucuccugcagcccccuggagugccgcaccuucuuccugacccagggcgcccuccugaacgacaagcacuccaacgggaccaucaaggaccggagccccuaccgcacgcugauguccugcccgaucggcgagguccccagccccuacaacucccgguucgagagcguggccuggagcgcguccgccugccacgacgggaucaacuggcucaccaucggcaucagcggccccgacaacggggccguggccguccugaaguacaacggcaucaucaccgacaccaucaaguccuggcgcaacaacauccugcggacgcaggagagcgagugcgcgugcgugaacggguccugcuucaccgugaugaccgacggcccgagcgacggccaggccuccuacaagaucuuccgcaucgagaaggggaagaucgucaagagcguggagaugaacgcccccaacuaccacuacgaggagugcuccugcuaccccgacagcuccgagaucacgugcgugugccgggacaacuggcacggcagcaaccgccccugggucuccuucaaccagaaccucgaguaccagaucggguacaucugcagcggcaucuucggggacaacccgcggcccaacgacaagaccggcuccugcggccccgugagcuccaacggggccaacggcgugaagggguucagcuucaaguacggcaacggggucuggaucggccgcaccaagaacaucuccagccggaacggcuucgagaugaucugggaccccaacggguggaccggcaccgacaacaacuucagcaucaagcaggacaucguggggaucaacgagugguccggcuacagcggguccuucgugcagcacccggagcugacgggccuggacugcauccgccccugcuucugggucgagcucauccggggccgccccaaggagaacaccaucuggaccagcggguccagcaucuccuucugcggcgugaacagcgacaccgucgggugguccuggcccgacggcgccgagcugccguucacgaucgacaaguga

SEQ ID NO: 83871 - RNA, 1410 nt, Artificial Sequence; identical to SEQ ID NO: 80762
  derived and/or modified CDS sequence (opt1) from neuraminidase__InfluenzaA__ADN26097

SEQ ID NO: 83872 - RNA, 1410 nt, Artificial Sequence; identical to SEQ ID NO: 80762
  derived and/or modified CDS sequence (opt1) from neuraminidase__InfluenzaA__ADN26098

SEQ ID NO: 83873 - RNA, 1410 nt, Artificial Sequence; identical to SEQ ID NO: 80762
  derived and/or modified CDS sequence (opt1) from neuraminidase__InfluenzaA__ADN26099

SEQ ID NO: 83874 - RNA, 1410 nt, Artificial Sequence; identical to SEQ ID NO: 80762
  derived and/or modified CDS sequence (opt1) from neuraminidase__InfluenzaA__ADN26100

SEQ ID NO: 83875 - RNA, 1410 nt, Artificial Sequence; identical to SEQ ID NO: 80762
  derived and/or modified CDS sequence (opt1) from neuraminidase__InfluenzaA__ADN26101

SEQ ID NO: 83876 - RNA, 1410 nt, Artificial Sequence
  derived and/or modified CDS sequence (opt1) from neuraminidase__InfluenzaA__ADN26102
augaaccccaaccagaagaucaucaccaucggcagcgugugcaugaccaucgggauggccaaccugauccuccagaucggcaacaucaucuccaucuggaucagccaccugauccagcuggggaaccagaaccagaucgagacgugcaaccaguccgucaucaccuacgagaacaacaccugggugaaccagaccuacgugaacaucagcaacacgaacuucgccgcgggccaguccgucgugagcgugaagcucgccgggaacuccagccugugcccggucuccggcugggccaucuacagcaaggacaacuccauccgcaucggcagcaagggggacguguucgugauccgggagcccuucaucuccugcagcccccuggagugccgcaccuucuuccucacccagggcgcccugcugaacgacaagcacuccaacgggaccaucaaggaccggagccccuaccgcacgcucauguccugcccgaucggcgagguccccagccccuacaacucccgguucgagagcguggccuggagcgcguccgccugccacgacgggaucaacuggcugaccaucggcaucagcggccccgacaacggggccguggccguccugaaguacaacggcaucaucaccgacaccaucaaguccuggcgcaacaacauccuccggacgcaggagagcgagugcgcgugcgugaacggguccugcuucaccgugaugaccgacggcccgagcgacggccaggccuccuacaagaucuucaagaucgagaaggggaagaucgucaagagcguggagaugaacgcccccaacuaccacuacgaggagugcuccugcuaccccgacagcuccgagaucacgugcgugugccgcgacaacuggcacggcagcaaccggcccugggucuccuucaaccagaaccuggaguaccagaucggguacaucugcagcggcaucuucggggacaacccgcgccccaacgacaagaccggcuccugcggccccgugagcuccaacggggccaacggcgugaagggguucagcuucaaguacggcaacggggucuggaucggccggaccaaguccaucagcagccgcaacggcuucgagaugaucugggaccccaacggguggaccggcaccgacaacaacuucuccaucaagcaggacaucguggggaucaacgaguggagcggcuacuccgggagcuucgugcagcacccggagcugacgggccucgacugcauccggcccugcuucugggucgagcugauccgcggccggcccaaggagaacuccaucuggaccagcggguccagcaucuccuucugcggcgugaacagcgacaccgucgggugguccuggcccgacggcgccgagcugccguucaccaucgacaaguga

SEQ ID NO: 83877 - RNA, 1410 nt, Artificial Sequence; identical to SEQ ID NO: 80762
  derived and/or modified CDS sequence (opt1) from neuraminidase__InfluenzaA__ADN26103

SEQ ID NO: 83878 - RNA, 1410 nt, Artificial Sequence; identical to SEQ ID NO: 80762
  derived and/or modified CDS sequence (opt1) from neuraminidase__InfluenzaA__ADN26104

SEQ ID NO: 83879 - RNA, 1410 nt, Artificial Sequence; identical to SEQ ID NO: 80762
  derived and/or modified CDS sequence (opt1) from neuraminidase__InfluenzaA__ADN26105

SEQ ID NO: 83880 - RNA, 1410 nt, Artificial Sequence; identical to SEQ ID NO: 80762
  derived and/or modified CDS sequence (opt1) from neuraminidase__InfluenzaA__ADN26106

SEQ ID NO: 83881 - RNA, 1410 nt, Artificial Sequence; identical to SEQ ID NO: 82664
  derived and/or modified CDS sequence (opt1) from neuraminidase__InfluenzaA__ADN26107

SEQ ID NO: 83882 - RNA, 1410 nt, Artificial Sequence; identical to SEQ ID NO: 82664
  derived and/or modified CDS sequence (opt1) from neuraminidase__InfluenzaA__ADN26108

SEQ ID NO: 83883 - RNA, 1410 nt, Artificial Sequence; identical to SEQ ID NO: 80762
  derived and/or modified CDS sequence (opt1) from neuraminidase__InfluenzaA__ADN26109

SEQ ID NO: 83884 - RNA, 1410 nt, Artificial Sequence; identical to SEQ ID NO: 81736
  derived and/or modified CDS sequence (opt1) from neuraminidase__InfluenzaA__ADN26110

SEQ ID NO: 83885 - RNA, 1410 nt, Artificial Sequence; identical to SEQ ID NO: 82664
  derived and/or modified CDS sequence (opt1) from neuraminidase__InfluenzaA__ADN26111

SEQ ID NO: 83886 - RNA, 1410 nt, Artificial Sequence; identical to SEQ ID NO: 81736
  derived and/or modified CDS sequence (opt1) from neuraminidase__InfluenzaA__ADN26112

SEQ ID NO: 83887 - RNA, 1410 nt, Artificial Sequence; identical to SEQ ID NO: 82664
  derived and/or modified CDS sequence (opt1) from neuraminidase__InfluenzaA__ADN26113

SEQ ID NO: 83888 - RNA, 1410 nt, Artificial Sequence
  derived and/or modified CDS sequence (opt1) from neuraminidase__InfluenzaA__ADN26114
augaaccccaaccagaagaucaucaccaucggcagcgugugcaugaccaucgggauggccaaccugauccuccagaucggcaacaucaucuccaucuggaucagccacuccauccagcuggggaaccagaaccagaucgagacgugcaaccagagcgucaucaccuacgagaacaacaccugggugaaccagaccuacgugaacaucaacaacacgaacuucgccgcgggccaguccgucgugagcgugaagcuggccgggaacuccagccucugcccggucuccggcugggccaucuacagcaaggacaacuccauccgcaucggcagcaagggggacguguucgugauccgggagcccuucaucuccugcagcccccuggagugccgcaccuucuuccugacccagggcgcccuccugaacgacaagcacuccaacgggaccaucaaggaccggagccccuaccgcacgcugauguccugcccgaucggcgagguccccagccccuacaacucccgguucgagagcguggccuggagcgcguccgccugccacgacgggaucaacuggcucaccaucggcaucagcggccccgacaacggggccguggccguccugaaguacaacggcaucaucaccgacaccaucaaguccuggcgcaacaacauccugcggacgcaggagagcgagugcgcgugcgugaacggguccugcuucaccgugaugaccgacggcccgagcgacggccaggccuccuacaagaucuuccgcaucgagaaggggaagaucgucaagagcguggagaugaacgcccccaacuaccacuacgaggagugcuccugcuaccccgacagcuccgagaucacgugcgugugccgggacaacuggcacggcagcaaccgccccugggucuccuucaaccagaaccucgaguaccagaucggguacaucugcagcggcaucuucggggacaacccgcggcccaacgacaagaccggcuccugcggccccgugagcuccaacggggccaacggcgugaagggguucagcuucaaguacggcaacggggucuggaucggccgcaccaaguccaucagcagccggaacggcuucgagaugaucugggaccccaacggguggaccggcaccgacaacaacuucuccaucaagcaggacaucguggggaucaacgaguggagcggcuacuccgggagcuucgugcagcacccggagcugacgggccuggacugcauccgccccugcuucugggucgagcucauccggggccgccccaaggagaacaccaucuggaccuccgggagcuccaucagcuucugcggcgugaacuccgacaccgucggguggagcuggcccgacggcgccgagcugccguucacgaucgacaaguga

SEQ ID NO: 83889 - RNA, 1410 nt, Artificial Sequence; identical to SEQ ID NO: 80762
  derived and/or modified CDS sequence (opt1) from neuraminidase__InfluenzaA__ADN26115

SEQ ID NO: 83890 - RNA, 1410 nt, Artificial Sequence
  derived and/or modified CDS sequence (opt1) from neuraminidase__InfluenzaA__ADN26116
augaaccccaaccagaagaucaucaccaucggcagcgugugcaugaccaucgggauggccaaccugauccuccagaucggcaacaucaucuccaucuggaucagccacuccauccagcuggggaaccagaaccagaucgagacgugcaaccagagcgucaucaccuacgagaacaacaccugggugaaccagaccuacgugaacaucuccaacacgaacuucgccgcgggccagagcgucguguccgugaagcuggccgggaacagcucccucugcccggucaacggcugggccaucuacagcaaggacaacuccauccgcaucggcagcaagggggacguguucgugauccgggagcccuucaucuccugcagcccccuggagugccgcaccuucuuccugacccagggcgcccuccugaacgacaagcacuccaacgggaccaucaaggaccggagccccuaccgcacgcugauguccugcccgaucggcgagguccccagccccuacaacucccgguucgagagcguggccuggagcgcguccgccugccacgacgggaucaacuggcucaccaucggcaucagcggccccgacaacggggccguggccguccugaaguacaacggcaucaucaccgacaccaucaaguccuggcgcaacaacauccugcggacgcaggagagcgagugcgcgugcgugaacggguccugcuucaccgugaugaccgacggcccgagcgacggccaggccuccuacaagaucuuccgcaucgagaaggggaagaucgucaagagcguggagaugaacgcccccaacuaccacuacgaggagugcuccugcuaccccgacagcuccgagaucacgugcgugugccgggacaacuggcacggcagcaaccgccccugggucuccuucaaccagaaccucgaguaccagaucggguacaucugcagcggcaucuucggggacaacccgcggcccaacgacaagaccggcuccugcggccccgugagcuccaacggggccaacggcgugaagggguucagcuucaaguacggcaacggggucuggaucggccgcaccaaguccaucagcagccggaacggcuucgagaugaucugggaccccaacggguggaccggcaccgacaacaacuucuccaucaagcaggacaucguggggaucaacgaguggagcggcuacuccgggagcuucgugcagcacccggagcugacgcgccuggacugcauccggcccugcuucugggucgagcucauccgcggccggcccaaggagaacaccaucuggaccuccggcagcuccaucagcuucugcggggugaacuccgacaccgucggcuggagcuggcccgacggggccgagcugccguucacgaucgacaaguga

SEQ ID NO: 83891 - RNA, 1410 nt, Artificial Sequence; identical to SEQ ID NO: 82664
  derived and/or modified CDS sequence (opt1) from neuraminidase__InfluenzaA__ADN26117

SEQ ID NO: 83892 - RNA, 1410 nt, Artificial Sequence; identical to SEQ ID NO: 82664
  derived and/or modified CDS sequence (opt1) from neuraminidase__InfluenzaA__ADN26118

SEQ ID NO: 83893 - RNA, 1410 nt, Artificial Sequence; identical to SEQ ID NO: 80762
  derived and/or modified CDS sequence (opt1) from neuraminidase__InfluenzaA__ADN26119

SEQ ID NO: 83894 - RNA, 1410 nt, Artificial Sequence; identical to SEQ ID NO: 81736
  derived and/or modified CDS sequence (opt1) from neuraminidase__InfluenzaA__ADN26120

SEQ ID NO: 83895 - RNA, 1410 nt, Artificial Sequence; identical to SEQ ID NO: 82664
  derived and/or modified CDS sequence (opt1) from neuraminidase__InfluenzaA__ADN26121

SEQ ID NO: 83896 - RNA, 1410 nt, Artificial Sequence; identical to SEQ ID NO: 80762
  derived and/or modified CDS sequence (opt1) from neuraminidase__InfluenzaA__ADN26122

SEQ ID NO: 83897 - RNA, 1410 nt, Artificial Sequence; identical to SEQ ID NO: 80762
  derived and/or modified CDS sequence (opt1) from neuraminidase__InfluenzaA__ADN26123

SEQ ID NO: 83898 - RNA, 1410 nt, Artificial Sequence; identical to SEQ ID NO: 80762
  derived and/or modified CDS sequence (opt1) from neuraminidase__InfluenzaA__ADN26124

SEQ ID NO: 83899 - RNA, 1410 nt, Artificial Sequence; identical to SEQ ID NO: 81736
  derived and/or modified CDS sequence (opt1) from neuraminidase__InfluenzaA__ADN26125

SEQ ID NO: 83900 - RNA, 1410 nt, Artificial Sequence; identical to SEQ ID NO: 81736
  derived and/or modified CDS sequence (opt1) from neuraminidase__InfluenzaA__ADN26126

SEQ ID NO: 83901 - RNA, 1410 nt, Artificial Sequence; identical to SEQ ID NO: 81527
  derived and/or modified CDS sequence (opt1) from neuraminidase__InfluenzaA__ADN26127

SEQ ID NO: 83902 - RNA, 1410 nt, Artificial Sequence; identical to SEQ ID NO: 80762
  derived and/or modified CDS sequence (opt1) from neuraminidase__InfluenzaA__ADN26128

SEQ ID NO: 83903 - RNA, 1410 nt, Artificial Sequence; identical to SEQ ID NO: 81736
  derived and/or modified CDS sequence (opt1) from neuraminidase__InfluenzaA__ADN26129

SEQ ID NO: 83904 - RNA, 1410 nt, Artificial Sequence; identical to SEQ ID NO: 82664
  derived and/or modified CDS sequence (opt1) from neuraminidase__InfluenzaA__ADN26130

SEQ ID NO: 83905 - RNA, 1410 nt, Artificial Sequence
  derived and/or modified CDS sequence (opt1) from neuraminidase__InfluenzaA__ADN26131
augaaccccaaccagaagaucaucaccaucggcagcgugugcaugaccaucgggauggccaaccugauccuccagaucggcaacaucaucuccaucuggaucagccacuccauccagcuggggaaccagaaccagaucgagacgugcaaccagagcgucaucaccuacgagaacaacaccugggugaaccagaccuacgugaacaucuccaacacgaacuucgccgcgggccagagcgucguguccgugaagcuggccgggaacagcucccucugcccggucagcggcugggccaucuacuccaaggacaacagcauccgcaucggcuccaagggggacguguucgugauccgggagcccuucaucagcugcagcccccuggagugccgcaccuucuuccugacccagggcgcccuccugaacgacaagcacuccaacgggaccaucaaggaccggucccccuaccgcacgcugaugagcugcccgaucggcgagguccccucccccuacaacagccgguucgagagcguggccugguccgcgagcgccugccacgacgggaucaacuggcucaccaucggcaucuccggccccgacaacggggccguggccguccugaaguacaacggcaucaucaccgacaccaucaagagcuggcgcaacaacauccugcggacgcaggaguccgagugcgcgugcgugaacgggagcugcuucaccgugaugaccgacggcccguccgacggccaggccagcuacaagaucuuccgcaucgagaaggggaagaucgucaaguccguggagaugaacgcccccaacuaccacuacgaggagugcagcugcuaccccgacuccagcgagaucacgugcgugugccgggacaacuggcacggcuccaaccgccccugggucagcuucaaccagaaccucgaguaccagaucggguacaucugcuccggcaucuucggggacaacccgcggcccaacgacaagaagggcagcugcggccccguguccagcaacggggccaacggcgugaagggguucuccuucaaguacggcaacggggucuggaucggccgcaccaagagcaucagcucccggaacggcuucgagaugaucugggaccccaacggguggaccggcaccgacaacaacuucagcaucaagcaggacaucguggggaucaacgagugguccggcuacagcggguccuucgugcagcacccggagcugaccggccuggacugcauccgccccugcuucugggucgagcucauccggggccgccccaaggagaacacgaucuggaccagcggguccagcaucucccugugcggcgugaacagcgacaccgucgggugguccuggcccgacggcgccgagcugccguucaccaucgacaaguga

SEQ ID NO: 83906 - RNA, 1410 nt, Artificial Sequence; identical to SEQ ID NO: 82664
  derived and/or modified CDS sequence (opt1) from neuraminidase__InfluenzaA__ADN26132

SEQ ID NO: 83907 - RNA, 1410 nt, Artificial Sequence; identical to SEQ ID NO: 81736
  derived and/or modified CDS sequence (opt1) from neuraminidase__InfluenzaA__ADN26134

SEQ ID NO: 83908 - RNA, 1410 nt, Artificial Sequence; identical to SEQ ID NO: 80762
  derived and/or modified CDS sequence (opt1) from neuraminidase__InfluenzaA__ADN26135

SEQ ID NO: 83909 - RNA, 1410 nt, Artificial Sequence; identical to SEQ ID NO: 80762
  derived and/or modified CDS sequence (opt1) from neuraminidase__InfluenzaA__ADN26136

SEQ ID NO: 83910 - RNA, 1410 nt, Artificial Sequence; identical to SEQ ID NO: 80762
  derived and/or modified CDS sequence (opt1) from neuraminidase__InfluenzaA__ADN26137

SEQ ID NO: 83911 - RNA, 1410 nt, Artificial Sequence; identical to SEQ ID NO: 82664
  derived and/or modified CDS sequence (opt1) from neuraminidase__InfluenzaA__ADN26138

SEQ ID NO: 83912 - RNA, 1410 nt, Artificial Sequence; identical to SEQ ID NO: 81736
  derived and/or modified CDS sequence (opt1) from neuraminidase__InfluenzaA__ADN26140

SEQ ID NO: 83913 - RNA, 1410 nt, Artificial Sequence
  derived and/or modified CDS sequence (opt1) from neuraminidase__InfluenzaA__ADN26141
augaaccccaaccagaagaucaucaccaucggcagcgugugcaugaccaucgggauggccaaccugauccuccagaucggcaacaucaucuccaucuggaucagccacuccauccagcuggggaaccagaaccgcaucgagacgugcaaccagagcgucaucaccuacgagaacaacaccugggugaaccagaccuacgugaacaucuccaacacgaacuucgccgcgggccagagcgucguguccgugaagcuggccgggaacagcucccucugcccggucagcggcugggccaucuacuccaaggacaacagcauccggaucggcuccaagggggacguguucgugauccgcgagcccuucaucagcugcagcccccuggagugccggaccuucuuccugacccagggcgcccuccugaacgacaagcacuccaacgggaccaucaaggaccgcucccccuaccggacgcugaugagcugcccgaucggcgagguccccucccccuacaacagccgcuucgagagcguggccugguccgcgagcgccugccacgacgggaucaacuggcucaccaucggcaucuccggccccgacaacggggccguggccguccugaaguacaacggcaucaucaccgacaccaucaagagcuggcggaacaacauccugcgcacgcaggaguccgagugcgcgugcgugaacgggagcugcuucaccgugaugaccgacggcccguccgacggccaggccagcuacaagaucuuccggaucgagaaggggaagaucgucaaguccguggagaugaacgcccccaacuaccacuacgaggagugcagcugcuaccccgacuccagcgagaucacgugcgugugccgcgacaacuggcacggcuccaaccggcccugggucagcuucaaccagaaccucgaguaccagaucggguacaucugcuccggcaucuucggggacaacccgcgccccaacgacaagaccggcagcugcggccccguguccagcaacggggccaacggcgugaagggguucuccuucaaguacggcaacggggucuggaucggccggaccaagagcaucagcucccgcaacggcuucgagaugaucugggaccccaacggguggaccggcaccgacaacaacuucagcaucaagcaggacaucguggggaucaacgagugguccggcuacagcggguccuucgugcagcacccggagcugacgggccuggacugcauccggcccugcuucugggucgagcucauccgcggccggcccaaggagaacaccaucuggaccagcggguccagcaucuccuucugcggcgugaacagcgacaccgucgggugguccuggcccgacggcgccgagcugccguucacgaucgacaaguga

SEQ ID NO: 83914 - RNA, 1410 nt, Artificial Sequence
  derived and/or modified CDS sequence (opt1) from neuraminidase__InfluenzaA__ADN26142
augaaccccaaccagaagaucaucaccaucggcagcgugugcaugaccaucgggauggccaaccugauccuccagaucggcaacaucaucuccaucuggaucagccacuccauccagcuggggaaccagaaccagaucgagacgugcaaccagagcgucaucaccuacgagaacaacaccugggugaaccagaccuacgugaacaucuccaacaacaacuucgccgcgggccagagcgucguguccgugaagcuggccgggaacagcucccucugcccggucaacggcugggccaucuacagcaaggacaacuccauccgcaucggcagcaagggggacguguucgugauccgggagcccuucaucuccugcagcccccuggagugccgcacguucuuccugacccagggcgcccuccugaacgacaagcacuccaacgggaccaucaaggaccggagccccuaccgcacccugauguccugcccgaucggcgagguccccagccccuacaacucccgguucgagagcguggccuggagcgcguccgccugccacgacgggaucaacuggcucacgaucggcaucagcggccccgacaacggggccguggccguccugaaguacaacggcaucaucaccgacaccaucaaguccuggcgcaacaacauccugcggacccaggagagcgagugcgcgugcgugaacggguccugcuucacggugaugaccgacggcccgagcgacggccaggccuccuacaagaucuuccgcaucgagaaggggaagaucgucaagagcguggagaugaacgcccccaacuaccacuacgaggagugcuccugcuaccccgacagcuccgagaucacgugcgugugccgggacaacuggcacggcagcaaccgccccugggucuccuucaaccagaaccucgaguaccagaucggguacaucugcagcggcaucuucggggacaacccgcggcccaacgacaagaccggcuccugcggccccgugagcuccaacggggccaacggcgugaagggguucagcuucaaguacggcaacggggucuggaucggccgcaccaaguccaucagcagccggaacggcuucgagaugaucugggaccccaacggguggaccggcaccgacaacaacuucuccaucaagcaggacaucguggggaucaacgaguggagcggcuacuccgggagcuucgugcagcacccggagcugaccggccuggacugcauccgccccugcuucugggucgagcucauccggggccgccccaaggagaacacgaucuggaccuccgggagcuccaucagcuucugcggcgugaacuccgacaccgucggguggagcuggcccgacggcgccgagcugccguucaccaucgacaaguga

SEQ ID NO: 83915 - RNA, 1410 nt, Artificial Sequence; identical to SEQ ID NO: 80762
  derived and/or modified CDS sequence (opt1) from neuraminidase__InfluenzaA__ADN26143

SEQ ID NO: 83916 - RNA, 1410 nt, Artificial Sequence; identical to SEQ ID NO: 82664
  derived and/or modified CDS sequence (opt1) from neuraminidase__InfluenzaA__ADN26144

SEQ ID NO: 83917 - RNA, 1410 nt, Artificial Sequence; identical to SEQ ID NO: 82664
  derived and/or modified CDS sequence (opt1) from neuraminidase__InfluenzaA__ADN26145

SEQ ID NO: 83918 - RNA, 1410 nt, Artificial Sequence; identical to SEQ ID NO: 80762
  derived and/or modified CDS sequence (opt1) from neuraminidase__InfluenzaA__ADN26146

SEQ ID NO: 83919 - RNA, 1410 nt, Artificial Sequence; identical to SEQ ID NO: 82664
  derived and/or modified CDS sequence (opt1) from neuraminidase__InfluenzaA__ADN26147

SEQ ID NO: 83920 - RNA, 1410 nt, Artificial Sequence; identical to SEQ ID NO: 80762
  derived and/or modified CDS sequence (opt1) from neuraminidase__InfluenzaA__ADN26148

SEQ ID NO: 83921 - RNA, 1410 nt, Artificial Sequence; identical to SEQ ID NO: 82664
  derived and/or modified CDS sequence (opt1) from neuraminidase__InfluenzaA__ADN26149

SEQ ID NO: 83922 - RNA, 1410 nt, Artificial Sequence
  derived and/or modified CDS sequence (opt1) from neuraminidase__InfluenzaA__ADN26150
augaaccccaaccagaagaucaucaccaucggcagcgugugcaugaccaucgggauggccucccugauccuccagaucggcaacaucaucagcaucuggaucucccacagcauccagcuggggaaccagaaccagaucgagacgugcaaccaguccgucaucaccuacgagaacaacaccugggugaaccagaccuacgugaacaucagcaacacgaacuucgccgcgggccaguccgucgugagcgugaagcuggccgggaacuccagccucugcccggucuccggcugggccaucuacagcaaggacaacuccauccgcaucggcagcaagggggacguguucgugauccgggagcccuucaucuccugcagcccccuggagugccgcaccuucuuccugacccagggcgcccuccugaacgacaagcacuccaacgggaccaucaaggaccggagccccuaccgcacgcugauguccugcccgaucggcgagguccccagccccuacaacagccgguucgaguccguggccuggagcgcguccgccugccacgacgggaucaacuggcucaccaucggcaucagcggccccgacaacggggccguggccguccugaaguacaacggcaucaucaccgacaccaucaaguccuggcgcaacaacauccugcggacgcaggagagcgagugcgcgugcgugaacggguccugcuucaccgugaugaccgacggcccgagcgacggccaggccuccuacaagaucuuccgcaucgagaaggggaagaucgucaagagcguggagaugaacgcccccaacuaccacuacgaggagugcuccugcuaccccgacagcuccgagaucacgugcgugugccgggacaacuggcacggcagcaaccgccccugggucuccuucaaccagaaccucgaguaccagaucggguacaucugcagcggcaucuucggggacaacccgcggcccaacgacaagaccggcuccugcggccccgugagcuccaacggggccaacggcgugaagggguucagcuucaaguacggcaacggggucuggaucggccgcaccaagagcaucuccagccggaacggcuucgagaugaucugggaccccaacggguggaccggcaccgacaacaacuucuccaucaagcaggacaucguggggaucaacgaguggagcggcuacuccgggagcuucgugcagcacccggagcugacgggccuggacugcauccgccccugcuucugggucgagcucauccggggccgccccaaggagaacaccaucuggaccuccgggagcuccaucagcuucugcggcgugaacuccgacaccgucggguggagcuggcccgacggcgccgagcugccguucacgaucgacaaguga

SEQ ID NO: 83923 - RNA, 1410 nt, Artificial Sequence; identical to SEQ ID NO: 81736
  derived and/or modified CDS sequence (opt1) from neuraminidase__InfluenzaA__ADN26151

SEQ ID NO: 83924 - RNA, 1410 nt, Artificial Sequence
  derived and/or modified CDS sequence (opt1) from neuraminidase__InfluenzaA__ADN26152
augaaccccaaccagaagaucaucaccaucggcagcgugugcaugaccaucgggauggccaaccugauccuccagaucggcaacaucaucuccaucuggaucagccacuccauccagcuggggaaccagaaccagaucgagacgugcaaccagagcgucaucaccuacgagaacaacaccugggugaaccagaccuacgugaacaucuccaacacgaacuucgccgcgggccagagcgucguguccaugaagcuggccgggaacagcucccucugcccggugaacggcugggccaucuacagcaaggacaacuccauccgcaucggcagcaagggggacgucuucgugauccgggagcccuucaucuccugcagcccccuggagugccgcaccuucuuccugacccagggcgcccuccugaacgacaagcacuccaacgggaccaucaaggaccggagccccuaccgcacgcugauguccugcccgaucggcgaggugcccagccccuacaacucccgguucgagagcgucgccuggagcgcguccgccugccacgacgggaucaacuggcucaccaucggcaucagcggccccgacaacggggccguggccgugcugaaguacaacggcaucaucaccgacaccaucaaguccuggcgcaacaacauccugcggacgcaggagagcgagugcgcgugcgucaacggguccugcuucaccgugaugaccgacggcccgagcgacggccaggccuccuacaagaucuuccgcaucgagaaggggaagaucgucaagagcguggagaugaacgcccccaacuaccacuacgaggagugcuccugcuaccccgacagcuccgagaucacgugcgugugccgggacaacuggcacggcagcaaccgccccuggguguccuucaaccagaaccucgaguaccagaucggguacaucugcagcggcaucuucggggacaacccgcggcccaacgacaagaccggcuccugcggccccgucagcuccaacggggccaacggcgugaagggguucagcuucaaguacggcaacgggguguggaucggccgcaccaaguccaucagcagccggaacggcuucgagaugaucugggaccccaacggguggacccgcaccgacaacaacuucuccaucaagcaggacaucgucggcaucaacgaguggagcggguacuccggcagcuucgugcagcacccggagcugacggggcuggacugcauccggcccugcuucuggguggagcucauccgcggccggcccaaggagaacaccaucuggaccuccggcagcuccaucagcuucugcggggucaacuccgacaccgugggcuggagcuggcccgacggggccgagcugccguucacgaucgacaaguga

SEQ ID NO: 83925 - RNA, 1410 nt, Artificial Sequence; identical to SEQ ID NO: 82664
  derived and/or modified CDS sequence (opt1) from neuraminidase__InfluenzaA__ADN26153

SEQ ID NO: 83926 - RNA, 1410 nt, Artificial Sequence; identical to SEQ ID NO: 81345
  derived and/or modified CDS sequence (opt1) from neuraminidase__InfluenzaA__ADN26154

SEQ ID NO: 83927 - RNA, 1410 nt, Artificial Sequence; identical to SEQ ID NO: 80762
  derived and/or modified CDS sequence (opt1) from neuraminidase__InfluenzaA__ADN26155

SEQ ID NO: 83928 - RNA, 1410 nt, Artificial Sequence; identical to SEQ ID NO: 81736
  derived and/or modified CDS sequence (opt1) from neuraminidase__InfluenzaA__ADN26157

SEQ ID NO: 83929 - RNA, 1410 nt, Artificial Sequence; identical to SEQ ID NO: 80762
  derived and/or modified CDS sequence (opt1) from neuraminidase__InfluenzaA__ADN26159

SEQ ID NO: 83930 - RNA, 1410 nt, Artificial Sequence; identical to SEQ ID NO: 80762
  derived and/or modified CDS sequence (opt1) from neuraminidase__InfluenzaA__ADN26161

SEQ ID NO: 83931 - RNA, 1410 nt, Artificial Sequence
  derived and/or modified CDS sequence (opt1) from neuraminidase__InfluenzaA__ADN26162
augaaccccaaccagaagaucaucaccaucagcuccgugugcaugaccgucggcauggccaaccugauccuccagaucgggaacaucaucagcaucuggaucucccacagcauccagcugggcaaccagaaccagaucgagacgugcaaccaguccgugaucaccuacgagaacaacaccugggugaaccagaccuacgucaacaucagcaacacgaacuucgccgcggggcaguccguggugagcgucaagcuggccggcaacuccagccucugcccgguguccgggugggccaucuacagcaaggacaacuccauccgcaucggcagcaagggcgacguguucgucauccgggagcccuucaucuccugcagcccccuggagugccgcaccuucuuccugacccagggggcccuccugaacgacaagcacuccaacggcaccaucaaggaccggagccccuaccgcacgcugauguccugcccgaucggggaggugcccagccccuacaacagccgguucgaguccguggccuggagcgcguccgccugccacgacggcaucaacuggcucaccaucgggaucagcggccccgacaacggcgccgucgccgugcugaaguacaacgggaucaucaccgacaccaucaaguccuggcgcaacaacauccugcggacgcaggagagcgagugcgcgugcgugaacggcuccugcuucaccgucaugaccgacgggccgagcgacggccaggccuccuacaagaucuuccgcaucgagaagggcaagaucgucaagagcguggagaugaacgcccccaacuaccacuacgaggagugcuccugcuaccccgacagcuccgagaucacgugcgugugccgggacaacuggcacgggagcaaccgccccuggguguccuucaaccagaaccucgaguaccagaucggcuacaucugcagcgggaucuucggcgacaacccgcggcccaacgacaagaccggguccugcggccccgugagcuccaacggcgccaacggggucaagggcuucagcuucaaguacgggaacggcguguggaucgggcgcaccaagagcaucuccagccggaacggcuucgagaugaucugggaccccaacggcuggaccgggaccgacaacaacuucuccaucaagcaggacaucgugggcaucaacgaguggagcggguacuccggcagcuucguccagcacccggagcugacggggcuggacugcauccgccccugcuucuggguggagcucauccggggccgccccaaggagaacaccaucuggaccuccggcagcuccaucagcuucugcggggucaacuccgacaccgugggcuggagcuggcccgacggggccgagcugccguucacgaucgacaaguga

SEQ ID NO: 83932 - RNA, 1410 nt, Artificial Sequence
  derived and/or modified CDS sequence (opt1) from neuraminidase__InfluenzaA__ADN26163
augaaccccaaccagaagaucaucaccaucggcagcgugugcaugaccaucgggauggccaaccugauccuccagaucggcaacaucaucuccaucuggaucagccacuccauccagcuggggaaccagaaccagaucgagacgugcaaccagagcgucaucaccuacgagaacaacaccugggugaaccagaccuacgugaacaucuccaacacgaacuucgccgcgggccagagcgucguguccgugaagcuggccgggaacagcucccucugcccggucagcggcugggccaucuacuccaaggacaacagcauccgcaucggcuccaagggggacguguucgugauccgggagcccuucaucagcugcagcccccuggagugccgcaccuucuuccugacccagggcgcccuccugaacgacaagcacuccaacgggaccaucaaggaccggucccccuaccgcacgcugaugagcugcccgaucggcgagguccccucccccuacaacagccgguucgagagcguggccugguccgcgagcgccugccacgacgggaucaacuggcucaccaucggcaucuccggccccgacaacggggccguggccguccugaaguacaacggcaucaucaccgacaccaucaagagcuggcgcaacaacauccugcggacgcaggaguccgagugcgcgugcgugaacgggagcugcuucaccgugaugaccgacggcccguccgacggccaggccagcuacaagaucuuccgcaucgagaaggggaagaucgucaaguccguggagaugaacgcccccaacuaccacuacgaggagugcagcugcuaccccgacuccagcgagaucacgugcgugugccgggacaacuggcacggcuccaaccgccccugggucagcuucaaccagaaccucgaguaccagaucggguacaucugcuccggcaucuucggggacaacccgcggcccaacgacaagaccggcagcugcggccccguguccagcaacggggccaacggcgugaagggguucuccuucaaguacggcaacggggucuggaucggccgcaccaagagcaucagcucccggaacggcuucgagaugaucugggaccccaacggguggaccggcaccgacaacaacuucagcaucaagcaggacaucaucgggaucaacgagugguccggcuacagcggguccuucgugcagcacccggagcugacgggccuggacugcauccgccccugcuucuggguggagcucauccggggccgccccaaggagaacaccaucuggaccagcggguccagcaucuccuucugcggcgucaacagcgacaccguggggugguccuggcccgacggcgccgagcugccguucaucaucgacaaguga

SEQ ID NO: 83933 - RNA, 1410 nt, Artificial Sequence
  derived and/or modified CDS sequence (opt1) from neuraminidase__InfluenzaA__ADN26164
augaaccccaaccagaagaucaucaccaucggcagcgugugcaugaccaucgggauggccaaccugauccuccagaucggcaacaucaucuccaucuggaucagccacuccauccagcuggggaaccagaaccagaucgagacgugcaaccagagcgucaucaccuacgagaacaacaccugggugaaccagaccuacgugaacaucuccaacacgaacuucgccgcgggccagagcgucguguccgugaagcuggccgggaacagcucccucugcccggucagcggcugggccaucuacuccaaggacaacagcauccgcaucggcuccaagggggacguguucgugauccgggagcccuucaucagcugcagcccccuggagugccgcaccuucuuccugacccagggcgcccuccugaacgacaagcacuccaacgggaccaucaaggaccggucccccuaccgcacgcugaugagcugcccgaucggcgagguccccucccccuacaacagccgguucgagagcguggccugguccgcgagcgccugccacgacgggaucaacuggcucaccaucggcaucuccggccccgacaacggggccguggccguccugaaguacaacggcaucaucaccgacaccaucaagagcuggcgcaacaacauccugcggacgcaggaguccgagugcgcgugccucaacgggagcugcuucaccgugaugaccgacggcccguccgacggccaggccagcuacaagaucuuccgcaucgagaaggggaagaucgugaaguccgucgagaugaacgcccccaacuaccacuacgaggagugcagcugcuaccccgacuccagcgagaucacgugcgugugccgggacaacuggcacggcuccaaccgccccugggugagcuucaaccagaaccuggaguaccagaucggguacaucugcuccggcaucuucggggacaacccgcggcccaacgacaagaccggcagcugcggccccgucuccagcaacggggccaacggcgugaagggguucuccuucaaguacggcaacgggguguggaucggccgcaccaagagcaucagcucccggaacggcuucgagaugaucugggaccccaacggguggaccggcaccgacaacgacuucagcaucaagcaggacaucgucgggaucaacgagugguccggcuacagcggguccuucgugcagcacccggagcugacgggccucgacugcauccgccccugcuucuggguggagcugauccggggccgccccaaggagaacaccaucuggaccagcggguccagcaucuccuucugcggcgucaacagcgacaccguggggugguccuggcccgacggcgccgagcugccguucacgaucgacaaguga

SEQ ID NO: 83934 - RNA, 1410 nt, Artificial Sequence; identical to SEQ ID NO: 82719
  derived and/or modified CDS sequence (opt1) from neuraminidase__InfluenzaA__ADN26168

SEQ ID NO: 83935 - RNA, 1410 nt, Artificial Sequence; identical to SEQ ID NO: 81985
  derived and/or modified CDS sequence (opt1) from neuraminidase__InfluenzaA__ADN26178

SEQ ID NO: 83936 - RNA, 1410 nt, Artificial Sequence; identical to SEQ ID NO: 80762
  derived and/or modified CDS sequence (opt1) from neuraminidase__InfluenzaA__ADN26868

SEQ ID NO: 83937 - RNA, 1410 nt, Artificial Sequence; identical to SEQ ID NO: 80762
  derived and/or modified CDS sequence (opt1) from neuraminidase__InfluenzaA__ADN26869

SEQ ID NO: 83938 - RNA, 1410 nt, Artificial Sequence; identical to SEQ ID NO: 80762
  derived and/or modified CDS sequence (opt1) from neuraminidase__InfluenzaA__ADN26870

SEQ ID NO: 83939 - RNA, 1410 nt, Artificial Sequence
  derived and/or modified CDS sequence (opt1) from neuraminidase__InfluenzaA__ADN26871
augaaccccaaccagaagaucaucaccaucggcagcgugugcaugaccaucgggauggccaaccugauccuccagaucggcaacaucaucuccaucuggaucagccacuccauccagcuggggaaccagaaccagaucgagacguacaaccagagcgucaucaccuacgagaacaacaccugggugaaccagaccuacgugaacaucuccaacacgaacuucgccgcgggccagagcgucguguccgugaagcuggccgggaacagcucccucugcccggucagcggcugggccaucuacuccaaggacaacagcauccgcaucggcuccaagggggacguguucgugauccgggagcccuucaucagcugcagcccccuggagugccgcaccuucuuccugacccagggcgcccuccugaacgacaagcacuccaacgggaccaucaaggaccggucccccuaccgcacgcugaugagcugcccgaucggcgagguccccucccccuacaacagccgguucgagagcguggccugguccgcgagcgccugccacgacgggaucaacuggcucaccaucggcaucuccggccccgacaacggggccguggccguccugaaguacaacggcaucaucaccgacaccaucaagagcuggcgcaacaacauccugcggacgcaggaguccgagugcgcgugcgugaacgggagcugcuucaccgugaugaccgacggcccguccgacggccaggccagcuacaagaucuuccgcaucgagaaggggaagaucgucaaguccguggagaugaacgcccccaacuaccacuacgaggagugcagcugcuaccccgacuccagcgagaucacgugcgugugccgggacaacuggcacggcuccaaccgccccugggucagcuucaaccagaaccucgaguaccagaucggguacaucugcuccggcaucuucggggacaacccgcggcccaacgacaagaccggcagcugcggccccguguccagcaacggggccaacggcgugaagggguucuccuucaaguacggcaacggggucuggaucggccgcaccaagagcaucagcucccggaacggcuucgagaugaucugggaccccaacggguggaccggcaccgacaacaacuucagcaucaagcaggacaucguggggaucaacgagugguccggcuacagcggguccuucgugcagcacccggagcugacgggccuggacugcauccgccccugcuucugggucgagcucauccggggccgccccaaggagaacaccaucuggaccagcggguccagcaucuccuucugcggcgugaacagcgacaccgucgggugguccuggcccgacggcgccgagcugccguucacgaucgacaaguga

SEQ ID NO: 83940 - RNA, 1410 nt, Artificial Sequence
  derived and/or modified CDS sequence (opt1) from neuraminidase__InfluenzaA__ADN26872
augaaccccaaccagaagaucaucaccaucggcagcgugugcaugaccaucgggauggccaaccugauccuccagaucggcaacaucaucuccaucuggaucagccacuccauccagcuggggaaccagaaccagaucgagacgugcaaccagagcgucaucaccuacgagaacaacaccugggugaaccagaccuacgugaacaucuccaacacgaacuucgccgcgggccugagcgucguguccgugaagcucgccgggaacagcucccugugcccggucagcggcugggccaucuacuccaaggacaacagcauccgcaucggcuccaagggggacguguucgugauccgggagcccuucaucagcugcagcccccuggagugccgcaccuucuuccucacccagggcgcccugcugaacgacaagcacuccaacgggaccaucaaggaccggucccccuaccgcacgcucaugagcugcccgaucggcgagguccccucccccuacaacagccgguucgagagcguggccugguccgcgagcgccugccacgacgggaucuccuggcugaccaucggcaucagcggccccgacaacggggccguggccguccugaaguacaacggcaucaucaccgacaccaucaaguccuggcgcaacaacauccuccggacgcaggagagcgagugcgcgugcgugaacggguccugcuucaccgugaugaccgacggcccgagcgacggccaggccuccuacaagaucuuccgcaucgagaaggggaagaucgucaagagcguggagaugaacgcccccaacuaccacuacgaggagugcuccugcuaccccgacagcuccgagaucacgugcgugugccgggacaacuggcacggcagcaaccgccccugggucuccuucaaccagaaccuggaguaccagaucggguacaucugcagcggcaucuucggggacaacccgcggcccaacgacaagaccggcuccugcggccccgugagcuccaacggggccaacggcgugaagggguucagcuucaaguacggcaacggggucuggaucggccgcaccaagagcaucuccagccggaacggcuucgagaugaucugggaccccaacggguggaccggcaccgacaacaacuucuccaucaagcaggacaucguggggaucaacgaguggagcggcuacuccgggagcuucgugcagcacccggagcugacgggccucgacugcauccgccccugcuucugggucgagcugauccggggccgccccaaggagaacaccaucuggaccuccgggagcuccaucagcuucugcggcgugaacuccgacaccgucggguggagcuggcccgacggcgccgagcugccguucacgaucgacaaguga

SEQ ID NO: 83941 - RNA, 1410 nt, Artificial Sequence; identical to SEQ ID NO: 80762
  derived and/or modified CDS sequence (opt1) from neuraminidase__InfluenzaA__ADN26873

SEQ ID NO: 83942 - RNA, 1410 nt, Artificial Sequence; identical to SEQ ID NO: 80762
  derived and/or modified CDS sequence (opt1) from neuraminidase__InfluenzaA__ADN26874

SEQ ID NO: 83943 - RNA, 1410 nt, Artificial Sequence; identical to SEQ ID NO: 80762
  derived and/or modified CDS sequence (opt1) from neuraminidase__InfluenzaA__ADN26875

SEQ ID NO: 83944 - RNA, 1410 nt, Artificial Sequence; identical to SEQ ID NO: 80762
  derived and/or modified CDS sequence (opt1) from neuraminidase__InfluenzaA__ADN26876

SEQ ID NO: 83945 - RNA, 1410 nt, Artificial Sequence; identical to SEQ ID NO: 80762
  derived and/or modified CDS sequence (opt1) from neuraminidase__InfluenzaA__ADN26877

SEQ ID NO: 83946 - RNA, 1410 nt, Artificial Sequence; identical to SEQ ID NO: 80762
  derived and/or modified CDS sequence (opt1) from neuraminidase__InfluenzaA__ADN26878

SEQ ID NO: 83947 - RNA, 1410 nt, Artificial Sequence; identical to SEQ ID NO: 81899
  derived and/or modified CDS sequence (opt1) from neuraminidase__InfluenzaA__ADN26879

SEQ ID NO: 83948 - RNA, 1410 nt, Artificial Sequence; identical to SEQ ID NO: 80762
  derived and/or modified CDS sequence (opt1) from neuraminidase__InfluenzaA__ADN26880

SEQ ID NO: 83949 - RNA, 1410 nt, Artificial Sequence; identical to SEQ ID NO: 80762
  derived and/or modified CDS sequence (opt1) from neuraminidase__InfluenzaA__ADN26881

SEQ ID NO: 83950 - RNA, 1410 nt, Artificial Sequence; identical to SEQ ID NO: 80762
  derived and/or modified CDS sequence (opt1) from neuraminidase__InfluenzaA__ADN26882

SEQ ID NO: 83951 - RNA, 1410 nt, Artificial Sequence; identical to SEQ ID NO: 80762
  derived and/or modified CDS sequence (opt1) from neuraminidase__InfluenzaA__ADN26883

SEQ ID NO: 83952 - RNA, 1413 nt, Artificial Sequence
  derived and/or modified CDS sequence (opt1) from neuraminidase__InfluenzaA__ADN89064
augaaccccaaccagaagaucaucaccaucggcagcaucuccaucgccaucgggaucaucagccugaugcuccagaucggcaacaucaucuccaucugggccagccacuccauccagaccgggagccagaacaacacgggcaucugcaaccagcgcaucaucaccuacgagaacuccaccugggugaaccacaccuacgucaacaucaacaacacgaacgugguggcgggggaggacaagaccagcgucacccuggccggcaacuccagccugugcuccaucagcggcugggccaucuacaccaaggacaacuccauccggaucgggagcaagggcgacguguucgugauccgcgagccguucaucuccugcagccaccucgagugccggacguucuuccugacccagggggcccugcucaacgacaagcacuccaacggcaccgucaaggaccgcagccccuaccgggcccugauguccugcccccugggggaggcgcccagcccguacaacagcaaguucgaguccguggccuggagcgccuccgccugccacgacggcaugggcuggcucaccaucgggaucagcggccccgacaacggggcgguggccguccugaaguacaacggcaucaucacgggcaccaucaaguccuggaagaagcagauccugcgcacccaggagagcgagugcgugugcaugaacggguccugcuucaccaucaugacggacggccccagcaacaaggccgccuccuacaagaucuucaagaucgagaaggggaaggugaccaagagcaucgagcucaacgcccccaacuucuacuacgaggagugcuccugcuacccggacaccggcaucgucaugugcgugugccgggacaacuggcacgggagcaaccgccccuggguguccuucaaccagaaccuggacuaccagaucggcuacaucugcagcggcgucuucggggacaacccccggcccgaggacggcgagggguccugcaacccggugaccguggacggcgcgaacggggucaagggcuucagcuacaaguacggcaacgggguguggaucggccgcacgaaguccaaccggcugcgccggggguucgagaugaucugggaccccaacggcuggaccaacaccgacagcgacuucuccgugaagcaggacgucguggccaucaccgacuggagcggguacagcggcuccuucgugcagcaccccgagcucacgggccuggacugcauccgccccugcuucugggucgagcuggugcgggggcucccgcgcgagaacaccaccaucuggaccagcggcuccagcaucuccuucugcggggucaacagcgacacggccaacugguccuggcccgacggcgccgagcugcccuucaccaucgacaaguga

SEQ ID NO: 83953 - RNA, 1413 nt, Artificial Sequence; identical to SEQ ID NO: 81485
  derived and/or modified CDS sequence (opt1) from neuraminidase__InfluenzaA__ADN89075

SEQ ID NO: 83954 - RNA, 1413 nt, Artificial Sequence
  derived and/or modified CDS sequence (opt1) from neuraminidase__InfluenzaA__ADN89086
augaaccccaaccagaagaucaucaccaucggcagcaucuccaucgccaucgggaucaucagccugaugcuccagaucggcaacaucaucuccaucugggccagccacuccauccagaccgggagccagaacaacacgggcaucugcaaccagcgcaucaucaccuacgagaacuccaccugggugaaccacaccuacgucaacaucaacaacacgaacgugguggcgggggaggacaagaccagcgucacccuggccggcaacuccagccugugcuccaucagcggcugggccaucuacaccaaggacaacuccauccggaucgggagcaagggcgacguguucgugauccgcgagccguucaucuccugcagccaccucgagugccggacguucuuccugacccagggggcccugcucaacgacaagcacuccaacggcaccgucaaggaccgcagccccuaccgggcccugauguccugcccccugggggaggcgcccagcccguacaacagcaaguucgaguccguggccuggagcgccuccgccugccacgacggcaugggcuggcucaccaucgggaucagcggccccgacaacggggcgguggccguccugaaguacaacggcaucaucacgggcaccaucaaguccuggaagaagcagauccugcgcacccaggagagcgagugcgugugcaugaacggguccugcuucaccaucaugacggacggccccagcaacaagaccgccuccuacaagaucuucaagaucgagaaggggaaggugaccaagagcaucgagcucaacgcccccaacuucuacuacgaggagugcuccugcuacccggacaccggcaucgucaugugcgugugccgggacaacuggcacgggagcaaccgccccuggguguccuucaaccagaaccuggacuaccagaucggcuacaucugcagcggcgucuucggggacaacccccggcccgaggacggcgagggguccugcaacccggugacgguggacggcgccaacggggucaagggcuucagcuacaaguacggcaacgggguguggaucggccgcaccaaguccaaccggcugcgcaagggguucgagaugaucugggaccccaacggcuggaccaacaccgacagcgacuucuccgugaagcaggacgucguggcgaucacggacuggagcggguacagcggcuccuucgugcagcaccccgagcucaccggccuggacugcauccggcccugcuucugggucgagcuggugcgcgggcucccgcgggagaacaccaccaucuggacgagcggcuccagcaucuccuucugcggggucaacagcgacaccgccaacugguccuggcccgacggcgccgagcugcccuucaccaucgacaaguga

SEQ ID NO: 83955 - RNA, 1413 nt, Artificial Sequence; identical to SEQ ID NO: 81485
  derived and/or modified CDS sequence (opt1) from neuraminidase__InfluenzaA__ADN89097

SEQ ID NO: 83956 - RNA, 1413 nt, Artificial Sequence
  derived and/or modified CDS sequence (opt1) from neuraminidase__InfluenzaA__ADN89108
augaaccccaaccagaagaucaucaccaucggcagcaucuccaucgccaucgggaucaucagccugaugcuccagaucggcaacaucaucuccaucugggccagccacuccauccagaccgggagccagaacaacacgggcaucugcaaccagcgcaucaucaccuacgagaacuccaccugggugaaccacaccuacgucaacaucaacaacacgaacgugguggcgggggaggacaagaccagcgucacccuggccggcaacuccagccugugcuccaucagcggcugggccaucuacaccaaggacaacuccauccggaucgggagcaagggcgacguguucgugauccgcgagccguucaucuccugcagccaccucgagugccggacguucuuccugacccagggggcccugcucaacgacaagcacuccaacggcaccgucaaggaccgcagccccuaccgggcccugauguccugcccccugggggaggcgcccagcccguacaacagcaaguucgaguccguggccuggagcgccuccgccugccacgacggcaugggcuggcucaccaucgggaucagcggccccgacaacggggcgguggccguccugaaguacaacggcaucaucacgggcaccaucaaguccuggaagaagcagauccugcgcacccaggagagcgagugcgugugcaugaacggguccugcuucaccaucaugacggacggccccagcaacaaggccgccuccuacaagaucuucaagaucgagaaggggaaggugaccaagagcaucgagcucaacgcccccaacuucuacuacgaggagugcuccugcuacccggacaccggcaucgucaugugcgugugccgggacaacuggcacgggagcaaccgccccuggguguccuucaaccagaaccuggacuaccagaucggcuacaucugcagcggcgucuucggggacaacccccggcccgaggacggcgagggguccugcaacccggugaccguggacggcgcgaacggggucaagggcuucagcuacaaguacggcaacgggguguggaucggccgcacgaaguccaaccggcugcgcaagggguucgagaugaucugggaccccaacggcuggaccaacaccgacagcgacuucuccgugaagcaggacgucgugagcaucaccgacuggagcggguacuccggcagcuucgugcagcaccccgagcucacgggccuggacugcauccggcccugcuucugggucgagcuggugcgcgggcucccgcgggagaacaccaccaucuggaccuccggcagcuccaucagcuucugcggggucaacuccgacacggccaacuggagcuggcccgacggcgccgagcugcccuucaccaucgacaaguga

SEQ ID NO: 83957 - RNA, 1413 nt, Artificial Sequence
  derived and/or modified CDS sequence (opt1) from neuraminidase__InfluenzaA__ADN89119
augaaccccaaccagaagaucaucaccaucggcagcaucuccaucgccaucgggaucaucagccugaugcuccagaucggcaacaucaucuccaucugggccagccacuccauccagaccgggagccagaacaacacgggcaucugcaaccagcgcaucaucaccuacgagaacuccaccugggugaaccacaccuacgucaacaucaacaacacgaacgugguggcgggggaggacaagaccagcgucacccuggccggcaacuccagccugugcuccaucagcggcugggccaucuacaccaaggacaacuccauccggaucgggagcaagggcgacguguucgugauccgcgagccguucaucuccugcagccaccucgagugccggacguucuuccugacccagggggcccugcucaacgacaagcacuccaacggcaccgucaaggaccgcagccccuaccgggcccugauguccugcccccugggggaggcgcccagcccguacaacagcaaguucgaguccguggccuggagcgccuccgccugccacgacggcaugggcuggcucaccaucgggaucagcggccccgacaacggggcgguggccguccugaaguacaacggcaucaucacgggcaccaucaaguccuggaagaagcagauccugcgcacccaggagagcgagugcgugugcaugaacggguccugcuucaccaucaugacggacggccccagcaacaaggccgccuccuacaagaucuucaagaucgagaaggggaaggugaccaagagcaucgagcucaacgcccccaacuucuacuacgaggagugcuccugcuacccggacaccggcaucgucaugugcgugugccgggacaacuggcacgggagcaaccgccccuggguguccuucaaccagaaccuggacuaccagaucggcuacaucugcagcggcgucuucggggacaacccccggcccgaggacggcgagggguccugcaacccggugaccgugaacggcgcggacggggucaagggcuucagcuacaaguacggcaacgggguguggaucggccgcacgaaguccaaccggcugcgcaagggguucgagaugaucugggaccccaacggcuggaccaacaccgacagcgacuucuccgugaagcaggacgucguggccaucaccgacuggagcggguacagcggcuccuucgugcagcaccccgagcucacgggccuggacugcacccggcccugcuucugggucgagcuggugcgcgggcucccgcgggagaacaccaccaucuggacgagcggcuccagcaucuccuucugcggggucaacagcgacaccgccaacugguccuggcccgacggcgccgagcugcccuucaccaucgacaaguga

SEQ ID NO: 83958 - RNA, 1413 nt, Artificial Sequence
  derived and/or modified CDS sequence (opt1) from neuraminidase__InfluenzaA__ADN89130
augaaccccaaccagaagaucaucaccaucggcagcaucuccaucgccaucgggaucaucagccugaugcuccagaucggcaacaucaucuccaucugggccagccacuccauccagaccgggagccagaacaacacgggcaucugcaaccagcgcaucaucaccuacgagaacuccaccugggugaaccacaccuacgucaacaucaacaacacgaacgugguggcgggggaggacaagaccagcgucacccuggccggcaacuccagccugugcuccaucagcggcugggccaucuacaccaaggacaacuccauccggaucgggagcaagggcgacguguucgugauccgcgagccguucaucuccugcagccaccucgagugccggacguucuuccugacccagggggcccugcucaacgacaagcacuccaacggcaccgucaaggaccgcagccccuaccgggcccugauguccugcccccugggggaggcgcccagcccguacaacagcaacuucgaguccguggccuggagcgccuccgccugccacgacggcaugggcuggcucaccaucgggaucagcggccccgacaacggggcgguggccguccugaaguacaacggcaucaucacgggcaccaucaaguccuggaagaagcagauccugcgcacccaggagagcgagugcgugugcaugaacggguccugcuucaccaucaugacggacggccccagcaacaaggccgccuccuacaagaucuucaagaucgagaaggggaaggugaccaagagcaucgagcucaacgcccccaacuucuacuacgaggagugcuccugcuacccggacaccggcaucgucaugugcgugugccgggacaacuggcacgggagcaaccgccccuggguguccuucaaccagaaccuggacuaccagaucggcuacaucugcagcggcgucuucggggacaacccccggcccgaggacggcgagggguccugcaacccggugaccguggacggcgcgaacggggucaagggcuucagcuacaaguacggcaacgggguguggaucggccgcacgaaguccaaccggcugcgcaagggguucgagaugaucugggaccccaacggcuggaccaacaccgacagcgacuucuccgugaagcaggacgucguggccaucaccgacuggagcggguacagcggcuccuucgugcagcaccccgagcucacgggccuggacugcauccggcccugcuucugggucgagcuggugcgcgggcucccgcgggagaacaccaccaucuggaccagcggcuccagcaucuccuucugcggggucaacggcgacacggccaacuggagcuggcccgacggcgccgagcugcccuucaccaucgacaaguga

SEQ ID NO: 83959 - RNA, 1413 nt, Artificial Sequence; identical to SEQ ID NO: 83956
  derived and/or modified CDS sequence (opt1) from neuraminidase__InfluenzaA__ADN89141

SEQ ID NO: 83960 - RNA, 1413 nt, Artificial Sequence
  derived and/or modified CDS sequence (opt1) from neuraminidase__InfluenzaA__ADN89152
augaaccccaaccagaagaucaucaccaucggcagcaucuccaucgccaucgggaucaucagccugaugcuccagaucggcaacaucaucuccaucugggccagccacuccauccagaccgggagccagaacaacacgggcaucugcaaccagcgcaucaucaccuacgagaacuccaccugggugaaccacaccuacgucaacaucaacaacacgaacgugguggcgggggaggacaagaccagcgucacccuggccggcaacuccagccugugcuccaucagcggcugggccaucuacaccaaggacaacuccauccggaucgggagcaagggcgacguguucgugauccgcgagccguucaucuccugcagccaccucgagugccggacguucuuccugacccagggggcccugcucaacgacaagcacuccaacggcaccgucaaggaccgcagccccuaccgggcccugauguccugcccccugggggaggcgcccagcccguacaacagcaaguucgaguccguggccuggagcgccuccgccugccacgacggcaugggcuggcucaccaucgggaucagcggccccgacaacggggcgguggccguccugaaguacaacggcaucaucacgggcaccaucaaguccuggaagaagcagauccugcgcacccaggagagcgagugcgugugcaugaacggguccugcuucaccaucaugacggacggccccagcaacaaggccgccuccuacaagaucuucaagaucgagaaggggaaggugaccaagagcaucgagcucaacgcccccaacuucuacuacgaggagugcuccugcuacccggacaccggcaucgucaugugcgugugccgggacaacuggcacgggagcaaccgccccuggguguccuucaaccagaaccuggacuaccagaucggcuacaucugcagcggcgucuucggggacaacccccggcccgaggacggcgagggguccugcaacccggugaccaucgacggcgcgaacggggugaagggcuucagcuacaaguacggcaacggggucuggaucggccgcacgaaguccaaccggcugcgcaagggguucgagaugaucugggaccccaacggcuggaccaacaccgacagcgacuucuccgugaagcaggacguggucgccaucaccgacuggagcggguacagcggcuccuucgugcagcaccccgagcucacgggccuggacugcauccggcccugcuucuggguggagcugguccgcgggcucccgcgggagaacaccaccaucuggaccagcggcuccagcaucuccuucugcggggugaacagcgacacggccaacugguccuggcccgacggcgccgagcugcccuucaccaucgacaaguga

SEQ ID NO: 83961 - RNA, 1413 nt, Artificial Sequence
  derived and/or modified CDS sequence (opt1) from neuraminidase__InfluenzaA__ADN89163
augaaccccaaccagcgcaucaucaccaucggcagcaucuccaucgccaucgggaucaucagccugaugcuccagaucggcaacaucaucuccaucugggccagccacuccauccagaccgggagccagaacaacacgggcaucugcaaccagcggaucaucaccuacgagaacuccaccugggugaaccacaccuacgucaacaucaacaacacgaacgugguggcgggggaggacaagaccagcgucacccuggccggcaacuccagccugugcuccaucagcggcugggccaucuacaccaaggacaacuccauccgcaucgggagcaagggcgacguguucgugauccgggagccguucaucuccugcagccaccucgagugccgcacguucuuccugacccagggggcccugcucaacgacaagcacuccaacggcaccgccaaggaccggagccccuaccgcgcgcugauguccugcccccugggggaggcccccagcccguacaacagcaaguucgaguccgucgccuggagcgccuccgcgugccacgacggcaugggcuggcucaccaucgggaucagcggccccgacaacggggccguggccgugcugaaguacaacggcaucaucacgggcaccaucaaguccuggaagaagcagauccugcggacccaggagagcgagugcgucugcaugaacggguccugcuucaccaucaugacggacggccccagcaacaaggccgccuccuacaagaucuucaagaucgagaaggggaaggugaccaagagcaucgagcucaacgcgcccaacuucuacuacgaggagugcuccugcuacccggacaccggcaucgugaugugcgucugccgcgacaacuggcacgggagcaaccggcccuggguguccuucaaccagaaccuggacuaccagaucggcuacaucugcagcggcguguucggggacaacccccgccccgaggacggcgagggguccugcaacccggucaccguggacggcgccaacggggugaagggcuucagcuacaaguacggcaacggggucuggaucggccggacgaaguccaaccgccugcggaagggguucgagaugaucugggaccccaacggcuggaccaacaccgacagcgacuucuccgugaagcaggacguggucgccaucaccgacuggagcggguacagcggcuccuucgugcagcaccccgagcucacgggccuggacugcauccgccccugcuucuggguggagcugguccgggggcucccgcgcgagaacaccaccaucuggaccagcggcuccagcaucuccuucugcggggugaacagcgacacggccaacugguccuggcccgacggcgccgagcugcccuucaccaucgacaaguga

SEQ ID NO: 83962 - RNA, 1413 nt, Artificial Sequence; identical to SEQ ID NO: 82954
  derived and/or modified CDS sequence (opt1) from neuraminidase__InfluenzaA__ADN89174

SEQ ID NO: 83963 - RNA, 1413 nt, Artificial Sequence; identical to SEQ ID NO: 83956
  derived and/or modified CDS sequence (opt1) from neuraminidase__InfluenzaA__ADN89185

SEQ ID NO: 83964 - RNA, 1413 nt, Artificial Sequence
  derived and/or modified CDS sequence (opt1) from neuraminidase__InfluenzaA__ADN89196
augaaccccaaccagaagaucaucaccaucggcagcaucuccaucgccaucgggaucaucagccugaugcuccagaucggcuccaucaucagcaucugggccucccacagcauccagaccgggucccagaacaacacgggcaucugcaaccagcgcaucaucaccuacgagaacagcaccugggugaaccacaccuacgucaacaucaacaacacgaacgugguggcgggggaggacaagaccuccgucacccuggccggcaacagcucccugugcagcaucuccggcugggccaucuacaccaaggacaacagcauccggaucggguccaagggcgacguguucgugauccgcgagccguucaucagcugcucccaccucgagugccggacguucuuccugacccagggggcccugcucaacgacaagcacagcaacggcaccgucaaggaccgcucccccuaccgggcccugaugagcugcccccugggggaggcgcccagcccguacaacuccaaguucgagagcguggccugguccgccagcgccugccacgacggcaugggcuggcucaccaucgggaucuccggccccgacaacggggcgguggccguccugaaguacaacggcaucaucacgggcaccaucaagagcuggaagaagcagauccugcgcacccaggaguccgagugcgugugcaugaacgggagcugcuucaccaucaugacggacggccccuccaacaaggccgccagcuacaagaucuucaagaucgagaaggggaaggugaccaaguccaucgagcucaacgcccccaacuucuacuacgaggagugcagcugcuacccggacaccggcaucgucaugugcgugugccgggacaacuggcacggguccaaccgccccugggugagcuucaaccagaaccuggacuaccagaugggcuacaucugcuccggcgucuucggggacaacccccggcccgaggacggcgaggggagcugcaacccggugaccguggacggcgcgaacggggucaagggcuucuccuacaaguacggcaacgggguguggaucggccgcaccaagagcaaccggcugcgcaagggguucgagaugaucugggaccccaacggcuggacgaacaccgacuccgacuucagccucaagcaggacguggucgccaucaccgacuggagcggguacuccggcagcuucgugcagcaccccgagcugacgggccuggacugcauccggcccugcuucuggguggagcucguccgcgggcugccgcgggagaacaccaccaucuggaccuccggcagcuccaucagcuucugcggggugaacuccgacacggccaacuggagcuggcccgacggcgccgagcugcccuucaccaucgacaaguga

SEQ ID NO: 83965 - RNA, 1413 nt, Artificial Sequence; identical to SEQ ID NO: 83964
  derived and/or modified CDS sequence (opt1) from neuraminidase__InfluenzaA__ADN89207

SEQ ID NO: 83966 - RNA, 1413 nt, Artificial Sequence
  derived and/or modified CDS sequence (opt1) from neuraminidase__InfluenzaA__ADN89218
augaaccccaaccagaagaucaucaccaucggcagcaucuccaucgccaucgggaucaucagccugaugcuccagaucggcaacaucaucuccaucugggccagccacuccauccagccggggagccagaacaacaccggcaucugcaaccagcgcaucaucacguacgagaacuccaccugggugaaccacaccuacgucaacaucaacaacaccaacgugguggcgggggaggacaagacgagcgucacccuggccggcaacuccagccugugcuccaucagcggcugggccaucuacaccaaggacaacuccauccggaucgggagcaagggcgacguguucgugauccgcgagcccuucaucuccugcagccaccucgagugccggaccuucuuccugacgcagggggcccugcucaacgacaagcacuccaacggcaccgucaaggaccgcagccccuaccgggcccugauguccugcccccugggggaggcgccgagccccuacaacagcaaguucgaguccguggccuggagcgccuccgccugccacgacggcaugggcuggcucaccaucgggaucagcggccccgacaacggggcgguggccguccugaaguacaacggcaucaucaccggcacgaucaaguccuggaagaagcagauccugcgcacccaggagagcgagugcgugugcaugaacggguccugcuucaccaucaugaccgacggccccagcaacaaggccgccuccuacaagaucuucaagaucgagaaggggaaggugaccaagagcaucgagcucaacgccccgaacuucuacuacgaggagugcuccugcuaccccgacacgggcaucgucaugugcgugugccgggacaacuggcacgggagcaaccgccccuggguguccuucaaccagaaccuggacuaccagaucggcuacaucugcagcggcgucuucggggacaacccccggccggaggacggcgagggguccugcaaccccgugaccguggacggcgcgaacggggucaagggcuucagcuacaaguacggcaacgggguguggaucggccgcaccaaguccaaccggcugcgcaagggguucgagaugaucugggaccccaacggcuggacgaacaccgacagcgacuucuccgugaagcaggacgucguggccaucaccgacuggagcggguacagcggcuccuucgugcagcaccccgagcucaccggccuggacugcauccggccgugcuucugggucgagcuggugcgcgggcucccccgggagaacacgaccaucuggaccagcggcuccagcaucuccuucugcggggucaacggcgacaccgccaacuggagcuggcccgacggcgccgagcugcccuucacgaucgacaaguga

SEQ ID NO: 83967 - RNA, 1413 nt, Artificial Sequence
  derived and/or modified CDS sequence (opt1) from neuraminidase__InfluenzaA__ADN89229
augaaccccaaccagaagaucaucaccaucggcagcaucuccaucgccaucgggaucaucagccugaugcuccagaucggcaacaucaucuccaucugggccagccacuccauccagaccgggagccagaacaacacgggcaucugcaaccagcgcaucaucaccuacgagaacuccaccugggugaaccacaccuacgucaacaucaacaacacgaacgugguggcgggggaggacaagaccagcgucacccuggccggcaacuccagccugugcuccaucagcggcugggccaucuacaccaaggacaacuccauccggaucgggagcaagggcgacguguucgugauccgcgagccguucaucuccugcagccaccucgagugccggacguucuuccugacccagggggcccugcucaacgacaagcacuccaacggcaccgucaaggaccgcagccccuaccgggcccugauguccugcccccugggggaggcgcccagcccguacaacagcaaguucgaguccguggccuggagcgccuccgccugccacgacggcaugggcuggcucaccaucgggaucagcggccccgacaacggggcgguggccguccugaaguacaacggcaucaucacgggcaccaucaaguccuggaagaagcagauccugcgcacccaggagagcgagugcgugugcaugaacggguccugcuucaccaucaugacggacggccccagcaacaaggccgccuccuacaagaucuucaagaucgagaaggggaaggugaccaagagcaucgagcucaacgcccccaacuucuacuacgaggagugcuccugcuacccggacaccggcaucgucaugugcgugugccgggacaacuggcacgggagcaaccgccccuggguguccuucaaccagaaccuggacuaccagaucggcuacaucugcagcggcgucuucggggacaacccccggcccgaggacggcgagggguccugcaacccggugaccguggacggcgcgaacggggucaagggcuucagcuacaaguacggcaacgggguguggaucggccgcacgaaguccaaccggcugcgcaagggguucgagaugaucugggaccccaacggcuggaccaacaccgacagcgacuucuccgugaagcaggacgucguggccaccacggacuggagcggguacagcggcuccuucgugcagcaccccgagcucaccggccuggacugcauccggcccugcuucugggucgagcuggugcgcgggcucccgcgggagaacaccaccaucuggacgagcggcuccagcaucuccuucugcggggucaacagcgacaccgccaacugguccuggcccgacggcgccgagcugcccuucaccaucgacaaguga

SEQ ID NO: 83968 - RNA, 1413 nt, Artificial Sequence
  derived and/or modified CDS sequence (opt1) from neuraminidase__InfluenzaA__ADN89240
augaaccccaaccagaagaucaucaccaucggcagcaucuccaucgccaucgggaucaucagccugaugcuccagaucggcaacaucaucuccaucugggccagccacuccauccagaccgggagccagaacaacacgggcaucugcaaccagcgcaucaucaccuacgagaacuccaccugggugaaccacaccuacgucaacaucaacaacacgaacgugguggcgggggaggacaagaccagcgucacccuggccggcaacuccagccugugcuccaucagcggcugggccaucuacaccaaggacaacuccauccggaucgggagcaagggcgacguguucgugauccgcgagccguucaucuccugcagccaccucgagugccggacguucuuccugacccagggggcccugcucaacgacaagcacuccaacggcaccgucaaggaccgcagccccuaccgggcccugauguccugcccccugggggaggcgcccagcccguacaacagcaaguucgaguccguggccuggagcgccuccgccugccacgacggcaugggcuggcucaccaucgggaucagcggccccgacaacggggcgguggccguccugaaguacaacggcaucaucacgggcaccaucaaguccuggaagaagcagauccugcgcacccaggagagcgagugcgugugcaugaacggguccugcuucaccaucaugacggacggccccagcaacaaggccgccuccuacaagaucuucaagaucgagaaggggaaggugaccaagagcaucgagcucaacgcccccaacuucuacuacgaggagugcuccugcuacccggacaccggcaucgucaugugcgugugccgggacaacuggcacgggagcaaccgccccuggguguccuucaaccagaaccuggacuaccagaucggcuacaucugcagcggcgucuucggggacaacccccggcccgaggacggcgagggguccugcaacccggugaccguggacggcgcgaacggggucaagggcuucagcuacaaguacggcaacgggguguggaucggccgcacgaaguccaaccggcugcgcaagggguucgagaugaucugggaccccaacggcuggaccaacaccgacagcgacuucuccgugaagcaggacgucguggccaucaccgacuggagcggguacagcggcuccuucgugcagcaccccgagcucacgggccuggacugcauccggcccugcuucugggucgagcuggugcgcgggcucccgcgggagaacaccaccaucuggaccagcggcuccagcaucuccuucugcggggucaacggcgacacggccaacuggagcuggcccgacggcgccgagcugcccuucaccaucgacaaguga

SEQ ID NO: 83969 - RNA, 1413 nt, Artificial Sequence; identical to SEQ ID NO: 81485
  derived and/or modified CDS sequence (opt1) from neuraminidase__InfluenzaA__ADN89251

SEQ ID NO: 83970 - RNA, 1413 nt, Artificial Sequence; identical to SEQ ID NO: 81485
  derived and/or modified CDS sequence (opt1) from neuraminidase__InfluenzaA__ADN89262

SEQ ID NO: 83971 - RNA, 1413 nt, Artificial Sequence; identical to SEQ ID NO: 81485
  derived and/or modified CDS sequence (opt1) from neuraminidase__InfluenzaA__ADN89273

SEQ ID NO: 83972 - RNA, 1413 nt, Artificial Sequence; identical to SEQ ID NO: 81485
  derived and/or modified CDS sequence (opt1) from neuraminidase__InfluenzaA__ADN89284

SEQ ID NO: 83973 - RNA, 1413 nt, Artificial Sequence; identical to SEQ ID NO: 81485
  derived and/or modified CDS sequence (opt1) from neuraminidase__InfluenzaA__ADN89295

SEQ ID NO: 83974 - RNA, 1413 nt, Artificial Sequence; identical to SEQ ID NO: 81485
  derived and/or modified CDS sequence (opt1) from neuraminidase__InfluenzaA__ADN89306

SEQ ID NO: 83975 - RNA, 1413 nt, Artificial Sequence
  derived and/or modified CDS sequence (opt1) from neuraminidase__InfluenzaA__ADN89317
augaaccccaaccagcgcaucaucaccaucggcagcaucuccaucgccaucgggaucaucagccugaugcuccagaucggcaacaucaucuccaucugggccagccacuccauccagaccgggagccagaacaacacgggcaucugcaaccagcggaucaucaccuacgagaacuccaccugggugaaccacaccuacgucaacaucaacagcacgaacgugguggcgggggaggacaagaccuccgucacccuggccggcaacagcucccugugcagcaucuccggcugggccaucuacaccaaggacaacagcauccgcaucggguccaagggcgacguguucgugauccgggagccguucaucagcugcucccaccucgagugccgcacguucuuccugacccagggggcccugcucaacgacaagcacagcaacggcaccgucaaggaccggucccccuaccgcgcccugaugagcugcccccugggggaggcgcccagcccguacaacuccaaguucgagagcguggccugguccgccagcgccugccacgacggcaugggcuggcucaccaucgggaucuccggccccgacaacggggcgguggccguccugaaguacaacggcaucaucacgggcaccaucaagagcuggaagaagcagauccugcggacccaggaguccgagugcgugugcaugaacgggagcugcuucaccaucaugacggacggccccuccaacaaggccgccagcuacaagaucuucaagaucgagaaggggaaggugaccaaguccaucgagcucaacgcccccaacuucuacuacgaggagugcagcugcuacccggacaccggcaucgucaugugcgugugccgcgacaacuggcacggguccaaccggcccugggugagcuucaaccagaaccuggacuaccagaucggcuacaucugcuccggcgucuucggggacaacccccgccccgaggacggcgaggggagcugcaacccggugaccguggacggcgcgaacggggucaagggcuucuccuacaaguacggcaacgggguguggaucggccggaccaagagcaaccgccugcggaagggguucgagaugaucugggaccccaacggcuggacgaacaccgacuccgacuucagcgugaagcaggacgucguggccaucaccgacuggagcggguacuccggcagcuucgugcagcaccccgagcucacgggccuggacugcauccgccccugcuucugggucgagcuggugcgggggcucccgcgcgagaacaccaccaucuggaccuccggcagcuccaucagcuucugcggggucaacggcgacacggccaacugguccuggcccgacggcgccgagcugcccuucaccaucgacaaguga

SEQ ID NO: 83976 - RNA, 1413 nt, Artificial Sequence
  derived and/or modified CDS sequence (opt1) from neuraminidase__InfluenzaA__ADN89328
augaaccccaaccagaagaucaucaccaucggcagcaucuccaucgccaucgggaucaucagccugaugcuccagaucggcuccaucaucagcaucugggccucccacagcauccagaccgggucccagaacaacacgggcaucugcaaccagcgcaucaucaccuacgagaacagcaccugggugaaccacaccuacgucaacaucaacaacacgaacgugguggcgggggaggacaagaccuccgucacccuggccggcaacagcucccugugcagcaucuccggcugggccaucuacaccaaggacaacagcauccggaucggguccaagggcgacguguucgugauccgcgagccguucaucagcugcucccaccucgagugccggacguucuuccugacccagggggcccugcucaacgacaagcacagcaacggcaccgucaaggaccgcucccccuaccgggcccugaugagcugcccccugggggaggcgcccagcccguacaacuccaaguucgagagcguggccugguccgccagcgccugccacgacggcaugggcuggcucaccaucgggaucuccggccccgacaacggggcgguggccguccugaaguacaacggcaucaucacgggcaccaucaagagcuggaagaagcagauccugcgcacccaggaguccgagugcgugugcaugaacgggagcugcuucaccaucaugacggacggccccuccaacaaggccgccagcuacaagaucuucaagaucgagaaggggaaggugaccaaguccaucgagcucaacgcccccaacuucuacuacgaggagugcagcugcuacccggacaccggcaucgucaugugcgugugccgggacaacuggcacggguccaaccgccccugggugagcuucaaccagaaccuggacuaccagaucggcuacaucugcuccggcgucuucggggacaacccccggcccgaggacggcgaggggagcugcaacccggugaccguggacggcgcgaacggggucaagggcuucuccuacaaguacggcaacgggguguggaucggccgcaccaagagcaaccggcugcgcaagggguucgagaugaucugggaccccaacggcuggacgaacaccgacuccgacuucagcgugaagcaggacgucguggccaucaccgacuggagcggguacuccggcagcuucgugcagcaccccgagcucacgggccuggacugcauccggcccugcuucugggucgagcuggugcgcgggcucccgcgggagaacaccaccaucugggccuccggcagcuccaucagcuucugcggggucaacuccgacaccgccaacuggagcuggcccgacggcgccgagcugcccuucacgaucgacaaguga

SEQ ID NO: 83977 - RNA, 1413 nt, Artificial Sequence; identical to SEQ ID NO: 83961
  derived and/or modified CDS sequence (opt1) from neuraminidase__InfluenzaA__ADN89339

SEQ ID NO: 83978 - RNA, 1413 nt, Artificial Sequence; identical to SEQ ID NO: 83967
  derived and/or modified CDS sequence (opt1) from neuraminidase__InfluenzaA__ADN89350

SEQ ID NO: 83979 - RNA, 1413 nt, Artificial Sequence
  derived and/or modified CDS sequence (opt1) from neuraminidase__InfluenzaA__ADN89361
augaaccccaaccagaagaucaucaccaucggcagcaucuccaucgccaucgggaucaucagccugaugcuccagaucggcuccaucaucagcaucugggccucccacagcauccagaccgggucccagaacaacacgggcaucugcaaccagcgcaucaucaccuacgagaacagcaccugggugaaccacaccuacgucaacaucaacaacacgaacgugguggcgggggaggacaagaccuccgucacccuggccggcaacagcucccugugcagcaucuccggcugggccaucuacaccaaggacaacagcauccggaucggguccaagggcgacguguucaucauccgcgagccguucaucagcugcucccaccucgagugccggacguucuuccugacccagggggcccugcucaacgacaagcacagcaacggcaccgugaaggaccgcucccccuaccgggcccugaugagcugcccccugggggaggcgcccagcccguacaacuccaaguucgagagcgucgccugguccgccagcgccugccacgacggcaugggcuggcucaccaucgggaucuccggccccgacaacggggcgguggccgugcugaaguacaacggcaucaucacgggcaccaucaagagcuggaagaagcagauccugcgcacccaggaguccgagugcgucugcaugaacgggagcugcuucaccaucaugacggacggccccuccaacaaggccgccagcuacaagaucuucaagaucgagaaggggaaggugaccaaguccaucgagcucaacgcccccaacuucuacuacgaggagugcagcugcuacccggacaccggcaucgugaugugcgucugccgggacaacuggcacggguccaaccgccccugggugagcuucaaccagaaccuggacuaccagaucggcuacaucugcuccggcguguucggggacaacccccggcccgaggacggcgaggggagcugcaacccggucaccguggacggcgcgaacggggugaagggcuucuccuacaaguacggcaacggggucuggaucggccgcaccaagagcaaccggcugcgcaagggguucgagaugaucugggaccccaacggcuggacgaacaccgacuccgacuucagcgugaagcaggacguggucgccaucaccgacuggagcggguacuccggcagcuucgugcagcaccccgagcucacgggccuggacugcauccggcccugcuucuggguggagcugguccgcgggcucccgcgggagaacaccaccaucuggaccuccggcagcuccaucagcuucugcggggugaacuccgacacggccaacuggagcuggcccgacggcgccgagcugcccuucaccaucgacaaguga

SEQ ID NO: 83980 - RNA, 1413 nt, Artificial Sequence
  derived and/or modified CDS sequence (opt1) from neuraminidase__InfluenzaA__ADN89372
augaaccccaaccagaagaucaucaccaucggcagcaucuccaucgccaucgggaucaucagccugaugcuccagaucggcaacaucaucuccaucugggccagccacuccauccagaccgggagccagaacaacacgggcaucugcaaccagcgcaucaucaccuacgagaacuccaccugggugaaccacaccuacgucaacaucaacaacacgaacaucguggcgggggaggacaagaccagcgugacccuggccggcaacuccagccugugcuccaucagcggcugggccaucuacaccaaggacaacuccauccggaucgggagcaagggcgacgucuucgugauccgcgagccguucaucuccugcagccaccucgagugccggacguucuuccugacccagggggcccugcucaacgacaagcacuccaacggcaccgugaaggaccgcagccccuaccgggcccugauguccugcccccugggggaggcgcccagcccguacaacagcaaguucgaguccgucgccuggagcgccuccgccugccacgacggcaugggcuggcucaccaucgggaucagcggccccgacaacggggcgguggccgugcugaaguacaacggcaucaucacgggcaccaucaaguccuggaagaagcagauccugcgcacccaggagagcgagugcgucugcaugaacggguccugcuucaccaucaugacggacggccccagcaacaaggccgccuccuacaagaucuucaagaucgagaaggggaaggugaccaagagcaucgagcucaacgcccccaacuucuacuacgaggagugcuccugcuacccggacaccggcaucgugaugugcgucugccgggacaacuggcacgggagcaaccgccccuggguguccuucaaccagaaccuggacuaccagaucggcuacaucugcagcggcguguucggggacaacccccggcccgaggacggcgagggguccugcaacccggucaccgugaacggcgcggacggggugaagggcuucagcuacaaguacggcaacggggucuggaucggccgcacgaaguccaaccggcugcgcaagggguucgagaugaucugggaccccaacggcuggaccaacaccgacagcgacuucuccgugaagcaggacguggucgccaucaccgacuggagcggguacagcggcuccuucgugcagcaccccgagcucacgggccuggacugcauccggcccugcuucuggguggagcugguccgcgggcucccgcgggagaacaccaccaucuggaccagcggcuccagcaucuccuucugcggggugaacagcgacacggccaacugguccuggcccgacggcgccgagcugcccuucaccaucgacaaguga

SEQ ID NO: 83981 - RNA, 1413 nt, Artificial Sequence; identical to SEQ ID NO: 83956
  derived and/or modified CDS sequence (opt1) from neuraminidase__InfluenzaA__ADN89383

SEQ ID NO: 83982 - RNA, 1413 nt, Artificial Sequence
  derived and/or modified CDS sequence (opt1) from neuraminidase__InfluenzaA__ADN89405
augaaccccaaccagaagaucaucaccaucggcagcaucuccaucgccaucgggaucaucagccugaugcuccagaucggcuccaucaucagcaucugggccucccacagcauccagaccgggucccagaacaacacgggcaucugcaaccagcgcaucaucaccuacgagaacagcaccugggugaaccacaccuacgucaacaucaacaacacgaacgugguggcgggggaggacaagaccuccgucacccuggccggcaacagcucccugugcagcaccuccggcugggccaucuacacgaaggacaacagcauccggaucggguccaagggcgacguguucgugauccgcgagccguucaucagcugcucccaccucgagugccggaccuucuuccugacccagggggcccugcucaacgacaagcacagcaacggcaccgucaaggaccgcucccccuaccgggcccugaugagcugcccccugggggaggcgcccagcccguacaacuccaaguucgagagcguggccugguccgccagcgccugccacgacggcaugggcuggcucacgaucgggaucuccggccccgacaacggggcgguggccguccugaaguacaacggcaucaucaccggcaccaucaagagcuggaagaagcagauccugcgcacccaggaguccgagugcgugugcaugaacgggagcugcuucacgaucaugaccgacggccccuccaacaaggccgccagcuacaagaucuucaagaucgagaaggggaaggugaccaaguccaucgagcucaacgcccccaacuucuacuacgaggagugcagcugcuacccggacaccggcaucgucaugugcgugugccgggacaacuggcacggguccaaccgccccugggugagcuucaaccagaaccuggacuaccagaucggcuacaucugcuccggcgucuucggggacaacccccggcccgaggacggcgaggggagcugcaacccggugacgguggacggcgcgaacggggucaagggcuucuccuacaaguacggcaacgggguguggaucggccgcaccaagagcaaccggcugcgcaagggguucgagaugaucugggaccccaacggcuggaccaacaccgacuccgacuucagcgugaagcaggacgucguggccaucacggacuggagcggguacuccggcagcuucgugcagcaccccgagcucaccggccuggacugcauccggcccugcuucugggucgagcuggugcgcgggcucccgcgggagaacaccaccaucuggacguccggcagcuccaucagcuucugcggggucaacuccgacaccgccaacuggagcuggcccgacggcgccgagcugcccuucaccaucgacaaguga

SEQ ID NO: 83983 - RNA, 1413 nt, Artificial Sequence
  derived and/or modified CDS sequence (opt1) from neuraminidase__InfluenzaA__ADN89416
augaaccccaaccagaagaucaucaccaucggcagcaucuccaucgccaucgggaucaucagccugaugcuccagaucggcaacaucaucuccaucugggccagccacuccauccagaccgggagccagaacaacacgggcaucugcaaccagcgcaucaucaccuacgagaacuccaccugggugaaccacaccuacgucaacaucaacaacacgaacgugguggcgggggaggacaagaccagcgucacccuggccggcaacuccagccugugcuccaucagcggcugggccaucuacaccaaggacaacuccauccggaucgggagcaagggcgacguguucgugauccgcgagccguucaucuccugcagccaccucgagugccggacguucuuccugacccagggggcccugcucaacgacaagcacuccaacggcaccgucaaggaccgcagccccuaccgggcccugauguccugcccccugggggaggcgcccagcccguacaacagcaaguucgaguccguggccuggagcgccuccgccugccacgacggcaugggcuggcucaccaucgggaucagcggccccgacaacggggcgguggccguccugaaguacaacggcaucaucacgggcaccaucaaguccuggaagaagcagauccugcgcacccaggagagcgagugcgugugcaugaacggguccugcuucaccaucaugacggacggccccagcaacaaggccgccuccuacaagaucuucaagaucgagaaggggaaggugaccaagagcaucgagcucaacgcccccaacuucuacuacgaggagugcuccugcuacccggacaccggcaucgucaugugcgugugccgggacaacuggcacgggagcaaccgccccuggguguccuucaaccagaaccuggacuaccagaucggcuacaucugcagcggcguccugggggacaacccccggcccgaggacggcgagggguccugcaacccggugaccguggacggcgcgaacggggucaagggcuucagcuacaaguacggcaacgggguguggaucggccgcacgaaguccaaccggcuccgcaagggguucgagaugaucugggaccccaacggcuggaccaacaccgacagcgacuucuccgugaagcaggacgucguggccaucaccgacuggagcggguacagcggcuccuucgugcagcaccccgagcugacgggccuggacugcauccggcccugcuucugggucgagcucgugcgcgggcugccgcgggagaacaccaccaucuggaccagcggcuccagcaucuccuucugcggggucaacggcgacacggccaacuggagcuggcccgacggcgccgagcugcccuucaccaucgacaaguga

SEQ ID NO: 83984 - RNA, 1413 nt, Artificial Sequence
  derived and/or modified CDS sequence (opt1) from neuraminidase__InfluenzaA__ADN89427
augaaccccaaccagaagaucaucaccaucggcagcaucuccaucgccaucgggaucaucagccugaugcuccagaucggcuccaucaucagcaucugggccucccacagcauccagaccgggucccagaacaacacgggcaucugcaaccagcgcaucaucaccuacgagaacagcaccugggugaaccacaccuacgucaacaucaacaacacgaacgugguggcgggggaggacaagaccuccgucacccuggccggcaacagcucccugugcagcaucuccggcugggccaucuacaccaaggacaacagcauccggaucggguccaagggcgacguguucgugauccgcgagccguucaucagcugcucccaccucgagugccggacguucuuccugacccagggggcccugcucaacgacaagcacagcaacggcaccgucaaggaccgcucccccuaccgggcccugaugagcugcccccugggggaggcgcccagcccguacaacuccaaguucgagagcguggccugguccgccagcgccugccacgacggcaugggcuggcucaccaucgggaucuccggccccgacaacggggcgguggccguccugaaguacaacggcaucaucacgggcaccaucaagagcuggaagaagcagauccugcgcacccaggaguccgagugcgugugcaugaacgggagcugcuucaccaucaugacggacggccccuccaacaaggccgccagcuacaagaucuucaagaucgagaaggggaaggugaccaaguccaucgagcucaacgcccccaacuucuacuacgaggagugcagcugcuacccggacaccggcaucgucaugugcgugugccgggacaacuggcacggguccaaccgccccugggugagcuucaaccagaaccuggacuaccagaucggcuacaucugcuccggcgucuucggggacaacccccggcccgaggacggcgaggggagcugcaacccggugaccguggacggcgcgaacggggucaagggcuucuccuacaaguacggcaacgggguguggaucggccgcaccaagagcaaccggcugcgcaagggguucgagaugaucugggaccccaacggcuggacgaacaccgacuccgacuucagcgugaagcaggacgucguggccaucaccgacuggagcggguacuccggcagcuucgugcagcaccccgagcucacgggccuggacugcauccggcccugcuucugggucgagcuggugcgcgggcucccgcgggagaacaccaccaucuggaccuccggcagcuccaucagcuucugcggggucgacuccgacgccgccgacuggagcuggcccgacggcgccgagcugcccuucacgaucgacaaguga

SEQ ID NO: 83985 - RNA, 1413 nt, Artificial Sequence; identical to SEQ ID NO: 81485
  derived and/or modified CDS sequence (opt1) from neuraminidase__InfluenzaA__ADN89438

SEQ ID NO: 83986 - RNA, 1413 nt, Artificial Sequence
  derived and/or modified CDS sequence (opt1) from neuraminidase__InfluenzaA__ADN89449
augaaccccaaccagaagaucaucaccaucggcagcaucuccaucgccaucgggaucaucagccugaugcuccagaucggcaacaucaucuccaucugggccagccacuccauccagaccgggagccagaacaacacgggcaucugcaaccagcgcaucaucaccuacgagaacuccaccugggugaaccacaccuacgucaacaucaacaacacgaacgugguggcgggggaggacaagccgagcgucacccuggccggcaacuccagccugugcuccaucagcggcugggccaucuacaccaaggacaacuccauccggaucgggagcaagggcgacguguucgugauccgcgagcccuucaucuccugcagccaccucgagugccggaccuucuuccugacgcagggggcccugcucaacgacaagcacuccaacggcaccgucaaggaccgcagccccuaccgggcccugauguccugcccccugggggaggcgccgagccccuacaacagcaaguucgaguccguggccuggagcgccuccgccugccacgacggcaugggcuggcucaccaucgggaucagcggccccgacaacggggcgguggccguccugaaguacaacggcaucaucaccggcacgaucaaguccuggaagaagcagauccugcgcacccaggagagcgagugcgugugcaugaacggguccugcuucaccaucaugaccgacggccccagcaacaaggccgccuccuacaagaucuucaagaucgagaaggggaaggugaccaagagcaucgagcucaacgccccgaacuucuacuacgaggagugcuccugcuaccccgacacgggcaucgucaugugcgugugccgggacaacuggcacgggagcaaccgccccuggguguccuucaaccagaaccuggacuaccagaucggcuacaucugcagcggcgucuucggggacaacccccggccggaggacggcgagggguccugcaaccccgugaccguggacggcgcgaacggggucaagggcuucagcuacaaguacggcaacgggguguggaucggccgcaccaaguccaaccggcugcgcaagggguucgagaugaucugggaccccaacggcuggacgaacaccgacagcgacuucuccgugaagcaggacgucguggccaucaccgacuggagcggguacagcggcuccuucgugcagcaccccgagcucaccggccuggacugcauccggccgugcuucugggucgagcuggugcgcgggcucccccgggagaacacgaccaucuggaccagcggcuccagcaucuccuucugcggggucaacagcgacaccgccaacugguccuggcccgacggcgccgagcugcccuucacgaucgacaaguga

SEQ ID NO: 83987 - RNA, 1413 nt, Artificial Sequence; identical to SEQ ID NO: 82954
  derived and/or modified CDS sequence (opt1) from neuraminidase__InfluenzaA__ADN89460

SEQ ID NO: 83988 - RNA, 1413 nt, Artificial Sequence; identical to SEQ ID NO: 81485
  derived and/or modified CDS sequence (opt1) from neuraminidase__InfluenzaA__ADN89482

SEQ ID NO: 83989 - RNA, 1413 nt, Artificial Sequence
  derived and/or modified CDS sequence (opt1) from neuraminidase__InfluenzaA__ADN89493
augaaccccaaccagaagaucaucaccaucggcagcaucuccaucgccaucgggaucaucagccugaugcuccagaucggcaacaucaucuccaucugggccagccacuccauccagaccgagagccagaacaacacggggaucugcaaccagcgcaucaucaccuacgagaacuccaccugggugaaccacaccuacgucaacaucaacaacacgaacgugguggcgggcgaggacaagaccagcgucacccuggccgggaacuccagccugugcuccaucagcggcugggccaucuacaccaaggacaacuccauccggaucggcagcaagggggacguguucgugauccgcgagccguucaucuccugcagccaccucgagugccggacguucuuccugacccagggcgcccugcucaacgacaagcacuccaacgggaccgucaaggaccgcagccccuaccgggcccugauguccugcccccugggcgaggcgcccagcccguacaacagcaaguucgaguccguggccuggagcgccuccgccugccacgacgggaugggcuggcucaccaucggcaucagcgggcccgacaacggcgcgguggccguccugaaguacaacgggaucaucacgggcaccaucaaguccuggaagaagcagauccugcgcacccaggagagcgagugcgugugcaugaacggcuccugcuucaccaucaugacggacgggcccagcaacaaggccgccuccuacaagaucuucaagaucgagaagggcaaggugaccaagagcaucgagcucaacgcccccaacuucuacuacgaggagugcuccugcuacccggacaccgggaucgucaugugcgugugccgggacaacuggcacggcagcaaccgccccuggguguccuucaaccagaaccuggacuaccagaugggguacaucugcagcggcgucuucggcgacaacccccggcccgaggacggggagggcuccugcaacccggugaccguggacggggcgaacggcgucaagggguucagcuacaaguacggcaacggcguguggaucgggcgcacgaaguccaaccggcugcgcaagggcuucgagaugaucugggaccccaacggguggaccaacaccgacagcgacuucuccgugaagcaggacgucguggccaucaccgacuggagcggcuacagcggguccuucgugcagcaccccgagcucacgggccuggacugcauccggcccugcuucugggucgagcuggugcgcggccucccgcgggagaacaccaccaucuggaccagcggguccagcaucuccuucugcggcgucaacagcgacacggccaacugguccuggcccgacggggccgagcugcccuucaccaucgacaaguga

SEQ ID NO: 83990 - RNA, 1413 nt, Artificial Sequence; identical to SEQ ID NO: 81485
  derived and/or modified CDS sequence (opt1) from neuraminidase__InfluenzaA__ADN89504

SEQ ID NO: 83991 - RNA, 1413 nt, Artificial Sequence
  derived and/or modified CDS sequence (opt1) from neuraminidase__InfluenzaA__ADN89515
augaaccccaaccagaagaucaucaccaucggcagcaucuccaucgccaucgggaucaucagccugaugcuccagaucggcaacaucaucuccaucugggccagccacuccauccagaccgggagccagaacaacacgggcaucugcaaccagcgcaucaucaccuacgagaacuccaccugggugaaccacaccuacgucaacaucaacaacacgaacgugguggcgggggaggacaagaccagcgucacccuggccggcaacuccagccugugcuccaucagcggcugggccaucuacaccaaggacaacuccauccggaucgggagcaagggcgacguguucgugauccgcgagccguucaucuccugcagccaccucgagugccggacguucuuccugacccagggggcccugcucaacgacaagcacuccaacggcaccgucaaggaccgcagccccuaccgggcccugauguccugcccccugggggaggcgcccagcccguacaacagcaaguucgaguccguggccuggagcgccuccgccugccacgacggcaugggcuggcucaccaucgggaucagcggccccgacaacggggcgguggccguccugaaguacaacggcaucaucacgggcaccaucaaguccuggaagaagcagauccugcgcacccaggagagcgagugcgugugcaugaacggguccugcuucaccaucaugacggacggccccagcaacaaggccgccuccuacaagaucuucaagaucgagaaggggaaggugaccaagagcaucgagcucaacgcccccaacuucuacuacgaggagugcuccugcuacccggacaccggcaucgucaugugcgugugccgggacaacuggcacgggagcaaccgccccuggguguccuucaaccagaaccuggacuaccagaucggcuacaucugcagcggcgucuucggggacaacccccggcccgaggacggcgagggguccugcaacccggugaccguggacggcgcgaacggggucaagggcuucagcuacaaguacggcaacgggguguggaucggccgcacgaaguccaaccggcugcgcaagggguucgagaugaucugggaccccaacggcuggaccaacaccgacagcgacuucaccgugaagcaggacgucguggccaucacggacugguccggguacagcggcagcuucgugcagcaccccgagcucaccggccuggacugcauccggcccugcuucugggucgagcuggugcgcgggcucccgcgggagaacaccaccaucuggacguccggcagcuccaucagcuucugcggggucaacuccgacaccgccaacuggagcuggcccgacggcgccgagcugcccuucaccaucgacaaguga

SEQ ID NO: 83992 - RNA, 1413 nt, Artificial Sequence; identical to SEQ ID NO: 81485
  derived and/or modified CDS sequence (opt1) from neuraminidase__InfluenzaA__ADN89526

SEQ ID NO: 83993 - RNA, 1413 nt, Artificial Sequence; identical to SEQ ID NO: 83956
  derived and/or modified CDS sequence (opt1) from neuraminidase__InfluenzaA__ADN89537

SEQ ID NO: 83994 - RNA, 1413 nt, Artificial Sequence; identical to SEQ ID NO: 81485
  derived and/or modified CDS sequence (opt1) from neuraminidase__InfluenzaA__ADN89548

SEQ ID NO: 83995 - RNA, 1413 nt, Artificial Sequence; identical to SEQ ID NO: 81485
  derived and/or modified CDS sequence (opt1) from neuraminidase__InfluenzaA__ADN89570

SEQ ID NO: 83996 - RNA, 1413 nt, Artificial Sequence
  derived and/or modified CDS sequence (opt1) from neuraminidase__InfluenzaA__ADN89581
augaaccccaaccagaagaucaucaccaucggcagcaucuccaucgccaucgggaucaucagccugaugcuccagaucggcaacaucaucuccaucugggccagccacuccauccagaccgggagccagaacaacacgggcaucugcaaccagcgcaucaucaccuacgagaacuccaccugggugaaccacaccuacgucaacaucaacaacacgaacgugguggcgggggaggacaagaccagcgucacccuggccggcaacuccagccugugcuccaucagcggcugggccaucuacaccaaggacaacuccauccggaucgggagcaagggcgacguguucgugauccgcgagccguucaucuccugcagccaccucgagugccggacguucuuccugacccagggggcccugcucaacgacaagcacuccaacggcaccgucaaggaccgcagccccuaccgggcccugauguccugcccccugggggaggcgcccagcccguacaacagcaaguucgaguccguggccuggagcgccuccgccugccacgacggcaugggcuggcucaccaucgggaucagcggccccgacaacggggcgguggccguccugaaguacaacggcaucaucacgggcaccaucaaguccuggaagaagcagauccugcgcacccaggagagcgagugcgugugcaugaacggguccugcuucaccaucaugacggacggccccagcaacaagaccgccuccuacaagaucuucaagaucgagaaggggaaggugaccaagagcaucgagcucaacgcccccaacuucuacuacgaggagugcuccugcuacccggacaccggcaucgucaugugcgugugccgggacaacuggcacgggagcaaccgccccuggguguccuucaaccagaaccuggacuaccagaucggcuacaucugcagcggcgucuucggggacaacccccggcccgaggacggcgagggguccugcaacccggugacgguggacggcgccaacggggucaagggcuucagcuacaaguacggcaacgggguguggaucggccgcaccaaguccaaccggcugcgcaagggguucgagaugaucugggaccccaacggcuggaccaacaccgacagcgacuucuccgugaagcaggacgucguggcgaucacggacuggagcggguacagcggcuccuucgugcagcaccccgagcucaccggccuggacugcauccggcccugcuucugggucgagcuggugcgcgggcucccgcgggagaacaccaccaucuggacgagcggcuccagcaucuccuucugcggggucaacggcgacaccgccaacuggagcuggcccgacggcgccgagcugcccuucaccaucgacaaguga

SEQ ID NO: 83997 - RNA, 1413 nt, Artificial Sequence; identical to SEQ ID NO: 82954
  derived and/or modified CDS sequence (opt1) from neuraminidase__InfluenzaA__ADN89592

SEQ ID NO: 83998 - RNA, 1413 nt, Artificial Sequence; identical to SEQ ID NO: 82954
  derived and/or modified CDS sequence (opt1) from neuraminidase__InfluenzaA__ADN89603

SEQ ID NO: 83999 - RNA, 1413 nt, Artificial Sequence; identical to SEQ ID NO: 83964
  derived and/or modified CDS sequence (opt1) from neuraminidase__InfluenzaA__ADN89614

SEQ ID NO: 84000 - RNA, 1413 nt, Artificial Sequence; identical to SEQ ID NO: 83983
  derived and/or modified CDS sequence (opt1) from neuraminidase__InfluenzaA__ADN89625

SEQ ID NO: 84001 - RNA, 1413 nt, Artificial Sequence; identical to SEQ ID NO: 81485
  derived and/or modified CDS sequence (opt1) from neuraminidase__InfluenzaA__ADN89636

SEQ ID NO: 84002 - RNA, 1413 nt, Artificial Sequence; identical to SEQ ID NO: 81485
  derived and/or modified CDS sequence (opt1) from neuraminidase__InfluenzaA__ADN89647

SEQ ID NO: 84003 - RNA, 1413 nt, Artificial Sequence; identical to SEQ ID NO: 81485
  derived and/or modified CDS sequence (opt1) from neuraminidase__InfluenzaA__ADN89658

SEQ ID NO: 84004 - RNA, 1413 nt, Artificial Sequence; identical to SEQ ID NO: 82954
  derived and/or modified CDS sequence (opt1) from neuraminidase__InfluenzaA__ADN89669

SEQ ID NO: 84005 - RNA, 1413 nt, Artificial Sequence; identical to SEQ ID NO: 81485
  derived and/or modified CDS sequence (opt1) from neuraminidase__InfluenzaA__ADN89680

SEQ ID NO: 84006 - RNA, 1413 nt, Artificial Sequence; identical to SEQ ID NO: 81485
  derived and/or modified CDS sequence (opt1) from neuraminidase__InfluenzaA__ADN89691

SEQ ID NO: 84007 - RNA, 1413 nt, Artificial Sequence; identical to SEQ ID NO: 83983
  derived and/or modified CDS sequence (opt1) from neuraminidase__InfluenzaA__ADN89702

SEQ ID NO: 84008 - RNA, 1413 nt, Artificial Sequence; identical to SEQ ID NO: 81485
  derived and/or modified CDS sequence (opt1) from neuraminidase__InfluenzaA__ADN89713

SEQ ID NO: 84009 - RNA, 1413 nt, Artificial Sequence; identical to SEQ ID NO: 81485
  derived and/or modified CDS sequence (opt1) from neuraminidase__InfluenzaA__ADN89724

SEQ ID NO: 84010 - RNA, 1413 nt, Artificial Sequence; identical to SEQ ID NO: 81485
  derived and/or modified CDS sequence (opt1) from neuraminidase__InfluenzaA__ADN89735

SEQ ID NO: 84011 - RNA, 1413 nt, Artificial Sequence; identical to SEQ ID NO: 81485
  derived and/or modified CDS sequence (opt1) from neuraminidase__InfluenzaA__ADN89746

SEQ ID NO: 84012 - RNA, 1413 nt, Artificial Sequence; identical to SEQ ID NO: 81485
  derived and/or modified CDS sequence (opt1) from neuraminidase__InfluenzaA__ADN89757

SEQ ID NO: 84013 - RNA, 1413 nt, Artificial Sequence; identical to SEQ ID NO: 81485
  derived and/or modified CDS sequence (opt1) from neuraminidase__InfluenzaA__ADN89768

SEQ ID NO: 84014 - RNA, 1413 nt, Artificial Sequence; identical to SEQ ID NO: 83960
  derived and/or modified CDS sequence (opt1) from neuraminidase__InfluenzaA__ADN89779

SEQ ID NO: 84015 - RNA, 1413 nt, Artificial Sequence; identical to SEQ ID NO: 81485
  derived and/or modified CDS sequence (opt1) from neuraminidase__InfluenzaA__ADN89790

SEQ ID NO: 84016 - RNA, 1413 nt, Artificial Sequence
  derived and/or modified CDS sequence (opt1) from neuraminidase__InfluenzaA__ADN89801
augaaccccaaccagaagaucaucaccaucggcagcaucuccaucgccaucgggaccaucagccugaugcuccagaucggcaacaucaucuccaucugggccagccacuccauccagacggggagccagaacaacaccggcaucugcaaccagcgcaucaucaccuacaagaacuccaccugggugaaccacacguacgucaacaucaacaacaccaacgugguggcgggggaggacaagaccagcgucacccuggccggcaacuccagccugugcuccaucagcggcugggccaucuacacgaaggacaacuccauccggaucgggagcaagggcgacguguucgugauccgcgagccguucaucuccugcagccaccucgagugccggaccuucuuccugacccagggggcccugcucaacgacaagcacuccaacggcaccgucaaggaccgcagccccuaccgggcccugauguccugcccccugggggaggcgcccagcccguacaacagcaaguucgaguccguggccuggagcgccuccgccugccacgacggcaugggcuggcucacgaucgggaucagcggccccgacaacggggcgguggccguccugaaguacaacggcaucaucaccggcaccaucaaguccuggaagaagcagauccugcgcacccaggagagcgagugcgugugcaugaacggguccugcuucacgaucaugaccgacggccccagcaacaaggccgccuccuacaagaucuucaagaucgagaaggggaaggugaccaagagcaucgagcucaacgcccccaacuucuacuacgaggagugcuccugcuacccggacaccggcaucgucaugugcgugugccgggacaacuggcacgggagcaaccgccccuggguguccuucaaccagaaccuggacuaccagaucggcuacaucugcagcggcgucuucggggacaacccccggcccgaggacggcgagggguccugcaacccggugacgguggacggcgcgaacggggucaagggcuucagcuacaaguacggcaacgggguguggaucggccgcaccaaguccaaccggcugcgcaagggguucgagaugaucugggaccccaacggcuggaccaacaccgacagcgacuucuccgugaagcaggacgucguggccaucacggacuggagcggguacagcggcuccuucgugcagcaccccgagcucaccggccuggacugcauccggcccugcuucugggucgagcuggugcgcgggcucccgcgggagaacaccaccaucuggacgagcggcuccagcaucuccuucugcggggucaacagcgacaccgccaacugguccuggcccgacggcgccgagcugcccuucaccaucgacaaguga

SEQ ID NO: 84017 - RNA, 1413 nt, Artificial Sequence
  derived and/or modified CDS sequence (opt1) from neuraminidase__InfluenzaA__ADN89823
augaaccccaaccagaagaucaucaccaucggcagcaucuccaucgccaucgggaucaucagccugaugcuccagaucggcuccaucaucagcaucugggccucccacagcauccacaccgggucccagaacaacacgggcaucugcaaccagcgcaucaucaccuacgagaacagcaccugggugaaccacaccuacgucaacaucaacaacacgaacgugguggcgggggaggacaagaccuccgucacccuggccggcaacagcucccugugcagcaucuccggcugggccaucuacaccaaggacaacagcauccggaucggguccaagggcgacguguucgugauccgcgagccguucaucagcugcucccaccucgagugccggacguucuuccugacccagggggcccugcucaacgacaagcacagcaacggcaccgucaaggaccgcucccccuaccgggcccugaugagcugcccccugggggaggcgcccagcccguacaacuccaaguucgagagcguggccugguccgccagcgccugccacgacggcaugggcuggcucaccaucgggaucuccggccccgacaacggggcgguggccguccugaaguacaacggcaucaucacgggcaccaucaagagcuggaagaagcagauccugcgcacccaggaguccgagugcgugugcaugaacgggagcugcuucaccaucaugacggacggccccuccaacaaggccgccagcuacaagaucuucaagaucgagaaggggaaggugaccaaguccaucgagcucaacgcccccaacuucuacuacgaggagugcagcugcuacccggacaccggcaucgucaugugcgugugccgggacaacuggcacggguccaaccgccccugggugagcuucaaccagaaccuggacuaccagaucggcuacaucugcuccggcgucuucggggacaacccccggcccgaggacggcgaggggagcugcaacccggugaccguggacggcgcgaacggggucaagggcuucuccuacaaguacggcaacgggguguggaucggccgcaccaagagcaaccggcugcgcaagggguucgagaugaucugggaccccaacggcuggacgaacaccgacuccgacuucagcgugaagcaggacgucguggccaucaccgacuggagcggguacuccggcagcuucgugcagcaccccgagcucacgggccuggacugcauccggcccugcuucugggucgagcuggugcgcgggcucccgcgggagaacaccaccaucuggaccuccggcagcuccaucagcuucugcggggucaacuccgacacggccaacuggagcuggcccgacggcgccgagcugcccuucaccaucgacaaguga

SEQ ID NO: 84018 - RNA, 1413 nt, Artificial Sequence; identical to SEQ ID NO: 82954
  derived and/or modified CDS sequence (opt1) from neuraminidase__InfluenzaA__ADN89834

SEQ ID NO: 84019 - RNA, 1413 nt, Artificial Sequence; identical to SEQ ID NO: 83956
  derived and/or modified CDS sequence (opt1) from neuraminidase__InfluenzaA__ADN89845

SEQ ID NO: 84020 - RNA, 1413 nt, Artificial Sequence; identical to SEQ ID NO: 81485
  derived and/or modified CDS sequence (opt1) from neuraminidase__InfluenzaA__ADN89856

SEQ ID NO: 84021 - RNA, 1410 nt, Artificial Sequence; identical to SEQ ID NO: 83434
  derived and/or modified CDS sequence (opt1) from neuraminidase__InfluenzaA__ADN89867

SEQ ID NO: 84022 - RNA, 1410 nt, Artificial Sequence; identical to SEQ ID NO: 83434
  derived and/or modified CDS sequence (opt1) from neuraminidase__InfluenzaA__ADN89878

SEQ ID NO: 84023 - RNA, 1410 nt, Artificial Sequence; identical to SEQ ID NO: 83434
  derived and/or modified CDS sequence (opt1) from neuraminidase__InfluenzaA__ADN89889

SEQ ID NO: 84024 - RNA, 1410 nt, Artificial Sequence; identical to SEQ ID NO: 83434
  derived and/or modified CDS sequence (opt1) from neuraminidase__InfluenzaA__ADN89900

SEQ ID NO: 84025 - RNA, 1410 nt, Artificial Sequence; identical to SEQ ID NO: 83434
  derived and/or modified CDS sequence (opt1) from neuraminidase__InfluenzaA__ADN89911

SEQ ID NO: 84026 - RNA, 1410 nt, Artificial Sequence
  derived and/or modified CDS sequence (opt1) from neuraminidase__InfluenzaA__ADN89922
augaaccccaaccagaagaucaucaccaucggcagcgugucccugaccaucagcacgaucugcuucuucaugcagaucgccauccucaucaccaccgucacccugcacuucaagcaguacaaguucaacuccccgcccaacaaccaggugaugcugugcgagcccacgaucaucgagcgcaacaucaccgagaucguguaccucaccaacaccacgaucgagaaggagaucugccccaagcuggccgaguaccggaacuggagcaagccgcagugcgacaucaccggguucgcgcccuucuccaaggacaacagcauccgccuguccgccggcggggacaucugggucacccgggagcccuacgugagcugcgaccccgacaagugcuaccaguucgcccucggccaggggaccacgcugaacaacgugcacuccaacaacaccguccgcgaccggaccccguaccgcacccugcucaugaacgagcugggcgugcccuuccaccugggcacgaagcaggucugcaucgccuggagcuccagcuccugccacgacgggaaggccuggcuccacgugugcaucaccggcgacgacaagaacgcgaccgccagcuucaucuacaacgggcggcugguggacuccguggucagcugguccaaggagauccugcgcacccaggagagcgagugcgugugcaucaacggcacgugcaccguggucaugaccgacggguccgccagcggcaaggccgacaccaagauccucuucaucgaggagggcaagaucgugcacacgagcacccuguccgggagcgcgcagcacguggaggagugcuccugcuacccccgguaccccggcguccgcugcgugugccgggacaacuggaaggggagcaaccgcccgaucguggacaucaacaucaaggaccacuccaucgucagcuccuacgugugcagcggccuggugggcgacacgccccggaagaacgacuccagcuccagcucccacugccucgaccccaacaacgaggagggcgggcacggggucaagggcugggccuucgacgacgggaacgacguguggaugggccgcaccaucaacgagaccagccggcugggcuacgagaccuucaaggucaucgaggggugguccaaccccaagagcaagcugcagaucaaccgccaggugaucguggaccggggcaaccgcuccggguacagcggcaucuucuccgucgagggcaagagcugcaucaaccggugcuucuacguggagcucauccgcgggcggaaggaggagaccgaggugcuguggaccagcaacuccaucgucguguucugcggcacgagcgggaccuacggcaccggguccuggccggacggcgccgaccugaacaucaugcccaucuga

SEQ ID NO: 84027 - RNA, 1410 nt, Artificial Sequence; identical to SEQ ID NO: 83434
  derived and/or modified CDS sequence (opt1) from neuraminidase__InfluenzaA__ADN89933

SEQ ID NO: 84028 - RNA, 1410 nt, Artificial Sequence; identical to SEQ ID NO: 83434
  derived and/or modified CDS sequence (opt1) from neuraminidase__InfluenzaA__ADN89955

SEQ ID NO: 84029 - RNA, 1410 nt, Artificial Sequence; identical to SEQ ID NO: 83434
  derived and/or modified CDS sequence (opt1) from neuraminidase__InfluenzaA__ADN89966

SEQ ID NO: 84030 - RNA, 1410 nt, Artificial Sequence; identical to SEQ ID NO: 83434
  derived and/or modified CDS sequence (opt1) from neuraminidase__InfluenzaA__ADN89977

SEQ ID NO: 84031 - RNA, 1410 nt, Artificial Sequence; identical to SEQ ID NO: 83434
  derived and/or modified CDS sequence (opt1) from neuraminidase__InfluenzaA__ADN89988

SEQ ID NO: 84032 - RNA, 1410 nt, Artificial Sequence; identical to SEQ ID NO: 83434
  derived and/or modified CDS sequence (opt1) from neuraminidase__InfluenzaA__ADN89999

SEQ ID NO: 84033 - RNA, 1410 nt, Artificial Sequence; identical to SEQ ID NO: 83434
  derived and/or modified CDS sequence (opt1) from neuraminidase__InfluenzaA__ADN90010

SEQ ID NO: 84034 - RNA, 1410 nt, Artificial Sequence; identical to SEQ ID NO: 83434
  derived and/or modified CDS sequence (opt1) from neuraminidase__InfluenzaA__ADN90021

SEQ ID NO: 84035 - RNA, 1410 nt, Artificial Sequence; identical to SEQ ID NO: 83434
  derived and/or modified CDS sequence (opt1) from neuraminidase__InfluenzaA__ADN90032

SEQ ID NO: 84036 - RNA, 1410 nt, Artificial Sequence; identical to SEQ ID NO: 83434
  derived and/or modified CDS sequence (opt1) from neuraminidase__InfluenzaA__ADN90043

SEQ ID NO: 84037 - RNA, 1410 nt, Artificial Sequence; identical to SEQ ID NO: 83434
  derived and/or modified CDS sequence (opt1) from neuraminidase__InfluenzaA__ADN90054

SEQ ID NO: 84038 - RNA, 1410 nt, Artificial Sequence; identical to SEQ ID NO: 83434
  derived and/or modified CDS sequence (opt1) from neuraminidase__InfluenzaA__ADN90065

SEQ ID NO: 84039 - RNA, 1410 nt, Artificial Sequence; identical to SEQ ID NO: 83434
  derived and/or modified CDS sequence (opt1) from neuraminidase__InfluenzaA__ADN90076

SEQ ID NO: 84040 - RNA, 1410 nt, Artificial Sequence; identical to SEQ ID NO: 83434
  derived and/or modified CDS sequence (opt1) from neuraminidase__InfluenzaA__ADN90087

SEQ ID NO: 84041 - RNA, 1410 nt, Artificial Sequence; identical to SEQ ID NO: 83434
  derived and/or modified CDS sequence (opt1) from neuraminidase__InfluenzaA__ADN90098

SEQ ID NO: 84042 - RNA, 1410 nt, Artificial Sequence; identical to SEQ ID NO: 83434
  derived and/or modified CDS sequence (opt1) from neuraminidase__InfluenzaA__ADN90109

SEQ ID NO: 84043 - RNA, 1410 nt, Artificial Sequence; identical to SEQ ID NO: 83434
  derived and/or modified CDS sequence (opt1) from neuraminidase__InfluenzaA__ADN90120

SEQ ID NO: 84044 - RNA, 1410 nt, Artificial Sequence; identical to SEQ ID NO: 83434
  derived and/or modified CDS sequence (opt1) from neuraminidase__InfluenzaA__ADN90131

SEQ ID NO: 84045 - RNA, 1410 nt, Artificial Sequence; identical to SEQ ID NO: 83434
  derived and/or modified CDS sequence (opt1) from neuraminidase__InfluenzaA__ADN90142

SEQ ID NO: 84046 - RNA, 1410 nt, Artificial Sequence; identical to SEQ ID NO: 83434
  derived and/or modified CDS sequence (opt1) from neuraminidase__InfluenzaA__ADN90153

SEQ ID NO: 84047 - RNA, 1410 nt, Artificial Sequence; identical to SEQ ID NO: 83434
  derived and/or modified CDS sequence (opt1) from neuraminidase__InfluenzaA__ADN90164

SEQ ID NO: 84048 - RNA, 1410 nt, Artificial Sequence; identical to SEQ ID NO: 83434
  derived and/or modified CDS sequence (opt1) from neuraminidase__InfluenzaA__ADN90186

SEQ ID NO: 84049 - RNA, 1410 nt, Artificial Sequence; identical to SEQ ID NO: 83434
  derived and/or modified CDS sequence (opt1) from neuraminidase__InfluenzaA__ADN90197

SEQ ID NO: 84050 - RNA, 1410 nt, Artificial Sequence
  derived and/or modified CDS sequence (opt1) from neuraminidase__InfluenzaA__ADN90208
augaaccccaaccagaagaucaucaccaucggcagcgugucccugaccaucagcacgaucugcuucuucaugcagaucgccauccucaucaccaccgucacccugcacuucaagcaguacaaguucaacuccccgcccaacaaccaggugaugcugugcgagcccacgaucaucgagcgcaacaucaccgagaucguguaccucaccaacaccacgaucgagaaggagaucugccccaagcuggccgaguaccggaacuggagcaagccgcagugcgacaucaccggguucgcgcccuucuccaaggacaacagcauccgccuguccgccggcggggacaucugggucacccgggagcccuacgugagcugcgaccccgacaagugcuaccaguucgcccucggccaggggaccacgcugaacaacgugcacuccaacaacaccguccgcgaccggaccccguaccgcacccugcucaugaacgagcugggcgugcccuuccaccugggcacgaagcaggucugcaucgccuggagcuccagcuccugccacgacgggaaggccuggcuccacgugugcaucaccggcgacgacaagaacgcgaccgccagcuucaucuacaacgggcggcugguggacuccguggucagcugguccaaggagauccugcgcacccaggagagcgagugcgugugcaucaacggcacgugcaccguggucaugaccgacggguccgccagcggcaaggccgacaccaagauccucuucaucgaggagggcaagaucgugcacacgagcacccuguccgggagcgcgcagcacguggaggagugcuccugcuacccccgguaccccggcguccgcugcgugugccgggacaacuggaaggggagcaaccgcccgaucguggacaucaacaucaaggaccacuccaucgucagcuccuacgugugcagcggccuggugggcgacacgccccggaagaacgacuccagcuccagcucccacugccucgaccccaacaacgaggagggcgggcacggggucaagggcugggccuucgacgacgggaacgacguguggaugggccgcaccaucaacgagaccagccggcugggcuacgagaccuucaaggucaucgaggggugguccaaccccaagagcaagcugcagaucaaccgccaggugaucguggaccgguccaaccgcagcggcuacuccgggaucuucagcgucgagggcaagagcugcaucaaccggugcuucuacguggagcucauccgcgggcggaaggaggagaccgaggugcuguggaccuccaacagcaucgucguguucugcggcacguccggcaccuacgggaccggcagcuggccggacggggccgaccugaaccucaugcccaucuga

SEQ ID NO: 84051 - RNA, 1410 nt, Artificial Sequence; identical to SEQ ID NO: 83434
  derived and/or modified CDS sequence (opt1) from neuraminidase__InfluenzaA__ADN90219

SEQ ID NO: 84052 - RNA, 1410 nt, Artificial Sequence
  derived and/or modified CDS sequence (opt1) from neuraminidase__InfluenzaA__ADN92469
augaaccccaaccagaagaucaucaccaucggcagcgugucccugaccaucagcacgaucugcuucuucaugcagaucgccauccucaucaccaccgucacccugcacuucaagcaguacgaguucaacuccccgcccaacaaccaggugaugcugugcgagcccacgaucaucgagcgcaacaucaccgagaucguguaccucaccaacaccacgaucgagaaggagaucugccccaagcuggccgaguaccggaacuggagcaagccgcagugcgacaucaccggguucgcgcccuucuccaaggacaacagcauccgccuguccgccggcggggacaucugggucacccgggagcccuacgugagcugcgaccccgacaagugcuaccaguucgcccucggccaggggaccacgcugaacaacgugcacuccaacaacaccguccgcgaccggaccccguaccgcacccugcucaugaacgagcugggcgugcccuuccaccugggcacgaagcaggucugcaucgccuggagcuccagcuccugccacgacgggaaggccuggcuccacgugugcaucaccggcgacgacaagaacgcgaccgccagcuucaucuacaacgggcggcugguggacuccguggucagcugguccaaggagauccugcgcacccaggagagcgagugcgugugcaucaacggcacgugcaccguggucaugaccgacggguccgccagcgagaaggccgacaccaagauccucuucaucgaggagggcaagaucgugcacacgagcacccuguccggcagcgcgcagcacguggaggagugcuccugcuacccccgguaccccgggguccgcugcgugugccgggacaacuggaagggcagcaaccgcccgaucguggacaucaacaucaaggaccacuccaucgucagcuccuacgugugcagcgggcuggugggcgacacgccccggaagaacgacuccagcuccagcucccacugccucgaccccaacaacgaggagggcgggcacggcgucaaggggugggccuucgacgacggcaacgacguguggauggggcgcaccaucagcgagaagucccggcugggcuacgagaccuucaaggucaucgagggcuggagcaaccccaaguccaagcugcagaucaaccgccaggugaucguggaccgggggaaccgcagcggcuacuccgggaucuucagcgucgagggcaagagcugcaucaaccggugcuucuacguggagcucauccgcgggcggaaggaggagaccgaggugcuguggaccuccaacagcaucgucguguucugcggcaccuccggcacguacgggaccggcagcuggccggacggggccgacaucaaccugaugcccaucuga

SEQ ID NO: 84053 - RNA, 1410 nt, Artificial Sequence; identical to SEQ ID NO: 83279
  derived and/or modified CDS sequence (opt1) from neuraminidase__InfluenzaA__ADN92480

SEQ ID NO: 84054 - RNA, 1410 nt, Artificial Sequence; identical to SEQ ID NO: 83279
  derived and/or modified CDS sequence (opt1) from neuraminidase__InfluenzaA__ADN92491

SEQ ID NO: 84055 - RNA, 1410 nt, Artificial Sequence
  derived and/or modified CDS sequence (opt1) from neuraminidase__InfluenzaA__ADN92502
augaaccccaaccagaagaucaucaccaucggcagcgugucccugaccaucagcacgaucugcuucuucaugcagaucgccauccucaucaccaccgucacccugcacuucaagcaguacgaguucaacuccccgcccaacaaccaggugaugcugugcgagcccacgaucaucgagcgcaacaucaccgagaucguguaccucaccaacaccacgaucgagaaggagaucugccccaagcuggccgaguaccggaacuggagcaagccgcagugcgacaucaccggguucgcgcccuucuccaaggacaacagcauccgccuguccgccggcggggacaucugggucacccgggagcccuacgugagcugcgaccccgacaagugcuaccaguucgcccucggccaggggaccacgcugaacaacgugcacuccaacaacaccguccgcgaccggaccccguaccgcacccugcucaugaacgagcugggcgugcccuuccaccugggcacgaagcaggucugcaucgccuggagcuccagcuccugccacgacgggaaggccuggcuccacgugugcaucaccggcgacgacaagaacgcgaccgccagcuucaucuacaacgggcggcugguggacuccguggucagcugguccaaggagauccugcgcacccaggagagcgagugcgugugcaucaacggcacgugcaccguggucaugaccgacggguccgccagcggcaaggccgacaccaagauccucuucaucgaggagggcaagaucgugcacacgagcacccuguccgggagcgcgcagcacguggaggagugcuccugcuacccccgguaccccggcguccgcugcgugugccgggacaacuggaaggggagcaaccgcccgaucguggacaucaacaucaaggaccacuccaucgucagcuccuacgugugcagcggccuggugggcgacacgccccggaagaacgacuccagcuccagcucccacugccucgaccccaacaacgaggagggcgggaacggggucaagggcugggccuucgacgacgggaacgacguguggaugggccgcaccaucagcgagaagucccggcugggcuacgagaccuucaaggucaucgagggguggagcaaccccaaguccaagcugcagaucaaccgccaggugaucguggaccggggcaaccgcagcggguacuccggcaucuucagcgucgagggcaagagcugcaucaaccggugcuucuacguggagcucauccgcgggcggaaggaggagaacgaggugcuguggaccuccaacagcaucgucguguucugcggcaccuccgggaccuacggcacggggagcuggccggacggcgccgacaucaaccugaugcccaucuga

SEQ ID NO: 84056 - RNA, 1410 nt, Artificial Sequence; identical to SEQ ID NO: 80762
  derived and/or modified CDS sequence (opt1) from neuraminidase__InfluenzaA__ADN92512

SEQ ID NO: 84057 - RNA, 1410 nt, Artificial Sequence; identical to SEQ ID NO: 80762
  derived and/or modified CDS sequence (opt1) from neuraminidase__InfluenzaA__ADN92522

SEQ ID NO: 84058 - RNA, 1410 nt, Artificial Sequence; identical to SEQ ID NO: 80762
  derived and/or modified CDS sequence (opt1) from neuraminidase__InfluenzaA__ADN92532

SEQ ID NO: 84059 - RNA, 1410 nt, Artificial Sequence; identical to SEQ ID NO: 80762
  derived and/or modified CDS sequence (opt1) from neuraminidase__InfluenzaA__ADN92542

SEQ ID NO: 84060 - RNA, 1410 nt, Artificial Sequence; identical to SEQ ID NO: 80762
  derived and/or modified CDS sequence (opt1) from neuraminidase__InfluenzaA__ADN92552

SEQ ID NO: 84061 - RNA, 1410 nt, Artificial Sequence; identical to SEQ ID NO: 80762
  derived and/or modified CDS sequence (opt1) from neuraminidase__InfluenzaA__ADO00733

SEQ ID NO: 84062 - RNA, 1410 nt, Artificial Sequence
  derived and/or modified CDS sequence (opt1) from neuraminidase__InfluenzaA__ADO00743
augaaccccaaccagaagaucaucaccaucggcagcgugugcaugaccaucgggauggccaaccugauccuccagaucggcaacaucaucuccaucuggaucagccacuccauccagcuggggaaccagaaccagaucgagacgugcaaccagagcgucaucaccuacgagaacaacaccugggugaaccagaccuacgugaacaucuccaacacgaacuucgccgcgggccagagcgucguguccgccaagcuggccgggaacagcucccucugcccggugagcggcugggccaucuacuccaaggacaacagcauccgcaucggcuccaagggggacgucuucgugauccgggagcccuucaucagcugcagcccccuggagugccgcaccuucuuccugacccagggcgcccuccugaacgacaagcacuccaacgggaccaucaaggaccggucccccuaccgcacgcugaugagcugcccgaucggcgaggugcccucccccuacaacagccgguucgagagcgucgcgugguccgccagcgccugccacgacgggaucaacuggcucaccaucggcaucuccggccccgacaacggggccguggcggugcugaaguacaacggcaucaucaccgacaccaucaagagcuggcgcaacaacauccugcggacgcaggaguccgagugcgccugcgucaacgggagcugcuucaccgugaugaccgacggcccguccgacggccaggccagcuacaagaucuuccgcaucgagaaggggaagaucgugaaguccgucgagaugaacgcccccaacuaccacuacgaggagugcagcugcuaccccgacuccagcgagaucacgugcgugugccgggacaacuggcacggcuccaaccgccccugggugagcuucaaccagaaccucgaguaccagaucggguacaucugcuccggcaucuucggggacaacccgcggcccaacgacaagaccggcagcugcggccccgucuccagcaacggggccaacggcgugaagggguucuccuucaaguacggcaacgggguguggaucggccgcaccaagagcaucagcucccggaacggcuucgagaugaucugggaccccaacggguggaccggcaccgacaacaacuucagcauccgccaggacaucgucgggaucaacgagugguccggcuacagcggguccuucgugcagcacccggagcugacgggccuggacugcauccggcccugcuucuggguggagcucauccgcggccggcccaaggagaacaccaucuggaccagcggguccagcaucuccuucugcggcgucaacagcgacaccguggggugguccuggcccgacggcgcggagcugccguucacgaucgacaaguga

SEQ ID NO: 84063 - RNA, 1410 nt, Artificial Sequence; identical to SEQ ID NO: 81939
  derived and/or modified CDS sequence (opt1) from neuraminidase__InfluenzaA__ADO00753

SEQ ID NO: 84064 - RNA, 1410 nt, Artificial Sequence; identical to SEQ ID NO: 80762
  derived and/or modified CDS sequence (opt1) from neuraminidase__InfluenzaA__ADO12146

SEQ ID NO: 84065 - RNA, 1410 nt, Artificial Sequence; identical to SEQ ID NO: 80762
  derived and/or modified CDS sequence (opt1) from neuraminidase__InfluenzaA__ADO12156

SEQ ID NO: 84066 - RNA, 1410 nt, Artificial Sequence; identical to SEQ ID NO: 80762
  derived and/or modified CDS sequence (opt1) from neuraminidase__InfluenzaA__ADO12166

SEQ ID NO: 84067 - RNA, 1410 nt, Artificial Sequence; identical to SEQ ID NO: 80762
  derived and/or modified CDS sequence (opt1) from neuraminidase__InfluenzaA__ADO12176

SEQ ID NO: 84068 - RNA, 1410 nt, Artificial Sequence; identical to SEQ ID NO: 80762
  derived and/or modified CDS sequence (opt1) from neuraminidase__InfluenzaA__ADO12186

SEQ ID NO: 84069 - RNA, 1410 nt, Artificial Sequence; identical to SEQ ID NO: 80762
  derived and/or modified CDS sequence (opt1) from neuraminidase__InfluenzaA__ADO12196

SEQ ID NO: 84070 - RNA, 1410 nt, Artificial Sequence; identical to SEQ ID NO: 80762
  derived and/or modified CDS sequence (opt1) from neuraminidase__InfluenzaA__ADO12206

SEQ ID NO: 84071 - RNA, 1410 nt, Artificial Sequence; identical to SEQ ID NO: 80762
  derived and/or modified CDS sequence (opt1) from neuraminidase__InfluenzaA__ADO12216

SEQ ID NO: 84072 - RNA, 1410 nt, Artificial Sequence; identical to SEQ ID NO: 80762
  derived and/or modified CDS sequence (opt1) from neuraminidase__InfluenzaA__ADO12226

SEQ ID NO: 84073 - RNA, 1410 nt, Artificial Sequence; identical to SEQ ID NO: 80762
  derived and/or modified CDS sequence (opt1) from neuraminidase__InfluenzaA__ADO12246

SEQ ID NO: 84074 - RNA, 1410 nt, Artificial Sequence; identical to SEQ ID NO: 80762
  derived and/or modified CDS sequence (opt1) from neuraminidase__InfluenzaA__ADO12266

SEQ ID NO: 84075 - RNA, 1410 nt, Artificial Sequence
  derived and/or modified CDS sequence (opt1) from neuraminidase__InfluenzaA__ADO12276
augaaccccaaccagaagaucaucaccaucggcagcgugugcaugaccaucgggauggccaaccugauccuccagaucggcaacaucaucuccaucuggaucagccacuccauccagcuggggaaccagaaccagaucgagacgugcaaccagagcgucaucaccuacgagaacaacaccugggugaaccagaccuacgugaacaucuccaacacgaacuucgccgcgggccagagcgucguguccgugaagcuggccgggaacagcucccucugcccggucagcggcugggccaucuacuccaaggacaacagcauccgcaucggcuccaagggggacguguucgugauccgggagcccuucaucagcugcagcccccuggagugccgcaccuucuuccugacccagggcgcccuccugaacgacaagcacuccaacgggaccaucaaggaccggucccccuaccgcacgcugaugagcugcccgaucggcgagguccccucccccuacaacagccgguucgagagcguggccugguccgcgagcgccugccacgacgggaucaacuggcucaccaucggcaucuccggccccgacaacggggccguggccguccugaaguacaacggcaucaucaccgacaccaucaagagcuggcgcaacaacauccugcggacgcaggaguccgagugcgcgugcgugaacgggagcugcuucaccgugaugaccgacggcccguccgacggccaggccagcuacaagaucuuccgcaucgagaaggggaagaucgucaaguccguggagaugaacgcccccaacuaccacuacgaggagugcagcugcuaccccgacuccagcgagaucacgugcgugugccgggacaacuggcacggcuccaaccgccccugggucagcuucaaccagaaccucgaguaccagaucggguacaucugcuccggcaucuucggggacaacccgcggcccaacgacaagagcggcuccugcggccccgugagcuccaacggggccaacggcgugaagggguucagcuucaaguacggcaacggggucuggaucggccgcaccaagagcaucuccagccggaacggcuucgagaugaucugggaccccaacggguggaccggcaccgacaacaacuucuccaucaagcaggacaucguggggaucaacgaguggagcggcuacuccgggagcuucgugcagcacccggagcugaccggccuggacugcauccgccccugcuucugggucgagcucauccggggccgccccaaggagaacacgaucuggaccuccgggagcuccaucagcuucugcggcgugaacuccgacaccgucggguggagcuggcccgacggcgccgagcugccguucaccaucgacaaguga

SEQ ID NO: 84076 - RNA, 1410 nt, Artificial Sequence; identical to SEQ ID NO: 80762
  derived and/or modified CDS sequence (opt1) from neuraminidase__InfluenzaA__ADO12286

SEQ ID NO: 84077 - RNA, 1410 nt, Artificial Sequence; identical to SEQ ID NO: 80762
  derived and/or modified CDS sequence (opt1) from neuraminidase__InfluenzaA__ADO12296

SEQ ID NO: 84078 - RNA, 1410 nt, Artificial Sequence; identical to SEQ ID NO: 80762
  derived and/or modified CDS sequence (opt1) from neuraminidase__InfluenzaA__ADO12306

SEQ ID NO: 84079 - RNA, 1410 nt, Artificial Sequence
  derived and/or modified CDS sequence (opt1) from neuraminidase__InfluenzaA__ADO12316
augaaccccaaccagaagaucaucaccaucggcagcgugugcaugaccaucgggauggccaaccugauccuccagaucggcaacaucaucuccaucuggaucagccacuccauccagcuggggaaccagaaccagaucgagacgugcaaccagagcgucaucaccuacgagaacaacaccugggugaaccagaccuacgugaacaucuccaacacgaacuucgccgcgggccagagcgucguguccgugaagcuggccgggaacagcucccucugcccggucagcggcugggccaucuacuccaaggacaacagcauccgcaucggcuccaagggggacguguucgugauccgggagcccuucaucagcugcagcccccuggagugccgcaccuucuuccugacccagggcgcccuccugaacgacaagcacuccaacgggaccaucaaggaccggucccccuaccgcacgcugaugagcugcccgaucggcgagguccccucccccuacaacagccgguucgagagcguggccugguccgcgagcgccugccacgacgggaucaacuggcucaccaucggcaucuccggccccgacaacggggccguggccguccugaaguacaacggcaucaucaccgacaccaucaagagcuggcgcaacaacauccugcggacgcaggaguccgagugcgcgugcgugaacgggagcugcuucaccgugaugaccgacggcccguccgacggccaggccagcuacaagaucuuccgcaucgagaaggggaagaucgucaaguccguggagaugaacgcccccaacuaccacuacgaggagugcagcugcuaccccgacuccagcgagaucacgugcgugugccgggacaacuggcacggcuccaaccgccccugggucagcuucaaccagaaccucgaguaccagaucggguacaucugcuccggcaucuucggggacaacccgcggcccaacgacaagaccggcagcugcggccccguguccagcaacggggccaacggcgugaagggguucuccuucaaguacggcgacggggucuggaucggccgcaccaagagcaucagcucccggaacggcuucgagaugaucugggaccccaacggguggaccggcaccgacaacaacuucagcaucaagcaggacaucguggggaucaacgagugguccggcuacagcggguccuucgugcagcacccggagcugacgggccuggacugcauccgccccugcuucugggucgagcucauccggggccgccccaaggagaacaccaucuggaccagcggguccagcaucuccuucugcggcgugaacagcgacaccgucgggugguccuggcccgacggcgccgagcugccguucacgaucgacaaguga

SEQ ID NO: 84080 - RNA, 1410 nt, Artificial Sequence; identical to SEQ ID NO: 80762
  derived and/or modified CDS sequence (opt1) from neuraminidase__InfluenzaA__ADO12326

SEQ ID NO: 84081 - RNA, 1410 nt, Artificial Sequence; identical to SEQ ID NO: 80762
  derived and/or modified CDS sequence (opt1) from neuraminidase__InfluenzaA__ADO12336

SEQ ID NO: 84082 - RNA, 1410 nt, Artificial Sequence; identical to SEQ ID NO: 80762
  derived and/or modified CDS sequence (opt1) from neuraminidase__InfluenzaA__ADO12346

SEQ ID NO: 84083 - RNA, 1410 nt, Artificial Sequence; identical to SEQ ID NO: 80762
  derived and/or modified CDS sequence (opt1) from neuraminidase__InfluenzaA__ADO12356

SEQ ID NO: 84084 - RNA, 1410 nt, Artificial Sequence; identical to SEQ ID NO: 80762
  derived and/or modified CDS sequence (opt1) from neuraminidase__InfluenzaA__ADO12366

SEQ ID NO: 84085 - RNA, 1410 nt, Artificial Sequence; identical to SEQ ID NO: 80762
  derived and/or modified CDS sequence (opt1) from neuraminidase__InfluenzaA__ADO12376

SEQ ID NO: 84086 - RNA, 1410 nt, Artificial Sequence; identical to SEQ ID NO: 80762
  derived and/or modified CDS sequence (opt1) from neuraminidase__InfluenzaA__ADO12386

SEQ ID NO: 84087 - RNA, 1410 nt, Artificial Sequence; identical to SEQ ID NO: 80762
  derived and/or modified CDS sequence (opt1) from neuraminidase__InfluenzaA__ADO12396

SEQ ID NO: 84088 - RNA, 1410 nt, Artificial Sequence; identical to SEQ ID NO: 80762
  derived and/or modified CDS sequence (opt1) from neuraminidase__InfluenzaA__ADO12406

SEQ ID NO: 84089 - RNA, 1410 nt, Artificial Sequence; identical to SEQ ID NO: 81529
  derived and/or modified CDS sequence (opt1) from neuraminidase__InfluenzaA__ADO12416

SEQ ID NO: 84090 - RNA, 1410 nt, Artificial Sequence; identical to SEQ ID NO: 80762
  derived and/or modified CDS sequence (opt1) from neuraminidase__InfluenzaA__ADO12426

SEQ ID NO: 84091 - RNA, 1410 nt, Artificial Sequence; identical to SEQ ID NO: 80762
  derived and/or modified CDS sequence (opt1) from neuraminidase__InfluenzaA__ADO12436

SEQ ID NO: 84092 - RNA, 1410 nt, Artificial Sequence; identical to SEQ ID NO: 80762
  derived and/or modified CDS sequence (opt1) from neuraminidase__InfluenzaA__ADO12446

SEQ ID NO: 84093 - RNA, 1410 nt, Artificial Sequence; identical to SEQ ID NO: 80762
  derived and/or modified CDS sequence (opt1) from neuraminidase__InfluenzaA__ADO12456

SEQ ID NO: 84094 - RNA, 1410 nt, Artificial Sequence; identical to SEQ ID NO: 80762
  derived and/or modified CDS sequence (opt1) from neuraminidase__InfluenzaA__ADO12466

SEQ ID NO: 84095 - RNA, 1410 nt, Artificial Sequence; identical to SEQ ID NO: 80762
  derived and/or modified CDS sequence (opt1) from neuraminidase__InfluenzaA__ADO12476

SEQ ID NO: 84096 - RNA, 1410 nt, Artificial Sequence; identical to SEQ ID NO: 80762
  derived and/or modified CDS sequence (opt1) from neuraminidase__InfluenzaA__ADO12486

SEQ ID NO: 84097 - RNA, 1410 nt, Artificial Sequence; identical to SEQ ID NO: 80762
  derived and/or modified CDS sequence (opt1) from neuraminidase__InfluenzaA__ADO12496

SEQ ID NO: 84098 - RNA, 1410 nt, Artificial Sequence; identical to SEQ ID NO: 80762
  derived and/or modified CDS sequence (opt1) from neuraminidase__InfluenzaA__ADO12506

SEQ ID NO: 84099 - RNA, 1410 nt, Artificial Sequence; identical to SEQ ID NO: 80762
  derived and/or modified CDS sequence (opt1) from neuraminidase__InfluenzaA__ADO12516

SEQ ID NO: 84100 - RNA, 1410 nt, Artificial Sequence; identical to SEQ ID NO: 80762
  derived and/or modified CDS sequence (opt1) from neuraminidase__InfluenzaA__ADO12526

SEQ ID NO: 84101 - RNA, 1410 nt, Artificial Sequence; identical to SEQ ID NO: 80762
  derived and/or modified CDS sequence (opt1) from neuraminidase__InfluenzaA__ADO12536

SEQ ID NO: 84102 - RNA, 1410 nt, Artificial Sequence; identical to SEQ ID NO: 80762
  derived and/or modified CDS sequence (opt1) from neuraminidase__InfluenzaA__ADO12546

SEQ ID NO: 84103 - RNA, 1410 nt, Artificial Sequence; identical to SEQ ID NO: 80762
  derived and/or modified CDS sequence (opt1) from neuraminidase__InfluenzaA__ADO12556

SEQ ID NO: 84104 - RNA, 1410 nt, Artificial Sequence; identical to SEQ ID NO: 80762
  derived and/or modified CDS sequence (opt1) from neuraminidase__InfluenzaA__ADO12566

SEQ ID NO: 84105 - RNA, 1410 nt, Artificial Sequence; identical to SEQ ID NO: 80762
  derived and/or modified CDS sequence (opt1) from neuraminidase__InfluenzaA__ADO12576

SEQ ID NO: 84106 - RNA, 1410 nt, Artificial Sequence
  derived and/or modified CDS sequence (opt1) from neuraminidase__InfluenzaA__ADO12586
augaaccccaaccagaagaucaucaccaucggcagcgugugcaugaccaucgggauggccaaccugauccuccagaucggcaacaucaucuccaucuggaucagccacuccauccagcuggggaaccagaaccagaucgagacgugcaaccagagcgucaucaccuacgagaacaacaccugggugaaccagaccuacgugaacaucuccaacacgaacuucgccgcgggccagagcgucguguccgugaagcuggccgggaacagcucccucugcccggucagcggcugggccaucuacuccaaggacaacagcauccgcaucggcuccaagggggacguguucgugauccgggagcccuucaucagcugcagcccccuggagugccgcaccuucuuccugacccagggcgcccuccugaacgacaagcacuccaacgggaccaucaaggaccggucccccuaccgcacgcugaugagcugcccgaucggcgagguccccucccccuacaacagccgguucgagagcguggccugguccgcgagcgccugccacgacgggaucaacuggcucaccaucggcaucuccggccccgacagcggggccguggccguccugaaguacaacggcaucaucaccgacaccaucaaguccuggcgcaacaacauccugcggacgcaggagagcgagugcgcgugcgugaacggguccugcuucaccgugaugaccgacggcccgagcgacggccaggccuccuacaagaucuuccgcaucgagaaggggaagaucgucaagagcguggagaugaacgcccccaacuaccacuacgaggagugcuccugcuaccccgacagcuccgagaucacgugcgugugccgggacaacuggcacggcagcaaccgccccugggucuccuucaaccagaaccucgaguaccagaucggguacaucugcagcggcaucuucggggacaacccgcggcccaacgacaagaccggcuccugcggccccgugagcuccaacggggccaacggcgugaagggguucagcuucaaguacggcaacggggucuggaucggccgcaccaagagcaucuccagccggaacggcuucgagaugaucugggaccccaacggguggaccggcaccgacaacaacuucuccaucaagcaggacaucguggggaucaacgaguggagcggcuacuccgggagcuucgugcagcacccggagcugacgggccuggacugcauccgccccugcuucugggucgagcucauccggggccgccccaaggagaacaccaucuggaccuccgggagcuccaucagcuucugcggcgugaacuccgacaccgucggguggagcuggcccgacggcgccgagcugccguucacgaucgacaaguga

SEQ ID NO: 84107 - RNA, 1410 nt, Artificial Sequence; identical to SEQ ID NO: 84106
  derived and/or modified CDS sequence (opt1) from neuraminidase__InfluenzaA__ADO12596

SEQ ID NO: 84108 - RNA, 1410 nt, Artificial Sequence; identical to SEQ ID NO: 80762
  derived and/or modified CDS sequence (opt1) from neuraminidase__InfluenzaA__ADO12606

SEQ ID NO: 84109 - RNA, 1410 nt, Artificial Sequence; identical to SEQ ID NO: 80762
  derived and/or modified CDS sequence (opt1) from neuraminidase__InfluenzaA__ADO12616

SEQ ID NO: 84110 - RNA, 1410 nt, Artificial Sequence; identical to SEQ ID NO: 80762
  derived and/or modified CDS sequence (opt1) from neuraminidase__InfluenzaA__ADO12626

SEQ ID NO: 84111 - RNA, 1410 nt, Artificial Sequence; identical to SEQ ID NO: 80762
  derived and/or modified CDS sequence (opt1) from neuraminidase__InfluenzaA__ADO14355

SEQ ID NO: 84112 - RNA, 1401 nt, Artificial Sequence
  derived and/or modified CDS sequence (opt1) from neuraminidase__InfluenzaA__ADO21028
augaaccccaaccagaagaucaucgccaucggcagcgugucccugaccaucgccaccaucugcuuccucaugcagaucgcgauccuggccacgaccaugacccugcacuucaagcagaacgagugcagcaacccguccaacaaccaggucgugcccugcgagcccaccaucaucgagcgcaacaucgugcaccucaacagcacgaccaucgagaaggagaucugccccaaggucgccgaguacaagaacugguccaagccgcagugccagaucaccgggagcgcccccuucuccaagggcaacagcauccggcuguccgccgggggcgacaucugggugacccgcgagcccuacgugagcugcucccuggggaagugcuaccaguucgcgcucggccagggcacgacccugaagaacaagcacagcaacgggaccacccacgaccgggucccccaccgcacgcugcucauguccgagcugggcgugccguuccaccuggggaccaagcaggucugcaucgccuggagcuccagcuccugccacgacggcaaggccuggcuccacgugugcgugaccggggacgacaagaacgccaccgcgagcaucaucuacgacggcaugcugguggacuccaucggcagcuggagcaagaacauccugcggacgcaggaguccgagugcgucugcaucaacgggaccugcaccguggugaugaccgacggcagcgccuccgggaaggccgacacgcgcauccucuucauccgggagggcaagaucguccacaucagcccccuguccggcagcgcccagcacguggaggagugcuccugcuacccccgcuaccccgaggugcggugcgucugccgcgacaacuggaaggggagcaaccggccggugcuguacaucaacauggccgacuacuccaucgagagcuccuacgugugcagcggccucgucggggacacgccccgcaacgacgacuccuacagcuccagcaacugccgggaccccaacaacgagcgcggcgcgcccggggugaagggcugggccuucgacaacggcaacgacaucuggauggggcggaccaucaaggaggacucccgcagcggcuacgagaccuuccggguggucgggggcuggaccaccgccaacuccaagagccagaucaaccgccaggugaucgucgacagcgacaacugguccggguacagcggcaucuucuccguggagggcaagaacugcaucaaccggugcuucuacguggagcugauccgcgggcggccgcaggagacccgcgucugguggaccagcaacuccaucaucguguucugcggcacgagcgggaccuacggcaccggguccuggcccgacggcgccaacaucaacuucaugcccaucuga

SEQ ID NO: 84113 - RNA, 1401 nt, Artificial Sequence
  derived and/or modified CDS sequence (opt1) from neuraminidase__InfluenzaA__ADO21039
augaaccccaaccagaagaucaucgccaucggcagcgugucccugaccaucgccaccaucugcuuccucaugcagaucgcgauccuggccacgaccaugacccugcacuucaagcagaacgagugcagcaacccguccaacaaccaggucgugcccugcgagcccaccaucaucgagcgcaacaucgugcaccucaacagcacgaccaucgagaaggagaucugccccaaggucgccgaguacaagaacugguccaagccgcagugccagaucaccgggagcgcccccuucuccaagggcaacagcauccggcuguccgccgggggcgacaucugggugacccgcgagcccuacgugagcugcucccuggggaagugcuaccaguucgcgcucggccagggcacgacccugaagaacaagcacagcaacgggaccacccacgaccgggacccccaccgcacgcugcucauguccgagcugggcgucccguuccaccuggggaccaagcaggucugcaucgccuggagcuccagcuccugccacgacggcaaggccuggcuccacgugugcgugaccggggacgacaagaacgccaccgcgagcaucaucuacgacggcaugcugguggacuccaucggcagcuggagcaagaacauccugcggacgcaggaguccgagugcgugugcaucaacgggaccugcaccgucgugaugaccgacggcagcgccuccgggaaggccgacacgcgcauccucuucauccgggagggcaagaucgugcacaucagcccccuguccggcagcgcccagcacgucgaggagugcuccugcuacccccgcuaccccgaggugcggugcgugugccgcgacaacuggaaggggagcaaccggccgguccuguacaucaacauggccgacuacaccaucgaguccagcuacgugugcuccggccucgugggggacacgccccgcaacgacgacagcuacuccagcuccaacugccgggaccccaacaacgagcgcggcgcgcccggggucaagggcugggccuucgacaacggcaacgacaucuggauggggcggaccaucaaggaggacagccgcuccggcuacgagaccuuccggguggucgggggcuggaccaccgccaacagcaagucccagaucaaccgccaggugaucguggacagcgacaacuggagcggguacuccggcaucuucagcgucgagggcaagaacugcaucaaccggugcuucuacguggagcugauccgcgggcggccgcaggagacccgcgugugguggacguccaacagcaucaucgucuucugcggcaccuccgggaccuacggcaccgggagcuggcccgacggcgccaacaucaacuucaugcccaucuga

SEQ ID NO: 84114 - RNA, 1401 nt, Artificial Sequence
  derived and/or modified CDS sequence (opt1) from neuraminidase__InfluenzaA__ADO21050
augaaccccaaccagaagaucaucgccaucggcagcgugucccugaccaucgccaccaucugcuuccucaugcagaucgcgauccuggccacgaccaugacccugcacuucaagcagaacgagugcagcaacccguccaacaaccaggucgugcccugcgagcccaccaucaucgagcgcaacaucgugcaccucaacagcacgaccaucgagaaggagaucugccccaaggucgccgaguacaagaacugguccaagccgcagugccagaucaccgggagcgcccccuucuccaagggcaacagcauccggcuguccgccgggggcgacaucugggugacccgcgagcccuacgugagcugcucccuggggaagugcuaccaguucgcgcucggccagggcacgacccugaagaacaagcacagcaacgggaccacccacgaccggggcccccaccgcacgcugcucauguccgagcugggggucccguuccaccugggcaccaagcaggucugcaucgccuggagcuccagcuccugccacgacgggaaggccuggcuccacgugugcgugaccggcgacgacaagaacgccaccgcgagcaucaucuacgacggcaugcugguggacuccaucgggagcuggagcaagaacauccugcggacgcaggaguccgagugcgugugcaucaacgggaccugcaccgucgugaugaccgacggcagcgccuccggcaaggccgacacgcgcauccucuucauccgggagggcaagaucgugcacaucagcccccuguccgggagcgcccagcacgucgaggagugcuccugcuacccccgcuaccccgaggugcggugcgugugccgcgacaacuggaagggcagcaaccggccgguccuguacaucaacauggccgacuacuccaucgagagcuccuacgugugcagcgggcucgugggcgacacgccccgcaacgacgacuccuacagcuccagcaacugccgggaccccaacaacgaguccggggcgcccggcgucaagggcugggccuucgacaacgggaacgacaucuggaugggccgcaccaucaaggaggacagccgguccggguacgagaccuuccgcguggugggcggguggaccaccgccaacagcaagagccagaucaaccggcaggucaucguggacuccgacaacuggagcggcuacuccggcaucuucagcgucgaggggaagaacugcaucaaccgcugcuucuacguggagcugauccggggccgcccgcaggagacccgggugugguggaccuccaacagcaucaucgucuucugcgggacguccggcaccuacgggaccggcagcuggcccgacggcgccaacaucaacuucaugcccaucuga

SEQ ID NO: 84115 - RNA, 1410 nt, Artificial Sequence
  derived and/or modified CDS sequence (opt1) from neuraminidase__InfluenzaA__ADO25095
augaaccccaaccagaagaucaucaccaucggcagcgugugcaugaccaucgggauggccaaccugauccuccagaucggcaacaucaucuccaucuggaucagccacuccauccagcuggggaaccagaaccagaucgagacgugcaaccagagcaucaucaccuacgagaacaacaccugggucaaccagaccuacgugaacaucuccaacacgaacuucgccgcgggccagagcguggucuccgugaagcuggccgggaacagcucccucugcccggugagcggcugggccaucuacuccaaggacaacagcauccgcaucggcuccaagggggacgucuucgugauccgggagcccuucaucagcugcagcccccuggagugccgcaccuucuuccugacccagggcgcccuccugaacgacaagcacuccaacgggaccaucaaggaccggucccccuaccgcacgcugaugagcugcccgaucggcgaggugcccucccccuacaacagccgguucgagagcgucgccugguccgcgagcgccugccacgacgggaucaacuggcucaccaucggcaucuccggccccgacaacggggccguggccgugcugaaguacaacggcaucaucaccgacaccaucaagagcuggcgcaacaacauccugcggacgcaggaguccgagugcgcgugcgucaacgggagcugcuucaccgugaugaccgacggcccguccgacggccaggccagcuacaagaucuuccgcaucgagaaggggaagaucgugaaguccgucgagaugaacgcccccaacuaccacuacgaggagugcagcugcuaccccgacuccagcgagaucacgugcgugugccgggacaacuggcacggcuccaaccgccccugggugagcuucaaccagaaccucgaguaccagaucggguacaucugcuccggcaucuucggggacaacccgcggcccaacgacaagaccggcagcugcggccccgucuccagcaacggggccaacggcgugaagggguucuccuucaaguacggcaacgggguguggaucggccgcaccaagagcaucagcucccggagcggcuucgagaugaucugggaccccaacggguggaccggcaccgacaacaacuucuccaucaagcaggacaucgucgggaucaacgaguggagcggcuacuccgggagcuucgugcagcacccggagcugacgggccuggacugcauccgccccugcuucuggguggagcucauccggggccgccccaaggagaacaccaucuggaccuccgggagcuccaucagcuucugcggcgucaacuccgacaccgugggguggagcuggcccgacggcgccgagcugccguucacgaucgacaaguga

SEQ ID NO: 84116 - RNA, 1410 nt, Artificial Sequence
  derived and/or modified CDS sequence (opt1) from neuraminidase__InfluenzaA__ADO25105
augaaccccaaccagaagaucaucaccaucggcagcgugugcaugaccaucgggauggccaaccugauccuccagaucggcaacaucaucuccaucuggaucagccacuccauccagcuggggaaccagaaccagaucggcacgugcaaccagagcgucaucaccuacgagaccaacaccugggugaaccagacguacgugaacaucuccaacaccaacuucgccgcggggcagagcgucguguccgugaagcuggccggcaacagcucccucugcccggucagcggcugggccaucuacuccaaggacaacagcauccgcaucggguccaagggcgacguguucgugauccgggagcccuucaucagcugcagcccccuggagugccgcaccuucuuccugacccagggggcccuccugaacgacaagcacuccaacggcacgaucaaggaccggucccccuaccgcacccugaugagcugcccgaucggggagguccccucccccuacaacagccgguucgagagcguggccugguccgcgagcgccugccacgacggcaucaacuggcucaccaucggcaucuccgggcccgacaacggcgccguggccguccugaaguacaacgggaucaucaccgacacgaucaagagcuggcgcaacaacauccugcggacccaggaguccgagugcgcgugcgugaacggcagcugcuucaccgugaugaccgacggcccguccgaccgccaggccagcuacaagaucuuccggaucgagaaggggaagaucgucaaguccguggagaugaacgcccccaacuaccacuacgaggagugcagcugcuaccccgacuccagcgagaucacgugcgugugccgcgacaacuggcacggcuccaaccggcccugggucagcuucaaccagaaccucgaguaccagaucggguacaucugcuccggcaucuucggggacaacccgcgccccaacgacaagaccggcagcugcggccccguguccagcaacggggccaacggcgugaagggguucuccuucaaguacggcaacggggucuggaucggccggaccaagagcaucagcucccgcaacggcuucgagaugaucugggaccccaacggguggaccggcacggacaacaacuucagcaucaagcaggacaucguggggaucaacgagugguccggcuacagcggguccuucgugcagcacccggagcugaccggccuggacugcauccggcccugcuucugggucgagcucauccgcggccggcccaaggagaacaccaucuggaccagcggguccagcaucuccuucugcggcgugaacagcgacacggucgggugguccuggcccgacggcgccgagcugccguucaccaucgacaaguga

SEQ ID NO: 84117 - RNA, 1410 nt, Artificial Sequence; identical to SEQ ID NO: 82543
  derived and/or modified CDS sequence (opt1) from neuraminidase__InfluenzaA__ADO25115

SEQ ID NO: 84118 - RNA, 1410 nt, Artificial Sequence; identical to SEQ ID NO: 82543
  derived and/or modified CDS sequence (opt1) from neuraminidase__InfluenzaA__ADO25125

SEQ ID NO: 84119 - RNA, 1410 nt, Artificial Sequence
  derived and/or modified CDS sequence (opt1) from neuraminidase__InfluenzaA__ADO25135
augaaccccaaccagaagaucaucaccaucggcagcgugugcaugaccaucgggauggccaaccugguccuccagaucggcaacaucaucuccaucuggaucagccacuccauccagcuggggaaccagaaccagaucgagacgugcaaccagagcgugaucaccuacgagaacaacaccugggugaaccagaccuacgucaacaucuccaacacgaacuucgccgcgggccagagcgugguguccgucaagcuggccgggaacagcucccucugcccggugagcggcugggccaucuacuccaaggacaacagcauccgcaucggcuccaagggggacguguucgucauccgggagcccuucaucagcugcagcccccuggagugccgcaccuucuuccugacccagggcgcccuccugaacgacaagcacuccaacgggaccaucaaggaccggucccccuaccgcacgcugaugagcugcccgaucggcgaggugcccucccccuacaacagccgguucgagagcguggccugguccgcgagcgccugccacgacgggaucaacuggcucaccaucggcaucuccggccccgacaacggggccgucgccgugcugaaguacaacggcaucaucaccgacaccaucaagagcuggcgcaacaacauccugcggacgcaggaguccgagugcgcgugcgugaacgggagcugcuucaccgucaugaccgacggcccguccgacggccaggccagcuacaagaucuuccgcaucgagaaggggaagaucgugaaguccguggagaugaacgcccccaacuaccacuacgaggagugcagcugcuaccccgacuccagcgagaucacgugcgucugccgggacaacuggcacggcuccaaccgccccugggugagcuucaaccagaaccucgaguaccagaucggguacaucugcuccggcaucuucggggacaacccgcggcccaacgacaagaccggcagcugcggccccguguccagcaacggggccaacggcgucaagggguucuccuucaaguacggcaacgggguguggaucggccgcaccaagagcaucagcucccggaacggcuucgagaugaucugggaccccaacggguggaccggcaccgacaacaacuucagcaucaagcaggacaucguggggaucaacgagugguccggcuacagcggguccuucguccagcacccggagcugacgggccuggacugcauccgccccugcuucuggguggagcucauccggggccgccccaaggagaacaccaucuggaccagcggguccagcaucuccuucugcggcgucaacagcgacaccguggggugguccuggcccgacggcgccgagcugccguucacgaucgacaaguga

SEQ ID NO: 84120 - RNA, 1410 nt, Artificial Sequence; identical to SEQ ID NO: 82113
  derived and/or modified CDS sequence (opt1) from neuraminidase__InfluenzaA__ADO25145

SEQ ID NO: 84121 - RNA, 1410 nt, Artificial Sequence; identical to SEQ ID NO: 80762
  derived and/or modified CDS sequence (opt1) from neuraminidase__InfluenzaA__ADO25155

SEQ ID NO: 84122 - RNA, 1410 nt, Artificial Sequence; identical to SEQ ID NO: 80762
  derived and/or modified CDS sequence (opt1) from neuraminidase__InfluenzaA__ADO25165

SEQ ID NO: 84123 - RNA, 1410 nt, Artificial Sequence; identical to SEQ ID NO: 80762
  derived and/or modified CDS sequence (opt1) from neuraminidase__InfluenzaA__ADO25175

SEQ ID NO: 84124 - RNA, 1410 nt, Artificial Sequence
  derived and/or modified CDS sequence (opt1) from neuraminidase__InfluenzaA__ADO25185
augaaccccaaccagaagaucaucaccaucggcagcgugugcaugaccaucgggauggccaaccugauccuccagaucggcaacaucaucuccaucuggaucagccacuccauccagcuggggaaccagaaccagaucgagacgugcaaccagagcgucaucaccuacgagaacaacaccugggugaaccagaccuacgugaacaucuccaacacgaacuucgccgcgggccagagcgucguguccgugaagcuggccgggaacagcucccucugcccggucagcggcugggccaucuacuccaaggacaacagcauccgcaucggcuccaagggggacguguucgugauccgggagcccuucaucagcugcagcccccuggagugccgcaccuucuuccugacccagggcgcccuccugaacgacaagcacuccaacgggaccaucaaggaccggucccccuaccgcacgcugaugagcugcccgaucggcgagguccccucccccuacaacagccgguucgagagcguggccugguccgcgagcgccugccacgacgggaucaacuggcucaccaucggcaucuccggccccgacaacggggccguggccguccugaaguacaacggcaucaucaccgacaccaucaagagcuggcgcaacaacauccugcggacgcaggaguccgagugcgcgugcgugaacgggagcugcuucaccgugaugaccgacggcccguccgacggccaggccagcuacaagaucuuccgcaucgagaaggggaagaucgucaaguccguggagaugaacgcccccaacuaccacuacgaggagugcagcugcuaccccgacuccagcgagaucacgugcgugugccgggacaacuggcacggcuccaaccgccccugggucagcuucaaccagaaccucgaguaccagaucggguacaucugcuccggcaucuucggggacaacccgcggcccaacgacaagaccggcagcugcggccccguguccagcaacggggccaacggcgugaagggguucuccuucaaguacggcaacggggucuggaucggccgcaccaagagcaugagcucccggaacggcuucgagaugaucugggaccccaacggguggaccggcaccgacaacaacuucagcaucaagcaggacaucguggggaucaacgagugguccggcuacagcggguccuucgugcagcacccggagcugacgggccuggacugcauccgccccugcuucugggucgagcucauccggggccgccccaaggagaacaccaucuggaccagcggguccagcaucuccuucugcggcgugaacagcgacaccgucgggugguccuggcccgacggcgccgagcugccguucacgaucgacaaguga

SEQ ID NO: 84125 - RNA, 1410 nt, Artificial Sequence; identical to SEQ ID NO: 83191
  derived and/or modified CDS sequence (opt1) from neuraminidase__InfluenzaA__ADO25195

SEQ ID NO: 84126 - RNA, 1410 nt, Artificial Sequence; identical to SEQ ID NO: 81899
  derived and/or modified CDS sequence (opt1) from neuraminidase__InfluenzaA__ADO25205

SEQ ID NO: 84127 - RNA, 1410 nt, Artificial Sequence; identical to SEQ ID NO: 82113
  derived and/or modified CDS sequence (opt1) from neuraminidase__InfluenzaA__ADO25215

SEQ ID NO: 84128 - RNA, 1410 nt, Artificial Sequence; identical to SEQ ID NO: 80762
  derived and/or modified CDS sequence (opt1) from neuraminidase__InfluenzaA__ADO25225

SEQ ID NO: 84129 - RNA, 1410 nt, Artificial Sequence; identical to SEQ ID NO: 82113
  derived and/or modified CDS sequence (opt1) from neuraminidase__InfluenzaA__ADO25235

SEQ ID NO: 84130 - RNA, 1410 nt, Artificial Sequence; identical to SEQ ID NO: 80762
  derived and/or modified CDS sequence (opt1) from neuraminidase__InfluenzaA__ADO25245

SEQ ID NO: 84131 - RNA, 1410 nt, Artificial Sequence; identical to SEQ ID NO: 80762
  derived and/or modified CDS sequence (opt1) from neuraminidase__InfluenzaA__ADO25255

SEQ ID NO: 84132 - RNA, 1410 nt, Artificial Sequence; identical to SEQ ID NO: 82543
  derived and/or modified CDS sequence (opt1) from neuraminidase__InfluenzaA__ADO25265

SEQ ID NO: 84133 - RNA, 1410 nt, Artificial Sequence; identical to SEQ ID NO: 82354
  derived and/or modified CDS sequence (opt1) from neuraminidase__InfluenzaA__ADO25275

SEQ ID NO: 84134 - RNA, 1410 nt, Artificial Sequence; identical to SEQ ID NO: 82113
  derived and/or modified CDS sequence (opt1) from neuraminidase__InfluenzaA__ADO25285

SEQ ID NO: 84135 - RNA, 1413 nt, Artificial Sequence
  derived and/or modified CDS sequence (opt1) from neuraminidase__InfluenzaA__ADO27623
augaaccccaaccagaagaucaucaccaucggcagcaucuccaucgccaucgggaucaucagccugaugcuccagaucggcaacaucaucuccaucugggccagccacuccauccagaccgggagccagaacaacacgggcaucugcaaccagcgcaucaucaccuacgagaacuccaccugggugaaccacaccuacgucaacaucaacaacacgaacguggcggccggggaggacaagaccagcgugacccuggccggcaacuccagccugugcuccaucagcggcugggccaucuacaccaaggacaacuccauccggaucgggagcaagggcgacgucuucgugauccgcgagccguucaucuccugcagccaccucgagugccggacguucuuccugacccagggggcccugcucaacgacaagcacuccaacggcaccgugaaggaccgcagccccuaccgggcgcugauguccugcccccugggggaggcccccagcccguacaacagcaaguucgaguccgucgccuggagcgccuccgcgugccacgacggcaugggcuggcucaccaucgggaucagcggccccgacaacggggccguggccgugcugaaguacaacggcaucaucacgggcaccaucaaguccuggaagaagcagauccugcgcacccaggagagcgagugcgucugcaugaacggguccugcuucaccaucaugacggacggccccagcaacaaggccgccuccuacaagaucuucaagaucgagaaggggaaggugaccaagagcaucgagcucaacgcgcccaacuucuacuacgaggagugcuccugcuacccggacaccggcaucgugaugugcgucugccgggacaacuggcacgggagcaaccgccccuggguguccuucaaccagaaccuggacuaccagaucggcuacaucugcagcggcguguucggggacaacccccggcccgaggacggcgagggguccugcaacccggucaccguggacggcgccaacggggugaagggcuucagcuacaaguacggcaacggggucuggaucggccgcacgaaguccaaccggcugcgcaagggguucgagaugaucugggaccccaacggcuggaccaacaccgacagcgacuucuccgugaagcaggacguggucgccaucaccgacuggagcggguacagcggcuccuucgugcagcaccccgagcucacgggccuggacugcauccggcccugcuucuggguggagcugguccgcgggcucccgcgggagaacaccaccaucuggaccagcggcuccagcaucuccuucugcggggugaacagcgacacggccaacugguccuggcccgacggcgccgagcugcccuucaccaucgacaaguga

SEQ ID NO: 84136 - RNA, 1410 nt, Artificial Sequence; identical to SEQ ID NO: 80762
  derived and/or modified CDS sequence (opt1) from neuraminidase__InfluenzaA__ADO30410

SEQ ID NO: 84137 - RNA, 1410 nt, Artificial Sequence; identical to SEQ ID NO: 82113
  derived and/or modified CDS sequence (opt1) from neuraminidase__InfluenzaA__ADO30420

SEQ ID NO: 84138 - RNA, 1410 nt, Artificial Sequence; identical to SEQ ID NO: 81470
  derived and/or modified CDS sequence (opt1) from neuraminidase__InfluenzaA__ADP95343

SEQ ID NO: 84139 - RNA, 1410 nt, Artificial Sequence; identical to SEQ ID NO: 80752
  derived and/or modified CDS sequence (opt1) from neuraminidase__InfluenzaA__ADP95353

SEQ ID NO: 84140 - RNA, 1410 nt, Artificial Sequence; identical to SEQ ID NO: 80752
  derived and/or modified CDS sequence (opt1) from neuraminidase__InfluenzaA__ADP95363

SEQ ID NO: 84141 - RNA, 1410 nt, Artificial Sequence; identical to SEQ ID NO: 80752
  derived and/or modified CDS sequence (opt1) from neuraminidase__InfluenzaA__ADP95373

SEQ ID NO: 84142 - RNA, 1410 nt, Artificial Sequence; identical to SEQ ID NO: 80752
  derived and/or modified CDS sequence (opt1) from neuraminidase__InfluenzaA__ADP95383

SEQ ID NO: 84143 - RNA, 1410 nt, Artificial Sequence; identical to SEQ ID NO: 80752
  derived and/or modified CDS sequence (opt1) from neuraminidase__InfluenzaA__ADP95393

SEQ ID NO: 84144 - RNA, 1410 nt, Artificial Sequence
  derived and/or modified CDS sequence (opt1) from neuraminidase__InfluenzaA__ADQ43774
augaaccccaaccagaagaucaucaccaucggcagcgggugcaugaccaucggcauggccaaccugauccuccagaucgggaacaucaucuccaucuggaucagccacuccauccagcugggcaaccagaaccagaucgagacgugcaaccagagcgugaucaccuacgagaacaacaccugggucaaccagaccuacgugaacaucuccaacacgaacuucgccgcggggcagagcguggucuccgugaagcuggccggcaacagcucccucugcccggugagcggcugggccaucuacuccaaggacaacagcauccgcaucggguccaagggcgacgucuucgugauccgggagcccuucaucagcugcagcccccuggagugccgcaccuucuuccugacccagggggcccuccugaacgacaagcacuccaacggcaccaucaaggaccggucccccuaccgcacgcugaugagcugcccgaucggggaggugcccucccccuacaacagccgguucgagagcgucgccugguccgcgagcgccugccacgacggcaucaacuggcucaccaucggcaucuccgggcccgacaacggcgccguggccgugcugaaguacaacgggaucaucaccgacaccaucaagagcuggcgcaacaacauccugcggacgcaggaguccgagugcgcgugcgucaacggcagcugcuucaccgugaugaccgacggcccguccgacgggcaggccagcuacaagaucuuccgcaucgagaagggcaagaucgugaaguccgucgagaugaaggcccccaacuaccacuacgaggagugcagcugcuaccccgacuccagcgagaucacgugcgugugccgggacaacuggcacggguccaaccgccccugggugagcuucaaccagaaccucgaguaccagaucggcuacaucugcuccgggaucuucggcgacaacccgcggcccaacgacaagaccggcagcugcgggcccgucuccagcaacggcgccaacggggugaagggcuucuccuucaaguacgggaacggcguguggaucggccgcaccaagagcaucagcucccggaacggguucgagaugaucugggaccccaacggcuggaccgggaccgacaacaacuucagcaucaagcaggacaucgucggcaucaacgagugguccggguacagcggcuccuucgugcagcacccggagcugacgggccuggacugcauccgccccugcuucuggguggagcucauccgggggcgccccaaggagaacaccaucuggaccagcggcuccagcaucuccuucugcggggucaacagcgacaccgugggcugguccuggcccgacggcgccgagcugccguucacgaucgacaaguga

SEQ ID NO: 84145 - RNA, 1410 nt, Artificial Sequence
  derived and/or modified CDS sequence (opt1) from neuraminidase__InfluenzaA__ADQ92578
augaaccccaaccagaagaucaucaccaucggcagcgugucccugaccaucagcacgaucugcuucuucaugcagaucgccauccucaucaccaccgucacccugcacuucaagcaguacgaguucaacuccccgcccaacaaccaggugauccugugcgagcccacgaucaucgagcgcaacaucaccgagaucguguaccucaccaacgccaccaucgagaaggagaucugccccaagcuggcggaguaccggaacuggagcaagccgcagugcgacaucacgggguucgcccccuucuccaaggacaacagcauccgccuguccgccggcggggacaucugggucacccgggagcccuacgugagcugcgaccccgacaagugcuaccaguucgcccucggccaggggaccacccugaacaacgugcacuccaacaacacgguccgcgaccggaccccguaccgcacccugcucaugaacgagcugggcgugcccuuccaccugggcaccaagcaggucugcaucgccuggagcuccagcuccugccacgacgggaaggcguggcuccacgugugcaucacgggcgacgacaagaacgccaccgccagcuucaucuacaacgggcggcugguggacuccguggucagcugguccaaggagauccugcgcacccaggagagcgagugcgugugcaucaacgggaccugcacgguggucaugaccgacggguccgccagcggcaaggcggacaccaagauccucuucaucgaggagggcaagaucgugcacaccagcacgcuguccgggagcgcccagcacguggaggagugcuccugcuacccccgguaccccggcguccgcugcgugugccgggacaacuggaaggggagcaaccgcccgaucguggacaucaacaucaaggaccacuccaucgucagcuccuacgugugcagcggccuggugggcgacacgccccggaagaacgacuccagcuccagcucccacugccucgaccccaacaacgaggagggcggccacggggucaagggcugggccuucgacgacgggaacgacguguggaugggccgcaccaucagcgagaagucccggcugggcuacgagaccuucaaggucaucgagggguggagcaaccccaaguccaagcugcagaucaaccgccaggugaucguggaccggggcaaccgcagcggguacuccggcaucuucagcgucgagggcaagagcugcaucaaccggugcuucuacguggagcucauccgcgggcggaaggaggagaccgaggugcuguggaccuccaacagcaucgucguguucugcggcaccuccgggaccuacggcacggggagcuggccggacggcgccgacaucaaccugaugcccaucuga

SEQ ID NO: 84146 - RNA, 1410 nt, Artificial Sequence; identical to SEQ ID NO: 80623
  derived and/or modified CDS sequence (opt1) from neuraminidase__InfluenzaA__ADR32364

SEQ ID NO: 84147 - RNA, 1410 nt, Artificial Sequence
  derived and/or modified CDS sequence (opt1) from neuraminidase__InfluenzaA__ADT64478
augaaccccaaccagaagaucaucaccaucggcagcgugugcaugaccaucgggauggccaaccugauccuccagaucggcaacaucaucuccaucuggaucgggcacagcauccagcugggcaaccagaaccagaucgagacgugcaaccaguccgucaucaccuacgagaacaacaccugggugaaccagaccuacgugaacaucagcaacacgaacuucgccgcggggcaguccgucgugagcgugaagcuggccggcaacuccagccucugcccggucuccggcugggccaucuacagcaaggacaacuccgugcgcaucgggagcaagggcgacguguucgucauccgggagcccuucaucuccugcagcccccuggagugccgcaccuucuuccugacccagggggcccuccugaacgacaagcacuccaacggcaccaucaaggaccggagccccuaccgcacgcugauguccugcccgaucggggaggugcccagccccuacaacucccgguucgagagcguggccuggagcgcguccgccugccacgacggcaucaacuggcucaccaucggcaucagcgggcccgacaacggcgccgucgccgugcugaaguacaacgggaucaucaccgacaccaucaaguccuggcgcaacaacauccugcggacgcaggagagcgagugcgcgugcgugaacggcuccugcuucaccgucaugaccgacggcccgagcaacgggcaggccuccuacaagaucuuccgcaucgagaagggcaagaucgucaagagcguggagaugaacgcccccaacuaccacuacgaggagugcuccugcuaccccgacagcuccgagaucacgugcgugugccgggacaacuggcacgggagcaaccgccccuggguguccuucaaccagaaccucgaguaccagaucggcuacaucugcagcgggaucuucggcgacaacccgcggcccaacgacaagaccggcuccugcgggcccgugagcuccaacggcgccaacggggucaagggcuucagcuucaaguacgggaacggcguguggaucggccgcaccaaguccaucagcagccggaacggguucgagaugaucugggaccccaacggcuggaccgggaccgacaacaacuucuccaucaagcaggacaucgugggcaucaacgaguggagcggguacuccggcagcuucguccagcacccggagcugacgggccuggacugcauccgccccugcuucuggguggagcucauccgggggcgccccaaggagaacaccaucuggaccuccggcagcuccaucagcuucugcggggucaacuccgacaccgugggcuggagcuggcccgacggcgccgagcugccguucacgaucgacaaguga

SEQ ID NO: 84148 - RNA, 1410 nt, Artificial Sequence
  derived and/or modified CDS sequence (opt1) from neuraminidase__InfluenzaA__ADT78889
augaaccccaaccagaagaucaucaccaucggcagcgugucccugaccaucgccacggucugcuuccucaugcagaucgccauccuggugaccaccgugacccugcacuucaagcagcacgagugcgacagcccggcguccaaccaggucaugcccugcgagcccaucaucaucgagcgcaacaucacggagaucguguaccucaacaacaccaccaucgagaaggagaucugccccaagguggucgaguaccggaacuggagcaagccgcagugccagaucaccggguucgcccccuucuccaaggacaacagcauccgccuguccgccggcggggacaucugggugacgcgggagcccuacgugagcugcgaccccggcaagugcuaccaguucgcccuggggcagggcaccacccucgacaacaagcacuccaacgacaccauccacgaccgcaucccgcaccggacgcugcugaugaacgagcucggcguccccuuccaccuggggacccgccaggugugcguggccuggagcuccagcuccugccacgacggcaaggcguggcugcacgucugcgugaccggggacgacaagaacgccaccgccagcuucaucuacgacggccggcucguggacuccaucgggagcuggucccagaacauccugcgcacgcaggagagcgagugcgucugcaucaacgggaccugcaccguggugaugaccgacggcuccgccagcgggcgggcggacacgcgcauccuguucaucgaggagggcaagaucguccacaucagcccccucuccgggagcgcccagcacguggaggagugcuccugcuacccccgguacccggacgugcgcugcaucugccgggacaacuggaagggcagcaaccgccccgucaucgacaucaacauggaggacuacuccaucgacagcuccuacgugugcagcggccuggugggggacacgccccggaacgacgaccgcuccagcaacuccaacugccgggaccccaacaacgagcgcggcaacccgggggucaagggcugggccuucgacaacggggacgacguguggaugggccggaccaucagcaaggaccugcgcuccggcuacgagaccuucaaggucaucgggggcuggagcacccccaacuccaagagccagaucaaccgccaggugaucguggacuccaacaacuggagcggguacuccggcaucuucagcgucgagggcaagagcugcaucaaccggugcuucuacguggagcucauccgcggccggcagcaggagacccgcgugugguggaccuccaacagcaucgucguguucugcggcaccuccgggacguacggcaccgggagcuggcccgacggcgccaacaucuccuucaugcccaucuga

SEQ ID NO: 84149 - RNA, 1410 nt, Artificial Sequence
  derived and/or modified CDS sequence (opt1) from neuraminidase__InfluenzaA__ADT78899
augaaccccaaccagaagaucaucaccaucggcagcgugucccugaccaucgccacggucugcuuccucaugcagaucgccauccuggcgaccaccgugacccugcacuucaagcagcacgagugcgacagcccggccuccaaccaggugaugcccugcgagcccaucaucaucgagcgcaacaucacggagaucgucuaccucaacaacaccaccaucgagaaggagaucugccccgaggugguggaguaccggaacuggagcaagccgcagugccagaucaccggguucgcccccuucuccaaggacaacagcauccgccuguccgccggcggggacaucugggucaugcgggagcccuacgugagcugcaaccccggcaagugcuaccaguucgcccuggggcagggcacgacccucgacaacaagcacuccaacggcaccauccacgaccgcaucccgcaccggacccugcugaugaacgagcucggggugcccuuccaccugggcacgaagcaggucugcguggcguggagcuccagcuccugccacgacgggaaggccuggcugcacgugugcgucaccggcgacgaccgcaacgccaccgccagcuucaucuacgacgggcggcucguggacuccaucggcagcuggucccagaacauccugcgcacccaggagagcgagugcgugugcaucaacggcacgugcaccgucgugaugaccgacggguccgcgagcggccgggccgacacccgcauccuguucaucaaggaggggaagaucgugcacaucagcccccucuccggcagcgcccagcacaucgaggagugcuccugcuacccccgguacccggacguccgcugcaucugccgggacaacuggaagggcagcaaccgccccgugaucgacaucaacauggaggacuacuccaucgacagcuccuacgugugcagcgggcuggucggcgacacgccccggaacgacgacuccagcuccaacagcaacugccgcgaccccaacaacgagcgggggaacccgggcgugaaggggugggccuucgacaacggcgacgacguguggaugggccgcaccaucuccaaggaccugcggagcggguacgagaccuucaaggucaucggcgggugguccacccccaacagcaagucccaggugaaccgccaggucaucguggacaacaacaacuggagcggcuacuccgggaucuucagcguggagggcaagagcugcaucaaccggugcuucuacgucgagcucauccgcggccgcccccaggagacgcgggugugguggaccuccagcuccaucguggucuucugcgggaccagcggcaccuacgggacgggcuccuggcccgacggggccaacaucaacuucaugccgaucuga

SEQ ID NO: 84150 - RNA, 1410 nt, Artificial Sequence
  derived and/or modified CDS sequence (opt1) from neuraminidase__InfluenzaA__ADT78963
augaaccccaaccagaagaucaucaccaucggcagcgugucccugaccaucgccacggucugcuuccucaugcagaucgccauccuggcgaccaccgugacccugcacuucaagcagcacgagugcgacagcccggccuccaaccaggugaugcccugcgagcccaucaucaucgagcgcaacaucacggagaucgucuaccucaacaacaccaccaucgagaaggagaucugccccgaggugguggaguaccggaacuggagcaagccgcagugccagaucaccggguucgcccccuucuccaaggacaacagcauccgccuguccgccggcggggacaucugggucacgcgggagcccuacgugagcugcgaccccggcaagugcuaccaguucgcccuggggcagggcaccacccucgacaacaagcacuccaacgacaccauccacgaccgcaucccgcaccggacgcugcugaugaacgagcucggcgugcccuuccaccuggggacccgccaggucugcguggcguggagcuccagcuccugccacgacggcaaggccuggcugcacgugugcgucaccggggacgaccggaacgccaccgccagcuucaucuacgacggccgccucguggacuccaucgggagcuggucccagaacauccugcggacgcaggagagcgagugcgugugcaucaacgggaccugcaccgucgugaugaccgacggcuccgcgagcgggcgcgccgacacgcggauccuguucaucaaggagggcaagaucgugcacaucagcccccucuccgggagcgcccagcacgucgaggagugcuccugcuacccccgcuacccggacgugcggugcaucugccgcgacaacuggaagggcagcaaccggcccgugaucgacaucaacauggaggacuacuccaucgacagcuccuacgucugcagcggccuggugggggacacgccccgcaacgacgaccgguccagcaacuccaacugccgcgaccccaacaacgagcggggcaacccgggggugaagggcugggccuucgacaacgggaacgacgucuggaugggccgcaccaucagcaaggaccugcgguccggcuacgagaccuucaaggugaucgggggcuggagcacccccaacuccaagagccaggucaaccgccaggugaucguggacaacaacaacugguccggguacagcggcaucuucuccgucgagggcaagagcugcaucaaccgcugcuucuacguggagcucauccggggccgccagcaggagacccgggugugguggaccagcaacuccaucgucguguucugcggcaccagcgggacguacggcaccggguccuggcccgacggcgccaacaucaacuucaugcccaucuga

SEQ ID NO: 84151 - RNA, 1410 nt, Artificial Sequence
  derived and/or modified CDS sequence (opt1) from neuraminidase__InfluenzaA__ADT79001
augaaccccaaccagaagaucaucaccaucggcagcaucucccugaccaucgccacgaucugcuuccucaugcagaucgccauccuggugaccaccgucacccugcacuucaagcaguacgagugcgacagcccggcgaacaaccaggugaugcccugcgagcccaucaucaucgagcgcaacaucacggagaucguguaccucaccaacaccaccaucgagaaggagaucugccccaagcuggucgaguaccggaacugguccaagccgcagugcaagaucacgggguucgcccccuucagcaaggacaacuccauccgccugagcgccggcggggacaucugggugacccgggagcccuacguguccugcgaccccggcaagugcuaccaguucgcccucgggcagggcaccacccuggacaacaagcacagcaacgacacgauccacgaccgcaucccgcaccggacccugcucaugaacgagcugggcguccccuuccaccuggggacccgccaggugugcaucgccugguccagcuccagcugccacgacggcaaggcguggcuccacgugugcgucaccggggacgacaagaacgccacggccuccuucaucuacgacggccggcugguggacagcaucggguccuggagccagaacauccugcgcacccaggaguccgagugcgugugcaucaacgggaccugcaccgucgugaugacggacggcagcgccuccggcaaggcggacacccggauccucuucaucgaggagggcaagaucgugcacaucagcccccugagcggguccgcccagcacgucgaggagugcagcugcuacccccgcuacccgggcgugcggugcaucugccgcgacaacuggaagggcuccaaccggcccguggucgacaucaacgugaaggacuacagcaucgacuccagcuacgugugcuccgggcuggucggcgacacgccccgcaacaacgaccggagcuccagcuccuacugccgcaaccccaacaacgagcgggggaaccacggcgugaaggggugggccuucgacgacggcaacgacguguggaugggccgcaccaucagcaaggacucccggagcggguacgagaccuucaaggucaucggcgggugguccaccccgaacagcaagucccagaucaaccgccaggugaucgucgacagcgacaaccgguccggcuacagcgggaucuucagcguggagggcaaguccugcaucaaccgcugcuucuacguggagcucauccgcggccgggagcaggagacccgcgucugguggaccagcaacuccaucgugguguucugcgggacgagcggcaccuacgggaccggcuccuggcccgacggggccgacaucaaccugaugcccaucuga

SEQ ID NO: 84152 - RNA, 1410 nt, Artificial Sequence; identical to SEQ ID NO: 78142
  derived and/or modified CDS sequence (opt1) from neuraminidase__InfluenzaA__ADT79021

SEQ ID NO: 84153 - RNA, 1410 nt, Artificial Sequence
  derived and/or modified CDS sequence (opt1) from neuraminidase__InfluenzaA__ADT79041
augaaccccaaccagaagaucaucaccaucggcagcgugucccugaccaucgccacggucugcuuccucaugcagaucgccauccuggugaccaccgugacccugcacuuccgccaguacgagugcgacagcccggcgaacaaccaggucaugcccugcgagcccaucaucaucgagcggaacaucacggagaucguguaccucaacaacaccaccaucgagaaggagaucugccccaagcugguggaguaccgcaacugguccaagccgcagugcaagaucaccggguucgcccccuucagcaaggacaacuccauccggcugagcgccggcggggacaucugggucacgcgcgagcccuacguguccugcgaccccggcaagugcuaccaguucgcccucgggcagggcaccacccuggacaacaagcacagcaacgacaccauccacgaccggaucccgcaccgcacgcugcucaugaacgagcugggcgugcccuuccaccuggggacccggcaggucugcaucgccugguccagcuccagcugccacgacggcaaggcguggcuccacgugugcgugaccggggacgacaagaacgccaccgccuccuucaucuacgacggccgccuggucgacagcaucggguccuggagccagaacauccugcggacgcaggaguccgagugcgugugcaucaacgggaccugcaccguggucaugaccgacggcagcgccuccggccgcgcggacacgaagauccucuucaucgaggagggcaagaucgugcacaucagcccccugagcggguccgcccagcacguggaggagugcagcugcuacccccgguacccgggcguccgcugcaucugccgggacaacuggaagggcuccaaccgccccgugguggacaucaacgucgaggacuacagcaucgacuccagcuacgugugcuccgggcuggugggcgacacgccccggaacaacgaccgcagcuccaacagcaacugccggaaccccaacaacgagcgcgggaaccacggcgucaaggggugggccuucgacgacggcaacgacguguggaugggccggaccaucuccaaggaccuccgcagcggguacgagaccuucaaggucaucggcgggugguccaccccgaacagcaagucccagaucaaccgccaggugaucguggacagcgacaaccgguccggcuacagcgggaucuucuccgucgagggcaagagcugcaucaaccgcugcuucuacguggagcugauccggggccgcgagcaggagacccgggugugguggaccagcaacuccaucgucguguucugcgggaccagcggcacguacgggaccggcuccuggcccgacggggccgacaucaaccugaugcccaucuga

SEQ ID NO: 84154 - RNA, 1410 nt, Artificial Sequence; identical to SEQ ID NO: 79784
  derived and/or modified CDS sequence (opt1) from neuraminidase__InfluenzaA__ADT79121

SEQ ID NO: 84155 - RNA, 1410 nt, Artificial Sequence
  derived and/or modified CDS sequence (opt1) from neuraminidase__InfluenzaA__ADT79131
augaaccccaaccagaagaucaucaccaucggcagcgugucccugaccaucgccacggucugcuuccucaugcagaucgccauccuggcgaccaccgugacccugcacuucaagcagcacgagugcgacagcccggccuccaaccaggugaugcccugcgagcccaucaucaucgagcgcaacaucacggagaucgucuaccucaacaacaccaccaucgagaaggagaucugccccgaggugguggaguaccggaacuggagcaagccgcagugccagaucaccggguucgcccccuucuccaaggacaacagcauccgccuguccgccggcggggacaucugggucacgcgggagcccuacgugagcugcgaccccggcaagugcuaccaguucgcccuggggcagggcaccacccucgacaacaagcacuccaacggcaccauccacgaccgcaucccgcaccggacgcugcugaugaacgagcucggggugcccuuccaccugggcaccaagcaggucugcguggcguggagcuccagcuccugccacgacgggaaggccuggcugcacgugugcgucaccggcgacgaccgcaacgccaccgccagcuucaucuacgacgggcggcucgaggacuccaucggcagcuggucccagaacauccugcgcacgcaggagagcgagugcgugugcaucaacgggaccugcaccguggucaugaccgacggcuccgcgagcggccgggccgacacgcgcauccuguucaucaaggaggggaagaucgugcacaucagcccccucuccggcagcgcccagcacaucgaggagugcuccugcuacccccgguacccggacgugcgcugcaucugccgggacaacuggaagggcagcaaccgccccguccuggacaucuccauggaggacuacagcaucgacuccagcuacgugugcuccgggcuggugggcgacacgccccggaacgacgacagcuccagcaacuccaacugccgcgaccccaacaacgagcgggggaacccgggcgucaaggggugggccuucgacaacggcgacgacguguggaugggccgcaccaucagcaaggaccuccgguccggguacgagaccuucaaggugaucggcggguggagcacccccaacuccaagagccaggucaaccgccaggugaucgucgacaacaacaacugguccggcuacagcgggaucuucagcguggagggcaaguccugcaucaaccggugcuucuacguggagcugauccgcggccgcagccaggagacccgggucugguggaccuccaacagcaucgugguguucugcgggaccuccggcacguacgggaccggcagcuggcccgacggggccaacaucaacuucaugcccaucuga

SEQ ID NO: 84156 - RNA, 1410 nt, Artificial Sequence; identical to SEQ ID NO: 80762
  derived and/or modified CDS sequence (opt1) from neuraminidase__InfluenzaA__ADT79234

SEQ ID NO: 84157 - RNA, 1410 nt, Artificial Sequence; identical to SEQ ID NO: 80752
  derived and/or modified CDS sequence (opt1) from neuraminidase__InfluenzaA__ADT79244

SEQ ID NO: 84158 - RNA, 1410 nt, Artificial Sequence
  derived and/or modified CDS sequence (opt1) from neuraminidase__InfluenzaA__ADU25480
augaaccccaaccagaagaucaucaucaucagcuccaucugccugaucaacggcaucaccagccucauccugcagaucgggaacaucaucuccaucuggaucagccacuccauccagaucggcaaccagaaccagaccgagacgugcagccagaacaucaucaccuacgagaacaacaccugggugaaccagaccuacgucaacaucuccaacaacaacuucguggccgagcaggccguggucagcaugaagcuggcgggguccagcccgcucugccccguguccggcugggccaucuacagcaaggacaacuccgugcgcaucgggagcaagggcgacgucuucgugauccgggagcccuucaucuccugcagccaccuggagugccgcacguucuuccugacccagggcgcccuccugaacgacaagcacuccaacgggaccaucaaggaccggagccccuaccgcacccugauguccugcccgaucggcgaggugcccagccccuacaacagccgguucgaguccgucgccuggagcgccuccgcgugccacgacgggacgagcuggcucaccaucggcaucuccgggcccgacaacggcgccguggccgugcugaaguacaacgacaucaucaccgacaccaucaagagcuggcgcaacaacauccugcggacgcaggaguccgagugcgucugcgugaacggcagcugcuucaccgugaugaccgacgggccguccaacggccaggccagcuacaagaucuucaagaucgagaaggggaaggucgugaaguccguggagcucaacgcgcccaacuaccacuacgaggagugcagcugcuaccccgacuccggcgagaucaucugcgucugccgcgacaacuggcacggcagcaaccggcccuggguguccuucaaccagaaccuggaguaccagaucggguacaucugcagcggcauccugggggacaacccgcgccccaacgaccggaccggcuccugcgggcccgugagccucaacggcgccaacggcgucaagggguucuccuucaaguacggcaacgggguguggaucggccgcaccaagagcagcuccagccgguccggguucgagaugaucugggaccccaacggcuggacggagaccgacaacaacuuccuggugaagcaggacaucgucggcaugaccgacuggagcggguacuccggcagcuucgugcagcacccggagcugacggggaugaacugcaugcgccccugcuucugggucgagcucauccggggccgccccaaggagaacaccaucuggaccuccgggagcuccaucagcuucugcggcgugaacuccgacaccguggacuggagcuggcccgacggcgccgagcugccguucacgaucgacaaguga

SEQ ID NO: 84159 - RNA, 1410 nt, Artificial Sequence; identical to SEQ ID NO: 80762
  derived and/or modified CDS sequence (opt1) from neuraminidase__InfluenzaA__ADU59780

SEQ ID NO: 84160 - RNA, 1410 nt, Artificial Sequence
  derived and/or modified CDS sequence (opt1) from neuraminidase__InfluenzaA__ADU59789
augaaccccaaccagaagaucaucaccaucggcagcgugugcaugaccaucgggauggccaaccugauccuccagaucggcaacaucaucuccaucuggaucagccacuccauccagcuggggaaccagaaccagaucgagacgugcaaccagagcgucaucaccuacgagaacaacaccugggugaaccagaccuacgugaacgucuccaacacgaacuucgccgcgggccagagcgugguguccgucaagcuggccgggaacagcucccucugcccggugagcggcugggccaucuacuccaaggacaacagcauccgcaucggcuccaagggggacguguucgucauccgggagcccuucaucagcugcagcccccuggagugccgcaccuucuuccugacccagggcgcccuccugaacgacaagcacuccaacgggaccaucaaggaccggucccccuaccgcacgcugaugagcugcccgaucggcgaggugcccucccccuacaacagccgguucgagagcguggccugguccgcgagcgccugccacgacgggaucaacuggcucaccaucggcaucuccggccccgacaacggggccgucgccgugcugaaguacaacggcaucaucaccgacaccaucaagagcuggcgcaacaacauccugcggacgcaggaguccgagugcgcgugcgugaacgggagcugcuucaccgucaugaccgacggcccguccgacggccaggccagcuacaagaucuuccgcaucgagaaggggaagaucgugaaguccguggagaugaacgcccccaacuaccacuacgaggagugcagcugcuaccccgacuccagcgagaucacgugcgucugccgggacaacuggcacggcuccaaccgccccugggugagcuucaaccagaaccucgaguaccagaucggguacaucugcuccggcaucuucggggacaacccgcggcccaacgacaagaccggcagcugcggccccguguccagcaacggggccaacggcgucaagggguucuccuucaaguacggcaacgggguguggaucggccgcaccaagagcaucagcucccggaacggcuucgagaugaucugggaccccaacggguggaccggcaccgacaacaacuucagcaucaagcaggacaucguggggaucaacgagugguccggcuacagcggguccuucguccagcacccggagcugacgggccuggacugcauccgccccugcuucuggguggagcucauccggggccgccccaaggagaacaccaucuggaccagcggguccagcaucuccuucugcggcgucaacagcgacaccguggggugguccuggcccgacggcgccgagcugccguucacgaucgacaaguga

SEQ ID NO: 84161 - RNA, 1410 nt, Artificial Sequence; identical to SEQ ID NO: 80762
  derived and/or modified CDS sequence (opt1) from neuraminidase__InfluenzaA__ADU59829

SEQ ID NO: 84162 - RNA, 1410 nt, Artificial Sequence
  derived and/or modified CDS sequence (opt1) from neuraminidase__InfluenzaA__ADU59838
augaaccccaaccagaagaucaucaucaucggcagcgugugcaugaccaucgggauggccaaccugauccuccagaucggcaacaucaucuccaucuggaucagccacuccauccagcuggggaaccagaaccagaucgagaccugcaaccagagcgucaucacguacgagaacaacaccugggugaaccagaccuacgugaacaucuccaacaccaacuucgccgcgggccagagcgucguguccgugaagcuggccgggaacagcucccucugcccggucagcggcugggccaucuacuccaaggacaacagcauccgcaucggcuccaagggggacguguucgugauccgggagcccuucaucagcugcagcccccuggagugccgcacguucuuccugacccagggcgcccuccugaacgacaagcacuccaacgggaccaucaaggaccggucccccuaccgcacccugaugagcugcccgaucggcgagguccccucccccuacaacagccgguucgagagcguggccugguccgcgagcgccugccacgacgggaucaacuggcucacgaucggcaucuccggccccgacaacggggccguggccguccugaaguacaacggcaucaucaccgacaccaucaagagcuggcgcaacaacauccugcggacccaggaguccgagugcgcgugcgugaacgggagcugcuucacggugaugaccgacggcccguccgacggccaggccagcuacaagaucuuccgcaucgagaaggggaagaucgucaaguccguggagaugaacgcccccaacuaccacuucgaggagugcagcugcuaccccgacuccagcgagaucacgugcgugugccgggacaacuggcacggcuccaaccgccccugggucagcuucaaccagaaccucgaguaccagaucggguacaucugcuccggcaucuucggggacaacccgcggcccaacgacaagaccggcagcugcggccccguguccagcaacggggccaacggcgugaagggguucuccuucaaguacggcaacggggucuggaucggccgcaccaagagcaucagcucccggaacggcuucgagaugaucugggaccccaacggguggaccggcaccgacaacaacuucagcaucaagcaggacaucguggggaucaacgagugguccggcuacagcggguccuucgugcagcacccggagcugaccggccuggacugcauccgccccugcuucugggucgagcucauccggggccgccccaaggagaacacgaucuggaccagcggguccagcaucuccuucugcggcgugaacagcgacaccgucgacugguccuggcccgacggggccgagcugccguucaccaucgacaaguga

SEQ ID NO: 84163 - RNA, 1410 nt, Artificial Sequence; identical to SEQ ID NO: 82113
  derived and/or modified CDS sequence (opt1) from neuraminidase__InfluenzaA__ADU59847

SEQ ID NO: 84164 - RNA, 1410 nt, Artificial Sequence; identical to SEQ ID NO: 80762
  derived and/or modified CDS sequence (opt1) from neuraminidase__InfluenzaA__ADU59907

SEQ ID NO: 84165 - RNA, 1410 nt, Artificial Sequence; identical to SEQ ID NO: 80762
  derived and/or modified CDS sequence (opt1) from neuraminidase__InfluenzaA__ADU59917

SEQ ID NO: 84166 - RNA, 1410 nt, Artificial Sequence; identical to SEQ ID NO: 80762
  derived and/or modified CDS sequence (opt1) from neuraminidase__InfluenzaA__ADU59920

SEQ ID NO: 84167 - RNA, 1410 nt, Artificial Sequence; identical to SEQ ID NO: 80762
  derived and/or modified CDS sequence (opt1) from neuraminidase__InfluenzaA__ADU59941

SEQ ID NO: 84168 - RNA, 1410 nt, Artificial Sequence
  derived and/or modified CDS sequence (opt1) from neuraminidase__InfluenzaA__ADU76311
augaaccccaaccagaagaucaucaccaucggcagcgugugcaugaccaucgggauggccaaccugauccuccagaucggcaacaucaucuccaucuggaucagccacuccauccagcuggggaaccagaaccagaucgagacgugcaaccagagcgucaucaccuacgagaacaacaccugggugaaccagaccuacgugaacaucuccaacacgaacuucgccgcgggccagagcgucguguccgugaagcuggccgggaacagcucccucugcccggucagcggcugggccaucuacuccaaggacaacagcauccgcaucggcuccaagggggacguguucgugauccgggagcccuucaucagcugcagcccccuggagugccgcaccuucuuccugacccagggcgcccuccugaacgacaagcacuccaacgggaccaucaaggaccggucccccuaccgcacgcugaugagcugcccgaucggcgagguccccucccccuacaacagccgguucgagagcguggccugguccgcgagcgccugccacgacgggaucaacuggcucaccaucggcaucuccggccccgacaacggggccguggccguccugaaguacaacggcaucaucaccgacaccaucaagagcuggcgcaacaacauccugcggacgcaggaguccgagugcgcgugcgugaacgggagcugcuucaccgugaugaccgacggcccguccgacggccaggccagcuacaagaucuuccgcaucgagaaggggaagaucgucaaguccguggagaugaacgcccccaacuaccacuacgaggagugcagcugcuaccccgacuccagcgagaucacgugcgugugccgggacaacuggcacggcuccaaccgccccugggucagcuucaaccagaaccucgaguaccagaucggguacaucugcuccggcaucuucggggacaacccgcggcccaacgacaagaccggcagcugcggccccguguccagcaacggggccaacggcgugaagggguucuccuucaaguacggcaacggggucuggaucggccgcaccaagagcaucagcucccggaacggcuucgagaugaucugggaccccaacggguggaccggcaccgacaacaacuucagcaucaagcaggacaucguggggaucaacgagugguccggcuacagcggguccuucgugcagcacccggagcugacgggccuggacugcauccgccccugcuucugggucgagcucauccggggccgccccaaggagaacaccaucuggaccagcggguccagcaucuccuucugcggcgugaacagcgacaccgucgggugguccuggcccgacggcgccaagcugccguucacgaucgacaaguga

SEQ ID NO: 84169 - RNA, 1410 nt, Artificial Sequence
  derived and/or modified CDS sequence (opt1) from neuraminidase__InfluenzaA__ADU76313
augaaccccaaccagaagaucaucaccaucggcagcgugugcaugaccaucgggauggccaaccugauccuccagaucggcaacaucaucuccaucuggaucagccacuccauccagcuggggaaccagaaccagaucgagacgugcaaccagagcgucaucaccuacgagaacaacaccugggugaaccagaccuacgugaacaucuccaacacgaacuucgccgcgggccagagcgucguguccgugaagcuggccgggaacagcucccucugcccggucagcggcugggccaucuacuccaaggacaacagcauccgcaucggcuccaagggggacguguucgugauccgggagcccuucaucagcugcagcccccuggagugccgcaccuucuuccugacccagggcgcccuccugaacgacaagcacuccaacgggaccaucaaggaccggucccccuaccgcacgcugaugagcugcccgaucggcgagguccccucccccuacaacagccgguucgagagcguggccugguccgcgagcgccugccacgacgggaucaacuggcucaccaucggcaucuccggccccgacaacggggccguggccguccugaaguacaacggcaucaucaccgacaccaucaagagcuggcgcaacaacauccugcggacgcaggaguccgagugcgcgugcgugaacgggagcugcuucaccgugaugaccgacggcccguccgacggccaggccagcuacaagaucuuccgcaucgagaaggggaagaucgucaaguccguggagaugaacgcccccaacuacuacuacgaggagugcagcugcuaccccgacuccagcgagaucacgugcgugugccgggacaacuggcacggcuccaaccgccccugggucagcuucaaccagaaccucgaguaccagaucggguacaucugcuccggcaucuucggggacaacccgcggcccaacgacaagaccggcagcugcggccccguguccagcaacggggccaacggcgugaagggguucuccuucaaguacggcaacggggucuggaucggccgcaccaagagcaucagcucccggaacggcuucgagaugaucugggaccccaacggguggaccggcaccgacaacaacuucagcaucaagcaggacaucguggggaucaacgagugguccggcuacagcggguccuucgugcagcacccggagcugacgggccuggacugcauccgccccugcuucugggucgagcucauccggggccgccccaaggagaacaccaucuggaccagcggguccagcaucuccuucugcggcgugaacagcgacaccgucgggugguccuggcccgacggcgccaagcugccguucacgaucgacaaguga

SEQ ID NO: 84170 - RNA, 1410 nt, Artificial Sequence; identical to SEQ ID NO: 84169
  derived and/or modified CDS sequence (opt1) from neuraminidase__InfluenzaA__ADU76314

SEQ ID NO: 84171 - RNA, 1410 nt, Artificial Sequence; identical to SEQ ID NO: 84169
  derived and/or modified CDS sequence (opt1) from neuraminidase__InfluenzaA__ADU76315

SEQ ID NO: 84172 - RNA, 1410 nt, Artificial Sequence; identical to SEQ ID NO: 84169
  derived and/or modified CDS sequence (opt1) from neuraminidase__InfluenzaA__ADU76316

SEQ ID NO: 84173 - RNA, 1410 nt, Artificial Sequence
  derived and/or modified CDS sequence (opt1) from neuraminidase__InfluenzaA__ADU76317
augaaccccaaccagaagaucaucaccaucggcagcgugugcaugaccaucgggauggccaaccugauccuccagaucggcaacaucaucuccaucuggaucagccacuccauccagcuggggaaccagaaccagaucgagacgugcaaccagagcgucaucaccuacgagaacaacaccugggugaaccagaccuacgugaacaucuccaacacgaacuucgccgcgggccagagcgucguguccgugaagcuggccgggaacagcucccucugcccggucagcggcugggccaucuacuccaaggacaacagcauccgcaucggcuccaagggggacguguucgugauccgggagcccuucaucagcugcagcccccuggagugccgcaccuucuuccugacccagggcgcccuccugaacgacaagcacuccaacgggaccaucaaggaccggucccccuaccgcacgcugaugagcugcccgaucggcgagguccccucccccuacaacagccgguucgagagcguggccugguccgcgagcgccugccacgacgggaucaacuggcucaccaucggcaucuccggccccgacaacggggccguggccguccugaaguacaacggcaucaucaccgacaccaucaagagcuggcgcaacaacauccugcggacgcaggaguccgagugcgcgugcgugaacgggagcugcuucaccgugaugaccgacggcccguccgacggccaggccagcuacaagaucuuccgcaucgagaaggggaagaucgucaaguccguggagaugaacgcccccaacuaccacuacgaggagugcagcugcuaccccgacuccagcgagaucacgugcgugugccgggacaacuggcacggcuccaaccgccccugggucagcuucaaccagaaccucgaguaccagaucggguacaucugcuccggcaucuucggggacaacccgcggcccaacgacaagaccggcagcugcggccccguguccagcaacggggccaacggcgugaagggguucuccuucaaguacggcaacggggucuggaucggccgcaccaagagcaccagcucccggaacggcuucgagaugaucugggaccccaacggguggaccggcacggacaacaacuucagcaucaagcaggacaucguggggaucaacgagugguccggcuacagcggguccuucgugcagcacccggagcugaccggccuggacugcauccgccccugcuucugggucgagcucauccggggccgccccaaggagaacaccaucuggaccagcggguccagcaucuccuucugcggcgugaacagcgacacggucgggugguccuggcccgacggcgccgagcugccguucaccaucgacaaguga

SEQ ID NO: 84174 - RNA, 1410 nt, Artificial Sequence
  derived and/or modified CDS sequence (opt1) from neuraminidase__InfluenzaA__ADU76318
augaaccccaaccagaagaucaucaccaucggcagcgugugcaugaccaucgggauggccaaccugauccuccagaucggcaacaucaucuccaucuggaucagccacuccauccagcuggggaaccagaaccagaucgagacgugcaaccagagcgucaucaccuacgagaacaacaccugggugaaccagaccuacgugaacaucuccaacacgaacuucgccgcgggccagagcgucguguccgugaagcuggccgggaacagcucccucugcccggucagcggcugggccaucuacuccaaggacaacagcauccgcaucggcuccaagggggacguguucgugauccgggagcccuucaucagcugcagcccccuggagugccgcaccuucuuccugacccagggcgcccuccugaacgacaagcacuccaacgggaccaucaaggaccggucccccuaccgcacgcugaugagcugcccgaucggcgagguccccucccccuacaacagccgguucgagagcguggccugguccgcgagcgccugccacgacgggaucaacuggcucaccaucggcaucuccggccccgacaacggggccguggccguccugaaguacaacggcaucaucaccgacaccaucaagagcuggcgcaacaacauccugcggacgcaggaguccgagugcgcgugcgugaacgggagcugcuucaccgugaugaccgacggcccguccgacggccaggccagcuacaagaucuuccgcaucgagaaggggaagaucgucaaguccguggagaugaacgcccccaacuaccacuacgaggagugcagcugcuaccccgacuccagcgagaucacgugcgugugccgggacaacuggcacggcuccaaccgccccugggucagcuucaaccacaaccucgaguaccagaucggguacaucugcuccggcaucuucggggacaacccgcggcccaacgacaagaccggcagcugcggccccguguccagcaacggggccaacggcgugaagggguucuccuucaaguacggcaacggggucuggaucggccgcaccaagagcaucagcucccggaacggcuucgagaugaucugggaccccaacggguggaccggcaccgacaacaacuucagcaucaagcaggacaucguggggaucaacgagugguccggcuacagcggguccuucgugcagcacccggagcugacgggccuggacugcauccgccccugcuucugggucgagcucauccggggccgccccaaggagaacaccaucuggaccagcggguccagcaucuccuucugcggcgugaacagcgacaccgucgggugguccuggcccgacggcgccgagcugccguucacgaucgacaaguga

SEQ ID NO: 84175 - RNA, 1410 nt, Artificial Sequence; identical to SEQ ID NO: 82005
  derived and/or modified CDS sequence (opt1) from neuraminidase__InfluenzaA__ADU76319

SEQ ID NO: 84176 - RNA, 1410 nt, Artificial Sequence; identical to SEQ ID NO: 80762
  derived and/or modified CDS sequence (opt1) from neuraminidase__InfluenzaA__ADU76320

SEQ ID NO: 84177 - RNA, 1410 nt, Artificial Sequence; identical to SEQ ID NO: 80762
  derived and/or modified CDS sequence (opt1) from neuraminidase__InfluenzaA__ADU76321

SEQ ID NO: 84178 - RNA, 1410 nt, Artificial Sequence
  derived and/or modified CDS sequence (opt1) from neuraminidase__InfluenzaA__ADU76322
augaaccccaaccagaagaucaucaccaucggcagcgugugcaugaccaucgggauggccaaccugauccuccagaucggcaacaucaucuccaucuggaucagccacuccauccagcuggggaaccagaaccagaucgagacgugcaaccagagcgucaucaccuacgagaacaacaccugggugaaccagaccuacgugaacaucuccaacacgaacuucgccgcgggccagagcgucguguccgugaagcuggccgggaacagcucccucugcccggucagcggcugggccaucuacuccaaggacaacagcauccgcaucggcuccaagggggacguguucgugauccgggagcccuucaucagcugcagcccccuggagugccgcaccuucuuccugacccagggcgcccuccugaacgacaagcacuccaacgggaccaucaaggaccggucccccuaccgcacgcugaugagcugcccgaucggcgagguccccucccccuacaacagccgguucgagagcguggccugguccgcgagcgccugccacgacgggaucaacuggcucaccaucggcaucuccggccccgacaacggggccguggccguccugaaguacaacggcaucaucaccgacaccaucaagagcuggcgcaacaacauccugcggacgcaggaguccgagugcgcgugcgugaacgggagcugcuucaccgugaugaccgacggcccguccgacggccaggccagcuacaagaucuuccgcaucgagaaggggaaggucgugaaguccguggagaugaacgcccccaacuaccacuacgaggagugcagcugcuaccccgacuccagcgagaucacgugcgucugccgggacaacuggcacggcuccaaccgccccugggugagcuucaaccagaaccucgaguaccagaucggguacaucugcuccggcaucuucggggacaacccgcggcccaacgacaagaccggcagcugcggccccguguccagcaacggggccaacggcgucaagggguucuccuucaaguacggcaacgggguguggaucggccgcaccaagagcaucagcucccggaacggcuucgagaugaucugggaccccaacggguggaccggcaccgacaacaacuucagcaucaagcaggacaucguggggaucaacgagugguccggcuacagcggguccuucguccagcacccggagcugacgggccuggacugcauccgccccugcuucuggguggagcucauccggggccgccccaaggagaacaccaucuggaccagcggguccaucaucagcuucugcggcgucaacuccgacaccgugggguggagcuggcccgacggcgccgagcugccguucacgaucgacaaguga

SEQ ID NO: 84179 - RNA, 1410 nt, Artificial Sequence; identical to SEQ ID NO: 84168
  derived and/or modified CDS sequence (opt1) from neuraminidase__InfluenzaA__ADU76323

SEQ ID NO: 84180 - RNA, 1410 nt, Artificial Sequence; identical to SEQ ID NO: 84169
  derived and/or modified CDS sequence (opt1) from neuraminidase__InfluenzaA__ADU76324

SEQ ID NO: 84181 - RNA, 1410 nt, Artificial Sequence; identical to SEQ ID NO: 84168
  derived and/or modified CDS sequence (opt1) from neuraminidase__InfluenzaA__ADU76325

SEQ ID NO: 84182 - RNA, 1410 nt, Artificial Sequence; identical to SEQ ID NO: 84169
  derived and/or modified CDS sequence (opt1) from neuraminidase__InfluenzaA__ADU76326

SEQ ID NO: 84183 - RNA, 1410 nt, Artificial Sequence; identical to SEQ ID NO: 84169
  derived and/or modified CDS sequence (opt1) from neuraminidase__InfluenzaA__ADU76327

SEQ ID NO: 84184 - RNA, 1410 nt, Artificial Sequence; identical to SEQ ID NO: 84168
  derived and/or modified CDS sequence (opt1) from neuraminidase__InfluenzaA__ADU76328

SEQ ID NO: 84185 - RNA, 1410 nt, Artificial Sequence; identical to SEQ ID NO: 84169
  derived and/or modified CDS sequence (opt1) from neuraminidase__InfluenzaA__ADU76329

SEQ ID NO: 84186 - RNA, 1410 nt, Artificial Sequence; identical to SEQ ID NO: 84169
  derived and/or modified CDS sequence (opt1) from neuraminidase__InfluenzaA__ADU76330

SEQ ID NO: 84187 - RNA, 1410 nt, Artificial Sequence; identical to SEQ ID NO: 84169
  derived and/or modified CDS sequence (opt1) from neuraminidase__InfluenzaA__ADU76331

SEQ ID NO: 84188 - RNA, 1410 nt, Artificial Sequence; identical to SEQ ID NO: 84169
  derived and/or modified CDS sequence (opt1) from neuraminidase__InfluenzaA__ADU76332

SEQ ID NO: 84189 - RNA, 1410 nt, Artificial Sequence; identical to SEQ ID NO: 80762
  derived and/or modified CDS sequence (opt1) from neuraminidase__InfluenzaA__ADU76333

SEQ ID NO: 84190 - RNA, 1410 nt, Artificial Sequence; identical to SEQ ID NO: 80762
  derived and/or modified CDS sequence (opt1) from neuraminidase__InfluenzaA__ADU76334

SEQ ID NO: 84191 - RNA, 1410 nt, Artificial Sequence; identical to SEQ ID NO: 80762
  derived and/or modified CDS sequence (opt1) from neuraminidase__InfluenzaA__ADU76335

SEQ ID NO: 84192 - RNA, 1410 nt, Artificial Sequence; identical to SEQ ID NO: 84169
  derived and/or modified CDS sequence (opt1) from neuraminidase__InfluenzaA__ADU76336

SEQ ID NO: 84193 - RNA, 1410 nt, Artificial Sequence; identical to SEQ ID NO: 81529
  derived and/or modified CDS sequence (opt1) from neuraminidase__InfluenzaA__ADU76337

SEQ ID NO: 84194 - RNA, 1410 nt, Artificial Sequence; identical to SEQ ID NO: 82664
  derived and/or modified CDS sequence (opt1) from neuraminidase__InfluenzaA__ADU76338

SEQ ID NO: 84195 - RNA, 1410 nt, Artificial Sequence; identical to SEQ ID NO: 84168
  derived and/or modified CDS sequence (opt1) from neuraminidase__InfluenzaA__ADU76339

SEQ ID NO: 84196 - RNA, 1410 nt, Artificial Sequence; identical to SEQ ID NO: 80762
  derived and/or modified CDS sequence (opt1) from neuraminidase__InfluenzaA__ADU76341

SEQ ID NO: 84197 - RNA, 1410 nt, Artificial Sequence; identical to SEQ ID NO: 80762
  derived and/or modified CDS sequence (opt1) from neuraminidase__InfluenzaA__ADU76342

SEQ ID NO: 84198 - RNA, 1410 nt, Artificial Sequence; identical to SEQ ID NO: 80762
  derived and/or modified CDS sequence (opt1) from neuraminidase__InfluenzaA__ADU76343

SEQ ID NO: 84199 - RNA, 1410 nt, Artificial Sequence; identical to SEQ ID NO: 84169
  derived and/or modified CDS sequence (opt1) from neuraminidase__InfluenzaA__ADU76344

SEQ ID NO: 84200 - RNA, 1410 nt, Artificial Sequence; identical to SEQ ID NO: 84169
  derived and/or modified CDS sequence (opt1) from neuraminidase__InfluenzaA__ADU76345

SEQ ID NO: 84201 - RNA, 1410 nt, Artificial Sequence
  derived and/or modified CDS sequence (opt1) from neuraminidase__InfluenzaA__ADU76346
augaaccccaaccagaagaucaucaccaucggcagcgugugcaugaccaucgggauggccaaccugauccuccagaucggcaacaucaucuccaucuggaucagccacuccauccagcuggggaaccagaaccagaucgagacgugcaaccagagcgucaucaccuacgagaacaacaccugggugaaccagaccuacgugaacaucuccaacacgaacuucgccgcgggccagagcgucguguccgugaagcuggccgggaacagcucccucugcccggucagcggcugggccaucuacuccaaggacaacagcauccgcaucggcuccaagggggacguguucgugauccgggagcccuucaucagcugcagcccccuggagugccgcaccuucuuccugacccagggcgcccuccugaacgacaagcacuccaacgggaccaucaaggaccggucccccuaccgcacgcugaugagcugcccgaucggcgagguccccucccccuacaacagccgguucgagagcguggccugguccgcgagcgccugccacgacgggaucaacuggcucaccaucggcaucuccggccccgacaacggggccguggccguccugaaguacaacggcaucaucaccgacaccaucaagagcuggcgcaacaacauccugcggacgcaggaguccgagugcgcgugcgugaacgggagcugcuucaccgugaugaccgacggcccguccgacggccaggccagcuacaagaucuuccgcaucgagaaggggaagaucgucaaguccguggagaugaacgcccccaacuaccacuacgaggagugcagcugcuaccccgacuccagcgagaucacgugcgugugccgggacaacuggcacggcuccaaccgccccugggucagcuucaaccagaaccucgaguaccagaucggguacaucugcuccggcaucuucggggacaacccgcggcccaacgacaagaccggcagcugcggccccguguccagcaacggggccaacggcgugaagggguucuccuucaaguacggcaacggggucuggaucggccgcaccaagagcaucagcucccggaacggcuucgagaugaucugggaccccaacggguggaccgagaccgacaacaacuucagcaucaagcaggacaucgugggcaucaacgagugguccggguacagcggcuccuucgugcagcacccggagcugacggggcuggacugcauccgccccugcuucugggucgagcucauccggggccgccccaaggagaacaccaucuggaccagcggcuccagcaucuccuucugcggggugaacagcgacaccgucggcugguccuggcccgacggggccgagcugccguucacgaucgacaaguga

SEQ ID NO: 84202 - RNA, 1410 nt, Artificial Sequence; identical to SEQ ID NO: 81529
  derived and/or modified CDS sequence (opt1) from neuraminidase__InfluenzaA__ADU76347

SEQ ID NO: 84203 - RNA, 1410 nt, Artificial Sequence
  derived and/or modified CDS sequence (opt1) from neuraminidase__InfluenzaA__ADV17285
augaaccccaaccaggagaucaucaccaucggcagcgugugcaugaccaucgggauggccaaccugauccuccagaucggcaacaucaucuccaucuggaucagccacuccauccagcuggggaaccagaaccagaucgagacgugcaaccagagcgucaucaccuacgagaacaacaccugggugaaccagaccuacgugaacaucuccaacacgaacuucgccgcgggccagagcgucguguccgugaagcuggccgggaacagcucccucugcccggucagcggcugggccaucuacuccaaggacaacagcauccgcaucggcuccaagggggacguguucgugauccgggagcccuucaucagcugcagcccccuggagugccgcaccuucuuccugacccagggcgcccuccugaacgacaagcacuccaacgggaccaucaaggaccggucccccuaccgcacgcugaugagcugcccgaucggcgagguccccucccccuacaacagccgguucgagagcguggccugguccgcgagcgccugccacgacgggaucaacuggcucaccaucggcaucuccggccccgacaacggggccguggccguccugaaguacaacggcaucaucaccgacaccaucaagagcuggcgcaacaacauccugcggacgcaggaguccgagugcgcgugcgugaacgggagcugcuucaccgugaugaccgacggcccguccgacggccaggccagcuacaagaucuuccgcaucgagaaggggaagaucgucaaguccguggagaugaacgcccccaacuaccacuacgaggagugcagcugcuaccccgacuccagcgagaucacgugcgugugccgggacaacuggcacggcuccaaccgccccugggucagcuucaaccagaaccucgaguaccagaucggguacaucugcuccggcaucuucggggacaacccgcggcccaacgacaagaccggcagcugcggccccguguccagcaacggggccaacggcgugaagggguucuccuuccgcuacggcaacggggucuggaucggccggaccaagagcaucagcucccgcaacggcuucgagaugaucugggaccccaacggguggaccggcaccgacaacaacuucagcaucaagcaggacaucguggggaucaacgagugguccggcuacagcggguccuucgugcagcacccggagcugacgggccuggacugcauccggcccugcuucugggucgagcucauccgcggccggcccaaggagaacaccaucuggaccagcggguccagcaucuccuucugcggcgugaacagcgacaccgucgggugguccuggcccgacggcgccgagcugccguucacgaucgacaaguga

SEQ ID NO: 84204 - RNA, 1410 nt, Artificial Sequence; identical to SEQ ID NO: 80762
  derived and/or modified CDS sequence (opt1) from neuraminidase__InfluenzaA__ADV17295

SEQ ID NO: 84205 - RNA, 1410 nt, Artificial Sequence
  derived and/or modified CDS sequence (opt1) from neuraminidase__InfluenzaA__ADV17305
augaaccccaaccagaagaucaucaccaucggcagcgugugcaugaccaucgggauggccaaccugauccuccagaucggcaacaucaucuccaucuggaucagccacuccauccagcuggggaaccagaaccagaucgagacgugcaaccagagcgucaucaccuacgagaacaacaccugggugaaccagaccuacgugaacaucuccaacacgaacuucgccgcgggccagagcgucguguccgugaagcuggccgggaacagcucccucugcccggucagcggcugggccaucuacuccaaggacaacagcauccgcaucggcuccaagggggacguguucgugauccgggagcccuucaucagcugcuccagccuggagugccgcaccuucuuccugacccagggcgcccuccugaacgacaagcacuccaacgggaccaucaaggaccggagccccuaccgcacgcugauguccugccccaucggcgaggucccgagccccuacaacagccgguucgaguccguggccuggagcgcguccgccugccacgacgggaucaacuggcucaccaucggcaucagcggcuccgacaacggggccguggccguccugaaguacaacggcaucaucaccgacaccaucaagagcuggcgcaacaacauccugcggacgcaggaguccgagugcgcgugcgugaacgggagcugcuucaccaucaugaccgacggccccuccgacggccaggccagcuacaagaucuuccgcaucgagaaggggaagaucgugaaguccgucgagaugaacgcccccaacuaccacuacgaggagugcagcugcuacccggacuccagcgagaucacgugcgugugccgggacaacuggcacggcuccaaccgccccugggugagcuucaaccagaaccucgaguaccagaucggguacaucugcuccggcaucuucggggacaacccccggcccaacgacaagaccggcagcugcggcccggucuccagcaacggggccaacggcgugaagggguucagcuucaaguacggcaacgggguguggaucggccgcaccaaguccaucagcucccggaacggcuucgagaugaucugggaccccaacggguggaccggcaccgacaacaacuucagcaucaagcaggacaucgucgggaucaacgagugguccggcuacagcggguccuucgugcagcaccccgagcugacgggccuggacugcauccgccccugcuucuggguggagcucauccggggccgcccgaaggagaacaccaucuggaccagcggguccagcaucuccuucugcggcgucaacagcgacaccguggggugguccuggcccgacggcgccgagcugcccuucacgaucgacaaguga

SEQ ID NO: 84206 - RNA, 1410 nt, Artificial Sequence; identical to SEQ ID NO: 80762
  derived and/or modified CDS sequence (opt1) from neuraminidase__InfluenzaA__ADV17315

SEQ ID NO: 84207 - RNA, 1410 nt, Artificial Sequence; identical to SEQ ID NO: 82193
  derived and/or modified CDS sequence (opt1) from neuraminidase__InfluenzaA__ADV17325

SEQ ID NO: 84208 - RNA, 1410 nt, Artificial Sequence
  derived and/or modified CDS sequence (opt1) from neuraminidase__InfluenzaA__ADV17335
augaaccccaaccagaagaucaucaccaucggcagcgugugcaugaccaucgggauggccaaccugauccuccagaucggcaacaucaucuccaucuggaucagccacuccauccagcuggggaaccagaaccagaucgagacgugcaaccagagcgucaucaccuacgagaacaacaccugggugaaccagaccuacgugaacaucuccaacacgaacuucgccgcgggccagagcgucguguccgugaagcuggccgggaacagcucccucugcccggucagcggcugggccaucuacuccaaggacaacagcauccgcaucggcuccaagggggacguguucgugauccgggagcccuucaucagcugcagcccccuggagugccgcaccuucuuccugacccagggcgcccuccugaacgacaagcacuccaacgggaccaucaaggaccggucccccuaccgcacgcugaugagcugcccgaucggcgagguccccucccccuacaacagccgguucgagagcguggccugguccgcgagcgccugccacgacgggaucaacuggcucaccaucggcaucuccggccccgacaacggggccguggccguccugaaguacaacggcaucaucaccgacaccaucaagagcuggcgcaacaacauccugcggacgcaggaguccgagugcgcgugcgugaacgggagcugcuucaccgugaugaccgacggcccguccgacggccaggccagcuacaagaucuuccgcaucgagaaggggaagaucgucaaguccguggagaugaacgcccccaacuaccacuacgaggagugcagcugcuaccccgacuccagcgagaucacgugcgugugccgggacaacuggcacggcuccaaccgccccugggucagcuucaaccagaaccucgaguaccagaucggguacaucugcuccggcguguucggggacaacccgcggcccaacgacaagaccggcagcugcggccccguguccagcaacggggccaacggcgucaagggguucuccuucaaguacggcaacgggguguggaucggccgcaccaagagcaucagcucccggaacggcuucgagaugaucugggaccccaacggguggaccggcaccgacaacaacuucagcaucaagcaggacaucguggggaucaacgagugguccggcuacagcggguccuucguccagcacccggagcugacgggccuggacugcauccgccccugcuucuggguggagcucauccggggccgccccaaggagaacaccaucuggaccagcggguccagcaucuccuucugcggcgucaacagcgacaccguggggugguccuggcccgacggcgccgagugcccguucacgaucgacaaguga

SEQ ID NO: 84209 - RNA, 1410 nt, Artificial Sequence; identical to SEQ ID NO: 80762
  derived and/or modified CDS sequence (opt1) from neuraminidase__InfluenzaA__ADV19022

SEQ ID NO: 84210 - RNA, 1410 nt, Artificial Sequence
  derived and/or modified CDS sequence (opt1) from neuraminidase__InfluenzaA__ADV41679
augaaccccaaccagaagaucaucaccaucggcagcgugugcaugaccaucgggauggccaaccugauccuccagaucggcaacaucaucuccaucuggaucagccacuccauccagcugcgcaaccagaaccagaucgagacgugcaaccagagcgucaucaccuacgagaacaacaccugggugaaccagaccuacgugaacaucuccaacacgaacuucgccgcggggcagagcgucguguccgugaagcuggccggcaacagcucccucugcccggucagcgggugggccaucuacuccaaggacaacagcauccggaucggcuccaagggcgacguguucgugauccgcgagcccuucaucagcugcagcccccuggagugccggaccuucuuccugacccagggggcccuccugaacgacaagcacuccaacggcaccaucaaggaccgcucccccuaccggacgcugaugagcugcccgaucggggagguccccucccccuacaacagccgcuucgagagcguggccugguccgcgagcgccugccacgacggcaucaacuggcucaccaucgggaucuccggccccgacaacggcgccguggccguccugaaguacaacgggaucaucaccgacaccaucaagagcuggcggaacaacauccugcgcacgcaggaguccgagugcgcgugcgugaacggcagcugcuucaccgugaugaccgacgggccguccgacggccaggccagcuacaagaucuuccggaucgagaagggcaagaucgucaaguccguggagaugaacgcccccaacuaccacuacgaggagugcagcugcuaccccgacuccagcgagaucacgugcgugugccgcgacaacuggcacggguccaaccggcccugggucagcuucaaccagaaccucgaguaccagaucggcuacaucugcuccgggaucuucggcgacaacccgcgccccaacgacaagaccgggagcugcggccccguguccagcaacggcgccaacggggugaagggcuucuccuucaaguacgggaacggcgucuggaucgggcggaccaagagcaucagcucccgcaacggcuucgagaugaucugggaccccaacggcuggaccgggaccgacaacaacuucagcaucaagcaggacaucgugggcaucaacgagugguccggguacagcggcuccuucgugcagcacccggagcugacggggcuggacugcauccggcccugcuucugggucgagcucauccgcggccggcccaaggagaacaccaucuggaccagcggcuccagcaucuccuucugcggggugaacagcgacaccgucggcugguccuggcccgacggggccgagcugccguucacgaucgacaaguga

SEQ ID NO: 84211 - RNA, 1410 nt, Artificial Sequence
  derived and/or modified CDS sequence (opt1) from neuraminidase__InfluenzaA__ADV76582
augaaccccaaccagaagaucaucaccaucggcagcgugucccugaccaucagcacggucugcuucuucaugcagaucgccauccucaucaccaccgugacccugcacuucaagcaguacgaguucaacuccccgcccaacaaccaggugaugcugugcgagcccacgaucaucgagcgcaacaucaccgagaucgucuaccucaccaacaccacgaucgagaaggagaucugccccaagcuggccgaguaccggaacuggagcaagccgcagugcgacaucaccggguucgcgcccuucuccaaggacaacagcauccgccuguccgccggcggggacaucugggugacccgggagcccuacgugagcugcgaccccgacaagugcuaccaguucgcccucggccaggggaccacgcugaacaacguccacuccaacaacaccgugcgcgaccggaccccguaccgcacccugcucaugaacgagcugggcgugcccuuccaccugggcacgaagcaggucugcaucgccuggagcuccagcuccugccacgacgggaaggccuggcuccacgugugcaucaccggcgacgacaagaacgcgaccgccagcuucaucuacaacgggcggcugguggacuccgucgugagcugguccaaggagauccugcgcacccaggagagcgagugcgugugcaucaacggcacgugcaccgucgugaugaccgacggguccgccagcggcaaggccgacaccaagauccucuucaucgaggagggcaagaucgugcacacgagcacccuguccgggagcgcgcagcacgucgaggagugcuccugcuacccccgguaccccggcgugcgcugcgugugccgggacaacuggaaggggagcaaccgcccgaucgucgacaucaacaucaaggaccacuccaucgugagcuccuacgugugcagcggccuggucggcgacacgccccggaagaacgacuccagcuccagcucccacugccucgaccccaacaacgaggagggcgggcacggggugaagggcugggccuucgacgacgggaacgacgucuggaugggccgcaccaucaacgagaccagccggcugggcuacgagaccuucaaggugaucgaggggugguccaaccccaagagcaagcugcagaucaaccgccaggugaucgucgacaagggcaaccgguccggguacagcggcaucuucuccguggagggcaagagcugcaucaaccgcugcuucuacguggagcucauccgggggcgcaaggaggagaccgagguccuguggaccagcaacuccaucgugguguucugcggcacgagcgggaccuacggcaccggguccuggccggacggcgccgaccugaaccucaugcccaucuga

SEQ ID NO: 84212 - RNA, 1410 nt, Artificial Sequence; identical to SEQ ID NO: 80623
  derived and/or modified CDS sequence (opt1) from neuraminidase__InfluenzaA__ADV76590

SEQ ID NO: 84213 - RNA, 1410 nt, Artificial Sequence; identical to SEQ ID NO: 80623
  derived and/or modified CDS sequence (opt1) from neuraminidase__InfluenzaA__ADV76601

SEQ ID NO: 84214 - RNA, 1410 nt, Artificial Sequence; identical to SEQ ID NO: 81616
  derived and/or modified CDS sequence (opt1) from neuraminidase__InfluenzaA__ADV76612

SEQ ID NO: 84215 - RNA, 1410 nt, Artificial Sequence; identical to SEQ ID NO: 80623
  derived and/or modified CDS sequence (opt1) from neuraminidase__InfluenzaA__ADV76623

SEQ ID NO: 84216 - RNA, 1410 nt, Artificial Sequence; identical to SEQ ID NO: 80623
  derived and/or modified CDS sequence (opt1) from neuraminidase__InfluenzaA__ADV76634

SEQ ID NO: 84217 - RNA, 1410 nt, Artificial Sequence; identical to SEQ ID NO: 83490
  derived and/or modified CDS sequence (opt1) from neuraminidase__InfluenzaA__ADV76645

SEQ ID NO: 84218 - RNA, 1410 nt, Artificial Sequence
  derived and/or modified CDS sequence (opt1) from neuraminidase__InfluenzaA__ADV76667
augaaccccaaccagaagaucaucaccaucggcagcgugucccugaccaucgccacggucugcuuccucaugcagaucgccauccuggugaccaccgugacccugcacuucaagcaguacgagugcgacagcccggcguccaaccaggucaugcccugcgagcccaucaucaucgagcgcaacaucacggagaucguguaccucaacaacaccaccaucgagaaggagaucugccccaagguggucgaguaccggaacuggagcaagccgcagugccagaucaccggguucgcccccuucuccaaggacaacagcauccgccuguccgccggcggggacaucugggugacgcgggagcccuacgugagcugcgaccacggcaagugcuaccaguucgcccuggggcagggcaccacccucgacaacaagcacuccaacgacaccauccacgaccgcaucccccaccggacgcugcugaugaacgagcucggcgucccguuccaccuggggacccgccaggugugcaucgccuggagcuccagcuccugccacgacggcaaggcguggcugcacgugugcaucaccggggacgacaagaacgccaccgccagcuucaucuacgacggccggcucgucgacuccaucgggagcuggucccagaacauccugcgcacgcaggagagcgagugcgugugcaucaacgggaccugcaccguggucaugaccgacggcuccgccagcggccgggcggacacgcgcauccuguucaucgaggagggcaagaucgugcacaucagcccccucuccgggagcgcccagcacguggaggagugcuccugcuacccccgguaccccggcguccgcugcaucugccgggacaacuggaagggcagcaaccgcccggugguggacaucaacauggaggacuacuccaucgacagcuccuacgucugcagcgggcuggugggcgacacgccccggaacgacgaccgcuccagcaacuccaagagccggaaccccaacaacgagcgcgggaaccagggcgugaaggggugggccuucgacaacggcgacgacgucuggaugggccggaccaucucccgcgaccugcggagcggguacgagaccuucaaggugaucggcgggugguccacccccaacagcaagucccagaucaaccgccaggucaucguggacagcgacaaccgcuccggcuacagcgggaucuucagcguggagggcaaguccugcaucaaccggugcuucuacgucgagcucauccgcggccggaagcaggagacccgcgugugguggaccagcaacuccaucguggucuucugcgggaccagcggcacguacgggaccggcuccuggccggacggggccaacaucaacuucaugcccaucuga

SEQ ID NO: 84219 - RNA, 1410 nt, Artificial Sequence; identical to SEQ ID NO: 83492
  derived and/or modified CDS sequence (opt1) from neuraminidase__InfluenzaA__ADV76676

SEQ ID NO: 84220 - RNA, 1410 nt, Artificial Sequence; identical to SEQ ID NO: 82633
  derived and/or modified CDS sequence (opt1) from neuraminidase__InfluenzaA__ADV76697

SEQ ID NO: 84221 - RNA, 1410 nt, Artificial Sequence
  derived and/or modified CDS sequence (opt1) from neuraminidase__InfluenzaA__ADV76708
augaaccccaaccagaagaucaucaccaucggcagcgugucccugaccaucagcacgaucugcuucuucaugcagaccgccauccucaucaccaccgucacgcugcacuucaagcagugcgaguucaacuccccgcccaacaaccaggugaugcugugcgagcccaccaucaucgagcgcaacaucaccgagaucguguaccucaccaacaucacgaucgagaaggagaucugccccaagcuggccgaguaccggaacuggagcaagccgcagugcgacaucaccggguucgcgcccuucuccaaggacaacagcauccgccuguccgccggcggggacaucugggucacccgggagcccuacgugagcugcgaccccgacaagugcuaccaguucgcccucggccaggggaccacgcugaacaacgugcacuccaacaacaccguccgcgaccggaccccguaccgcacccugcucaugaacgagcugggcgugcccuuccaccugggcacgaagcaggucugcaucgccuggagcuccagcuccugccacgacgggaaggccuggcuccacgugugcaucaccggcgacgacaagaacgcgaccgccagcuucaucuacaacgggcggcugguggacuccguggucagcugguccaaggagauccugcgcacccaggagagcgagugcgugugcaucaacggcacgugcaccguggucaugaccgacggguccgccagcggcaaggccgacaccaagauccucuucaucgaggagggcaagaucgugcacacgagcacccuguccgggagcgcgcagcacguggaggagugcuccugcuacccccgguaccccggcguccgcugcgugugccgggacaacuggaaggggagcaaccgcccgaucguggacaucaacaucaaggaccacuccaucgucagcuccuacgugugcagcggccuggugggcgacacgccccggaagaacgacuccagcuccagcucccacugccucgaccccaacaacgaggagggcgggcacggggucaagggcugggccuucgacgacgggaacgacguguggaugggccgcaccaucagcgagaagucccggcugggcuacgagaccuucaaggucaucgagggguggagcaaccccaaguccaagcugcagaucaaccgccaggugaucguggaccggggcaaccgcagcggguacuccggcaucuucagcgucgagggcaagagcugcaucaaccggugcuucuacguggagcucauccgcgggcggaaggaggagaccgaggugcuguggaccuccaacagcaucgucguguucugcggcaccuccgggacguacggcaccgggagcuggccggacggcgccgacaucaaccugaugcccaucuga

SEQ ID NO: 84222 - RNA, 1410 nt, Artificial Sequence
  derived and/or modified CDS sequence (opt1) from neuraminidase__InfluenzaA__ADV76719
augaaccccaaccagaagaucaucaccaucggcagcgugucccugaccaucagcacgaucugcuucuucaugcagaucgccauccucaucaccaccgucacccugcacuucaagcaguacgaguucaacuccccgcccaacaaccaggugaugcugugcgagcccacgaucaucgagaagaacaucaccgagaucguguaccucaccaacaccacgaucgagaaggagaucugccccaagcuggccgaguaccgcaacuggagcaagccgcagugcgacaucaccggguucgcgcccuucuccaaggacaacagcauccggcuguccgccggcggggacaucugggucacccgcgagcccuacgugagcugcgaccccgacaagugcuaccaguucgcccucggccaggggaccacgcugaacaacgugcacuccaacaacaccguccgggaccgcaccccguaccggacccugcucaugaacgagcugggcgugcccuuccaccugggcacgaagcaggucugcaucgccuggagcuccagcuccugccacgacgggaaggccuggcuccacgugugcaucaccggcgacgacaagaacgcgaccgccagcuucaucuacaacgggcgccugguggacuccguggucagcugguccaaggagauccugcggacccaggagagcgagugcgugugcaucaacggcacgugcaccguggucaugaccgacggguccgccagcggcaaggccgacaccaagauccucuucaucgaggagggcaagaucgugcacacgagcacccuguccgggagcgcgcagcacguggaggagugcuccugcuacccccgcuaccccggcguccggugcgugugccgcgacaacuggaaggggagcaaccggccgaucguggacaucaacaucaaggaccacuccaucgucagcuccuacgugugcagcggccuggugggcgacacgccccgcaagaacgacuccagcuccagcucccacugccucgaccccaacaacgaggagggcgggcacggggucaagggcugggccuucgacgacgggaacgacguguggaugggccggaccaucagcgagaagucccgccugggcuacgagaccuucaaggucaucgagggguggagcaaccccaaguccaagcugcagaugaaccgccaggugaucguggaccggggcaaccggagcggguacuccggcaucuucagcgucgagggcaagagcugcaucaaccgcugcuucuacguggagcucauccgggggcgcaaggaggagaccgaggugcuguggaccuccaacagcaucgucguguucugcggcaccuccgggacguacggcaccgggagcuggccggacggcgccgacaucaaccugaugcccaucuga

SEQ ID NO: 84223 - RNA, 1410 nt, Artificial Sequence
  derived and/or modified CDS sequence (opt1) from neuraminidase__InfluenzaA__ADV76730
augaaccccaaccagaagaucaucaccaucggcagcgugucccugaccaucagcacgaucugcuucuucaugcagaucgccauccucaucaccaccgucacccugcacuucaagcaguacgaguucaacuccccgcccaacaaccaggugaugcugugcgagcccacgaucaucgagcgcaacaucaccgagaucguguaccucaccaacaccacgaucgagaaggagaucugccccaagcuggccgaguaccggaacuggagcaagccgcagugcgacaucaccggguucgcgcccuucuccaaggacaacagcauccgccuguccgccggcggggacaucugggucacccgggagcccuacgugagcugcgaccccgacaagugcuaccaguucgcccucggccaggggaccacgcugaacaacgugcacuccaacaacaccguccgcgaccggaccccguaccgcacccugcucaugaacgagcugggcgugcccuuccaccugggcacgaagcaggucugcaucgccuggagcuccagcuccugccacgacgggaaggccuggcuccacgugugcaucaccggcgacgacaagaacgcgaccgccagcuucaucuacaacgggcggcugguggacuccguggucagcugguccaaggagacccugcgcacgcaggagagcgagugcgugugcaucaacgggaccugcaccguggucaugaccgacggguccgccagcggcaaggccgacacgaagauccucuucaucgaggagggcaagaucgugcacaccagcacccuguccgggagcgcgcagcacguggaggagugcuccugcuacccccgguaccccggcguccgcugcgugugccgggacaacuggaaggggagcaaccgcccgaucguggacaucaacaucaaggaccacuccaucgucagcuccuacgugugcagcggccuggugggcgacacgccccggaaggacgacuccagcuccagcucccacugccucgaccccaacaacgaggagggcggccacggggucaagggcugggccuucgacgacgggaacgacguguggaugggccgcaccaucagcgagaagucccggcugggcuacgagaccuucaaggucaucgagggguggagcaaccccaaguccaagcugcagaucaaccgccaggugaucguggaccggggcaaccgcagcggguacuccggcaucuucagcgucgagggcaagagcugcaucaaccggugcuucuacguggagcucauccgcgggcggaaggaggagaccgaggugcuguggaccuccaacagcaucgucguguucugcggcacguccgggaccuacggcaccgggagcuggccggacggcgccgacaucaaccugaugcccaucuga

SEQ ID NO: 84224 - RNA, 1410 nt, Artificial Sequence
  derived and/or modified CDS sequence (opt1) from neuraminidase__InfluenzaA__ADV78132
augaaccccaaccagaagaucaucaccaucggcagcgugugcaugaccaucgggauggccaaccugauccuccagaucggcaacaucaucuccaucuggaucagccacuccauccagcuggggaaccagagccagaucgagacgugcaaccaguccgucaucaccuacgagaacaacaccuggcugaaccagaccuacgugaacaucagcaacacgaacuucgccgcgggccaguccguggucagcgugaagcucgccgggaacuccagccugugcccgguguccggcugggccaucuacagcaaggacaacuccauccgcaucggcagcaagggggacgucuucgugauccgggagcccuucaucuccugcagccccuccgagugccgcaccuucuuccugacccagggcgcccuccugaacgacaagcacagcaacgggaccaucaaggaccggucccccuaccgcacgcugaugagcugcccgaucggcgaggugcccagccccuacaacucccgguucgagagcgucgccugguccgcgagcgccugccacgacgggaucaacuggcucaccaucggcaucuccggccccgacaacggggccguggccgugcugaaguacaacggcaucaucaccgacaccaucaagagcuggcgcaacaacauccugcggacgcaggaguccgagugcgcgugcgucaacgggagcugcuucaccaucaugaccgacggcccguccgacggccaggccagcuacaagaucuuccgcaucgagaaggggaagaucgugaaguccgugggcaugaacgcccccaacuaccacuacgaggagugcagcugcuaccccgacuccagcgagaucacgugcgucugccgggacaacuggcacggguccaaccgccccugggugagcuucaaccagaaccucgaguaccagaucggcuacaucugcuccgggaucuucggcgacaacccgcggcccaacgacaagaccggcagcugcgggcccguguccagcaacggcgccaacggggucaagggcuucagcuucaaguacgggaacggcguguggaucggccgcaccaaguccaucagcucccggaagggguucgagaugaucugggaccccaacggcuggaccgggaccgacaacaacuucagcaucaagcaggacaucgugggcaucaacgagugguccggguacagcggcuccuucguccagcacccggagcugacgggccuggacugcauccgccccugcuucuggguggagcucauccgggggcgccccaaggagaacaccaucugggccagcggcuccagcaucuccuucugcggggugaacagcgacaccgucggcugguccuggcccgacggcgcggagcugccguucaucaucgacaaguga

SEQ ID NO: 84225 - RNA, 1413 nt, Artificial Sequence
  derived and/or modified CDS sequence (opt1) from neuraminidase__InfluenzaA__ADW09104
augaaccccaaccagaagaucaucaccaucggcagcaucuccaucgccaucgggaucaucagccugaugcuccagaucggcaacaucaucuccaucugggccagccacuccauccagaccgggagccagaacaacacgggcaucugcaaccagcgcaucaucaccuacgagaacuccaccugggugaaccacaccuacgucaacaucaacaacacgaacgugguggcgggggaggacaagaccagcgucacccuggccggcaacuccagccugugcuccaucagcggcugggccaucuacaccaaggacaacuccauccggaucgggagcaagggcgacguguucgugauccgcgagccguucaucuccugcagccaccucgagugccggacguucuuccugacccagggggcccugcucaacgacaagcacuccaacggcaccgucaaggaccgcagccccuaccgggcccugauguccugcccccugggggaggcgcccagcccguacaacagcaaguucgaguccguggccuggagcgccuccgccugccacgacggcaugggcuggcucaccaucgggaucagcggccccgacaacggggcgguggccguccugaaguacaacggcaucaucacgggcaccaucaaguccuggaagaagcagauccugcgcacccaggagagcgagugcgugugcaugaacggguccugcuucaccaucaugacggacggccccaacaacaaggccgccagcuacaagaucuucaagaucgagaaggggaaggugaccaaguccaucgagcucaacgcccccaacuucuacuacgaggagugcagcugcuacccggacaccggcaucgucaugugcgugugccgggacaacuggcacggguccaaccgccccugggugagcuucaaccagaaccuggacuaccagaucggcuacaucugcuccggcgucuucggggacaacccccggcccgaggacggcgaggggagcugcaacccggugaccguggacggcgcgaacggggucaagggcuucuccuacaaguacggcaacgggguguggaucggccgcaccaagagcaaccggcugcgcaagggguucgagaugaucugggaccccaacggcuggacgaacaccgacuccgacuucagcgugaagcaggacgucguggccaucaccgacugguccggguacagcggcagcuucgugcagcaccccgagcucacgggccuggacugcauccggcccugcuucugggucgagcuggugcgcgggcucccgcgggagaacaccaccaucuggaccuccggcagcuccaucagcuucugcggggucaacuccgacacggccaacuggagcuggcccgacggcgccgagcugcccuucaccaucgacaaguga

SEQ ID NO: 84226 - RNA, 1413 nt, Artificial Sequence; identical to SEQ ID NO: 81485
  derived and/or modified CDS sequence (opt1) from neuraminidase__InfluenzaA__ADW09114

SEQ ID NO: 84227 - RNA, 1413 nt, Artificial Sequence
  derived and/or modified CDS sequence (opt1) from neuraminidase__InfluenzaA__ADW09123
augaaccccaaccagaagaucaucaccaucggcagcaucuccaucgccaucgggaucaccagccugaugcuccagaucggcaacaucaucuccaucugggccagccacuccauccagacggggagccagaacaacaccggcaucugcaaccagcgcaucaucaccuacgagaacuccaccugggugaaccacacguacgucaacaucaacaacaccaacgugguggcgggggaggacaagaccagcgucacccuggccggcaacuccagccugugcuccaucagcggcugggccaucuacacgaaggacaacuccauccggaucgggagcaagggcgacguguucgugauccgcgagccguucaucuccugcagccaccucgagugccggaccuucuuccugacccagggggcccugcucaacgacaagcacuccaacggcaccgucaaggaccgcagccccuaccgggcccugauguccugcccccugggggaggcgcccagcccguacaacagcaaguucgaguccguggccuggagcgccuccgccugccacgacggcaugggcuggcucacgaucgggaucagcggccccgacaacggggcgguggccguccugaaguacaacggcaucaucaccggcaccaucaaguccuggaagaagcagauccugcgcacccaggagagcgagugcgugugcaugaacggguccugcuucacgaucaugaccgacggccccagcaacaaggccgccuccuacaagaucuucaagaucgagaaggggaaggugaccaagagcaucgagcucaacgcccccaacuucuacuacgaggagugcuccugcuacccggacaccggcaucgucaugugcgugugccgggacaacuggcacgggagcaaccgccccuggguguccuucaaccagaaccuggacuaccagaucggcuacaucugcagcggcgucuucggggacaacccccggcccgaggacggcgagggguccugcaacccggugacgguggacggcgcggacggggucaagggcuucagcuacaaguacggcaacgggguguggaucggccgcaccaaguccaaccggcugcgcaagggguucgagaugaucugggaccccaacggcuggaccaacaccgacagcgacuucuccgugaagcaggacgucguggccaucacggacuggagcggguacagcggcuccuucgugcagcaccccgagcucaccggccuggacugcauccggcccugcuucugggucgagcuggugcgcgggcucccgcgggagaacaccaccaucuggacgagcggcuccagcaucuccuucugcggggucaacagcgacaccgccaacugguccuggcccgacggcgccgagcugcccuucaccaucgacaaguga

SEQ ID NO: 84228 - RNA, 1413 nt, Artificial Sequence
  derived and/or modified CDS sequence (opt1) from neuraminidase__InfluenzaA__ADW09156
augaaccccaaccagaagaucaucaccaucggcagcaucuccaucgccaucgggaucaucagccugaugcuccagaucggcaacaucaucuccaucugggccagccacuccauccagaccgggagccagaacaacacgggcaucugcaaccagcgcaucaucaccuacgagaacuccaccugggugaaccacaccuacgucaacaucaacaacacgaacgugguggcgggggaggacaagaccagcgucacccuggccggcaacuccagccugugcuccaucagcggcugggccaucuacaccaaggacaacuccauccggaucgggagcaagggcgacguguucgugauccgcgagccguucaucuccugcagccaccucgagugccggacguucuuccugacccagggggcccugcucaacgacaagcacuccaacggcaccgucaaggaccgcagccccuaccgggcccugauguccugcccccugggggaggcgcccagcccguacaacagcaaguucgaguccguggccuggagcgccuccgccugccacgacggcaugggcuggcucaccaucgggaucagcggccccgacaacggggcgguggccguccugaaguacaacggcaucaucacgggcaccaucaaguccuggaagaagcagauccugcgcacccaggagagcgagugcgugugcaugaacggguccugcuucaccaucaugacggacggccccagcaacaaggccgccuccuacaagaucuucaagaucgagaaggggaaggugaccaagagcaucgagcucaacgcccccaacuucuacuacgaggagugcuccugcuacccggacaccggcaucgucaugugcgugugccgggacaacuggcacgggagcaaccgccccuggguguccuucaaccagaaccuggacuaccagaucggcuacaucugcagcggcgucuucggggacaacccccggcccgaggacggcgagggguccugcaacccggugaccguggacggcgcggacggggucaagggcuucagcuacaaguacggcaacgggguguggaucggccgcacgaaguccaaccggcugcgcaagggguucgagaugaucugggaccccaacggcuggaccaacaccgacagcgacuucuccgugaagcaggacgucguggccaucaccgacuggagcggguacagcggcuccuucgugcagcaccccgagcucacgggccuggacugcauccggcccugcuucugggucgagcuggugcgcgggcucccgcgggagaacaccaccaucuggaccagcggcuccagcaucuccuucugcggggucaacagcgacacggccaacugguccuggcccgacggcgccgagcugcccuucaccaucgacaaguga

SEQ ID NO: 84229 - RNA, 1413 nt, Artificial Sequence
  derived and/or modified CDS sequence (opt1) from neuraminidase__InfluenzaA__ADW09167
augaaccccaaccagaagaucaucaccaucggcagcaucuccaucgccaucgggaucaucagccugaugcuccagaucggcaacaucaucuccaucugggccagccacuccauccagaccgggagccagaacaacacgggcaucugcaaccagcgcaucaucaccuacgagaacuccaccugggugaaccacaccuacgucaacaucaacaacacgaacgugguggcgggggaggacaagaccagcgucacccuggccggcaacuccagccugugcuccaucagcggcugggccaucuacaccaaggacaacuccauccggaucgggagcaagggcgacguguucgugauccgcgagccguucaucuccugcagccaccucgagugccggacguucuuccugacccagggggcccugcucaacgacaagcacuccaacggcaccgucaaggaccgcagccccuaccgggcccugauguccugcccccugggggaggcgcccagcccguacaacagcaaguucgaguccguggccuggagcgccuccgccugccacgacggcaugggcuggcucaccaucgggaucagcggccccgacaacggggcgguggccguccugaaguacaacggcaucaucacgggcaccaucaaguccuggaagaagcagauccugcgcacccaggagagcgagugcgugugcaugaacggguccugcuucaccaucaugacggacggccccagcaacaaggccgccuccuacaagaucuucaagaucgagaaggggaaggugaccaagagcaucgagcucaacgcccccaacuucuacuacgaggagugcuccugcuacccggacaccggcaucgucaugugcgugugccgggacaacuggcacgggagcaaccgccccuggguguccuucaaccagaaccuggacuaccagaucggcuacaucugcagcggcgucuucggggacaacccccggcccgaggacggcgagggguccugcaacccggugaccgugaacggcgcggacggggucaagggcuucagcuacaaguacggcaacgggguguggaucggccgcacgaaguccaaccggcugcgcaagggguucgagaugaucugggaccccaacggcuggaccaacaccgacagcgacuucuccgugaagcaggacgucguggccaucaccgacuggagcggguacagcggcuccuucgugcagcaccccgagcucacgggccuggacugcauccggcccugcuucugggucgagcuggugcgcgggcucccgcgggagaacaccaccaucuggaccagcggcuccagcaucuccuucugcggggucaacagcgacacggccaacugguccuggcccgacggcgccgagcugcccuucaccaucgacaaguga

SEQ ID NO: 84230 - RNA, 1413 nt, Artificial Sequence; identical to SEQ ID NO: 81485
  derived and/or modified CDS sequence (opt1) from neuraminidase__InfluenzaA__ADW09178

SEQ ID NO: 84231 - RNA, 1413 nt, Artificial Sequence; identical to SEQ ID NO: 81485
  derived and/or modified CDS sequence (opt1) from neuraminidase__InfluenzaA__ADW09189

SEQ ID NO: 84232 - RNA, 1413 nt, Artificial Sequence; identical to SEQ ID NO: 84229
  derived and/or modified CDS sequence (opt1) from neuraminidase__InfluenzaA__ADW09211

SEQ ID NO: 84233 - RNA, 1413 nt, Artificial Sequence
  derived and/or modified CDS sequence (opt1) from neuraminidase__InfluenzaA__ADW09222
augaaccccaaccagaagaucaucaccaucggcagcaucuccaucgccaucgggaucaucagccugaugcuccagaucggcaacaucaucuccaucugggccagccacuccauccagaccgggagccagaacaacacgggcaucugcaaccagcgcaucaucaccuacgagaacuccaccugggugaaccacaccuacgucaacaucaacaacacgaacgugguggcgggggaggacaagaccagcgucacccuggccggcaacuccagccugugcuccaucagcggcugggccaucuacaccaaggacaacuccauccggaucgggagcaagggcgacguguucgugauccgcgagccguucaucuccugcagccaccucgagugccggacguucuuccugacccagggggcccugcucaacgacaagcacuccaacggcaccgucaaggaccgcagccccuaccgggcccugauguccugcccccugggggaggcgcccagcccguacaacagcaaguucgaguccguggccuggagcgccuccgccugccacgacggcaugggcuggcucaccaucgggaucagcggccccgacaacggggcgguggccguccugaaguacaacggcaucaucacgggcaccaucaaguccuggaagaagcagauccugcgcacccaggagagcgagugcgugugcaugaacggguccugcuucaccaucaugacggacggccccagcaacaaggccgccuccuacaagaucuucaagaucgagaaggggaaggugaccaagagcaucgagcucaacgcccccaacuucuacuacgaggagugcuccugcuacccggacaccggcaucgucaugugcgugugccgggacaacuggcacgggagcaaccgccccuggguguccuucaaccagaaccuggacuaccagaucggcuacaucugcagcggcgucuucggggacaacccccggcccgaggacggcgagggguccugcaacagcgugaccguggacggcgcggacggggucaagggcuucuccuacaaguacggcaacgggguguggaucggccgcaccaagagcaaccggcugcgcaagggguucgagaugaucugggacccgaacggcuggacgaacaccgacuccgacuucagcgugaagcaggacgucguggccaucaccgacuggagcggguacuccggcagcuucgugcagcaccccgagcucacgggccuggacugcauccggcccugcuucugggucgagcuggugcgcgggcucccccgggagaacaccaccaucuggaccuccggcagcuccaucagcuucugcggggucaacuccgacacggccaacuggagcuggccggacggcgccgagcugcccuucaccaucgacaaguga

SEQ ID NO: 84234 - RNA, 1413 nt, Artificial Sequence
  derived and/or modified CDS sequence (opt1) from neuraminidase__InfluenzaA__ADW09233
augaaccccaaccagaagaucaucaccaucggcagcaucuccaucgccaucgggaccaucagccugaugcuccagaucggcaacaucaucuccaucugggccagccacuccauccagacggggagccagaacaacaccggcaucugcaaccagcgcaucaucaccuacgagaacuccaccugggugaaccacacguacgucaacaucaacaacaccaacgugguggcgggggaggacaagaccagcgucacccuggccggcaacuccagccugugcuccaucagcggcugggccaucuacacgaaggacaacuccauccggaucgggagcaagggcgacguguucgugauccgcgagccguucaucuccugcagccaccucgagugccggaccuucuuccugacccagggggcccugcucaacgacaagcacuccaacggcaccgucaaggaccgcagccccuaccgggcccugauguccugcccccugggggaggcgcccagcccguacaacagcaaguucgaguccguggccuggagcgccuccgccugccacgacggcaugggcuggcucacgaucgggaucagcggccccgacaacggggcgguggccguccugaaguacaacggcaucaucaccggcaccaucaaguccuggaagaagcagauccugcgcacccaggagagcgagugcgugugcaugaacggguccugcuucacgaucaugaccgacggccccagcaacaaggccgccuccuacaagaucuucaagaucgagaaggggaaggugaccaagagcaucgagcucaacgcccccaacuucuacuacgaggagugcuccugcuacccggacaccggcaucgucaugugcgugugccgggacaacuggcacgggagcaaccgccccuggguguccuucaaccagaaccuggacuaccagaucggcuacaucugcagcggcgucuucggggacaacccccggcccgaggacggcgagggguccugcaacccggugacgguggacggcgcgaacggggucaagggcuucagcuacaaguacggcaacgggguguggaucggccgcaccaaguccaaccggcugcgcaagggguucgagaugaucugggaccccaacggcuggaccaacaccgacagcgacuucuccgugaagcaggacgucguggccaucacggacuggagcggguacagcggcuccuucgugcagcaccccgagcucaccggccuggacugcauccggcccugcuucugggucgagcuggugcgcgggcucccgcgggagaacaccaccaucuggacgagcggcuccagcaucuccuucugcggggucaacagcgacaccgccaacugguccuggcccgacggcgccgagcugcccuucaccaucgacaaguga

SEQ ID NO: 84235 - RNA, 1413 nt, Artificial Sequence; identical to SEQ ID NO: 84228
  derived and/or modified CDS sequence (opt1) from neuraminidase__InfluenzaA__ADW09244

SEQ ID NO: 84236 - RNA, 1413 nt, Artificial Sequence; identical to SEQ ID NO: 84228
  derived and/or modified CDS sequence (opt1) from neuraminidase__InfluenzaA__ADW09255

SEQ ID NO: 84237 - RNA, 1413 nt, Artificial Sequence; identical to SEQ ID NO: 84228
  derived and/or modified CDS sequence (opt1) from neuraminidase__InfluenzaA__ADW09266

SEQ ID NO: 84238 - RNA, 1413 nt, Artificial Sequence; identical to SEQ ID NO: 84228
  derived and/or modified CDS sequence (opt1) from neuraminidase__InfluenzaA__ADW09277

SEQ ID NO: 84239 - RNA, 1413 nt, Artificial Sequence; identical to SEQ ID NO: 81485
  derived and/or modified CDS sequence (opt1) from neuraminidase__InfluenzaA__ADW09288

SEQ ID NO: 84240 - RNA, 1413 nt, Artificial Sequence; identical to SEQ ID NO: 84229
  derived and/or modified CDS sequence (opt1) from neuraminidase__InfluenzaA__ADW09299

SEQ ID NO: 84241 - RNA, 1413 nt, Artificial Sequence; identical to SEQ ID NO: 81485
  derived and/or modified CDS sequence (opt1) from neuraminidase__InfluenzaA__ADW09310

SEQ ID NO: 84242 - RNA, 1413 nt, Artificial Sequence; identical to SEQ ID NO: 81485
  derived and/or modified CDS sequence (opt1) from neuraminidase__InfluenzaA__ADW09330

SEQ ID NO: 84243 - RNA, 1413 nt, Artificial Sequence; identical to SEQ ID NO: 84228
  derived and/or modified CDS sequence (opt1) from neuraminidase__InfluenzaA__ADW10475

SEQ ID NO: 84244 - RNA, 1413 nt, Artificial Sequence; identical to SEQ ID NO: 84229
  derived and/or modified CDS sequence (opt1) from neuraminidase__InfluenzaA__ADW10486

SEQ ID NO: 84245 - RNA, 1413 nt, Artificial Sequence; identical to SEQ ID NO: 81485
  derived and/or modified CDS sequence (opt1) from neuraminidase__InfluenzaA__ADW10497

SEQ ID NO: 84246 - RNA, 1413 nt, Artificial Sequence
  derived and/or modified CDS sequence (opt1) from neuraminidase__InfluenzaA__ADW10508
augaaccccaaccagaagaucaucaccaucggcagcaucuccaucgccaucgggaucaucagccugaugcuccagaucggcaacaucaucuccaucugggccagccacuccauccagaccgggagccagaacaacacgggcaucugcaaccagcgcaucaucaccuacgagaacuccaccugggugaaccacaccuacgucaacaucaacaacacgaacgugguggcgggggaggacaagaccagcgucacccuggccggcaacuccagccugugcuccaucagcggcugggccaucuacaccaaggacaacuccauccggaucgggagcaagggcgacguguucgugauccgcgagccguucaucuccugcagccaccucgagugccggacguucuuccugacccagggggcccuggucaacgacaagcacuccaacggcaccgugaaggaccgcagccccuaccgggcccucauguccugcccccugggggaggcgcccagcccguacaacagcaaguucgaguccguggccuggagcgccuccgccugccacgacggcaugggcuggcugaccaucgggaucagcggccccgacaacggggcggucgccgugcucaaguacaacggcaucaucacgggcaccaucaaguccuggaagaagcagauccugcgcacccaggagagcgagugcgugugcaugaacggguccugcuucaccaucaugacggacggccccagcaacaaggccgccuccuacaagaucuucaagaucgagaaggggaaggucaccaagagcaucgagcugaacgcccccaacuucuacuacgaggagugcuccugcuacccggacaccggcaucgugaugugcgugugccgggacaacuggcacgggagcaaccgccccugggucuccuucaaccagaaccucgacuaccagaucggcuacaucugcagcggcguguucggggacaacccccggcccgaggacggcgagggguccugcaacccggugaccgucaacggcgcggacggggugaagggcuucagcuacaaguacggcaacgggguguggaucggccgcacgaaguccaaccggcugcgcaagggguucgagaugaucugggaccccaacggcuggaccaacaccgacagcgacuucuccgucaagcaggacgugguggccaucaccgacuggagcggguacagcggcuccuucguccagcaccccgagcugacgggccucgacugcauccggcccugcuucuggguggagcugguccgcgggcugccgcgggagaacaccaccaucuggaccagcggcuccagcaucuccuucugcggggugaacagcgacacggccaacugguccuggcccgacggcgccgagcuccccuucaccaucgacaaguga

SEQ ID NO: 84247 - RNA, 1413 nt, Artificial Sequence; identical to SEQ ID NO: 81485
  derived and/or modified CDS sequence (opt1) from neuraminidase__InfluenzaA__ADW10519

SEQ ID NO: 84248 - RNA, 1413 nt, Artificial Sequence; identical to SEQ ID NO: 81485
  derived and/or modified CDS sequence (opt1) from neuraminidase__InfluenzaA__ADW10530

SEQ ID NO: 84249 - RNA, 1413 nt, Artificial Sequence
  derived and/or modified CDS sequence (opt1) from neuraminidase__InfluenzaA__ADW10541
augaaccccaaccagaagaucaucaccaucggcagcaucuccaucgccaucgggaucaucagccugaugcuccagaucggcaacaucaucuccaucugggccagccacuccauccagaccgggagccagaacaacacgggcaucugcaaccagcgcaucaucaccuacgagaacuccaccugggugaaccacaccuacgucaacaucaacaacacgaacgugguggcgggggaggacaagaccagcgucacccuggccggcaacuccagccugugcuccaucagcggcugggccaucuacaccaaggacaacuccauccggaucgggagcaagggcgacguguucgugauccgcgagccguucaucuccugcagccaccucgagugccggacguucuuccugacccagggggcccugcucaacgacaagcacuccaacggcaccgucaaggaccgcagccccuaccgggcccugauguccugcccccugggggaggcgcccagcccguacaacagcaaguucgaguccguggccuggagcgccuccgccugccacgacggcaugggcuggcucaccaucgggaucagcggccccgacaacggggcgguggccguccugaaguacaacggcaucaucacgggcaccaucaaguccuggaagaagcagauccugcgcacccaggagagcgagugcgugugcauggacggguccugcuucaccaucaugacggacggccccagcaacaaggccgccuccuacaagaucuucaagaucgagaaggggaaggugaccaagagcaucgagcucaacgcccccaacuucuacuacgaggagugcuccugcuacccggacaccggcaucgucaugugcgugugccgggacaacuggcacgggagcaaccgccccuggguguccuucaaccagaaccuggacuaccagaucggcuacaucugcagcggcgucuucggggacaacccccggcccgaggacggcgagggguccugcaacccggugaccguggacggcgcgaacggggucaagggcuucagcuacaaguacggcaacgggguguggaucggccgcacgaaguccaaccggcugcgcaagggguucgagaugaucugggaccccaacggcuggaccaacaccgacagcgacuucuccgugaagcaggacgucguggccaucaccgacuggagcggguacagcggcuccuucgugcagcaccccgagcucacgggccuggacugcauccggcccugcuucugggucgagcuggugcgcgggcucccgcgggagaacaccaccaucuggaccagcggcuccagcaucuccuucugcggggucaacagcgacacggccaacugguccuggcccgacggcgccgagcugcccuucaccaucgacaaguga

SEQ ID NO: 84250 - RNA, 1413 nt, Artificial Sequence
  derived and/or modified CDS sequence (opt1) from neuraminidase__InfluenzaA__ADW10552
augaaccccaaccagaagaucaucaccaucggcagcaucuccaucgccaucgggaucaucagccugaugcuccagaucggcaacaucaucuccaucugggccagccacuccauccagaccgggagccagaacaacacgggcaucugcaaccagcgcaucaucaccuacgagaacuccaccugggugaaccacaccuacgucaacaucaacaacacgaacgugguggcgggggaggacaagaccagcgucacccuggccggcaacuccagccugugcuccaucagcggcugggccaucuacaccaaggacaacuccauccggaucgggagcaagggcgacguguucgugauccgcgagccguucaucuccugcagccaccucgagugccggacguucuuccugacccagggggcccugcucaacgacaagcacuccaacggcaccgucaaggaccgcagccccuaccgggcccugauguccugcccccugggggaggcgcccagcccguacaacagcaaguucgaguccguggccuggagcgccuccgccugccacgacggcaugggcuggcucaccaucgggaucagcggccccgacaacggggcgguggccguccugaaguacaacggcaucaucacgggcaccaucaaguccuggaagaagcagauccugcgcacccaggagagcgagugcgugugcaugaacggguccugcuucaccaucaugacggacggccccagcaacaaggccgccuccuacaagaucuucaagaucgagaaggggaaggugaccaagagcaucgagcucaacgcccccgacuucuacuacgaggagugcuccugcuacccggacaccggcaucgucaugugcgugugccgggacaacuggcacgggagcaaccgccccuggguguccuucaaccagaaccuggacuaccagaucggcuacaucugcagcggcgucuucggggacaacccccggcccgaggacggcgagggguccugcaacccggugaccgugaacggcgcggacggggucaagggcuucagcuacaaguacggcaacgggguguggaucggccgcacgaaguccaaccggcugcgcaagggguucgagaugaucugggaccccaacggcuggaccaacaccgacagcgacuucuccgugaagcaggacgucguggccaucaccgacuggagcggguacagcggcuccuucgugcagcaccccgagcucacgggccuggacugcauccggcccugcuucugggucgagcuggugcgcgggcucccgcgggagaacaccaccaucuggaccagcggcuccagcaucuccuucugcggggucaacagcgacacggccaacugguccuggcccgacggcgccgagcugcccuucaccaucgacaaguga

SEQ ID NO: 84251 - RNA, 1413 nt, Artificial Sequence; identical to SEQ ID NO: 83961
  derived and/or modified CDS sequence (opt1) from neuraminidase__InfluenzaA__ADW10563

SEQ ID NO: 84252 - RNA, 1413 nt, Artificial Sequence; identical to SEQ ID NO: 81485
  derived and/or modified CDS sequence (opt1) from neuraminidase__InfluenzaA__ADW10574

SEQ ID NO: 84253 - RNA, 1413 nt, Artificial Sequence
  derived and/or modified CDS sequence (opt1) from neuraminidase__InfluenzaA__ADW10585
augaaccccaaccagaagaucaucaccaucggcagcaucuccaucgccaucgggaucaucagccugaugcuccagaucggcuccaucaucagcaucugggccucccacagcauccagaccgggucccagaacaacacgggcaucugcaaccagcgcaucaucaccuacgagaacagcaccugggugaaccacaccuacgucaacaucaacaacacgaacgugguggcgggggaggacaagaaguccgucacccuggccggcaacagcucccugugcagcaucuccggcugggccaucuacaccaaggacaacagcauccggaucggguccaagggcgacguguucgugauccgcgagccguucaucagcugcucccaccucgagugccggaccuucuuccugacgcagggggcccugcucaacgacaagcacagcaacggcaccgucaaggaccgcucccccuaccgggcccugaugagcugcccccugggggaggcgcccagcccguacaacuccaaguucgagagcguggccugguccgccagcgccugccacgacggcaugggcuggcucaccaucgggaucuccggccccgacaacggggcgguggccguccugaaguacaacggcaucaucaccggcacgaucaagagcuggaagaagcagauccugcgcacccaggaguccgagugcgugugcaugaacgggagcugcuucaccaucaugaccgacggccccuccaacaaggccgccagcuacaagaucuucaagaucgagaaggggaaggugacgaaguccaucgagcucaacgcccccaacuucuacuacgaggagugcagcugcuacccggacaccggcaucgucaugugcgugugccgggacaacuggcacggguccaaccgccccugggugagcuucaaccagaaccuggaguaccagaucggcuacaucugcuccggcgucuucggggacaacccccggcccgaggacggcgaggggagcugcaacccggugaccguggacggcgcgaacggggucaagggcuucuccuacaaguacggcaacgggguguggaucggccgcaccaagagcaaccggcugcgcaagggguucgagaugaucugggaccccaacggcuggacgaacaccgacuccgacuucagcgugaagcaggacgucguggccaucaccgacuggagcggguacuccggcagcuucgugcagcaccccgagcucaccggccuggacugcauccggcccugcuucugggucgagcuggugcgcgggcucccgcgggagaacacgaccaucuggaccuccggcagcuccaucagcuucugcggggucaacuccgacaccgccaacuggagcuggcccgacggcgccgagcugcccuucacgaucgacaaguga

SEQ ID NO: 84254 - RNA, 1413 nt, Artificial Sequence; identical to SEQ ID NO: 84229
  derived and/or modified CDS sequence (opt1) from neuraminidase__InfluenzaA__ADW10596

SEQ ID NO: 84255 - RNA, 1413 nt, Artificial Sequence; identical to SEQ ID NO: 84228
  derived and/or modified CDS sequence (opt1) from neuraminidase__InfluenzaA__ADW10607

SEQ ID NO: 84256 - RNA, 1413 nt, Artificial Sequence; identical to SEQ ID NO: 84228
  derived and/or modified CDS sequence (opt1) from neuraminidase__InfluenzaA__ADW10618

SEQ ID NO: 84257 - RNA, 1413 nt, Artificial Sequence; identical to SEQ ID NO: 84228
  derived and/or modified CDS sequence (opt1) from neuraminidase__InfluenzaA__ADW10629

SEQ ID NO: 84258 - RNA, 1413 nt, Artificial Sequence; identical to SEQ ID NO: 84228
  derived and/or modified CDS sequence (opt1) from neuraminidase__InfluenzaA__ADW10724

SEQ ID NO: 84259 - RNA, 1413 nt, Artificial Sequence; identical to SEQ ID NO: 84229
  derived and/or modified CDS sequence (opt1) from neuraminidase__InfluenzaA__ADW10735

SEQ ID NO: 84260 - RNA, 1413 nt, Artificial Sequence; identical to SEQ ID NO: 84229
  derived and/or modified CDS sequence (opt1) from neuraminidase__InfluenzaA__ADW10746

SEQ ID NO: 84261 - RNA, 1413 nt, Artificial Sequence
  derived and/or modified CDS sequence (opt1) from neuraminidase__InfluenzaA__ADW10757
augaaccccaaccagaagaucaucaccaucggcagcaucuccaucgccaucgggaucaucagccugaugcuccagaucggcaacaucaucuccaucugggccagccacuccauccagacccgcagccagaacaacacggggaucugcaaccagcggaucaucaccuacgagaacuccaccugggugaaccacaccuacgucaacaucaacaacacgaacgugguggcgggcggggacaagaccagcgucacccuggccggcaacuccagccugugcuccaucagcggcugggccaucuacaccaaggacaacuccauccgcaucgggagcaagggcgacguguucgugauccgggagccguucaucuccugcagccaccucgagugccgcacguucuuccugacccagggggcccugcucaacgacaagcacuccaacggcaccgucaaggaccggagccccuaccgcgcccugauguccugcccccugggggaggcgcccagcccguacaacagcaaguucgaguccguggccuggagcgccuccgccugccacgacggcaugggcuggcucaccaucgggaucagcggccccgacaacggggcgguggccguccugaaguacaacggcaucaucacgggcaccaucaaguccuggaagaagcagauccugcggacccaggagagcgagugcgugugcaugaacggguccugcuucacccucaugacggacggccccagcaacaaggccgccuccuacaagaucuucaagaucgagaaggggaaggugaccaagagcaucgagcugaacgcccccaacuucuacuacgaggagugcuccugcuacccggacaccggcaucgucaugugcgugugccgcgacaacuggcacgggagcaaccggcccuggguguccuucaaccagaaccuggacuaccagaucggcuacaucugcagcggcgucuucggggacaacccccgccccgaggacggcgagggguccugcaacccggugaccguggacggcgcgaacggggucaagggcuucagcuacaaguacggcaacgggguguggaucggccggacgaaguccaaccgccuccggaagggguucgagaugaucugggaccccaacggcuggaccaacaccgacagcgacuucuccgugaagcaggacgucguggccaucaccgacuggagcggguacagcggcuccuucgugcagcaccccgagcugacgggccuggacugcauccgccccugcuucugggucgagcucgugcgggggcugccgcgcgagaacaccaccaucuggaccagcggcuccagcaucuccuucugcggggucaacagcgacacggccaacugguccuggcccgacggcgccgagcugcccuucaccaucgacaaguga

SEQ ID NO: 84262 - RNA, 1413 nt, Artificial Sequence; identical to SEQ ID NO: 84228
  derived and/or modified CDS sequence (opt1) from neuraminidase__InfluenzaA__ADW10768

SEQ ID NO: 84263 - RNA, 1413 nt, Artificial Sequence; identical to SEQ ID NO: 81485
  derived and/or modified CDS sequence (opt1) from neuraminidase__InfluenzaA__ADW10779

SEQ ID NO: 84264 - RNA, 1413 nt, Artificial Sequence
  derived and/or modified CDS sequence (opt1) from neuraminidase__InfluenzaA__ADW10790
augaaccccaaccagaagaucaucaccaucggcagcaucuccaucgccaucgggaucaucagccugaugcuccagaucggcaacaucaucuccaucugggccagccacuccauccagaccgggagccagaacaacacgggcaucugcaaccagcgcaucaucaccuacgagaacuccaccugggugaaccacaccuacgucaacaucaacaacacgaacgugguggcgggggaggacaagaccagcgucacccuggccggcaacuccagccugugcuccaucagcggcugggccaucuacaccaaggacaacuccauccggaucgggagcaagggcgacguguucgugauccgcgagccguucaucuccugcagccaccucgagugccggacguucuuccugacccagggggcccugcucaacgacaagcacuccaacggcaccgucaaggaccgcagccccuaccgggcccugauguccugcccccugggggaggcgcccagcccguacaacagcaaguucgaguccguggccuggagcgccuccgccugccacgacggcaugggcuggcucaccaucgggaucagcggccccgacaacggggcgguggccguccugaaguacaacggcaucaucacgggcaccaucaaguccuggaagaagcagauccugcgcacccaggagagcgagugcgugugcaugaacggguccugcuucaccaucaugacggacggccccagcaacaaggccgccuccuacaagaucuucaagaucgagaaggggaaggugaccaagagcaucgagcucaacgcccccaacuucuacuacgaggagugcuccugcuacccggacaccggcaucgucaugugcgugugccgggacaacuggcacgggagcaaccgccccuggguguccuucaaccagaaccuggacuaccagaucggcuacaucugcagcggcgucuucggggacaacccccggcccgaggacggcgagggguccugcaacccggugaccguggacggcgcgaacggggucaagggcuucagcuacaaguacggcaacgggguguggaucggccgcacgaaguccaaccggcugcgcaagggguucgagaugaucugggaccccaacggcuggaccaacaccgacagcgacuucuccgugaagcaggacgucguggccaucaccgacuggagcggguacagcggcuccuucgugcagcaccccgagcucacgggccuggacugcaucauccccugcuucugggucgagcuggugcgggggcucccgcgcgagaacgccaccaucuggaccagcggcuccagcaucuccuucugcggggucaacagcgacaccgccaacugguccuggcccgacggcgccgagcugcccuucacgaucgacaaguga

SEQ ID NO: 84265 - RNA, 1413 nt, Artificial Sequence; identical to SEQ ID NO: 82954
  derived and/or modified CDS sequence (opt1) from neuraminidase__InfluenzaA__ADW10801

SEQ ID NO: 84266 - RNA, 1413 nt, Artificial Sequence; identical to SEQ ID NO: 84228
  derived and/or modified CDS sequence (opt1) from neuraminidase__InfluenzaA__ADW10812

SEQ ID NO: 84267 - RNA, 1413 nt, Artificial Sequence; identical to SEQ ID NO: 83980
  derived and/or modified CDS sequence (opt1) from neuraminidase__InfluenzaA__ADW10823

SEQ ID NO: 84268 - RNA, 1413 nt, Artificial Sequence
  derived and/or modified CDS sequence (opt1) from neuraminidase__InfluenzaA__ADW10834
augaaccccaaccagaagaucaucaccaucggcagcaucuccaucgccaucgggaucaucagccugaugcuccagaucggcaacaucaucuccaucugggccagccacuccauccagaccgggagccagaacaacacgggcaucugcaaccagcgcaucaucaccuacgagaacuccaccugggugaaccacaccuacgucaacaucaacaacacgaacgugguggcgggggaggacaagaccagcgucacccuggccggcaacuccagccugugcuccaucagcggcugggccaucuacaccaaggacaacuccauccggaucgggagcaagggcgacguguucgugauccgcgagccguucaucuccugcagccaccucgagugccggacguucuuccugacccagggggcccugcucaacgacaagcacuccaacggcaccgucaaggaccgcagccccuaccgggcccugauguccugcccccugggggaggcgcccagcccguacaacagcaaguucgaguccguggccuggagcgccuccgccugccacgacggcaugggcuggcucaccaucgggaucagcggccccgacaacggggcgguggccguccugaaguacaacggcaucaucacgggcaccaucaaguccuggaagaagcagauccugcgcacccaggagagcgagugcgugugcaugaacggguccugcuucaccaucaugacggacggccccagcaacaaggccgccuccuacaagaucuucaagaucgagaaggggaaggugaucaagagcaucgagcucaacgcccccaacuucuacuacgaggagugcuccugcuacccggacaccggcaucgucaugugcgugugccgggacaacuggcacgggagcaaccgccccuggguguccuucaaccagaaccuggacuaccagaucggcuacaucugcagcggcgucuucggggacaacccccggcccgaggacggcgagggguccugcaacccggugaccguggacggcgcgaacggggucaagggcuucagcuacaaguacggcaacgggguguggaucggccgcaccaaguccaaccggcugcgcaagggguucgagaugaucugggaccccaacggcuggacgaacaccgacagcgacuucuccgugaagcaggacgucguggccaucaccgacuggagcggguacagcggcuccuucgugcagcaccccgagcucaccggccuggacugcauccggcccugcuucugggucgagcuggugcgcgggcucccgcgggagaacacgaccaucuggaccagcggcuccagcaucuccuucugcggggucaacagcgacaccgccaacugguccuggcccgacggcgccgagcugcccuucacgaucgacaaguga

SEQ ID NO: 84269 - RNA, 1413 nt, Artificial Sequence; identical to SEQ ID NO: 84229
  derived and/or modified CDS sequence (opt1) from neuraminidase__InfluenzaA__ADW10845

SEQ ID NO: 84270 - RNA, 1413 nt, Artificial Sequence
  derived and/or modified CDS sequence (opt1) from neuraminidase__InfluenzaA__ADW10856
augaaccccaaccagcgcaucaucaccaucggcagcaucuccaucgccaucgggaucaucagccugaugcuccagaucggcaacaucaucuccaucugggccagccacuccauccagaccgggagccagaacaacacgggcaucugcaaccagcggaucaucaccuacgagaacuccaccugggugaaccacaccuacgucaacaucaacaacacgaacgugguggcgggggaggacaagaccagcaugacccuggccggcaacuccagccugugcuccaucagcggcugggccaucuacaccaaggacaacuccauccgcaucgggagcaagggcgacgucuucgugauccgggagccguucaucuccugcagccaccucgagugccgcacguucuuccugacccagggggcccugcucaacgacaagcacuccaacggcaccgccaaggaccggagccccuaccgcgcgcugauguccugcccccugggggaggcccccagcccguacaacagcaaguucgaguccguggccuggagcgccuccgcgugccacgacggcaugggcuggcucaccaucgggaucagcggccccgacaacggggccgucgccgugcugaaguacaacggcaucaucacgggcaccaucaaguccuggaagaagcagauccugcggacccaggagagcgagugcgugugcaugaacggguccugcuucaccaucaugacggacggccccagcaacaaggccgccuccuacaagaucuucaagaucgagaaggggaaggucaccaagagcaucgagcucaacgcgcccaacuucuacuacgaggagugcuccugcuacccggacaccggcaucgugaugugcgugugccgcgacaacuggcacgggagcaaccggcccugggucuccuucaaccagaaccuggacuaccagaucggcuacaucugcagcggcguguucggggacaacccccgccccgaggacggcgagggguccugcaacccggugaccgucgacggcgccaacggggugaagggcuucagcuacaaguacggcaacgggguguggaucggccggacgaaguccaaccgccugcggaagggguucgagaugaucugggaccccaacggcuggaccaacaccgacagcgacuucuccgucaagcaggacgugguggccaucaccgacuggagcggguacagcggcuccuucguccagcaccccgagcucacgggccuggacugcauccgccccugcuucuggguggagcuggugcgggggcucccgcgcgagaacaccaccaucuggaccagcggcuccagcaucuccuucugcggggucaacagcgacacggccaacugguccuggcccgacggcgccgagcugcccuucaccaucgacaaguga

SEQ ID NO: 84271 - RNA, 1413 nt, Artificial Sequence; identical to SEQ ID NO: 84228
  derived and/or modified CDS sequence (opt1) from neuraminidase__InfluenzaA__ADW10867

SEQ ID NO: 84272 - RNA, 1413 nt, Artificial Sequence; identical to SEQ ID NO: 84228
  derived and/or modified CDS sequence (opt1) from neuraminidase__InfluenzaA__ADW10878

SEQ ID NO: 84273 - RNA, 1413 nt, Artificial Sequence; identical to SEQ ID NO: 84228
  derived and/or modified CDS sequence (opt1) from neuraminidase__InfluenzaA__ADW10889

SEQ ID NO: 84274 - RNA, 1413 nt, Artificial Sequence; identical to SEQ ID NO: 81485
  derived and/or modified CDS sequence (opt1) from neuraminidase__InfluenzaA__ADW10900

SEQ ID NO: 84275 - RNA, 1410 nt, Artificial Sequence; identical to SEQ ID NO: 82508
  derived and/or modified CDS sequence (opt1) from neuraminidase__InfluenzaA__ADW11155

SEQ ID NO: 84276 - RNA, 1410 nt, Artificial Sequence; identical to SEQ ID NO: 80762
  derived and/or modified CDS sequence (opt1) from neuraminidase__InfluenzaA__ADW23530

SEQ ID NO: 84277 - RNA, 1410 nt, Artificial Sequence
  derived and/or modified CDS sequence (opt1) from neuraminidase__InfluenzaA__ADW54483
augaaccccaaccagaagaucaucaccaucggcagcgugugcaugaccaucgggauggccaaccugaugcuccagaucggcaacaucaucuccaucuggaucagccacuccauccagcuggggaaccagagccagaucgagacgugcaaccaguccgucaucaccuacgagaacaacaccugggugaaccagaccuacgugaacaucagcaacacgaacuucgccgcgggccaguccgucgugagcgugaagcuggccgggaacuccagccucugcccggucuccggcugggccaucuacagcaaggacaacuccauccgcaucggcagcaagggggacguguucgugauccgggagcccuucaucuccugcagcccccuggagugccgcaccuucuuccugacccagggcgcccuccugaacgacaagcacuccaacgggaccaucaaggaccggagccccuaccgcacgcugauguccugcccgaucggcgagguccccagccccuacaacagccgguucgaguccguggccuggagcgcguccgccugccacgacgggaucaacuggcucaccaucggcaucagcggccccgacaacggggccguggccguccugaaguacaacggcaucaucaccgacaccaucaaguccuggcgcaacaacauccugcggacgcaggagagcgagugcgcgugcgugaacggguccugcuucaccaucaugaccgacggcccgagcgacggccaggccuccuacaagaucuuccgcaucgagaaggggaagaucgucaagagcguggagaugaacgcccccaacuaccacuacgaggagugcuccugcuaccccgacagcuccgagaucacgugcgugugccgggacaacuggcacggcagcaaccgccccuggguguccuucaaccagaaccucgaguaccagaucggguacaucugcagcggcaucuucggggacaacccgcggcccaacgacaagaccggcuccugcggccccgucagcuccaacggggccaacggcgugaagggguucagcuucaaguacggcaacgggguguggaucggccgcaccaagagcaucuccagccggaagggcuucgagaugaucugggaccccaacggguggaccggcaccgacaacaacuucuccaucaagcaggacaucgucgggaucaacgaguggagcggcuacuccgggagcuucgugcagcacccggagcugacgggccuggacugcauccgccccugcuucuggguggagcucauccggggccgccccaaggagaacaccaucuggaccuccgggagcuccaucagcuucugcggcgucaacuccgacaccgugggguggagcuggcccgacggcgccgagcugccguucacgaucgacaaguga

SEQ ID NO: 84278 - RNA, 1410 nt, Artificial Sequence
  derived and/or modified CDS sequence (opt1) from neuraminidase__InfluenzaA__ADW54494
augaaccccaaccagaagaucaucaccaucggcagcgugugcaugaccaucgggauggccaaccugauccuccagaucggcaacaucaucuccaucuggaucagccacuccauccagcuggggaaccagaaccagaucgagacgugcaaccagagcgucaucaccuacgagaacaacaccugggugaaccagaccuacgugaacaucuccaacacgaacuucgccgcgggccagagcgucguguccgugaagcuggccgggaacagcucccucugcccggucagcggcugggccaucuacuccaaggacaacagcauccgcaucggcuccaagggggacguguucgugauccgggagcccuucaucagcugcagcccccuggagugccgcaccuucuuccugacccagggcgcccuccugaacgacaagcacuccaacgggaccaucaaggaccggucccccuaccgcacgcugaugagcugcccgaucggcgagguccccucccccuacaacagccgguucgagagcguggccugguccgcgagcgccugccacgacgggaucaacuggcucaccaucggcaucuccggccccgacaacggggccguggccguccugaaguacaacggcaucaucaccgacaccaucaagagcuggcgcaacaacauccugcggacgcaggaguccgagugcgcgugcgugaacgggagcugcuucaccgugaugaccgacggcccguccgacggccaggccagcuacaagaucuuccgcaucgagaaggggaagaucgucaaguccguggagaugaacgcccccaacuaccacuacgaggagugcagcugcuaccccgacuccagcgagaucacgugcgugugccgggacaacuggcacggcuccaaccgccccugggucagcuucaaccagaaccucgaguaccggaucggguacaucugcuccggcaucuucggggacaacccgcgccccaacgacaagaccggcagcugcggccccguguccagcaacggggccaacggcgugaagggguucuccuucaaguacggcaacggggucuggaucggccggaccaagagcaucagcucccgcaacggcuucgagaugaucugggaccccaacggguggaccggcaccgacaacaacuucagcaucaagcaggacaucaucgggaucaacgagugguccggcuacagcggguccuucgugcagcacccggagcugacgggccuggacugcauccggcccugcuucuggguggagcucauccgcggccggcccaaggagaacaccaucuggaccagcggguccagcaucuccuucugcggcgucaacagcgacaccguggggugguccuggcccgacggcgccgagcugccguucacgaucgacaaguga

SEQ ID NO: 84279 - RNA, 1410 nt, Artificial Sequence
  derived and/or modified CDS sequence (opt1) from neuraminidase__InfluenzaA__ADW54514
augaaccccaaccagaagaucaucaccaucggcagcgugugcaugaccaucgggauggccaaccugauccuccagaucggcaacaucaucuccaucuggaucagccacuccauccagcuggggaaccagaaccagaucgagacgugcaaccagagcgucaucaccuacgagaacaacaccugggugaaccagaccuacgugaacaucuccaacacgaacuucgccgcgggccagagcgucguguccgugaagcuggccgggaacagcucccucugcccggucagcggcugggccaucuacuccaaggacaacagcauccgcaucggcuccaagggggacguguucgugauccgggagcccuucaucagcugcagcccccuggagugccgcaccuucuuccugacccagggcgcccuccugaacgacaagcacuccaacgggaccaucaaggaccggucccccuaccgcacgcugaugagcugcccgaucggcgagguccccucccccuacaacagccgguucgagagcguggccugguccgcgagcgccugccacgacgggaucaacuggcucaccaucggcaucuccggccccgacaacggggccguggccguccugaaguacaacggcaucaucaccgacaccaucaagagcuggaagaacaacauccugcgcacgcaggaguccgagugcgcgugcgugaacgggagcugcuucaccgugaugaccgacggcccguccgacggccaggccagcuacaagaucuuccggaucgagaaggggaagaucgucaaguccguggagaugaacgcccccaacuaccacuacgaggagugcagcugcuaccccgacuccagcgagaucacgugcgugugccgcgacaacuggcacggcuccaaccggcccugggucagcuucaaccagaaccucgaguaccgcaucggguacaucugcuccggcaucuucggggacaacccgcggcccaacgacaagaccggcagcugcggccccguguccagcaacggggccaacggcgugaagggguucuccuucaaguacggcaacggggucuggaucggccgcaccaagagcaucagcucccggaacggcuucgagaugaucugggaccccaacggguggaccggcaccgacaacaacuucagcaagaagcaggacaucaucgggaucaacgagugguccggcuacagcggguccuucgugcagcacccggagcugacgggccuggacugcauccgccccugcuucuggguggagcucauccggggccgccccaaggagaacaccaucuggaccagcggguccagcaucuccuucugcggcgucaacagcgacaccguggggugguccuggcccgacggcgccgagcugccguucacgaucgacaaguga

SEQ ID NO: 84280 - RNA, 1410 nt, Artificial Sequence
  derived and/or modified CDS sequence (opt1) from neuraminidase__InfluenzaA__ADW54522
augaaccccaaccagaagaucaucaccaucggcagcgugugcaugaucaucgggauggccaaccugauccuccagaucggcaacaucaucuccaucuggaucagccacuccauccagcuggggaaccagaaccagaucgagaccugcaaccagagcgucaucacguacgagaacaacaccugggugaaccagaccuacgugaacaucuccaacaccaacuucgccgcgggccagagcgucguguccgugaagcuggccgggaacagcucccucugcccggucagcggcugggccaucuacuccaaggacaacagcauccgcaucggcuccaagggggacguguucgugauccgggagcccuucaucagcugcagcccccuggagugccgcacguucuuccugacccagggcgcccuccugaacgacaagcacuccaacgggaccaucaaggaccggucccccuaccgcacccugaugagcugcccgaucggcgagguccccucccccuacaacagccgguucgagagcguggccugguccgcgagcgccugccacgacgggaucaacuggcucacgaucggcaucuccggccccgacaacggggccguggccguccugaaguacaacggcaucaucaccgacaccaucaagagcuggcgcaacaaccggcugcgcacccaggaguccgagugcgcgugcgugaacgggagcugcuucacggugaugaccgacggcccguccgacggccaggccagcuacaagaucuuccggaucgagaaggggaagaucgucaaguccguggagaugaacgcccccaacuaccacuacgaggagugcagcugcuaccccgacuccagcgagaucacgugcgugugccgcgacaacuggcacggcuccaaccggcccugggucagcuucaaccagaaccucgaguaccagaucggguacaucugcuccggcaucuucggggacaacccgcgccccaacgacaagaccggcagcugcggccccguguccagcaacggggccaacggcgugaagggguucuccuucaaguacggcaacggggucuggaucggccggaccaagagcaucagcucccgcaagggcuucgagaugaucugggaccccaacggguggaccggcaccgacaacaacuucagcaucaagcaggacaucguggggaucaacgagugguccggcuacagcggguccuucgugcagcacccggagcugaccggccuggacugcauccggcccugcuucugggucgagcucauccgcggccggcccaaggagaacacgaucuggaccagcggguccagcaucuccuucugcggcgugaacagcgacaccgucgggugguccuggcccgacggcgccgagcugccguucaccaucgacaaguga

SEQ ID NO: 84281 - RNA, 1410 nt, Artificial Sequence
  derived and/or modified CDS sequence (opt1) from neuraminidase__InfluenzaA__ADW65826
augaaccccaaccagaagaucaucaccaucggcagcgugugcaugaccaucgggauggccaaccugauccuccagaucggcaacaucaucuccaucuggaucagccacuccauccagcuggggaaccagagccagaucgagacgugcaaccaguccgucaucaccuacgagaacaacaccugggugaaccagaccuacgugaacaucagcaacacgaacuucgccgcgggccaguccgucgugagcgugaagcuggccgggaacuccagccucugcccggucuccggcugggccaucuacagcaaggacaacuccauccgcaucggcagcaagggggacguguucgugauccgggagcccuucaucuccugcagcccccuggagugccgcaccuucuuccugacccagggcgcccuccugaacgacaagcacuccaacgggaccaucaaggaccggagccccuaccgcacgcugauguccugcccgaucggcgagguccccagccccuacaacagccgguucgaguccguggccuggagcgcguccgccugccacgacgggaucaacuggcucaccaucggcaucagcggccccgacaacggggccguggccguccugaaguacaacggcaucaucaccgacaccaucaaguccuggcgcaacaacauccugcggacgcaggagagcgagugcgcgugcgugaacggguccugcuucaccaucaugaccgacggcccgagcgacggccaggccuccuacaagaucuuccgcaucgagaaggggaagaucgucaagagcguggagaugaacgcccccaacuaccacuacgaggagugcuccugcuaccccgacagcuccgagaucacgugcgugugccgggacaacuggcacggcagcaaccgccccuggguguccuucaaccagaaccucgaguaccagaucggguacaucugcagcggcaucuucggggacaacccgcggcccaacgacaagaccggcuccugcggccccgucagcuccaacggggccaacggcgugaagggguucagcuucaaguacggcaacgggguguggaucggccgcaccaagagcaucuccagccggaagggcuucgagaugaucugggaccccaacggguggaccggcaccgacaacaacuucuccaucaagcaggacaucgucgggaucaacgaguggagcggcuacuccgggagcuucgugcagcacccggagcugacgggccuggacugcauccgccccugcuucuggguggagcucauccggggccgccccaaggagaacaccaucuggaccuccgggagcuccaucagcuucugcggcgucaacuccgacaccgugggguggagcuggcccgacggcgccgagcugccguucacgaucgacaaguga

SEQ ID NO: 84282 - RNA, 1410 nt, Artificial Sequence; identical to SEQ ID NO: 80623
  derived and/or modified CDS sequence (opt1) from neuraminidase__InfluenzaA__ADW80519

SEQ ID NO: 84283 - RNA, 1410 nt, Artificial Sequence; identical to SEQ ID NO: 80623
  derived and/or modified CDS sequence (opt1) from neuraminidase__InfluenzaA__ADW82127

SEQ ID NO: 84284 - RNA, 1410 nt, Artificial Sequence; identical to SEQ ID NO: 80623
  derived and/or modified CDS sequence (opt1) from neuraminidase__InfluenzaA__ADW82138

SEQ ID NO: 84285 - RNA, 1410 nt, Artificial Sequence; identical to SEQ ID NO: 80623
  derived and/or modified CDS sequence (opt1) from neuraminidase__InfluenzaA__ADW82149

SEQ ID NO: 84286 - RNA, 1410 nt, Artificial Sequence; identical to SEQ ID NO: 80623
  derived and/or modified CDS sequence (opt1) from neuraminidase__InfluenzaA__ADW82158

SEQ ID NO: 84287 - RNA, 1410 nt, Artificial Sequence; identical to SEQ ID NO: 80623
  derived and/or modified CDS sequence (opt1) from neuraminidase__InfluenzaA__ADW82169

SEQ ID NO: 84288 - RNA, 1410 nt, Artificial Sequence; identical to SEQ ID NO: 80623
  derived and/or modified CDS sequence (opt1) from neuraminidase__InfluenzaA__ADW82180

SEQ ID NO: 84289 - RNA, 1410 nt, Artificial Sequence; identical to SEQ ID NO: 80762
  derived and/or modified CDS sequence (opt1) from neuraminidase__InfluenzaA__ADW82191

SEQ ID NO: 84290 - RNA, 1410 nt, Artificial Sequence; identical to SEQ ID NO: 80762
  derived and/or modified CDS sequence (opt1) from neuraminidase__InfluenzaA__ADW82201

SEQ ID NO: 84291 - RNA, 1410 nt, Artificial Sequence; identical to SEQ ID NO: 80762
  derived and/or modified CDS sequence (opt1) from neuraminidase__InfluenzaA__ADW82211

SEQ ID NO: 84292 - RNA, 1410 nt, Artificial Sequence; identical to SEQ ID NO: 80762
  derived and/or modified CDS sequence (opt1) from neuraminidase__InfluenzaA__ADW82221

SEQ ID NO: 84293 - RNA, 1410 nt, Artificial Sequence; identical to SEQ ID NO: 80762
  derived and/or modified CDS sequence (opt1) from neuraminidase__InfluenzaA__ADW82231

SEQ ID NO: 84294 - RNA, 1410 nt, Artificial Sequence; identical to SEQ ID NO: 80762
  derived and/or modified CDS sequence (opt1) from neuraminidase__InfluenzaA__ADW82241

SEQ ID NO: 84295 - RNA, 1410 nt, Artificial Sequence; identical to SEQ ID NO: 80762
  derived and/or modified CDS sequence (opt1) from neuraminidase__InfluenzaA__ADW82251

SEQ ID NO: 84296 - RNA, 1410 nt, Artificial Sequence; identical to SEQ ID NO: 80762
  derived and/or modified CDS sequence (opt1) from neuraminidase__InfluenzaA__ADW82261

SEQ ID NO: 84297 - RNA, 1410 nt, Artificial Sequence; identical to SEQ ID NO: 80762
  derived and/or modified CDS sequence (opt1) from neuraminidase__InfluenzaA__ADW82271

SEQ ID NO: 84298 - RNA, 1410 nt, Artificial Sequence; identical to SEQ ID NO: 84281
  derived and/or modified CDS sequence (opt1) from neuraminidase__InfluenzaA__ADW95306

SEQ ID NO: 84299 - RNA, 1410 nt, Artificial Sequence; identical to SEQ ID NO: 84281
  derived and/or modified CDS sequence (opt1) from neuraminidase__InfluenzaA__ADW95313

SEQ ID NO: 84300 - RNA, 1410 nt, Artificial Sequence; identical to SEQ ID NO: 84281
  derived and/or modified CDS sequence (opt1) from neuraminidase__InfluenzaA__ADW95320

SEQ ID NO: 84301 - RNA, 1410 nt, Artificial Sequence; identical to SEQ ID NO: 84281
  derived and/or modified CDS sequence (opt1) from neuraminidase__InfluenzaA__ADW95327

SEQ ID NO: 84302 - RNA, 1410 nt, Artificial Sequence
  derived and/or modified CDS sequence (opt1) from neuraminidase__InfluenzaA__ADW95333
augaaccccaaccagaagaucaucaccaucggcagcgugugcaugaccaucgggauggccaaccugauccuccagaucggcaacaucaucuccaucuggaucagccacuccauccagcuggggaaccagagccagaucgagacgugcaaccaguccgucaucaccuacgagaacaacaccugggugaaccagaccuacgugaacaucagcaacacgaacuucgccgcgggccaguccgucgugagcgugaagcuggccgggaacuccagccucugcccggucuccggcugggccaucuacagcaaggacaacuccauccgcaucggcagcaagggggacguguucgugauccgggagcccuucaucuccugcagcccccuggagugccgcaccuucuuccugacccagggcgcccuccugaacgacaagcacuccaacgggaccaucaaggaccggagccccuaccgcacgcugauguccugcccgaucggcgagguccccagccccuacaacagccgguucgaguccguggccuggagcgcguccgccugccacgacgggaucaacuggcucaccaucggcaucagcggccccgacaacggggccguggccguccugaaguacaacggcaucaucaccgacaccaucaaguccuggcgcaacaacauccugcggacgcaggagagcgagugcgcgugcgugaacggguccugcuucaccaucaugaccgacggcccgagcgacggccaggccuccuacaagaucuuccgcaucgagaaggggaagaucgucaagagcguggagaugaacgcccccaacuaccacuacgaggagugcuccugcuaccccgacagcuccgagaucacgugcgugugccgggacaacuggcacggcagcaaccgccccuggguguccuucaaccagaaccucgaguaccagaucggguacaucugcagcggcaucuucggggacaacccgcggcccaacgacaagaccggcuccugcggccccgucagcuccaacggggccaacggcgugaagggguucagcuucaaguacggcaacgggguguggaucggcagcgccaaguccaucagcucccgcaaggcguucgagaugaucugggaccccaacggcuggaccgggaccgacaacaacuucagcaucaagcaguacaucgucggcaucaacgagugguccggguacagcggcuccuucguggagcacccggagcugaccgggcuggacugcauccggcccugcuucuggguggagcucauccgcggccggcccaaggagaacacgaucuggaccagcggcuccagcaucuccuucugcggggucaacagcgacaccgugggcugguccuggcccgacggggccgagcugccguucaccaucgacaaguga

SEQ ID NO: 84303 - RNA, 1410 nt, Artificial Sequence
  derived and/or modified CDS sequence (opt1) from neuraminidase__InfluenzaA__ADX20813
augaaccccaaccagaagaucaucaccaucggcagcgugugcaugaccaucgggauggccaaccugauccuccagaucggcaacaucaucuccaucuggaucagccacuccauccagcuggggaaccagaaccagaucgagacgugcaaccagagcgucaucaccuacgagaacaacaccugggugaaccagaccuacgugaacaucuccaacacgaacuucgccgcgggccagagcgucguguccgugaagcuggccgggaacagcucccucugcccggucagcggcugggccaucuacuccaaggacaacagcauccgcaucggcuccaagggggacguguucgugauccgggagcccuucaucagcugcagcccccuggagugccgcaccuucuuccugacccagggcgcccuccugaacgacaagcacuccaacgggaccaucaaggaccggucccccuaccgcacgcugaugagcugcccgaucggcgagguccccucccccuacaacagccgguucgagcucguggccuggagcgcguccgccugccacgacgggaucaacuggcugaccaucggcaucagcggccccgacaacggggccguggccguccugaaguacaacggcaucaucaccgacaccaucaaguccuggcgcaacaacauccuccggacgcaggagagcgagugcgcgugcgugaacggguccugcuucaccgugaugaccgacggcccgagcgacggccagaccuccuacaagaucuuccgcaucgagaaggggaagaucgucaagagcguggagaugaacgcccccaacuacuacuacgaggagugcuccugcuaccccgacagcuccgagaucacgugcgugugccgggacaacuggcacggcagcaaccgccccugggucuccuucaaccagaaccuggaguaccagaucggguacaucugcagcggcaucuucggggacaacccgcggcccaacgacaagaccggcuccugcggccccgugagcuccaacggggccaacggcgugaagggguucagcuucaaguacggcaacggggucuggaucggccgcaccaaguccaucagcagccggaagggcuucgagaugaucugggaccccaacggguggaccggcacggacaacaacuucuccaucaagcaggacaucguggggaucaacgaguggagcggcuacuccgggagcuucgugcagcacccggagcugaccggccucgacugcauccgccccugcuucugggucgagcugauccggggccgccccaaggagaacaccaucuggaccuccgggagcuccaucagcuucugcggcgugaacuccgacacggucggguggagcuggcccgacggcgccgagcugccguucaccaucgacaaguga

SEQ ID NO: 84304 - RNA, 1410 nt, Artificial Sequence
  derived and/or modified CDS sequence (opt1) from neuraminidase__InfluenzaA__ADX20814
augaaccccaaccagaagaucaucaccaucggcagcgugugcaugaccaucgggauggccaaccugauccuccagaucggcaacaucaucuccaucuggaucagccacuccauccagcuggggaaccagagccagaucgagacgugcaaccaguccgucaucaccuacgagaacaacaccugggugaaccagaccuacgugaacaucagcaacacgaacuucgccgcgggccaguccgucgugagcgugaagcuggccgggaacuccagccucugcccggucuccggcugggccaucuacagcaaggacaacuccauccgcaucggcagcaagggggacguguucgugauccgggagcccuucaucuccugcagcccccuggagugccgcaccuucuuccugacccagggcgcccuccugaacgacaagcacuccaacgggaccaucaaggaccggagccccuaccgcacgcugauguccugcccgaucggcgagguccccagccccuacaacagccgguucgaguccguggccuggagcgcguccgccugccacgacgggaucaacuggcucaccaucggcaucagcggccccgacaacggggccguggccguccugaaguacaacggcaucaucaccgacaccaucaaguccuggcgcaacaacauccugcggacgcaggagagcgagugcgcgugcgugaacggguccugcuucaccaucaugaccgacggcccgagcgacggccaggccuccuacaagaucuuccgcaucgagaaggggaagaucgucaagagcguggagaugaacgcccccaacuacuacuacgaggagugcuccugcuaccccgacagcuccgagaucacgugcgugugccgggacaacuggcacggcagcaaccgccccuggguguccuucaaccagaaccucgaguaccagaucggguacaucugcagcggcaucuucggggacaacccgcggcccaacgacaagaccggcuccugcggccccgucagcuccaacggggccaacggcgugaagggguucagcuucaaguacggcaacgggguguggaucggccgcaccaagagcaucuccagccggaagggcuucgagaugaucugggaccccaacggguggaccggcaccgacaacaacuucuccaucaagcaggacaucgucgggaucaacgaguggagcggcuacuccgggagcuucgugcagcacccggagcugacgggccuggacugcauccgccccugcuucuggguggagcucauccggggccgccccaaggagaacaccaucuggaccuccgggagcuccaucagcuucugcggcgucaacuccgacaccgugggguggagcuggcccgacggcgccgagcugccguucacgaucgacaaguga

SEQ ID NO: 84305 - RNA, 1410 nt, Artificial Sequence; identical to SEQ ID NO: 80623
  derived and/or modified CDS sequence (opt1) from neuraminidase__InfluenzaA__ADX21091

SEQ ID NO: 84306 - RNA, 1410 nt, Artificial Sequence; identical to SEQ ID NO: 80762
  derived and/or modified CDS sequence (opt1) from neuraminidase__InfluenzaA__ADX21101

SEQ ID NO: 84307 - RNA, 1410 nt, Artificial Sequence; identical to SEQ ID NO: 81629
  derived and/or modified CDS sequence (opt1) from neuraminidase__InfluenzaA__ADX36112

SEQ ID NO: 84308 - RNA, 1410 nt, Artificial Sequence
  derived and/or modified CDS sequence (opt1) from neuraminidase__InfluenzaA__ADX87386
augaaccccaaccagcgcaucaucaccaucggcagcgugucccugaccaucagcacgaucugcuucuucaugcagaucgccauccucaucaccaccgucacccugcacuucaagcaguacgaguucaacuccccgcccaacaaccaggugaugcugugcgagcccacgaucaucgagcggaacaucaccgagaucguguaccucaccaacaccacgaucgagaaggagaucugccccaagcuggccgaguaccgcaacuggagcaagccgcagugcgacaucaccggguucgcgcccuucuccaaggacaacagcauccggcuguccgccggcggggacaucugggucacccgcgagcccuacgugagcugcgaccccgacaagugcuaccaguucgcccucggccaggggaccacgcugaacaacgugcacuccaacaacaccguccgggaccgcaccccguaccggacccugcucaugaacgagcugggcgugcccuuccaccugggcacgaagcaggucugcaucgccuggagcuccagcuccugccacgacgggaaggccuggcuccacgugugcaucaccggcgacgacaagaacgcgaccgccagcuucaucuacaacgggcgccugguggacuccguggucagcugguccaaggagauccugcggacccaggagagcgagugcgugugcaucaacggcacgugcaccguggucaugaccgacggguccgccagcggcaaggccgacaccaagauccucuucaucgaggagggcaagaucgugcacacgagcacccuguccgggagcgcgcagcacguggaggagugcuccugcuacccccgcuaccccggcguccggugcgugugccgcgacaacuggaaggggagcaaccggccgaucguggacaucaacaucaaggaccacuccaucgucagcuccuacgugugcagcggccuggugggcgacacgccccgcaagaacgacuccagcuccagcucccacugccucgaccccaacaacgaggagggcgggcacggggucaagggcugggccuucgacgacgggaacgacguguggaugggccggaccaucagcgagaagucccgccugggcuacgagaccuucaaggucaucgagggguggagcaaccccaaguccaagcugcagaucaaccgccaggugaucguggaccggggcaaccggagcggguacuccggcaucuucagcgucgagggcaagagcugcaucaaccgcugcuucuacguggagcucauccgggggcgcaaggaggagaccgaggugcuguggaccuccaacagcaucgucguguucugcggcaccuccgggacguacggcaccgggagcuggccggacggcgccgacaucaaccugaugcccguguga

SEQ ID NO: 84309 - RNA, 1410 nt, Artificial Sequence
  derived and/or modified CDS sequence (opt1) from neuraminidase__InfluenzaA__ADX96270
augaaccccaaccagaagaucaucaccaucggcagcgugugcaugaccaucgggauggccaaccugauccuccagaucggcaacaucaucuccaucuggaucagccacuccauccagcuggggaaccagaaccagaucgagacgugcaaccagagcaucaucaccuacgagaacaacaccugggucaaccagaccuacgugaacaucuccaacacgaacuucgccgcgggccagagcguggccuccgucaagcuggccgggaacagcucccucugcccggugagcggcugggccaucuacuccaaggacaacagcgugcgcaucggcuccaagggggacgucuucgugauccgggagcccuucaucagcugcagcccccuggagugccgcaccuucuuccugacccagggcgcccuccugaacgacaagcacuccaacgggaccaucaaggaccggucccccuaccgcacgcugaugagcugcccgaucggcgaggugcccucccccuacaacagccgguucgagagcgucgcgugguccgccagcgccugccacgacgggaucaacuggcucaccaucggcaucuccggccccgacaacggggccguggcggugcugaaguacaacggcaucaucaccgacaccaucaagagcuggcgcaacaacauccugcggacgcaggaguccgagugcgccugcgucaacgggagcugcuucaccgugaugaccgacggcccguccgacggccaggccagcuacaagaucuuccgcaucgagaaggggaagaucgugaaguccgucgagaugaacgcccccaacuaccacuacgaggagugcagcugcuaccccgacuccagcgagaucacgugcgugugccgggacaacuggcacggcuccaaccgccccugggugagcuucaaccagaaccucgaguaccagaucggguacaucugcuccggcaucuucggggacaacccgcggcccaacgacaagaccggcagcugcggccccgucuccagcaacggggccaacggcgugaagggguucuccuucaaguacggcaacgggguguggaucggccgcaccaagagcaucagcucccggaacggcuucgagaugaucugggaccccaacggguggaccggcaccgacaacaacuucagcaucaagcaggacaucgucgggaucaacgagugguccggcuacagcggguccuucgugcagcacccggagcugacgggccuggacugcauccgccccugcuucuggguggagcucauccggggccgccccaaggagaacaccaucuggaccagcggguccagcaucuccuucugcggcgucaacagcgacaccguggggugguccuggcccgacggcgcggagcugccguucacgaucgacaaguga

SEQ ID NO: 84310 - RNA, 1410 nt, Artificial Sequence; identical to SEQ ID NO: 84309
  derived and/or modified CDS sequence (opt1) from neuraminidase__InfluenzaA__ADX96280

SEQ ID NO: 84311 - RNA, 1410 nt, Artificial Sequence; identical to SEQ ID NO: 81345
  derived and/or modified CDS sequence (opt1) from neuraminidase__InfluenzaA__ADX96290

SEQ ID NO: 84312 - RNA, 1410 nt, Artificial Sequence; identical to SEQ ID NO: 80762
  derived and/or modified CDS sequence (opt1) from neuraminidase__InfluenzaA__ADX96300

SEQ ID NO: 84313 - RNA, 1410 nt, Artificial Sequence; identical to SEQ ID NO: 80762
  derived and/or modified CDS sequence (opt1) from neuraminidase__InfluenzaA__ADX96310

SEQ ID NO: 84314 - RNA, 1410 nt, Artificial Sequence
  derived and/or modified CDS sequence (opt1) from neuraminidase__InfluenzaA__ADX96330
augaaccccaaccagaagaucaucaccaucggcagcgugugcaugaccaucgggauggccaaccugauccuccagaucggcaacgggaucuccaucuggaucagccacuccauccagcugggcaaccagaaccagaucgagacgugcaaccagagcgucaucaccuacgagaacaacaccugggugaaccagaccuacgugaacaucuccaacacgaacuucgccgcggggcagagcgucguguccgugaagcuggccggcaacagcucccucugcccggucagcggcugggccaucuacuccaaggacaacagcauccgcaucggguccaagggcgacguguucgugauccgggagcccuucaucagcugcagcccccuggagugccgcaccuucuuccugacccagggggcccuccugaacgacaagcacuccaacggcaccaucaaggaccggucccccuaccgcacgcugaugagcugcccgaucggggagguccccucccccuacaacagccgguucgagagcguggccugguccgcgagcgccugccacgacggcaucaacuggcucaccaucggcaucuccgggcccgacaacggcgccguggccguccugaaguacaacgggaucaucaccgacaccaucaagagcuggcgcaacaacauccugcggacgcaggaguccgagugcgcgugcgugaacggcagcugcuucaccgugaugaccgacggcccguccgacgggcaggccagcuacaagaucuuccgcaucgagaagggcaagaucgucaaguccguggagaugaacgcccccaacuaccacuacgaggagugcagcugcuaccccgacuccaacgagaucacgugcgugugccgggacaacuggcacgggagcaaccgccccugggucuccuucaaccagaaccucgaguaccagaucggcuacaucugcagcgggaucuucggcgacaacccgcggcccaacgacaagaccggcuccugcgggcccgugagcuccaacggcgccaacggggugaagggcuucagcuucaaguacgggaacggcgucuggaucggccgcaccaaguccaucagcagccggaacggguucgagaugaucugggaccccaacggcuggaccgggaccgacaacaacuucuccaucaagcaggacaucgugggcaucaacgaguggagcggguacuccggcagcuucgugcagcacccggagcugacgggccuggacugcauccgccccugcuucugggucgagcucauccgggggcgccccaaggagaacaccaucuggaccuccggcagcuccaucagcuucugcggggugaacuccgacaccgucggcuggagcuggcccgacggcgccgagcugccguucacgaucgacaaguga

SEQ ID NO: 84315 - RNA, 1410 nt, Artificial Sequence; identical to SEQ ID NO: 80762
  derived and/or modified CDS sequence (opt1) from neuraminidase__InfluenzaA__ADX96339

SEQ ID NO: 84316 - RNA, 1410 nt, Artificial Sequence
  derived and/or modified CDS sequence (opt1) from neuraminidase__InfluenzaA__ADX96349
augaaccccaaccagaagaucaucaccaucggcagcgugugcaugaccaucgggauggccaaccugauccuccagaucggcaacaucaucuccaucuggaucagccacuccauccagcuggggaaccagaaccagaucgagacgugcaaccagagcgucaucaccuacgagaacaacaccugggugaaccagaccuacgugaacaucuccaacacgaacuucgccgcgggccagagcgucguguccgugaagcuggccgggaacagcucccucugcccggucagcggcugggccaucuacuccaaggacaacagcauccgcaucggcuccaagggggacguguucgugauccgggagcccuucaucagcugcagcccccuggagugccgcaccuucuuccugacccagggcgcccuccugaacgacaagcacuccaacgggaccaucaaggaccggucccccuaccgcacgcugaugagcugcccgaucggcgagguccccucccccuacaacagccgguucgagagcguggccugguccgcgagcgccugccacgacgggaucaacuggcucaccaucggcaucuccggccccgacaacggggccguggccguccugaaguacaacggcaucaucaccgacaccaucaagagcuggcgcaacaacauccugcggacgcaggaguccgagugcgcgugcgugaacgggagcugcuucaccgugaugaccgacggcccguccgacggccaggccagcuacaagaucuuccgcaucgagaaggggaagaucgucaaguccguggagaugaacgcccccaacuaccacuacgaggagugcagcugcuaccccgacuccaacgagaucacgugcgugugccgggacaacuggcacggcagcaaccgccccugggucuccuucaaccagaaccucgaguaccagaucggguacaucugcagcggcaucuucggggacaacccgcggcccaacgacaagaccggcuccugcggccccgugagcuccaacggggccaacggcgugaagggguucagcuucaaguacggcaacggggucuggaucggccgcaccaaguccaucagcagccggaacggcuucgagaugaucugggaccccaacggguggaccggcaccgacaacaacuucuccaucaagcaggacaucguggggaucaacgaguggagcggcuacuccgggagcuucgugcagcacccggagcugacgggccuggacugcauccgccccugcuucugggucgagcucauccggggccgccccaaggagaacaccaucuggaccuccgggagcuccaucagcuucugcggcgugaacuccgacaccgucggguggagcuggcccgacggcgccgagcugccguucacgaucgacaaguga

SEQ ID NO: 84317 - RNA, 1410 nt, Artificial Sequence; identical to SEQ ID NO: 80762
  derived and/or modified CDS sequence (opt1) from neuraminidase__InfluenzaA__ADX96359

SEQ ID NO: 84318 - RNA, 1410 nt, Artificial Sequence; identical to SEQ ID NO: 80762
  derived and/or modified CDS sequence (opt1) from neuraminidase__InfluenzaA__ADX96369

SEQ ID NO: 84319 - RNA, 1410 nt, Artificial Sequence
  derived and/or modified CDS sequence (opt1) from neuraminidase__InfluenzaA__ADX96380
augaaccccaaccagaagaucaucaccaucggcagcgugugcaugaccaucgggauggccaaccugauccuccagaucggcaacaucaucuccaucuggccgguccacagcauccagcuggggaaccagaaccagaucgagacgugcaaccaguccgugaucaccuacgagaacaacaccugggugaaccagaccuacgucaacaucagcaacacgaacuucgccgcgggccaguccguggugagcaugaagcuggccgggaacuccagccucugccccgucggcggcugggccaucuacuccaaggacaacagcgugcgcaucggguccaagggcgacguguucgucauccgggagcccuucaucagcugcagcccccuggagugccgcaccuucuuccugacccagggggcccuccugaacgacaagcacuccaacggcaccaucaaggaccgguccccguaccgcacgcugaugagcugccccaucggggaggugcccucccccuacaacagccgguucgaguccguggccuggagcgcgagcgccugccacgacggcaucaacuggcucaccaucggcaucuccgggccggacaacggcgccgucgccgugcugaaguacaacgggaucaucaccgacaccaucaagagcuggcgcaacaacauccugcggacgcaggaguccgagugcgcgugcgugaacggcagcugcuucaccgucaugaccgacggccccuccgacgggcaggccagcuacaagaucuuccgcaucgagaagggcaagaucguggaguccguggagaugaacgcccccaacuaccacuacgaggagugcagcugcuaccccgacuccagcgagaucacgugcgucugccgggacaacuggcacggguccaaccgcccgugggugagcuucaaccagaaccucgaguaccagaucggcuacaucugcuccgggaucuucggcgacaacccccggcccaacgacaagaccggcagcugcgggcccguguccagcaacggcgccaacggggucaagggcuucuccuucaaguacgggaacggcguguggaucggccgcaccaagagcaucuccagccggaacggguucgagaugaucugggacccgaacggcuggaccgggaccgacaacaacuucagcaucaagcaggacaucgugggcaucaacgagugguccggguacagcggcuccuucguccagcaccccgagcugacgggccuggacugcauccgccccugcuucuggguggagcucauccgggggcgccccaaggagaacaccaucuggaccagcggcuccagcaucuccuucugcggggucaacagcgacaccgugggcugguccuggccggacggcgccgagcugcccuucacgaucgacaaguga

SEQ ID NO: 84320 - RNA, 1410 nt, Artificial Sequence
  derived and/or modified CDS sequence (opt1) from neuraminidase__InfluenzaA__ADX96390
augaaccccaaccagaagaucaucaccaucggcagcgugugcaugaccaucgggauggccaaccugauccuccagaucggcaacaucaucuccaucuggcugagccacuccauccagcuggggaaccagaaccagaucgagacgugcaaccagagcgucaucaccuacgagaacaacaccugggugaaccagaccuacgugaacaucuccaacacgaacuucgccgcgggccagagcgucguguccgugaagcucgccgggaacagcucccugugcccggucagcggcugggccaucuacuccaaggacaacagcauccgcaucggcuccaagggggacguguucgugauccgggagcccuucaucagcugcagcccccuggagugccgcaccuucuuccucacccagggcgcccugcugaacgacaagcacuccaacgggaccaucaaggaccggucccccuaccgcacgcucaugagcugcccgaucggcgagguccccucccccuacaacagccgguucgagagcguggccugguccgcgagcgccugccacgacgggaucaacuggcugaccaucggcaucuccggccccgacaacggggccguggccguccugaaguacaacggcaucaucaccgacaccaucaagagcuggcgcaacaacauccuccggacgcaggaguccgagugcgcgugcgugaacgggagcugcuucaccgugaugaccgacggcccguccgacggccaggccagcuacaagaucuuccgcaucgagaaggggaagaucgucaaguccguggagaugaacgcccccaacuaccacuacgaggagugcagcugcuaccccgacuccagcgagaucacgugcgugugccgggacaacuggcacggcuccaaccgccccugggucagcuucaaccagaaccuggaguaccagaucggguacaucugcuccggcaucuucggggacaacccgcggcccaacgacaagaccggcagcugcggccccguguccagcaacggggccaacggcgugaagggguucuccuucaaguacggcaacggggucuggaucggccgcaccaagagcaucagcucccggaacggcuucgagaugaucugggaccccaacggguggaccggcaccgacaacaacuucagcaucaagcaggacaucguggggaucaacgagugguccggcuacagcggguccuucgugcagcacccggagcugacgggccucgacugcauccgccccugcuucugggucgagcugauccggggccgccccaaggagaacaccaucuggaccagcggguccagcaucuccuucugcggcgugaacagcgacaccgucgggugguccuggcccgacggcgccgagcugccguucacgaucgacaaguga

SEQ ID NO: 84321 - RNA, 1410 nt, Artificial Sequence; identical to SEQ ID NO: 80762
  derived and/or modified CDS sequence (opt1) from neuraminidase__InfluenzaA__ADX96400

SEQ ID NO: 84322 - RNA, 1410 nt, Artificial Sequence; identical to SEQ ID NO: 80762
  derived and/or modified CDS sequence (opt1) from neuraminidase__InfluenzaA__ADX96410

SEQ ID NO: 84323 - RNA, 1410 nt, Artificial Sequence; identical to SEQ ID NO: 80762
  derived and/or modified CDS sequence (opt1) from neuraminidase__InfluenzaA__ADX96419

SEQ ID NO: 84324 - RNA, 1410 nt, Artificial Sequence
  derived and/or modified CDS sequence (opt1) from neuraminidase__InfluenzaA__ADX96429
augaaccccaaccagaagaucaucaccaucggcagcgugugcaugaccaucgggauggccaaccugauccuccagaucggcaacaucaucuccaucuggaucagccacuccauccagcuggggaaccagaaccagaucgagacgugcaaccagagcgucaucaccuacgagaacaacaccugggugaaccagaccuacgugaacaucuccaacacgaacuucgccgcgggccagagcgucguguccgugaagcuggccgggaacagcucccucugcccggucagcggcugggccaucuacuccaaggacaacagcgugcgcaucggcuccaagggggacguguucgucauccgggagcccuucaucagcugcagcccccuggagugccgcaccuucuuccugacccagggcgcccuccugaacgacaagcacuccaacgggaccaucaaggaccggucccccuaccgcacgcugaugagcugcccgaucggcgaggugcccucccccuacaacagccgguucgagagcguggccugguccgcgagcgccugccacgacgggaucaacuggcucaccaucggcaucuccggccccgacaacggggccgucgccgugcugaaguacaacggcaucaucaccgacaccaucaagagcuggcgcaacaacauccugcggacgcaggaguccgagugcgcgugcgugaacgggagcugcuucaccgucaugaccgacggcccguccaacggccaggccagcuacaagaucuuccgcaucgagaaggggaagaucgugaaguccguggagaugaacgcccccaacuaccacuacgaggagugcagcugcuaccccgacuccagcgagaucacgugcgucugccgggacaacuggcacggcuccaaccgccccugggugagcuucaaccagaaccucgaguaccagaucggguacaucugcuccggcaucuucggggacaacccgcggcccaacgacaagaccggcagcugcggccccguguccagcaacggggccaacggcgucaagggguucuccuucaaguacggcaacgggguguggaucggccgcaccaagagcaucagcucccggaacggcuucgagaugaucugggaccccaacggguggaccggcaccgacaacaacuucagcaucaagcaggacaucgugcgcaucaacgagugguccggguacagcggcuccuucguccagcacccggagcugacggggcuggacugcauccggcccugcuucuggguggagcucauccgcggccggcccaaggagaacaccaucuggaccagcggcuccagcaucuccuucugcggggucaacagcgacaccgugggcugguccuggcccgacggggccgagcugccguucacgaucgacaaguga

SEQ ID NO: 84325 - RNA, 1410 nt, Artificial Sequence; identical to SEQ ID NO: 80762
  derived and/or modified CDS sequence (opt1) from neuraminidase__InfluenzaA__ADX96449

SEQ ID NO: 84326 - RNA, 1410 nt, Artificial Sequence; identical to SEQ ID NO: 80762
  derived and/or modified CDS sequence (opt1) from neuraminidase__InfluenzaA__ADX96469

SEQ ID NO: 84327 - RNA, 1410 nt, Artificial Sequence; identical to SEQ ID NO: 80762
  derived and/or modified CDS sequence (opt1) from neuraminidase__InfluenzaA__ADX96489

SEQ ID NO: 84328 - RNA, 1410 nt, Artificial Sequence; identical to SEQ ID NO: 80762
  derived and/or modified CDS sequence (opt1) from neuraminidase__InfluenzaA__ADX96499

SEQ ID NO: 84329 - RNA, 1410 nt, Artificial Sequence
  derived and/or modified CDS sequence (opt1) from neuraminidase__InfluenzaA__ADX96509
augaaccccaaccagaagaucaucaccaucggcagcgugugcaugaccaucgggauggccaaccugauccuccagaucggcaacaucaucuccaucuggaucagccacuccauccagcuggggaaccagaaccagaucgagacgugcaaccagagcgucaucaccuacgagaacaacaccugggugaaccagaccuacgugaacaucuccaacacgaacuucgccgcgggccagagcgucguguccgugaagcuggccgggaacagcucccucugcccggucagcggcugggccaucuacuccaaggacaacagcauccgcaucggcuccaacggggacguguucgugauccgggagcccuucaucagcugcagcccccuggagugccgcaccuucuuccugacccagggcgcccuccugaacgacaagcacuccaacgggaccaucaaggaccggucccccuaccgcacgcugaugagcugcccgaucggcgagguccccucccccuacaacagccgguucgagagcguggccugguccgcgagcgccugccacgacgggaucaacuggcucaccaucggcaucuccggccccgacaacggggccguggccguccugaaguacaacggcaucaucaccgacaccaucaagagcuggcgcaacaacauccugcggacgcaggaguccgagugcgcgugcgugaacgggagcugcuucaccgugaugaccgacggcccguccgacggccaggccagcuacaagaucuuccgcaucgagaaggggaagaucgucaaguccguggagaugaacgcccccaacuaccacuacgaggagugcagcugcuaccccgacuccagcgagaucacgugcgugugccgggacaacuggcacggcuccaaccgccccugggucagcuucaaccagaaccucgaguaccagaucggguacaucugcuccggcaucuucggggacaacccgcggcccaacgacaagaccggcagcugcggccccguguccagcaacggggccaacggcgugaagggguucuccuucaaguacggcaacggggucuggaucggccgcaccaagagcaucagcucccggaacggcuucgagaugaucugggaccccaacggguggaccggcaccgacaacaacuucagcaucaagcaggacaucguggggaucaacgagugguccggcuacagcggguccuucgugcagcacccggagcugacgggccuggacugcauccgccccugcuucugggucgagcucauccggggccgccccaaggagaacaccaucuggaccagcggguccagcaucuccuucugcggcgugaacagcgacaccgucgggugguccuggcccgacggcgccgagcugccguucacgaucgacaaguga

SEQ ID NO: 84330 - RNA, 1410 nt, Artificial Sequence; identical to SEQ ID NO: 80762
  derived and/or modified CDS sequence (opt1) from neuraminidase__InfluenzaA__ADX96519

SEQ ID NO: 84331 - RNA, 1410 nt, Artificial Sequence; identical to SEQ ID NO: 80762
  derived and/or modified CDS sequence (opt1) from neuraminidase__InfluenzaA__ADX96529

SEQ ID NO: 84332 - RNA, 1410 nt, Artificial Sequence; identical to SEQ ID NO: 80762
  derived and/or modified CDS sequence (opt1) from neuraminidase__InfluenzaA__ADX96539

SEQ ID NO: 84333 - RNA, 1410 nt, Artificial Sequence; identical to SEQ ID NO: 80762
  derived and/or modified CDS sequence (opt1) from neuraminidase__InfluenzaA__ADX96549

SEQ ID NO: 84334 - RNA, 1410 nt, Artificial Sequence; identical to SEQ ID NO: 80762
  derived and/or modified CDS sequence (opt1) from neuraminidase__InfluenzaA__ADX96559

SEQ ID NO: 84335 - RNA, 1410 nt, Artificial Sequence; identical to SEQ ID NO: 80762
  derived and/or modified CDS sequence (opt1) from neuraminidase__InfluenzaA__ADX96569

SEQ ID NO: 84336 - RNA, 1410 nt, Artificial Sequence; identical to SEQ ID NO: 80752
  derived and/or modified CDS sequence (opt1) from neuraminidase__InfluenzaA__ADX96579

SEQ ID NO: 84337 - RNA, 1410 nt, Artificial Sequence; identical to SEQ ID NO: 80762
  derived and/or modified CDS sequence (opt1) from neuraminidase__InfluenzaA__ADX96589

SEQ ID NO: 84338 - RNA, 1410 nt, Artificial Sequence; identical to SEQ ID NO: 80762
  derived and/or modified CDS sequence (opt1) from neuraminidase__InfluenzaA__ADX96599

SEQ ID NO: 84339 - RNA, 1410 nt, Artificial Sequence
  derived and/or modified CDS sequence (opt1) from neuraminidase__InfluenzaA__ADX96609
augaaccccaaccagaagaucaucaccaucggcagcgugugcaugaccaucgggauggccaaccugauccuccagaucggcaacaucaucuccaucuggaucagccacuccauccagcuggggaaccagaaccagaucgagacgugcaaccagagcgucaucaccuacgagaacaacaccugggugaaccagaccuacgugaacaucuccaacacgaacuucgccgcgggccagagcgucguguccgugaagcuggccgggaacagcucccucugcccggucggcggcugggccaucuacagcaaggacaacuccgugcgcaucgggagcaagggcgacguguucgucauccgggagcccuucaucuccugcagcccccuggagugccgcaccuucuuccugacccagggggcccuccugaacgacaagcacuccaacggcaccaucaaggaccggagccccuaccgcacgcugauguccugcccgaucggggaggugcccagccccuacaacucccgguucgagagcguggccuggagcgcguccgccugccacgacggcaucaacuggcucaccaucggcaucagcgggcccgacaacggcgccgucgccgugcugaaguacaacgggaucaucaccgacaccaucaaguccuggcgcaacaacauccugcggacgcaggagagcgagugcgcgugcgugaacggcuccugcuucaccgucaugaccgacggcccgagcaacgggcaggccuccuacaagaucuuccgcaucgagaagggcaagaucgucaagagcguggagaugaacgcccccaacuaccacuacgaggagugcuccugcuaccccgacagcuccgagaucacgugcgugugccgggacaacuggcacgggagcaaccgccccuggguguccuucaaccagaaccucgaguaccagaucggcuacaucugcagcgggaucuucggcgacaacccgcggcccaacgacaagaccggcuccugcgggcccgugagcuccaacggcgccaacggggucaagggcuucagcuucaaguacggggacggcguguggaucggccgcaccaaguccaucagcagccggaacggguucgagaugaucugggaccccaacggcuggaccgggaccgacaacaacuucuccaucaagcaggacaucgugggcaucaacgaguggagcggguacuccggcagcuucguccagcacccggagcugacgggccuggacugcauccgccccugcuucuggguggagcucauccgggggcgccccaaggagaacaccaucuggaccuccggcagcuccaucagcuucugcggggucaacuccgacaccgugggcuggagcuggcccgacggcgccgagcugccguucacgaucgacaaguga

SEQ ID NO: 84340 - RNA, 1410 nt, Artificial Sequence; identical to SEQ ID NO: 80752
  derived and/or modified CDS sequence (opt1) from neuraminidase__InfluenzaA__ADX96619

SEQ ID NO: 84341 - RNA, 1410 nt, Artificial Sequence; identical to SEQ ID NO: 80762
  derived and/or modified CDS sequence (opt1) from neuraminidase__InfluenzaA__ADX96629

SEQ ID NO: 84342 - RNA, 1410 nt, Artificial Sequence; identical to SEQ ID NO: 80762
  derived and/or modified CDS sequence (opt1) from neuraminidase__InfluenzaA__ADX96639

SEQ ID NO: 84343 - RNA, 1410 nt, Artificial Sequence; identical to SEQ ID NO: 80762
  derived and/or modified CDS sequence (opt1) from neuraminidase__InfluenzaA__ADX96649

SEQ ID NO: 84344 - RNA, 1410 nt, Artificial Sequence; identical to SEQ ID NO: 80752
  derived and/or modified CDS sequence (opt1) from neuraminidase__InfluenzaA__ADX96659

SEQ ID NO: 84345 - RNA, 1410 nt, Artificial Sequence; identical to SEQ ID NO: 80762
  derived and/or modified CDS sequence (opt1) from neuraminidase__InfluenzaA__ADX96669

SEQ ID NO: 84346 - RNA, 1410 nt, Artificial Sequence; identical to SEQ ID NO: 80762
  derived and/or modified CDS sequence (opt1) from neuraminidase__InfluenzaA__ADX96679

SEQ ID NO: 84347 - RNA, 1410 nt, Artificial Sequence; identical to SEQ ID NO: 80762
  derived and/or modified CDS sequence (opt1) from neuraminidase__InfluenzaA__ADX96689

SEQ ID NO: 84348 - RNA, 1410 nt, Artificial Sequence; identical to SEQ ID NO: 80762
  derived and/or modified CDS sequence (opt1) from neuraminidase__InfluenzaA__ADX96699

SEQ ID NO: 84349 - RNA, 1410 nt, Artificial Sequence
  derived and/or modified CDS sequence (opt1) from neuraminidase__InfluenzaA__ADX96709
augaaccccaaccagaagaucaucaccaucggcagcgugugcaugaccaucgggauggccaaccugauccuccagaucggcaacaucaucuccaucuggaucagccacuccauccagcuggggaaccagaaccagaucgagacgugcaaccagagcgucaucaccuacgagaacaacaccugggugaaccagaccuacgugaacaucuccaacacgaacuucgccgcgggccagagcgucguguccgugaagcuggccgggaacagcucccucugcccggucagcggcugggccaucuacuccaaggacaacagcauccgcaucggcuccaagggggacguguucgugauccgggagcccuucaucagcugcagcccccuggagugccgcaccuucuuccugacccagggcgcccuccugaacgacaagcacuccaacgggaccaucaaggaccggucccccuaccgcacgcugaugagcugcccgaucggcgagguccccucccccuacaacagccgguucgagagcguggccugguccgcgagcgccugccacgacgggaucaacuggcucaccaucggcaucuccggccccgacaacggggccguggccguccugaaguacaacggcaucaucaccgacaccaucaagagcuggcgcaacaacauccugcggacgcaggaguccgagugcgcgugcgugaacgggagcugcuucaccgugaugaccgacggcccguccgacggccaggccagcuacaagaucuuccgcaucgagaaggggaagaucgucaaguccguggagaucaacgcccccaacuaccacuacgaggagugcagcugcuaccccgacuccagcgagaucacgugcgugugccgggacaacuggcacggcuccaaccgccccugggucagcuucaaccagaaccucgaguaccagaucggguacaucugcuccggcaucuucggggacaacccgcggcccaacgacgagaccggcagcugcggccccguguccagcaacggggccaacggcgugaagggguucuccuucaaguacggcaacggggucuggaucggccgcaccaagagcaucagcucccggaacggcuucgagaugaucugggaccccaacggguggaccggcaccgacaacaacuucagcaucaagcaggacaucguggggaucaacgagugguccggcuacagcggguccuucgugcagcacccggagcugacgggccuggacugcauccgccccugcuucugggucgagcucauccggggccgccccaaggagaacaccaucuggaccagcggguccagcaucuccuucugcggcgugaacagcgacaccgucgggugguccuggcccgacggcgccgagcugccguucacgaucgacaaguga

SEQ ID NO: 84350 - RNA, 1410 nt, Artificial Sequence
  derived and/or modified CDS sequence (opt1) from neuraminidase__InfluenzaA__ADX96719
augaaccccaaccagaagaucaucaccaucggcagcgugugcaugaccaucgggauggccaaccugauccuccagaucggcaacaucaucuccaucuggaucagccacuccauccagcuggggaaccagaaccagaucgagacgugcaaccagagcgucaucaccuacgagaacaacaccugggugaaccagaccuacgugaacaucuccaacacgaacuucgccgcgggccagagcgucguguccgugaaguucgccgggaacagcucccugugcccggucagcggcugggccaucuacuccaaggacaacagcauccgcaucggcuccaagggggacguguucgugauccgggagcccuucaucagcugcagcccccucgagugccgcaccuucuuccugacccagggcgcccugcucaacgacaagcacuccaacgggaccaucaaggaccggucccccuaccgcacgcugaugagcugcccgaucggcgagguccccucccccuacaacagccgguucgagagcguggccugguccgcgagcgccugccacgacgggaucaacuggcugaccaucggcaucuccggccccgacaacggggccguggccguccucaaguacaacggcaucaucaccgacaccaucaagagcuggcgcaacaacauccugcggacgcaggaguccgagugcgcgugcgugaacgggagcugcuucaccgugaugaccgacggcccguccgacggccaggccagcuacaagaucuuccgcaucgagaaggggaagaucgucaaguccguggagaugaacgcccccaacuaccacuacgaggagugcagcugcuaccccgacuccagcgagaucacgugcgugugccgggacaacuggcacggcuccaaccgccccugggucagcuucaaccagaaccuggaguaccagaucggguacaucugcuccggcaucuucggggacaacccgcggcccaacgacaagaccggcagcugcggccccguguccagcaacggggccaacggcgugaagggguucuccuucaaguacggcaacggggucuggaucggccgcaccaagagcaucagcucccggaacggcuucgagaugaucugggaccccaacggguggaccggcaccgacaacaacuucagcaucaagcaggacaucguggggaucaacgagugguccggcuacagcggguccuucgugcagcacccggagcucacgggccuggacugcauccgccccugcuucugggucgagcugauccggggccgccccaaggagagcaccguguggaccuccgggagcuccaucagcuucugcggcgucaacuccgacaccgugggguggagcuggcccgacggcgccgagcucccguucacgaucgacaaguga

SEQ ID NO: 84351 - RNA, 1410 nt, Artificial Sequence; identical to SEQ ID NO: 80762
  derived and/or modified CDS sequence (opt1) from neuraminidase__InfluenzaA__ADX96729

SEQ ID NO: 84352 - RNA, 1410 nt, Artificial Sequence
  derived and/or modified CDS sequence (opt1) from neuraminidase__InfluenzaA__ADX96739
augaaccccaaccagaagaucaucaccaucggcagcgugugcaugaccaucgggauggccaaccugauccuccagaucggcaacaucaucuccaucuggaucagccacuccauccagcuggggaaccagaaccagaucgagacgugcaaccagagcgucaucaccuacgagaacaacaccugggugaaccagaccuacgugaacaucuccaacacgaacuucgccgcgggccagagcgucguguccgugaagcuggccgggaacagcucccucugcccggucagcggcugggccaucuacuccaaggacaacagcauccgcaucggcuccaagggggacguguucgugauccgggagcccuucaucagcugcagcccccuggagugccgcaccuucuuccugacccagggcgcccuccugaacgacaagcacagcaacgggaccaucaaggaccggucccccuaccgcacgcugaugagcugcccgaucggcgagguccccucccccuacaacagccgguucgagagcguggccugguccgcgagcgccugccacgacgggaucaacuggcucaccaucggcaucuccggccccgacaacggggccguggccguccugaaguacaacggcaucaucaccgacaccaucaagagcuggcgcaacaacauccugcggacgcaggaguccgagugcgcgugcgugaacgggagcugcuucaccgugaugaccgacggcccguccgacggccaggccagcuacaagaucuuccgcaucgagaaggggaagaucgucaaguccguggagaugaacgcccccaacuaccacuacgaggagugcagcugcuaccccgacuccagcgagaucacgugcgugugccgggacaacuggcacggcuccaaccgccccugggucagcuucaaccagaaccucgaguaccagaucggguacaucugcuccggcaucuucggggacaacccgcggcccaacgacaagaccggcagcugcggccccguguccagcaacggggccaacggcgugaagggguucuccuucaaguacggcaacggggucuggaucggccgcaccaagagcaucagcucccggaacggcuucgagaugaucugggaccccaacggguggaccggcaccgacaacaacuucagcaucaagcaggacaucguggggaucaacgagugguccggcuacagcggguccuucgugcagcacccggagcugacgggccuggacugcauccgccccugcuucugggucgagcucauccggggccgccccaaggagaacaccaucuggaccagcggguccagcaucuccuucugcggcgugaaguccgacaccgucgggugguccuggcccgacggcgccgagcugccguucacgaucgacaaguga

SEQ ID NO: 84353 - RNA, 1410 nt, Artificial Sequence; identical to SEQ ID NO: 80762
  derived and/or modified CDS sequence (opt1) from neuraminidase__InfluenzaA__ADX96749

SEQ ID NO: 84354 - RNA, 1410 nt, Artificial Sequence; identical to SEQ ID NO: 80762
  derived and/or modified CDS sequence (opt1) from neuraminidase__InfluenzaA__ADX96759

SEQ ID NO: 84355 - RNA, 1410 nt, Artificial Sequence; identical to SEQ ID NO: 81736
  derived and/or modified CDS sequence (opt1) from neuraminidase__InfluenzaA__ADX96769

SEQ ID NO: 84356 - RNA, 1410 nt, Artificial Sequence; identical to SEQ ID NO: 80762
  derived and/or modified CDS sequence (opt1) from neuraminidase__InfluenzaA__ADX96779

SEQ ID NO: 84357 - RNA, 1410 nt, Artificial Sequence
  derived and/or modified CDS sequence (opt1) from neuraminidase__InfluenzaA__ADX96789
augaaccccaaccagaagaucaucaccaucggcagcgugugcaugaccaucgggauggccaaccugauccuccagaucggcaacaucaucuccaucuggaucagccacuccauccagcuggggaaccagaaccagaucgagacgugcaaccagagcgucaucaccuacgagaacaacaccugggugaaccagaccuacgugaacaucuccaacacgaacuucgccgcgggccagagcgucgugucccugaagcucgccgggaacagcucccugugcccggugagcggcugggccaucuacuccaaggacaacagcauccgcaucggcuccaagggggacgucuucgugauccgggagcccuucaucagcugcagcccccuggagugccgcaccuucuuccucacccagggcgcccugcugaacgacaagcacuccaacgggaccaucaaggaccggucccccuaccgcacgcucaugagcugcccgaucggcgaggugcccucccccuacaacagccgguucgagagcgucgccugguccgcgagcgccugccacgacgggaucaacuggcugaccaucggcaucuccggccccgacaacggggccguggccgugcugaaguacaacggcaucaucaccgacaccaucaagagcuggcgcaacaacauccuccggacgcaggaguccgagugcgcgugcgucaacgggagcugcuucaccgugaugaccgacggcccguccgacggccaggccagcuacaagaucuuccgcaucgagaaggggaagaucgugaaguccgucgagaugaacgcccccaacuaccacuacgaggagugcagcugcuaccccgacuccagcgagaucacgugcgugugccgggacaacuggcacggcuccaaccgccccugggugagcuucaaccagaaccuggaguaccagaucggguacaucugcuccggcaucuucggggacaacccgcggcccaacgacaagaccggcagcugcggccccgucuccagcaacggggccaacggcgugaagggguucuccuucaaguacggcaacgggguguggaucggccgcaccaagagcaucagcucccggaacggcuucgagaugaucugggaccccaacggguggaccggcaccgacaacaacuucagcaucaagcaggacaucgucgggaucaacgagugguccggcuacagcggguccuucgugcagcacccggagcugacgggccucgacugcauccgccccugcuucuggguggagcugauccggggccgccccaaggagaacaccaucuggaccagcggguccagcaucuccuucugcggcgucaacagcgacaccguggggugguccuggcccgacggcgccgagcugccguucacgaucgacaaguga

SEQ ID NO: 84358 - RNA, 1410 nt, Artificial Sequence; identical to SEQ ID NO: 80762
  derived and/or modified CDS sequence (opt1) from neuraminidase__InfluenzaA__ADX96799

SEQ ID NO: 84359 - RNA, 1410 nt, Artificial Sequence; identical to SEQ ID NO: 80917
  derived and/or modified CDS sequence (opt1) from neuraminidase__InfluenzaA__ADX96809

SEQ ID NO: 84360 - RNA, 1410 nt, Artificial Sequence; identical to SEQ ID NO: 80762
  derived and/or modified CDS sequence (opt1) from neuraminidase__InfluenzaA__ADX96819

SEQ ID NO: 84361 - RNA, 1410 nt, Artificial Sequence; identical to SEQ ID NO: 81985
  derived and/or modified CDS sequence (opt1) from neuraminidase__InfluenzaA__ADX96829

SEQ ID NO: 84362 - RNA, 1410 nt, Artificial Sequence
  derived and/or modified CDS sequence (opt1) from neuraminidase__InfluenzaA__ADX96839
augaaccccaaccagaagaucaucaccaucggcagcgugugcaugaccaucgggauggccaaccugauccuccagaucggcaacaucaucuccaucuggaucagccacuccauccagcuggggaaccagaaccagaucgagacgugcaaccagagcgucaucaccuacgagaacaacaccugggugaaccagaccuacgugaacaucuccaacacgaacuucgccgcgggccagagcgucguguccgugaagcuggccgggaacagcucccucugcccggucagcggcugggccaucuacuccaaggacaacaacgugcgcaucggcagcaagggggacguguucgucauccgggagcccuucaucuccugcagcccccuggagugccgcaccuucuuccugacccagggcgcccuccugaacgacaagcacuccaacgggaccaucaaggaccggagccccuaccgcacgcugauguccugcccgaucggcgaggugcccagccccuacaacucccgguucgagagcguggccuggagcgcguccgccugccacgacgggaucaacuggcucaccaucggcaucagcggccccgacaacggggccgucgccgugcugaaguacaacggcaucaucaccgacaccaucaaguccuggcgcaacaacauccugcggacgcaggagagcgagugcgcgugcgugaacggguccugcuucaccgucaugaccgacggcccgagcgacggccaggccuccuacaagaucuuccgcaucgagaaggggaagaucgucaagagcguggagaugaacgcccccaacuaccacuacgaggagugcuccugcuaccccgacagcuccgagaucacgugcgugugccgggacaacuggcacggcagcaaccgccccuggguguccuucaaccagaaccucgaguaccagaucggguacaucugcagcggcaucuucggggacaacccgcggcccaacgacaagaccggcuccugcggccccgugagcuccaacggggccaacggcgucaagggguucagcuucaaguacggcaacgggguguggaucggccgcaccaaguccaucagcagccggaacggcuucgagaugaucugggaccccaacggguggaccggcaccgacaacaacuucuccaucaagcaggacaucguggggaucaacgaguggagcggcuacuccgggagcuucguccagcacccggagcugacgggccuggacugcauccgccccugcuucuggguggagcucauccggggccgccccaaggagaacaccaucuggaccuccgggagcuccaucagcuucugcggcgucaacuccgacaccgugggguggagcuggcccgacggcgccgagcugccguucacgaucgacaaguga

SEQ ID NO: 84363 - RNA, 1410 nt, Artificial Sequence; identical to SEQ ID NO: 80762
  derived and/or modified CDS sequence (opt1) from neuraminidase__InfluenzaA__ADX96849

SEQ ID NO: 84364 - RNA, 1410 nt, Artificial Sequence; identical to SEQ ID NO: 80762
  derived and/or modified CDS sequence (opt1) from neuraminidase__InfluenzaA__ADX96859

SEQ ID NO: 84365 - RNA, 1410 nt, Artificial Sequence; identical to SEQ ID NO: 81985
  derived and/or modified CDS sequence (opt1) from neuraminidase__InfluenzaA__ADX96869

SEQ ID NO: 84366 - RNA, 1410 nt, Artificial Sequence; identical to SEQ ID NO: 80762
  derived and/or modified CDS sequence (opt1) from neuraminidase__InfluenzaA__ADX96879

SEQ ID NO: 84367 - RNA, 1410 nt, Artificial Sequence; identical to SEQ ID NO: 80762
  derived and/or modified CDS sequence (opt1) from neuraminidase__InfluenzaA__ADX96899

SEQ ID NO: 84368 - RNA, 1410 nt, Artificial Sequence
  derived and/or modified CDS sequence (opt1) from neuraminidase__InfluenzaA__ADX96909
augaaccccaaccagaagaucaucaccaucggcagcgugugcaugaccaucgggauggccaaccugauccuccagaucggcaacaucaucuccaucuggaucagccacuccauccagcuggggaaccagaaccagaucgagacgugcaaccagagcgucaucaccuacgagaacaacaccugggugaaccagaccuacgugaacaucuccaacacgaacuucgccgcgggccagagcgucguguccgugaagcuggccgggaacagcucccucugcccggucagcggcugggccaucuacuccaaggacaacagcauccgcaucggcuccaagggggacguguucgugauccgggagcccuucaucagcugcagcccccuggagugccgcaccuucuuccugacccagggcgcccuccugaacgacaagcacuccaacgggaccaucaaggaccggucccccuaccgcacgcugaugagcugcccgaucggcgagguccccucccccuacaacagccgguucgagagcguggccugguccgcgagcgccugccacgacgggaucaacuggcucaccaucggcaucuccggccccgacaacggggccguggccguccugaaguacaacggcaucaucaccgacaccaucaagagcuggcgcaacgacauccugcggacgcaggaguccgagugcgcgugcgugaacgggagcugcuucaccgugaugaccgacggcccguccgacggccaggccagcuacaagaucuuccgcaucgagaaggggaagaucgucaaguccguggagaucaacgcccccaacuaccacuacgaggagugcagcugcuaccccgacuccagcgagaucacgugcgugugccgggacaacuggcacggcuccaaccgccccugggucagcuucaaccagaaccucgaguaccagaucggguacaucugcuccggcaucuucggggacaacccgcggcccaacgacaagaccggcagcugcggccccguguccagcaacggggccaacggcgugaagggguucuccuucaaguacggcaacggggucuggaucggccgcaccaagagcaucaacagccggaacggcuucgagaugaucugggaccccaacggguggaccggcaccgacaacaacuucuccaucaagcaggacaucguggggaucaacgaguggagcggcuacuccgggagcuucgugcagcacccggagcugacgggccuggacugcauccgccccugcuucugggucgagcucauccggggccgccccaaggagaacaccaucuggaccuccgggagcuccaucagcuucugcggcgugaacuccgacaccgucggguggagcuggcccgacggcgccgagcugccguucacgaucgacaaguga

SEQ ID NO: 84369 - RNA, 1410 nt, Artificial Sequence; identical to SEQ ID NO: 80762
  derived and/or modified CDS sequence (opt1) from neuraminidase__InfluenzaA__ADX96919

SEQ ID NO: 84370 - RNA, 1410 nt, Artificial Sequence; identical to SEQ ID NO: 80762
  derived and/or modified CDS sequence (opt1) from neuraminidase__InfluenzaA__ADX96929

SEQ ID NO: 84371 - RNA, 1410 nt, Artificial Sequence; identical to SEQ ID NO: 80762
  derived and/or modified CDS sequence (opt1) from neuraminidase__InfluenzaA__ADX96939

SEQ ID NO: 84372 - RNA, 1410 nt, Artificial Sequence; identical to SEQ ID NO: 81345
  derived and/or modified CDS sequence (opt1) from neuraminidase__InfluenzaA__ADX96949

SEQ ID NO: 84373 - RNA, 1410 nt, Artificial Sequence; identical to SEQ ID NO: 80762
  derived and/or modified CDS sequence (opt1) from neuraminidase__InfluenzaA__ADX96959

SEQ ID NO: 84374 - RNA, 1410 nt, Artificial Sequence
  derived and/or modified CDS sequence (opt1) from neuraminidase__InfluenzaA__ADX96969
augaaccccaaccagaugaucaucaccaucggcagcgugugcaugaccaucgggauggccaaccugauccuccagaucggcaacaucaucuccaucuggaucagccacuccauccagcuggggaaccagaaccagaucgagacgugcaaccagagcgucaucaccuacgagaacaacaccugggugaaccagaccuacgugaacaucuccaacacgaacuucgccgcgggccagagcgucguguccgugaagcuggccgggaacagcucccucugcccggucagcggcugggccaucuacuccaaggacaacagcgugcgcaucggcuccaagggggacguguucgucauccgggagcccuucaucagcugcagcccccuggagugccgcaccuucuuccugacccagggcgcccuccugaacgacaagcacuccaacgggaccaucaaggaccggucccccuaccgcacgcugaugagcugcccgaucggcgaggugcccucccccuacaacagccgguucgagagcguggccugguccgcgagcgccugccacgacgggaucaacuggcucaccaucggcaucuccggccccgacaacggggccgucgccgugcugaaguacaacggcaucaucaccgacaccaucaagagcuggcgcaacaacauccugcggacgcaggaguccgagugcgcgugcgugaacgggagcugcuucaccgucaugaccgacggcccguccaacggccaggccagcuacaagaucuuccgcaucgagaaggggaagaucgugaaguccguggagaugaacgcccccaacuaccacuacgaggagugcagcugcuaccccgacuccagcgagaucacgugcgucugccgggacaacuggcacggcuccaaccgccccugggugagcuucaaccagaaccucgaguaccagaucggguacaucugcuccggcaucuucggggacaacccgcggcccaacgacaagaccggcagcugcggccccguguccagcaacggggccaacggcgucaagggguucuccuucaaguacggcaacgggguguggaucggccgcaccaagagcaucagcucccggaacggcuucgagaugaucugggaccccaacggguggaccggcaccgacaacaacuucagcaucaagcaggacaucguggggaucaacgagugguccggcuacagcggguccuucguccagcacccggagcugacgggccuggacugcauccgccccugcuucuggguggagcucauccggggccgccccaaggagaacaccaucuggaccagcggguccagcaucuccuucugcggcgucaacagcgacaccguggggugguccuggcccgacggcgccgagcugccguucacgaucgacaaguga

SEQ ID NO: 84375 - RNA, 1410 nt, Artificial Sequence; identical to SEQ ID NO: 81985
  derived and/or modified CDS sequence (opt1) from neuraminidase__InfluenzaA__ADX96979

SEQ ID NO: 84376 - RNA, 1410 nt, Artificial Sequence; identical to SEQ ID NO: 81985
  derived and/or modified CDS sequence (opt1) from neuraminidase__InfluenzaA__ADX96989

SEQ ID NO: 84377 - RNA, 1407 nt, Artificial Sequence
  derived and/or modified CDS sequence (opt1) from neuraminidase__InfluenzaA__ADX96999
augaaccccaaccagaagaucaucaccaucggcagcgugugcaugaccaucgggauggccaaccugauccuccagaucggcaucaucuccaucuggaucagccacuccauccagcuggggaaccagaaccagaucgagacgugcaaccagagcgucaucaccuacgagaacaacaccugggugaaccagaccuacgugaacaucuccaacacgaacuucgccgcgggccagagcgucguguccgugaagcuggccgggaacagcucccucugcccggucagcggcugggccaucuacuccaaggacaacagcauccgcaucggcuccaagggggacguguucgugauccgggagcccuucaucagcugcagcccccuggagugccgcaccuucuuccugacccagggcgcccuccugaacgacaagcacuccaacgggaccaucaaggaccggucccccuaccgcacgcugaugagcugcccgaucggcgagguccccucccccuacaacagccgguucgagagcguggccugguccgcgagcgccugccacgacgggaucaacuggcucaccaucggcaucuccggccccgacaacggggccguggccguccugaaguacaacggcaucaucaccgacaccaucaagagcuggcgcaacaacauccugcggacgcaggaguccgagugcgcgugcgugaacgggagcugcuucaccgugaugaccgacggcccguccaacggccaggccagcuacaagaucuuccgcaucgagaaggggaagaucgucaaguccguggagaugaacgcccccaacuaccacuacgaggagugcagcugcuaccccgacuccagcgagaucacgugcgugugccgggacaacuggcacggcuccaaccgccccugggucagcuucaaccagaaccucgaguaccagaucggguacaucugcuccggcaucuucggggacaacccgcggcccaacgacaagaccggcagcugcggccccguguccagcaacggggccaacggcgugaagggguucuccuucaaguacggcaacggggucuggaucggccgcaccaagagcaucagcucccggaacggcuucgagaugaucugggaccccaacggguggaccggcaccgacaacaacuucagcaucaagcaggacaucguggggaucaacgagugguccggcuacagcggguccuucgugcagcacccggagcugacgggccuggacugcauccgccccugcuucugggucgagcucauccggggccgccccaaggagaacaccaucuggaccagcggguccagcaucuccuucugcggcgugaacagcgacaccgucgggugguccuggcccgacggcgccgagcugccguucacgaucgacaaguga

SEQ ID NO: 84378 - RNA, 1410 nt, Artificial Sequence; identical to SEQ ID NO: 80762
  derived and/or modified CDS sequence (opt1) from neuraminidase__InfluenzaA__ADX97009

SEQ ID NO: 84379 - RNA, 1410 nt, Artificial Sequence; identical to SEQ ID NO: 80917
  derived and/or modified CDS sequence (opt1) from neuraminidase__InfluenzaA__ADX97020

SEQ ID NO: 84380 - RNA, 1410 nt, Artificial Sequence
  derived and/or modified CDS sequence (opt1) from neuraminidase__InfluenzaA__ADX97030
augaaccccaaccagaagaucaucaccaucggcagcgugugcaugaucaucgggauggccaaccugaugcuccagaucggcaacaucaucuccaucuggaucagccacuccauccagcuggggaaccagaaccagaucgagaccugcaaccagagcgucaucacguacgagaacaacaccugggugaaccagaccuacgugaacaucuccaacaccaacuucgccgcgggccagagcgucguguccgugaagcuggccgggaacagcucccucugcccggucagcggcugggccaucuacuccaaggacaacagcgugcgcaucggcuccaagggggacguguucgucauccgggagcccuucaucagcugcagcccccuggagugccgcacguucuuccugacccagggcgcccuccugaacgacaagcacuccaacgggaccaucaaggaccggucccccuaccgcacccugaugagcugcccgaucggcgaggugcccucccccuacaacagccgguucgagagcguggccugguccgcgagcgccugccacgacgggaucaacuggcucacgaucggcaucuccggccccgacaacggggccgucgccgugcugaaguacaacggcaucaucaccgacaccaucaagagcuggcgcaacaacauccugcggacccaggaguccgagugcgcgugcgugaacgggagcugcuucacggucaugaccgacggcccguccgacggccaggccagcuacaagaucuuccgcaucgagaaggggaagaucgugaaguccguggagaugaacgcccccaacuaccacuacgaggagugcagcugcuaccccgacuccagcgagaucacgugcgucugccgggacaacuggcacggcuccaaccgccccugggugagcuucaaccagaaccucgaguaccagaucggguacaucugcuccggcaucuucggggacaacccgcggcccaacgacaagaccggcagcugcggccccguguccagcaacggggccaacggcgucaagggguucuccuucaaguacggcaacgggguguggaucggccgcaccaagagcaucagcucccggaacggcuucgagaugaucugggaccccaacggguggaccggcaccgacaacaacuucagcaucaagcaggacaucguggggaucaacgagugguccggcuacagcggguccuucguccagcacccggagcugaccggccuggacugcauccgccccugcuucuggguggagcucauccggggccgccccaaggagaacacgaucuggaccagcggguccagcaucuccuucugcggcgucaacagcgacaccguggggugguccuggcccgacggcgccgagcugccguucaccaucgacaaguga

SEQ ID NO: 84381 - RNA, 1410 nt, Artificial Sequence; identical to SEQ ID NO: 82310
  derived and/or modified CDS sequence (opt1) from neuraminidase__InfluenzaA__ADX98643

SEQ ID NO: 84382 - RNA, 1410 nt, Artificial Sequence; identical to SEQ ID NO: 80762
  derived and/or modified CDS sequence (opt1) from neuraminidase__InfluenzaA__ADX98653

SEQ ID NO: 84383 - RNA, 1410 nt, Artificial Sequence
  derived and/or modified CDS sequence (opt1) from neuraminidase__InfluenzaA__ADX98668
augaaccccaaccagaagaucaucaccaucggcagcaucugcaucaccaucgggauggccaaccugauccuccagaucggcaacaucaucuccaucuggaucagccacuccauccagcuggggaaccagaaccagaucgagacgugcaaccagagcgugaucaccuacgagaacaacaccugggucaaccagaccuacgugaacaucuccaacacgaacuucgccgcgggccagagcguggucuccgugaagcuggccgggaacagcucccucugcccggugagcggcugggccaucuacuccaaggacaacagcauccgcaucggcuccaagggggacgucuucgugauccgggagcccuucaucagcugcagcccccuggagugccgcaccuucuuccugacccagggcgcccuccugaacgacaagcacuccaacgggaccaucaaggaccggucccccuaccgcacgcugaugagcugcccgaucggcgaggugcccucccccuacaacagccgguucgagagcgucgccugguccgcgagcgccugccacgacgggaucaacuggcucaccaucggcaucuccggccccgacaacggggccguggccgugcugaaguacaacggcaucaucaccgacaccaucaagagcuggcgcaacaacauccugcggacgcaggaguccgagugcgcgugcgucaacgggagcugcuucaccgugaugaccgacggcccguccgacggccaggccagcuacaagaucuuccgcaucgagaaggggaagaucgugaaguccgucgagaugaacgcccccaacuaccacuacgaggagugcagcugcuaccccgacuccagcgagaucacgugcgugugccgggacaacuggcacggcuccaaccgccccugggugagcuucaaccagaaccucgaguaccagaucggguacaucugcuccggcaucuucggggacaacccgcggcccaacgacaagaccggcagcugcggccccgucuccagcaacggggccaacggcgugaagggguucuccuucaaguacggcaacgggguguggaucggccgcaccaagagcaucagcucccggaacggcuucgagaugaucugggaccccaacggguggaccggcaccgacaacaacuucagcaucaagcaggacaucgucgggaucaacgagugguccggcuacagcggguccuucgugcagcacccggagcugacgggccuggacugcauccgccccugcuucuggguggagcucauccggggccgccccaaggagaacaccaucuggaccagcggguccagcaucuccuucugcggcgucaacagcgacaccguggggugguccuggcccgacggcgccgagcugccguucacgaucgacaaguga

SEQ ID NO: 84384 - RNA, 1410 nt, Artificial Sequence; identical to SEQ ID NO: 80762
  derived and/or modified CDS sequence (opt1) from neuraminidase__InfluenzaA__ADX98678

SEQ ID NO: 84385 - RNA, 1410 nt, Artificial Sequence; identical to SEQ ID NO: 80762
  derived and/or modified CDS sequence (opt1) from neuraminidase__InfluenzaA__ADX98698

SEQ ID NO: 84386 - RNA, 1410 nt, Artificial Sequence
  derived and/or modified CDS sequence (opt1) from neuraminidase__InfluenzaA__ADX98708
augaaccccaaccagaagaucaucaccaucggcagcgugugcaugaccaucgggauggccaaccugauccuccagaucggcaacaucaucuccaucuggaucagccacuccauccagcuggggaaccagaaccagaucgagacgugcaaccagagcgucaucaucuacgagaacaacaccugggugaaccagaccuacgugaacaucuccaacaccaacuucgccgcgggccagagcgucguguccgugaagcuggccgggaacagcucccucugcccggucagcggcugggccaucuacuccaaggacaacagcauccgcaucggcuccaagggggacguguucgugauccgggagcccuucaucagcugcagcccccuggagugccgcacguucuuccugacccagggcgcccuccugaacgacaagcacuccaacgggaccaucaaggaccggucccccuaccgcacccugaugagcugcccgaucggcgagguccccucccccuacaacagccgguucgagagcguggccugguccgcgagcgccugccacgacgggaucaacuggcucacgaucggcaucuccggccccgacaacggggccguggccguccugaaguacaacggcaucaucaccgacaccaucaagagcuggcgcaacaacauccugcggacccaggaguccgagugcgcgugcgugaacgggagcugcuucacggugaugaccgacggcccguccgacggccaggccagcuacaagaucuuccgcaucgagaaggggaagaucgucaaguccguggagaugaacgcccccaacuaccacuacgaggagugcagcugcuaccccgacuccagcgagaucacgugcgugugccgggacaacuggcacggcuccaaccgccccugggucagcuucaaccagaaccucgaguaccagaucggguacaucugcuccggcaucuucggggacaacccgcggcccaacgacaagaccggcagcugcggccccguguccagcaacggggccaacggcgugaagggguucuccuucaaguacggcaacggggucuggaucggccgcaccaagagcaucagcucccggaacggcuucgagaugaucugggaccccaacggguggaccggcaccgacaacaacuucagcaucaagcaggacaucguggggaucaacgagugguccggcuacagcggguccuucgugcagcacccggagcugaccggccuggacugcauccgccccugcuucugggucgagcucauccggggccgccccaaggagaacacgaucuggaccagcggguccagcaucuccuucugcggcgugaacagcgacaccgucgggugguccuggcccgacggcgccgagcugccguucaccaucgacaaguga

SEQ ID NO: 84387 - RNA, 1410 nt, Artificial Sequence; identical to SEQ ID NO: 80762
  derived and/or modified CDS sequence (opt1) from neuraminidase__InfluenzaA__ADX98722

SEQ ID NO: 84388 - RNA, 1410 nt, Artificial Sequence; identical to SEQ ID NO: 80762
  derived and/or modified CDS sequence (opt1) from neuraminidase__InfluenzaA__ADX98732

SEQ ID NO: 84389 - RNA, 1410 nt, Artificial Sequence; identical to SEQ ID NO: 80762
  derived and/or modified CDS sequence (opt1) from neuraminidase__InfluenzaA__ADX98742

SEQ ID NO: 84390 - RNA, 1410 nt, Artificial Sequence; identical to SEQ ID NO: 82113
  derived and/or modified CDS sequence (opt1) from neuraminidase__InfluenzaA__ADX98751

SEQ ID NO: 84391 - RNA, 1410 nt, Artificial Sequence; identical to SEQ ID NO: 80762
  derived and/or modified CDS sequence (opt1) from neuraminidase__InfluenzaA__ADX98761

SEQ ID NO: 84392 - RNA, 1410 nt, Artificial Sequence
  derived and/or modified CDS sequence (opt1) from neuraminidase__InfluenzaA__ADX98770
augaaccccaaccagaagaucaucaccaucggcagcgugugcaugaccaucgggauggccaaccugauccuccagaucggcaacaucaucuccaucuggaucagccacuccauccagcuggggaaccagaaccagaucgagacgugcaaccagagcgucaucaccuacgagaacaacaccugggugaaccagaccuacgugaacaucuccaacacgaacuucgccgcgggccagagcgucguguccgugaagcuggccgggaacagcucccucugcccggucagcggcugggccaucuacuccaaggacaacagcauccgcaucggcuccaagggggacguguucgugauccgggagcccuucaucagcugcagcccccuggagugccgcaccuucuuccugacccagggcgcccuccugaacgacaagcacuccaacgggaccaucaaggaccggucccccuaccgcacgcugaugagcugcccgaucggcgagguccccucccccuacaacagccgguucgagagcguggccugguccgcgagcgccugccacgacgggaucaacuggcucaccaucggcaucuccggccccgacaacggggccguggccguccugaaguacaacggcaucaucaccgacaccaucaagagcuggcgcaacaacauccugcggacgcaggaguccgagugcgcgugcgugaacgggagcugcuucaccgugaugaccgacggcccguccgacggccaggccagcuacaagaucuuccgcaucgagaaggggaagaucgucaaguccguggagaugaacgcccccaacuaccacuacgaggagugcagcugcuaccccgacuccagcgagaucacgugcgugugccgggacaacuggcacggcuccaaccgccccugggggagcuucaaccagaaccucgaguaccagaucggcuacaucugcuccgggaucuucggcgacaacccgcggcccaacgacaagaccggcagcugcgggcccgucuccagcaacggcgccaacggggugaagggcuucuccuucaaguacgggaacggcguguggaucggccgcaccaagagcaucagcucccggaacggguucgagaugaucugggaccccaacggcuggaccgggaccgacaacaacuucagcaucaagcaggacaucgucggcaucaacgagugguccggguacagcggcuccuucgugcagcacccggagcugacgggccuggacugcauccgccccugcuucuggguggagcucauccgggggcgccccaaggagaacaccaucuggaccagcggcuccagcaucuccuucugcggggucaacagcgacaccgugggcugguccuggcccgacggcgccgagcugccguucacgaucgacaaguga

SEQ ID NO: 84393 - RNA, 1410 nt, Artificial Sequence; identical to SEQ ID NO: 80762
  derived and/or modified CDS sequence (opt1) from neuraminidase__InfluenzaA__ADX98780

SEQ ID NO: 84394 - RNA, 1410 nt, Artificial Sequence
  derived and/or modified CDS sequence (opt1) from neuraminidase__InfluenzaA__ADX98788
augaaccccaaccagaagaucaucaccaucggcagcgugugcaugaccaucgggauggccaaccugguccuccagaucggcaacaucaucuccaucuggaucagccacuccauccagcuggggaaccagaaccagaucgagacgugcaaccagagcgugaucaccuacgagaacaacaccugggugaaccagaccuacgucaacaucuccaacacgaacuucgccgcgggccagagcgugguguccgucaagcuggccgggaacagcucccucugcccggugagcggcugggccaucuacuccaaggacaacagcauccgcaucggcuccaagggggacguguucgucauccgggagcccuucaucagcugcagcccccuggagugccgcaccuucuuccugacccagggcgcccuccugaacgacaagcacuccaacgggaccaucaaggaccggucccccuaccgcacgcugaugagcugcccgaucggcgaggugcccucccccuacaacagccgguucgagagcguggccugguccgcgagcgccugccacgacgggaucaacuggcucaccaucggcaucuccggccccgacaacggggccgucgccgugcugaaguacaacggcaucaucaccgacaccaucaagagcuggcgcaacaacauccugcggacgcaggaguccgagugcgcgugcgugaacgggagcugcuucaccgucaugaccgacggcccguccgacggccaggccagcuacaagaucuuccgcaucgagaaggggaagaucgugaaguccguggagaugaacgcccccaacuaccacuacgaggagugcagcugcuaccccgacuccagcgagaucacgugcgucugccgggacaacuggcacggcuccaaccgccccugggugagcuucaaccagaaccucgaguaccagaucggguacaucugcuccggcaucuucggggacaacccgcggcccaacgacaagaccggcagcugcggccccguguccagcaacggggccaacggcgucaagggguucuccuucaaguacggcaacgggguguggaucggccgcaccaagagcaucagcucccggaacggcuucgagaugaucugggaccccaacggguggaccggcaccgacaacaaguucagcaucaagcaggacaucguggggaucaacgagugguccggcuacagcggguccuucguccagcacccggagcugacgggccuggacugcauccgccccugcuucuggguggagcucauccggggccgccccaaggagaacaccaucuggaccagcggguccagcaucuccuucugcggcgucaacagcgacaccguggggugguccuggcccgacggcgccgagcugccguucacgaucgacaaguga

SEQ ID NO: 84395 - RNA, 1410 nt, Artificial Sequence
  derived and/or modified CDS sequence (opt1) from neuraminidase__InfluenzaA__ADX98809
augaaccccaaccagaagaucaucaccaucggcagcgugugcaugaccaucgggauggccaaccugauccuccagaucggcaacaucauccugaucuggaucucccacagcauccagcuggggaaccagaaccagaucgagacgugcaaccaguccgucaucaccuacgagaacaacaccugggugaaccagaccuacgugaacaucagcaacacgaacuucgccgcgggccaguccgucgugagcgugaagcucgccgggaacuccagccugugcccggucuccggcugggccaucuacagcaaggacaacuccauccgcaucggcagcaagggggacguguucgugauccgggagcccuucaucuccugcagcccccuggagugccgcaccuucuuccucacccagggcgcccugcugaacgacaagcacuccaacgggaccaucaaggaccggagccccuaccgcacgcucauguccugcccgaucggcgagguccccagccccuacaacucccgguucgagagcguggccuggagcgcguccgccugccacgacgggaucaacuggcugaccaucggcaucagcggccccgacaacggggccguggccguccugaaguacaacggcaucaucaccgacaccaucaaguccuggcgcaacaacauccuccggacgcaggagagcgagugcgcgugcgugaacggguccugcuucaccgugaugaccgacggcccgagcgacggccaggccuccuacaagaucuuccgcaucgagaaggggaagaucgucaagagcguggagaugaacgcccccaacuaccacuacgaggagugcuccugcuaccccgacagcuccgagaucacgugcgugugccgggacaacuggcacggcagcaaccgccccugggucuccuucaaccagaaccuggaguaccagaucggguacaucugcagcggcaucuucggggacaacccgcggcccaacgacaagaccggcuccugcggccccgugagcuccaacggggccaacggcgugaagggguucagcuucaaguacggcaacggggucuggaucggccgcaccaaguccaucagcagccggaacggcuucgagaugaucugggaccccaacggguggaccggcaccgacaacaacuucuccaucaagcaggacaucguggggaucaacgaguggagcggcuacuccgggagcuucgugcagcacccggagcugacgggccucgacugcauccgccccugcuucugggucgagcugauccggggccgccccaaggagaacaccaucuggaccuccgggagcuccaucagcuucugcggcgugaacuccgacaccgucggguggagcuggcccgacggcgccgagcugccguucacgaucgacaaguga

SEQ ID NO: 84396 - RNA, 1410 nt, Artificial Sequence; identical to SEQ ID NO: 80762
  derived and/or modified CDS sequence (opt1) from neuraminidase__InfluenzaA__ADX98821

SEQ ID NO: 84397 - RNA, 1410 nt, Artificial Sequence; identical to SEQ ID NO: 80762
  derived and/or modified CDS sequence (opt1) from neuraminidase__InfluenzaA__ADX98846

SEQ ID NO: 84398 - RNA, 1410 nt, Artificial Sequence
  derived and/or modified CDS sequence (opt1) from neuraminidase__InfluenzaA__ADX98856
augaaccccaaccagaagaucaugaccaucggcagcgugugcaugaccaucgggauggccaaccugauccuccagaucggcaacaucaucuccaucuggaucagccacuccauccagcuggggauccagaaccagaucgagacgugcaaccagagcgucaucaccuacgagaacaacaccugggugaaccagaccuacgugaacaucuccaacacgaacuucgccgcgggccagagcgucguguccgugaagcuggccgggaacagcucccucugcccggucagcggcugggccaucuacuccaaggacaacagcauccgcaucggcuccaagggggacguguucgugauccgggagcccuucaucagcugcagcccccuggagugccgcaccuucuuccugacccagggcgcccuccugaacgacaagcacuccaacgggaccaucaaggaccggucccccuaccgcacgcugaugagcugcccgaucggcgagguccccucccccuacaacagccgguucgagagcguggccugguccgcgagcgccugccacgacgggaucaacuggcucaccaucggcaucuccggccccgacaacggggccguggccguccugaaguacaacggcaucaucaccgacaccaucaagagcuggcgcaacaacauccugcggacgcaggaguccgagugcgcgugcgugaacgggagcugcuucaccgugaugaccgacggcccguccgacggccaggccagcuacaagaucuuccgcaucgagaaggggaagaucgucaaguccguggagaugaacgcccccaacuaccacuacgaggagugcagcugcuaccccgacuccagcgagaucacgugcgugugccgggacaacuggcacggcuccaaccgccccugggucagcuucaaccagaaccucgaguaccagaucggguacaucugcuccggcaucuucggggacaacccgcggcccaacgacaagaccggcagcugcggccccguguccagcaacggggccaacggcgugaagggguucuccuucaaguacggcaacggggucuggaucggccgcaccaagagcaucagcucccggaacggcuucgagaugaucugggaccccaacggguggaccggcaccgacaacaacuucagcaucaagcaggacaucguggggaucaacgagugguccggcuacagcggguccuucgugcagcacccggagcugacgggccuggacugcauccgccccugcuucugggucgagcucauccggggccgccccaaggagaacaccaucuggaccagcggguccagcaucuccuucugcggcgugaacagcgacaccgucgggugguccuggcccgacggcgccgagcugccguucacgaucgacaaguga

SEQ ID NO: 84399 - RNA, 1410 nt, Artificial Sequence; identical to SEQ ID NO: 80762
  derived and/or modified CDS sequence (opt1) from neuraminidase__InfluenzaA__ADX98863

SEQ ID NO: 84400 - RNA, 1410 nt, Artificial Sequence; identical to SEQ ID NO: 80762
  derived and/or modified CDS sequence (opt1) from neuraminidase__InfluenzaA__ADX98873

SEQ ID NO: 84401 - RNA, 1410 nt, Artificial Sequence
  derived and/or modified CDS sequence (opt1) from neuraminidase__InfluenzaA__ADX98883
augaaccccaaccagaagaucaucaccaucggcagcgugugcaugaccaucgggauggccaaccugauccuccagaucggcaacaucaucuccaucuggaucagccacuccauccagcuggggaaccagaaccagaucgagacgugcaaccagagcgucaucaccuacgagaacaacaccugggugaaccagaccuacgugaacaucuccaacacgaacgucgccgcgggccagagcgugguguccgucaagcuggccgggaacagcucccucugcccggugagcggcugggccaucuacuccaaggacaacagcauccgcaucggcuccaagggggacgccuucgugauccgggagcccuucaucagcugcagcccccuggagugccgcaccuucuuccugacccagggcgcccuccugaacgacaagcacuccaacgggaccaucaaggaccggucccccuaccgcacgcugaugagcugcccgaucggcgagguccccucccccuacaacagccgguucgagagcguggcgugguccgccagcgccugccacgacgggaucaacuggcucaccaucggcaucuccggccccgacaacggggccguggcgguccugaaguacaacggcaucaucaccgacaccaucaagagcuggcgcaacaacauccugcggacgcaggaguccgagugcgccugcgugaacgggagcugcuucaccgugaugaccgacggcccguccgacggccaggccagcuacaagaucuuccgcaucgagaaggggaagaucgucaaguccguggagaugaacgcccccaacuaccacuacgaggagugcagcugcuaccccgacuccagcgagaucacgugcgugugccgggacaacuggcacggcuccaaccgccccugggucagcuucaaccagaaccucgaguaccagaucggguacaucugcuccggcaucuucggggacaacccgcggcccaacgacaagaccggcagcugcggccccguguccagcaacggggccaacggcgugaagggguucuccuucaaguacggcaacggggucuggaucggccgcaccaagagcaucagcucccggagcggcuucgagaugaucugggaccccaacggguggaccggcaccgacaacaacuucuccaucaagcaggacaucguggggaucaacgaguggagcggcuacuccgggagcuucgugcagcacccggagcugacgggccuggacugcauccgccccugcuucugggucgagcucauccggggccgccccaaggagaacaccaucuggaccuccgggagcuccaucagcuucugcggcgugaacuccgacaccgucggguggagcuggcccgacggcgcggagcugccguucacgaucgacaaguga

SEQ ID NO: 84402 - RNA, 1410 nt, Artificial Sequence; identical to SEQ ID NO: 80762
  derived and/or modified CDS sequence (opt1) from neuraminidase__InfluenzaA__ADX98893

SEQ ID NO: 84403 - RNA, 1410 nt, Artificial Sequence; identical to SEQ ID NO: 80762
  derived and/or modified CDS sequence (opt1) from neuraminidase__InfluenzaA__ADX98903

SEQ ID NO: 84404 - RNA, 1410 nt, Artificial Sequence; identical to SEQ ID NO: 82315
  derived and/or modified CDS sequence (opt1) from neuraminidase__InfluenzaA__ADX98913

SEQ ID NO: 84405 - RNA, 1410 nt, Artificial Sequence; identical to SEQ ID NO: 82193
  derived and/or modified CDS sequence (opt1) from neuraminidase__InfluenzaA__ADX98923

SEQ ID NO: 84406 - RNA, 1410 nt, Artificial Sequence; identical to SEQ ID NO: 82199
  derived and/or modified CDS sequence (opt1) from neuraminidase__InfluenzaA__ADX98933

SEQ ID NO: 84407 - RNA, 1410 nt, Artificial Sequence; identical to SEQ ID NO: 80762
  derived and/or modified CDS sequence (opt1) from neuraminidase__InfluenzaA__ADX98943

SEQ ID NO: 84408 - RNA, 1410 nt, Artificial Sequence; identical to SEQ ID NO: 82719
  derived and/or modified CDS sequence (opt1) from neuraminidase__InfluenzaA__ADX98953

SEQ ID NO: 84409 - RNA, 1410 nt, Artificial Sequence; identical to SEQ ID NO: 80762
  derived and/or modified CDS sequence (opt1) from neuraminidase__InfluenzaA__ADX98963

SEQ ID NO: 84410 - RNA, 1410 nt, Artificial Sequence
  derived and/or modified CDS sequence (opt1) from neuraminidase__InfluenzaA__ADX98973
augaaccccaaccagaagaucaucaccaucggcagcgugugcaugaccaucgggauggccaaccugauccuccagaucggcaacaucaucuccaucuggaucagccacuccauccagcuggggaaccagaaccagaucgagacgugcaaccagagcgucaucaccuacgagaacaacaccugggugaaccagaccuacgugaacaucuccaacacgaacuucgccgcgggccagagcgucguguccgugaagcuggccgggaacagcucccucugcccggucagcggcugggccaucuacuccaaggacaacagcauccgcaucggcuccaagggggacguguucgugauccgggagcccuucaucagcugcagcccccuggagugccgcaccuucuuccugacccagggcgcccuccugaacgacaagcacuccaacgggaccaucaaggaccggucccccuaccgcacgcugaugaucugcccgaucggcgagguccccagccccuacaacucccgguucgagagcguggccuggagcgcguccgccugccacgacgggaucaacuggcucaccaucggcaucagcggccccgacaacggggccguggccguccugaaguacaacggcaucaucaccgacaccaucaaguccuggcgcaacaacauccugcggacgcaggagagcgagugcgcgugcgugaacggguccugcuucaccgugaugaccgacggcccgagcgacggccaggccuccuacaagaucuuccgcaucgagaaggggaagaucgucaagagcguggagaugaacgcccccaacuaccacuacgaggagugcuccugcuaccccgacagcuccgagaucacgugcgugugccgggacaacuggcacggcagcaaccgccccugggucuccuucaaccagaaccucgaguaccagaucggguacaucugcagcggcaucuucggggacaacccgcggcccaacgacaagaccggcuccugcggccccgugagcuccaacggggccaacggcgugaagggguucagcuucaaguacggcaacggggucuggaucggccgcaccaaguccaucagcagccggaacggcuucgagaugaucugggaccccaacggguggaccggcaccgacaacaacuucuccaucaagcaggacaucguggggaucaacgaguggagcggcuacuccgggagcuucgugcagcacccggagcugacgggccuggacugcauccgccccugcuucugggucgagcucauccggggccgccccaaggagaacaccaucuggaccuccgggagcuccaucagcuucugcggcgugaacuccgacaccgucggguggagcuggcccgacggcgccgagcugccguucacgaucgacaaguga

SEQ ID NO: 84411 - RNA, 1410 nt, Artificial Sequence; identical to SEQ ID NO: 80762
  derived and/or modified CDS sequence (opt1) from neuraminidase__InfluenzaA__ADX98983

SEQ ID NO: 84412 - RNA, 1410 nt, Artificial Sequence; identical to SEQ ID NO: 80762
  derived and/or modified CDS sequence (opt1) from neuraminidase__InfluenzaA__ADX98993

SEQ ID NO: 84413 - RNA, 1410 nt, Artificial Sequence; identical to SEQ ID NO: 80762
  derived and/or modified CDS sequence (opt1) from neuraminidase__InfluenzaA__ADX99003

SEQ ID NO: 84414 - RNA, 1365 nt, Artificial Sequence
  derived and/or modified CDS sequence (opt1) from neuraminidase__InfluenzaA__ADX99584
augaaccccaaccagaagaucaccaccaucggcagcaucugccugguggucgggcucaucucccugauccugcagaucggcaacaucaucagcaucuggaucucccacagcauccagacggggucccagaaccacaccggcaucugcaaccagaacaucaucaccuacaagaacagcaccugggugaaggacacgaccuccgugauccucaccgggaacagcucccugugcccgauccgcggcugggccaucuacagcaaggacaacuccauccggaucggcagcaagggggacgucuucgugauccgcgagcccuucaucuccugcagccaccuggagugccggaccuucuuccucacgcagggcgcccugcugaacgacaagcacuccaacgggaccgugaaggaccgcagccccuaccgggcgcucauguccugccccgucggcgaggccccgagccccuacaacucccgcuucgagagcguggccuggagcgccuccgccugccacgacgggaugggcuggcugaccaucggcaucagcgggcccgacaacggcgcgguggccguccugaaguacaacgggaucaucaccgagacgaucaaguccuggcggaagaagauccuccgcacccaggagagcgagugcgccugcgugaacggcuccugcuucaccaucaugaccgacggccccagcgacgggcuggccuccuacaagaucuucaagaucgagaagggcaaggugaccaagagcaucgagcugaacgcgccgaacucccacuacgaggagugcagcugcuaccccgacacggggaaggucaugugcgugugccgggacaacuggcacggcuccaaccgccccugggugagcuucgaccagaaccucgacuaccagaucggguacaucugcuccggcgucuucggcgacaacccccggccggaggacgggaccggcagcugcgggcccguguacguggacggcgccaacggggucaagggcuucuccuaccgcuacggcaacgggguguggaucggccggaccaagagccacuccagccgccacggguucgagaugaucugggaccccaacggcuggacggagaccgacuccaaguucagcgugcggcaggacgucguggccaugaccgacuggagcggguacuccggcagcuucgugcagcaccccgagcugaccggccuggacugcaugcgcccgugcuucugggucgagcucauccgggggcgccccaaggagaagacgaucuggaccuccgccagcuccaucagcuucugcggcgugaacuccgacaccgucgacuggagcuggcccgacggggccgagcugcccuucuccaucgacaaguga

SEQ ID NO: 84415 - RNA, 1365 nt, Artificial Sequence; identical to SEQ ID NO: 84414
  derived and/or modified CDS sequence (opt1) from neuraminidase__InfluenzaA__ADX99595

SEQ ID NO: 84416 - RNA, 1365 nt, Artificial Sequence; identical to SEQ ID NO: 84414
  derived and/or modified CDS sequence (opt1) from neuraminidase__InfluenzaA__ADX99606

SEQ ID NO: 84417 - RNA, 1365 nt, Artificial Sequence; identical to SEQ ID NO: 84414
  derived and/or modified CDS sequence (opt1) from neuraminidase__InfluenzaA__ADX99617

SEQ ID NO: 84418 - RNA, 1365 nt, Artificial Sequence; identical to SEQ ID NO: 84414
  derived and/or modified CDS sequence (opt1) from neuraminidase__InfluenzaA__ADX99628

SEQ ID NO: 84419 - RNA, 1365 nt, Artificial Sequence; identical to SEQ ID NO: 84414
  derived and/or modified CDS sequence (opt1) from neuraminidase__InfluenzaA__ADX99639

SEQ ID NO: 84420 - RNA, 1365 nt, Artificial Sequence; identical to SEQ ID NO: 79743
  derived and/or modified CDS sequence (opt1) from neuraminidase__InfluenzaA__ADX99650

SEQ ID NO: 84421 - RNA, 1365 nt, Artificial Sequence; identical to SEQ ID NO: 79743
  derived and/or modified CDS sequence (opt1) from neuraminidase__InfluenzaA__ADX99672

SEQ ID NO: 84422 - RNA, 1365 nt, Artificial Sequence; identical to SEQ ID NO: 79743
  derived and/or modified CDS sequence (opt1) from neuraminidase__InfluenzaA__ADX99683

SEQ ID NO: 84423 - RNA, 1365 nt, Artificial Sequence; identical to SEQ ID NO: 79743
  derived and/or modified CDS sequence (opt1) from neuraminidase__InfluenzaA__ADX99694

SEQ ID NO: 84424 - RNA, 1365 nt, Artificial Sequence; identical to SEQ ID NO: 79743
  derived and/or modified CDS sequence (opt1) from neuraminidase__InfluenzaA__ADX99705

SEQ ID NO: 84425 - RNA, 1365 nt, Artificial Sequence; identical to SEQ ID NO: 79743
  derived and/or modified CDS sequence (opt1) from neuraminidase__InfluenzaA__ADX99846

SEQ ID NO: 84426 - RNA, 1365 nt, Artificial Sequence; identical to SEQ ID NO: 79743
  derived and/or modified CDS sequence (opt1) from neuraminidase__InfluenzaA__ADX99857

SEQ ID NO: 84427 - RNA, 1365 nt, Artificial Sequence; identical to SEQ ID NO: 79743
  derived and/or modified CDS sequence (opt1) from neuraminidase__InfluenzaA__ADX99868

SEQ ID NO: 84428 - RNA, 1365 nt, Artificial Sequence; identical to SEQ ID NO: 79743
  derived and/or modified CDS sequence (opt1) from neuraminidase__InfluenzaA__ADX99879

SEQ ID NO: 84429 - RNA, 1365 nt, Artificial Sequence; identical to SEQ ID NO: 79743
  derived and/or modified CDS sequence (opt1) from neuraminidase__InfluenzaA__ADX99890

SEQ ID NO: 84430 - RNA, 1365 nt, Artificial Sequence; identical to SEQ ID NO: 79743
  derived and/or modified CDS sequence (opt1) from neuraminidase__InfluenzaA__ADX99901

SEQ ID NO: 84431 - RNA, 1365 nt, Artificial Sequence
  derived and/or modified CDS sequence (opt1) from neuraminidase__InfluenzaA__ADX99912
augaaccccaaccagaagaucaucaccaucggcagcaucugccugguggucgggcucaucucccugauccugcagaucggcaacaucaucagcaucuggaucucccacagcauccagaccgggucccagaaccacacgggcaucugcaaccagaacaucaucaccuacaagaacagcaccugggugaaggacaccacguccgugauccucaccgggaacagcucccugugcccgauccgcggcugggccaucuacagcaaggacaacuccauccggaucggcagcaagggggacgucuucaucauccgcgagcccuucaucuccugcagccaccuggagugccggaccuucuuccucacccagggcgcccugcugaacgacaagcacuccagcgggacggugaaggaccgcucccccuaccgggcgcucaugagcugccccgugggcgaggccccgucccccuacaacagccgcuucgagagcgucgccugguccgccagcgccugccacgacgggaugggcuggcugaccaucggcaucuccgggcccgacaacggcgcgguggccgugcugaaguacaacgggaucaucaccgagaccaucaagagcuggcggaagaagauccuccgcacgcaggaguccgagugcgccugcgucaacggcagcugcuucaccaucaugaccgacggccccuccgacgggcuggccagcuacaagaucuucaagaucgagaagggcaaggugaccaaguccaucgagcugaacgcgccgaacagccacuacgaggagugcuccugcuaccccgacacggggaaggugaugugcgucugccgggacaacuggcacggcagcaaccgccccuggguguccuucgaccagaaccucgacuaccagaucggguacaucugcagcggcguguucggcgacaacccccggccggaggacgggaccggcuccugcgggcccgucuacguggacggcgccaacggggugaagggcuucagcuaccgcuacggcaacggggucuggaucggccggaccaagucccacagcucccgccacggguucgagaugaucugggaccccaacggcuggaccgagacggacagcaaguucagcgugcggcaggacguggucgccaugaccgacugguccggguacagcggcuccuucgugcagcaccccgagcugaccggccuggacugcaugcgcccgugcuucuggguggagcucauccgggggcgccccaaggagaagaccaucuggacgagcgccuccagcaucuccuucugcggcgucaacagcgacaccguggacugguccuggcccgacggggccgagcugcccuucagcaucgacaaguga

SEQ ID NO: 84432 - RNA, 1365 nt, Artificial Sequence; identical to SEQ ID NO: 79743
  derived and/or modified CDS sequence (opt1) from neuraminidase__InfluenzaA__ADX99923

SEQ ID NO: 84433 - RNA, 1365 nt, Artificial Sequence; identical to SEQ ID NO: 79743
  derived and/or modified CDS sequence (opt1) from neuraminidase__InfluenzaA__ADX99934

SEQ ID NO: 84434 - RNA, 1365 nt, Artificial Sequence; identical to SEQ ID NO: 79743
  derived and/or modified CDS sequence (opt1) from neuraminidase__InfluenzaA__ADX99956

SEQ ID NO: 84435 - RNA, 1365 nt, Artificial Sequence; identical to SEQ ID NO: 79743
  derived and/or modified CDS sequence (opt1) from neuraminidase__InfluenzaA__ADX99967

SEQ ID NO: 84436 - RNA, 1365 nt, Artificial Sequence; identical to SEQ ID NO: 79743
  derived and/or modified CDS sequence (opt1) from neuraminidase__InfluenzaA__ADX99978

SEQ ID NO: 84437 - RNA, 1365 nt, Artificial Sequence; identical to SEQ ID NO: 79743
  derived and/or modified CDS sequence (opt1) from neuraminidase__InfluenzaA__ADX99989

SEQ ID NO: 84438 - RNA, 1365 nt, Artificial Sequence; identical to SEQ ID NO: 79743
  derived and/or modified CDS sequence (opt1) from neuraminidase__InfluenzaA__ADY00001

SEQ ID NO: 84439 - RNA, 1365 nt, Artificial Sequence; identical to SEQ ID NO: 79743
  derived and/or modified CDS sequence (opt1) from neuraminidase__InfluenzaA__ADY00012

SEQ ID NO: 84440 - RNA, 1365 nt, Artificial Sequence; identical to SEQ ID NO: 79743
  derived and/or modified CDS sequence (opt1) from neuraminidase__InfluenzaA__ADY00023

SEQ ID NO: 84441 - RNA, 1413 nt, Artificial Sequence
  derived and/or modified CDS sequence (opt1) from neuraminidase__InfluenzaA__ADY04729
augaaccccaaccagaagaucaucaccaucggcagcaucuccaucgccaucgggaucaucagccugaugcuccagaucggcaacaucaucuccaucugggccagccacuccauccagaccgggagccagaaccacacgggcgugugcaaccagcgcaucaucaccuacgagaacuccaccugggucaaccacaccuacgugaacaucaacaacacgaacgugaucgcggggaaggacaagaccagcgucaccauggccggcaacuccagccugugcuccaucagcggcugggccaucuacaccaaggacaacuccauccggaucgggagcaagggcgacguguucgugauccgcgagccguucaucuccugcagccaccuggagugccggacguucuuccucacccagggggcccugcugaacgacaagcacuccaacggcaccgucaaggaccgcagccccuaccgggcccucauguccugcccccugggggaggcgcccagcccguacaacagcaaguucgaguccguggccuggagcgccuccgccugccacgacggcaugggcuggcugaccaucgggaucagcggccccgacaacggggcgguggccguccucaaguacaacggcaucaucacggagaccaucaaguccuggaagaagcagauccugcgcacccaggagagcgagugcgugugcgugaacggcuccugcuucaccaucaugacggacgggcccagcaacggcgccgccuccuacaagaucuucaagaucgagaaggggaaggucaccaagagcaucgagcugaacgcccccaacuuccacuacgaggagugcuccugcuacccggacaccggcaccgugaugugcgugugccgggacaacuggcacgggagcaaccgccccugggucuccuucaaccagaaccucgacuaccagaucggcuacaucugcagcggcguguucggggacaacccccggcccaaggacggcgagggguccugcaacccggugacggucgacggcgcgaacggggugaagggcuucagcuacaaguacggcaacgggguguggaucggccgcaccaaguccaaccggcugcgcaagggguucgagaugaucugggaccccaacggcuggaccgacaccgacagcgacuucuccgucaagcaggacgugguggccaucacggacuggagcggguacagcggcuccuucguccagcaccccgagcugaccggccucgacugcauccggcccugcuucuggguggagcugguccgcgggcugccgaaggagaacaccaccaucuggacgagcggcuccagcaucuccuucugcggggugaacagcgacaccgccaacugguccuggcccgacggcgccgagcuccccuucaccaucgacaaguga

SEQ ID NO: 84442 - RNA, 1410 nt, Artificial Sequence; identical to SEQ ID NO: 83542
  derived and/or modified CDS sequence (opt1) from neuraminidase__InfluenzaA__ADY11828

SEQ ID NO: 84443 - RNA, 1410 nt, Artificial Sequence; identical to SEQ ID NO: 80623
  derived and/or modified CDS sequence (opt1) from neuraminidase__InfluenzaA__ADY11839

SEQ ID NO: 84444 - RNA, 1410 nt, Artificial Sequence; identical to SEQ ID NO: 80623
  derived and/or modified CDS sequence (opt1) from neuraminidase__InfluenzaA__ADY17657

SEQ ID NO: 84445 - RNA, 1410 nt, Artificial Sequence; identical to SEQ ID NO: 80623
  derived and/or modified CDS sequence (opt1) from neuraminidase__InfluenzaA__ADY17668

SEQ ID NO: 84446 - RNA, 1410 nt, Artificial Sequence; identical to SEQ ID NO: 80623
  derived and/or modified CDS sequence (opt1) from neuraminidase__InfluenzaA__ADY17679

SEQ ID NO: 84447 - RNA, 1410 nt, Artificial Sequence; identical to SEQ ID NO: 80623
  derived and/or modified CDS sequence (opt1) from neuraminidase__InfluenzaA__ADY17690

SEQ ID NO: 84448 - RNA, 1410 nt, Artificial Sequence; identical to SEQ ID NO: 80623
  derived and/or modified CDS sequence (opt1) from neuraminidase__InfluenzaA__ADY17701

SEQ ID NO: 84449 - RNA, 1410 nt, Artificial Sequence; identical to SEQ ID NO: 80762
  derived and/or modified CDS sequence (opt1) from neuraminidase__InfluenzaA__ADY38722

SEQ ID NO: 84450 - RNA, 1410 nt, Artificial Sequence; identical to SEQ ID NO: 82511
  derived and/or modified CDS sequence (opt1) from neuraminidase__InfluenzaA__ADY38723

SEQ ID NO: 84451 - RNA, 1410 nt, Artificial Sequence; identical to SEQ ID NO: 80762
  derived and/or modified CDS sequence (opt1) from neuraminidase__InfluenzaA__ADY38734

SEQ ID NO: 84452 - RNA, 1410 nt, Artificial Sequence; identical to SEQ ID NO: 82354
  derived and/or modified CDS sequence (opt1) from neuraminidase__InfluenzaA__ADY38753

SEQ ID NO: 84453 - RNA, 1410 nt, Artificial Sequence; identical to SEQ ID NO: 80762
  derived and/or modified CDS sequence (opt1) from neuraminidase__InfluenzaA__ADY38763

SEQ ID NO: 84454 - RNA, 1410 nt, Artificial Sequence; identical to SEQ ID NO: 80762
  derived and/or modified CDS sequence (opt1) from neuraminidase__InfluenzaA__ADZ04600

SEQ ID NO: 84455 - RNA, 1410 nt, Artificial Sequence; identical to SEQ ID NO: 80762
  derived and/or modified CDS sequence (opt1) from neuraminidase__InfluenzaA__ADZ04610

SEQ ID NO: 84456 - RNA, 1410 nt, Artificial Sequence; identical to SEQ ID NO: 80762
  derived and/or modified CDS sequence (opt1) from neuraminidase__InfluenzaA__ADZ04693

SEQ ID NO: 84457 - RNA, 1410 nt, Artificial Sequence; identical to SEQ ID NO: 80762
  derived and/or modified CDS sequence (opt1) from neuraminidase__InfluenzaA__ADZ04701

SEQ ID NO: 84458 - RNA, 1410 nt, Artificial Sequence; identical to SEQ ID NO: 80762
  derived and/or modified CDS sequence (opt1) from neuraminidase__InfluenzaA__ADZ04711

SEQ ID NO: 84459 - RNA, 1410 nt, Artificial Sequence
  derived and/or modified CDS sequence (opt1) from neuraminidase__InfluenzaA__ADZ05393
augaaccccaaccagaagaucaucaccaucgacagcgugugcaugaccaucggcauggccaaccugauccuccagaucgggaacaucaucuccaucuggaucagccacuccauccagcugggcaaccagaaccagaucgagacgugcaaccagagcgucaucaccuacgagaacaacaccugggugaaccagaccuacgugaacaucuccaacacgaacuucgccgcggggcagagcgucguguccgugaagcuggccggcaacagcucccucugcccggucagcgggugggccaucuacuccaaggacaacagcgugcgcaucggcuccaagggcgacguguucgucauccgggagcccuucaucagcugcagcccccuggagugccgcaccuucuuccugacccagggggcccuccugaacgacaagcacuccaacggcaccaucaaggaccggucccccuaccgcacgcugaugagcugcccgaucggggaggugcccucccccuacaacagccgguucgagagcguggccugguccgcgagcgccugccacgacggcaucaacuggcucaccaucgggaucuccggccccgacaacggcgccgucgccgugcugaaguacaacgggaucaucaccgacaccaucaagagcuggcgcaacaacauccugcggacgcaggaguccgagugcgcgugcgugaacggcagcugcuucaccgucaugaccgacgggccguccaacggccaggccagcuacaagaucuuccgcaucgagaagggcaagaucgugaaguccguggagaugaacgcccccaacuaccacuacgaggagugcagcugcuaccccgacuccagcgagaucacgugcgucugccgggacaacuggcacggguccaaccgccccugggugagcuucaaccagaaccucgaguaccagaucggcuacaucugcuccgggaucuucggcgacaacccgcggcccaacgacaagaccgggagcugcggccccguguccagcaacggcgccaacggggucaagggcuucuccuucaaguacgggaacggcguguggaucgggcgcaccaagagcaucagcucccggaacggcuucgagaugaucugggaccccaacggcuggaccgggaccgacaacaacuucagcaucaagcaggacaucgugggcaucaacgagugguccggguacagcggcuccuucguccagcacccggagcugacggggcuggacugcauccgccccugcuucuggguggagcucauccggggccgccccaaggagaacaccaucuggaccagcggcuccagcaucuccuucugcggggucaacagcgacaccgugggcugguccuggcccgacggggccgagcugccguucacgaucgacaaguga

SEQ ID NO: 84460 - RNA, 1413 nt, Artificial Sequence
  derived and/or modified CDS sequence (opt1) from neuraminidase__InfluenzaA__ADZ05837
augaaccccaaccagaagaucaucaccaucggcagcaucuccaucgccaucgggaucaucagccugaugcuccagaucggcaacaucaucuccaucugggccagccacuccauccagaccgggagccagaacaacacgggcaucugcaaccagcgcaucaucacgugcgagaacuccaccugggugaaccacaccuacgucaacaucaacaacaccaacgugguggcgggggaggacaagaccagcgucacccuggccggcaacuccagccugugcuccaucagcggcugggccaucuacaccaaggacaacuccauccggaucgggagcaagggcgacguguucgugauccgcgagccguucaucuccugcagccaccucgagugccggacguucuuccugacccagggggcccugcucaacgacaagcacuccaacggcaccgucaaggaccgcagccccuaccgggcccugauguccugcccccugggggaggcgcccagcccguacaacagcaaguucgaguccguggccuggagcgccuccgccugccacgacggcaugggcuggcucaccaucgggaucagcggccccgacaacggggcgguggccguccugaaguacaacggcaucaucacgggcaccaucaaguccuggaagaagcagauccugcgcacccaggagagcgagugcgugugcaugaacggguccugcuucaccaucaugacggacggccccagcaacaaggccgccuccuacaagaucuucaagaucgagaaggggaaggugaccaagagcaucgagcucaacgcccccaacuucuacuacgaggagugcuccugcuacccggacaccggcaucgucaugugcgugugccgggacaacuggcacgggagcaaccgccccuggguguccuucaaccagaaccuggacuaccagaucggcuacaucugcagcggcgucuucggggacaacccccggcccgaggacggcgagggguccugcaacccggugaccguggacggcgcgaacggggucaagggcuucagcuacaaguacggcaacgggguguggaucggccgcacgaaguccaaccggcugcgcaagggguucgagaugaucugggaccccaacggcuggaccaacaccgacagcgacuucuccgugaagcaggacgucguggccaccacggacuggagcggguacagcggcuccuucgugcagcaccccgagcucaccggccuggacugcauccggcccugcuucugggucgagcuggugcgcgggcucccgcgggagaacaccaccaucuggacgagcggcuccagcaucuccuucugcggggucaacagcgacaccgccaacugguccuggcccgacggcgccgagcugcccuucaccaucgacaaguga

SEQ ID NO: 84461 - RNA, 1413 nt, Artificial Sequence; identical to SEQ ID NO: 81485
  derived and/or modified CDS sequence (opt1) from neuraminidase__InfluenzaA__ADZ05848

SEQ ID NO: 84462 - RNA, 1410 nt, Artificial Sequence; identical to SEQ ID NO: 81929
  derived and/or modified CDS sequence (opt1) from neuraminidase__InfluenzaA__ADZ05858

SEQ ID NO: 84463 - RNA, 1410 nt, Artificial Sequence; identical to SEQ ID NO: 80762
  derived and/or modified CDS sequence (opt1) from neuraminidase__InfluenzaA__ADZ47841

SEQ ID NO: 84464 - RNA, 1410 nt, Artificial Sequence; identical to SEQ ID NO: 80762
  derived and/or modified CDS sequence (opt1) from neuraminidase__InfluenzaA__ADZ47851

SEQ ID NO: 84465 - RNA, 1410 nt, Artificial Sequence
  derived and/or modified CDS sequence (opt1) from neuraminidase__InfluenzaA__ADZ47861
augaaccccaaccagaagaucaucaccaucggcagcgugugcaugaccaucgggcuggccaaccucauccugcagaucggcaacaucaucuccaucuggaucagccacuccauccagcuggggaaccagaaccagaucgagacgugcaaccagagcgucaucaccuacgagaacaacaccugggugaaccagaccuacgugaacaucuccaacaucaacuucgccgcgggccagagcgucguguccgugaagcucgccgggaacagcucccugugcccggucagcggcugggccaucuacuccaaggacaacagcgugcgcaucggcuccaagggggacguguucgucauccgggagcccuucaucagcugcagcccccuggagugccgcacguucuuccucacccagggcgcccugcugaacgacaagcacuccaacgggaccaucaaggaccggucccccuaccgcacccucaugagcugcccgaucggcgaggugcccucccccuacaacagccgguucgagagcguggccugguccgcgagcgccugccacgacgggaucaacuggcugacgaucggcaucuccggccccgacaacggggccgucgccgugcugaaguacaacggcaucaucaccgacaccaucaagagcuggcgcaacaacauccuccggacccaggaguccgagugcgcgugcgugaacgggagcugcuucacggucaugaccgacggcccguccgacggccaggccagcuacaagaucuuccgcaucgagaaggggaagaucgugaaguccguggagaugaacgcccccaacuaccacuacgaggagugcagcugcuaccccgacuccagcgagaucacgugcgucugccgggacaacuggcacggcuccaaccgccccugggugagcuucaaccagaaccuggaguaccggaucggguacaucugcuccggcaucuucggggacaacccgcgccccaacgacaagaccggcagcugcggccccguguccagcaacggggccaacggcgucaagggguucuccuucaaguacggcaacgggguguggaucggccggaccaagagcaucagcucccgcaacggcuucgagaugaucugggaccccaacggguggaccggcaccgacaagaacuucagcaucaagcaggacaucguggggaucaacgagugguccggcuacagcggguccuucguccagcacccggagcugaccggccucgacugcauccggcccugcuucuggguggagcugauccgcggccggcccaaggagaacacgaucuggaccagcggguccagcaucuccuucugcggcgucaacagcgacaccguggggugguccuggcccgacggcgccgagcugccguucaccaucgacaaguga

SEQ ID NO: 84466 - RNA, 1413 nt, Artificial Sequence
  derived and/or modified CDS sequence (opt1) from neuraminidase__InfluenzaA__ADZ53101
augaaccccaaccagaagaucaucaccaucggcagcaucuccaucgccaucgggaucaucagccugaugcuccagaucggcaacaucaucuccaucugggccagccacuccauccagaccgggagccagaacaacacgggcaucugcaaccagcgcaucaucaccuacgagaacuccaccugggugaaccacaccuacgucaacaucaacaacacgaaggugguggcgggggaggacaagaccagcgucacccuggccggcaacuccagccugugcuccaucagcggcugggccaucaacaccaaggacaacuccauccggaucgggagcaagggcgacguguucgugauccgcgagccguucaucuccugcagccaccucgagugccggacguucuuccugacccagggggcccugcucaacgacaagcacuccaacggcaccgucaaggaccgcagccccuaccgggcccugauguccugcccccugggggaggcgcccagcccguacaacagcaaguucgaguccguggccuggagcgccuccgccugccacgacggcaugggcuggcucaccaucgggaucagcggccccgacaacggggcgguggccguccugaaguacaacggcaucaucacgggcaccaucaaguccuggaagaagcagauccugcgcacccaggagagcgagugcgugugcaugaacggguccugcuucaccaucaugacggacggccccagcaacaaggccgccuccuacaagaucuucaagaucgagaaggggaaggugaccaagagcaucgagcucaacgcccccaacuucuacuacgaggagugcuccugcuacccggacaccggcaucgucaugugcgugugccgggacaacuggcacgggagcaaccgccccuggguguccuucaaccagaaccuggacuaccagaucggcuacaucugcagcggcgucuucggggacaacccccggcccgaggacggcgagggguccugcaacccggugaccguggacggcgcgaacggggucaagggcuucagcuacaaguacggcaacgggguguggaucggccgcacgaaguccaaccggcugcgcaagggguucgagaugaucugggaccccaacggcuggaccaacaccgacagcgacuucuccgugaagcaggacgucguggccaucaccgacuggagcggguacagcggcuccuucgugcagcaccccgagcucacgggccuggacugcauccggcccugcuucugggucgagcuggugcgcgggcucccgcgggagaacaccaccaucuggaccagcggcuccagcaucuccuucugcggggucaacagcgacacggccaacugguccuggcccgacggcgccgagcugcccuucaccaucgacaaguga

SEQ ID NO: 84467 - RNA, 1410 nt, Artificial Sequence
  derived and/or modified CDS sequence (opt1) from neuraminidase__InfluenzaA__ADZ53124
augaaccccaaccagaagaucaucaccaucggcagcgugugcaugaccaucgggauggccaaccugauccuccagaucggcaacaucaucuccaucuggaucagccacuccauccagcuggggaaccagaaccagaucgagacgugcaaccagagcgucaucaccuacgagaacaacaccugggugaaccagaccuacgugaacaucuccaacacgaacuucgccgcgggccagagcgucguguccgugaagcuggccgggaacagcucccucugcccggucagcggcugggccaucuacuccaaggacaacagcauccgcaucggcuccaagggggacguguucgugauccgggagcccuucaucagcugcagcccccuggagugccgcaccuucuuccugacccagggcgcccuccugaacgacaagcacuccaacgggaccaucaaggaccggucccccuaccgcacgcugaugagcugcccgaucggcgagguccccucccccuacaacagccgguucgagagcguggccugguccgcgagcgccugccacgacgggaucaacuggcucaccaucggcaucuccggccccgacaacggggccguggccguccugaaguacaacggcaucaucaccgacaccaucaagagcuggcgcaacaacauccugcggacgcaggaguccgagugcgcgugcgugaacgggagcugcuucaccgugaugaccgacggcccguccgacggccaggccagcuacaagaucuuccgcaucgagaaggggaagaucgucaaguccguggagaugaacgcccccaacuacuacuacgaggagugcagcugcuaccccgacuccagcgagaucacgugcgugugccgggacaacuggcacggcuccaaccgccccugggucagcuucaaccagaaccucgaguaccagaucggguacaucugcuccggcaucuucggggacaacccgcggcccaacgacaagaccggcagcugcggccccguguccagcaacggggccaacggcgugaagggguucuccuucaaguacggcaacggggucuggaucggccgcaccaagagcaucagcucccggaacggcuucgagaugaucugggaccccaacggguggaccggcaccgacaacgacuucagcaucaagcaggacaucguggggaucaacgagugguccggcuacagcggguccuucgugcagcacccggagcugacgggccuggacugcauccgccccugcuucugggucgagcucauccggggccgccccaaggagaacaccaucuggaccagcggguccagcaucuccuucugcggcgugaacagcgacaccgucgggugguccuggcccgacggcgccgagcugccguucacgaucgacaaguga

SEQ ID NO: 84468 - RNA, 1410 nt, Artificial Sequence; identical to SEQ ID NO: 80762
  derived and/or modified CDS sequence (opt1) from neuraminidase__InfluenzaA__ADZ53130

SEQ ID NO: 84469 - RNA, 1410 nt, Artificial Sequence; identical to SEQ ID NO: 80752
  derived and/or modified CDS sequence (opt1) from neuraminidase__InfluenzaA__ADZ53132

SEQ ID NO: 84470 - RNA, 1410 nt, Artificial Sequence; identical to SEQ ID NO: 80762
  derived and/or modified CDS sequence (opt1) from neuraminidase__InfluenzaA__ADZ53134

SEQ ID NO: 84471 - RNA, 1410 nt, Artificial Sequence; identical to SEQ ID NO: 80762
  derived and/or modified CDS sequence (opt1) from neuraminidase__InfluenzaA__ADZ53136

SEQ ID NO: 84472 - RNA, 1410 nt, Artificial Sequence; identical to SEQ ID NO: 81116
  derived and/or modified CDS sequence (opt1) from neuraminidase__InfluenzaA__ADZ53137

SEQ ID NO: 84473 - RNA, 1410 nt, Artificial Sequence; identical to SEQ ID NO: 80762
  derived and/or modified CDS sequence (opt1) from neuraminidase__InfluenzaA__ADZ53139

SEQ ID NO: 84474 - RNA, 1410 nt, Artificial Sequence
  derived and/or modified CDS sequence (opt1) from neuraminidase__InfluenzaA__ADZ53141
augaaccccaaccagaagaucaucaccaucggcagcgugugcaugaccaucgggauggccaaccugauccuccagaucggcaacaucaucuccaucuggaucagccacuccauccagcuggggaaccagaaccagaucgagacgugcaaccagagcgucaucaccuacgagaacaacaccugggugaaccagaccuacgugaacaucuccaacacgaacuucgccgcgggccagagcgucguguccgugaagcuggccgggaacagcucccucugcccggucagcggcugggccaucuacuccaaggacaacagcauccgcaucggcuccaagggggacguguucgugauccgggagcccuucaucagcugcagcccccuggagugccgcaccuucuuccugacccagggcgcccuccugaacgacaagcacuccaacgggaccaucaaggaccggucccccuaccgcacgcugaugagcugcccgaucggcgagguccccucccccuacaacagccgguucgagagcguggccugguccgcgagcgccugccacgacgggaucaacuggcucaccaucggcaucuccggccccgacaacggggccguggccguccugaaguacaacggcaucaucaccgacaccaucaagagcuggcgcaacaacauccugcggacgcaggaguccgagugcgcgugcgugaacgggagcugcuucaccgugaugaccgacggcccguccgacggccaggccagcuacaagaucuuccgcaucgagaaggggaagaucgucaaguccguggagaugaacgcccccaacuaccacuacgaggagugcagcugcuaccccgacuccagcgagaucacgugcgugugccgggacaacuggcacggcuccaaccgccccugggucagcuucaaccagaaccucgaguaccagaucggguacaucugcuccggcaucuucggggacaacccgcggcccaacgacaagaccggcagcugcggccccguguccagcaacggggccaacggcgugaagggguucuccuucaaguacggcaacggggucuggaucggccgcaccaagagcaucagcucccggaacggcuucgagaugaucugggaccccaacggguggaccggcaccgacaacgacuucagcaucaagcaggacaucguggggaucaacgagugguccggcuacagcggguccuucgugcagcacagcgagcugacgggccuggacugcauccgcccgugcuucugggucgagcucauccggggccgccccaaggagaacaccaucuggaccuccgggagcuccaucagcuucugcggcgugaacuccgacaccgucggguggagcuggcccgacggcgccgagcugcccuucacgaucgacaaguga

SEQ ID NO: 84475 - RNA, 1410 nt, Artificial Sequence; identical to SEQ ID NO: 80623
  derived and/or modified CDS sequence (opt1) from neuraminidase__InfluenzaA__AEA03712

SEQ ID NO: 84476 - RNA, 1410 nt, Artificial Sequence; identical to SEQ ID NO: 80623
  derived and/or modified CDS sequence (opt1) from neuraminidase__InfluenzaA__AEA03722

SEQ ID NO: 84477 - RNA, 1410 nt, Artificial Sequence; identical to SEQ ID NO: 80623
  derived and/or modified CDS sequence (opt1) from neuraminidase__InfluenzaA__AEA03744

SEQ ID NO: 84478 - RNA, 1410 nt, Artificial Sequence
  derived and/or modified CDS sequence (opt1) from neuraminidase__InfluenzaA__AEA03755
augaaccccaaccagaagaucaucaccaucggcagcgugucccugaccaucagcacgaucugcuucuucaugcagaucgccauccucaucaccaccgucacccugcacuucaagcaguacgaguucaacuccccgcccaacaaccaggugaugcugugcgagcccacgaucaucgagcgcaacaucaccgagaucguguaccucaccaacaccacgaucgagaaggagaucugccccaagcuggccgaguaccggaacuggagcaagccgcagugcgacaucaccggguucgcgcccuucuccaaggacaacagcauccgccuguccgccggcggggacaucugggucacccgggagcccuacgugagcugcgaccccgacaagugcuaccaguucgcccucggccaggggaccacgcugaacaacgugcacuccaacaacaccguccgcggccggaccccguaccgcacccugcucaugaacgagcugggcgugcccuuccaccuggggacgaagcaggucugcaucgccuggagcuccagcuccugccacgacggcaaggccuggcuccacgugugcaucaccggggacgacaagaacgcgaccgccagcuucaucuacaacggccggcugguggacuccguggucagcugguccaaggagauccugcgcacccaggagagcgagugcgugugcaucaacgggacgugcaccguggucaugaccgacggcuccgccagcggcaaggccgacaccaagauccucuucaucgaggaggggaagaucgugcacacgagcacccuguccggcagcgcgcagcacguggaggagugcuccugcuacccccgguaccccgggguccgcugcgugugccgggacaacuggaagggcagcaaccgcccgaucguggacaucaacaucaaggaccacuccaucgucagcuccuacgugugcagcggccuggugggggacacgccccggaagaacgacuccagcuccagcucccacugccucgaccccaacaacgaggagggcgggcacggcgucaaggggugggccuucgacgacggcaacgacguguggaugggccgcaccaucagcgagaagucccggcugggguacgagaccuucaaggucaucgagggcuggagcaaccccaaguccaagcugcagaucaaccgccaggugaucguggaccgggggaaccgcagcggcuacuccgggaucuucagcgucgagggcaagagcugcaucaaccggugcuucuacguggagcucauccgcggccggaaggaggagaccgaggugcuguggaccuccaacagcaucgucguguucugcgggaccuccggcacguacgggaccggcagcuggccggacggggccgacaucaaccugaugcccaucuga

SEQ ID NO: 84479 - RNA, 1410 nt, Artificial Sequence; identical to SEQ ID NO: 80623
  derived and/or modified CDS sequence (opt1) from neuraminidase__InfluenzaA__AEA03766

SEQ ID NO: 84480 - RNA, 1410 nt, Artificial Sequence; identical to SEQ ID NO: 80623
  derived and/or modified CDS sequence (opt1) from neuraminidase__InfluenzaA__AEA03796

SEQ ID NO: 84481 - RNA, 1410 nt, Artificial Sequence; identical to SEQ ID NO: 80623
  derived and/or modified CDS sequence (opt1) from neuraminidase__InfluenzaA__AEA03806

SEQ ID NO: 84482 - RNA, 1410 nt, Artificial Sequence
  derived and/or modified CDS sequence (opt1) from neuraminidase__InfluenzaA__AEA03817
augaaccccaaccagaagaucaucaccaucggcagcgugucccugaccaucagcacgaucugcuucuucaugcagaucgccauccucaucaccaccgucacccugcacuucaagcaguacgaguucaacuccccgcccaacaaccaggugaugcugugcgagcccacgaucaucgagcgcaacaucaccgagaucguguaccucaccaacaccacgaucgagaaggagaucugccccaagcuggccgaguaccggaacuggagcaagccgcagugcgacaucaccggguucgcgcccuucuccaaggacaacagcauccgccuguccgccggcggggacaucugggucacccgggagcccuacgugagcugcgaccccgaccgcugcuaccaguucgcccucggccaggggaccacgcugaacaacgugcacuccaacaacaccguccgggaccgcaccccguaccggacccugcucaugaacgagcugggcgugcccuuccaccugggcacgaagcaggucugcaucgccuggagcuccagcuccugccacgacgggaaggccuggcuccacgugugcaucaccggcgacgacaagaacgcgaccgccagcuucaucuacaacgggcgccugguggacuccguggucagcugguccaaggagauccugcggacccaggagagcgagugcgugugcaucaacggcacgugcaccguggucaugaccgacggguccgccagcggcaaggccgacaccaagauccucuucaucgaggagggcaagaucgugcacacgagcacccuguccgggagcgcgcagcacguggaggagugcuccugcuacccccgcuaccccggcguccggugcgugugccgcgacaacuggaaggggagcaaccggccgaucguggacaucaacaucaaggaccacuccaucgucagcuccuacgugugcagcggccuggugggcgacacgccccgcaagaacgacuccagcuccagcucccacugccucgaccccaacaacgaggagggcgggcacggggucaagggcugggccuucgacgacgggaacgacguguggaugggccggaccaucagcgagaagucccgccugggcuacgagaccuucaaggucaucgagggguggagcaaccccaaguccaagcugcagaucaaccgccaggugaucguggaccggggcaaccggagcggguacuccggcaucuucagcgucgagggcaagagcugcaucaaccgcugcuucuacguggagcucauccgggggcgcaaggaggagaccgaggugcuguggaccuccaacagcaucgucguguucugcggcaccuccgggacguacggcaccgggagcuggccggacggcgccgacaucaaccugaugcccaucuga

SEQ ID NO: 84483 - RNA, 1410 nt, Artificial Sequence; identical to SEQ ID NO: 80623
  derived and/or modified CDS sequence (opt1) from neuraminidase__InfluenzaA__AEA03828

SEQ ID NO: 84484 - RNA, 1410 nt, Artificial Sequence; identical to SEQ ID NO: 80623
  derived and/or modified CDS sequence (opt1) from neuraminidase__InfluenzaA__AEA03838

SEQ ID NO: 84485 - RNA, 1410 nt, Artificial Sequence; identical to SEQ ID NO: 83779
  derived and/or modified CDS sequence (opt1) from neuraminidase__InfluenzaA__AEA03849

SEQ ID NO: 84486 - RNA, 1410 nt, Artificial Sequence; identical to SEQ ID NO: 80623
  derived and/or modified CDS sequence (opt1) from neuraminidase__InfluenzaA__AEA03860

SEQ ID NO: 84487 - RNA, 1410 nt, Artificial Sequence
  derived and/or modified CDS sequence (opt1) from neuraminidase__InfluenzaA__AEA03871
augaaccccaaccagaagaucaucaccaucggcagcgugucccugaccaucagcacgaucugcuucuucaugcagaucgccauccucaucaccaccgucacccugcacuucaagcaguacgaguucaacuccccgcccaacaaccaggugaugcugugcgagcccacgaucaucgagcgcaacaucaccgagaucguguaccucaccaacaccacgaucgagaaggagaucugccccaagcuggccgaguaccggaacuggagcaagccgcagugcgacaucaccggguucgcgcccuucuccaaggacaacagcauccgccuguccgccggcggggacaucugggucacccgggagcccuacgugagcugcgaccccgacaagugcuaccaguucgcccucggccaggggaccacgcugaacaacgugcacuccaacaacaccguccgcgaccggaccccguaccgcacccugcucaugaacgagcugggcgugcccuuccaccugggcacgaagcaggucugcaucgccuggagcuccagcuccugccacgacgggaaggccuggcuccacgugugcaucaccggcgacgacaagaacgcgaccgccagcuucaucuacaacgggcggcugguggacuccguggucagcugguccaaggagauccugcgcacccaggagagcgagugcgugugcaucaacggcacgugcaccguggucaucaccgacggguccgccagcggcaaggccgacaccaagauccucuucaucgaggagggcaagaucgugcacacgagcacccuguccgggagcgcgcagcacguggaggagugcuccugcuacccccgguaccccggcguccgcugcgugugccgggacaacuggaaggggagcaaccgcccgaucguggacaucaacaucaaggaccacuccaucgucagcuccuacgugugcagcggccuggugggcgacacgccccggaagaacgacuccagcuccagcucccacugccucgaccccaacaacgaggagggcgggcacggggucaagggcugggccuucgacgacgggaacgacguguggaugggccgcaccaucagcgagaagucccggcugggcuacgagaccuucaaggucaucgagggguggagcaaccccaaguccaagcugcagaucaaccgccaggugaucguggaccggggcaaccgcagcggguacuccggcaucuucagcgucgagggcaagagcugcaucaaccggugcuucuacguggagcucauccgcgggcggaaggaggagaccgaggugcuguggaccuccaacagcaucgucguguucugcggcaccuccgggacguacggcaccgggagcuggccggacggcgccgacaucaaccugaugcccaucuga

SEQ ID NO: 84488 - RNA, 1410 nt, Artificial Sequence; identical to SEQ ID NO: 80623
  derived and/or modified CDS sequence (opt1) from neuraminidase__InfluenzaA__AEA03879

SEQ ID NO: 84489 - RNA, 1410 nt, Artificial Sequence
  derived and/or modified CDS sequence (opt1) from neuraminidase__InfluenzaA__AEA03889
augaaccccaaccagaagaucaucaccaucggcagcgugucccugaccaucagcacgaucugcuucuucaugcagaucgccauccucaucaccaccgucacccugcacuucaagcaguacgaguucaacuccccgcccaacaaccaggugaugcugugcgagcccacgaucaucgagcgcaacaucaccgagaucguguaccucaccaacaccacgaucgagaaggagaucugccccaagcuggccgaguaccggaacuggagcaagccgcagugcgacaucaccggguucgcgcccuucuccaaggacaacagcauccgccuguccgccggcggggacaucugggucacccgggagcccuacgugagcugcgaccccgacaagugcuaccaguucgcccucggccaggggaccacgcugaacaacgugcacuccaacaacaagguccgcgaccggaccccguaccgcacccugcucaugaacgagcugggcgugcccuuccaccugggcaccaagcaggucugcaucgccuggagcuccagcuccugccacgacgggaaggccuggcuccacgugugcaucacgggcgacgacaagaacgcgaccgccagcuucaucuacaacgggcggcugguggacuccguggucagcugguccaaggagauccugcgcacccaggagagcgagugcgugugcaucaacgggaccugcacgguggucaugaccgacggguccgccagcggcaaggccgacaccaagauccucuucaucgaggagggcaagaucgugcacaccagcacgcuguccgggagcgcgcagcacguggaggagugcuccugcuacccccgguaccccggcguccgcugcgugugccgggacaacuggaaggggagcaaccgcccgaucguggacaucaacaucaaggaccacuccaucgucagcuccuacgugugcagcggccuggugggcgacacgccccggaagaacgacuccagcuccagcucccacugccucgaccccaacaacgaggagggcggccacggggucaagggcugggccuucgacgacgggaacgacguguggaugggccgcaccaucagcgagaagucccggcugggcuacgagaccuucaaggucaucgagggguggagcaaccccaaguccaagcugcagaucaaccgccaggugaucguggaccggggcaaccgcagcggguacuccggcaucuucagcgucgagggcaagagcugcaucaaccggugcuucuacguggagcucauccgcgggcggaaggaggagaccgaggugcuguggaccuccaacagcaucgucguguucugcggcaccuccgggaccuacggcacggggagcuggccggacggcgccgacaucaaccugaugcccaucuga

SEQ ID NO: 84490 - RNA, 1410 nt, Artificial Sequence
  derived and/or modified CDS sequence (opt1) from neuraminidase__InfluenzaA__AEA03898
augaaccccaaccagaagaucaucaccaucggcagcgugucccugaccaucagcacgaucugcuucuucaugcagaucgccauccucaucaccaccgucacccugcacuucaagcaguacgaguucaacuccccgcccaacaaccaggugaugcugugcgagcccacgaucaucgagcgcaacaucaccgagaucguguaccucaccaacaccacgaucgagaaggagaucugccccaagcuggccgaguaccggaacuggagcaagccgcagugcgacaucaccggguucgcgcccuucuccaaggacaacagcauccgccuguccgccggcggggacaucugggucacccgggagcccuacgugagcugcgaccccgacaagugcuaccaguucgcccucggccaggggaccacgcugaacaacgugcacuccaacaacaccguccgcgaccggaccccguaccgcacccugcucaugaacgagcugggcgugcccuuccaccugggcacgaagcaggucugcaucgccuggagcuccagcuccugccacgacgggaaggccuggcuccacgugugcaucaccggcgacgacaagaacgcgaccgccagcuucaucuacaacgggcggcugguggacuccguggucagcugguccaaggagauccugcgcacccaggagagcgagugcgugugcaucaacggcacgugcaccguggucaugaccgacggguccgccagcggcaaggccgacaccaagauccucuucaucgaggagggcaagaucgugcacacgagcacccuguccgggagcgcgcagcacguggaggagugcuccugcuacccccgguaccccggcguccgcugcgugugccgggacaacuggaaggggagcaaccgcccgaucguggacaucaacaucaaggaccacuccaucgucagcuccuacgugugcagcggccuggugggcgacacgccccggaaguccgacagcuccagcuccagccacugccucgaccccaacaacgaggagggcgggcacggggucaagggcugggccuucgacgacgggaacgacguguggaugggccgcaccaucuccgagaagucccggcugggcuacgagaccuucaaggucaucgagggguggagcaaccccaagagcaagcugcagaucaaccgccaggugaucguggaccggggcaaccgcuccggguacagcggcaucuucagcgucgaggggaaguccugcaucaaccggugcuucuacguggagcucauccgcggccggaaggaggagaccgaggugcuguggaccagcaacuccaucgucguguucugcggcaccagcgggacguacggcaccggguccuggccggacggcgccgacaucaaccugaugcccaucuga

SEQ ID NO: 84491 - RNA, 1410 nt, Artificial Sequence; identical to SEQ ID NO: 80623
  derived and/or modified CDS sequence (opt1) from neuraminidase__InfluenzaA__AEA03909

SEQ ID NO: 84492 - RNA, 1410 nt, Artificial Sequence
  derived and/or modified CDS sequence (opt1) from neuraminidase__InfluenzaA__AEA03924
augaaccccaaccagaagaucaucaccaucggcagcgugucccugaccaucagcacgaucugcuucuucaugcagaucgccauccucaucaccaccgucacccugcacuucaagcaguacgaguucaacuccccgcccaacaaccaggugaugcugugcgagcccacgaucaucgagcgcaacaucaccgagaucguguaccucaccaacaccacgaucgagaaggagaucugccccaagcuggccgaguaccggaacuggagcaagccgcagugcgacaucaccggguucgcgcccuucuccaaggacaacagcauccgccuguccgccggcggggacaucugggucacccgggagcccuacgugagcugcgaccccgacaagugcuaccaguucgcccucggccaggggaccacgcugaacaacgugcacuccaacaacaccguccgcgaccggaccccguaccgcacccugcucaugaacgagcugggcgugcccuuccaccugggcacgaagcaggucugcaucgccuggagcuccagcuccugccacgacgggaaggccuggcuccacgugugcaucaccggcgacgacaagaacgcgaccgccagcuucaucuacaacgggcggcugguggacuccguggucagcugguccaaggagauccugcgcacccaggagagcgagugcgugugcaucaacggcacgugcaccguggucaugaccgacggguccgccagcggcaaggccgacaccaagauccucuucaucgaggagggcaagaucauccacacgagcacccuguccgggagcgcgcagcacguggaggagugcuccugcuacccccgguaccccggcgugcgcugcgucugccgggacaacuggaaggggagcaaccgcccgaucguggacaucaacaucaaggaccacuccaucgugagcuccuacgucugcagcggccuggugggcgacacgccccggaagaacgacuccagcuccagcucccacugccucgaccccaacaacgaggagggcgggcacggggugaagggcugggccuucgacgacgggaacgacgucuggaugggccgcaccaucagcgagaagucccggcugggcuacgagaccuucaaggugaucgagggguggagcaaccccaaguccaagcugcagaucaaccgccaggucaucguggaccggggcaaccgcagcggguacuccggcaucuucagcguggagggcaagagcugcaucaaccggugcuucuacgucgagcucauccgcgggcggaaggaggagaccgaggugcuguggaccuccaacagcaucguggucuucugcggcaccuccgggacguacggcaccgggagcuggccggacggcgccgacaucaaccugaugcccaucuga

SEQ ID NO: 84493 - RNA, 1410 nt, Artificial Sequence; identical to SEQ ID NO: 80623
  derived and/or modified CDS sequence (opt1) from neuraminidase__InfluenzaA__AEA03935

SEQ ID NO: 84494 - RNA, 1410 nt, Artificial Sequence
  derived and/or modified CDS sequence (opt1) from neuraminidase__InfluenzaA__AEA03946
augaaccccaaccagaagaucaucaccaucggcagcgugucccugaccaucagcacgaucugcuucuucaugcagaucgccauccucaucaccaccgucacccugcacuucaagcaguacgaguucaacuccccgcccaacaaccaggugaugcugugcgagcccacgaucaucgagcgcaacaucaccgagaucguguaccucaccaacaccacgaucgagaaggagaucugccccaagcuggccgaguaccggaacuggagcaagccgcagugcgacaucaccggguucgcgcccuucuccaaggacaacagcauccgccuguccgccggcggggacaucugggucacccgggagcccuacgugagcugcgaccccgacaagugcuaccaguucgcccucggccaggggaccacgcugaacaacgugcacuccaacaacaccguccgcgaccggaccccguaccgcacccugcucaugaacgagcugggcgugcccuuccaccugggcacgaagcaggucugcaucgccuggagcuccagcuccugccacgacgggaaggccuggcuccacgugugcaucaccggcgacgacaagaacgcgaccgccagcuucaucuacaacgggcggcugguggacuccguggucagcugguccgaggagauccugcgcacccaggagagcgagugcgugugcaucaacggcacgugcaccguggucaugaccgacggguccgccagcggcaaggccgacaccaagauccucuucaucgaggagggcaagaucgugcacacgagcacccuguccgggagcgcgcagcacguggaggagugcuccugcuacccccgguaccccggcguccgcugcgugugccgggacaacuggaaggggagcaaccgcccgaucguggacaucaacaucaaggaccacuccaucgucagcuccuacgugugcagcggccuggugggcgacacgccccggaagaacgacuccagcuccagcucccacugccucgaccccaacaacgaggagggcgggcacggggucaagggcugggccuucgacgacgggaacgacguguggaugggccgcaccaucagcgagaagucccggcugggcuacgagaccuucaaggucaucgagggguggagcaaccccaaguccaagcugcagaucaaccgccaggugaucguggaccggggcaaccgcagcggguacuccggcaucuucagcgucgagggcaagagcugcaucaaccggugcuucuacguggagcucauccgcgggcggaaggaggagaccgaggugcuguggaccuccaacagcaucgucguguucugcggcaccuccgggacguacggcaccgggagcuggccggacggcgccgacaucaaccugaugcccaucuga

SEQ ID NO: 84495 - RNA, 1410 nt, Artificial Sequence
  derived and/or modified CDS sequence (opt1) from neuraminidase__InfluenzaA__AEA03957
augaaccccaaccagaagaucaucaccaucggcagcgugucccugaccaucagcacgaucugcuucuucaugcagaucgccauccucaucaccaccgucacccugcacuucaagcaguacgaguucaacuccccgcccaacaaccaggugaugcugugcgagcccacgaucaucgagcgcaacaucaccgagaucguguaccucaccaacaccacgaucgagaaggagaucugccccaagcuggccgaguaccggaacuggagcaagccgcagugcgacaucaccggguucgcgcccuucuccaaggacaacagcauccgccuguccgccggcggggacaucugggucacccgggagcccuacgugagcugcgaccccgacaagugcuaccaguucgcccucggccaggggaccacgcugaacaacgugcacuccaacaacaccguccgcgaccggaccccguaccgcacccugcucaugaacgagcugggcgugcccuuccaccugggcacgaagcaggucugcaucgccuggagcuccagcuccugccacgacgggaaggccuggcuccacgugugcaucaccggcgacgacaagaacgcgaccgccagcuucaucuacaacgggcggcugguggacuccguggucagcugguccaaggagauccugcgcacccaggagagcgagugcgugugcaucaacggcacgugcaccguggucaugaccgacggguccgccagcggcaaggccgacaccaagauccucuucaucgaggagggcaagaucgugcacacgagcacccuguccgggagcgcgcagcacguggaggagugcuccugcuacccccgguaccccggcguccgcugcgugugccgggacaacuggaaggggagcaaccgcccgaucguggacaucaacaucaaggaccacuccaucgucagcuccuacgugugcagcggccuggugggcgacacgccccggaagaacgacuccagcuccagcucccacugccucgaccccaacaacgaggagggcgggcacggggucaagggcugggccuucgacgacgggaacgacguguggaugggccgcaccaucagcgagaagucccggcugggcuacgagaccuucaaggucaucgagggguggagcaacuccaagagcaagcugcagaucaaccgccaggugaucguggaccggggcaaccgcuccggguacagcggcaucuucagcgucgaggggaaguccugcaucaaccggugcuucuacguggagcucauccgcggccggaaggaggagaccgaggugcuguggaccagcaacuccaucgucguguucugcggcaccagcgggacguacggcaccggguccuggcccgacggcgccgacaucaaccugaugccgaucuga

SEQ ID NO: 84496 - RNA, 1410 nt, Artificial Sequence; identical to SEQ ID NO: 80623
  derived and/or modified CDS sequence (opt1) from neuraminidase__InfluenzaA__AEA03989

SEQ ID NO: 84497 - RNA, 1410 nt, Artificial Sequence; identical to SEQ ID NO: 83779
  derived and/or modified CDS sequence (opt1) from neuraminidase__InfluenzaA__AEA04000

SEQ ID NO: 84498 - RNA, 1410 nt, Artificial Sequence; identical to SEQ ID NO: 80623
  derived and/or modified CDS sequence (opt1) from neuraminidase__InfluenzaA__AEA04011

SEQ ID NO: 84499 - RNA, 1410 nt, Artificial Sequence; identical to SEQ ID NO: 83779
  derived and/or modified CDS sequence (opt1) from neuraminidase__InfluenzaA__AEA04022

SEQ ID NO: 84500 - RNA, 1410 nt, Artificial Sequence; identical to SEQ ID NO: 80623
  derived and/or modified CDS sequence (opt1) from neuraminidase__InfluenzaA__AEA04033

SEQ ID NO: 84501 - RNA, 1410 nt, Artificial Sequence; identical to SEQ ID NO: 80623
  derived and/or modified CDS sequence (opt1) from neuraminidase__InfluenzaA__AEA04044

SEQ ID NO: 84502 - RNA, 1410 nt, Artificial Sequence; identical to SEQ ID NO: 80623
  derived and/or modified CDS sequence (opt1) from neuraminidase__InfluenzaA__AEA04049

SEQ ID NO: 84503 - RNA, 1410 nt, Artificial Sequence; identical to SEQ ID NO: 80623
  derived and/or modified CDS sequence (opt1) from neuraminidase__InfluenzaA__AEA04059

SEQ ID NO: 84504 - RNA, 1410 nt, Artificial Sequence; identical to SEQ ID NO: 80623
  derived and/or modified CDS sequence (opt1) from neuraminidase__InfluenzaA__AEA04070

SEQ ID NO: 84505 - RNA, 1410 nt, Artificial Sequence; identical to SEQ ID NO: 83779
  derived and/or modified CDS sequence (opt1) from neuraminidase__InfluenzaA__AEA04081

SEQ ID NO: 84506 - RNA, 1410 nt, Artificial Sequence; identical to SEQ ID NO: 80623
  derived and/or modified CDS sequence (opt1) from neuraminidase__InfluenzaA__AEA04092

SEQ ID NO: 84507 - RNA, 1410 nt, Artificial Sequence; identical to SEQ ID NO: 80623
  derived and/or modified CDS sequence (opt1) from neuraminidase__InfluenzaA__AEA04103

SEQ ID NO: 84508 - RNA, 1410 nt, Artificial Sequence; identical to SEQ ID NO: 80623
  derived and/or modified CDS sequence (opt1) from neuraminidase__InfluenzaA__AEA04125

SEQ ID NO: 84509 - RNA, 1410 nt, Artificial Sequence; identical to SEQ ID NO: 80623
  derived and/or modified CDS sequence (opt1) from neuraminidase__InfluenzaA__AEA04133

SEQ ID NO: 84510 - RNA, 1410 nt, Artificial Sequence
  derived and/or modified CDS sequence (opt1) from neuraminidase__InfluenzaA__AEA04144
augaaccccaaccagaagaucaucaccaucggcagcgugucccugaccaucagcacgaucugcuucuucaugcagaucgccauccucaucaccaccgucacccugcacuucaagcaguacgaguucaacuccccgcccaacaaccaggugaugcugugcgagcccacgaucaucgagcgcaacaucaccgagaucguguaccucaccaacaccacgaucgagaaggagaucugccccaagcuggccgaguaccggaacuggagcaagccgcagugcgacaucaccggguucgcgcccuucuccaaggacaacagcauccgccuguccgccggcggggacaucugggucacccgggagcccuacgugagcugcgaccccgacaagugcuaccaguucgcccucggccaggggaccacgcugaacaacgugcacuccaacaacaccguccgcgaccggaccccguaccgcacccugcucaugaacgagcugggcgugcccuuccaccugggcacgaagcaggucugcaucgccuggagcuccagcuccugccacgacgggaaggccuggcuccacgugugcaucaccggcgacgacaagaacgcgaccgccagcuucaucuacaacgggcggcugguggacuccguggucagcugguccaaggagauccugcgcacccaggagagcgagugcgugugcaucaacggcacgugcaccguggucaugaccgacggguccgccagcggcaaggccgacaccaagauccucuucaucgaggagggcaagaucauccacacgagcacccuguccgggagcgcgcagcacguggaggagugcuccugcuacccccgguaccccggcgugcgcugcgucugccgggacaacuggaaggggagcaaccgcccgaucguggacaucaacaucaaggaccacuccaucgugagcuccuacgucugcagcggccuggugggcgacacgccccggaagaacgacuccagcuccagcucccacugccucgaccccaacaacgaggagggcgggcacggggugaagggcugggccuucgacgacgggaacgacgucuggaugggccgcaccaucagcgagaagucccggcugggcuacgagaccuucaaggugaucgagggguggagcaaccccaaguccaagcugcagaucaaccgccaggucaucguggaccggggcaaccgcagcggguacuccggcaucuucagcguggagggcaagagcugcaucaaccggugcuucuacgucgagcucauccgcgggcggaaggaggagaccgaggugcuguggaccuccaacagcaucaucguguucugcggcaccuccgggacguacggcaccgggagcuggccggacggcgccgacaucaaccugaugcccaucuga

SEQ ID NO: 84511 - RNA, 1410 nt, Artificial Sequence; identical to SEQ ID NO: 80623
  derived and/or modified CDS sequence (opt1) from neuraminidase__InfluenzaA__AEA04155

SEQ ID NO: 84512 - RNA, 1410 nt, Artificial Sequence; identical to SEQ ID NO: 80623
  derived and/or modified CDS sequence (opt1) from neuraminidase__InfluenzaA__AEA04166

SEQ ID NO: 84513 - RNA, 1410 nt, Artificial Sequence
  derived and/or modified CDS sequence (opt1) from neuraminidase__InfluenzaA__AEA04177
augaaccccaaccagaagaucaucaccaucggcagcgugucccugaccaucagcacgaucugcuucuucaugcagaucgccauccucaucaccaccgucacccugcacuucaagcaguacgaguucaacuccccgcccaacaaccaggugaugcugugcgagcccacgaucaucgagcgcaacaucaccgagaucguguaccucaccaacaccacgaucgagaaggagaucugccccaagcuggccgaguaccggaacuggagcaagccgcagugcgacaucaccggguucgcgcccuucuccaaggacaacagcauccgccuguccgccggcggggacaucugggucacccgggagcccuacgugagcugcgaccccgacaagugcuaccaguucgcccucggccaggggaccacgcugaacaacgugcacuccaacaacaccguccgcaaccggaccccguaccgcacccugcucaugaacgagcugggcgugcccuuccaccugggcacgaagcaggucugcaucgccuggagcuccagcuccugccacgacgggaaggccuggcuccacgugugcaucaccggcgacgacaagaacgcgaccgccagcuucaucuacaacgggcggcugguggacuccguggucagcugguccaaggagauccugcgcacccaggagagcgagugcgugugcaucaacggcacgugcaccguggucaugaccgacggguccgccagcggcaaggccgacaccaagauccucuucaucgaggagggcaagaucgugcacacgagcacccuguccgggagcgcgcagcacguggaggagugcuccugcuacccccgguaccccggcguccgcugcgugugccgggacaacuggaaggggagcaaccgcccgaucguggacaucaacaucaaggaccacuccaucgucagcuccuacgugugcagcggccuggugggcgacacgccccggaagaacgacuccagcuccagcucccacugccucgaccccaacaacgaggagggcgggcacggggucaagggcugggccuucgacgacgggaacgacguguggaugggccgcaccaucagcgagaagucccggcugggcuacgagaccuucaaggucaucgagggguggagcaaccccaaguccaagcugcagaucaaccgccaggugaucguggaccggggcaaccgcagcggguacuccggcaucuucagcgucgagggcaagagcugcaucaaccggugcuucuacguggagcucauccgcgggcggaaggaggagaccgaggugcuguggaccuccaacagcaucgucguguucugcggcaccuccgggacguacggcaccgggagcuggccggacggcgccgacaucaaccugaugcccaucuga

SEQ ID NO: 84514 - RNA, 1410 nt, Artificial Sequence; identical to SEQ ID NO: 80623
  derived and/or modified CDS sequence (opt1) from neuraminidase__InfluenzaA__AEA04188

SEQ ID NO: 84515 - RNA, 1410 nt, Artificial Sequence; identical to SEQ ID NO: 81616
  derived and/or modified CDS sequence (opt1) from neuraminidase__InfluenzaA__AEA04199

SEQ ID NO: 84516 - RNA, 1410 nt, Artificial Sequence; identical to SEQ ID NO: 80623
  derived and/or modified CDS sequence (opt1) from neuraminidase__InfluenzaA__AEA04210

SEQ ID NO: 84517 - RNA, 1410 nt, Artificial Sequence; identical to SEQ ID NO: 81616
  derived and/or modified CDS sequence (opt1) from neuraminidase__InfluenzaA__AEA04229

SEQ ID NO: 84518 - RNA, 1410 nt, Artificial Sequence; identical to SEQ ID NO: 81616
  derived and/or modified CDS sequence (opt1) from neuraminidase__InfluenzaA__AEA04239

SEQ ID NO: 84519 - RNA, 1410 nt, Artificial Sequence
  derived and/or modified CDS sequence (opt1) from neuraminidase__InfluenzaA__AEA04250
augaaccccaaccagaagaucaucaccaucggcagcgugucccugaccaucagcacgaucugcuucuucaugcagaccgccauccucaucaccaccgucacgcugcacuucaagcagugcgaguucaacuccccgcccaacaaccaggugaugcugugcgagcccaccaucaucgagcgcaacaucaccgagaucguguaccucaccaacacgaccaucgagaaggagaucugccccaagcuggccgaguaccggaacuggagcaagccgcagugcgacaucaccggguucgcgcccuucuccaaggacaacagcauccgccuguccgccggcggggacaucugggucacccgggagcccuacgugagcugcgaccccgacaagugcuaccaguucgcccucggccaggggacgacccugaacaacgugcacuccaacaacaccguccgcgugcggaccccguaccgcacgcugcucaugaacgagcugggcgugcccuuccaccugggcaccaagcaggucugcaucgccuggagcuccagcuccugccacgacgggaaggccuggcuccacgugugcaucaccggcgacgacaagaacgcgaccgccagcuucaucuacaacgggcggcugguggacuccgucgugagcugguccaaggagauccugcgcacgcaggagagcgagugcgugugcaucaacgggaccugcaccgucgugaugaccgacggguccgccagcggcaaggccgacacgaagauccucuucaucgaggagggcaagaucgugcacaccagcacccuguccgggagcgcgcagcacgucgaggagugcuccugcuacccccgguaccccggcgugcgcugcgugugccgggacaacuggaaggggagcaaccgcccgaucgucgacaucaacaucaaggaccacuccaucgugagcuccuacgugugcagcggccuggucggcgacacgccccggaagaacgacuccagcuccagcucccacugccucgaccccaacaacgaggagggcggccacggggugaagggcugggccuucgacgacgggaacgacgucuggaugggccgcaccaucagcgagaagucccggcugggcuacgagaccuucaaggugaucgagggguggagcaaccccaaguccaagcugcagaucaaccgccaggugaucgucgaccggggcaaccgcagcggguacuccggcaucuucagcguggagggcaagagcugcaucaaccggugcuucuacguggagcucauccgcgggcggaaggaggagaccgagguccuguggaccuccaacagcaucgugguguucugcggcacguccgggaccuacggcaccgggagcuggccggacggcgccgacaucaaccugaugcccaucuga

SEQ ID NO: 84520 - RNA, 1410 nt, Artificial Sequence; identical to SEQ ID NO: 81616
  derived and/or modified CDS sequence (opt1) from neuraminidase__InfluenzaA__AEA04260

SEQ ID NO: 84521 - RNA, 1410 nt, Artificial Sequence
  derived and/or modified CDS sequence (opt1) from neuraminidase__InfluenzaA__AEA04268
augaaccccaaccagaagaucaucaccaucggcagcgugucccugaccaucagcacgaucugccucuucaugcagaccgccauccugaucaccaccgucacgcugcacuucaagcagugcgaguucaacuccccgcccaacaaccaggccaugcucugcgagcccaccaucaucgagcgcaacaucaccgagaucguguaccugaccaacacgaccaucgagaaggagaucugccccaagcuggcggaguaccggaacuggagcaagccgcagugcgacaucaccggguucgcccccuucuccaaggacaacagcauccgccucuccgccggcggggacaucugggugacccgggagcccuacgucagcugcgaccccgacaagugcuaccaguucgcccugggccaggggacgacccugaacaacgugcacuccaacaacaccgugcgcgaccggaccccguaccgcacgcuccugaugaacgagcugggcguccccuuccaccucggcaccaagcaggucugcaucgccuggagcuccagcuccugccacgacgggaaggcguggcugcacgugugcaucaccggcgacgacaagaacgccaccgccagcuucaucuacaacgggcggcugguggacuccguggugagcugguccaaggagauccuccgcacgcaggagagcgagugcgucugcaucaacgggaccugcaccguggugaugaccgacggguccgccagcggcaaggcggacacgaagauccuguucaucgaggagggcaagaucguccacaccagcacccuguccgggagcgcccagcacguggaggagugcuccugcuacccccgguaccccggcgugcgcugcgucugccgggacaacuggaaggggagcaaccgcccgaucguggacaucaacaucaaggaccacuccaucgugagcuccuacgucugcagcggccucgugggcgacacgccccggaagaacgacuccagcuccagcucccacugccuggaccccaacaacgaggagggcggccacggggugaagggcugggccuucgacgacgggaacgacgucuggaugggccgcaccaucagcgagaagucccggcugggcuacgagaccuucaaggugaucgagggguggagcaaccccaaguccaagcuccagaucaaccgccaggucaucguggaccggggcaaccgcagcggguacuccggcaucuucagcguggagggcaagagcugcaucaaccggugcuucuacgucgagcugauccgcgggcggaaggaggagaccgaggugcuguggaccuccaacagcaucguggucuucugcggcacguccgggaccuacggcaccgggagcuggccggacggcgccgacaucaaccucaugcccaucuga

SEQ ID NO: 84522 - RNA, 1410 nt, Artificial Sequence; identical to SEQ ID NO: 81616
  derived and/or modified CDS sequence (opt1) from neuraminidase__InfluenzaA__AEA04276

SEQ ID NO: 84523 - RNA, 1410 nt, Artificial Sequence; identical to SEQ ID NO: 81616
  derived and/or modified CDS sequence (opt1) from neuraminidase__InfluenzaA__AEA04287

SEQ ID NO: 84524 - RNA, 1410 nt, Artificial Sequence; identical to SEQ ID NO: 81616
  derived and/or modified CDS sequence (opt1) from neuraminidase__InfluenzaA__AEA04298

SEQ ID NO: 84525 - RNA, 1410 nt, Artificial Sequence
  derived and/or modified CDS sequence (opt1) from neuraminidase__InfluenzaA__AEA04307
augaaccccaaccagaagaucaucaccaucggcagcgugucccugaccaucagcacgaucugcuucuucaugcagaccgccauccucaucaccaccgucacgcugcacuucaagcagugcgaguucaacuccccgcccaacaaccaggugaugcugugcgagcccaccaucaucgagcgcaacaucaccgagaucguguaccucaccaacacgaccaucgagaaggagaucugccccaagcuggccgaguaccggaacuggagcaagccgcagugcgacaucaccggguucgcgcccuucuccaaggacaacagcauccgccuguccgccggcggggacaucugggucacccgggagcccuacgugagcugcgaccccgacaagugcuaccaguucgcccucggccaggggacgacccugaacaacgugcacuccaacaacaccguccgcgaccggaccccguaccgcacgcugcucaugaacgagcugggcgugcccuuccaccugggcaccaagcaggucugcaucgccuggagcuccagcuccugccacgacgggaaggccuggcuccacgugugcaucaccggcgacgacaagaacgcgaccgccagcuucaucuacaacgggcggcugguggacuccguggucagcugguccaaggagauccugcgcacgcaggagagcgagugcgugugcaucaacgggaccugcaccguggucaugaccgacggcuccgccagcggcaaggccgacacgaagauccucuucaucgaggagggcaagaucgugcacaccagcacccuguccgggagcgcgcagcacguggaggagugcuccugcuacccccgguaccccgacguccgcugcgugugccgggacaacuggaagggcagcaaccgcccgaucguggacaucaacaucaaggaccacuccaucgucagcuccuacgugugcagcgggcuggugggcgacacgccccggaagaacgacuccagcuccagcucccacugccucgaccccaacaacgaggagggcgggcacggcgucaaggggugggccuucgacgacggcaacgacguguggauggggcgcaccaucagcgagaagucccggcugggcuacgagaccuucaaggucaucgagggcuggagcaaccccaaguccaagcugcagaucaaccgccaggugaucguggaccgggggaaccgcagcggcuacuccgggaucuucagcgucgagggcaagagcugcaucaaccggugcuucuacguggagcucauccgcgggcggaaggaggagaccgaggugcuguggaccuccaacagcaucgucguguucugcggcacguccggcaccuacgggaccggcagcuggccggacggggccgacaucaaccugaugcccaucuga

SEQ ID NO: 84526 - RNA, 1395 nt, Artificial Sequence
  derived and/or modified CDS sequence (opt1) from neuraminidase__InfluenzaA__AEA04357
augaaccccaaccagaagaucaucaccaucggcagcaucugcaugguggucgggaucaucucccugauccuccagaucggcaacaucgugagcaucuggaucucccacagcauccagaccgggaaccagaaccacacggggaccugcgaccaguccaucaucaccuacaagaacagcaccugggugaaccagacguacgucaacgugguggccggcaaggacaccaccuccgucauccuggccggcaacagcucccugugcccgauccgcggcugggcgaucuacagcaaggacaacggggugcggaucggcuccaagggggacguguucgucauccgcgagcccuucaucagcugcucccaccucgagugccggaccuucuuccugacgcagggcgcccugcucaacgacaagcacagcaacgggaccgugaaggaccgcucccccuaccgggcccugaugagcugccccgugggcgaggccccgucccccuacaacagccgcuucgaguccgucgccuggagcgcgagcgccugccacgacggcaugggguggcugaccaucggcaucuccgggcccgacgacggcgccguggccgugcucaaguacaacggcaucaucaccgagacgaucaagagcuggcggaaggagauccugcgcacccaggaguccgagugcgucugcgugaacgggagcugcuucaccaucaugaccgacggccccuccgggggcccggcgagcuacaagaucuucaagaucgagaaggggaaggugacgaaguccaucgagcuggacgcccccaacagccacuacgaggagugcuccugcuaccccgacaccagcaaggucaugugcgugugccgggacaacuggcacggcuccaaccgccccugggugagcuucgaccagaaccucgacuaccagaugggcuacaucugcuccggggucuucggcgacaacccgcggcccaaggacgggaagggcagcugcgggcccguguacguggacggcgccaacggcgucaagggguucuccuacaaguacggcaacgggguguggaucggccgcaccaagagcaucuccagccggcagggguucgagaugaucugggaccccaacggcuggaccgagacggacuccaacuucuucaccaagcaggacgucguggccgugaccgacuggagcggcuacagcggguccuucguccagcacccggagcugaccggccuggacugcaugcgccccugcuucuggguggagcucauccgggggcgccccaaggagaacacgaucuggaccagcggcuccagcaucuccuucugcggcgugaacagcgacaccgucgacugguccuggcccgacggggccgagcugccguucaccaucgacaaguga

SEQ ID NO: 84527 - RNA, 1410 nt, Artificial Sequence; identical to SEQ ID NO: 80491
  derived and/or modified CDS sequence (opt1) from neuraminidase__InfluenzaA__AEA04368

SEQ ID NO: 84528 - RNA, 1410 nt, Artificial Sequence
  derived and/or modified CDS sequence (opt1) from neuraminidase__InfluenzaA__AEA04379
augaaccccaaccagaagaccaucaccaucggcagcgugucccugacgaucgagaccgucugcuuccucaugcagaucgccauccuggccaccaccgugacgcugcacuucaagcagcacgagugcgacagcccggcguccaaccaggugaugcccugcgagcccaucaucaucgagcgcaacaucaccgagaucgucuaccucaacaacaccaccaucgagaaggagaucugccccgaggugguggaguaccggaacuggagcaagccgcagugccagaucacgggguucgcccccuucuccaaggacaacagcauccgccuguccgccggcggggacaucugggucacccgggagcccuacgugagcugcgaccccggcaagugcuaccaguucgcccuggggcagggcaccacccucgacaacaagcacuccaacggcacgauccacgaccgcaucccgcaccggacccugcugaugaacgagcucggggugcccuuccaccugggcaccaagcaggucugcguggccuggagcuccagcuccugccacgacgggaaggcguggcugcacgugugcgucaccggcgacgaccgcaacgccacggccagcuucaucuacgacgggcggcucguggacuccaucggcagcuggucccagaacauccugcgcacccaggagagcgagugcgugugcaucaacgggaccugcaccgucgugaugacggacggcuccgccagcggccgggcggacacccgcauccuguucaucaaggaggggaagaucgugcacaucagcccccucuccggcagcgcccagcacaucgaggagugcuccugcuacccccgguacccggacguccgcugcaucugccgggacaacuggaagggcagcaaccgccccgugaucgacaucaacauggaggacuacuccaucgacagcuccuacgugugcagcgggcuggucggcgacacgccccggaacgacgacuccagcuccaacagcaagucccgcgaccccaacaacgagcgggggaacccgggcgugaaggggugggccuucgacaacggcgacgacguguggaugggccgcaccaucagcaaggacucccggagcggguacgagaccuucaaggucaucggcgggugguccacccccaacagcaagucccaggugaaccgccaggucaucguggacaacaacaacuggagcggcuacagcgggaucuucuccguggagggcaagagcugcaucaaccggugcuucuacgucgagcugauccgcggccgcccccaggagacccgggugugguggaccuccaacagcaucguggucuucugcgggacguccggcaccuacgggaccggcagcuggcccgacggggccaacaucaacuucaugccgaucuga

SEQ ID NO: 84529 - RNA, 1413 nt, Artificial Sequence; identical to SEQ ID NO: 84228
  derived and/or modified CDS sequence (opt1) from neuraminidase__InfluenzaA__AEA10295

SEQ ID NO: 84530 - RNA, 1410 nt, Artificial Sequence; identical to SEQ ID NO: 80762
  derived and/or modified CDS sequence (opt1) from neuraminidase__InfluenzaA__AEA10306

SEQ ID NO: 84531 - RNA, 1410 nt, Artificial Sequence; identical to SEQ ID NO: 84115
  derived and/or modified CDS sequence (opt1) from neuraminidase__InfluenzaA__AEA10316

SEQ ID NO: 84532 - RNA, 1410 nt, Artificial Sequence; identical to SEQ ID NO: 80762
  derived and/or modified CDS sequence (opt1) from neuraminidase__InfluenzaA__AEA10326

SEQ ID NO: 84533 - RNA, 1410 nt, Artificial Sequence; identical to SEQ ID NO: 82050
  derived and/or modified CDS sequence (opt1) from neuraminidase__InfluenzaA__AEA10335

SEQ ID NO: 84534 - RNA, 1410 nt, Artificial Sequence; identical to SEQ ID NO: 80762
  derived and/or modified CDS sequence (opt1) from neuraminidase__InfluenzaA__AEA10342

SEQ ID NO: 84535 - RNA, 1410 nt, Artificial Sequence
  derived and/or modified CDS sequence (opt1) from neuraminidase__InfluenzaA__AEA10352
augaaccccaaccagaagaucaucaccaucggcagcgugugcaugaccaucgggauggccaaccugauccuccagaucggcaacaucaucuccaucuggaucagccacuccauccagcuggggaaccagaaccagaucgagacgugcaaccagagcgucaucaccuacgagaacaacaccugggugaaccagaccuacgugaacaucuccaacacgaacuucgccgcgggccagagcgucguguccgugaagcuggccgggaacagcucccucugcccggucagcggcugggccaucuacuccaaggacaacagcauccgcaucggcuccaagggggacguguucgugauccgggagcccuucaucagcugcagcccccuggagugccgcaccuucuuccugacccagggcgcccuccugaacgacaagcacuccaacgggaccaucaaggaccggucccccuaccgcacgcugaugagcugcccgaucggcgagguccccucccccuacaacagccgguucgagagcguggccugguccgcgagcgccugccacgacgggaucaacuggcucaccaucggcaucuccggccccgacaacggggccguggccguccugaaguacaacggcaucaucaccgacaccaucaagagcuggcgcaacaacauccugcggacgcaggaguccgagugcgcgugcaucaacgggagcugcuucaccgugaugaccgacggcccguccgacggccaggccagcuacaagaucuuccgcaucgagaaggggaagaucgugaaguccgucgagaugaacgcccccaacuaccacuacgaggagugcagcugcuaccccgacuccagcgagaucacgugcgugugccgggacaacuggcacggcuccaaccgccccugggugagcuucaaccagaaccucgaguaccagaucggguacaucugcuccggcaucuucggggacaacccgcggcccaacgacaagaccggcagcugcucccccgucagcuccaacggcgccaacggggugaagggcuucagcuucaaguacgggaacggcguguggaucgggcgcaccaagagcaucuccagccggaacggcuucgagaugaucugggaccccaacggcuggaccgggaccgacaacaacuucuccaucaagcaggacaucgucggcaucaacgaguggagcggguacuccggcagcuucgugcagcacccggagcugacggggcuggacugcauccgccccugcuucuggguggagcucauccggggccgccccaaggagaacaccaucuggaccuccggcagcuccaucagcuucugcggggucaacuccgacaccgugggcuggagcuggcccgacggggccgagcugccguucacgaucgacaaguga

SEQ ID NO: 84536 - RNA, 1410 nt, Artificial Sequence; identical to SEQ ID NO: 80762
  derived and/or modified CDS sequence (opt1) from neuraminidase__InfluenzaA__AEA48991

SEQ ID NO: 84537 - RNA, 1410 nt, Artificial Sequence; identical to SEQ ID NO: 83434
  derived and/or modified CDS sequence (opt1) from neuraminidase__InfluenzaA__AEA72707

SEQ ID NO: 84538 - RNA, 1410 nt, Artificial Sequence; identical to SEQ ID NO: 83434
  derived and/or modified CDS sequence (opt1) from neuraminidase__InfluenzaA__AEA72718

SEQ ID NO: 84539 - RNA, 1410 nt, Artificial Sequence; identical to SEQ ID NO: 83434
  derived and/or modified CDS sequence (opt1) from neuraminidase__InfluenzaA__AEA72729

SEQ ID NO: 84540 - RNA, 1410 nt, Artificial Sequence
  derived and/or modified CDS sequence (opt1) from neuraminidase__InfluenzaA__AEA72742
augaaccccaaccagaagaucaucaccaucggcagcgugugcaugaccaucgggauggccaaccugauccuccagaucggcaacaucaucuccaucuggaucagccacuccauccagcuggggaaccagagccagaucgagacgugcaaccaguccgucaucaccuacgagaacaacaccugggugaaccagaccuacgugaacaucagcaacacgaacuucgccgcgggccaguccgucgugagcgugaagcuggccgggaacuccagccucugcccggucuccggcugggccaucuacagcaaggacaacuccauccgcaucggcagcaagggggacguguucgugauccgggagcccuucaucuccugcagcccccuggagugccgcaccuucuuccugacccagggcgcccuccugaacgacaagcacuccaacgggaccaucaaggaccggagccccuaccgcacgcugauguccugcccgaucggcgagguccccagccccuacaacagccgguucgaguccguggccuggagcgcguccgccugccacgacgggaucaacuggcucaccaucggcaucagcggccccgacaacggggccguggccguccugaaguacaacggcaucaucaccgacaccaucaaguccuggcgcaacaacauccugcggacgcaggagagcgagugcgcgugcgugaacggguccugcuucaccaucaugaccgacggcccgagcgacggccaggccuccuacaagaucuuccgcaucgagaaggggaagaucgucaagagcguggagaugaacgcccccaacuaccacuacgaggagugcuccugcuaccccgacagcuccgagaucacgugcgugugccgggacaacuggcacggcagcaaccgccccuggguguccuucaaccagaaccucgaguaccagaucggguacaucugcagcggcaucuucggggacaacccgcggcccaacgacaagaccggcuccugcggccccgucagcuccaacggggccaacggcgugaagggguucagcuucaaguacggcaacgggguguggaucggccgcaccaagagcaucuccagccggaacggcuucgagaugaucugggaccccaacggguggaccggcaccgacaacaacuucuccaucaagcaggacaucgucgggaucaacgaguggagcggcuacuccgggagcuucgugcagcacccggagcugacgggccuggacugcauccgccccugcuucuggguggagcucauccggggccgccccaaggagaacaccaucuggaccuccgggagcuccaucagcuucugcggcgucaacuccgacaccgugggguggagcuggcccgacggcgccgagcugccguucacgaucgacaaguga

SEQ ID NO: 84541 - RNA, 1410 nt, Artificial Sequence; identical to SEQ ID NO: 83037
  derived and/or modified CDS sequence (opt1) from neuraminidase__InfluenzaA__AEA72779

SEQ ID NO: 84542 - RNA, 1410 nt, Artificial Sequence
  derived and/or modified CDS sequence (opt1) from neuraminidase__InfluenzaA__AEA72789
augaaccccaaccagaagaucaucaccaucggcagcgugugcaugaccaucgggauggccaaccugauccuccagaucggcaacaucaucuccaucuggaucagccacuccauccagcuggggaaccagagccagaucgagacgugcaaccaguccgucaucaccuacgagaacaacaccugggugaaccagaccuacgugaacaucagcaacacgaacuucgccgcgggccaguccgucgugagcgugaagcuggccgggaacuccagccucugcccggucuccggcugggccaucuacagcaaggacgacuccauccgcaucggcagcaagggggacguguucgugauccgggagcccuucaucuccugcagcccccuggagugccgcaccuucuuccugacccagggcgcccuccugaacgacaagcacuccaacgggaccaucaaggaccggagccccuaccgcacgcugauguccugcccgaucggcgagguccccagccccuacaacagccgguucgaguccguggccuggagcgcguccgccugccacgacgggaucaacuggcucaccaucggcaucagcggccccgacaacggggccguggccguccugaaguacaacggcaucaucaccgacaccaucaaguccuggcgcaacaacauccugcggacgcaggagagcgagugcgcgugcgugaacggguccugcuucaccgugaugaccgacggcccgagcgacggccaggccuccuacaagaucuuccgcaucgagaaggggaagaucgucaagagcguggagaugaacgcccccaacuaccacuacgaggagugcuccugcuaccccgacagcuccgagaucacgugcgugugccgggacaacuggcacggcagcaaccgccccugggucuccuucaaccagaaccucgaguaccagaucggguacaucugcagcggcaucuucggggacaacccgcggcccaacgacaagaccggcuccugcggccccgugagcuccaacggggccaacggcgugaagggguucagcuucaaguacggcaacggggucuggaucggccgcaccaagagcaucuccagccggaacggcuucgagaugaucugggaccccaacggguggaccggcaccgacaacaacuucuccaucaagcaggacaucguggggaucaacgaguggagcggcuacuccgggagcuucgugcagcacccggagcugacgggccuggacugcauccgccccugcuucugggucgagcucauccggggccgccccaaggagaacaccaucuggaccuccgggagcuccaucagcuucugcggcgugaacuccgacaccgucggguggagcuggcccgacggcgccgagcugccguucacgaucgacaaguga

SEQ ID NO: 84543 - RNA, 1410 nt, Artificial Sequence; identical to SEQ ID NO: 83434
  derived and/or modified CDS sequence (opt1) from neuraminidase__InfluenzaA__AEA73291

SEQ ID NO: 84544 - RNA, 1410 nt, Artificial Sequence; identical to SEQ ID NO: 83434
  derived and/or modified CDS sequence (opt1) from neuraminidase__InfluenzaA__AEA73302

SEQ ID NO: 84545 - RNA, 1410 nt, Artificial Sequence; identical to SEQ ID NO: 83434
  derived and/or modified CDS sequence (opt1) from neuraminidase__InfluenzaA__AEA73313

SEQ ID NO: 84546 - RNA, 1410 nt, Artificial Sequence; identical to SEQ ID NO: 83434
  derived and/or modified CDS sequence (opt1) from neuraminidase__InfluenzaA__AEA73324

SEQ ID NO: 84547 - RNA, 1410 nt, Artificial Sequence; identical to SEQ ID NO: 83434
  derived and/or modified CDS sequence (opt1) from neuraminidase__InfluenzaA__AEA73335

SEQ ID NO: 84548 - RNA, 1410 nt, Artificial Sequence; identical to SEQ ID NO: 83434
  derived and/or modified CDS sequence (opt1) from neuraminidase__InfluenzaA__AEA73346

SEQ ID NO: 84549 - RNA, 1410 nt, Artificial Sequence; identical to SEQ ID NO: 83434
  derived and/or modified CDS sequence (opt1) from neuraminidase__InfluenzaA__AEA73357

SEQ ID NO: 84550 - RNA, 1410 nt, Artificial Sequence; identical to SEQ ID NO: 83434
  derived and/or modified CDS sequence (opt1) from neuraminidase__InfluenzaA__AEA73368

SEQ ID NO: 84551 - RNA, 1410 nt, Artificial Sequence; identical to SEQ ID NO: 83434
  derived and/or modified CDS sequence (opt1) from neuraminidase__InfluenzaA__AEA73379

SEQ ID NO: 84552 - RNA, 1410 nt, Artificial Sequence; identical to SEQ ID NO: 83434
  derived and/or modified CDS sequence (opt1) from neuraminidase__InfluenzaA__AEA73390

SEQ ID NO: 84553 - RNA, 1410 nt, Artificial Sequence; identical to SEQ ID NO: 83434
  derived and/or modified CDS sequence (opt1) from neuraminidase__InfluenzaA__AEA73401

SEQ ID NO: 84554 - RNA, 1410 nt, Artificial Sequence; identical to SEQ ID NO: 83434
  derived and/or modified CDS sequence (opt1) from neuraminidase__InfluenzaA__AEA73412

SEQ ID NO: 84555 - RNA, 1410 nt, Artificial Sequence; identical to SEQ ID NO: 83434
  derived and/or modified CDS sequence (opt1) from neuraminidase__InfluenzaA__AEA73423

SEQ ID NO: 84556 - RNA, 1410 nt, Artificial Sequence; identical to SEQ ID NO: 83434
  derived and/or modified CDS sequence (opt1) from neuraminidase__InfluenzaA__AEA73455

SEQ ID NO: 84557 - RNA, 1410 nt, Artificial Sequence; identical to SEQ ID NO: 83434
  derived and/or modified CDS sequence (opt1) from neuraminidase__InfluenzaA__AEA73466

SEQ ID NO: 84558 - RNA, 1410 nt, Artificial Sequence
  derived and/or modified CDS sequence (opt1) from neuraminidase__InfluenzaA__AEA73477
augaaccccaaccagaagaucaucaccaucggcagcgugucccugaccaucagcacgaucugcuucuucaugcagaucgccauccucaucaccaccgucacccugcacuucaagcaguacaaguucaacuccccgcccaacaaccaggugaugcugugcgagcccacgaucaucgagcgcaacaucaccgagaucguguaccucaccaacaccacgaucgagaaggagaucugccccaagcuggccgaguaccggaacuggagcaagccgcagugcgacaucaccggguucgcgcccuucuccaaggacaacagcauccgccuguccgccggcggggacaucugggucacccgggagcccuacgugagcugcgaccccgacaagugcuaccaguucgcccucggccaggggaccacgcugaacaacgugcacuccaacaacaccguccgcgaccggaccccguaccgcacccugcucaugaacgagcugggcgugcccuuccaccugggcacgaagcaggucugcaucgccuggagcuccagcuccugccacgacgggaaggccuggcuccacgugugcaucaccggcgacgacaagaacgcgaccgccagcuucaucuacaacgggcggcugguggacuccguggucagcugguccaaggagauccugcgcacccaggagagcgagugcgugugcaucaacggcacgugcaccguggucaugaccgacggguccgccagcggcaaggccgacaccaagauccucuucaucgaggagggcaagaucgugcacacgagcacccuguccgggagcgcgcagcacguggaggagugcuccugcuacccccgguaccccggcguccgcugcgugugccgggacaacuggaaggggagcaaccgcccgaucguggacaucaacaucaaggaccacuccaucgucagcuccuacgugugcagcggccuggugggcgacacgccccggaagaacgacuccagcuccagcucccacugccucgaccccaacaacgaggagggcgggcacggggucaagggcugggccuucgacgacgggaacgacguguggaugggccgcaccaucaacgagaccagccggcugggcuacgagaccuucaaggucaucgaggggugguccaaccccaagagcaagcugcagaucaaccgccaggugaucguggaccggggcaaccgcuccggguacagcggcaucuucuccgucgagggcaagagcugcaucaaccggugcuucuacguggagcucauccgcgggcggaaggaggagaccaaggugcuguggaccagcaacuccaucgucguguucugcggcacgagcgggaccuacggcaccggguccuggccggacggcgccgaccugaaccucaugcccaucuga

SEQ ID NO: 84559 - RNA, 1410 nt, Artificial Sequence; identical to SEQ ID NO: 83434
  derived and/or modified CDS sequence (opt1) from neuraminidase__InfluenzaA__AEA73488

SEQ ID NO: 84560 - RNA, 1410 nt, Artificial Sequence
  derived and/or modified CDS sequence (opt1) from neuraminidase__InfluenzaA__AEA73499
augaaccccaaccagaagaucaucaccaucggcagcgugucccugaccaucagcacgaucugcuucuucaugcagaucgccauccucaucaccaccgucacccugcacuucaagcaguacaaguucaacuccccgcccaacaaccaggugaugcugugcgagcccacgaucaucgagcgcaacaucaccgagaucguguaccucaccaacaccacgaucgagaaggagaucugccccaagcuggccgaguaccggaacuggagcaagccgcagugcgacaucaccggguucgcgcccuucuccaaggacaacagcauccgccuguccgccggcggggacaucugggucacccgggagcccuacgugagcugcgaccccgacaagugcuaccaguucgcccucggccaggggaccacgaucaacaacgugcacuccaacaacaccguccgcgaccggaccccguaccgcacccugcugaugaacgagcucggcgugcccuuccaccugggcacgaagcaggucugcaucgccuggagcuccagcuccugccacgacgggaaggccuggcugcacgugugcaucaccggcgacgacaagaacgcgaccgccagcuucaucuacaacgggcggcucguggacuccguggucagcugguccaaggagauccugcgcacccaggagagcgagugcgugugcaucaacggcacgugcaccguggucaugaccgacggguccgccagcggcaaggccgacaccaagauccuguucaucgaggagggcaagaucgugcacacgagcacccucuccgggagcgcgcagcacguggaggagugcuccugcuacccccgguaccccggcguccgcugcgugugccgggacaacuggaaggggagcaaccgcccgaucguggacaucaacaucaaggaccacuccaucgucagcuccuacgugugcagcggccuggugggcgacacgccccggaagaacgacuccagcuccagcucccacugccuggaccccaacaacgaggagggcgggcacggggucaagggcugggccuucgacgacgggaacgacguguggaugggccgcaccaucaacgagaccagccggcucggcuacgagaccuucaaggucaucgaggggugguccaaccccaagagcaagcugcagaucaaccgccaggugaucguggaccggggcaaccgcuccggguacagcggcaucuucuccgucgagggcaagagcugcaucaaccggugcuucuacguggagcugauccgcgggcggaaggaggagaccgaggugcucuggaccagcaacuccaucgucguguucugcggcacgagcgggaccuacggcaccggguccuggccggacggcgccgaccugaaccugaugcccaucuga

SEQ ID NO: 84561 - RNA, 1410 nt, Artificial Sequence; identical to SEQ ID NO: 83434
  derived and/or modified CDS sequence (opt1) from neuraminidase__InfluenzaA__AEA73510

SEQ ID NO: 84562 - RNA, 1410 nt, Artificial Sequence; identical to SEQ ID NO: 83434
  derived and/or modified CDS sequence (opt1) from neuraminidase__InfluenzaA__AEA73521

SEQ ID NO: 84563 - RNA, 1410 nt, Artificial Sequence; identical to SEQ ID NO: 83434
  derived and/or modified CDS sequence (opt1) from neuraminidase__InfluenzaA__AEA73532

SEQ ID NO: 84564 - RNA, 1410 nt, Artificial Sequence; identical to SEQ ID NO: 83434
  derived and/or modified CDS sequence (opt1) from neuraminidase__InfluenzaA__AEA73543

SEQ ID NO: 84565 - RNA, 1410 nt, Artificial Sequence; identical to SEQ ID NO: 83434
  derived and/or modified CDS sequence (opt1) from neuraminidase__InfluenzaA__AEA73554

SEQ ID NO: 84566 - RNA, 1410 nt, Artificial Sequence; identical to SEQ ID NO: 83434
  derived and/or modified CDS sequence (opt1) from neuraminidase__InfluenzaA__AEA73565

SEQ ID NO: 84567 - RNA, 1413 nt, Artificial Sequence; identical to SEQ ID NO: 81485
  derived and/or modified CDS sequence (opt1) from neuraminidase__InfluenzaA__AEA73576

SEQ ID NO: 84568 - RNA, 1413 nt, Artificial Sequence; identical to SEQ ID NO: 81485
  derived and/or modified CDS sequence (opt1) from neuraminidase__InfluenzaA__AEA73587

SEQ ID NO: 84569 - RNA, 1413 nt, Artificial Sequence; identical to SEQ ID NO: 84228
  derived and/or modified CDS sequence (opt1) from neuraminidase__InfluenzaA__AEA73598

SEQ ID NO: 84570 - RNA, 1413 nt, Artificial Sequence; identical to SEQ ID NO: 81485
  derived and/or modified CDS sequence (opt1) from neuraminidase__InfluenzaA__AEA73609

SEQ ID NO: 84571 - RNA, 1413 nt, Artificial Sequence; identical to SEQ ID NO: 81485
  derived and/or modified CDS sequence (opt1) from neuraminidase__InfluenzaA__AEA73620

SEQ ID NO: 84572 - RNA, 1413 nt, Artificial Sequence
  derived and/or modified CDS sequence (opt1) from neuraminidase__InfluenzaA__AEA73631
augaaccccaaccagaagaucaucaccaucggcagcaucuccaucgccaucgggaucaucagccugaugcuccagaucggcaacaucaucuccaucugggccagccacuccauccagaccgggagccagaacaacacgggcaucugcaaccagcgcaucaucaccuacgagaacuccaccugggugaaccacaccuacgucaacaucaacaacacgaacgugguggcgggggaggacaagaccagcgucacccuggccggcaacuccagccugugcuccaucagcggcugggccaucuacaccaaggacaacuccauccggaucgggagcaagggcgacguguucgugauccgcgagccguucaucuccugcagccaccucgagugccggacguucuuccugacccagggggcccugcucaacgacaagcacuccaacggcaccgucaaggaccgcagccccuaccgggcccugauguccugcccccugggggaggcgcccagcccguacaacagcaaguucgaguccguggccuggagcgccuccgccugccacgacggcaugggcuggcucaccaucgggaucagcggccccgacaacggggcgguggccguccugaaguacaacggcaucaucacgggcaccaucaaguccuggaagaagcagauccugcgcacccaggagagcgagugcgugugcaugaacggguccugcuucaccaucaugacggacggccccagcaacaaggccgccuccuacaagaucuucaagaucgagaaggggaaggugaccaagagcaucgagcucaacgcccccaacuucuacuacgaggagugcuccugcuacccggacaccggcaucgucaugugcgugugccgggacaacuggcacgggagcaaccgccccuggguguccuucaaccagaaccuggacuaccagaucggcuacaucugcagcggcgucuucggggacaacccccggcccgaggacggcgagggguccugcaacccggugaccguggacggcgcgaacggggucaagggcuucagcuacaaguacggcaacgggguguggaucggccgcaucaaguccaaccggcugcgcaagggguucgagaugaucugggaccccaacggcuggacgaacaccgacagcgacuucuccgugaagcaggacgucguggccaucaccgacuggagcggguacagcggcuccuucgugcagcaccccgagcucaccggccuggacugcauccggcccugcuucugggucgagcuggugcgcgggcucccgcgggagaacacgaccaucuggaccagcggcuccagcaucuccuucugcggggucaacagcgacaccgccaacugguccuggcccgacggcgccgagcugcccuucacgaucgacaaguga

SEQ ID NO: 84573 - RNA, 1413 nt, Artificial Sequence
  derived and/or modified CDS sequence (opt1) from neuraminidase__InfluenzaA__AEA73642
augaaccccaaccagcgcaucaucaccaucggcagcaucuccaucgccaucgggaucaucagccugaugcuccagaucggcaacaucaucuccaucugggccagccacuccauccagaccgggagccagaacaacacgggcaucugcaagcagcggaucaucaccuacgagaacuccaccugggugaaccacaccuacgucaacaucaacaacacgaacgugguggcgggggaggacaagaccagcgucacccuggccggcaacuccagccugugcuccaucagcggcugggccaucuacaccaaggacaacuccauccgcaucgggagcaagggcgacguguucgugauccgggagccguucaucuccugcagccaccucgagugccgcacguucuuccugacccagggggcccugcucaacgacaagcacuccaacggcaccgccaaggaccggagccccuaccgcgcgcugauguccugcccccugggggaggcccccagcccguacaacagcaaguucgaguccgucgccuggagcgccuccgcgugccacgacggcaugggcuggcucaccaucgggaucagcggccccgacaacggggccguggccgugcugaaguacaacggcaucaucacgggcaccaucaaguccuggaagaagcagauccugcggacccaggagagcgagugcgucugcaugaacggguccugcuucaccaucaugacggacggccccagcaacaaggccgccuccuacaagaucuucaagaucgagaaggggaaggugaccaagagcaucgagcucaacgcgcccaacuucuacuacgaggagugcuccugcuacccggacaccggcaucgugaugugcgucugccgcgacaacuggcacgggagcaaccggcccuggguguccuucaaccagaaccuggacuaccagaucggcuacaucugcagcggcguguucggggacaacccccgccccgaggacggcgagggguccugcaacccggucaccguggacggcgccaacggggugaagggcuucagcuacaaguacggcaacggggucuggcugggccggacgaaguccaaccgccuccggaagggguucgagaugaucugggaccccaacggcuggaccaacaccgacagcgacuucuccgugaagcaggacguggucgccaucaccgacuggagcggguacagcggcuccuucgugcagcaccccgagcugacgggccuggacugcauccgccccugcuucuggguggagcucguccgggggcugccgcgcgagaacaccaccaucuggaccagcggcuccagcaucuccuucugcggggugaacagcgacacggccaacugguccuggcccgacggcgccgagcugcccuucaccaucgacaaguga

SEQ ID NO: 84574 - RNA, 1413 nt, Artificial Sequence; identical to SEQ ID NO: 81485
  derived and/or modified CDS sequence (opt1) from neuraminidase__InfluenzaA__AEA73653

SEQ ID NO: 84575 - RNA, 1413 nt, Artificial Sequence
  derived and/or modified CDS sequence (opt1) from neuraminidase__InfluenzaA__AEA73664
augaaccccaaccagaagaucaucaccaucggcagcaucuccaucgccaucgggaucaucagccugaugcuccagaucggcaacaucaucuccaucugggccagccacuccauccagaccgggagccagaacaacacgggcaucugcaaccagcgcaucaucaccuacgagaacuccaccugggugaaccacaccuacgucaacaucaacaacacgaacgugguggcgggggaggacaagaccagcgucacccuggccggcaacuccagccugugcuccaucagcggcugggccaucuacaccaaggacaacuccauccggaucgggagcaagggcgacguguucgugauccgcgagccguucaucuccugcagccaccucgagugccggacguucuuccugacccagggggcccugcucaacgacaagcacuccaacggcaccgucaaggaccgcagccccuaccgggcccugauguccugcccccugggggaggcgcccagcccguacaacagcaaguucgaguccguggccuggagcgccuccgccugccacgacggcaugggcuggcucaccaucgggaucagcggccccgacaacggggcgguggccguccugaaguacaacggcaucaucacgggcaccaucaaguccuggaagaagcagauccugcgcacccaggagagcgagugcgugugcaugaacggguccugcuucaccaucaugacggacggccccagcaacaaggccgccuccuacaagaucuucaagaucgagaaggggaaggugaccaagagcaucgagcucaacgcccccaacuucuacuacgaggagugcuccugcuacccggacaccggcaucgucaugugcgugugccgggacaacuggcacgggagcaaccgccccuggguguccuucaaccagaaccuggacuaccagaucggcuacaucugcagcggcgucuucggggacaacccccggcccgaggacggcgagggguccugcaacccggugaccgugaacggcgcggacggggucaagggcuucagcuacaaguacggcaacgggguguggaucggccgcacgaaguccaaccggcugcgcaagggguucgagaugaucugggaccccaacggcuggaccaacaccgacagcgacuucuccgugaagcaggacgucguggccaucaccgacuggagcggguacagcggcuccuucgugcagcaccccgagcucacgggccuggacugcauccggcccugcuucugggucgagcuggugcgcgggcucccgaaggagaacaccaccaucuggaccagcggcuccagcaucuccuucugcggggucaacagcgacacggccaacugguccuggcccgacggcgccgagcugcccuucaccaucgacaaguga

SEQ ID NO: 84576 - RNA, 1413 nt, Artificial Sequence
  derived and/or modified CDS sequence (opt1) from neuraminidase__InfluenzaA__AEA73675
augaaccccaaccagaagaucaucaccaucggcagcaucuccaucgccaucgggaucaucagccugaugcuccagaucggcaacaucaucuccaucugggccagccacuccauccagaccgggagccagaacaacacgggcaucugcaaccagcgcaucaucaccuacgagaacuccaccugggugaaccacaccuacgucaacaucaacaacacgaacgugguggcgggggaggacaagaccagcgucacccuggccggcaacuccagccugugcuccaucagcggcugggccaucuacaccaaggacaacuccauccggaucgggagcaagggcgacguguucgugauccgcgagccguucaucuccugcagccaccucgagugccggacguucuuccugacccagggggcccugcucaacgacaagcacuccaacggcaccgucaaggaccgcagccccuaccgggcccugauguccugcccccugggggaggcgcccagcccguacaacagcaaguucgaguccguggccuggagcgccuccgccugccacgacggcaugggcuggcucaccaucgggaucagcggccccgacaacggggcgguggccguccugaaguacaacggcaucaucacgggcaccaucaaguccuggaagaagcagauccugcgcacccaggagagcgagugcgugugcaugaacggguccugcuucaccaucaugacggacggccccagcaacaaggccgccuccuacaagaucuucaagaucgagaaggggaaggugaccaagagcaucgagcucaacgcccccaacuucuacuacgaggagugcuccugcuacccggacaccggcaucgucaugugcgugugccgggacaacuggcacgggagcaaccgccccuggguguccuucaaccagaaccuggacuaccagaucggcuacaucugcagcggcgucuucggggacaacccccggcccgaggacggcgagggguccugcaacccggugaccguggacggcgcggacggggucaagggcuucagcuacaaguacggcaacgggguguggaucggccgcacgaaguccaaccggcugcgcaagggguucgagaugaucugggaccccaacggcuggaccaacaccgacagcgacuucuccgugaagcaggacgucguggccaucaccgacuggagcggguacagcggcuccuucgugcagcaccccgagcucacgggccuggacugcauccggcccugcuucuggaucgagcugguccgcgggcucccgcgggagaacaccaccaucuggaccagcggcuccagcaucuccuucugcggggugaacagcgacacggccaacugguccuggcccgacggcgccgagcugcccuucaccaucgacaaguga

SEQ ID NO: 84577 - RNA, 1413 nt, Artificial Sequence; identical to SEQ ID NO: 84228
  derived and/or modified CDS sequence (opt1) from neuraminidase__InfluenzaA__AEA73686

SEQ ID NO: 84578 - RNA, 1413 nt, Artificial Sequence
  derived and/or modified CDS sequence (opt1) from neuraminidase__InfluenzaA__AEA73697
augaaccccaaccagaagaucaucaccaucggcagcaucuccaucgccaucgggaucaucagccugaugcuccagaucggcaacaucaucuccaucugggccagccacuccauccagaccgggagccagaacaacacgggcaucugcaaccagcgcaucaucaccuacgagaacuccaccugggugaaccacaccuacgucaacaucaacaacacgaacaucguggcgggggaggacaagaccagcgugacccuggccggcaacuccagccugugcuccaucagcggcugggccaucuacaccaaggacaacuccauccggaucgggagcaagggcgacgucuucgugauccgcgagccguucaucuccugcagccaccucgagugccggacguucuuccugacccagggggcccugcucaacgacaagcacuccaacggcaccgugaaggaccgcagccccuaccgggcccugauguccugcccccugggggaggcgcccagcccguacaacagcaaguucgaguccgucgccuggagcgccuccgccugccacgacggcaugggcuggcucaccaucgggaucagcggccccgacaacggggcgguggccgugcugaaguacaacggcaucaucacgggcaccaucaaguccuggaagaagcagauccugcgcacccaggagagcgagugcgucugcaugaacggguccugcuucaccaucaugacggacggccccagcaacaaggccgccuccuacaagaucuucaagaucgagaaggggaaggugaccaagagcguggagcucaacgcccccaacuucuacuacgaggagugcuccugcuacccggacaccggcaucgucaugugcgugugccgggacaacuggcacgggagcaaccgccccuggguguccuucaaccagaaccuggacuaccagaucggcuacaucugcagcggcgucuucggggacaacccccggcccgaggacggcgagggguccugcaacccggugaccgugaacggcgcggacggggucaagggcuucagcuacaaguacggcaacgggguguggaucggccgcacgaaguccaaccggcugcgcaagggguucgagaugaucugggaccccaacggcuggaccaacaccgacagcgacuucuccgugaagcaggacgucguggccaucaccgacuggagcggguacagcggcuccuucgugcagcaccccgagcucacgggccuggacugcauccggcccugcuucugggucgagcuggugcgcgggcucccgcgggagaacaccaccaucuggaccagcggcuccagcaucuccuucugcggggucaacagcgacacggccaacugguccuggcccgacggcgccgagcugcccuucaccaucgacaaguga

SEQ ID NO: 84579 - RNA, 1413 nt, Artificial Sequence; identical to SEQ ID NO: 84229
  derived and/or modified CDS sequence (opt1) from neuraminidase__InfluenzaA__AEA73708

SEQ ID NO: 84580 - RNA, 1413 nt, Artificial Sequence; identical to SEQ ID NO: 81485
  derived and/or modified CDS sequence (opt1) from neuraminidase__InfluenzaA__AEA73719

SEQ ID NO: 84581 - RNA, 1413 nt, Artificial Sequence; identical to SEQ ID NO: 81485
  derived and/or modified CDS sequence (opt1) from neuraminidase__InfluenzaA__AEA73730

SEQ ID NO: 84582 - RNA, 1413 nt, Artificial Sequence; identical to SEQ ID NO: 81485
  derived and/or modified CDS sequence (opt1) from neuraminidase__InfluenzaA__AEA73741

SEQ ID NO: 84583 - RNA, 1413 nt, Artificial Sequence; identical to SEQ ID NO: 81485
  derived and/or modified CDS sequence (opt1) from neuraminidase__InfluenzaA__AEA73752

SEQ ID NO: 84584 - RNA, 1413 nt, Artificial Sequence; identical to SEQ ID NO: 84228
  derived and/or modified CDS sequence (opt1) from neuraminidase__InfluenzaA__AEA73763

SEQ ID NO: 84585 - RNA, 1410 nt, Artificial Sequence; identical to SEQ ID NO: 80762
  derived and/or modified CDS sequence (opt1) from neuraminidase__InfluenzaA__AEA73774

SEQ ID NO: 84586 - RNA, 1410 nt, Artificial Sequence; identical to SEQ ID NO: 80762
  derived and/or modified CDS sequence (opt1) from neuraminidase__InfluenzaA__AEA73784

SEQ ID NO: 84587 - RNA, 1410 nt, Artificial Sequence; identical to SEQ ID NO: 80762
  derived and/or modified CDS sequence (opt1) from neuraminidase__InfluenzaA__AEA73794

SEQ ID NO: 84588 - RNA, 1410 nt, Artificial Sequence; identical to SEQ ID NO: 80762
  derived and/or modified CDS sequence (opt1) from neuraminidase__InfluenzaA__AEA73804

SEQ ID NO: 84589 - RNA, 1410 nt, Artificial Sequence; identical to SEQ ID NO: 80762
  derived and/or modified CDS sequence (opt1) from neuraminidase__InfluenzaA__AEA73814

SEQ ID NO: 84590 - RNA, 1410 nt, Artificial Sequence; identical to SEQ ID NO: 80762
  derived and/or modified CDS sequence (opt1) from neuraminidase__InfluenzaA__AEA73824

SEQ ID NO: 84591 - RNA, 1410 nt, Artificial Sequence
  derived and/or modified CDS sequence (opt1) from neuraminidase__InfluenzaA__AEA73834
augaaccccaaccagaagaucaucaccaucggcagcaucugcaugaccaucgggauggccaaccugauccuccagaucggcaacaucaucuccaucuggaucagccacuccauccagcuggggaaccagaaccagaucgagacgugcaaccagagcgugaucaccuacgagaacaacaccugggucaaccagaccuacgugaacaucuccaacacgaacuucgccgcgggccagagcguggucuccgugaagcuggccgggaacagcucccucugcccggugagcggcugggccaucuacuccaaggacaacagcauccgcaucggcuccaagggggacgucuucgugauccgggagcccuucaucagcugcagcccccuggagugccgcaccuucuuccugacccagggcgcccuccugaacgacaagcacuccaacgggaccaucaaggaccggucccccuaccgcacgcugaugagcugcccgaucggcgaggugcccucccccuacaacagccgguucgagagcgucgccugguccgcgagcgccugccacgacgggaucaacuggcucaccaucggcaucuccggccccgacaacggggccguggccgugcugaaguacaacggcaucaucaccgacaccaucaagagcuggaagaacaacauccugcgcacgcaggaguccgagugcgcgugcgucaacgggagcugcuucaccgugaugaccgacggcccguccgacggccaggccagcuacaagaucuuccggaucgagaaggggaagaucgugaaguccgucgagaugaacgcccccaacuaccacuacgaggagugcagcugcuaccccgacuccagcgagaucacgugcgugugccgcgacaacuggcacggcuccaaccggcccugggugagcuucaaccagaaccucgaguaccagaucggguacaucugcuccggcaucuucggggacaacccgcgccccaacgacaagaccggcagcugcggccccgucuccagcaacggggccaacggcgugaagggguucuccuucaaguacggcaacgggguguggaucggccggaccaagagcaucagcucccgcaacggcuucgagaugaucugggaccccaacggguggaccggcaccgacaacaacuucagcaucaagcaggacaucgucgggaucaacgagugguccggcuacagcggguccuucgugcagcacccggagcugacgggccuggacugcauccggcccugcuucuggguggagcucauccgcggccggcccaaggagaacaccaucuggaccagcggguccagcaucuccuucugcggcgucaacagcgacaccguggggugguccuggcccgacggcgccgagcugccguucacgaucgacaaguga

SEQ ID NO: 84592 - RNA, 1410 nt, Artificial Sequence; identical to SEQ ID NO: 84124
  derived and/or modified CDS sequence (opt1) from neuraminidase__InfluenzaA__AEA73844

SEQ ID NO: 84593 - RNA, 1410 nt, Artificial Sequence; identical to SEQ ID NO: 80762
  derived and/or modified CDS sequence (opt1) from neuraminidase__InfluenzaA__AEA73854

SEQ ID NO: 84594 - RNA, 1410 nt, Artificial Sequence; identical to SEQ ID NO: 80762
  derived and/or modified CDS sequence (opt1) from neuraminidase__InfluenzaA__AEA73864

SEQ ID NO: 84595 - RNA, 1410 nt, Artificial Sequence; identical to SEQ ID NO: 82543
  derived and/or modified CDS sequence (opt1) from neuraminidase__InfluenzaA__AEA73874

SEQ ID NO: 84596 - RNA, 1410 nt, Artificial Sequence; identical to SEQ ID NO: 82543
  derived and/or modified CDS sequence (opt1) from neuraminidase__InfluenzaA__AEA73884

SEQ ID NO: 84597 - RNA, 1410 nt, Artificial Sequence; identical to SEQ ID NO: 84124
  derived and/or modified CDS sequence (opt1) from neuraminidase__InfluenzaA__AEA73894

SEQ ID NO: 84598 - RNA, 1410 nt, Artificial Sequence
  derived and/or modified CDS sequence (opt1) from neuraminidase__InfluenzaA__AEA73904
augaaccccaaccagaagaucaucaccaucggcagcgugugcaugaccaucgggauggccaaccugguccuccagaucggcaacaucaucuccaucuggaucagccacuccauccagcuggggaaccagaaccagaucgagacgugcaaccagagcgugaucaccuacgagaacaacaccugggugaaccagaccuacgucaacaucuccaacacgaacuucgccgcgggccagagcgugguguccgucaagcuggccgggaacagcucccucugcccggugagcggcugggccaucuacuccaaggacaacagcauccgcaucggcuccaagggggacguguucgucauccgggagcccuucaucagcugcagcccccuggagugccgcaccuucuuccugacccagggcgcccuccugaacgacaagcacuccaacgggaccaucaaggaccggucccccuaccgcacgcugaugagcugcccgaucggcgaggugcccucccccuacaacagccgguucgagagcguggccugguccgcgagcgccugccacgacgggaucaacuggcucaccaucggcaucuccggccccgacaacggggccgucgccgugcugaaguacaacggcaucaucaccgacaccaucaagagcuggcgcaacaacauccugcggacgcaggaguccgagugcgcgugcgugaacgggagcugcuucaccgucaugaccgacggcccguccgacggccaggccagcuacaagaucuuccgcaucgagaaggggaagaucgugaaguccguggagaugaacgcccccaacuaccacuacgaggagugcagcugcuaccccgacuccagcgagaucacgugcgucugccgggacaacuggcacggcuccaaccgccccugggugagcuucaaccagaaccucgaguaccagaucggguacaucugcuccggcaucuucggggacaacccgcggcccaacgacaagaccggcagcugcggccccguguccagcaacggggccaacggcgucaagggguucuccuucaaguacggcaacgggguguggaucggccgcaccaagagcaucagcucccggaacggcuucgagaugaucugggaccccaacggguggaccggcaccgacaacaacuucagcaucaagcaggacaucaucgggaucaacgagugguccggcuacagcggguccuucgugcagcacccggagcugacgggccuggacugcauccgccccugcuucugggucgagcucauccggggccgccccaaggagaagaccaucuggaccagcggguccagcaucuccuucugcggcgugaacagcgacaccgucgggugguccuggcccgacggcgccgagcugccguucacgaucgacaaguga

SEQ ID NO: 84599 - RNA, 1410 nt, Artificial Sequence; identical to SEQ ID NO: 80762
  derived and/or modified CDS sequence (opt1) from neuraminidase__InfluenzaA__AEA73914

SEQ ID NO: 84600 - RNA, 1410 nt, Artificial Sequence; identical to SEQ ID NO: 82543
  derived and/or modified CDS sequence (opt1) from neuraminidase__InfluenzaA__AEA73924

SEQ ID NO: 84601 - RNA, 1410 nt, Artificial Sequence; identical to SEQ ID NO: 84201
  derived and/or modified CDS sequence (opt1) from neuraminidase__InfluenzaA__AEA73934

SEQ ID NO: 84602 - RNA, 1410 nt, Artificial Sequence
  derived and/or modified CDS sequence (opt1) from neuraminidase__InfluenzaA__AEA73944
augaaccccaaccagaagaucaucaccaucggcagcgugugcaugaccaucgggauggccaaccugauccuccaggucggcaacaucaucuccaucuggaucagccacuccauccagcuggggaaccagaaccagaucgagacgugcaaccagagcgugaucaccuacgagaacaacaccugggugaaccagaccuacgucaacaucuccaacacgaacuucgccgcgggccagagcgugguguccgucaagcuggccgggaacagcucccucugcccggugagcggcugggccaucuacuccaaggacaacagcauccgcaucggcuccaagggggacguguucgucauccgggagcccuucaucagcugcagcccccuggagugccgcaccuucuuccugacccagggcgcccuccugaacgacaagcacuccaacgggaccaucaaggaccggucccccuaccgcacgcugaugagcugcccgaucggcgaggugcccucccccuacaacagccgguucgagagcguggccugguccgcgagcgccugccacgacgggaucaacuggcucaccaucggcaucuccggccccgacaacggggccgucgccgugcugaaguacaacggcaucaucaccgacaccaucaagagcuggcgcaacaacauccugcggacgcaggaguccgagugcgcgugcgugaacgggagcugcuucaccgucaugaccgacggcccguccgacggccaggccagcuacaagaucuuccgcaucgagaaggggaagaucgugaaguccguggagaugaacgcccccaacuacuacuacgaggagugcagcugcuaccccgacuccagcgagaucacgugcgucugccgggacaacuggcacggcuccaaccgccccugggugagcuucaaccagaaccucgaguaccagaucggguacaucugcuccggcaucuucggggacaacccgcggcccaacgacaagaccggcagcugcggccccguguccagcaacggggccaacggcgucaagggguucuccuucaaguacggcaacgggguguggaucggccgcaccaagagcaucagcucccggaacggcuucgagaugaucugggaccccaacggguggaccggcaccgacaacaacuucagcaucaagcaggacaucguggggaucaacgagugguccggcuacagcggguccuucguccagcacccggagcugacgggccuggacugcauccgccccugcuucuggguggagcucauccggggccgccccaaggagaacaccaucuggaccagcggguccagcaucuccuucugcggcgucaacagcgacaccguggggugguccuggcccgacggcgccgagcugccguucacgaucgacaaguga

SEQ ID NO: 84603 - RNA, 1410 nt, Artificial Sequence; identical to SEQ ID NO: 80762
  derived and/or modified CDS sequence (opt1) from neuraminidase__InfluenzaA__AEA73954

SEQ ID NO: 84604 - RNA, 1410 nt, Artificial Sequence; identical to SEQ ID NO: 80762
  derived and/or modified CDS sequence (opt1) from neuraminidase__InfluenzaA__AEA73964

SEQ ID NO: 84605 - RNA, 1410 nt, Artificial Sequence
  derived and/or modified CDS sequence (opt1) from neuraminidase__InfluenzaA__AEA73974
augaaccccaaccagaagaucaucaccaucggcagcgugugcaugaccaucgggauggccaaccugauccuccagaucggcaacaucaucuccaucuggaucagccacuccauccagcacgggaaccagaaccagaucgagacgugcaaccagagcgucaucaccuacgagaacaacaccugggugaaccagaccuacgugaacaucuccaacacgaacuucgccgcgggccagagcgucguguccgugaagcuggccgggaacagcucccugugcccggucagcggcugggccaucuacuccaaggacaacagcauccgcaucggcuccaagggggacguguucgugauccgggagcccuucaucagcugcagcccccucgagugccgcaccuucuuccugacccagggcgcccugcucaacgacaagcacuccaacgggaccaucaaggaccggucccccuaccgcacgcugaugagcugcccgaucggcgagguccccucccccuacaacagccgguucgagagcguggccugguccgcgagcgccugccacgacgggaucaacuggcugaccaucggcaucuccggccccgacaacggggccguggccguccucaaguacaacggcaucaucaccgacaccaucaagagcuggcgcaacaacauccugcggacgcaggaguccgagugcgcgugcgugaacgggagcugcuucaccgugaugaccgacggcccguccgacggccaggccagcuacaagaucuuccgcaucgagaaggggaagaucgucaaguccguggagaugaacgcccccaacuaccacuacgaggagugcagcugcuaccccgacuccagcgagaucacgugcgugugccgggacaacuggcacggcuccaaccgccccugggucagcuucaaccagaaccuggaguaccagaucggguacaucugcuccggcaucuucggggacaacccgcggcccaacgacaagaccggcagcugcggccccguguccagcaacggggccaacggcgugaagggguucuccuucaaguacggcaacggggucuggaucggccgcaccaagagcaucagcucccggaacggcuucgagaugaucugggaccccaacggguggaccggcaccgacaacaacuucagcaucaagcaggacaucguggggaucaacgagugguccggcuacagcggguccuucgugcagcacccggagcucacgggccuggacugcauccgccccugcuucugggucgagcugauccggggccgccccaaggagaacaccaucuggaccagcggguccagcaucuccuucugcggcgugaacagcgacaccgucgggugguccuggcccgacggcgccgagcucccguucacgaucgacaaguga

SEQ ID NO: 84606 - RNA, 1410 nt, Artificial Sequence; identical to SEQ ID NO: 80762
  derived and/or modified CDS sequence (opt1) from neuraminidase__InfluenzaA__AEA73984

SEQ ID NO: 84607 - RNA, 1410 nt, Artificial Sequence; identical to SEQ ID NO: 82113
  derived and/or modified CDS sequence (opt1) from neuraminidase__InfluenzaA__AEA73994

SEQ ID NO: 84608 - RNA, 1410 nt, Artificial Sequence
  derived and/or modified CDS sequence (opt1) from neuraminidase__InfluenzaA__AEA74004
augaaccccaacaagaagaucaucaucaucggcagcgugugcaugaccaucgggauggccaaccugauccuccagaucggcaacaucaucuccaucuggaucagccacuccauccagcuggggaaccagaaccagaucgagaccugcaaccagagcgucaucacguacgagaacaacaccugggugaaccagaccuacgugaacaucuccaacaccaacuucgccgcgggccagagcgucguguccgugaagcuggccgggaacagcucccucugcccggucagcggcugggccaucuacuccaaggacaacagcauccgcaucggcuccaagggggacguguucgugauccgggagcccuucaucagcugcagcccccuggagugccgcacguucuuccugacccagggcgcccuccugaacgacaagcacuccaacgggaccaucaaggaccggucccccuaccgcacccugaugagcugcccgaucggcgagguccccucccccuacaacagccgguucgagagcguggccugguccgcgagcgccugccacgacgggaucaacuggcucacgaucggcaucuccggccccgacaacggggccguggccguccugaaguacaacggcaucaucaccgacaccaucaagagcuggcgcaacaacauccugcggacccaggaguccgagugcgcgugcgugaacgggagcugcuucacggugaugaccgacggcccguccgacggccaggccagcuacaagaucuuccgcaucgagaaggggaagaucgucaaguccguggagaugaacgcccccaacuaccacuacgaggagugcagcugcuaccccgacuccagcgagaucacgugcgugugccgggacaacuggcacggcuccaaccgccccugggucagcuucaaccagaaccucgaguaccagaucggguacaucugcuccggcaucuucggggacaacccgcggcccaacgacaagaccggcagcugcggccccguguccagcaacggggccaacggcgugaagggguucuccuucaaguacggcaacggggucuggaucggccgcaccaagagcaucagcucccggaacggcuucgagaugaucugggaccccaacggguggaccggcaccgacaacaacuucagcaucaagcaggacaucguggggaucaacgagugguccggcuacagcggguccuucgugcagcacccggagcugaccggccuggacugcauccgccccugcuucugggucgagcucauccggggccgccccaaggagaacacgaucuggaccagcggguccagcaucuccuucugcggcgugaacagcgacaccgucgggugguccuggcccgacggcgccgagcugccguucaccaucgacaaguga

SEQ ID NO: 84609 - RNA, 1410 nt, Artificial Sequence; identical to SEQ ID NO: 81939
  derived and/or modified CDS sequence (opt1) from neuraminidase__InfluenzaA__AEA74014

SEQ ID NO: 84610 - RNA, 1410 nt, Artificial Sequence; identical to SEQ ID NO: 81939
  derived and/or modified CDS sequence (opt1) from neuraminidase__InfluenzaA__AEA74024

SEQ ID NO: 84611 - RNA, 1410 nt, Artificial Sequence; identical to SEQ ID NO: 80762
  derived and/or modified CDS sequence (opt1) from neuraminidase__InfluenzaA__AEA74032

SEQ ID NO: 84612 - RNA, 1410 nt, Artificial Sequence; identical to SEQ ID NO: 80762
  derived and/or modified CDS sequence (opt1) from neuraminidase__InfluenzaA__AEA74034

SEQ ID NO: 84613 - RNA, 1410 nt, Artificial Sequence
  derived and/or modified CDS sequence (opt1) from neuraminidase__InfluenzaA__AEA77302
augaaccccaaccagaagaucaucaccaucggcagcgugucccugaccaucagcacgaucugcuucuucaugcagaucgccauccucaucaccaccgucacccugcacuucaagcaguacgaguucaacuccccgcccaacaaccaggugaugcugugcgagcccacgaucaucgagcgcaacaucaccgagaucguguaccucaccaacaccacgaucgagaaggagaagugccccaagcuggccgaguaccggaacuggagcaagccgcagugcgacaucaccggguucgcgcccuucuccaaggacaacagcauccgccuguccgccggcggggacaucugggucacccgggagcccuacgugagcugcgaccccgacaagugcuaccaguucgcccucggccaggggaccacgcugaacaacgugcacuccaacaacaccguccgcgaccggaccccguaccgcacccugcucaugaacgagcugggcgugcccuuccaccugggcacgaagcaggucugcaucgccuggagcuccagcuccugccacgacgggaaggccuggcuccacgugugcaucaccggcgacgacaagaacgcgaccgccagcuucaucuacaacgggcggcugguggacuccguggucagcugguccaaggagauccugcgcacccaggagagcgagugcgugugcaucaacggcacgugcaccguggucaugaccgacggguccgccagcggcaaggccgacaccaagauccucuucaucgaggagggcaagaucgugcacacgagcacccuguccgggagcgcgcagcacguggaggagugcuccugcuacccccgguaccccggcguccgcugcgugugccgggacaacuggaaggggagcaaccgcccgaucguggacaucaacaucaaggaccacuccaucgucagcuccuacgugugcagcggccuggugggcgacacccccaagaagaacgacuccagcuccagcucccacugccucgaccccaacaacgaggagggcgggcacggggucaagggcugggccuucgacgacgggaacgacguguggaugggccggaccaucagcgagaagucccgccugggcuacgagacguucaaggucaucgagggguggagcaaccccaaguccaagcugcagaucaaccgccaggugaucguggaccggggcaaccggagcggguacuccggcaucuucagcgucgagggcaagagcugcaucaaccgcugcuucuacguggagcucauccgggggcgcaaggaggagaccgaggugcuguggaccuccaacagcaucgucguguucugcggcaccuccgggacguacggcaccgggagcuggccggacggcgccgacaucaaccugaugcccaucuga

SEQ ID NO: 84614 - RNA, 1410 nt, Artificial Sequence; identical to SEQ ID NO: 84281
  derived and/or modified CDS sequence (opt1) from neuraminidase__InfluenzaA__AEB21318

SEQ ID NO: 84615 - RNA, 1410 nt, Artificial Sequence
  derived and/or modified CDS sequence (opt1) from neuraminidase__InfluenzaA__AEB21328
augaaccccaaccagaagaucaucaccaucggcagcgugugcaugaccaucgggauggccaaccugauccuccagaucggcaacaucaucuccaucuggaucagccacuccauccagcuggggaaccagagccagaucgagacgugcaaccaguccgucaucaccuacgagaacaacaccugggugaaccagaccuacgugaacaucagcaacacgaacuucgccgcgggccaguccgucgugagcgugaagcuggccgggaacuccagccucugcccggucuccggcugggccaucuacagcaaggacaacuccauccgcaucggcagcaagggggacguguucgugauccgggagcccuucaucuccugcagcccccuggagugccgcaccuucuuccugacccagggcgcccuccugaacgacaagcacuccaacgggaccaucaaggaccggagccccuaccgcacgcugauguccugcccgaucggcgagguccccagccccuacaacagccgguucgaguccguggccuggagcgcguccgccugccacgacggguucaacuggcucaccaucggcaucagcggccccgacaacggggccguggccguccugaaguacaacggcaucaucaccgacaccaucaaguccuggcgcaacaacauccugcggacgcaggagagcgagugcgcgugcgugaacggguccugcuucaccaucaugaccgacggcccgagcgacggccaggccuccuacaagaucuuccgcaucgagaaggggaagaucgucaagagcguggagaugaacgcccccaacuaccacuacgaggagugcuccugcuaccccgacagcuccgagaucacgugcgugugccgggacaacuggcacggcagcaaccgccccuggguguccuucaaccagaaccucgaguaccagaucggguacaucugcagcggcaucuucggggacaacccgcggcccaacgacaagaccggcuccugcggccccgucagcuccaacggggccaacggcgugaagggguucagcuucaaguacggcaacgggguguggaucggccgcaccaagagcaucuccagccggaagggcuucgagaugaucugggaccccaacggguggaccggcaccgacaacaacuucuccaucaagcaggacaucgucgggaucaacgaguggagcggcuacuccgggagcuucgugcagcacccggagcugacgggccuggacugcauccgccccugcuucuggguggagcucauccggggccgccccaaggagaacaccaucuggaccuccgggagcuccaugagcuucugcggcgucaacuccgacaccgugggguggagcuggcccgacggcgccgagcugccguucacgaucgacaaguga

SEQ ID NO: 84616 - RNA, 1410 nt, Artificial Sequence; identical to SEQ ID NO: 84281
  derived and/or modified CDS sequence (opt1) from neuraminidase__InfluenzaA__AEB21340

SEQ ID NO: 84617 - RNA, 1410 nt, Artificial Sequence
  derived and/or modified CDS sequence (opt1) from neuraminidase__InfluenzaA__AEB21350
augaaccccaaccagaagaucaucaccaucggcagcgugugcaugaccaucgggauggccaaccugauccuccagaucggcaacaucaucuccaucuggaucagccacuccauccagcuggggaaccagagccagaucgagacgugcaaccaguccgucaucaccuacgagaacaacaccugggugaaccagaccuacgugaacaucagcaacacgaacuucgccgcgggccaguccgucgugagcgugaagcuggccgggaacuccagccucugcccggucuccggcugggccaucuacagcaaggacaacuccauccgcaucggcagcaagggggacguguucgugauccgggagcccuucaucuccugcagccccuccgagugccgcaccuucuuccugacccagggcgcccugcucaacgacaagcacagcaacgggaccaucaaggaccggucccccuaccgcacgcugaugagcugcccgaucggcgagguccccagccccuacaacucccgguucgagagcguggccugguccgcgagcgccugccacgacgggaucaacuggcugaccaucggcaucuccggccccgacaacggggccguggccguccucaaguacaacggcaucaucaccgacaccaucaagagcuggcgcaacaacauccugcggacgcaggaguccgagugcgcgugcgugaacgggagcugcuucaccaucaugaccgacggcccguccgacggccaggccagcuacaagaucuuccgcaucgagaaggggaagaucgugaaguccgucgagaugaacgcccccaacuaccacuacgaggagugcagcugcuaccccgacuccagcgagaucacgugcgugugccgggacaacuggcacggcuccaaccgccccugggugagcuucaaccagaaccuggaguaccagaucggguacaucugcuccggcaucuucggggacaacccgcggcccaacgacaagaccggcagcugcggccccgucuccagcaacggggccaacggcgugaagggguucagcuucaaguacggcaacgggguguggaucggccgcaccaaguccaucaucagccggaagggcuucgagaugaucugggaccccaacggguggaccggcaccgacaacaacuucuccaucaagcaggacaucgucgggaucaacgaguggagcggcuacuccgggagcuucgugcagcacccggagcucacgggccuggacugcauccgccccugcuucuggguggagcugauccggggccgccccaaggagaacaccaucuggaccuccgggagcuccaucagcuucugcggcgucaacuccgacaccgugggguggagcuggcccgacggcgccgagcucccguucacgaucgacaaguga

SEQ ID NO: 84618 - RNA, 1410 nt, Artificial Sequence; identical to SEQ ID NO: 84281
  derived and/or modified CDS sequence (opt1) from neuraminidase__InfluenzaA__AEB21360

SEQ ID NO: 84619 - RNA, 1410 nt, Artificial Sequence; identical to SEQ ID NO: 81629
  derived and/or modified CDS sequence (opt1) from neuraminidase__InfluenzaA__AEB40209

SEQ ID NO: 84620 - RNA, 1410 nt, Artificial Sequence; identical to SEQ ID NO: 80623
  derived and/or modified CDS sequence (opt1) from neuraminidase__InfluenzaA__AEB66898

SEQ ID NO: 84621 - RNA, 1413 nt, Artificial Sequence
  derived and/or modified CDS sequence (opt1) from neuraminidase__InfluenzaA__AEB71103
augaaccccaaccagaagaucaucaccaucggcagcgugucccuggggcucgucguguucaacgugcugcugcacgucgugagcaucaucgugaccgucguggugcucggcaacgacgggggcaacgggaucugcaacggcacggucgugaaggaguacaacgagaccgugcgcaucgagcgggucauccaguggcacaacaccuccgugguggaguacaucccguaccugaacggcgggaccuacacgaacaacaccgagagcgucugcgacgugaagggcuucgcccccuucuccaaggacaacggggugcgcaucggcagccgggggcacgucuucgugauccgcgagcccuucguguccugcagcccccgggagugccgcaccuucuuccugacccagggcucccuccugaacgacaagcacagcaacggcacggucaaggaccgguccccguucaagacccugaugagcguggagguggggcagucccccaacgucuaccaggcccgcuucgaggcgguggccuggagcgccaccgccugccacgacggcaagaaguggaugaccaucggggucacgggccccgacuccaaggccguggcggugguccacuacggcggggugcccaccgacaucaucaacagcugggccggcgacauccuccggacccaggaguccagcugcacgugcauccagggggacugcuacugggugaugaccgacggcccggccaaccgccaggcccaguaccggaucuacaaguccaaccaggggaagaucaucggccagauggacaucaacuucaacggcgggcacaucgaggagugcagcugcuaccccaacgacggcaaggucgagugcgugugccgcgacaacuggaccgggaccaaccggcccgugcuggucaucagccccgaccuguccuacaaggugggcuaccucugcgcggggcugccgagcgacacgccccgcggcgaggacgcccaguucuccggcagcugcaccucccccgucgggggccagggguacggcgugaagggguucggcuuccggcagggcaacgacguguggauggggcgcaccaucagccggaccucccgcagcggcuucgaggugauccgggucaagaacggguggacccagacguccaaggagcagauccgcaagcaggucgugguggacaaccugaacuggagcggcuacuccggcagcuucacccuccccaucgagcuguccggcaagagcugccuggugccgugcuucuggguggagaccauccgggggaagcccgaggagaagaccaucuggacguccagcuccagcaucgucaugugcgggguggacuacgagguggccgacugguccuggcacgacggcgccauccuccccuucgacaucgacaagauguga

SEQ ID NO: 84622 - RNA, 1413 nt, Artificial Sequence; identical to SEQ ID NO: 82954
  derived and/or modified CDS sequence (opt1) from neuraminidase__InfluenzaA__AEB71899

SEQ ID NO: 84623 - RNA, 1410 nt, Artificial Sequence
  derived and/or modified CDS sequence (opt1) from neuraminidase__InfluenzaA__AEB71910
augaaccccaaccagaagaucaucaccaucggcagcgugugcaugaccaucgggauggccaaccugauccuccagaucggcaacaucaucuccaucuggaucagccacuccauccagcuggggaaccagaaccagaucgagacgugcaaccagagcgucaucaccuacgagaacaacaccugggugaaccagaccuacgugaacaucuccaacacguacuucgccgcgggccagagcgucguguccgugaagcuggccgggaacagcucccucugcccggucagcggcugggccaucuacuccaaggacaacagcauccgcaucggcuccaagggggacguguucgugauccgggagcccuucaucagcugcagcccccuggagugccgcaccuucuuccugacccagggcgcccuccugaacgacaagcacuccaacgggaccaucaaggaccggucccccuaccgcacgcugaugagcugcccgaucggcgagguccccucccccuacaacagccgguucgagagcguggccugguccgcgagcgccugccacgacgggaucaacuggcucaccaucggcaucuccggccccgacaacggggccguggccguccugaaguacaacggcaucaucaccgacaccaucaagagcuggcgcaacaacauccugcggacgcaggaguccgagugcgcgugcgugaacgggagcugcuucaccgugaugaccgacggcccguccgacggccaggccagcuacaagaucuuccgcaucgagaaggggaagaucgucaaguccguggagaugaacgcccccaacuaccacuacgaggagugcagcugcuaccccgacuccagcgagaucacgugcgugugccgggacaacuggcacggcuccaaccgccccugggucagcuucaaccagaaccucgaguaccagaucggguacaucugcuccggcaucuucggggacaacccgcggcccaacgacaagaccggcagcugcggccccguguccagcaacggggccaacggcgugaagggguucuccuucaaguacggcaacggggucuggaucggccgcaccaagagcaucagcucccggaacggcuucgagaugaucugggaccccaacggguggaccggcaccgacaacaacuucagcaucaagcaggacaucguggggaucaacgagugguccggcuacagcggguccuucgugcagcacccggagcugacgggccuggacugcauccgccccugcuucugggucgagcucauccggggccgccccaaggagaacaccaucuggaccagcggguccagcaucuccuucugcggcgugaacagcgacaccgucgggugguccuggcccgacggcgccgagcugccguucacgaucgacaaguga

SEQ ID NO: 84624 - RNA, 1410 nt, Artificial Sequence; identical to SEQ ID NO: 80762
  derived and/or modified CDS sequence (opt1) from neuraminidase__InfluenzaA__AEB71919

SEQ ID NO: 84625 - RNA, 1410 nt, Artificial Sequence; identical to SEQ ID NO: 82508
  derived and/or modified CDS sequence (opt1) from neuraminidase__InfluenzaA__AEB71928

SEQ ID NO: 84626 - RNA, 1410 nt, Artificial Sequence
  derived and/or modified CDS sequence (opt1) from neuraminidase__InfluenzaA__AEB71939
augaaccccaaccagaagaucaucaccaucggcagcgugucccugaccaucagcgccaucugcuucuucaugcagaucgccauccucaucacgaccgucacccugcacuucaagcaguacgaguucaacuccccgcccaacaaccaggugaugcugugcgagcccaccaucaucgagcgcaacaucacggagaucguguaccucaccaacaccaccaucgagaaggagaucugccccaagcuggcggaguaccggaacuggagcaagccgcagugcgacaucacgggguucgcccccuucuccaaggacaacagcauccgccuguccgccggcggggacaucugggucacccgggagcccuacgugagcugcgaccccgacaagugcuaccaguucgcccucggccaggggaccacccugaacaacgugcacuccaacaacacgguccgcgaccggaccccguaccgcacccugcucaugaacgagcugggcgugcccuuccaccugggcaccaagcaggucugcaucgccuggagcuccagcuccugccacgacgggaaggcguggcuccacgugugcaucacgggcgacgacaagaacgccaccgccagcuucaucuacaacgggcggcugguggacuccguggucagcugguccaaggagauccugcgcacccaggagagcgagugcgugugcaucaacgggaccugcacgguggucaugaccgacggguccgccagcggcaaggcggacaccaagauccucuucaucgaggagggcaagaucgugcacaccagcacgcuguccgggagcgcccagcacguggaggagugcuccugcuacccccgguaccccggcguccgcugcgugugccgggacaacuggaaggggagcaaccgcccgaucguggacaucaacaucaaggaccacuccaucgucagcuccuacgugugcagcggccuggugggcgacacgccccggaagaacgacuccagcuccagcucccacugccucgaccccaacaacgaggagggcggccacggggucaagggcugggccuucgacgacgggaacgacguguggaugggccgcaccaucagcgagaagucccggcugggcuacgagaccuucaaggucaucgagggguggagcaaccacaaguccaagcugcagaucaaccgccaggugaucguggaccggggcaaccgcagcggguacuccggcaucuucagcgucgagggcaagagcugcaucaaccggugcuucuacguggagcucauccgcgggcggaaggaggagaccgaggugcuguggaccuccaacagcaucgucguguucugcggcaccuccgggaccuacggcacggggagcuggcccgacggcgccgaccugaaccucaugccgaucuga

SEQ ID NO: 84627 - RNA, 1410 nt, Artificial Sequence
  derived and/or modified CDS sequence (opt1) from neuraminidase__InfluenzaA__AEB71950
augaaccccaaccagaagaucaucaccaucggcagcgugucccugaccaucagcacgaucugcuucuucaugcagaucgccauccucaucaccaccgucacccugcacuucaagcaguacgaguucaacuccccgcccaacaaccaggugaugcugugcgagcccacgaucaucgagcgcaacaucaccgagaucguguaccucaccaacaccacgaucgagaaggagaucugccccaagcuggccgaguaccggaacuggagcaagccgcagugcgacaucaccggguucgcgcccuucuccaaggacaacagcauccgccuguccgccggcggggacaucugggucacccgggagcccuacgugagcugcgaccccgacaagugcuaccaguucgcccucggccaggggaccacgcugaacaacgugcacuccaacaacaccguccgcgaccggaccccguaccgcacccugcucaugaacgagcugggcgugcccuuccaccugggcacgaagcaggucugcaucgccuggagcuccagcuccugccacgacgggaaggccuggcuccacgugugcaucaccggcgacgacaagaacgcgaccgccagcuucaucuacaacgggcggcugguggacuccguggucagcugguccaaggagauccugcgcacccaggagagcgagugcgugugcaucaacggcacgugcaccguggucaugaccgacggguccgccagcggcaaggccgacaccaagauccucuucaucgaggagggcaagaucgugcacacgagcacccuguccgggagcgcgcagcacguggaggagugcuccugcuacccccgguaccccggcguccgcugcgugugccgggacaacuggaaggggagcaaccgcccgaucguggacaucaacaucaaggaccacuccaucgucagcuccuacgugugcagcggccuggugggcgacacgccccggaagaacgacuccagcuccagcucccacugccucgaccccaacaacgaggagggggaccacggcgucaaggggugggccuucgacgacggcaacgacguguggauggggcgcaccaucagcgagaagucccggcugggcuacgagaccuucaaggucaucgagggcuggagcaaccacaaguccaagcugcagaucaaccgccaggugaucguggaccgggggaaccgcagcggcuacuccgggaucuucagcgucgagggcaagagcugcaucaaccggugcuucuacguggagcucauccgcgggcggaaggaggagaccgaggugcuguggaccuccaacagcaucgucguguucugcggcaccuccggcacguacgggaccggcagcuggcccgacggggccgaccugaaccucaugccgaucuga

SEQ ID NO: 84628 - RNA, 1413 nt, Artificial Sequence; identical to SEQ ID NO: 83961
  derived and/or modified CDS sequence (opt1) from neuraminidase__InfluenzaA__AEB71961

SEQ ID NO: 84629 - RNA, 1410 nt, Artificial Sequence
  derived and/or modified CDS sequence (opt1) from neuraminidase__InfluenzaA__AEB71972
augaaccccaaccagaagaucaucaccaucggcagcgugucccugaccaucagcacgaucugcuucuucaugcagaucgccauccucaucaccaccgucacccugcacuucaagcaguacgaguucaacuccccgcccaacaaccaggugaugcugugcgagcccacgaucaucgagcgcaacaucaccgagaucguguaccucaccaacaccacgaucgucaaggagaucugccccaagcuggccgaguaccggaacuggagcaagccgcagugcgacaucaccggguucgcgcccuucuccaaggacaacagcauccgccuguccgccggcggggacaucugggugacccgggagcccuacgugagcugcgaccccgacaagugcuaccaguucgcccucggccaggggaccacgcugaacaacguccacuccaacaacaccgugcgcgaccggaccccguaccgcacccugcucaugaacgagcugggcgugcccuuccaccugggcacgaagcaggucugcaucgccuggagcuccagcuccugccacgacgggaaggccuggcuccacgugugcaucaccggcgacgacaagaacgcgaccgccagcuucaucuacaacgggcggcugguggacuccgucgugagcugguccaaggagauccugcgcacccaggagagcgagugcgugugcaucaacggcacgugcaccgucgugaugaccgacggguccgccagcggcaaggccgacaccaagauccucuucaucgaggagggcaagaucgugcacacgagcacccuguccgggagcgcgcagcacgucgaggagugcuccugcuacccccgguaccccggcgugcgcugcgugugccgggacaacuggaaggggagcaaccgcccgaucgucgacaucaacaucaaggaccacuccaucgugagcuccuacgugugcagcggccuggucggcgacacgccccggaagaacgacuccagcuccagcucccacugccucgaccccaacaacgaggagggcgggcacggggugaagggcugggccuucgacgacgggaacgacgucuggaugggccgcaccaucagcgagaagucccggcugggcuacgagaccuucaaggugaucgagggguggagcaaccccaaguccaagcugcagaucaaccgccaggugaucgucgaccggggcaaccgcagcggguacuccggcaucuucagcguggagggcaagagcugcaucaaccggugcuucuacguggagcucauccgcgggcggaaggaggagaccgagguccuguggaccuccaacagcaucgugguguucugcggcaccuccgggacguacggcaccgggagcuggccggacggcgccgacaucaaccugaugcccaucuga

SEQ ID NO: 84630 - RNA, 1410 nt, Artificial Sequence
  derived and/or modified CDS sequence (opt1) from neuraminidase__InfluenzaA__AEB71983
augaaccccaaccagaagaucaucaccaucggcagcgugucccugaccaucagcacgaucugcuucuucaugcagaucgccauccucaucaccaccgucacccugcacuucaagcaguacgaguucaacuccccgcccaacaaccaggugaugcugugcgagcccacgaucaucgagcgcaacaucaccgagaucguguaccucaccaacaccacgaucgagaaggagaucugccccaagcuggccgaguaccggaacuggagcaagccgcagugcgacaucaccggguucgcgcccuucuccaaggacaacagcauccgccuguccgccggcggggacaucugggucacccgggagcccuacgugagcugcgaccccgacaagugcuaccaguucgcccucggccaggggaccacgcugaacaacgugcacuccaacaacaccguccgcgaccggaccccguaccgcacccugcucaugaacgagcugggcgugcccuuccaccugggcacgaagcaggucugcaucgccuggagcuccagcuccugccacgacgggaaggccuggcuccacgugugcaucaccggcgacgacaagaacgcgaccgccagcuucaucuacaacgggcggcugguggacuccguggucagcugguccaaggagauccugcgcacccaggagagcgagugcgugugcaucaacggcacgugcaccguggucaugaccgacggguccgccagcggcaaggccgacaccaagauccucuucaucgaggagggcaagaucgugcacacgagcacccuguccgggagcgcgcagcacguggaggagugcuccugcuacccccgguaccccggcguccgcugcgugugccgggacaacuggaaggggagcaaccgcccgaucguggacaucaacaugaaggaccacuccaucgucagcuccuacgugugcagcggccuggugggcgacacgccccggcgcaacgacuccagcuccagcucccacugccucgaccccaacaacgaggagggcgggcacggggucaagggcugggccuucgacgacgggaacgacguguggaugggccggaccaucagcgagaagucccgccugggcuacgagaccuucaaggucaucgagggguggagcaaccccaaguccaagcugcagaucaaccgccaggugaucguggaccggggcaaccggagcggguacuccggcaucuucagcgucgagggcaagagcugcaucaaccgcugcuucuacguggagcucauccgggggcgcaaggaggagaccgaggugcuguggaccuccaacagcaucgucguguucugcggcaccuccgggacguacggcaccgggagcuggccggacggcgccgacaucaaccugaugcccaucuga

SEQ ID NO: 84631 - RNA, 1413 nt, Artificial Sequence
  derived and/or modified CDS sequence (opt1) from neuraminidase__InfluenzaA__AEB71995
augaaccccaaccagaagaucaucaccaucggcagcaucuccaucgccaucgggaucaucagccugaugcuccagaucggcaacaucaucuccaucugggccagccacuccauccagaccgggagccagaacaacacgggcaucugcaaccagcgcaucaucaccuacgagaacuccaccugggugaaccacaccuacaucaacaucaacaacacgaacgucguggcgggggaggacaagaccagcgugacccuggccggcaacuccagccugugcuccaucagcggcugggccaucuacaccaaggacaacuccauccggaucgggagcaagggcgacgucuucgugauccgcgagccguucaucuccugcagccaccucgagugccggacguucuuccugacccagggggcccugcucaacgacaagcacuccaacggcaccgugaaggaccgcagccccuaccgggcccugauguccugcccccugggggaggcgcccagcccguacaacagcaaguucgaguccgucgccuggagcgccuccgccugccacgacggcaugggcuggcucaccaucgggaucagcggccccgacaacggggcgguggccgugcugaaguacaacggcaucaucacgggcaccaucaaguccuggaagaagcagauccugcgcacccaggagagcgagugcgucugcaugaacggguccugcuucaccaucaugacggacggccccagcaacaaggccgccuccuacaagaucuucaagaucgagaaggggaaggugaccaagagcaucgagcucaacgcccccaacuucuacuacgaggagugcuccugcuacccggacaccggcaucgugaugugcgucugccgggacaacuggcacgggagcaaccgccccuggguguccuucaaccagaaccuggacuaccagaucggcuacaucugcagcggcguguucggggacaacccccggcccgaggacggcgagggguccugcaacccggucaccgugaacggcgcggacggggugaagggcuucagcuacaaguacggcaacggggucuggaucggccgcacgaaguccaaccggcugcgcaagggguucgagaugaucugggaccccaacggcuggaccaacaccgacagcgacuucuccgugaagcaggacguggucgccaucaccgacuggagcggguacagcggcuccuucgugcagcaccccgagcucacgggccuggagugcauccggcccugcuucuggguggagcugguccgcgggcucccgcgggagaacaccaccaucuggaccagcggcuccagcaucuccuucugcggggugaacagcgacacggccaacugguccuggcccgacggcgccgagcugcccuucaccaucgacaaguga

SEQ ID NO: 84632 - RNA, 1413 nt, Artificial Sequence; identical to SEQ ID NO: 84229
  derived and/or modified CDS sequence (opt1) from neuraminidase__InfluenzaA__AEC13316

SEQ ID NO: 84633 - RNA, 1410 nt, Artificial Sequence; identical to SEQ ID NO: 80762
  derived and/or modified CDS sequence (opt1) from neuraminidase__InfluenzaA__AEC53262

SEQ ID NO: 84634 - RNA, 1410 nt, Artificial Sequence; identical to SEQ ID NO: 80762
  derived and/or modified CDS sequence (opt1) from neuraminidase__InfluenzaA__AEC53272

SEQ ID NO: 84635 - RNA, 1410 nt, Artificial Sequence; identical to SEQ ID NO: 80762
  derived and/or modified CDS sequence (opt1) from neuraminidase__InfluenzaA__AEC53282

SEQ ID NO: 84636 - RNA, 1410 nt, Artificial Sequence; identical to SEQ ID NO: 80762
  derived and/or modified CDS sequence (opt1) from neuraminidase__InfluenzaA__AEC53292

SEQ ID NO: 84637 - RNA, 1410 nt, Artificial Sequence
  derived and/or modified CDS sequence (opt1) from neuraminidase__InfluenzaA__AEC53302
augaaccccaaccagaagaucaucaccaucggcagcgugugcaugaccaucgggauggccaaccugauccuccagaucggcaacaucaucuccaucuggaucagccacuccauccagcuggggaaccagaaccagaucgagacgugcaaccagagcgucaucaccuacgagaacaacaccugggugaaccagaccuacgugaacaucuccaacacgaacuucgccgcgggccagagcgucguguccgugaagcuggccgggaacagcucccucugcccggucagcggcugggccaucuacuccaaggacaacagcauccgcaucggcuccaagggggacguguucgugauccgggagcccuucaucagcugcagcccccuggagugccgcaccuucuuccugacccagggcgcccuccugaacgacaagcacuccaacgggaccaucaaggaccggucccccuaccgcacgcugaugagcugcccgaucggcgagguccccucccccuacaacagccgguucgagagcguggccugguccgcgagcgccugccacgacgggaucaacuggcucaccaucggcaucuccggccccgacaacggggccguggccguccugaaguacaacggcaucaucaccgacaucaucaagagcuggcgcaacaacauccugcggacccaggaguccgagugcgcgugcgugaacgggagcugcuucacggugaugaccgacggcccguccgacggccaggccagcuacaagaucuuccgcaucgagaaggggaagaucgucaaguccguggagaugaacgcccccaacuaccacuacgaggagugcagcugcuaccccgacuccagcgagaucacgugcgugugccgggacaacuggcacggcuccaaccgccccugggucagcuucaaccagaaccucgaguaccagaucggguacaucugcuccggcaucuucggggacaacccgcggcccaacgacaagaccggcagcugcggccccguguccagcaacggggccaacggcgugaagggguucuccuucaaguacggcaacggggucuggaucggccgcaccaagagcaucagcucccggaacggcuucgagaugaucugggaccccaacggguggaccggcaccgacaacaacuucagcaucaagcaggacaucguggggaucaacgagugguccggcuacagcggguccuucgugcagcacccggagcugaccggccuggacugcauccgccccugcuucugggucgagcucauccggggccgccccaaggagaacacgaucuggaccagcggguccagcaucuccuucugcggcgugaacagcgacaccgucgggugguccuggcccgacggcgccgagcugccguucaccaucgacaaguga

SEQ ID NO: 84638 - RNA, 1410 nt, Artificial Sequence; identical to SEQ ID NO: 80762
  derived and/or modified CDS sequence (opt1) from neuraminidase__InfluenzaA__AEC53350

SEQ ID NO: 84639 - RNA, 1410 nt, Artificial Sequence; identical to SEQ ID NO: 81470
  derived and/or modified CDS sequence (opt1) from neuraminidase__InfluenzaA__AEC53407

SEQ ID NO: 84640 - RNA, 1410 nt, Artificial Sequence; identical to SEQ ID NO: 80762
  derived and/or modified CDS sequence (opt1) from neuraminidase__InfluenzaA__AEC53427

SEQ ID NO: 84641 - RNA, 1410 nt, Artificial Sequence; identical to SEQ ID NO: 81588
  derived and/or modified CDS sequence (opt1) from neuraminidase__InfluenzaA__AED99967

SEQ ID NO: 84642 - RNA, 1410 nt, Artificial Sequence; identical to SEQ ID NO: 80752
  derived and/or modified CDS sequence (opt1) from neuraminidase__InfluenzaA__AEE27161

SEQ ID NO: 84643 - RNA, 1410 nt, Artificial Sequence; identical to SEQ ID NO: 80762
  derived and/or modified CDS sequence (opt1) from neuraminidase__InfluenzaA__AEE27170

SEQ ID NO: 84644 - RNA, 1410 nt, Artificial Sequence; identical to SEQ ID NO: 80752
  derived and/or modified CDS sequence (opt1) from neuraminidase__InfluenzaA__AEE27180

SEQ ID NO: 84645 - RNA, 1410 nt, Artificial Sequence
  derived and/or modified CDS sequence (opt1) from neuraminidase__InfluenzaA__AEE27190
augaaccccaaccagaagaucaucaccaucggcagcgugugcaugaccaucgggauggccaaccugauccuccagaucggcaacaucaucuccaucuggaucagccacuccauccagcuggggaaccagaaccagaucgagacgugcaaccagagcgucaucaccuacgagaacaacaccugggugaaccagaccuacgugaacaucuccaacacgaacuucgccgcgggccagagcgucguguccgugaagcuggccgggaacagcucccucugcccggucagcggcugggccaucuacuccaaggacaacagcgugcgcaucggcuccaagggggacguguucgucauccgggagcccuucaucagcugcagcccccuggagugccgcaccuucuuccugacccagggcgcccuccugaacgacaagcacuccaacgggaccaucaaggaccggucccccuaccgcacgcugaugagcugcccgaucggcgaggugcccucccccuacaacagccgguucgagagcguggccugguccgcgagcgccugccacgacgggaucaacuggcucaccaucggcaucuccggccccgacaacggggccgucgccgugcugaaguacaacggcgugaucaccgacaccaucaagagcuggcgcaacaacauccugcggacgcaggaguccgagugcgcgugcgucaacgggagcugcuucaccgugaugaccgacggcccguccaacggccaggccagcuacaagaucuucaagaucgagaaggggaagaucgugaaguccgucgagaugaacgcccccaacuaccacuacgaggagugcagcugcuaccccgacuccagcgagaucacgugcgugugccgcgacaacuggcacggcuccaaccggcccugggugagcuucaaccagaaccucgaguaccagaucggguacaucugcuccggcaucuucggggacaacccgcgccccaacgacaagaccggcagcugcggccccgucuccagcaacggggccaacggcgugaagggguucuccuucaaguacggcaacgggguguggaucggccggaccaagagcaucagcucccgcaacggcuucgagaugaucugggaccccaacggguggaccggcaccgacaacaacuucagcaucaagcaggacaucgucgggaucaacgagugguccggcuacagcggguccuucgugcagcacccggagcugacgggccuggacugcauccggcccugcuucugggucgagcucauccgcggccggcccaaggagaacaccaucuggaccagcggguccagcaucuccuucugcggcgugaacagcgacaccguggggugguccuggcccgacggcgccgagcugccguucacgaucgacaaguga

SEQ ID NO: 84646 - RNA, 1410 nt, Artificial Sequence; identical to SEQ ID NO: 81985
  derived and/or modified CDS sequence (opt1) from neuraminidase__InfluenzaA__AEE27200

SEQ ID NO: 84647 - RNA, 1410 nt, Artificial Sequence; identical to SEQ ID NO: 83821
  derived and/or modified CDS sequence (opt1) from neuraminidase__InfluenzaA__AEG64755

SEQ ID NO: 84648 - RNA, 1362 nt, Artificial Sequence
  derived and/or modified CDS sequence (opt1) from neuraminidase__InfluenzaA__AEG64765
augaaccccaaccagaagaucaucaccaucggcagcaucugcaugguggucgggaucaucucccugauccuccagaucggcaacaucaucagcaucuggaucucccacagcauccagaccgggaaccagaaccacacgggcaucugcaaccaggggaucaucaccuacaacgugguggccggccaggacuccaccagcgucauccugaccggcaacuccagccugugcccgauccgcgggugggccauccacuccaaggacaacggcauccggaucgggagcaagggcgacguguucgugauccgcgagcccuucaucuccugcagccaccucgagugccggacguucuuccugacccagggggcgcugcucaacgacaagcacuccaacggcaccgucaaggaccgcagccccuaccgggcccugauguccugccccgugggcgaggccccgagccccuacaacucccgcuucgagagcguggccugguccgccagcgcgugccacgacgggaugggcuggcugaccaucgggaucagcggccccgacaacggcgccgucgccgugcucaaguacaacgggaucaucacggagaccaucaaguccuggcggaagaagauccugcgcacccaggagagcgagugcacgugcgugaacggcuccugcuucaccaucaugaccgacgggcccagcgacggccuggccuccuacaagaucuucaagaucgagaaggggaaggucaccaagagcaucgagcucaacgcgccgaacucccacuacgaggagugcagcugcuaccccgacaccggcaaggugaugugcgugugccgggacaacuggcacggcuccaaccgccccugggucagcuucgaccagaaccuggacuaccagaucggguacaucugcuccggcguguucggggacaacccccggccgaaggacggcacggggagcugcggccccguguccgccgacggcgccaacggggucaagggcuucagcuaccgcuacgggaacggcguguggaucgggcggaccaaguccgacagcucccgccacggcuucgagaugaucugggaccccaacggcuggaccgagaccgacagccgguucuccgugcgccaggacgucguggccaugacggaccggagcggguacagcggcuccuucgugcagcaccccgagcugaccgggcucgacugcaugcgcccgugcuucugggucgagcugauccggggccgccccgaggagaagaccaucuggaccagcggcuccaucaucagcuucugcggggugaacuccgacacggucgacuggagcuggcccgacggcgccgagcugcccuucaccaucgacaaguga

SEQ ID NO: 84649 - RNA, 1410 nt, Artificial Sequence
  derived and/or modified CDS sequence (opt1) from neuraminidase__InfluenzaA__AEG64787
augaaccccaaccagaagaucaucaccaucggcagcgugugcaugaccaucgggauggccaaccugauccuccagaucggcaacaucaucuccaucuggaucagccacuccauccagcuggggaaccagaaccagaucgagacgugcaaccagagcgucaucaccuacgagaacaacaccugggugaaccagaccuacgugaacaucuccaacacgaacuucgccgcgggccagagcgucguguccgugaagcuggccgggaacagcucccucugcccggucagcggcugggccaucuacuccaaggacaacagcauccgcaucggcuccaagggggacguguucgugauccgggagcccuucaucagcugcagcccccuggagugccgcaccuucuuccugacccagggcgcccuccugaacgacaagcacuccaacgggaccaucaaggaccggucccccuaccgcacgcugaugagcugcccgaucggcgagguccccucccccuacaacagccgguucgagagcguggccugguccgcgagcgccugccacgacgggaucaacuggcucaccaucggcaucuccggccccgacaacggggccguggccguccugaaguacaacggcaucaucaccgacaccaucaagagcuggcgcaacaaccggcugcgcacgcaggaguccgagugcgcgugcgugaacgggagcugcuucaccgugaugaccgacggcccguccgacggccaggccagcuacaagaucuuccggaucgagaaggggaagaucgucaaguccguggagaugaacgcccccaacuaccacuacgaggagugcagcugcuaccccgacuccagcgagaucacgugcgugugccgcgacaacuggcacggcuccaaccggcccugggucagcuucaaccagaaccucgaguaccagaucggguacaucugcuccggcaucuucggggacaacccgcgccccaacgacaagaccggcagcugcggccccguguccagcaacggggccaacggcgugaagggguucuccuucaaguacggcaacggggucuggaucggccggaccaagagcaucagcucccgcaacggcuucgagaugaucugggaccccaacggguggaccggcaccgacaacgacuucagcaucaagcaggacaucguggggaucaacgagugguccggcuacagcggguccuucgugcagcacccggagcugacgggccuggacugcauccggcccugcuucugggucgagcucauccgcggccggcccaaggagaacaccaucuggaccagcggguccagcaucuccuucugcggcgugaacagcgacaccgucgggugguccuggcccgacggcgccgagcugccguucacgaucgacaaguga

SEQ ID NO: 84650 - RNA, 1410 nt, Artificial Sequence
  derived and/or modified CDS sequence (opt1) from neuraminidase__InfluenzaA__AEG64837
augaaccccaaccagaagaucaucaccaucggcagcgugucccugaccaucagcacgaucugcuucuucaugcagaucgccauccucaucaccaccgucacccugcacuucaagcaguacgaguucaacuccccgcccaacaaccaggugaugcugugcgagcccacgaucaucgagcgcaacaucaccgagaucguguaccucaccaacaccacgaucgagaaggagaucugccccaagcuggccgaguaccggaacuggagcaagccgcagugcgacaucaccggguucgcgcccuucuccaaggacaacagcauccgccuguccgccggcggggacaucugggucacccgggagcccuacgugagcugcgaccccgacaagugcuaccaguucgcccucggccaggggaccacgcugaacaacgugcacuccaacaacaccguccgcgaccggaccccguaccgcacccugcucaugaacgagcugggcgugcccuuccaccugggcacgaagcaggucugcaucgccuggagcuccagcuccugccacgacgggaaggccuggcuccacgugugcaucaccggcgacgacaagaacgcgaccgccagccugaucuacaacgggcggcugguggacuccguggucagcugguccaaggagauccuccgcacccaggagagcgagugcgugugcaucaacggcacgugcaccguggucaugaccgacggguccgccagcggcaaggccgacaccaagauccuguucaucgaggagggcaagaucgugcacacgagcacccuguccgggagcgcgcagcacguggaggagugcuccugcuacccccgguaccccggcguccgcugcgugugccgggacaacuggaaggggagcaaccgcccgaucguggacaucaacaucaaggaccacuccaucgucagcuccuacgugugcagcggccucgugggcgacacgccccggaagaacgacuccagcuccagcucccacugccuggaccccaacaacgaggagggcgggcacggggucaagggcugggccuucgacgacgggaacgacguguggaugggccgcaccaucaacgagaccagccggcugggcuacgagaccuucaaggucaucgaggggugguccaaccccaagagcaagcuccagaucaaccgccaggugaucguggaccggggcaaccgcuccggguacagcggcaucuucuccgucgagggcaagagcugcaucaaccggugcuucuacguggagcugauccgcgggcggaaggaggagaccgaggugcuguggaccagcaacuccaucgucguguucugcggcacgagcgggaccuacggcaccggguccuggccggacggcgccgaccucaaccugaugcccaucuga

SEQ ID NO: 84651 - RNA, 1410 nt, Artificial Sequence
  derived and/or modified CDS sequence (opt1) from neuraminidase__InfluenzaA__AEG64848
augaaccccaaccagaagaucaucaccaucggcagcgugucccugaccaucagcacgaucugcuucuucaugcagaucgccauccucaucaccaccgucacccugcacuucaagcaguacgaguucuacuccccgcccaacaaccaggugaugcugugcgagcccacgaucaucgagcgcaacaucaccgagaucguguaccucaccaacaccacgaucgagaaggagaucugccccaagcuggccgaguaccggaacuggcugaagccgcagugcgacaucaccggguucgcgcccuucagcaaggacaacuccauccgccucagcgccggcggggacaucugggucacccgggagcccuacguguccugcgaccccgacaagugcuaccaguucgcccugggccaggggaccacgcugaacaacgugcacagcaacaacaccguccgcgaccggaccccguaccgcacccuccugaugaacgagcugggcgugcccuuccaccucggcacgaagcaggucugcaucgccugguccagcuccagcugccacgacgggaaggccuggcugcacgugugcaucaccggcgacgacaagaacgcgaccgccuccuucaucuacaacgggcggcugguggacagcguggucuccuggagcaaggagauccuccgcacccaggaguccgagugcgugugcaucaacggcacgugcaccguggucaugaccgacgggagcgccuccggcaaggccgacaccaagauccuguucaucgaggagggcaagaucgugcacacgagcacccugagcggguccgcgcagcacguggaggagugcagcugcuacccccgguaccccggcguccgcugcgugugccgggacaacuggaagggguccaaccgcccgaucguggacaucaacaucaaggaccacagcaucgucuccagcuacgugugcuccggccucgugggcgacacgccccggaagaacgacagcuccagcuccagccacugccuggaccccaacaacgaggagggcgggcacggggucaagggcugggccuucgacgacgggaacgacguguggaugggccgcaccaucaacgagaccucccggcugggcuacgagaccuucaaggucaucgagggguggagcaaccccaaguccaagcuccagaucaacaagcaggucaucguggaccgcggcaaccggagcggguacuccggcaucuucagcguggaggggaaguccugcaucaaccgcugcuucuacguggagcugauccggggccgcaaggaggagaccgaggugcuguggaccagcaacagcaucgucguguucugcggcacguccgggaccuacggcaccgggagcuggccggacggcgccgaccucaaccugaugcccaucuga

SEQ ID NO: 84652 - RNA, 1410 nt, Artificial Sequence; identical to SEQ ID NO: 78257
  derived and/or modified CDS sequence (opt1) from neuraminidase__InfluenzaA__AEG64859

SEQ ID NO: 84653 - RNA, 1410 nt, Artificial Sequence; identical to SEQ ID NO: 78085
  derived and/or modified CDS sequence (opt1) from neuraminidase__InfluenzaA__AEG64870

SEQ ID NO: 84654 - RNA, 1410 nt, Artificial Sequence; identical to SEQ ID NO: 78277
  derived and/or modified CDS sequence (opt1) from neuraminidase__InfluenzaA__AEG64881

SEQ ID NO: 84655 - RNA, 1410 nt, Artificial Sequence; identical to SEQ ID NO: 78085
  derived and/or modified CDS sequence (opt1) from neuraminidase__InfluenzaA__AEG64892

SEQ ID NO: 84656 - RNA, 1410 nt, Artificial Sequence; identical to SEQ ID NO: 78161
  derived and/or modified CDS sequence (opt1) from neuraminidase__InfluenzaA__AEG64914

SEQ ID NO: 84657 - RNA, 1410 nt, Artificial Sequence; identical to SEQ ID NO: 78161
  derived and/or modified CDS sequence (opt1) from neuraminidase__InfluenzaA__AEG64925

SEQ ID NO: 84658 - RNA, 1410 nt, Artificial Sequence
  derived and/or modified CDS sequence (opt1) from neuraminidase__InfluenzaA__AEG64936
augaaccccaaccagaagaucaucaccaucggcagcgugucccugaccaucgccacgaucugcuuccucaugcagaucgccauccuggucaccaccgugacccugcacuucaagcagcacgagugcaacagcccgcccaacaaccaggugaugcucugcgagcccacgaucaucgagcgcaacaucaccgagaucgucuaccugaccaacaccacgaucgagaaggagaucugccccaagcuggcggaguaccggaacugguccaagccgcagugcaacaucaccggguucgcccccuucagcaaggacaacuccauccgccucagcgccggcggggacaucugggugacccgggagcccuacguguccugcgaccccgacaagugcuaccaguucgcccugggccaggggaccacgcugaacaacggccacagcaacgacaccguccacgaccgcaccccguaccggacccuccugaugaacgagcugggcgugcccuuccaccucgggacgcgccaggugugcaucgccugguccagcuccagcugccacgacggcaaggcguggcugcacgucugcgugaccggggaggacaagaacgccaccgccuccuucaucuacaacggccggcugguggacagcaucggguccuggagcaagaagauccuccgcacccaggaguccgagugcgucugcaucaacggcacgugcaccguggugaugaccgacggcagcgccuccgggaaggcggacaccaagauccuguucaucgaggagggcaagaucguccacaucagcacgcugagcggguccgcccagcacguggaggagugcagcugcuacccccgguaccccggcgugcgcugcgucugccgggacaacuggaagggcuccaaccgcccgaucguggacaucaacgugaaggacuacagcaucgucuccagcuacgugugcuccgggcucgugggcgacacgccccggaagaacgacagcuccagcuccagccacugccuggaccccaacaacgaggagggcgggcacggggucaagggcugggccuucgacgacggcaacgacguguggauggggcgcaccaucuccgagaagcugcggagcggcuacgagaccuucaaggucaucgaggggugguccaagcccaacagcaagcuccagaucaaccgccaggugaucguggagcggggcaaccgcuccggguacagcggcaucuucuccgucgagggcaagagcugcaucaaccggugcuucuacguggagcugauccgcgggcggaaggaggagaccgaggugugguggaccagcaacuccaucgucguguucugcggcaccagcgggaccuacggcacgggguccuggccggacggcgccgacaucaaccugaugcccaucuga

SEQ ID NO: 84659 - RNA, 1410 nt, Artificial Sequence; identical to SEQ ID NO: 78174
  derived and/or modified CDS sequence (opt1) from neuraminidase__InfluenzaA__AEG64947

SEQ ID NO: 84660 - RNA, 1410 nt, Artificial Sequence; identical to SEQ ID NO: 78161
  derived and/or modified CDS sequence (opt1) from neuraminidase__InfluenzaA__AEG64958

SEQ ID NO: 84661 - RNA, 1410 nt, Artificial Sequence; identical to SEQ ID NO: 78161
  derived and/or modified CDS sequence (opt1) from neuraminidase__InfluenzaA__AEG64969

SEQ ID NO: 84662 - RNA, 1410 nt, Artificial Sequence; identical to SEQ ID NO: 78161
  derived and/or modified CDS sequence (opt1) from neuraminidase__InfluenzaA__AEG64980

SEQ ID NO: 84663 - RNA, 1410 nt, Artificial Sequence
  derived and/or modified CDS sequence (opt1) from neuraminidase__InfluenzaA__AEG64991
augaaccccaaccagaagaucaucaccaucggcagcgugucccugaccaucagcacgaucugcuucuucaugcagaucgccauccucaucaccaccgucacccugcacuucaagcaguacgaguccaacagcccgcccaacaaccaggugaugcugugcgagcccacgaucaucgagcgcaacaucaccgagaucguguaccucaccaacaccacgaucgagaaggagaucugccccaagcuggccgaguaccggaacugguccaagccgcagugcaacaucaccggguucgcgcccuucagcaaggacaacuccauccgccugagcgccggcggggacaucugggucacccgggagcccuacguguccugcgaccccgacaagugcuaccaguucgcccucggccaggggaccacgcugaacaacgugcacagcaacgacaccguccacgaccgcaccccguaccggacccugcucaugaacgagcugggcgugcccuuccaccugggcacgaagcaggucugcaucgccugguccagcuccagcugccacgacgggaaggccuggcuccacgugugcgugaccggcgacgacaagaacgcgaccgccuccuucaucuacaacgggcgccugguggacagcaucgucuccuggagcaaggagauccugcggacccaggaguccgagugcgugugcaucaacggcacgugcaccguggucaugaccgacgggagcgccagcggcaaggccgacaccaagauccucuucaucgaggagggcaagaucgugcacacguccacccugagcggguccgcgcagcacguggaggagugcagcugcuacccccgcuaccccggcguccggugcgugugccgcgacaacuggaagggguccaaccggccgaucguggacaucaacaucaaggacuacagcaucgucuccagcuacgugugcuccggccuggugggcgacacgccccgcaagaacgacagcuccagcuccagccacugccucgaccccaacaacgaggagggcgggcacggggucaagggcugggccuucgacgacgggaacgacguguggaugggccggaccaucuccgagaagcugcgcagcggcuacgagaccuucaaggucaucgaggggugguccaaccccaacagcaagcugcagaccaaccgccaggugaucguggaccggggcaaccgguccggguacagcggcaucuucagcgucgaggggaaguccugcaucaaccgcugcuucuacguggagcucauccggggccgcaaggaggagaccgaggugcuguggaccagcaacuccaucgucguguucugcggcacgagcgggaccuacggcaccggguccuggccggacggcgccgacaucaaccugaugcccaucuga

SEQ ID NO: 84664 - RNA, 1410 nt, Artificial Sequence; identical to SEQ ID NO: 78351
  derived and/or modified CDS sequence (opt1) from neuraminidase__InfluenzaA__AEG65002

SEQ ID NO: 84665 - RNA, 1410 nt, Artificial Sequence
  derived and/or modified CDS sequence (opt1) from neuraminidase__InfluenzaA__AEG65013
augaaccccaaccagaagaucaucaccaucggcagcgugucccugaccaucagcacgaucugcuucuucaugcagaucgccauccucaucaccaccgucacccugcacuucaagcaguacgaguucaacuccccgcccaacaaccaggugaugcugugcgagcccacgaucaucgagcgcaacaucaccgagaucguguaccucaccaacaccacgaucgagaaggagaucugccccaagcuggccgaguaccggaacuggagcaagccgcagugcgacaucaccggguucgcgcccuucuccaaggacaacagcauccgccuguccgccggcggggacaucugggucacccgggagcccuacgugagcugcgaccccgacaagugcuaccaguucgcccucggccaggggaccacgcugaacaacgugcacuccaacgacaccguccacgaccgcaccccguaccggacccugcucaugaacgagcugggcgugcccuuccaccugggcacgaagcaggucugcaucgccuggagcuccagcuccugccacgacgggaaggccuggcuccacgugugcgugaccggcgacgacaagaacgcgaccgccagcuucaucuacaacgggcgccugguggacuccaucgucagcugguccaaggacauccugcggacccaggagagcgagugcgugugcaucaacggcacgugcaccguggucaugaccgacggguccgccagcggcaaggccgacaccaagauccucuucaucgaggagggcaagaucgugcacacgagcacccuguccgggagcgcgcagcacguggaggagugcuccugcuacccccgcuaccccggcguccggugcgugugccgcgacaacuggaaggggagcaaccggccgaucguggacaucaacaucaaggacuacuccaucgucagcuccuacgugugcagcggccuggugggcgacacgccccgcaagaacgacuccagcuccagcucccacugccucgaccccaacaacgaggagggcgggcacggggucaagggcugggccuucgacgacgggaacgacguguggaugggccggaccaucagcgagaagcugcgccugggcuacgagaccuucaaggucaucgaggggugguccaaccccaacagcaagcuccagaccaaccgccaggugaucguggagcggggcaaccgguccggguacagcggcaucuucuccgucgagggcaagagcugcaucaaccgcugcuucuacguggagcugauccgggggcgcaaggaggagaccgaggugcuguggaccagcaacuccaucgucguguucugcggcacgagcgggaccuacggcaccggguccuggccggacggcgccgacaucaaccucaugcccaucuga

SEQ ID NO: 84666 - RNA, 1410 nt, Artificial Sequence
  derived and/or modified CDS sequence (opt1) from neuraminidase__InfluenzaA__AEG65024
augaaccccaaccagaagaucaucaccaucggcagcgugucccugaccaucagcacgaucugcuucuucaugcagaucgccauccucaucaccaccgucacccugcacuucaagcaguacgaguucaacuccccgcccaacaaccacgugaugcugugcgagcccacgaucaucgagcgcaacaucaccgagaucguguaccucaccaacaccacgaucgagaaggagaucugccccaagcuggccgaguaccggaacuggagcaagccgcagugcgacaucaccggguucgcgcccuucuccaaggacaacagcauccgccuguccgccggcggggacaucugggucacccgggagcccuacgugagcugcgaccccgacaagugcuaccaguucgcccucggccaggggaccacgcugaacaacgugcacuccaacgacaccguccacgaccgcaccccguaccggacccugcucaugaacgagcugggcgugcccuuccaccugggcacgaagcaggucugcaucgccuggagcuccagcuccugccacgacgggaaggccuggcuccacgugugcgugaccggcgacgacaagaacgcgaccgccagcuucaucuacaacgggcgccugguggacuccaucgucagcugguccaaggagauccugcggacccaggagagcgagugcgugugcaucaacggcacgugcaccguggucaugaccgacggguccgccagcggcaaggccgacaccaagauccucuucaucgaggagggcaagaucgugcacacgagcacccuguccgggagcgcgcagcacguggaggagugcuccugcuacccccgcuaccccggcguccggugcgugugccgcgacaacuggaaggggagcaaccggccgaucguggacaucaacaucaaggacuacuccaucgucagcuccuacgugugcagcggccuggugggcgacacgccccgcaagaacgacuccagcuccagcucccacugccucgaccccaacaacgaggagggcgggcacggggucaagggcugggccuucgacgacgggaacgacguguggaugggccggaccaucagcgagaagcugcgccugggcuacgagaccuucaaggucaucgaggggugguccaaccccaacagcaagcuccagaucaaccgccaggugaucguggaccggggcaaccgguccggguacagcggcaucuucuccgucgagggcaagagcugcaucaaccgcugcuucuacguggagcugauccgggggcgcaaggaggagaccgaggugcuguggaccagcaacuccaucgucguguucugcggcaccagcgggacguacggcaccggguccuggccggacggcgccgacaucaaccucaugcccaucuga

SEQ ID NO: 84667 - RNA, 1410 nt, Artificial Sequence
  derived and/or modified CDS sequence (opt1) from neuraminidase__InfluenzaA__AEG65035
augaaccccaaccagaagaucaucaccaucggcagcgugucccugaccaucagcacgaucugcuucuucaugcagaucgccauccucaucaccaccgucacccugcacuucaagcaguacgaguucaacuccccgcccaacaaccaggugaugcugugcgagcccacgaucaucgagcgcaacaucaccgagaucguguaccucaccaacaccacgaucgagaaggaggucugccccaagcuggccgaguaccggaacuggagcaagccgcagugcaacaucaccggguucgcgcccuucuccaaggacaacagcauccgccuguccgccggcggggacaucugggugacccgggagcccuacgugagcugcgaccucgacaagugcuaccaguucgcccugggccaggggaccacgcugaacaacguccacuccaacgacaccgugcacgaccgcacccccuaccggacccuccugaugaacgagcugggcgugccguuccaccucggcacgaagcaggucugcaucgccuggagcuccagcuccugccacgacgggaaggccuggcugcacgugugcgugaccggcgacgacaagaacgcgaccgccagcuucaucuacaacgggcgccuggucgacuccaucgugagcugguccaaggagauccuccggacccaggagagcgagugcgugugcaucaacggcacgugcaccgucgugaugaccgacggguccgccagcggcaaggccgacaccaagauccuguucaucgaggagggcaagaucgugcacacgagcacccuguccgggagcgcgcagcacgucgaggagugcuccugcuacccccgcuaccccggcgugcggugcgugugccgcgacaacuggaaggggagcaaccggcccaucgucgacaucaacaucaaggacuacuccaucgugagcuccuacgugugcagcggccucgucggcgacaccccgcgcaagaacgacuccagcuccagcucccacugccuggaccccaacaacgaggagggcgggcacggggugaagggcugggccuucgacgacgggaacgacgucuggaugggccggaccaucagcgagaagcugcgcuccggcuacgagacguucaaggugaucgagggguggagcaaccccaacuccaagcuccagaucaaccgccaggugaucgucgaccggggcaaccggagcggguacuccggcaucuucagcguggagggcaagagcugcaucaaccgcugcuucuacguggagcugauccgggggcgcaaggaggagaacgagguccuguggaccuccaacagcaucgugguguucugcggcaccuccgggaccuacggcacggggagcuggcccgacggcgccgacaucaaccucaugccgaucuga

SEQ ID NO: 84668 - RNA, 1410 nt, Artificial Sequence; identical to SEQ ID NO: 78736
  derived and/or modified CDS sequence (opt1) from neuraminidase__InfluenzaA__AEG65057

SEQ ID NO: 84669 - RNA, 1410 nt, Artificial Sequence; identical to SEQ ID NO: 79731
  derived and/or modified CDS sequence (opt1) from neuraminidase__InfluenzaA__AEG65068

SEQ ID NO: 84670 - RNA, 1410 nt, Artificial Sequence
  derived and/or modified CDS sequence (opt1) from neuraminidase__InfluenzaA__AEG65079
augaaccccaaccagaagaucaucaccaucggcagcgugucccugaccaucagcacgaucugcuucuucaugcagaucgccauccucaucaccaccgucacccugcacuucaagcaguacgaguucaacuccccgcccaacaaccaggugaugcugugcgagcccacgaucaucgagcgcaacaucaccgagaucguguaccucaccaacaccacgaucgagaaggagaucugccccaagcuggccgaguaccggaacuggagcaagccgcagugcaacaucaccggguucgcgcccuucuccaaggacaacagcauccgccuguccgccggcggggacaucugggucacccgggagcccuacgugagcugcgaccccgacaagugcuaccaguucgcccucggccaggggaccacgcugaacaacgugcacuccaacgacaccguccacgaccgcaccccguaccggacccugcucaugaacgagcugggcgugcccuuccaccugggcacgaagcaggucugcaucgccuggagcuccagcuccugccacgacgggaaggccuggcuccacgugugcgugaccggcgacgacaagaacgcgaccgccagcuucaucuacaacgggcgccugguggacuccaucgucagcugguccaaggagauccugcggacccaggagagcgagugcgugugcaucaacggcacgugcaccguggucaugaccgacggguccgccagcggcaaggccgacaccaagauccucuucaucgaggagggcaagaucgugcacacgagcacccuguccgggagcgcgaagcacguggaggagugcuccugcuacccccgcuaccccggcguccggugcgugugccgcgacaacuggaaggggagcaaccggccgaucguggacaucaacaucaaggacuacuccaucgucagcuccuacgugugcagcggccuggugggcgacacgccccgcaagaacgacuccagcuccagcgggcacugccucgaccccaacaacgaggagggcgggcacggcgucaaggggugggccuucgacgacggcaacgacguguggaugggccggaccaucuccgagaagcugcgcagcggguacgagaccuucaaggucaucgagggcugguccaaccccaacagcaagcugcagaucaaccgccaggugaucguggaccgggggaaccgguccggcuacagcgggaucuucuccgucgagggcaagagcugcaucaaccgcugcuucuacguggagcucauccggggccgcaaggaggagaccgaggugcuguggaccagcaacuccaucgucguguucugcgggaccagcggcacguacgggaccggcuccuggccggacggggccgacaucaaccugaugcccaucuga

SEQ ID NO: 84671 - RNA, 1410 nt, Artificial Sequence
  derived and/or modified CDS sequence (opt1) from neuraminidase__InfluenzaA__AEG65090
augaaccccaaccagaagaucaucaccaucggcagcgugucccugaccaucagcacgaucugcuucuucaugcagaucgccauccucaucaccaccgucacccugcacuucaagcaguacgaguucaacuccccgcccaacaaccaggugaugcugugcgagcccacgaucaucgagcgcaacaucaccgagaucguguaccucaccaacaccacgaucgagaaggagaucugccccaagcuggccgaguaccggaacuggagcaagccgcagugcaacaucaccggguucgcgcccuucuccaaggacaacagcauccgccuguccgccggcggggacaucugggucacccgggagcccuacgugagcugcgaccccgacaagugcuaccaguucgcccucggccaggggaccacgcugaacaacgugcacuccaacgacaccguccacgaccgcaccccguaccggacccugcucaugaacgagcugggcgugcccuuccaccugggcacgaagcaggucugcaucgccuggagcuccagcuccugccacgacgggaaggccuggcuccacgugugcgugaccggcgacgacaagaacgcgaccgccagcuucaucuacaacgggcgccugguggacuccaucgucagcugguccaaggagauccugcggacccaggagagcgagugcgugugcaucaacggcacgugcaccguggucaugaccgacggguccgccagcggcaaggccgacaccaagauccucuucaucgaggagggcaagaucauccacacgagcacccuguccgggagcgcgcagcacguggaggagugcuccugcuacccccgcuaccccggcgugcggugcgucugccgcgacaacuggaaggggagcaaccggccgaucguggacaucaacaucaaggacuacuccaucgugagcuccuacgucugcagcggccuggugggcgacacgccccgcaagaacgacuccagcuccagcucccacugccucgaccccaacaacgaggagggcgggcacggggugaagggcugggccuucgacgacgggaacgacgucuggaugggccggaccaucagcgagaagcugcgcuccggcuacgagaccuucaaggugaucgagggguggagcaaccccaacuccaagcugcagaucaaccggcaggucaucguggaccgcggcaaccggagcggguacuccggcaucuucagcguggagggcaagagcugcaucaaccgcugcuucuacgucgagcucauccgggggcgcaaggaggagaccgaggugcuguggaccuccaacagcaucguggucuucugcggcaccuccgggacguacggcaccgggagcuggccggacggcgccgacaucucccugaugcccaucuga

SEQ ID NO: 84672 - RNA, 1410 nt, Artificial Sequence
  derived and/or modified CDS sequence (opt1) from neuraminidase__InfluenzaA__AEG65101
augaaccccaaccagaagaucaucaccaucggcagcgugucccugaccaucagcacgaucugcuucuucaugcagaucgccauccucaucaccaccgucacccugcacuucaagcaguacgaguucaacuccccgcccgacaaccaggugaugcugugcgagcccacgaucaucgagcgcaacaucaccgagaucguguaccucaccaacaccacgaucgagaaggagaucugccccaagcuggccgaguaccggaacuggagcaagccgcagugcgacaucaccggguucgcgcccuucuccaaggacaacagcauccgccuguccgccggcggggacaucugggucacccgggagcccuacgugagcugcgaccccgacaagugcuaccaguucgcccucggccaggggaccacgcugaacaacgugcacuccaacgacaccguccacgaccgcaccccguaccggacccugcucaugaacgagcugggcgugcccuuccaccugggcacgaagcaggucugcaucgccuggagcuccagcuccugccacgacgggaaggccuggcuccacgugugcgugaccggcgacgacaagaacgcgaccgccagcuucaucuacaacgggcgccugguggacuccgucgugagcugguccaaggacauccugcggacccaggagagcgagugcgugugcaucaacggcacgugcaccgucgugaugaccgacggguccgccagcggcaaggccgacaccaagauccucuucaucgaggagggcaagaucgugcacacgagcacccuguccgggagcgcgcagcacgucgaggagugcuccugcuacccccgcuaccccggcgugcggugcgugugccgcgacaacuggaaggggagcaaccggccgaucgucgacaucaacaucaagaacuacuccaucgugagcuccuacgugugcagcggccuggucggcgacacgccccgcaagaccgacuccagcuccagcucccacugccucgaccccaacaacgaggagggcgggcacggggugaagggcugggccuucgacgacgggaacgacgucuggaugggccggaccaucagcgagaagcugcgccugggcuacgagaccuucaaggugaucgaggggugguccaaccccaacagcaagcuccagaucaaccgccaggugaucgucgaccggggcaaccgguccggguacagcggcaucuucuccguggagggcaagagcugcaucaaccgcugcuucuacguggagcugauccgggggcgcaaggaggagaccgagguccuguggaccagcaacuccaucgugguguucugcggcacgagcgggaccuacggcaccggguccuggccggacggcgccgacaucaaccucaugcccaucuga

SEQ ID NO: 84673 - RNA, 1410 nt, Artificial Sequence
  derived and/or modified CDS sequence (opt1) from neuraminidase__InfluenzaA__AEG65123
augaaccccaaccagaagaucaucaccaucggcagcgugucccugaccaucagcacgaucugcuucuucaugcagaucgccauccucaucaccaccgucacccugcacuucaagcaguacgaguucaacuccccgcccaacaaccaggugaugcugugcgagcccacgaccaucgagcgcaacaucaccgagaucguguaccucaccaacacgaccaucgagaaggagaucugccccaagcuggccgaguaccggaacuggagcaagccgcagugcgacaucaccggguucgcgcccuucuccaaggacaacagcauccgccuguccgccggcggggacaucugggucacccgggagcccuacgugagcugcgaccccgacaagugcuaccaguucgcccucggccaggggacgacccugaacaacgugcacuccaacgacaccguccacgaccgcaccccguaccggacgcugcucaugaacgagcugggcgugcccuuccaccugggcaccaagcaggucugcaucgccuggagcuccagcuccugccacgacgggaaggccuggcuccacgugugcgugaccggcgacgacaagaacgcgaccgccagcuucaucuacaacgggcgccugguggacuccgucgugagcugguccaaggacauccugcggacgcaggagagcgagugcgugugcaucaacgggaccugcaccgucgugaugaccgacggguccgccagcggcaaggccgacacgaagauccucuucaucgaggagggcaagaucgugcacaccagcacccuguccgggagcgcgcagcacgucgaggagugcuccugcuacccccgcuaccccggcgugcggugcgugugccgcgacaacuggaaggggagcaaccggccgaucgucgacaucaacaucaagaacuacuccaucgugagcuccuacgugugcagcggccuggucggcgacacgccccgcaagaccgacuccagcuccagcucccacugccucgaccccaacaacgaggagggcggccacggggugaagggcugggccuucgacgacgggaacgacgucuggaugggccggaccaucagcgagaagcugcgccugggcuacgagaccuucaaggugaucgaggggugguccaaccccaacagcaagcuccagaucaaccgccaggugaucgucgaccggggcaaccgguccggguacagcggcaucuucuccguggagggcaagagcugcaucaaccgcugcuucuacguggagcugauccgggggcgcaaggaggagaacgagguccuguggaccagcaacuccaucgugguguucugcggcacgagcgggaccuacggcaccggguccuggccggacggcgccgacaucaaccucaugcccaucuga

SEQ ID NO: 84674 - RNA, 1410 nt, Artificial Sequence; identical to SEQ ID NO: 79731
  derived and/or modified CDS sequence (opt1) from neuraminidase__InfluenzaA__AEG65134

SEQ ID NO: 84675 - RNA, 1410 nt, Artificial Sequence
  derived and/or modified CDS sequence (opt1) from neuraminidase__InfluenzaA__AEG65145
augaaccccaaccagaagaucaucaccaucggcagcgugucccugaccaucgccacgaucugcuuccucaugcagaucgccauccuggucaccaccgugacccugcacuucaagcaguacgagugcaacagcccgcccaacaaccaggugaugcucugcgagcccacgaucaucgagcgcaacaucaccgagaucgucuaccugaccaacaccacgaucgagaaggagaucugccccaagcuggcggaguaccggaacugguccaagccgcagugcaacaucaccggguucgcccccuucagcaaggacaacuccauccgccucagcgccggcggggacaucugggugacccgggagcccuacguguccugcgaccccgacaagugcuaccaguucgcccugggccaggggaccacgcugaacaacggccacagcaacgacaccguccacgaccgcaccccguaccggacccuccugaugaacgagcugggcgugcccuuccaccucgggacgcgccaggugugcaucgccugguccagcuccagcugccacgacggcaaggcguggcugcacgucugcgugaccggggacgacgagaacgccaccgccuccuucaucuacaacggccggcugguggacagcaucggguccuggagcaagaagauccuccgcacccaggaguccgagugcgucugcaucaacggcacgugcaccguggugaugaccgacggcagcgccuccgggaaggcggacaccaagauccuguucaucgaggagggcaagaucguccacaucagcacgcugagcggguccgcccagcacguggaggagugcagcugcuacccccgguaccccggcgugcgcugcgucugccgggacaacuggaagggcuccaaccgcccgaucguggacaucaacgugaaggacuacagcaucgucuccagcuacgugugcuccgggcucgugggcgacacgccccggaagaacgacagcuucuccaacagccacugccuggaccccaacaacgaggagggcgggcacggggucaagggcugggccuucgacgacggcaacgacguguggauggggcgcaccaucuccgagaagcugcggagcggcuacgagaccuucaaggucaucgaggggugguccaagcccaacagcaagcuccagaucaaccgccaggugaucguggagcggggcaaccgcuccggguacagcggcaucuucuccgucgagggcaagagcugcaucaaccggugcuucuacguggagcugauccgcgggcggaaggaggagaccgaggugugguggaccuccaacagcaucgucguguucugcggcaccagcgggaccuacggcacgggguccuggccggacggcgccgacaucaaccugaugcccaucuga

SEQ ID NO: 84676 - RNA, 1410 nt, Artificial Sequence
  derived and/or modified CDS sequence (opt1) from neuraminidase__InfluenzaA__AEG65156
augaaccccaaccagaagaucaucaccaucggcagcgugucccugaccaucgccacgaucugcuuccucaugcagaucgccauccuggucaccaccgugacccugcacuucaagcaguacgagugcaacagcccgcccaacaaccaggugaugcucugcgagcccacgaucaucgagcgcaacaucaccgagaucgucuaccugaccaacaccacgaucgagaaggagaucugccccaagcuggcggaguaccggaacugguccaagccgcagugcaacaucaccggguucgcccccuucagcaaggacaacuccauccgccucagcgccggcggggacaucugggugacccgggagcccuacguguccugcgaccccgacaagugcuaccaguucgcccugggccaggggaccacgcugaacaacggccacagcaacgacaccguccacgaccgcaccccguaccggacccuccugaugaacgagcugggcgugcccuuccaccucgggacgcgccaggugugcaucgccugguccagcuccagcugccacgacggcaaggcguggcugcacgucugcgugaccggggacgacgagaacgccaccgccuccuucaucuacaacggccggcugguggacagcaucggguccuggagcaagaagauccuccgcacccaggaguccgagugcgucugcaucaacggcacgugcaccguggugaugaccgacggcagcgccuccgggaaggcggacaccaagauccuguucaucgaggagggcaagaucguccacacgagcacccugagcggguccgcccagcacguggaggagugcagcugcuacccccgguaccccggcgugcgcugcgucugccgggacaacuggaagggcuccaaccgcccgaucguggacaucaacgugaaggacuacagcaucgucuccagcuacgugugcuccgggcucgugggcgacacgccccggaagaacgacagcuucuccagcucccacugccuggaccccaacaacgaggagggcgggcacggggucaagggcugggccuucgacgacggcaacgacguguggauggggcgcaccaucagcgagaagcugcgguccggcuacgagaccuucaaggucaucgagggguggagcaagcccaacuccaagcuccagaucaaccgccaggugaucguggagcggggcaaccgcagcggguacuccggcaucuucagcgucgagggcaaguccugcaucaaccggugcuucuacguggagcugauccgcgggcggaaggaggagaccgaggugugguggaccagcaacagcaucgucguguucugcggcaccuccgggacguacggcaccgggagcuggccggacggcgccgacaucaaccugaugcccaucuga

SEQ ID NO: 84677 - RNA, 1410 nt, Artificial Sequence
  derived and/or modified CDS sequence (opt1) from neuraminidase__InfluenzaA__AEG65167
augaaccccaaccagaagaucaucaccaucggcagcgugucccugaccaucgccacgaucugcuuccucaugcagaucgccauccuggucaccaccgugacccugcacuucaagcaguacgagugcaacagcccgcccaacaaccaggugaugcucugcgagcccacgaucaucgagcgcaacaucaccgagaucgucuaccugaccaacaccacgaucgagaaggagaucugccccaagcuggcggaguaccggaacugguccaagccgcagugcaacaucaccggguucgcccccuucagcaaggacaacuccauccgccucagcgccggcggggacaucugggugacccgggagcccuacguguccugcgaccccgacaagugcuaccaguucgcccugggccaggggaccacgcugaacaacggccacagcaacgacaccguccacgaccgcaccccguaccggacccuccugaugaacgagcugggcgugcccuuccaccucgggacgcgccaggugugcaucgccugguccagcuccagcugccacgacggcaaggcguggcugcacgucugcgugaccggggacgacgagaacgccaccgccuccuucaucuacaacggccggcugguggacagcaucggguccuggagcaagaagauccuccgcacccaggaguccgagugcgucugcaucaacggcacgugcaccguggugaugaccgacggcagcgccuccgggaaggcggacaccaagauccuguucaucgaggagggcaagaucguccacaucagcacgcugagcggguccgcccggcacguggaggagugcagcugcuacccccgcuaccccggcgugcggugcgucugccgcgacaacuggaagggcuccaaccggccgaucguggacaucaacgugaaggacuacagcaucgucuccagcuacgugugcuccgggcucgugggcgacacgccccgcaagaacgacagcuucuccagcucccacugccuggaccccaacaacgaggagggcgggcacggggucaagggcugggccuucgacgacggcaacgacguguggauggggcggaccaucagcgagaagcugcgcuccggcuacgagaccuucaaggucaucgagggguggagcaagcccaacuccaagcuccagaucaaccgccaggugaucguggagcggggcaaccggagcggguacuccggcaucuucagcgucgagggcaaguccugcaucaaccgcugcuucuacguggagcugauccgggggcgcaaggaggagaccgaggugugguggaccagcaacagcaucgucguguucugcggcaccuccgggaccuacggcacggggagcuggccggacggcgccgacaucaaccugaugcccaucuga

SEQ ID NO: 84678 - RNA, 1410 nt, Artificial Sequence
  derived and/or modified CDS sequence (opt1) from neuraminidase__InfluenzaA__AEG65178
augaaccccaaccagaagaucaucaccaucggcagcgugucccugaccaucgccacgaucugcuuccucaugcagaucgccauccuggucaccaccgugacccugcacuucaagcagcacgagugcaacagcccgcccaacaaccaggugaugcucugcgagcccacgaucaucgagcgcaacaucaccgagaucgucuaccugaccaacaccacgaucgagaaggagaucugccccaagcuggcggaguaccggaacugguccaagccgcagugcaacaucaccggguucgcccccuucagcaaggacaacuccauccgccucagcgccggcggggacaucugggugacccgggagcccuacguguccugcgaccccgacaagugcuaccaguucgcccugggccaggggaccacgcugaacaacggccacagcaacaacaccguccacgaccgcaccccguaccggacccuccugaugaacgagcugggcgugcccuuccaccucgggacgcgccaggugugcaucgccugguccagcuccagcugccacgacggcaaggcguggcugcacgucugcgugaccggggacgacaagaacgccaccgccuccuucaucuacaacggccggcugguggacagcaucggguccuggagcaagaacauccuccgcacccaggaguccgagugcgucugcaucaacggcacgugcaccguggugaugaccgacggcagcgccuccgggaaggcggacaccaagauccuguucaucgaggagggcaagaucguccacaucagcacgcugagcggguccgcccagcacguggaggagugcagcugcuacccccgguaccccggcgugcgcugcgucugccgggacaacuggaagggcuccaaccgcccgaucguggacaucaacgugaaggacuacagcaucgucuccagcuacgugugcuccgggcucgugggcgacacgccccggaagaacgacagcuucuccagcucccacugccuggaccccaacaacgaggagggcgggcacggggucaagggcugggccuucgacgacggcaacgacguguggauggggcgcaccaucagcgagaagcugcgguccggcuacgagaccuucaaggucaucgagggguggagcaagcccaacuccaagcuccagaucaaccgccaggugaucguggagcggggcaaccgcagcggguacuccggcaucuucagcgucgagggcaaguccugcaucaaccggugcuucuacguggagcugauccgcgggcggaaggaggagaccgaggugugguggaccagcaacagcaucgucguguucugcggcaccuccgggaccuacggcacggggagcuggccggacggcgccgacaucaaccugaugcccaucuga

SEQ ID NO: 84679 - RNA, 1410 nt, Artificial Sequence
  derived and/or modified CDS sequence (opt1) from neuraminidase__InfluenzaA__AEG65189
augaaccccaaccagaagaucaucaccaucggcagcgugucccugaccaucagcacgaucugcuucuucaugcagaucgccauccucaucaccaccgucacccugcacuucaagcaguacgaguucaacuccccgcccaacaaccaggugaugcugugcgagcccacgaucaucgagcgcaacaucaccgagaucguguaccucaccaacaccacgaucgagaaggagaucugccccaagcuggccgaguaccggaacuggagcaagccgcagugcgacaucaccggguucgcgcccuucuccaaggacaacagcauccgccuguccgccggcggggacaucugggucacccgggagcccuacgugagcugcgaccccgacaagugcuaccaguucgcccucggccaggggaccacgcugaacaacgugcacuccaacgacaccguccacgaccgcaccccguaccggacccugcucaugaacgagcugggcgugcccuuccaccugggcacgaagcaggucugcaucgccuggagcuccagcuccugccacgacgggaaggccuggcuccacgugugcgugaccggcgacgacaagaacgcgaccgccagcuucaucuacaacgggcgccugguggacuccaucgucagcugguccaaggagauccugcggacccaggagagcgagugcgugugcaucaacggcacgugcaccguggucaugaccgacggguccgccagcggcaaggccgacaccaagauccucuucaucgaggagggcaagaucgugcacacgagcacccuguccgggagcgcgcagcacguggaggagugcuccugcuacccccgcuaccccggcguccggugcgugugccgcgacaacuggaaggggagcaaccggccgaucguggacaucaacaucaacgacuacuccaucgucagcuccuacgugugcagcggccuggugggcgacacgccccgcaagaacgacuccagcuccagcucccacugccucgaccccaacaacgaggagggcgggcacggggucaagggcugggccuucgacgacgggaacgacguguggaugggccggaccaucagcgagaagcugcgcuccggcuacgagaccuucaaggucaucgagggguggagcaaccccaacuccaagcugcagaucaaccgccaggugaucguggaccggggcaaccggagcggguacuccggcaucuucagcgucgagggcaagagcugcaucaaccgcugcuucuacguggagcucauccgggggcgcaaggaggagaccgaggugcuguggaccuccaacagcaucgucguguucugcggcaccuccgggacguacggcaccgggagcuggccggacggcgccgacaucaaccugaugcccaucuga

SEQ ID NO: 84680 - RNA, 1410 nt, Artificial Sequence
  derived and/or modified CDS sequence (opt1) from neuraminidase__InfluenzaA__AEG65200
augaaccccaaccagaagaucaucaccaucggcagcgugucccugaccaucagcacgaucugcuucuucaugcagaucgccauccucaucaccaccgucacccugcacuucaagcaguacgaguucaacuccccgcccaacaaccaggugaugcugugcgagcccacgaucaucgagcgcaacaucaccgagaucguguaccucaccaacaccacgaucgagaaggagaucugccccaagcuggccgaguaccggaacuggagcaagccgcagugcgacaucaccggguucgcgcccuucuccaaggacaacagcauccgccuguccgccggcggggacaucugggucacccgggagcccuacgugagcugcgaccccgacaagugcuaccaguucgcccucggccaggggaccacgcugaacaacgugcacuccaacgacaccguccacgaccgcaccccguaccggacccugcucaugaacgagcugggcgugcccuuccaccugggcacgaagcaggucugcaucgccuggagcuccagcuccugccacgacgggaaggccuggcuccacgugugcgugaccggcgacgacaagaacgcgaccgccagcuucaucuacaacgggcgccugguggacuccaucgucagcugguccaaggaggugcugcggacccaggagagcgagugcgugugcaucaacggcacgugcaccgucgugaugaccgacggguccgccagcggcaaggccgacaccaagauccucuucaucgaggagggcaagaucgugcacacgagcacccuguccgggagcgcgcagcacgucgaggagugcuccugcuacccccgcuaccccggcgugcggugcgugugccgcgacaacuggaaggggagcaaccggccgaucgucgacaucaacaucaaggacuacuccaucgugagcuccuacgugugcagcggccuggucggcgacacgccccgcaagaacgacuccagcuccagcucccacugccucgaccccaacaacgaggagggcgggcacggggugaagggcugggccuucgacgacgggaacgacgucuggaugggccggaccaucagcgagaagcugcgcuccggcuacgagaccuucaaggugaucgagggguggagcaaccccaacuccaagcugcagaccaaccgccaggugaucgucgaccggggcaaccggagcggguacuccggcaucuucagcguggagggcaagagcugcaucaaccgcugcuucuacguggagcucauccgggggcgcaaggaggagaccgagguccuguggaccuccaacagcaucgugguguucugcggcacguccgggaccuacggcaccgggagcuggccggacggcgccgacaucaaccugaugcccaucuga

SEQ ID NO: 84681 - RNA, 1410 nt, Artificial Sequence; identical to SEQ ID NO: 78736
  derived and/or modified CDS sequence (opt1) from neuraminidase__InfluenzaA__AEG65211

SEQ ID NO: 84682 - RNA, 1410 nt, Artificial Sequence; identical to SEQ ID NO: 78738
  derived and/or modified CDS sequence (opt1) from neuraminidase__InfluenzaA__AEG65222

SEQ ID NO: 84683 - RNA, 1410 nt, Artificial Sequence
  derived and/or modified CDS sequence (opt1) from neuraminidase__InfluenzaA__AEG65233
augaaccccaaccagaagaucaucaccaucggcagcgugucccugaccaucagcacgaucugcuucuucaugcagaucgccauccucaucaccaccgucacccugcacuucaagcaguacgaguucaacuccccgcccaacaaccaggugaugcugugcgagcccacgaucaucgagcgcaacaucaccgagaucguguaccucaccaacaccacgaucgagaaggagaucugccccaagcuggccgaguaccggaacuggagcaagccgcagugcgacaucaccggguucgcgcccuucuccaaggacaacagcauccgccuguccgccggcggggacaucugggucacccgggagcccuacgugagcugcgaccccgacaagugcuaccaguucgcccucggccaggggaccacgcugaacaacgugcacuccaacgacaccguccacgaccgcaccccguaccggacccugcucaugaacgagcugggcgugcccuuccaccugggcacgaagcaggucugcaucgccuggagcuccagcuccugccacgacgggaaggccuggcuccacgugugcgugaccggcgacgacaagaacgcgaccgccagcuucaucuacaacgggcgccugguggacuccaucgucagcugguccaagaagauccugcggacccaggagagcgagugcgugugcaucaacggcacgugcaccguggucaugaccgacggguccgccagcggcaaggccgacaccaagauccucuucaucgaggagggcaagaucgugcacacgagcacccuguccgggagcgcgcagcacguggaggagugcuccugcuacccccgcuaccccggcguccggugcgugugccgcgacaacuggaaggggagcaaccggccgaucaucgacaucaacaucaaggacuacuccaucgugagcuccuacgucugcagcggccuggugggcgacacgccccgcaagaacgacuccagcuccagcucccacugccucgaccccaacaacgaggagggcgggcacggggugaagggcugggccuucgacgacgggaacgacgucuggaugggccggaccaucagcgagaagcugcgcuccggcuacgagaccuucaaggugaucgagggguggagcaaccccaacuccaagcugcagaucaaccggcaggucaucguggaccgcggcaaccggagcggguacuccggcaucuucagcguggagggcaagagcugcaucaaccgcugcuucuacgucgagcucauccgggggcgcaaggaggagaccgaggugcuguggaccuccaacagcaucguggucuucugcggcaccuccgggacguacggcaccgggagcuggccggacggcgccgacaucaaccugaugcccaucuga

SEQ ID NO: 84684 - RNA, 1410 nt, Artificial Sequence
  derived and/or modified CDS sequence (opt1) from neuraminidase__InfluenzaA__AEG65244
augaaccccaaccagaagaucaucaccaucggcagcgugucccugaccaucagcacgaucugcuucuucaugcagaucgccauccucaucaccaccgucacccugcacuucaagcaguacgaguucaacuccccgcccaacaaccaggugaugcugugcgagcccacgaucaucgagcgcaacaucaccgagaucguguaccucaccaacaccacgaucgagaaggagaucugccccaagcuggccgaguaccggaacuggagcaagccgcagugcaacaucaccggguucgcgcccuucuccaaggacaacagcauccgccuguccgccggcggggacaucugggucacccgggagcccuacgugagcugcgaccccgacaagugcuaccaguucgcccucggccaggggaccacgcugaacaacgugcacuccaacgacaccguccacgaccgcaccccguaccggacccugcucaugaacgagcugggcgugcccuuccaccugggcacgcagcaggucugcaucgccuggagcuccagcuccugccacgacgggaaggccuggcuccacgugugcgugaccggcgacgacgagaacgcgaccgccagcuucaucuacaacgggcgccugguggacuccaucgucagcugguccaagaagauccugcggacccaggagagcgagugcgugugcaucaacggcacgugcaccguggucaugaccgacggguccgccagcggcaaggccgacaccaagauccucuucaucgaggagggcaagaucgugcacacgagcacccuguccgggagcgcgcagcacguggaggagugcuccugcuacccccgcuaccccggcguccggugcgugugccgcgacaacuggaaggggagcaaccggccgaucguggacaucaacaucaaggacuacuccaucgccagcuccuacgucugcagcggccuggugggcgacacgccccgcaagaacgacuccagcuccagcucccacugccucgaccccaacaacgaggagggcgggcacggggugaagggcugggccuucgacgacgggaacgacgucuggaugggccggaccaucagcgagaagcugcgcuccggcuacgagaccuucaaggugaucgagggguggagcaaccccaacuccaagcugcagaucaaccggcaggucaucguggaccgcggcaaccggagcggguacuccggcaucuucagcguggagggcaagagcugcaucaaccgcugcuucuacgucgagcucauccgggggcgcaaccaggagaccgaggugcuguggaccuccaacagcaucguggucuucugcggcaccuccgggacguacggcaccgggagcuggccggacggcgccgacaucaaccugaugcccaucuga

SEQ ID NO: 84685 - RNA, 1410 nt, Artificial Sequence; identical to SEQ ID NO: 78738
  derived and/or modified CDS sequence (opt1) from neuraminidase__InfluenzaA__AEG65255

SEQ ID NO: 84686 - RNA, 1410 nt, Artificial Sequence; identical to SEQ ID NO: 78615
  derived and/or modified CDS sequence (opt1) from neuraminidase__InfluenzaA__AEG65266

SEQ ID NO: 84687 - RNA, 1410 nt, Artificial Sequence; identical to SEQ ID NO: 78615
  derived and/or modified CDS sequence (opt1) from neuraminidase__InfluenzaA__AEG65277

SEQ ID NO: 84688 - RNA, 1410 nt, Artificial Sequence
  derived and/or modified CDS sequence (opt1) from neuraminidase__InfluenzaA__AEG65288
augaaccccaaccagaagaucaucaccaucggcagcgugucccugaccaucgccacgaucugcuuccucaugcagaucgccauccuggucaccaccgugacccugcacuucaagcagcacgagugcaacagcccgcccaacaaccaggugaugcucugcgagcccacgaucaucgagcgcaacaucaccgagaucgucuaccugaccaacaccacgaucgagaaggagaucugccccaagcugguggaguaccggaacugguccaagccgcagugcaacaucaccggguucgcgcccuucagcaaggacaacuccauccgccucagcgccggcggggacaucugggugacccgggagcccuacgucuccugcgaccccgacaagugcuaccaguucgcccugggccaggggaccacgcugaacaacggccacagcaacgacaccgugcacgaccgcaccccguaccggacccuccugaugaacgagcugggcgugcccuuccaccucgggacgcgccaggucugcaucgccugguccagcuccagcugccacgacggcaaggccuggcugcacgugugcgugaccggggacgacaagaacgcgaccgccuccuucaucuacaacggccggcuggucgacagcaucggguccuggagcaagaagauccuccgcacccaggaguccgagugcgugugcaucaacggcacgugcaccguggucaugaccgacggcagcgccuccgggaaggccgacaccaagauccuguucaucgaggagggcaagaucgugcacaucagcacgcugagcggguccgcgcagcacguggaggagugcagcugcuacccccgguaccccggcguccgcugcgugugccgggacaacuggaagggcuccaaccgcccgaucguggacaucaacgucaaggacuacagcaucguguccagcuacgugugcuccgggcucgucggcgacacgccccggaagaacaacagcuucuccagcucccacugccuggaccccaacaacgaggagggcgggcacggggugaagggcugggccuucgacgacggcaacgacgucuggauggggcgcaccaucagcgagaagcugcgguccggcuacgagaccuucaaggugaucgagggguggagcaagcccaacuccaagcuccagaucaaccgccaggugaucgucgagcggggcaaccgcagcggguacuccggcaucuucagcguggagggcaaguccugcaucaaccggugcuucuacguggagcugauccgcgggcggaaggaggagaccgaggucugguggaccagcaacagcaucgugguguucugcggcaccuccgggaccuacggcacggggagcuggccggacggcgccgacaucaaccugaugcccaucuga

SEQ ID NO: 84689 - RNA, 1410 nt, Artificial Sequence; identical to SEQ ID NO: 78615
  derived and/or modified CDS sequence (opt1) from neuraminidase__InfluenzaA__AEG65299

SEQ ID NO: 84690 - RNA, 1410 nt, Artificial Sequence; identical to SEQ ID NO: 78738
  derived and/or modified CDS sequence (opt1) from neuraminidase__InfluenzaA__AEG65310

SEQ ID NO: 84691 - RNA, 1410 nt, Artificial Sequence; identical to SEQ ID NO: 78738
  derived and/or modified CDS sequence (opt1) from neuraminidase__InfluenzaA__AEG65321

SEQ ID NO: 84692 - RNA, 1410 nt, Artificial Sequence; identical to SEQ ID NO: 78738
  derived and/or modified CDS sequence (opt1) from neuraminidase__InfluenzaA__AEG65332

SEQ ID NO: 84693 - RNA, 1410 nt, Artificial Sequence; identical to SEQ ID NO: 78738
  derived and/or modified CDS sequence (opt1) from neuraminidase__InfluenzaA__AEG65354

SEQ ID NO: 84694 - RNA, 1410 nt, Artificial Sequence; identical to SEQ ID NO: 78738
  derived and/or modified CDS sequence (opt1) from neuraminidase__InfluenzaA__AEG65365

SEQ ID NO: 84695 - RNA, 1410 nt, Artificial Sequence
  derived and/or modified CDS sequence (opt1) from neuraminidase__InfluenzaA__AEG65376
augaaccccaaccagaagaucaucaccaucggcagcgugucccugaccaucagcacgaucugcuucuucaugcagaucgccauccucaucaccaccgucacccugcacuucaagcaguacgaguucaacuccccgcccaacaaccaggugaugcugugcgagcccacgaucaucgagcgcaacaucaccgagaucguguaccucaccaacaccacgaucgagaaggagaucugccccaagcuggccgaguaccggaacuggagcaagccgcagugcaacaucaccggguucgcgcccuucuccaaggacaacagcauccgccuguccgccggcggggacaucugggucacccgggagcccuacgugagcugcgaccccgacaagugcuaccaguucgcccucggccaggggaccacgcugaacaacgugcacuccaacgacaccguccacgaccgcaccccguaccggacccugcucaugaacgagcugggcgugcccuuccaccugggcacgcagcaggucugcaucgccuggagcuccagcuccugccacgacgggaaggccuggcuccacgugugcgugaccggcgacgacgagaacgcgaccgccagcuucaucuacaacgggcgccugguggacuccaucgucagcugguccaagaagauccugcggacccaggagagcgagugcgugugcaucaacggcacgugcaccguggucaugaccgacggguccgccagcggcaaggccgacaccaagauccucuucaucgaggagggcaagaucgugcacacgagcacccuguccgggagcgcgcagcacguggaggagugcuccugcuacccccgcuaccccggcguccggugcgugugccgcgacaacuggaaggggagcaaccggccgaucguggacaucaacaucaaggacuacuccaucgucagcuccuacgugugcagcggccuggugggcgacacgccccgcaagaacgacuccagcuccagcucccacugccucgaccccaacaacgaggagggcgggcacggggucaagggcugggccuucgacgacgggaacgacguguggaugggccggaccaucagcgagaagcugcgcuccggcuacgagaccuucaaggucaucgagggguggagcaaccccaacuccaagcugcagaucaaccgccaggugaucguggaccggggcaaccggagcggguacuccggcaucuucagcgucgagggcaagagcugcaucaaccgcugcuucuacguggagcucauccgggggcgcaaccaggagaccgaggugcuguggaccuccaacagcaucgucguguucugcggcaccuccgggacguacggcaccgggagcuggccggacggcgccgacaucaaccugaugcccaucuga

SEQ ID NO: 84696 - RNA, 1410 nt, Artificial Sequence; identical to SEQ ID NO: 78615
  derived and/or modified CDS sequence (opt1) from neuraminidase__InfluenzaA__AEG65387

SEQ ID NO: 84697 - RNA, 1410 nt, Artificial Sequence; identical to SEQ ID NO: 78615
  derived and/or modified CDS sequence (opt1) from neuraminidase__InfluenzaA__AEG65398

SEQ ID NO: 84698 - RNA, 1410 nt, Artificial Sequence; identical to SEQ ID NO: 78615
  derived and/or modified CDS sequence (opt1) from neuraminidase__InfluenzaA__AEG65409

SEQ ID NO: 84699 - RNA, 1410 nt, Artificial Sequence; identical to SEQ ID NO: 78615
  derived and/or modified CDS sequence (opt1) from neuraminidase__InfluenzaA__AEG65420

SEQ ID NO: 84700 - RNA, 1410 nt, Artificial Sequence; identical to SEQ ID NO: 78615
  derived and/or modified CDS sequence (opt1) from neuraminidase__InfluenzaA__AEG65431

SEQ ID NO: 84701 - RNA, 1410 nt, Artificial Sequence; identical to SEQ ID NO: 78736
  derived and/or modified CDS sequence (opt1) from neuraminidase__InfluenzaA__AEG65442

SEQ ID NO: 84702 - RNA, 1410 nt, Artificial Sequence; identical to SEQ ID NO: 78738
  derived and/or modified CDS sequence (opt1) from neuraminidase__InfluenzaA__AEG65453

SEQ ID NO: 84703 - RNA, 1410 nt, Artificial Sequence; identical to SEQ ID NO: 78738
  derived and/or modified CDS sequence (opt1) from neuraminidase__InfluenzaA__AEG65464

SEQ ID NO: 84704 - RNA, 1410 nt, Artificial Sequence; identical to SEQ ID NO: 78738
  derived and/or modified CDS sequence (opt1) from neuraminidase__InfluenzaA__AEG65475

SEQ ID NO: 84705 - RNA, 1410 nt, Artificial Sequence
  derived and/or modified CDS sequence (opt1) from neuraminidase__InfluenzaA__AEG65486
augaaccccaaccagaagaucaucaccaucggcagcgugucccugaccaucagcacgaucugcuucuucaugcagaucgccauccucaucaccaccgucacccugcacuucaagcaguacgaguucaacuccccgcccaacaaccaggugaugcugugcgagcccacgaucaucgagcgcaacaucaccgagaucguguaccucaccaacaccacgaucgagaaggagaucugccccaagcuggccgagcaccggaacuggagcaagccgcagugcgacaucaccggguucgcgcccuucuccaaggacaacagcauccgccuguccgccggcggggacaucugggucacccgggagcccuacgugagcugcgaccccgacaagugcuaccaguucgcccucggccaggggaccacgcugaacaacgugcacuccaacgacaccguccacgaccgcaccccguaccggacccugcucaugaacgagcugggcgugcccuuccaccugggcacgaagcaggucugcaucgccuggagcuccagcuccugccacgacgggaaggccuggcuccacgugugcgugaccggcgacgacaagaacgcgaccgccagcuucaucuacaacgggcgccugguggacuccaucgucagcugguccaagaagauccugcggacccaggagagcgagugcgugugcaucaacggcacgugcaccguggucaugaccgacggguccgccagcggcaaggccgacaccaagauccucuucaucgaggagggcaagaucgugcacacgagcacccuguccgggagcgcgcagcacguggaggagugcuccugcuacccccgcuaccccggcguccggugcgugugccgcgacaacuggaaggggagcaaccggccgaucguggacaucaacaucaaggacuacuccaucgucagcuccuacgugugcagcggccuggugggcgacacgccccgcaagaacgacuccagcuccagcucccacugccucgaccccaacaacgaggagggcgggcacggggucaagggcugggccuucgacgacgggaacgacguguggaugggccggaccaucagcgagaagcugcgcuccggcuacgagaccuucaaggucaucgagggguggagcaaccccaacuccaagcugcagaucaaccgccaggugaucguggaccggggcaaccggagcggguacuccggcaucuucagcgucgagggcaagagcugcaucaaccgcugcuucuacguggagcucauccgggggcgcaaggaggagaccgaggugcuguggaccuccaacagcaucgucguguucugcggcaccuccgggacguacggcaccgggagcuggccggacggcgccgacaucaaccugaugcccaucuga

SEQ ID NO: 84706 - RNA, 1410 nt, Artificial Sequence; identical to SEQ ID NO: 78738
  derived and/or modified CDS sequence (opt1) from neuraminidase__InfluenzaA__AEG65497

SEQ ID NO: 84707 - RNA, 1410 nt, Artificial Sequence; identical to SEQ ID NO: 78738
  derived and/or modified CDS sequence (opt1) from neuraminidase__InfluenzaA__AEG65508

SEQ ID NO: 84708 - RNA, 1410 nt, Artificial Sequence; identical to SEQ ID NO: 78738
  derived and/or modified CDS sequence (opt1) from neuraminidase__InfluenzaA__AEG65519

SEQ ID NO: 84709 - RNA, 1410 nt, Artificial Sequence; identical to SEQ ID NO: 78738
  derived and/or modified CDS sequence (opt1) from neuraminidase__InfluenzaA__AEG65530

SEQ ID NO: 84710 - RNA, 1410 nt, Artificial Sequence; identical to SEQ ID NO: 78738
  derived and/or modified CDS sequence (opt1) from neuraminidase__InfluenzaA__AEG65541

SEQ ID NO: 84711 - RNA, 1410 nt, Artificial Sequence
  derived and/or modified CDS sequence (opt1) from neuraminidase__InfluenzaA__AEG65563
augaaccccaaccagaagaucaucaccaucggcagcgugucccugaccaucagcacgaucugcuucuucaugcagaucgccauccucaucaccaccgucacccugcacuucaagcaguacgaguucaacuccccgcccaacaaccaggugaugcugugcgagcccacgaucaucgagcgcaacaucaccgagaucguguaccucaccaacaccacgaucgagaaggagaucugccccaagcuggccgaguaccggaacuggagcaagccgcagugcgacaucaccggguucgcgcccuucuccaaggacaacagcauccgccuguccgccggcggggacaucugggucacccgggagcccuacgugagcugcgaccccgaccgcugcuaccaguucgcccucggccaggggaccacgcugaacaacgugcacuccaacgacaccguccacgaccggaccccguaccgcacccugcucaugaacgagcugggcgugcccuuccaccugggcacgaagcaggucugcaucgccuggagcuccagcuccugccacgacgggaaggccuggcuccacgugugcgugaccggcgacgacaagaacgcgaccgccagcuucaucuacaacgggcggcugguggacuccaucgucagcugguccaagaagauccugcgcacccaggagagcgagugcgugugcaucaacggcacgugcaccguggucaugaccgacggguccgccagcggcaaggccgacaccaagauccucuucaucgaggagggcaagaucgugcacacgagcacccuguccgggagcgcgcagcacguggaggagugcuccugcuacccccgguaccccggcguccgcugcgugugccgggacaacuggaaggggagcaaccgcccgaucguggacaucaacaucaaggacuacuccaucgucagcuccuacgugugcagcggccuggugggcgacacgccccggaagaacgacuccagcuccagcucccacugccucgaccccaacaacgaggagggcgggcacggggucaagggcugggccuucgacgacgggaacgacguguggaugggccgcaccaucagcgagaagcugcgguccggcuacgagaccuucaaggucaucgagggguggagcaaccccaacuccaagcugcagaucaaccgccaggugaucguggaccggggcaaccgcagcggguacuccggcaucuucagcgucgagggcaagagcugcaucaaccggugcuucuacguggagcucauccgcgggcggaaggaggagaccgaggugcuguggaccuccaacagcaucgucguguucugcggcaccuccgggacguacggcaccgggagcuggccggacggcgccgacaucaaccugaugcccaucuga

SEQ ID NO: 84712 - RNA, 1410 nt, Artificial Sequence
  derived and/or modified CDS sequence (opt1) from neuraminidase__InfluenzaA__AEG65574
augaaccccaaccagaagaucaucaccaucggcagcgugucccugaccaucagcacgaucugcuucuucaugcagaucgccauccucaucaccaccgucacccugcacuucaagcaguacgaguucaacuccccgcccaacaaccaggugaugcugugcgagcccacgaucaucgagcgcaacaucaccgagaucguguaccucaccaacaccacgaucgagaaggagaucugccccaagcuggccgaguaccggagcugguccaagccgcagugcgacaucaccggguucgcgcccuucagcaaggacaacuccauccgccugagcgccggcggggacaucugggucacccgggagcccuacguguccugcgaccccgaccgcugcuaccaguucgcccucggccaggggaccacgcugaacaacgugcacagcaacgacaccguccacgaccggaccccguaccgcacccugcucaugaacgagcugggcgugcccuuccaccugggcacgaagcaggucugcaucgccugguccagcuccagcugccacgacgggaaggccuggcuccacgugugcgugaccggcgacgacaagaacgcgaccgccuccuucaucuacaacgggcggcugguggacagcaucgucuccuggagcaagaagauccugcgcacccaggaguccgagugcgugugcaucaacggcacgugcaccguggucaugaccgacgggagcgccagcggcaaggccgacaccaagauccucuucaucgaggagggcaagaucgugcacacguccacccugagcggguccgcgcagcacguggaggagugcagcugcuacccccgguaccccggcguccgcugcgugugccgggacaacuggaagggguccaaccgcccgaucguggacaucaacaucaaggacuacagcaucgucuccagcuacgugugcuccggccuggugggcgacacgccccggaagaacgacagcuccagcuccagccacugccucgaccccaacaacgaggagggcgggcacggggucaagggcugggccuucgacgacgggaacgacguguggaugggccgcaccaucuccgagaagcugcggagcggcuacgagaccuucaaggucaucgaggggugguccaaccccaacagcaagcugcagaucaaccgccaggugaucguggaccggggcaaccgcuccggguacagcggcaucuucagcgucgaggggaaguccugcaucaaccggugcuucuacguggagcucauccgcggccggaaggaggagaccgaggugcuguggaccagcaacuccaucgucguguucugcggcaccagcgggacguacggcaccggguccuggccggacggcgccgacaucaaccugaugcccaucuga

SEQ ID NO: 84713 - RNA, 1410 nt, Artificial Sequence; identical to SEQ ID NO: 84711
  derived and/or modified CDS sequence (opt1) from neuraminidase__InfluenzaA__AEG65585

SEQ ID NO: 84714 - RNA, 1410 nt, Artificial Sequence; identical to SEQ ID NO: 84711
  derived and/or modified CDS sequence (opt1) from neuraminidase__InfluenzaA__AEG65596

SEQ ID NO: 84715 - RNA, 1410 nt, Artificial Sequence
  derived and/or modified CDS sequence (opt1) from neuraminidase__InfluenzaA__AEG65607
augaaccccaaccagaagaucaucaccaucggcagcgugucccugaccaucagcacgaucugcuucuucaugcagaucgccauccucaucaccaccgucacccugcacuucaagcaguacgaguucaacuccccgcccaacaaccaggugaugcugugcgagcccacgaucaucgagcgcaacaucaccgagaucguguaccucaccaacaccacgaucgagaaggagaucugccccaagcuggccgaguaccggaacuggagcaagccgcagugcgacaucaccggguucgcgcccuucuccaaggacaacagcauccgccuguccgccggcggggacaucugggucacccgggagcccuacgugagcugcgaccccgacaagugcuaccaguucgcccucggccaggggaccacgcugaacaacgugcacuccaacgacaccguccacgaccgcaccccguaccggacccugcucaugaacgagcugggcgugcccuuccaccugggcacgaagcaggucugcaucgccuggagcuccagcuccugccacgacgggaaggccuggcuccacgugugcgugaccggcgacgacaagaacgcgaccgccagcuucaucuacaacgggcgccugguggacuccaucgucagcugguccaagaagauccugcggacccaggagagcgagugcgugugcaucaacggcacgugcaccguggucaugaccgacggguccgccagcggcaaggccgacaccaagauccucuucaucgaggagggcaagaucgugcacacgagcacccuguccgggagcgcgcagcacguggaggagugcuccugcuacccccgcuaccccggcguccggugcgugugccgcgacaacuggaaggggagcaaccggccgaucguggacaucaacaucaaggacuacuccaucgccagcuccuacgucugcagcggccuggugggcgacacgccccgcaagaacgacuccagcuccagcucccacugccucgaccccaacaacgaggagggcgggcacggggugaagggcugggccuucgacgacgggaacgacgucuggaugggccggaccaucagcgagaagcugcgcuccggcuacgagaccuucaaggugaucgagggguggagcaaccccaacuccaagcugcagaucaaccggcaggucaucguggaccgcggcaaccggagcggguacuccggcaucuucagcguggagggcaagagcugcaucaaccgcugcuucuacgucgagcucauccgggggcgcaaggaggagaccgaggugcuguggaccuccaacagcaucguggucuucugcggcaccuccgggacguacggcaccgggagcuggccggacggcgccgacaucaaccugaugcccaucuga

SEQ ID NO: 84716 - RNA, 1410 nt, Artificial Sequence
  derived and/or modified CDS sequence (opt1) from neuraminidase__InfluenzaA__AEG65629
augaaccccaaccagaagaucaucaccaucggcagcgugucccugaccaucagcacgaucugcuucuucaugcagaucgccauccucaucaccaccgucacccugcacuucaagcaguacgaguucaacuccccgcccaacaaccaggugaugcugugcgagcccacgaucaucgagcgcaacaucaccgagaucguguaccucaccaacaccacgaucgagaaggagaucugccccaagcuggccgaguaccggaacuggagcaagccgcagugcgacaucaccggguucgcgcccuucuccaaggacaacagcauccgccuguccgccggcggggacaucugggucacccgggagcccuacgugagcugcgaccccgacaagugcuaccaguucgcccucggccaggggaccacgcugaacaacgugcacuccaacgacaccguccacgaccgcaccccguaccggacccugcucaugaacgagcugggcgugcccuuccaccugggcacgaagcaggucugcaucgccuggagcuccagcuccugccacgacgggaaggccuggcuccacgugugcgugaccggcgacgacaagaacgcgaccgccagcuucaucuacaacgggcgccugguggacuccaucgucagcugguccaaggagauccugcggacccaggagagcgagugcgugugcaucaacggcacgugcaccguggucaugaccgacggguccgccagcggcaaggccgacaccaagauccucuucaucgaggagggcaagaucgugcacacgagcacccuguccgggagcgcgcagcacguggaggagugcuccugcuacccccgcuaccccggcguccggugcgugugccgcgacaacuggaaggggagcaaccggccgaucguggacaucaacaucaaggacuacuccaucgucagcuccuacgugugcagcggccuggugggcgacacgccccgcaagaacgacuccagcuccagcucccacugccucgaccccaacgacgaggagggcgggcacggggucaagggcugggccuucgacgacgggaacgacguguggaugggccggaccaucagcgagaagcugcgcuccggcuacgagaccuucaaggucaucgagggguggagcaaccccaacuccaagcugcagaucaaccgccaggugaucguggaccggggcaaccggagcggguacuccggcaucuucagcgucgagggcaagagcugcaucaaccgcugcuucuacguggagcucauccgggggcgcaaggaggagaucgaggugcuguggaccuccaacagcaucgucguguucugcggcaccuccgggaccuacggcacggggagcuggccggacggcgccgacaucaaccugaugcccaucuga

SEQ ID NO: 84717 - RNA, 1410 nt, Artificial Sequence; identical to SEQ ID NO: 84716
  derived and/or modified CDS sequence (opt1) from neuraminidase__InfluenzaA__AEG65640

SEQ ID NO: 84718 - RNA, 1410 nt, Artificial Sequence; identical to SEQ ID NO: 78159
  derived and/or modified CDS sequence (opt1) from neuraminidase__InfluenzaA__AEG65651

SEQ ID NO: 84719 - RNA, 1410 nt, Artificial Sequence; identical to SEQ ID NO: 78738
  derived and/or modified CDS sequence (opt1) from neuraminidase__InfluenzaA__AEG65662

SEQ ID NO: 84720 - RNA, 1410 nt, Artificial Sequence; identical to SEQ ID NO: 78738
  derived and/or modified CDS sequence (opt1) from neuraminidase__InfluenzaA__AEG65673

SEQ ID NO: 84721 - RNA, 1410 nt, Artificial Sequence; identical to SEQ ID NO: 78738
  derived and/or modified CDS sequence (opt1) from neuraminidase__InfluenzaA__AEG65684

SEQ ID NO: 84722 - RNA, 1410 nt, Artificial Sequence; identical to SEQ ID NO: 84695
  derived and/or modified CDS sequence (opt1) from neuraminidase__InfluenzaA__AEG65695

SEQ ID NO: 84723 - RNA, 1410 nt, Artificial Sequence
  derived and/or modified CDS sequence (opt1) from neuraminidase__InfluenzaA__AEG65706
augaaccccaaccagaagaucaucaccaucggcagcgugucccugaccaucagcacgaucugcuucuucaugcagaucgccauccucaucaccaccgucacccugcacuucaagcaguacgaguucaacuccccgcccaacaaccaggugaugcugugcgagcccacgaucaucgagcgcaacaucaccgagaucguguaccucaccaacaccacgaucgagaaggagaucugccccaagcuggccgaguaccggaacuggagcaagccgcagugcaacaucaccggguucgcgcccuucuccaaggacaacagcauccgccuguccgccggcggggacaucugggucacccgggagcccuacgugagcugcgaccccgacaagugcuaccaguucgcccucggccaggggaccacgcugaacaacgugcacuccaacgacaccguccacgaccgcaccccguaccggacccugcucaugaacgagcugggcgugcccuuccaccugggcacgaagcaggucugcaucgccuggagcuccagcuccugccacgacgggaaggccuggcuccacgugugcgugaccggcgacgacaagaacgcgaccgccagcuucaucuacaacgggcgccugguggacuccaucgucagcugguccaaggagauccugcggacccaggagagcgagugcgugugcaucaacggcacgugcaccguggucaugaccgacggguccgccagcggcaaggccgacaccaagauccucuucaucgaggagggcaagaucgugcacacgagcacccuguccgggagcgcgcagcacguggaggagugcuccugcuacccccgcuaccccggcguccggugcgugugccgcgacaacuggaaggggagcaaccggccgaucguggacaucaacaucaaggacuacuccaucgucagcuccuacgugugcagcggccuggugggcgacacgccccgcaagaacgacuccagcuccagcucccacugccucgaccccaacaacgaggagggcgggcacggggucaagggcugggccuucgacgacgggaacgacguguggaugggccggaccaucagcgagaagcugcgcuccggcuacgagaccuucaaggucaucgagggguggagcaaccccaacuccaagcugcagaucaaccgccaggugaucguggaccggggcaaccggagcggguacuccggcaucuucagcgucgagggcaagagcugcaucaaccgcugcuucuacguggagcucauccgggggcgcaaggaggagaacgaggugcuguggaccuccaacagcaucgucguguucugcggcaccuccgggaccuacggcacggggagcuggccggacggcgccgacaucaaccugaugcccaucuga

SEQ ID NO: 84724 - RNA, 1410 nt, Artificial Sequence
  derived and/or modified CDS sequence (opt1) from neuraminidase__InfluenzaA__AEG65728
augaaccccaaccagaagaucaucaccaucggcagcgugucccugaccaucagcacgaucugcuucuucaugcagaucgccauccucaucaccaccgucacccugcacuucaagcaguacgaguucaacuccccgcccaacaaccaggugaugcugugcgagcccacgaucaucgagcgcaacaucaccgagaucguguaccucaccaacaccacgaucgagaaggagaucugccccaagcuggccgaguaccggaacuggagcaagccgcagugcaacaucaccggguucgcgcccuucuccaaggacaacagcauccgccuguccgccggcggggacaucugggucacccgggagcccuacgugagcugcgaccccgacaagugcuaccaguucgcccucggccaggggaccacgcugaacaacgugcacuccaacgacaccguccacgaccgcaccccguaccggacccugcucaugaacgagcugggcgugcccuuccaccugggcacgaagcaggucugcaucgccuggagcuccagcuccugccacgacgggaaggccuggcuccacgugugcgugaccggcgacgacaagaacgcgaccgccagcuucaucuacaacgggcgccugguggacuccaucgucagcugguccaaggagauccugcggacccaggagagcgagugcgugugcaucaacggcacgugcaccguggucaugaccgacggguccgccagcggcaaggccgacaccaagauccucuucaucgaggagggcaagaucgugcacacgagcacccuguccgggagcgcgcagcacguggaggagugcuccugcuacccccgcuaccccggcguccggugcgugugccgcgacaacuggaaggggagcaaccggccgaucguggacaucaacaucaaggacuacuccaucgucagcuccuacgugugcagcggccuggugggcgacacgccccgcaagaacgacuccagcuccagcucccacugccucgaccccaacaacgaggagggcgggcacggggucaagggcugggccuucgacgacgggaacgacguguggaugggccggaccaucagcgagaagcugcgcuccggcuacgagaccuucaaggucaucgagggguggagcaaccccaacuccaagcugcagaucaaccgccaggugaucguggaccggggcaaccggagcggguacuccggcaucuucagcgucgagggcaagagcugcaucaaccgcugcuucuacguggagcucauccgggggcgcaaggaggagaccgaggugcuguggaccuccaacagcaucgucguguucugcggcaccuccgggacguacggcaccgggagcuggccggacggcgccgagaucaaccugaugcccaucuga

SEQ ID NO: 84725 - RNA, 1410 nt, Artificial Sequence
  derived and/or modified CDS sequence (opt1) from neuraminidase__InfluenzaA__AEG65739
augaaccccaaccagaagaucaucaccaucggcagcgugucccugaccaucagcacgaucugcuucuucaugcagaucgccauccucaucaccaccgucacccugcacuucaagcaguacgaguucuccagcccgcccaacaaccaggugaugcccugcgagcccacgaucaucgagcgcaacaucaccgagaucguguaccugaccaacaccacgaucgagaaggagaucugcccgaagcucgccgaguaccggaacugguccaagccccagugcgacaucaccggguucgcgcccuucagcaaggacaacuccauccgccugagcgccggcggggacaucugggucacccgggagcccuacguguccugcgacccggacaagugcuaccaguucgcccugggccaggggaccacgcucaacaacgugcacagcaacgacaccguccacgaccgcacccccuaccggacccugcugaugaacgagcucggcgugcccuuccaccugggcacgaagcaggucugcaucgccugguccagcuccagcugccacgacgggaaggccuggcugcacgugugcgugaccggcgacgacaagaacgcgaccgccuccuucaucuacaacgggcgccucguggacagcaucgucuccuggagcaaggagauccugcggacccaggaguccgagugcgugugcaucaacggcacgugcaccguggucaugaccgacgggagcgccagcggcaaggccgacaccaagauccuguucaucgaggagggcaagaucgugcacacguccacccucagcggguccgcgcagcacguggaggagugcagcugcuacccccgcuacccgggcguccggugcgugugccgcgacaacuggaagggguccaaccggcccaucguggacaucaacaugaaggacuacagcaucgucuccagcuacgugugcuccggccuggugggcgacacgccccgcaagaacgacagcuccagcuccagccacugccuggaccccaacaacgaggagggcgggcacggggucaagggcugggccuucgacgacgggaacgacguguggaugggccggaccaucuccgagaagcuccgcagcggcuacgagaccuucaaggucaucgaggggugguccaacccgaacagcaagcugcagaucaaccgccaggugaucguggaccggggcaaccgguccggguacagcggcaucuucagcgucgaggggaaguccugcaucaaccgcugcuucuacguggagcugauccggggccgcaaggaggagaccgaggugcucuggaccagcaacuccaucgucguguucugcggcaccagcgggacguacggcaccggguccuggcccgacggcgccgacaucaaccugaugcccaucuga

SEQ ID NO: 84726 - RNA, 1410 nt, Artificial Sequence; identical to SEQ ID NO: 80588
  derived and/or modified CDS sequence (opt1) from neuraminidase__InfluenzaA__AEG65750

SEQ ID NO: 84727 - RNA, 1410 nt, Artificial Sequence; identical to SEQ ID NO: 84724
  derived and/or modified CDS sequence (opt1) from neuraminidase__InfluenzaA__AEG65761

SEQ ID NO: 84728 - RNA, 1410 nt, Artificial Sequence
  derived and/or modified CDS sequence (opt1) from neuraminidase__InfluenzaA__AEG65772
augaaccccaaccagaagaucaucaccaucggcagcgugucccugaccaucagcacgaucugcuucuucaugcagaccgccauccucaucaccaccgucacgcugcacuucaagcaguacgaguucaacuccccgcccaacaaccaggugaugcugugcgagcccaccaucaucgagcgcaacaucaccgagaucguguaccucaccaacacgaccaucgagaaggagaugugccccaagcuggccgaguaccggaacuggagcaagccgcagugcgacaucaccggguucgcgcccuucuccaaggacaacagcauccgccuguccgccggcggggacaucugggucacccgggagcccuacgugagcugcgaccccgacaagugcuaccaguucgcccucggccaggggacgacccugaacaacgugcacuccaacgacaccguccacgaccgcaccccguaccggacgcugcucaugaacgagcugggcgugcccuuccaccugggcaccaagcaggucugcaucgccuggagcuccagcuccugccacgacgggaaggccuggcuccacgugugcgugaccggcgacgacaagaacgcgaccgccagcuucaucuacaacgggcgccugguggacuccaucgucagcugguccaagaagauccugcggacgcaggagagcgagugcgugugcaucaacgggaccugcaccguggucaugaccgacggguccgccagcggcaaggccgacacgaagauccucuucaucgaggagggcaagaucauccacaccagcacccuguccgggagcgcgcagcacguggaggagugcuccugcuacccccgcuaccccggcgugcggugcgucugccgcgacaacuggaaggggagcaaccggccgaucguggacaucaacaucaaggacuacuccaucgugagcuccuacgucugcagcggccuggugggcgacacgccccgcaagaacgacuccagcuccagcucccacugccucgaccccaacaacgaggagggcggccacggggugaagggcugggccuucgacgacgggaacgacgucuggaugggccggaccaucagcgagaagcugcgcuccggcuacgagaccuucaaggugaucgagggguggagcaagcccaacuccaagcugcagaucaaccggcaggucaucguggaccgcggcaaccggagcggguacuccggcaucuucagcguggagggcaagagcugcaucaaccgcugcuucuacgucgagcucauccgggggcgcaaggaggagaccgaggugcuguggaccuccaacagcaucguggucuucugcggcacguccgggaccuacggcaccgggagcuggccggacggcgccgacaucaaccugaugcccaucuga

SEQ ID NO: 84729 - RNA, 1410 nt, Artificial Sequence; identical to SEQ ID NO: 83542
  derived and/or modified CDS sequence (opt1) from neuraminidase__InfluenzaA__AEG65783

SEQ ID NO: 84730 - RNA, 1410 nt, Artificial Sequence
  derived and/or modified CDS sequence (opt1) from neuraminidase__InfluenzaA__AEG65794
augaaccccaaccagaagaucaucaccaucggcagcgugucccugaccaucagcacgaucugcuucuucaugcagaucgccauccucaucaccaccaucacccugcacuucaagcaguacgaguucaacuccccgcccaacaaccaggucaugcugugcgagcccacgaucaucgagcgcaacaucaccgagaucguguaccucaccaacaccacgaucgagaaggagaucugccccaagcuggccgaguaccggaacuggagcaagccgcagugcgacaucaccggguucgcgcccuucuccaaggacaacagcauccgccuguccgccggcggggacaucugggugacccgggagcccuacgucagcugcgaccccgacaagugcuaccaguucgcccucggccaggggaccacgcugaacaacgugcacuccaacaacaccgugcgcgaccggaccccguaccgcacccugcucaugaacgagcugggcguccccuuccaccugggcacgaagcaggucugcaucgccuggagcuccagcuccugccacgacgggaaggccuggcuccacgugugcaucaccggcgacgacaagaacgcgaccgccagcuucaucuacaacgggcggcugguggacuccguggugagcugguccaaggagauccugcgcacccaggagagcgagugcgucugcaucaacggcacgugcaccguggugaugaccgacggguccgccagcggcaaggccgacaccaagauccucuucaucgaggagggcaagaucguccacacgagcacccuguccgggagcgcgcagcacguggaggagugcuccugcuacccccgguaccccggcgugcgcugcgucugccgggacaacuggaaggggagcaaccgcccgaucguggacaucaacaucaaggaccacuccaucgugagcuccuacgucugcagcggccuggugggcgacacgccccggaagaacgacuccagcuccagcucccacugccucgaccccaacaacgaggagggcgggcacggggugaagggcugggccuucgacgacgggaacgacgucuggaugggccgcaccaucaacgagaccagccggcugggcuacgagaccuucaaggugaucgaggggugguccaaccccaagagcaagcugcagaucaaccgccaggucaucguggacaagggcaaccgguccggguacagcggcaucuucuccguggagggcaagagcugcaucaaccgcugcuucuacgucgagcucauccgggggcgcaaggaggagaccgaggugcuguggaccagcaacuccaucguggucuucugcggcacgagcgggaccuacggcaccggguccuggccggacggcgccgaccugaaccucaugcccaucuga

SEQ ID NO: 84731 - RNA, 1410 nt, Artificial Sequence; identical to SEQ ID NO: 83542
  derived and/or modified CDS sequence (opt1) from neuraminidase__InfluenzaA__AEG65805

SEQ ID NO: 84732 - RNA, 1410 nt, Artificial Sequence
  derived and/or modified CDS sequence (opt1) from neuraminidase__InfluenzaA__AEG65816
augaaccccaaccagaagaucaucaccaucggcagcgugucccugaccaucagcacgaucugcuucuucaugcagaucgccauccucaucaccaccgucacccugcacuucaagcaguacgaguucaacuccccgcccaacaaccaggugaugcugugcgagcccacgaucaucgagcgcaacaucaccgagaucguguaccucaccaacaccacgaucgagaaggagaucugccccaagcuggccgaguaccggaacuggagcaagccgcagugcgacaucaccggguucgcgcccuucuccaaggacaacagcauccgccuguccgccggcggggacaucugggucacccgggagcccuacgugagcugcgaccccgacaagugcuaccaguucgcccucggccaggggaccacgcugaacaacgugcacuccaacaacaccguccgcgaccggaccccguaccgcacccugcucaugaacgagcugggcgugcccuuccaccugggcacgaagcaggucugcaucgccuggagcuccagcuccugccacgacgggaaggccuggcuccacgugugcaucaccggcgacgacaagaacgcgaccgccagcuucaucuacaacgggcggcugguggacuccguggucagcugguccaaggagauccugcgcacccaggagagcgagugcgugugcaucaacggcacgugcaccguggucaugaccgacggguccgccagcggcgaggccgacaccaagauccucuucaucgaggagggcaagaucgugcacacgagcacccuguccgggagcgcgcagcacguggaggagugcuccugcuacccccgguaccccggcguccgcugcgugugccgggacaacuggaaggggagcaaccgcccgaucguggacaucaacaucaaggaccacuccaucgucagcuccuacgugugcagcggccuggugggcgacacgccccggaagaacgacuccagcuccagcucccacugccucgaccccaacaacgaggagggcgggcacggggucaagggcugggccuucgacgacgggaacgacguguggaugggccgcaccaucaacgagaccagccggcugggcuacgagaccuucaaggucaucgaggggugguccaaccccaagagcaagcugcagaucaaccgccaggugaucguggaccggggcaaccgcuccggguacagcggcaucuucuccgucgagggcaagagcugcaucaaccggugcuucuacguggagcucauccgcgggcggaaggaggagaccgaggugcuguggaccagcaacuccaucgucguguucugcggcacgagcgggaccuacggcaccggguccuggccggacggcgccgaccugaaccucaugcccaucuga

SEQ ID NO: 84733 - RNA, 1410 nt, Artificial Sequence
  derived and/or modified CDS sequence (opt1) from neuraminidase__InfluenzaA__AEG79808
augaaccccaaccagaagaucaucaccaucggcagcgugugcaugaccaucgggauggccaaccugauccuccagaucggcaacaucaucuccaucuggaucagccacuccauccagcuggggaaccagaaccagaucgagacgugcaaccagagcgucaucaccuacgagaacaacaccugggugaaccagaccuacgugaacaucuccaacacgaacuucgccgcgggccagagcgucguguccgugaagcuggccgggaacagcucccucugcccggucagcggcugggccaucuacuccaaggacaacagcauccgcaucggcuccaagggggacguguucgugauccgggagcccuucaucagcugcagcccccuggagugccgcaccuucuuccugacccagggcgcccuccugaacgacaagcacuccaacgggaccaucaaggaccggucccccuaccgcacgcugaugagcugcccgaucggcgagguccccucccccuacaacagccgguucgagagcguggccugguccgcgagcgccugccacgacgggaucaacuggcucaccaucggcaucuccggccccgacaacggggccguggccguccugaaguacaacggcaucaucaccgacaccaucaagagcuggcgcaacaacauccugcggacgcaggaguccgagugcgcgugcgugaacgggagcugcuucaccaucaugaccgacggcccguccgacggccaggccagcuacaagaucuuccgcaucgagaaggggaagaucgugaaguccgucgagaugaacgcccccaacuaccacuacgaggagugcagcugcuaccccgacuccagcgagaucacgugcgugugccgggacaacuggcacggcuccaaccgccccugggugagcuucaaccagaaccucgaguaccagaucggguacaucugcuccggcaucuucggggacaacccgcggcccaacgacaagaccggcagcugcggccccgucuccagcaacggggccaacggcgugaagggguucuccuucaaguacggcaacgggguguggaucggccgcaccaagagcaucagcucccggaagggcuucgagaugaucugggaccccaacggguggaccggcaccgacaacaacuucagcaucaagcaggacaucgucgggaucaacgagugguccggcuacagcggguccuucgugcagcacccggagcugacgggccuggacugcauccgccccugcuucuggguggagcucauccggggccgccccaaggagaacaccaucuggaccagcggguccagcaucuccuucugcggcgucaacagcgacaccguggggugguccuggcccgacggcgccgagcugccguucacgaucgacaaguga

SEQ ID NO: 84734 - RNA, 1410 nt, Artificial Sequence; identical to SEQ ID NO: 84733
  derived and/or modified CDS sequence (opt1) from neuraminidase__InfluenzaA__AEG79814

SEQ ID NO: 84735 - RNA, 1410 nt, Artificial Sequence
  derived and/or modified CDS sequence (opt1) from neuraminidase__InfluenzaA__AEG79826
augaaccccaaccagaagaucaucaccaucagcuccgugugcaugaccaucggcauggccaaccugauccuccagaucgggaacaucaucagcaucuggaucucccacagcauccagcugggcaaccagaaccagaucgagacgugcaaccaguccgucaucaccuacgagaacaacaccugggugaaccagaccuacgugaacaucagcaacacgaacuucgccgcggggcaguccgucgugagcgugaagcuggccggcaacuccagccucugcccggucuccgggugggccaucuacagcaaggacaacuccauccgcaucggcagcaagggcgacguguucgugauccgggagcccuucaucuccugcagcccccuggagugccgcaccuucuuccugacccagggggcccuccugaacgacaagcacuccaacggcaccaucaaggaccggagccccuaccgcacgcugauguccugcccgaucggggagguccccagccccuacaacagccgguucgaguccguggccuggagcgcguccgccugccacgacggcaucaacuggcucaccaucgggaucagcggccccgacaacggcgccguggccguccugaaguacaacgggaucaucaccgacaccaucaaguccuggcgcaacaacauccugcggacgcaggagagcgagugcgcgugcgugaacggcuccugcuucaccaucaugaccgacgggccgagcgacggccaggccuccuacaagaucuuccgcaucgagaagggcaagaucgucaagagcguggagaugaacgcccccaacuaccacuacgaggagugcuccugcuaccccgacagcuccgagaucacgugcgugugccgggacaacuggcacgggagcaaccgccccuggguguccuucaaccagaaccucgaguaccagaucggcuacaucugcagcgggaucuucggcgacaacccgcggcccaacgacaagaccggguccugcggccccgucagcuccaacggcgccaacggggugaagggcuucagcuucaaguacgggaacggcguguggaucgggcgcaccaagagcaucuccagccggaagggcuucgagaugaucugggaccccaacggcuggaccgggaccgacaacaacuucuccaucaagcaggacaucgucggcaucaacgaguggagcggguacuccggcagcuucgugcagcacccggagcugacggggcuggacugcauccgccccugcuucuggguggagcucauccggggccgccccaaggagaacaccaucuggaccuccggcagcuccaucagcuucugcggggucaacuccgacaccaugggcuggagcuggcccgacggggccgagcugccguucacgaucgacaaguga

SEQ ID NO: 84736 - RNA, 1410 nt, Artificial Sequence
  derived and/or modified CDS sequence (opt1) from neuraminidase__InfluenzaA__AEG79830
augaaccccaaccagaagaucaucaccaucagcuccgugugcaugaccaucggcauggccaaccugauccuccagaucgggaacaucaucagcaucuggaucucccacagcauccagcugggcaaccagaaccagaucgagacgugcaaccaguccgucaucaccuacgagaacaacaccugggugaaccagaccuacgugaacaucagcaacacgaacuucgccgcggggcaguccgucgugagcgugaagcuggccggcaacuccagccucugcccggucuccgggugggccaucuacagcaaggacaacuccauccgcaucggcagcaagggcgacguguucgugauccgggagcccuucaucuccugcagcccccuggagugccgcaccuucuuccugacccagggggcccuccugaacgacaagcacuccaacggcaccaucaaggaccggagccccuaccgcacgcugauguccugcccgaucggggagguccccagccccuacaacagccgguucgaguccguggccuggagcgcguccgccugccacgacggcaucaacuggcucaccaucgggaucagcggccccgacaacggcgccguggccguccugaaguacaacgggaucaucaccgacaccaucaaguccuggcgcaacaacauccugcggacgcaggagagcgagugcgcgugcgugaacggcuccugcuucaccgugaugaccgacgggccgagcgacggccaggccuccuacaagaucuuccgcaucgagaagggcaagaucgucaagagcguggagaugaacgcccccaacuaccacuacgaggagugcuccugcuaccccgacagcuccgagaucacgugcgugugccgggacaacuggcacgggagcaaccgccccugggucuccuucaaccagaaccucgaguaccagaucggcuacaucugcagcgggaucuucggcgacaacccgcggcccaacgacaagaccggguccugcggccccgugagcuccaacggcgccaacggggugaagggcuucagcuucaaguacgggaacggcgucuggaucgggcgcaccaagagcaucuccagccggaagggcuucgagaugaucugggaccccaacggcuggaccgggaccgacaacaacuucuccaucaagcaggacaucgugggcaucaacgaguggagcggguacuccggcagcuucgugcagcacccggagcugacggggcuggacugcauccgccccugcuucugggucgagcucauccggggccgccccaaggagaacaccaucuggaccuccggcagcuccaucagcuucugcggggugaacuccgacaccgucggcuggagcuggcccgacggggccgagcugccguucacgaucgacaaguga

SEQ ID NO: 84737 - RNA, 1410 nt, Artificial Sequence; identical to SEQ ID NO: 84281
  derived and/or modified CDS sequence (opt1) from neuraminidase__InfluenzaA__AEG79836

SEQ ID NO: 84738 - RNA, 1410 nt, Artificial Sequence
  derived and/or modified CDS sequence (opt1) from neuraminidase__InfluenzaA__AEH59356
augaaccccaaccagaagaucaucaccaucggcagcgugugcaugaccaucgggauggccaaccugauccuccagaucggcaacaucaucuccaucuggaucagccacuccauccagcuggggaaccagaaccagaucgagacgugcaaccagagcgucaucaccuacgagaacaacaccugggugaaccagaccuacgugaacaucuccaacacgaacuucgccgcgggccagagcgucguguccgugaagcuggccgggaacagcucccucugcccggucagcggcugggccaucuacuccaaggacaacagcauccgcaucggcuccaagggggacguguucgugauccgggagcccuucaucagcugcagcccccuggagugccgcaccuucuuccugacccagggcacccuccugaacgacaagcacuccaacgggacgaucaaggaccggucccccuaccgcacccugaugagcugcccgaucggcgagguccccucccccuacaacagccgguucgagagcguggccugguccgccagcgcgugccacgacgggaucaacuggcucaccaucggcaucuccggccccgacaacggggccguggccguccugaaguacaacggcaucaucaccgacacgaucaagagcuggcgcaacaacauccugcggacccaggaguccgagugcgccugcgugaacgggagcugcuucaccaucaugaccgacggcccguccgacggccaggcgagcuacaagaucuuccgcaucgagaaggggaagaucgugaaguccgucgagaugaacgcccccaacuacuacuacgaggagugcagcugcuaccccgacuccagcgagaucacgugcgugugccgggacaacuggcacggcuccaaccgccccugggugagcuucaaccagaaccucgaguaccagaucggguacaucugcuccggcaucuucggggacaacccgcggcccaacgacaagaccggcagcugcggccccgucuccagcaacggggccaacggcgugaagggguucuccuucaaguacggcaacgggguguggaucggccgcaccaagagcaucagcucccggaagggcuucgagaugaucugggaccccaacggguggaccggcacggacaacaacuucagcaucaagcaggacaucgucgggaucaacgagugguccggcuacagcggguccuucgugcagcacccggagcugaccggccuggacugcauccgccccugcuucuggguggagcucauccggggccgccccaaggagaacaccgucuggaccagcggguccagcaucuccuucugcggcgugaacagcgacacggucgggugguccuggcccgacggcgccgagcugccguucaccaucgacaaguga

SEQ ID NO: 84739 - RNA, 1410 nt, Artificial Sequence; identical to SEQ ID NO: 84733
  derived and/or modified CDS sequence (opt1) from neuraminidase__InfluenzaA__AEH59360

SEQ ID NO: 84740 - RNA, 1410 nt, Artificial Sequence
  derived and/or modified CDS sequence (opt1) from neuraminidase__InfluenzaA__AEH59364
augaaccccaaccagaagaucaucaccaucggcagcgugugcaugaccaucgggauggccaaccugauccuccagaucggcaacaucaucuccaucuggaucagccacuccauccagcuggggaaccagaaccagaucgagacgugcaaccagagcgucaucaccuacgagaacaacaccugggugaaccagaccuacgugaacaucuccaacacgaacuucgccgcgggccagagcgucguguccgugaagcuggccgggaacagcucccucugcccggucagcggcugggccaucuacuccaaggacaacagcauccgcaucggcuccaagggggacguguucgugauccgggagcccuucaucagcugcagcccccuggagugccgcaccuucuuccugacccagggcgcccuccugaacgacaagcacuccaacgggaccaucaaggaccggucccccuaccgcacgcugaugagcugcccgaucggcgagguccccucccccuacaacagccgguucgagagcguggccugguccgcgagcgccugccacgacgggaucaacuggcucaccaucggcaucuccggccccgacaacggggccguggccguccugaaguacaacggcaucaucaccgacaccaucaagagcuggcgcaacaacauccugcggacgcaggaguccgagugcgcgugcgugaacgggagcugcuucaccgugaugaccgacggcccgaacgacggccaggccuccuacaagaucuuccgcaucgagaaggggaagaucgucaagagcguggagaugaacgcccccaacuaccacuacgaggagugcuccugcuaccccgacagcuccgagaucacgugcgugugccgggacaacuggcacggcgccaaccgccccugggucagcuucaaccagaaccucgaguaccagaucggguacaucugcuccggcaucuucggggacaacccgcggcccaacgacaagaccggcagcugcggccccguguccagcaacggggccaacggcgugaagggguucuccuucaaguacggcaacggggucuggaucggccgcaccaagagcaucuccagccggaacggcuucgagaugaucugggaccccaacggguggaccggcaccgacaacaacuucagcaucaagcaggacaucguggggaucaacgagugguccggcuacagcggguccuucgugcagcacccggagcugacgggccuggacugcauccgccccugcuucugggucgagcucauccggggccgccccaaggagaacaccaucuggaccagcggguccagcaucuccuucugcggcgugaacagcgacaccgucgggugguccuggcccgacggcgcggagcugccguucacgaucgacaaguga

SEQ ID NO: 84741 - RNA, 1410 nt, Artificial Sequence
  derived and/or modified CDS sequence (opt1) from neuraminidase__InfluenzaA__AEH59366
augaaccccaaccagaagaucaucaccaucggcagcgugugcaugaccaucgggauggccaaccugauccuccagaucggcaacaucaucuccaucuggaucagccacuccauccagcuggggaaccagaaccagaucgagacgugcaaccagagcgucaucaccuacgagaacaacaccugggugaaccagaccuacgugaacaucuccaacacgaacuucgccgcgggccagagcgucguguccgugaagcuggccgggaacagcucccucugcccggucagcggcugggccaucuacuccaaggacaacagcauccgcaucggcuccaagggggacguguucgugauccgggagcccuucaucagcugcagcccccuggagugccgcaccuucuuccugacccagggcgcccuccugaacgacaagcacuccaacgggaccaucaaggaccggucccccuaccgcacgcugaugagcugcccgaucggcgggguccccucccccuacaacagccgguucgagagcguggccugguccgcgagcgccugccacgacggcaucaacuggcucaccaucggcaucuccgggcccgacaacggcgccguggccguccugaaguacaacgggaucaucaccgacaccaucaagagcuggcgcaacaacauccugcggacgcaggaguccgagugcgcgugcgugaacggcagcugcuucaccaucaugaccgacggcccguccgacgggcaggccagcuacaagaucuuccgcaucgagaagggcaagaucgugaaguccgucgagaugaacgcccccaacuaccacuacgaggagugcagcugcuaccccgacuccagcgagaucacgugcgugugccgggacaacuggcacggguccaaccgccccugggugagcuucaaccagaaccucgaguaccagaucggcuacaucugcuccgggaucuucggcgacaacccgcggcccaacgacaagaccggcagcugcgggcccgucuccagcaacggcgccaacggggugaagggcuucuccuucaaguacgggaacggcguguggaucggccgcaccaagagcaucagcucccggaagggguucgagaugaucugggaccccaacggcuggaccgggaccgacaacaacuucagcaucaagcaggacaucgucggcaucaacgagugguccggguacagcggcuccuucgugcagcacccggagcugacgggccuggacugcauccgccccugcuucuggguggagcucauccgggggcgccccaaggagaacaccaucuggaccagcggcuccagcaucuccuucugcggggucaacagcgacaccgugggcugguccuggcccgacggcgccgagcugccguucacgaucgacaaguga

SEQ ID NO: 84742 - RNA, 1410 nt, Artificial Sequence; identical to SEQ ID NO: 84733
  derived and/or modified CDS sequence (opt1) from neuraminidase__InfluenzaA__AEH59368

SEQ ID NO: 84743 - RNA, 1410 nt, Artificial Sequence; identical to SEQ ID NO: 84281
  derived and/or modified CDS sequence (opt1) from neuraminidase__InfluenzaA__AEH59370

SEQ ID NO: 84744 - RNA, 1410 nt, Artificial Sequence; identical to SEQ ID NO: 84740
  derived and/or modified CDS sequence (opt1) from neuraminidase__InfluenzaA__AEH59372

SEQ ID NO: 84745 - RNA, 1410 nt, Artificial Sequence; identical to SEQ ID NO: 84740
  derived and/or modified CDS sequence (opt1) from neuraminidase__InfluenzaA__AEH59376

SEQ ID NO: 84746 - RNA, 1410 nt, Artificial Sequence; identical to SEQ ID NO: 84281
  derived and/or modified CDS sequence (opt1) from neuraminidase__InfluenzaA__AEH59378

SEQ ID NO: 84747 - RNA, 1410 nt, Artificial Sequence; identical to SEQ ID NO: 84740
  derived and/or modified CDS sequence (opt1) from neuraminidase__InfluenzaA__AEH59382

SEQ ID NO: 84748 - RNA, 1410 nt, Artificial Sequence
  derived and/or modified CDS sequence (opt1) from neuraminidase__InfluenzaA__AEH59384
augaaccccaaccagaagaucaucaccaucggcagcgugugcaugaccaucgggauggccaaccugauccuccagaucggcaacaucaucuccaucuggaucagccacuccauccagcuggggaaccagagccagaucgagacgugcaaccaguccgucaucaccuacgagaacaacaccugggugaaccagaccuacgugaacaucagcaacacgaacuucgccgcgggccaguccgucgugagcgugaagcuggccgggaacuccagccucugcccggucuccggcugggccaucuacagcaaggacaacuccauccgcaucggcagcaagggggacguguucgugauccgggagcccuucaucuccugcagcccccuggagugccgcaccuucuuccugacccagggcgcccuccugaacgacaagcacuccaacgggaccaucaaggaccggagccccuaccgcacgcugauguccugcccgaucggcgagguccccagccccuacaacagccgguucgaguccguggccuggagcgcguccgccugccacgacgggaucaacuggcucaccaucggcaucagcggccccgacaacggggccguggccguccugaaguacaacggcaucaucaccgacaccaucaaguccuggcgcaacaacauccugcggacgcaggagagcgagugcgcgugcgugaacggguccugcuucaccaucaugaccgacggcccgagcgacggccaggccuccuacaagaucuuccgcaucgagaaggggcggaucgucaagagcguggagaugaacgcccccaacuaccacuacgaggagugcuccugcuaccccgacagcuccgagaucacgugcgugugccgcgacaacuggcacggcagcaaccggcccuggguguccuucaaccagaaccucgaguaccagaucggguacaucugcagcggcaucuucggggacaacccgcgccccaacgacaagaccggcuccugcggccccgucagcuccaacggggccaacggcgugaagggguucagcuucaaguacggcaacgggguguggaucggccggaccaagagcaucuccagccgcaagggcuucgagaugaucugggaccccaacggguggaccggcaccgacaacaacuucuccaucaagcaggacaucgucgggaucaacgaguggagcggcuacuccgggagcuucgugcagcacccggagcugacgggccuggacugcauccggcccugcuucuggguggagcucauccgcggccggcccaaggagaacaccaucuggaccuccgggagcuccaucagcuucugcggcgucaacuccgacaccgugggguggagcuggcccgacggcgccgagcugccguucacgaucgacaaguga

SEQ ID NO: 84749 - RNA, 1410 nt, Artificial Sequence
  derived and/or modified CDS sequence (opt1) from neuraminidase__InfluenzaA__AEH59386
augaaccccaaccagaagaucaucaccaucggcagcgugugcaugaccaucgggauggccaaccugauccuccagaucggcaacaucaucuccaucuggaucagccacuccauccagaucgggaaccagaaccagaucgagacgugcaaccagagcgucaucaccuacgagaacaacaccugggugaaccagaccuacgugaacaucuccaacacgaacuucgccgcgggccagagcgucguguccgugaagcuggccgggaacagcucccugugcccggucagcggcugggccaucuacuccaaggacaacagcauccgcaucggcuccaagggggacguguucgugauccgggagcccuucaucagcugcagcccccucgagugccgcaccuucuuccugacccagggcgcccugcucaacgacaagcacuccaacgggaccaucaaggaccggucccccuaccgcacgcugaugagcugcccgaucggcgagguccccucccccuacaacagccgguucgagagcguggccugguccgcgagcgccugccacgacgggaucaacuggcugaccaucggcaucuccggccccgacaacggggccguggccguccucaaguacaacggcaucaucaccgacaccaucaagagcuggcgcaacaacauccugcggacgcaggaguccgagugcgcgugcgugaacgggagcugcuucaccaucaugaccgacggcccguccgacggccaggccagcuacaagaucuuccgcaucgagaaggggaagaucgugaaguccgucgagaugaacgcccccaacuaccacuacgaggagugcagcugcuaccccgacuccagcgagaucacgugcgugugccgggacaacuggcacggcuccaaccgccccugggugagcuucaaccagaaccuggaguaccagaucggguacaucugcuccggcaucuucggggacaacccgcggcccaacgacaagaccggcagcugcggccccgucuccagcaacggggccaacggcgugaagggguucuccuucaaguacggcaacgggguguggaucggccgcaccaagagcaucagcucccggaagggcuucgagaugaucugggaccccaacggguggaccggcaccgacaacaacuucagcaucaagcaggacaucgucgggaucaacgagugguccggcuacagcggguccuucgugcagcacccggagcucacgggccuggacugcauccgccccugcuucuggguggagcugauccggggccgccccaaggagaacaccaucuggaccagcggguccagcaucuccuucugcggcgucaacagcgacaccguggggugguccuggcccgacggcgccgagcucccguucacgaucgacaaguga

SEQ ID NO: 84750 - RNA, 1410 nt, Artificial Sequence; identical to SEQ ID NO: 84740
  derived and/or modified CDS sequence (opt1) from neuraminidase__InfluenzaA__AEH59388

SEQ ID NO: 84751 - RNA, 1410 nt, Artificial Sequence
  derived and/or modified CDS sequence (opt1) from neuraminidase__InfluenzaA__AEH59390
augaaccccaaccagaagaucaucaccaucggcagcgugugcaugaccaucgggauggccaaccugauccuccagaucggcaacaucaucuccaucuggaucagccacuccauccagcuggggaaccagagccagaucgagacgugcaaccaguccgucaucaccuacgagaacaacaccugggugaaccagaccuacgugaacaucagcaacacgaacuucgccgcgggccaguccgucgugagcgugaagcuggccgggaacuccagccucugcccggucuccggcugggccaucuacagcaaggacaacuccauccgcaucggcagcaagggggacguguucgugauccgggagcccuucaucuccugcagcccccuggagugccgcaccuucuuccugacccagggcgcccuccugaacgacaagcacuccaacgggaccaucaaggaccggagccccuaccgcacgcugauguccugcccgaucggcgagguccccagccccuacaacagccgguucgaguccguggccuggagcgcguccgccugccacgacgggaucaacuggcucaccaucggcaucagcggccccgacaacggggccguggccguccugaaguacaacggcaucaucaccgacaccaucaaguccuggcgcaacaacauccugcggacgcaggagagcgagugcgcgugcgugaacggguccugcuucaccaucaugaccgacggcccgagcgacggccaggccuccuacaagaucuuccgcaucgagaaggggaagaucgucaagagcguggagaugaacgcccccaacuaccacuacgaggagugcuccugcuaccccgacagcuccgagaucacgugcgugugccgggacaacuggcacggcagcaaccgccccuggguguccuucaaccagaaccucgaguaccagaucggguacaucugcagcggcaucuucggggacaacccgcggcccaacgacaagaccggcuccugcggccccgucagcuccaacggggccaacggcgugaagggguucagcuucaaguacggcaacgggguguggaucggccgcaccaagagcaucuccagccggaagggcuucgagaugaucugggaccccaacggguggaccggcaccgacaacaacuucuccaucaagcaggacaucgucgggcugaacgaguggagcggcuacuccgggagcuucgugcagcacccggagcugacgggccucgacugcauccgccccugcuucuggguggagcugauccggggccugcccaaggagaacaccaucuggaccuccgggagcuccaucagcuucugcggcgucaacuccgacaccgugggguggagcuggcccgacggcgccgagcucccguucacgaucgacaaguga

SEQ ID NO: 84752 - RNA, 1410 nt, Artificial Sequence; identical to SEQ ID NO: 84740
  derived and/or modified CDS sequence (opt1) from neuraminidase__InfluenzaA__AEH59392

SEQ ID NO: 84753 - RNA, 1410 nt, Artificial Sequence; identical to SEQ ID NO: 84740
  derived and/or modified CDS sequence (opt1) from neuraminidase__InfluenzaA__AEH59396

SEQ ID NO: 84754 - RNA, 1410 nt, Artificial Sequence
  derived and/or modified CDS sequence (opt1) from neuraminidase__InfluenzaA__AEH59398
augaaccccaaccagaagaucaucaccaucggcagcgugugcaugaccaucggggucgccaaccugauccuccagaucggcaacaucaucuccaucuggaucagccacuccauccagcuggggaaccagaaccagaucgagacgugcaaccagagcgugaucaccuacgagaacaacaccugggugaaccagaccuacgucaacaucuccaacacgaacuucgccgcgggccagagcgugguguccgucaagcuggccgggaacagcucccucugcccggugagcggcugggccaucuacuccaaggacaacagcauccgcaucggcuccaagggggacguguucgucauccgggagcccuucaucagcugcagcccccuggagugccgcaccuucuuccugacccagggcgcccuccugaacgacaagcacuccaacgggaccaucaaggaccggucccccuaccgcacgcugaugagcugcccgaucggcgaggugcccucccccuacaacagccgguucgagagcguggccugguccgcgagcgccugccacgacgggaucaacuggcucaccaucggcaucuccggccccgacaacggggccgucgccgugcugaaguacaacggcaucaucaccgacaccaucaagagcuggcgcaacuacauccugcggacgcaggaguccgagugcgcgugcgugaacgggagcugcuucaccaucaugaccgacggcccguccgacggccaggccagcuacaagaucuuccgcaucgagaaggggaaggucgugaaguccguggagaugaacgcccccaacuaccacuacgaggagugcagcugcuaccccgacuccagcgagaucacgugcgucugccgggacaacuggcacggcuccaaccgccccugggugagcuucaaccagaaccucgaguaccagaucggguacaucugcuccggcaucuucggggacaacccgcggcccaacgacaagaccggcagcugcggccccguguccagcaacggggccaacggcgucaagggguucuccuucaaguacggcaacgggguguggaucggccgcaccaagagcaucagcucccggaagggcuucgagaugaucugggaccccaacggguggaccggcaccgacaacaacuucagcaucaagcaggacaucaucgggaucaacgagugguccggcuacagcggguccuucgugcagcacccggagcugacgggccuggacugcauccgccccugcuucugggucgagcucauccggggccgccccaaggagaacaccaucuggaccagcggguccagcaucuccuucugcggcgugaacagcgacaccgucgggugguccuggcccgacggcgccgagcugccguucacgaucgacaaguga

SEQ ID NO: 84755 - RNA, 1410 nt, Artificial Sequence
  derived and/or modified CDS sequence (opt1) from neuraminidase__InfluenzaA__AEH59400
augaaccccaaccagaagaucaucaccaucggcagcgugugcaugaccaucgggauggccaaccugauccuccagaucggcaacaucaucuccaucuggaucagccacuccauccagcuggggaaccagagccagaucgagacgugcaaccaguccgucaucaccuacgagaacaacaccugggugaaccagaccuacgugaacaucagcaacacgaacuucgccgcgggccaguccgucgugagcgugaagcuggccgggaacuccagccucugcccggucuccggcugggccaucuacagcaaggacaacuccauccgcaucggcagcaagggggacguguucgugauccgggagcccuucaucuccugcagcccccuggagugccgcaccuucuuccugacccagggcgcccuccugaacgacaagcacuccaacgggaccaucaaggaccggagccccuaccgcacgcugauguccugcccgaucggcgagguccccagccccuacaacagccgguucgaguccguggccuggagcgcguccgccugccacgacgggaucaacuggcucaccaucggcaucagcggccccgacaacggggccguggccguccugaaguacaacggcaucaucaccgacaccaucaaguccuggcgcaacaacauccugcggacgcaggagagcgagugcgcgugcgugaacggguccugcuucaccgugaugaccgacggcccgaacgacggccaggccagcuacaagaucuuccgcaucgagaaggggaagaucgucaaguccguggagaugaacgcccccaacuaccacuacgaggagugcagcugcuaccccgacuccagcgagaucacgugcgugugccgggacaacuggcacggcgccaaccgccccugggucuccuucaaccagaaccucgaguaccagaucggguacaucugcagcggcaucuucggggacaacccgcggcccaacgacaagaccggcuccugcggccccgugagcuccaacggggccaacggcgugaagggguucagcuucaaguacggcaacggggucuggaucggccgcaccaaguccaucagcagccggaacggcuucgagaugaucugggaccccaacggguggaccggcaccgacaacaacuucuccaucaagcaggacaucguggggaucaacgaguggagcggcuacuccgggagcuucgugcagcacccggagcugacgggccuggacugcauccgccccugcuucugggucgagcucauccggggccgccccaaggagaacaccaucuggaccuccgggagcuccaucagcuucugcggcgugaacuccgacaccgucggguggagcuggcccgacggcgcggagcugccguucacgaucgacaaguga

SEQ ID NO: 84756 - RNA, 1410 nt, Artificial Sequence
  derived and/or modified CDS sequence (opt1) from neuraminidase__InfluenzaA__AEH59402
augaaccccaaccagaagaucaucaccaucggcagcgugugcaugaccaucgggauggccaaccugauccuccagaucggcaacaucaucuccaucuggaucagccacuccauccagcuggggaaccagaaccagaucgagacgugcaaccagagcgucaucaccuacgagaacaacaccugggugaaccagaccuacgugaacaucuccaacacgaacuucgccgcgggccagagcgucguguccgugaagcuggccgggaacagcucccucugcccggucagcggcugggccaucuacuccaaggacaacagcauccgcaucggcuccaagggggacguguucgugauccgggagcccuucaucagcugcagcccccuggagugccgcaccuucuuccugacccagggcgcccuccugaacgacaagcacuccaacgggaccaucaaggaccggucccccuaccgcacgcugaugagcugcccgaucggcgagguccccucccccuacaacagccgguucgagagcguggccugguccgcgagcgccugccacgacgggaucaacuggcucaccaucggcaucuccggccccgacaacggggccguggccguccugaaguacaacggcaucaucaccgacaccaucaagagcuggcgcaacaacauccugcggacgcaggaguccgagugcgcgugcgugaacgggagcugcuucaccgugaugaccgacggcccgaacgacggccaggccuccuacaagaucuuccgcaucgagaaggggaagaucgucaagagcguggagaugaacgcccccaacuaccacuacgaggagugcuccugcuaccccgacagcuccgagaucacgugcgugugccgggacaacuggcacggcgccaaccgccccugggucagcuucaaccagaaccucgaguaccagaucggguacaucugcuccggcaucuucggggacaacccgcggcccaacgacaagaccggcagcugcggccccguguccagcaacggggccaacggcgugaagggguucuccuucaaguacggcaacggggucuggaucggccgcaccaagagcaucuccagccggaacggcuucgagaugaucugggaccccaacggguggaccgagaccgacaacaacuucagcaucaagcaggacaucgugggcaucaacgagugguccggguacagcggcuccuucgugcagcacccggagcugacggggcuggacugcauccgccccugcuucugggucgagcucauccggggccgccccaaggagaacaccaucuggaccagcggcuccagcaucuccuucugcggggugaacagcgacaccgucggcugguccuggcccgacggggcggagcugccguucacgaucgacaaguga

SEQ ID NO: 84757 - RNA, 1410 nt, Artificial Sequence
  derived and/or modified CDS sequence (opt1) from neuraminidase__InfluenzaA__AEH59404
augaaccccaaccagaagaucaucaccaucggcagcgccugcaugaccaucgggauggccaaccugauccuccagaucggcaacaucaucuccaucuggaucagccacuccauccagcuggggaaccagagccagaucgagacgugcaaccaguccgugaucaccuacgagaacaacaccugggucaaccagaccuacgugaacaucagcaacacgaacuucgcggccggccagccgguggucuccgugaagcuggccgggaacagcucccucugccccgugagcggcugggccaucuacuccaaggacaacagcauccgcaucggcuccaagggggacgucuucgugauccgggagcccuucaucagcugcagcccccuggagugccgcaccuucuuccugacccagggcgcccuccugaacgacaagcacuccaacgggaccaucaaggaccgguccccguaccgcacgcugaugagcugccccaucggcgaggugcccucccccuacaacagccgguucgagagcgucgcgugguccgccagcgccugccacgacgggaucaacuggcucaccaucggcaucuccggcccggacaacggggccguggcggugcugaaguacaacggcaucaucaccgacaccaucaagagcuggcgcaacaacauccugcggacgcaggaguccgagugcgccugcgucaacgggagcugcuucaccaucaugaccgacggccccuccgacggccaggccagcuacaagaucuuccgcaucgagaaggggaagaucgugaaguccguggagaugaacgcccccaacuaccacuacgaggagugcagcugcuaccccgacuccagcgagaucacgugcgucugccgggacaacuggcacggcuccaaccgcccgugggugagcuucaaccagaaccucgaguaccagaucggguacaucugcuccggcaucuucggggacaacccccggcccaacgacaagaccggcagcugcggccccguguccagcaacggggccaacggcgucaagggguucuccuucaaguacggcaacgggguguggaucggccgcaccaagagcaucagcucccggaagggcuucgagaugaucugggacccgaacggguggaccggcaccgacaacaacuucagcaucaagcaggacaucguggggaucaacgagugguccggcuacagcggguccuucguccagcaccccgagcugacgggccuggacugcauccgccccugcuucuggguggagcucauccggggccgccccaaggagaacaccaucuggaccagcggguccagcaucuccuucugcggcgugaacagcgacaccgucgggugguccuggccggacggcgcggagcugcccuucacgaucgacaaguga

SEQ ID NO: 84758 - RNA, 1410 nt, Artificial Sequence
  derived and/or modified CDS sequence (opt1) from neuraminidase__InfluenzaA__AEH59406
augaaccccaaccagaagaucaucaccaucggcagcgugugcaugaccaucgggauggccaaccugauccuccagaucggcaacaucaucuccaucuggaucagccacuccauccagcuggggaaccagagccagaucgagacgugcaaccaguccgucaucaccuacgagaacaacaccugggugaaccagaccuacgugaacaucagcaacacgaacuucgccgcgggccaguccgucgugagcgugaagcuggccgggaacuccagccucugcccggucuccggcugggccaucuacagcaaggacaacuccauccgcaucggcagcaagggggacguguucgugauccgggagcccuucaucuccugcagcccccuggagugccgcaccuucuuccugacccagggcgcccuccugaacgacaagcacuccaacgggaccaucaaggaccggagccccuaccgcacgcugauguccugcccgaucggcgagguccccagccccuacaacagccgguucgaguccguggccuggagcgcguccgccugccacgacgggaucaacuggcucaccaucggcaucagcggccccgacaacggggccguggccguccugaaguacaacggcaucaucaccgacaccaucaaguccuggcgcaacaacauccugcggacgcaggagagcgagugcgcgugcgugaacggguccugcuucaccaucaugaccgacggcccgagcgacggccaggccuccuacaagaucuuccgcaucgagaaggggaagaucgucaagagcguggagaugaacgcccccaccuaccacuacgaggagugcuccugcuaccccgacagcuccgagaucacgugcgugugccgggacaacuggcacggcagcaaccgccccuggguguccuucaaccagaaccucgaguaccagaucggguacaucugcagcggcaucuucggggacaacccgcggcccaacgacaagaccggcuccugcggccccgucagcuucaacggggccaacggcgugaagggguucuccuucaaguacggcaacgggguguggaucggccgcaccaagagcaucagcucccggaagggcuucgagaugaucugggaccccaacggguggaccggcacggacaacaacuucagcaucaagcaggacaucgucgggaucgacgagugguccggcuacagcggguccuucgugcagcacccggagcugaccggccuggacugcauccgccccugcuucuggguggagcucauccggggccgccccaaggagaacaccaucuggaccagcggguccagcaucuccuucugcggcgucaacagcgacacgguggggugguccuggcccgacggcgccgagcugccguucaccaucgacaaguga

SEQ ID NO: 84759 - RNA, 1410 nt, Artificial Sequence; identical to SEQ ID NO: 84281
  derived and/or modified CDS sequence (opt1) from neuraminidase__InfluenzaA__AEH59408

SEQ ID NO: 84760 - RNA, 1410 nt, Artificial Sequence
  derived and/or modified CDS sequence (opt1) from neuraminidase__InfluenzaA__AEH59412
augaaccccaaccagaagaucaucaccaucggcagcgugugcaugaccaucgggauggccaaccugauccuccagaucggcaacaucaucuccaucuggaucagccacuccauccagcuggggaaccagagccagaucgagacgugcaaccaguccgucaucaccuacgagaacaacaccugggugaaccagaccuacgugaacaucagcaacacgaacuucgccgcgggccaguccgucgugagcgugaagcuggccgggaacuccagccucugcccggucuccggcugggccaucuacagcaaggacaacuccauccgcaucggcagcaagggggacguguucgugauccgggagcccuucaucuccugcagcccccuggagugccgcaccuucuuccugacccagggcgcccuccugaacgacaagcacuccaacgggaccaucaaggaccggagccccuaccgcacgcugauguccugcccgaucggcgagguccccagccccuacaacagccgguucgaguccguggccuggagcgcguccgccugccacgacgggaucaacuggcucaccaucggcaucagcggccccgacaacggggccguggccguccugaaguacaacggcaucaucaccgacaccauccgcuccuggcggaacaacauccugcgcacgcaggagagcgagugcgcgugcgugaacggguccugcuucaccaucaugaccgacggcccgagcgacggccaggccuccuacaagaucuuccggaucgagaaggggaagaucaucaagagcguggagaugaacgcccccaacuaccacuacgaggagugcuccugcuaccccgacagcuccgagaucacgugcgucugccgcgacaacuggcacggcagcaaccggcccuggguguccuucaaccagaaccucgaguaccagaucggguacaucugcagcggcaucuucggggacaacccgcgccccaacgacaagaccggcuccugcggccccgugcugagcaacggggccaacggcgucaagggguucuccuucaaguacggcaacgggguguggaucggccggaccaagagcaucagcucccgcaagggcuucgagaugaucugggaccccaacggguggaccggcaccgacaacaacuucagcaucaagcaggacaucguggggaucaacgagugguccggcuacagcggguccuucguccagcacccggagcugacgggccucgacugcauccggcccugcuucuggguggagcugauccgcggccggcccaaggagaacaccaucuggaccagcggguccagcaucuccuucugcggcgugaacagcgacaccgucgggugguccuggcccgacggcgccgagcugccguucacgaucgacaaguga

SEQ ID NO: 84761 - RNA, 1410 nt, Artificial Sequence; identical to SEQ ID NO: 84733
  derived and/or modified CDS sequence (opt1) from neuraminidase__InfluenzaA__AEH59416

SEQ ID NO: 84762 - RNA, 1410 nt, Artificial Sequence; identical to SEQ ID NO: 80762
  derived and/or modified CDS sequence (opt1) from neuraminidase__InfluenzaA__AEH59584

SEQ ID NO: 84763 - RNA, 1410 nt, Artificial Sequence; identical to SEQ ID NO: 80762
  derived and/or modified CDS sequence (opt1) from neuraminidase__InfluenzaA__AEH59586

SEQ ID NO: 84764 - RNA, 1410 nt, Artificial Sequence; identical to SEQ ID NO: 80762
  derived and/or modified CDS sequence (opt1) from neuraminidase__InfluenzaA__AEH59588

SEQ ID NO: 84765 - RNA, 1410 nt, Artificial Sequence; identical to SEQ ID NO: 80762
  derived and/or modified CDS sequence (opt1) from neuraminidase__InfluenzaA__AEH59592

SEQ ID NO: 84766 - RNA, 1410 nt, Artificial Sequence; identical to SEQ ID NO: 80762
  derived and/or modified CDS sequence (opt1) from neuraminidase__InfluenzaA__AEH59594

SEQ ID NO: 84767 - RNA, 1410 nt, Artificial Sequence; identical to SEQ ID NO: 80762
  derived and/or modified CDS sequence (opt1) from neuraminidase__InfluenzaA__AEH59596

SEQ ID NO: 84768 - RNA, 1410 nt, Artificial Sequence; identical to SEQ ID NO: 80762
  derived and/or modified CDS sequence (opt1) from neuraminidase__InfluenzaA__AEH59598

SEQ ID NO: 84769 - RNA, 1410 nt, Artificial Sequence; identical to SEQ ID NO: 80762
  derived and/or modified CDS sequence (opt1) from neuraminidase__InfluenzaA__AEH59600

SEQ ID NO: 84770 - RNA, 1410 nt, Artificial Sequence
  derived and/or modified CDS sequence (opt1) from neuraminidase__InfluenzaA__AEH59602
augaaccccaaccagaagaucaucaccaucggcagcgugugcaugaccaucgggauggccaaccugauccuccagaucggcaacaucaucuccaucuggaucagccacuccauccagcuggggagccagaaccagaucgagacgugcaaccaguccgucaucaccuacgagaacaacaccugggugaaccagaccuacgugaacaucagcaacacgaacuucgccgcgggccaguccgucgugagcgugaagcuggccgggaacuccagccucugcccggucuccggcugggccaucuacagcaaggacaacuccauccgcaucggcagcaagggggacguguucgugauccgggagcccuucaucuccugcagcccccuggagugccgcaccuucuuccugacccagggcgcccuccugaacgacaagcacuccaacgggaccaucaaggaccggagccccuaccgcacgcugauguccugcccgaucggcgagguccccagccccuacaacagccgguucgaguccguggccuggagcgcguccgccugccacgacgggaucaacuggcucaccaucggcaucagcggccccgacaacggggccguggccguccugaaguacaacggcaucaucaccgacaccaucaaguccuggcgcaacaacauccugcggacgcaggagagcgagugcgcgugcgugaacggguccugcuucaccgugaugaccgacggcccgagcgacggccaggccuccuacaagaucuuccgcaucgagaaggggaagaucgucaagagcguggagaugaacgcccccaacuaccacuacgaggagugcuccugcuaccccgacagcuccgagaucacgugcgugugccgggacaacuggcacggcagcaaccgccccugggucuccuucaaccagaaccucgaguaccagaucggguacaucugcagcggcaucuucggggacaacccgcggcccaacgacaagaccggcuccugcggccccgugagcuccaacggggccaacggcgugaagggguucagcuucaaguacggcaacggggucuggaucggccgcaccaagagcaucuccagccggaacggcuucgagaugaucugggaccccaacggguggaccggcaccgacaacaacuucuccaucaagcaggacaucguggggaucaacgaguggagcggcuacuccgggagcuucgugcagcacccggagcugacgggccuggacugcauccgccccugcuucugggucgagcucauccggggccgccccaaggagaacaccaucuggaccuccgggagcuccaucagcuucugcggcgugaacuccgacaccgucggguggagcuggcccgacggcgccgagcugccguucacgaucgacaaguga

SEQ ID NO: 84771 - RNA, 1410 nt, Artificial Sequence; identical to SEQ ID NO: 80762
  derived and/or modified CDS sequence (opt1) from neuraminidase__InfluenzaA__AEH59606

SEQ ID NO: 84772 - RNA, 1410 nt, Artificial Sequence; identical to SEQ ID NO: 80762
  derived and/or modified CDS sequence (opt1) from neuraminidase__InfluenzaA__AEH59616

SEQ ID NO: 84773 - RNA, 1410 nt, Artificial Sequence; identical to SEQ ID NO: 80762
  derived and/or modified CDS sequence (opt1) from neuraminidase__InfluenzaA__AEH59626

SEQ ID NO: 84774 - RNA, 1413 nt, Artificial Sequence; identical to SEQ ID NO: 81485
  derived and/or modified CDS sequence (opt1) from neuraminidase__InfluenzaA__AEH77262

SEQ ID NO: 84775 - RNA, 1410 nt, Artificial Sequence
  derived and/or modified CDS sequence (opt1) from neuraminidase__InfluenzaA__AEH77273
augaaccccaaccagaagaucaucaccaucggcagcgugugcaugaccaucgggauggccaaccugauccuccagaucggcaacaucacguccaucuggaucagccacuccauccagcuggggaaccagaaccagaucgagaccugcaaccagagcgucaucaccuacgagaacaacaccugggugaaccagacguacgugaacaucuccaacaccaacuucgccgcgggccagagcgucguguccgugaagcuggccgggaacagcucccucugcccggucagcggcugggccaucuacuccaaggacaacagcauccgcaucggcuccaagggggacguguucgugauccgggagcccuucaucagcugcagcccccuggagugccgcaccuucuuccugacccagggcgcccuccugaacgacaagcacuccaacgggacgaucaaggaccggucccccuaccgcacccugaugagcugcccgaucggcgagguccccucccccuacaacagccgguucgagagcguggccugguccgcgagcgccugccacgacgggaucaacuggcucaccaucggcaucuccggccccgacaacggggccguggccguccugaaguacaacggcaucaucaccgacacgaucaagagcuggcgcaacaacauccugcggacccaggaguccgagugcgcgugcgugaacgggagcugcuucaccgugaugaccgacggcccguccgacggccaggccagcuacaagaucuuccgcaucgagaaggggaagaucgucaaguccguggagaugaacgcccccaacuaccacuacgaggagugcagcugcuaccccgacuccagcgagaucacgugcgugugccgggacaacuggcacggcuccaaccgccccugggucagcuucaaccagaaccucgaguaccagaucggguacaucugcuccggcaucuucggggacaacccgcggcccaacgacaagaccggcagcugcggccccguguccagcaacggggccaacggcgugaagggguucuccuucaaguacggcaacggggucuggaucggccgcaccaagagcaucagcucccggaacggcuucgagaugaucugggaccccaacggguggaccggcacggacaacaacuucagcaucaagcaggacaucguggggaucaacgagugguccggcuacagcggguccuucgugcagcacccggagcugaccggccuggacugcauccgccccugcuucugggucgagcucauccggggccgccccaaggagaacaccaucuggaccagcggguccagcaucuccuucugcggcgugaacagcgacacggucgggugguccuggcccgacggcgccgagcugccguucaccaucgacaaguga

SEQ ID NO: 84776 - RNA, 1410 nt, Artificial Sequence
  derived and/or modified CDS sequence (opt1) from neuraminidase__InfluenzaA__AEH77282
augaaccccaaccagaagaucaucaccaucggcagcgugucccugaccaucgccacgaucugcuuccucaugcagaucgccauccuggucaccaccgugacccugcacuucaagcagcacgagugcaacagcccgcccaacaaccaggugaugcucugcgagcccacgaucaucgagcgcaacaucaccgagaucgucuaccugaccaacaccacgaucgagaaggagaucugccccaagcuggcggaguaccggaacugguccaagccgcagugcaacaucaccggguucgcccccuucagcaaggacaacuccauccgccucagcgccggcggggacaucugggugacccgggagcccuacguguccugcgaccccgacaagugcuaccaguucgcccugggccaggggaccacgcugaacaacggccacagcaacgacaccguccacgaccgcaccccguaccggacccuccugaugaacgagcugggcgugcccuuccaccucgggacgcgccaggugugcaucgccugguccagcuccagcugccacgacggcaaggcguggcugcacgucugcgugaccggggacgacaagaacgccaccgccuccuucaucuacaacggccggcugguggacagcaucggguccuggagcaagaagauccuccgcacccaggaguccgagugcgucugcaucaacggcacgugcaccguggugaugaccgacggcagcgccuccgggaaggcggacaccaagauccuguucgucgaggagggcaagaucgugcacaucagcacgcugagcggguccgcccagcacguggaggagugcagcugcuacccccgguaccccggcguccgcugcgugugccgggacaacuggaagggcuccaaccgcccgaucguggacaucaacgucaaggacuacagcaucguguccagcuacgugugcuccgggcucgucggcgacacgccccggaagaacgacagcuccagcuccagccacugccuggaccccaacaacgaggagggcgggcacggggugaagggcugggccuucgacgacggcaacgacgucuggauggggcgcaccaucuccgagaagcugcggagcggcuacgagaccuucaaggugaucgaggggugguccaagcccaacagcaagcuccagaucaaccgccaggugaucgucgagcggggcaaccgcuccggguacagcggcaucuucuccguggagggcaagagcugcaucaaccggugcuucuacguggagcugauccgcgggcggaaggaggagaccgaggucugguggaccagcaacuccaucgugguguucugcggcaccagcgggaccuacggcacgggguccuggccggacggcgccgacaucaaccugaugcccaucuga

SEQ ID NO: 84777 - RNA, 1410 nt, Artificial Sequence; identical to SEQ ID NO: 80762
  derived and/or modified CDS sequence (opt1) from neuraminidase__InfluenzaA__AEI29218

SEQ ID NO: 84778 - RNA, 1410 nt, Artificial Sequence; identical to SEQ ID NO: 82129
  derived and/or modified CDS sequence (opt1) from neuraminidase__InfluenzaA__AEI29228

SEQ ID NO: 84779 - RNA, 1410 nt, Artificial Sequence; identical to SEQ ID NO: 78161
  derived and/or modified CDS sequence (opt1) from neuraminidase__InfluenzaA__AEI54350

SEQ ID NO: 84780 - RNA, 1410 nt, Artificial Sequence; identical to SEQ ID NO: 78174
  derived and/or modified CDS sequence (opt1) from neuraminidase__InfluenzaA__AEI54361

SEQ ID NO: 84781 - RNA, 1410 nt, Artificial Sequence; identical to SEQ ID NO: 78738
  derived and/or modified CDS sequence (opt1) from neuraminidase__InfluenzaA__AEI54372

SEQ ID NO: 84782 - RNA, 1410 nt, Artificial Sequence; identical to SEQ ID NO: 78615
  derived and/or modified CDS sequence (opt1) from neuraminidase__InfluenzaA__AEI54383

SEQ ID NO: 84783 - RNA, 1410 nt, Artificial Sequence; identical to SEQ ID NO: 78738
  derived and/or modified CDS sequence (opt1) from neuraminidase__InfluenzaA__AEI54394

SEQ ID NO: 84784 - RNA, 1410 nt, Artificial Sequence; identical to SEQ ID NO: 79908
  derived and/or modified CDS sequence (opt1) from neuraminidase__InfluenzaA__AEI54416

SEQ ID NO: 84785 - RNA, 1410 nt, Artificial Sequence; identical to SEQ ID NO: 84728
  derived and/or modified CDS sequence (opt1) from neuraminidase__InfluenzaA__AEI54427

SEQ ID NO: 84786 - RNA, 1410 nt, Artificial Sequence; identical to SEQ ID NO: 83542
  derived and/or modified CDS sequence (opt1) from neuraminidase__InfluenzaA__AEI54438

SEQ ID NO: 84787 - RNA, 1410 nt, Artificial Sequence; identical to SEQ ID NO: 83542
  derived and/or modified CDS sequence (opt1) from neuraminidase__InfluenzaA__AEI54449

SEQ ID NO: 84788 - RNA, 1410 nt, Artificial Sequence; identical to SEQ ID NO: 83542
  derived and/or modified CDS sequence (opt1) from neuraminidase__InfluenzaA__AEI54460

SEQ ID NO: 84789 - RNA, 1410 nt, Artificial Sequence
  derived and/or modified CDS sequence (opt1) from neuraminidase__InfluenzaA__AEI54471
augaaccccaaccagaagaucaucaccaucggcagcgugucccugaccaucagcacgaucugcuucuucaugcagaucgccguccucaucaccaccgugacccugcacuucaagcaguacaaguucaacuccccgcccaacaaccaggugaugcugugcgagcccacgaucaucgagcgcaacaucaccgagaucgucuaccucaccaacaccacgaucgagaaggagaucugccccaagcuggccgaguaccggaacuggagcaagccgcagugcgacaucaccggguucgcgcccuucuccaaggacaacagcauccgccuguccgccggcggggacaucugggugacccgggagcccuacgugagcugcgaccccgacaagugcuaccaguucgcccucggccaggggaccacgcugaacaacguccacuccaacaacaccgugcgcgaccggaccccguaccgcacccugcucaugaacgagcugggcgugcccuuccaccugggcacgaagcaggucugcaucgccuggagcuccagcuccugccacgacgggaaggccuggcuccacgugugcaucaccggcgacgacaagaacgcgaccgccagcuucaucuacaacgggcggcugguggacuccgucgugagcugguccaaggagauccugcgcacccaggagagcgagugcgugugcaucaacggcacgugcaccgucgugaugaccgacggguccgccagcggcaaggccgacaccaagauccucuucaucgaggagggcaagaucgugcacacgagcacccuguccgggagcgcgcagcacgucgaggagugcuccugcuacccccgguaccccggcgugcgcugcgugugccgggacaacuggaaggggagcaaccgcccgaucgucgacaucaacaucaaggaccacuccaucgugagcuccuacgugugcagcggccuggucggcgacacgccccggaagaacgacuccagcuccagcucccacugccucgaccccaacaacgaggagggcgggcacggggugaagggcugggccuucgacgacgggaacgacgucuggaugggccgcaccaucaacgagaccagccggcugggcuacgagaccuucaaggugaucgaggggugguccaaccccaagagcaagcugcagaucaaccgccaggugaucgucgaccggggcaaccgcuccggguacagcggcaucuucuccguggagggcaagagcugcaucaaccggugcuucuacguggagcucauccgcgggcggaaggaggagaccgagguccuguggaccagcaacuccaucgugguguucugcggcacgagcgggaccuacggcaccggguccuggccggacggcgccgaccugaaccucaugcccaucuga

SEQ ID NO: 84790 - RNA, 1410 nt, Artificial Sequence; identical to SEQ ID NO: 83434
  derived and/or modified CDS sequence (opt1) from neuraminidase__InfluenzaA__AEI54482

SEQ ID NO: 84791 - RNA, 1410 nt, Artificial Sequence
  derived and/or modified CDS sequence (opt1) from neuraminidase__InfluenzaA__AEI54493
augaaccccaaccagaagaucaucaccaucggcagcgugucccugaccaucagcacgaucugcuucuucaugcagaucgccauccucaucaccaccgucacccugcacuucaagcaguacgaguucaacuccccgcccaacaaccaggugaugcugugcgagcccacgaucaucgagcgcaacaucaccgagaucguguaccucaccaacaccacgaucgagaaggagaucugccccaagcuggccgaguaccggaacuggagcaagccgcagugcgacaucaccggguucgcgcccuucuccaaggacaacagcauccgccuguccgccggcggggacaucugggucacccgggagcccuacgugagcugcgaccccgacaagugcuaccaguucgcccucggccaggggaccacgcugaacaacgugcacuccaacaacaccguccgcgaccggaccccguaccgcacccugcucaugaacgagcugggcgugcccuuccaccugggcacgaagcaggucugcaucgccuggagcuccagcuccugccacgacgggaaggccuggcuccacgugugcaucaccggcgacgacaagaacgcgaccgccagcuucaucuacaacgggcggcugguggacuccguggucagcugguccaaggagauccugcgcacccaggagagcgagugcgugugcaucaacggcacgugcaccguggucaugaccgacggguccgccagcggcaaggccgacaccaagauccucuucaucgaggagggcaagaucgugcacacgagcacccuguccgggagcgcgcagcacguggaggagugcuccugcuacccccgguaccccggcguccgcugcgugugccgggacaacuggaaggggagcaaccgcccgaucguggacaucaacaucaaggaccacuccaucgucagcuccuacgugugcagcggccuggugggcgacacgccccggaagaacgacuccagcuccagcucccacugccucgaccccaacaacgaggagggcgggcacggggucaagggcugggccuucgacgacgggaacgacguguggaugggccgcaccaucaacgagaccagccggcugggcuacgagaccuucaaggucaucgaggggugguccaaccccaagagcaagcugcagaucaaccgccaggugaucguggaccggggcaaccgcuccggguacagcggcaucuucuccgucgagggcaagagcugcaucaaccggugcuucuacguggagcucauccgcgggcggaaggaggagaccgaggugcuguggaccagcaacuccaucgucguguucugcggcacgagcgggaccuacggcaccggguccuggccggacggcgccgaccugaaccucaugagcaucuga

SEQ ID NO: 84792 - RNA, 1410 nt, Artificial Sequence; identical to SEQ ID NO: 83542
  derived and/or modified CDS sequence (opt1) from neuraminidase__InfluenzaA__AEI54504

SEQ ID NO: 84793 - RNA, 1410 nt, Artificial Sequence; identical to SEQ ID NO: 83062
  derived and/or modified CDS sequence (opt1) from neuraminidase__InfluenzaA__AEI59982

SEQ ID NO: 84794 - RNA, 1413 nt, Artificial Sequence; identical to SEQ ID NO: 83960
  derived and/or modified CDS sequence (opt1) from neuraminidase__InfluenzaA__AEI59993

SEQ ID NO: 84795 - RNA, 1413 nt, Artificial Sequence; identical to SEQ ID NO: 83956
  derived and/or modified CDS sequence (opt1) from neuraminidase__InfluenzaA__AEI60004

SEQ ID NO: 84796 - RNA, 1410 nt, Artificial Sequence
  derived and/or modified CDS sequence (opt1) from neuraminidase__InfluenzaA__AEI60015
augaaccccaaccagaagaucaucaccaucggcagcgugucccugaccaucagcacgaucugcuucuucaugcagaucgccauccucaucaccaccgucacccugcacuucaagcaguacgaguucaacuccccgcccaacaaccaggugaugcugugcgagcccacgaucaucgagcgcaacaucaccgagaucguguaccucaccaacaccacgaucgagaaggagaucugccccaagcuggccgaguaccggaacuggagcaagccgcagugcgacaucaccggguucgcgcccuucuccaaggacaacagcauccgccuguccgccggcggggacaucugggucacccgggagcccuacgugagcugcgaccccgacaagugcuaccaguucgcccucggccaggggaccacgcugaacaacgugcacuccaacaacaccguccgcgaccggaccccguaccgcacccugcucaugaacgagcugggcgugcccuuccaccugggcacgaagcaggucugcaucgccuggagcuccagcuccugccacgacgggaaggccuggcuccacgugugcaucaccggcgacgacaagaacgcgaccgccagcuucaucuacaacgggcggcugguggacuccguggucagcugguccaaggagauccugcgcacccaggagagcgagugcgugugcaucaacggcacgugcaccguggucaugaccgacggguccgccagcggcaaggccgacaccaagauccucuucaucgaggagggcaagaucgugcacacgagcacccuguccgggagcgcgcagcacguggaggagugcuccugcuacccccgguaccccggcguccgcugcgugugccgggacaacuggaaggggagcaaccgcccgaucguggacaucaacaucaaggaccacuccaucgucagcuccuacgugugcagcggccuggugggcgacacgccccggaagaacgacuccagcuccagcgggcacugccucgaccccaacaacgaggagggcgggaacggcgucaaggggugggccuucgacgacggcaacgacguguggaugggccgcaccaucuccgagaagucccggcugggguacgagaccuucaaggucaucgagggcuggagcaaccacaagagcaagcugcagaucaaccgccaggugaucguggaccgggggaaccgcuccggcuacagcgggaucuucuccgucgagggcaagagcugcaucaaccggugcuucuacguggagcucauccgcggccggaaggaggagaccgaggugcuguggaccagcaacuccaucgucguguucugcgggaccagcggcacguacgggaccggcuccuggcccgacggggccgaccugaaccucaugccgaucuga

SEQ ID NO: 84797 - RNA, 1410 nt, Artificial Sequence; identical to SEQ ID NO: 82508
  derived and/or modified CDS sequence (opt1) from neuraminidase__InfluenzaA__AEI60026

SEQ ID NO: 84798 - RNA, 1410 nt, Artificial Sequence
  derived and/or modified CDS sequence (opt1) from neuraminidase__InfluenzaA__AEI60037
augaaccccaaccagaagaucaucaccaucggcagcgugucccugaccaucagcacgaucugcuucuucaugcagaucgccauccucaucaccaccgucacccugcacuucaagcaguacgaguucaacuccccgcccaacaaccaggugaugcugugcgagcccacgaucaucgagcgcaacaucaccgagaucguguaccucaccaacaccacgaucgagaaggagaucugccccaagcuggccgaguaccggaacuggagcaagccgcagugcgacaucaccggguucgcgcccuucuccaaggacaacagcauccgccuguccgccggcggggacaucugggucacccgggagcccuacgugagcugcgaccccgacaagugcuaccaguucgcccucggccaggggaccacgcugaacaacgugcacuccaacaacaccguccgcgaccggaccccguaccgcacccugcucaugaacgagcugggcgugcccuuccaccugggcacgaagcaggucugcaucgccuggagcuccagcuccugccacgacgggaaggccuggcuccacgugugcaucaccggcgacgacaagaacgcgaccgccagcuucaucuacaacgggcggcugguggacuccguggucagcugguccaaggagauccugcgcacccaggagagcgagugcgugugcaucaacggcacgugcaccguggucaugaccgacggguccgccagcggcaaggccgacaccaagauccucuucaucgaggagggcaagaucgugcacacgagcacccuguccgggagcgcgcagcacguggaggagugcuccugcuacccccgguaccccggcguccgcugcgugugccgggacaacuggaaggggagcaaccgcccgaucguggacaucaacaucaaggaccacuccaucgucagcuccuacgugugcagcggccuggugggcgacacgccccggcgcaacgacuccagcuccagcucccacugccucgaccccaacaacgaggagggcgggcacggggucaagggcugggccuucgacgacgggaacgacguguggaugggccggaccaucagcgagaagucccgccugggcuacgagaccuucaaggucaucgagggguggagcaaccacaaguccaagcugcagaucaaccgccaggugaucguggaccggggcaaccggagcggguacuccggcaucuucagcgucgagggcaagagcugcaucaaccgcugcuucuacguggagcucauccgggggcgcaaggaggagaccgaggugcuguggaccuccaacagcaucgucguguucugcggcaccuccgggacguacggcaccgggagcuggcccgacggcgccgaccugaaccucaugccgaucuga

SEQ ID NO: 84799 - RNA, 1410 nt, Artificial Sequence
  derived and/or modified CDS sequence (opt1) from neuraminidase__InfluenzaA__AEI60048
augaaccccaaccagaagaucaucaccaucggcagcgugucccugaccaucagcacgaucugcuucuucaugcagaucgccauccucaucaccaccgucacccugcacuucaagcaguacgaguucaacuccccgcccaacaaccaggugaugcugugcgcccccacgaucaucgagcgcaacaucaccgagaucguguaccucaccaacaccacgaucgagaaggagaucugccccaagcuggcggaguaccggaacuggagcaagccgcagugcgacaucaccggguucgcccccuucuccaaggacaacagcauccgccuguccgccggcggggacaucugggucacccgggagcccuacgugagcugcgaccccgacaagugcuaccaguucgcccucggccaggggaccacgcugaacaacgugcacuccaacaacaccguccgcgaccggaccccguaccgcacccugcucaugaacgagcugggcgugcccuuccaccugggcacgaagcaggucugcaucgccuggagcuccagcuccugccacgacgggaaggcguggcuccacgugugcaucaccggcgacgacaagaacgccaccgccagcuucaucuacaacgggcggcugguggacuccguggucagcugguccaaggagauccugcgcacccaggagagcgagugcgugugcaucaacggcacgugcaccguggucaugaccgacggguccgccagcggcaaggcggacaccaagauccucuucaucgaggagggcaagaucgugcacacgagcacccuguccgggagcgcccagcacguggaggagugcuccugcuacccccgguaccccggcguccgcugcgugugccgggacaacuggaaggggagcaaccgcccgaucguggacaucaacaucaaggaccacuccaucgucagcuccuacgugugcagcggccuggugggcgacacgccccggaagaacgacuccagcuccagcucccacugccucgaccccaacaacgaggagggcgggcacggggucaagggcugggccuucgacgacgggaacgacguguggaugggccgcaccaucagcgagaagucccggcugggcuacgagaccuucaaggucaucgagggguggagcaaccccaaguccaagcugcagaucaaccgccaggugaucguggaccggggcaaccgcagcggguacuccggcaucuucagcgucgagggcaagagcugcaucaaccggugcuucuacguggagcucauccgcgggcggaaggaggagaccgaggugcuguggaccuccaacagcaucgucguguucugcggcaccuccgggacguacggcaccgggagcuggccggacggcgccgacaucaaccugaugcccaucuga

SEQ ID NO: 84800 - RNA, 1410 nt, Artificial Sequence
  derived and/or modified CDS sequence (opt1) from neuraminidase__InfluenzaA__AEI60089
augaaccccaaccagaagaucaucaccaucggcagcgugugcaugaccaucgggauggccaaccugauccuccagaucggcaacaucaucuccaucuggaucagccacuccauccagcuggggaaccagaaccagaucgagacgugcaaccagagcgucaucaccuacgagaacaacaccugggugaaccagaccuacgugaacaucuccaacacgaacuucgccgcgggccagagcgucguguccgugaagcuggccgggaacagcucccucugcccggucagcggcugggccaucuacuccaaggacaacagcauccgcaucggcuccaagggggacguguucgugauccgggagcccuucaucagcugcagcccccuggagugccgcaccuucuuccugacccagggcgcccuccugaacgacaagcacuccaacgggaccaucaaggaccggucccccuaccgcacgcugaugagcugcccgaucggcgagguccccucccccuacaacagccgguucgagagcguggccugguccgcgagcgccugccacgacgggaucaacuggcucaccaucggcaucuccggccccgacaacggggccguggccguccugaaguacaacggcaucaucaccgacaccaucaagagcuggcgcaacaacauccugcggacgcaggaguccgagugcgcgugcgugaacgggagcugcuucaccaucaugaccgacggcccguccgacggccaggccagcuacaagaucuuccgcaucgagaaggggaagaucgugaaguccgucgagaugaacgcccccaacuacuacuacgaggagugcagcugcuaccccgacuccagcgagaucacgugcgugugccgggacaacuggcacggcuccaaccgccccugggugagcuucaaccagaaccucgaguaccagaucggguacaucugcuccggcaucuucggggacaacccgcggcccaacgacaagaccggcagcugcggccccgucuccagcaacggggccaacggcgugaagggguucuccuucaaguacggcaacgggguguggaucggccgcaccaagagcaucagcucccggaagggcuucgagaugaucugggaccccaacggguggaccggcaccgacaacaacuucagcaucaagcaggacaucgucgggaucaacgagugguccggcuacagcggguccuucgugcagcacccggagcugacgggccuggacugcauccgccccugcuucuggguggagcucauccggggccgccccaaggagaacaccaucuggaccagcggguccagcaucuccuucugcggcgucaacagcgacaccguggggugguccuggcccgacggcgccgagcugccguucacgaucgacaaguga

SEQ ID NO: 84801 - RNA, 1410 nt, Artificial Sequence; identical to SEQ ID NO: 84733
  derived and/or modified CDS sequence (opt1) from neuraminidase__InfluenzaA__AEI60099

SEQ ID NO: 84802 - RNA, 1410 nt, Artificial Sequence
  derived and/or modified CDS sequence (opt1) from neuraminidase__InfluenzaA__AEI60111
augaaccccaaccagaagaucaucaccaucggcagcaucucccugaccaucgccacgaucugcuuccucaugcagaucgccauccuggugaccaccgucacccugcacuucaagcaguacaagugcaacagcccgcccaacaaccgcgugaugcucugcgagcccacgaucaucgagcggaacaucaccgagaucguguaccugaccaacaccacgaucgagaaggagaucugccccaagcuggcggaguaccgcaacugguccaagccgcagugcaacaucaagggguucgcccccuucagcaaggacaacuccauccggcucagcgccggcggggacaucugggucacccgcgagcccuacguguccugcgaccccgacaagugcuaccaguucgcccugggccaggggaccacccugaacaacggccacagcaacgacacggugcacgaccggaccccguaccgcacccuccugaugaacgagcugggcguccccuuccaccucgggacccgccaggugugcaucgccugguccagcuccagcugccacgacggcaaggcguggcugcacgugugcaucacgggggacgacgagaacgccaccgccuccuucaucuacaacggccggcuggucgacagcaucggguccuggagcaagaagauccuccggacccaggaguccgagugcgugugcaucaacgggaccugcacgguggucaugaccgacggcagcgccuccgggaaggcggacaccaagauccuguucaucgaggagggcaagaucgugcacaucagcacccugagcggguccgcccagcacguggaggagugcagcugcuacccccgcuaccccggcguccggugcgugugccgcgacaacuggaagggcuccaaccggccgaucguggacaucaacguccgcgacuacagcaucguguccagcuacgugugcuccgggcucgucggcgacacgccccggaagaacgacagcuucuccagcucccacugccuggaccccaacaacgaggagggcggccacggggugaagggcugggccuucgacgacggcaacgacguguggauggggcgcaccaucagcgagaagcugcgguccggcuacgagaccuucaaggucaucgagggguggagcaagcccaacuccaagcuccaggugaaccgccaggucaucguggagcggggcaaccgcagcggguacuccggcaucuucagcguggagggcaaguccugcaucaaccggugcuucuacgucgagcugauccgcgggcgcaaggaggagaccaaggugugguggacgagcaacagcaucguggucuucugcggcaccuccgggaccuacggcaccgggagcuggccggacggcgccgacaucaacaucaugcccaucuga

SEQ ID NO: 84803 - RNA, 1410 nt, Artificial Sequence; identical to SEQ ID NO: 80762
  derived and/or modified CDS sequence (opt1) from neuraminidase__InfluenzaA__AEI73669

SEQ ID NO: 84804 - RNA, 1410 nt, Artificial Sequence
  derived and/or modified CDS sequence (opt1) from neuraminidase__InfluenzaA__AEI86727
augaaccccaaccagaagaucaucaccaucggcagcgugugcaucaccaucgggauggccaaccugauccuccagaucggcaacaucaucuccaucuggaucagccacuccauccagcuggggaaccagaaccagaucgagacgugcaaccagagcgucaucaccuacgagaacaacaccugggugaaccagaccuacgugaacaucuccaacacgaacuucgccgcgggccagagcgucguguccgugaagcuggccgggaacagcucccucugcccggucagcggcugggccaucuacuccaaggacaacagcauccgcaucggcuccaagggggacguguucgugauccgggagcccuucaucagcugcagcccccuggagugccgcaccuucuuccugacccagggcgcccuccugaacgacaagcacuccaacgggaccaucaaggaccggucccccuaccgcacgcugaugagcugcccgaucggcgagguccccucccccuacaacagcaaguucgagagcguggccugguccgcgagcgccugccacgacgggaucuccuggcucaccaucggcaucagcggccccgacaacggggccguggccguccugaaguacaacggcaucaucaccgacaccaucaaguccuggcggaacaacauccugcgcacgcaggagagcgagugcgcgugcgugaacggguccugcuucaccgugaugaccgacggcccgagcgacggccaggccuccuacaagaucuuccggaucgagaaggggaagaucgucaagagcguggagaugaacgcccccaacuaccacuacgaggagugcuccugcuaccccgacagcuccgagaucacgugcgugugccgcgacaacuggcacggcagcaaccggcccugggucuccuucaaccagaaccucgaguaccagaucggguacaucugcagcggcaucuucggggacaacccgcgccccaacgacaagaccggcuccugcggccccgugagcuccaacggggccaacggcgugaagggguucagcuucaaguacggcaacggggucuggaucggccggaccaagagcaucuccagccgcaacggcuucgagaugaucugggaccccaacggguggaccggcaccgacaacaacuucuccaucaagcaggacaucguggggaucaacgaguggagcggcuacuccgggagcuucgugcagcacccggagcugacgggccuggacugcauccggcccugcuucugggucgagcucauccgcggccggcccaaggagaacaccaucuggaccuccgggagcuccaucagcuucugcggcgugaacuccgacaccgucggguggagcuggcccgacggcgccgagcugccguucacgaucgacaaguga

SEQ ID NO: 84805 - RNA, 1410 nt, Artificial Sequence
  derived and/or modified CDS sequence (opt1) from neuraminidase__InfluenzaA__AEI86737
augaaccccaaccagaagaucaucaccaucggcagcgugugcaugaccaucgggauggccaaccugauccuccagaucggcaacaucaucuccaucuggaucagccacuccauccagcuggggaaccagaaccagaucgagacgugcaaccagagcgucaucaccuacgagaacaagaccugggugaaccagaccuacgugaacaucuccaacacgaacuucgccgcgggccagagcgucguguccgugaagcuggccgggaacagcucccucugcccggucagcggcugggccaucuacuccaaggacaacagcauccgcaucggcuccaagggggacguguucgugauccgggagcccuucaucagcugcagcccccuggagugccgcaccuucuuccugacccagggcgcccuccugaacgacaagcacuccaacgggaccaucaaggaccggucccccuaccgcacgcugaugagcugcccgaucggcgagguccccucccccuacaacagccgguucgagagcguggccugguccgcgagcgccugccacgacgggaucaacuggcucaccaucggcaucuccggccccgacaacggggccguggccguccugaaguacaacggcaucaucaccgacaccaucaagagcuggcgcaacaacauccugcggacgcaggaguccgagugcgcgugcgugaacgggagcugcuucaccgugaugaccgacggcccguccgacggccaggccagcuacaagaucuuccgcaucgagaaggggaaggucgugaaguccguggagaugaacgcccccaacuaccacuacgaggagugcagcugcuaccccgacuccagcgagaucacgugcgucugccgggacaacuggcacggcuccaaccgccccugggugagcuucaaccagaaccucgaguaccagaucggguacaucugcuccggcaucuucggggacaacccgcggcccaacgacaagaccggcagcugcggccccguguccagcaacggggccaacggcgucaagggguucuccuucaaguacggcaacgggguguggaucggccgcaccaagagcaucagcucccggaacggcuucgagaugaucugggaccccaacggguggaccggcaccgacaacaacuucagcaucaagcaggacaucguggggaucaacgagugguccggcuacagcggguccuucguccagcacccggagcugacgggccuggacugcauccgccccugcuucuggguggagcucauccggggccgccccaaggagaacaccaucuggaccagcggguccagcaucuccuucugcggcgucaacagcgacaccguggggugguccuggcccgacggcgccgagcugccguucacgaucgacaaguga

SEQ ID NO: 84806 - RNA, 1410 nt, Artificial Sequence
  derived and/or modified CDS sequence (opt1) from neuraminidase__InfluenzaA__AEI86757
augaaccccaaccagaagaucaucaccaucggcagcgugugcaucaccaucgggauggccaaccugauccuccagaucggcaacaucaucuccaucuggaucagccacuccauccagcuggggaaccagaaccagaucgagacgugcaaccagagcgucaucaccuacgagaacaacaccugggugaaccagaccuacgugaacaucuccaacacgaacuucgccgcgggccagagcgucguguccgugaagcuggccgggaacagcucccucugcccggucagcggcugggccaucuacuccaaggacaacagcauccgcaucggcuccaagggggacguguucgugauccgggagcccuucaucagcugcagcccccuggagugccgcaccuucuuccugacccagggcgcccuccugaacgacaagcacuccaacgggaccaucaaggaccggucccccuaccgcacgcugaugagcugcccgaucggcgagguccccucccccuacaacagccgguucgagagcguggccugguccgcgagcgccugccacgacgggaucuccuggcucaccaucggcaucagcggccccgacaacggggccguggccguccugaaguacaacggcaucaucaccgacaccaucaaguccuggcgcaacaacauccugcggacgcaggagagcgagugcgcgugcgugaacggguccugcuucaccgugaugaccgacggcccgagcgacggccaggccuccuacaagaucuuccgcaucgagaaggggaagaucgucaagagcguggagaugaacgcccccaacuaccacuacgaggagugcuccugcuaccccgacagcuccgagaucacgugcgugugccgggacaacuggcacggcagcaaccgccccugggucuccuucaaccagaaccucgaguaccagaucggguacaucugcagcggcaucuucggggacaacccgcggcccaacgacaagaccggcuccugcggccccgugagcuccaacggggccaacggcgugaagggguucagcuucaaguacggcaacggggucuggaucggccgcaccaagagcaucaucucccggaacggcuucgagaugaucugggaccccaacggguggaccggcaccgacaacaacuucagcaucaagcaggacaucguggggaucaacgagugguccggcuacagcggguccuucgugcagcacccggagcugacgggccuggacugcauccgccccugcuucugggucgagcucauccggggccgccccaaggagaacaccaucuggaccagcggguccagcaucuccuucugcggcgugaacagcgacaccgucgggugguccuggcccgacggcgccgagcugccguucacgaucgacaaguga

SEQ ID NO: 84807 - RNA, 1410 nt, Artificial Sequence
  derived and/or modified CDS sequence (opt1) from neuraminidase__InfluenzaA__AEI86767
augaaccccaaccagaagaucaucaccaucggcagcgugugcaucaccaucgggauggccaaccugauccuccagaucggcaacaucaucuccaucuggaucagccacuccauccagcuggggaaccagaaccagaucgagacgugcaaccagagcgucaucaccuacgagaacaacaccugggugaaccagaccuacgugaacaucuccaacacgaacuucgccgcgggccagagcgucguguccgugaagcuggccgggaacagcucccucugcccggucagcggcugggccaucuacuccaaggacaacagcauccgcaucggcuccaagggggacguguucgugauccgggagcccuucaucagcugcagcccccuggagugccgcaccuucuuccugacccagggcgcccuccugaacgacaagcacuccaacgggaccaucaaggaccggucccccuaccgcacgcugaugagcugcccgaucggcgagguccccucccccuacaacagccgguucgagagcguggccugguccgcgagcgccugccacgacgggaucuccuggcucaccaucggcaucagcggccccgacaacggggccguggccguccugaaguacaacggcaucaucaccgacaccaucaaguccuggcgcaacaacauccugcggacgcaggagagcgagugcgcgugcgugaacggguccugcuucaccgugaugaccgacggcccgagcgacggccaggccuccuacaagaucuuccgcaucgagaaggggaagaucgucaagagcguggagaugaacgcccccaacuaccacuacgaggagugcuccugcuaccccgacagcuccgagaucacgugcgugugccgggacaacuggcacggcagcaaccgccccugggucuccuucaaccacaaccucgaguaccagaucggguacaucugcagcggcaucuucggggacaacccgcggcccaacgacaagaccggcuccugcggccccgugagcuccaacggggccaacggcgugaagggguucagcuucaaguacggcaacggggucuggaucggccgcaccaagagcaucuccagccggaacggcuucgagaugaucugggaccccaacggguggaccggcaccgacaacaacuucuccaucaagcaggacaucguggggaucaacgaguggagcggcuacuccgggagcuucgugcagcacccggagcugacgggccuggacugcauccgccccugcuucugggucgagcucauccggggccgccccaaggagaacaccaucuggaccuccgggagcuccaucagcuucugcggcgugaacuccgacaccgucggguggagcuggcccgacggcgccgagcugccguucacgaucgacaaguga

SEQ ID NO: 84808 - RNA, 1410 nt, Artificial Sequence; identical to SEQ ID NO: 84807
  derived and/or modified CDS sequence (opt1) from neuraminidase__InfluenzaA__AEI86777

SEQ ID NO: 84809 - RNA, 1410 nt, Artificial Sequence
  derived and/or modified CDS sequence (opt1) from neuraminidase__InfluenzaA__AEI86787
augaaccccaaccagaagaucaucaccaucggcagcgugugcaugaccaucgggauggccaaccugaugcuccagaucggcaacaucaucuccaucuggaucagccacuccauccagcuggggaaccagaaccagaucgagacgugcaaccagagcgucaucaccuacgagaacaacaccugggugaaccagaccuacgugaacaucuccaacacgaacuucgccgcgggccagagcgucguguccgugaagcuggccgggaacagcucccucugcccggucagcggcugggccaucuacuccaaggacaacagcauccgcaucggcuccaagggggacguguucgugauccgggagcccuucaucagcugcagcccccuggagugccgcaccuucuuccugacccagggcgcccuccugaacgacaagcacuccaacgggaccaucaaggaccggucccccuaccgcacgcugaugagcugcccgaucggcgagguccccucccccuacaacagccgguucgagagcguggccugguccgcgagcgccugccacgacgggaucaacuggcucaccaucggcaucuccggccccgacaacggggccguggccguccugaaguacaacggcaucaucaccgacaccaucaagagcuggcgcaacaacauccugcggacgcaggaguccgagugcgcgugcgugaacgggagcugcuucaccgugaugaccgacggcccguccgacggccaggccagcuacaagaucuuccgcaucgagaaggggaagaucgucaaguccguggagaugaacgcccccaacuaccacuacgaggagugcagcugcuaccccgacuccagcgagaucacgugcgugugccgggacaacuggcacggcuccaaccgccccugggucagcuucaaccagaaccucgaguaccagaucggguacaucugcuccggcaucuucggggacaacccgcggcccaacgacaagaccggcagcugcggccccguguccagcaacggggccaacggcgugaagggguucuccuucaaguacggcaacggggucuggaucggccgcaccaagagcaucagcucccggaacggcuucgagaugaucugggaccccaacggguggaccggcaccgacaacaacuucagcaucaagcaggacaucguggggaucaacgagugguccggcuacagcggguccuucgugcagcacccggagcugacgggccuggacugcauccgccccugcuucugggucgagcucauccggggccgccccaaggagaacaccaucuggaccagcggguccagcaucuccuucugcggcgugaacagcgacaccgucgggugguccuggcccgacggcgccgagcugccguucacgaucgacaaguga

SEQ ID NO: 84810 - RNA, 1410 nt, Artificial Sequence
  derived and/or modified CDS sequence (opt1) from neuraminidase__InfluenzaA__AEI86797
augaaccccaaccagaagaucaucaccaucggcagcgugugcaucaccaucgggauggccaaccugauccuccagaucggcaacaucaucuccaucuggaucagccacuccauccagcuggggaaccagaaccagaucgagacgugcaaccagagcgucaucaccuacgagaacaacaccugggugaaccagaccuacgugaacaucuccaacacgaacuucgccgcgggccagagcgucguguccgugaagcuggccgggaacagcucccucugcccggucagcggcugggccaucuacuccaaggacaacagcauccgcaucggcuccaagggggacguguucgugauccgggagcccuucaucagcugcagcccccuggagugccgcaccuucuuccugacccagggcgcccuccugaacgacaagcacuccaacgggaccaucaaggaccggucccccuaccgcacgcugaugagcugcccgaucggcgagguccccucccccuacaacagccgguucgagagcguggccugguccgcgagcgccugccacgacgggaucuccuggcucaccaucggcaucagcggccccgacaacggggccguggccguccugaaguacaacggcaucaucaccgacaccaucaaguccuggcgcaacaacauccugcggacgcaggagagcgagugcgcgugcgugaacggguccugcuucaccgugaugaccgacggcccgagcgacggccaggccuccuacaagaucuuccgcaucgagaaggggaagaucgucaagagcguggagaugaacgcccccaacuaccacuacgaggagugcuccugcuaccccgacagcuccgagaucacgugcgugugccgggacaacuggcacggcagcaaccgccccugggucuccuucaaccagaaccucgaguaccagaucggguacaucugcagcggcaucuucggggacaacccgcggcccaacgacaagaccggcuccugcggccccgugagcuccaacggggccaacggcgugaagggguucagcuucaaguacggcaacggggucuggaucggccgcaccaagagcaucuccagccggaacggcuucgagaugaucugggaccccaacggguggaccggcaccgacaacaacuucuccaucaagcaggacaucguggggaucaacgaguggagcggcuacuccgggagcuucgugcagcacccggagcugacgggccuggacugcauccgccccugcuucugggucgagcucauccggggccgccccaaggagaacaccaucuggaccuccgggagcuccaucagcuucugcggcgugaacuccgacaccgucggguggagcuggcccgacggcgccgagcugccguucacgaucgacaaguga

SEQ ID NO: 84811 - RNA, 1410 nt, Artificial Sequence
  derived and/or modified CDS sequence (opt1) from neuraminidase__InfluenzaA__AEI86807
augaaccccaaccagaagaucaucaccaucggcagcgugugcaugaccaucgggauggccaaccugauccuccagaucggcaacaucaucuccaucuggaucagccacuccauccagcuggggaaccagaaccagaucgagacgugcaaccagagcgucaucaccuacgagaacaacaccugggugaaccagaccuacgugaacaucuccaacacgaacuucgccgcgggccagagcgucguguccgugaagcuggccgggaacagcucccucugcccggucagcggcugggccaucuacuccaaggacaacagcauccgcaucggcuccaagggggacguguucgugauccgggagcccuucaucagcugcagcccccuggagugccgcaccuucuuccugacccagggcgcccuccugaacgacaagcacuccaacgggaccaucaaggaccggucccccuaccgcacgcugaugagcugcccgaucggcgagguccccucccccuacaacagccgguucgagagcguggccugguccgcgagcgccugccacgacgggaucaacuggcucaccaucggcaucuccggccccgacaacggggccguggccguccugaaguacaacggcaucaucaccgacaccaucaagagcuggcgcaacaacauccugcggacgcaggaguccgagugcgcgugcgugaacgggagcugcuucaccgugaugaccgacggcccguccgacggccaggccagcuacaagaucuuccgcaucgagaaggggaagaucgucaaguccguggagaugaacgcccccaacuaccacuacgaggagugcagcugcuaccccgacuccagcaagaucacgugcgugugccgggacaacuggcacggcuccaaccgccccugggucagcuucaaccagaaccucgaguaccagaucggguacaucugcuccggcaucuucggggacaacccgcggcccaacgacaagaccggcagcugcggccccguguccagcaacggggccaacggcgugaagggguucuccuucaaguacggcaacggggucuggaucggccgcaccaagagcaucagcucccggaacggcuucgagaugaucugggaccccaacggguggaccggcaccgacaacaacuucagcaucaagcaggacaucguggggaucaacgagugguccggcuacagcggguccuucgugcagcacccggagcugacgggccuggacugcauccgccccugcuucugggucgagcucauccggggccgccccaaggagaacaccaucuggaccagcggguccagcaucuccuucugcggcgugaacagcgacaccgucgggugguccuggcccgacggcgccgagcugccguucaucaucgacaaguga

SEQ ID NO: 84812 - RNA, 1410 nt, Artificial Sequence; identical to SEQ ID NO: 84807
  derived and/or modified CDS sequence (opt1) from neuraminidase__InfluenzaA__AEI86817

SEQ ID NO: 84813 - RNA, 1410 nt, Artificial Sequence
  derived and/or modified CDS sequence (opt1) from neuraminidase__InfluenzaA__AEI86827
augaaccccaaccagaagaucaucaccaucggcagcgugugcaucaccaucgggauggccaaccugauccuccagaucggcaacaucaucuccaucuggaucagccacuccauccagcuggggaaccagaaccagaucgagacgugcaaccagagcgucaucaccuacgagaacaacaccugggugaaccagaccuacgugaacaucuccaacacgaacuucgccgcgggccagagcgucguguccgugaagcuggccgggaacagcucccucugcccggucagcggcugggccaucuacuccaaggacaacagcauccgcaucggcuccaagggggacguguucgugauccgggagcccuucaucagcugcagcccccuggagugccgcaccuucuuccugacccagggcgcccuccugaacgacaagcacuccaacgggaccaucaaggaccggucccccuaccgcacgcugaugagcugcccgaucggcgagguccccucccccuacaacagccgguucgagagcguggccugguccgcgagcgccugccacgacgggaucuccuggcucaccaucggcaucagcggccccgacaacggggccguggccguccugaaguacaacggcaucaucaccgacaccaucaaguccuggcgcaacaacauccugcggacgcaggagagcgagugcgcgugcgugaacggguccugcuucaccgugaugaccgacggcccgagcgacggccaggccuccuacaagaucuuccgcaucgagaaggggaagaucgucaagagcguggagaugaacgcccccaacuaccacuacgaggagugcuccugcuaccccgacagcuccgagaucacgugcgugugccgggacaacuggcacggcagcaaccgccccugggucuccuucaaccacaaccucgaguaccagaucggguacaucugcagcggcaucuucggggacaacccgcggcccaacgacaagaccggcuccugcggccccgugagcuccaacggggccaacggcgugaagggguucagcuucaaguacggcaacggggucuggaucggccgcaccaagagcaccuccagccggaacggcuucgagaugaucugggaccccaacggguggaccggcacggacaacaacuucuccaucaagcaggacaucguggggaucaacgaguggagcggcuacuccgggagcuucgugcagcacccggagcugaccggccugaacugcauccgccccugcuucugggucgagcucauccggggccgccccaaggagaacaccaucuggaccuccgggagcuccaucagcuucugcggcgugaacuccgacacggucggguggagcuggcccgacggcgccgagcugccguucaccaucgacaaguga

SEQ ID NO: 84814 - RNA, 1410 nt, Artificial Sequence; identical to SEQ ID NO: 84810
  derived and/or modified CDS sequence (opt1) from neuraminidase__InfluenzaA__AEI86837

SEQ ID NO: 84815 - RNA, 1410 nt, Artificial Sequence; identical to SEQ ID NO: 84281
  derived and/or modified CDS sequence (opt1) from neuraminidase__InfluenzaA__AEI86847

SEQ ID NO: 84816 - RNA, 1410 nt, Artificial Sequence
  derived and/or modified CDS sequence (opt1) from neuraminidase__InfluenzaA__AEI86867
augaaccccaaccagaagaucaucaccaucggcagcgugugcaugaccaucgggauggccaaccugauccuccagaucggcaacaucaucuccaucuggaucagccacuccauccagcuggggaaccagaaccagaucgagacgugcaaccagagcgucaucaccuacgagaacaacaccugggugaaccagaccuacgugaacaucuccaacacgaaccuggccgcgggccagagcgucguguccgugaagcucgccgggaacagcucccugugcccggucagcggcugggccaucuacuccaaggacaacagcauccgcaucggcuccaagggggacguguucgugauccgggagcccuucaucagcugcagcccccuggagugccgcaccuucuuccucacccagggcgcccugcugaacgacaagcacuccaacgggaccaucaaggaccggucccccuaccgcacgcucaugagcugcccgaucggcgagguccccucccccuacaacagcaaguucgagagcguggccugguccgcgagcgccugccacgacgggaucaacuggcugaccaucggcaucuccggccccgacaacggggccguggccguccugaaguacaacggcaucaucaccgacaccaucaagagcuggcggaacaacauccuccgcacgcaggaguccgagugcgcgugcgugaacgggagcugcuucaccaucaugaccgacggcccguccgacggccaggccagcuacaagaucuuccggaucgagaaggggaagaucgugaaguccgucgagaugaacgcccccaacuaccacuacgaggagugcagcugcuaccccgacuccagcgagaucacgugcgugugccgcgacaacuggcacggcuccaaccggcccugggugagcuucaaccagaaccuggaguaccagaucggguacaucugcuccggcaucuucggggacaacccgcgccccaacgacaagaccggcagcugcggccccgucuccagcaacggggccaacggcgugaagggguucuccuucaaguacggcaacgggguguggaucggccggaccaagagcaucagcucccgcaagggcuucgagaugaucugggaccccaacggguggaccggcaccgacaacaacuucagcaucaagcaggacaucgucgggaucaacgagugguccggcuacagcggguccuucgugcagcacccggagcugacgggccucgacugcauccggcccugcuucuggguggagcugauccgcggccggcccaaggagaacaccaucuggaccagcggguccagcaucuccuucugcggcgucaacagcgacaccguggggugguccuggcccgacggcgccgagcugccguucacgaucgacaaguga

SEQ ID NO: 84817 - RNA, 1410 nt, Artificial Sequence; identical to SEQ ID NO: 84810
  derived and/or modified CDS sequence (opt1) from neuraminidase__InfluenzaA__AEI86887

SEQ ID NO: 84818 - RNA, 1410 nt, Artificial Sequence; identical to SEQ ID NO: 84810
  derived and/or modified CDS sequence (opt1) from neuraminidase__InfluenzaA__AEI86897

SEQ ID NO: 84819 - RNA, 1410 nt, Artificial Sequence
  derived and/or modified CDS sequence (opt1) from neuraminidase__InfluenzaA__AEI86907
augaaccccaaccagaagaucaucaccaucggcagcgugugcaugaccaucgggauggccaaccugauccuccagaucggcaacaucaucuccaucuggaucagccacuccauccagcuggggaaccagaaccagaucgagacgugcaaccagagcgucaucaccuacgagaacaacaccugggugaaccagaccuacgugaacaucuccaacacgaacuucgccgcgggccagagcgucguguccgugaagcuggccgggaacagcucccucugcccggucagcggcugggccaucuacuccaaggacaacagcauccgcaucggcuccaagggggacguguucgugauccgggagcccuucaucagcugcagcccccuggagugccgcaccuucuuccugacccagggcgcccuccugaacgacauccacuccaacgggaccaucaaggaccggucccccuaccgcacgcugaugagcugcccgaucggcgagguccccucccccuacaacagccgguucgagagcguggccugguccgcgagcgccugccacgacgggaucaacuggcucaccaucggcaucuccggccccgacaacggggccguggccguccugaaguacaacggcaucaucaccgacaccaucaagagcuggcgcaacaacauccugcggacgcaggaguccgagugcgcgugcgugaacgggagcugcuucaccaucaugaccgacggcccguccgacggccaggccagcuacaagaucuuccgcaucgagaaggggaagaucgugaaguccgucgagaugaacgcccccaacuaccacuacgaggagugcagcugcuaccccgacuccagcgagaucacgugcgugugccgggacaacuggcacggcuccaaccgccccugggugagcuucaaccagaaccucgaguaccagaucggguacaucugcuccggcaucuucggggacaacccgcggcccaacgacaagaccggcagcugcggccccgucuccagcaacggggccaacggcgugaagggguucuccuucaaguacggcaacgggguguggaucggccgcaccaagagcaucagcucccggaagggcuucgagaugaucugggaccccaacggguggaccggcaccgacaacaacuucagcaucaagcaggacaucgucgggaucaacgagugguccggcuacagcggguccuucgugcagcacccggagcugacgggccuggacugcauccgccccugcuucuggguggagcucauccggggccgccccaaggagaacaccaucuggaccagcggguccagcaucuccuucugcggcgucaacagcgacaccguggggugguccuggcccgacggcgccgagcugccguucacgaucgacaaguga

SEQ ID NO: 84820 - RNA, 1410 nt, Artificial Sequence
  derived and/or modified CDS sequence (opt1) from neuraminidase__InfluenzaA__AEI86917
augaaccccaaccagaagaucaucaccaucggcagcaucugcaugaccaucgggauggccaaccugauccuccagaucggcaacaucaucuccaucuggaucagccacuccauccagcuggggaaccagaaccagaucgagacgugcaaccagagcgugaucaccuacgagaacaacaccugggucaaccagaccuacgugaacaucuccaacacgaacuucgccgcgggccagagcguggucuccgugaagcuggccgggaacagcucccucugcccggugagcggcugggccaucuacuccaaggacaacagcauccgcaucggcuccaagggggacgucuucgugauccgggagcccuucaucagcugcagcccccuggagugccgcaccuucuuccugacccagggcgcccuccugaacgacaagcacuccaacgggaccaucaaggaccggucccccuaccgcacgcugaugagcugcccgaucggcgaggugcccucccccuacaacagccgguucgagagcgucgccugguccgcgagcgccugccacgacgggaucaacuggcucaccaucggcaucuccggccccgacaacggggccguggccgugcugaaguacaacggcaucaucaccgacaccaucaagagcuggcgcaacaacauccugcggacgcaggaguccgagugcgcgugcgucaacgggagcugcuucaccaucaugaccgacggcccguccgacggccaggccagcuacaagaucuuccgcaucgagaaggggaagaucgugaaguccguggagaugaacgcccccaacuaccacuacgaggagugcagcugcuaccccgacuccagcgagaucacgugcgucugccgggacaacuggcacggcuccaaccgccccugggugagcuucaaccagaaccucgaguaccagaucggguacaucugcuccggcaucuucggggacaacccgcggcccaacgacaagaccggcagcugcggccccguguccagcaacggggccaacggcgucaagggguucuccuucaaguacggcaacgggguguggaucggccgcaccaagagcaucagcucccggaagggcuucgagaugaucugggaccccaacggguggaccggcaccgacaacaacuucagcaucaagcaggacaucguggggaucaacgagugguccggcuacagcggguccuucguccagcacccggagcugacgggccuggacugcauccgccccugcuucuggguggagcucauccggggccgccccaaggagaacaccaucuggaccagcggguccagcaucuccuucugcggcgugaacagcgacaccgucgggugguccuggcccgacggcgccgagcugccguucacgaucgacaaguga

SEQ ID NO: 84821 - RNA, 1410 nt, Artificial Sequence; identical to SEQ ID NO: 84733
  derived and/or modified CDS sequence (opt1) from neuraminidase__InfluenzaA__AEI86927

SEQ ID NO: 84822 - RNA, 1410 nt, Artificial Sequence; identical to SEQ ID NO: 84807
  derived and/or modified CDS sequence (opt1) from neuraminidase__InfluenzaA__AEI86937

SEQ ID NO: 84823 - RNA, 1410 nt, Artificial Sequence
  derived and/or modified CDS sequence (opt1) from neuraminidase__InfluenzaA__AEI86947
augaaccccaaccagaagaucaucaccaucggcagcgugugcaugaccaucgggauggccaaccugauccuccagaucggcaacaucaucuccaucuggaucagccacuccauccagcuggggaacaagaaccagaucgagacgugcaaccagagcgucaucaccuacgagaacaacaccugggugaaccagaccuacgugaacaucuccaacacgaacuucgccgcgggccagagcgucguguccgugaagcuggccgggaacagcucccucugcccggucagcggcugggccaucuacuccaaggacaacagcauccgcaucggcuccaagggggacguguucgugauccgggagcccuucaucagcugcagcccccuggagugccgcaccuucuuccugacccagggcgcccuccugaacgacaagcacuccaacgggaccaucaaggaccggucccccuaccgcacgcugaugagcugcccgaucggcgagguccccucccccuacaacagccgguucgagagcguggccugguccgcgagcgccugccacgacgggaucaacuggcucaccaucggcaucuccggccccgacaacggggccguggccguccugaaguacaacggcaucaucaccgacaccaucaagagcuggcgcaacaacauccugcggacgcaggaguccgagugcgcgugcgugaacgggagcugcuucaccgugaugaccgacggcccguccgacggccaggccagcuacaagaucuuccgcaucgagaaggggaagaucgucaaguccguggagaugaacgcccccaacuaccacuacgaggagugcagcugcuaccccgacuccagcgagaucacgugcgugugccgggacaacuggcacggcuccaaccgccccugggucagcuucaaccagaaccucgaguaccagaucggguacaucugcuccggcaucuucggggacaacccgcggcccaacgacaagaccggcagcugcggccccguguccagcaacggggccaacggcgugaagggguucuccuucaaguacggcaacggggucuggaucggccgcaccaagagcaucagcucccggaacggcuucgagaugaucugggaccccaacggguggaccggcaccgacaacaacuucagcaucaagcaggacaucguggggaucaaggagugguccggcuacagcggguccuucgugcagcacccggagcugacgggccuggacugcauccgccccugcuucugggucgagcucauccggggccgccccaaggagaacaccaucuggaccagcggguccagcaucuccuucugcggcgugaacagcgacaccgucgggugguccuggcccgacggcgccgagcugccguucacgaucgacaaguga

SEQ ID NO: 84824 - RNA, 1410 nt, Artificial Sequence
  derived and/or modified CDS sequence (opt1) from neuraminidase__InfluenzaA__AEI86967
augaaccccaaccagaagaucaucaccaucggcagcgugugcaugaccaucgggauggccaaccugauccuccagaucggcaacaucaucuccaucuggaucagccacuccauccagcuggggaaccagaaccagaucgagacgugcaaccagagcgucaucaccuacgagaacaacaccugggugaaccagaccuacgugaacaucuccaacacgaacuucgccgcgggccagagcgucguguccgugaagcuggccgggaacagcucccucugcccggucagcggcugggccaucuacuccaaggacaacagcauccgcaucggcuccaagggggacgccuucgugauccgggagcccuucaucagcugcagcccccuggagugccgcaccuucuuccugacccagggcgcccuccugaacgacaagcacuccaacgggaccaucaaggaccggucccccuaccgcacgcugaugagcugcccgaucggcgaggugcccucccccuacaacagccgguucgagagcgucgcgugguccgccagcgccugccacgacgggaucaacuggcucaccaucggcaucuccggccccgacaacggggccguggcggugcugaaguacaacggcaucaucaccgacaccaucaagagcuggcgcaacaacauccugcggacgcaggaguccgagugcgccugcgucaacgggagcugcuucaccaucaugaccgacggcccguccgacggccaggccagcuacaagaucuuccgcaucgagaaggggaagaucgugaaguccguggagaugaacgcccccaacuaccacuacgaggagugcagcugcuaccccgacuccagcgagaucacgugcgucugccgggacaacuggcacggcuccaaccgccccugggugagcuucaaccagaaccucgaguaccagaucggguacaucugcuccggcaucuucggggacaacccgcggcccaacgacaagaccggcagcugcggccccguguccagcaacggggccaacggcgucaagggguucuccuucaaguacggcaacgggguguggaucggccgcaccaagagcaucagcucccggaagggcuucgagaugaucugggaccccaacggguggaccggcaccgacaacaacuucagcaucaagcaggacaucguggggaucaacgagugguccggcuacagcggguccuucguccagcacccggagcugacgggccuggacugcauccgccccugcuucuggguggagcucauccggggccgccccaaggagaacaccaucuggaccagcggguccagcaucuccuucugcggcgugaacagcgacaccgucgggugguccuggcccgacggcgcggagcugccguucacgaucgacaaguga

SEQ ID NO: 84825 - RNA, 1410 nt, Artificial Sequence
  derived and/or modified CDS sequence (opt1) from neuraminidase__InfluenzaA__AEI86977
augaaccccaaccagaagaucaucaccaucggcagcgugugcaugaccaucgggauggccaaccugauccuccagaucggcaacaucaucuccaucuggaucagccacuccauccagcuggggaaccagaaccagaucggcacgugcaaccagagcgucaucaccuacgagaacaacaccugggugaaccagaccuacgugaacaucuccaacacgaacuucgccgcggggcagagcgucguguccgugaagcuggccggcaacagcucccucugcccggucagcggcugggccaucuacuccaaggacaacagcauccgcaucggguccaagggcgacguguucgugauccgggagcccuucaucagcugcagcccccuggagugccgcaccuucuuccugacccagggggcccuccugaacgacaagcacuccaacggcaccaucaaggaccggucccccuaccgcacgcugaugagcugcccgaucggggagguccccucccccuacaacagccgguucgagagcguggccugguccgcgagcgccugccacgacggcaucaacuggcucaccaucggcaucuccgggcccgacaacggcgccguggccguccugaaguacaacgggaucaucaccgacaccaucaagagcuggcgcaacaacauccugcggacgcaggaguccgagugcacgugcgugaacggcagcugcuucaccgugaugaccgacggcccguccgacgggcaggcgagcuacaagaucuucaagaucgagaagggcaagaucgucaaguccguggagaugaacgcccccaacuaccacuacgaggagugcagcugcuaccccgacuccagcgagaucacgugcgugugccgcgacaacuggcacggguccaaccggcccugggucagcuucaaccagaaccucgaguaccagaucggcuacaucugcuccgggaucuucggcgacaacccgcgccccaacgacaagaccggcagcugcgggcccguguccagcaacggcgccaacggggugaagggcuucuccuucaaguacgggaacggcgucuggaucggccggaccaagagcaucagcucccgcaacggguucgagaugaucugggaccccaacggcuggaccgggaccgacaacaacuucagcaucaagcaggacaucgugggcaucaacgagugguccggguacagcggcuccuucgugcagcacccggagcugaccggccuggacugcauccggcccugcuucugggucgagcucauccgcgggcggcccaaggagaacaccaucuggaccagcggcuccagcaucuccuucugcggggugaacagcgacacggucggcugguccuggcccgacggcgccgagcugccguucaccaucgacaaguga

SEQ ID NO: 84826 - RNA, 1410 nt, Artificial Sequence
  derived and/or modified CDS sequence (opt1) from neuraminidase__InfluenzaA__AEI86997
augaaccccaaccagaagaucaucaccaucggcagcgugugcaugaccaucgggauggccaaccugauccuccagaucggcaacaucaucuccaucuggaucagccacuccauccagcuggggaaccagaaccagaucgagacgugcaaccagagcgucaucaccuacgagaacaacaccugggugaaccagaccuacgugaacaucuccaacacgaacuucgccgcgggccagagcgucguguccgugaagcuggccgggaacagcucccucugcccggucagcggcugggccaucuacuccaaggacaacagcauccgcaucggcuccaagggggacguguucgugauccgggagcccuucaucagcugcagcccccuggagugccgcaccuucuuccugacccagggcgcccuccugaacgacaagcacuccaacgggaccaucaaggaccggucccccuaccgcacgcugaugagcugcccgaucggcgagguccccucccccuacaacagccgguucgagagcguggccugguccgcgagcgccugccacgacgggaucaacuggcucaccaucggcaucuccggccccgacaacggggccguggccguccugaaguacaacggcaucaucaccgacaccaucaagagcuggcgcaacaacauccugcggacgcaggaguccgagugcgcgugcgugaacgggagcugcuucaccgugaugaccgacggcccguccgacggccaggccagcuacaagaucuuccgcaucgagaaggggaagaucgucaaguccguggagaugaacgcccccaacuaccacuacgaggagugcagcugcuaccccgacuccagcgagaucacgugcgugugccgggacaacuggcacggcuccaaccgccccugggucagcuucaaccagaaccucgaguaccagaucggguacaucugcuccggcaucuucggggacaacccgcggcccaacgacaagaccggcagcugcggccccguguccagcaacggggccaacggcgugaagggguucuccuucaaguacggcaacggggucuggaucggccgcaccaagagcaucagcucccggaacggcuucgagaugaucugggaccccaacggguggaccggcaccgacaacaacuucagcaucaagcaggacaucguggggaucaaggagugguccggcuacagcggguccuucgugcagcacccggagcugacgggccuggacugcauccgccccugcuucugggucgagcucauccggggccgccccaaggagaacaccaucuggaccagcggguccaucaucagcuucugcggcgugaacuccgacaccgucggguggagcuggcccgacggcgccgagcugccguucacgaucgacaaguga

SEQ ID NO: 84827 - RNA, 1410 nt, Artificial Sequence
  derived and/or modified CDS sequence (opt1) from neuraminidase__InfluenzaA__AEI87007
augaaccccaaccagaagaucaucaccaucggcagcgugugcaucaccaucgggauggccaaccugauccuccagaucggcaacaucaucuccaucuggaucagccacuccauccagcuggggaaccagaaccagaucgagacgugcaaccagagcgucaucaccuacgagaacaacaccugggugaaccagaccuacgugaacaucuccaacacgaacuucgccgcgggccagagcgucguguccgugaagcuggccgggaacagcucccucugcccggucagcggcugggccaucuacuccaaggacaacagcauccgcaucggcuccaagggggacguguucgugauccgggagcccuucaucagcugcuccagccuggagugccgcaccuucuuccugacccagggcgcccuccugaacgacaagcacuccaacgggaccaucaaggaccggagccccuaccgcacgcugauguccugccccaucggcgaggucccgagccccuacaacagccgguucgaguccguggccuggagcgcguccgccugccacgacgggaucagcuggcucaccaucggcaucuccggccccgacaacggggccguggccguccugaaguacaacggcaucaucaccgacaccaucaagagcuggcgcaacaacauccugcggacgcaggaguccgagugcgcgugcgugaacgggagcugcuucaccgugaugaccgacggccccuccgacggccaggccagcuacaagaucuuccgcaucgagaaggggaagaucgucaaguccguggagaugaacgccccgaacuaccacuacgaggagugcagcugcuaccccgacuccagcgagaucacgugcgugugccgggacaacuggcacggcuccaaccgccccugggucagcuucaaccagaaccucgaguaccagaucggguacaucugcuccggcaucuucggggacaacccccggccgaacgacaagaccggcagcugcggccccguguccagcaacggggccaacggcgugaagggguucagcuucaaguacggcaacggggucuggaucggccgcaccaaguccaucagcucccggaacggcuucgagaugaucugggaccccaacggguggaccggcaccgacaacaacuucagcaucaagcaggacaucguggggaucaacgagugguccggcuacagcggguccuucgugcagcaccccgagcugacgggccuggacugcauccgcccgugcuucugggucgagcucauccggggccgccccaaggagaacaccaucuggaccagcggguccagcaucuccuucugcggcgugaacagcgacaccgucgggugguccuggcccgacggcgccgagcugcccuucacgaucgacaaguga

SEQ ID NO: 84828 - RNA, 1410 nt, Artificial Sequence
  derived and/or modified CDS sequence (opt1) from neuraminidase__InfluenzaA__AEI87017
augaaccccaaccagaagaucaucaccaucggcagcgugugcaugaccaucgggauggccaaccugauccuccagaucggcaacaucaucuccaucuggaucagccacuccauccagcuggggaaccagaaccagaucgagacgugcaaccagagcgucaucaccuacgagaacaacaccugggugaaccagaccuacgugaacaucuccaacacgaacuucgccgcgggccagagcgucguguccgugaagcuggccgggaacagcucccucugcccggucagcggcugggccaucuacuccaaggacaacagcauccgcaucggcuccaagggggacguguucgugauccgggagcccuucaucagcugcagcccccuggagugccgcaccuucuuccugacccagggcgcccuccugaacgacaagcacuccaacgggaccaucaaggaccggucccccuaccgcacgcugaugagcugcccgaucggcgagguccccucccccuacaacagccgguucgagagcguggccugguccgcgagcgccugccacgacgggaucaacuggcucaccaucggcaucuccggccccgacaacggggccguggccguccugaaguacaacggcaucaucaccgacaccaucaagagcuggcgcaacaacauccugcggacgcaggaguccgagugcgcgugcgugaacgggagcugcuucaccgugaugaccgacggcccguccgacggccaggccagcuacaagaucuuccgcaucgagaaggggaagaucgucaaguccguggagaugaacgcccccaacuaccacuacgaggagugcagcugcuaccccgacuccagcgagaucacgugcgugugccgggacaacuggcacggcuccaaccgccccugggucagcuucaaccagaaccucgaguaccagaucggguacaucugcuccggcaucuucggggacaacccgcggcccaacgacaagaccggcagcugcggccccguguccagcaacggggccaacggcgugaagggguucuccuucaaguacggcaacggggucuggaucggccgcaccaagagcaucagcucccggaacggcuucgagaugaucugggaccccaacggguggaccggcaccgacaacaacuucagcaucaagcaggacaucguggggaucaacgagugguccggcuacagcggguccuucgugcagcacccggagcugacgggccuggacugcauccgccccugcuucugggucgagcucauccggggccgccccaaggagaacaccaucuggaccagcggguccagcaucuccuucugcggcgugaacggggacaccggcggcuggagcuggcccgacggggccgagcugccguucacgaucgacaaguga

SEQ ID NO: 84829 - RNA, 1410 nt, Artificial Sequence; identical to SEQ ID NO: 84733
  derived and/or modified CDS sequence (opt1) from neuraminidase__InfluenzaA__AEI87027

SEQ ID NO: 84830 - RNA, 1410 nt, Artificial Sequence; identical to SEQ ID NO: 84826
  derived and/or modified CDS sequence (opt1) from neuraminidase__InfluenzaA__AEI87037

SEQ ID NO: 84831 - RNA, 1410 nt, Artificial Sequence; identical to SEQ ID NO: 84810
  derived and/or modified CDS sequence (opt1) from neuraminidase__InfluenzaA__AEI87047

SEQ ID NO: 84832 - RNA, 1410 nt, Artificial Sequence
  derived and/or modified CDS sequence (opt1) from neuraminidase__InfluenzaA__AEI87057
augaaccccaaccagaagaucaucaccaucggcagcgugugcaugaccaucgggauggccaaccugauccuccagaucggcaacaucaucuccaucuggaucagccacuccauccagcuggggaaccagaaccagaucgagacgugcaaccagagcgucaucaccuacgagaacaacaccugggugaaccagaccuacgugaacaucuccaacacgaacuucgccgcgggccagagcgucguguccgugaagcuggccgggaacagcucccucugcccggucagcggcugggccaucuacuccaaggacaacagcauccgcaucggcuccaagggggacguguucgugauccgggagcccuucaucagcugcagcccccuggagugccgcaccuucuuccugacccagggcgcccuccugaacgacaagcacuccaacgggaccaucaaggaccggucccccuaccgcacgcugaugagcugcccgaucggcgagguccccucccccuacaacagccgguucgagagcguggccugguccgcgagcgccugccacgacgggaucaacuggcucaccaucggcaucuccggccccgacaacggggccguggccguccugaaguacaacggcaucaucaccgacaccaucaagagcuggcgcaacaacauccugcggacgcaggaguccgagugcgcgugcgugaacgggagcugcuucaccgugaugaccgacggcccguccgacggccaggccagcuacaagaucuuccgcaucgagaaggggaagaucgucaaguccguggagaugaacgcccccaacuaccacuacgaggagugcagcugcuaccccgacuccagcgagaucacgugcgugugccgggacaacuggcacggcuccaaccgccccugggucagcuucaaccagaaccucgaguaccagaucggguacaucugcuccggcaucuucggggacaacccgcggcccaacgacaagaccggcagcugcggccccguguccagcaacggggccaacggcgugaagggguucuccuucaaguacggcaacggggucuggaucggccgcaccaagagcaucagcucccggaacggcuucgagaugaucugggaccccaacggguggaccggcaccgacaacaacuucagcaucaagcaggacaucguggggaucaaggagugguccggcuacagcggguccuucgugcagcacccggagcugacgggccuggacugcauccgccccugcuucugggucgagcucauccggggccgccccaaggagaacaccaucuggaccagcggguccagcaucuccuucugcggcgugaacagcgacaccgucgggugguccuggcccgacggcgccgagcugccguucacgaucgacaaguga

SEQ ID NO: 84833 - RNA, 1410 nt, Artificial Sequence; identical to SEQ ID NO: 84281
  derived and/or modified CDS sequence (opt1) from neuraminidase__InfluenzaA__AEI87067

SEQ ID NO: 84834 - RNA, 1410 nt, Artificial Sequence
  derived and/or modified CDS sequence (opt1) from neuraminidase__InfluenzaA__AEI87077
augaaccccaaccagaagaucaucaccaucggcagcaucugcaugaccaucgggauggccaaccugauccuccagaucggcaacaucaucuccaucuggaucagccacuccauccaguucgggaaccagaaccagaucggcacgugcaaccagagcgugaucaccuacgagaacaacaccugggucaaccagaccuacgugaacaucuccaacacgaacuucgccgcggggcagagcguggucuccgugaagcuggccggcaacagcucccugugcccggugagcggcugggccaucuacuccaaggacaacagcauccgcaucggguccaagggcgacgucuucgugauccgggagcccuucaucagcugcagcccccucgagugccgcaccuucuuccugacccagggggcccugcucaacgacaagcacuccaacggcaccaucaaggaccggucccccuaccgcacgcugaugagcugcccgaucggggaggugcccucccccuacaacagccgguucgagagcgucgccugguccgcgagcgccugccacgacggcaucaacuggcugaccaucggcaucuccgggcccgacaacggcgccguggccgugcucaaguacaacgggaucaucaccgacaccaucaagagcuggcgcaacaacauccugcggacgcaggaguccgagugcgcgugcgucaacggcagcugcuucaccaucaugaccgacggcccguccgacgggcaggccagcuacaagaucuuccgcaucgagaagggcaagaucgugaaguccguggagaugaacgcccccaacuaccacuacgaggagugcagcugcuaccccgacuccagcgagaucacgugcgucugccgggacaacuggcacggguccaaccgccccugggugagcuucaaccagaaccuggaguaccagaucggcuacaucugcuccgggaucuucggcgacaacccgcggcccaacgacaagaccggcagcugcgggcccguguccagcaacggcgccaacggggucaagggcuucuccuucaaguacgggaacggcguguggaucggccgcaccaagagcaucagcucccggaagggguucgagaugaucugggaccccaacggcuggaccgggaccgacaacaacuucagcaucaagcaggacaucgugggcaucaacgagugguccggguacagcggcuccuucguccagcacccggagcucacgggccuggacugcauccgccccugcuucuggguggagcugauccgggggcgccccaaggagaacaccaucuggaccagcggcuccagcaucuccuucugcggggugaacagcgacaccgucggcugguccuggcccgacggcgccgagcucccguucacgaucgacaaguga

SEQ ID NO: 84835 - RNA, 1410 nt, Artificial Sequence
  derived and/or modified CDS sequence (opt1) from neuraminidase__InfluenzaA__AEI87087
augaaccccaaccagaagaucaucaccaucggcagcgugugcaugaccaucgggauggccaaccugauccuccagaucggcaacaucaucuccaucuggaucagccacuccauccagcuggggaaccagaaccagaucgagacgugcaaccagagcgucaucaccuacgagaacaacaccugggugaaccagaccuacgugaacaucuccaacacgaacuucgccgcgggccagagcgucguguccgugaagcuggccgggaacagcucccucugcccgaucagcggcugggccaucuacuccaaggacaacagcauccgcaucggcuccaagggggacgucuucgugauccgggagcccuucaucagcugcagcccccuggagugccgcaccuucuuccugacccagggcgcccuccugaacgacaagcacuccaacgggaccaucaaggaccggucccccuaccgcacgcugaugagcugcccgaucggcgaggugcccucccccuacaacagccgguucgagagcgucgccugguccgcgagcgccugccacgacgggaucaacuggcucaccaucggcaucuccggccccgacaacggggccguggccgugcugaaguacaacggcaucaucaccgacaccaucaagagcuggcgcaacaacauccugcggacgcaggaguccgagugcgcgugcgucaacgggagcugcuucaccgugaugaccgacggcccguccgacggccaggccagcuacaagaucuuccgcaucgagaaggggaagaucgugaaguccgucgagaugaacgcccccaacuaccacuacgaggagugcagcugcuaccccgacuccagcgagaucacgugcgugugccgggacaacuggcacggcuccaaccgccccugggugagcuucaaccagaaccucgaguaccagaucggguacaucugcuccggcaucuucggggacaacccgcggcccaacgacaagaccggcagcugcggccccgucuccagcaacggggccaacggcgugaagggguucuccuucaaguacggcaacgggguguggaucggccgcaccaagagcaucagcucccggaacggcuucgagaugaucugggaccccaacggguggaccggcaccgacaacaacuucagcaucaagcaggacaucgucgggaucaaggagugguccggcuacagcggguccuucgugcagcacccggagcugacgggccuggacugcauccgccccugcuucuggguggagcucauccggggccgccccaaggagaacaccaucuggaccagcggguccaucaucagcuucugcuccgucaacagcgacaccgugggcugguccuggcccgacggggccgagcugccguucacgaucgacaaguga

SEQ ID NO: 84836 - RNA, 1410 nt, Artificial Sequence; identical to SEQ ID NO: 84807
  derived and/or modified CDS sequence (opt1) from neuraminidase__InfluenzaA__AEI87097

SEQ ID NO: 84837 - RNA, 1410 nt, Artificial Sequence; identical to SEQ ID NO: 84807
  derived and/or modified CDS sequence (opt1) from neuraminidase__InfluenzaA__AEI87107

SEQ ID NO: 84838 - RNA, 1413 nt, Artificial Sequence
  derived and/or modified CDS sequence (opt1) from neuraminidase__InfluenzaA__AEI91968
augaaccccaaccagaagaucaucaccaucggcagcaucuccaucgccaucgggaucaucagccugaugcuccagaucggcaacaucaucuccaucugggccagccacuccauccagaccgggagccagaacaacacgggcaucugcaaccagcgcaucaucaccuacgagaacuccaccugggugaaccacaccuacgucaacaucaacaacacgaacgugguggcgggggaggacaagaccagcgucacccuggccggcaacuccagccugugcuccaucagcggcugggccaucuacaccaaggacaacuccauccggaucgggagcaagggcgacguguucgugauccgcgagccguucaucuccugcagccaccucgagugccggacguucuuccugacccagggggcccugcucaacgacaagcacuccaacggcaccgucaaggaccgcagccccuaccgggcccugauguccugcccccugggggaggcgcccagcccguacaacagcaaguucgaguccguggccuggagcgccuccgccugccacgacggcaugggcuggcucaccaucgggaucagcggccccgacaacggggcgguggccguccugaaguacaacggcaucaucacgggcaccaucaaguccuggaagaagcagauccugcgcacccaggagagcgagugcgugugcaugaacggguccugcuucaccaucaugacggacggccccagcaacaaggccgccuccuacaagaucuucaagaucgagaaggggaaggugaccaagagcaucgagcucaacgcccccaacuucuacuacgaggagugcuccugcuacccggacaccggcaucgucaugugcgugugccgggacaacuggcacgggagcaaccgccccuggguguccuucaaccagaaccuggacuaccagaucggcuacaucugcagcggcgucuucggggacaacccccggcccgaggacggcgagggguccugcaacccggugaccguggacggcgcgaacggggucaagggcuucagcuacaaguacggcaacgggguguggaucggccgcacgaaguccaaccggcugcgcaagggguucgagaugaucugggaccccaacggcuggaccaacaccgacagcgacuucuccgugaagcaggacgucguggccaucaccgacuggagcggguacagcggcuccuucgugcagcaccccgagcucacgggccuggacugcaucaagcccugcuucugggucgagcuggugcgggggcucccgcgcgagaacaccaccaucuggaccagcggcuccagcaucuccuucugcggggucaacagcgacacggccaacugguccuggcccgacggcgccgagcugcccuucaccaucgacaaguga

SEQ ID NO: 84839 - RNA, 1410 nt, Artificial Sequence; identical to SEQ ID NO: 80762
  derived and/or modified CDS sequence (opt1) from neuraminidase__InfluenzaA__AEI91983

SEQ ID NO: 84840 - RNA, 1410 nt, Artificial Sequence; identical to SEQ ID NO: 83248
  derived and/or modified CDS sequence (opt1) from neuraminidase__InfluenzaA__AEI91984

SEQ ID NO: 84841 - RNA, 1410 nt, Artificial Sequence
  derived and/or modified CDS sequence (opt1) from neuraminidase__InfluenzaA__AEI92004
augaaccccaaccagaagaucaucaccaucggcagcgugugcaugaccaucgggauggccaaccugauccuccagaucggcaacaucaucuccaucuggaucagccacuccauccagcuggggaaccagaaccagaucgagacgugcaaccagagcgucaucaccuacgagaacaacaccugggugaaccagaccuacgugaacaucuccaacacgaacuucgccgcgggccagagcgucguguccgugaagcuggccgggaacagcucccucugcccggucagcggcugggccaucuacuccaaggacaacagcauccgcaucggcuccaagggggacguguucgugauccgggagcccuucaucagcugcagcccccuggagugccgcaccuucuuccugacccagggcgcccuccugaacgacaagcacuccaacgggaccaucaaggaccggucccccuaccgcacgcugaugagcugcccgaucggcgagguccccucccccuacaacagccgguucgagagcguggccugguccgcgagcgccugccacgacgggaucaacuggcucaccaucggcaucuccggccccgacaacggggccguggccguccugaaguacaacggcaucaucaccgacaccaucaagagcuggcgcaacaacauccugcggacgcaggaguccgagugcgcgugcgugaacgggagcugcuucaccgugaugaccgacggcccguccgacggccaggccagcuacaagaucuuccgcaucgagaaggggaagaucgucaaguccguggagaugaacgcccccaacuaccacuacgaggagugcagcugcuaccccgacuccagcgagaucacgugcgugugccgggacaacuggcacggcuccaaccgccccugggucagcuucaaccagaaccucgaguaccagaucggguacaucugcuccggcaucuucggggacaacccgcggcccaacgacaagaccggcagcugcggccccguguccagcaacggggccuacggcgugaagggguucuccuucaaguacggcaacggggucuggaucggccgcaccaagagcaucagcucccggaacggcuucgagaugaucugggaccccaacggguggaccggcaccgacaacaacuucagcaucaagcaggacaucguggggaucaacgagugguccggcuacagcggguccuucgugcagcacccggagcugacgggccuggacugcauccgccccugcuucugggucgagcucauccggggccgccccaaggagaacaccaucuggaccagcggguccagcaucuccuucugcggcgugaacagcgacaccgucgggugguccuggcccgacggcgccgagcugccguucacgaucgacaaguga

SEQ ID NO: 84842 - RNA, 1413 nt, Artificial Sequence
  derived and/or modified CDS sequence (opt1) from neuraminidase__InfluenzaA__AEI92023
augaaccccaaccagaagaucaucaccaucggcagcaucuccaucgccaucgggaucaucagccugaugcuccagaucggcaacaucaucuccaucugggccagccacuccauccagaccgggagccagaacaacacgggcaucugcaaccagaagaucaucaccuacgagaacuccaccugggugaaccacaccuacgucaacaucaacaacacgaacgugguggcgggggaggacaagaccagcgucacccuggccggcaacuccagccugugcuccaucagcggcugggccaucuacaccaaggacaacuccauccgcaucgggagcaagggcgacguguucgugauccgggagccguucaucuccugcagccaccucgagugccgcacguucuuccugacccagggggcccugcucaacgacaagcacuccaacggcaccgucaaggaccggagccccuaccgcgcccugauguccugcccccugggggaggcgcccagcccguacaacagcaaguucgaguccguggccuggagcgccuccgccugccacgacggcaugggcuggcucaccaucgggaucagcggccccgacaacggggcgguggccguccugaaguacaacggcaucaucacgggcaccaucaaguccuggaagaagcagauccugcggacccaggagagcgagugcgugugcaugaacggguccugcuucaccaucaugacggacggccccagcaacaaggccgccuccuacaagaucuucaagaucgagaaggggaaggugaccaagagcaucgagcucaacgcccccaacuucuacuacgaggagugcuccugcuacccggacaccggcaucgucaugugcgugugccgcgacaacuggcacgggagcaaccggcccuggguguccuucaaccagaaccuggacuaccagaucggcuacaucugcagcggcgucuucggggacaacccccgccccgaggacggcgagggguccugcaacccggugaccguggacggcacgaacggggucaagggcuucagcuacaaguacggcaacgggguguggaucggccggaccaaguccaaccgccugcggaagggguucgagaugaucugggaccccaacggcuggaccaacaccgacagcgacuucuccgugaagcaggacgucguggcgaucacggacuggagcggguacagcggcuccuucgugcagcaccccgagcucaccggccuggacugcauccgccccugcuucugggucgagcuggugcgggggcucccgcgcgagaacaccaccaucuggacgagcggcuccagcaucuccuucugcggggucaacagcgacaccgccaacugguccuggcccgacggcgccgagcugcccuucaccaucgacaaguga

SEQ ID NO: 84843 - RNA, 1410 nt, Artificial Sequence
  derived and/or modified CDS sequence (opt1) from neuraminidase__InfluenzaA__AEJ10403
augaaccccaaccagaagaucaucaccaucggcagcgugugcaucaccaucgggauggccaaccugauccuccagaucggcaacaucaucuccaucuggaucagccacuccauccagcuggggaaccagaaccagaucgagacgugcaaccagagcgucaucaccuacgagaacaacaccugggugaaccagaccuacgugaacaucuccaacacgaacuucgccgcgggccagagcgucguguccgugaagcuggccgggaacagcucccucugcccggucagcggcugggccaucuacuccaaggacaacagcauccgcaucggcuccaagggggacguguucgugauccgggagcccuucaucagcugcagcccccuggagugccgcaccuucuuccugacccagggcgcccuccugaacgacaagcacuccaacgggaccaucaaggaccggucccccuaccgcacgcugaugagcugcccgaucggcgagguccccucccccuacaacagccgguucgagagcguggccugguccgcgagcgccugccacgacgggaucuccuggcucaccaucggcaucagcggccccgacaacggggccguggccguccugaaguacaacggcaucaucaccgacaccaucaaguccuggcgcaacaacauccugcggacgcaggagagcgagugcgcgugcgugaacggguccugcuucaccgugaugaccgacggcccgagcgacggccaggccuccuacaagaucuuccgcaucgagaaggggaagaucgucaagagcguggagaugaacgcccccaacuaccacuacgaggagugcuccugcuaccccgacagcuccgagaucacgugcgugugccgggacaacuggcacggcagcaaccgccccugggucuccuucaaccagaaccucgaguaccagaucggguacaucugcagcggcaucuucggggacaacccgcggcccaacgacaagaccggcuccugcggccccgugagcgccaacggggccaacggcgugaagggguucuccuucaaguacggcaacggggucuggaucggccgcaccaagagcaucagcucccggaacggcuucgagaugaucugggaccccaacggguggaccggcaccgacaacaacuucagcaucaagcaggacaucguggggaucaacgagugguccggcuacagcggguccuucgugcagcacccggagcugacgggccuggacugcauccgccccugcuucugggucgagcucauccggggccgccccaaggagaacaccaucuggaccagcggguccagcaucuccuucugcggcgugaacagcgacaccgucgggugguccuggcccgacggcgcggagcugccguucacgaucgacaaguga

SEQ ID NO: 84844 - RNA, 1410 nt, Artificial Sequence; identical to SEQ ID NO: 84810
  derived and/or modified CDS sequence (opt1) from neuraminidase__InfluenzaA__AEJ10413

SEQ ID NO: 84845 - RNA, 1410 nt, Artificial Sequence; identical to SEQ ID NO: 84832
  derived and/or modified CDS sequence (opt1) from neuraminidase__InfluenzaA__AEJ10423

SEQ ID NO: 84846 - RNA, 1410 nt, Artificial Sequence
  derived and/or modified CDS sequence (opt1) from neuraminidase__InfluenzaA__AEJ10433
augaaccccaaccagaagaucaucaccaucggcagcgugugcaugaccaucgggauggccaaccugauccuccagaucggcaacaucaucuccaucuggaucagccacuccauccagcuggggaaccagaaccagaucgagacgugcaaccagagcgucaucaccuacgagaacaacaccugggugaaccagaccuacgugaacaucuccaacacgaacuucgccgcgggccagagcgucguguccgugaagcuggccgggaacagcucccucugcccggucagcggcugggccaucuacuccaaggacaacagcauccgcaucggcuccaagggggacguguucgugauccgggagcccuucaucagcugcagcccccuggagugccgcaccuucuuccugacccagggcgcccuccugaacgacaagcacuccaacgggaccaucaaggaccggucccccuaccgcacgcugaugagcugcccgaucggcgagguccccucccccuacaacagccgguucgagagcguggccugguccgcgagcgccugccacgacgggaucaacuggcucaccaucggcaucuccggccccgacaacggggccguggccguccugaaguacaacggcaucaucaccgacaccaucaagagcuggcgcaacaacauccugcggacgcaggaguccgagugcgcgugcgugaacgggagcugcuucaccgugaugaccgacggcccguccgacggccaggccagcuacaagaucuuccgcaucgagaaggggaagaucgucaaguccguggagaugaacgcccccaacuaccacuacgaggagugcagcugcuaccccgacuccagcgagaucacgugcgugugccgggacaacuggcacggcuccaaccgccccugggucagcuucaaccagaaccucgaguaccggaucggguacaucugcuccggcaucuucggggacaacccgcgccccaacgacaagaccggcagcugcggccccguguccagcaacggggccaacggcgugaagggguucuccuucaaguacggcaacggggucuggaucggccggaccaagagcaucagcucccgcaacggcuucgagaugaucugggaccccaacggguggaccggcaccgacaacaacuucagcaucaagcaggacaucaucgggaucaacgagugguccggcuacagcggguccuucgugcagcacccggagcugacgggccuggacugcauccggcccugcuucuggguggagcucauccgcggccggcccaaggagaacaccaucuggaccagcggguccagcaucuccuucugcggcgucaacagcgggaccgugggcugguccuggcccgacggcgccgagcugccguucacgaucgacaaguga

SEQ ID NO: 84847 - RNA, 1410 nt, Artificial Sequence; identical to SEQ ID NO: 84281
  derived and/or modified CDS sequence (opt1) from neuraminidase__InfluenzaA__AEJ10443

SEQ ID NO: 84848 - RNA, 1410 nt, Artificial Sequence; identical to SEQ ID NO: 84281
  derived and/or modified CDS sequence (opt1) from neuraminidase__InfluenzaA__AEJ10453

SEQ ID NO: 84849 - RNA, 1410 nt, Artificial Sequence; identical to SEQ ID NO: 84733
  derived and/or modified CDS sequence (opt1) from neuraminidase__InfluenzaA__AEJ10463

SEQ ID NO: 84850 - RNA, 1410 nt, Artificial Sequence
  derived and/or modified CDS sequence (opt1) from neuraminidase__InfluenzaA__AEJ10473
augaaccccaaccagaagaucaucaccaucggcagcgugugcaugaccaucgggauggccaaccugauccuccagaucggcaacaucaucuccaucuggaucagccacuccauccagcuggggaaccagaaccagaucgagacgugcaaccagagcgucaucaccuacgagaacaagaccugggugaaccagaccuacgugaacaucuccaacacgaacuucgccgcgggccagagcgucguguccgugaagcuggccgggaacagcucccucugcccggucagcggcugggccaucuacuccaaggacaacagcauccgcaucggcuccaagggggacguguucgugauccgggagcccuucaucagcugcagcccccuggagugccgcaccuucuuccugacccagggcgcccuccugaacgacaagcacuccaacgggaccaucaaggaccggucccccuaccgcacgcugaugagcugcccgaucggcgagguccccucccccuacaacagccgguucgagagcguggccugguccgcgagcgccugccacgacgggaucaacuggcucaccaucggcaucuccggccccgacaacggggccguggccguccugaaguacaacggcaucaucaccgacaccaucaagagcuggcgcaacaacauccugcggacgcaggaguccgagugcgcgugcgugaacgggagcugcuucaccgugaugaccgacggcccguccgacggccaggccagcuacaagaucuuccgcaucgagaaggggaagaucgucaaguccguggagaugaacgcccccaacuaccacuacgaggagugcagcugcuaccccgacuccagcgagaucacgugcgugugccgggacaacuggcacggcuccaaccgccccugggucagcuucaaccagaaccucgaguaccagaucggguacaucugcuccggcaucuucggggacaacccgcggcccaacgacaagaccggcagcugcggccccguguccagcaacggggccaacggcgugaagggguucuccuucaaguacggcaacggggucuggaucggccgcaccaagagcaucagcucccggaacggcuucgagaugaucugggaccccaacggguggaccggcaccgacaacaaguucagcaucaagcaggacaucguggggaucaacgagugguccggcuacagcggguccuucgugcagcacccggagcugacgggccugaacugcauccgccccugcuucugggucgagcucauccggggccgccccaaggagaacaccaucuggaccagcggguccagcaucuccuucugcggcgugaacagcgacaccgucgggugguccuggcccgacggcgccgagcugccguucacgaucgacaaguga

SEQ ID NO: 84851 - RNA, 1410 nt, Artificial Sequence; identical to SEQ ID NO: 84281
  derived and/or modified CDS sequence (opt1) from neuraminidase__InfluenzaA__AEJ10503

SEQ ID NO: 84852 - RNA, 1410 nt, Artificial Sequence; identical to SEQ ID NO: 80762
  derived and/or modified CDS sequence (opt1) from neuraminidase__InfluenzaA__AEJ10523

SEQ ID NO: 84853 - RNA, 1410 nt, Artificial Sequence; identical to SEQ ID NO: 80762
  derived and/or modified CDS sequence (opt1) from neuraminidase__InfluenzaA__AEJ10533

SEQ ID NO: 84854 - RNA, 1410 nt, Artificial Sequence; identical to SEQ ID NO: 80762
  derived and/or modified CDS sequence (opt1) from neuraminidase__InfluenzaA__AEJ10543

SEQ ID NO: 84855 - RNA, 1410 nt, Artificial Sequence; identical to SEQ ID NO: 80762
  derived and/or modified CDS sequence (opt1) from neuraminidase__InfluenzaA__AEJ10553

SEQ ID NO: 84856 - RNA, 1410 nt, Artificial Sequence; identical to SEQ ID NO: 83037
  derived and/or modified CDS sequence (opt1) from neuraminidase__InfluenzaA__AEJ10563

SEQ ID NO: 84857 - RNA, 1410 nt, Artificial Sequence; identical to SEQ ID NO: 83037
  derived and/or modified CDS sequence (opt1) from neuraminidase__InfluenzaA__AEJ10573

SEQ ID NO: 84858 - RNA, 1410 nt, Artificial Sequence; identical to SEQ ID NO: 83037
  derived and/or modified CDS sequence (opt1) from neuraminidase__InfluenzaA__AEJ10583

SEQ ID NO: 84859 - RNA, 1410 nt, Artificial Sequence
  derived and/or modified CDS sequence (opt1) from neuraminidase__InfluenzaA__AEJ36305
augaaccccaaccagaagaucaucaccaucggcagcgugugcaugaccaucgggauggccaaccugauccuccagaucggcaacaucaucuccaucuggaucagccacuccauccagcuggggaaccagaaccagaucgagacgugcaaccagagcgucaucaccuacgagaacaacaccugggugaaccagaccuacgugaacaucuccaacacgaacuucgccgcgggccagagcgucguguccgugaagcuggccgggaacagcucccucugcccggucagcggcugggccaucuacuccaaggacaacagcauccgcaucggcuccaagggggacguguucgugauccgggagcccuucaucagcugcagcccccuggagugccgcaccuucuuccugacccagggcgcccuccugaacgacaagcacuccaacgggaccaucaaggaccggucccccuaccgcacgcugaugagcugcccgaucggcgagguccccucccccuacaacagccgguucgagagcguggccugguccgcgagcgccugccacgacgggaucaacuggcucaccaucggcaucuccggccccgacaacggggccguggccguccugaaguacaacggcaucaucaccgacaccaucaagagcuggcgcaacaacauccugcggacgcaggaguccgagugcgcgugcgugaacgggagcugcuucaccgugaugaccgacggcccguccgacggccaggccagcuacaagaucuuccgcaucgagaaggggaagaucgucaaguccguggagaugaacgcccccaacuaccacuacgaggagugcagcugcuaccccgacuccagcgagaucacgugcgugugccgggacaacuggcacggcuccaaccgccccugggucagcuucaaccagaaccucgaguaccagaucggguacaucugcuccggcaucuucggggacaacccgcggcccaacgacaagaccggcagcugcggccccguguccagcaacggggccaacggcgugaagggguucuccuucaaguacggcaacggggucuggaucggccgcaccaagagcaccagcucccggaacggcuucgagaugaucugggaccccaacggguggaccggcacggacaacagcuucuccaucaagcaggacaucguggggaucaacgaguggagcggcuacuccgggagcuucgugcagcacccggagcugaccggccuggacugcauccgccccugcuucugggucgagcucauccggggccgccccaaggagaacaccaucuggaccuccgggagcuccaucagcuucugcggcgugaacuccgacacggucggguggagcuggcccgacggcgccgagcugccguucaccaucgacaaguga

SEQ ID NO: 84860 - RNA, 1410 nt, Artificial Sequence; identical to SEQ ID NO: 80762
  derived and/or modified CDS sequence (opt1) from neuraminidase__InfluenzaA__AEJ37856

SEQ ID NO: 84861 - RNA, 1410 nt, Artificial Sequence; identical to SEQ ID NO: 80762
  derived and/or modified CDS sequence (opt1) from neuraminidase__InfluenzaA__AEJ37866

SEQ ID NO: 84862 - RNA, 1410 nt, Artificial Sequence; identical to SEQ ID NO: 80762
  derived and/or modified CDS sequence (opt1) from neuraminidase__InfluenzaA__AEJ37876

SEQ ID NO: 84863 - RNA, 1410 nt, Artificial Sequence; identical to SEQ ID NO: 84810
  derived and/or modified CDS sequence (opt1) from neuraminidase__InfluenzaA__AEJ37886

SEQ ID NO: 84864 - RNA, 1410 nt, Artificial Sequence
  derived and/or modified CDS sequence (opt1) from neuraminidase__InfluenzaA__AEJ37896
augaaccccaaccagaagaucaucaccaucggcagcgugugcaucaccaucgggauggccaaccugauccuccagaucggcaacaucaucuccaucuggaucagccacuccauccagcuggggaaccagaaccagaucgagacgugcaaccagagcgucaucaccuacgagaacaacaccugggugaaccagaccuacgugaacaucuccaacacgaacuucgccgcgggccagagcgucguguccgugaagcuggccgggaacagcucccucugcccggucagcggcugggccaucuacuccaaggacaacagcauccgcaucggcuccaagggggacguguucgugauccgggagcccuucaucagcugcagcccccuggagugccgcaccuucuuccugacccagggcgcccuccugaacgacaagcacuccaacgggaccaucaaggaccggucccccuaccgcacgcugaugagcugcccgaucggcgagguccccucccccuacaacagccgguucgagagcguggccugguccgcgagcgccugccacgacgggaucuccuggcucaccaucggcaucagcggccccgacaacggggccguggccguccugaaguacaacggcaucaucaccgacaccaucaaguccuggcgcaacaacauccugcggacgcaggagagcgagugcgcgugcgugaacggguccugcuucaccgugaugaccgacggcccgagcgacggccaggccuccuacaagaucuuccgcaucgagaaggggcggaucgucaagagcguggagaugaacgcccccaacuaccacuacgaggagugcuccugcuaccccgacagcuccgagaucacgugcgugugccgcgacaacuggcacggcagcaaccggcccugggucuccuucaaccagaaccucgaguaccagaucggguacaucugcagcggcaucuucggggacaacccgcgccccaacgacaagaccggcuccugcggccccgugagcuccaacggggccaacggcgugaagggguucagcuucaaguacggcaacggggucuggaucggccggaccaagagcaucuccagccgcaacggcuucgagaugaucugggaccccaacggguggaccggcaccgacaacaacuucuccaucaagcaggacaucguggggaucaacgaguggagcggcuacuccgggagcuucgugcagcacccggagcugacgggccuggacugcauccggcccugcuucugggucgagcucauccgcggccggcccaaggagaacaccaucuggaccuccgggagcuccaucagcuucugcggcgugaacuccgacaccgucggguggagcuggcccgacggcgccgagcugccguucacgaucgacaaguga

SEQ ID NO: 84865 - RNA, 1410 nt, Artificial Sequence; identical to SEQ ID NO: 84810
  derived and/or modified CDS sequence (opt1) from neuraminidase__InfluenzaA__AEJ37906

SEQ ID NO: 84866 - RNA, 1410 nt, Artificial Sequence; identical to SEQ ID NO: 84810
  derived and/or modified CDS sequence (opt1) from neuraminidase__InfluenzaA__AEJ37916

SEQ ID NO: 84867 - RNA, 1410 nt, Artificial Sequence; identical to SEQ ID NO: 84810
  derived and/or modified CDS sequence (opt1) from neuraminidase__InfluenzaA__AEJ37926

SEQ ID NO: 84868 - RNA, 1410 nt, Artificial Sequence; identical to SEQ ID NO: 82664
  derived and/or modified CDS sequence (opt1) from neuraminidase__InfluenzaA__AEJ37936

SEQ ID NO: 84869 - RNA, 1410 nt, Artificial Sequence; identical to SEQ ID NO: 80762
  derived and/or modified CDS sequence (opt1) from neuraminidase__InfluenzaA__AEJ37946

SEQ ID NO: 84870 - RNA, 1410 nt, Artificial Sequence; identical to SEQ ID NO: 84810
  derived and/or modified CDS sequence (opt1) from neuraminidase__InfluenzaA__AEJ37956

SEQ ID NO: 84871 - RNA, 1410 nt, Artificial Sequence; identical to SEQ ID NO: 84810
  derived and/or modified CDS sequence (opt1) from neuraminidase__InfluenzaA__AEJ37966

SEQ ID NO: 84872 - RNA, 1410 nt, Artificial Sequence; identical to SEQ ID NO: 80762
  derived and/or modified CDS sequence (opt1) from neuraminidase__InfluenzaA__AEJ37976

SEQ ID NO: 84873 - RNA, 1410 nt, Artificial Sequence; identical to SEQ ID NO: 84810
  derived and/or modified CDS sequence (opt1) from neuraminidase__InfluenzaA__AEJ37986

SEQ ID NO: 84874 - RNA, 1410 nt, Artificial Sequence; identical to SEQ ID NO: 83434
  derived and/or modified CDS sequence (opt1) from neuraminidase__InfluenzaA__AEK21372

SEQ ID NO: 84875 - RNA, 1413 nt, Artificial Sequence; identical to SEQ ID NO: 84228
  derived and/or modified CDS sequence (opt1) from neuraminidase__InfluenzaA__AEK21383

SEQ ID NO: 84876 - RNA, 1410 nt, Artificial Sequence; identical to SEQ ID NO: 82664
  derived and/or modified CDS sequence (opt1) from neuraminidase__InfluenzaA__AEK21399

SEQ ID NO: 84877 - RNA, 1410 nt, Artificial Sequence; identical to SEQ ID NO: 80762
  derived and/or modified CDS sequence (opt1) from neuraminidase__InfluenzaA__AEK21409

SEQ ID NO: 84878 - RNA, 1410 nt, Artificial Sequence; identical to SEQ ID NO: 84733
  derived and/or modified CDS sequence (opt1) from neuraminidase__InfluenzaA__AEK21419

SEQ ID NO: 84879 - RNA, 1410 nt, Artificial Sequence; identical to SEQ ID NO: 84810
  derived and/or modified CDS sequence (opt1) from neuraminidase__InfluenzaA__AEK21429

SEQ ID NO: 84880 - RNA, 1410 nt, Artificial Sequence
  derived and/or modified CDS sequence (opt1) from neuraminidase__InfluenzaA__AEK21439
augaaccccaaccagaagaucaucaccaucggcagcgugugcaugaccaucgggauggccaaccugauccuccagaucggcaacaucaucuccaucuggaucagccacuccauccagcuggggaaccagaaccagaucgagacgugcaaccagagcgucaucaccuacgagaacaacaccugggugaaccagaccuacgugaacaucuccaacacgaacuucgccgcgggccagagcgucguguccgugaagcuggccgggaacagcucccucugcccggucagcggcugggccaucuacuccaaggacaacagcauccgcaucggcuccaagggggacguguucgugauccgggagcccuucaucagcugcagcccccuggagugccgcaccuucuuccugacccagggcgcccuccugaacgacaagcacuccaacgggaccaucaaggaccggucccccuaccgcacgcugaugagcugcccgaucggcgagguccccucccccuacaacagccgguucgagagcguggccugguccgcgagcgccugccacgacgggaucaacuggcucaccaucggcaucuccggccccgacaacggggccguggccguccugaaguacaacggcaucaucaccgacaccaucaagagcuggcgcaacaacauccugcggacgcaggaguccgagugcgcgugcgugaacgggagcugcuucaccgugaugaccgacggcccguccgacggccaggccagcuacaagaucuuccgcaucgagaaggggaagaucgucaaguccguggagaugaacgcccccaacuaccacuacgaggagugcagcugcuaccccgacuccagcgagaucacgugcgugugccgggacaacuggcacggcuccaaccgccccugggucagcuucaaccagaaccucgaguaccagaucggguacaucugcuccggcaucuucggggacaacccgcggcccaacgacaagaccggcagcugcggccccguguccagcaacggggccaacggcgugaagggguucuccuucaaguacggcaacggggucuggaucggccgcaccaagagcaucagcucccggaacggcuucgagaugaucugggaccccaacggguggaccggcaccgacaacaacuucagcaagaagcaggacaucguggggaucaacgagugguccggcuacagcggguccuucgugcagcacccggagcugacgggccuggacugcauccgccccugcuucugggucgagcucauccggggccgccccaaggagaacaccaucuggaccagcggguccagcaucuccuucugcggcgugaacagcgacaccgucgggugguccuggcccgacggcgccgagcugccguucacgaucgacaaguga

SEQ ID NO: 84881 - RNA, 1410 nt, Artificial Sequence; identical to SEQ ID NO: 84810
  derived and/or modified CDS sequence (opt1) from neuraminidase__InfluenzaA__AEK21449

SEQ ID NO: 84882 - RNA, 1410 nt, Artificial Sequence; identical to SEQ ID NO: 82664
  derived and/or modified CDS sequence (opt1) from neuraminidase__InfluenzaA__AEK21459

SEQ ID NO: 84883 - RNA, 1410 nt, Artificial Sequence; identical to SEQ ID NO: 84810
  derived and/or modified CDS sequence (opt1) from neuraminidase__InfluenzaA__AEK21469

SEQ ID NO: 84884 - RNA, 1410 nt, Artificial Sequence; identical to SEQ ID NO: 84810
  derived and/or modified CDS sequence (opt1) from neuraminidase__InfluenzaA__AEK21479

SEQ ID NO: 84885 - RNA, 1410 nt, Artificial Sequence; identical to SEQ ID NO: 80762
  derived and/or modified CDS sequence (opt1) from neuraminidase__InfluenzaA__AEK21489

SEQ ID NO: 84886 - RNA, 1410 nt, Artificial Sequence; identical to SEQ ID NO: 84478
  derived and/or modified CDS sequence (opt1) from neuraminidase__InfluenzaA__AEK28776

SEQ ID NO: 84887 - RNA, 1410 nt, Artificial Sequence
  derived and/or modified CDS sequence (opt1) from neuraminidase__InfluenzaA__AEK28787
augaaccccaaccagaagaucaucaccaucggcagcgugucccugaccaucagcacgaucugcuucuucaugcagaucgccauccucaucaccaccgucacccugcacuucaagcaguacgaguucuacuccccgcccaacaaccaggugaugcugugcgagcccacgaucaucgagcgcaacaucaccgagaucguguaccucaccaacaccacgaucgagaaggagaucugccccaagcuggccgaguaccggaacuggagcaagccgcagugcgacaucaccggguucgcgcccuucuccaaggacaacagcauccgccuguccgccggcggggacaucugggucacccgggagcccuacgugagcugcgaccccgacaagugcuaccaguucgcccucggccaggggaccacgcugaacaacgugcacuccaacaacaccguccgcgaccggaccccguaccgcacccugcucaugaacgagcugggcgugcccuuccaccugggcacgaagcaggucugcaucgccuggagcuccagcuccugccacgacgggaaggccuggcuccacgugugcaucaccggcgacgacaagaacgcgaccgccagcuucaucuacaacgggcggcugguggacuccguggucagcugguccaaggagauccugcgcacccaggagagcgagugcgugugcaucaacggcacgugcaccguggucaugaccgacggguccgccagcggcaaggccgacaccaagauccucuucaucgaggagggcaagaucgugcacacgagcacccuguccgggagcgcgcagcacguggaggagugcuccugcuacccccgguaccccggcguccgcugcgugugccgggacaacuggaaggggagcaaccgcccgaucguggacaucaacaucaaggaccacuccaucgucagcuccuacgugugcagcggccuggugggcgacacgccccggaagaacgacuccagcuccagcucccacugccucgaccccaacaacgaggagggcgggcacggggucaagggcugggccuucgacgacgggaacgacguguggaugggccgcaccaucaacgagaccagccggcugggcuacgagaccuucaaggucaucgaggggugguccaaccccaagagcaagcugcagaucaaccgccaggugaucguggaccggggcaaccgcuccggguacagcggcaucuucuccgucgaggggcggagcugcaucaaccgcugcuucuacguggagcucauccggggccgcaaggaggagaccgaggugcuguggaccagcaacuccaucgucguguucugcggcacgagcgggaccuacggcaccggguccuggccggacggcgccgaccugaaccucaugcccaucuga

SEQ ID NO: 84888 - RNA, 1410 nt, Artificial Sequence
  derived and/or modified CDS sequence (opt1) from neuraminidase__InfluenzaA__AEK28798
augaaccccaaccagaagaucaucaccaucggcagcgugucccugaccaucagcacgaucugcuucuucaugcagaucgccauccucaucaccaccgucacccugcacuucaagcaguacgaguucaacuccccgcccaacaaccaggugaugcugugcgagcccacgaucaucgagcgcaacaucaccgagaucguguaccucaccaacaccacgaucgagaaggagaucugccccaagcuggccgaguaccggaacuggagcaagccgcagugcgacaucaccggguucgcgcccuucuccaaggacaacagcauccgccuguccgccggcggggacaucugggucacccgggagcccuacgugagcugcgaccccgacaagugcuaccaguucgcccucggccaggggaccacgcugaacaacgugcacuccaacaacaccguccgcgaccggaccccguaccgcacccugcucaugaacgagcugggcgugcccuuccaccugggcacgaagcaggucugcaucgccuggagcuccagcuccugccacgacgggaaggccuggcuccacgugugcaucaccggcgacgacaagaacgcgaccgccagcuucaucuacaacgggcggcugguggacuccguggucagcugguccaaggagauccugcgcacccaggagagcgagugcgugugcaucaacggcacgugcaccguggucaugaccgacgggaacgccuccggcaaggccgacaccaagauccucuucaucgaggagggcaagaucgugcacacgagcacccugagcggguccgcgcagcacguggaggagugcagcugcuacccccgguaccccggcguccgcugcgugugccgggacaacuggaagggguccaaccgcccgaucguggacaucaacaucaaggaccacagcaucgucuccagcuacgugugcuccggccuggugggcgacacgccccggaagaacgacagcuccagcuccagccacugcuccgaccccaacaacgaggagggcgggcacggggucaagggcugggccuucgacgacgggaacgacguguggaugggccgcaccaucagcgagaagucccggcucggcuacgagaccuucaaggucaucgagggguggagcaaccccaaguccaagcugcagaucaaccgccaggugaucguggaccggggcaaccgcagcggguacuccggcaucuucagcgucgagggcaagagcugcaucaaccggugcuucuacguggagcugauccgcgggcggaaggaggagaccgaggugcucuggaccuccaacagcaucgucguguucugcggcaccuccgggacguacggcaccgggagcuggccggacggcgccgacaucaaccugaugcccaucuga

SEQ ID NO: 84889 - RNA, 1410 nt, Artificial Sequence
  derived and/or modified CDS sequence (opt1) from neuraminidase__InfluenzaA__AEK28809
augaaccccaaccagaagaucaucaccaucggcagcgugucccugaccaucagcacgaucugcuucuucaugcagaucgccauccucaucaccaccgucaccgugcacuucaagcaguacgaguucaacuccccgcccaacaaccaggugaugcugugcgagcccacgaucaucgagcgcaacaucaccgagaucgucuaccugaccaacaccacgaucgagaaggagaucugccccaagcucgccgaguaccggaacuggagcaagccgcagugcgacaucaccggguucgcgcccuucuccaaggacaacagcauccgccuguccgccggcggggacaucugggugacccgggagcccuacgugagcugcgaccccgacaagugcuaccaguucgcccugggccaggggaccacgcucaacaacguccacuccaacaacaaggugcgcgaccggaccccguaccgcacccugcugaugaacgagcucggcgugcccuuccaccugggcaccaagcaggucugcaucgccuggagcuccagcuccugccacgacgggaaggccuggcugcacgugugcaucacgggcgacgacaagaacgcgaccgccagcuucaucuacaacgggcggcucguggacuccgucgugagcugguccaaggagauccugcgcacccaggagagcgagugcgugugcaucaacgggaccugcacggucgugaugaccgacggguccgccagcggcaaggccgacaccaagauccuguucaucgaggagggcaagaucgugcacaccagcacgcucuccgggagcgcgcagcacgucgaggagugcuccugcuacccccgguaccccggcgugcgcugcgugugccgggacaacuggaaggggagcaaccgcccgaucgucgacaucaacaucaaggaccacuccaucgugagcuccuacgugugcagcggccuggucggcgacacgccccggaagaacgacuccagcuccagcucccacugccuggaccccaacaacgaggagggcggccacggggugaagggcugggccuucgacgacgggaacgacgucuggaugggccgcaccaucagcgagaagucccggcucggcuacgagaccuucaaggugaucgagggguggagcaaccccaaguccaagcugcagaucaaccgccaggugaucgucgaccggggcaaccgcagcggguacuccggcaucuucagcguggagggcaagagcugcaucaaccggugcuucuacguggagcugauccgcgggcggaaggaggagaccgagguccucuggaccuccaacagcaucgugguguucugcggcaccuccgggaccuacggcacggggagcuggccggacggcgccgacaucaaccugaugcccaucuga

SEQ ID NO: 84890 - RNA, 1410 nt, Artificial Sequence
  derived and/or modified CDS sequence (opt1) from neuraminidase__InfluenzaA__AEK28819
augaaccccaaccagaagaucaucaccaucggcagcgugucccugaccaucagcacgaucugcuucuucaugcagaucgccauccucaucaccaccgucacccugcacuucaagcaguacgaguucaacuacccgcccaacaaccaggugaugcugugcgagcccacgaucaucgagcgcaacaucaccgagaucguguaccucaccaacaccacgaucgagaaggagaucugccccaagcuggccgaguaccggaacugguccaagccgcagugcgacaucaccggguucgcgcccuucagcaaggacaacuccauccgccugagcgccggcggggacaucugggucacccgggagcccuacguguccugcgaccccgacaagugcuaccaguucgcccucggccaggggaccacgcugaacaacgugcacagcaacaacaccguccgcgagcggaccccguaccgcacccugcucaugaacgagcugggcgugcccuuccaccugggcacgaagcaggucugcaucgccugguccagcuccagcugccacgacgggaaggccuggcuccacgugugcaucaccggcgacgacaagaacgcgaccgccuccuucaucuacaacgggcggcugguggacagcguggucuccuggagcaaggagauccugcgcacccaggaguccgagugcgugugcaucaacggcacgugcaccguggucaugaccgacgggagcgccuccggcaaggccgacaccaagauccucuucaucgaggagggcaagaucgugcacacgagcacccugagcggguccgcgcagcacguggaggagugcagcugcuacccccgguaccccggcguccgcugcgugugccgggacaacuggaagggguccaaccgcccgaucguggacaucaacaucaaggaccacagcaucgucuccagcuacgugugcuccggccuggugggcgacacgccccggaagaacgacagcuccagcuccagccacugccucgaccccaacaacgaggagggcgggcacggggucaagggcugggccuucgacgacgggaacgacguguggaugggccgcaccaucuccgagaagucccggcugggcuacgagaccuucaaggucaucgagggguggagcaaccccaagagcaagcugcagaucaaccgccaggugaucguggaccggggcaaccgcuccggguacagcggcaucuucuccgucgagggcaagagcugcaucaaccggugcuucuacguggagcucauccgcgggcggaaggaggagaccgaggugcuguggaccagcaacuccaucgucguguucugcggcaccagcgggacguacggcaccggguccuggccggacggcgccgacaucaaccugaugcccaucuga

SEQ ID NO: 84891 - RNA, 1410 nt, Artificial Sequence
  derived and/or modified CDS sequence (opt1) from neuraminidase__InfluenzaA__AEK28830
augaaccccaaccagaagaucaucaccaucggcagcgugucccugaccaucagcacgaucugcuucuucaugcagaucgccauccucaucaccaccgucacccugcacuucaagcaguacgaguucaacuccccgcccaacaaccaggugaugcugugcgagcccacgaucaucgagcgcaacaucaccgagaucguguaccucaccaacaccacgaucgagaaggagaucugccccaaccuggccgaguaccggaacuggagcaagccgcagugcgacaucaccggguucgcgcccuucuccaaggacaacagcauccgccuguccgccggcggggacaucugggucacccgggagcccuacgugagcugcgaccccgacaagugcuaccaguucgcccucggccaggggaccacgcugaacaacgugcacuccaacaacaccguccgcggccggaccccguaccgcacccugcucaugaacgagcugggcgugcccuuccaccuggggacgaagcaggucugcaucgccuggagcuccagcuccugccacgacggcaaggccuggcuccacgugugcaucaccggggacgacaagaacgcgaccgccagcuucaucuacaacggccggcugguggacuccguggucagcugguccaaggagauccugcgcacccaggagagcgagugcgugugcaucaacgggacgugcaccguggucaugaccgacggcuccgccagcggcaaggccgacaccaagauccucuucaucgaggaggggaagaucgugcacacgagcacccuguccggcagcgcgcagcacguggaggagugcuccugcuacccccgguaccccgggguccgcugcgugugccgggacaacuggaagggcagcaaccgcccgaucguggacaucaacaucaaggaccacuccaucgucagcuccuacgugugcagcggccuggugggggacacgccccggaagaacgacuccagcuccagcucccacugccucgaccccaacaacgaggagggcgggcacggcgucaaggggugggccuucgacgacggcaacgacguguggaugggccgcaccaucagcgagaagucccggcugggguacgagaccuucaaggucaucgagggcuggagcaaccccaaguccaagcugcagaucaaccgccaggugaucguggaccgggggaaccgcagcggcuacuccgggaucuucagcgucgagggcaagagcugcaucaaccggugcuucuacguggagcucauccgcggccggaaggaggagaccgaggugcuguggaccuccaacagcaucgucguguucugcgggaccuccggcacguacgggaccggcagcuggccggacggggccgacaucaaccugaugcccaucuga

SEQ ID NO: 84892 - RNA, 1410 nt, Artificial Sequence
  derived and/or modified CDS sequence (opt1) from neuraminidase__InfluenzaA__AEK28841
augaaccccaaccagaagaucaucaccaucggcagcgugucccugaccaucagcacgaucugcuucuucaugcagaucgccauccucaucaccaccgucacccugcacuucaagcaguacgaguucaacuccccgcccaacaaccaggugaugcugugcgagcccacgaucaucgagcgcaacaucaccgagaucguguaccucaccaacaccacgaucgagaaggagaucugccccaagcuggccgaguaccggaacuggagcaagccgcagugcgacaucaccggguucgcgcccuucuccaaggacaacagcauccgccuguccgccggcggggacaucugggucacccgggagcccuacgugagcugcgaccccgacaagugcuaccaguucgcccucggccaggggaccacggugaacaacguccacuccaacaacaccgugcgcggccggaccccguaccgcacccugcugaugaacgagcucggcgugcccuuccaccuggggacgaagcaggucugcaucgccuggagcuccagcuccugccacgacggcaaggccuggcugcacgugugcaucaccggggacgacaagaacgcgaccgccagcuucaucuacaacggccggcucguggacuccgucgugagcugguccaaggagauccugcgcacccaggagagcgagugcgugugcaucaacgggacgugcaccgucgugaugaccgacggcuccgccagcggcaaggccgacaccaagauccuguucaucgaggaggggaagaucgugcacacgagcacccucuccggcagcgcgcagcacgucgaggagugcuccugcuacccccgguaccccggggugcgcugcgugugccgggacaacuggaagggcagcaaccgcccgaucgucgacaucaacaucaaggaccacuccaucgugagcuccuacgugugcagcggccuggucggggacacgccccggaagaacgacuccagcuccagcucccacugccuggaccccaacaacgaggagggcgggcacggcgugaaggggugggccuucgacgacggcaacgacgucuggaugggccgcaccaucagcgagaagucccggcucggguacgagaccuucaaggugaucgagggcuggagcaaccacaaguccaagcugcagaucaaccgccaggugaucgucgaccgggggaaccgcagcggcuacuccgggaucuucagcguggagggcaagagcugcaucaaccggugcuucuacguggagcugauccgcggccggaaggaggagaccgagguccucuggaccuccaacagcaucgugguguucugcgggaccuccggcacguacgggaccggcagcuggcccgacggggccgaccugaaccugaugccgaucuga

SEQ ID NO: 84893 - RNA, 1410 nt, Artificial Sequence
  derived and/or modified CDS sequence (opt1) from neuraminidase__InfluenzaA__AEK28852
augaaccccaaccagaagaucaucaccaucggcagcgugucccugaccaucagcacgaucugcuucuucaugcagaucgccauccucaucaccaccgucacccugcacuucaagcaguacgaguucaacuccccgcccaacaaccaggugaugcugugcgagcccacgaucaucgagaagaacaucaccgagaucguguaccucaccaacaccacgaucgagaaggagaucugccccaagcuggccgaguaccgcaacuggagcaagccgcagugcgacaucaccggguucgcgcccuucuccaaggacaacagcauccggcuguccgccggcggggacaucugggucacccgcgagcccuacgugagcugcgaccccgacaagugcuaccaguucgcccucggccaggggaccacgcugaacaacgugcacuccaacaaccggguccgcgaccggaccccguaccgcacccugcucaugaacgagcugggcgugcccuuccaccugggcaccaagcaggucugcaucgccuggagcuccagcuccugccacgacgggaaggccuggcuccacgugugcaucacgggcgacgacaagaacgcgaccgccagcuucaucuacaacgggcggcugguggacuccguggucagcugguccaaggagauccugcgcacccaggagagcgagugcgugugcaucaacgggaccugcacgguggucaugaccgacggguccgccagcggcaaggccgacaccaagauccucuucaucgaggagggcaagaucgugcacaccagcacgcuguccgggagcgcgcagcacguggaggagugcuccugcuacccccgguaccccggcguccgcugcgugugccgggacaacuggaaggggagcaaccgcccgaucguggacaucaacaucaaggaccacuccaucgucagcuccuacgugugcagcggccuggugggcgacacgccccggaagaacgacuccagcuccagcucccacugccucgaccccaacaacgaggagggcggccacggggucaagggcugggccuucgacgacgggaacgacguguggaugggccgcaccaucagcgagaagucccggcugggcuacgagaccuucaaggucaucgagggguggagcaaccccaaguccaagcugcagaucaaccgccaggugaucguggaccggggcaaccgcagcggguacuccggcaucuucagcgucgagggcaagagcugcaucaaccggugcuucuacguggagcucauccgcgggcggaaggaggagaccgaggugcuguggaccuccaacagcaucgucguguucugcggcaccuccgggaccuacggcacggggagcuggccggacggcgccgacaucaaccugaugcccaucuga

SEQ ID NO: 84894 - RNA, 1410 nt, Artificial Sequence; identical to SEQ ID NO: 82508
  derived and/or modified CDS sequence (opt1) from neuraminidase__InfluenzaA__AEK28863

SEQ ID NO: 84895 - RNA, 1410 nt, Artificial Sequence
  derived and/or modified CDS sequence (opt1) from neuraminidase__InfluenzaA__AEK28874
augaaccccaaccagaagaucaucaccaucggcagcgugucccugaccaucagcacgaucugcuucuucaugcagaucgccauccucaucaccaccgucacccugcacuucaagcaguacgaguucaacuccccgcccaacaaccaggugaugcugugcgagcccacgaucaucgagcgcaacaucaccgagaucguguaccucaccaacaccacgaucgagaaggagaucugccccaagcuggccgaguaccggaacuggagcaagccgcagugcgacaucaccggguucgcgcccuucuccaaggacaacagcauccgccuguccgccggcggggacaucugggucacccgggagcccuacgugagcugcgaccccgacaagugcuaccaguucgcccucggccaggggaccacgcugaacaacgugcacuccaacaacaagguccgcgaccggaccccguaccgcacccugcucaugaacgagcugggcgugcccuuccaccugggcaccaagcaggucugcaucgccuggagcuccagcuccugccacgacgggaaggccuggcuccacgugugcaucacgggcgacgacaagaacgcgaccgccagcuucaucuacaacgggcggcugguggacuccguggucagcugguccaaggagauccugcgcacccaggagagcgagugcgugugcaucaacgggaccugcacgguggucaugaccgacggguccgccagcggcaaggccgacaccaagauccucuucaucgaggagggcaagaucgugcacaccagcacgcuguccgggagcgcgcagcacguggaggagugcuccugcuacccccgguaccccggcguccgcugcgugugccgggacaacuggaaggggagcaaccgcccgaucguggacaucaacaucaaggaccacuccaucgucagcuccuacgugugcagcggccuggugggcgacacgccccggaagaacgacuccagcuccagcucccacugccucgaccccaacaacgaggagggcggccacggggucaagggcugggccuucgacgacgggaacgacguguggaugggccgcaccaucagcgagaagucccggcugggcuacgagaccuucaaggucaucgagggguggagcaaccacaaguccaagcugcagaucaaccgccaggugaucguggaccggggcaaccgcagcggguacuccggcaucuucagcgucgagggcaagagcugcaucaaccggugcuucuacguggagcucauccgcgggcggaaggaggagaccgaggugcuguggaccuccaacagcaucgucguguucugcggcaccuccgggaccuacggcacggggagcuggcccgacggcgccgaccugaaccucaugccgaucuga

SEQ ID NO: 84896 - RNA, 1410 nt, Artificial Sequence
  derived and/or modified CDS sequence (opt1) from neuraminidase__InfluenzaA__AEK28885
augaaccccaaccagaagaucaucaccaucggcagcgugucccugaccaucagcacgaucugcuucuucaugcagaucgccauccucaucaccaccgucacccugcacuucaagcaguacgaguucaaccugccgcccaacaaccaggugaugcucugcgagcccacgaucaucgagcgcaacaucaccgagaucguguaccugaccaacaccacgaucgagaaggagaucugccccaagcuggccgaguaccggaacugguccaagccgcagugcgacaucaccggguucgcgcccuucagcaaggacaacuccauccgccucagcgccggcggggacaucugggucacccgggagcccuacguguccugcgaccccgacaagugcuaccaguucgcccugggccaggggaccacgcugaacaacgugcacagcaacaacaccguccgcgaccggaccccguaccgcacccuccugaugaacgagcugggcgugcccuuccaccucggcacgaagcaggucugcaucgccugguccagcuccagcugccacgacgggaaggccuggcugcacgugugcaucaccggcgacgacaagaacgcgaccgccuccuucaucuacaacgggcggcugguggacagcguggucuccuggagcaaggagauccuccgcacccaggaguccgagugcgugugcaucaacggcacgugcaccguggucaugaccgacgggagcgccuccggcaaggccgacaccaagauccuguucaucgaggagggcaagaucgugcacacgagcacccugagcggguccgcgcagcacguggaggagugcagcugcuacccccgguaccccggcguccgcugcgugugccgggacaacuggaagggguccaaccgcccgaucguggacaucaacaucaaggaccacagcaucgucuccagcuacgugugcuccggccucgugggcgacacgccccggaagaacgacagcuccagcuccagccacugccuggaccccaacaacgaggagggcgggcacggggucaagggcugggccuucgacgacgggaacgacguguggaugggccgcaccaucuccgagaagucccggcugggcuacgagaccuucaaggucaucgagggguggagcaaccccaagagcaagcuccagaucaaccgccaggugaucguggaccggggcaaccgcuccggguacagcggcaucuucuccgucgagggcaagagcugcaucaaccggugcuucuacguggagcugauccgcgggcggaaggaggagaccgaggugcuguggaccagcaacuccaucgucguguucugcggcaccagcgggacguacggcaccggguccuggccggacggcgccgacaucaaccucaugcccaucuga

SEQ ID NO: 84897 - RNA, 1410 nt, Artificial Sequence; identical to SEQ ID NO: 82633
  derived and/or modified CDS sequence (opt1) from neuraminidase__InfluenzaA__AEK28896

SEQ ID NO: 84898 - RNA, 1410 nt, Artificial Sequence
  derived and/or modified CDS sequence (opt1) from neuraminidase__InfluenzaA__AEK28907
augaaccccaaccagaagaucaucaccaucggcagcgugucccugaccaucagcacgaucugcuucuucaugcagaucgccauccucaucaccaccgucacccugcacuucaagcaguacgaguucaacuccccgcccaacaaccaggugaugcugugcgagcccacgaucaucgagaagaacaucaccgagaucguguaccucaccaacaccacgaucgagaaggagaucugcccccgccuggccgaguaccggaacuggagcaagccgcagugcgacaucaccggguucgcgcccuucuccaaggacaacagcauccgccuguccgccggcggggacaucugggucacccgggagcccuacgugagcugcgaccccgacaagugcuaccaguucgcccucggccaggggaccacgcugaacaacgugcacuccaacaacaccguccgcgaccggaccccguaccgcacccugcucaugaacgagcugggcgugcccuuccaccugggcacgaagcaggucugcaucgccuggagcuccagcuccugccacgacgggaaggccuggcuccacgugugcaucaccggcgacgacaagaacgcgaccgccagcuucaucuacaacgggcggcugguggacuccguggucagcugguccaaggagauccugcgcacccaggagagcgagugcgugugcaucaacggcacgugcaccguggucaugaccgacggguccgccagcggcaaggccgacaccaagauccucuucaucgaggagggcaagaucgugcacacgagcacccuguccgggagcgcgcagcacguggaggagugcuccugcuacccccgguaccccggcguccgcugcgugugccgggacaacuggaaggggagcaaccgcccgaucguggacaucaacaucaaggaccacuccaucgucagcuccuacgugugcagcggccuggugggcgacacgccccggaagaacgacuccagcuccagcucccacugccucgaccccaacaacgaggagggcgggcacggggucaagggcugggccuucgacgacgggaacgacguguggaugggccgcaccaucagcgagaagucccggcugggcuacgagaccuucaaggucaucgagggguggagcaaccccaaguccaagcugcagaucaaccgccaggugaucguggaccggggcaaccgcagcggguacuccggcaucuucagcgucgagggcaagagcugcaucaaccggugcuucuacguggagcucauccgcgggcggaaggaggagaccgaggugcuguggaccuccaacagcaucgucguguucugcggcaccuccgggacguacggcaccgggagcuggccggacggcgccgacaucaaccugaugcccaucuga

SEQ ID NO: 84899 - RNA, 1410 nt, Artificial Sequence; identical to SEQ ID NO: 80623
  derived and/or modified CDS sequence (opt1) from neuraminidase__InfluenzaA__AEK28918

SEQ ID NO: 84900 - RNA, 1410 nt, Artificial Sequence; identical to SEQ ID NO: 81929
  derived and/or modified CDS sequence (opt1) from neuraminidase__InfluenzaA__AEK28929

SEQ ID NO: 84901 - RNA, 1410 nt, Artificial Sequence
  derived and/or modified CDS sequence (opt1) from neuraminidase__InfluenzaA__AEK28951
augaaccccaaccagaagaucaucaccaucggcagcgugucccugaccaucagcacgaucugcuucuucaugcagaucgccauccucaucaccaccgucacccugcacuucaagcaguacgaguucaacuccccgcccaacaaccaggugaugcugugcgagcccacgaucaucgagcgcaacaucaccgagaucguguaccucaccaacaccacgaucgagaaggagaucugccccaagcuggccgaguaccggaacuggagcaagccgcagugcgacaucaccggguucgcgcccuucuccaaggacaacagcauccgccuguccgccggcggggacaucugggucacccgggagcccuacgugagcugcgaccccgacaagugcuaccaguucgcccucggccaggggaccacgcugaacaacgugcacuccaacaacaccguccgcgaccggaccccguaccgcacccugcucaugaacgagcugggcgugcccuuccaccugggcacgaagcaggucugcaucgccuggagcuccagcuccugccacgacgggaaggccuggcuccacgugugcaucaccggcgacgacaagaacgcgaccgccagcuucaucuacaacgggcggcugguggacuccguggucagcugguccaaggagauccugcgcacccaggagagcgagugcgugugcaucaacggcacgugcaccguggucaugaccgacggguccgccagcggcaaggccgacaccaagauccucuucaucgaggagggcaagaucgugcacacgagcacccuguccgggagcgcgcagcacguggaggagugcuccugcuacccccgguaccccggcguccgcugcgugugccgggacaacuggaaggggagcaaccgcccgaucguggacaucaacaucaaggaccacuccaucgucagcuccuacgugugcagcggccuggugggcgacacgccccggaagaacgacuccagcuccagcucccacugccucgaccccaacaacgaggagggcgggcacggggucaagggcugggccuucgacgacgggaacgacguguggaugggccgcaccaucagcgagaagucccggagcggcuacgagaccuucaaggucaucgaggggugguccaaccacaagagcaagcugcagaucaaccgccaggugaucguggaccggggcaaccgcuccggguacagcggcaucuucagcgucgaggggaaguccugcaucaaccggugcuucuacguggagcugauccgcggccggaaggaggagaccgaggcccucuggaccagcaacuccaucguggucuucugcggcaccagcgggacguacggcaccggguccuggcccgacggcgccgaccugaaccugaugccgaucuga

SEQ ID NO: 84902 - RNA, 1410 nt, Artificial Sequence
  derived and/or modified CDS sequence (opt1) from neuraminidase__InfluenzaA__AEK28962
augaaccccaaccagaagaucaucaccaucggcagcgugucccugaccaucagcacgaucugcuucuucaugcagaucgccauccucaucaccaccgucacccugcacuucaagcaguacgaguucaacuccccgcccaacaaccaggugaugcugugcgagcccacgaucaucgagcgcaacaucaccgagaucguguaccccaccaacaccacgaucgagaaggagaucugcccgaagcucgccgaguaccggaacuggagcaagccccagugcgacaucaccggguucgcgcccuucuccaaggacaacagcauccgccuguccgccggcggggacaucugggucacccgggagcccuacgugagcugcgacccggacaagugcuaccaguucgcccugggccaggggaccacgcucaacaacgugcacuccaacaacaccguccgcgaccggacccccuaccgcacccugcugaugaacgagcucggcgugcccuuccaccugggcacgaagcaggucugcaucgccuggagcuccagcuccugccacgacgggaaggccuggcugcacgugugcaucaccggcgacgacaagaacgcgaccgccagcuucaucuacaacgggcggcucguggacuccguggucagcugguccaaggagauccugcgcacccaggagagcgagugcgugugcaucaacggcacgugcaccguggucaugaccgacggguccgccagcggcaaggccgacaccaagauccuguucaucgaggagggcaagaucgugcacacgagcacccucuccgggagcgcgcagcacguggaggagugcuccugcuacccccgguacccgggcguccgcugcgugugccgggacaacuggaaggggagcaaccgccccaucguggacaucaacaucaaggaccacuccaucgucagcuccuacgugugcagcggccuggugggcgacacgccccggaagaacgacuccagcuccagcucccacugccuggaccccaacaacgaggagggcgggcacggggucaagggcugggccuucgacgacgggaacgacguguggaugggccgcaccaucagcgagaagucccggcucggcuacgagaccuucaaggucaucgagggguggagcaacccgaaguccaagcugcagaucaaccgccaggugaucguggaccggggcaaccgcagcggguacuccggcaucuucagcgucgagggcaagagcugcaucaaccggugcuucuacguggagcugauccgcgggcggaaggaggagaccgaggugcucuggaccuccaacagcaucgucguguucugcggcaccuccgggacguacggcaccgggagcuggcccgacggcgccgacaucaaccugaugcccaucuga

SEQ ID NO: 84903 - RNA, 1410 nt, Artificial Sequence
  derived and/or modified CDS sequence (opt1) from neuraminidase__InfluenzaA__AEK28973
augaaccccaaccagaagaucaucaccaucggcagcgugucccugaccaucagcacgaucugcuucuucaugcagaucgccauccucaucaccaccgucacccugcacuucaagcaguacgaguucaacuccccgcccaacaaccaggugaugcugugcgagcccacgaucaucgagcgcaacaucaccgagaucguguaccucaccaacaccacgaucgagaaggagaucugccccaagcuggccgaguaccggaacuggagcaagccgcagugcgacaucaccggguucgcgcccuucuccaaggacaacagcauccgccuguccgccggcggggacaucugggucacccgggagcccuacgugagcugcgaccccgacaagugcuaccaguucgcccucggccaggggaccacgcugaacaacgugcacuccaacaacaccguccgcgaccggaccccguaccgcacccugcucaugaacgagcugggcgugcccuuccaccugggcacgaagcaggucugcaucgccuggagcuccagcuccugccacgacgggaaggccuggcuccacgugugcaucaccggcgacgacaagaacgcgaccgccagcuucaucuacaacgggcggcugguggacuccguggucagcugguccaaggagauccugcgcacccaggagagcgagugcgugugcaucaacggcacgugcaccguggucaugaccgacggguccgccagcggcaaggccgacaccaagauccucuucaucgaggagggcaagaucgugcacacgagcacccuguccgggagcgcgcagcacguggaggagugcuccugcuacccccgguaccccggcguccgcugcgugugccgggacaacuggaaggggagcaaccgcccgaucguggacaucaacaucaaggaccacuccaucgucagcuccuacgugugcagcggccuggugggcgacacgccccggaagaacgacuccagcuccagcucccacugccucgaccccaacaacgaggagggcgggcacggggucaagggcugggccuucgacgacgggaacgacguguggaugggccgcaccaucagcgagaagucccggcugggcuacgagaccuucaaggucaucgagggguggagcaaccacaaguccaagcugcagaucaaccgccaggugaucguggaccggggcaaccgcagcggguacuccggcaucuucagcgucgagggcaagagcugcaucaaccggugcuucuacguggagcucauccgcgggcggaaggaggagaccgaggugcuguggaccuccaacagcaucgucguguucugcggcaccuccgggacguacggcaccgggagcuggcccgacggcgccgaccugaacuucaugccgaucuga

SEQ ID NO: 84904 - RNA, 1410 nt, Artificial Sequence
  derived and/or modified CDS sequence (opt1) from neuraminidase__InfluenzaA__AEK28984
augaaccccaaccagaagaucaucaccaucggcagcgugucccugaccaucagcacgaucugcuucuucaugcagaucgccauccucaucaccaccgucacccugcacuucaagcaguacgaguucaacuccccgcccaacaaccaggugaugcugugcgagcccacgaucaucgagcgcaacaucaccgagaucguguaccucaccaacaccacgaucgagaaggagaucugccccaagcuggccgaguaccggaacuggagcaagccgcagugcgacaucaccggguucgcgcccuucuccaaggacaacagcguccgccuguccgccggcggggacaucugggugacccgggagcccuacgugagcugcgaccccgacaagugcuaccaguucgcccucggccaggggaccacgcugaacaacguccacuccaacaacaccgugcgcgaccggaccccguaccgcacccugcucaugaacgagcugggcgugcccuuccaccugggcacgaagcaggucugcaucgccuggagcuccagcuccugccacgacgggaaggccuggcuccacgugugcaucaccggcgacgacaagaacgcgaccgccagcuucaucuacaacgggcggcugguggacuccgucgugagcugguccaaggagauccugcgcacccaggagagcgagugcgugugcaucaacggcacgugcaccgucgugaugaccgacggguccgccagcggcaaggccgacaccaagauccucuucaucgaggagggcaagaucgugcacacgagcacccuguccgggagcgcgcagcacgucgaggagugcuccugcuacccccgguaccccggcgugcgcugcgugugccgggacaacuggaaggggagcaaccgcccgaucgucgacaucaacaucaaggaccacuccaucgugagcuccuacgugugcagcggccuggucggcgacacgccccggaagaacgacuccagcuccagcucccacugccucgaccccaacaacgaggagggcgggcacggggugaagggcugggccuucgacgacgggaacgacgucuggaugggccgcaccaucagcgagaagucccggcugggcuacgagaccuucaaggugaucgagggguggagcaaccccaaguccaagcugcagaucaaccgccaggugaucgucgaccggggcaaccgcagcggguacuccggcaucuucagcguggagggcaagagcugcaucaaccggugcuucuacguggagcucauccgcgggcggaaggaggagaccgagguccuguggaccuccaacagcaucgugguguucugcggcaccuccgggacguacggcaccgggagcuggccggacggcgccgacaucaaccugaugcccaucuga

SEQ ID NO: 84905 - RNA, 1410 nt, Artificial Sequence; identical to SEQ ID NO: 84904
  derived and/or modified CDS sequence (opt1) from neuraminidase__InfluenzaA__AEK28995

SEQ ID NO: 84906 - RNA, 1410 nt, Artificial Sequence; identical to SEQ ID NO: 83542
  derived and/or modified CDS sequence (opt1) from neuraminidase__InfluenzaA__AEK29006

SEQ ID NO: 84907 - RNA, 1410 nt, Artificial Sequence
  derived and/or modified CDS sequence (opt1) from neuraminidase__InfluenzaA__AEK29028
augaaccccaaccagaagaucaucaccaucggcagcgugucccugaccaucagcacgaucugcuucuucaugcagaucgccauccucaucaccaccgucacccugcacuucaagcaguacgaguucaacuccccgcccaacaaccaggugaugcugugcgagcccacgaucaucgagcgcaacaucaccgagaucguguaccucaccaacaccacgaucgagaaggagaucugccccaagcuggccgaguaccggaacuggagcaagccgcagugcgacaucaccggguucgcgcccuucuccaaggacaacagcauccgccuguccgccggcggggacaucugggucacccgggagcccuacgugagcugcgaccccaacaagugcuaccaguucgcccucggccaggggaccacgcugaacaacgugcacuccaacaacaccguccgcgaccggaccccguaccgcacccugcucaugaacgagcugggcgugcccuuccaccugggcacgaagcaggucugcaucgccuggagcuccagcuccugccacgacgggaaggccuggcuccacgugugcaucaccggcgacgacaagaacgcgaccgccagcuucaucuacaacgggcggcugguggacuccguggucagcugguccaaggagauccugcgcacccaggagagcgagugcgugugcaucaacggcacgugcaccguggucaugaccgacggguccgccagcggcaaggccgacaccaagauccucuucaucgaggagggcaagaucgugcacacgagcacccuguccgggagcgcgcagcacguggaggagugcuccugcuacccccgguaccccggcguccgcugcgugugccgggacaacuggaaggggagcaaccgcccgaucguggacaucaacaugaaggaccacuccaucgucagcuccuacgugugcagcggccuggugggcgacacgccccggaagaacgacuccagcuccagcucccacugcuucgaccccaacgacgaggagggcgggcacggggucaagggcugggccuucgacgacgggaacgacguguggaugggccgcaccaucagcgagaagucccggcucggcuacgagaccuucaaggucaucgagggguggagcaaccccaaguccaagcugcagaucaaccgccaggugaucguggaccggggcaaccgcagcggguacuccggcaucuucagcgucgagggcaagagcugcaucaaccggugcuucuacguggagcugauccgcgggcggaaggaggagaccgaggugcucuggaccuccaacagcaucgucguguucugcggcaccuccgggacguacggcaccgggagcuggccggacggcgccgacaucaaccugaugcccaucuga

SEQ ID NO: 84908 - RNA, 1410 nt, Artificial Sequence
  derived and/or modified CDS sequence (opt1) from neuraminidase__InfluenzaA__AEK29050
augaaccccaaccagaagaucaucaccaucggcagcgugucccugaccaucagcacgaucugcuucuucaugcagaucgccauccucaucaccaccgucacccugcacuucaagcaguacgaguucaacccgccgcccaacaaccaggugaugcugugcgagcccacgaucaucgagcgcaacaucaccgagaucguguaccucaccaacaccacgaucgagaaggagaucugccccaagcuggccgaguaccggaacugguccaagccccagugcgacaucaccggguucgcgcccuucagcaaggacaacuccauccgccugagcgccggcggggacaucugggucacccgggagcccuacguguccugcgacccggacaagugcuaccaguucgcccucggccaggggaccacgcugaacaacgugcacagcaacaacaccguccgcgaccggacccccuaccgcacccugcucaugaacgagcugggcgugcccuuccaccugggcacgaagcaggucugcaucgccugguccagcuccagcugccacgacgggaaggccuggcuccacgugugcaucaccggcgacgacaagaacgcgaccgccuccuucaucuacaacgggcggcugguggacagcguggucuccuggagcaaggagauccugcgcacccaggaguccgagugcgugugcaucaacggcacgugcaccguggucaugaccgacgggagcgccuccggcaaggccgacaccaagauccucuucaucgaggagggcaagaucgugcacacgagcacccugagcggguccgcgcagcacguggaggagugcagcugcuacccccgguacccgggcguccgcugcgugugccgggacaacuggaagggguccaaccgccccaucguggacaucaacaucaaggaccacagcaucgucuccagcuacgugugcuccggccuggugggcgacacgccccggaagaacgacagcuccagcuccagccacugccucgaccccaacaacgaggagggcgggcacggggucaagggcugggccuucgacgacgggaacgacguguggaugggccgcaccaucaacgagaccucccggcugggcuacgagaccuucaaggucaucgagggguggagcaacccgaaguccaagcugcagaucaaccgccaggugaucguggaccggggcaaccgcagcggguacuccggcaucuucagcgucgaggggaaguccugcaucaaccggugcuucuacguggagcucauccgcggccggaaggaggagaccgaggugcuguggaccagcaacagcaucgucguguucugcggcacguccgggaccuacggcaccgggagcuggcccgacggcgccgaccugaaccucaugcccaucuga

SEQ ID NO: 84909 - RNA, 1410 nt, Artificial Sequence
  derived and/or modified CDS sequence (opt1) from neuraminidase__InfluenzaA__AEK29061
augaaccccaaccagaagaucaucaccaucggcagcgugucccugaccaucagcacgaucugcuucuucauccagaucgccauccucaucaccaccgucacccugcacuucaagcaguacgaguucaacuccccgcccaacaaccaggugaugcugugcgagcccacgaucaucgagaagaacaucaccgagaucguguaccucaccaacaccacgaucgagaaggagaucugccccaagcuggccgaguaccgcaacuggagcaagccgcagugcgacaucaccggguucgcgcccuucuccaaggacaacagcauccggcuguccgccggcggggacaucugggucacccgcgagcccuacgugagcugcgaccccgacaagugcuaccaguucgcccucggccaggggaccacgcugaacaacgugcacuccaacaacaucguccgggaccgcaccccguaccggacccugcucaugaacgagcugggcgugcccuuccaccugggcaccaagcaggucugcaucgccuggagcuccagcuccugccacgacgggaaggccuggcuccacgugugcaucacgggcgacgacaagaacgcgaccgccagcuucaucuacaacgggcgccugguggacuccguggucagcugguccaaggagauccugcggacccaggagagcgagugcgugugcaucaacgggaccugcacgguggucaugaccgacggguccgccagcggcaaggccgacaccaagauccucuucaucgaggagggcaagaucgugcacaccagcacgcuguccgggagcgcgcagcacguggaggagugcuccugcuacccccgcuaccccggcguccggugcgugugccgcgacaacuggaaggggagcaaccggccgaucguggacaucaacaucaaggaccacuccaucgucagcuccuacgugugcagcggccuggugggcgacacgccccgcaagaacgacuccagcuccagcucccacugccucgaccccaacaacgaggagggcggccacggggucaagggcugggccuucgacgacgggaacgacguguggaugggccggaccaucaacgagaccagccgccugggcuacgagaccuucaaggucaucgaggggugguccaaccccaagagcaagcugcagaucaaccgccaggugaucguggaccggggcaaccgguccggguacagcggcaucuucuccgucgagggcaagagcugcaucaaccgcugcuucuacguggagcucauccgggggcgcaaggaggagaccgaggugcuguggaccagcaacuccaucgucguguucugcggcaccagcgggacguacggcaccggguccuggccggacggcgccgaccugaaccucaugcccaucuga

SEQ ID NO: 84910 - RNA, 1410 nt, Artificial Sequence
  derived and/or modified CDS sequence (opt1) from neuraminidase__InfluenzaA__AEK29083
augaaccccaaccagaagaucaucaccaucggcagcgugucccugaccaucagcacgaucugcuucuucauccagaucgccauccucaucaccaccgucacccugcacuucaagcaguacgaguucaacuccccgcccaacaaccaggugaugcugugcgagcccacgaucaucgagaagaacaucaccgagaucguguaccucaccaacaccacgaucgagaaggagaucugccccaagcuggccgaguaccgcaacuggagcaagccgcagugcgacaucaccggguucgcgcccuucuccaaggacaacagcauccggcuguccgccggcggggacaucugggucacccgcgagcccuacgugagcugcgaccccgacaagugcuaccaguucgcccucggccaggggaccacgcugaacaacgugcacuccaacaacaccguccgggaccgcaccccguaccggacccugcucaugaacgagcugggcgugcccuuccaccugggcacgaagcaggucugcaucgccuggagcuccagcuccugccacgacgggaaggccuggcuccacgugugcaucaccggcgacgacaagaacgcgaccgccagcuucaucuacaacgggcgccugguggacuccguggucagcugguccaaggagauccugcggacccaggagagcgagugcgugugcaucaacggcacgugcaccguggucaugaccgacggguccgccagcggcaaggccgacaccaagauccucuucaucgaggagggcaagaucgugcacacgagcacccuguccgggagcgcgcagcacguggaggagugcuccugcuacccccgcuaccccggcguccggugcgugugccgcgacaacuggaaggggagcaaccggccgaucguggacaucaacaucaaggaccacuccaucgucagcuccuacgugugcagcggccuggugggcgacacgccccgcaagaacgacuccagcuccagcucccacugccucgaccccaacaacgaggagggcgggcacggggucaagggcugggccuucgacgacgggaacgacguguggaugggccggaccaucaacgagaccagccgccugggcuacgagaccuucaaggucaucgaggggugguccaaccccaagagcaagcugcagaucaaccgccaggugaucguggaccggggcaaccgguccggguacagcggcaucuucuccgucgagggcaagagcugcaucaaccgcugcuucuacguggagcucauccgggggcgcaaggaggagaccgaggugcuguggaccagcaacuccaucgucguguucugcggcacgagcgggaccuacggcaccggguccuggccggacggcgccgaccugaaccucaugcccaucuga

SEQ ID NO: 84911 - RNA, 1410 nt, Artificial Sequence; identical to SEQ ID NO: 83434
  derived and/or modified CDS sequence (opt1) from neuraminidase__InfluenzaA__AEK29094

SEQ ID NO: 84912 - RNA, 1410 nt, Artificial Sequence; identical to SEQ ID NO: 83542
  derived and/or modified CDS sequence (opt1) from neuraminidase__InfluenzaA__AEK29127

SEQ ID NO: 84913 - RNA, 1410 nt, Artificial Sequence; identical to SEQ ID NO: 83542
  derived and/or modified CDS sequence (opt1) from neuraminidase__InfluenzaA__AEK29138

SEQ ID NO: 84914 - RNA, 1410 nt, Artificial Sequence
  derived and/or modified CDS sequence (opt1) from neuraminidase__InfluenzaA__AEK29182
augaaccccaaccagaagaucaucaccaucggcagcgugucccugaccaucagcacgaucugcuucuucaugcagaucgccauccucaucaccaccgucacccugcacuucaagcaguacgaguucaacuccccgcccaacaaccaggugaugcugugcgagcccacgaucaucgagcgcaacaucaccgagaucguguaccucaccaacaccacgaucgagaaggagaucugccccaagcuggccgaguaccggaacuggagcaagccgcagugcgacaucaccggguucgcgcccuucuccaaggacaacagcauccgccuguccgccggcggggacaucugggucacccgggagcccuacgugagcugcgaccccgacaagugcuaccaguucgcccucggccaggggaccacgcugaacaacgugcacuccaacaacaccguccgcgaccggaccccguaccgcacccugcucaugaacgagcugggcgugcccuuccaccugggcacgaagcaggucugcaucgccuggagcuccagcuccugccacgacgggaaggccuggcuccacgugugcaucaccggcgacgacaagaacgcgaccgccagcuucaucuacaacgggcggcugguggacuccguggucagcugguccaaggagauccugcgcacccaggagagcgagugcgugugcaucaacggcacgugcaccguggucaugaccgacggguccgccagcggcaaggccgacaccaagauccucuucaucgaggagggcaagaucgugcacacgagcacccuguccgggagcgcgcagcacguggaggagugcuccugcuacccccgguaccccggcguccgcugcgugugccgggacaacuggaaggggagcaaccgcccgaucguggacaucaacaucaaggaccacuccaucgucagcuccuacgugugcagcggccuggugggcgacacgccccggaagaacgacuccagcuccagcucccacugccucgaccccaacaacgaggagggcgggcacggggucaagggcugggccuucgacgacgggaacgacguguggaugggccgcaccaucaacgagaccagccggcugggcuacgagaccuucaaggucaucgaggggugguccaaccccaagagcaagcuccaggugaaccgccaggugaucgucgaccggggcaaccgcuccggguacagcggcaucuucuccguggagggcaagagcugcaucaaccggugcuucuacguggagcugauccgcgggcggaaggaggagaccgagguccuguggaccagcaacuccaucgugguguucugcggcacgagcgggaccuacggcaccggguccuggccggacggcgccgaccugaaccucaugcccaucuga

SEQ ID NO: 84915 - RNA, 1410 nt, Artificial Sequence
  derived and/or modified CDS sequence (opt1) from neuraminidase__InfluenzaA__AEK29204
augaaccccaaccagaagaucaucaccaucggcagcgugucccugaccaucagcacgaucugcuucuucaugcagaucgccauccucaucaccaccgucacccugcacuucaagcaguacgaguucaacuccccgcccaacaaccaggugaugcugugcgagcccacgaucaucgagcgcaacaucaccgagaucguguaccucaccaacaccacgaucgagaaggagaucugccccaagcuggccgaguaccggaacuggagcaagccgcagugcgacaucaccggguucgcgcccuucuccaaggacaacagcauccgccuguccgccggcggggacaucugggucacccgggagcccuacgugagcugcgaccccgacaagugcuaccaguucgcccucggccaggggaccacgcugaacaacgugcacuccaacaacaccguccgcgaccggaccccguaccgcacccugcucaugaacgagcugggcgugcccuuccaccugggcacgaagcaggucugcaucgccuggagcuccagcuccugccacgacgggaaggccuggcuccacgugugcaucaccggcgacgacaagaacgcgaccgccagcuucaucuacaacgggcggcugguggacuccguggucagcugguccaaggagauccugcgcacccaggagagcgagugcgugugcaucaacggcacgugcaccguggucaugaccgacggguccgccagcggcaaggccaacaccaagguccucuucaucgaggagggcaagaucgugcacacgagcacccuguccgggagcgcgcagcacguggaggagugcuccugcuacccccgguaccccggcgugcgcugcgugugccgggacaacuggaaggggagcaaccgcccgaucgucgacaucaacaucaaggaccacuccaucgugagcuccuacgugugcagcggccuggucggcgacacgccccggaagaacgacuccagcuccagcucccacugccucgaccccaacaacgaggagggcgggcacggggugaagggcugggccuucgacgacgggaacgacgucuggaugggccgcaccaucaacgagaccagccggcugggcuacgagaccuucaaggugaucgaggggugguccaaccccaagagcaagcugcagaucaaccgccaggugaucgucgaccggggcaaccgcuccggguacagcggcaucuucuccguggagggcaagagcugcaucaaccggugcuucuacguggagcucauccgcgggcggaaggaggagaccgagguccuguggaccagcaacuccaucgugguguucugcggcacgagcgggaccuacggcaccggguccuggccggacggcgccgaccugaaccucaugcccaucuga

SEQ ID NO: 84916 - RNA, 1410 nt, Artificial Sequence
  derived and/or modified CDS sequence (opt1) from neuraminidase__InfluenzaA__AEK29215
augaaccccaaccagaagaucaucaccaucggcagcgugucccugaccaucagcacgaucugcuucuucaugcagaucgccauccucaucaccaccgucacccugcacuucaagcaguacgaguucaacuccccgcccaacaaccaggugaugcugugcgagcccacgaucaucgagcgcaacaucaccgagaucguguaccucaccaacaccacgaucgagaaggagaucugccccaagcuggccgaguaccggaacuggagcaagccgcagugcgacaucaccggguucgcgcccuucuccaaggacaacagcauccgccuguccgccggcggggacaucugggucacccgggagcccuacgugagcugcgaccccgacaagugcuaccaguucgcccucggccaggggaccacgcugaacaacgugcacuccaacaacaccguccgcaaccggaccccguaccgcacccugcucaugaacgagcugggcgugcccuuccaccugggcacgaagcaggucugcaucgccuggagcuccagcuccugccacgacgggaaggccuggcuccacgugugcaucaccggcgacgacaagaacgcgaccgccagcuucaucuacaacgggcggcugguggacuccguggucagcugguccaaggagauccugcgcacccaggagagcgagugcgugugcaucaacggcacgugcaccguggucaugaccgacggguccgccagcggcaaggccgacaccaagauccucuucaucgaggagggcaagaucgugcacacgagcacccuguccgggagcgcgcagcacguggaggagugcuccugcuacccccgguaccccggcguccgcugcgugugccgggacaacuggaaggggagcaaccgcccgaucguggacaucaacaucaaggaccacuccaucgucagcuccuacgugugcagcggccuggugggcgacacgccccggaagaacgacuccagcuccagcucccacugccucgaccccaacaacgaggagggcgggcacggggucaagggcugggccuucgacgacgggaacgacguguggaugggccgcaccaucaacgagaccagccggcugggcuacgagaccuucaaggucaucgaggggugguccaaccccaagagcaagcugcagaucaaccgccaggugaucguggaccggggcgaccgcuccggguacagcggcaucuucuccgucgagggcaagagcugcaucaaccggugcuucuacguggagcucauccgcgggcggaaggaggagaccgaggugcuguggaccagcaacuccaucgucguguucugcggcacgagcgggaccuacggcaccggguccuggccggacggcgccgaccugaaccucaugcccaucuga

SEQ ID NO: 84917 - RNA, 1410 nt, Artificial Sequence; identical to SEQ ID NO: 84915
  derived and/or modified CDS sequence (opt1) from neuraminidase__InfluenzaA__AEK29237

SEQ ID NO: 84918 - RNA, 1410 nt, Artificial Sequence; identical to SEQ ID NO: 83542
  derived and/or modified CDS sequence (opt1) from neuraminidase__InfluenzaA__AEK29248

SEQ ID NO: 84919 - RNA, 1410 nt, Artificial Sequence; identical to SEQ ID NO: 83542
  derived and/or modified CDS sequence (opt1) from neuraminidase__InfluenzaA__AEK29259

SEQ ID NO: 84920 - RNA, 1410 nt, Artificial Sequence; identical to SEQ ID NO: 83542
  derived and/or modified CDS sequence (opt1) from neuraminidase__InfluenzaA__AEK29270

SEQ ID NO: 84921 - RNA, 1413 nt, Artificial Sequence
  derived and/or modified CDS sequence (opt1) from neuraminidase__InfluenzaA__AEK59839
augaaccccaaccagaagaucaucaccaucggcagcaucuccaucgccaucgggaucaucagccugaugcuccagaucggcaacaucaucuccaucugggccagccacuccauccagaccgggagccagaaccacacgggcaucugcaaccagcgcaucaucaccuacgagaacuccaccugggugaaccacaccuacgucaacaucaacaacacgaacgugguggcggggaaggacaagaccagcgucacccuggccggcaacuccagccugugcuccaucagcggcugggccaucuacaccaaggacaacuccauccggaucgggagcaagggcgacguguucgugauccgcgagccguucaucuccugcagccaccucgagugccggacguucuuccugacccagggggcccugcucaacgacaagcacuccaacggcaccgucaaggaccgcagccccuaccgggcccugauguccugcccccugggggaggcgcccagcccguacaacagcaaguucgaguccguggccuggagcgccuccgccugccacgacggccucggcuggcugaccaucgggaucagcggccccgacaacggggcgguggccguccugaaguacaacggcaucaucacgggcaccaucaaguccuggaagaagcagauccuccgcacccaggagagcgagugcgugugcaugaacggguccugcuucaccaucaugacggacggccccagcaacggggccgccuccuacaagaucuucaagaucgagaagggcaaggugaccaagagcaucgagcugaacgcccccaacuuccacuacgaggagugcuccugcuacccggacaccgggaucgucaugugcgugugccgggacaacuggcacggcagcaaccgccccuggguguccuucaaccagaaccuggacuaccagaucggcuacaucugcagcggggucuucggcgacaacccccggcccaaggacggggagggcuccugcaacccggugaccguggacggggcggacggcgucaagggcuucagcuacaaguacgacaacgggguguggaucggccgcacgaaguccaaccggcuccgcaagggguucgagaugaucugggaccccaacggcuggaccaacaccgacagcgacuucuccgugaagcaggacgucguggccaucaccgacuggagcggguacagcggcuccuucgugcagcaccccgagcugacgggccuggacugcauccggcccugcuucugggucgagcucgugcgcgggcugccgcgggagaacaccaccaucuggaccagcggcuccagcaucuccuucugcggggucaacagcgacacggccaacugguccuggcccgacggcgccgagcugcccuucaccaucgacaaguga

SEQ ID NO: 84922 - RNA, 1410 nt, Artificial Sequence
  derived and/or modified CDS sequence (opt1) from neuraminidase__InfluenzaA__AEK98375
augaaccccaaccagaagaucaucaccaucggcagcgugucccugaccaucagcacgaucugcuucuucaugcagaucgccauccucaucaccaccgucacccugcacuucaagcaguacgaguucaacuccccgcccaacaaccaggugaugcugugcgagcccacgaucaucgagcgcaacaucaccgagaucguguaccucaccaacaccacgaucgagaaggagaucugccccaagcuggccgaguaccggaacuggagcaagccgcagugcgacaucaccggguucgcgcccuucuccaaggacaacagcauccgccuguccgccggcggggacaucugggucacccgggagcccuacgugagcugcgaccccgacaagugcuaccaguucgcccucggccaggggaccacgcugaacaacgugcacuccaacgacaccguccgcgaccggaccccguaccgcacccugcucaugaacgagcugggcgugcccuuccaccugggcacgaagcaggucugcaucgccuggagcuccagcuccugccacgacgggaaggccuggcuccacgugugcaucaccggcgacgacaagaacgcgaccgccagcuucaucuacaacgggcggcugguggacuccaucgugagcugguccaaggagauccugcgcacccaggagagcgagugcgucugcaucaacggcacgugcaccguggugaugaccgacggguccgccagcggcgaggccgacaccaagauccucuucaucgaggagggcaagaucguccacacgagcacccuguccgggagcgcgcagcacguggaggagugcuccugcuacccccgguaccccggcgugcgcugcgucugccgggacaacuggaaggggagcaaccgcccgaucguggacaucaacaucaaggaccacuccaucgugagcuccuacgucugcagcggccuggugggcgacacgccccggaagaacgacuccagcuccagcucccacugccucgaccccaacaacgaggagggcgggcacggggugaagggcugggccuucgacgacgggaacgacgucuggaugggccgcaccaucagcgagaagucccggcugggcuacgagaccuucaaggugaucgagggguggagcaaccccaaguccaagcugcagaccaaccgccaggucaucguggaccggggcaaccgcagcggguacuccggcaucuucagcguggagggcaagagcugcaucaaccggugcuucuacgucgagcucauccgcgggcggaaggaggagaccgaggugcuguggaccuccaacagcaucguggucuucugcggcacguccgggaccuacggcaccgggagcuggccggacggcgccgacaucaaccugaugcccaucuga

SEQ ID NO: 84923 - RNA, 1410 nt, Artificial Sequence; identical to SEQ ID NO: 80623
  derived and/or modified CDS sequence (opt1) from neuraminidase__InfluenzaA__AEK98377

SEQ ID NO: 84924 - RNA, 1410 nt, Artificial Sequence; identical to SEQ ID NO: 80065
  derived and/or modified CDS sequence (opt1) from neuraminidase__InfluenzaA__AEK98379

SEQ ID NO: 84925 - RNA, 1410 nt, Artificial Sequence
  derived and/or modified CDS sequence (opt1) from neuraminidase__InfluenzaA__AEK98381
augaaccccaaccagaagaucaucaccaucggcagcgugucccugaccaucagcacgaucugcuucuucaugcagaucgccauccucaucaccaccgucacccugcacuucaagcaguacgaguucaacuccccgcccaacaaccaggugaugcugugcgagcccacgaucaucgagcgcaacaucaccgagaucguguaccucaccaacaccacgaucgagaaggagaucugccccaagcuggccgaguaccggaacuggagcaagccgcagugcgacaucaccggguucgcgcccuucuccaaggacaacagcauccgccuguccgccggcggggacaucugggucacccgggagcccuacgugagcugcgaccccgacaagugcuaccaguucgcccucggccaggggaccacgcugaacaacgugcacuccaacgacaccguccgcgaccggaccccguaccgcacccugcucaugaacgagcugggcgugcccuuccaccugggcacgaagcaggucugcaucgccuggagcuccagcuccugccacgacggggaggccuggcuccacgugugcaucaccggcgacgacaagaacgcgaccgccagcuucaucuacaacgggcggcugguggacuccaucgugagcugguccaaggagauccugcgcacccaggagagcgagugcgucugcaucaacggcacgugcaccguggugaugaccgacggguccgccagcggcgaggccgacaccaagauccucuucaucgaggagggcaagaucguccacacgagcacccuguccgggagcgcgcagcacguggaggagugcuccugcuacccccgguaccccggcgugcgcugcgucugccgggacaacuggaaggggagcaaccgcccgaucguggacaucaacaucaaggaccacuccaucgugagcuccuacgucugcagcggccuggugggcgacacgccccggaagaacgacuccagcuccagcucccacugccucgaccccaacaacgaggagggcgggcacggggugaagggcugggccuucgacgacgggaacgacgucuggaugggccgcaccaucagcgagaagucccggcugggcuacgagaccuucaaggugaucgagggguggagcaaccccaaguccaagcugcagaucaaccgccaggucaucguggaccggggcaaccgcagcggguacuccggcaucuucagcguggagggcaagagcugcaucaaccggugcuucuacgucgagcucauccgcgggcggaaggaggagaccgaggugcuguggaccuccaacagcaucguggucuucugcggcaccuccgggacguacggcaccgggagcuggccggacggcgccgacaucaaccugaugcccaucuga

SEQ ID NO: 84926 - RNA, 1410 nt, Artificial Sequence; identical to SEQ ID NO: 80065
  derived and/or modified CDS sequence (opt1) from neuraminidase__InfluenzaA__AEK98383

SEQ ID NO: 84927 - RNA, 1410 nt, Artificial Sequence; identical to SEQ ID NO: 80623
  derived and/or modified CDS sequence (opt1) from neuraminidase__InfluenzaA__AEK98385

SEQ ID NO: 84928 - RNA, 1410 nt, Artificial Sequence
  derived and/or modified CDS sequence (opt1) from neuraminidase__InfluenzaA__AEK98387
augaaccccaaccagaagaucaucaccaucggcagcgugucccugaccaucagcacgaucugcuucuucaugcagaucgccauccucaucaccaccgucacccugcacuucaagcaguacgaguucaacuccccgcccaacaaccaggugaugcugugcgagcccacgaucaucgagcgcaacaucaccgagaucguguaccucaccaacaccacgaucgagaaggagaucugccccaagcuggccgaguaccggaacuggagcaagccgcagugcgacaucaccggguucgcgcccuucuccaaggacaacagcauccgccuguccgccggcggggacaucugggucacccgggagcccuacgugagcugcgaccccgacaagugcuaccaguucgcccucggccaggggaccacgcugaacaacgugcacuccaacaacaccguccgcgaccggaccccguaccgcacccugcucaugaacgagcugggcgugcccuuccaccugggcacgaagcaggucugcaucgccuggagcuccagcuccugccacgacgggaaggccuggcuccacgugugcaucaccggcgacgacaagaacgcgaccgccagcuucaucuacaacgggcggcugaucgacuccguggugagcugguccaaggagauccugcgcacccaggagagcgagugcgucugcaucaacggcacgugcaccguggugaugaccgacggguccgccagcggcaaggccgacaccaagauccucuucaucgaggagggcaagaucguccacacgagcacccuguccgggagcgcgcagcacguggaggagugcuccugcuacccccgguaccccggcgugcgcugcgucugccgggacaacuggaaggggagcaaccgcccgaucguggacaucaacaucaaggaccacuccaucgugagcuccuacgucugcagcggccuggugggcgacacgccccggaagaacgacuccagcuccagcucccacugccucgaccccaacaacgaggagggcgggcacggggugaagggcugggccuucgacgacgggaacgacgucuggaugggccgcaccaucaacgagaccagccggcugggcuacgagaccuucaaggugaucgaggggugguccaaccccaagagcaagcugcagaucaaccgccaggucaucguggaccggggcaaccgcuccggguacagcggcaucuucuccguggagggcaagagcugcaucaaccggugcuucuacgucgagcucauccgcgggcggaaggaggagaccgaggugcuguggaccagcaacuccaucguggucuucugcggcacgagcgggaccuacggcaccggguccuggccggacggcgccgaccugaaccucaugcccaucuga

SEQ ID NO: 84929 - RNA, 1410 nt, Artificial Sequence; identical to SEQ ID NO: 80623
  derived and/or modified CDS sequence (opt1) from neuraminidase__InfluenzaA__AEK98389

SEQ ID NO: 84930 - RNA, 1410 nt, Artificial Sequence
  derived and/or modified CDS sequence (opt1) from neuraminidase__InfluenzaA__AEK98393
augaaccccaaccagaagaucaucaccaucggcagcgugucccugaccaucagcacgaucugcuucuucaugcagaucgccauccucaucaccaccgucacccugcacuucaagcaguacgaguucaacuccccgcccaacaaccaggugaugcugugcgagcccacgaucaucgagcgcaacaucaccgagaucguguaccucaccaacaccacgaucgagaaggagaucugccccaagcuggccgaguaccggaacuggagcaagccgcagugcgacaucaccggguucgcgcccuucuccaaggacaacagcauccgccuguccgccggcggggacaucugggucacccgggagcccuacgugagcugcgaccccgacaagugcuaccaguucgcccucggccaggggaccacgcugaacaacgugcacuccaacaacaccguccgcgaccggaccccguaccgcacccugcucaugaacgagcugggcgugcccuuccaccugggcacgaagcaggucugcaucgccuggagcuccagcuccugccacgacgggaaggccuggcuccacgugugcaucaccggcgacgacaagaacgcgaccgccagcuucaucuacaacgggcggcugguggacuccguggucagcugguccaaggagauccugcgcacccaggagagcgagugcgugugcaucaacggcacgugcaccguggucaugaccgacggguccgccagcggcaaggccgacaccaagauccucuucaucgaggagggcaagaucgugcacacgagcacccuguccgggagcgcgcagcacguggaggagugcuccugcuacccccgguaccccggcguccgcugcgugugccgggacaacuggaaggggagcaaccgcccgaucguggacaucaacaucaaggaccacuccaucgccagcuccuacgucugcagcggccuggugggcgacacgccccggaagaacgacuccagcuccagcucccacugccucgaccccaacaacgaggagggcgggcacggggugaagggcugggccuucgacgacgggaacgacgucuggaugggccgcaccaucaacgagaccagccggcugggcuacgagaccuucaaggugaucgaggggugguccaaccccaagagcaagcugcagaucaaccgccaggucaucguggaccggggcaaccgcuccggguacagcggcaucuucuccguggagggcaagagcugcaucaaccggugcuucuacgucgagcucauccgcgggcggaaggaggagaccgaggugcuguggaccagcaacuccaucguggucuucugcggcacgagcgggaccuacggcaccggguccuggccggacggcgccgaccugaaccucaugcccaucuga

SEQ ID NO: 84931 - RNA, 1410 nt, Artificial Sequence; identical to SEQ ID NO: 83542
  derived and/or modified CDS sequence (opt1) from neuraminidase__InfluenzaA__AEK98395

SEQ ID NO: 84932 - RNA, 1410 nt, Artificial Sequence
  derived and/or modified CDS sequence (opt1) from neuraminidase__InfluenzaA__AEK98397
augaaccccaaccagaagaucaucaccaucggcagcgugucccugaccaucagcacgaucugcuucuucaugcagaucgccauccucaucaccaccgucacccugcacuucaagcaguacgaguucaacuccccgcccaacaaccaggugaugcugugcgagcccacgaucaucgagcgcaacaucaccgagaucguguaccucaccaacaccacgaucgagaaggagaucugccccaagcuggccgaguaccggaacuggagcaagccgcagugcgacaucaccggguucgcgcccuucuccaaggacaacagcauccgccuguccgccggcggggacaucugggucacccgggagcccuacgugagcugcgaccccaacaagugcuaccaguucgcccucggccaggggaccacgcugaacaacgugcacuccaacaacaccguccgcgaccggaccccguaccgcacccugcucaugaacgagcugggcgugcccuuccaccugggcacgaagcaggucugcaucgccuggagcuccagcuccugccacgacgggaaggccuggcuccacgugugcaucaccggcgacgacaagaacgcgaccgccagcuucaucuacaacgggcggcugguggacuccguggucagcugguccaaggagauccugcgcacccaggagagcgagugcgugugcaucaacggcacgugcaccguggucaugaccgacggguccgccagcggcaaggccgacaccaagauccucuucaucgaggagggcaagaucgugcacacgagcacccuguccgggagcgcgcagcacguggaggagugcuccugcuacccccgguaccccggcguccgcugcgugugccgggacaacuggaaggggagcaaccgcccgaucguggacaucaacaugaaggaccacuccaucgucagcuccuacgugugcagcggccuggugggcgacacgccccggaagaacgacuccagcuccagcucccacugccucgaccccaacaacgaggagggcgggcacggggucaagggcugggccuucgacgacgggaacgacguguggaugggccgcaccaucagcgagaagucccggcugggcuacgagaccuucaaggucaucgagggguggagcaaccccaaguccaagcugcagaucaaccgccaggugaucguggaccggggcaaccgcagcggguacuccggcaucuucagcgucgagggcaagagcugcaucaaccggugcuucuacguggagcucauccgcgggcggaaggaggagaccgaggugcuguggaccuccaacagcaucgucguguucugcggcaccuccgggacguacggcaccgggagcuggccggacggcgccgacaucaacuucaugcccaucuga

SEQ ID NO: 84933 - RNA, 1410 nt, Artificial Sequence; identical to SEQ ID NO: 80623
  derived and/or modified CDS sequence (opt1) from neuraminidase__InfluenzaA__AEK98399

SEQ ID NO: 84934 - RNA, 1410 nt, Artificial Sequence; identical to SEQ ID NO: 80536
  derived and/or modified CDS sequence (opt1) from neuraminidase__InfluenzaA__AEK98403

SEQ ID NO: 84935 - RNA, 1410 nt, Artificial Sequence
  derived and/or modified CDS sequence (opt1) from neuraminidase__InfluenzaA__AEK98405
augaaccccaaccagaagaucaucaccaucggcagcgugucccugaccaucagcacgaucugcuucuucaugcagaucgccauccucaucaccaccgucacccugcacuucaagcaguacgaguucaacuccccgcccaacaaccaggugaugcugugcgagcccacgaucaucgagcgcaacaucaccgagaucguguaccucaccaacaccacgaucgagaaggagaucugccccaagcuggccgaguaccggaacuggagcaagccgcagugcgacaucaccggguucgcgcccuucuccaaggacaacagcauccgccuguccgccggcggggacaucugggucacccgggagcccuacgugagcugcgaccccgacaagugcuaccaguucgcccucggccaggggaccacgcugaacaacgugcacuccaacaacaccguccgcgaccggaccccguaccgcacccugcucaugaacgagcugggcgugcccuuccaccugggcacgaagcaggucugcaucgccuggagcuccagcuccugccacgacgggaaggccuggcuccacgugugcaucaccggcgacgacaagaacgcgaccgccagcuucaucuacaacgggcggcugguggacuccaucgugagcugguccaaggagauccugcgcacccaggagagcgagugcgucugcaucaacggcacgugcaccguggugaugaccgacggguccgccagcggcaaggccgacaccaagauccucuucaucgaggagggcaagaucguccacacgagcacccuguccgggagcgcgcagcacguggaggagugcuccugcuacccccgguaccccggcgugcgcugcgucugccgggacaacuggaaggggagcaaccgcccgaucguggacaucaacaucaaggaccacuccaucgugagcuccuacgucugcagcggccuggugggcgacacgccccggaagaacgacuccagcuccagcucccacugccucgaccccaacaacgaggagggcgggcacggggugaagggcugggccuucgacgacgggaacgacgucuggaugggccgcaccaucagcgagaagucccggcugggcuacgagaccuucaaggugaucgagggguggagcaaccccaaguccaagcugcagaucaaccgccaggucaucguggaccgggacaaccgcagcggcuacuccgggaucuucagcguggagggcaagagcugcaucaaccggugcuucuacgucgagcucauccgcgggcggaaggaggagaccgaggugcuguggaccuccaacagcaucguggucuucugcggcaccuccggcacguacgggaccggcagcuggccggacggggccgacaucaaccugaugcccaucuga

SEQ ID NO: 84936 - RNA, 1410 nt, Artificial Sequence
  derived and/or modified CDS sequence (opt1) from neuraminidase__InfluenzaA__AEK98407
augaaccccaaccagaagaucaucaccaucggcagcgugucccugaccaucagcacgaucugcuucuucaugcagaucgccauccucaucaccaccgucacccugcacuucaagcaguacgaguucaacuccccgcccaacaaccaggugaugcugugcgagcccacgaucaucgagcgcaacaucaccgagaucguguaccucaccaacaccacgaucgagaaggagaucugccccaagcuggccgaguaccggaacuggagcaagccgcagugcgacaucaccggguucgcgcccuucuccaaggacaacagcauccgccuguccgccggcggggacaucugggucacccgggagcccuacgugagcugcgaccccgacaagugcuaccaguucgcccucggccaggggaccacgcugaacaacgugcacuccaacaacaccguccgcgugcggaccccguaccgcacccugcucaugaacgagcugggcgugcccuuccaccugggcacgaagcaggucugcaucgccuggagcuccagcuccugccacgacgggaaggccuggcuccacgugugcaucaccggcgacgacaagaacgcgaccgccagcuucaucuacaacgggcggcugguggacuccaucgucagcugguccaaggagauccugcgcacccaggagagcgagugcgugugcaucaacggcacgugcaccguggucaugaccgacggguccgccagcggcaaggccgacaccaagauccucuucaucgaggagggcaagaucgugcacacgagcacccuguccgggagcgcgcagcacguggaggagugcuccugcuacccccgguaccccggcguccgcugcgugugccgggacaacuggaaggggagcaaccgcccgaucguggacaucaacaucaaggaccacuccaucgucagcuccuacgugugcagcggccuggugggcgacacgccccggaagaacgacuccagcuccagcucccacugccucgaccccaacaacgaggagggcgggcacggggucaagggcugggccuucgacgacgggaacgacguguggaugggccgcaccaucagcgagaagucccggcugggcuacgagaccuucaaggucaucgagggguggagcaaccccaaguccaagcugcagaucaaccgccaggugaucguggaccgggacaaccgcagcggcuacuccgggaucuucagcgucgagggcaagagcugcaucaaccggugcuucuacguggagcucauccgcgggcggaaggaggagaccgaggugcuguggaccuccaacagcaucgucguguucugcggcaccuccggcacguacgggaccggcagcuggccggacggggccgacaucaaccugaugcccaucuga

SEQ ID NO: 84937 - RNA, 1410 nt, Artificial Sequence; identical to SEQ ID NO: 78351
  derived and/or modified CDS sequence (opt1) from neuraminidase__InfluenzaA__AEL11690

SEQ ID NO: 84938 - RNA, 1410 nt, Artificial Sequence; identical to SEQ ID NO: 83037
  derived and/or modified CDS sequence (opt1) from neuraminidase__InfluenzaA__AEL89300

SEQ ID NO: 84939 - RNA, 1410 nt, Artificial Sequence; identical to SEQ ID NO: 83037
  derived and/or modified CDS sequence (opt1) from neuraminidase__InfluenzaA__AEL89310

SEQ ID NO: 84940 - RNA, 1410 nt, Artificial Sequence; identical to SEQ ID NO: 83037
  derived and/or modified CDS sequence (opt1) from neuraminidase__InfluenzaA__AEL89320

SEQ ID NO: 84941 - RNA, 1410 nt, Artificial Sequence; identical to SEQ ID NO: 83037
  derived and/or modified CDS sequence (opt1) from neuraminidase__InfluenzaA__AEL89330

SEQ ID NO: 84942 - RNA, 1410 nt, Artificial Sequence; identical to SEQ ID NO: 83037
  derived and/or modified CDS sequence (opt1) from neuraminidase__InfluenzaA__AEL89340

SEQ ID NO: 84943 - RNA, 1410 nt, Artificial Sequence; identical to SEQ ID NO: 83037
  derived and/or modified CDS sequence (opt1) from neuraminidase__InfluenzaA__AEL89350

SEQ ID NO: 84944 - RNA, 1410 nt, Artificial Sequence; identical to SEQ ID NO: 83037
  derived and/or modified CDS sequence (opt1) from neuraminidase__InfluenzaA__AEL89360

SEQ ID NO: 84945 - RNA, 1410 nt, Artificial Sequence; identical to SEQ ID NO: 83037
  derived and/or modified CDS sequence (opt1) from neuraminidase__InfluenzaA__AEL89370

SEQ ID NO: 84946 - RNA, 1410 nt, Artificial Sequence; identical to SEQ ID NO: 83037
  derived and/or modified CDS sequence (opt1) from neuraminidase__InfluenzaA__AEL89394

SEQ ID NO: 84947 - RNA, 1410 nt, Artificial Sequence; identical to SEQ ID NO: 83037
  derived and/or modified CDS sequence (opt1) from neuraminidase__InfluenzaA__AEL89404

SEQ ID NO: 84948 - RNA, 1410 nt, Artificial Sequence; identical to SEQ ID NO: 83037
  derived and/or modified CDS sequence (opt1) from neuraminidase__InfluenzaA__AEL89414

SEQ ID NO: 84949 - RNA, 1410 nt, Artificial Sequence; identical to SEQ ID NO: 83037
  derived and/or modified CDS sequence (opt1) from neuraminidase__InfluenzaA__AEL89424

SEQ ID NO: 84950 - RNA, 1410 nt, Artificial Sequence; identical to SEQ ID NO: 83037
  derived and/or modified CDS sequence (opt1) from neuraminidase__InfluenzaA__AEL89434

SEQ ID NO: 84951 - RNA, 1410 nt, Artificial Sequence; identical to SEQ ID NO: 83037
  derived and/or modified CDS sequence (opt1) from neuraminidase__InfluenzaA__AEL89444

SEQ ID NO: 84952 - RNA, 1410 nt, Artificial Sequence; identical to SEQ ID NO: 83037
  derived and/or modified CDS sequence (opt1) from neuraminidase__InfluenzaA__AEL89454

SEQ ID NO: 84953 - RNA, 1410 nt, Artificial Sequence; identical to SEQ ID NO: 83037
  derived and/or modified CDS sequence (opt1) from neuraminidase__InfluenzaA__AEL89464

SEQ ID NO: 84954 - RNA, 1410 nt, Artificial Sequence; identical to SEQ ID NO: 83037
  derived and/or modified CDS sequence (opt1) from neuraminidase__InfluenzaA__AEL89474

SEQ ID NO: 84955 - RNA, 1410 nt, Artificial Sequence
  derived and/or modified CDS sequence (opt1) from neuraminidase__InfluenzaA__AEL89484
augaaccccaaccagaagaucaucaccaucggcagcgugugcaugaccaucgggauggccaaccugaugcuccagaucggcaacaucaucuccaucuggaucagccacuccauccagcuggggaaccagaaccagaucgagacgugcaaccagagcgucaucaccuacgagaacaacaccugggugaaccagaccuacgugaacaucuccaacacgaacuucgccgcgggccagagcgucguguccgugaagcuggccgggaacagcucccucugcccggucagcggcugggccaucuacuccaaggacaacagcauccgcaucggcuccaagggggacguguucgugauccgggagcccuucaucagcugcagcccccuggagugccgcaccuucuuccugacccagggcgcccuccugaacgacaagcacuccaacgggaccaucaaggaccggucccccuaccgcacgcugaugagcugcccgaucggcgagguccccucccccuacaacagccgguucgagagcguggccugguccgcgagcgccugccacgacgggaucaacuggcucaccaucggcaucuccggccccgacaacggggccguggccguccugaaguacaacggcaucaucaccgacaccaucaagagcuggcgcaacaacauccugcggacgcaggaguccgagugcgcgugcgugaacgggagcugcuucaccgugaugaccgacggcccguccgacggccaggccagcuacaagaucuuccgcaucgagaaggggaagaucgucaaguccguggagaucaacgcccccaacuaccacuacgaggagugcagcugcuaccccgacuccagcgagaucacgugcgugugccgggacaacuggcacggcuccaaccgccccugggucagcuucaaccagaaccucgaguaccagaucggguacaucugcuccggcaucuucggggacaacccgcggcccaacgacaagaccggcagcugcggccccguguccagcaacggggccaacggcgugaagggguucuccuucaaguacggcaacggggucuggaucggccgcaccaagagcaucagcucccggaacggcuucgagaugaucugggaccccaacggguggaccggcaccgacaacaacuucagcaucaagcaggacaucguggggaucaacgagugguccggcuacagcggguccuucgugcagcacccggagcugacgggccuggacugcauccgccccugcuucugggucgagcucauccggggccgccccaaggagaacaccaucuggaccagcggguccagcaucuccuucugcggcgugaacagcgacaccgucgggugguccuggcccgacggcgccgagcugccguucacgaucgacaaguga

SEQ ID NO: 84956 - RNA, 1410 nt, Artificial Sequence; identical to SEQ ID NO: 84826
  derived and/or modified CDS sequence (opt1) from neuraminidase__InfluenzaA__AEL89494

SEQ ID NO: 84957 - RNA, 1410 nt, Artificial Sequence; identical to SEQ ID NO: 84832
  derived and/or modified CDS sequence (opt1) from neuraminidase__InfluenzaA__AEL89514

SEQ ID NO: 84958 - RNA, 1410 nt, Artificial Sequence; identical to SEQ ID NO: 84810
  derived and/or modified CDS sequence (opt1) from neuraminidase__InfluenzaA__AEL89524

SEQ ID NO: 84959 - RNA, 1410 nt, Artificial Sequence
  derived and/or modified CDS sequence (opt1) from neuraminidase__InfluenzaA__AEL89534
augaaccccaaccagaagaucaucaccaucggcagcgugugcaugaccaucgggauggccaaccugauccuccagaucggcaacaucaucuccaucuggaucagccacuccauccagcuggggaaccagaaccagaucggcacgugcaaccagagcgucaucaccuacgagaacaacaccugggugaaccagaccuacgugaacaucuccaacacgaacuucgccgcggggcagagcgucguguccgugaagcuggccggcaacagcucccucugcccggucagcggcugggccaucuacuccaaggacaacagcauccgcaucggguccaagggcgacguguucgugauccgggagcccuucaucagcugcagcccccuggagugccgcaccuucuuccugacccagggggcccuccugaacgacaagcacuccaacggcaccaucaaggaccggucccccuaccgcacgcugaugagcugcccgaucggggagguccccucccccuacaacagccgguucgagagcguggccugguccgcgagcgccugccacgacggcaucaacuggcucaccaucggcaucuccgggcccgacaacggcgccguggccguccugaaguacaacgggaucaucaccgacaccaucaagagcuggcgcaacaacauccugcggacgcaggaguccgagugcgcgugcgugaacggcagcugcuucaccgugaugaccgacggcccguccgacgggcaggccagcuacaagaucuuccgcaucgagaagggcaagaucgucaaguccguggagaucaacgcccccaacuaccacuacgaggagugcagcugcuaccccgacuccagcgagaucacgugcgugugccgggacaacuggcacggguccaaccgccccugggucagcuucaaccagaaccucgaguaccagaucggcuacaucugcuccgggaucuucggcgacaacccgcggcccaacgacaagaccggcagcugcgggcccguguccagcaacggcgccaacggggugaagggcuucuccuucaaguacgggaacggcgucuggaucggccgcaccaagagcaucagcucccggaacggguucgagaugaucugggaccccaacggcuggaccgggaccgacaacaacuucagcaagaagcaggacaucgugggcaucaacgagugguccggguacagcggcuccuucgugcagcacccggagcugacgggccuggacugcauccgccccugcuucugggucgagcucauccgggggcgccccaaggagaacaccaucuggaccagcggcuccagcaucuccuucugcggggugaacagcgacaccgucggcugguccuggcccgacggcgccgagcugccguucacgaucgacaaguga

SEQ ID NO: 84960 - RNA, 1410 nt, Artificial Sequence; identical to SEQ ID NO: 84832
  derived and/or modified CDS sequence (opt1) from neuraminidase__InfluenzaA__AEL89544

SEQ ID NO: 84961 - RNA, 1410 nt, Artificial Sequence; identical to SEQ ID NO: 84832
  derived and/or modified CDS sequence (opt1) from neuraminidase__InfluenzaA__AEL89554

SEQ ID NO: 84962 - RNA, 1410 nt, Artificial Sequence
  derived and/or modified CDS sequence (opt1) from neuraminidase__InfluenzaA__AEL89564
augaaccccaaccagaagaucaucaccaucggcagcgugugcaucaccaucgggauggccaaccugauccuccagaucggcaacaucaucuccaucuggaucagccacuccauccagcuggggaaccagaaccagaucgagacgugcaaccagagcgucgugaccuacgagaacaacaccugggugaaccagaccuacgucaacaucuccaacacgaacuucgccgcgggccagagcgugguguccgucaagcuggccgggaacagcucccucugcccggugagcggcugggccaucuacuccaaggacaacagcauccgcaucggcuccaagggggacguguucgucauccgggagcccuucaucagcugcagcccccuggagugccgcaccuucuuccugacccagggcgcccuccugaacgacaagcacagcaacgggaccaucaaggaccggucccccuaccgcacgcugaugagcugcccgaucggcgaggugcccucccccuacaacagccgguucgagagcguggccugguccgcgagcgccugccacgacgggaucuccuggcucaccaucggcaucagcggccccgacaacggggccgucgccgugcugaaguacaacggcaucaucaccgacaccaucaaguccuggcgcaacaacauccugcggacgcaggagagcgagugcgcgugcgugaacggguccugcuucaccgucaugaccgacggcccgagcgacggccaggccuccuacaagaucuuccgcaucgagaaggggaagaucgugaaguccguggagaugaacgcccccaacuaccacuacgaggagugcuccugcuaccccgacagcuccgagaucacgugcgucugccgggacaacuggcacggcagcaaccgccccuggguguccuucaaccagaaccucgaguaccagaucggguacaucugcagcggcaucuucggggacaacccgcggcccaacgacaagaccggcuccugcggccccgugagcuccaacggggccaacggcgucaagggguucagcuucaaguacggcaacgggguguggaucggccgcaccaagagcaucuccagccggaacggcuucgagaugaucugggaccccaacggguggaccggcaccgacaacaacuucuccaucaagcaggacaucguggggaucaacgaguggagcggcuacuccgggagcuucguccagcacccggagcugacgggccuggacugcauccgccccugcuucuggguggagcucauccggggccgccccaaggagaacaccaucuggaccuccgggagcuccaucagcuucugcggcgucaacuccgacaccgugggguggagcuggcccgacggcgccgagcugccguucacgaucgacaaguga

SEQ ID NO: 84963 - RNA, 1410 nt, Artificial Sequence; identical to SEQ ID NO: 84832
  derived and/or modified CDS sequence (opt1) from neuraminidase__InfluenzaA__AEL89574

SEQ ID NO: 84964 - RNA, 1410 nt, Artificial Sequence; identical to SEQ ID NO: 84832
  derived and/or modified CDS sequence (opt1) from neuraminidase__InfluenzaA__AEL89584

SEQ ID NO: 84965 - RNA, 1410 nt, Artificial Sequence; identical to SEQ ID NO: 81779
  derived and/or modified CDS sequence (opt1) from neuraminidase__InfluenzaA__AEL89604

SEQ ID NO: 84966 - RNA, 1410 nt, Artificial Sequence; identical to SEQ ID NO: 84281
  derived and/or modified CDS sequence (opt1) from neuraminidase__InfluenzaA__AEL89624

SEQ ID NO: 84967 - RNA, 1410 nt, Artificial Sequence
  derived and/or modified CDS sequence (opt1) from neuraminidase__InfluenzaA__AEL89634
augaaccccaaccagaagaucaucaccaucggcagcgugugcaucaccaucgggauggccaaccugauccuccagaucggcaacaucaucuccaucuggaucagccacuccauccagcuggggaaccagaaccagaucgagacgugcaaccagagcgucaucaccuacgagaacaacaccugggugaaccagaccuacgugaacaucuccaacacgaacuucgccgcgggccagagcgucguguccgugaagcuggccgggaacagcucccucugcccggucagcggcugggccaucuacuccaaggacaacagcauccgcaucggcuccaagggggacguguucgugauccgggagcccuucaucagcugcagcccccuggagugccgcaccuucuuccugacccagggcgcccuccugaacgacaagcacuccaacgggaccaucaaggaccggucccccuaccgcacgcugaugagcugcccgaucggcgagguccccucccccuacaacagccgguucgagagcguggccugguccgcgagcgccugccacgacgggaucuccuggcucaccaucggcaucagcggccccgacaacggggccguggccguccugaaguacaacggcaucaucaccgacaccaucaaguccuggcgcaacaacauccugcggacgcaggagagcgagugcgcgugcgugaacggguccugcuucaccgugaugaccgacggcccgagcgacggccaggccuccuacaagaucuuccgcaucgagaaggggaagaucgucaagagcguggagaugaacgcccccaacuaccacuacgaggagugcuccugcuaccccgacagcuccgagaucacgugcgugugccgggacaacuggcacggcagcaaccgccccugggucuccuucaaccagaaccucgaguaccagaucggguacaucugcagcggcaucuucggggacaacccgcggcccaacgacaagaccggcuccugcggccccgugagcuccaacggggccaacggcgugaagggguucagcuacaaguacggcaacggggucuggaucggccgcaccaagagcaucuccagccggaacggcuucgagaugaucugggaccccaacggguggaccggcaccgacaacaacuucuccaucaagcaggacaucguggggaucaacgaguggagcggcuacuccgggagcuucgugcagcacccggagcugacgggccuggacugcauccgccccugcuucugggucgagcucauccggggccgccccaaggagaacaccaucuggaccuccgggagcuccaucagcuucugcggcgugaacuccgacaccgucggguggagcuggcccgacggcgccgagcugccguucacgaucgacaaguga

SEQ ID NO: 84968 - RNA, 1410 nt, Artificial Sequence; identical to SEQ ID NO: 83037
  derived and/or modified CDS sequence (opt1) from neuraminidase__InfluenzaA__AEL89644

SEQ ID NO: 84969 - RNA, 1410 nt, Artificial Sequence; identical to SEQ ID NO: 84733
  derived and/or modified CDS sequence (opt1) from neuraminidase__InfluenzaA__AEL89654

SEQ ID NO: 84970 - RNA, 1410 nt, Artificial Sequence; identical to SEQ ID NO: 84281
  derived and/or modified CDS sequence (opt1) from neuraminidase__InfluenzaA__AEL89664

SEQ ID NO: 84971 - RNA, 1410 nt, Artificial Sequence; identical to SEQ ID NO: 84281
  derived and/or modified CDS sequence (opt1) from neuraminidase__InfluenzaA__AEL89674

SEQ ID NO: 84972 - RNA, 1410 nt, Artificial Sequence; identical to SEQ ID NO: 84281
  derived and/or modified CDS sequence (opt1) from neuraminidase__InfluenzaA__AEL89694

SEQ ID NO: 84973 - RNA, 1410 nt, Artificial Sequence
  derived and/or modified CDS sequence (opt1) from neuraminidase__InfluenzaA__AEL89704
augaaccccaaccagaagaucaucaccaucggcagcgugugcaugaccaucgggauggccaaccugauccuccagaucggcaacaucauccugaucuggaucucccacagcauccagcuggggaaccagaaccagaucgagacgugcaaccaguccgucaucaccuacgagaacaacaccugggugaaccagaccuacgugaacaucagcaacacgaacuucgccgcgggccaguccgucgugagcgugaagcucgccgggaacuccagccugugcccggucuccggcugggccaucuacagcaaggacaacuccauccgcaucggcagcaagggggacguguucgugauccgggagcccuucaucuccugcagcccccuggagugccgcaccuucuuccucacccagggcgcccugcugaacgacaagcacuccaacgggaccaucaaggaccggagccccuaccgcacgcucauguccugcccgaucggcgagguccccagccccuacaacucccgguucgagagcguggccuggagcgcguccgccugccacgacgggaucaacuggcugaccaucggcaucagcggccccgacaacggggccguggccguccugaaguacaacggcaucaucaccgacaccaucaaguccuggcgcaacaacauccuccggacgcaggagagcgagugcgcgugcgugaacggguccugcuucaccgugaugaccgacggcccgaacgacggccaggccagcuacaagaucuuccgcaucgagaaggggaagaucgucaaguccguggagaugaacgcccccaacuaccacuacgaggagugcagcugcuaccccgacuccagcgagaucacgugcgugugccgggacaacuggcacggcuccaaccgccccugggucagcuucaaccagaaccuggaguaccagaucggguacaucugcuccggcaucuucggggacaacccgcggcccaacgacaagaccggcagcugcggccccguguccagcaacggggccaacggcgugaagggguucuccuucaaguacggcaacggggucuggaucggccgcaccaagagcaucuccagccggaacggcuucgagaugaucugggaccccaacggguggaccggcaccgacaacaacuucagcgugaagcaggacaucaucgggaucaacgagugguccggcuacagcggguccuucgugcagcacccggagcugacgggccucgacugcauccgccccugcuucugggucgagcugauccggggccgccccaaggagaacaccaucuggaccagcggguccagcaucuccuucugcggcgugaacagcgacaccgucgggugguccuggcccgacggcgccgagcugccguucacgaucgacaaguga

SEQ ID NO: 84974 - RNA, 1410 nt, Artificial Sequence; identical to SEQ ID NO: 84973
  derived and/or modified CDS sequence (opt1) from neuraminidase__InfluenzaA__AEL89714

SEQ ID NO: 84975 - RNA, 1410 nt, Artificial Sequence; identical to SEQ ID NO: 84281
  derived and/or modified CDS sequence (opt1) from neuraminidase__InfluenzaA__AEL89744

SEQ ID NO: 84976 - RNA, 1410 nt, Artificial Sequence
  derived and/or modified CDS sequence (opt1) from neuraminidase__InfluenzaA__AEL89754
augaaccccaaccagaagaucaucaccaucggcagcgugugcaucaccaucgggauggccaaccugauccuccagaucggcaacaucaucuccaucuggaucagccacuccauccagcuggggaaccagaaccagaucgagacgugcaaccagagcgucaucaccuacgagaacaacaccugggugaaccagaccuacgugaacaucuccaacacgaacuucgccgcgggccagagcgucguguccgugaagcuggccgggaacagcucccucugcccggucagcggcugggccaucuacuccaaggacaacagcauccgcaucggcuccaagggggacguguucgugauccgggagcccuucaucagcugcagcccccuggagugccgcaccuucuuccugacccagggcgcccuccugaacgacaagcacuccaacgggaccaucaaggaccggucccccuaccgcacgcugaugagcugcccgaucggcgagguccccucccccuacaacagccgguucgagagcguggccugguccgcgagcgccugccacgacgggaucuccuggcucaccaucggcaucagcggccccgacaacggggccguggccguccugaaguacaacggcaucaucaccgacaccaucaaguccuggcgcaacaacauccugcggacgcaggagagcgagugcgcgugcgugaacggguccugcuucaccgugaugaccgacggcccgagcgacggccaggccuccuacaagaucuuccgcaucgagaaggggaagaucgucaagagcguggagaugaacgcccccaacuaccacuacgaggagugcuccugcuaccccgacagcuccgagaucacgugcgugugccgggacaacuggcacggcagcaaccgccccugggucuccuucaaccagaaccucgaguaccagaucggguacaucugcagcggcaucuucggggacaacccgcggcccaacgacaagaccggcuccugcggccccgugagcuccaacggggccaacggcgugaagggguucagcuucaaguacggcaacggggucuggaucggccgcaccaagagcaucuccagccggaacggcuucgagaugaucugggaccccaacggguggaccggcaccgacaacaacuucuccaucaagcaggacaucguggggaucaacgaguggagcggcuacuccgggagcuucgugcagcacccggagcugacgggccuggacugcauccgccccugcuucugggucgagcucauccggggccgccccaaggagaacaccaucuggaccuccgggagcuccaucagcuucugcggcgugaacuccgacaccgucggguggagcuggcccgacggcgccgagcugccguucaucaucgacaaguga

SEQ ID NO: 84977 - RNA, 1410 nt, Artificial Sequence; identical to SEQ ID NO: 83037
  derived and/or modified CDS sequence (opt1) from neuraminidase__InfluenzaA__AEL89774

SEQ ID NO: 84978 - RNA, 1410 nt, Artificial Sequence
  derived and/or modified CDS sequence (opt1) from neuraminidase__InfluenzaA__AEL89784
augaaccccaaccagaagaucaucaccaucggcagcgugugcaugaccaucgggauggccaaccugauccuccagaucggcaacaucaucuccaucuggaucagccacuccauccagcuggggaaccagaaccagaucgagacgugcaaccagagcgucaucaccuacgagaacaacaccugggugaaccagaccuacgugaacaucuccaacacgaacuucgccgcgggccagagcgucguguccgugaagcuggccgggaacagcucccucugcccggucagcggcugggccaucuacuccaaggacaacagcauccgcaucggcuccaagggggacguguucgugauccgggagcccuucaucagcugcagcccccuggagugccgcaccuucuuccugacccagggcgcccuccugaacgacaagcacuccaacgggaccaucaaggaccggucccccuaccgcacgcugaugagcugcccgaucggcgagguccccucccccuacaacagccgguucgagagcguggccugguccgcgagcgccugccacgacgggaucaacuggcucaccaucggcaucuccggccccgacaacggggccguggccguccugaaguacaacggcaucaucaccgacaccaucaagagcuggcgcaacaacauccugcggacgcaggaguccgagugcgcgugcgugaacgggagcugcuucaccgugaugaccgacggcccguccgacggccaggccagcuacaagaucuuccgcaucgagaaggggaagaucgucaaguccguggagaugaacgcccccaacuaccacuacgaggagugcagcugcuaccccgacuccagcgagaucacgugcgugugccgggacaacuggcacggcuccaaccgccccugggucagcuucaaccagaaccucgaguaccagaucggguacaucugcuccggcaucuucggggacaacccgcggcccaacgacaagaccggcagcugcggccccguguccagcaacggggccaacggcgugaagggguucuccuucaaguacggcaacggggucuggaucggccgcaccaagagcaucagccugcggaacggcuucgagaugaucugggaccccaacggguggaccggcaccgacaacaacuucuccgugaagcaggacaucaucgggaucaacgaguggagcggcuacuccgggagcuucgugcagcacccggagcugacgggccucgacugcauccgccccugcuucugggucgagcugauccggggccgccccaaggagaacaccaucuggaccuccgggagcuccaucagcuucugcggcgugaacuccgacaccgucggguggagcuggcccgacggcgccgagcugccguucacgaucgacaaguga

SEQ ID NO: 84979 - RNA, 1410 nt, Artificial Sequence
  derived and/or modified CDS sequence (opt1) from neuraminidase__InfluenzaA__AEL89794
augaaccccaaccagaagaucaucaccaucggcagcgugugcaugaccaucgggauggccaaccugauccuccagaucggcaacaucaucuccaucuggaucagccacuccauccagcuggggaaccagagccagaucgagacgugcaaccaguccgucaucaccuacgagaacaacaccugggugaaccagaccuacgugaacaucagcaacacgaacuucgccgcgggccaguccgucgugagcgugaagcuggccgggaacuccagccucugcccggucuccggcugggccaucuacagcaaggacaacuccauccgcaucggcagcaagggggacguguucgugauccgggagcccuucaucuccugcagcccccuggagugccgcaccuucuuccugacccagggcgcccuccugaacgacaagcacuccaacgggaccaucaaggaccggagccccuaccgcacgcugauguccugcccgaucggcgagguccccagccccuacaacagccgguucgaguccguggccuggagcgcguccgccugccacgacgggaucaacuggcucaccaucggcaucagcggccccgacaacggggccguggccguccugaaguacaacggcaucaucaccgacaccaucaaguccuggcgcaacaacauccugcggacgcaggagagcgagugcgcgugcgugaacggguccugcuucaccaucaugaccgacggcccgagcgacggccaggccuccuacaagaucuuccgcaucgagaaggggaagaucgucaagagcguggagaugaacgcccccaacuaccacuacgaggagugcuccugcuaccccgacagcuccgagaucacgugcgugugccgggacaacuggcacggcagcaaccgccccuggguguccuucaaccagaaccucgaguaccagaucggguacaucugcagcggcaucuucggggacaacccgcggcccaacgacaagaccggcuccugcggccccgucagcuccaacggggccaacggcgugaagggguucagcuucaaguacggcaacgggguguggaucggccgcaccaagagcaucuccagccggaagggcuucgagaugaucugggaccccaacggguggaccggcaccgacaacaacuucuccaucaagcaggacaucgucgggaucaacgaguggagcggcuacuccgggagcuucgugcagcacccggagcugacgggccuggacugcauccgccccugcuucuggguggagcucauccggggccgccccaaggagaacaccaucuggaccuccgggagcuccaucagcuucugcggcgucaacuccgacgccgugggguggagcuggcccgacggcgcggagcugccguucaccaucgacaaguga

SEQ ID NO: 84980 - RNA, 1410 nt, Artificial Sequence; identical to SEQ ID NO: 84733
  derived and/or modified CDS sequence (opt1) from neuraminidase__InfluenzaA__AEL89804

SEQ ID NO: 84981 - RNA, 1410 nt, Artificial Sequence
  derived and/or modified CDS sequence (opt1) from neuraminidase__InfluenzaA__AEL89815
augaaccccaaccagaagaucaucaccaucggcagcgugugcaugaccaucgggauggccaaccugauccuccagaucggcaacaucaucuccaucuggaucagccacuccauccagcuggggaaccagaaccagaucgagacgugcaaccagagcgucaucaccuacgagaacaacaccugggugaaccagaccuacgugaacaucuccaacacgaacuucgccgcgggccagagcgucguguccgugaagcuggccgggaacagcucccucugcccggucagcggcugggccaucuacuccaaggacaacagcauccgcaucggcuccaagggggacguguucgugauccgggagcccuucaucagcugcagcccccuggagugccgcaccuucuuccugacccagggcgcccuccugaacgacaagcacuccaacgggaccaucaaggaccggucccccuaccgcacgcugaugagcugcccgaucggcgagguccccucccccuacaacagccgguucgagagcguggccugguccgcgagcgccugccacgacgggaucaacuggcucaccaucggcaucuccggccccgacaacggggccguggccguccugaaguacaacggcaucaucaccgacaccaucaagagcuggcgcaacaacauccugcggacgcaggaguccgagugcgcgugcgugaacgggagcugcuucaccgugaugaccgacggcccguccgacggccaggccagcuacaagaucuuccgcaucgagaaggggaagaucgucaaguccguggagaugaacgcccccaacuaccacuacgaggagugcagcugcuaccccgacuccagcgagaucacgugcgugugccgggacaacuggcacggcuccaaccgccccugggucagcuucaaccagaaccucgaguaccagaucggguacaucugcuccggcaucuucggggacaacccgcggcccaacgacaagaccggcagcugcggccccguguccagcaacggggccaacggcgugaagggguucuccuucaaguacggcaacggggucuggaucggccgcaccaagagcaucagcucccggaacggcuucgagaugaucugggaccccaacggguggaccggcaccgacaacaacuucagcgugaagcaggacaucaucgggaucaacgagugguccggcuacagcggguccuucgugcagcacccggagcugacgggccuggacugcauccgccccugcuucugggucgagcucauccggggccgccccaaggagaacaccaucuggaccagcggguccagcaucuccuucugcggcgugaacagcgacaccgucgggugguccuggcccgacggcgccgagcugccguucacgaucgacaaguga

SEQ ID NO: 84982 - RNA, 1410 nt, Artificial Sequence
  derived and/or modified CDS sequence (opt1) from neuraminidase__InfluenzaA__AEL89825
augaaccccaaccagaagaucaucaccaucggcagcgugugcaugaccaucgggauggccaaccugauccuccagaucggcaacaucaucuccaucuggaucagccacuccauccagcuggggaaccagaaccagaucgagacgugcaaccagagcgucaucaccuacgagaacaacaccugggugaaccagaccuacgugaacaucuccaacacgaacuucgccgcgggccagagcgucguguccgugaagcuggccgggaacagcucccucugcccggucagcggcugggccaucuacuccaaggacaacagcauccgcaucggcuccaagggggacguguucgugauccgggagcccuucaucagcugcagcccccuggagugccgcaccuucuuccugacccagggcgcccuccugaacgacaagcacuccaacgggaccaucaaggaccggucccccuaccgcacgcugaugagcugcccgaucggcgagguccccucccccuacaacagccgguucgagagcguggccugguccgcgagcgccugccacgacgggaucaacuggcucaccaucggcaucuccggccccgacaacggggccguggccguccugaaguacaacggcaucaucaccgacaccaucaagagcuggcgcaacaacauccugcggacgcaggaguccgagugcgcgugcgugaacgggagcugcuucaccgugaugaccgacggcccguccgacggccaggccagcuacaagaucuuccgcaucgagaaggggaagaucgucaaguccguggagaugaacgcccccaacuaccacuacgaggagugcagcugcuaccccgacuccagcgagaucacgugcgugugccgggacaacuggcacggcgccaaccgccccugggucuccuucaaccagaaccucgaguaccagaucggguacaucugcagcggcaucuucggggacaacccgcggcccaacgacaagaccggcuccugcggccccgugagcuccaacggggccaacggcgugaagggguucagcuucaaguacggcaacggggucuggaucggccgcaccaaguccaucagcagccggaacggcuucgagaugaucugggaccccaacggguggaccggcaccgacaacaacuucuccaucaagcaggacaucguggggaucaacgaguggagcggcuacuccgggagcuucgugcagcacccggagcugacgggccuggacugcauccgccccugcuucugggucgagcucauccggggccgccccaaggagaacaccaucuggaccuccgggagcuccaucagcuucugcggcgugaacuccgacaccgucggguggagcuggcccgacggcgcggagcugccguucacgaucgacaaguga

SEQ ID NO: 84983 - RNA, 1410 nt, Artificial Sequence
  derived and/or modified CDS sequence (opt1) from neuraminidase__InfluenzaA__AEL89835
augaaccccaaccagaagaucaucaccaucggcagcgugugcaugaccaucgggauggccaaccugauccuccagaucggcaacaucaucuccaucuggaucagccacuccauccagcuggggaaccagagccagaucgagacgugcaaccaguccgucaucaccuacgagaacaacaccugggugaaccagaccuacgugaacaucagcaacacgaacuucgccgcgggccaguccgucgugagcgugaagcuggccgggaacuccagccucugcccggucuccggcugggccaucuacagcaaggacaacuccauccgcaucggcagcaagggggacguguucgugauccgggagcccuucaucuccugcagcccccuggagugccgcaccuucuuccugacccagggcgcccuccugaacgacaagcacuccaacgggaccaucaaggaccggagccccuaccgcacgcugauguccugcccgaucggcgagguccccagccccuacaacagccgguucgaguccguggccuggagcgcguccgccugccacgacgggaucaacuggcucaccaucggcaucagcggccccgacaacggggccguggccguccugaaguacaacggcaucaucaccgacaccaucaaguccuggcgcaacaacauccugcggacgcaggagagcgagugcgugugcgugaacggguccugcuucaccaucaugaccgacggcccgagcgacggccaggcguccuacaagaucuuccgcaucgagaaggggaagaucgucaagagcguggagaugaacgcccccaacuaccacuacgaggagugcuccugcuaccccgacagcuccgagaucacgugcgugugccgggacaacuggcacggcagcaaccgccccugggucuccuucaaccagaaccucgaguaccagaucggguacaucugcagcggcaucuucggggacaacccgcggcccaacgacaagaccggcuccugcggccccgugagcuccaacggggccaacggcgugaagggguucagcuucaaguacggcaacggggucuggaucggccgcaccaagagcaucuccagccggaagggcuucgagaugaucugggaccccaacggguggaccggcaccgacaacaacuucuccaucaagcaggacaucguggggaucaacgaguggagcggcuacuccgggagcuucgugcagcacccggagcugacgggccuggacugcauccgccccugcuucugggucgagcucauccggggccgccccaaggagaacaccaucuggaccuccgggagcuccaucagcuucugcggcgugaacuccgacaccgucggguggagcuggcccgacggcgccgagcugccguucacgaucgacaaguga

SEQ ID NO: 84984 - RNA, 1410 nt, Artificial Sequence
  derived and/or modified CDS sequence (opt1) from neuraminidase__InfluenzaA__AEL89845
augaaccccaaccagaagaucaucaccaucggcagcgugugcaugaccaucgggauggccaaccugauccuccagaucggcaacaucaucuccaucuggaucagccacuccauccagcuggggaacaagaaccagaucgagacgugcaaccagagcgucaucaccuacgagaacaacaccugggugaaccagaccuacgugaacaucuccaacacgaacuucgccaccggccagagcgucguguccgugaagcuggcggggaacagcucccucugcccggucagcggcugggccaucuacuccaaggacaacagcauccgcaucggcuccaagggggacguguucgugauccgggagcccuucaucagcugcagcccccuggagugccgcaccuucuuccugacccagggcgcccuccugaacgacaagcacuccaacgggacgaucaaggaccggucccccuaccgcacccugaugagcugcccgaucggcgaggcccccucccccuacaacagccgguucgagagcgucgccugguccgcgagcgccugccacgacgggaucaacuggcucaccaucggcaucuccggccccgacaacggggccguggccgugcugaaguacaacggcaucaucaccgacacgaucaagagcuggcgcaacaacauccugcggacccaggaguccgagugcgcgugcgucaacgggagcugcuucaccgugaugaccgacggcccguccgacggccaggccagcuacaagaucuuccgcaucgagaaggggaagaucgugaaguccgucgagaugaacgcccccaacuaccacuacgaggagugcagcugcuaccccgacuccagcgagaucacgugcgugugccgggacaacuggcacggcuccaaccgccccugggugagcuucaaccagaaccucgaguaccagaucggguacaucugcuccggcaucuucggggacaacccgcggcccaacgacaagaagggcagcugcggccccgucuccagcaacggggccaacggcgugaagggguucuccuucaaguacggcaacgggguguggaucggccgcaccaagagcaucagcucccggaacggcuucgagaugaucugggaccccaacggguggaccggcaccgacaacaacuucagcaucaagcaggacaucgucgggaucaacgagugguccggcuacagcggguccuucgugcagcacccggagcugacgggccuggacugcauccgccccugcuucuggguggagcucauccggggccgccccaaggagaacaccaucuggaccagcggguccagcaucuccuucugcggcgucaacagcgacaccguggggugguccuggcccgacggcgccgagcugccguucacgaucgacaaguga

SEQ ID NO: 84985 - RNA, 1410 nt, Artificial Sequence; identical to SEQ ID NO: 84982
  derived and/or modified CDS sequence (opt1) from neuraminidase__InfluenzaA__AEL89855

SEQ ID NO: 84986 - RNA, 1410 nt, Artificial Sequence; identical to SEQ ID NO: 84281
  derived and/or modified CDS sequence (opt1) from neuraminidase__InfluenzaA__AEL93581

SEQ ID NO: 84987 - RNA, 1410 nt, Artificial Sequence
  derived and/or modified CDS sequence (opt1) from neuraminidase__InfluenzaA__AEL93591
augaaccccaaccagaagaucaucaccaucggcagcgugugcaugaccaucgggauggccaaccugauccuccagaucggcaacaucaucuccaucuggaucagccacuccauccagcuggggaaccagaaccagaucgagacgugcaaccagagcgucaucaccuacgagaacaacaccugggugaaccagaccuacgugaacaucuccaacacgaacuucgccgcgggccagagcgucguguccgugaaccuggccgggaacagcucccucugcccggucagcggcugggccaucuacuccaaggacaacagcauccgcaucggcuccaagggggacguguucgugauccgggagcccuucaucagcugcagcccccuggagugccgcaccuucuuccugacccagggcgcccuccugaacgacaagcacuccaacgggaccaucaaggaccggucccccuaccgcacgcugaugagcugcccgaucggcgagguccccucccccuacaacagccgguucgagagcguggccugguccgcgagcgccugccacgacgggaucaacuggcucaccaucggcaucuccggccccgacaacggggccguggccguccugaaguacaacggcaucaucaccgacaccaucaagagcuggcgcaacaacauccugcggacgcaggaguccgagugcgcgugcgugaacgggagcugcuucaccaucaugaccgacggcccguccgacggccaggccagcuacaagaucuuccgcaucgagaaggggaagaucgugaaguccgucgagaugaacgcccccaacuaccacuacgaggagugcagcugcuaccccgacuccagcgagaucacgugcgugugccgggacaacuggcacggcuccaaccgccccugggugagcuucaaccagaaccucgaguaccagaucggguacaucugcuccggcaucuucggggacaacccgcggcccaacgacaagaccggcagcugcggccccgucuccagcaacggggccaacggcgugaagggguucuccuucaaguacggcaacgggguguggaucggccgcaccaagagcaucagcucccggaagggcuucgagaugaucugggaccccaacggguggaccggcaccgacaacaacuucagcaucaagcaggacaucgucgggaucaacgagugguccggcuacagcggguccuucgugcagcacccggagcugacgggccuggacugcauccgccccugcuucuggguggagcucauccggggccgccccaaggagaacaccaucuggaccagcggguccagcaucuccuucugcggcgucaacagcgacaccguggggugguccuggcccgacggcgccgagcugccguucacgaucgacaaguga

SEQ ID NO: 84988 - RNA, 1410 nt, Artificial Sequence; identical to SEQ ID NO: 84733
  derived and/or modified CDS sequence (opt1) from neuraminidase__InfluenzaA__AEL93601

SEQ ID NO: 84989 - RNA, 1410 nt, Artificial Sequence; identical to SEQ ID NO: 84281
  derived and/or modified CDS sequence (opt1) from neuraminidase__InfluenzaA__AEL93611

SEQ ID NO: 84990 - RNA, 1410 nt, Artificial Sequence; identical to SEQ ID NO: 84281
  derived and/or modified CDS sequence (opt1) from neuraminidase__InfluenzaA__AEL93621

SEQ ID NO: 84991 - RNA, 1410 nt, Artificial Sequence; identical to SEQ ID NO: 84281
  derived and/or modified CDS sequence (opt1) from neuraminidase__InfluenzaA__AEL93631

SEQ ID NO: 84992 - RNA, 1410 nt, Artificial Sequence
  derived and/or modified CDS sequence (opt1) from neuraminidase__InfluenzaA__AEL93641
augaaccccaaccagaagaucaucaccaucggcagcgugugcaucaccaucgggauggccaaccugauccuccagaucggcaacaucaucuccaucuggaucagccacuccauccagcuggggaaccagaaccagaucgagacgugcaaccagagcgucaucaccuacgagaacaacaccugggugaaccagaccuacgugaacaucuccaacacgaacuucgccgcgggccagagcgucguguccgugaagcuggccgggaacagcucccucugcccggucagcggcugggccaucuacuccaaggacaacagcauccgcaucggcuccaagggggacguguucgugauccgggagcccuucaucagcugcagcccccuggagugccgcaccuucuuccugacccagggcgcccuccugaacgacaagcacuccaacgggaccaucaaggaccggucccccuaccgcacgcugaugagcugcccgaucggcgagguccccucccccuacaacagccgguucgagagcguggccugguccgcgagcgccugccacgacgggaucuccuggcucaccaucggcaucagcggccccgacaacggggccguggccguccugaaguacaacggcaucaucaccgacaccaucaaguccuggcgcaacaacauccugcggacgcaggagagcgagugcgcgugcgugaacggguccugcuucaccgugaugaccgacggcccgagcgacggccaggccuccuacaagaucuuccgcaucgagaaggggaagaucgucaagagcguggagaugaacgcccccaacuaccacuacgaggagugcuccugcuaccccgacagcuccgagaucacgugcgugugccgggacaacuggcacggcagcaaccgccccugggucuccuucaaccacaaccucgaguaccagaucggguacaucugcagcggcaucuucggggacaacccgcggcccaacgacaagaccggcuccugcggccccgugagcuccaacggggccaacggcgugaagggguucagcuucaaguacggcaacggggucuggaucggccgcaccaagagcaucuccagccggaacggcuucgagaugaucugggaccccaacggguggaccggcaccgacaacaacuucuccaucaagcaggacaucguggggaucaacgaguggagcggcuacuccgggagcuucgugcagcacccggagcugacgggccuggacugcauccgccccugcuucugggucgagcucauccggggccagcccaaggagaacaccaucuggaccuccgggagcuccaucagcuucugcggcgugaacuccgacaccgucggguggagcuggcccgacggcgccgagcugccguucacgaucgacaaguga

SEQ ID NO: 84993 - RNA, 1410 nt, Artificial Sequence; identical to SEQ ID NO: 84832
  derived and/or modified CDS sequence (opt1) from neuraminidase__InfluenzaA__AEL94890

SEQ ID NO: 84994 - RNA, 1410 nt, Artificial Sequence
  derived and/or modified CDS sequence (opt1) from neuraminidase__InfluenzaA__AEL95429
augaaccccaaccagaagaucaucaccaucggcagcgugugcaugaccaucgggauggccaaccugauccuccagaucggcaacaucaucuccaucuggaucagccacuccauccagcuggggaaccagagccagaucgagacgugcaaccaguccgucaucaccuacgagaacaacaccugggugaaccagaccuacgugaacaucagcaacacgaacuucgccgcgggccaguccgucgugagcgugaagcuggccgggaacuccagccucugcccggucuccggcugggccaucuacagcaaggacaacuccauccgcaucggcagcaagggggacguguucgugauccgggagcccuucaucuccugcagcccccuggagugccgcaccuucuuccugacccagggcgcccuccugaacgacaagcacuccaacgggaccaucaaggaccggagcccccaccgcacgcugauguccugcccgaucggcgagguccccagccccuacaacagccgguucgaguccguggccuggagcgcguccgccugccacgacgggaucaacuggcucaccaucggcaucagcggccccgacaacggggccguggccguccugaaguacaacggcaucaucaccgacaccaucaaguccuggcgcaacaacauccugcggacgcaggagagcgagugcgcgugcgugaacggguccugcuucaccaucaugaccgacggcccgagcgacggccaggccuccuacaagaucuuccgcaucgagaaggggaagaucgucaagagcguggagaugaacgcccccaacuaccacuacgaggagugcuccugcuaccccgacagcuccgagaucacgugcgugugccgggacaacuggcacggcagcaaccgccccuggguguccuucaaccagaaccucgaguaccagaucggguacaucugcagcggcaucuucggggacaacccgcggcccaacgacaagaccggcuccugcggccccgucagcuccaacggggccaacggcgugaagggguucagcuucaaguacggcaacgggguguggaucggccgcaccaagagcaucuccagccggaagggcuucgagaugaucugggaccccaacggguggaccggcaccgacaacaacuucuccaucaagcaggacaucgucgggaucaacgaguggagcggcuacuccgggagcuucgugcagcacccggagcugacgggccuggacugcauccgccccugcuucuggguggagcucauccggggccgccccaaggagaacaccaucuggaccuccgggagcuccaucagcuucugcggcgucaacuccgacaccgugggguggagcuggcccgacggcgccgagcugccguucacgaucgacaaguga

SEQ ID NO: 84995 - RNA, 1410 nt, Artificial Sequence
  derived and/or modified CDS sequence (opt1) from neuraminidase__InfluenzaA__AEL97634
augaaccccaaccagaagaucaucaccaucggcagcgugugcaugaccaucgggauggccaaccugauccuccagaucggcaacaucaucuccaucugggucagccacuccauccagcuggggaaccagaaccagaucgagacgugcaaccagagcgugaucaccuacgagaacaacaccugggugaaccagaccuacgucaacaucuccaacacgaacuucgccgcgggccagagcgugguguccgucaagcuggccgggaacagcucccucugcccggugagcggcugggccaucuacuccaaggacaacagcauccgcaucggcuccaagggggacguguucgucauccgggagcccuucaucagcugcagcccccuggagugccgcaccuucuuccugacccagggcgcccuccugaacgacaagcacuccaacgggaccaucaaggaccggucccccuaccgcacgcugaugagcugcccgaucggcgaggugcccucccccuacaacagccgguucgagagcguggccugguccgcgagcgccugccacgacgggaucaacuggcucaccaucggcaucuccggccccgacaacggggccgucgccgugcugaaguacaacggcaucaucaccgacaccaucaagagcuggcgcaacaacauccugcggacgcaggaguccgagugcgcgugcgugaacgggagcugcuucaccgucaugaccgacggcccguccgacggccaggccagcuacaagaucuuccgcaucgagaaggggaagaucgugaaguccguggagaugaacgcccccaacuaccacuacgaggagugcagcugcuaccccgacuccagcgagaucacgugcgucugccgggacaacuggcacggcuccaaccgccccugggugagcuucaaccagaaccucgaguaccagaucggguacaucugcuccggcaucuucggggacaacccgcggcccaacgacaagaccggcagcugcggccccguguccagcaacggggccaacggcgucaagggguucuccuucaaguacggcaacgggguguggaucggccgcaccaagagcaucagcucccggaacggcuucgagaugaucugggaccccaacggguggaccggcaccgacaacaacuucagcaucaagcaggacaucgugggggucaacgagugguccggcuacagcggguccuucgugcagcacccggagcugacgggccuggacugcauccgccccugcuucugggucgagcucauccggggccgccccaaggagaacaccaucuggaccagcggguccagcaucuccuucugcggcgugaacagcgacaccguggggugguccuggcccgacggcgccgagcugccguucacgaucgacaaguga

SEQ ID NO: 84996 - RNA, 1410 nt, Artificial Sequence; identical to SEQ ID NO: 80762
  derived and/or modified CDS sequence (opt1) from neuraminidase__InfluenzaA__AEL99667

SEQ ID NO: 84997 - RNA, 1410 nt, Artificial Sequence; identical to SEQ ID NO: 80762
  derived and/or modified CDS sequence (opt1) from neuraminidase__InfluenzaA__AEL99677

SEQ ID NO: 84998 - RNA, 1410 nt, Artificial Sequence; identical to SEQ ID NO: 79800
  derived and/or modified CDS sequence (opt1) from neuraminidase__InfluenzaA__AEM53471

SEQ ID NO: 84999 - RNA, 1413 nt, Artificial Sequence; identical to SEQ ID NO: 80477
  derived and/or modified CDS sequence (opt1) from neuraminidase__InfluenzaA__AEM60040

SEQ ID NO: 85000 - RNA, 1413 nt, Artificial Sequence; identical to SEQ ID NO: 80067
  derived and/or modified CDS sequence (opt1) from neuraminidase__InfluenzaA__AEM60061

SEQ ID NO: 85001 - RNA, 1410 nt, Artificial Sequence
  derived and/or modified CDS sequence (opt1) from neuraminidase__InfluenzaA__AEM60072
augaaccccaaccagaagaucaucaccaucggcagcgugucccugaccaucgccacgaucugcuuccucaugcagaucgccauccuggucaccaccgugacccugcacuucaagcaguacgagugcagcuccccgcccaacaaccaggugaugcccugcgagcccacgaucaucgagcgcaacaucaccgagaucgucuaccucaccaacaccacgaucgagaaggagaucugcccgaagcugguggaguaccggaacuggagcaagccccagugcaagaucaccggguucgcgcccuucuccaaggacaacagcauccgccuguccgccggcggggacaucugggugacccgggagcccuacgucagcugcgacccgggcaagugcuaccaguucgcccucgggcagggcaccacgcugaacaaccgccacuccaacgacaccgugcacgaccggacccccuaccgcacccugcucaugaacgagcugggcgugcccuuccaccuggggacgaagcaggucugcaucgccuggagcuccagcuccugccacgacggcaaggccuggcuccacgugugcgugaccgggcacgacgagaacgcgaccgccagcuucaucuacgacggccggcuggucgacuccaucgggagcugguccaagaacauccugcgcacccaggagagcgagugcgugugcaucaacggcacgugcaccguggucaugaccgacggcuccgccagcgagcgggccgacaccaagauccucuucaucgaggaggggaagaucgugcacaucagcccccuguccggcagcgcgcagcacguggaggagugcuccugcuacccgcgcuaccccgggguccggugcgugugccgcgacaacuggaagggcagcaaccggcccaucguggacaucaacgucaaggacuacuccaucgugagcuccuacgugugcagcggccuggucggggacacgccccgcaagaacgaccgguccagcuccagcuacugccgcaacccgaacaacgagaagggcucccacggggugaagggcugggccuucgacgacgggaacgacgucuggaugggccggaccaucggcgaggagcuccgcagcggguacgagaccuucaaggugaucggcgggugguccacccccaacagcaagcugcagaucaaccgccaggugaucgucgacuccggcaaccggagcggguacuccggcaucuucagcguggagggcaagagcugcaucaaccggugcuucuacguggagcugauccgcgggcgcgagcaggagacgcgggucugguggaccuccaacagcaucgugguguucugcggcaccuccgggaccuacggcacggggagcuggcccgacggcgccgacaucaaccucaugcccaucuga

SEQ ID NO: 85002 - RNA, 1410 nt, Artificial Sequence; identical to SEQ ID NO: 80762
  derived and/or modified CDS sequence (opt1) from neuraminidase__InfluenzaA__AEM62774

SEQ ID NO: 85003 - RNA, 1410 nt, Artificial Sequence; identical to SEQ ID NO: 80762
  derived and/or modified CDS sequence (opt1) from neuraminidase__InfluenzaA__AEM62783

SEQ ID NO: 85004 - RNA, 1410 nt, Artificial Sequence
  derived and/or modified CDS sequence (opt1) from neuraminidase__InfluenzaA__AEM62792
augaaccccaaccagaagaucaucaccaucggcagcgugugcaugaccaucgggauggccaaccugauccuccagaucggcaacaucaucuccaucuggaucagccacuccauccagcuggggagccagaaccagaucgagacgugcaaccaguccgucaucaccuacgagaacaacaccugggugaaccagaccuacgugaacaucagcaacacgaacuucgccgcgggccaguccgucaucagcgugcgccuggccgggaacuccagccucugcccgguguccggcugggccaucuacagcaaggacaacuccauccggaucggcagcaagggggacgucuucgugauccgcgagcccuucaucuccugcagcccccuggagugccggaccuucuuccugacccagggcgcccuccugaacgacaagcacuccaacgggaccaucaaggaccgcagccccuaccggacgcugauguccugcccgaucggcgaggugcccagccccuacaacagccgcuucgaguccgucgccuggagcgcguccgccugccacgacgggaucaacuggcucaccaucggcaucagcggccccgacaacggggccguggccgugcugaaguacaacggcaucaucaccgacaccaucaaguccuggcggaacaacauccugcgcacgcaggagagcgagugcgcgugcgucaacggguccugcuucaccgugaugaccgacggcccgagcgacggccaggccuccuacaagaucuuccggaucgagaaggggaagaucgucaagagcguggagaugaacgcccccaacuaccacuacgaggagugcuccugcuaccccgacagcuccgagaucacgugcgugugccgcgacaacuggcacggcagcaaccggcccuggguguccuucaaccagaaccucgaguaccagaucggguacaucugcagcggcaucuucggggacaacccgcgccccaacgacaagaccggcuccugcggccccgucagcuccaacggggccaacggcgugaagggguucagcuucaaguacggcaacgggguguggaucggccggaccaagagcaucuccagccgcaacggcuucgagaugaucugggaccccaacggguggaccggcaccgacaacaacuucuccaucaagcaggacaucaucgggaucaacgaguggagcggcuacuccgggagcuucguccagcacccggagcugacgggccuggacugcauccggcccugcuucuggguggagcucauccgcggccggcccaaggagaacaccaucuggaccuccgggagcuccaucagcuucugcggcgugaacuccgacaccgucggguggagcuggcccgacggcgccgagcugccguucacgaucgacaaguga

SEQ ID NO: 85005 - RNA, 1410 nt, Artificial Sequence; identical to SEQ ID NO: 80762
  derived and/or modified CDS sequence (opt1) from neuraminidase__InfluenzaA__AEM62801

SEQ ID NO: 85006 - RNA, 1410 nt, Artificial Sequence
  derived and/or modified CDS sequence (opt1) from neuraminidase__InfluenzaA__AEM62810
augaaccccaaccagaagaucaucaccaucggcagcgugugcaugaccaucgggaugggcaaccugauccuccagaucgggaacaucaucuccaucuggaucagccacuccauccagcugggcaaccagaaccagaucgagacgugcaaccagagcgucaucaccuacgagaacaacaccugggugaaccagaccuacgugaacaucuccaacacgaacuucgccgccgggcagagcgucguguccgugaagcuggcgggcaacagcucccucugcccggucagcggcugggccaucuacuccaaggacaacagcauccgcaucggguccaagggcgacguguucgugauccgggagcccuucaucagcugcagcccccuggagugccgcaccuucuuccugacccagggggcccuccugaacgacaagcacuccaacggcaccaucaaggaccggucccccuaccgcacgcugaugagcugcccgaucggggagguccccucccccuacaacagccgguucgagagcguggccugguccgccagcgcgugccacgacggcaucaacuggcucaccaucggcaucuccgggcccgacaacggcgccguggccguccugaaguacaacgggaucaucaccgacaccaucaagagcuggcgcaacaacauccugcggacgcaggaguccgagugcgccugcgugaacggcagcugcuucaccgugaugaccgacggcccguccgacgggcaggcgagcuacaagaucuuccgcaucgagaagggcaagaucgucaaguccguggagaugaacgcccccaacuaccacuacgaggagugcagcugcuaccccgacuccagcgagaucacgugcgugugccgggacaacuggcacggguccaaccgccccugggucagcuucaaccagaaccucgaguaccagaucggcuacaucugcuccgggaucuucggcgacaacccgcggcccaacgacaagaccggcagcugcgggcccguguccagcaacggcgccaacggggugaagggcuucuccuucaaguacgggaacggcgucuggaucggccgcaccaagagcaucagcucccggaacggguucgagaugaucugggaccccaacggcuggaccgggaccgacaacaacuucagcaucaagcaggacaucgugggcaucaacgagugguccggguacagcggcuccuucgugcagcacccggagcugacgggccuggacugcauccgccccugcuucugggucgagcucauccgggggcgccccaaggagaacaccaucuggaccagcggcuccagcaucuccuucugcggggugaacagcgacaccgucggcugguccuggcccgacggcgccgagcugccguucacgaucgacaaguga

SEQ ID NO: 85007 - RNA, 1410 nt, Artificial Sequence
  derived and/or modified CDS sequence (opt1) from neuraminidase__InfluenzaA__AEM62819
augaaccccaaccagaagaucaucaccaucggcagcgugugcaugaccaucgggauggccaaccugauccuccagaucggcaacaucaucuccaucuggaucagccacuccauccagcuggggaaccagaaccagaucgagacgugcaaccagagcgucaucaccuacgagaacgacaccugggugaaccagaccuacgugaacaucuccaacacgaacuucgccgcgggccagagcgucguguccgugaagcuggccgggaacagcucccucugcccggucagcggcugggccaucuacuccaaggacaacagcauccgcaucggcuccaagggggacguguucgugauccgggagcccuucaucagcugcagcccccuggagugccgcaccuucuuccugacccagggcgcccuccugaacgacaagcacuccaacgggaccaucaaggaccggucccccuaccgcacgcugaugagcugcccgaucggcgagguccccucccccuacaacagccgguucgagagcguggccugguccgcgagcgccugccacgacgggaucaacuggcucaccaucggcaucuccggccccgacaacggggccguggccguccugaaguacaacggcaucaucaccgacaccaucaagagcuggcgcaacaacauccugcggacgcaggaguccgagugcgcgugcgugaacgggagcugcuucaccgugaugaccgacggcccguccgacggccaggccagcuacaagaucuuccgcaucgagaaggggaagaucgucaaguccguggagaugaacgcccccaacuaccacuacgaggagugcagcugcuaccccgacuccagcgagaucacgugcgugugccgggacaacuggcacggcuccaaccgccccugggucagcuucaaccagaaccucgaguaccagaucggguacaucugcuccggcaucuucggggacaacccgcggcccaacgacaagaccggcagcugcggccccguguccagcaacggggccaacggcgugaagggguucuccuucaaguacggcaacggggucuggaucggccgcaccaagagcaucagcucccggaacggcuucgagaugaucugggaccccaacggguggaccggcaccgacaacaacuucagcaucaagcaggacaucguggggaucaacgagugguccggcuacagcggguccuucgugcagcacccggagcugacgggccuggacugcauccgccccugcuucugggucgagcucauccggggccgccccaaggagaacaccaucuggaccagcggguccagcaucuccuucugcggcgugaacagcgacaccgucgggugguccuggcccgacggcgccgagcugccguucacgaucgacaaguga

SEQ ID NO: 85008 - RNA, 1410 nt, Artificial Sequence; identical to SEQ ID NO: 80762
  derived and/or modified CDS sequence (opt1) from neuraminidase__InfluenzaA__AEM62828

SEQ ID NO: 85009 - RNA, 1410 nt, Artificial Sequence; identical to SEQ ID NO: 81345
  derived and/or modified CDS sequence (opt1) from neuraminidase__InfluenzaA__AEM62837

SEQ ID NO: 85010 - RNA, 1410 nt, Artificial Sequence; identical to SEQ ID NO: 80762
  derived and/or modified CDS sequence (opt1) from neuraminidase__InfluenzaA__AEM62846

SEQ ID NO: 85011 - RNA, 1410 nt, Artificial Sequence
  derived and/or modified CDS sequence (opt1) from neuraminidase__InfluenzaA__AEM62855
augaaccccaaccagaagaucaucaccaucggcagcgugugcaucaccaucgggauggccaaccugauccuccagaucggcaacaucaucuccaucuggaucagccacuccauccagcuggggaaccagaaccagaucgagacgugcaaccagagcgucaucaccuacgagaacaacaccugggugaaccagaccuacgugaacaucuccaacacgaacuucgccgcgggccagagcgucguguccgugaagcuggccgggaacagcucccucugcccggucagcggcugggccaucuacuccaaggacaacagcgugcgcaucggcuccaagggggacguguucgucauccgggagcccuucaucagcugcagcccccuggagugccgcaccuucuuccugacccagggcgcccuccugaacgacaagcacuccaacgggaccaucaaggaccggucccccuaccgcacgcugaugagcugcccgaucggcgaggugcccucccccuacaacagccgguucgagagcguggccugguccgcgagcgccugccacgacgggaucaacuggcucaccaucggcaucuccggccccgacaacggggccgucgccgugcugaaguacaacggcaucaucaccgacaccaucaagagcuggcgcaacaacauccugcggacgcaggaguccgagugcgcgugcgugaacgggagcugcuucaccgucaugaccgacggcccguccaacggccaggccagcuacaagaucuuccgcaucgagaaggggaagaucgugaaguccguggagaugaacgcccccaacuaccacuacgaggagugcagcugcuaccccgacuccggcgagaucacgugcgucugccgggacaacuggcacgggagcaaccgccccuggguguccuucaaccagaaccucgaguaccagaucggcuacaucugcagcgggaucuucggcgacaacccgcggcccaacgacaagaccggcuccugcgggcccgugagcuccaacggcgccaacggggucaagggcuucagcuucaaguacgggaacggcguguggaucggccgcaccaaguccaucagcagccggaacggguucgagaugaucugggaccccaacggcuggaccgggaccgacaacaacuucuccaucaagcaggacaucgugggcaucaacgaguggagcggguacuccggcagcuucguccagcacccggagcugacgggccuggacugcauccgccccugcuucuggguggagcucauccgggggcgccccaaggagaacaccaucuggaccuccggcagcuccaucagcuucugcggggucaacuccgacaccgugggcuggagcuggcccgacggcgccgagcugccguucacgaucgacaaguga

SEQ ID NO: 85012 - RNA, 1410 nt, Artificial Sequence
  derived and/or modified CDS sequence (opt1) from neuraminidase__InfluenzaA__AEM62864
augaaccccaaccagaagaucaucaccaucggcagcgugugcaugaccaucgggauggccaaccugauccuccagaucggcaacaucaucuccaucuggaucagccacuccauccagcuggggaaccagaaccagaucgagacgugcaaccagagcgucaucaccuacgagaacaacaccugggugaaccagaccuacgugaacaucuccaacacgaacuucgccgcgggccagagcgucguguccgugaagcuggccgggaacagcucccucugcccggucagcggcugggccaucuacuccaaggacaacagcauccgcaucggcuccaagggggacguguucgugauccgggagcccuucaucagcugcagcccccuggagugccgcaccuucuuccugacccagggcgcccuccugaacgacaagcacuccaacgggaccaucaaggaccggucccccuaccgcacgcugaugagcugcccgaucggcgagguccccucccccuacaacagccgguucgagagcguggccugguccgcgagcgccugccacgacgggaucaacuggcucaccaucggcaucuucggccccgacaacggggccguggccguccugaaguacaacggcaucaucaccgacaccaucaaguccuggcgcaacaacauccugcggacgcaggagagcgagugcgcgugcgugaacggguccugcuucaccgugaugaccgacggcccgagcgacggccaggccuccuacaagaucuuccgcaucgagaaggggaagaucgucaagagcguggagaugaacgcccccaacuaccacuacgaggagugcuccugcuaccccgacagcuccgagaucacgugcgugugccgggacaacuggcacggcagcaaccgccccugggucuccuucaaccagaaccucgaguaccagaucggguacaucugcagcggcaucuucggggacaacccgcggcccaacgacaagaccggcuccugcggccccgugagcuccaacggggccaacggcgugaagggguucagcuucaaguacggcaacggggucuggaucggccgcaccaaguccaucagcagccggaacggcuucgagaugaucugggaccccaacggguggaccggcaccgacaacaacuucuccaucaagcaggacaucguggggaucaacgaguggagcggcuacuccgggagcuucgugcagcacccggagcugacgggccuggacugcauccgccccugcuucugggucgagcucauccggggccgccccaaggagaacaccaucuggaccuccgggagcuccaucagcuucugcggcgugaacuccgacaccgucggguggagcuggcccgacggcgccgagcugccguucacgaucgacaaguga

SEQ ID NO: 85013 - RNA, 1410 nt, Artificial Sequence
  derived and/or modified CDS sequence (opt1) from neuraminidase__InfluenzaA__AEM62872
augaaccccaaccagaagaucaucaccaucggcagcgugugcaugaccaucgggauggccaaccugauccuccagaucggcaacaucaucuccaucuggaucagccacuccauccagcuggggaaccagaaccagaucgagacgugcaaccagagcgucaucaccuacgagaacaacaccugggugaaccagaccuacgugaacaucuccaacacgaacuucgccgcgggccagagcgucguguccgugaagcuggccgggaacagcucccucugcccggucagcggcugggccaucuacuccaaggacaacagcauccgcaucggcuccaagggggacguguucgugauccgggagcccuucaucagcugcagcccccuggagugccgcaccuucuuccugacccagggcgcccuccugaacgacaagcacuccaacgggaccaucaaggaccggucccccuaccgcacgcugaugagcugcccgaucggcgagguccccucccccuacaacagccgguucgagagcguggccugguccgcgagcgccugccacgacgggaucaacuggcucaccaucggcaucuccggccccgacaacggggccguggccguccugaaguacaacggcaucaucaccgacaccaucaagagcuggcgcaacaacauccugcggacgcaggaguccgagugcgcgugcgugaacgggagcugcuucaccgugaugaccgacggcccguccgacggccaggccagcuacaagaucuuccgcaucgagaaggggaagaucgucaaguccguggagaugaacgcccccaacuaccacuacgaggagugcagcugcuaccccgacuccagcgagaucacgugcgugugccgggacaacuggcacggcuccaaccgccccugggucagcuucaaccagaaccucgaguaccagaucggguacaucugcuccggcaucuucggggacaacccgcggcccaacgacaagaccggcagcugcggccccguguccuucaacggggccaacggcgugaagggguucagcuucaaguacggcaacggggucuggaucggccgcaccaaguccaucagcagccggaacggcuucgagaugaucugggaccccaacggguggaccggcaccgacaacaacuucuccaucaagcaggacaucguggggaucaacgaguggagcggcuacuccgggagcuucgugcagcacccggagcugacgggccuggacugcauccgccccugcuucugggucgagcucauccggggccgccccaaggagaacaccaucuggaccuccgggagcuccaucagcuucugcggcgugaacuccgacaccgucggguggagcuggcccgacggcgccgagcugccguucacgaucgacaaguga

SEQ ID NO: 85014 - RNA, 1410 nt, Artificial Sequence; identical to SEQ ID NO: 80762
  derived and/or modified CDS sequence (opt1) from neuraminidase__InfluenzaA__AEM92310

SEQ ID NO: 85015 - RNA, 1410 nt, Artificial Sequence; identical to SEQ ID NO: 82224
  derived and/or modified CDS sequence (opt1) from neuraminidase__InfluenzaA__AEM92320

SEQ ID NO: 85016 - RNA, 1410 nt, Artificial Sequence
  derived and/or modified CDS sequence (opt1) from neuraminidase__InfluenzaA__AEM92340
augaaccccaaccagaagaucaucaccaucggcagcgugugcaugaccaucgggauggccaaccugauccuccagaucggcaacaucaucuccaucuggaucagccacuccauccagcuggggaaccagaaccagaucgagacgugcaaccagagcgucaucaccuacgagaacaacaccugggugaaccagaccuacgugaacaucuccaacacgaacuucgccgcgggccagagcgucguguccgugaagcuggccgggaacagcucccucugcccggucagcggcugggccaucuacuccaaggacaacagcauccgcaucggcuccaagggggacguguucgugauccgggagcccuucaucagcugcagcccccuggagugccgcaccuucuuccugacccagggcgcccuccugaacgacaagcacuccaacgggaccaucaaggaccggucccccuaccgcacgcugaugagcugcccgaucggcgagguccccucccccuacaacagccgguucgagagcguggccugguccgcgagcgccugccacgacgggaucaacuggcucaccaucggcaucuccggccccgacaacggggccguggccguccugaaguacaacggcaucaucaccgacaccaucaagagcuggcgcaacaacauccugcggacgcaggaguccgagugcgcgugcgugaacgggagcugcuucaccaucaugaccgacggcccguccgacggccaggccagcuacaagaucuuccgcaucgagaaggggaagaucgugaaguccgucgagaugaacgcccccaacuaccacuacgaggagugcagcugcuaccccgacuccagcgagaucacgugcgugugccgggacaacuggcacggcuccaaccgccccugggugagcuucaaccagaaccucgaguaccagaucggguacaucugcuccggcaucuucggggacaacccgcggcccaacgacaagaccggcagcugcggccccgucuccagcaacggggccaacggcgugaagggguucuccuucaaguacggcaacgggguguggaucggccgcaccaagagcaucagcucccggaagggcuucgagaugaucugggaccccaacggguggacccgcaccgacaacaacuucagcaucaagcaggacaucgucggcaucaacgagugguccggguacagcggcuccuucgugcagcacccggagcugacggggcuggacugcauccggcccugcuucuggguggagcucauccgcggccggcccaaggagaacaccaucuggaccagcggcuccagcaucuccuucugcggggucaacagcgacaccgugggcugguccuggcccgacggggccgagcugccguucacgaucgacaaguga

SEQ ID NO: 85017 - RNA, 1410 nt, Artificial Sequence; identical to SEQ ID NO: 82224
  derived and/or modified CDS sequence (opt1) from neuraminidase__InfluenzaA__AEM92350

SEQ ID NO: 85018 - RNA, 1410 nt, Artificial Sequence
  derived and/or modified CDS sequence (opt1) from neuraminidase__InfluenzaA__AEM92360
augaaccccaaccagaagaucaucaccaucggcagcgugugcaugaccaucgggauggccaaccugauccuccagaucggcaacaucaucuccaucuggaucagccacuccauccagcuggggaaccagaaccagaucgagacgugcaaccagagcgucaucaccuacgagaacaacaccugggugaaccagaccuacgugaacaucuccaacacgaacuucgccgcggagcagagcgucguguccgugaagcuggccggcaacagcucccucugcccggucagcgggugggccaucuacuccaaggacaacagcauccgcaucggcuccaagggcgacguguucgugauccgggagcccuucaucagcugcagcccccuggagugccgcaccuucuuccugacccagggggcccuccugaacgacaagcacuccaacggcaccaucaaggaccggucccccuaccgcacgcugaugagcugcccgaucggggagguccccucccccuacaacagccgguucgagagcguggccugguccgcgagcgccugccacgacggcaucaacuggcucaccaucgggaucuccggccccgacaacggcgccguggccguccugaaguacaacgggaucaucaccgacaccaucaagagcuggcgcaacaacauccugcggacgcaggaguccgagugcgcgugcgugaacggcagcugcuucaccaucaugaccgacgggccguccgacggccaggccagcuacaagaucuuccgcaucgagaagggcaagaucgugaaguccgucgagaugaacgcccccaacuaccacuacgaggagugcagcugcuaccccgacuccagcgagaucacgugcgugugccgggacaacuggcacggguccaaccgccccugggugagcuucaaccagaaccucgaguaccagaucggcuacaucugcuccgggaucuucggcgacaacccgcggcccaacgacaagaccgggagcugcggccccgucuccagcaacggcgccaacggggugaagggcuucuccuucaaguacgggaacggcguguggaucgggcgcaccaagagcaucagcucccggaagggcuucgagaugaucugggaccccaacggcuggaccgggaccgacaacaacuucagcaucaagcaggacaucgucggcaucaacgagugguccggguacagcggcuccuucgugcagcacccggagcugacggggcuggacugcauccgccccugcuucuggguggagcucauccggggccgccccaaggagaacaccaucuggaccagcggcuccagcaucuccuucugcggggucaacagcgacaccgugggcugguccuggcccgacggggccgagcugccguucacgaucgacaaguga

SEQ ID NO: 85019 - RNA, 1410 nt, Artificial Sequence; identical to SEQ ID NO: 85016
  derived and/or modified CDS sequence (opt1) from neuraminidase__InfluenzaA__AEM92370

SEQ ID NO: 85020 - RNA, 1410 nt, Artificial Sequence; identical to SEQ ID NO: 85016
  derived and/or modified CDS sequence (opt1) from neuraminidase__InfluenzaA__AEM92380

SEQ ID NO: 85021 - RNA, 1410 nt, Artificial Sequence
  derived and/or modified CDS sequence (opt1) from neuraminidase__InfluenzaA__AEM92399
augaaccccaaccagaagaucaucaccaucggcagcgugugcaugaccaucgggauggccaaccugauccuccagaucggcaacaucaucuccaucuggaucagccacuccauccagcuggggaaccagaaccagaucgagacgugcaaccagagcgucaucaccuacgagaacaacaccugggugaaccagaccuacgugaacaucuccaacacgaacuucgccgcgggccagagcgucguguccgugaagcuggccgggaacagcucccucugcccggucagcggcugggccaucuacuccaaggacaacagcauccgcaucggcuccaagggggacguguucgugauccgggagcccuucaucagcugcagcccccuggagugccgcaccuucuuccugacccagggcgcccuccugaacgacaagcacuccaacgggaccaucaaggaccggucccccuaccgcacgcugaugagcugcccgaucggcgagguccccucccccuacaacagccgguucgagagcguggccugguccgcgagcgccugccacgacgggaccaacuggcucaccaucggcaucuccggccccgacaacggggccguggccguccugaaguacaacggcaucaucaccgacacgaucaagagcuggcgcaacaacauccugcggacccaggaguccgagugcgcgugcgugaacgggagcugcuucaccgugaugaccgacggcccguccgacggccaggccagcuacaagaucuuccgcaucgagaaggggaagaucgucaaguccguggagaugaacgcccccaacuaccacuacgaggagugcagcugcuaccccgacuccagcgagaucacgugcgugugccgggacaacuggcacggcuccaaccgccccugggucagcuucaaccagaaccucgaguaccagaucggguacaucugcuccggcaucuucggggacaacccgcggcccaacgacaagaccggcagcugcggccccgugcuguccaacggggccaacggcgugaagggguucagcuucaaguacggcaacggggucuggaucggccgcaccaaguccaucagcagccggaacggcuucgagaugaucugggaccccaacggguggaccggcacggacaacaacuucuccaucaagcaggacaucguggggaucaacgaguggagcggcuacuccgggagcuucgugcagcacccggagcugaccggccucgacugcauccgccccugcuucugggucgagcugauccggggccgccccaaggagaacaccaucuggaccuccgggagcuccaucagcuucugcggcgugaacuccgacacggucggguggagcuggcccgacggcgccgagcugccguucaccaucgacaaguga

SEQ ID NO: 85022 - RNA, 1410 nt, Artificial Sequence; identical to SEQ ID NO: 85021
  derived and/or modified CDS sequence (opt1) from neuraminidase__InfluenzaA__AEM92409

SEQ ID NO: 85023 - RNA, 1410 nt, Artificial Sequence; identical to SEQ ID NO: 81186
  derived and/or modified CDS sequence (opt1) from neuraminidase__InfluenzaA__AEM92419

SEQ ID NO: 85024 - RNA, 1410 nt, Artificial Sequence
  derived and/or modified CDS sequence (opt1) from neuraminidase__InfluenzaA__AEM92430
augaaccccaaccagaagaucaugaccaucggcagcgugugcaugaccaucgggauggccaaccugauccuccagaucggcaacaucaucuccaucuggaucagccacuccauccagcuggggaaccagaaccagaucgagacgugcaaccagagcgucaucaccuacgagaacaacaccugggugaaccagaccuacgugaacaucuccaacacgaacuucgccgcgggccagagcgucguguccgugaagcuggccgggaacagcucccucugcccggucagcggcugggccaucuacuccaaggacaacagcauccgcaucggcuccaagggggacguguucgugauccgggagcccuucaucagcugcagcccccuggagugccgcaccuucuuccugacccagggcgcccuccugaacgacaagcacuccaacgggaccaucaaggaccggucccccuaccgcacgcugaugagcugcccgaucggcgagguccccucccccuacaacagccgguucgagagcguggccugguccgcgagcgccugccacgacgggaucaacuggcucaccaucggcaucuccggccccgacaacggggccguggccguccugaaguacaacggcaucaucaccgacaccaucaagagcuggcgcaacaacauccugcggacgcaggaguccgagugcgcgugcgugaacgggagcugcuucaccgugaugaccgacggcccguccgacggccaggccagcuacaagaucuuccgcaucgagaaggggaagaucgucaaguccguggagaugaacgcccccaacuaccacuacgaggagugcagcugcuaccccgacuccagcgagaucacgugcgugugccgggacaacuggcacggcuccaaccgccccugggucagcuucaaccagaaccucgaguaccagaucggguacaucugcuccggcaucuucggggacaacccgcggcccaacgacaagaccggcagcugcggccccguguccagcaacggggccaacggcgugaagggguucuccuucaaguacggcaacggggucuggaucggccgcaccaagagcaucagcucccggaacggcuucgagaugaucugggaccccaacggguggaccggcaccgacaacaacuucagcaucaagcaggacaucguggggaucaacgagugguccggcuacagcggguccuucgugcagcacccggagcugacgggccuggacugcauccgccccugcuucugggucgagcucauccggggccgccccaaggagaacaccaucuggaccagcggguccagcaucuccuucugcggcgugaacagcgacaccgucgggugguccuggcccgacggcgccgagcugccguucacgaucgacaaguga

SEQ ID NO: 85025 - RNA, 1410 nt, Artificial Sequence
  derived and/or modified CDS sequence (opt1) from neuraminidase__InfluenzaA__AEM92440
augaaccccaaccagaagaucaucaccaucggcagcgugugcaucaccaucgggauggccaaccugauccuccagaucggcaacaucaucuccaucuggaucagccacuccauccagcuggggaaccagagccagaucgagacgugcaaccaguccgucaucaccuacgagaacaacaccugggugaaccagaccuacgugaacaucagcaacacgaacuucgccgcgggccaguccgucgugagcgugaagcuggccgggaacuccagccucugcccggucuccggcugggccaucuacagcaaggacaacuccauccgcaucggcagcaagggggacguguucgugauccgggagcccuucaucuccugcagcccccuggagugccgcaccuucuuccugacccagggcgcccuccugaacgacaagcacuccaacgggaccaucaaggaccggagccccuaccgcacgcugauguccugcccgaucggcgagguccccagccccuacaacagccgguucgaguccguggccuggagcgcguccgccugccacgacgggaucaacuggcucaccaucggcaucagcggccccgacaacggggccguggccguccugaaguacaacggcaucaucaccgacaccaucaaguccuggcgcaacaacauccugcggacgcaggagagcgagugcgcgugcgugaacggguccugcuucaccaucaugaccgacggcccgagcgacggccaggccuccuacaagaucuuccgcaucgagaaggggaagaucgucaagagcguggagaugaucgcccccaacuaccacuacgaggagugcuccugcuaccccgacagcuccgagaucacgugcgugugccgggacaacuggcacggcagcaaccgccccuggguguccuucaaccagaaccucgaguaccagaucggguacaucugcagcggcaucuucggggacaacccgcggcccaacgacaagaccggcuccugcggccccgucagcuccaacggggccaacggcgugaagggguucagcuucaaguacggcaacgggguguggaucggccgcaccaagagcaucuccagccggaagggcuucgagaugaucugggaccccaacggguggaccggcaccgacaacaacuucuccaucaagcaggacaucgucgggaucaacgaguggagcggcuacuccgggagcuucgugcagcacccggagcugacgggccuggacugcauccgccccugcuucuggguggagcucauccggggccgccccaaggagaacaccaucuggaccuccgggagcuccaucagcuucugcggcgucaacuccgacaccgugggguggagcuggcccgacggcgccgagcugccguucacgaucgacaaguga

SEQ ID NO: 85026 - RNA, 1410 nt, Artificial Sequence; identical to SEQ ID NO: 84982
  derived and/or modified CDS sequence (opt1) from neuraminidase__InfluenzaA__AEM92450

SEQ ID NO: 85027 - RNA, 1410 nt, Artificial Sequence; identical to SEQ ID NO: 84982
  derived and/or modified CDS sequence (opt1) from neuraminidase__InfluenzaA__AEM92460

SEQ ID NO: 85028 - RNA, 1410 nt, Artificial Sequence; identical to SEQ ID NO: 84733
  derived and/or modified CDS sequence (opt1) from neuraminidase__InfluenzaA__AEM92470

SEQ ID NO: 85029 - RNA, 1410 nt, Artificial Sequence; identical to SEQ ID NO: 84733
  derived and/or modified CDS sequence (opt1) from neuraminidase__InfluenzaA__AEM92480

SEQ ID NO: 85030 - RNA, 1410 nt, Artificial Sequence
  derived and/or modified CDS sequence (opt1) from neuraminidase__InfluenzaA__AEM92490
augaaccccaaccagaagaucaucaccaucggcagcgugugcaugaucaucgggauggccaaccugaugcuccagaucggcaacaucaucuccaucuggaucagccacuccauccagcuggggaaccagaaccagaucgagaccugcaaccagagcgucaucacguacgagaacaacaccugggugaaccagaccuacgugaacaucuccaacaccaacuucgccgcgggccagagcgucguguccgugaagcuggccgggaacagcucccucugcccggucagcggcugggccaucuacuccaaggacaacagcauccgcaucggcuccaagggggacguguucgugauccgggagcccuucaucagcugcagcccccuggagugccgcacguucuuccugacccagggcgcccuccugaacgacaagcacuccaacgggaccaucaaggaccggucccccuaccgcacccugaugagcugcccgaucggcgagguccccucccccuacaacagccgguucgagagcguggccugguccgcgagcgccugccacgacgggaucaacuggcucacgaucggcaucuccggccccgacaacggggccguggccguccugaaguacaacggcaucaucaccgacaccaucaagagcuggcgcaacaacauccugcggacccaggaguccgagugcgcgugcgugaacgggagcugcuucacgaucaugaccgacggcccguccgacggccaggccagcuacaagaucuuccgcaucgagaaggggaagaucgugaaguccgucgagaugaacgcccccaacuaccacuacgaggagugcagcugcuaccccgacuccagcgagaucacgugcgugugccgggacaacuggcacggcuccaaccgccccugggugagcuucaaccagaaccucgaguaccagaucggguacaucugcuccggcaucuucggggacaacccgcggcccaacgacaagaccggcagcugcggccccgucuccagcaacggggccaacggcgugaagggguucuccuucaaguacggcaacgggguguggaucggccgcaccaagagcaucagcucccggaacggcuucgagaugaucugggaccccaacggguggaccggcaccgacaacaacuucagcaucaagcaggacaucgucgggaucaacgagugguccggcuacagcggguccuucgugcagcacccggagcugaccggccuggacugcauccgccccugcuucuggguggagcucauccggggccgccccaaggagaacacgaucuggaccagcggguccagcaucuccuucugcggcgucaacagcgacaccguggggugguccuggcccgacggcgccgagcugccguucaccaucgacaaguga

SEQ ID NO: 85031 - RNA, 1410 nt, Artificial Sequence
  derived and/or modified CDS sequence (opt1) from neuraminidase__InfluenzaA__AEM92500
augaaccccaaccagaagaucaucaccaucggcagcgugugcaugaucaucgggauggccaaccugaugcuccagaucggcaacaucaucuccaucuggaucagccacuccauccagcuggggaaccagaaccagaucgagaccugcaaccagagcgucaucacguacgagaacaacaccugggugaaccagaccuacgugaacaucuccaacaccaacuucgccgcgggccagagcgucguguccgugaagcuggccgggaacagcucccucugcccggucagcggcugggccaucuacuccaaggacaacagcauccgcaucggcuccaagggggacguguucgugauccgggagcccuucaucagcugcagcccccuggagugccgcacguucuuccugacccagggcgcccuccugaacgacaagcacuccaacgggaccaucaaggaccggucccccuaccgcacccugaugagcugcccgaucggcgagguccccucccccuacaacagccgguucgagagcguggccugguccgcgagcgccugccacgacgggaucaacuggcucacgaucggcaucuccggccccgacaacggggccguggccguccugaaguacaacggcaucaucaccgacaccaucaagagcuggcgcaacaacauccugcggacccaggaguccgagugcgcgugcgugaacgggagcugcuucacgaucaugaccgacggcccguccgacggccaggccagcuacaagaucuuccgcaucgagaaggggaagaucgugaaguccgucgagaugaacgcccccaacuaccacuacgaggagugcagcugcuaccccgacuccagcgagaucacgugcgugugccgggacaacuggcacggcuccaaccgccccugggugagcuucaaccagaaccucgaguaccagaugggguacaucugcuccggcaucuucggggacaacccgcggcccaacgacaagaccggcagcugcggccccgucuccagcaacggggccaacggcgugaagggguucuccuucaaguacggcaacgggguguggaucggccgcaccaagagcaucagcucccggaacggcuucgagaugaucugggaccccaacggguggaccggcaccgacaacaaguucagcaucaagcaggacaucgucgggaucaacgagugguccggcuacagcggguccuucgugcagcacccggagcugaccggccuggacugcauccgccccugcuucuggguggagcucauccggggccgccccaaggagaacacgaucuggaccagcggguccagcaucuccuucugcggcgucaacagcgacaccguggggugguccuggcccgacggcgccgagcugccguucaccaucgacaaguga

SEQ ID NO: 85032 - RNA, 1410 nt, Artificial Sequence
  derived and/or modified CDS sequence (opt1) from neuraminidase__InfluenzaA__AEM92520
augaaccccaaccagaagaucaucaccaucggcagcgugugcaugaccaucgggauggccaaccugaugcuccagaucggcaacaucaucuccaucuggaucagccacuccauccagcuggggaaccagaaccagaucgagacgugcaaccagagcgucaucaccuacgagaacaacaccugggugaaccagaccuacgugaacaucuccaacacgaacuucgccgcgggccagagcgucguguccgugaagcuggccgggaacagcucccucugcccggucagcggcugggccaucuacuccaaggacaacagcauccgcaucggcuccaagggggacguguucgugauccgggagcccuucaucagcugcagcccccuggagugccgcaccuucuuccugacccagggcgcccuccugaacgacaagcacuccaacgggaccaucaaggaccggucccccuaccgcacgcugaugagcugcccgaucggcgagguccccucccccuacaacagccgguucgagagcguggccugguccgcgagcgccugccacgacgggaucaacuggcucaccaucggcaucuccggccccgacaacggggccguggccguccugaaguacaacggcaucaucaccgacaccaucaagagcuggcgcaacaacauccugcggacgcaggaguccgagugcgcgugcgugaacgggagcugcuucaccgugaugaccgacggcccguccgacggccaggccagcuacaagaucuuccgcaucgagaaggggaagaucgucaaguccguggagaugaacgcccccaacuaccacuacgaggagugcagcugcuaccccgacuccagcgagaucacgugcgugugccgggacaacuggcacggcuccaaccgccccugggucagcuucaaccagaaccucgaguaccagaucggguacaucugcuccggcaucuucggggacaacccgcggcccaacgacaagaccggcagcugcggccccguguccagcaacggggccaacggcgugaagggguucuccuucaaguacggcaacggggucuggaucggccgcaccaagagcaucagcucccggaacggcuucgagaugaucugggaccccaacggguggaccggcaccgacaacaacuucagcaucaagcaggacaucaucgggaucaacgagugguccggcuacagcggguccuucgugcagcacccggagcugacgggccuggacugcauccgccccugcuucuggguggagcucauccggggccgccccaaggagaacaccaucuggaccagcggguccagcaucuccuucugcggcgucaacagcgacaccguggggugguccuggcccgacggcgccgagcugccguucacgaucgacaaguga

SEQ ID NO: 85033 - RNA, 1410 nt, Artificial Sequence; identical to SEQ ID NO: 84733
  derived and/or modified CDS sequence (opt1) from neuraminidase__InfluenzaA__AEM92550

SEQ ID NO: 85034 - RNA, 1410 nt, Artificial Sequence
  derived and/or modified CDS sequence (opt1) from neuraminidase__InfluenzaA__AEM92570
augaaccccaaccagaagaucaucaccaucggcagcgugugcaugaccaucgggauggccaaccugauccuccagaucggcaacaucaucuccaucuggaucagccacuccauccagcuggggaaccagaaccagaucgagacgugcaaccagagcgucaucaccuacgagaacaacaccugggugaaccagaccuacgugaacaucuccaacacgaacuucgccgcgggccagagcgucguguccgugaagcuggccgggaacagcucccucugcccggucagcggcugggccaucuacuccaaggacaacagcauccgcaucggcuccaaggggaacguguucgugauccgggagcccuucaucagcugcagcccccuggagugccgcaccuucuuccugacccagggcgcccuccugaacgacaagcacuccaacgggaccaucaaggaccggucccccuaccgcacgcugaugagcugcccgaucggcgagguccccucccccuacaacagccgguucgagagcguggccugguccgcgagcgccugccacgacgggaucaacuggcucaccaucggcaucuccggccccgacaacggggccguggccguccugaaguacaacggcaucaucaccgacaccaucaagagcuggcgcaacaacauccugcggacgcaggaguccgagugcgcgugcgugaacgggagcugcuucaccaucaugaccgacggcccguccgacggccaggccagcuacaagaucuuccgcaucgagaaggggaagaucgugaaguccgucgagaugaacgcccccaacuaccacuacgaggagugcagcugcuaccccgacuccagcgagaucacgugcgugugccgggacaacuggcacggcuccaaccgccccugggugagcuucaaccagaaccucgaguaccagaucggguacaucugcuccggcaucuucggggacaacccgcggcccaacgacaagaccggcagcugcggccccgucuccagcaacggggccaacggcgugaagggguucuccuucaaguacggcaacgggguguggaucggccgcaccaagagcaucagcucccggaagggcuucgagaugaucugggaccccaacggguggaccggcaccgacaacaacuucagcaucaagcaggacaucgucgggaucaacgagugguccggcuacagcggguccuucgugcagcacccggagcugacgggccuggacugcauccgccccugcuucuggguggagcucauccggggccgccccaaggagaacaccaucuggaccagcggguccagcaucuccuucugcggcgucaacagcgacaccguggggugguccuggcccgacggcgccgagcugccguucacgaucgacaaguga

SEQ ID NO: 85035 - RNA, 1410 nt, Artificial Sequence
  derived and/or modified CDS sequence (opt1) from neuraminidase__InfluenzaA__AEM92580
augaaccccaaccagaagaucaucaccaucggcagcgugugcaugaccaucgggauggccaaccugauccuccagaucggcaacaucaucuccaucuggaucagccacuccauccagcuggggaaccagaaccagaucgagacgugcaaccagagcgucaucaccuacgagaacaacaccugggugaaccagaccuacgugaacaucuccaacacgaacuucgccgcgggccagagcgucguguccgugaagcuggccgggaacagcucccucugcccggucagcggcugggccaucuacuccaaggacaacagcauccgcaucggcuccaagggggacguguucgugauccgggagcccuucaucagcugcagcccccuggagugccgcaccuucuuccugacccagggcgcccuccugaacgacaagcacuccaacgggaccaucaaggaccggucccccuaccgcacgcugaugagcugcccgaucggcgagguccccucccccuacaacagccgguucgagagcguggccugguccgcgagcgccugccacgacgggaucaacuggcucaccaucggcaucuccggccccgacaacggggccguggccguccugaaguacaacggcaucaucaccgacaccaucaagagcuggcgcaacaacauccugcggacgcaggaguccgagugcgcgugcgugaacgggagcugcuucaccaucaugaccgacggcccguccaacggccaggccagcuacaagaucuuccgcaucgagaaggggaagaucgugaaguccgucgagaugaacgcccccaacuaccacuacgaggagugcagcugcuaccccgacuccagcgagaucacgugcgugugccgggacaacuggcacggcuccaaccgccccugggugagcuucaaccagaaccucgaguaccagaucggguacaucugcuccggcaucuucggggacaacccgcggcccaacgacaagaccggcagcugcggccccgucuccagcaacggggccaacggcgugaagggguucuccuucaaguacggcaacgggguguggaucggccgcaccaagagcaucagcucccggaagggcuucgagaugaucugggaccccaacggguggaccggcaccgacaacaacuucagcaucaagcaggacaucgucgggaucaacgagugguccggcuacagcggguccuucgugcagcacccggagcugacgggccuggacugcauccgccccugcuucuggguggagcucauccggggccgccccaaggagaacaccaucuggaccagcggguccagcaucuccuucugcggcgucaacagcgacaccguggggugguccuggcccgacggcgccgagcugccguucacgaucgacaaguga

SEQ ID NO: 85036 - RNA, 1410 nt, Artificial Sequence; identical to SEQ ID NO: 84733
  derived and/or modified CDS sequence (opt1) from neuraminidase__InfluenzaA__AEM92590

SEQ ID NO: 85037 - RNA, 1410 nt, Artificial Sequence; identical to SEQ ID NO: 84733
  derived and/or modified CDS sequence (opt1) from neuraminidase__InfluenzaA__AEM92600

SEQ ID NO: 85038 - RNA, 1410 nt, Artificial Sequence
  derived and/or modified CDS sequence (opt1) from neuraminidase__InfluenzaA__AEM92610
augaaccccaaccagaagaucaucaccaucggcagcgugugcaugaccaucgggauggccaaccugaugcuccagaucggcaacaucaucuccaucuggaucagccacuccauccagcuggggaaccagaaccagaucgagacgugcaaccagagcgucaucaccuacgagaacaacaccugggugaaccagaccuacgugaacaucuccaacacgaacuucgccgcgggccagagcgucguguccgugaagcuggccgggaacagcucccucugcccggucagcggcugggccaucuacuccaaggacaacagcauccgcaucggcuccaagggggacguguucgugauccgggagcccuucaucagcugcagcccccuggagugccgcaccuucuuccugacccagggcgcccuccugaacgacaagcacuccaacgggaccaucaaggaccggucccccuaccgcacgcugaugagcugcccgaucggcgagguccccucccccuacaacagccgguucgagagcguggccugguccgcgagcgccugccacgacgggaucaacuggcucaccaucggcaucuccggccccgacaacggggccguggccguccugaaguacaacggcaucaucaccgacaccaucaagagcuggcgcaacaacauccugcggacgcaggaguccgagugcgcgugcgugaacgggagcugcuucaccgugaugaccgacggcccguccgacggccaggccagcuacaagaucuuccgcaucgagaaggggaagaucgucaaguccguggagaugaacgcccccaacuaccacuacgaggagugcagcugcuaccccgacuccagcgagaucacgugcgugugccgggacaacuggcacggcuccaaccgccccugggucagcuucaaccagaaccucgaguaccagaucggguacaucugcuccggcaucuucggggacaacccgcggcccaacgacaagaccggcagcugcggccccguguccagcaacggggccaacggcgugaagggguucuccuucaaguacggcaacggggucuggaucggccgcaccaagagcaucagcucccggaacggcuucgagaugaucugggaccccaacggguggaccggcaccgacaacaacuucagcaucaagcaggacaucguggggaucaacgagugguccggcuacagcggguccuucgugcagcacccggagcugacgggccuggacugcauccgccccugcuucugggucgagcucauccggggccgccccaaggagaacaccaucuggaccagcggguccagcaucuccuucugcggcgugaacagcgacaccgucuccuggagcuggcccgacggggccgagcugccguucacgaucgacaaguga

SEQ ID NO: 85039 - RNA, 1410 nt, Artificial Sequence
  derived and/or modified CDS sequence (opt1) from neuraminidase__InfluenzaA__AEM92620
augaaccccaaccagaagaucaucaccaucggcagcgugugcaugaucaucgggauggccaaccugaugcuccagaucggcaacaucaucuccaucuggaucagccacuccauccagcuggggaaccagaaccagaucgagaccugcaaccagagcgucaucacguacgagaacaacaccugggugaaccagaccuacgugaacaucuccaacaccaacuucgccgcgggccagagcgucguguccgugaagcuggccgggaacagcucccucugcccggucagcggcugggccaucuacuccaaggacaacagcauccgcaucggcuccaagggggacguguucgugauccgggagcccuucaucagcugcagcccccuggagugccgcacguucuuccugacccagggcgcccuccuggacgacaagcacuccaacgggaccaucaaggaccggucccccuaccgcacccugaugagcugcccgaucggcgagguccccucccccuacaacagccgguucgagagcguggccugguccgcgagcgccugccacgacgggaucaacuggcucacgaucggcaucuccggccccgacaacggggccguggccguccugaaguacaacggcaucaucaccgacaccaucaagagcuggcgcaacaacauccugcggacccaggaguccgagugcgcgugcgugaacgggagcugcuucacgaucaugaccgacggcccguccgacggccaggccagcuacaagaucuuccgcaucgagaaggggaagaucgugaaguccgucgagaugaacgcccccaacuaccacuacgaggagugcagcugcuaccccgacuccagcgagaucacgugcgugugccgggacaacuggcacggcuccaaccgccccugggugagcuucaaccagaaccucgaguaccagaugggguacaucugcuccggcaucuucggggacaacccgcggcccaacgacaagaccggcagcugcggccccgucuccagcaacggggccaacggcgugaagggguucuccuucaaguacggcaacgggguguggaucggccgcaccaagagcaucagcucccggaacggcuucgagaugaucugggaccccaacggguggaccggcaccgacaacaaguucagcaucaagcaggacaucgucgggaucaacgagugguccggcuacagcggguccuucgugcagcacccggagcugaccggccuggacugcauccgccccugcuucuggguggagcucauccggggccgccccaaggagaacacgaucuggaccagcggguccagcaucuccuucugcggcgucaacagcgacaccguggggugguccuggcccgacggcgccgagcugccguucaccaucgacaaguga

SEQ ID NO: 85040 - RNA, 1410 nt, Artificial Sequence
  derived and/or modified CDS sequence (opt1) from neuraminidase__InfluenzaA__AEM92650
augaaccccaaccagaagaucaucaccaucggcagcgugugcaugaccaucgggauggccaaccugauccuccagaucggcaacaucaucuccaucuggaucagccacuccauccagcuggggaaccagaaccagaucgagacgugcaaccagagcgucaucaccuacgagaacaacaccugggugaaccagaccuacgugaacaucuccaacacgaacuucgccgcgggccagagcgucguguccgugaagcuggccgggaacagcucccucugcccggucagcggcugggccaucuacuccaaggacaacagcgugcgcaucggcuccaagggggacguguucgucauccgggagcccuucaucagcugcagcccccuggagugccgcaccuucuuccugacccagggcgcccuccugaacgacaagcacuccaacgggaccaucaaggaccggucccccuaccgcacgcugaugagcugcccgaucggcgaggugcccucccccuacaacagccgguucgagagcguggccugguccgcgagcgccugccacgacgggaucaacuggcucaccaucggcaucuccggccccgacaacggggccgucgccgugcugaaguacaacggcaucaucaccgacaccaucaagagcuggcgcaacaacauccugcggacgcaggaguccgagugcgcgugcgugaacgggagcugcuucaccgucaugaccgacggcccguccgacggccaggccagcuacaagaucuuccgcaucgagaaggggaagaucgugaaguccguggagaugaacgcccccaacuaccacuacgaggagugcagcugcuaccccgacuccagcgagaucacgugcgucugccgggacaacuggcacggcuccaaccgccccugggugagcuucaaccagaaccucgaguaccagaucggguacaucugcuccggcaucuucggggacaacccgcggcccaacgacaagaccggcagcugcggccccguguccagcaacggggccaacggcgucaagggguucuccuucaaguacggcaacgggguguggaucggccgcaccaagagcaucagcucccggaacggcuucgagaugaucugggaccccaacggguggaccggcaccgacacgaaguucagcaucaagcaggacaucguggggaucaacgagugguccggcuacagcggguccuucguccagcacccggagcugaccggccuggacugcauccgccccugcuucuggguggagcucauccggggccgccccaaggagaacaccaucuggaccagcggguccagcaucuccuucugcggcgucaacagcgacacgguggggugguccuggcccgacggcgccgagcugccguucaccaucgacaaguga

SEQ ID NO: 85041 - RNA, 1410 nt, Artificial Sequence; identical to SEQ ID NO: 83434
  derived and/or modified CDS sequence (opt1) from neuraminidase__InfluenzaA__AEM98410

SEQ ID NO: 85042 - RNA, 1410 nt, Artificial Sequence; identical to SEQ ID NO: 83434
  derived and/or modified CDS sequence (opt1) from neuraminidase__InfluenzaA__AEM98421

SEQ ID NO: 85043 - RNA, 1410 nt, Artificial Sequence; identical to SEQ ID NO: 83434
  derived and/or modified CDS sequence (opt1) from neuraminidase__InfluenzaA__AEM98432

SEQ ID NO: 85044 - RNA, 1410 nt, Artificial Sequence; identical to SEQ ID NO: 84810
  derived and/or modified CDS sequence (opt1) from neuraminidase__InfluenzaA__AEN55401

SEQ ID NO: 85045 - RNA, 1410 nt, Artificial Sequence; identical to SEQ ID NO: 83037
  derived and/or modified CDS sequence (opt1) from neuraminidase__InfluenzaA__AEN55411

SEQ ID NO: 85046 - RNA, 1410 nt, Artificial Sequence
  derived and/or modified CDS sequence (opt1) from neuraminidase__InfluenzaA__AEN55421
augaaccccaaccagaagaucaucaccaucggcagcgugugcaugaccaucgggauggccaaccugauccuccagaucggcaacaucaucuccaucuggaucagccacuccauccagcuggggaaccagagccagaucgagacgugcaaccaguccgucaucaccuacgagaacaacaccugggugaaccagaccuacgugaacaucagcaacacgaacuucgccgcgcgccaguccgucgugagcgugaagcuggccggcaacuccagccucugcccggucuccgggugggccaucuacagcaaggacaacuccauccggaucggcagcaagggcgacguguucgugauccgcgagcccuucaucuccugcagcccccuggagugccggaccuucuuccugacccagggggcccuccugaacgacaagcacuccaacggcaccaucaaggaccgcagccccuaccggacgcugauguccugcccgaucggggagguccccagccccuacaacagccgcuucgaguccguggccuggagcgcguccgccugccacgacggcaucaacuggcucaccaucgggaucagcggccccgacaacggcgccguggccguccugaaguacaacgggaucaucaccgacaccaucaaguccuggcggaacaacauccugcgcacgcaggagagcgagugcgugugcgugaacggcuccugcuucaccaucaugaccgacgggccgagcgacggccaggcguccuacaagaucuuccggaucgagaagggcaagaucgucaagagcguggagaugaacgcccccaacuaccacuacgaggagugcuccugcuaccccgacagcuccgagaucacgugcgugugccgcgacaacuggcacgggagcaaccggcccugggucuccuucaaccagaaccucgaguaccagaucggcuacaucugcagcgggaucuucggcgacaacccgcgccccaacgacaagaccggguccugcggccccgugagcuccaacggcgccaacggggugaagggcuucagcuucaaguacgggaacggcgucuggaucgggcggaccaagagcaucuccagccgcaagggcuucgagaugaucugggaccccaacggcuggaccgggaccgacaacaacuucuccaucaagcaggacaucgugggcaucaacgaguggagcggguacuccggcagcuucgugcagcacccggagcugacggggcuggacugcauccggcccugcuucugggucgagcucauccgcggccggcccaaggagaacaccaucuggaccuccggcagcuccaucagcuucugcggggugaacuccgacaccgucggcuggagcuggcccgacggggccgagcugccguucacgaucgacaaguga

SEQ ID NO: 85047 - RNA, 1410 nt, Artificial Sequence
  derived and/or modified CDS sequence (opt1) from neuraminidase__InfluenzaA__AEN55466
augaaccccaaccagaagaucaucaccaucggcagcgugugcaucaccaucgggauggccaaccugauccuccagaucggcaacacgaucuccaucuggaucagccacuccauccagcuggggaaccagaaccagaucgagaccugcaaccagagcgucaucaccuacgagaacaacaccugggugaaccagacguacgugaacaucuccaacaccaacuucgccgcgggccagagcgucguguccgugaagcuggccgggaacagcucccucugcccggucagcggcugggccaucuacuccaaggacaacagcauccgcaucggcuccaagggggacguguucgugauccgggagcccuucaucagcugcagcccccuggagugccgcaccuucuuccugacccagggcgcccuccugaacgacaagcacuccaacgggacgaucaaggaccggucccccuaccgcacccugaugagcugcccgaucggcgagguccccucccccuacaacagccgguucgagagcguggccugguccgcgagcgccugccacgacgggaucuccuggcucaccaucggcaucagcggccccgacaacggggccguggccguccugaaguacaacggcaucaucaccgacacgaucaaguccuggcgcaacaacauccugcggacccaggagagcgagugcgcgugcgugaacggguccugcuucaccgugaugaccgacggcccgagcgacggccaggccuccuacaagaucuuccgcaucgagaaggggaagaucgucaagagcguggagaugaacgcccccaacuaccacuacgaggagugcuccugcuaccccgacagcuccgagaucacgugcgugugccgggacaacuggcacggcagcaaccgccccugggucuccuucaaccagaaccucgaguaccagaucggguacaucugcagcggcaucuucggggacaacccgcggcccaacgacaagaccggcuccugcggccccgugagcuccaacggggccaacggcgugaagggguucagcuucaaguacggcaacggggucuggaucggccgcaccaagagcaucuccagccggaacggcuucgagaugaucugggaccccaacggguggaccggcacggacaacaacuucuccaucaagcaggacaucguggggaucaacgaguggagcggcuacuccgggagcuucgugcagcacccggagcugaccggccuggacugcauccgccccugcuucugggucgagcucauccggggccgccccaaggagaacaccaucuggaccuccgggagcuccaucagcuucugcggcgugaacuccgacacggucggguggagcuggcccgacggcgccgagcugccguucaccaucgacaaguga

SEQ ID NO: 85048 - RNA, 1410 nt, Artificial Sequence
  derived and/or modified CDS sequence (opt1) from neuraminidase__InfluenzaA__AEN55476
augaaccccaaccagaagaucaucaccaucggcagcgugugcaugaccaucgggauggccaaccugauccuccagaucggcaacaucaucuccaucuggaucagccacuccauccagcuggggaaccagagccagaucgagacgugcaaccaguccgucaucaccuacgagaacaacaccugggugaaccagaccuacgugaacaucagcaacacgaacuucgccgcgggccaguccgucgugagcgugaagcuggccgggaacuccagccucugcccggucuccggcugggccaucuacagcaaggacaacuccauccgcaucggcagcaagggggacguguucgugauccgggagcccuucaucuccugcagcccccuggagugccgcaccuucuuccugacccagggcgcccuccugaacgacaagcacuccaacgggaccaucaaggaccggagccccuaccgcacgcugauguccugcccgaucggcgagguccccagccccuacaacagccgguucgaguccguggccuggagcgcguccgccugccacgacgggaucaacuggcucaccaucggcaucagcggccccgacaacggggccguggccguccugaaguacaacggcaucaucaccgacaccaucaaguccuggcgcaacaacauccugcggacgcaggagagcgagugcgcgugcgugaacggguccugcuucaccaucaugaccgacggcccgagcgacggccaggccuccuacaagaucuuccgcaucgagaaggggaagaucgucaagagcguggagaugaacgcccccaacuaccacuacgaggagugcuccugcuaccccgacagcuccgagaucacgugcgugugccgggacaacuggcacggcagcaaccgccccuggguguccuucaaccagaaccucgaguaccagaucggguacaucugcagcggcaucuucggggacaacccgcggcccaacgacaagaccggcuccugcggccccgucagcuccaacggggccaacggcgugaagggguucagcuucaaguacggcaacgggguguggaucggccgcaccaagagcaucuccagccggaagggcuucgagaugaucugggaccccaacggguggaccggcaccgacaacaacuucuccaucaagcaggacaucgucgggaucaacgaguggagcggcuacuccgggagcuucgugcagcacccggagcugacgggccuggacugcauccgccccugcuucuggguggagcucauccggggccgccccaaggagaacaccaucuggaccuccgggagcuccaucagcuucugcggcgucaacuccgacaccgugagcugguccuggcccgacggggccgagcugccguucacgaucgacaaguga

SEQ ID NO: 85049 - RNA, 1410 nt, Artificial Sequence; identical to SEQ ID NO: 84281
  derived and/or modified CDS sequence (opt1) from neuraminidase__InfluenzaA__AEN55486

SEQ ID NO: 85050 - RNA, 1410 nt, Artificial Sequence; identical to SEQ ID NO: 84281
  derived and/or modified CDS sequence (opt1) from neuraminidase__InfluenzaA__AEN55506

SEQ ID NO: 85051 - RNA, 1410 nt, Artificial Sequence
  derived and/or modified CDS sequence (opt1) from neuraminidase__InfluenzaA__AEN55516
augaaccccaaccagaagaucaucaccaucggcagcgugugcaugaccaucgggauggccaaccugauccuccagaucggcaacaucaucuccaucuggaucagccacuccauccagcuggggaaccagagccagaucgagacgugcaaccaguccgucaucaccuacgagaacaacaccugggugaaccagaccuacgugaacaucagcaacacgaacuucgccgcgggccaguccgucgugagcgugaagcuggccgggaacuccagccucugcccggucuccggcugggccaucuacagcaaggacaacuccauccgcaucggcagccgcggggacguguucgugauccgggagcccuucaucuccugcagcccccuggagugccggaccuucuuccugacccagggcgcccuccugaacgacaagcacuccaacgggaccaucaaggaccgcagccccuaccggacgcugauguccugcccgaucggcgagguccccagccccuacaacagccgcuucgaguccguggccuggagcgcguccgccugccacgacgggaucaacuggcucaccaucggcaucagcggccccgacaacggggccguggccguccugaaguacaacggcaucaucaccgacaccaucaaguccuggcggaacaacauccugcgcacgcaggagagcgagugcgcgugcgugaacggguccugcuucaccaucaugaccgacggcccgagcgacggccaggccuccuacaagaucuuccggaucgagaaggggaagaucgucaagagcguggagaugaacgcccccaacuaccacuacgaggagugcuccugcuaccccgacagcuccgagaucacgugcgugugccgcgacaacuggcacggcagcaaccggcccuggguguccuucaaccagaaccucgaguaccagaucggguacaucugcagcggcaucuucggggacaacccgcgccccaacgacaagaccggcuccugcggccccgucagcuccaacggggccaacggcgugaagggguucagcuucaaguacggcaacgggguguggaucggccggaccaagagcaucuccagccgcaagggcuucgagaugaucugggaccccaacggguggaccggcaccgacaacaacuucuccaucaagcaggacaucgucgggaucaacgaguggagcggcuacuccgggagcuucgugcagcacccggagcugacgggccuggacugcauccggcccugcuucuggguggagcucauccgcggccggcccaaggagaacaccaucuggaccuccgggagcuccaucagcuucugcggcgucaacuccgacaccgugggguggagcuggcccgacggcgccgagcugccguucacgaucgacaaguga

SEQ ID NO: 85052 - RNA, 1410 nt, Artificial Sequence; identical to SEQ ID NO: 84281
  derived and/or modified CDS sequence (opt1) from neuraminidase__InfluenzaA__AEN55526

SEQ ID NO: 85053 - RNA, 1410 nt, Artificial Sequence; identical to SEQ ID NO: 84810
  derived and/or modified CDS sequence (opt1) from neuraminidase__InfluenzaA__AEN69429

SEQ ID NO: 85054 - RNA, 1410 nt, Artificial Sequence; identical to SEQ ID NO: 84807
  derived and/or modified CDS sequence (opt1) from neuraminidase__InfluenzaA__AEN69438

SEQ ID NO: 85055 - RNA, 1410 nt, Artificial Sequence; identical to SEQ ID NO: 83037
  derived and/or modified CDS sequence (opt1) from neuraminidase__InfluenzaA__AEN69484

SEQ ID NO: 85056 - RNA, 1410 nt, Artificial Sequence; identical to SEQ ID NO: 80709
  derived and/or modified CDS sequence (opt1) from neuraminidase__InfluenzaA__AEO01627

SEQ ID NO: 85057 - RNA, 1410 nt, Artificial Sequence; identical to SEQ ID NO: 80709
  derived and/or modified CDS sequence (opt1) from neuraminidase__InfluenzaA__AEO01638

SEQ ID NO: 85058 - RNA, 1410 nt, Artificial Sequence
  derived and/or modified CDS sequence (opt1) from neuraminidase__InfluenzaA__AEO01644
augaaccccaaccagaagaucaucaccaucggcagcgugucccugaccaucagcacgaucugcuucuucaugcagaucgccauccucaucaccaccgucacccugcacuucaagcaguacgaguucaacuccccgcccaacaaccaggugaugcugugcgagcccacgaucaucgagcgcaacaucaccgagaucguguaccucaccaacaccacgaucgagaaggagaucugccccaagcuggccgaguaccggaacuggagcaagccgcagugcgacaucaccggguucgcgcccuucuccaaggacaacagcauccgccuguccgccggcggggacaucugggucacccgggagcccuacgugagcugcgaccccgacaagugcuaccaguucgcccucggccaggggaccacgcugaacaacgugcacuccaacgacaccguccgcgaccggaccccguaccgcacccugcucaugaacgagcugggcgugcccuuccaccugggcacgaagcaggucugcaucgccuggagcuccagcuccugccacgacgggaaggccuggcuccacgugugcaucaccggcgacgacaagaacgcgaccgccagcuucaucuacaacgggcggcugguggacuccaucgugagcugguccaaggagauccugcgcacccaggagagcgagugcgucugcaucaacggcacgugcaccguggugaugaccgacggguccgccagcggcaaggccgacaccaagauccucuucaucgaggagggcaagaucguccacacgagcacccuguccgggagcgcgcagcacguggaggagugcuccugcuacccccgguaccccggcgugcgcugcgucugccgggacaacuggaaggggagcaaccgcccgaucguggacaucaacaucaaggaccacuccaucgugagcuccuacgucugcagcggccuggugggcgacacgccccggaagaccgacuccagcuccagcgggcacugccucgaccccaacaacgaggagggcgggcacggcgugaaggggugggccuucgacgacggcaacgacgucuggaugggccgcaccaucuccgagaagucccggcugggguacgagaccuucaaggugaucgagggcuggagcaaccccaagagcaagcugcagaucaaccgccaggucaucguggaccgggggaaccgcuccggcuacagcgggaucuucuccguggagggcaagagcugcaucaaccggugcuucuacgucgagcucauccgcggccggaaggaggagaccgaggugcuguggaccagcaacuccaucguggucuucugcgggacgagcggcaccuacgggaccggcuccuggccggacggggccgacaucaaccugaugcccaucuga

SEQ ID NO: 85059 - RNA, 1410 nt, Artificial Sequence
  derived and/or modified CDS sequence (opt1) from neuraminidase__InfluenzaA__AEO01654
augaaccccaaccagaagaucaucaccaucggcagcgugucccugaccaucagcacgaucugcuucuucaugcagaucgccauccucaucaccaccgucacccugcacuucaagcaguacgaguucaacuccccgcccaacaaccaggugaugcugugcgagcccacgaucaucgagcgcaacaucaccgagaucguguaccucaccaacaccacgaucgagaaggagaucugccccaagcuggccgaguaccggaacuggagcaagccgcagugcgacaucaccggguucgcgcccuucuccaaggacaacagcauccgccuguccgccggcggggacaucugggucacccgggagcccuacgugagcugcgaccccgacaagugcuaccaguucgcccucggccaggggaccacgcugaacaacgugcacuccaacgacaccguccgcgaccggaccccguaccgcacccugcucaugaacgagcugggcgugcccuuccaccugggcacgaagcaggucugcaucgccuggagcuccagcuccugccacgacgggaaggccuggcuccacgugugcaucaccggcgacgacaagaacgcgaccgccagcuucaucuacaacgggcggcugguggacuccaucgugagcugguccaaggacauccugcgcacccaggagagcgagugcgucugcaucaacggcacgugcaccguggugaugaccgacggguccgccagcggcaaggccgacaccaagauccucuucaucgaggagggcaagaucguccacacgagcacccuguccgggagcgcgcagcacguggaggagugcuccugcuacccccgguaccccggcgugcgcugcgucugccgggacaacuggaaggggagcaaccgcccgaucguggacaucaacaucaaggaccacuccaucgugagcuccuacgucugcagcggccuggugggcgacacgccccggaagaacgacuccagcuccagcgggcacugccucgaccccaacaacgaggagggcgggcacggcgugaaggggugggccuucgacgacggcaacgacgucuggaugggccgcaccaucuccgagaagucccggcugggguacgagaccuucaaggugaucgagggcuggagcaaccccaagagcaagcugcagaucaaccgccaggucaucguggaccgggggaaccgcuccggcuacagcgggaucuucuccguggagggcaagagcugcaucaaccggugcuucuacgucgagcucauccgcggccggaaggaggagaccaaggugcuguggaccagcaacuccaucguggucuucugcgggaccagcggcacguacgggaccggcuccuggccggacggggccgagaucaaccugaugcccaucuga

SEQ ID NO: 85060 - RNA, 1413 nt, Artificial Sequence; identical to SEQ ID NO: 80656
  derived and/or modified CDS sequence (opt1) from neuraminidase__InfluenzaA__AEO01665

SEQ ID NO: 85061 - RNA, 1413 nt, Artificial Sequence
  derived and/or modified CDS sequence (opt1) from neuraminidase__InfluenzaA__AEO01676
augaaccccaaccagaagaucaucaccaucggcagcaucuccaucgccaucgggaucaucagccugaugcuccagaucggcaacaucaucuccaucugggccagccacuccauccagaccgggagccagaacaacacgggcaucugcaaccagcgcaucaucaccuacgagaacuccaccugggugaaccacaccuacgucaacaucaacaacacgaacgugguggcgggggaggacaagaccagcgucacccuggccggcaacuccagccugugcuccaucagcggcugggccaucuacaccaaggacaacuccauccggaucgggagcaagggcgacguguucgugauccgcgagccguucaucuccugcagccaccucgagugccggacguucuuccugacccagggggcccugcucaacgacaagcacuccaacggcaccgucaaggaccgcagccccuaccgggcccugauguccugcccccugggggaggcgcccagcccguacaacagcaaguucgaguccguggccuggagcgccuccgccugccacgacggcaugggcuggcucaccaucgggaucagcggccccgacaacggggcgguggccguccugaaguacaacggcaucaucacgggcaccaucaaguccuggaagaagcagauccugcgcacccaggagagcgagugcgugugcaugaacggguccugcuucaccaucaugacggacggccccagcaacaaggccgccuccuacaagaucuucaagaucgagaaggggaaggugaccaagagcaucgagcucaacgcccccaacuuccacuacgaggagugcuccugcuacccggacaccggcaucgucaugugcgugugccgggacaacuggcacgggagcaaccgccccuggguguccuucaaccagaaccuggacuaccagaucggcuacaucugcagcggcgucuucggggacaacccccggcccgaggacggcgagggguccugcaacccggugaccguggacggcgcgaacggggucaagggcuucagcuacaaguacgacaacggcguguggaucgggcgcacgaaguccaaccggcugcgcaagggcuucgagaugaucugggaccccaacggguggaccaacaccgacagcgacuucuccgugaagcaggacgucguggccaucaccgacuggagcggcuacagcggguccuucgugcagcaccccgagcucacgggccuggacugcauccggcccugcuucugggucgagcuggugcgcggccucccgcgggagaacaccaccaucuggaccagcggguccagcaucuucuuccgcggcgacaacuccgacacggccaacuggagcuggcccgacggggccgagaugaccuucaccaucgacaaguga

SEQ ID NO: 85062 - RNA, 1410 nt, Artificial Sequence; identical to SEQ ID NO: 80709
  derived and/or modified CDS sequence (opt1) from neuraminidase__InfluenzaA__AEO01693

SEQ ID NO: 85063 - RNA, 1413 nt, Artificial Sequence; identical to SEQ ID NO: 80656
  derived and/or modified CDS sequence (opt1) from neuraminidase__InfluenzaA__AEO01711

SEQ ID NO: 85064 - RNA, 1410 nt, Artificial Sequence; identical to SEQ ID NO: 84832
  derived and/or modified CDS sequence (opt1) from neuraminidase__InfluenzaA__AEO37533

SEQ ID NO: 85065 - RNA, 1410 nt, Artificial Sequence
  derived and/or modified CDS sequence (opt1) from neuraminidase__InfluenzaA__AEO37543
augaaccccaaccagaagaucaucaccaucggcagcgugugcaugaccaucgggauggccaaccugauccuccagaucggcaacaucaucuccaucuggaucagccacuccauccagcuggggaaccagaaccagaucgagccgugcaaccagagcgucaucacguacgagaacaacaccugggugaaccagaccuacgugaacaucuccaacaccaacuucgccgcgggccagagcgucguguccgugaagcuggccgggaacagcucccucugccccgucagcggcugggccaucuacuccaaggacaacagcauccgcaucggcuccaagggggacguguucgugauccgggagcccuucaucagcugcagcccccuggagugccgcacguucuuccugacccagggcgcccuccugaacgacaagcacuccaacgggaccaucaaggaccgguccccguaccgcacccugaugagcugccccaucggcgagguccccucccccuacaacagccgguucgagagcguggccugguccgcgagcgccugccacgacgggaucaacuggcucacgaucggcaucuccggcccggacaacggggccguggccguccugaaguacaacggcaucaucaccgacaccaucaagagcuggcgcaacaacauccugcggacccaggaguccgagugcgcgugcgugaacgggagcugcuucacggugaugaccgacggccccuccgacggccaggccagcuacaagaucuuccgcaucgagaaggggaagaucgucaaguccguggagaugaacgcccccaacuaccacuacgaggagugcagcugcuaccccgacuccagcgagaucacgugcgugugccgggacaacuggcacggcuccaaccgcccgugggucagcuucaaccagaaccucgaguaccagaucggguacaucugcuccggcaucuucggggacaacccccggcccaacgacaagaccggcagcugcggccccguguccagcaacggggccaacggcgugaagggguucuccuucaaguacggcaacggggucuggaucggccgcaccaagagcaucagcucccggaacggcuucgagaugaucugggacccgaacggguggaccggcaccgacaacaacuucagcgugaagcaggacaucaucgggaucaacgagugguccggcuacagcggguccuucgugcagcaccccgagcugaccggccuggacugcauccgccccugcuucugggucgagcucauccggggccgccccaaggagaacacgaucuggaccagcggguccagcaucuccuucugcggcgugaacagcgacaccgucgggugguccuggccggacggcgccgagcugcccuucaccaucgacaaguga

SEQ ID NO: 85066 - RNA, 1410 nt, Artificial Sequence; identical to SEQ ID NO: 84281
  derived and/or modified CDS sequence (opt1) from neuraminidase__InfluenzaA__AEO72179

SEQ ID NO: 85067 - RNA, 1350 nt, Artificial Sequence
  derived and/or modified CDS sequence (opt1) from neuraminidase__InfluenzaA__AEO88957
augaaccccaaccagaagaucaucaccaucggcagcaucugcauggugaucgggaucgucucccugaugcuccagaucggcaacaugaucagcaucugggugucccacagcacccagacggggaaccagcaccaggccgagccgauccgcaacaccaacuuccugaccgagaacgccguggcguccgucacccuggccggcaacagcucccucugccccauccgggggugggccgugcacagcaaggacaacuccauccgcaucggcagcaagggcgacguguucgucauccgggagcccuucaucuccugcagccaccuggagugccgcacguucuuccugacccagggggcccuccugaacgacaagcacuccaacggcaccgugaaggaccggagcccccaccgcacccugauguccugcccggugggggaggcccccagccccuacaacucccgguucgagagcgucgcgugguccgccagcgccugccacgacggcacgagcuggcucaccaucgggaucuccggccccgacaacggcgccguggcggugcugaaguacaacgggaucaucaccgacaccaucaagagcuggcgcaacaacauccugcggacgcaggaguccgagugcgccugcgucaacggcagcugcuucaccgugaugaccgacgggccguccaacggccaggccagcuacaagaucuucaagauggagaagggcaagguggucaaguccguggagcucaacgcccccaacuaccacuacgaggagugcagcugcuaccccgacgccggggagaucaucugcgugugccgcgacaacuggcacggcuccaaccggcccugggucagcuucaaccagaaccuggaguaccagaucggguacaucugcuccggcguguucggggacaacccgcgccccaacgacggcaccggcagcugcgggcccgugucccccaacggcgcguacgggaucaagggcuucagcuucaaguacgggaacggcgucuggaucggccggacgaaguccaccaacagccgcuccggguucgagaugaucugggacccgaacggcuggaccgggaccgacagcaacuucuccgugaagcaggacaucguggccaucacggacuggagcggcuacagcggguccuucguccagcaccccgagcugaccggccucgacugcauccggcccugcuucuggguggagcugauccgcggccggcccaaggagagcaccaucuggaccuccgggagcuccaucagcuucugcggcgucaacuccgacacggugagcugguccuggccggacggggccgagcugcccuucaccaucgacaaguga

SEQ ID NO: 85068 - RNA, 1350 nt, Artificial Sequence
  derived and/or modified CDS sequence (opt1) from neuraminidase__InfluenzaA__AEO88965
augaaccccaaccagaagaucaucaccaucggcagcaucugcauggugaucgagaucgucucccugaugcuccagaucgggaacaugaucagcaucugggugucccacagcauccagaccaagaaccagcgccaggccgagccgaucuccaacacgaaguuccugaccgagaaggccguggcgagcgucacccuggccggcaacuccagccucugccccaucuccgggugggccgugcacagcaaggacaacuccauccggaucggcagcaagggggacguguucgucauccgcgagcccuucaucuccugcagccaccuggagugccggaccuucuuccugacgcagggcgcccuccugaacgacaagcacuccaacggcaccgugaaggaccgcagcccccaccggacccugauguccugcccggugggggaggcccccagccccuacaacucccgcuucgagagcgucgcguggagcgccuccgccugccacgacggcaccagcuggcucacgaucgggaucuccggccccgacaacggggccguggcggugcugaaguacaacggcaucaucaccgacaccaucaagagcuggcggaacaacauccugcgcacccaggaguccgagugcgccugcgucaacggcagcugcuucacggugaugaccgacgggccguccaacggccaggccagcuacaagaucuucaagauggagaaggggaagguggucaaguccguggagcucgacgcccccaacuaccacuacgaggagugcagcugcuaccccgacgccggcgagaucacgugcgugugccgggacaacuggcacggcuccaaccgccccugggucagcuucaaccagaaccuggaguaccagaucggguacaucugcuccggcguguucggggacaacccgcggcccaacgacggcaccgggagcugcggccccgugucccccaacggcgcguacggggucaagggcuucagcuucaaguacgggaacggcguguggaucgggcgcaccaaguccaccaacagccgguccggcuucgagaugaucugggacccgaacggcuggaccgggaccgacagcagcuucuccgugaagcaggacaucgucgccaucacggacuggagcggcuacuccgggagcuucgugcagcaccccgagcugaccggccucaacugcauccgccccugcuucugggucgagcuggugcgggggcgccccaaggaguccaccaucuggaccagcggcuccagcaucuccuucugcggcgugaacagcgacacggucgggugguccuggccggacggcgccgagcugcccuucaccaucgacaaguga

SEQ ID NO: 85069 - RNA, 1350 nt, Artificial Sequence
  derived and/or modified CDS sequence (opt1) from neuraminidase__InfluenzaA__AEO88973
augaaccccaaccagaagaucaucaccaucggcagcaucugcauggugaucgggaucgucucccugaugcuccagaucggcaacaugaucagccugugggugucccacagcauccagaccgggaaccagcaccagguggagccgaucuccaacacgaacuuccugaccgagaaggccgucgccagcgugacccucgcgggcaacuccagccugugccccauccgcgggugggccgugcacuccaaggacaacagcauccggaucggcuccaagggcgacgucuucgugauccgcgagcccuucaucagcugcucccaccuggagugccggaccuucuuccucacgcagggggcccugcugaacgacaagcacagcaacggcaccgugaaggaccgcagcccccaccggacccucaugagcugcccggucggggaggcccccucccccuacaacagccgcuucgaguccguggccuggagcgcgagcgccugccacgacggcaccuccuggcugacgaucgggaucagcggccccgacaacggcgccguggccguccugaaguacaacgggaugaucaccgacaccaucaaguccuggcggaacaacauccuccgcacccaggagagcgagugcgcgugcgugaacggcuccugcuucacggugaugaccgacgggccgagcaacggccaggccuccuacaagaucuucaagauggagaagggccgggucgugaaguccguggagcuggacgcccccaacuaccacuacgaggagugcuccugcuaccccgacgccggggagaucacgugcgucugccgcgacaacuggcacggcagcaaccggcccuggguguccuucaaccagaaccuggaguaccagaucggguacaucugcagcggcguguucggggacaacccgcgccccaacgacggcaccggcuccugcgggcccgucagccccaacggcgccuacggggugaagggcuucuccuucaaguacgggaacggcguguggaucggccggaccaagagcccgaacucccgcagcggguucgagaugaucugggaccccaacggcuggaucgagaccgacuccagcuucagcgucaagcaggacaucguggcgaucaccgacugguccggguacagcggcuccuucguccagcaccccgagcucaccgggcuggacugcauccggcccugcuucuggguggagcugauccgcggccggccgaaggagagcacgaucuggaccuccggcagcuccaucagcuucugcggggugaacuccgacaccgucagcugguccuggcccgacggcgccgagcuccccuucaccaucgacaaguga

SEQ ID NO: 85070 - RNA, 1350 nt, Artificial Sequence
  derived and/or modified CDS sequence (opt1) from neuraminidase__InfluenzaA__AEO88982
augaaccccaaccagaagaucaucaccaucggcagcaucugcauggugaucgggaucgucucccugaugcuccagaucggcaacaugaucagcaucugggugucccacagcauccagaccgggaaccagcaccaggccgagccgauccgcaacacgaacuuccugaccgagaacgccguggcguccgucacccuggccggcaacagcucccucugccccgugcgggggugggccgugcacagcaaggacaacuccauccgcaucggcagcaagggcgacgucuucgugauccgggagcccuucaucuccugcagccaccuggagugccgcaccuucuuccugacgcagggggcccuccugaacgacaagcacuccaacggcaccgugaaggaccggagcccccaccgcacccugauguccugcccggucggggaggcccccagccccuacaacucccgguucgagagcguggcgugguccgccagcgccugccacgacggcaccagcuggcucacgaucgggaucuccggccccgacaacggcgccguggcgguccugaaguacaacgggaucaucaccgacaccaucaagagcuggcgcaacaacauccugcggacccaggaguccgagugcgccugcgugaacggcagcugcuucacggugaugaccgacgggccguccaacggccaggccagcuacaagaucuucaagauggagaagggcaaggucgugaaguccguggagcucaacgcccccaacuaccacuacgaggagugcagcugcuaccccgacgccggggagaucacgugcgucugccgcgacaacuggcacggcuccaaccggcccugggugagcuucaaccagaaccuggaguaccagaucggguacaucugcuccggcaucuucggggacaacccgcgcccccacgacggcaccggcagcugcgggcccgugucccccaacggcgcguacgggaucaagggcuucagcuucaaguacgggaacggcgucuggaucggccggaccaaguccaccaacagccgcuccggguucgagaugaucugggacccgaacggcuggaccgggaccgacagcaacuucuccgugaagcaggacaucguggccaucacggacuggagcggcuacagcggguccuucguccagcaccccgagcugaccggccucgacugcauccggcccugcuucuggguggagcugauccgcggccggcccaaggagagcaccaucuggaccuccgggagcuccaucagcuucugcggcgucaacuccgacacggugagcugguccuggccggacgacgccgagcugcccuucaccaucgacaaguga

SEQ ID NO: 85071 - RNA, 1350 nt, Artificial Sequence
  derived and/or modified CDS sequence (opt1) from neuraminidase__InfluenzaA__AEO88990
augaaccccaaccagaagaucaucaccaucggcagcaucugcauggugaucgggaucgucucccugaugcuccagaucggcaacaugaucagcaucugggugucccacagcauccagaccgggaaccagcaccaggccgagccgauccgcaacacgaacuuccugaccgagaacgccguggcguccgucacccuggccggcaacagcucccucugccccgugcgggggugggccgugcacagcaaggacaacuccauccgcaucggcagcaagggcgacgucuucgugauccgggagcccuucaucuccugcagccaccuggagugccgcaccuucuuccugacgcagggggcccuccugaacgacaagcacuccaacggcaccgugaaggaccggagcccccaccgcacccugauguccugcccggucggggaggcccccagccccuacaacucccgguucgagagcguggcgugguccgccagcgccugccacgacggcaccagcuggcucacgaucgggaucuccggccccgacaacggcgccguggcgguccugaaguacaacgggaucaucaccgacaccaucaagagcuggcgcaacaacauccugcggacccaggaguccgagugcgccugcgugaacggcagcugcuucacggugaugaccgacgggccguccaacggccaggccagcuacaagaucuucaagauggagaagggcaaggucgugaaguccguggagcucaacgcccccaacuaccacuacgaggagugcagcugcuaccccgacgccggggagaucacgugcgucugccgcgacaacuggcacggcuccaaccggcccugggugagcuucaaccagaaccuggaguaccagaucggguacaucugcuccggcguguucggggacaacccgcgccccaacgacggcaccggcagcugcgggcccgucucccccaacggcgcguacgggaucaagggcuucagcuucaaguacgggaacggcguguggaucggccggaccaaguccaccaacagccgcuccggguucgagaugaucugggacccgaacggcuggaccgggaccgacagcaacuucuccgugaagcaggacaucgucgccaucacggacuggagcggcuacagcggguccuucgugcagcaccccgagcugaccggccucgacugcauccggcccugcuucugggucgagcugauccgcggccggcccaaggagagcaccaucuggaccuccgggagcuccaucagcuucugcggcgugaacuccgacacggugagcugguccuggccggacgacgccgagcugcccuucaccaucgacaaguga

SEQ ID NO: 85072 - RNA, 1350 nt, Artificial Sequence
  derived and/or modified CDS sequence (opt1) from neuraminidase__InfluenzaA__AEO88998
augaaccccaaccagaagaucaucaccaucggcagcaucugcauggugaucgggaucgucucccugaugcuccagaucggcaacaugaucagcaucugggugucccacagcauccagaccgggaaccagcaccaggccgagccgauccgcaacacgaacuuccugaccgagaacgccguggcguccgucacccuggccggcaacagcucccucugccccauccgggggugggccgugcacagcaaggacaacuccauccgcaucggcagcaagggcgacguguucgucauccgggagcccuucaucuccugcagccaccuggagugccgcaccuucuuccugacgcagggggcccuccugaacgacaagcacuccaacggcaccgugaaggaccggagcccccaccgcacccugauguccugcccggugggggaggcccccagccccuacaacucccgguucgagagcgucgcgugguccgccagcgccugccacgacggcaccagcuggcucacgaucgggaucuccggccccgacaacggcgccguggcggugcugaaguacaacgggaucaucaccgacaccaucaagagcuggcgcaacaacauccugcggacccaggaguccgagugcgccugcgucaacggcagcugcuucacggugaugaccgacgggccguccaacgagcaggccagcuacaagaucuucaagauggagaagggcaagguggucaaguccguggagcucaacgcccccaacuaccacuacgaggagugcagcugcuaccccgacgccggcgagaucaucugcgugugccgcgacaacuggcacggguccaaccggcccugggucagcuucaaccagaaccuggaguaccagaucggcuacaucugcuccgggguguucggcgacaacccgcgccccaacgacgggaccggcagcugcggccccgugucccccaacggggcguacggcaucaagggguucagcuucaaguacggcaacggggucuggaucggccggaccaaguccacgaacagccgcuccggcuucgagaugaucugggacccgaacggguggaccggcaccgacagcaacuucuccgugaagcaggacaucguggccaucaccgacuggagcggguacagcggcuccuucguccagcaccccgagcugacggggcucgacugcauccggcccugcuucuggguggagcugauccgcggccggcccaaggagagcaccaucuggaccuccggcagcuccaucagcuucugcggggucaacuccgacaccgugagcugguccuggccggacggcgccgagcugcccuucacgaucgacaaguga

SEQ ID NO: 85073 - RNA, 1350 nt, Artificial Sequence
  derived and/or modified CDS sequence (opt1) from neuraminidase__InfluenzaA__AEO89006
augaaccccaaccagaagaucaucaccaucggcagcaucugcauggugaucgggaucgucucccugaugcuccagaucggcaacaugaucagcaucugggugucccacagcauccagaccgggaaccagcaccaggccgagccgauccgcaacacgaacuuccugaccgagaacgccguggcguccgucacccuggccggcaacagcucccucugccccgugcgggggugggccgugcacagcaaggacaacuccauccgcaucggcagcaagggcgacgucuucgugauccgggagcccuucaucuccugcagccaccuggagugccgcaccuucuuccugacgcagggggcccuccugaacgacaagcacuccaacggcaccgugaaggaccggagcccccaccgcacccugauguccugcccggucggggaggcccccagccccuacaacucccgguucgagagcguggcgugguccgccagcgccugccacgacggcaccagcuggcucacgaucgggaucuccggccccgacaacggcgccguggcgguccugaaguacaacgggaucaucaccgacaccaucaagagcuggcgcaacaacauccugcggacccaggaguccgagugcgccugcgugaacggcagcugcuucacggugaugaccgacgggccguccaacggccaggccagcuacaagaucuucaagauggagaagggcaaggucgugaaguccguggagcucaacgcccccaacuaccacuacgaggagugcagcugcuaccccgacgccggggagaucacgugcgucugccgcgacaacuggcacggcuccaaccggcccugggugagcuucaaccagaaccuggaguaccagaucggguacaucugcuccggcguguucggggacaacccgcgccccaacgacggcaccggcagcugcgggcccgucucccccaacggcgcguacgggaucaagggcuucagcuucaaguacgggaacggcguguggaucggccggaccaaguccaccaacagccgcuccggguucgagaugaucugggacccgaacggcuggaccgggaccgacagcgacuucuccgugaagcaggacaucaucgccaucacggacuggagcggcuacagcggguccuucguccagcaccccgagcugaccggccucgacugcauccggcccugcuucuggguggagcugauccgcggccggcccaaggagagcaccaucuggaccuccgggagcuccaucagcuucugcggcgucaacuccgacacggugagcugguccuggccggacggggccgagcugcccuucaccaucgacaaguga

SEQ ID NO: 85074 - RNA, 1350 nt, Artificial Sequence
  derived and/or modified CDS sequence (opt1) from neuraminidase__InfluenzaA__AEO89023
augaaccccaaccagaagaucaucaccaucggcagcaucugcauggugaucgggaucgucucccugaugcuccagaucggcaacauggugagccugugggugucccacagcauccagaccgggaaccagcaccaggucgagccgaucuccaacacgaacuuccugaccgagaaggccguggccagcgugacccucgcgggcaacuccagccugugccccauccgcgggugggccguccacuccaaggacaacagcauccggaucggcuccaagggcgacguguucgugauccgcgagcccuucaucagcugcucccaccuggagugccggaccuucuuccucacgcagggggcccugcugaacgacaagcacagcaacggcaccgucaaggaccgcagcccccaccggacccucaugagcugcccggugggggaggcccccucccccuacaacagccgcuucgaguccguggccuggagcgcgagcgccugccacgacggcaccuccuggcugacgaucgggaucagcggccccgacaacggcgccgucgccgugcugaaguacaacgggaugaucaccgacaccaucaaguccuggcggaacaacauccuccgcacccaggagagcgagugcgcgugcgugaacggcuccugcuucacggucaugaccgacgggccgagcaacggccaggccuccuacaagaucuucaagauggagaagggcaagguggugaaguccgucgagcuggacgcccccaacuaccacuacgaggagugcuccugcuaccccgacgccggggagaucacgugcgugugccgggacaacuggcacggcagcaaccgccccuggguguccuucaaccagaaccuggaguaccagaucggguacaucugcagcggcgucuucggggacaacccgcggcccaacgacggcaccggcuccugcgggcccgugagccccaacggcgccuacggggugaagggcuucuccuucaaguacgggaacggcgucuggaucggccgcaccaagagcccguccagccgguccggguucgagaugaucugggaccccaacggcuggaccgagaccgacagcagcuucuccgugaagcaggacaucgucgcgaucaccgacuggagcggguacuccggcagcuucgugcagcaccccgagcucacggggcuggacugcauccgccccugcuucuggguggagcugauccggggccgcccgaaggaguccaccaucuggaccagcggcuccagcaucuccuucugcggggucaacagcgacaccguguccuggagcuggcccgacggcgccgagcuccccuucacgaucgacaaguga

SEQ ID NO: 85075 - RNA, 1350 nt, Artificial Sequence
  derived and/or modified CDS sequence (opt1) from neuraminidase__InfluenzaA__AEO89032
augaaccccaaccagaagaucaucaccaucggcagcaucugcauggugaucgggaucgucucccugaugcuccagaucggcaacaugaucagcaucugggugucccacagcauccagaccgggaaccagcaccaggccgagccgauccgcaacacgaacuuccugaccgagaacgccguggcguccgucacccuggccggcaacagcucccucugccccgugcgggggugggccgugcacagcaaggacaacuccauccgcaucggcagcaagggcgacgucuucgugauccgggagcccuucaucuccugcagccaccuggagugccgcaccuucuuccugacgcagggggcccuccugaacgacaagcacuccaacggcaccgugaaggaccggagcccccaccgcacccugauguccugcccggucggggaggcccccagccccuacaacucccgguucgagagcguggcgugguccgccagcgccugccacgacggcaccagcuggcucacgaucgggaucuccggccccgacaacggcgccguggcgguccugaaguacaacgggaucaucaccgacaccaucaagagcuggcgcaacaacauccugcggacccaggaguccgagugcgccugcgugaacggcagcugcuucacggugaugaccgacgggccguccaacggccaggccagcuacaagaucuucaagauggagaagggcaaggucgugaaguccguggagcucaacgcccccaacuaccacuacgaggagugcagcugcuaccccgacgccggggagaucacgugcgucugccgcgacaacuggcacggcuccaaccggcccugggugagcuucaaccagaaccuggaguaccagaucggguacaucugcuccggcguguucggggacaacccgcgccccaacgacggcaccggcagcugcgggcccgucucccccaacggcgcguacgggaucaagggcuucagcuucaaguacgggaacggcguguggaucggccggaccaaguccaccaacagccgcuccggguucgagaugaucugggacccgaacggcuggaccgggaccgacagcaacuucuccgugaagcaggacaucgucgccaucacggacuggagcggcuacagcggguccuucgugcagcaccccgagcugaccggccucgacugcauccggcccugcuucugggucgagcugauccgcggccggcccaaggagagcaccaucuggaccuccgggagcuccaucagcuucugcggcgugaacuccgacacggugagcugguccuggccggacggggccgagcugcccuucaccaucgacaaguga

SEQ ID NO: 85076 - RNA, 1350 nt, Artificial Sequence
  derived and/or modified CDS sequence (opt1) from neuraminidase__InfluenzaA__AEO89041
augaaccccaaccagaagaucaucaccaucggcagcaucugcauggugaucgggcuggucucccucaugcugcagaucggcaacaugaucagcaucugggugucccacagcauccagaccgggaaccagcaccaggccgagccgauccgcaacacgaacuuccugaccgagaacgccguggcguccgucacccucgccggcaacagcucccugugccccgugcgggggugggccgugcacagcaaggacaacuccauccgcaucggcagcaagggcgacgucuucgugauccgggagcccuucaucuccugcagccaccuggagugccgcaccuucuuccucacgcagggggcccugcugaacgacaagcacuccaacggcaccgugaaggaccggagcccccaccgcacccucauguccugcccggucggggaggcccccagccccuacaacucccgguucgagagcguggcgugguccgccagcgccugccacgacggcaccagcuggcugacgaucgggaucuccggccccgacaacggcgccguggcgguccugaaguacaacgggaucaucaccgacaccaucaagagcuggcgcaacaacauccuccggacccaggaguccgagugcgccugcgugaacggcagcugcuucacggugaugaccgacgggccguccaacggccaggccagcuacaagaucuucaagauggagaagggcaaggucgugaaguccguggagcugaacgcccccaacuaccacuacgaggagugcagcugcuaccccgacgccggggagaucacgugcgucugccgcgacaacuggcacggcuccaaccggcccugggugagcuucaaccagaaccuggaguaccagaucggguacaucugcuccggcguguucggggacaacccgcgccccaacgacggcaccggcagcugcgggcccgucucccccaacggcgcguacgggaucaagggcuucagcuucaaguacgggaacggcguguggaucggccggaccaaguccaccaacagccgcuccggguucgagaugaucugggacccgaacggcuggaccgggaccgacagcaacuucuccgugaagcaggacaucgucgccaucacggacuggagcggcuacagcggguccuucgugcagcaccccgagcucaccggccuggacugcauccggcccugcuucuggaucgagcugauccgcggccggcccaaggagagcaccaucuggaccuccgggagcuccaucagcuucugcggcgucaacuccgacacggugagcugguccuggccggacggggccgagcuccccuucaccaucgacaaguga

SEQ ID NO: 85077 - RNA, 1350 nt, Artificial Sequence
  derived and/or modified CDS sequence (opt1) from neuraminidase__InfluenzaA__AEO89050
augaaccccaaccagaagaucaucaccaucggcagcaucugcauggugaucgggaucgucucccugaugcuccagaucggcaacaugaucagcaucugggugucccacagcauccagaccgggaaccagcaccaggccgagccgauccgcaacacgaacuuccugaccgagaacgccguggcguccgucacccuggccggcaacagcucccucugccccauccgggggugggccgugcacagcaaggacaacuccauccgcaucggcagcaagggcgacguguucgucauccgggagcccuucaucuccugcagccaccuggagugccgcaccuucuuccugacgcagggggcccuccugaacgacaagcacuccaacggcaccgugaaggaccggagcccccaccgcacccugauguccugcccgaugggggaggcccccagccccuacaacucccgguucgagagcguggcgugguccgccagcgccugccacgacggcaccagcuggcucacgaucgggaucuccggccccgacaacggcgccgucgcggugcugaaguacaacgggaucaucaccgacaccaucaagagcuggcgcaacaacauccugcggacccaggaguccgagugcgccugcgugaacggcagcugcuucacggucaugaccgacgggccguccaacggccaggccagcuacaagaucuucaagauggagaagggcaagguggugaaguccgucgagcucaacgcccccaacuaccacuacgaggagugcagcugcuaccccgacgccggggagaucaucugcgugugccgcgacaacuggcacggcuccaaccggcccugggugagcuucaaccagaaccuggaguaccagaucggguacaucugcuccggcgucuucggggacaacccgcgccccaacgacggcaccggcagcugcgggcccgugucccccaacggcgcguacgggaucaagggcuucagcuucaaguacgggaacggcguguggaucggccggaccaaguccacgaacagccgcuccggguucgagaugaucugggacccgaacggcuggaccgggaccgacagcgacuucuccgucaagcaggacaucguggccaucaccgacuggagcggcuacagcggguccuucgugcagcaccccgagcugacgggccucgacugcauccggcccugcuucugggucgagcugauccgcggccggcccaaggagagcaccaucuggaccuccgggagcuccaucagcuucugcggcgugaacuccgacaccgucagcugguccuggccggacggggccgagcugcccuucacgaucgacaaguga

SEQ ID NO: 85078 - RNA, 1350 nt, Artificial Sequence
  derived and/or modified CDS sequence (opt1) from neuraminidase__InfluenzaA__AEO89058
augaaccccaaccagaagaucaucaccaucggcagcaucugcauggugaucgggaucgucucccugaugcuccagaucggcaacaugaucagcaucugggugucccacagcauccagaccgggaaccagcgccaggccgagccgaucuccaacacgaaguuccugaccgagaaggccguggcgagcgucacccuggccggcaacuccagccucugccccaucuccgggugggccguguacagcaaggacaacuccauccggaucggcagccgcggcgacguguucgucauccgggagcccuucaucuccugcagccaccuggagugccgcaccuucuuccugacgcagggggcccuccugaacgacaagcacuccaacggcaccgugaaggaccggagcccccaccgcacccugauguccugcccggugggggaggcccccagccccuacaacucccgguucgagagcgucgcguggagcgccuccgccugccacgacggcaccagcuggcucacgaucgggaucuccggccccgacaacggcgccguggcggugcugaaguacaacgggaucaucaccgacaccaucaagagcuggcgcaacaacauccugcggacccaggaguccgagugcgccugcgucaacggcagcugcuucacggugaugaccgacgggccguccaacggccaggccagcuacaagaucuucaagauggagaagggcaagguggucaaguccguggagcucgacgcccccaacuaccacuacgaggagugcagcugcuaccccgacgccggggagaucacgugcgugugccgcgacaacuggcacggcuccaaccggcccugggucagcuucaaccagaaccuggacuaccagaucggguacaucugcuccggcguguucggggacaacccgcgccccaacgacggcaccggcagcugcgggcccgugucccccaacggcgcguacggggucaagggcuucagcuucaaguacgggaacggcguguggaucggccggaccaaguccaccaacagccgcuccggguucgagaugaucugggacccgaacggcuggaccgggaccgacagcagcuucuccgugaagcaggacaucgucgccaucacggacuggagcggcuacuccgggagcuucgugcagcaccccgagcugaccggccucgacugcauccggcccugcuucugggucgagcugauccgcggccggcccaaggaguccaccaucuggaccagcggguccagcaucuccuucugcggcgugaacagcgacacgguguccuggagcuggccggacggggccgagcugcccuucaccaucgacaaguga

SEQ ID NO: 85079 - RNA, 1350 nt, Artificial Sequence
  derived and/or modified CDS sequence (opt1) from neuraminidase__InfluenzaA__AEO89075
augaaccccaaccagaagaucaucaccaucggcagcaucugcauggugaucgggaucgucucccugaugcuccagaucggcaacaugaucagcaucugggugucccacagcauccagcgcgggaaccugaaccagguggagccgaucuccaacaccaacuuccugacggagaaggccgucgccagcgugacccucgcgggcaacuccagccugugccccauccgggggugggccauccacuccaaggacaacagcauccgcaucggcuccaagggcgacguguucgucauccgggagcccuucaucagcugcucccaccuggagugccgcaccuucuuccucacccagggggcccugcugaacgacaagcacagcaacggcacggugaaggaccggagcccccaccgcacccucauguccugcccggugggggagguccccucccccuacaacagccgguucgaguccguggccuggagcgccagcgcgugccacgacggcaccuccuggcugaccaucgggaucagcggccccgacaacggcgccguggccgucgugaaguacaacgggaucaucacggacaccaucaaguccuggcgcaacaacauccugcggacccaggagagcgagugcgccugcgugaacggcuccugcuucaccgucaugacggacgggccgagcaacggccaggcguccuacaagaucuucaagauggagaagggcaaggugaucaagagcguggagcucgacgcccccaacuaccacuacgaggagugcuccugcuaccccgacgccggggagaucacgugcgucugccgcgacaacuggcacggcagcaaccggcccuggguguccuucaaccagaaccuggaguaccagaucggguacaucugcagcggcguguucggggacaacccgcgccccaacgacggcaccggcuccugcgggcccgucagccccaacggcgccuacggggugaagggcuucuccuucaaguacgggaacggcguguggaucggccggaccaagagcccgaacucccgcagcggguucgagaugaucugggaccccaacggcugguccgagaccgacagcagcuucuccgucaagcaggacaucguggccaucaccgacuggagcggguacuccggcagcuucguccagcaccccgagcugaccgggcucgacugcauccggcccugcuucuggguggagcugauccgcggccggccgaaggaguccaccaucuggacgagcggcuccagcaucuccuucugcggggugaacagcgacaccgucuccuggagcuggcccgacggcgcggagcugcccuucaccaucgacaaguga

SEQ ID NO: 85080 - RNA, 1350 nt, Artificial Sequence
  derived and/or modified CDS sequence (opt1) from neuraminidase__InfluenzaA__AEO89084
augaaccccaaccagaagaucaucaccaucggcagcaucugcauggugaucgggaucgucucccugaugcuccagaucggcaacaugaucagcaucuggaucuccuacagcauccagaccgggaaccagcaccaggccgagccgacgcgcaacgccaccuuccugaccgagaacgcgguggccuccgugacccuggccggcaacagcucccucugccccguccgggggugggccgugcacagcaaggacaacuccauccgcaucggcagcaagggcgacguguucgucauccgggagcccuucaucuccugcagccaccuggagugccgcacguucuuccugacccagggggcccuccugaacgacaagcacuccaacggcaccgugaaggaccggagcccccaccgcacccugauguccugcccggugggggaggcgcccagccccuacaacucccgguucgagagcgucgccugguccgccagcgccugccacgacggcacgagcuggcucaccaucgggaucuccggccccgacaacggcgcgguggccgugcugaaguacaacgggaucaucaccgacaccaucaagagcuggcgcaacaacauccugcggacgcaggaguccgagugcgccugcgucaacggcagcugcuucaccgugaugaccgacgggccguccgacggccaggccagcuacaagaucuucaagauggagaagggcaagguggucaaguccguggagcucaucgcccccaacuaccacuacgaggagugcagcugcuaccccgacgcgggggagaucacgugcgugugccgcgacaacuggcacggcuccaaccggcccugggucagcuucaaccagaaccuggaguaccagaucggguacaucugcuccggcguguucggggacaacccgcgccccaacgacggcaccggcagcugcgggcccgugucccccaacggcgccuacgggaucaagggcuucagcuucaaguacgggaacggcgucuggaucggccggaccaaguccaccaacagccgcuccggguucgagaugaucugggacccgaacggcuggaccgagacggacagcaacuucuccgugaagcaggacaucguggccaucaccgacuggagcggguacagcggcuccuucguccagcaccccgagcugaccgggcucgacugcauccggcccugcuucuggguggagcugauccgcggccggcccaaggagagcaccaucuggacguccggcagcuccaucagcuucugcggggucaacuccgacaccgugagcugguccuggccggacggcgccgagcugcccuucaccaucgacaaguga

SEQ ID NO: 85081 - RNA, 1350 nt, Artificial Sequence
  derived and/or modified CDS sequence (opt1) from neuraminidase__InfluenzaA__AEO89093
augaaccccaaccagaagaucaucaccaucggcagcaucugcauggugaucgggaucgucucccugaugcuccagaucggcaacaugaucagccugugggugucccacagcauccagaccgggaaccagcaccagguggagccgaucuccaacacgaacuuccuggucgagaaggccguggccagcgugacccucgcgggcaacuccagccugugccccauccgcgggugggccguccacuccaaggacaacagcauccggaucggcuccaagggcgacguguucgugauccgcgagcccuucaucagcugcucccaccuggagugccggaccuucuuccucacccagggggcccugcugaacgacaagcacagcaacggcacggucaaggaccgcagcccccaccggacccucaugagcugcccggugggggaggcccccucccccuacaacagccgcuucgaguccguggccuggagcgcgagcgccugccacgacggcaccuccuggcugaccaucgggaucagcggccccgacaacggcgccgucgccgugcugaaguacaacgggaugaucacggacaccaucaaguccuggcggaacaacauccuccgcacccaggagagcgagugcgcgugcgugaacggcuccugcuucaccgucaugacggacgggccgagcaacggccaggccuccuacaagaucuucaagauggagaagggccggguggugaaguccgucgagcuggacgcccccaacuaccacuacgaggagugcuccugcuaccccgacgccggggagaucacgugcgugugccgcgacaacuggcacggcagcaaccggcccuggguguccuucaaccagaaccuggaguaccagaucggguacaucugcagcggcgucuucggggacaacccgcgccccaacgacggcaccggcuccugcgggcccgugagcuccaacggcgccuacggggugaagggcuucagcuucaaguacgggaacggcgucuggaucggccggaccaagucccccaacagccgcuccggguucgagaugaucugggacccgaacggcuggaccgagaccgacagcagcuucuccgugaagcaggacaucgucgcgaucaccgacuggagcggguacuccggcagcuucgugcagcaccccgagcucaccgggcuggacugcauccggcccugcuucuggguggagcugauccgcggccggcccaaggaguccacgaucuggaccagcggcuccagcaucuccuucugcggggucaacagcgacaccguguccuggagcuggccggacggcgccgagcuccccuucaccaucgacaaguga

SEQ ID NO: 85082 - RNA, 1350 nt, Artificial Sequence
  derived and/or modified CDS sequence (opt1) from neuraminidase__InfluenzaA__AEO89102
augaaccccaaccagaagaucaucaccaucggcagcaucugcauggugaucgggaucgucucccugaugcuccagaucggcaacaugaucagcaucuggaucucccacagcauccagaccgggaaccagaaccagguggagccgaucuccaacacgaacuuccugaccgagaaggccguggccagcgucauccuggcgggcaacuccagccucugccccauccgcgggugggccauccacuccaaggacaacagcauccggaucggcuccaagggcgacguguucgugauccgcgagcccuucaucagcugcucccaccuggagugccggaccuucuuccugacccagggggcccuccugaacgacaagcacagcaacggcacggucaaggaccgcagcccccaccggacccugauguccugcccggugggggaggcccccucccccuacaacagccgcuucgaguccguggccuggagcgcgagcgccugccacgacggcaccuccuggcucaccaucgggaucagcggccccgacuccggcgccgucgccgugcugaaguacaacgggaucaucacggacaccaucaagagcuggcggaacaacauccugcgcacccaggaguccgagugcgcgugcgugaacggcagcugcuucaccgucaugacggacgggccguccaacggccaggccagcuacaagaucuucaagauggagaagggcaaggugaucaaguccguggagcucgacgcccccaacuaccacuacgaggagugcagcugcuaccccgacgccggggagaucacgugcgucugccgggacaacuggcacggcuccaaccgccccugggugagcuucaaccagaaccuggaguaccagaucggguacaucugcuccggcguguucggggacaacccgcggcccaacgacggcaccggcagcugcgggcccgucucccacaacggcgccuacggggugaagggcuucagcuucaaguacgggaacggcguguggaucggccgcaccaagucccccaacagccgguccggguucgagaugaucugggacccgaacggcuggagcgagaccgacagcuccuucagcgucaagcaggacaucguggcgaucaccgacugguccggguacagcggcuccuucgugcagcaccccgagcugaccgggcucgacugcauccgccccugcuucugggucgagcugauccggggccgccccaaggagagcaccguguggacguccggcagcuccaucagcuucugcggggucaacuccgacaccgugagcugguccuggccggacggcgccgagcugcccuucaccaucgacaaguga

SEQ ID NO: 85083 - RNA, 1350 nt, Artificial Sequence
  derived and/or modified CDS sequence (opt1) from neuraminidase__InfluenzaA__AEO89111
augaaccccaaccagaagaucaucaccaucggcagcaucugcauggugaucgggaucgucucccugaugcuccagaucggcaacaucaucagcaucugggugucccacagcauccagaccgggaaccagcaccaggacgagccgauccgcaacgccaacgugcugacggagaacgccgucgcguccgugacccuggccggcaacagcucccucugccccgugcgggggugggccguccacagcaaggacaacuccauccgcaucggcagcaagggcgacguguucgugauccgggagcccuucaucuccugcagccaccuggagugccgcaccuucuuccugacccagggggcccuccugaacgacaagcacuccaacggcacggucaaggaccggagcccccaccgcacccugauguccugcccggugggggaggcccccagccccuacaacucccgguucgagagcguggcgugguccgccagcgccugccacgacggcaccagcuggcucaccaucgggaucuccggccccgacaacggcgccgucgcggugcugaaguacaacgggaucaucacggacaccaucaagagcuggcgcaacaacauccugcggacccaggaguccgagugcgccugcgugaacggcagcugcuucaccgucaugacggacgggccguccaacggccaggccagcuacaagaucuucaagauggagaagggcaagguggugaaguccgucgagcucaacgcccccaacuaccacuacgaggagugcagcugcuaccccgacgccggggagaucacgugcgugugccgcgacaacuggcacggcuccaaccggcccugggugagcuucaaccagaaccuggaguaccagaucggguacaucugcuccggcgucuucggggacaacccgcgccccaacgacggcaccggcagcugcgaccccgugucccccaacggggcguacggcaucaagggguucagcuucaaguacggcaacgggguguggaucggccggaccaaguccaccaacagccgcuccggcuucgagaugaucugggacccgaacggguggaccgagaccgacagcaacuucuccgucaagcaggacaucguggccaucaccgacuggagcggcuacagcggguccuucguccagcaccccgagcugacgggccucgacugcauccggcccugcuucuggguggagcugauccgcgggcggcccaaggagagcaccaucuggaccuccggcagcuccaucagcuucugcggcgugaacuccgacaccgucagcugguccuggccggacggggccgagcugcccuucacgaucgacaaguga

SEQ ID NO: 85084 - RNA, 1350 nt, Artificial Sequence
  derived and/or modified CDS sequence (opt1) from neuraminidase__InfluenzaA__AEO89120
augaaccccaaccagaagaucaucaccaucggcagcaucugcauggugaucgggaucgucucccugaugcuccagaucggcaacaugaucagcaucugggugucccacagcauccagaccgggaaccagcaccaggccgagccgauccgcaacgccuccuuccugacggagaacgcgguggccagcgucacccuggccggcaacuccagccucugccccgugcgggggugggccgugcacuccaaggacaacagcauccgcaucggcuccaagggcgacgucuucgugauccgggagcccuucaucagcugcucccaccuggagugccgcaccuucuuccugacccagggggcccuccugaacgacaagcacagcaacggcacggugaaggaccggagcccccaccgcacccugaugagcugcccggucggggaggcgcccucccccuacaacagccgguucgaguccguggccuggagcgccagcgccugccacgacggcaucuccuggcucaccaucgggaucagcggccccgacaacggcgcgguggccguccugaaguacaacgggaucaucaccgacacgaucaaguccuggcgcaacaacauccugcggacccaggagagcgagugcgccugcgugaacggcuccugcuucaccgugaugaccgacgggccgagcaacggccaggccuccuacaagaucuucaagauggagaagggcaaggucgugaaguccguggagcucaacgcccccaacuaccacuacgaggagugcuccugcuaccccgacgcgggggagaucacgugcgucugccgcgacaacuggcacggcagcaaccggcccuggguguccuucaaccagaaccuggaguaccagaucggguacaucugcagcggcguguucggggacaacccgcgccccaacgacggcaccggcuccugcgggcccgucagccccaacggcgccuacgggaucaagggcuucuccuucaaguacgggaacggcguguggaucggccggaccaagagcaccaacucccgcagcggguucgagaugaucugggacccgaacggcugggccgagacggacuccaacuucagcgugaagcaggacaucgucgccaucaccgacuggagcggguacuccggcagcuucgugcagcaccccgagcugaccgggcucgacugcauccggcccugcuucugggucgagcugauccgcggccggcccaaggagggcaccaucuggacguccgggagcuccaucagcuucugcggcgugaacuccgacaccgugagcugguccuggccggacggggccgagcugcccuucaccaucgacaaguga

SEQ ID NO: 85085 - RNA, 1350 nt, Artificial Sequence
  derived and/or modified CDS sequence (opt1) from neuraminidase__InfluenzaA__AEO89129
augaaccccaaccagaagaucaucaccaucggcagcaucugcauggugaucgggaucgucucccugaugcuccagaucggcaacaucaucagcaucugggugucccacagcacccagacggggaaccagcaccaggacgagccgauccgcaacgccaacuuccugaccgagaacgccguggcguccgucacccuggccggcaacagcucccucugccccgugcgggggugggccgugcacagcaaggacaacuccauccgcgucggcagcaagggcgacguguucgugauccgggagcccuucaucuccugcagccaccuggagugccgcaccuucuuccugacgcagggggcccuccugaacgacaagcacuccaacggcaccgucaaggaccggagcccccaccgcacccugauguccugcccggugggggaggcccccagccccuacaacucccgguucgagagcguggcgugguccgccagcgccugccacgacggcaccagcuggcucacgaucgggaucuccggccccgacaacggcgccgucgcggugcugaaguacaacgggaucaucaccgacaccaucaagagcuggcgcaacaacauccugcggacccaggaguccgagugcgccugcgugaacggcagcugcuucacggucaugaccgacgggccguccaacggccaggccagcuacaagaucuucaagauggagaagggcaagguggugaaguccgucgagcucaacgcccccaacuaccacuacgaggagugcagcugcuaccccgacgccggggagaucacgugcgugugccgcgacaacuggcacggcuccaaccggcccugggugagcuucaaccagaaccuggaguaccagaucggguacaucugcuccggcgucuucggggacaacccgcgccccaacgacggcaccggcagcugcgaccccgugucccccaacggggcguacggcaucaagggguucagcuucaaguacggcaacgggguguggaucggccggaccaaguccaccaacagccgcuccggcuucgagaugaucugggacccgaacggguggaccgagaccgacagcaacuucuccgucaagcaggacaucguggccaucacggacuggagcggcuacagcggguccuucguccagcaccccgagcugaccggccucgacugcauccggcccugcuucuggguggagcugauccgcgggcggcccaaggagagcaccaucuggaccuccggcagcuccaucagcuucugcggcgugaacuccgacacggucagcugguccuggccggacggggccgagcugcccuucaccaucgacaaguga

SEQ ID NO: 85086 - RNA, 1350 nt, Artificial Sequence
  derived and/or modified CDS sequence (opt1) from neuraminidase__InfluenzaA__AEO89138
augaaccccaaccagaagaucaucaccaucggcagcaucugcauggugaccgggaucgucucccugaugcuccagaucggcaacaucaucagcaugugggugucccacagcauccagacgcgcaaccagcaccaggccgagccgauccggaacaccaacuuccugaccgagaacgccguggcguccgucacccugacggggaacagcucccucugccccauccgcggcugggccgugcacagcaaggacaacuccauccggaucgggagcaagggcgacguguucgucauccgcgagcccuucaucuccugcagccaccuggagugccggaccuucuuccugacccagggcgcccuccugaacgacaagcacuccaacgggaccgugaaggaccgcagcccccaccggacgcugauguccugcccggugggcgaggcccccagccccuacaacucccgcuucgagagcgucgccugguccgcgagcgccugccacgacgggaccagcuggcucaccaucggcaucuccgggcccgacaacggcgccguggccgugcugaaguacaacggcaucaucaccgacacgaucaagagcuggcggaacaacauccugcgcacccaggaguccgagugcgcgugcgucaacgggagcugcuucaccgugaugaccgacggcccguccaacgggcaggccagcuacaagaucuucaagauggagaagggcaagguggucaaguccguggagcucaacgcccccaacuaccacuacgaggagugcagcugcuaccccgacgccggcgagaucaucugcgugugccgggacaacuggcacggguccaaccgccccugggucagcuucaaccagaaccuggaguaccagaucggcuacaucugcuccgggguguucggcgacaacccgcggcccaacgacgggacgggcagcugcggccccgugucccccaacggggccuacggcaucaagggguucagcuucaaguacggcaacggggucuggaucggccgcaccaaguccaccaacagccgguccggcuucgagaugaucugggacccgaacggguggaccggcacggacaacgacuucagcgugaagcaggacaucguggcgaucaccgacugguccggguacagcggcagcuucguccagcaccccgagcugaccgggcucgacugcauccgccccugcuucuggguggagcugauccggggccgccccaaggaguccaccgucuggacgagcggcuccagcaucuccuucugcggggugaacagcgacaccguguccuggagcuggccggacggcgccgagcugcccuucaccaucgacaaguga

SEQ ID NO: 85087 - RNA, 1350 nt, Artificial Sequence
  derived and/or modified CDS sequence (opt1) from neuraminidase__InfluenzaA__AEO89156
augaaccccaaccagaagaucaucaccaucggcagcaucugcauggugaccgggaucgucucccugaugcuccagaucggcaacaucacgagcaugugggugucccacagcauccagacccgcaaccagcaccaggccgagccgauccggaacaccaacuuccugaccgagaacgccguggcguccgucacgcuggccgggaacagcucccucugccccauccgcggcugggccgugcacagcaaggacaacuccauccggaucgggagcaagggcgacguguucgucauccgcgagcccuucaucuccugcagccaccuggagugccggaccuucuuccugacccagggcgcccuccugaacgacaagcacuccaacgggaccgugaaggaccgcagcccccaccggacgcugauguccugcccggugggcgaggcccccagccccuacaacucccgcuucgagagcgucgcgugguccgccagcgccugccacgacgggaccagcuggcucaccaucggcaucuccgggcccgacaacggcgccguggcggugcugaaguacaacggcaucaucaccgacacgaucaagagcuggcggaacaacauccugcgcacccaggaguccgagugcgccugcgucaacgggagcugcuucaccgugaugaccgacggcccguccaacgggcaggccagcuacaagaucuucaagauggagaagggcaagguggucaaguccguggagcucaacgcccccaacuaccacuacgaggagugcagcugcuaccccgacgccggcgagaucaucugcgugugccgggacaacuggcacggguccaaccgccccugggucagcuucaaccagaaccuggaguaccagaucggcuacaucugcuccgggguguucggcgacaacccgcggcccaacgacgggacgggcagcugcggccccgugucccccaacggggcguacggcaucaagggguucagcuucaaguacggcaacggggucuggaucggccgcaccaaguccaccaacagccgguccggcuucgagaugaucugggacccgaacggguggaccggcacggacagcgacuucuccgugaagcaggacaucguggccaucaccgacuggagcggguacagcggcuccuucguccagcaccccgagcugaccgggcucgacugcauccgccccugcuucuggguggagcugauccggggccgccccaaggagagcaccaucuggacguccggcagcuccaucagcuucugcggggucaacuccgacaccgugagcugguccuggccggacggcgccgagcugcccuucaccaucgacaaguga

SEQ ID NO: 85088 - RNA, 1350 nt, Artificial Sequence
  derived and/or modified CDS sequence (opt1) from neuraminidase__InfluenzaA__AEO89174
augaaccccaaccagaagaucaucaccaucggcagcaucugcauggugaccgggaucgucucccugaugcuccagaucggcaacaucaucagcaugugggugucccacagcauccagacgcgcaaccagcaccaggccgagccgauccggaacaccaacuuccugaccgagaacgccguggcguccgucacccuggccgggaacagcucccucugccccauccgcggcugggccgugcacagcaaggacaacuccauccggaucgggagcaagggcgacguguucgucauccgcgagcccuucaucuccugcagccaccuggagugccggacguucuuccugacccagggcgcccuccugaacgacaagcacuccaacgggaccgugaaggaccgcagcccccaccggacccugauguccugcccggugggcgaggcccccagccccuacaacucccgcuucgagagcgucgcgugguccgccagcgccugccacgacgggacgagcuggcucaccaucggcaucuccgggcccgacaacggcgccguggcggugcugaaguacaacggcaucaucaccgacaccaucaagagcuggcggaacaacauccugcgcacgcaggaguccgagugcgccugcgucaacgggagcugcuucaccgugaugaccgacggcccguccaacgggcaggccagcuacaagaucuucaagauggagaagggcaagguggucaaguccguggagcucaacgcccccaacuaccacuacgaggagugcagcugcuaccccgacgccggcgagaucaucugcgugugccgggacaacuggcacggguccaaccgccccugggucagcuucaaccagaaccuggaguaccagaucggcuacaucugcuccgggguguucggcgacaacccgcggcccaacgacgggaccggcagcugcggccccgugucccccaacggggcguacggcaucaagggguucagcuucaaguacggcaacggggucuggaucggccgcacgaaguccaccaacagccgguccggcuucgagaugaucugggacccgaacggguggaccggcaccgacagcgacuucuccgugaagcaggacaucguggccaucacggacuggagcggguacagcggcuccuucguccagcaccccgagcugaccgggcucgacugcauccgccccugcuucuggguggagcugauccggggccgccccaaggagagcaccaucuggaccuccggcagcuccaucagcuucugcggggucaacuccgacacggugagcugguccuggccggacggcgccgagcugcccuucaccaucgacaaguga

SEQ ID NO: 85089 - RNA, 1350 nt, Artificial Sequence
  derived and/or modified CDS sequence (opt1) from neuraminidase__InfluenzaA__AEO89183
augaaccccaaccagaagaucgugaccaucggcagcaucugcauggucaucgggaucgugucccugaugcuccagaucggcaacaugaucagcaucugggugucccacagcauccagaccgggaaccagcaccagacggagccgauccgcaacaccaacuuccugaccgagaacaccgucgccuccgugacgcuggccggcaacagcucccucugccccauccgggggugggcggugcacagcaaggacaacuccauccgcaucggcagcaagggcgacgucuucgugauccgggagcccuucaucuccugcagccaccuggagugccgcaccuucuuccugacccagggggcccuccugaacgacaagcacuccaacggcaccgugaaggaccggagcccccaccgcacgcugauguccugcccgaucggggaggcccccagccccuacaacucccgguucgagagcgucgccugguccgccagcgcgugccacgacggcaccagcuggcucaccaucgggaucuccggccccgacaacggcgccguggccgugcugaaguacaacgggaucaucaccgacacgaucaagagcuggcgcaacaacauccugcggacccaggaguccgagugcgccugcgucaacggcagcugcuucaccgugaugaccgacgggccguccaacggccaggcgagcuacaagaucuucaagauggagaagggcaagguggucaaguccguggagcucaacgcccccaacuaccacuacgaggagugcagcugcuaccccgacgccggggagaucaucugcgugugccgcgacaacuggcacggcuccaaccggcccugggucagcuucaaccagaaccuggaguaccagaucggguacaucugcuccggcguguucggggacaacccgcgccccaacgacggcaagggcagcugcgggcccgugucccccaacggcgccuacggggucaagggcuucagcuucaaguacgggaacggcguguggaucggccggacgaaguccacccacagccgcuccggguucgagaugaucugggacccgaacggcuggaccgggaccgacagcgaguucuccaugaagcaggacaucguggccaucacggacuggagcggcuacagcggguccuucguccagcaccccgagcugaccggccucgacugcauccggcccugcuucuggguggagcugauccgcggccggcccaaggagagcaccaucuggaccuccgggagcuccaucagcuucugcggcgucaacuccgacacggugagcugguccuggccggacggggcggagcugcccuucaccaucgacaaguga

SEQ ID NO: 85090 - RNA, 1350 nt, Artificial Sequence
  derived and/or modified CDS sequence (opt1) from neuraminidase__InfluenzaA__AEO89205
augaaccccacccagaagaucaucaccaucggcagcaucugcauggugaucgggaucgucucccugaugcuccagaucggcaacaugaucagcaucugggugucccacagcauccagacggggaaccagcaccaggccgagccgauccgcaacgccuccuuccugaccgagaacgcgguggccagcgucacccuggccggcaacuccagccucugccccgugcgggggugggccgugcacuccaaggacaacagcauccgcaucggcuccaagggcgacgucuucgugauccgggagcccuucaucagcugcucccaccuggagugccgcaccuucuuccugacgcagggggcccuccugaacgacaagcacagcaacggcaccgugaaggaccggagcccccaccgcacccugaugagcugcccggucggggaggcgcccucccccuacaacagccgguucgaguccguggccuggagcgccagcgccugccacgacggcaucuccuggcucaccaucgggaucagcggccccgacaacggcgcgguggccguccugaaguacaacgggaucaucacggacaccaucaaguccuggcgcaacaacauccugcggacccaggagagcgagugcgccugcgugaacggcuccugcuucaccgugaugacggacgggccgagcaacggccaggccuccuacaagaucuucaagauggagaagggcaaggucgugaaguccguggagcucaacgcccccaacuaccacuacgaggagugcuccugcuaccccgacgcgggggagaucacgugcgucugccgcgacaacuggcacggcagcaaccggcccuggguguccuucaaccagaaccuggaguaccagaucggguacaucugcagcggcguguucggggacaacccgcgccccaacgacggcaccggcuccugcgggcccgucagccccaacggcgccuacgggaucaagggcuucuccuucaaguacgggaacggcguguggaucggccggaccaagagcaccaacucccgcagcggguucgagaugaucugggacccgaacggcugggccgagaccgacuccaacuucagcgugaagcaggacaucgucgccaucaccgacuggagcggguacuccggcagcuucgugcagcaccccgagcugaccgggcucgacugcauccggcccugcuucugggucgagcugauccgcggccggcccaaggagggcacgaucuggaccuccgggagcuccaucagcuucugcggcgugaacuccgacaccgugagcugguccuggccggacggggccgagcugcccuucaccaucgacaaguga

SEQ ID NO: 85091 - RNA, 1350 nt, Artificial Sequence
  derived and/or modified CDS sequence (opt1) from neuraminidase__InfluenzaA__AEO89215
augaaccccaaccagaagaucaucaccaucggcagcaucugcauggccaucgggaucgugucccugaugcuccagaucggcaacaugaucagcaucugggucucccacagcauccagaccgggaaccagcaccaggccgagccgauccgcaacgcguccuuccugacggagaacgccguggccagcgugacccuggccggcaacuccagccucugccccguccgggggugggccgugcacuccaaggacaacagcauccgcaucggcuccaagggcgacguguucgucauccgggagcccuucaucagcugcucccaccuggagugccgcaccuucuuccugacccagggggcgcuccugaacgacaagcacagcaacggcacggugaaggaccggagcccccaccgcacccugauguccugcccggugggggaggcccccucccccuacaacagccgguucgaguccgucgccuggagcgccagcgcgugccacgacggcaucuccuggcucaccaucgggaucagcggccccgacaacggcgccguggccgugcugaaguacaacgggaucaucaccgacacgaucaaguccuggcgcaacaacauccugcggacccaggagagcgagugcgccugcgucaacggcuccugcuucaccgugaugaccgacgggccgagcaacggccaggccuccuacaagaucuucaagauggagaagggcaagguggucaagagcguggagcucaacgcgcccaacuaccacuacgaggagugcuccugcuaccccgacgccggggagaucacgugcgugugccgcgacaacuggcacggcagcaaccggcccugggucuccuucaaccagaaccuggaguaccagaucggguacaucugcagcggcguguucggggacaacccgcgccccaacgacggcaccggcuccugcgggcccgugagccccaacggcgccuacgggaucaagggcuucuccuucaaguacgggaacggcgucuggaucggccggaccaagagcaccaacucccgcagcggguucgagaugaucugggacccgaacggcugggccgagacggacuccaacuucagcgugaagcaggacaucguggccaucaccgacuggagcggguacuccggcagcuucguccagcaccccgagcugaccgggcucgacugcauccggcccugcuucuggguggagcugauccgcggccggcccaaggagggcaccaucuggacguccgggagcuccaucagcuucugcggcgucaacuccgacaccgugagcugguccuggccggacggggcggagcugcccuucaccaucgacaaguga

SEQ ID NO: 85092 - RNA, 1350 nt, Artificial Sequence
  derived and/or modified CDS sequence (opt1) from neuraminidase__InfluenzaA__AEO89226
augaaccccacccagaagaucaucaccaucggcagcaucugcauggccaucgggaucgugucccugaugcuccagaucggcaacaugaucagcaucugggucucccacagcauccagacggggaaccagcaccaggccgagccgauccgcaacgcguccuuccugaccgagaacgccguggccagcgugacccuggccggcaacuccagccucugccccguccgggggugggccgugcacuccaaggacaacagcauccgcaucggcuccaagggcgacguguucgucauccgggagcccuucaucagcugcucccaccuggagugccgcaccuucuuccugacgcagggggcgcuccugaacgacaagcacagcaacggcaccgugaaggaccggagcccccaccgcacccugauguccugcccggugggggaggcccccucccccuacaacagccgguucgaguccgucgccuggagcgccagcgcgugccacgacggcaucuccuggcucaccaucgggaucagcggccccgacaacggcgccguggccgugcugaaguacaacgggaucaucacggacaccaucaaguccuggcgcaacaacauccugcggacccaggagagcgagugcgccugcgucaacggcuccugcuucaccgugaugacggacgggccgagcaacggccaggccuccuacaagaucuucaagauggagaagggcaagguggucaagagcguggagcucaacgcgcccaacuaccacuacgaggagugcuccugcuaccccgacgccggggagaucacgugcgugugccgcgacaacuggcacggcagcaaccggcccugggucuccuucaaccagaaccuggaguaccagaucggguacaucugcagcggcguguucggggacaacccgcgccccaacgacggcaccggcuccugcgggcccgugagccccaacggcgccuacgggaucaagggcuucuccuucaaguacgggaacggcgucuggaucggccggaccaagagcaccaacucccgcagcggguucgagaugaucugggacccgaacggcugggccgagaccgacuccaacuucagcgugaagcaggacaucguggccaucaccgacuggagcggguacuccggcagcuucguccagcaccccgagcugaccgggcucgacugcauccggcccugcuucuggguggagcugauccgcggccggcccaaggagggcacgaucuggaccuccgggagcuccaucagcuucugcggcgucaacuccgacaccgugagcugguccuggccggacggggcggagcugcccuucaccaucgacaaguga

SEQ ID NO: 85093 - RNA, 1350 nt, Artificial Sequence
  derived and/or modified CDS sequence (opt1) from neuraminidase__InfluenzaA__AEO89237
augaaccccaaccagaagaucaucaccaucggcagcaucugcauggugaucgggaucgucucccugaugcuccagaucggcaacaucaucagcaugugggugucccacagcauccagacccgcaaccagcaccaggccgagccgauccggaacacgaacuuccugaccgagaacgccguggcguccgucacccuggccgggaacagcucccucugccccauccgcggcugggccgugcacagcaaggacaacuccauccggaucgggagcaagggcgacguguucgucauccgcgagcccuucaucuccugcagccaccuggagugccggaccuucuuccugacgcagggcgcccuccugaacgacaagcacuccaacgggaccgugaaggaccgcagcccccaccggacccugauguccugcccggugggcgaggcccccagccccuacaacucccgcuucgagagcgucgcgugguccgccagcgccugccacgacgggaccagcuggcucacgaucggcaucuccgggcccgacaacggcgccguggcggugcugaaguacaacggcaucaucaccgacaccaucaagagcuggcggaacaacauccugcgcacccaggaguccgagugcgccugcgucaacgggagcugcuucacggugaugaccgacggcccguccaacgggcaggccagcuacaagaucuucaagauggagaagggcaagguggucaaguccguggagcucaacgcccccaacuaccacuacgaggagugcagcugcuaccccgacgccggcgagaucaucugcgugugccgggacaacuggcacggguccaaccgccccugggucagcuucaaccagaaccuggaguaccagaucggcuacaucugcuccgggguguucggcgacaacccgcggcccaacgacgggaccggcagcugcggccccgugucccccaacggggcguacggcaucaagggguucagcuucaaguacggcaacggggucuggaucggccgcaccaaguccacgaacagccgguccggcuucgagaugaucugggacccgaacggguggaccggcaccgacagcgacuucuccgugaagcaggacaucguggccaucaccgacuggagcggguacagcggcuccuucguccagcaccccgagcugacggggcucgacugcauccgccccugcuucuggguggagcugauccggggccgccccaaggagagcaccaucuggaccuccggcagcuccaucagcuucugcggggucaacuccgacaccgugagcugguccuggccggacggcgccgagcugcccuucacgaucgacaaguga

SEQ ID NO: 85094 - RNA, 1350 nt, Artificial Sequence
  derived and/or modified CDS sequence (opt1) from neuraminidase__InfluenzaA__AEO89248
augaaccccaaccagaagaucaucaccaucggcagcaucugcauggugaucgggaucgucucccugaugcuccagaucggcaacaucaucagcaucugggugucccacagcuuccagacccgcgugcagcaccaggccgagccgauccggaacacgaacuuccugaccgagaacgccgucgcguccgugacccuggccgggaacagcucccucugccccauccgcggcugggccgugcacagcaaggacaacuccauccggaucgggagcaagggcgacgucuucgugauccgcgagcccuucaucuccugcagccaccuggagugccggaccuucuuccugacgcagggcgcccuccugaacgacaagcacuccaacgggaccgugaaggaccgcagcccccaccggacccugauguccugcccggucggcgaggcccccagccccuacaacucccgcuucgagagcguggcgugguccgccagcgccugccacgacgggaccagcuggcucacgaucggcaucuccgggcccgacaacggcgccguggcgguccugaaguacaacggcaucaucaccgacaccaucaagagcuggcggaacaacauccugcgcacccaggaguccgagugcgccugcgugaacgggagcugcuucacggugaugaccgacggcccguccaacgggcaggccagcuacaagaucuucaagaugaagaagggcaaggucgugaaguccguggagcucaacgcccccaacuaccacuacgaggagugcagcugcuaccccgacgccggcgagaucaucugcgucugccgggacaacuggcacggguccaaccgccccugggugagcuucaaccagaaccuggaguaccagaucggcuacaucugcuccgggguguucggcgacaacccgcggcccaacgacgggaccggcagcugcggccccgucucccccaacggggcguacggcaucaagggguucagcuucaaguacggcaacgggguguggaucggccgcaccaaguccacgaacagccgguccggcuucgagaugaucugggacccgaacggguggaccggcaccgacagcgacuucuccaugaagcaggacaucguggccaucaccgacuggagcggguacagcggcuccuucguccagcaccccgagcugacggggcucgacugcauccgccccugcuucuggguggagcugauccggggccgccccaaggagagcaccaucuggaccuccggcagcuccaucagcuucugcggggucaacuccgacaccgugagcugguccuggccggacggcgccgagcugcccuucacgaucgacaaguga

SEQ ID NO: 85095 - RNA, 1350 nt, Artificial Sequence
  derived and/or modified CDS sequence (opt1) from neuraminidase__InfluenzaA__AEO89270
augaaccccaaccagaagaucaucaccaucggcagcaucugcauggugaccgggaucgucucccugaugcuccagaucggcaacaucacgagcaugugggugucccacagcauccagacccgcaaccagcaccaggccgagccgauccggaacaccaacuuccugaccgagaacgccguggcguccgucacgcuggccgggaacagcucccucugccccauccgcggcugggccgugcacagcaaggacaacuccauccggaucgggagcaagggcgacguguucgucauccgcgagcccuucaucuccugcagccaccuggagugccggaccuucuuccugacccagggcgcccuccugaacgacaagcacuccaacgggaccgugaaggaccgcagcccccaccggacgcugauguccugcccggugggcgaggcccccagccccuacaacucccgcuucgagagcgucgcgugguccgccagcgccugccacgacgggaccagcuggcucaccaucggcaucuccgggcccgacaacggcgccguggcggugcugaaguacaacggcaucaucaccgacacgaucaagagcuggcggaacaacauccugcgcacccaggaguccgagugcgccugcgucaacgggagcugcuucaccgugaugaccgacggcccguccaacgggcaggccagcuacaagaucuucaagauggagaagggcaagguggucaaguccguggagcucaacgcccccaacuaccacuacgaggagugcagcugcuaccccgacgccggcgagaucaucugcgugugccgggacaacuggcacggguccaaccgccccugggucagcuucaaccagaaccuggaguaccagaucggcuacaucugcuccgggguguucggcgacaacccgcggcccaacgacgggacgggcagcugcggccccgugucccccaacggggcguacggcaucaagggguucagcuucaaguacggcaacggggucuggaucggccgcaccaaguccaccaacagccgguccggcuucgagaugaucugggacccgaacggguggaccggcacggacagcgacuucuccgugaagcaggacaucguggccaucaccgacuggagcggguacagcggcuccuucguccagcaccccgagcugaccgggcucgacugcauccgccccugcuucuggguggagcugauccggggccgccccaaggagagcaccaucuggacguccggcagcuccaucagcuucugcggggucaacuccgacaccgugggcuggagcuggccggacggggccgagcugcccuucaccaucgacaaguga

SEQ ID NO: 85096 - RNA, 1350 nt, Artificial Sequence
  derived and/or modified CDS sequence (opt1) from neuraminidase__InfluenzaA__AEO89281
augaaccccaaccagaagaucaucaccaucggcagcaucugcaugguggucgggaucgugucccugaugcuccagaucggcaacaucgugagcaucugggucucccacagcauccagaccgggcaccagcagcaggccgagccgaucaagaacacgaacuuccugaccaagaacgccguggcguccgugacccuggccggcaacagcucccucugccccauccgcgggugggccguccacagcaaggacaacuccauccggaucggcagcaagggcgacguguucgugauccgcgagcccuucaucuccugcagccaccuggagugccggaccuucuuccugacgcagggggcccuccugaacgacaagcacuccaacggcaccgucaaggaccgcagcccccaccggacccugauguccugcccggugggggaggcccccagccccuacaacucccgcuucgagagcguggcgugguccgccagcgccugccacgacggcaccagcuggcucacgaucgggaucuccggccccgacaacggcgccgucgcggugcugaaguacaacgggaucaucaccgacaccaucaagagcuggcggaacaacacccugcgcacgcaggaguccgagugcgccugcgugaacggcagcugcuucaccgucaugaccgacgggccguccaacggccaggccagcuacaagaucuucaagauggagaagggcaagguggugaaguccgccgagcucaacgcccccaacuaccacuacgaggagugcagcugcuaccccgacgcgggggagaucaucugcgucugccgggacaacuggcacggcuccaaccgccccugggugagcuucaaccagaaccuggaguaccagaucggguacaucugcuccggcguguucggggacaacccgcggcccaacgacggcaccggcagcugcgggcccgucucccccaacggcgccuacgggaucaagggcuucagcuucaaguacgggaacggcguguggaucggccgcacgaaguccaccaacagccgguccggguucgagaugaucugggacccgaacggcuggaccgggaccgacagcaacuucuccaugaagcaggacaucguggccaucacggaguggagcggcuacagcggguccuucguccagcaccccgagcugaccggccucgacugcauccgccccugcuucuggguggagcugauccggggccgccccaaggagagcaccaucuggaccuccgggagcuccaucagcuucugcggcgucaacuccgacacggugagcugguccuggccggacggggccgagcugcccuucaccaucgacaaguga

SEQ ID NO: 85097 - RNA, 1350 nt, Artificial Sequence
  derived and/or modified CDS sequence (opt1) from neuraminidase__InfluenzaA__AEO89291
augaaccccaaccagaagaucaucaccaucggcagcaucugcaugguggucgggaucgugucccugaugcuccagaucggcaacaucgugagcaucugggucucccacagcauccagaccgggcaccagcagcaggccgagccgaucaagaacacgaacuuccugaccgagaacgccguggcguccgugacccuggccggcaacagcucccucugccccauccgcgggugggccguccacagcaaggacaacuccauccggaucggcagcaagggcgacguguucgugauccgcgagcccuucaucuccugcagccaccuggagugccggaccuucuuccugacgcagggggcccuccugaacgacaagcacuccaacggcaccgucaaggaccgcagcccccaccggacccugauguccugcccggugggggaggcccccagccccuacaacucccgcuucgagagcguggcgugguccgccagcgccugccacgacggcaccagcuggcucacgaucgggaucuccggccccgacaacggcgccgucgcggugcugaaguacaacgggaucaucaccgacaccaucaagagcuggcggaacaacauccugcgcacccaggaguccgagugcgccugcgugaacggcagcugcuucacggucaugaccgacgggccguccaacggccaggccagcuacaagaucuucaagauggagaagggcaagguggugaaguccgccgagcucaacgcccccaacuaccacuacgaggagugcagcugcuaccccgacgcgggggagaucaucugcgucugccgggacaacuggcacggcuccaaccgccccugggugagcuucaaccagaaccuggaguaccagaucggguacaucugcuccggcguguucggggacaacccgcggcccaacgacggcaccggcagcugcgggcccgucucccccaacggcgccuacgggaucaagggcuucagcuucaaguacgggaacggcguguggaucggccgcaccaaguccacgaacagccgguccggguucgagaugaucugggacccgaacggcuggaccgggaccgacagcaacuucuccaugaagcaggacaucguggccaucaccgaguggagcggcuacagcggguccuucguccagcaccccgagcugacgggccucgacugcauccgccccugcuucuggguggagcugauccggggccgccccaaggagagcaccaucuggaccuccgggagcuccaucagcuucugcggcgucaacuccgacaccgugagcugguccuggccggacggggccgagcugcccuucacgaucgacaaguga

SEQ ID NO: 85098 - RNA, 1350 nt, Artificial Sequence
  derived and/or modified CDS sequence (opt1) from neuraminidase__InfluenzaA__AEO89302
augaaccccaaccagaagaucaucaccaucggcagcaucugcauggugaucgggaucgucucccugaugcuccagaucggcaacaucaucagcaucugggugucccacagcauccagaccgggaaccagcaccaggacgagccgauccgcaacgccaacuuccugacggagaacgccguggcguccgucacccuggccggcaacagcucccucugccccgugcgggggugggccgugcacagcaaggacaacuccauccgcaucggcagcaagggcgacgucuucgugauccgggagcccuucaucuccugcagccaccuggagugccgcaccuucuuccugacccagggggcccuccugaacgacaagcacuccaacggcacggugaaggaccggagcccccaccgcacccugauguccugcccggucggggaggcccccagccccuacaacucccgguucgagagcguggcgugguccgccagcgccugccacgacggcaccagcuggcucaccaucgggaucuccggccccgacaacggcgccguggcgguccugaaguacaacgggaucaucacggacaccaucaagagcuggcgcaacaacauccugcggacccaggaguccgagugcgccugcgugaacggcagcugcuucaccgugaugacggacgggccguccaacggccaggccagcuacaagaucuucaagauggagaagggcaaggucgugcgcuccguggagcucaacgcccccaacuaccacuacgaggagugcagcugcuaccccgacgccggggagaucacgugcgucugccgggacaacuggcacggcuccaaccgccccugggugagcuucaaccagaaccuggaguaccagaucggguacaucugcuccggcguguucggggacaacccgcggcccaacgacggcaccggcagcugcgaccccgucucccccaacggggcguacggcaucaagggguucagcuucaaguacggcaacgggguguggaucggccgcaccaaguccaccaacagccgguccggcuucgagaugaucugggacccgaacggguggaccgagaccgacagcgacuucuccgugaagcaggacaucgucgccaucaccgacuggagcggcuacagcggguccuucgugcagcaccccgagcugacgggccucgacugcauccgccccugcuucugggucgagcugauccgggggcgccccaaggagagcaccaucuggaccuccggcagcuccaucagcuucugcggcguguccagcgacaccguguccuggagcuggccggacggggccgagcugcccuucacgaucgacaaguga

SEQ ID NO: 85099 - RNA, 1410 nt, Artificial Sequence; identical to SEQ ID NO: 80081
  derived and/or modified CDS sequence (opt1) from neuraminidase__InfluenzaA__AEO99218

SEQ ID NO: 85100 - RNA, 1410 nt, Artificial Sequence
  derived and/or modified CDS sequence (opt1) from neuraminidase__InfluenzaA__AEQ49739
augaaccccaaccagaagaucaucaccaucggcagcgugugcaugaccaucgggauggccaaccugauccuccagaucggcaacaucaucuccaucuggaucagccacuccauccagcuggggaaccagagccagaucgagacgugcaaccaguccgucaucaccuacgagaacaacaccugggugaaccagaccuacgugaacaucagcaacacgaacuucgccgcgggccaguccgucgugagcgugaagcuggccgggaacuccagccucugcccggucuccggcugggccaucuacagcaaggacaacuccauccgcaucggcagcaagggggacguguucgugauccgggagcccuucaucuccugcagcccccuggagugccgcaccuucuuccugacccagggcgcccuccugaacgacaagcacuccaacgggaccaucaaggaccggagccccuaccgcacgcugauguccugcccgaucggcgagguccccagccccuacaacagccgguucgaguccguggccuggagcgcguccgccugccacgacgggaucaacuggcucaccaucggcaucagcggccccgacaacggggccguggccguccugaaguacaacggcaucaucaccgacaccaucaaguccuggcgcaacaacauccugcggacgcaggagagcgagugcgcgugcgugaacggguccugcuucaccaucaugaccgacggcccgagcgacggccaggccuccuacaagaucuuccgcaucgagaaggggaagaucgucaagagcguggagaugaacgcccccaacuaccacuacgaggagugcuccugcuaccccgacagcuccgaggugaccugcgugugccgggacaacuggcacggcagcaaccgccccugggucuccuucaaccagaaccucgaguaccagaucggguacaucugcagcggcaucuucggggacaacccgcggcccaacgacaagacgggcuccugcggccccgugagcuccaacggggccaacggcgugaagggguucagcuucaaguacggcaacggggucuggaucggccgcaccaagagcaucuccagccggaagggcuucgagaugaucugggaccccaacggguggaccggcaccgacaacaacuucuccaucaagcaggacaucguggggaucaacgaguggagcggcuacuccgggagcuucgugcagcacccggagcugacgggcauggacugcauccgccccugcuucugggucgagcugauccggggccgccccaaggagaacaccaucuggaccuccgggagcuccaucagcuucugcggcgugaacuccgacaccgucggguggagcuggcccgacggcgccgagcucccguucacgaucgacaaguga

SEQ ID NO: 85101 - RNA, 1410 nt, Artificial Sequence; identical to SEQ ID NO: 84281
  derived and/or modified CDS sequence (opt1) from neuraminidase__InfluenzaA__AEQ49740

SEQ ID NO: 85102 - RNA, 1410 nt, Artificial Sequence
  derived and/or modified CDS sequence (opt1) from neuraminidase__InfluenzaA__AEQ49741
augaaccccaaccagaagaucaucaccaucggcagcgugugcaugaccaucgggauggccaaccugauccuccagaucggcaacaucaucuccaucuggaucagccacuccauccagcuggggaaccagagccagaucgagacgugcaaccaguccgucaucaccuacgagaacaacaccugggugaaccagaccuacgugaacaucagcaacacgaacuucgccgcgggccaguccgucgugagcgugaagcuggccgggaacuccagccucugcccggucuccggcugggccaucuacagcaaggacaacuccauccgcaucggcagcaagggggacguguucgugauccgggagcccuucaucuccugcagcccccuggagugccgcaccuucuuccugacccagggcgcccuccugaacgacaagcacuccaacgggaccaucaaggaccggagccccuaccgcacgcugauguccugcccgaucggcgagguccccagccccuacaacagccgguucgaguccguggccuggagcgcguccgccugccacgacgggaucaacuggcucaccaucggcaucagcggccccgacaacggggccguggccguccugaaguacaacggcaucaucaccgacaccaucaaguccuggcgcaacaacauccugcggacgcaggagagcgagugcgcgugcgugaacggguccugcuucaccaucaugaccgacggcccgagcgacggccaggccuccuacaagaucuuccgcaucgagaaggggaagaucgucaagagcguggagaugaacgcccccaacuaccacuacgaggagugcuccugcuaccccgacagcuccgagaucacgugcgugugccgggacaacuggcacggcagcaaccgccccuggguguccuucaaccagaaccucgaguaccagaucggguacaucugcagcggcaucuucggggacaacccgcggcccaacgacaagaccggcuccugcggccccgucagcuccaacggggccaacggcgugaagggguucagcuucaaguacggcaacgggguguggaucggccgcaccaagagcaucuccagccggaagggcuucgagaugaucugggaccccaacggguggaccggcaccgacaacaacuucuccaucaagcaggacaucgucgggaucaacgaguggagcggcuacuccgggagcuucgugcagcacccggagcugacgggcauggacugcauccgccccugcuucuggguggagcugauccggggccgccccaaggagaacaccaucuggaccuccgggagcuccaucagcuucugcggcgucaacuccgacaccgugggguggagcuggcccgacggcgccgagcucccguucacgaucgacaaguga

SEQ ID NO: 85103 - RNA, 1410 nt, Artificial Sequence
  derived and/or modified CDS sequence (opt1) from neuraminidase__InfluenzaA__AEQ49742
augaaccccaaccagaagaucaucaccaucggcagcgugugcaugaccaucgggauggccaaccugauccuccagaucggcaacaucaucuccaucuggaucagccacuccauccagcuggggaaccagagccagaucgagacgugcaaccaguccgucaucaccuacgagaacaacaccugggugaaccagaccuacgugaacaucagcaacacgaacuucgccgcgggccaguccgucgugagcgugaagcuggccgggaacuccagccucugcccggucuccggcugggccauccacagcaaggacaacuccauccgcaucggcagcaagggggacguguucgugauccgggagcccuucaucuccugcagcccccuggagugccgcaccuucuuccugacccagggcgcccuccugaacgacaagcacuccaacgggaccaucaaggaccggagccccuaccgcacgcugauguccugcccgaucggcgagguccccagccccuacaacagccgguucgaguccguggccuggagcgcguccgccugccacgacgggaucaacuggcucaccaucggcaucagcggccccgacaacggggccguggccguccugaaguacaacggcaucaucaccgacaccaucaaguccuggcgcaacaacauccugcggacgcaggagagcgagugcgcgugcgugaacggguccugcuucaccaucaugaccgacggcccgagcgacggccaggccuccuacaagaucuuccgcaucgagaaggggaagaucgucaagagcguggagaugaacgcccccaacuaccacuacgaggagugcuccugcuaccccgacagcuccgagaucacgugcgugugccgggacaacuggcacggcagcaaccgccccuggguguccuucaaccagaaccucgaguaccagaucggguacaucugcagcggcaucuucggggacaacccgcggcccaacgacaagaccggcuccugcggccccgucagcuccaacggggccaacggcgugaagggguucagcuucaaguacggcaacgggguguggaucggccgcaccaagagcaucuccagccggaagggcuucgagaugaucugggaccccaacggguggaccggcaccgacaacaacuucuccaucaagcaggacaucgucgggaucaacgaguggagcggcuacuccgggagcuucgugcagcacccggagcugacgggcauggacugcauccgccccugcuucuggguggagcugauccggggccgccccaaggagaacaccaucuggaccuccgggagcuccaucagcuucugcggcgucaacuccgacaccgugggguggagcuggcccgacggcgccgagcucccguucacgaucgacaaguga

SEQ ID NO: 85104 - RNA, 1410 nt, Artificial Sequence
  derived and/or modified CDS sequence (opt1) from neuraminidase__InfluenzaA__AEQ49743
augaaccccaaccagaagaucaucaccaucggcagcgugugcaugaccaucgggauggccaaccugauccuccagaucggcaacaucaucuccaucuggaucagccacuccauccagcuggggaaccagagccagaucgagacgugcaaccaguccgucaucaccuacgagaacaacaccugggugaaccagaccuacgugaacaucagcaacacgaacuucgccgcgggccaguccgucgugagcgugaagcuggccgggaacuccagccucugcccggucuccggcugggccaucuacagcaaggacaacuccauccgcaucggcagcaagggggacguguucgugauccgggagcccuucaucuccugcagcccccuggagugccgcaccuucuuccugacccagggcgcccuccugaacgacaagcacuccaacgggaccaucaaggaccggagccccuaccgcacgcugauguccugcccgaucggcgagguccccagccccuacaacagccgguucgaguccguggccuggagcgcguccgccugccacgacgggaucaacuggcucaccaucggcaucagcggccccgacaacggggccguggccguccugaaguacaacggcaucaucaccgacaccaucaaguccuggcgcaacaacauccugcggacgcaggagagcgagugcgcgugcgugaacggguccugcuucaccaucaugaccgacggcccgagcgacggccaggccuccuacaagaucuuccgcaucgagaaggggaagaucgucaagagcguggagaugaacgcccccaacuaccacuacgaggagugcuccugcuaccccgacagcuccgagaucacgugcgugugccgggacaacuggcacggcagcaaccgccccuggguguccuucaaccagaaccucgaguaccagaucggguacaucugcagcggcaucuucggggacaacccgcggcccaacgacaagaccggcuccugcggccccgucagcuccaacggggccaacggcgugaagggguucagcuucaaguacggcaacgggguguggaucggccgcaccaagagcaucuccagccggaagggcuucgagaugaucugggaccccaacggguggaccggcaccgacaacaacuucuccaucaagcaggacaucgucgggacgaacgaguggagcggcuacuccgggagcuucgugcagcacccggagcugaccggccuggacugcauccgccccugcuucuggguggagcucauccggggccgccccaaggagaacaccaucuggaccuccgggagcuccaucagcuucugcggcgucaacuccgacacggugggguggagcuggcccgacggcgccgagcugccguucaccaucgacaacuga

SEQ ID NO: 85105 - RNA, 1410 nt, Artificial Sequence
  derived and/or modified CDS sequence (opt1) from neuraminidase__InfluenzaA__AEQ49744
augaaccccaaccagaagaucaucaccaucggcagcgugugcaugaccaucgggauggccaaccugauccuccagaucggcaacaucaucuccaucuggaucagccacuccauccagcuggggaaccagagccagaucgagacgugcaaccaguccgucaucaccuacgagaacaacaccugggugaaccagaccuacgugaacaucagcaacacgaacuucgccgcgggccaguccgucgugagcgugaagcuggccgggaacuccagccucugcccggucuccggcugggccaucuacagcaaggacaacuccauccgcaucggcagcaagggggacguguucgugauccgggagcccuucaucuccugcagcccccuggagugccgcaccuucuuccugacccagggcgcccucgucaacgacaagcacuccaacgggaccaucaaggaccggagccccuaccgcacgcugauguccugcccgaucggcgaggugcccagccccuacaacagccgguucgaguccguggccuggagcgcguccgccugccacgacgggaucaacuggcugaccaucggcaucagcggccccgacaacggggccgucgccgugcucaaguacaacggcaucaucaccgacaccaucaaguccuggcgcaacaacaucuuccggacgcaggagagcgagugcgcgugcgugaacggguccugcuucaccaucaugaccgacggcccgagcgacggccaggccuccuacaagaucuuccgcaucgagaaggggaagaucgucaagagcguggagaugaacgcccccaacuaccacuacgaggagugcuccugcuaccccgacagcuccgagaucacgugcgugugccgggacaacuggcacggcagcaaccgccccugggucuccuucaaccaggaccuggaguaccagaucggguacaucugcagcggcaucuucggggacaacccgcggcccaacgacaagaccggcuccugcggccccgugagcuccaacggggccaacggcgugaagggguucagcuucaaguacggcaacggggucuggaucggccgcaccaagagcaucuccagccggaagggcuucgagaugaucugggaccccaacggguggaccggcaccgacaacaacuucuccaucaagcagaacaucguggggaucaacgaguggagcggcuacuccgggagcuucgugcagcacccggagcugacgggccucgacugcauccgccccugcuucugggucgagcugauccggggccgccccaaggagaacaccaucuggaccuccgggagcuccaucagcuucugcggcgugaacuccgacaccgucggguggagcuggcccgacggcgccgagcugccguucacgaucgacaaguga

SEQ ID NO: 85106 - RNA, 1410 nt, Artificial Sequence; identical to SEQ ID NO: 85102
  derived and/or modified CDS sequence (opt1) from neuraminidase__InfluenzaA__AEQ49745

SEQ ID NO: 85107 - RNA, 1410 nt, Artificial Sequence; identical to SEQ ID NO: 85102
  derived and/or modified CDS sequence (opt1) from neuraminidase__InfluenzaA__AEQ49746

SEQ ID NO: 85108 - RNA, 1410 nt, Artificial Sequence; identical to SEQ ID NO: 85102
  derived and/or modified CDS sequence (opt1) from neuraminidase__InfluenzaA__AEQ49747

SEQ ID NO: 85109 - RNA, 1410 nt, Artificial Sequence; identical to SEQ ID NO: 84281
  derived and/or modified CDS sequence (opt1) from neuraminidase__InfluenzaA__AEQ49748

SEQ ID NO: 85110 - RNA, 1410 nt, Artificial Sequence; identical to SEQ ID NO: 85102
  derived and/or modified CDS sequence (opt1) from neuraminidase__InfluenzaA__AEQ49749

SEQ ID NO: 85111 - RNA, 1410 nt, Artificial Sequence
  derived and/or modified CDS sequence (opt1) from neuraminidase__InfluenzaA__AEQ49750
augaaccccaaccagaagaucaucaccaucggcagcgugugcaugaccaucgggauggccaaccugauccuccagaucggcaacaucaucuccaucuggaucagccacuccauccagcuggggaaccagagccagaucgagacgugcaaccaguccgucaucaccuacgagaacaacaccugggugaaccagaccuacgugaacaucagcaacacgaacuucgccgcgggccaguccgucgugagcgugaagcuggccgggaacuccagccucugcccggucuccggcugggccaucuacagcaaggacaacuccauccgcaucggcagcaagggggacguguucgugauccgggagcccuucaucuccugcagcccccuggagugccgcaccuucuuccugacccagggcgcccuccugaacgacaaccacuccaacgggaccaucaaggaccggagccccuaccgcacgcugauguccugcccgaucggcgagguccccagccccuacaacagccgguucgaguccguggccuggagcgcguccgccugccacgacgggaucaacuggcucaccaucggcaucagcggccccgacaacggggccguggccguccugaaguacaacggcaucaucaccgacaccaucaaguccuggcgcaacaacauccugcggacgcaggagagcgagugcgcgugcgugaacggguccugcuucaccaucaugaccgacggcccgagcgacggccaggccuccuacaagaucuuccgcaucgagaaggggaagaucgucaagagcguggagaugaacgcccccaacuaccacuacgaggagugcuccugcuaccccgacagcuccgagaucacgugcgugugccgggacaacuggcacggcagcaaccgccccuggguguccuucaaccagaaccucgaguaccagaucggguacaucugcagcggcaucuucggggacaacccgcggcccaacgacaagaccggcuccugcggccccgucagcuccaacggggccaacggcgugaagggguucagcuucaaguacggcaacgggguguggaucggccgcaccaagaacaucagcucccggaagggcuucgagaugaucugggaccccaacggguggaccggcaccgacaacaacuucagcaucaagcaggacaucgucgggaucaacgagugguccggcuacagcggguccuucgugcagcacccggagcugacgggccuggacugcauccgccccugcuucuggguggagcucauccggggccgccccaaggagaacaccaucuggaccagcggguccagcaucuccuucugcggcgucaacagcgacaccguggggugguccuggcccgacggcgccgagcugccguucacgaucgacaaguga

SEQ ID NO: 85112 - RNA, 1410 nt, Artificial Sequence
  derived and/or modified CDS sequence (opt1) from neuraminidase__InfluenzaA__AEQ49751
augaaccccaaccagaagaucaucaccaucggcagcgugugcaugaccaucgggauggccaaccugauccuccagaucggcaacaucaucuccaucuggaucagccacuccuuccagcuggggaaccagagccagaucgagacgugcaaccaguccgucaucaccuacgagaacaacaccugggugaaccagaccuacgugaacaucagcaacacgaacuucgccgcgggccaguccgucgugagcgugaagcuggccgggaacuccagccucugcccggucuccggcugggccaucuacagcaaggacaacuccauccgcaucggcagcaagggggacguguucgugauccgggagcccuucaucuccugcagcccccuggagugccgcaccuucuuccugacccagggcgcccuccugaacgacaaccacuccaacgggaccaucaaggaccggagccccuaccgcacgcugauguccugcccgaucggcgagguccccagccccuacaacagccgguucgaguccguggccuggagcgcguccgccugccacgacgggaucaacuggcucaccaucggcaucagcggccccgacaacggggccguggccguccugaaguacaacggcaucaucaccgacaccaucaaguccuggcgcaacaacauccugcggacgcaggagagcgagugcgcgugcgugaacggguccugcuucaccaucaugaccgacggcccgagcgacggccaggccuccuacaagaucuuccgcaucgagaaggggaagaucgucaagagcguggagaugaacgcccccaacuaccacuacgaggagugcuccugcuaccccgacagcuccgagaucacgugcgugugccgggacaacuggcacggcagcaaccgccccuggguguccuucaaccagaaccucgaguaccagaucggguacaucugcagcggcaucuucggggacaacccgcggcccaacgacaagaccggcuccugcggccccgucagcuccaacggggccaacggcgugaagggguucagcuucaaguacggcaacgggguguggaucggccgcaccaagagcaucuccagccggaagggcuucgagaugaucugggaccccaacggguggaccggcaccgacaacaacuucuccaucaagcaggacaucgucgggaucaacgaguggagcggcuacuccgggagcuucgugcagcacccggagcugacgggcauggacugcauccgccccugcuucuggguggagcugauccggggccgccccaaggagaacaccaucuggaccuccgggagcuccaucagcuucugcggcgucaacuccgacaccgugggguggagcuggcccgacggcgccgagcucccguucacgaucgacaaguga

SEQ ID NO: 85113 - RNA, 1410 nt, Artificial Sequence
  derived and/or modified CDS sequence (opt1) from neuraminidase__InfluenzaA__AEQ49752
augaaccccaaccagaagaucaucaccaucggcagcgugugcaugaccaucgggauggccaaccugauccuccagaucggcaacaucaucuccaucuggaucagccacuccauccagcuggggaaccagagccagaucggcacgugcaaccaguccgucaucaccuacgagaacaacaccugggugaaccagaccuacgugaacaucagcaacacgaacuucgccgcggggcaguccgucgugagcgugaagcuggccggcaacuccagccucugcccggucuccggcugggccaucuacagcaaggacaacuccauccgcaucgggagcaagggcgacguguucgugauccgggagcccuucaucuccugcagcccccuggagugccgcaccuucuuccugacccagggggcccuccugaacgacaagcacuccaacggcaccaucaaggaccggagccccuaccgcacgcugauguccugcccgaucggggagguccccagccccuacaacagccgguucgaguccguggccuggagcgcguccgccugccacgacggcaucaacuggcucaccaucggcaucagcgggcccgacaacggcgccguggccguccugaaguacaacgggaucaucaccgacaccaucaaguccuggcgcaacaacauccugcggacgcaggagagcgagugcgcgugcgugaacggcuccugcuucaccaucaugaccgacggcccgagcgacgggcaggccuccuacaagaucuuccgcaucgagaagggcaagaucgucaagagcguggagaugaacgcccccaacuacuacuacgaggagugcuccugcuaccccgacagcuccgagaucacgugcgugugccgggacaacuggcacgggagcaaccgccccuggguguccuucaaccagaaccucgaguaccagaucggcuacaucugcagcgggaucuucggcgacaacccgcggcccaacgacaagaccggcuccugcgggcccgucagcuccaacggcgccaacggggugaagggcuucagcuucaaguacgggaacggcguguggaucggccgcaccaagagcaucuccagccggaagggguucgagaugaucugggaccccaacggcuggaccgggaccgacaacaacuucuccaucaagcaggacaucgucggcaucaacgaguggagcggguacuccggcagcuucgugcagcacccggagcugacgggcauggacugcauccgccccugcuucuggguggagcugauccgggggcgccccaaggagaacaccaucuggaccuccggcagcuccaucagcuucugcggggucaacuccgacaccgugggcuggagcuggcccgacggcgccgagcucccguucacgaucgacaaguga

SEQ ID NO: 85114 - RNA, 1410 nt, Artificial Sequence
  derived and/or modified CDS sequence (opt1) from neuraminidase__InfluenzaA__AEQ49753
augaaccccaaccagaagaucaucaccaucggcagcgugugcaugaccaucgggauggccaaccugauccuccagaucggcaacaucaucuccaucuggaucagccacuccauccagcuggggaaccagagccagaucgagacgugcaaccaguccgucaucaccuacgagaacaacaccugggugaaccagaccuacgugaacaucagcaacacgaacuucgccgcgggccaguccgucgugagcgugaagcuggccgggaacuccagccucugcccggucuccggcugggccaucuacagcaaggacaacuccauccgcaucggcagcaagggggacguguucgugauccgggagcccuucaucuccugcagcccccuggagugccgcaccuucuuccugacccagggcgcccuccugaacgacaagcacuccaacgggaccaucaaggaccggagccccuaccgcacgcugauguccugcccgaucggcgagguccccagccccuacaacagccgguucgaguccguggccuggagcgcguccgccugccacgacgggaucaacuggcucaccaucggcaucagcggccccgacaacggggccguggccguccugaaguacaacggcaucaucaccgacaccaucaaguccuggcgcaacaacauccugcggacgcaggagagcgagugcgcgugcgugaacggguccugcuucaccaucaugaccgacggcccgagcgacggccaggccuccuacaagaucuuccgcaucgagaaggggaagaucgucaagagcguggagaugaacgcccccaacuaccacuacgaggagugcuccugcuaccccgacagcuccgagaucacgugcgugugccgggacaacuggcacggcagcaaccgccccuggguguccuucaaccagaaccucgaguaccagaucggguacaucugcagcggcaucuucggggacaacccgcggcccaacgacaagaccggcuccugcggccccgucagcuccaacggggccaacggcgugaagggguucagcuucaaguacggcaacgggguguggaucggccgcaccaagagcaucuccagccggaagggcuucgagaugaucugggaccccaacggguggaccggcaccgacaacaacuucuccaucaagcaggacaucgucgggaucaacgaguggagcggcuacuccgggagcuucgugcagcacccggagcugacgggcauggacugcauccgccccugcuucuggguggagcugauccggggccgccccaaggagaacaccaucuggaccuccgggagcuccaucagcuucugcggcgucaacuccgacaccguggacuggagcuggcccgacggggccgagcucccguucacgaucgacaaguga

SEQ ID NO: 85115 - RNA, 1410 nt, Artificial Sequence
  derived and/or modified CDS sequence (opt1) from neuraminidase__InfluenzaA__AEQ49754
augaaccccaaccagaagaucaucaccaucggcagcgugugcaugaccaucgggauggccaaccugauccuccagaucggcaacaucaucuccaucuggaucagccacuccauccagcuggggaaccagagccagaucgagacgugcaaccaguccgucaucaccuacgagaacaacaccugggugaaccagaccuacgugaacaucagcaacacgaacuucgccgcgggccaguccgucgugagcgugaagcuggccgggaacuccagccucugcccggucuccggcugggccaucuacagcaaggacaacuccauccgcaucggcagcaagggggacguguucgugauccgggagcccuucaucuccugcagcccccuggagugccgcaccuucuuccugacccagggcgcccuccugaacgacaagcacuccaacgggaccaucaaggaccggagccccuaccgcacgcugauguccugcccgaucggcgagguccccagccccuacaacagccgguucgaguccguggccuggagcgcguccgccugccacgacgggaucaacuggcucaccaucggcaucagcggccccgacaacggggccguggccguccugaaguacaacggcaucaucaccgacaccaucaaguccuggcgcaacaacauccugcggacgcaggagagcgagugcgcgugcgugaacggguccugcuucaccaucaugaccgacggcccgagcgacggccaggccuccuacaagaucuuccgcaucgagaaggggaagaucgucaagagcguggagaugaacgcccccaacuaccacuacgaggagugcuccugcuaccccgacagcuccgagaucacgugcgugugccgggacaacuggcacggcagcaaccgccccuggguguccuucaaccagaaccucgaguaccagaucggguacaucugcagcggcaucuucggggacaacccgcggcccaacgacaagaccggcuccugcggccccgucagcuccaacggggccaacggcgugaagggguucagcuucaaguacggcaacgggguguggaucggccgcaccaagagcaucuccagccggaagggcuucgagaugaucugggaccccaacggguggaccggcaccgacaacaacuucuccaucaagcaggacaucgucgggaucaacgaguggagcggcuacuccgggagcuucgugcagcacccggagcugacgggccuggacugcauccgccccugcuucuggguggagcucauccggggccgccccaaggagaacaccaucuggaccuccgggagcuccaucagcuucugcggcgucaacuccaacaccgugggguggagcuggcccgacggcgccgagcugccguucacgaucgacaaguga

SEQ ID NO: 85116 - RNA, 1410 nt, Artificial Sequence; identical to SEQ ID NO: 85102
  derived and/or modified CDS sequence (opt1) from neuraminidase__InfluenzaA__AEQ49755

SEQ ID NO: 85117 - RNA, 1410 nt, Artificial Sequence
  derived and/or modified CDS sequence (opt1) from neuraminidase__InfluenzaA__AEQ49756
augaaccccaaccagaagaucaucaccaucggcagcgugugcaugaccaucgggauggccaaccugauccuccagaucggcaacaucaucuccaucuggaucagccacuccauccagcuggggaaccagagccaggucgagacgugcaaccaguccgugaucaccuacgagaacaacaccugggugaaccagaccuacgucaacaucagcaacacgaacuucgccgcgggccaguccguggugagcgucaagcuggccgggaacuccagccucugcccgguguccggcugggccaucuacagcaaggacaacuccauccgcaucggcagcaagggggacguguucgucauccgggagcccuucaucuccugcagcccccuggagugccgcaccuucuuccugacccagggcgcccuccugaacgacaagcacuccaacgggaccaucaaggaccggagccccuaccgcacgcugauguccugcccgaucggcgaggugcccagccccuacaacagccgguucgaguccguggccuggagcgcguccgccugccacgacgggaucaacuggcucaccaucggcaucagcggccccgacaacggggccgucgccgugcugaaguacaacggcaucaucaccgacaccaucaaguccuggcgcaacaacauccugcggacgcaggagagcgagugcgcgugcgugaacggguccugcuucaccaucaugaccgacggcccgagcgacggccaggccuccuacaagaucuuccgcaucgagaaggggaagaucgucaagagcguggagaugaacgcccccaacuaccacuacgaggagugcuccugcuaccccgacagcuccgagaucacgugcgugugccgggacaacuggcacggcagcaaccgccccugggucuccuucaaccagaaccucgaguaccagaucggguacaucugcagcggcaucuucggggacaacccgcggcccaacgacaagaccggcuccugcggccccgugagcuccaacggggccaacggcgugaagggguucagcuucaaguacggcaacggggucuggaucggccgcaccaagagcaucuccagccggaagggcuucgagaugaucugggaccccaacggguggaccggcaccgacaacaacuucuccaucaagcaggacaucguggggaucaacgaguggagcggcuacuccgggagcuucgugcagcacccggagcugacgggccuggacugcauccgccccugcuucugggucgagcucauccggggccgccccaaggagaacaccaucuggaccuccgggagcuccaucagcuucugcggcgugaacuccgacaccgucggguggagcuggcccgacggcgccgagcugccguucacgaucgacaaguga

SEQ ID NO: 85118 - RNA, 1410 nt, Artificial Sequence; identical to SEQ ID NO: 85102
  derived and/or modified CDS sequence (opt1) from neuraminidase__InfluenzaA__AEQ49757

SEQ ID NO: 85119 - RNA, 1410 nt, Artificial Sequence
  derived and/or modified CDS sequence (opt1) from neuraminidase__InfluenzaA__AEQ49758
augaaccccaaccagaagaucaucaccaucggcagcgugugcaugaccaucgggauggccaaccugauccuccagaucggcaacaucaucuccaucuggaucagccacuccauccagcuggggaaccacagccagaucgagacgugcaaccaguccgucaucaccuacgagaacaacaccugggugaaccagaccuacgugaacaucagcaacacgaacuucgccgcgggccaguccgucgugagcgugaagcuggccgggaacuccagccucugcccggucuccggcugggccaucuacagcaaggacaacuccauccgcaucggcagcaagggggacguguucgugauccgggagcccuucaucuccugcagcccccuggagugccgcaccuucuuccugacccagggcgcccuccugaacgacaagcacuccaacgggaccaucaaggaccggagccccuaccgcacgcugauguccugcccgaucggcgagguccccagccccuacaacagccgguucgaguccguggccuggagcgcguccgccugccacgacgggaucaacuggcucaccaucggcaucagcggccccgacaacggggccguggccguccugaaguacaacggcaucaucaccgacaccaucaaguccuggcgcaacaacauccugcggacgcaggagagcgagugcgcgugcgugaacggguccugcuucaccaucaugaccgacggcccgagcgacggccaggccuccuacaagaucuuccgcaucgagaaggggaagaucgucaagagcguggagaugaacgcccccaacuacuacuacgaggagugcuccugcuaccccgacagcuccgagaucacgugcgugugccgggacaacuggcacggcagcaaccgccccuggguguccuucaaccagaaccucgaguaccagaucggguacaucugcagcggcaucuucggggacaacccgcggcccaacgacaagaccggcuccugcggccccgucagcuccaacggggccaacggcgugaagggguucagcuucaaguacggcaacgggguguggaucggccgcaccaagagcaucuccagccggaagggcuucgagaugaucugggaccccaacgggugggccggcaccgacaacaacuucuccaucaagcaggacaucgucgggaucaacgaguggagcggcuacuccgggagcuucgugcagcacccggagcugaccggccuggacugcauccgccccugcuucuggguggagcucauccggggccgccccaaggagaacacgaucuggaccuccgggagcuccaucagcuucugcggcgucaacuccgacaccgugggguggagcuggcccgacggcgcggagcugccguucaccaucgacaaguga

SEQ ID NO: 85120 - RNA, 1410 nt, Artificial Sequence; identical to SEQ ID NO: 85102
  derived and/or modified CDS sequence (opt1) from neuraminidase__InfluenzaA__AEQ49759

SEQ ID NO: 85121 - RNA, 1410 nt, Artificial Sequence; identical to SEQ ID NO: 85102
  derived and/or modified CDS sequence (opt1) from neuraminidase__InfluenzaA__AEQ49760

SEQ ID NO: 85122 - RNA, 1410 nt, Artificial Sequence
  derived and/or modified CDS sequence (opt1) from neuraminidase__InfluenzaA__AEQ49761
augaaccccaaccagaagaucaucaccaucggcagcgugugcaugaccaucgggauggccaaccugauccuccagaucggcaacaucaucuccaucuggaucagccacuccauccagcuggggaaccagagccagaucgagacgugcaaccaguccgucaucaccuacgagaacaacaccuggcugaaccagaccuacgugaacaucagcaacacgaacuucgccgcgggccaguccguggucagcgugaagcucgccgggaacuccagccugugcccgguguccggcugggccaucuacagcaaggacaacuccauccgcaucggcagcaagggggacgucuucgugauccgggagcccuucaucuccugcagccccuccgagugccgcaccuucuuccugacccagggcgcccuccugaacgacaagcacagcaacgggaccaucaaggaccggucccccuaccgcacgcugaugagcugcccgaucggcgaggugcccagccccuacaacucccgguucgagagcgucgccugguccgcgagcgccugccacgacgggaucaacuggcucaccaucggcaucuccggccccgacaacggggccguggccgugcugaaguacaacggcaucaucaccgacaccaucaagagcuggcgcaacaacauccugcggacgcaggaguccgagugcgcgugcgucaacgggagcugcuucaccaucaugaccgacggcccguccgacggccaggccagcuacaagaucuuccgcaucgagaaggggaagaucgugaaguccguggagaugaacgcccccaacuaccacuacgaggagugcagcugcuaccccgacuccagcgagaucacgugcgucugccgggacaacuggcacggcuccaaccgccccugggugagcuucaaccagaaccucgaguaccagaucggguacaucugcuccggcaucuucggggacaacccgcggcccaacgacaagaccggcagcugcggccccguguccagcaacggggccaacggcgucaagggguucagcuucaaguacggcaacgggguguggaucggccgcaccaaguccaucagcucccggaagggcuucgagaugaucugggaccccaacggguggaccggcaccgacaacaacuucagcaucaagcaggacaucguggggaucaacgagugguccggcuacagcggguccuucguccagcacccggagcugacgggccuggacugcauccgccccugcuucuggguggagcucauccggggccgcagcaaggagaacaccaucuggaccuccgggagcuccaucagcuucugcggcgugaacuccgacaccgucggguggagcuggcccgacggcgccgagcugcccuucacgaucgacaaguga

SEQ ID NO: 85123 - RNA, 1410 nt, Artificial Sequence
  derived and/or modified CDS sequence (opt1) from neuraminidase__InfluenzaA__AEQ49762
augaaccccaaccagaagaucaucaccaucggcagcgugugcaugaccaucgggauggccaaccugauccuccagaucggcaacaucaucuccaucuggaucagccacuccauccagcuggggaaccagagccagaucgagacgugcaaccaguccgucaucaccuacgagaacaacaccuggaucaaccagaccuacgugaacaucagcaacacgaacuucgccgcgggccaguccguggucagcgugaagcuggccgggaacuccagccucugcccgguguccggcugggccaucuacagcaaggacaacuccauccgcaucggcagcaagggggacgucuucgugauccgggagcccuucaucuccugcagcccccuggagugccgcaccuucuuccugacccagggcgcccuccugaacgacaagcacuccaacgggaccaucaaggaccggagccccuaccgcacgcugauguccugcccgaucggcgaggugcccagccccuacaacagccgguucgaguccgucgccuggagcgcguccgccugccacgacgggaucaacuggcucaccaucggcaucagcggccccgacaacggggccguggccgugcugaaguacaacggcaucaucaccgacaccaucaaguccuggcgcaacaacauccugcggacgcaggagagcgagugcgcgugcgucaacggguccugcuucaucaucaugaccgacggcccgagcgacggccaggccuccuacaagaucuuccgcaucgagaaggggaagaucgucaagagcguggagaugaacgcccccaacuaccacuacgaggagugcuccugcuaccccgacagcuccgagaucacgugcgugugccgggacaacuggcacggcagcaaccgccccuggguguccuucaaccagaaccucgaguaccagaucggguacaucugcagcggcaucuucggggacaacccgcggcccaacgacaagaccggcuccugcggccccgugagcuccaacggggccaacggcgucaagggguucagcuucaaguacggcaacgggguguggaucggccgcaccaagagcaucuccagccggaagggcuucgagaugaucugggaccccaacggguggaccggcaccgacaacaacuucuccaucaagcaggacaucguggggaucaacgaguggagcggcuacuccgggagcuucguccagcacccggagcugaccggccuggacugcauccgccccugcuucuggguggagcucauccggggccgccccaaggagaacacgaucuggaccuccgggagcuccaucagcuucugcggcgugaacuccgacaccgucggguggagcuggcccgacggcgccgagcugccguucaccaucgacaaguga

SEQ ID NO: 85124 - RNA, 1410 nt, Artificial Sequence; identical to SEQ ID NO: 85102
  derived and/or modified CDS sequence (opt1) from neuraminidase__InfluenzaA__AEQ49763

SEQ ID NO: 85125 - RNA, 1410 nt, Artificial Sequence; identical to SEQ ID NO: 85102
  derived and/or modified CDS sequence (opt1) from neuraminidase__InfluenzaA__AEQ49764

SEQ ID NO: 85126 - RNA, 1410 nt, Artificial Sequence; identical to SEQ ID NO: 85102
  derived and/or modified CDS sequence (opt1) from neuraminidase__InfluenzaA__AEQ49765

SEQ ID NO: 85127 - RNA, 1410 nt, Artificial Sequence
  derived and/or modified CDS sequence (opt1) from neuraminidase__InfluenzaA__AEQ49766
augaaccccaaccagaagaucaucaccaucggcagcgugugcaugaccaucgggauggccaaccugauccuccagaucggcaacaucaucuccaucuggaucagccacuccauccagcuggggaaccagagccagaucgagacgugcaaccaguccgucaucaccuacgagaacaacaccugggugaaccagaccuacgugaacaucagcaacacgaacuucgccgcgggccaguccgucgugagcgugaagcugaccgggaacuccagccucugcccggucuccggcugggccaucuacagcaaggacaacuccauccgcaucggcagcaagggggacguguucgugauccgggagcccuucaucuccugcagcccccuggagugccgcaccuucuuccugacccagggcgcccuccugaacgacaagcacuccaacgggacgaucaaggaccggagccccuaccgcacccugauguccugcccgaucggcgagguccccagccccuacaacagccgguucgaguccguggccuggagcgccuccgcgugccacgacgggaucaacuggcucaccaucggcaucagcggccccgacaacggggccguggccguccugaaguacaacggcaucaucaccgacacgaucaaguccuggcgcaacaacauccugcggacccaggagagcgagugcgccugcgugaacggguccugcuucaccaucaugaccgacggcccgagcgacggccaggcguccuacaagaucuuccgcaucgagaaggggaagaucgucaagagcguggagaugaacgcccccaacuaccacuacgaggagugcuccugcuaccccgacagcuccgagaucacgugcgugugccgggacaacuggcacggcagcaaccgccccuggguguccuucaaccagaaccucgaguaccagaucggguacaucugcagcggcaucuucggggacaacccgcggcccaacgacaagaccggcuccugcggccccgucagcuccaacggggccaacggcgugaagggguucagcuucaaguacggcaacgggguguggaucggccgcaccaagagcaucuccagccggaagggcuucgagaugaucugggaccccaacggguggaccggcacggacaacaacuucuccaucaagcaggacaucgucgggaucaacgaguggagcggcuacuccgggagcuucgugcagcacccggagcugaccggccuggacugcauccgccccugcuucuggguggagcucauccggggccgccccaaggagaacaccaucuggaccuccgggagcuccaucagcuucugcggcgucaacuccgacacggugggguggagcuggcccgacggcgccgagcugccguucaccaucgacaaguga

SEQ ID NO: 85128 - RNA, 1410 nt, Artificial Sequence
  derived and/or modified CDS sequence (opt1) from neuraminidase__InfluenzaA__AEQ49767
augaaccccaaccagaagaucaucaccaucggcagcgugugcaugaccaucgggauggccaaccugauccuccagaucggcaacaucaucuccaucuggaucagccacuccauccagcuggggaaccagagccagaucgagacgugcaaccaguccgucaucaccuacgagaacaacaccugggugaaccagaccuacgugaacaucagcaacacgaacuucgccgcgggccaguccgucgugagcgugaagcuggccgggaacuccagccucugcccggucuccggcugggccaucuacagcaaggacaacuccauccgcaucggcagcaagggggacguguucgugauccgggagcccuucaucuccugcagcccccuggagugccgcaccuucuuccugacccagggcgcccuccugaacgacaagcacuccaacgggaccaucaaggaccggagccccuaccgcacgcugauguccugcccgaucggcgagguccccagccccuacaacagccgguucgaguccguggccuggagcgcguccgccugccacgacgggaucaacuggcucaccaucggcaucagcggccccgacaacggggccguggccguccugaaguacaacggcaucaucaccgacaccaucaaguccuggcgcaacaacauccugcggacgcaggagagcgagugcgcgugcgugaacggguccugcuucaccaucaugaccgacggcccgagcgacggccaggccuccuacaagaucuucaagaucgagaaggggaagaucgucaagagcguggagaugaacgcccccaacuaccacuacgaggagugcuccugcuaccccgacagcuccgagaucacgugcgugugccgcgacaacuggcacggcagcaaccggcccuggguguccuucaaccagaaccucgaguaccagaucggguacaucugcagcggcaucuucggggacaacccgcgccccaacgacaagaccggcuccugcggccccgucagcuccaacggggccaacggcgugaagggguucagcuacaaguacggcaacgggguguggaucggccggaccaagagcaucuccagccgcaagggcuucgagaugaucugggaccccaacggguggaccggcaccgacaacaacuucuccaucaagcaggacaucgucgggaucaacgaguggagcggcuacuccgggagcuucgugcagcacccggagcugacgggcaugggcugcauccggcccugcuucuggguggagcugauccgcgggcggcccaaggagaacaccaucuggaccuccggcagcuccaucagcuucugcggggucaacuccgacaccgugggcuggagcuggcccgacggcgccgagcucccguucacgaucgacaaguga

SEQ ID NO: 85129 - RNA, 1410 nt, Artificial Sequence; identical to SEQ ID NO: 84281
  derived and/or modified CDS sequence (opt1) from neuraminidase__InfluenzaA__AEQ49768

SEQ ID NO: 85130 - RNA, 1410 nt, Artificial Sequence; identical to SEQ ID NO: 85102
  derived and/or modified CDS sequence (opt1) from neuraminidase__InfluenzaA__AEQ49769

SEQ ID NO: 85131 - RNA, 1410 nt, Artificial Sequence
  derived and/or modified CDS sequence (opt1) from neuraminidase__InfluenzaA__AEQ49770
augaaccccaaccagaagaucaucaccaucggcagcgugugcaugaccaucgggauggccaaccugauccuccagaucggcaacaucaucuccgucuggaucagccacuccauccagcuggggaaccagaaccagacggagaccugcaaccagagcgugaucaccuacgagaacaacaccugggugaaccagacguacgucaacaucuccaacaccaacuucgccgcgggccagagcgugguguccgucaagcuggccgggaacagcucccucugcccggugagcggcugggccaucuacuccaaggacaacagcauccgcaucggcuccaagggggacguguucgucauccgggagcccuucaucagcugcagcccccuggagugccgcaccuucuuccugacccagggcgcccuccugaacgacaagcacuccaacgggacgaucaaggaccggucccccuaccgcacccugaugagcugcccgaucggcgaggugcccucccccuacaacagccgguucgagagcguggccugguccgcgagcgccugccacgacgggaucaacuggcucaccaucggcaucuccggccccgacaacggggccgucgccgugcugaaguacaacggcaucaucaccgacacgaucaagagcuggcgcaacaacauccugcggacccaggaguccgagugcgcgugcgugaacgggagcugcuucaccgucaugaccgacggcccguccgacggccaggccagcuacaagaucuuccgcaucgagaaggggaagaucgugaaguccguggagaugaacgcccccaacuaccacuacgaggagugcagcugcuaccccgacuccagcgagaucacgugcgucugccgggacaacuggcacggcuccaaccgccccugggugagcuucaaccagaaccucgaguaccggaucggguacaucugcuccggcaucuucggggacaacccgcgccccaacgacaagaccggcagcugcggccccguguccagcaacggggccaacggcgucaagggguucuccuucaaguacggcaacgggguguggaucggccggaccaagagcaucagcucccgcaacggcuucgagaugaucugggaccccaacggguggaccggcacggacaacaacuucagcaucaagcaggacaucaucgggaucaacgagugguccggcuacagcggguccuucgugcagcacccggagcugaccggccuggacugcauccggcccugcuucugggucgagcucauccgcggccggcccaaggagaacaccaucuggaccagcggguccagcaucuccuucugcggcgugaacagcgacacggucgggugguccuggcccgacggcgccgagcugccguucaccguggacaaguga

SEQ ID NO: 85132 - RNA, 1410 nt, Artificial Sequence; identical to SEQ ID NO: 85115
  derived and/or modified CDS sequence (opt1) from neuraminidase__InfluenzaA__AEQ49771

SEQ ID NO: 85133 - RNA, 1410 nt, Artificial Sequence; identical to SEQ ID NO: 84281
  derived and/or modified CDS sequence (opt1) from neuraminidase__InfluenzaA__AEQ49772

SEQ ID NO: 85134 - RNA, 1410 nt, Artificial Sequence
  derived and/or modified CDS sequence (opt1) from neuraminidase__InfluenzaA__AEQ49773
augaaccccaaccagaagaucaucaccaucggcagcaucugcaugaccaucgggauggccaaccugauccuccagaucggcaacaucaucuccaucuggaucagccacuccauccagcuggggaaccagagccagaucgagacgugcaaccaguccgugaucaccuacgagaacaacaccugggucaaccagaccuacgugaacaucagcaacacgaacuucgccgcgggccaguccguggucagcgugaagcuggccgggaacuccagccucugcccgguguccggcugggccaucuacagcaaggacaacuccauccgcaucggcagcaagggggacgucuucgugauccgggagcccuucaucuccugcagcccccuggagugccgcaccuucuuccugacccagggcgcccuccugaacgacaagcacuccaacgggaccaucaaggaccggagccccuaccgcacgcugauguccugcccgaucggcgaggugcccagccccuacaacagccgguucgaguccgucgccuggagcgcguccgccugccacgacgggaucaacuggcucaccaucggcaucagcggccccgacaacggggccguggccgugcugaaguacaacggcaucaucaccgacaccaucaaguccuggcgcaacaacauccugcggacgcaggagagcgagugcgcgugcgucaacggguccugcuucaccaucaugaccgacggcccgagcgacggccaggccuccuacaagaucuuccgcaucgagaaggggaagaucgucaagagcguggagaugaacgcccccaacuaccacuacgaggagugcuccugcuaccccgacagcuccgagaucacgugcgugugccgggacaacuggcacggcagcaaccgccccuggguguccuucaaccagaaccucgaguaccagaucggguacaucugcagcggcaucuucggggacaacccgcggcccaacgacaagaccggcuccugcggccccgugagcuccaacggggccaacggcgucaagggguucagcuucaaguacggcaacgggguguggaucggccgcaccaagagcaucuccagccggaagggcuucgagaugaucugggaccccaacggguggaccggcaccgacaacaacuucuccaucaagcaggacaucguggggaucaacgaguggagcggcuacuccgggagcuucguccagcacccggagcugacgggccuggacugcauccgccccugcuucuggguggagcucauccggggccgccccaaggagaacaccaucuggaccuccgggagcuccaucagcuucugcggcgugaacuccaacaccgucggguggagcuggcccgacggcgccgagcugccguucacgaucgacaaguga

SEQ ID NO: 85135 - RNA, 1410 nt, Artificial Sequence
  derived and/or modified CDS sequence (opt1) from neuraminidase__InfluenzaA__AEQ49774
augaaccccaaccagaagaucaucaccaucggcagcgugugcaugaccaucgggauggccaaccugauccuccagaucggcaacaucaucuccaucuggaucagccacuccauccagcuggggaaccagagccagaucgagacgugcaaccaguccgucaucaccuacgaguacaacaccugggugaaccagaccuacaucaacaucagcaacacgaacuucgccgcgggccaguccguggucagcgugaagcugguggggaacuccagccucugcccggucuccggcugggccaucuacagcaaggacaacuccauccgcaucggcagcaagggggacguguucgugauccgggagcccuucaucuccugcagcccccuggagugccgcaccuucuuccugacccagggcgcccuccugaacgacaagcacuccaacgggaccaucaaggaccggagccccuaccgcacgcugauguccugcccgaucggcgagguccccagccccuacaacagccgguucgaguccguggccuggagcgccuccgcgugccacgacgggaucaacuggcucaccaucggcaucagcggccccgacaacggggccguggccguccugaaguacaacggcaucaucaccgacaccaucaaguccuggcgcaacaacauccugcggacgcaggagagcgagugcgccugcgugaacggguccugcuucaccaucaugaccgacggcccgagcgacggccaggcguccuacaagaucuuccgcaucgagaaggggaagaucgucaagagcguggagaugaacgcccccaacuaccacuacgaggagugcuccugcuaccccgacagcuccgagaucacgugcgugugccgggacaacuggcacggcagcaaccgccccuggguguccuucaaccagaaccucgaguaccagaucggguacaucugcagcggcaucuucggggacaacccgcggcccaacgacaagaccggcuccugcggccccgucagcuccaacggggccaacggcgugaagggguucagcuucaaguacggcaacgggguguggaucggccgcaccaagagcaucuccagccggaagggcuacgagaugaucugggaccccaacggguggaccggcaccgacaacaacuucuccaucaagcaggacaucgucgggaucaacgaguggagcggcuacuccgggagcuucgugcagcacccggagcugacgggcauggacugcauccgccccugcuucuggguggagcugauccggggccgccccaaggagaacaccaucuggaccuccgggagcuccaucagcuucugcggcgucaacuccgacaccgugggguggagcuggcccgacggcgccgagcucccguucacgaucgacaaguga

SEQ ID NO: 85136 - RNA, 1410 nt, Artificial Sequence; identical to SEQ ID NO: 84281
  derived and/or modified CDS sequence (opt1) from neuraminidase__InfluenzaA__AEQ49775

SEQ ID NO: 85137 - RNA, 1410 nt, Artificial Sequence
  derived and/or modified CDS sequence (opt1) from neuraminidase__InfluenzaA__AEQ49776
augaaccccaaccagaagaucaucaccaucggcagcgugugcaugaccaucgggauggccaaccugauccuccagaucggcaacaucaucuccaucuggaucagccacuccauccagcuggggaaccagagccagaucgagacgugcaaccaguccgucaucaccuacgagaacaacaccugggugaaccagaccuacgugaacaucagcaacacgaacuucgccgcgggccaguccgucgugagcgugaagcuggccgggaacuccagccucugcccggucuccggcugggccaucuacagcaaggacaacuccauccgcaucggcagcaagggggacguguucgugauccgggagcccuucaucuccugcagccccuccgagugccgcaccuucuuccugacccagggcgcccugcucaacgacaagcacagcaacgggaccaucaaggaccggucccccuaccgcacgcugaugagcugcccgaucggcgagguccccagccccuacaacucccgguucgagagcguggccugguccgcgagcgccugccacgacgggaucaacuggcugaccaucggcaucuccggccccgacaacggggccguggccguccucaaguacaacggcaucaucaccgacaccaucaagagcuggcgcaacaacauccugcggacgcaggaguccgagugcgcgugcgugaacgggagcugcuucaccaucaugaccgacggcccguccgacggccaggccagcuacaagaucuuccgcaucgagaaggggaagaucgugaaguccgucgagaugaacgcccccaacuaccacuacgaggagugcagcugcuaccccgacuccagcgagaucacgugcgugugccgggacaacuggcacggcuccaaccgccccugggugagcuucaaccagaaccuggaguaccagaucggguacaucugcuccggcaucuucggggacaacccgcggcccaacgacaagaccggcagcugcggccccgucuccagcaacggggccaacggcgugaagggguucagcuucaaguacggcaacgggguguggaucggccgcaccaaguccaucagcucccggaagggcuucgagaugaucugggaccccaacggguggaccggcaccgacaacaacuucagcaucaagcaggacaucgucgggaucaacgagugguccggcuacagcggguccuucgugcagcacccggagcucacgggccuggacugcauccgccccugcuucuggguggagcugauccggggccgccccaccgagaacaccaucuggaccagcggguccagcaucuccuucugcggcgucaacagcgacacgguggggugguccuggcccgacggcgccgagcucccguucaccaucgacaaguga

SEQ ID NO: 85138 - RNA, 1410 nt, Artificial Sequence; identical to SEQ ID NO: 85102
  derived and/or modified CDS sequence (opt1) from neuraminidase__InfluenzaA__AEQ49777

SEQ ID NO: 85139 - RNA, 1410 nt, Artificial Sequence
  derived and/or modified CDS sequence (opt1) from neuraminidase__InfluenzaA__AEQ49778
augaaccccaaccagaagaucaucaccaucggcagcgugugcaugaccaucgggauggccaaccugauccuccagaucggcaacaucaucuccaucuggaucagccacuccauccagcuggggaaccagagccagaucgagacgugcaaccaguccgucaucaccuacgagaacaacaccuggaucaaccagaccuacgugaacaucagcaacacgaacuucgccgcggugcaguccgucgugagcgugaagcuggccggcaacuccacccucugcccggucagcgggugggccaucuacuccaaggacaacagcauccgcaucggcuccaagggcgacguguucgugauccgggagcccuucaucagcugcagcccccuggagugccgcaccuucuuccugacccagggggcccuccugaacgacaagcacuccaacggcacgaucaaggaccggucccccuaccgcacccugaugagcugcccgaucggggagguccccucccccuacaacagccgguucgagagcguggccugguccgcgagcgccugccacgacggcaucaacuggcucaccaucgggaucuccggccccgacaacggcgccguggccguccugaaguacaacgggaucaucaccgacacgaucaagagcuggcgcaacaacauccugcggacccaggaguccgagugcgcgugcgugaacggcagcugcuucaccaucaugaccgacgggccguccgacggccaggccagcuacaagaucuuccgcaucgagaagggcaagaucgugaaguccgucgagaugaacgcccccaacuaccacuacgaggagugcagcugcuaccccgacuccagcgagaucacgugcgugugccgggacaacuggcacggguccaaccgccccugggugagcuucaaccagaaccucgaguaccagaucggcuacaucugcuccgggaucuucggcgacaacccgcggcccaacgacaagaccgggagcugcggccccgucuccagcaacggcgccaacggggugaagggcuucuccuucaaguacgggaacggcguguggaucgggcgcaccaagagcaucagcucccggaagggcuucgagaugaucugggaccccaacggcuggaccgggacggacaacaacuucagcaucaagcaggacaucgucggcaucaacgagugguccggguacagcggcuccuucgugcagcacccggagcugaccgggcuggacugcauccgccccugcuucuggguggagcucauccggggccgccccaaggagaacaccaucuggaccagcggcuccagcaucuccuucugcggggucaacagcgacacggugggcugguccuggcccgacggggccgagcugccguucaccaucgacaaguga

SEQ ID NO: 85140 - RNA, 1410 nt, Artificial Sequence
  derived and/or modified CDS sequence (opt1) from neuraminidase__InfluenzaA__AEQ49779
augaaccccaaccagaagaucaucaccaucggcagcgugugcaugaccaucgggauggccaaccugauccuccagaucggcaacaucaucuccaucuggaucagccacuccauccagcuggggaaccagaaccagacggagaccugcaaccagagcgucaucaccuacgagaacaacaccugggugaaccagacguacgugaacaucuccaacaccaacuucgccgcgggccagagcgucguguccgugaagcuggccgggaacagcucccucugcccggucagcggcugggccaucuacuccaaggacaacagcauccgcaucggcuccaagggggacguguucgugauccgggagcccuucaucagcugcagcccccuggagugccgcaccuucuuccugacccagggcgcccuccugaacgacaagcacuccaacgggacgaucaaggaccggucccccuaccgcacccugaugagcugcccgaucggcgagguccccucccccuacaacagccgguucgagagcguggccugguccgcgagcgccugccacgacgggaucaacuggcucaccaucggcaucuccggccccgacaacggggccguggccguccugaaguacaacggcaucaucaccgacacgaucaagagcuggcgcaacaacauccugcggacccaggaguccgagugcgcgugcgugaacgggagcugcuucaccgugaugaccgacggcccguccgacggccaggccagcuacaagaucuuccgcaucgagaaggggaagaucgucaaguccguggagaugaacgcccccaacuaccacuacgaggagugcagcugcuaccccgacuccagcgagaucacgugcgugugccgggacaacuggcacggcuccaaccgccccugggucagcuucaaccagaaccucgaguaccggaucggguacaucugcuccggcaucuucggggacaacccgcgccccaacgacaagaccggcagcugcggccccguguccagcaacggggccaacggcgugaagggguucuccuucaaguacggcaacggggucuggaucggccggaccaagagcaucagcucccgcaacggcuucgagaugaucugggaccccaacggguggaccggcacggacaacaacuucagcaucaagcaggacaucaucgggaucaacgagugguccggcuacagcggguccuucgugcagcacccggagcugaccggccuggacugcauccggcccugcuucuggguggagcucauccgcggccggcccaaggagaacaccaucuggaccagcggguccagcaucuccuucugcggcgucaacagcgacacgguggggugguccuggcccgacggcgccgagcugccguucaccgucgacaaguga

SEQ ID NO: 85141 - RNA, 1410 nt, Artificial Sequence; identical to SEQ ID NO: 84281
  derived and/or modified CDS sequence (opt1) from neuraminidase__InfluenzaA__AEQ49780

SEQ ID NO: 85142 - RNA, 1410 nt, Artificial Sequence; identical to SEQ ID NO: 84281
  derived and/or modified CDS sequence (opt1) from neuraminidase__InfluenzaA__AEQ49781

SEQ ID NO: 85143 - RNA, 1410 nt, Artificial Sequence; identical to SEQ ID NO: 85102
  derived and/or modified CDS sequence (opt1) from neuraminidase__InfluenzaA__AEQ49782

SEQ ID NO: 85144 - RNA, 1410 nt, Artificial Sequence
  derived and/or modified CDS sequence (opt1) from neuraminidase__InfluenzaA__AEQ49783
augaaccccaaccagaagaucaucaccaucggcagcgccugcaugaccaucgggauggccaaccugauccuccagaucggcaacaucaucuccaucuggaucagccacuccauccagcuggggaaccagagccagaucgagacgugcaaccaguccgugaucaccuacgagaacaacaccugggucaaccagaccuacgugaacaucagcaacacgaacuucgcggccggccaguccguggucagcgugaagcuggccgggaacuccagccucugcccgguguccggcugggccaucuacagcaaggacaacuccauccgcaucggcagcaagggggacgucuucgugauccgggagcccuucaucuccugcagcccccuggagugccgcaccuucuuccugacccagggcgcccuccugaacgacaagcacuccaacgggaccaucaaggaccggagccccuaccgcacgcugauguccugcccgaucggcgaggugcccagccccuacaacagccgguucgaguccgucgcguggagcgccuccgccugccacgacgggaucaacuggcucaccaucggcaucagcggccccgacaacggggccguggcggugcugaaguacaacggcaucaucaccgacaccaucaaguccuggcgcaacaacauccugcggacgcaggagagcgagugcgccugcgucaacggguccugcuucaccaucaugaccgacggcccgagcgacggccaggccuccuacaagaucuuccgcaucgagaaggggaagaucgucaagagcguggagaugaacgcccccaacuaccacuacgaggagugcuccugcuaccccgacagcuccgagaucacgugcgugugccgggacaacuggcacggcagcaaccgccccuggguguccuucaaccagaaccucgaguaccagaucggguacaucugcagcggcaucuucggggacaacccgcggcccaacgacaagaccggcuccugcggccccgugagcuccaacggggccaacggcgucaagggguucagcuucaaguacggcaacgggguguggaucggccgcaccaagagcaucuccagccggaagggcuucgagaugaucugggaccccaacggguggaccggcaccgacaacaacuucuccaucaagcaggacaucguggggaucaacgaguggagcggcuacuccgggagcuucguccagcacccggagcugacgggccuggacugcauccgccccugcuucuggguggagcucauccggggccgccccaaggagaacaccaucuggaccuccgggagcuccaucagcuucugcggcgugaacuccgacaccgucggguggagcuggcccgacggcgcggagcugccguucacgaucgacaaguga

SEQ ID NO: 85145 - RNA, 1410 nt, Artificial Sequence
  derived and/or modified CDS sequence (opt1) from neuraminidase__InfluenzaA__AEQ49785
augaaccccaaccagaagaucaucaccaucggcagcgugucccugaccaucagcacgaucugcuucuucaugcagaucgccauccucaucaccaccgucacccugcacuucaagcaguacgaguucaacuccccgcccaacaaccaggugaugcugugcgagcccacgaucaucgagcgcaacaucaccgagaucguguaccucaccaacaccacgaucgagaaggagaucugccccaagcuggccgaguaccggaacuggagcaagccgcagugcgacaucaccggguucgcgcccuucuccaaggacaacagcauccgccuguccgccggcggggacaucugggucacccgggagcccuacgugagcugcgaccccaacaagugcuaccaguucgcccucggccaggggaccacgcugaacaacgugcacuccaacaacaccguccgcgaccggaccccguaccgcacccugcucaugaacgagcugggcgugcccuuccaccugggcacgaagcaggucugcaucgccuggagcuccagcuccugccacgacgggaaggccuggcuccacgugugcaucaccggcgacgacaagaacgcgaccgccagcuucaucuacaacgggcggcugguggacuccguggucagcugguccaaggagauccugcgcacccaggagagcgagugcgugugcaucaacggcacgugcaccguggucaugaccgacggguccgccagcggcaaggccgacaccaagauccucuucaucgaggagggcaagaucgugcacacgagcacccuguccgggagcgcgcagcacguggaggagugcuccugcuacccccgguaccccggcguccgcugcgugugccgggacaacuggaaggggagcaaccgcccgaucguggacaucaacaugaaggaccacuccaucgucagcuccuacgugugcagcggccuggugggcgacacgccccggaagaacgacuccagcuccagcucccacugcuucgaccccaacgacgaggagggcgggcacggggucaagggcugggccuucgacgacgggaacgacguguggaugggccgcaccaucagcgagaagucccggcucggcuacgagaccuucaaggucaucgagggguggagcaaccccaaguccaagcugcagaucaaccgccaggugaucguggaccggggcgaccgcagcggguacuccggcaucuucagcgucgagggcaagagcugcaucaaccggugcuucuacguggagcugauccgcggguccaaggaggagaccgaggugcucuggaccagcaacuccaucgucguguucugcggcaccagcgggacguacggcaccggguccuggccggacggcgccgacaucaaccugaugcccaucuga

SEQ ID NO: 85146 - RNA, 1410 nt, Artificial Sequence; identical to SEQ ID NO: 85145
  derived and/or modified CDS sequence (opt1) from neuraminidase__InfluenzaA__AEQ49786

SEQ ID NO: 85147 - RNA, 1410 nt, Artificial Sequence; identical to SEQ ID NO: 85145
  derived and/or modified CDS sequence (opt1) from neuraminidase__InfluenzaA__AEQ49788

SEQ ID NO: 85148 - RNA, 1410 nt, Artificial Sequence; identical to SEQ ID NO: 85145
  derived and/or modified CDS sequence (opt1) from neuraminidase__InfluenzaA__AEQ49789

SEQ ID NO: 85149 - RNA, 1410 nt, Artificial Sequence
  derived and/or modified CDS sequence (opt1) from neuraminidase__InfluenzaA__AEQ49790
augaaccccaaccagaagaucaucaccaucggcagcgugucccugaccaucagcacgaucugcuucuucaugcagaucgccauccucaucaccaccgucacccugcacuucaagcaguacgaguucuacuccccgcccaacaaccaggugaugcugugcgagcccacgaucaucgagcgcaacaucaccgagaucguguaccucaccaacaccacgaucgagaaggagaucugccccaagcuggccgaguaccggaacuggagcaagccgcagugcgacaucaccggguucgcgcccuucuccaaggacaacagcauccgccuguccgccggcggggacaucugggucacccgggagcccuacgugagcugcgaccccgacaagugcuaccaguucgcccucggccaggggaccacgcugaacaacgugcacuccaacaacaccguccgcggccggaccccguaccgcacccugcucaugaacgagcugggcgugcccuuccaccuggggacgaagcaggucugcaucgccuggagcuccagcuccugccacgacggcaaggccuggcuccacgugugcaucaccggggacgacaagaacgcgaccgccagcuucaucuacaacggccggcugguggacuccguggucagcugguccaaggagauccugcgcacccaggagagcgagugcgugugcaucaacgggacgugcaccguggucaugaccgacggcuccgccagcggcaaggccgacaccaagauccucuucaucgaggaggggaagaucgugcacacgagcacccuguccggcagcgcgcagcacguggaggagugcuccugcuacccccgguaccccgggguccgcugcgugugccgggacaacuggaagggcagcaaccgcccgaucguggacaucaacaucaaggaccacuccaucgucagcuccuacgugugcagcggccuggugggggacacgccccggaagaacgacuccagcuccagcucccacugccucgaccccaacaacgaggagggcgggcacggcgucaaggggugggccuucgacgacggcaacgacguguggaugggccgcaccaucaacgagaccagccggcugggguacgagaccuucaaggucaucgagggcugguccaaccccaagagcaagcugcagaucaaccgccaggugaucguggaccgggggaaccgcuccggcuacagcgggaucuucuccgucgagggcaagagcugcaucaaccggugcuucuacguggagcucauccgcggccggaaggaggagaccgaggugcuguggaccagcaacuccaucgucguguucugcgggacgagcggcaccuacgggaccggcuccuggccggacggggccgaccugaaccucaugcccaucuga

SEQ ID NO: 85150 - RNA, 1410 nt, Artificial Sequence
  derived and/or modified CDS sequence (opt1) from neuraminidase__InfluenzaA__AEQ49791
augaaccccaaccagaagaucaucaccaucggcagcgugucccugaccaucagcacgaucugcuucuucaugcagaucgccauccucaucaccaccgucacccugcacuucaagcaguacgaguucuacccgccgcccaacaaccaggugaugcugugcgagcccacgaucaucgagcgcaacaucaccgagaucguguaccucaccaacaccacgaucgagaaggagaucugccccaagcuggccgaguaccggaacugguccaagccccagugcgacaucaccggguucgcgcccuucagcaaggacaacuccauccgccugagcgccggcggggacaucugggucacccgggagcccuacguguccugcgacccggacaagugcuaccaguucgcccucggccaggggaccacgcugaacaacgugcacagcaacaacaccguccgcaaccggacccccuaccgcacccugcucaugaacgagcugggcgugcccuuccaccugggcacgaagcaggucugcaucgccugguccagcuccagcugccacgacgggaaggccuggcuccacgugugcaucaccggcgacgacaagaacgcgaccgccuccuucaucuacaacgggcggcugguggacagcguggucuccuggagcaaggagauccugcgcacccaggaguccgagugcgugugcaucaacggcacgugcaccguggucaugaccgacgggagcgccuccggcaaggccgacaccaagauccucuucaucgaggagggcaagaucgugcacacgagcacccugagcggguccgcgcagcacguggaggagugcagcugcuacccccgguacccgggcguccgcugcgugugccgggacaacuggaagggguccaaccgccccaucguggacaucaacaucaaggaccacagcaucgucuccagcuacgugugcuccggccuggugggcgacacgccccggaagaacgacagcuccagcuccagccacugccucgaccccaacaacgaggagggcgggcacggggucaagggcugggccuucgacgacgggaacgacguguggaugggccgcaccaucaacgagaccucccggcugggcuacgagaccuucaaggucaucgagggguggagcaacccgaaguccaagcugcagaucaaccgccaggugaucguggaccggggcaaccgcagcggguacuccggcaucuucagcgucgaggggaaguccugcaucaaccggugcuucuacguggagcucauccgcggccggaaggaggagaccgaggugcuguggaccagcaacagcaucgucguguucugcggcacguccgggaccuacggcaccgggagcuggcccgacggcgccgaccugaaccucaugcccaucuga

SEQ ID NO: 85151 - RNA, 1410 nt, Artificial Sequence; identical to SEQ ID NO: 85145
  derived and/or modified CDS sequence (opt1) from neuraminidase__InfluenzaA__AEQ49792

SEQ ID NO: 85152 - RNA, 1410 nt, Artificial Sequence; identical to SEQ ID NO: 85145
  derived and/or modified CDS sequence (opt1) from neuraminidase__InfluenzaA__AEQ49793

SEQ ID NO: 85153 - RNA, 1410 nt, Artificial Sequence; identical to SEQ ID NO: 85145
  derived and/or modified CDS sequence (opt1) from neuraminidase__InfluenzaA__AEQ49794

SEQ ID NO: 85154 - RNA, 1410 nt, Artificial Sequence; identical to SEQ ID NO: 85145
  derived and/or modified CDS sequence (opt1) from neuraminidase__InfluenzaA__AEQ49795

SEQ ID NO: 85155 - RNA, 1410 nt, Artificial Sequence
  derived and/or modified CDS sequence (opt1) from neuraminidase__InfluenzaA__AEQ49796
augaaccccaaccagaagaucaucaccaucggcagcgugucccugaccaucagcacgaucugcuucuucaugcagaucgccauccucaucaccaccgucacccugcacuucaagcaguacgaguucaacuccccgcccaacaaccaggugaugcugugcgagcccacgaucaucgagcgcaacaucaccgagaucguguaccucaccaacaccacgaucgagaaggagaucugccccaagcuggccgaguaccggaacuggagcaagccgcagugcgacaucaccggguucgcgcccuucuccaaggacaacagcauccgccuguccgccggcggggacaucugggucacccgggagcccuacgugagcugcgaccccgacaagugcuaccaguucgcccucggccaggggaccacgcugaacaacgugcacuccaacaacaccguccgcggccggaccccguaccgcacccugcucaugaacgagcugggcgugcccuuccaccuggggacgaagcaggucugcaucgccuggagcuccagcuccugccacgacggcaaggccuggcuccacgugugcaucaccggggacgacaagaacgcgaccgccagcuucaucuacaacggccggcugguggacuccguggucagcugguccaaggagauccugcgcacccaggagagcgagugcgugugcaucaacgggacgugcaccguggucaugaccgacggcuccgccagcggcaaggccgacaccaagauccucuucaucgaggaggggaagaucgugcacacgagcacccuguccggcagcgcgcagcacguggaggagugcuccugcuacccccgguaccccgggguccgcugcgugugccgggacaacuggaagggcagcaaccgcccgaucguggacaucaacaucaaggaccacuccaucgucagcuccuacgugugcagcggccuggugggggacacgccccggaagaacgacuccagcuccagcucccacugccucgaccccaacaacgaggagggcgggcacggcgucaaggggugggccuucgacgacggcaacgacguguggaugggccgcaccaucaacgagaccagccggcugggguacgagaccuucaaggucaucgagggcugguccaaccccaagagcaagcugcagaucaaccgccaggugaucguggacaaggggaaccgguccggcuacagcgggaucuucuccgucgagggcaagagcugcaucaaccgcugcuucuacguggagcucauccggggccgcaaggaggagaccgaggugcuguggaccagcaacuccaucgucguguucugcgggacgagcggcaccuacgggaccggcuccuggccggacggggccgaccugaaccucaugcccaucuga

SEQ ID NO: 85156 - RNA, 1410 nt, Artificial Sequence; identical to SEQ ID NO: 85145
  derived and/or modified CDS sequence (opt1) from neuraminidase__InfluenzaA__AEQ49797

SEQ ID NO: 85157 - RNA, 1410 nt, Artificial Sequence; identical to SEQ ID NO: 85145
  derived and/or modified CDS sequence (opt1) from neuraminidase__InfluenzaA__AEQ49798

SEQ ID NO: 85158 - RNA, 1410 nt, Artificial Sequence; identical to SEQ ID NO: 85145
  derived and/or modified CDS sequence (opt1) from neuraminidase__InfluenzaA__AEQ49799

SEQ ID NO: 85159 - RNA, 1410 nt, Artificial Sequence; identical to SEQ ID NO: 85145
  derived and/or modified CDS sequence (opt1) from neuraminidase__InfluenzaA__AEQ49800

SEQ ID NO: 85160 - RNA, 1410 nt, Artificial Sequence; identical to SEQ ID NO: 85145
  derived and/or modified CDS sequence (opt1) from neuraminidase__InfluenzaA__AEQ49801

SEQ ID NO: 85161 - RNA, 1410 nt, Artificial Sequence; identical to SEQ ID NO: 85145
  derived and/or modified CDS sequence (opt1) from neuraminidase__InfluenzaA__AEQ49802

SEQ ID NO: 85162 - RNA, 1410 nt, Artificial Sequence
  derived and/or modified CDS sequence (opt1) from neuraminidase__InfluenzaA__AEQ49803
augaaccccaaccagaagaucaucaccaucggcagcgugucccugaccaucagcacgaucugcuucuucaugcagaucgccauccucaucaccaccgucacccugcacuucaagcaguacgaguucaacuccccgcccaacaaccaggugaugcugugcgagcccacgaucaucgagcgcaacaucaccgagaucguguaccucaccaacaccacgaucgagaaggagaucugccccaagcuggccgaguaccggaacuggagcaagccgcagugcgacaucaccggguucgcgcccuucuccaaggacaacagcauccgccuguccgccggcggggacaucugggucacccgggagcccuacgugagcugcgaccccaacaagugcuaccaguucgcccucggccaggggaccacgcugaacaacgugcacuccaacaacaccguccgcgaccggaccccguaccgcacccugcucaugaacgagcugggcgugcccuuccaccugggcacgaagcaggucugcaucgccuggagcuccagcuccugccacgacgggaaggccuggcuccacgugugcaucaccggcgacgacaagaacgcgaccgccagcuucaucuacaacgggcggcugguggacuccguggucagcugguccaaggagauccugcgcacccaggagagcgagugcgugugcaucaacggcacgugcaccguggucaugaccgacggguccgccagcggcaaggccgacaccaagauccucuucaucgaggagggcaagaucgugcacacgagcacccuguccgggagcgcgcagcacguggaggagugcuccugcuacccccgguaccccggcguccgcugcgugugccgggacaacuggaaggggagcaaccgcccgaucguggacaucaacaucaaggaccacuccaucgucagcuccuacgugugcagcggccuggugggcgacacgccccggaagaacgacuccaccagcuccagccacugccucgaccccaacaacgaggagggcgggcacggggucaagggcugggccuucgacgacgggaacgacguguggaugggccgcaccaucuccgagaccagccggcugggcuacgagaccuucaaggucaucgaggggugguccaaccccaagagcaagcugcagaucaaccgccaggugaucguggacaagggcaaccgguccggguacagcggcaucuucuccgucgagggcaagagcugcaucaaccgcugcuucuacguggagcucauccgggggcgcaaggaggagaccgaggugcuguggacgagcaacuccaucgucguguucugcggcaccagcgggaccuacggcaccggguccuggccggacggcgccgaccugaaccucaugacgaucuga

SEQ ID NO: 85163 - RNA, 1410 nt, Artificial Sequence
  derived and/or modified CDS sequence (opt1) from neuraminidase__InfluenzaA__AEQ49804
augaaccccaaccagaagaucaucaccaucggcagcgugucccugaccaucagcacgaucugcuucuucaugcagaucgccauccucaucaccaccgucacccugcacuucaagcaguacgaguucaacuccccgcccaacaaccaggugaugcugugcgagcccacgaucaucgagcgcaacaucaccgagaucguguaccucaccaacaccacgaucgagaaggagaucugccccaagccggccgaguaccggaacuggagcaagccccagugcgacaucaccggguucgcgcccuucuccaaggacaacagcauccgccuguccgccggcggggacaucugggucacccgggagcccuacgugagcugcgacccggacaagugcuaccaguucgcccugggccaggggaccacgcucaacaacgugcacuccaacaacaccguccgcgaccggacccccuaccgcacccugcugaugaacgagcucggcgugcccuuccaccugggcacgaagcaggucugcaucgccuggagcuccagcuccugccacgacgggaaggccuggcugcacgugugcaucaccggcgacgacaagaacgcgaccgccagcuucaucuacaacgggcggcucguggacuccguggucagcugguccaaggacauccugcgcacccaggagagcgagugcgugugcaucaacggcacgugcaccguggucaugaccgacggguccgccagcggcaaggccgacaccaagauccuguucaucgaggagggcaagaucgugcacacgagcacccucuccgggagcgcgcagcacguggaggagugcuccugcuacccccgguacccgggcguccgcugcgugugccgggacaacuggaaggggagcaaccgccccaucguggacaucaacaucaaggaccacuccaucgucagcuccuacgugugcagcggccuggugggcgacaccccgcggaagaacgacuccagcuccagcucccacugccuggaccccaacaacgaggagggcgggcacggggucaagggcugggccuucgacgacgggaacgacguguggaugggccgcaccaucaacgagacgagccggcucggcuacgagaccuucaaggucaucgaggggugguccaaccccaagagcaagcugcagaucaaccgccaggugaucguggaccggggcaaccgcuccggguacagcggcaucuucuccgucgagggcaagagcugcaucaaccggugcuucuacguggagcugauccgcgggcggaaggaggagaccgaggugcucuggaccagcaacuccaucgucguguucugcggcacgagcgggaccuacggcaccggguccuggcccgacggcgccgaccugaaccugaugcccaucuga

SEQ ID NO: 85164 - RNA, 1410 nt, Artificial Sequence
  derived and/or modified CDS sequence (opt1) from neuraminidase__InfluenzaA__AEQ49805
augaaccccaaccagaagaucaucaccaucggcagcgugucccugaccaucagcacgaucugcuucuucaugcagaucgccauccucaucaccaccgucacccugcacuucaagcaguacgaguucaacuccccgcccaacaaccaggugaugcugugcgagcccacgaucaucgagcgcaacaucaccgagaucguguaccucaccaacaccacgaucgagaaggagaucugccccaagccggccgaguaccggaacuggagcaagccccagugcgacaucaccggguucgcgcccuucuccaaggacaacagcauccgccuguccgccggcggggacaucugggucacccgggagcccuacgugagcugcgacccggacaagugcuaccaguucgcccugggccaggggaccacgcucaacaacgugcacuccaacaacaccguccgcaaccggacccccuaccgcacccugcugaugaacgagcucggcgugcccuuccaccugggcacgaagcaggucugcaucgccuggagcuccagcuccugccacgacgggaaggccuggcugcacgugugcaucaccggcgacgacaagaacgcgaccgccagcuucaucuacaacgggcggcucguggacuccguggucagcugguccaaggacauccugcgcacccaggagagcgagugcgugugcaucaacggcacgugcaccguggucaugaccgacggguccgccagcggcaaggccgacaccaagauccuguucaucgaggagggcaagaucgugcacacgagcacccucuccgggagcgcgcagcacguggaggagugcuccugcuacccccgguacccgggcguccgcugcgugugccgggacaacuggaaggggagcaaccgccccaucguggacaucaacaucaaggaccacuccaucgucagcuccuacgugugcagcggccuggugggcgacaccccgcggaagaacgacuccagcuccagcucccacugccuggaccccaacaacgaggagggcgggcacggggucaagggcugggccuucgacgacgggaacgacguguggaugggccgcaccaucaacgagacgagccggcucggcuacgagaccuucaaggucaucgaggggugguccaaccccaagagcaagcugcagaucaaccgccaggugaucguggaccggggcaaccgcuccggguacagcggcaucuucuccgucgagggcaagagcugcaucaaccggugcuucuacguggagcugauccgcgggcggaaggaggagaccgaggugcucuggaccagcaacuccaucgucguguucugcggcacgagcgggaccuacggcaccggguccuggcccgacggcgccgaccugaaccugaugcccaucuga

SEQ ID NO: 85165 - RNA, 1410 nt, Artificial Sequence
  derived and/or modified CDS sequence (opt1) from neuraminidase__InfluenzaA__AEQ49806
augaaccccaaccagaagaucaucaccaucggcagcgugucccugaccaucagcacgaucugcuucuucaugcagaucgccauccucaucaccaccgucacccugcacuucaagcaguacgaguucaacuccccgcccaacaaccaggugaugcugugcgagcccacgaucaucgagcgcaacaucaccgagaucguguaccucaccaacaccacgaucgagaaggagaucugccccaagcuggccgaguaccggaacuggagcaagccgcagugcgacaucaccggguucgcgcccuucuccaaggacaacagcauccgccuguccgccggcggggacaucugggucacccgggagcccuacgugagcugcgaccccgacaagugcuaccaguucgcccucggccaggggaccacgcugaacaacgugcacuccaacaacaccguccgcgaccggaccccguaccgcacccugcucaugaacgagcugggcgugcccuuccaccugggcacgaagcaggucugcaucgccuggagcuccagcuccugccacgacgggaaggccuggcuccacgugugcaucaccggcgacgacaagaacgcgaccgccagcuucaucuacaacgggcggcugguggacuccguggucagcugguccaaggagauccugcgcacccaggagagcgagugcgugugcaucaacggcacgugcaccguggucaugaccgacggguccgccagcggcaaggccgacaccaagauccucuucaucgaggagggcaagaucgugcacacgagcacccuguccgggagcgcgcagcacguggaggagugcuccugcuacccccgguaccccggcguccgcugcgugugccgggacaacuggaaggggagcaaccgcccgaucguggacaucaacaucaaggaccacuccaucgucagcuccuacgugugcagcggccuggugggcgacacgccccggaagaacgacuccuucagcuccagccacugccucgaccccaacaacgaggagggcgggcacggggucaagggcugggccuucgacgacgggaacgacguguggaugggccgcaccaucaacgagaccucccggcugggcuacgagaccuucaaggucaucgagggguggagcaaccccaaguccaagcugcagaucaaccgccaggugaucguggaccggggcaaccgcagcggguacuccggcaucuucagcgucgaggggaaguccugcaucaaccggugcuucuacguggagcucauccgcggccggaaggaggagaccgaggugcuguggaccagcaacagcaucgucguguucugcggcacguccgggaccuacggcaccgggagcuggccggacggcgccgaccugaaccucaugcccaucuga

SEQ ID NO: 85166 - RNA, 1410 nt, Artificial Sequence; identical to SEQ ID NO: 83542
  derived and/or modified CDS sequence (opt1) from neuraminidase__InfluenzaA__AEQ49807

SEQ ID NO: 85167 - RNA, 1410 nt, Artificial Sequence
  derived and/or modified CDS sequence (opt1) from neuraminidase__InfluenzaA__AEQ49809
augaaccccaaccagaagaucaucaccaucggcagcgugucccugaccaucagcacgaucugcuucuucaugcagaucgccauccucaucaccaccgucacccugcacuucaagcaguacgaguucaacuccccgcccaacaaccaggugaugcugugcgagcccacgaucaucgagcgcaacaucaccgagaucguguaccucaccaacaccacgaucgagaaggagaucugccccaagcuggccgaguaccggaacuggagcaagccgcagugcgacaucaccggguucgcgcccuucuccaaggacaacagcauccgccuguccgccggcggggacaucugggucacccgggagcccuacgugagcugcgaccccgacaagugcuaccaguucgcccucggccaggggaccacgcugaacaacgugcacuccaacaacaccguccgcgaccggaccccguaccgcacccugcucaugaacgagcugggcgugcccuuccaccugggcacgaagcaggucugcaucgccuggagcuccagcuccugccacgacgggaaggccuggcuccacgugugcaucaccggcgacgacaagaacgcgaccgccagcuucaucuacaacgggaagcugguggacuccguggucagcugguccaaggagauccugcggacccaggagagcgagugcgugugcaucaacggcacgugcaccguggucaugaccgacggguccgccagcggcaaggccgacaccaagauccucuucaucgaggagggcaagaucgugcacacgagcacccuguccgggagcgcgcagcacguggaggagugcuccugcuacccccgcuaccccggcguccggugcgugugccgcgacaacuggaaggggagcaaccggccgaucguggacaucaacaucaaggaccacuccaucgucagcuccuacgugugcagcggccuggugggcgacacgccccgcaagaacgacuccagcuccagcucccacugccucgaccccaacaacgaggagggcgggcacggggucaagggcugggccuucgacgacgggaacgacguguggaugggccggaccaucaacgagaccagccgccugggcuacgagaccuucaaggucaucgaggggugguccaaccccaagagcaagcugcagaucaaccgccaggugaucguggaccggggcaaccgguccggguacagcggcaucuucuccgucgagggcaagagcugcaucaaccgcugcuucuacguggagcucauccgggggcgcaaggaggagaccgaggugcuguggaccagcaacuccaucgucguguucugcggcacgagcgggaccuacggcaccggguccuggccggacggcgccgaccugaaccucaugcccaucuga

SEQ ID NO: 85168 - RNA, 1410 nt, Artificial Sequence; identical to SEQ ID NO: 85167
  derived and/or modified CDS sequence (opt1) from neuraminidase__InfluenzaA__AEQ49811

SEQ ID NO: 85169 - RNA, 1410 nt, Artificial Sequence; identical to SEQ ID NO: 83542
  derived and/or modified CDS sequence (opt1) from neuraminidase__InfluenzaA__AEQ49812

SEQ ID NO: 85170 - RNA, 1410 nt, Artificial Sequence; identical to SEQ ID NO: 83542
  derived and/or modified CDS sequence (opt1) from neuraminidase__InfluenzaA__AEQ49813

SEQ ID NO: 85171 - RNA, 1410 nt, Artificial Sequence; identical to SEQ ID NO: 83542
  derived and/or modified CDS sequence (opt1) from neuraminidase__InfluenzaA__AEQ49815

SEQ ID NO: 85172 - RNA, 1410 nt, Artificial Sequence
  derived and/or modified CDS sequence (opt1) from neuraminidase__InfluenzaA__AEQ49816
augaaccccaaccagaagaucaucaccaucggcagcgugucccugaccaucagcacgaucugcuucuucaugcagaucgccauccucaucaccaccgucacccugcacuucaagcaguacgaguucaacuccccgcccaacaaccaggugaugcugugcgagcccacgaucaucgagcgcaacaucaccgagaucguguaccucaccaacaccacgaucgagaaggagaucugccccaagcuggccgaguaccggaacuggagcaagccgcagugcgacaucaccggguucgcgcccuucuccaaggacaacagcauccgccuguccgccggcggggacaucugggucacccgggagcccuacgugagcugcgaccccaacaagugcuaccaguucgcccucggccaggggaccacgcugaacaacgugcacuccaacaacaccguccgcgaccggaccccguaccgcacccugcucaugaacgagcugggcgugcccuuccaccugggcacgaagcaggucugcaucgccuggagcuccagcuccugccacgacgggaaggccuggcuccacgugugcaucaccggcgacgacaagaacgcgaccgccagcuucaucuacaacgggcggcugguggacuccguggucagcugguccaaggagauccugcgcacccaggagagcgagugcgugugcaucaacggcacgugcaccguggucaugaccgacggguccgccagcggcaaggccgacaccaagauccucuucguggaggagggcaagaucgugcacacgagcacccuguccgggagcgcgcagcacgucgaggagugcuccugcuacccccgguaccccggcgugcgcugcgugugccgggacaacuggaaggggagcaaccgcccgaucgucgacaucaacaugaaggaccacuccaucgugagcuccuacgugugcagcggccuggucggcgacacgccccggaagaacgacuccagcuccagcucccacugcuucgaccccaacgacgaggagggcgggcacggggugaagggcugggccuucgacgacgggaacgacgucuggaugggccgcaccaucagcgagaagucccggcucggcuacgagaccuucaaggugaucgagggguggagcaaccccaaguccaagcugcagaucaaccgccaggugaucgucgaccggggcaaccgcagcggguacuccggcaucuucagcguggagggcaagagcugcaucaaccggugcuucuacguggagcugauccgcgggcggaaggaggagaccgagguccucuggaccuccaacagcaucgugguguucugcggcaccuccgggacguacggcaccgggagcuggccggacggcgccgacaucaaccugaugcccaucuga

SEQ ID NO: 85173 - RNA, 1410 nt, Artificial Sequence; identical to SEQ ID NO: 84907
  derived and/or modified CDS sequence (opt1) from neuraminidase__InfluenzaA__AEQ49820

SEQ ID NO: 85174 - RNA, 1410 nt, Artificial Sequence; identical to SEQ ID NO: 84907
  derived and/or modified CDS sequence (opt1) from neuraminidase__InfluenzaA__AEQ49821

SEQ ID NO: 85175 - RNA, 1410 nt, Artificial Sequence; identical to SEQ ID NO: 85145
  derived and/or modified CDS sequence (opt1) from neuraminidase__InfluenzaA__AEQ49822

SEQ ID NO: 85176 - RNA, 1410 nt, Artificial Sequence; identical to SEQ ID NO: 85145
  derived and/or modified CDS sequence (opt1) from neuraminidase__InfluenzaA__AEQ49823

SEQ ID NO: 85177 - RNA, 1410 nt, Artificial Sequence; identical to SEQ ID NO: 85145
  derived and/or modified CDS sequence (opt1) from neuraminidase__InfluenzaA__AEQ49824

SEQ ID NO: 85178 - RNA, 1410 nt, Artificial Sequence; identical to SEQ ID NO: 85145
  derived and/or modified CDS sequence (opt1) from neuraminidase__InfluenzaA__AEQ49825

SEQ ID NO: 85179 - RNA, 1410 nt, Artificial Sequence; identical to SEQ ID NO: 85145
  derived and/or modified CDS sequence (opt1) from neuraminidase__InfluenzaA__AEQ49826

SEQ ID NO: 85180 - RNA, 1410 nt, Artificial Sequence; identical to SEQ ID NO: 85145
  derived and/or modified CDS sequence (opt1) from neuraminidase__InfluenzaA__AEQ49827

SEQ ID NO: 85181 - RNA, 1410 nt, Artificial Sequence; identical to SEQ ID NO: 85145
  derived and/or modified CDS sequence (opt1) from neuraminidase__InfluenzaA__AEQ49828

SEQ ID NO: 85182 - RNA, 1410 nt, Artificial Sequence
  derived and/or modified CDS sequence (opt1) from neuraminidase__InfluenzaA__AEQ49829
augaaccccaaccagaagaucaucaccaucggcagcgugucccugaccaucagcacgaucugcuucuucaugcagaucgccauccucaucaccaccgucacccugcacuucaagcaguacgaguucaacuccccgcccaacaaccaggugaugcugugcgagcccacgaucaucgagcgcaacaucaccgagaucguguaccucaccaacaccacgaucgagaaggagaucugccccaagcuggccgaguaccggaacuggagcaagccgcagugcgacaucaccggguucgcgcccuucuccaaggacaacagcauccgccuguccgccggcggggacaucugggucacccgggagcccuacgugagcugcgaccccaacaagugcuaccaguucgcccucggccaggggaccacgcugaacaacgugcacuccaacaacaccguccgcgaccggaccccguaccgcacccugcucaugaacgagcugggcgugcccuuccaccugggcacgaagcaggucugcaucgccuggagcuccagcuccugccacgacgggaaggccuggcuccacgugugcaucaccggcgacgacaagaacgcgaccgccagcuucaucuacaacgggcggcugguggacuccguggucagcugguccaaggagauccugcgcacccaggagagcgagugcgugugcaucaacggcacgugcaccguggucaugaccgacggguccgcccucggcaaggccgacaccaagauccuguucaucgaggagggcaagaucgugcacacgagcacccugagcggguccgcgcagcacguggaggagugcagcugcuacccccgguaccccggcguccgcugcgugugccgggacaacuggaagggguccaaccgcccgaucguggacaucaacaugaaggaccacagcaucgucuccagcuacgugugcuccggccucgugggcgacacgccccggaagaacgacagcuccagcuccagccacugcuucgaccccaacgacgaggagggcgggcacggggucaagggcugggccuucgacgacgggaacgacguguggaugggccgcaccaucuccgagaagucccggcugggcuacgagaccuucaaggucaucgagggguggagcaaccccaagagcaagcugcagaucaaccgccaggugaucguggaccggggcgaccgcuccggguacagcggcaucuucuccgucgagggcaagagcugcaucaaccggugcuucuacguggagcucauccgcgggagcaaggaggagaccgaggugcuguggaccuccaacagcaucgucguguucugcggcaccuccgggacguacggcaccgggagcuggccggacggcgccgacaucaaccugaugcccaucuga

SEQ ID NO: 85183 - RNA, 1410 nt, Artificial Sequence; identical to SEQ ID NO: 85145
  derived and/or modified CDS sequence (opt1) from neuraminidase__InfluenzaA__AEQ49830

SEQ ID NO: 85184 - RNA, 1410 nt, Artificial Sequence; identical to SEQ ID NO: 85145
  derived and/or modified CDS sequence (opt1) from neuraminidase__InfluenzaA__AEQ49831

SEQ ID NO: 85185 - RNA, 1410 nt, Artificial Sequence
  derived and/or modified CDS sequence (opt1) from neuraminidase__InfluenzaA__AEQ49832
augaaccccaaccagaagaucaucaccaucggcagcgugucccugaccaucagcacgaucugcuucuucaugcagaucgccauccucaucaccaccgucacccugcacuucaagcaguacgaguucaacuccccgcccaacaaccaggugaugcugugcgagcccacgaucaucgagcgcaacaucaccgagaucguguaccucaccaacaccacgaucgagaaggagaucugccccaagcuggccgaguaccggaacuggagcaagccgcagugcgacaucaccggguucgcgcccuucuccaaggacaacagcauccgccuguccgccggcggggacaucugggucacccgggagcccuacgugagcugcgaccccaacaagugcuaccaguucgcccucggccaggggaccacgcugaacaacgugcacuccaacaacaccguccgcgaccggaccccguaccgcacccugcucaugaacgagcugggcgugcccuuccaccugggcacgaagcaggucugcaucgccuggagcuccagcuccugccacgacgggaaggccuggcuccacgugugcaucaccggcgacgacaagaacgcgaccgccagcuucaucuacaacgggcggcugguggacuccguggucagcugguccaaggagauccugcgcacccaggagagcgagugcgugugcaucaacggcacgugcaccguggucaugaccgacggguccgccagcggcaaggccgacaccaagauccucuucaucgaggagggcaagaucgugcacacgagcacccuguccgggagcgcgcagcacguggaggagugcuccugcuacccccgguaccccggcguccgcugcgugugccgggacaacuggaaggggagcaaccgcccgaucguggacaucaacaugaaggaccacuccaucgucagcuccuacgugugcagcggccuggugggcgacacgccccggaagaacgacuccagcuccagcucccacugcuucgaccccaacgacgaggagggcgggcacggggucaagggcugggccuucgacgacgggaacgacguguggaugggccgcaccaucagcgagaagucccggcucggcuacgagaccuucaaggucguggagggguggagcaaccccaaguccaagcugcagaucaaccgccaggugaucgucgaccggggcgaccgcagcggguacuccggcaucuucagcguggagggcaagagcugcaucaaccggugcuucuacguggagcugauccgcggguccaaggaggagaccgagguccucuggaccagcaacuccaucgugguguucugcggcaccagcgggacguacggcaccggguccuggccggacggcgccgacaucaaccugaugcccaucuga

SEQ ID NO: 85186 - RNA, 1410 nt, Artificial Sequence
  derived and/or modified CDS sequence (opt1) from neuraminidase__InfluenzaA__AEQ49833
augaaccccaaccagaagaucaucaccaucggcagcgugucccugaccaucagcacgaucugcuucuucaugcagaucgccauccucaucaccaccgucacccugcacuucaagcaguacgaguucaacuccccgcccaacaaccaggugaugcugugcgagcccacgaucaucgagcgcaacaucaccgagaucguguaccucaccaacaccacgaucgagaaggagaucugccccaagcuggccgaguaccggaacuggagcaagccgcagugcgacaucaccggguucgcgcccuucuccaaggacaacagcauccgccuguccgccggcggggacaucugggucacccgggagcccuacgugagcugcgaccccgacaagugcuaccaguucgcccucggccaggggaccacgcugaacaacgugcacuccaacaacaccguccgcgaccggaccccguaccgcacccugcucaugaacgagcugggcgugcccuuccaccugggcacgaagcaggucugcaucgccuggagcuccagcuccugccacgacgggaaggccuggcuccacgugugcaucaccggcgacgacaagaacgcgaccgccagcuucaucuacaacgggaagcugguggacuccguggucagcugguccaaggagauccugcggacccaggagagcgagugcgugugcaucaacggcacgugcaccguggucaugaccgacggguccgccagcggcaaggccgacaccaagauccucuucaucgaggagggcaagaucgugcacacgagcacccuguccgggagcgcgcagcacguggaggagugcuccugcuacccccgcuaccccggcguccggugcgugugccgcgacaacuggaaggggagcaaccggccgaucguggacaucaacaucaaggaccacuccaucgucagcuccuacgugugcagcggccuggugggcgacacgccccgcaagaacgacuccagcuccagcucccacugccucgaccccaacaacgaggagggcgggcacggggucaagggcugggccuucgacgacgggaacgacguguggaugggccggaccaucaacgagaccagccgccugggcuacgagaccuucaaggucaucgaggggugguccaaccccaagagcaagcugcagaucucccgccaggugaucguggaccggggcaaccggagcggguacuccggcaucuucagcgucgagggcaagagcugcaucaaccgcugcuucuacguggagcucauccgggggcgcaaggaggagaccgaggugcuguggaccuccaacagcaucgucguguucugcggcacguccgggaccuacggcaccgggagcuggccggacggcgccgaccugaaccucaugcccaucuga

SEQ ID NO: 85187 - RNA, 1410 nt, Artificial Sequence
  derived and/or modified CDS sequence (opt1) from neuraminidase__InfluenzaA__AEQ49835
augaaccccaaccagaagaucaucaccaucggcagcgugucccugaccaucagcacgaucugcuucuucaugcagaucgccauccucaucaccaccgucacccugcacuucaagcaguacgaguucaacuccccgcccaacaaccaggugaugcugugcgagcccacgaucaucgagcgcaacaucaccgagaucguguaccucaccaacaccacgaucgagaaggagaucugccccaagcuggccgaguaccggaacuggagcaagccgcagugcgacaucaccggguucgcgcccuucuccaaggacaacagcauccgccuguccgccggcggggacaucugggucacccgggagcccuacgugagcugcgaccccaacaagugcuaccaguucgcccucggccaggggaccacgcugaacaacgugcacuccaacaacaccguccgcgaccggaccccguaccgcacccugcucaugaacgagcugggcgugcccuuccaccugggcacgaagcaggucugcauggccuggagcuccagcuccugccacgacgggaaggccuggcuccacgugugcaucaccggcgacgacaagaacgcgaccgccagcuucaucuacaacgggcggcugguggacuccguggucagcugguccaaggagauccugcgcacccaggagagcgagugcgugugcaucaacggcacgugcaccguggucaugaccgacggguccgccagcggcaaggccgacaccaagauccucuucaucgaggagggcaagaucgugcacacgagcacccuguccgggagcgcgcagcacguggaggagugcuccugcuacccccgguaccccggcguccgcugcgugugccgggacaacuggaaggggagcaaccgcccgaucguggacaucaacaugaaggaccacuccaucgucagcuccuacgugugcagcggccuggugggcgacacgccccggaagaacgacuccagcuccagcucccacugcuucgaccccaacgacgaggagggcgggcacggggucaagggcugggccuucgacgacgggaacgacguguggaugggccgcaccaucagcgagaagucccggcucggcuacgagaccuucaaggucaucgagggguggagcaaccccaaguccaagcugcagaucaaccgccaggugaucguggaccggggcaaccgcagcggguacuccggcaucuucagcgucgagggcaagagcugcaucaaccggugcuucuacguggagcugauccgcgggcggaaggaggagaccgaggugcucuggaccuccaacagcaucgucguguucugcggcaccuccgggacguacggcaccgggagcuggccggacggcgccgacaucaaccugaugcccaucuga

SEQ ID NO: 85188 - RNA, 1410 nt, Artificial Sequence; identical to SEQ ID NO: 85187
  derived and/or modified CDS sequence (opt1) from neuraminidase__InfluenzaA__AEQ49836

SEQ ID NO: 85189 - RNA, 1410 nt, Artificial Sequence; identical to SEQ ID NO: 85187
  derived and/or modified CDS sequence (opt1) from neuraminidase__InfluenzaA__AEQ49838

SEQ ID NO: 85190 - RNA, 1410 nt, Artificial Sequence; identical to SEQ ID NO: 85187
  derived and/or modified CDS sequence (opt1) from neuraminidase__InfluenzaA__AEQ49839

SEQ ID NO: 85191 - RNA, 1410 nt, Artificial Sequence
  derived and/or modified CDS sequence (opt1) from neuraminidase__InfluenzaA__AEQ49840
augaaccccaaccagaagaucaucaccaucggcagcgugucccugaccaucagcacgaucugcuucuucaugcagaucgccauccucaucaccaccgucacccugcacuucaagcaguacgaguucaacuccccgcccaacaaccaggugaugcugugcgagcccacgaucaucgagcgcaacaucaccgagaucguguaccucaccaacaccacgaucgagaaggagaucugccccaagcuggccgaguaccggaacuggagcaagccgcagugcgacaucaccggguucgcgcccuucuccaaggacaacagcauccgccuguccgccggcggggacaucugggucacccgggagcccuacgugagcugcgaccccaacaagugcuaccaguucgcccucggccaggggaccacgcugaacaacgugcacuccaacaacaccguccgcgaccggaccccguaccgcacccugcucaugaacgagcugggcgugcccuuccaccugggcacgaagcaggucugcauggccuggagcuccagcuccugccacgacgggaaggccuggcuccacgugugcaucaccggcgacgacaagaacgcgaccgccagcuucaucuacaacgggcggcugguggacuccguggucagcugguccaaggagauccugcgcacccaggagagcgagugcgugugcaucaacggcacgugcaccguggucaugaccgacggguccgccagcggcaaggccgacaccaagauccucuucaucgaggagggcaagaucgugcacacgagcacccuguccgggagcgcgcagcacguggaggagugcuccugcuacccccgguaccccggcguccgcugcgugugccgggacaacuggaaggggagcaaccgcccgaucguggacaucaacaugaaggaccacuccaucgucagcuccuacgugugcagcggccuggugggcgacacgccccggaagaacgacuccagcuccagcucccacugcuucgaccccaacgacgaggagggcgggcacggggucaagggcugggccuucgacgacgggaacgacguguggaugggccgcaccaucagcgagaagucccggcucggcuacgagaccuucaaggucaucgagggguggagcaaccacaaguccaagcugcagaucaaccgccaggugaucguggaccggggcaaccgcagcggguacuccggcaucuucagcgucgagggcaagagcugcaucaaccggugcuucuacguggagcugauccgcgggcggaaggaggagaccgaggugcucuggaccuccaacagcaucgucguguucugcggcaccuccgggacguacggcaccgggagcuggcccgacggcgccgacaucaaccugaugccgaucuga

SEQ ID NO: 85192 - RNA, 1410 nt, Artificial Sequence; identical to SEQ ID NO: 85187
  derived and/or modified CDS sequence (opt1) from neuraminidase__InfluenzaA__AEQ49841

SEQ ID NO: 85193 - RNA, 1410 nt, Artificial Sequence; identical to SEQ ID NO: 85187
  derived and/or modified CDS sequence (opt1) from neuraminidase__InfluenzaA__AEQ49842

SEQ ID NO: 85194 - RNA, 1410 nt, Artificial Sequence; identical to SEQ ID NO: 85187
  derived and/or modified CDS sequence (opt1) from neuraminidase__InfluenzaA__AEQ49843

SEQ ID NO: 85195 - RNA, 1410 nt, Artificial Sequence; identical to SEQ ID NO: 85145
  derived and/or modified CDS sequence (opt1) from neuraminidase__InfluenzaA__AEQ49844

SEQ ID NO: 85196 - RNA, 1410 nt, Artificial Sequence
  derived and/or modified CDS sequence (opt1) from neuraminidase__InfluenzaA__AEQ49845
augaaccccaaccagaagaucaucaccaucggcagcgugucccugaccaucagcacgaucugcuucuucaugcagaucgccauccucaucaccaccgucacccugcacuucaagcaguacgaguucaacuccccgcccaacaaccaggugaugcugugcgagcccacgaucaucgagcgcaacaucaccgagaucguguaccucaccaacaccacgaucgagcgggagaucugccccaagcuggccgaguaccgcaacuggagcaagccgcagugcgacaucaccggguucgcgcccuucuccaaggacaacagcauccggcuguccgccggcggggacaucugggucacccgcgagcccuacgugagcugcgaccccaacaagugcuaccaguucgcccucggccaggggaccacgcugaacaacgugcacuccaacaacaccguccgggaccgcaccccguaccggacccugcucaugaacgagcugggcgugcccuuccaccugggcacgaagcaggucugcauggccuggagcuccagcuccugccacgacgggaaggccuggcuccacgugugcaucaccggcgacgacaagaacgcgaccgccagcuucaucuacaacgggcgccugguggacuccguggucagcugguccaaggagauccugcggacccaggagagcgagugcgugugcaucaacggcacgugcaccguggucaugaccgacggguccgccagcggcaaggccgacaccaagauccucuucaucgaggagggcaagaucgugcacacgagcacccuguccgggagcgcgcagcacguggaggagugcuccugcuacccccgcuaccccggcguccggugcgugugccgcgacaacuggaaggggagcaaccggccgaucguggacaucaacaugaaggaccacuccaucgucagcuccuacgugugcagcggccuggugggcgacacgccccgcaagaacgacuccagcuccagcucccacugcuucgaccccaacgacgaggagggcgggcacggggucaagggcugggccuucgacgacgggaacgacguguggaugggccggaccaucagcgagaagucccgccucggcuacgagaccuucaaggucaucgagggguggagcaaccccaaguccaagcugcagaucaaccgccaggugaucguggaccggggcaaccggagcggguacuccggcaucuucagcgucgagggcaagagcugcaucaaccgcugcuucuacguggagcugauccgggggcgcaaggaggagaccgaggugcucuggaccuccaacagcaucgucguguucugcggcaccuccgggacguacggcaccgggagcuggccggacggcgccgacaucaaccugaugcccaucuga

SEQ ID NO: 85197 - RNA, 1410 nt, Artificial Sequence
  derived and/or modified CDS sequence (opt1) from neuraminidase__InfluenzaA__AEQ49846
augaaccccaaccagaagaucaucaccaucggcagcgugucccugaccaucagcacgaucugcuucuucaugcagaucgccauccucaucaccaccgucacccugcacuucaagcaguacgaguucaacuccccgcccaacaaccaggugaugcugugcgagcccacgaucaucgagcgcaacaucaccgagaucguguaccucaccaacaccacgaucgagaaggagaucugccccaagcuggccgaguaccggaacuggagcaagccgcagugcgacaucaccggguucgcgcccuucuccaaggacaacagcauccgccuguccgccggcggggacaucugggucacccgggagcccuacgugagcugcgaccccaacaagugcuaccaguucgcccucggccaggggaccacgcugaacaacgugcacuccaacaacaccguccgcgaccggaccccguaccgcacccugcucaugaacgagcugggcgugcccuuccaccugggcacgaagcaggucugcauggccuggagcuccagcuccugccacgacgggaaggccuggcuccacgugugcaucaccggcgacgacaagaacgcgaccgccagcuucaucuacaacgggcggcugguggacuccguggucagcugguccaaggagauccugcgcacccaggagagcgagugcgugugcaucaacggcacgugcaccguggucaugaccgacggguccgccagcggcaaggccgacaccaagauccucuucaucgaggagggcaagaucgugcacacgagcacccuguccgggagcgcgcagcacguggaggagugcuccugcuacccccgguaccccggcguccgcugcgugugccgggacaacuggaaggggagcaaccgcccgaucguggacaucaaccugaaggaccacuccaucgucagcuccuacgugugcagcggccucgugggcgacacgccccggaagaacgacuccagcuccagcucccacugcuucgaccccaacgacgaggagggcgggcacggggucaagggcugggccuucgacgacgggaacgacguguggaugggccgcaccaucagcgagaagucccggcugggcuacgagaccuucaaggucaucgagggguggagcaaccccaaguccaagcugcagaucaaccgccaggugaucguggaccggggcaaccgcagcggguacuccggcaucuucagcgucgagggcaagagcugcaucaaccggugcuucuacguggagcucauccgcgggcggaaggaggagaccgaggugcuguggaccuccaacagcaucgucguguucugcggcaccuccgggacguacggcaccgggagcuggccggacggcgccgacaucaaccugaugcccaucuga

SEQ ID NO: 85198 - RNA, 1410 nt, Artificial Sequence
  derived and/or modified CDS sequence (opt1) from neuraminidase__InfluenzaA__AEQ49850
augaaccccaaccagaagaucaucaccaucggcagcgugucccugaccaucagcacgaucugcuucuucaugcagaucgccauccucaucaccaccgucacccugcacuucaagcaguacgaguucaacuccccgcccaacaaccaggugaugcugugcgagcccacgaucaucgagcgcaacaucaccgagaucguguaccucaccaacaccacgaucgagaaggagaucugccccaagcuggccgaguaccggaacuggagcaagccgcagugcgacaucaccggguucgcgcccuucuccaaggacaacagcauccgccuguccgccggcggggacaucugggucacccgggagcccuacgugagcugcgaccccaacaagugcuaccaguucgcccucggccaggggaccacgcugaacaacgugcacuccaacaacaccguccgcgaccggaccccguaccgcacccugcucaugaacgagcugggcgugcccuuccaccugggcacgaagcaggucugcaucgccuggagcuccagcuccugccacgacgggaaggccuggcuccacgugugcaucaccggcgacgacaagaacgcgaccgccagcuucaucuacaacgggcggcugguggacuccguggucagcugguccaaggagauccugcgcacccaggagagcgagugcgugugcaucaacggcacgugcaccguggucaugaccgacggguccgccagcggcaaggccgacaccaagauccucuucaucgaggagggcaagaucgugcacacgagcacccuguccgggagcgcgcagcacguggaggagugcuccugcuacccccgguaccccggcguccgcugcgugugccgggacaacuggaaggggagcaaccgcccgaucguggacaucaacaugaaggaccacuccaucgucagcuccuacgugugcagcggccuggugggcgacacgccccggaagaacgacuccagcuccagcucccacugcuucgaccccaacgacgaggagggcgggcacggggucaagggcugggccuucgacgacgggaacgacguguggaugggccgcaccaucagcgagaagucccggcucggcuacgagaccuucaaggucaucgagggguggagcaaccccaaguccaagcugcagaucaaccgccaggugaucguggaccggggcgaccgcagcggguacuccggcaucuucagcgucgagggcaagagcugcaucaaccggugcuucuacguggagcugauccgcggguccaaggaggagaccgaggugcucuggaccagcaacuccaucgucguguucugcggcaccagcgggacguacggcaccggguccuggccggacggcgccgacaucaagaucaugcccaucuga

SEQ ID NO: 85199 - RNA, 1410 nt, Artificial Sequence
  derived and/or modified CDS sequence (opt1) from neuraminidase__InfluenzaA__AEQ49851
augaaccccaaccagaagaucaucaccaucggcagcgugucccugaccaucagcacgaucugcuucuucaugcagaucgccauccucaucaccaccgucacccugcacuucaagcaguacgaguucaacuccccgcccaacaaccaggugaugcugugcgagcccacgaucauggagcgcaacaucaccgagaucguguaccucaccaacaccacgaucgagaaggagaucugccccaagcuggccgaguaccggaacuggagcaagccgcagugcgacaucaccggguucgcgcccuucuccaaggacaacagcauccgccuguccgccggcggggacaucugggucacccgggagcccuacgugagcugcgaccccgacaagugcuaccaguucgcccucggccaggggaccacgcugaacaacgugcacuccaacaacaccguccgcgaccggaccccguaccgcacccugcucaugaacgagcugggcgugcccuuccaccugggcacgaagcaggucugcaucgccuggagcuccagcuccugccacgacgggaaggccuggcuccacgugugcaucaccggcgacgacaagaacgcgaccgccagcuucaucuacaacgggaagcugguggacuccguggucagcugguccaaggagauccugcggacccaggagagcgagugcgugugcaucaacggcacgugcaccguggucaugaccgacggguccgccagcggcaaggccgacaccaagauccucuucaucgaggagggcaagaucgugcacacgagcacccuguccgggagcgcgcagcacguggaggagugcuccugcuacccccgcuaccccggcguccggugcgugugccgcgacaacuggaaggggagcaaccggccgaucguggacaucaacaucaaggaccacuccaucgucagcuccuacgugugcagcggccuggugggcgacacgccccgcaagaacgacuccagcuccagcucccacugccucgaccccaacaacgaggagggcgggcacggggucaagggcugggccuucgacgacgggaacgacguguggaugggccggaccaucaacgagaccagccgccugggcuacgagaccuucaaggucaucgaggggugguccaaccccaagagcaagcugcagaucaaccgccaggugaucguggaccggggcaaccgguccggguacagcggcaucuucuccgucgagggcaagagcugcaucaaccgcugcuucuacguggagcucauccgggggcgcaaggaggagaccgaggugcuguggaccagcaacuccaucgucguguucugcggcacgagcgggaccuacggcaccggguccuggccggacggcgccgaccugaaccucaugcccaucuga

SEQ ID NO: 85200 - RNA, 1410 nt, Artificial Sequence; identical to SEQ ID NO: 85167
  derived and/or modified CDS sequence (opt1) from neuraminidase__InfluenzaA__AEQ49852

SEQ ID NO: 85201 - RNA, 1410 nt, Artificial Sequence; identical to SEQ ID NO: 85145
  derived and/or modified CDS sequence (opt1) from neuraminidase__InfluenzaA__AEQ49969

SEQ ID NO: 85202 - RNA, 1410 nt, Artificial Sequence; identical to SEQ ID NO: 85167
  derived and/or modified CDS sequence (opt1) from neuraminidase__InfluenzaA__AEQ49970

SEQ ID NO: 85203 - RNA, 1410 nt, Artificial Sequence
  derived and/or modified CDS sequence (opt1) from neuraminidase__InfluenzaA__AEQ54954
augaaccccaaccagaagaucaucaccaucggcagcgugucccugaccaucagcacgaucugcuucuucaugcagaucgccauccucaucaccaccgucacccugcacuucaagcaguacgaguucaacuccccgcccaacaaccaggugaugcugugcgagcccacgaucaucgagcgcaacaucaccgagaucguguaccucaccaacaccacgaucgagaaggagaucugccccaagcuggccgaguaccggaacuggagcaagccgcagugcgacaucaccggguucgcgcccuucuccaaggacaacagcauccgccuguccgccggcggggacaucugggucacccgggagcccuacgugagcugcgaccccgacaagugcuaccaguucgcccucggccaggggaccacgcugaacaacgugcacuccaacaacaccguccgcgaccggaccccguaccgcacccugcucaugaacgagcugggcgugcccuuccaccugggcacgaagcaggucugcaucgccuggagcuccagcuccugccacgacgggaaggccuggcuccacgugugcaucaccggcgacgacaagaacgcgaccgccagcuucaucuacaacgggaagcugguggacuccguggucagcugguccaaggagauccugcggacccaggagagcgagugcgugugcaucaacggcacgugcaccguggucaugaccgacggguccgccagcggcaaggccgacaccaagauccucuucaucgaggagggcaagaucgugcacacgagcacccuguccgggagcgcgcagcacguggaggagugcuccugcuacccccgcuaccccggcguccggugcgugugccgcgacaacuggaaggggagcaaccggccgaucguggacaucaacaucaaggaccacuccaucgucagcuccuacgugugcagcggccuggugggcgacacgccccgcaagaacgacuccagcuccagcucccacugccucgaccccaacaacgaggagggcgggcacggggucaagggcugggccuucgacgacgggaacgacguguggaugggccggaccaucagcgagaccucccgccugggcuacgagaccuucaaggucaucgagggguggagcaaccccaaguccaagcugcagaucaaccgccaggugaucguggaccggggcaaccggagcggguacuccggcaucuucagcgucgagggcaagagcugcaucaaccgcugcuucuacguggagcucauccgggggcgcaaggaggagaccgaggugcuguggaccuccaacagcaucgucguguucugcggcacguccgggaccuacggcaccgggagcuggccggacggcgccgaccugaaccucaugcccaucuga

SEQ ID NO: 85204 - RNA, 1410 nt, Artificial Sequence; identical to SEQ ID NO: 80623
  derived and/or modified CDS sequence (opt1) from neuraminidase__InfluenzaA__AER08645

SEQ ID NO: 85205 - RNA, 1410 nt, Artificial Sequence
  derived and/or modified CDS sequence (opt1) from neuraminidase__InfluenzaA__AER08649
augaaccccaaccagaagaucaucaccaucggcagcgugucccugaccaucagcacgaucugcuucuucaugcagaucgccauccucaucaccaccgucacccugcacuucaagcaguacgaguucaacuccccgcccaacaaccaggugaugcugugcgagcccacgaucaucgagcgcaacaucaccgagaucguguaccucaccaacaccacgaucgagaaggagaucugccccaagcuggccgaguaccggaacuggagcaagccgcagugcgacaucaccggguucgcgcccuucuccaaggacaacagcauccgccuguccgccggcggggacaucugggucacccgggagcccuacgugagcugcgaccccgacaagugcuaccaguucgcccucggccaggggaccacgcugaacaacgugcacuccaacaacaccguccgcgaccggaccccguaccgcacccugcucaugaacgagcugggcgugcccuuccaccugggcacgaagcaggucugcaucgccuggagcuccagcuccugccacgacgggaaggccuggcuccacgugugcaucaccggcgacgacaagaacgcgaccgccagcuucaucuacaacgggcggcugguggacuccguggucagcugguccaaggagauccugcgcacccaggagagcgagugcgugugcaucaacggcacgugcaccguggucaugaccgacggguccgccagcggcaaggccgacaccaagauccucuucaucgaggagggcaagcuggugcacacgagcacccuguccgggagcgcgcagcacguggaggagugcuccugcuacccccgguaccccggcguccgcugcgugugccgggacaacuggaaggggagcaaccgcccgaucguggacaucaacaucaaggaccacuccaucgucagcuccuacgugugcagcggccucgugggcgacacgccccggaagaacgacuccagcuccagcucccacugccuggaccccaacaacgaggagggcgggcacggggucaagggcugggccuucgacgacgggaacgacguguggaugggccgcaccaucagcgagaagucccggcugggcuacgagaccuucaaggucaucgagggguggagcaaccccaaguccaagcuccagaucaaccgccaggugaucguggaccggggcaaccgcagcggguacuccggcaucuucagcgucgagggcaagagcugcaucaaccggugcuucuacguggagcugauccgcgggcggaaggaggagaccgaggugcuguggaccuccaacagcaucgucguguucugcggcaccuccgggacguacggcaccgggagcuggccggacggcgccgacaucaaccucaugcccaucuga

SEQ ID NO: 85206 - RNA, 1410 nt, Artificial Sequence
  derived and/or modified CDS sequence (opt1) from neuraminidase__InfluenzaA__AER08657
augaaccccaaccagaagaucaucaccaucggcagcgugucccugaccaucagcacggucugcuucuucaugcagaucgccauccucaucaccaccgugacccugcacuucaagcaguacgaguucaacuccccgcccaacaaccaggugaugcugugcgagcccacgaucaucgagcgcaacaucaccgagaucgucuaccucaccaacaccacgaucgagaaggagaugugccccaagcuggccgaguaccggaacuggagcaagccgcagugcgacaucaccggguucgcgcccuucuccaaggacaacagcauccgccuguccgccggcggggacaucugggugacccgggagcccuacgugagcugcgaccccgacaagugcuaccaguucgcccucggccaggggaccacgcugaacaacguccacuccaacaacaccgugcgcgaccggaccccguaccgcacccugcucaugaacgagcugggcgugcccuuccaccugggcacgaagcaggucugcaucgccuggagcuccagcuccugccacgacgggaaggccuggcuccacgugugcaucaccggcgacgacaagaacgcgaccgccagcuucaucuacaacgggcggcugguggacuccgucgugagcugguccaaggagauccugcgcacccaggagagcgagugcgugugcaucaacggcacgugcaccgucgugaugaccgacggguccgccagcggcaaggccgacaccaagauccucuucaucgaggagggcaagaucgugcacacgagcacccuguccgggagcgcgcagcacgucgaggagugcuccugcuacccccgguaccccggcgugcgcugcgugugccgggacaacuggaaggggagcaaccgcccgaucgucgacaucaacaucaaggaccacuccaucgugagcuccuacgugugcagcggccuggucggcgacacgccccggaagaacgacuccagcuccagcucccacugccucgaccccaacaacgaggagggcgggcacggggugaagggcugggccuucgacgacgggaacgacgucuggaugggccgcaccaucagcgagaagucccggcugggcuacgagaccuucaaggugaucgagggguggagcaaccccaaguccaagcugcagaucaaccgccaggugaucgucgaccggggcaaccgcagcggguacuccggcaucuucagcguggagggcaagagcugcaucaaccggugcuucuacguggagcucauccgcgggcggaaggaggagaccgagguccuguggaccuccaacagcaucgugguguucugcggcaccuccgggacguacggcaccgggagcuggccggacggcgccgacaucaaccugaugcccaucuga

SEQ ID NO: 85207 - RNA, 1410 nt, Artificial Sequence; identical to SEQ ID NO: 80623
  derived and/or modified CDS sequence (opt1) from neuraminidase__InfluenzaA__AER08659

SEQ ID NO: 85208 - RNA, 1410 nt, Artificial Sequence
  derived and/or modified CDS sequence (opt1) from neuraminidase__InfluenzaA__AER08661
augaaccccaaccagaagaucaucaccaucggcagcgugucccugaccaucagcacgaucugcuucuucaugcagaucgccauccucaucaccaccgucacccugcacuucaagcaguacgaguucaacuccccgcccaacaaccaggugaugcugugcgagcccacgaucaucgagcgcaacaucaccgagaucguguaccucaccaacaccacgaucgagaaggagaucugccccaagcuggccgaguaccggaacuggagcaagccgcagugcgacaucaccggguucgcgcccuucuccaaggacaacagcauccgccuguccgccggcggggacaucugggucacccgggagcccuacgugagcugcgaccccgacaagugcuaccaguucgcccucggccaggggaccacgcugaacaacgugcacuccaacaacaccguccgcgaccggaccccguaccgcacccugcucaugaacgagcugggcgugcccuuccaccugggcacgaagcaggucugcaucgccuggagcuccagcuccugccacgacgggaaggccuggcuccacgugugcaucaccggcgacgacaagaacgcgaccgccagcuucaucuacaacgggcggcugguggacuccguggucagcugguccaaggagauccugcgcacccaggagagcgagugcgugugcaucaacggcacgugcaccguggucaugaccgacggguccgccagcggcaaggccgacaccaagauccucuucaucgaggagggcaagaucgugcacacgagcacccuguccgggagcgcgcagcacguggaggagugcuccugcuacccccgguaccccggcguccgcugcgugugccgggacaacuggaaggggagcaaccgcccgaucguggacaucaacaucaaggaccacuccaucgucagcuccuacgugugcagcggccuggugggcgacacgccccggaagaacgacuccagcuccagcucccacugccucgaccccaacaacgaggagggggaccacggcgucaaggggugggccuucgacgacggcaacgacguguggauggggcgcaccaucaacgagaccagccggcugggcuacgagaccuucaaggucaucgagggcugguccaaccccaagagcaagcugcagaucaaccgccaggugaucguggaccgggggaaccgcuccggcuacagcgggaucuucuccgucgagggcaagagcugcaucaaccggugcuucuacguggagcucauccgcgggcggaaggaggagaccgaggugcuguggaccagcaacuccaucgucguguucugcggcacgagcggcaccuacgggaccggcuccuggccggacggggccgaccugaaccucaugcccaucuga

SEQ ID NO: 85209 - RNA, 1410 nt, Artificial Sequence; identical to SEQ ID NO: 83542
  derived and/or modified CDS sequence (opt1) from neuraminidase__InfluenzaA__AER08663

SEQ ID NO: 85210 - RNA, 1410 nt, Artificial Sequence; identical to SEQ ID NO: 83542
  derived and/or modified CDS sequence (opt1) from neuraminidase__InfluenzaA__AER08665

SEQ ID NO: 85211 - RNA, 1410 nt, Artificial Sequence
  derived and/or modified CDS sequence (opt1) from neuraminidase__InfluenzaA__AER08669
augaaccccaaccagaagaucaucaccaucggcagcgugucccugaccaucagcacgaucugcuucuucaugcagaucgccauccucaucaccaccgucacccugcacuucaagcaguacgaguucaacuccccgcccaacaaccaggugaugcugugcgagcccacgaucaucgagcgcaacaucaccgagaucguguaccucaccaacaccacgaucgagaaggagaucugccccacccuggccgaguaccggaacuggagcaagccgcagugcgacaucaccggguucgcgcccuucuccaaggacaacagcauccgccuguccgccggcggggacaucugggucacccgggagcccuacgugagcugcgaccccgacaagugcuaccaguucgcccucggccaggggacgacccugaacaacgugcacuccaacaacaccguccgcgaccggaccccguaccgcacgcugcucaugaacgagcugggcgugcccuuccaccugggcaccaagcaggucugcaucgccuggagcuccagcuccugccacgacgggaaggccuggcuccacgugugcaucaccggcgacgacaagaacgcgaccgccagcuucaucuacaacgggcggcugguggacuccguggucagcugguccaaggagauccugcgcacgcaggagagcgagugcgugugcaucaacgggaccugcaccguggucaugaccgacggguccgccagcggcaaggccgacacgaagauccucuucaucgaggagggcaagaucgugcacaccagcacccuguccgggagcgcgcagcacguggaggagugcuccugcuacccccgguaccccggcguccgcugcgugugccgggacaacuggaaggggagcaaccgcccgaucguggacaucaacaucaaggaccacuccaucgucagcuccuacgugugcagcggccuggugggcgacacgccccggaagaacgacuccagcuccagcucccacugccucgaccccaacaacgaggagggcggccacggggucaagggcugggccuucgacgacgggaacgacguguggaugggccgcaccaucagcgagaccucccggcugggcuacgagaccuucaaggucaucgagggguggagcaaccccaaguccaagcugcagaucaaccgccaggugaucguggaccggggcaaccgcagcggguacuccggcaucuucagcgucgagggcaagagcugcaucaaccggugcuucuacguggagcucauccgcgggcggaaggaggagaccgaggugcuguggacguccaacagcaucgucguguucugcggcaccuccgggaccuacggcaccgggagcuggccggacggcgccgaccugaaccucaugcccaucuga

SEQ ID NO: 85212 - RNA, 1410 nt, Artificial Sequence
  derived and/or modified CDS sequence (opt1) from neuraminidase__InfluenzaA__AER08671
augaaccccaaccagaagaucaucaccaucggcagcgugucccugaccaucagcacgaucugcuucuucaugcagaucgccauccucaucaccaccgucacccugcacuucaagcaguacggguucaacuccccgcccaacaaccaggugaugcugugcgagcccacgaucaucgagcgcaacaucaccgagaucguguaccucaccaacaccacgaucgagaaggagaucugccccacccuggccgaguaccggaacuggagcaagccgcagugcgacaucaccggcuucgcgcccuucuccaaggacaacagcauccgccuguccgccgggggcgacaucugggucacccgggagcccuacgugagcugcgaccccgacaagugcuaccaguucgcccucgggcagggcacgacccugaacaacgugcacuccaacaacaccguccgcgaccggaccccguaccgcacgcugcucaugaacgagcugggcgugcccuuccaccuggggaccaagcaggucugcaucgccuggagcuccagcuccugccacgacggcaaggccuggcuccacgugugcaucaccggggacgacaagaacgcgaccgccagcuucaucuacaacggccggcugguggacuccguggucagcugguccaaggagauccugcgcacgcaggagagcgagugcgugugcaucaacgggaccugcaccguggucaugaccgacggcuccgccagcggcaaggccgacacgaagauccucuucaucgaggaggggaagaucgugcacaccagcacccuguccggcagcgcgcagcacguggaggagugcuccugcuacccccgguaccccgggguccgcugcgugugccgggacaacuggaagggcagcaaccgcccgaucguggacaucaacaucaaggaccacuccaucgucagcuccuacgugugcagcggccuggugggggacacgccccggaagaacgacuccagcuccagcucccacugccucgaccccaacaacgaggagggcgggcacggcgucaaggggugggccuucgacgacggcaacgacguguggaugggccgcaccaucaacgagaccagccggcugggguacgagaccuucaaggucaucgagggcugguccaaccccaagagcaagcugcagaucaaccgccaggugaucguggaccgggggaaccgcuccggcuacagcgggaucuucuccgucgagggcaagagcugcaucaaccggugcuucuacguggagcucauccgcggccggaaggaggagaccgaggugcuguggacgagcaacuccaucgucguguucugcgggaccagcggcaccuacgggaccggcuccuggccggacggggccgaccugaaccucaugcccaucuga

SEQ ID NO: 85213 - RNA, 1410 nt, Artificial Sequence; identical to SEQ ID NO: 83542
  derived and/or modified CDS sequence (opt1) from neuraminidase__InfluenzaA__AER08673

SEQ ID NO: 85214 - RNA, 1410 nt, Artificial Sequence; identical to SEQ ID NO: 83542
  derived and/or modified CDS sequence (opt1) from neuraminidase__InfluenzaA__AER08675

SEQ ID NO: 85215 - RNA, 1410 nt, Artificial Sequence; identical to SEQ ID NO: 83542
  derived and/or modified CDS sequence (opt1) from neuraminidase__InfluenzaA__AER08677

SEQ ID NO: 85216 - RNA, 1410 nt, Artificial Sequence; identical to SEQ ID NO: 83542
  derived and/or modified CDS sequence (opt1) from neuraminidase__InfluenzaA__AER08679

SEQ ID NO: 85217 - RNA, 1410 nt, Artificial Sequence
  derived and/or modified CDS sequence (opt1) from neuraminidase__InfluenzaA__AER08681
augaaccccaaccagaagaucaucaccaucggcagcgugucccugaccaucagcacgaucugcuucuucaugcagaucgccauccucaucaccaccgucacccugcacuucaagcaguacgaguucaacuccccgcccaacaaccaggugaugcugugcgagcccacgaucaucgagcgcaacaucaccgagaucguguaccucaccaacaccacgaucgagaaggagaucugccccaagcuggccgaguaccggaacuggagcaagccgcagugcgacaucaccggguucgcgcccuucuccaaggacaacagcauccgccuguccgccggcggggacaucugggucacccgggagcccuacgugagcugcgaccccgacaagugcuaccaguucgcccucggccaggggaccacgcugaacaacgugcacuccaacaacaccguccgcgaccggaccccguaccgcacccugcucaugaacgagcugggcgugcccuuccaccugggcacgaagcaggucugcaucgccuggagcuccagcuccugccacgacgggaaggccuggcuccacgugugcaucaccggcgacgacaagaacgcgaccgccagcuucaucuacaacgggcggcugguggacuccguggucagcugguccaaggagauccugcgcacccaggagagcgagugcgugugcaucaacggcacgugcaccguggucaugaccgacggguccgccagcggcaaggccgacaccaagauccucuucaucgaggagggcaagaucgugcacacgagcacccuguccgggagcgcgcagcacguggaggagugcuccugcuacccccgguaccccggcguccgcugcgugugccgggacaacuggaaggggagcaaccgcccgaucguggacaucaacaucaaggaccacuccaucgucagcuccuacgugugcagcggccuggugggcgacacgccccggaagaacgacuccagcuccagcucccacugccucgaccccaacgacgaggagggcgggcacggggucaagggcugggccuucgacgacgggaacgacguguggaugggccgcaccaucaacgagaccagccggcugggcuacgagaccuucaaggucaucgaggggugguccaaccccaagagcaagcugcagaucaaccgccaggugaucguggacaagggcaaccgguccggguacagcggcaucuucuccgucgagggcaagagcugcaucaaccgcugcuucuacguggagcucauccgggggcgcaaggaggagaccgaggugcuguggaccagcaacuccaucgucguguucugcggcacgagcgggaccuacggcaccggguccuggccggacggcgccgaccugaaccucaugcccaucuga

SEQ ID NO: 85218 - RNA, 1410 nt, Artificial Sequence; identical to SEQ ID NO: 83542
  derived and/or modified CDS sequence (opt1) from neuraminidase__InfluenzaA__AER08683

SEQ ID NO: 85219 - RNA, 1410 nt, Artificial Sequence; identical to SEQ ID NO: 85167
  derived and/or modified CDS sequence (opt1) from neuraminidase__InfluenzaA__AER08685

SEQ ID NO: 85220 - RNA, 1410 nt, Artificial Sequence; identical to SEQ ID NO: 85167
  derived and/or modified CDS sequence (opt1) from neuraminidase__InfluenzaA__AER08687

SEQ ID NO: 85221 - RNA, 1410 nt, Artificial Sequence
  derived and/or modified CDS sequence (opt1) from neuraminidase__InfluenzaA__AER08689
augaaccccaaccagaagaucaucaccaucggcagcgugucccugaccaucagcacgaucugcuucuucaugcagaucgccauccucaucaccaccgucacccugcacuucaagcaguacgaguucaacuccccgcccaacaaccaggugacgcugugcgagcccaccaucaucgagcgcaacaucaccgagaucguguaccucaccaacacgaccaucgagaaggagaucugccccaagcuggccgaguaccggaacuggagcaagccgcagugcgacaucaccggguucgcgcccuucuccaaggacaacagcauccgccuguccgccggcggggacaucugggucacccgggagcccuacgugagcugcgaccccgacaagugcuaccaguucgcccucggccaggggacgacccugaacaacgugcacuccaacaacaccguccgcgaccggaccccguaccgcacgcugcucaugaacgagcugggcgugcccuuccaccugggcaccaagcaggucugcaucgccuggagcuccagcuccugccacgacgggaaggccuggcuccacgugugcaucaccggcgacgacaagaacgcgaccgccagcuucaucuacaacgggcggcugguggacuccguggucagcugguccaaggagauccugcgcacgcaggagagcgagugcgugugcaucaacgggaccugcaccguggucaugaccgacggguccgccagcggcaaggccgacacgaagauccucuucaucgaggagggcaagaucgugcacaccagcacccuguccgggagcgcgcagcacguggaggagugcuccugcuacccccgguaccccggcguccgcugcgugugccgggacaacuggaaggggagcaaccgcccgaucguggacaucaacaucaaggaccacuccaucgucagcuccuacgugugcagcggccuggugggcgacacgccccggaaggacgacuccagcuccagcucccacugccucgaccccaacaacgaggagggcggccacggggucaagggcugggccuucgacgacgggaacgacguguggaugggccgcaccaucaacgagaccagccggcugggcuacgagaccuucaaggucaucgaggggugguccaaccccaagagcaagcugcagaucaaccgccaggugaucguggaccggggcaaccgcuccggguacagcggcaucuucuccgucgagggcaagagcugcaucaaccggugcuucuacguggagcucauccgcgggcggaaggaggagaccgaggugcuguggacgagcaacuccaucgucguguucugcggcaccagcgggaccuacggcaccggguccuggccggacggcgccgaccugaaccucaugcccaucuga

SEQ ID NO: 85222 - RNA, 1410 nt, Artificial Sequence; identical to SEQ ID NO: 85167
  derived and/or modified CDS sequence (opt1) from neuraminidase__InfluenzaA__AER08691

SEQ ID NO: 85223 - RNA, 1410 nt, Artificial Sequence
  derived and/or modified CDS sequence (opt1) from neuraminidase__InfluenzaA__AER08693
augaaccccaaccagaagaucaucaccaucggcagcgugucccugaccaucagcacgaucugcuucuucaugcagaucgccauccucaucaccaccgucacccugcacuucaagcaguacgaguucaacuccccgcccaagaaccaggugaugcugugcgagcccacgaucaucgagcgcaacaucaccgagaucguguaccucaccaacaccacgaucgagaaggagaucugccccaagcuggccgaguaccggaacuggagcaagccgcagugcgacaucaccggguucgcgcccuucuccaaggacaacagcauccgccuguccgccggcggggacaucugggucacccgggagcccuacgugagcugcgaccccgacaagugcuaccaguucgcccucggccaggggaccacgcugaacaacgugcacuccaacaacaccguccgcgaccggaccccguaccgcacccugcucaugaacgagcugggcgugcccuuccaccugggcacgaagcaggucugcaucgccuggagcuccagcuccugccacgacgggaaggccuggcuccacgugugcaucaccggcgacgacaagaacgcgaccgccagcuucaucuacaacgggaagcugguggacuccguggucagcugguccaaggagauccugcggacccaggagagcgagugcgugugcaucaacggcacgugcaccguggucaugaccgacggguccgccagcggcaaggccgacaccaagauccucuucaucgaggagggcaagaucgugcacacgagcacccuguccgggagcgcgcagcacguggaggagugcuccugcuacccccgcuaccccggcguccggugcgugugccgcgacaacuggaaggggagcaaccggccgaucguggacaucaacaucaaggaccacuccaucgucagcuccuacgugugcagcggccuggugggcgacacgccccgcaagaacgacuccagcuccagcucccacugccucgaccccaacaacgaggagggcgggcacggggucaagggcugggccuucgacgacgggaacgacguguggaugggccggaccaucaacgagaccagccgccugggcuacgagaccuucaaggucaucgaggggugguccaaccccaagagcaagcugcagaucaaccgccaggugaucguggaccggggcaaccgguccggguacagcggcaucuucuccgucgagggcaagagcugcaucaaccgcugcuucuacguggagcucauccgggggcgcaaggaggagaccgaggugcuguggaccagcaacuccaucgucguguucugcggcacgagcgggaccuacggcaccggguccuggccggacggcgccgaccugaaccucaugcccaucuga

SEQ ID NO: 85224 - RNA, 1410 nt, Artificial Sequence
  derived and/or modified CDS sequence (opt1) from neuraminidase__InfluenzaA__AER08697
augaaccccaaccagaagaucaucaccaucggcagcgugucccugaccaucagcacgaucugcuucuucaugcagaucgccauccucaucaccaccgucacccugcacuucaagcaguacgaguucaacuccccgcccaacaaccaggugaugcugugcgagcccacgaucaucgagcgcaacaucaccgagaucguguaccucaccaacaccacgaucgagaaggagaccugccccacccuggccgaguaccggaacuggagcaagccgcagugcgacaucaccggguucgcgcccuucuccaaggacaacagcauccgccuguccgccggcggggacaucugggucacgcgggagcccuacgugagcugcgaccccgacaagugcuaccaguucgcccucggccaggggaccacccugaacaacgugcacuccaacaacaccguccgcgaccggacgccguaccgcacccugcucaugaacgagcugggcgugcccuuccaccugggcaccaagcaggucugcaucgccuggagcuccagcuccugccacgacgggaaggccuggcuccacgugugcaucaccggcgacgacaagaacgcgacggccagcuucaucuacaacgggcggcugguggacuccguggucagcugguccaaggagauccugcgcacccaggagagcgagugcgugugcaucaacgggaccugcaccguggucaugacggacggguccgccagcggcaaggccgacaccaagauccucuucaucgaggagggcaagaucgugcacaccagcacccuguccgggagcgcgcagcacguggaggagugcuccugcuacccccgguaccccggcguccgcugcgugugccgggacaacuggaaggggagcaaccgcccgaucguggacaucaacaucaaggaccacuccaucgucagcuccuacgugugcagcggccuggugggcgacacgccccggaagaacgacuccagcuccagcucccacugccucgaccccaacaacgaggagggcggccacggggucaagggcugggccuucgacgacgggaacgacguguggaugggccgcaccaucaacgucaccagccggcugggcuacgagaccuucaaggugaucgaggggugguccaaccccaagagcaagcugcagaucaaccgccaggugaucgucgaccggggcaaccgcuccggguacagcggcaucuucuccguggagggcaagagcugcaucaaccggugcuucuacguggagcucauccgcgggcggaaggaggagacggagguccuguggaccagcaacuccaucgugguguucugcggcaccagcgggaccuacggcacgggguccuggccggacggcgccgaccugaaccucaugcccaucuga

SEQ ID NO: 85225 - RNA, 1410 nt, Artificial Sequence; identical to SEQ ID NO: 85021
  derived and/or modified CDS sequence (opt1) from neuraminidase__InfluenzaA__AER92714

SEQ ID NO: 85226 - RNA, 1410 nt, Artificial Sequence; identical to SEQ ID NO: 80762
  derived and/or modified CDS sequence (opt1) from neuraminidase__InfluenzaA__AER92721

SEQ ID NO: 85227 - RNA, 1410 nt, Artificial Sequence; identical to SEQ ID NO: 80762
  derived and/or modified CDS sequence (opt1) from neuraminidase__InfluenzaA__AER92724

SEQ ID NO: 85228 - RNA, 1413 nt, Artificial Sequence
  derived and/or modified CDS sequence (opt1) from neuraminidase__InfluenzaA__AET84165
augaaccccaaccagaagaucaucaccaucggcagcaucuccaucgccaucgggaucaucagccugaugcuccagaucggcaacaucaucuccaucugggccagccacuccauccagaccgggagccagaacaacacgggcaucugcaaccagcgcaucaucaccuacgagaacuccaccugggugaaccacaccuacgucaacaucaacaacacgaacgugguggcgggggaggacaagaccagcgucacccuggccggcaacuccagccugugcuccaucagcggcugggccaucuacaccaaggacaacuccauccggaucgggagcaagggcgacguguucgugauccgcgagccguucaucuccugcagccaccucgagugccggacguucuuccugacccagggggcccugcucaacgacaagcacuccaacggcaccgucaaggaccgcagccccuaccgggcccugauguccugcccccugggggaggcgcccagcccguacaacagcaaguucgaguccguggccuggagcgccuccgccugccacgacggcaugggcuggcucaccaucgggaucagcggccccgacaacggggcgguggccguccugaaguacaacggcaucaucacgggcaccaucaaguccuggaagaagcagauccugcgcacccaggagagcgagugcgugugcaugaacggguccugcuucaccaucaugacggacggccccagcaacaaggccgccuccuacaagaucuucaagaucgagaaggggaaggugaccaagagcaucgagcucuccgcccccaacuucuacuacgaggagugcagcugcuacccggacaccggcaucgucaugugcgugugccgggacaacuggcacggguccaaccgccccugggugagcuucaaccagaaccuggacuaccagaucggcuacaucugcuccggcgucuucggggacaacccccggcccgaggacggcgaggggagcugcaacccggugaccaucgacggcgcgaacggggugaagggcuucuccuacaaguacggcaacggggucuggaucggccgcaccaagagcaaccggcugcgcaagggguucgagaugaucugggaccccaacggcuggacgaacaccgacuccgacuucagcgugaagcaggacguggucgccaucaccgacuggagcggguacuccggcagcuucgugcagcaccccgagcucacgggccuggacugcauccggcccugcuucuggguggagcugguccgcgggcucccgcgggagaacaccaccaucuggaccuccggcagcuccaucagcuucugcggggugaacuccgacacggccaacuggagcuggcccgacggcgccgagcugcccuucaccaucgacaaguga

SEQ ID NO: 85229 - RNA, 1413 nt, Artificial Sequence; identical to SEQ ID NO: 82954
  derived and/or modified CDS sequence (opt1) from neuraminidase__InfluenzaA__AET84176

SEQ ID NO: 85230 - RNA, 1413 nt, Artificial Sequence
  derived and/or modified CDS sequence (opt1) from neuraminidase__InfluenzaA__AET84187
augaaccccaaccagaagaucaucaccaucggcagcaucuccaucgccaucgggaucaucagccugaugcuccagaucggcaacaucaucuccaucugggccagccacuccauccagaccgggagccagaacaacacgggcaucugcaaccagcgcaucaucaccuacgagaacuccaccugggugaaccacaccuacgucaacaucaacaacacgaacgugguggcgggggaggacaagaccagcgucacccuggccggcaacuccagccugugcuccaucagcggcugggccaucuacaccaaggacaacuccauccggaucgggagcaagggcgacguguucgugauccgcgagccguucaucuccugcagccaccucgagugccggacguucuuccugacccagggggcccugcucaacgacaagcacuccaacggcaccgucaaggaccgcagccccuaccgggcccugauguccugcccccugggggaggcgcccagcccguacaacagcaaguucgaguccguggccuggagcgccuccgccugccacgacggcauggacuggcucaccaucggcaucagcgggcccgacaacggcgcgguggccguccugaaguacaacgggaucaucacgggcaccaucaaguccuggaagaagcagauccugcgcacccaggagagcgagugcgugugcaugaacggcuccugcuucaccaucaugacggacgggcccagcaacaaggccgccuccuacaagaucuucaagaucgagaagggcaaggugaccaagagcaucgagcucaacgcccccaacuucuacuacgaggagugcuccugcuacccggacaccgggaucgucaugugcgugugccgggacaacuggcacggcagcaaccgccccuggguguccuucaaccagaaccuggacuaccagaucggguacaucugcagcggcgucuucggcgacaacccccggcccaaggacggggagggcuccugcaacccggugaccaucgacggggcgaacggcgugaagggguucagcuacaaguacggcaacggcgucuggaucgggcgcacgaaguccaaccggcugcgcaagggcuucgagaugaucugggaccccaacggguggaccaacaccgacagcgacuucuccgugaagcaggacguggucgccaucaccgacuggagcggcuacagcggguccuucgugcagcaccccgagcucacgggccuggacugcauccggcccugcuucuggguggagcugguccgcggccucccgcgggagaacaccaccaucuggaccagcggguccagcaucuccuucugcggcgugaacagcgacacggccaacugguccuggcccgacggggccgagcugcccuucaccaucgacaaguga

SEQ ID NO: 85231 - RNA, 1413 nt, Artificial Sequence
  derived and/or modified CDS sequence (opt1) from neuraminidase__InfluenzaA__AET84198
augaaccccaaccagaagaucaucaccaucggcagcaucuccaucgccaucgggaucaucagccugaugcuccagaucggcaacaucaucuccaucugggccagccacuccauccagaccgggagccagaacaacacgggcaucugcaaccagcgcaucaucaccuacgagaacuccaccugggugaaccacaccuacgucaacaucaacaacacgaacgugguggcgggggaggacaagaccagcaugacccuggccggcaacuccagccugugcuccaucagcggcugggccaucuacaccaaggacaacuccauccggaucgggagcaagggcgacgucuucgugauccgcgagccguucaucuccugcagccaccucgagugccggacguucuuccugacccagggggcccugcucaacgacaagcacuccaacggcaccgugaaggaccgcagccccuaccgggcccugauguccugcccccugggggaggcgcccagcccguacaacagcaaguucgaguccgucgccuggagcgccuccgccugccacgacggcaugggcuggcucaccaucgggaucagcggccccgacaacggggcgguggccgugcugaaguacaacggcaucaucacgggcaccaucaaguccuggaagaagcagauccugcgcacccaggagagcgagugcgucugcaugaacggguccugcuucaccaucaugacggacggccccagcaacaaggccgccuccuacaagaucuucaagaucgagaaggggaaggugaccaagagcaucgagcucaacgcccccaacuucuacuacgaggagugcuccugcuacccggacaccggcaucgugaugugcgucugccgggacaacuggcacgggagcaaccgccccuggguguccuucaaccagaaccuggacuaccagaucggcuacaucugcagcggcguguucggggacaacccccggcccaaggacggcgagggguccugcaacccggucaccguggacggcgcgaacggggugaagggcuucagcuacaaguacggcaacggggucuggaucggccgcacgaaguccaaccggcugcgcaagggguucgagaugaucugggaccccaacggcuggaccaacaccgacagcgacuucuccgugaagcaggacguggucgccaucaccgacuggagcggguacagcggcuccuucgugcagcaccccgagcucacgggccuggacugcauccggcccugcuucuggguggagcugguccgcgggcucccgcgggagaacaccaccaucuggaccagcggcuccagcaucuccuucugcggggugaacagcgacacggccaacugguccuggcccgacggcgccgagcugcccuucaccaucgacaaguga

SEQ ID NO: 85232 - RNA, 1413 nt, Artificial Sequence
  derived and/or modified CDS sequence (opt1) from neuraminidase__InfluenzaA__AET84209
augaaccccaaccagaagaucaucaccaucggcagcaucuccaucgccaucgggaucaucagccugaugcuccagaucggcaacaucaucuccaucugggccagccacuccauccagaccgggagccagaacaacacgggcaucugcaaccagcgcaucaucaccuacgagaacuccaccugggugaaccacaccuacgucaacaucaacaacacgaaggugguggcgggggaggacaagaccagcgucacccuggccggcaacuccagccugugcuccaucagcggcugggccaucaacaccaaggacaacuccauccggaucgggagcaagggcgacguguucgugauccgcgagccguucaucuccugcagccaccucgagugccggacguucuuccugacccagggggcccugcucaacgacaagcacuccaacggcaccgucaaggaccgcagccccuaccgggcccugauguccugcccccugggggaggcgcccagcccguacaacagcaaguucgaguccguggccuggagcgccuccgccugccacgacggcaugggcuggcucaccaucgggaucagcggccccgacaacggggcgguggccguccugaaguacaacggcaucaucacgggcaccaucaaguccuggaagaagcagauccugcgcacccaggagagcgagugcgugugcaugaacggguccugcuucaccaucaugacggacggccccagcaacaaggccgccuccuacaagaucuucaagaucgagaaggggaaggugaccaagagcaucgagcucaacgcccccaacuucuacuacgaggagugcuccugcuacccggacaccggcaucgucaugugcgugugccgggacaacuggcacgggagcaaccgccccuggguguccuucaaccagaaccuggacuaccagaucggcuacaucugcagcggcgucuucggggacaacccccggcccaaggacggcgagggguccugcaacccggugaccguggacggcgcgaacggggucaagggcuucagcuacaaguacggcaacgggguguggaucggccgcacgaaguccaaccggcugcgcaagggguucgagaugaucugggaccccaacggcuggaccaacaccgacagcgacuucuccgugaagcaggacgucguggccaucaccgacuggagcggguacagcggcuccuucgugcagcaccccgagcucacgggccuggacugcauccggcccugcuucugggucgagcuggugcgcgggcucccgcgggagaacaccaccaucuggaccagcggcuccagcaucuccuucugcggggucaacagcgacacggccaacugguccuggcccgacggcgccgagcugcccuucaccaucgacaaguga

SEQ ID NO: 85233 - RNA, 1413 nt, Artificial Sequence
  derived and/or modified CDS sequence (opt1) from neuraminidase__InfluenzaA__AET84231
augaaccccaaccagaagaucaucaccaucggcagcaucuccaucgccaucgggaucaucagccugaugcuccagaucggcuccaucaucagcaucugggccucccacagcauccacaccgggucccagaacaacacgggcaucugcaaccagcgcaucaucaccuacgagaacagcaccugggugaaccacaccuacgucaacaucaacaacacgaacgugguggcgggggaggacaagaccuccgucacccuggccggcaacagcucccugugcagcaucuccggcugggccaucuacaccaaggacaacagcauccggaucggguccaagggcgacguguucgugauccgcgagccguucaucagcugcucccaccucgagugccggacguucuuccugacccagggggcccugcucaacgacaagcacagcaacggcaccgucaaggaccgcucccccuaccgggcccugaugagcugcccccugggggaggcgcccagcccguacaacuccaaguucgagagcguggccugguccgccagcgccugccacgacggcaugggcuggcucaccaucgggaucuccggccccgacaacggggcgguggccguccugaaguacaacggcaucaucacgggcaccaucaagagcuggaagaagcagauccugcgcacccaggaguccgagugcgugugcaugaacgggagcugcuucaccaucaugacggacggccccuccaacaaggccagcuccuacaagaucuucaagaucgagaaggggaaggugaccaagagcaucgagcucaacgcccccaacuucuacuacgaggagugcuccugcuacccggacaccggcaucgucaugugcgugugccgggacaacuggcacgggagcaaccgccccuggguguccuucaaccagaaccuggacuaccagaucggcuacaucugcagcggcgucuucggggacaacccccggcccgaggacggcgagggguccugcaacccggugaccguggacggcgccaacggggucaagggcuucagcuacaaguacggcaacgggguguggaucggccgcacgaaguccaaccggcugcgcaagggguucgagaugaucugggaccccaacggcuggaccaacaccgacagcgacuucagcgugaagcaggacgucguggcgaucaccgacugguccggguacagcggcuccuucgugcagcaccccgagcucacgggccuggacugcauccggcccugcuucugggucgagcuggugcgcgggcucccgcgggagaacaccaccaucuggaccagcggcuccagcaucuccuucugcggggucaacagcgacacggccaacugguccuggcccgacggcgccgagcugcccuucaccaucgacaaguga

SEQ ID NO: 85234 - RNA, 1413 nt, Artificial Sequence; identical to SEQ ID NO: 81485
  derived and/or modified CDS sequence (opt1) from neuraminidase__InfluenzaA__AET84242

SEQ ID NO: 85235 - RNA, 1413 nt, Artificial Sequence
  derived and/or modified CDS sequence (opt1) from neuraminidase__InfluenzaA__AET84253
augaaccccaaccagaagaucaucaccaucggcagcaucuccaucgccaucgggaucaucagccugaugcuccagaucggcuccaucaucagcaucugggccucccacagcauccagaccgggucccagaacaacacgggcaucugcaaccagcgcaucaucaccuacgagaacagcaccugggugaaccacaccuacgucaacaucaacaacacgaacgugguggcgggggaggacaagaccuccgucacccuggccggcaacagcucccugugcagcaucuccggcugggccaucuacaccaaggacaacagcauccggaucggguccaagggcgacguguucgugauccgcgagccguucaucagcugcucccaccucgagugccggacguucuuccugacccagggggcccugcucaacgacaagcacagcaacggcaccgucaaggaccgcucccccuaccgggcccugaugagcugcccccugggggaggcgcccagcccguacaacuccaaguucgagagcguggccugguccgccagcgccugccacgacggcaugggcuggcucaccaucgggaucuccggccccgacaacggggcgguggccguccugaaguacaacggcaucaucacggagaccaucaagagcuggaagaagcagauccugcgcacccaggaguccgagugcgugugcaugaacggcagcugcuucaccaucaugacggacgggcccuccaacaaggccgccagcuacaagaucuucaagaucgagaagggcaaggugaccaaguccaucgagcucaacgcccccaacuucuacuacgaggagugcagcugcuacccggacaccgggaucgucaugugcgugugccgggacaacuggcacggcuccaaccgccccugggugagcuucaaccagaaccuggacuaccagaucggguacaucugcuccggcgucuucggcgacaacccccggcccgaggacggggagggcagcugcaacccggugaccguggacggggcgaacggcgucaagggguucuccuacaaguacggcaacggcguguggaucgggcgcaccaagagcaaccggcugcgcaagggcuucgagaugaucugggaccccaacggguggacgaacaccgacuccgacuucagcgugaagcaggacgucguggccaucaccgacuggagcggcuacuccgggagcuucgugcagcaccccgagcucacgggccuggacugcauccggcccugcuucugggucgagcuggugcgcggccucccgcgggagaacaccaccaucuggaccuccgggagcuccaucagcuucugcggcgucaacuccgacacggccaacuggagcuggcccgacggggccgagcugcccuucaccaucgacaaguga

SEQ ID NO: 85236 - RNA, 1413 nt, Artificial Sequence
  derived and/or modified CDS sequence (opt1) from neuraminidase__InfluenzaA__AET84264
augaaccccaaccagaagaucaucaccaucggcagcaucuccaucgccaucgggaucaucagccugauguuccagaucggcuccaucaucagcaucugggccucccacagcauccagaccgggucccagaacaacacgggcaucugcaaccagcgcaucaucaccuacgagaacagcaccugggugaaccacaccuacgucaacaucaacaacacgaacgugguggcgggggaggacaagaccuccgucacccucgccggcaacagcucccugugcagcaucuccggcugggccaucuacaccaaggacaacagcauccggaucggguccaagggcgacguguucgugauccgcgagccguucaucagcugcucccaccuggagugccggacguucuuccucacccagggggcccugcugaacgacaagcacagcaacggcaccgucaaggaccgcucccccuaccgggcccucaugagcugcccccugggggaggcgcccagcccguacaacuccaaguucgagagcguggccugguccgccagcgccugccacgacggcaugggcuggcugaccaucgggaucuccggccccgacaacggggcgguggccguccucaaguacaacggcaucaucacggagaccaucaagagcuggaagaagcagauccugcgcacccaggaguccgagugcgugugcaugaacggcagcugcuucaccaucaugacggacgggcccuccaacaaggccgccagcuacaagaucuucaagaucgagaagggcaaggugaccaaguccaucgagcugaacgcccccaacuucuacuacgaggagugcagcugcuacccggacaccgggaucgucaugugcgugugccgggacaacuggcacggcuccaaccgccccugggugagcuucaaccagaaccucgacuaccagaucggguacaucugcuccggcgucuucggcgacaacccccggcccgaggacggggagggcagcugcaacccggugaccguggacggggcgaacggcgucaagggguucuccuacaaguacggcaacggcguguggaucgggcgcaccaagagcaaccggcugcgcaagggcuucgagaugaucugggaccccaacggguggacgaacaccgacuccgacuucagcgugaagcaggacgucguggccaucaccgacuggagcggcuacuccgggagcuucgugcagcaccccgagcugacgggccucgacugcauccggcccugcuucugggucgagcuggugcgcggccugccgcgggagaacaccaccaucuggaccuccgggagcuccaucagcuucugcggcgucaacuccgacacggccaacuggagcuggcccgacggggccgagcuccccuucaccaucgacaaguga

SEQ ID NO: 85237 - RNA, 1413 nt, Artificial Sequence
  derived and/or modified CDS sequence (opt1) from neuraminidase__InfluenzaA__AET84275
augaaccccaaccagaagaucaucaccaucggcagcaucuccaucgccaucgggaucaucagccugaugcuccagaucggcaacaucaucuccaucugggccagccacuccauccagaccgggagccagaacaacacgggcaucugcaaccagcgcaucaucaccuacgagaacuccaccugggugaaccacaccuacgucaacaucaacaacacgaacgugguggcgggggaggacaagaccagcgucacccuggccggcaacuccagccugugcuccaucagcggcugggccaucuacaccaaggacaacuccauccggaucgggagcaagggcgacguguucgugauccgcgagccguucaucuccugcagccaccucgagugccggacguucuuccugacccagggggcccugcucaacgacaagcacuccaacggcaccgucaaggaccgcagccccuaccgggcccugauguccugcccccugggggaggcgcccagcccguacaacagcaaguucgaguccguggccuggagcgccuccgccugccacgacggcaugggcuggcucaccaucgggaucagcggccccgacaacggggcgguggccguccugaaguacaacggcaucaucacgggcaccaucaaguccuggaagaagcagauccugcgcacccaggagagcgagugcgugugcaugaacggguccugcuucaccaucaugacggacggccccagcaacaaggccgccuccuacaagaucuucaagaucgagaaggggaaggugaccaagagcaucgagcucaacgcccccaacuucuacuacgaggagugcuccugcuacccggacaccggcaucgucaugugcgugugccgggacaacuggcacgggagcaaccgccccuggguguccuucaaccagaaccuggacuaccagaucggcuacaucugcagcggcgucuucggggacaacccccggcccaaggacggcgagggguccugcaacccggugaccguggacggcgcgaacggggucaagggcuucagcuacaaguacggcaacgggguguggaucggccgcacgaaguccaaccggcugcgcaagggguucgagaugaucugggaccccaacggcuggaccaacaccgacagcgacuucuccgugaagcaggacgucguggccaucaccgacuggagcggguacagcggcuccuucgugcagcaccccgagcucacgggccuggacugcauccggcccugcuucugggucgagcuggugcgcgggcucccgcgggagaacaccaccaucuggaccagcggcuccagcaucuccuucugcggggucaacagcgacacggccaacugguccuggcccgacggcgccgagcugcccuucaccaucgacaaguga

SEQ ID NO: 85238 - RNA, 1413 nt, Artificial Sequence; identical to SEQ ID NO: 81485
  derived and/or modified CDS sequence (opt1) from neuraminidase__InfluenzaA__AET84286

SEQ ID NO: 85239 - RNA, 1413 nt, Artificial Sequence
  derived and/or modified CDS sequence (opt1) from neuraminidase__InfluenzaA__AET84297
augaaccccaaccagaagaucaucaccaucggcagcaucuccaucgccaucgggaucaucagccugaugcuccagaucggcaacaucaucuccaucugggccagccacuccauccagaccgggagccagaacaacacgggcaucugcaaccagcgcaucaucaccuacgagaacuccaccugggugaaccacaccuacgucaacaucaacaacacgaacgugguggcgggggaggacaagaccagcgucacccuggccggcaacuccagccugugcuccaucagcggcugggccaucuacaccaaggacaacuccauccggaucgggagcaagggcgacguguucgugauccgcgagccguucaucuccugcagccaccucgagugccggacguucuuccugacccagggggcccugcucaacgacaagcacuccaacggcaccgucaaggaccgcagccccuaccgggcccugauguccugcccccugggggaggcgcccagcccguacaacagcaaguucgaguccguggccuggagcgccuccgccugccacgacggcaugggcuggcucaccaucgggaucagcggccccgacaacggggcgguggccguccugaaguacaacggcaucaucacgggcaccaucaaguccuggaagaagcagauccugcgcacccaggagagcgagugcgugugcaugaacggguccugcuucaccaucaugacggacggccccagcaacaaggccgccuccuacaagaucuucaagaucgagaaggggaaggugaccaagagcaucgagcucaacgcccccaacuucuacuacgaggagugcuccugcuacccggacaccggcaucgucaugugcgugugccgggacaacuggcacgggagcaaccgccccuggguguccuucaaccagaaccuggacuaccagaucggcuacaucugcagcggcgucuucggggacaacccccggcccgaggacggcgagggguccugcaacccggugaccguggacggcgcgaacggggucaagggcuucagcuacaaguacgacaacggcguguggaucgggcgcacgaaguccaaccggcugcgcaagggcuucgagaugaucugggaccccaacggguggaccaacaccgacagcgacuucuccgugaagcaggacgucguggccaucaccgacuggagcggcuacagcggguccuucgugcagcaccccgagcucacgggccuggacugcauccggcccugcuucugggucgagcuggugcgcggccucccgcgggagaacaccaccaucuggaccagcggguccagcaucuccuucugcggcgucaacagcgacacgaccaacugguccuggcccgacggggccgagcugcccuucaccaucgacaaguga

SEQ ID NO: 85240 - RNA, 1413 nt, Artificial Sequence
  derived and/or modified CDS sequence (opt1) from neuraminidase__InfluenzaA__AET84308
augaaccccaaccagaagaucaucaccaucggcagcaucuccaucgccaucgggaucaucagccugaugcuccagaucggcaacaucaucuccaucugggccagccacuccauccagaccgggagccagaacaacacgggcaucugcaaccagcgcaucaucaccuacgagaacuccaccugggugaaccacaccuacgucaacaucaacaacacgaacgugguggcgggggaggacaagaccagcgucacccuggccggcaacuccagccugugcuccaucagcggcugggccaucuacaccaaggacaacuccauccggaucgggagcaagggcgacguguucgugauccgcgagccguucaucuccugcagccaccucgagugccggacguucuuccugacccagggggcccugcucaacgacaagcacuccaacggcaccgucaaggaccgcagccccuaccgggcccugauguccugcccccugggggaggcgcccagcccguacaacagcaaguucgaguccguggccuggagcgccuccgccugccacgacggcaugggcuggcucaccaucgggaucagcggccccgacaacggggcgguggccguccugaaguacaacggcaucaucacggagaccaucaaguccuggaagaagcagauccugcgcacccaggagagcgagugcgugugcaugaacggcuccugcuucaccaucaugacggacgggcccagcaacaaggccgccuccuacaagaucuucaagaucgagaagggcaaggugaccaagagcaucgagcucaacgcccccaacuuccacuacgaggagugcuccugcuacccggacaccgggaucgucaugugcgugugccgggacaacuggcacggcagcaaccgccccuggguguccuucaaccagaaccuggacuaccagaucggguacaucugcagcggcgucuucggcgacaacccccggcccgaggacggggagggcuccugcaacccggugaccguggacggggcgaacggcgucaagggguucagcuacaaguacgacaacggcguguggaucggccgcacgaaguccaaccggcugcgcaagggguucgagaugaucugggaccccaacggcuggaccaacaccgacagcgacuucuccgugaagcaggacgucguggccaucaccgacuggagcggguacagcggcuccuucgugcagcaccccgagcucacggggcuggacugcauccggcccugcuucugggucgagcuggugcgcggccucccgcgggagaacaccaccaucuggaccagcggcuccagcaucuccuucugcggggucaacagcgacacgaccaacugguccuggcccgacggcgccgagcugcccuucaccaucgacaaguga

SEQ ID NO: 85241 - RNA, 1413 nt, Artificial Sequence
  derived and/or modified CDS sequence (opt1) from neuraminidase__InfluenzaA__AET84319
augaaccccaaccagaagaucaucaccaucggcagcaucuccaucgccaucgggaucaucagccugaugcuccagaucggcaacaucaucuccaucugggccagccacuccauccagaccgggagccagaacaacacgggcaucugcaaccagcgcaucaucaccuacgagaacuccaccugggugaaccacaccuacgucaacaucaacaacacgaacgugguggcgggggaggacaagaccagcaugacccuggccggcaacuccagccugugcuccaucagcggcugggccaucuacaccaaggacaacuccauccggaucgggagcaagggcgacgucuucgugauccgcgagccguucaucuccugcagccaccucgagugccggacguucuuccugacccagggggcccugcucaacgacaagcacuccaaccgcaccgugaaggaccggagccccuaccgcgcccugauguccugcccccugggcgaggcgcccagcccguacaacagcaaguucgaguccgucgccuggagcgccuccgccugccacgacgggaugggcuggcucaccaucggcaucagcgggcccgacaacggcgcgguggccgugcugaaguacaacgggaucaucacggagaccaucaaguccuggaagaagcagauccugcggacccaggagagcgagugcgucugcaugaacggcuccugcuucaccaucaugacggacggccccagcaacaaggccgccuccuacaagaucuucaagaucgagaaggggaaggugaccaagagcaucgagcucaacgcccccaacuucuacuacgaggagugcuccugcuacccggacaccggcaucgugaugugcgucugccgcgacaacuggcacgggagcaaccggcccuggguguccuucaaccagaaccuggacuaccagaucggcuacaucugcagcgggguguucggcgacaacccccgccccgaggacggcgagggguccugcaacccggucaccguggacggcgcgaacggggugaagggcuucagcuacaaguacgggaacggcgucuggaucggccggacgaaguccaaccgccugcggaagggguucgagaugaucugggaccccaacggcuggaccaacaccgacagcgacuucuccgugaagcaggacguggucgccaucaccgacuggagcggguacagcggcuccuucgugcagcaccccgagcucacggggcuggacugcauccgccccugcuucuggguggagcugguccggggccucccgcgcgagaacaccaccaucuggaccagcggcuccagcaucuccuucugcggggugaacagcgacacggccaacugguccuggcccgacggcgccgagcugcccuucaccaucgacaaguga

SEQ ID NO: 85242 - RNA, 1413 nt, Artificial Sequence
  derived and/or modified CDS sequence (opt1) from neuraminidase__InfluenzaA__AET84330
augaaccccaaccagcgcaucaucaccaucggcagcaucuccaucgccaucgggaucaucagccugaugcuccagaucggcaacaucaucuccaucugggccagccacuccauccagaucgggagccagaacaacaccggcaucugcaaccagcggaucaucacguacgagaacuccaccugggugaaccacaccuacgucaacaucaacaacaccaacgugguggcgggggaggacaagacgagcgucacccuggccggcaacuccagccugugcuccaucagcggcugggccaucuacaccaaggacaacuccauccgcaucgggagcaagggcgacguguucgugauccgggagccguucaucuccugcagccaccucgagugccgcaccuucuuccugacgcagggggcccugcucaacgacaagcacuccaacggcaccgccaaggaccggagccccuaccgcgcgcugauguccugcccccugggggaggcccccagcccguacaacagcaaguucgaguccgucgccuggagcgccuccgcgugccacgacggcaugggcuggcucaccaucgggaucagcggccccgacaacggggccguggccgugcugaaguacaacggcaucaucaccggcacgaucaaguccuggaagaagcagauccugcggacccaggagagcgagugcgucugcaugaacggguccugcuucaccaucaugaccgacggccccagcaacaaggccgccuccuacaagaucuucaagaucgagaaggggaaggugaccaagagcaucgagcucaacgcgcccaacuucuacuacgaggagugcuccugcuacccggacacgggcaucgugaugugcgucugccgcgacaacuggcacgggagcaaccggcccuggguguccuucaaccagaaccuggacuaccagaucggcuacaucugcagcggcguguucggggacaacccccgccccaaggacggcgagggguccugcaacccggucaccguggacggcgccaacggggugaagggcuucagcuacaaguacggcaacggggucuggaucggccggaccaaguccaaccgccugcggaagggguucgagaugaucugggaccccaacggcuggacgaacaccgacagcgacuucuccgugaagcaggacguggucgccaucaccgacuggagcggguacagcggcuccuucgugcagcaccccgagcucaccggccuggacugcauccgccccugcuucuggguggagcugguccgggggcucccgcgcgagaacacgaccaucuggaccagcggcuccagcaucuccuucugcggggugaacagcgacaccgccaacugguccuggcccgacggcgccgagcugcccuucacgaucgacaaguga

SEQ ID NO: 85243 - RNA, 1413 nt, Artificial Sequence
  derived and/or modified CDS sequence (opt1) from neuraminidase__InfluenzaA__AET84341
augaaccccaaccagcgcaucaucaccaucggcagcaucuccaucgccaucgggaucaucagccugaugcuccagaucggcaacaucaucuccaucugggccagccacuccauccagaucgggagccagaacaacaccggcaucugcaaccagcggaucaucacguacgagaacuccaccugggugaaccacaccuacgucaacaucaacaacaccaacgugguggcgggggaggacaagacgagcgucacccuggccggcaacuccagccugugcuccaucagcggcugggccaucuacaccaaggacaacuccauccgcaucgggagcaagggcgacguguucgugauccgggagccguucaucuccugcagccaccucgagugccgcaccuucuuccugacgcagggggcccugcucaacgacaagcacuccaacggcaccgccaaggaccggagccccuaccgcgcgcugauguccugcccccugggggaggcccccagcccguacaacagcaaguucgaguccgucgccuggagcgccuccgcgugccacgacggcaugggcuggcucaccaucgggaucagcggccccgacaacggggccguggccgugcugaaguacaacggcaucaucaccggcacgaucaaguccuggaagaagcagauccugcggacccaggagagcgagugcgucugcaugaacggguccugcuucaccaucaugaccgacggccccagcaacaaggccgccuccuacaagaucuucaagaucgagaaggggaaggugaccaagagcaucgagcucaacgcgcccaacuucuacuacgaggagugcuccugcuacccggacacgggcaucgugaugugcgucugccgcgacaacuggcacgggagcaaccggcccuggguguccuucaaccagaaccuggacuaccagaucggcuacaucugcagcggcguguucggggacaacccccgccccaaggacggcgagggguccugcaacccggucaccguggacggcgccaacggggugaagggcuucagcuacaaguacggcaacggggucuggaucggccggaccaaguccaaccgccugcggaagggguucgagaugaucugggaccccaacggcuggacgaacaccgacagcgacuucuccgugaagcaggacguggucgccaucaccgacuggagcggguacagcggcuccuucgugcagcaccccgagcucaccggccuggacugcauccgccccugcuucuggguggagcugguccgggggcucccgaaggagaacacgaccaucuggaccagcggcuccagcaucuccuucugcggggugaacagcgacaccgccaacugguccuggcccgacggcgccgagcugcccuucacgaucgacaaguga

SEQ ID NO: 85244 - RNA, 1413 nt, Artificial Sequence
  derived and/or modified CDS sequence (opt1) from neuraminidase__InfluenzaA__AET84363
augaaccccaaccagcgcaucaucaccaucggcagcaucuccaucgccaucgggaucaucagccugaugcuccagaucggcaacaucaucuccaucugggccagccacuccauccagaccgggagccagaacaacacgggcaucugcaaccagcggaucaucaccuacgagaacuccaccugggugaaccacaccuacgucaacaucaacaacacgaacgugguggcgggggaggacaagaccagcaugacccuggccggcaacuccagccugugcuccaucagcggcugggccaucuacaccaaggacaacuccauccgcaucgggagcaagggcgacgucuucgugauccgggagccguucaucuccugcagccaccucgagugccgcacguucuuccugacccagggggcccugcucaacgacaagcacuccaacggcaccgccaaggaccggagccccuaccgcgcgcugauguccugcccccugggggaggcccccagcccguacaacagcaaguucgaguccguggccuggagcgccuccgcgugccacgacggcaugggcuggcucaccaucgggaucagcggccccgacaacggggccgucgccgugcugaaguacaacggcaucaucacgggcaccaucaaguccuggaagaagcagauccugcggacccaggagagcgagugcgugugcaugaacggguccugcuucaccaucaugacggacggccccagcaacaaggccgccuccuacaagaucuucaagaucgagaaggggaaggucaccaagagcaucgagcucaacgcgcccaacuucuacuacgaggagugcuccugcuacccggacaccggcaucgugaugugcgugugccgcgacaacuggcacgggagcaaccggcccugggucuccuucaaccagaaccuggacuaccagaucggcuacaucugcagcggcguguucggggacaacccccgccccaaggacggcgagggguccugcaacccggugaccgucgacggcgccaacggggugaagggcuucagcuacaaguacggcaacgggguguggaucggccggacgaaguccaaccgccugcggaagggguucgagaugaucugggaccccaacggcuggaccaacaccgacagcgacuucuccgucaagcaggacgugguggccaucaccgacuggagcggguacagcggcuccuucguccagcaccccgagcucacgggccuggacugcauccgccccugcuucuggguggagcuggugcgggggcucccgcgcgagaacaccaccaucuggaccagcggcuccagcaucuccuucugcggggucaacagcgacacggccaacugguccuggcccgacggcgccgagcugcccuucaccaucgacaaguga

SEQ ID NO: 85245 - RNA, 1413 nt, Artificial Sequence
  derived and/or modified CDS sequence (opt1) from neuraminidase__InfluenzaA__AET84374
augaaccccaaccagcgcaucaucaccaucggcagcaucuccaucgccaucgggaucaucagccugaugcuccagaucggcaacaucaucuccaucugggccagccacuccauccagaucgggagccagaacaacaccggcaucugcaaccagcggaucaucacguacgagaacuccaccugggugaaccacaccuacgucaacaucaacaacaccaacgugguggcgggggaggacaagacgagcgucacccuggccggcaacuccagccugugcuccaucagcggcugggccaucuacaccaaggacaacuccauccgcaucgggagcaagggcgacguguucgugauccgggagccguucaucuccugcagccaccucgagugccgcaccuucuuccugacgcagggggcccugcucaacgacaagcacuccaacggcaccgccaaggaccggagccccuaccgcgcgcugauguccugcccccugggggaggcccccagcccguacaacagcaaguucgaguccgucgccuggagcgccuccgcgugccacgacggcaugggcuggcucaccaucgggaucagcggccccgacaacggggccguggccgugcugaaguacaacggcaucaucaccgagacgaucaaguccuggaagaagcagauccugcggacccaggagagcgagugcgucugcaugaacggcuccugcuucaccaucaugaccgacgggcccagcaacaaggccgccuccuacaagaucuucaagaucgagaagggcaaggugaccaagagcaucgagcucaacgcgcccaacuucuacuacgaggagugcuccugcuacccggacacggggaucgugaugugcgucugccgcgacaacuggcacggcagcaaccggcccuggguguccuucaaccagaaccuggacuaccagaucggguacaucugcagcggcguguucggcgacaacccccgccccaaggacggggagggcuccugcaacccggucaccguggacggggccaacggcgugaagggguucagcuacaaguacggcaacggcgucuggaucgggcggaccaaguccaaccgccugcggaagggcuucgagaugaucugggaccccaacggguggacgaacaccgacagcgacuucuccgugaagcaggacguggucgccaucaccgacuggagcggcuacagcggguccuucgugcagcaccccgagcucaccggccuggacugcauccgccccugcuucuggguggagcugguccggggccucccgcgcgagaacacgaccaucuggaccagcggguccagcaucuccuucugcggcgugaacagcgacaccgccaacugguccuggcccgacggggccgagcugcccuucacgaucgacaaguga

SEQ ID NO: 85246 - RNA, 1413 nt, Artificial Sequence
  derived and/or modified CDS sequence (opt1) from neuraminidase__InfluenzaA__AET84396
augaaccccaaccagcgcaucaucaccaucggcagcaucuccaucgccaucgggaucaucagccugaugcuccagaucggcaacaucaucuccaucugggccagccacuccauccagaccgggagccagaacaacacgggcaucugcaaccagcggaucaucaccuacgagaacuccaccugggugaaccacaccuacgucaacaucaacaacacgaacgugguggcgggggaggacaagaccagcaugacccuggccggcaacuccagccugugcuccaucagcggcugggccaucuacaccaaggacaacuccauccgcaucgggagcaagggcgacgucuucgugauccgggagccguucaucuccugcagccaccucgagugccgcacguucuuccugacccagggggcccugcucaacgacaagcacuccaacggcaccgccaaggaccggagccccuaccgcgcgcugauguccugcccccugggggaggcccccagcccguacaacagcaaguucgaguccguggccuggagcgccuccgcgugccacgacggcaugggcuggcucaccaucgggaucagcggccccgacaacggggccgucgccgugcugaaguacaacggcaucaucacggagaccaucaaguccuggaagaagcagauccugcggacccaggagagcgagugcgugugcaugaacggcuccugcuucaccaucaugacggacgggcccagcaacaaggccgccuccuacaagaucuucaagaucgagaagggcaaggucaccaagagcaucgagcucaacgcgcccaacuucuacuacgaggagugcuccugcuacccggacaccgggaucgugaugugcgugugccgcgacaacuggcacggcagcaaccggcccugggucuccuucaaccagaaccuggacuaccagaucggguacaucugcagcggcguguucggcgacaacccccgccccaaggacggggagggcuccugcaacccggugaccgucgacggggccaacggcgugaagggguucagcuacaaguacggcaacggcguguggaucgggcggacgaaguccaaccgccugcggaagggcuucgagaugaucugggaccccaacggguggaccaacaccgacagcgacuucuccgucaagcaggacgugguggccaucaccgacuggagcggcuacagcggguccuucguccagcaccccgagcucacgggccuggacugcauccgccccugcuucuggguggagcuggugcggggccucccgcgcgagaacaccaccaucuggaccagcggguccagcaucuccuucugcggcgucaacagcgacacggccaacugguccuggcccgacggggccgagcugcccuucaccaucgacaaguga

SEQ ID NO: 85247 - RNA, 1413 nt, Artificial Sequence
  derived and/or modified CDS sequence (opt1) from neuraminidase__InfluenzaA__AET84407
augaaccccaaccagcgcaucaucaccaucggcagcaucuccaucgccaucgggaucaucagccugaugcuccagaucggcaacaucaucuccaucugggccagccacuccauccagaucgggagccagaacaacaccggcaucugcaaccagcggaucaucacguacgagaacuccaccugggugaaccacaccuacgucaacaucaacaacaccaacgugguggcgggggaggacaagacgagcgucacccuggccggcaacuccagccugugcuccaucagcggcugggccaucuacaccaaggacaacuccauccgcaucgggagcaagggcgacguguucgugauccgggagccguucaucuccugcagccaccucgagugccgcaccuucuuccugacgcagggggcccugcucaacgacaagcacuccaacggcaccgccaaggaccggagccccuaccgcgcgcugauguccugcccccugggggaggcccccagcccguacaacagcaaguucgaguccgucgccuggagcgccuccgcgugccacgacggcaugggcuggcucaccaucgggaucagcggccccgacaacggggccguggccgugcugaaguacaacggcaucaucaccggcacgaucaaguccuggaagaagcagauccugcggacccaggagagcgagugcgucugcaugaacggguccugcuucaccaucaugaccgacggccccagcaacaaggccgccuccuacaagaucuucaagaucgagaaggggaaggugaccaagagcaucgagcucaacgcgcccaacuucuacuacgaggagugcuccugcuacccggacacgggcaucgugaugugcgucugccgcgacaacuggcacgggagcaaccggcccuggguguccuucaaccagaaccuggacuaccagaucggcuacaucugcagcggcguguucggggacaacccccgccccgaggacggcgagggguccugcaacccggucaccguggacggcgccaacggggugaagggcuucagcuacaaguacggcaacggggucuggaucggccggaccaaguccaaccgccugcggaagggguucgagaugaucugggaccccaacggcuggacgaacaccgacagcgacuucuccgugaagcaggacguggucgccaucaccgacuggagcggguacagcggcuccuucgugcagcaccccgagcucaccggccuggacugcauccgccccugcuucuggguggagcugguccgggggcucccgcgcgagaacacgaccaucuggaccagcggcuccagcaucuccuucugcggggugaacagcgacaccgccaacugguccuggcccgacggcgccgagcugcccuucacgaucgacaaguga

SEQ ID NO: 85248 - RNA, 1413 nt, Artificial Sequence
  derived and/or modified CDS sequence (opt1) from neuraminidase__InfluenzaA__AET84418
augaaccccaaccagcgcaucaucgccaucggcagcaucuccaucgccaucgggaucaucagccugaugcuccagaucggcaacaucaucuccaucugggcgagccacuccauccagaucgggagccagaacaacaccggcaucugcaaccagcggaucaucaccuacgagaacuccacgugggugaaccacaccuacgucaacaucaacaacaccaacgugguggccggggaggacaagaccagcgucacgcuggccggcaacuccagccugugcuccaucagcggcugggccaucuacaccaaggacaacuccauccgcaucgggagcaagggcgacguguucgugauccgggagccguucaucuccugcagccaccucgagugccgcaccuucuuccugacccagggggcccugcucaacgacaagcacuccaacggcacggcgaaggaccggagccccuaccgcgcccugauguccugcccccugggggaggcccccagcccguacaacagcaaguucgaguccgucgccuggagcgcguccgccugccacgacggcaugggcuggcucaccaucgggaucagcggccccgacaacggggccguggccgugcugaaguacaacggcaucaucaccgagaccaucaaguccuggaagaagcagauccugcggacgcaggagagcgagugcgucugcaugaacggcuccugcuucaccaucaugaccgacgggcccagcaacaaggccgcguccuacaagaucuucaagaucgagaagggcaaggugaccaagagcaucgagcucaacgcccccaacuucuacuacgaggagugcuccugcuacccggacacggggaucgugaugugcgucugccgcgacaacuggcacggcagcaaccggcccuggguguccuucaaccagaaccuggacuaccagaucggguacaucugcagcggcguguucggcgacaacccccgccccgaggacggggagggcuccugcaacccggucaccguggacggggccaacggcgugaagggguucagcuacaaguacggcaacggcgucuggaucgggcggaccaaguccaaccgccugcggaagggcuucgagaugaucugggaccccaacggguggaccaacacggacagcgacuucuccgugaagcaggacguggucgccaucaccgacuggagcggcuacagcggguccuucgugcagcaccccgagcucaccggccuggacugcauccgccccugcuucuggguggagcugguccggggccucccgcgcgagaacaccacgaucuggaccagcggguccagcaucuccuucugcggcgugaacagcgacaccgccaacugguccuggcccgacggggcggagcugcccuucaccaucgacaaguga

SEQ ID NO: 85249 - RNA, 1413 nt, Artificial Sequence
  derived and/or modified CDS sequence (opt1) from neuraminidase__InfluenzaA__AET84429
augaaccccaaccagaagaucaucaccaucggcagcaucuccaucgccaucgggaucaucagccugaugcuccagaucggcaacaucaucuccaucugggccagccacuccauccagaccgggagccagaacaacacgggcaucugcaaccagcgcaucaucaccuacgagaacuccaccugggugaaccacaccuacgucagcaucaacaacacgaacgugguggcggggaaggacaagaccuccgucacccuggccggcaacagcucccugugcagcaucuccggcugggccaucuacaccaaggacaacagcauccggaucggguccaagggcgacguguucgugauccgcgagccguucaucagcugcucccaccucgagugccggacguucuuccugacccagggggcccugcucaacgacaagcacagcaacggcaccgucaaggaccgcucccccuaccgggcccugaugagcugcccccugggggaggcgcccagcccguacaacuccaaguucgagagcguggccugguccgccagcgccugccacgacggcaugggcuggcucaccaucgggaucuccggccccgacaacggggcgguggccguccugaaguacaacggcaucaucacgggcaccaucaagagcuggaagaagcagauccugcgcacccaggaguccgagugcgugugcaugaacgggagcugcuucaccaucaugacggacggccccuccaacaaggccgccagcuacaagaucuucaagaucgagaaggggaaggugaccaaguccaucgagcucaacgcccccaacuucuacuacgaggagugcagcugcuacccggacaccggcaucgucaugugcgugugccgggacaacuggcacggguccaaccgccccugggugagcuucaaccaggaccuggacuaccagaucggcuacaucugcuccggcgucuucggggacaacccccggcccaaggacggcgaggggagcugcaacccggugaccguggacggcgcgaacggggucaagggcuucuccuacaaguacggcaacgggguguggaucggccgcaccaagagcaaccggcugcgcaagggguucgagaugaucugggaccccaacggcuggacgaacaccgacuccgacuucagcgugaagcaggacgucguggccaucaccgacuggagcggguacuccggcagcuucgugcagcaccccgagcucacgggccuggacugcauccggcccugcuucugggucgagcuggugcgcgggcucccgcgggagaacaccaccaucuggaccuccggcagcuccaucagcuucugcggggucaacuccgacacggccaacuggagcuggcccgacggcgccgagcugcccuucaccaucgacaaguga

SEQ ID NO: 85250 - RNA, 1413 nt, Artificial Sequence
  derived and/or modified CDS sequence (opt1) from neuraminidase__InfluenzaA__AET84440
augaaccccaaccagaagaucaucaccaucggcagcaucuccaucgccaucgggaucaucagccugaugcuccagaucggcaacaucaucuccaucugggccagccacuccauccagaccgggagccagaacaacacgggcaucugcaaccagcgcaucaucaccuacgagaacuccaccugggugaaccacaccuacgucaacaucaacaacacgaacgugguggcgggggaggacaagaccagcgucacccuggccggcaacuccagccugugcuccaucagcggcugggccaucuacaccaaggacaacuccauccggaucgggagcaagggcgacguguucgugauccgcgagccguucaucuccugcagccaccucgagugccggacguucuuccugacccagggggcccugcucaacgacaagcacuccaacggcaccgucaaggaccgcagccccuaccgggcccugauguccugcccccugggggaggcgcccagcccguacaacagcaaguucgaguccguggccuggagcgccuccgccugccacgacggcaugggcuggcucaccaucgggaucagcggccccgacaacggggcgguggccguccugaaguacaacggcaucaucacggagaccaucaaguccuggaagaagcagauccugcgcacccaggagagcgagugcgugugcaugaacggcuccugcuucaccaucaugacggacgggcccagcaacaaggccgccuccuacaagaucuucaagaucgagaagggcaaggugaccaagagcaucgagcucaacgcccccaacuucuacuacgaggagugcuccugcuacccggacaccgggaucgucaugugcgugugccgggacaacuggcacggcagcaaccgccccuggguguccuucaaccagaaccuggacuaccagaucggguacaucugcagcggcgucuucggcgacaacccccggcccaaggacggggagggcuccugcaacccggugaccguggacggggcgaacggcgucaagggguucagcuacaaguacggcaacggcguguggaucgggcgcacgaaguccaaccggcugcgcaagggcuucgagaugaucugggaccccaacggguggaccaacaccgacagcgacuucuccgugaagcaggacgucguggccaucaccgacuggagcggcuacagcggguccuucgugcagcaccccgagcucacgggccuggacugcauccggcccugcuucugggucgagcuggugcgcggccucccgcgggagaacaccaccaucuggaccagcggguccagcaucuccuucugcggcgucaacagcgacacggccaacugguccuggcccgacggggccgagcugcccuucaccaucgacaaguga

SEQ ID NO: 85251 - RNA, 1413 nt, Artificial Sequence
  derived and/or modified CDS sequence (opt1) from neuraminidase__InfluenzaA__AET84451
augaaccccaaccagaagaucaucaccaucggcagcaucuccaucgccaucgggaucaucagccugauccuccagaucggcaacaucaucuccaucugggccagccacuccauccagaccgggagccagaaccacacgggcaucugcaaccagcgcaucaucaccuacgagaacuccaccugggugaacaacaccuacgucaacaucaacaacacgaacgugguggcggagaaggacaagaccagcgucacccuggccgggaacuccagccugugcuccaucagcggcugggccaucuacaccaaggacaacuccauccggaucggcagcaagggggacguguucgugauccgcgagccguucaucuccugcagccaccucgagugccggacguucuuccugaccaagggcgcccugcucaacgacaagcacuccaacgggaccgucaccgaccgcagccccuaccgggcccugauguccugcccccugggcgaggcgcccagcccguacaacagccgcuucgaguccguggccuggagcgccuccgccugccacgacgggaugggcuggcucacgaucggcaucagcgggcccgacaacggcgcgguggccguccugaaguacaacgggaucaucaccgagaccaucaaguccuggaagaagcggauccugcgcacccaggagagcgagugcgugugcaugaacggcuccugcuucacgaucaugaccgacggccccagcaacggggccgccuccuacaagaucuucaagaucgagaagggcaaggugaccaagaccaucgagcucaacgcccccaacuuccacuacgaggagugcagcugcuacccggacacggggaccgucaugugcgugugccgggacaacuggcacggcuccaaccgccccugggugagcuucaaccagaaccuggacuaccagaucggguacaucugcuccggcgucuucggcgacaacccccggcccaaggacggggagggcagcugcaacccggugaccguggacggggcggacggcgucaagggguucuccuacaaguacggcaacggcguguggaucgggcgcaccaagagcaaccggcugcgcaagggcuucgagaugaucugggaccccaacggguggacgaacaccgacuccgacuucagcgugaagcaggacgucguggccaucaccgacugguccggcuacagcgggagcuucgugcagcaccccgagcucaccggccuggacugcauccggcccugcuucugggucgagcuggugcgcggccucccgcgggagaacacgaccaucuggaccuccgggagcuccaucagcuucugcggcgucaacuccgggaccgccaacuggagcuggcccgacggcgccgagcugcccuucacgaucgacaaguga

SEQ ID NO: 85252 - RNA, 1410 nt, Artificial Sequence; identical to SEQ ID NO: 80762
  derived and/or modified CDS sequence (opt1) from neuraminidase__InfluenzaA__AEV53421

SEQ ID NO: 85253 - RNA, 1410 nt, Artificial Sequence; identical to SEQ ID NO: 80762
  derived and/or modified CDS sequence (opt1) from neuraminidase__InfluenzaA__AEV53423

SEQ ID NO: 85254 - RNA, 1410 nt, Artificial Sequence; identical to SEQ ID NO: 82224
  derived and/or modified CDS sequence (opt1) from neuraminidase__InfluenzaA__AEV53425

SEQ ID NO: 85255 - RNA, 1410 nt, Artificial Sequence; identical to SEQ ID NO: 80762
  derived and/or modified CDS sequence (opt1) from neuraminidase__InfluenzaA__AEV53427

SEQ ID NO: 85256 - RNA, 1410 nt, Artificial Sequence; identical to SEQ ID NO: 82224
  derived and/or modified CDS sequence (opt1) from neuraminidase__InfluenzaA__AEV53429

SEQ ID NO: 85257 - RNA, 1410 nt, Artificial Sequence
  derived and/or modified CDS sequence (opt1) from neuraminidase__InfluenzaA__AEV53431
augaaccccaaccagaagaucaucaccaucggcagcgugugcaugaccaucgggauggccaaccugauccuccagaucggcaacaucaucuccaucuggaucagccacuccauccagcuggggaaccagaaccagaucgagacgugcaaccagagcgucaucaccuacgagaacaacaccugggugaaccagaccuacgugaacaucuccaacacgaacuucgccgcgggccagagcgucgugccggugaagcuggccgggaacuccagccucugccccgucuccggcugggccaucuacagcaaggacaacuccauccgcaucggcagcaagggggacguguucgugauccgggagcccuucaucuccugcagcccccuggagugccgcaccuucuuccugacccagggcgcccuccugaacgacaagcacuccaacgggaccaucaaggaccggagcccguaccgcacgcugauguccugccccaucggcgagguccccagccccuacaacucccgguucgagagcguggccuggagcgcguccgccugccacgacgggaucaacuggcucaccaucggcaucagcggcccggacaacggggccguggccguccugaaguacaacggcaucaucaccgacaccaucaaguccuggcgcaacaacauccugcggacgcaggagagcgagugcgcgugcgugaacggguccugcuucaccgugaugaccgacggccccagcgacggccaggccuccuacaagaucuuccgcaucgagaaggggaagaucgucaagagcguggagaugaacgcccccaacuaccacuacgaggagugcuccugcuaccccgacagcuccgagaucacgugcgugugccgggacaacuggcacggcagcaaccgcccgugggucuccuucaaccagaaccucgaguaccagaucggguacaucugcagcggcaucuucggggacaacccccggcccaacgacaagaccggcuccugcggccccgugagcuccaacggggccaacggcgugaagggguucagcuucaaguacggcaacggggucuggaucggccgcaccaaguccaucagcagccggaacggcuucgagaugaucugggacccgaacggguggaccggcaccgacaacaacuucuccaucaagcaggacaucguggggaucaacgaguggagcggcuacuccgggagcuucgugcagcaccccgagcugacgggccuggacugcauccgccccugcuucugggucgagcucauccggggccgccccaaggagaacaccaucuggaccuccgggagcuccaucagcuucugcggcgugaacuccgggaccgucggcuggagcuggccggacggcgccgagcugcccuucacgaucgacaaguga

SEQ ID NO: 85258 - RNA, 1410 nt, Artificial Sequence; identical to SEQ ID NO: 80762
  derived and/or modified CDS sequence (opt1) from neuraminidase__InfluenzaA__AEV53435

SEQ ID NO: 85259 - RNA, 1410 nt, Artificial Sequence
  derived and/or modified CDS sequence (opt1) from neuraminidase__InfluenzaA__AEV53437
augaaccccaaccagaagaucaucaccaucggcagcgugugcaugaccaucgggauggccaaccugauccuccagaucggcaacaucaucuccaucuggaucagccacuccauccagcuggggaaccagaaccagaucgagacgugcaaccagagcgucaucaccuacgagaacaacaccugggugaaccagaccuacgugaacaucuccaacacgaacuucgccgcgggccagagcgucguguccgugaagcuggccgggaacagcucccucugcccggucagcggcugggccaucuacuccaaggacaacagcauccgcaucggcuccaagggggacguguucgugauccgggagcccuucaucagcugcagcccccuggagugccgcaccuucuuccugacccagggcgcccuccugaacgacaagcacuccaacgggaccaucaaggaccggucccccuaccgcacgcugaugagcugcccgaucggcgagguccccucccccuacaacagccgguucgagagcguggccugguccgcgagcgccugccacgacgggaucaacuggcucaccaucggcaucuccggccccgacaacggggccguggccguccugaaguacaacggcaucaucaccgacaccaucaagagcuggcgcaacaacacgcugcggacccaggaguccgagugcgcgugcgugaacgggagcugcuucaccgugaugaccgacggcccguccgacggccaggccagcuacaagaucuuccgcaucgagaaggggaagaucgucaaguccguggagaugaacgcccccaacuaccacuacgaggagugcagcugcuaccccgacuccagcgagaucacgugcgugugccgggacaacuggcacggcuccaaccgccccugggucagcuucaaccagaaccucgaguaccagaucggguacaucugcuccggcaucuucggggacaacccgcggcccaacgacaagaccggcagcugcggccccguguccagcaacggggccaacggcgugaagggguucuccuucaaguacggcaacggggucuggaucggccgcaccaagagcaucagcucccggaacggcuucgagaugaucugggaccccaacggguggaccggcacggacaacaacuucagcaucaagcaggacaucguggggaucaacgagugguccggcuacagcggguccuucgugcagcacccggagcugaccggccuggacugcauccgccccugcuucugggucgagcucauccggggccgccccaaggagaacaccaucuggaccagcggguccagcaucuccuucugcggcgugaacagcgacacggucgggugguccuggcccgacggcgccgagcugccguucaccaucgacaaguga

SEQ ID NO: 85260 - RNA, 1410 nt, Artificial Sequence; identical to SEQ ID NO: 80762
  derived and/or modified CDS sequence (opt1) from neuraminidase__InfluenzaA__AEV53439

SEQ ID NO: 85261 - RNA, 1410 nt, Artificial Sequence; identical to SEQ ID NO: 80762
  derived and/or modified CDS sequence (opt1) from neuraminidase__InfluenzaA__AEV53441

SEQ ID NO: 85262 - RNA, 1410 nt, Artificial Sequence; identical to SEQ ID NO: 80762
  derived and/or modified CDS sequence (opt1) from neuraminidase__InfluenzaA__AEV53443

SEQ ID NO: 85263 - RNA, 1410 nt, Artificial Sequence
  derived and/or modified CDS sequence (opt1) from neuraminidase__InfluenzaA__AEV53445
augaaccccaaccagaagaucaucaccaucggcagcgugugcaugaccaucgggauggccaaccugauccuccagaucggcaacaucaucuccaucuggaucagccacuccauccagcuggggaaccagaaccagaucgagacgugcaaccagagcgucaucaccuacgagaacaacaccugggugaaccagaccuacgugaacaucuccaacacgaacuucgccgcgggccagagcgucguguccgugaagcuggccgggaacagcucccucugcccggucagcggcugggccaucuacuccaaggacaacagcauccgcaucggcuccaagggggacguguucgugauccgggagcccuucaucagcugcagcccccuggagugccgcaccuucuuccugacccagggcgcccuccugaacgacaagcacuccaacgggaccaucaaggaccggucccccuaccgcacgcugaugagcugcccgaucggcgagguccccucccccuacaacagccgguucgagagcguggccugguccgcgagcgccugccacgacgggaucaacuggcucaccaucggcaucuccggccccgacaacggggccguggccguccugaaguacaacggcaucaucaccgacaccaucaagagcuggcgcaacaacauccugcggacgcaggaguccgagugcgcgugcgugaacgggagcugcuucaccgugaugaccgacggcccguccgacggccaggccagcuacaagaucuuccgcaucgagaaggggaagaucgucaaguccguggagaugaacgcccccaacuaccacuacgaggagugcagcugcuaccccgacuccagcgagaucacgugcgugugccgggacaacuggcacggcuccaaccgccccugggucagcuucaaccagaaccucgaguaccagaucggguacaucugcuccggcaucuucggggacaacccgcggcccaacgacaagaccggcagcugcggccccguguccagcaacggggccaacggcgugaagggguucuccuucaaguacggcaacggggucuggaucggccgcaccaagagcaucagcucccggaacggcuucgagaugaucugggaccccaacggguggaccggcaccgaccacaacuucagcaucaagcaggacaucguggggaucaacgagugguccggcuacagcggguccuucgugcagcacccggagcugacgggccuggacugcauccgccccugcuucugggucgagcucauccggggccgccccaaggagaacaccaucuggaccagcggguccagcaucuccuucugcggcgugaacagcgacaccgucgggugguccuggcccgacggcgccgagcugccguucacgaucgacaaguga

SEQ ID NO: 85264 - RNA, 1410 nt, Artificial Sequence; identical to SEQ ID NO: 80762
  derived and/or modified CDS sequence (opt1) from neuraminidase__InfluenzaA__AEV53447

SEQ ID NO: 85265 - RNA, 1410 nt, Artificial Sequence; identical to SEQ ID NO: 82664
  derived and/or modified CDS sequence (opt1) from neuraminidase__InfluenzaA__AEV53449

SEQ ID NO: 85266 - RNA, 1410 nt, Artificial Sequence
  derived and/or modified CDS sequence (opt1) from neuraminidase__InfluenzaA__AEV53451
augaaccccaaccagaagaucaucaccaucggcagcgugugcaugaccaucgggauggccaaccugauccuccagaucggcaacaucaucuccaucuggaucagccacuccauccagcuggggaaccagaaccagaucgagacgugcaaccagagcgucaucaccuacgagaacaacaccugggugaaccagaccuacgugaacaucuccaacacgaacuucgccgcgggccagagcgucguguccgugaagcuggccgggaacagcucccucugcccggucagcggcugggccaucuacuccaaggacaacagcauccgcaucggcuccaagggggacguguucgugauccgggagcccuucaucagcugcagcccccuggagugccgcaccuucuuccugacccagggcgcccuccugaacgacaagcacuccaacgggaccaucaaggaccggucccccuaccgcacgcugaugagcugcccgaucggcgagguccccucccccuacaacagccgguucgagagcguggccugguccgcgagcgccugccacgacgggaucaacuggcucaccaucggcaucuccggccccgacaacggggccguggccguccugaaguacaacggcaucaucaccgacaccaucaagagcuggcgcaacaacauccugcggacgcaggaguccgagugcgcgugcgugaacgggagcugcuucaccgugaugaccgacggcccguccgacggccaggccagcuacaagaucuucaagaucgagaaggggaagaucgucaaguccguggagaugaacgcccccgacuaccacuacgaggagugcagcugcuaccccgacuccagcgagaucacgugcgugugccgcgacaacuggcacggcuccaaccggcccugggucagcuucaaccagaaccucgaguaccagaucggguacaucugcuccggcaucuucggggacaacccgcgccccaacgacaagaccggcagcugcggccccguguccagcaacggggccaacggcgugaagggguucuccuucaaguacggcaacggggucuggaucggccggaccaagagcaucagcucccgcaacggcuucgagaugaucugggaccccaacggguggaccggcaccgacaacaacuucagcaucaagcaggacaucguggggaucaacgagugguccggcuacagcggguccuucgugcagcacccggagcugacgggccuggacugcauccggcccugcuucugggucgagcucauccgcggccggcccaaggagaacaccaucuggaccagcggguccagcaucuccuucugcggcgugaacagcgacaccgucgggugguccuggcccgacggcgccgagcugccguucacgaucgacaaguga

SEQ ID NO: 85267 - RNA, 1410 nt, Artificial Sequence; identical to SEQ ID NO: 80762
  derived and/or modified CDS sequence (opt1) from neuraminidase__InfluenzaA__AEV53453

SEQ ID NO: 85268 - RNA, 1410 nt, Artificial Sequence
  derived and/or modified CDS sequence (opt1) from neuraminidase__InfluenzaA__AEV53455
augaaccccaaccagaagaucaucaccaucggcagcgugugcaugaccaucgggauggccaaccugauccuccagaucggcaacaucaucuccaucuggaucagccacuccauccagcuggggaaccagaaccagaucgagacgugcaaccagagcgucaucaccuacgagaacaacaccugggugaaccagaccuacgugaacaucuccaacacgaacuucgccgcgggccagagcgucguguccgugaagcuggccgggaacagcucccucugcccggucagcggcugggccaucuacuccaaggacaacagcauccgcaucggcuccaagggggacguguucgugauccgggagcccuucaucagcugcagcccccuggagugccgcaccuucuuccugacccagggcgcccuccugaacgacaagcacuccaacgggaccaucaaggaccggucccccuaccgcacgcugaugagcugcccgaucggcgagguccccucccccuacaacagccgguucgagagcguggccugguccgcgagcgccugccacgacgggaucaacuggcucaccaucggcaucuccggccccgacaacggggccguggccguccugaaguacaacggcaucaucaccgacaccaucaagagcuggcgcaacaacauccugcggacgcaggaguccgagugcgcgugcgugaacgggagcugcuucaccgugaugaccgacggcccguccgacggccaggccagcuacaagaucuuccgcaucgagaaggggaagaucgucaaguccguggagaugaacgcccccaacuaccacuacgaggagugcagcugcuaccccgacuccagcgagaucacgugcgugugccgggacaacuggcacggcuccaaccgccccugggucagcuucaaccagaaccucgaguaccagaucggguacaucugcuccggcaucuucggggacaacccgcggcccaacgacaagaccggcagcugcggccccguguccagcaacggggccaacggcgugaagggguucuccuucaaguacggcaacggggucuggaucggccgcaccaagagcaucagcucccggaacggcuucgagaugaucugggaccccaacggguggaccgagaccgacaacaacuucagcaucaagcaggacaucgugggcaucaacgagugguccggguacagcggcuccuucgugcagcacccggagcugacggggcugaacugcauccgccccugcuucugggucgagcucauccggggccgccccaaggagaacaccaucuggaccagcggcuccagcaucuccuucugcggggugaacagcgacaccgucggcugguccuggcccgacggggccgagcugccguucacgaucgacaaguga

SEQ ID NO: 85269 - RNA, 1410 nt, Artificial Sequence
  derived and/or modified CDS sequence (opt1) from neuraminidase__InfluenzaA__AEV53457
augaaccccaaccagaagaucaucaccaucggcagcgugugcaugaccaucgggauggccaaccugauccuccagaucggcaacaucaucuccaucuggaucagccacuccauccagcuggggaaccagaaccagaucgagacgugcaaccagagcgucaucaccuacgagaacaacaccugggugaaccagaccuacgugaacaucuccaacacgaacuucgccgcgggccagagcgucguguccgugaagcuggccgggaacagcucccucugcccggucagcggcugggccaucuacuccaaggacaacagcauccgcaucggcuccaagggggacguguucgugauccgggagcccuucaucagcugcagcccccuggagugccgcaccuucuuccugacccagggcgcccuccugaacgacaagcacuccaacgggaccaucaaggaccggucccccuaccgcacgcugaugagcugcccgaucggcgagguccccucccccuacaacagccgguucgagagcguggccugguccgcgagcgccugccacgacgggaucaacuggcucaccaucggcaucuccggccccgacaacggggccguggccguccugaaguacaacggcaucaucaccgacaccaucaagagcuggcgcaacaacauccugcggacgcaggaguccgagugcgcgugcgugaacgggagcugcuucaccgugaugaccgacggcccguccgacggccaggccagcuacaagaucuuccgcgucgagaaggggaagaucgugaaguccguggagaugaacgcccccaacuaccacuacgaggagugcagcugcuaccccgacuccagcgagaucacgugcgucugccgggacaacuggcacggcuccaaccgccccugggugagcuucaaccagaaccucgaguaccagaucggguacaucugcuccggcaucuucggggacaacccgcggcccaacgacaagaccggcagcugcggccccguguccagcaacggggccaacggcgucaagggguucuccuucaaguacggcaacgggguguggaucggccgcaccaagagcaucagcucccggaacggcuucgagaugaucugggaccccaacggguggaccggcaccgacaacaacuucagcaucaagcaggacaucguggggaucaacgagugguccggcuacagcggguccuucguccagcacccggagcugacgggccuggacugcauccgccccugcuucuggguggagcucauccggggccgccccaaggagaacaccaucuggaccagcggguccagcaucuccuucugcggcgucaacagcgacaccguggggugguccuggcccgacggcgccgagcugccguucacgaucgacaaguga

SEQ ID NO: 85270 - RNA, 1410 nt, Artificial Sequence
  derived and/or modified CDS sequence (opt1) from neuraminidase__InfluenzaA__AEV53459
augaaccccaaccagaagaucaucaccaucggcagcgugugcaugaccaucgggauggccaaccugauccuccagaucggcaacaucaucuccaucuggaucagccacuccauccagcuggggaaccagaaccagaucgagacgugcaaccagagcgucaucaccuacgagaacaacaccugggugaaccagaccuacgugaacaucuccaacacgaacuucgccgcgggccagagcgucguguccgugaagcuggccgggaacagcucccucugcccggucagcggcugggccaucuacuccaaggacaacagcauccgcaucggcuccaagggggacguguucgugauccgggagcccuucaucagcugcagcccccuggagugccgcaccuucuuccugacccagggcgcccuccugaacgacaagcacuccaacgggaccaucaaggaccggucccccuaccgcacgcugaugagcugcccgaucggcgagguccccucccccuacaacagccgguucgagagcguggccugguccgcgagcgccugccacgacgggaucaacuggcucaccaucggcaucuccggccccgacaacggggccguggccguccugaaguacaacggcaucaucaccgacaccaucaagagcuggcgcaacaacauccugcggacgcaggaguccgagugcgcgugcgugaacgggagcugcuucaccgugaucaccgacggcccguccgacggccaggccagcuacaagaucuuccgcaucgagaaggggaagaucgucaaguccguggagaugaacgcccccaacuaccacuacgaggagugcagcugcuaccccgacuccagcgagaucacgugcgugugccgggacaacuggcacggcuccaaccgccccugggucagcuucaaccagaaccucgaguaccagaucggguacaucugcuccggcaucuucggggacaacccgcggcccaacgacaagaccggcagcugcggccccguguccagcaacggggccaacggcgugaagggguucuccuucaaguacggcaacggggucuggaucggccgcaccaagagcaucagcucccggaacggcuucgagaugaucugggaccccaacggguggaccgagaccgacaacaacuucagcaucaagcaggacaucgugggcaucaacgagugguccggguacagcggcuccuucgugcagcacccggagcugacggggcugaacugcauccgccccugcuucugggucgagcucauccggggccgccccaaggagaacaccaucuggaccagcggcuccagcaucuccuucugcggggugaacagcgacaccgucggcugguccuggcccgacggggccgagcugccguucacgaucgacaaguga

SEQ ID NO: 85271 - RNA, 1410 nt, Artificial Sequence; identical to SEQ ID NO: 80762
  derived and/or modified CDS sequence (opt1) from neuraminidase__InfluenzaA__AEV53461

SEQ ID NO: 85272 - RNA, 1410 nt, Artificial Sequence
  derived and/or modified CDS sequence (opt1) from neuraminidase__InfluenzaA__AEV53463
augaaccccaaccagaagaucaucaccaucggcagcgugugcaugaccaucgggauggccaaccugauccuccagaucggcaacaucaucuccaucuggaucagccacuccauccagcuggagaaccagaaccagaucgagacgugcaaccagagcgucaucaccuacgagaacaacaccugggugaaccagaccuacgugaacaucuccaacacgaacuucgccgcggggcagagcgucguguccgugaagcuggccggcaacagcucccucugcccggucagcgggugggccaucuacuccaaggacaacagcauccgcaucggcuccaagggcgacguguucgugauccgggagcccuucaucagcugcagcccccuggagugccgcaccuucuuccugacccagggggcccuccugaacgacaagcacuccaacggcaccaucaaggaccggucccccuaccgcacgcugaugagcugcccgaucggggagguccccucccccuacaacagccgguucgagagcguggccugguccgcgagcgccugccacgacggcaucaacuggcucaccaucgggaucuccggccccgacaacggcgccguggccguccugaaguacaacgggaucaucaccgacaccaucaagagcuggcgcaacaacauccugcggacgcaggaguccgagugcgcgugcaucaacggcagcugcuucaccgugaugaccgacgggccguccgacggccaggccagcuacaagaucuuccgcaucgagaagggcaagaucgugaaguccgucgagaugaacgcccccaacuaccacuacgaggagugcagcugcuaccccgacuccagcgagaucacgugcgugugccgggacaacuggcacggguccaaccgccccugggugagcuucaaccagaaccucgaguaccagaucggcuacaucugcuccgggaucuucggcgacaacccgcggcccaacgacaagaccgggagcugcggccccgucuccagcaacggcgccaacggggugaagggcuucuccuucaaguacgggaacggcguguggaucgggcgcaccaagagcaucagcucccggaacggcuucgagaugaucugggaccccaacggcuggaccgggaccgacaacaacuucagcaucaagcaggacaucgucggcaucaacgagugguccggguacagcggcuccuucgugcagcacccggagcugacggggcuggacugcauccgccccugcuucuggguggagcucauccggggccgccccaaggagaacaccaucuggaccagcggcuccagcaucuccuucugcggggucaacagcgacaccgugggcugguccuggcccgacggggccgagcugccguucacgaucgacaaguga

SEQ ID NO: 85273 - RNA, 1410 nt, Artificial Sequence
  derived and/or modified CDS sequence (opt1) from neuraminidase__InfluenzaA__AEV53465
augaaccccaaccagaagaucaucaccaucggcagcgugugcaugaccaucgggauggccaaccugauccuccagaucggcaacaucaucuccaucuggaucagccacuccauccagcuggggaaccagaaccagaucgagacgugcaaccagagcgucaucaccuacgagaacaacaccugggugaaccagaccuacgugaacaucuccaacacgaacuucgccgcgggccagagcgucguguccgugaagcuggccgggaacagcucccucugcccggucagcggcugggccaucuacuccaaggacaacagcauccgcaucggcuccaagggggacguguucgugauccgggagcccuucaucagcugcagcccccuggagugccgcaccuucuuccugacccagggcgcccuccugaacgacaagcacuccaacgggaccaucaaggaccggucccccuaccgcacgcugaugagcugcccgaucggcgagguccccucccccuacaacagccgguucgagagcguggccugguccgcgagcgccugccacgacgggaucaacuggcucaccaucggcaucuccggccccgacaacggggccguggccguccugaaguacaacggcaucaucaccgacaccaucaagagcuggcgcaacaacauccugcggacgcaggaguccgagugcgcgugcgugaacgggagcugcuucaccgugaugaccgacggcccguccgaccgccaggccagcuacaagaucuuccggaucgagaagggcaagaucgucaaguccguggagaugaacgcccccaacuaccacuacgaggagugcagcugcuaccccgacuccagcgagaucacgugcgugugccgcgacaacuggcacggguccaaccggcccugggucagcuucaaccagaaccucgaguaccagaucggcuacaucugcuccgggaucuucggcgacaacccgcgccccaacgacaagaccgggagcugcggccccguguccagcaacggcgccaacggggugaagggcuucuccuacaaguacgggaacggcgucuggaucgggcggaccaagagcaucagcucccgcaacggcuucgagaugaucugggaccccaacggcuggaccgggaccgacaacaacuucagcaucaagcaggacaucgugggcaucaacgagugguccggguacagcggcuccuucgugcagcacccggagcugacggggcuggacugcauccggcccugcuucugggucgagcucauccgcggccggcccaaggagaacaccaucuggaccagcggcuccagcaucuccuucugcggggugaacagcgacaccgucggcugguccuggcccgacggggccgagcugccguucacgaucgacaaguga

SEQ ID NO: 85274 - RNA, 1410 nt, Artificial Sequence; identical to SEQ ID NO: 82563
  derived and/or modified CDS sequence (opt1) from neuraminidase__InfluenzaA__AEV53467

SEQ ID NO: 85275 - RNA, 1410 nt, Artificial Sequence; identical to SEQ ID NO: 82563
  derived and/or modified CDS sequence (opt1) from neuraminidase__InfluenzaA__AEV53469

SEQ ID NO: 85276 - RNA, 1410 nt, Artificial Sequence; identical to SEQ ID NO: 80762
  derived and/or modified CDS sequence (opt1) from neuraminidase__InfluenzaA__AEV53471

SEQ ID NO: 85277 - RNA, 1410 nt, Artificial Sequence; identical to SEQ ID NO: 80762
  derived and/or modified CDS sequence (opt1) from neuraminidase__InfluenzaA__AEV53473

SEQ ID NO: 85278 - RNA, 1410 nt, Artificial Sequence; identical to SEQ ID NO: 80762
  derived and/or modified CDS sequence (opt1) from neuraminidase__InfluenzaA__AEV53475

SEQ ID NO: 85279 - RNA, 1410 nt, Artificial Sequence; identical to SEQ ID NO: 80762
  derived and/or modified CDS sequence (opt1) from neuraminidase__InfluenzaA__AEV53477

SEQ ID NO: 85280 - RNA, 1410 nt, Artificial Sequence; identical to SEQ ID NO: 80762
  derived and/or modified CDS sequence (opt1) from neuraminidase__InfluenzaA__AEV53479

SEQ ID NO: 85281 - RNA, 1410 nt, Artificial Sequence; identical to SEQ ID NO: 80762
  derived and/or modified CDS sequence (opt1) from neuraminidase__InfluenzaA__AEV53481

SEQ ID NO: 85282 - RNA, 1410 nt, Artificial Sequence; identical to SEQ ID NO: 80762
  derived and/or modified CDS sequence (opt1) from neuraminidase__InfluenzaA__AEV53483

SEQ ID NO: 85283 - RNA, 1410 nt, Artificial Sequence
  derived and/or modified CDS sequence (opt1) from neuraminidase__InfluenzaA__AEV53485
augaaccccaaccagaagaucaucaccaucggcagcgugugcaugaccaucgggauggccaaccugauccuccagaucggcaacaucaucuccaucugggucagccacuccauccagcuggggaaccagaaccagaucgagacgugcaaccagagcgugaucaccuacgagaacaacaccugggugaaccagaccuacgucaacaucuccaacacgaacuucgccgcgggccagagcgugguguccgucaagcuggccgggaacagcucccucugcccggugagcggcugggccaucuacuccaaggacaacagcauccgcaucggcuccaagggggacguguucgucauccgggagcccuucaucagcugcagcccccuggagugccgcaccuucuuccugacccagggcgcccuccugaacgacaagcacuccaacgggaccaucaaggaccggucccccuaccgcacgcugaugagcugcccgaucggcgaggugcccucccccuacaacagccgguucgagagcguggccugguccgcgagcgccugccacgacgggaucaacuggcucaccaucggcaucuccggccccgacaacggggccgucgccgugcugaaguacaacggcaucaucaccgacaccaucaagagcuggcgcaacaacauccugcggacgcaggaguccgagugcgcgugcgugaacgggagcugcuucaccgucaugaccgacggcccguccgacggccaggccagcuacaagaucuuccgcaucgagaaggggaagaucgugaaguccguggagaugaacgcccccaacuaccacuacgaggagugcagcugcuaccccgacuccagcgagaucacgugcgucugccgggacaacuggcacggcuccaaccgccccugggugagcuucaaccagaaccucgaguaccagaucggguacaucugcuccggcaucuucggggacaacccgcggcccaacgacaagaccggcagcugcggccccguguccagcaacggggccaacggcgucaagggguucuccuucaaguacggcaacgggguguggaucggccgcaccaagagcaucagcucccggaacggcuucgagaugaucugggaccccaacggguggaccggcaccgacaacaacuucagcaucaagcaggacaucguggggaucaacgagugguccggcuacagcggguccuucguccagcacccggagcugacgggccuggacugcauccgccccugcuucuggguggagcucauccggggccgccccaaggagaacaccaucuggaccagcggguccagcaucuccuucugcggcgucaacagcgacaccguggggugguccuggcccgacggcgccgagcugccguucacgaucgacaaguga

SEQ ID NO: 85284 - RNA, 1410 nt, Artificial Sequence; identical to SEQ ID NO: 82563
  derived and/or modified CDS sequence (opt1) from neuraminidase__InfluenzaA__AEV53487

SEQ ID NO: 85285 - RNA, 1410 nt, Artificial Sequence; identical to SEQ ID NO: 81780
  derived and/or modified CDS sequence (opt1) from neuraminidase__InfluenzaA__AEV53489

SEQ ID NO: 85286 - RNA, 1410 nt, Artificial Sequence
  derived and/or modified CDS sequence (opt1) from neuraminidase__InfluenzaA__AEV53491
augaaccccaaccagaagaucaucaccaucggccuggugugcaugaccaucgggauggccaaccucauccugcagaucggcaacaucaucagcaucuggaucucccacagcauccagcuggggaaccagaaccagaucgagacgugcaaccaguccgucaucaccuacgagaacaacaccugggugaaccagaccuacgugaacaucagcaacacgaacuucgccgcgggccaguccgucgugagcgugaagcucgccgggaacuccagccugugcccggucuccggcugggccaucuacagcaaggacaacuccauccgcaucggcagcaagggggacguguucgugauccgggagcccuucaucuccugcagcccccuggagugccgcaccuucuuccucacccagggcgcccugcugaacgacaagcacuccaacgggaccaucaaggaccggagccccuaccgcacgcucauguccugcccgaucggcgagguccccagccccuacaacucccgguucgagagcguggccuggagcgcguccgccugccacgacgggaucaacuggcugaccaucggcaucagcggccccgacaacggggccguggccguccugaaguacaacggcaucaucaccgacaccaucaaguccuggcgcaacaacauccuccggacgcaggagagcgagugcgcgugcgugaacggguccugcuucaccgugaugaccgacggcccgagcgacggccaggccuccuacaagaucuuccgcaucgagaaggggaagaucgucaagagcguggagaugaacgcccccaacuaccacuacgaggagugcuccugcuaccccgacagcuccgagaucacgugcgugugccgggacaacuggcacggcagcaaccgccccugggucuccuucaaccagaaccuggaguaccagaucggguacaucugcagcggcaucuucggggacaacccgcggcccaacgacaagaccggcuccugcggccccgugagcuccaacggggccaacggcgugaagggguucagcuucaaguacggcaacggggucuggaucggccgcaccaaguccaucagcagccggaacggcuucgagaugaucugggaccccaacggguggaccggcaccgacaacaacuucuccaucaagcaggacaucguggggaucaacgaguggagcggcuacuccgggagcuucgugcagcacccggagcugacgggccucgacugcauccgccccugcuucugggucgagcugauccggggccgccccaaggagaacaccaucuggaccuccgggagcuccaucagcuucugcggcgugaacuccgacaccgucggguggagcuggcccgacggcgccgagcugccguucacgaucgacaaguga

SEQ ID NO: 85287 - RNA, 1410 nt, Artificial Sequence; identical to SEQ ID NO: 80762
  derived and/or modified CDS sequence (opt1) from neuraminidase__InfluenzaA__AEV53493

SEQ ID NO: 85288 - RNA, 1410 nt, Artificial Sequence; identical to SEQ ID NO: 82224
  derived and/or modified CDS sequence (opt1) from neuraminidase__InfluenzaA__AEV53495

SEQ ID NO: 85289 - RNA, 1410 nt, Artificial Sequence
  derived and/or modified CDS sequence (opt1) from neuraminidase__InfluenzaA__AEV53497
augaaccccaaccagaagaucaucaccaucggcagcgugugcaugaccaucgggauggccaaccugauccuccagaucggcaacaucaucuccaucuggaucagccacuccauccagcuggagaaccagaaccagaucgagacgugcaaccagagcgucaucaccuacgagaacaacaccugggugaaccagaccuacgugaacaucuccaacacgaacuucgccgcggggcagagcgucguguccgugaaccuggccggcaacagcucccucugcccggucagcgggugggccaucuacuccaaggacaacagcauccgcaucggcuccaagggcgacguguucgugauccgggagcccuucaucagcugcagcccccuggagugccgcaccuucuuccugacccagggggcccuccugaacgacaagcacuccaacggcaccaucaaggaccggucccccuaccgcacgcugaugagcugcccgaucggggagguccccucccccuacaacagccgguucgagagcguggccugguccgcgagcgccugccacgacggcaucaacuggcucaccaucgggaucuccggccccgacaacggcgccguggccguccugaaguacaacgggaucaucaccgacaccaucaagagcuggcgcaacaacauccugcggacgcaggaguccgagugcgcgugcgugaacggcagcugcuucaccgugaugaccgacgggccguccgacggccaggccagcuacaagaucuuccgcaucgagaagggcaagaucgucaaguccguggagaugaacgcccccaacuaccacuacgaggagugcagcugcuaccccgacuccagcgagaucacgugcgugugccgggacaacuggcacggguccaaccgccccugggucagcuucaaccagaaccucgaguaccagaucggcuacaucugcuccgggaucuucggcgacaacccgcggcccaacgacaagaccgggagcugcggccccguguccagcaacggcgccaacggggugaagggcuucuccuucaaguacgggaacggcgucuggaucgggcgcaccaagagcaucagcucccggaacggcuucgagaugaucugggaccccaacggcuggaccgggaccgacaacaacuucagcaucaagcaggacaucgugggcaucaacgagugguccggguacagcggcuccuucgugcagcacccggagcugacggggcuggacugcauccgccccugcuucugggucgagcucauccggggccgccccaaggagaacaccaucuggaccagcggcuccagcaucuccuucugcggggugaacagcgacaccgucggcugguccuggcccgacggggccgagcugccguucacgaucgacaaguga

SEQ ID NO: 85290 - RNA, 1410 nt, Artificial Sequence; identical to SEQ ID NO: 81780
  derived and/or modified CDS sequence (opt1) from neuraminidase__InfluenzaA__AEV53499

SEQ ID NO: 85291 - RNA, 1410 nt, Artificial Sequence; identical to SEQ ID NO: 80762
  derived and/or modified CDS sequence (opt1) from neuraminidase__InfluenzaA__AEV53501

SEQ ID NO: 85292 - RNA, 1410 nt, Artificial Sequence; identical to SEQ ID NO: 80762
  derived and/or modified CDS sequence (opt1) from neuraminidase__InfluenzaA__AEV53503

SEQ ID NO: 85293 - RNA, 1410 nt, Artificial Sequence; identical to SEQ ID NO: 80762
  derived and/or modified CDS sequence (opt1) from neuraminidase__InfluenzaA__AEV53505

SEQ ID NO: 85294 - RNA, 1410 nt, Artificial Sequence; identical to SEQ ID NO: 80762
  derived and/or modified CDS sequence (opt1) from neuraminidase__InfluenzaA__AEV53507

SEQ ID NO: 85295 - RNA, 1410 nt, Artificial Sequence; identical to SEQ ID NO: 80762
  derived and/or modified CDS sequence (opt1) from neuraminidase__InfluenzaA__AEV53509

SEQ ID NO: 85296 - RNA, 1410 nt, Artificial Sequence; identical to SEQ ID NO: 82224
  derived and/or modified CDS sequence (opt1) from neuraminidase__InfluenzaA__AEV53511

SEQ ID NO: 85297 - RNA, 1410 nt, Artificial Sequence; identical to SEQ ID NO: 82224
  derived and/or modified CDS sequence (opt1) from neuraminidase__InfluenzaA__AEV53513

SEQ ID NO: 85298 - RNA, 1410 nt, Artificial Sequence; identical to SEQ ID NO: 82224
  derived and/or modified CDS sequence (opt1) from neuraminidase__InfluenzaA__AEV53515

SEQ ID NO: 85299 - RNA, 1410 nt, Artificial Sequence
  derived and/or modified CDS sequence (opt1) from neuraminidase__InfluenzaA__AEV53517
augaaccccaaccagcgcaucaucaccaucggcagcgugugcaugaccaucgggauggccaaccugauccuccagaucggcaacaucaucuccaucugggucagccacuccauccagcuggggaaccagaaccagaucgagacgugcaaccagagcgugaucaccuacgagaacaacaccugggugaaccagaccuacgucaacaucuccaacacgaacuucgccgcgggccagagcgugguguccgucaagcuggccgggaacagcucccucugcccggugagcggcugggccaucuacuccaaggacaacagcauccggaucggcuccaagggggacguguucgucauccgcgagcccuucaucagcugcagcccccuggagugccggaccuucuuccugacccagggcgcccuccugaacgacaagcacuccaacgggaccaucaaggaccgcucccccuaccggacgcugaugagcugcccgaucggcgaggugcccucccccuacaacagccgcuucgagagcguggccugguccgcgagcgccugccacgacgggaucaacuggcucaccaucggcaucuccggccccgacaacggggccgucgccgugcugaaguacaacggcaucaucaccgacaccaucaagagcuggcggaacaacauccugcgcacgcaggaguccgagugcgcgugcgugaacgggagcugcuucaccgucaugaccgacggcccguccgacggccaggccagcuacaagaucuuccggaucgagaaggggaagaucgugaaguccguggagaugaacgcccccaacuaccacuacgaggagugcagcugcuaccccgacuccagcgagaucacgugcgucugccgcgacaacuggcacggcuccaaccggcccugggugagcuucaaccagaaccucgaguaccagaucggguacaucugcuccggcaucuucggggacaacccgcgccccaacgacaagaccggcagcugcggccccguguccagcaacggggccaacggcgucaagggguucuccuucaaguacggcaacgggguguggaucggccggaccaagagcaucagcucccgcaacggcuucgagaugaucugggaccccaacggguggaccggcaccgacaacaacuucagcaucaagcaggacaucguggggaucaacgagugguccggcuacagcggguccuucguccagcacccggagcugacgggccuggacugcauccggcccugcuucuggguggagcucauccgcggccggcccaaggagaacaccaucuggaccagcggguccagcaucuccuucugcggcgucaacagcgacaccguggggugguccuggcccgacggcgccgagcugccguucacgaucgacaaguga

SEQ ID NO: 85300 - RNA, 1410 nt, Artificial Sequence; identical to SEQ ID NO: 80762
  derived and/or modified CDS sequence (opt1) from neuraminidase__InfluenzaA__AEV53519

SEQ ID NO: 85301 - RNA, 1410 nt, Artificial Sequence; identical to SEQ ID NO: 82224
  derived and/or modified CDS sequence (opt1) from neuraminidase__InfluenzaA__AEV53521

SEQ ID NO: 85302 - RNA, 1410 nt, Artificial Sequence; identical to SEQ ID NO: 82050
  derived and/or modified CDS sequence (opt1) from neuraminidase__InfluenzaA__AEV53523

SEQ ID NO: 85303 - RNA, 1410 nt, Artificial Sequence; identical to SEQ ID NO: 81116
  derived and/or modified CDS sequence (opt1) from neuraminidase__InfluenzaA__AEV53525

SEQ ID NO: 85304 - RNA, 1410 nt, Artificial Sequence; identical to SEQ ID NO: 80762
  derived and/or modified CDS sequence (opt1) from neuraminidase__InfluenzaA__AEV53527

SEQ ID NO: 85305 - RNA, 1410 nt, Artificial Sequence
  derived and/or modified CDS sequence (opt1) from neuraminidase__InfluenzaA__AEV53529
augaaccccaaccagaagaucaucaccaucggcagcgugugcaugaccaucgggauggccaaccugauccuccagaucggcaacaucaucuccaucuggaucagccacuccauccagcuggagaaccagaaccagaucgagacgugcaaccagagcgucaucaccuacgagaacaacaccugggugaaccagaccuacgugaacaucuccaacacgaacuucgccgcggggcagagcgucguguccgugaagcuggccggcaacagcucccucugcccggucagcgggugggccaucuacuccaaggacaacagcauccgcaucggcuccaagggcgacguguucgugauccgggagcccuucaucagcugcagcccccuggagugccgcaccuucuuccugacccagggggcccuccugaacgacaagcacuccaacggcaccaucaaggaccggucccccuaccgcacgcugaugagcugcccgaucggggagguccccucccccuacaacagccgguucgagagcguggccugguccgcgagcgccugccacgacggcaucaacuggcucaccaucgggaucuccggccccgacaacggcgccguggccguccugaaguacaacgggaucaucaccgacaccaucaagagcuggcgcaacaacauccugcggacgcaggaguccgagugcgcgugcgugaacggcagcugcuucaccgugaugaccgacgggccguccgacggccaggccagcuacaagaucuuccgcaucgagaagggcaagaucgucaaguccguggagaugaacgcccccaacuaccacuacgaggagugcagcugcuaccccgacuccagcgagaucacgugcgugugccgggacaacuggcacggguccaaccgccccugggucagcuucaaccagaaccucgaguaccagaucggcuacaucugcuccgggaucuucggcgacaacccgcggcccaacgacaagaccgggagcugcggccccguguccagcaacggcgccaacggggugaagggcuucuccuucaaguacgggaacggcgucuggaucgggcgcaccaagagcaucagcucccggaacggcuucgagaugaucugggaccccaacggcuggaccgggaccgacaacaacuucagcaucaagcaggacaucgugggcaucaaggagugguccggguacagcggcuccuucgugcagcacccggagcugacggggcuggacugcauccgccccugcuucugggucgagcucauccggggccgccccaaggagaacaccaucuggaccagcggcuccagcaucuccuucugcggggugaacagcgacaccgucggcugguccuggcccgacggggccgagcugccguucacgaucgacaaguga

SEQ ID NO: 85306 - RNA, 1410 nt, Artificial Sequence; identical to SEQ ID NO: 82224
  derived and/or modified CDS sequence (opt1) from neuraminidase__InfluenzaA__AEV53531

SEQ ID NO: 85307 - RNA, 1410 nt, Artificial Sequence
  derived and/or modified CDS sequence (opt1) from neuraminidase__InfluenzaA__AEV53533
augaaccccaaccagaagaucaucaccaucggcagcgugugcaugaccaucgggauggccaaccugauccuccagaucggcaacaucaucuccaucuggaucagccacuccauccagcuggggaaccagaaccagaucgagacgugcaaccagagcgucaucaccuacgagaacaacaccugggugaaccagaccuacgugaacaucuccaacacgaacuucgccgcgggccagagcgucguguccgugaagcuggccgggaacagcucccucugcccggucagcggcugggccaucuacuccaaggacaacagcauccgcaucggcuccaagggggacguguucgugauccgggagcccuucaucagcugcagcccccuggagugccgcaccuucuuccugacccagggcgcccuccugaacgacaagcacuccaacgggaccaucaaggaccggucccccuaccgcacgcugaugagcugcccgaucggcgagguccccucccccuacaacagccgguucgagagcguggccugguccgcgagcgccugccacgacgggaucaacuggcucaccaucggcaucuccggccccgacaacggggccguggccguccugaaguacaacggcaucaucaccgacaccaucaagagcuggcgcaacaacauccugcggacgcaggaguccgagugcgcgugcgugaacgggagcugcuucaccgugaugaccgacggcccguccgacggccaggccagcuacaagaucuuccgcaucgagaaggggaagaucgucaaguccguggagaugaacgcccccaacuacuacuacgaggagugcagcugcuaccccgacuccagcgagaucacgugcgugugccgggacaacuggcacggcuccaaccgccccugggucagcuucaaccagaaccucgaguaccagaucggguacaucugcuccggcaucuucggggacaacccgcggcccaacgacaagaccggcagcugcggccccguguccagcaacggggccaacggcgugaagggguucuccuucaaguacggcaacggggucuggaucggccgcaccaagagcaucagcucccggaacggcuucgagaugaucugggaccccaacggguggaccggcaccgacaacaacuucagcaucaagcaggacaucguggggaucaacgagugguccggcuacagcggguccuucgugcagcacccggagcugacgggccugaacugcauccgccccugcuucugggucgagcucauccggggccgccccaaggagaacaccaucuggaccagcggguccagcaucuccuucugcggcgugaacagcgacaccgucgggugguccuggcccgacggcgccgagcugccguucacgaucgacaaguga

SEQ ID NO: 85308 - RNA, 1410 nt, Artificial Sequence; identical to SEQ ID NO: 80762
  derived and/or modified CDS sequence (opt1) from neuraminidase__InfluenzaA__AEV53535

SEQ ID NO: 85309 - RNA, 1410 nt, Artificial Sequence; identical to SEQ ID NO: 85283
  derived and/or modified CDS sequence (opt1) from neuraminidase__InfluenzaA__AEV53537

SEQ ID NO: 85310 - RNA, 1410 nt, Artificial Sequence; identical to SEQ ID NO: 80762
  derived and/or modified CDS sequence (opt1) from neuraminidase__InfluenzaA__AEV53539

SEQ ID NO: 85311 - RNA, 1410 nt, Artificial Sequence; identical to SEQ ID NO: 84201
  derived and/or modified CDS sequence (opt1) from neuraminidase__InfluenzaA__AEV53541

SEQ ID NO: 85312 - RNA, 1410 nt, Artificial Sequence; identical to SEQ ID NO: 84201
  derived and/or modified CDS sequence (opt1) from neuraminidase__InfluenzaA__AEV53543

SEQ ID NO: 85313 - RNA, 1410 nt, Artificial Sequence; identical to SEQ ID NO: 82410
  derived and/or modified CDS sequence (opt1) from neuraminidase__InfluenzaA__AEV53545

SEQ ID NO: 85314 - RNA, 1410 nt, Artificial Sequence; identical to SEQ ID NO: 84201
  derived and/or modified CDS sequence (opt1) from neuraminidase__InfluenzaA__AEV53547

SEQ ID NO: 85315 - RNA, 1410 nt, Artificial Sequence; identical to SEQ ID NO: 84201
  derived and/or modified CDS sequence (opt1) from neuraminidase__InfluenzaA__AEV53549

SEQ ID NO: 85316 - RNA, 1410 nt, Artificial Sequence; identical to SEQ ID NO: 84201
  derived and/or modified CDS sequence (opt1) from neuraminidase__InfluenzaA__AEV53551

SEQ ID NO: 85317 - RNA, 1410 nt, Artificial Sequence; identical to SEQ ID NO: 84201
  derived and/or modified CDS sequence (opt1) from neuraminidase__InfluenzaA__AEV53553

SEQ ID NO: 85318 - RNA, 1410 nt, Artificial Sequence; identical to SEQ ID NO: 85283
  derived and/or modified CDS sequence (opt1) from neuraminidase__InfluenzaA__AEV53555

SEQ ID NO: 85319 - RNA, 1410 nt, Artificial Sequence; identical to SEQ ID NO: 81780
  derived and/or modified CDS sequence (opt1) from neuraminidase__InfluenzaA__AEV53557

SEQ ID NO: 85320 - RNA, 1410 nt, Artificial Sequence; identical to SEQ ID NO: 80762
  derived and/or modified CDS sequence (opt1) from neuraminidase__InfluenzaA__AEV53559

SEQ ID NO: 85321 - RNA, 1410 nt, Artificial Sequence; identical to SEQ ID NO: 80762
  derived and/or modified CDS sequence (opt1) from neuraminidase__InfluenzaA__AEV53561

SEQ ID NO: 85322 - RNA, 1410 nt, Artificial Sequence; identical to SEQ ID NO: 82354
  derived and/or modified CDS sequence (opt1) from neuraminidase__InfluenzaA__AEV53563

SEQ ID NO: 85323 - RNA, 1410 nt, Artificial Sequence
  derived and/or modified CDS sequence (opt1) from neuraminidase__InfluenzaA__AEV53565
augaaccccaaccagaagaucaucaccaucggcagcgugugcaugaccaucgggauggccaaccugauccuccagaucggcaacaucaucuccaucuggaucagccacuccauccagcuggggaaccagaaccagaucgagacgugcaaccagagcgucaucaccuacgagaacaacaccugggugaaccagaccuacgugaacaucuccaacacgaacuucgccgcgggccagagcgucguguccgugaagcuggccgggaacagcucccucugcccggucaacggcugggccaucuacagcaaggacaacuccauccgcaucggcagcaagggggacguguucgugauccgggagcccuucaucuccugcagcccccuggagugccgcaccuucuuccugacccagggcgcccuccugaacgacaagcacuccaacgggaccaucaaggaccggagccccuaccgcacgcugauguccugcccgaucggcgagguccccagccccuacaacucccgguucgagagcguggccuggagcgcguccgccugccacgacgggaucaacuggcucaccaucggcaucagcggccccgacaacggggccguggccguccugaaguacaacggcaucaucaccgacaccaucaaguccuggcgcaacaacauccugcggacgcaggagagcgagugcgcgugcgugaacggguccugcuucaccgugaugaccgacggcccgagcgacggccaggccuccuacaagaucuuccgcaucgagaaggggaagaucgucaagagcguggagaugaacgcccccaacuaccacuacgaggagugcuccugcuaccccgacagcuccgagaucacgugcgugugccgggacaacuggcacggcagcaaccgccccugggucuccuucaaccagaaccucgaguaccagaucggguacaucugcagcggcaucuucggggacaacccgcggcccaacgacaagaccggcuccugcggccccgugagcuccaacggggccaacggcgugaagggguucagcuucaaguacggcaacggggucuggaucggccgcaccaaguccaucagcagccggaacggcuucgagaugaucugggaccccaacggguggaccggcaccgacaacaacuucuccaucaagcaggacaucguggggaucaacgaguggagcggcuacuccgggagcuucgugcagcacccggagcugacgggccuggacugcauccgccccugcuucugggucgagcucauccggggccgccccaaggagaacaccaucuggaccuccgggagcuccaucagcuucugcggcgugaacuccgacaccgucggguggagcuggcccgacggcgccgagcugccgcugacgaucgacaaguga

SEQ ID NO: 85324 - RNA, 1410 nt, Artificial Sequence
  derived and/or modified CDS sequence (opt1) from neuraminidase__InfluenzaA__AEV53567
augaaccccaaccagaagaucaucaccaucggcagcgugugcaugaccaucgggauggccaaccugauccuccagaucggcaacaucaucuccaucuggaucagccacuccauccagcuggggaaccagaaccagaucgagacgugcaaccagagcgucaucaccuacgagaacaacaccugggugaaccagaccuacgugaacaucuccaacacgaacuucgccgcgggccagagcgucguguccgugaagcuggccgggaacagcucccucugcccggucagcggcugggccaucuacuccaaggacaacagcauccgcaucggcuccaagggggacguguucgugauccgggagcccuucaucagcugcagcccccuggagugccgcaccuucuuccugacccagggcgcccuccugaacgacaagcacuccaacgggaccaucaaggaccggucccccuaccgcacgcugaugagcugcccgaucggcgagguccccucccccuacaacagccgguucgagagcguggccugguccgcgagcgccugccacgacgggaucaacuggcucaccaucggcaucuccggccccgacaacggggccguggccguccugaaguacaacggcaucaucaccgacaccaucaagagcuggcgcaacaacauccugcggacgcaggaguccgagugcgcgugcgugaacgggagcugcuucaccgugaugaccgacggcccguccgacggccaggccagcuacaagaucuuccgcaucgagaaggggaagaucgucaaguccguggagaugaacgcccccaacuaccacuacgaggagugcagcugcuaccccgacuccagcgagaucacgugcgugugccgggacaacuggcacggcuccaaccgccccugggucagcuucaaccagaaccucgaguaccagaucggguacaucugcuccggcaucuucggggacaacccgcggcccaacgacaagaccggcagcugcggccccguguccagcaacggggccaacggcgugaagggguucuccuucaaguacggcaacggggccuggaucggccgcaccaagagcaucagcucccggaacggcuucgagaugaucugggaccccaacggguggaccgagaccgacaacaacuucagcaucaagcaggacaucgucggcaucaacgagugguccggguacagcggcuccuucgugcagcacccggagcugacggggcugaacugcauccgccccugcuucuggguggagcucauccggggccgccccaaggagaacaccaucuggaccagcggcuccagcaucuccuucugcggggucaacagcgacaccgugggcugguccuggcccgacggggcggagcugccguucacgaucgacaaguga

SEQ ID NO: 85325 - RNA, 1410 nt, Artificial Sequence; identical to SEQ ID NO: 80762
  derived and/or modified CDS sequence (opt1) from neuraminidase__InfluenzaA__AEV53569

SEQ ID NO: 85326 - RNA, 1410 nt, Artificial Sequence; identical to SEQ ID NO: 84201
  derived and/or modified CDS sequence (opt1) from neuraminidase__InfluenzaA__AEV53571

SEQ ID NO: 85327 - RNA, 1410 nt, Artificial Sequence; identical to SEQ ID NO: 84201
  derived and/or modified CDS sequence (opt1) from neuraminidase__InfluenzaA__AEV53573

SEQ ID NO: 85328 - RNA, 1410 nt, Artificial Sequence; identical to SEQ ID NO: 82563
  derived and/or modified CDS sequence (opt1) from neuraminidase__InfluenzaA__AEV53575

SEQ ID NO: 85329 - RNA, 1410 nt, Artificial Sequence
  derived and/or modified CDS sequence (opt1) from neuraminidase__InfluenzaA__AEV53577
augaaccccaaccagaagaucaucaccaucggcagcgugugcaugaccaucgggauggccaaccugauccuccagaucggcaacaucaucuccaucuggaucagccacuccauccagcuggggaaccagaaccagaucgagacgugcaaccagagcgucaucaccuacgagaacaacaccugggugaaccagaccuacgugaacaucuccaacacgaacuucgccgcgggccagagcgucguguccgugaagcuggccgggaacagcucccucugcccggucagcggcugggccaucuacuccaaggacaacagcauccgcaucggcuccaagggggacguguucgugauccgggagcccuucaucagcugcagcccccuggagugccgcaccuucuuccugacccagggcgcccuccugaacgacaagcacuccaacgggaccaucaaggaccggucccccuaccgcacgcugaugagcugcccgaucggcgagguccccucccccuacaacagccgguucgagagcguggccugguccgcgagcgccugccacgacgggaucaacuggcucaccaucggcaucuccggccccgacaacggggccguggccguccugaaguacaacggcaucaucaccgacaccaucaagagcuggcgcaacaacauccugcggacgcaggaguccgagugcgcgugcgugaacgggagcugcuucaccgugaugaccgacggcccguccgacggccaggccagcuacaagaucuuccgcaucgagaaggggaagaucgucaaguccguggagaugaacgcccccaacuaccacuacgaggagugcagcugcuaccccgacuccagcgagaucacgugcgugugccgggacaacuggcacggcuccaaccgccccugggucagcuucaaccagaaccucgaguaccagaucggguacaucugcuccggcaucuucggggacaacccgcggcccaacgacaagaccggcagcugcggccccguguccagcaacggggccaacggcgugaagggguucuccuucaaguacggcaacggggucuggaucggccgcaccaagagcaucagcucccggaacggcuucgagaugaucugggaccccaacggguggaccggcaccgacaacaacuucagcaucaagcaggacaucguggggaucaacgagugguccggcuacagcggguccuucgugcagcagccggagcugacgggccuggacugcauccgccccugcuucugggucgagcucauccggggccgccccaaggagaacaccaucuggaccagcggguccagcaucuccuucugcggcgugaacagcgacaccgucgggugguccuggcccgacggcgccgagcugccguucacgaucgacaaguga

SEQ ID NO: 85330 - RNA, 1410 nt, Artificial Sequence; identical to SEQ ID NO: 85268
  derived and/or modified CDS sequence (opt1) from neuraminidase__InfluenzaA__AEV53579

SEQ ID NO: 85331 - RNA, 1410 nt, Artificial Sequence; identical to SEQ ID NO: 82563
  derived and/or modified CDS sequence (opt1) from neuraminidase__InfluenzaA__AEV53581

SEQ ID NO: 85332 - RNA, 1410 nt, Artificial Sequence; identical to SEQ ID NO: 82224
  derived and/or modified CDS sequence (opt1) from neuraminidase__InfluenzaA__AEV53583

SEQ ID NO: 85333 - RNA, 1410 nt, Artificial Sequence; identical to SEQ ID NO: 82224
  derived and/or modified CDS sequence (opt1) from neuraminidase__InfluenzaA__AEV53585

SEQ ID NO: 85334 - RNA, 1410 nt, Artificial Sequence
  derived and/or modified CDS sequence (opt1) from neuraminidase__InfluenzaA__AEV76877
augaaccccaaccagaagaucaucaccaucggcagcgugugcaugaccaucgggauggccaaccugauccuccagaucggcaacaucaucuccaucuggaucagccacuccauccagcuggggaaccagagccagaucgagacgugcaaccaguccgucaucaccuacgagaacaacaccugggugaaccagaccuacgugaacaucagcacgaccaacuucgccgcgggccaguccgucgugagcgugaagcuggccgggaacuccagccucugcccggucuccggcugggccaucuacagcaaggacaacuccauccgcaucggcagcaagggggacguguucgugauccgggagcccuucaucuccugcagcccccuggagugccgcaccuucuuccugacccagggcgcccuccugaacgacaagcacuccaacgggacgaucaaggaccggagccccuaccgcacccugauguccugcccgaucggcgagguccccagccccuacaacagccgguucgaguccguggccuggagcgcguccgccugccacgacgggaucaacuggcucaccaucggcaucagcggccccgacaacggggccguggccguccugaaguacaacggcaucaucaccgacacgaucaaguccuggcgcaacaacauccugcggacccaggagagcgagugcgcgugcgugaacggguccugcuucaccaucaugaccgacggcccgagcgacggccaggccuccuacaagaucuuccgcaucgagaaggggaagaucgucaagagcguggagaugaacgcccccaacuaccacuacgaggagugcuccugcuaccccgacagcuccgagaucacgugcgugugccgggacaacuggcacggcagcaaccgccccuggguguccuucaaccagaaccucgaguaccagaucggguacaucugcagcggcaucuucggggacaacccgcggcccaacgacaagaccggcuccugcggccccgucagcuccaacggggccaacggcgugaagggguucagcuucaaguacggcaacgggguguggaucggccgcaccaagagcaucuccagccggaagggcuucgagaugaucugggaccccaacggguggaccggcacggacaacaacuucuccaucaagcaggacaucgucgggaucaacgaguggagcggcuacuccgggagcuucgugcagcacccggagcugaccggccuggacugcauccgccccugcuucuggguggagcucauccggggccgccccaaggagaacaccaucuggaccuccgggagcuccaucagcuucugcggcgucaacuccgacacggugggguggagcuggcccgacggcgccgagcugccguucaccaucgacaaguga

SEQ ID NO: 85335 - RNA, 1410 nt, Artificial Sequence; identical to SEQ ID NO: 80762
  derived and/or modified CDS sequence (opt1) from neuraminidase__InfluenzaA__AEW10576

SEQ ID NO: 85336 - RNA, 1410 nt, Artificial Sequence; identical to SEQ ID NO: 80762
  derived and/or modified CDS sequence (opt1) from neuraminidase__InfluenzaA__AEW10586

SEQ ID NO: 85337 - RNA, 1410 nt, Artificial Sequence; identical to SEQ ID NO: 80762
  derived and/or modified CDS sequence (opt1) from neuraminidase__InfluenzaA__AEW10596

SEQ ID NO: 85338 - RNA, 1410 nt, Artificial Sequence; identical to SEQ ID NO: 80762
  derived and/or modified CDS sequence (opt1) from neuraminidase__InfluenzaA__AEW10606

SEQ ID NO: 85339 - RNA, 1410 nt, Artificial Sequence; identical to SEQ ID NO: 81649
  derived and/or modified CDS sequence (opt1) from neuraminidase__InfluenzaA__AEW10616

SEQ ID NO: 85340 - RNA, 1410 nt, Artificial Sequence
  derived and/or modified CDS sequence (opt1) from neuraminidase__InfluenzaA__AEW10626
augaaccccaaccagaagaucaucaccaucggcagcgugugcaugaccaucgggauggccaaccugauccuccagaucggcaacaucaucuccaucuggaucagccacuccauccagcuggggaaccagaaccagaucgagacgugcaaccagagcgucaucaccuacgagaacaacaccugggugaaccagaccuacgugaacaucuccaacacgaacuucgccgcgggccagagcgucguguccgugaagcuggccgggaacagcucccucugcccggucagcggcugggccaucuacuccaaggacaacagcauccgcaucggcuccaagggggacguguucgugauccgggagcccuucaucagcugcagcccccuggagugccgcaccuucuuccugacccagggcgcccuccugaacgacaagcacuccaacgggaccaucaaggaccggucccccuaccgcacgcugaugagcugcccgaucggcgagguccccucccccuacaacagccgguucgagagcguggccugguccgcgagcgccugccacgacgggaucaacuggcucaccaucggcaucuccggccccgacaacggggccauggccgugcugaaguacaacggcaucaucaccgacaccaucaagagcuggcgcaacaacauccugcggacgcaggaguccgagugcgcgugcgucaacgggagcugcuucaccgugaugaccgacggcccguccgacggccaggccagcuacaagaucuuccgcaucgagaaggggaagaucgugaaguccgucgagaugaacgcccccaacuaccacuacgaggagugcagcugcuaccccgacuccagcgagaucacgugcgugugccgggacaacuggcacggcuccaaccgccccugggugagcuucaaccagaaccucgaguaccagaucggguacaucugcuccggcaucuucggggacaacccgcggcccaacgacaagaccggcagcugcggccccgucuccagcaacggggccaacggcgugaagggguucuccuucaaguacggcaacgggguguggaucggccgcaccaagagcaucagcucccggaacggcuucgagaugaucugggaccccaacggguggaccggcaccgacaacaacuucagcaucaagcaggacaucgucgggaucaacgagugguccggcuacagcggguccuucgugcagcacccggagcugacgggccuggacugcauccgccccugcuucuggguggagcucauccggggccgccccaaggagaacaccaucuggaccagcggguccagcaucuccuucugcggcgucaacagcgacaccguggggugguccuggcccgacggcgccgagcugccguucacgaucgacaaguga

SEQ ID NO: 85341 - RNA, 1410 nt, Artificial Sequence; identical to SEQ ID NO: 80762
  derived and/or modified CDS sequence (opt1) from neuraminidase__InfluenzaA__AEW10636

SEQ ID NO: 85342 - RNA, 1410 nt, Artificial Sequence; identical to SEQ ID NO: 80752
  derived and/or modified CDS sequence (opt1) from neuraminidase__InfluenzaA__AEW10646

SEQ ID NO: 85343 - RNA, 1410 nt, Artificial Sequence; identical to SEQ ID NO: 80762
  derived and/or modified CDS sequence (opt1) from neuraminidase__InfluenzaA__AEW10656

SEQ ID NO: 85344 - RNA, 1410 nt, Artificial Sequence; identical to SEQ ID NO: 80762
  derived and/or modified CDS sequence (opt1) from neuraminidase__InfluenzaA__AEW10666

SEQ ID NO: 85345 - RNA, 1410 nt, Artificial Sequence; identical to SEQ ID NO: 80762
  derived and/or modified CDS sequence (opt1) from neuraminidase__InfluenzaA__AEW10676

SEQ ID NO: 85346 - RNA, 1410 nt, Artificial Sequence; identical to SEQ ID NO: 80762
  derived and/or modified CDS sequence (opt1) from neuraminidase__InfluenzaA__AEW10686

SEQ ID NO: 85347 - RNA, 1410 nt, Artificial Sequence; identical to SEQ ID NO: 80762
  derived and/or modified CDS sequence (opt1) from neuraminidase__InfluenzaA__AEW10696

SEQ ID NO: 85348 - RNA, 1410 nt, Artificial Sequence; identical to SEQ ID NO: 80762
  derived and/or modified CDS sequence (opt1) from neuraminidase__InfluenzaA__AEW10706

SEQ ID NO: 85349 - RNA, 1410 nt, Artificial Sequence; identical to SEQ ID NO: 80752
  derived and/or modified CDS sequence (opt1) from neuraminidase__InfluenzaA__AEW10716

SEQ ID NO: 85350 - RNA, 1410 nt, Artificial Sequence; identical to SEQ ID NO: 80762
  derived and/or modified CDS sequence (opt1) from neuraminidase__InfluenzaA__AEW10726

SEQ ID NO: 85351 - RNA, 1410 nt, Artificial Sequence; identical to SEQ ID NO: 80762
  derived and/or modified CDS sequence (opt1) from neuraminidase__InfluenzaA__AEW10736

SEQ ID NO: 85352 - RNA, 1410 nt, Artificial Sequence; identical to SEQ ID NO: 80752
  derived and/or modified CDS sequence (opt1) from neuraminidase__InfluenzaA__AEW10746

SEQ ID NO: 85353 - RNA, 1410 nt, Artificial Sequence; identical to SEQ ID NO: 80752
  derived and/or modified CDS sequence (opt1) from neuraminidase__InfluenzaA__AEW10756

SEQ ID NO: 85354 - RNA, 1410 nt, Artificial Sequence; identical to SEQ ID NO: 80752
  derived and/or modified CDS sequence (opt1) from neuraminidase__InfluenzaA__AEW10766

SEQ ID NO: 85355 - RNA, 1410 nt, Artificial Sequence; identical to SEQ ID NO: 80752
  derived and/or modified CDS sequence (opt1) from neuraminidase__InfluenzaA__AEW10776

SEQ ID NO: 85356 - RNA, 1410 nt, Artificial Sequence; identical to SEQ ID NO: 80752
  derived and/or modified CDS sequence (opt1) from neuraminidase__InfluenzaA__AEW10786

SEQ ID NO: 85357 - RNA, 1410 nt, Artificial Sequence; identical to SEQ ID NO: 80752
  derived and/or modified CDS sequence (opt1) from neuraminidase__InfluenzaA__AEW10796

SEQ ID NO: 85358 - RNA, 1410 nt, Artificial Sequence; identical to SEQ ID NO: 80752
  derived and/or modified CDS sequence (opt1) from neuraminidase__InfluenzaA__AEW10806

SEQ ID NO: 85359 - RNA, 1410 nt, Artificial Sequence; identical to SEQ ID NO: 80752
  derived and/or modified CDS sequence (opt1) from neuraminidase__InfluenzaA__AEW10816

SEQ ID NO: 85360 - RNA, 1410 nt, Artificial Sequence; identical to SEQ ID NO: 80762
  derived and/or modified CDS sequence (opt1) from neuraminidase__InfluenzaA__AEW10826

SEQ ID NO: 85361 - RNA, 1410 nt, Artificial Sequence; identical to SEQ ID NO: 80752
  derived and/or modified CDS sequence (opt1) from neuraminidase__InfluenzaA__AEW10836

SEQ ID NO: 85362 - RNA, 1410 nt, Artificial Sequence; identical to SEQ ID NO: 80752
  derived and/or modified CDS sequence (opt1) from neuraminidase__InfluenzaA__AEW10846

SEQ ID NO: 85363 - RNA, 1410 nt, Artificial Sequence; identical to SEQ ID NO: 80752
  derived and/or modified CDS sequence (opt1) from neuraminidase__InfluenzaA__AEW10856

SEQ ID NO: 85364 - RNA, 1410 nt, Artificial Sequence; identical to SEQ ID NO: 80752
  derived and/or modified CDS sequence (opt1) from neuraminidase__InfluenzaA__AEW10866

SEQ ID NO: 85365 - RNA, 1410 nt, Artificial Sequence; identical to SEQ ID NO: 80752
  derived and/or modified CDS sequence (opt1) from neuraminidase__InfluenzaA__AEW10876

SEQ ID NO: 85366 - RNA, 1410 nt, Artificial Sequence; identical to SEQ ID NO: 80752
  derived and/or modified CDS sequence (opt1) from neuraminidase__InfluenzaA__AEW10886

SEQ ID NO: 85367 - RNA, 1410 nt, Artificial Sequence; identical to SEQ ID NO: 80752
  derived and/or modified CDS sequence (opt1) from neuraminidase__InfluenzaA__AEW10896

SEQ ID NO: 85368 - RNA, 1410 nt, Artificial Sequence; identical to SEQ ID NO: 80752
  derived and/or modified CDS sequence (opt1) from neuraminidase__InfluenzaA__AEW10906

SEQ ID NO: 85369 - RNA, 1410 nt, Artificial Sequence; identical to SEQ ID NO: 80752
  derived and/or modified CDS sequence (opt1) from neuraminidase__InfluenzaA__AEW10916

SEQ ID NO: 85370 - RNA, 1410 nt, Artificial Sequence
  derived and/or modified CDS sequence (opt1) from neuraminidase__InfluenzaA__AEW10926
augaaccccaaccagaagaucaucaccaucggcagcgugugcaugaccaucgggauggccaaccugauccuccagaucggcaacaucaucuccaucuggaucagccacuccauccagcuggggaaccagaaccagaucgagacgugcaaccagagcgucaucaccuacgagaacaacaccugggugaaccagaccuacgugaacaucuccaacacgaacuucgccgcgggccagagcgucguguccgugaagcuggccgggaacagcucccucugcccggucagcggcugggccaucuacuccaaggacaacagcauccgcaucggcuccaagggggacguguucaucauccgggagcccuucaucagcugcagcccccuggagugccgcaccuucuuccugacccagggcgcccuccugaacgacaagcacuccaacgggaccaucaaggaccggucccccuaccgcacgcugaugagcugcccgaucggcgaggugcccucccccuacaacagccgguucgagagcgucgccugguccgcgagcgccugccacgacgggaucaacuggcucaccaucggcaucuccggccccgacaacggggccguggccgugcugaaguacaacggcaucaucaccgacaccaucaagagcuggcgcaacaacauccugcggacgcaggaguccgagugcgcgugcgucaacgggagcugcuucaccgugaugaccgacggcccguccgacggccaggccagcuacaagaucuuccgcaucgagaaggggaagaucgugaaguccgucgagaugaacgcccccaacuaccacuacgaggagugcagcugcuaccccgacuccagcgagaucacgugcgugugccgggacaacuggcacggcuccaaccgccccugggugagcuucaaccagaaccucgaguaccagaucggguacaucugcuccggcaucuucggggacaacccgcggcccaacgacaagaccggcagcugcggccccgucuccagcaacggggccaacggcgugaagggguucuccuucaaguacggcaacgggguguggaucggccgcaccaagagcaucagcucccggaacggcuucgagaugaucugggaccccaacggguggaccggcaccgacaacaacuucagcaucaagcaggacaucgucgggaucaacgagugguccggcuacagcggguccuucgugcagcacccggagcugacgggccuggacugcauccgccccugcuucuggguggagcucauccggggccgccccaaggagaacaccaucuggaccagcggguccagcaucuccuucugcggcgucaacagcgacaccguggggugguccuggcccgacggcgccgagcugccguucacgaucgacaaguga

SEQ ID NO: 85371 - RNA, 1410 nt, Artificial Sequence; identical to SEQ ID NO: 80752
  derived and/or modified CDS sequence (opt1) from neuraminidase__InfluenzaA__AEW10936

SEQ ID NO: 85372 - RNA, 1410 nt, Artificial Sequence; identical to SEQ ID NO: 80752
  derived and/or modified CDS sequence (opt1) from neuraminidase__InfluenzaA__AEW10946

SEQ ID NO: 85373 - RNA, 1410 nt, Artificial Sequence; identical to SEQ ID NO: 80762
  derived and/or modified CDS sequence (opt1) from neuraminidase__InfluenzaA__AEW10956

SEQ ID NO: 85374 - RNA, 1410 nt, Artificial Sequence; identical to SEQ ID NO: 80762
  derived and/or modified CDS sequence (opt1) from neuraminidase__InfluenzaA__AEW10966

SEQ ID NO: 85375 - RNA, 1410 nt, Artificial Sequence; identical to SEQ ID NO: 80752
  derived and/or modified CDS sequence (opt1) from neuraminidase__InfluenzaA__AEW10976

SEQ ID NO: 85376 - RNA, 1410 nt, Artificial Sequence; identical to SEQ ID NO: 80762
  derived and/or modified CDS sequence (opt1) from neuraminidase__InfluenzaA__AEW10986

SEQ ID NO: 85377 - RNA, 1410 nt, Artificial Sequence; identical to SEQ ID NO: 80762
  derived and/or modified CDS sequence (opt1) from neuraminidase__InfluenzaA__AEW10996

SEQ ID NO: 85378 - RNA, 1410 nt, Artificial Sequence; identical to SEQ ID NO: 80762
  derived and/or modified CDS sequence (opt1) from neuraminidase__InfluenzaA__AEW11006

SEQ ID NO: 85379 - RNA, 1410 nt, Artificial Sequence; identical to SEQ ID NO: 80762
  derived and/or modified CDS sequence (opt1) from neuraminidase__InfluenzaA__AEW11016

SEQ ID NO: 85380 - RNA, 1410 nt, Artificial Sequence; identical to SEQ ID NO: 80762
  derived and/or modified CDS sequence (opt1) from neuraminidase__InfluenzaA__AEW11026

SEQ ID NO: 85381 - RNA, 1410 nt, Artificial Sequence; identical to SEQ ID NO: 80762
  derived and/or modified CDS sequence (opt1) from neuraminidase__InfluenzaA__AEW11036

SEQ ID NO: 85382 - RNA, 1410 nt, Artificial Sequence; identical to SEQ ID NO: 80752
  derived and/or modified CDS sequence (opt1) from neuraminidase__InfluenzaA__AEW11046

SEQ ID NO: 85383 - RNA, 1410 nt, Artificial Sequence; identical to SEQ ID NO: 80762
  derived and/or modified CDS sequence (opt1) from neuraminidase__InfluenzaA__AEW11056

SEQ ID NO: 85384 - RNA, 1410 nt, Artificial Sequence; identical to SEQ ID NO: 81566
  derived and/or modified CDS sequence (opt1) from neuraminidase__InfluenzaA__AEW11066

SEQ ID NO: 85385 - RNA, 1410 nt, Artificial Sequence; identical to SEQ ID NO: 81566
  derived and/or modified CDS sequence (opt1) from neuraminidase__InfluenzaA__AEW11076

SEQ ID NO: 85386 - RNA, 1410 nt, Artificial Sequence; identical to SEQ ID NO: 81566
  derived and/or modified CDS sequence (opt1) from neuraminidase__InfluenzaA__AEW11086

SEQ ID NO: 85387 - RNA, 1410 nt, Artificial Sequence; identical to SEQ ID NO: 81566
  derived and/or modified CDS sequence (opt1) from neuraminidase__InfluenzaA__AEW11096

SEQ ID NO: 85388 - RNA, 1410 nt, Artificial Sequence; identical to SEQ ID NO: 81566
  derived and/or modified CDS sequence (opt1) from neuraminidase__InfluenzaA__AEW11106

SEQ ID NO: 85389 - RNA, 1410 nt, Artificial Sequence; identical to SEQ ID NO: 80762
  derived and/or modified CDS sequence (opt1) from neuraminidase__InfluenzaA__AEW11116

SEQ ID NO: 85390 - RNA, 1410 nt, Artificial Sequence; identical to SEQ ID NO: 81566
  derived and/or modified CDS sequence (opt1) from neuraminidase__InfluenzaA__AEW11126

SEQ ID NO: 85391 - RNA, 1410 nt, Artificial Sequence; identical to SEQ ID NO: 81470
  derived and/or modified CDS sequence (opt1) from neuraminidase__InfluenzaA__AEW11136

SEQ ID NO: 85392 - RNA, 1410 nt, Artificial Sequence; identical to SEQ ID NO: 80762
  derived and/or modified CDS sequence (opt1) from neuraminidase__InfluenzaA__AEW11146

SEQ ID NO: 85393 - RNA, 1410 nt, Artificial Sequence; identical to SEQ ID NO: 80762
  derived and/or modified CDS sequence (opt1) from neuraminidase__InfluenzaA__AEW11156

SEQ ID NO: 85394 - RNA, 1410 nt, Artificial Sequence; identical to SEQ ID NO: 81566
  derived and/or modified CDS sequence (opt1) from neuraminidase__InfluenzaA__AEW11166

SEQ ID NO: 85395 - RNA, 1410 nt, Artificial Sequence; identical to SEQ ID NO: 81566
  derived and/or modified CDS sequence (opt1) from neuraminidase__InfluenzaA__AEW11176

SEQ ID NO: 85396 - RNA, 1410 nt, Artificial Sequence; identical to SEQ ID NO: 80762
  derived and/or modified CDS sequence (opt1) from neuraminidase__InfluenzaA__AEW11186

SEQ ID NO: 85397 - RNA, 1410 nt, Artificial Sequence; identical to SEQ ID NO: 81566
  derived and/or modified CDS sequence (opt1) from neuraminidase__InfluenzaA__AEW11196

SEQ ID NO: 85398 - RNA, 1410 nt, Artificial Sequence; identical to SEQ ID NO: 80762
  derived and/or modified CDS sequence (opt1) from neuraminidase__InfluenzaA__AEW11206

SEQ ID NO: 85399 - RNA, 1410 nt, Artificial Sequence; identical to SEQ ID NO: 80762
  derived and/or modified CDS sequence (opt1) from neuraminidase__InfluenzaA__AEW11216

SEQ ID NO: 85400 - RNA, 1410 nt, Artificial Sequence; identical to SEQ ID NO: 81470
  derived and/or modified CDS sequence (opt1) from neuraminidase__InfluenzaA__AEW11226

SEQ ID NO: 85401 - RNA, 1410 nt, Artificial Sequence; identical to SEQ ID NO: 80762
  derived and/or modified CDS sequence (opt1) from neuraminidase__InfluenzaA__AEW11236

SEQ ID NO: 85402 - RNA, 1410 nt, Artificial Sequence; identical to SEQ ID NO: 80762
  derived and/or modified CDS sequence (opt1) from neuraminidase__InfluenzaA__AEW11246

SEQ ID NO: 85403 - RNA, 1410 nt, Artificial Sequence; identical to SEQ ID NO: 81566
  derived and/or modified CDS sequence (opt1) from neuraminidase__InfluenzaA__AEW11255

SEQ ID NO: 85404 - RNA, 1410 nt, Artificial Sequence; identical to SEQ ID NO: 81566
  derived and/or modified CDS sequence (opt1) from neuraminidase__InfluenzaA__AEW11265

SEQ ID NO: 85405 - RNA, 1410 nt, Artificial Sequence; identical to SEQ ID NO: 80762
  derived and/or modified CDS sequence (opt1) from neuraminidase__InfluenzaA__AEW11275

SEQ ID NO: 85406 - RNA, 1410 nt, Artificial Sequence
  derived and/or modified CDS sequence (opt1) from neuraminidase__InfluenzaA__AEW11285
augaaccccaaccagaagaucaucaccaucggcagcgugugcaugaccaucgggauggccaaccugauccuccagaucggcaacaucaucuccaucuggaucagccacuccauccagcuggggaaccagaaccagaucgagacgugcaaccagagcgucaucaccuacgagaacaacaccugggugaaccagaccuacgugaacaucuccaacacgaacuucgccgcgggccagagcgucguguccgugaagcuggccgggaacagcucccucugcccggucagcggcugggccaucuacuccaaggacaacagcgugcgcaucggcuccaagggggacguguucgucauccgggagcccuucaucagcugcagcccccuggagugccgcaccuucuuccugacccagggcgcccuccugaacgacaagcacuccaacgggaccaucaaggaccggucccccuaccgcacgcugaugagcugcccgaucggcgaggugcccucccccuacaacagccgguucgagagcguggccugguccgcgagcgccugccacgacgggaucaacuggcucaccaucggcaucuccggccccgacaacggggccgucgccgugcugaaguacaacggcaucaucaccgacaccaucaagagcuggcgcaacaacauccugcggacgcaggaguccgagugcgcgugcgugaacgggagcugcuucaccgucaugaccgacggcccguccaacggccaggccagcuacaagaucuuccgcaucgagaaggggaagaucgugaaguccguggagaugaacgcccccaacuaccacuacgaggagugcagcugcuaccccgacuccagcgagaucacgugcgucugccgggacaacuggcacggcuccaaccgccccugggugagcuucaaccagaaccucgaguaccagaucggguacaucugcuccggcaucuucggggacaacccgcggcccaacgacaagaccggcagcugcggccccguguccagcaacggggccaacggcgucaagggguucuccuucaaguacggcaacgggguguggaucggccgcaccaagagcaucagcucccggaacggcuucgagaugaucugggaccccaacggguggaccggcaccgacaacaacuucagcaucaagcaggacaucguggggaucaacgagugguccggcuacagcggguccuucguccagaacccggagcugacgggccuggacugcauccgccccugcuucuggguggagcucauccggggccgccccaaggagaacaccaucuggaccagcggguccagcaucuccuucugcggcgucaacagcgacaccguggggugguccuggcccgacggcgccgagcugccguucacgaucgacaaguga

SEQ ID NO: 85407 - RNA, 1410 nt, Artificial Sequence; identical to SEQ ID NO: 81566
  derived and/or modified CDS sequence (opt1) from neuraminidase__InfluenzaA__AEW11295

SEQ ID NO: 85408 - RNA, 1410 nt, Artificial Sequence; identical to SEQ ID NO: 80762
  derived and/or modified CDS sequence (opt1) from neuraminidase__InfluenzaA__AEW11305

SEQ ID NO: 85409 - RNA, 1410 nt, Artificial Sequence; identical to SEQ ID NO: 81566
  derived and/or modified CDS sequence (opt1) from neuraminidase__InfluenzaA__AEW11315

SEQ ID NO: 85410 - RNA, 1410 nt, Artificial Sequence; identical to SEQ ID NO: 80762
  derived and/or modified CDS sequence (opt1) from neuraminidase__InfluenzaA__AEW11325

SEQ ID NO: 85411 - RNA, 1410 nt, Artificial Sequence; identical to SEQ ID NO: 80762
  derived and/or modified CDS sequence (opt1) from neuraminidase__InfluenzaA__AEW25299

SEQ ID NO: 85412 - RNA, 1410 nt, Artificial Sequence; identical to SEQ ID NO: 80762
  derived and/or modified CDS sequence (opt1) from neuraminidase__InfluenzaA__AEW25308

SEQ ID NO: 85413 - RNA, 1410 nt, Artificial Sequence; identical to SEQ ID NO: 81835
  derived and/or modified CDS sequence (opt1) from neuraminidase__InfluenzaA__AEW25317

SEQ ID NO: 85414 - RNA, 1410 nt, Artificial Sequence; identical to SEQ ID NO: 80762
  derived and/or modified CDS sequence (opt1) from neuraminidase__InfluenzaA__AEW25324

SEQ ID NO: 85415 - RNA, 1410 nt, Artificial Sequence
  derived and/or modified CDS sequence (opt1) from neuraminidase__InfluenzaA__AEW25327
augaaccccaaccagaagaucaucaccaucggcagcgugugcaugaccaucgggauggccaaccugauccuccagaucggcaacaucaucuccaucuggaucagccacuccauccagcuggggaaccagaaccagaucgagacgugcaaccagagcgucaucaccuacgagaacaacaccugggugaaccagaccuacgugaacaucuccaacacgaacuucgccgcgggccagagcgucguguccgugaagcuggccgggaacagcucccucugcccggucagcggcugggccaucuacuccaaggacaacagcauccgcaucggcuccaagggggacguguucgugauccgggagcccuucaucagcugcagcccccuggagugccgcaccuucuuccugacccagggcgcccuccugaacgacaagcacuccaacgggaccaucaaggaccggucccccuaccgcacgcugaugagcugcccgaucggcgaggucccgccgcccuacaacucccgguucgagagcguggccuggagcgcguccgccugccacgacgggaucaacuggcucaccaucggcaucagcggccccgacaacggggccguggccguccugaaguacaacggcaucaucaccgacaccaucaaguccuggcgcaacaacauccugcggacgcaggagagcgagugcgcgugcgugaacggguccugcuucaccgugaugaccgacggccccagcgacggccaggccuccuacaagaucuuccgcaucgagaaggggaagaucgucaagagcguggagaugaacgcccccaacuaccacugcgaggagugcuccugcuaccccgacagcuccgagaucacgugcgugugccgggacaacuggcacggcagcaaccgccccugggucuccuucaaccagaaccucgaguaccagaucggguacaucugcagcggcaucuucggggacaacccccggcccaacgacaagaccggcuccugcggccccgugagcuccaacggggccaacggcgugaagggguucagcuucaaguacggcaacggggucuggaucggccgcaccaaguccaucagcagccggaacggcuucgagaugaucugggacccgaacggguggaccggcaccgacaacaacuucuccaucaagcaggacaucguggggaucaacgaguggagcggcuacuccgggagcuucgugcagcaccccgagcugacgggccuggacugcauccgccccugcuucugggucgagcucauccggggccgccccaaggagaacaccaucuggaccuccgggagcuccaucagcuucugcggcgugaacuccgacaccgucggguggagcuggccggacggcgccgagcugcccuucacgaucgacaaguga

SEQ ID NO: 85416 - RNA, 1410 nt, Artificial Sequence
  derived and/or modified CDS sequence (opt1) from neuraminidase__InfluenzaA__AEW25333
augaaccccaaccagaagaucaucaccaucggcagcgugugcaugaccaucgggauggccaaccugauccuccagaucggcaacaucaucuccaucuggaucagccacuccauccagcuggggaaccagaaccagaucgagacgugcaaccagagcgucaucaccuacgagaacaacaccugggugaaccacaccuacgugaacaucuccaacacgaacuucgccgcgggccagagcgucguguccgugaagcuggccgggaacagcucccucugcccggucagcggcugggccaucuacuccaaggacaacagcauccgcaucggcuccaagggggacguguucgugauccgggagcccuucaucagcugcagcccccuggagugccgcaccuucuuccugacccagggcgcccuccugaacgacaagcacuccaacgggaccaucaaggaccggucccccuaccgcacgcugaugagcugcccgaucggcgagguccccucccccuacaacagccgguucgagagcguggccugguccgcgagcgccugccacgacgggaucaacuggcucaccaucggcaucuccggccccgacaacggggccguggccguccugaaguacaacggcaucaucaccgacaccaucaagagcuggcgcaacaacauccugcggacgcaggaguccgagugcgcgugcgugaacgggagcugcuucaccgugaugaccgacggcccguccgacggccaggccagcuacaagaucuuccgcaucgagaaggggaagaucgucaaguccguggagaugaacgcccccaacuaccacuacgaggagugcagcugcuaccccgacuccagcgagaucacgugcgugugccgggacaacuggcacggcuccaaccgccccugggucagcuucaaccagaaccucgaguaccagaucggguacaucugcuccggcaucuucggggacaacccgcggcccaacgacaagaccggcagcugcggccccguguccagcaacggggccaacggcgugaagggguucuccuucaaguacggcaacggggucugggugggccgcaccaagagcaucagcucccggaacggcuucgagaugaucugggaccccaacggguggaccggcaccgacaacaacuucagcaucaagcaggacaucguggggaucaacgagugguccggcuacagcggguccuucguccagcacccggagcugacgggccuggacugcauccgccacugcuucuggguggagcucauccggggccgccccaaggagaacaccaucuggaccagcggguccagcaucuccuucugcggcgucaacagcgacaccguggggugguccuggcccgacggcgccgagcugcccuucacgaucgacaaguga

SEQ ID NO: 85417 - RNA, 1410 nt, Artificial Sequence
  derived and/or modified CDS sequence (opt1) from neuraminidase__InfluenzaA__AEW25338
augaaccccaaccagaagaucaucaccaucggcagcgugugcauggccaucgggauggccaaccugauccuccagaucggcaacaucaucuccaucuggaucagccacuccauccagcuggggaaccagaaccagaucgagaccugcaaccagagcgucaucacguacgagaacaacaccugggugaaccagaccuacgugaacaucuccaacaccaacuucgcggccggccagagcgucguguccgugaagcuggccgggaacagcucccucugcccggucagcggcugggccaucuacuccaaggacaacagcauccgcaucggcuccaagggggacguguucgugauccgggagcccuucaucagcugcagcccccuggagugccgcacguucuuccugacccagggcgcccuccugaacgacaagcacuccaacgggaccaucaaggaccggucccccuaccgcacccugaugagcugcccgaucggcgagguccccucccccuacaacagccgguucgagagcguggcgugguccgccagcgccugccacgacgggaucaacuggcucacgaucggcaucuccggccccgacaacggggccguggcgguccugaaguacaacggcaucaucaccgacaccaucaagagcuggcgcaacaacauccugcggacccaggaguccgagugcgccugcgugaacgggagcugcuucacggugaugaccgacggcccguccgacggccaggccagcuacaagaucuuccgcaucgagaaggggaagaucgucaaguccguggagaugaacgcccccaacuaccacuacgaggagugcagcugcuaccccgacuccagcgagaucacgugcgugugccgggacaacuggcacggcuccaaccgccccugggucagcuucaaccagaaccucgaguaccagaucggguacauccgguccggcaucuucggggacaacccgcgccccaacgacaagaccggcagcugcggccccguguccagcaacggggccaacggcgugaagggguucuccuucaaguacggcaacggggucuggaucggccggaccaagagcaucagcucccgcaacggcuucgagaugaucugggaccccaacggguggaccggcaccgacaacaacuucagcaucaagcaggacaucguggggaucaacgagugguccggcuacagcggguccuucgugcagcacccggagcugaccggccuggacugcauccggcccugcuucugggucgagcucauccgcggccggcccaaggagaacacgaucuggaccagcggguccagcaucuccuucugcggcgugaacagcgacaccgucgggugguccuggcccgacggcgcggagcugccguucaccaucgacaaguga

SEQ ID NO: 85418 - RNA, 1410 nt, Artificial Sequence
  derived and/or modified CDS sequence (opt1) from neuraminidase__InfluenzaA__AEW25343
augaaccccaaccagaagaucaucaccaucggcagcgugugcaugaccaucgggauggccaaccugauccuccagaucggcaacaucaucuccaucuggaucagccacuccauccagcuggggaaccagaaccagaucgagacgugcaaccagagcgucaucaccuacgagaacaacaccugggugaaccagaccuacgugaacaucuccaacacgaacuucgccgcgggccagagcgucguguccgugaagcuggccgggaacagcucccucugcccggucagcggcugggccaucuacuccaaggacaacagcauccgcaucggcuccaagggggacguguucgugauccgggagcccuucaucagcugcagcccccuggagugccgcaccuucuuccugacccagggcgcccuccugaacgacaagcacagcaacgggaccaucaaggaccggucccccuaccgcacgcugaugagcugcccgaucggcgagguccccucccccuacaacagccggagcgaguccguggccuggagcgcguccgccugccacgacgggaucaacuggcucaccaucggcaucagcggccccgacaacggggccguggccguccugaaguacaacggcaucaucaccgacaccaucaaguccuggcgcaacaacauccugcggacgcaggagagcgugugcgcgugcgugaacggguccugcuucaccgucaugaccgacggcccgagcgacggccaggccuccuacaagaucuuccgcaucgagaaggggaagaucgugaaguccguggagaugaacgcccccaacuaccacuacgaggagugcuccugcuaccccgacagcuccgagaucacgugcgucugccgggacaacuggcacggcagcaaccgccccuggguguccuucaaccagaaccucgaguaccagaucggguacaucugcagcggcaucuucggggacuccccgcggcccaacgacaagaccggcagcugcggccccguguccagcaacggggccaacggcgucaagggguucagcuucaaguacggcaacgggguguggaucggccgcaccaaguccaucagcucccggaacggcuucgagaugaucugggaccccaacggguggaccggcaccgacaacaacuucagcaucaagcaggacaucguggggaucaacgagugguccggcuacagcggguccuucguccagcacccggagcugacgggccuggacugcauccgccccugcuucuggguggagcucauccggggccgccccaaggagaacaccaucuggaccagcggguccagcaucuccuucugcggcgucaacagcgacaccguggggugguccuggcccgacggcgccgagcugccguucacgaucgacaaguga

SEQ ID NO: 85419 - RNA, 1410 nt, Artificial Sequence
  derived and/or modified CDS sequence (opt1) from neuraminidase__InfluenzaA__AEW25351
augaaccccaaccagaagaucaucaccaucggcagcgugugcaugaccaucgggauggccaaccugauccuccagaucggcaacaucaucuccaucuggaucagccacuccauccagcuggggaaccagaaccagaucgagacgugcaaccagagcgucaucaccuacgagaacaacaccugggugaaccacaccuacgugaacaucuccaacacgaacuucgccgcgggccagagcgucguguccgugaagcuggccgggaacagcucccucugcccggucagcggcugggccaucuacuccaaggacaacagcauccgcaucggcuccaagggggacguguucgugauccgggagcccuucaucagcugcagcccccuggagugccgcaccuucuuccugacccagggcgcccuccugaacgacaagcacuccaacgggaccaucaacgaccggucccccuaccgcacgcugaugagcugcccgaucggcgagguccccucccccuacaacagccgguucgagagcguggccugguccgcgagcgccugccacgacgggaucaacuggcucaccaucggcaucuccggccccgacaacggggccguggccguccugaaguacaacggcaucaucaccgacaccaucaagagcuggcgcaacaacauccugcggacgcaggaguccgagugcgcgugcgugaacgggagcugcuucaccgugaugaccgacggcccguccgacggccaggccagcuacaagaucuuccgcaucgagaaggggaagaucgucaaguccguggagaugaacgcccccaacuaccacuacgaggagugcagcugcuaccccgacuccagcgagaucacgugcgugugccgggacaacuggcacggcuccaaccgccccugggucagcuucaaccagaaccucgaguaccagaucggguacaucugcuccggcaccuucggggacaacccgcggcccaacgacaagaccggcagcugcggccccguguccagcaacggggccaacggcgugaagggguucuccuucaaguacggcaacggggucuggaucggccgcaccaagagcaucagcucccggaacggcuucgagaugaucugggaccccaacggguggaccggcacggacaacaacuucagcaucaagcaggacaucguggggaucaacgagugguccggcuacagcggguccuucgugcagcacccggagcugaccggccuggacugcauccgccccugcuucugggucgagcucauccggggccgccccaaggagaacaccaucuggaccagcggguccagcaucuccuucugcggcgugaacagcgacacggucgggugguccuggcccgacggcgccgagcugccguucaccaucgacaaguga

SEQ ID NO: 85420 - RNA, 1410 nt, Artificial Sequence
  derived and/or modified CDS sequence (opt1) from neuraminidase__InfluenzaA__AEW25358
augaaccccaaccagaagaucaucaccaucggcagcgugugcaugaccaucgggauggccaaccugauccuccagaucggcaacaucaucuccaucugggucagccacuccauccagcuggggaaccagaaccagaucgagacgugcaaccagagcgugaucaccuacgagaacaacaccugggugaaccagaccuacgucaacaucuccaacacgaacuucgccgcgggccagagcgugguguccgucaagcuggccgggaacagcucccucugcccggugagcggcugggccaucuacuccaaggacaacagcauccgcaucggcuccaagggggacguguucgucauccgggagcccuucaccagcugcagcccccuggagugccgcaccuucuuccugacccagggcgcccuccugaacgacaagcacuccaacgggacgaucaaggaccggucccccuaccgcacccugaugagcugcccgaucggcgaggugcccucccccuacaacagccgguucgagagcguggccugguccgcgagcgccugccacgacgggaucaacuggcucaccaucggcaucuccggccccgacaacggggccgucgccgugcugaaguacaacggcaucaucaccgacacgaucaagagcuggcgcaacaacauccugcggacccaggaguccgagugcgcgugcgugaacgggagcugcuucaccgucaugaccgacggcccguccgacggccaggccagcuacaagaucuuccgcaucgagaaggggaagaucgugaaguccguggagaugaacgcccccaacuaccacuacgaggagugcagcugcuaccccgacuccagcgagaucacgugcgucugccgggacaacuggcacggcuccaaccgccccugggugagcuucaaccagaaccucgaguaccagaucggguacaucugcuccggcaucuucggggacaacccgcggcccaacgacaagaccggcagcugcggccccguguccagcaacggggccaacggcgucaagggguucuccuucaaguacggcaacgggguguggaucggccgcaccaagagcaucagcucccggaacggcuucgagaugaucugggaccccaacggguggaccggcacggacaacaacuucagcaucaagcaggacaucguggggaucaacgagugguccggcuacagcggguccuucguccagcacccggagcugaccggccuggacugcauccgccccugcuucuggguggagcucauccggggccgccccaaggagaacaccaucuggaccagcggguccagcaucuccuucugcggcgucaacagcgacacgguggggugguccuggcccgacggcgccgagcugccguucaccaucgugaaguga

SEQ ID NO: 85421 - RNA, 1410 nt, Artificial Sequence; identical to SEQ ID NO: 80762
  derived and/or modified CDS sequence (opt1) from neuraminidase__InfluenzaA__AEW25361

SEQ ID NO: 85422 - RNA, 1410 nt, Artificial Sequence
  derived and/or modified CDS sequence (opt1) from neuraminidase__InfluenzaA__AEW25379
augaaccccaaccagaagaucaucaccaucggcagcgugugcaugaccaucgggauggccaaccugauccuccagaucggcaacaucaucuccaucuggacgagccacuccauccagcuggggaaccagaaccagaucgagaccugcaaccagagcgucaucaccuacgagaacaacaccugggugaaccagacguacgugaacaucuccaacaccaacuucgccgcgggccagagcgucguguccgugaagcuggccgggaacagcucccucugcccggucagcggcugggccaucuacuccaaggacaacagcauccgcaucggcuccaagggggacguguucgugauccgggagcccuucaucagcugcagcccccuggagugccgcaccuucuuccugacccagggcgcccuccugaacgacaagcacuccaacgggacgaucaaggaccggucccccuaccgcacccugaugagcugcccgaucggcgagguccccucccccuacaacagccgguucgagagcguggccugguccgcgagcgccugccacgacgggaucaacuggcucaccaucggcaucuccggccccgacaacggggccguggccguccugaaguacaacggcaucaucaccgacacgaucaagagcuggcgcaacaacauccugcggacccaggaguccgagugcgcgugcgugaacgggagcugcuucaccgugaugaccgacggcccguccgacggccaggccagcuacaagaucuuccgcaucgagaaggggaagaucgucaaguccguggagaugaacgcccccaacuaccacuacgaggagugcagcugcuaccccgacuccagcgaggugacgugcgucugccgggacaacuggcacggcuccaaccgccccugggugagcuucaaccagaaccucgaguaccagaucggguacaucugcuccggcaucuucggggacaacccgcggcccaacgacaagaccggcagcugcggccccguguccagcgacggggccaacggcgucaagggguucuccuucaaguacggcaacgggguguggaucggccgcaccaagagcaucagcucccggaacggcuucgagaugaucugggaccccaacggguggaccggcacggacaacaacuucagcaucaagcaggacaucguggggaucaacgagugguccggcuacagcggguccuucguccagcacccggagcugaccggccuggacugcauccgccccugcuucuggguggagcucauccggggccgccccaaggagaacaccaucuggaccagcggguccagcaucuccuucugcggcgucaacagcgacacgguggggugguccuggcccgacggcgccgagcugccguucaccaucgacaaguga

SEQ ID NO: 85423 - RNA, 1410 nt, Artificial Sequence
  derived and/or modified CDS sequence (opt1) from neuraminidase__InfluenzaA__AEW25387
augaaccccaaccagaagaucaucaccaucggcagcgugugcaugaccaucgggauggccaaccugauccuccagaucggcaacaucaucuccaucuggaucagccacuccauccagcuggggaaccagaaccagaucgagacgugcaaccagagcgucaucaccuacgagaacaacaccugggugaaccagaccuacgugaacaucuccaacacgaacuucgccgcgggccagagcgucguguccgugaagcuggccgggaacagcucccucugcccggucagcggcugggccaucuacuccaaggacaacagcauccgcaucggcuccaagggggacguguucgugauccgggagcccuucaucagcugcagcccccuggagugccgcaccuucuuccugacccagggcgcccuccugaacgacaagcacuccaacgggaccaucaaggaccggucccccuaccgcacgcugaugagcugcccgaucggcgagguccccucccccuacaacagccgguucgagagcguggccugguccgcgagcgccugccacgacgggaucaacuggcucaccaucggcaucuccggccccgacaacggggccguggccguccugaaguacaacggcaucaucaccgacaccaucaagagcuggcgcaacaacauccugcggacgcaggaguccgagugcgcgugcguggacgggagcugcuucaccgugaugaccgacggcccguccgacggccaggccagcuacaagaucuuccgcaucgagaaggggaagaucgucaaguccguggagaugaacgcccccaacuaccacuacgaggagugcagcugcuaccccgacuccagcgagaucacgugcgugugccgggacaacuggcacggcuccaaccgccccugggucagcuucaaccagaaccucgaguaccagaucggguacaucugcuccggcaucuucgaggacaacccgcggcccaacgacaagaccgggagcugcggccccguguccagcaacggcgccaacggggugaagggcuucuccuucaaguacgggaacggcgucuggaucgggcgcaccaagagcaucagcucccggaacggcuucgagaugaucugggaccccaacggcuggaccgggaccgacaacaacuucagcaucaagcaggacaucgugggcaucaacgagugguccggguacagcggcuccuucgugcagcacccggagcugacggggcuggacugcauccgccccugcuucugggucgagcucauccggggccgccccaaggagaacaccaucuggaccagcggcuccagcaucuccuucugcggggugaacagcgacaccgucggcugguccuggcccgacggggccgagcugccguucacgaucgacaaguga

SEQ ID NO: 85424 - RNA, 1410 nt, Artificial Sequence
  derived and/or modified CDS sequence (opt1) from neuraminidase__InfluenzaA__AEW25392
augaaccccaaccagaagaucaucaccaucggcagcgugugcaugaccaucgggauggccaaccugauccuccagaucggcaacaucaucuccaucuggaucagccacuccauccagcuggggaaccagaaccagaucgagacgugcaaccagagcgucaucaccuacgagaacaacaccugggugaaccagaccuacgugaacaucuccaacacgaacuucgccgcgggccagagcgucguguccgugaagcuggccgggaacagcucccucugcccggucagcggcugggccaucuacuccaaggacaacagcauccgcaucggcuccaagggggacguguucgugauccgggagcccuucaucagcugcagcccccuggagugccgcaccuucuuccugacccagggcgcccuccugaacgacaagcacuccaacgggaccaucaaggaccggucccccuaccgcacgcugaugagcugcccgaucggcgagguccccucccccuacaacagccgguucgagagcguggccugguccgcgagcgccugccacgacgggaucaacuggcucaccaucggcaucuccggccccgacaacggggccguggccguccugaaguacaacggcaucaucaccgacaccaucaagagcuggcgcaacaacauccugcggacgcaggaguccgagugcgcgugcgugaacgggagcugcuucaccgugaugaccgacggcccguccgacggccaggccagcuacaagaucuuccgcaucgagaaggggaagaucgucaaguccguggagaugaacgcccccaacuaccacuacgaggagugcagcugcuaccccgacuccagcgagaucacgugcgugugccgggacaacuggcacggcuccaaccgccccugggucagcuucaaccagaaccucgaguaccagaucggguacaucugcuccggcaucuucggggacaacccgcggcccaacgacaagaccggcagcugcggccccguguccagcaacggggccaacggcgugaagggguucuccuucaaguacggcaacggggucuggaucggccgcaccaagagcaucagcucccggaacggcuucgagaugaucugggaccccaacggguggaccggcaccgacaacaacuucagcaucaagcacgacaucguggggaucaacgagugguccggcuacagcggguccuucgugcagcacccggagcugacgggccuggacugcauccgccccugcuucugggucgagcucauccggggccgccccaaggagaacaccaucuggaccagcggguccagcaucuccuucugcggcgugaacagcgacaccgucgggugguccuggcccgacggcgccgagcugccguucacgaucgacaaguga

SEQ ID NO: 85425 - RNA, 1410 nt, Artificial Sequence
  derived and/or modified CDS sequence (opt1) from neuraminidase__InfluenzaA__AEW25397
augaaccccaaccagaagaucaucaccaucggcagcgugugcaugaccaucgggauggccaaccugauccuccagaucggcaacaucaucuccaucuggaucagccacuccauccagcuggggaaccagaaccagaucgagacgugcaaccagagcgucaucaccuacgagaacaacaccugggugaaccagaccuacgugaacaucuccaacacgaacuucgccgcgggccagagcgucguguccgugaagcuggccgggaacagcucccucugcccggucagcggcugggccaucuacuccaaggacaacagcauccgcaucggcuccaagggggacguguucgugauccgggagcccuucaucagcugcagcccccuggagugccgcaccuucuuccugacccagggcgcccuccugaacgacaagcacuccaacgggaccaucaaggaccggucccccuaccgcacgcugaugagcugcccgaucggcgagguccccucccccuacaacagccgguucgagcccguggccuggagcgcguccgccugccacgacgggaucaacuggcucaccaucggcaucagcggcccggacaacggggccguggccguccugaaguacaacggcaucaucaccgacaccaucaaguccuggcgcaacaacauccugcggacgcaggagagcgagugcgcgugcgugaacggguccugcuucaccgugaugaccgacggccccagcgacggccaggccuccuacaagaucuuccgcaucgagaaggggaagaucgucaagagcguggagaugaacgcccccaacuaccacuacgaggagugcuccugcuaccccgacagcuccgagaucacgugcgugugccgggacaacuggcacggcagcaaccgcccgugggucuccuucaaccagaaccucgaguaccagaucggguacaucugcagcggcaucuucggggacagcccccggcccaacgacaagaccggcuccugcggccccguguccagcaacggggccaacggcgugaagggguucuccuucaaguacggcaacggggucuggaucggccgcaccaagagcaucagcucccggaacggcuucgagaugaucugggacccgaacggguggaccggcaccgacaacaacuucagcaucaagcaggacaucguggggaucaacgagugguccggcuacagcggguccuucgugcagcaccccgagcugacgggccuggacugcauccgccccugcuucugggucgagcucauccggggccgccccaaggagaacaccaucuggaccagcggguccagcaucuccuucugcggcgugaacagcgacaacgucgggugguccuggccggacggcgccgagcugcccuucaccaucgacaaguga

SEQ ID NO: 85426 - RNA, 1410 nt, Artificial Sequence; identical to SEQ ID NO: 80762
  derived and/or modified CDS sequence (opt1) from neuraminidase__InfluenzaA__AEW25402

SEQ ID NO: 85427 - RNA, 1410 nt, Artificial Sequence; identical to SEQ ID NO: 80762
  derived and/or modified CDS sequence (opt1) from neuraminidase__InfluenzaA__AEW25407

SEQ ID NO: 85428 - RNA, 1410 nt, Artificial Sequence
  derived and/or modified CDS sequence (opt1) from neuraminidase__InfluenzaA__AEW25418
augaaccccaaccagaagaucaucaccaucggcagcgugugcaugaccaucgggauggccaaccugauccuccagaucggcaacaucaucuccaucuggaucagccacuccauccagcuggggaaccagaaccagaucgagacgugcaaccagagcgucaucaccuacgagaacaacaccugggugaaccacaccuacgugaacaucuccaacacgaacuucgccgcgggccagagcgucguguccgugaagcuggccgggaacagcucccucugcccggucagcggcugggccaucuacuccaaggacaacagcauccgcaucggcuccaagggggacguguucgugauccgggagcccuucaucagcugcagcccccuggagugccgcaccuucuuccugacccagggcgcccuccugaacgacaagcacuccaacgggaccaucaaggaccggucccccuaccgcacgcugaugagcugcccgaucggcgagguccccucccccuacaacagccgguucgagagcguggccugguccgcgagcgccugccacgacgggaucaacuggcucaccaucggcaucuccggccccgacaacggggccguggccguccugaaguacaacggcaucaucaccgacaccaucaagagcuggcgcaacaacauccugcggacgcaggaguccgagugcgcgugcgugaacgggagcugcuucaccgugaugaccgacggcccguccgacggccaggccagcuacaagaucuuccgcaucgggaagggcaagaucgucaaguccguggagaugaacgcccccaacuaccacuacgaggagugcagcugcuaccccgacuccagcgagaucacgugcgugugccgggacaacuggcacggguccaaccgccccugggucagcuucaaccagaaccucgaguaccagaucggcuacaucugcuccgggaucuucggcgacaacccgcggcccaacgacaagaccggcagcugcgggcccguguccagcaacggcgagaacggggugaagggcuucuccuucaaguacgggaacggcgucuggaucggccgcaccaagagcaucagcucccggaacggguucgagaugaucugggaccccaacggcuggaccgggaccgacaacaacuucagcaucaagcaggacaucgugggcaucaacgagugguccggguacagcggcuccuucgugcagcacccggagcugacgggccuggacugcauccgccccugcuucugggucgagcucauccgggggcgccccaaggagaacaccaucuggaccagcggcuccagcaucuccuucugcggggugaacagcgacaccgucggcugguucuggcccgacggcgccgagcugccguucacgaucgacaaguga

SEQ ID NO: 85429 - RNA, 1410 nt, Artificial Sequence
  derived and/or modified CDS sequence (opt1) from neuraminidase__InfluenzaA__AEW25423
augaaccccaaccagaagaucaucaccaucggcagcgugugcaugaccaucgggauggccaaccugauccuccagaucggcaacaucaucuccaucuggaucagcaacuccauccagcuggggaaccagaaccagaucgagacgugcaaccagagcgucaucaccuacgagaacaacaccugggugaaccagaccuacgugaacaucuccaacacgaacuucgccgcgggccagagcgucguguccgugaagcuggccgggaacagcucccucugcccggucagcggcugggccaucuacuccaaggacaacagcauccgcaucggcuccaagggggacguguucgugauccgggagcccuucaucagcugcagcccccuggagugccgcaccuucuuccugacccagggcgcccuccugaacgacaagcacuccaacgggaccaucaaggaccggucccccuaccgcacgcugaugagcugcccgaucggcgagguccccucccccuacaacagccgguucgagagcguggccugguccgcgagcgccugccacgacgggaucaacuggcucaccaucggcaucuccggccccgacaacggggccguggccguccugaaguacaacggcaucaucaccgacaccaucaagagcuggcgcaacaacauccugcggacgcaggaguccgagugcgcgugcgugaacgggagcugcuucaccgugaugaccgacggcccguccgacggccaggccagcuacaagaucuuccgcaucgagaaggggaagaucgucaaguccguggagaugaacgcccccaacuaccacuacgaggagugcagcugcuaccccgacuccagcgagaucacgugcgugugccgggacaacuggcacggcuccaaccgccccugggucagcuucaaccagaaccucgaguaccagaucggguacaucugcuccggcaucuucggggacaacccgcggcccaacgacaagaccggcagcugcggccccguguccagcaacggggccaacggcgugaagggguucuccuucaaguacggcaacggggucuggaucggccgcaccaagagcaucagcucccggaacggcuucgagaugaucugggaccccaacggguggaccggcaccgacaacaacuucagcaucaagcaggacaucguggggaucaacgagugguccggcuacagcggguccuucgugcagcacccggagcugacgggccuggacugcauccgccccugcuucugggucgagcucauccggggccgccccaaggagaacaccaucuggaccagcggguccagcaucuccuucugcggcgugaacagcgacaccgucgggugguccuggcccgacggcgccgagcugccguucacgaucgacaaguga

SEQ ID NO: 85430 - RNA, 1410 nt, Artificial Sequence; identical to SEQ ID NO: 80762
  derived and/or modified CDS sequence (opt1) from neuraminidase__InfluenzaA__AEW25426

SEQ ID NO: 85431 - RNA, 1410 nt, Artificial Sequence
  derived and/or modified CDS sequence (opt1) from neuraminidase__InfluenzaA__AEW25432
augaaccccaaccagaagaucaucaccaucggcagcgugugcaugaccaucgggauggccaaccugauccuccagaucggcaacaucaucuccaucuggacgagccacuccauccagcuggggaaccagaaccagaucgagaccugcaaccagagcgucaucaccuacgagaacaacaccugggugaaccagacguacgugaacaucuccaacaccaacuucgccgcgggccagagcgucguguccgugaagcuggccgggaacagcucccucugcccggucagcggcugggccaucuacuccaaggacaacagcauccgcaucggcuccaagggggacguguucgugauccgggagcccuucaucagcugcagcccccuggagugccgcaccuucuuccugacccagggcgcccuccugaacgacaagcacuccaacgggacgaucaaggaccggucccccuaccgcacccugaugagcugcccgaucggcgagguccccucccccuacaacagccgguucgagagcguggccugguccgcgagcgccugccacgacgggaucaacuggcucaccaucggcaucuccggccccgacaacggggccguggccguccugaaguacaacggcaucaucaccgacacgaucaagagcuggcgcaacaacauccugcggacccaggaguccgagugcgcgugcgugaacgggagcugcuucaccgugaugaccgacggcccguccgacggccaggccagcuacaagaucuuccgcaucgagaaggggaagaucgucaaguccguggagaugaacgcccccaacuaccacuacgaggagugcagcugcuaccccgacuccagcgagaucacgugcgugugccgggacaacuggcacggcuccaaccgccccugggucagcuucaaccagaaccucgaguaccagaucggguacaucugcuccggcaucuucggggacaacccgcggcccaacgacaagaccggcagcugcggccccguguccagcaacggggccaacggcgugaagggguucuccuucaaguacggcaacggggucuggaucggccgcaccaagagcaucagcucccggaacggcuucgagaugaucugggaccccaacggguggaccggcacggacaacaacagcuccaucaagcaggacaucguggggaucaacgaguggagcggcuacuccgggagcuucgugcagcacccggagcugaccggccuggacugcauccgccccugcuucugggucgagcucauccggggccgccccaaggagaacaccaucuggaccuccgggagcuccaucagcuucugcggcaucaacuccgacgccgugggguggagcuggcccgacggcgcggagcugccguucacgaucgacaaguga

SEQ ID NO: 85432 - RNA, 1410 nt, Artificial Sequence
  derived and/or modified CDS sequence (opt1) from neuraminidase__InfluenzaA__AEW25436
augaaccccaaccagaagaucaucaccaucggcagcgugugcaugaccaucgggauggccaaccugauccuccagaucggcaacaucaucuccaucuggaucagccacuccauccagcuggggaaccagaaccagaucgagacgugcaaccagagcaucaucaccuacgagaacaacaccugggucaaccagaccuacgugaacaucuccaacacgaacuucgccgcgggccagagcguggucuccgugaagcuggccgggaacagcucccucugcccggugagcggcugggccaucuacuccaaggacaacagcauccgcaucggcuccaagggggacgucuucgugauccgggagcccuucaucagcugcagcccccuggagugccgcaccuucuuccugacccagggcgcccuccugaacgacaagcacuccaacgggaccaucaaggaccggucccccuaccgcacgcugaugagcugcccgaucggcgaggugcccucccccuacaacagccgguucgagagcgucgccugguccgcgagcgccugccacgacgggaucaacuggcucaccaucggcaucuccggccccgacaacggggccguggccgugcugaaguacaacggcaucaucaccgacaccaucaagagcuggcgcaacaacauccugcggacgcaggaguccgagugcgcgugcgucaacgggagcugcuucaccgugaugaccgacggcccguccgacggccaggccagcuacaagaucuuccgcaucgagaaggggaagaucgugaaguccgucgagaugaacgcccccaacuaccacuacgaggagugcagcugcuaccccgacuccagcgagaucacgugcgugugccgggacaacuggcacggcuccaaccgccccugggugagcuucaaccagaaccucgaguaccggaucggguacaucugcuccggcaucuucggggacaacccgcgccccaacgacaagaccggcagcugcggccccgucuccagcaacggggccaacggcgugaagggguucuccuucaaguacggcaacgggguguggaucggccggaccaagagcaucagcucccgcaacggcuucgagaugaucugggaccccaacggguggaccggcaccgacaacaacuucagcaucaagcaggacaucgucgggacgaacgagugguccggcuacagcggguccuucgugcagcacccggagcugaccggccuggacugcauccggcccugcuucuggguggagcucauccgcggccggcccaaggagaacaccaucuggaccagcggguccagcaucuccuucugcggcgucaacagcgacacgauggggugguccuggcccgacggcgccgagcugccguucaccaucgacaaguga

SEQ ID NO: 85433 - RNA, 1410 nt, Artificial Sequence; identical to SEQ ID NO: 80762
  derived and/or modified CDS sequence (opt1) from neuraminidase__InfluenzaA__AEW25440

SEQ ID NO: 85434 - RNA, 1410 nt, Artificial Sequence
  derived and/or modified CDS sequence (opt1) from neuraminidase__InfluenzaA__AEW25448
augaaccccaaccagaagaucaucaccaucggcagcgugugcaugaccaucgggauggccaaccugauccuccagaucggcaacaucaucuccaucuggaucagccacuccauccagcuggggaaccagaaccagaucgagacgugcaaccagagcgucaucaccuacgagaacaacaccugggugaaccagaccuacgugaacaucuccaacacgaacuucgccgcgggccagagcgucguguccgugaagcuggccgggaacagcucccucugcccggucagcggcugggccaucuacuccaaggacaacagcauccgcaucggcuccaagggggacguguucgugauccgggagcccuucaucagcugcagcccccuggagugccgcaccuucuuccugacccagggcgcccuccugaacgacaagcacuccaacgggaccaucaaggaccggucccccuaccgcacgcugaugagcugcccgaucggcgagguccccucccccuacaacagccgguucgagagcguggccugguccgcgagcgccugccacgacgggaucaacuggcucaccaucggcaucuccggccccgacaacggggccguggccguccugaaguacaacggcaucaucaccgacaccaucaagagcuggcgcaacaacauccugcggacgcaggaguccgagugcgcgugcgugaacgggagcugcuucaccgugaugaccgacggcccguccgacggccaggccagcuacaagaucuuccgcaucgagaaggggaagaucgucaaguccguggagaugaacgcccccaacuaccacuacgaggagugcagcugcuaccccgacuccagcgagaucacgugcgugugccgggacaacuggcacggcuccaaccgccccugggucagcuucaaccagaaccucgaguaccagaucggguacaucugcuccggcaucuucggggacaacccgcggcccaacgacaagaccggcagcugcggccccguguccagcaacggggccaacggcgugaagggguucuccuucaaguacggcaacggggucuggaucggccgcaccaagagcaucagcucccggaacggcuucgagaugaucugggaccccaacggguggaccggcaccgacaacaacuucagcaucaagcaggacaucguggggaucaacgagugguccggcuacagcggguccuucgugcagcacccggagcugacgggccuggacugcauccgccccugcuucugggucgagcucauccggggccgccccaaggagaacaccaucuggaccagcggguccagcaucuccuucugcggcgugaacagcgacaccgucgggugguccuggcccgacggcgccgagcugccguucacgaccgacaaguga

SEQ ID NO: 85435 - RNA, 1410 nt, Artificial Sequence; identical to SEQ ID NO: 80762
  derived and/or modified CDS sequence (opt1) from neuraminidase__InfluenzaA__AEW25456

SEQ ID NO: 85436 - RNA, 1410 nt, Artificial Sequence
  derived and/or modified CDS sequence (opt1) from neuraminidase__InfluenzaA__AEW25464
augaaccccaaccagaagaucaucaccaucggcagcgugugcaugaccaucgggauggccaaccugauccuccagaucggcaacaucaucuccaucuggaucagccacuccauccagcuggggaaccagaaccagaucgagacgugcaaccagagcgucaucaccuacgagaacaacaccugggugaaccagaccuacgugaacaucuccaacacgaacuucgccgcgggccagagcgucguguccgugaagcuggccgggaacagcucccucugcccggucagcggcugggccaucuacuccaaggacaacagcauccgcaucggcuccaagggggacguguucgugauccgggagcccuucaucagcugcagcccccuggagugccgcaccuucuuccugacccagggcgcccuccugaacgacaagcacuccaacgggaccaucaaggaccggucccccuaccgcacgcugaugagcugcccgaucggcgagguccccucccccuacaacagccgguucgagagcguggccugguccgcgagcgccugccacgacgggaucaacuggcucaccaucggcaucuccggccccgacaacggggccguggccguccugaaguacaacggcaucaucaccgacaccaucaagagcuggcgcaacaacauccugcggacgcaggaguccgagugcgcgugcgugaacgggagcugcuucaccgugaugaccgacggcccguccgacggccaggccagcuacaagaucuuccgcaucgagaaggggaagaucgucaaguccguggagcucaacgcccccaacuaccacuacgaggagugcagcugcuaccccgacuccagcgagaucacgugcgugugccgggacaacuggcacggcuccaaccgccccugggucagcuucaaccagaaccuggaguaccagaucggguacaucugcuccggcaucuucggggacaacccgcggcccaacgacaagaccggcagcugcggccccguguccagcaacggggccaacggcgugaagggguucuccuucaaguacggcaacggggucuggaucggccgcaccaagagcaucagcucccggaacggcuucgagaugaucugggaccccaacggguggaccggcaccgacaacaacuucagcaucaagcaggacaucguggggaucaacgagugguccggcuacagcggguccuucgugcagcacccggagcugacgggccucgacugcauccgccccugcuucugggucgagcugauccggggccgccccaaggagaacaccaucuggaccagcggguccagcaucuccuucugcggcgugaacagcgacaccgucgggugguccuggcccgacggcgccgagcugccguucacgaucgacaaguga

SEQ ID NO: 85437 - RNA, 1410 nt, Artificial Sequence
  derived and/or modified CDS sequence (opt1) from neuraminidase__InfluenzaA__AEW25474
augaaccccaaccagaagaucaucaccaucggcagcgugugcaugaccaucgggauggccaaccugauccuccagaucggcaacaucaucuccaucuggaucagccacuccauccagcuggggaaccagaaccagaucgagacgugcaaccagagcgucaucaccuacgagaacaacaccugggugaaccagaccuacgugaacaucuccaacacgaacuucgccgcgggccagagcgucguguccgugaagcuggccgggaacagcucccucugcccggucagcggcugggccaucuacuccaaggacaacagcauccgcaucggcuccaagggggacguguucgugauccgggagcccuucaucagcugcagcccccuggagugccgcaccuucuuccugacccagggcgcccuccugaacgacaagcacuccaacgggaccaucaaggaccggucccccuaccgcacgcugaugagcugcccgaucggcgagguccccucccccuacaacagccgguucgagagcguggccugguccgcgagcgccugccacgacgggaucaacuggcucaccaucggcaucuccggccccgacaacggggccguggccguccugaaguacaacggcaucaucaccgacaccaucaagagcuggcgcaacaacauccugcggacgcaggaguccgagugcgcgugcgugaacgggagcugcuucaccgugaugaccgacggcccguccgacggccaggccagcuacaagaucuuccgcaucgagaaggggaagaucgucaaguccguggagaugaacgcccccaacuaccacuacgaggagugcagcugcuaccccgacuccagcgagaucacgugcgugugccgggacaacuggcacggcuccaaccgccccugggucagcuucaaccagaaccucgaguaccagaucggguacaucugcuccggcaucuucggggacaacccgcggcccaacgacaagaccggcagcugcggccccguguccagcaacggggccaacggcgugaagggguucuccuucaaguacggcaacggggucuggaucggccgcaccaagagcaucagcucccggaacggcuucgagaugaucugggaccccaacggguggaccggcaccgacaacaacuucagcaucaagcaggacaucguggggaucaacgagugguccggcuacagcggguccuucgugcagcacccggagcugacgggccuggacugcauccgccccugcuucugggucgagcucauccggggccgccccaaggagaacaccaucuggaccagcggguccagcaucuccuucugcggcgugaacagcgacaccgucgggugguccuggcccgacggcgccgagcugccgagcacgaucgacaaguga

SEQ ID NO: 85438 - RNA, 1410 nt, Artificial Sequence
  derived and/or modified CDS sequence (opt1) from neuraminidase__InfluenzaA__AEW25484
augaaccccaaccagaagaucaucaccaucggcagcgugugcaugaccaucgggauggccaaccugauccuccagaucggcaacaucaucuccaucuggaucagccacuccauccagcuggggaaccagaaccagaucgagacgugcaaccagagcgucaucaccuacgagaacaacaccuggaucaaccagaccuacgugaacaucuccaacacgaacuucgccgcgggccagagcguggucuccgugaagcuggccgggaacagcucccucugcccggugagcggcugggccaucuacuccaaggacaacagcauccgcaucggcuccaagggggacgucuucgugauccgggagcccuucaucagcugcucccaccuggagugccgcaccuucuuccugacccagggcgcccuccugaacgacaagcacagcaacgggaccaucaaggaccggucccccuaccgcacgcugaugagcugccccaucggcgaggugccgucccccuacaacagccgguucgagagcgucgccugguccgcgagcgccugccacgacgggaucaacuggcucaccaucggcaucuccggccccgaccacggggccguggccgugcugaaguacaacggcaucaucaccgacaccaucaagagcuggcgcaacaacauccugcggacgcaggaguccgagugcgcgugcgucaacgggagcugcuucaccgugaugaccgacggccccuccgacggccaggccagcuacaagaucuuccgcaucgagaaggggaagaucgugaaguccgucgagaugaacgccccgaacuaccacuacgaggagugcagcugcuaccccgacuccagcgagaucacgugcgugugccgggacaacuggcacggcuccaaccgccccugggugagcuucaaccagaaccucgaguaccagaucggguacaucugcuccggcaucuucggggacaacccccggccgaacgacaagaccggcagcugcggccccgucuccagcaacggggccaacggcgugaagggguucuccuucaaguacggcaacgggguguggaucggccgcaccaagagcaucagcucccggaacggcuucgagaugaucugggaccccaacggguggaccggcaccgacaacaacuucagcaucaagcaggacaucgucgggaucaacgagugguccggcuacagcggguccuucgugcagcaccccgagcugacgggccuggacugcauccgcccgugcuucuggguggagcucauccggggccgccccaaggagaacaccaucuggaccagcggguccagcaucuccuucugcggcgucaacagcgacaccguggggugguccuggcccgacggcgccgagcugcccuucacgaucgacaaguga

SEQ ID NO: 85439 - RNA, 1410 nt, Artificial Sequence
  derived and/or modified CDS sequence (opt1) from neuraminidase__InfluenzaA__AEW25494
augaaccccaaccagaagaucaucaccaucggcagcgugugcaugaccaucgggauggccaaccugauccuccagaucggcaacaucaucuccaucuggaucagccacuccauccagcuggggaaccagaaccagaucgagacgugcaaccagagcgucaucaccuacgagaacaacaccugggugaaccagaccuacgugaacaucuccaacacgaacuucgccgcgggccagagcgucguguccgugaagcuggccgggaacagcucccucugcccggucagcggcugggccaucuacuccaaggacaacagcauccgcaucggcuccaagggggacguguucgugauccgggagcccuucaucagcugcagcccccuggagugccgcaccuucuuccugacccagggcgcccuccugaacgacaagcacuccaacgggaccaucaaggaccggucccccuaccgcacgcugaugagcugcccgaucggcgagguccccucccccuacaacagccgguucgagagcguggccugguccgcgagcgccugccacgacgggaucaacuggcucaccaucggcaucuccggccccgacaacggggccguggccguccugaaguacaacggcaucaucaccgacagcaucaaguccuggcgcaacaacauccugcggacccaggagagcgagugcgcgugcgugaacggguccugcuucacggugaugaccgacggcccgagcgacggccaggccuccuacaagaucuuccgcaucgagaaggggaagaucgucaagagcguggagaugaacgcccccaacuaccacuacgaggagugcuccugcuaccccgacagcuccgagaucacgugcgugugccgggacaacuggcacggcagcaaccgccccugggucuccuucaaccagaaccucgaguaccagaucggguacaucugcagcggcaccuucggggacaacccgcggcccaacgacaagaccggcuccugcggccccgugagcuccaacggggccaacggcgugaagggguucagcuucaaguacggcaacggggucuggaucggccgcaccaagagcaucuccagccggaacggcuucgagaugaucugggaccccaacggguggaccggcaccgacaacaacuucuccaucaagcaggacaucguggggaucaacgaguggagcggcuacuccgggagcuucgugcagcacccggagcugacgggccuggacugcauccgccccugcuucugggucgagcucauccggggccgccccaaggagaacaccaucuggaccuccgggagcuccaucagcuucugcggcgugaacuccgacaccgucggguggagcuggcccgacggcgccgagcugccguucacgaucgacaaguga

SEQ ID NO: 85440 - RNA, 1410 nt, Artificial Sequence
  derived and/or modified CDS sequence (opt1) from neuraminidase__InfluenzaA__AEW25503
augaaccccaaccagaagaucaucaccaucggcagcgugugcaugaccaucgggauggccaaccugauccuccagaucggcaacaucaucuccaucuggaucagccacuccauccagcuggggaaccagaaccagaucgagacgugcaaccagagcgucaucaccuacgagaacaacaccugggugaaccagaccuacgugaacaucuccaacacgaacuucgccgcgggccagagcgucguguccgugaagcuggccgggaacagcucccucugcccggucagcggcugggccaucuacuccaaggacaacagcauccgcaucggcuccaagggggacguguucgugauccgggagcccuucaucagcugcagcccccuggagugccgcaccuucuuccugacccagggcgcccuccugaacgacaagcacuccaacgggaccaucaaggaccggucccccuaccgcacgcugaugagcugcccgaucggcgagguccccucccccuacaacagccgguucgagagcguggccugguccgcgagcgccugccacgacgggaucaacuggcucaccaucggcaucuccggccccgacaacggggccguggccguccugaaguacaacggcaucaucaccgacaccaucaagagcuggcgcaacaacauccugcggacgcaggaguccgagugcgcgugcgugaacgggagcugcuucaccgugaugaccgacggcccguccgacggccaggccagcuacaagaucuuccgcaucgagaaggggaagaucgucaaguccguggagaugaacgcccccaacuaccacuacgaggagugcagcugcuaccccgacuccagcgagaucacgugcgugugccgggacaacuggcacggcuccaaccgccccugggucagcuucaaccagaaccucgaguaccagaucggguacaucugcuccggcaucuucggggacaacccgcggcccaacgacaagaccggcagcugcggccccguguccagcaacggggccaacggcgugaagggguucuccuucaaguacggcaacggggccuggaucggccgcaccaagagcaucagcucccggaacggcuucgagaugaucugggaccccaacggguggaccggcaccgacaacaacuucagcaucaagcaggacaucgucgggaucaacgagugguccggcuacagcggguccuucgugcagcacccggagcugacgggccuggacugcauccgccccugcuucuggguggagcucauccggggccgccccaaggagaacaccaucuggaccagcggguccagcaucuccuucugcggcgucaacagcgacaccguggggugguccuggcccgacggcgcggagcugccguucacgaucgacaaguga

SEQ ID NO: 85441 - RNA, 1410 nt, Artificial Sequence
  derived and/or modified CDS sequence (opt1) from neuraminidase__InfluenzaA__AEW25511
augaaccccaaccagaagaucaucaccaucggcagcgugugcaugaccaucgggauggccaaccugauccuccagaucggcaacaucaucuccaucuggaucagccacuccauccagcuggggaaccagaaccagaucgagacgugcaaccagagcgucaucaccuacgagaacaacaccugggugaaccacaccuacgugaacaucuccaacacgaacuucgccgcgggccagagcgucguguccgugaagcuggccgggaacagcucccucugcccggucagcggcugggccaucuacuccaaggacaacagcauccgcaucggcuccaagggggugguguucgucauccgggagcccuucaucagcugcagcccccuggagugccgcaccuucuuccugacccagggcgcccuccugaacgacaagcacuccaacgggaccaucaaggaccggucccccuaccgcacgcugaugagcugcccgaucggcgaggugcccucccccuacaacagccgguucgagagcguggccugguccgcgagcgccugccacgacgggaucaacuggcucaccaucggcaucuccggccccgacaacggggccgucgccgugcugaaguacaacggcaucaucaccgacaccaucaagagcuggcgcaacaacauccugcggacgcaggaguccgagugcgcgugcgugaacgggagcugcuucaccgucaugaccgacggcccguccgacggccaggccagcuacaagaucuuccgcaucgagaaggggaagaucgugaaguccguggagaugaacgcccccaacuaccacuacgaggagugcagcugcuaccccgacuccagcgagaucacgugcgucugccgggacaacuggcacggcuccaaccgccccugggugagcuucaaccagaaccucgaguaccagaucggguacaucugcuccggcaucuucggggacaacccgcggcccaacgacaagaccggcagcugcggccccguguccagcaacggggccaacggcgucaagggguucuccuucaaguacggcaacgggguguggaucggccgcaccaagagcaucagcucccggaacggcuucgagaugaucugggaccccaacggguggaccggcaccgacaacaacuucagcaucaagcaggacaucguggggaucaacgagugguccggcuacagcggguccuucguccagcacccggagcugacgggccuggacugcauccgccccugcuucuggguggagcucauccggggccgccccaaggagaacaccaucuggaccagcggguccagcaucuccuucugcggcgucaacagcgacaccguggggugguccuggcccgacggcgccgagcugccguucacgaucgacaaguga

SEQ ID NO: 85442 - RNA, 1410 nt, Artificial Sequence
  derived and/or modified CDS sequence (opt1) from neuraminidase__InfluenzaA__AEW25530
augaaccccaaccagaagaucaucaccaucggcagcgugugcaugaccaucgggauggccaaccugauccuccagaucggcaacaucaucuccaucuggaucagccacuccauccagcuggggaaccagaaccagaucgagacgugcaaccagagcgucaucaccuacgagaacaacaccugggugaaccacaccuacgugaacaucuccaacacgaacuucgccgcgggccagagcgucguguccgugaagcuggccgggaacagcucccucugcccggucagcggcugggccaucuacuccaaggacaacagcauccgcaucggcuccaagggggacguguucgugauccgggagcccuucaucagcugcagcccccuggagugccgcaccuucuuccugacccagggcgcccuccugaacgacaagcacuccaacgggaccaucaaggaccggucccccuaccgcacgcugaugagcugcccgaucggcgagguccccucccccuacaacagccgguucgagagcguggccugguccgcgagcgccugccacgacgggaucaacuggcucaccaucggcaucuccggccccgacaacggggccguggccguccugaaguacaacggcaucaucaccgacaccaucaagagcuggcgcuacaacauccugcggacgcaggaguccgagugcgcgugcgugaacgggagcugcuucaccgugaugaccgacggcccguccgacggccaggccagcuacaagaucuuccgcaucgagaaggggaagaucgucaaguccguggagaugaacgcccccaacuaccacuacgaggagugcagcugcuaccccgacuccagcgagaucacgugcgugugccgggacaacuggcacggcuccaaccgccccugggucagcuucaaccagaaccucgaguaccagaucggguacaucugcuccggcaucuucggggacaacccgcggcccaacgacaagaccggcagcugcggccccguguccagcaacggggagaacggcgugaagggguucuccuucaaguacggcaacggggucuggaucggccgcaccaagagcaucagcucccggaacggcuucgagaugaucugggaccccaacggguggaccggcaccgacaacaacuucagcaucaagcaggacaucguggggaucaacgagugguccggcuacagcggguccuucgugcagcacccggagcugacgggccuggacugcauccgccccugcuucugggucgagcucauccggggccgccccaaggagaacaccaucuggaccagcggguccagcaucuccuucugcggcgugaacagcgacaccgucgggugguccuggcccgacggcgccgagcugccguucacgaucgacaaguga

SEQ ID NO: 85443 - RNA, 1410 nt, Artificial Sequence
  derived and/or modified CDS sequence (opt1) from neuraminidase__InfluenzaA__AEW25537
augaaccccaaccagaagaucaucaccaucggcagcgugugcaugaccaucgggauggccaaccugauccuccagaucggcaacaucaucuccaucuggaucagccacuccauccagcuggggaaccagaaccagaucgagacgugcaaccagagcgucaucaccuacgagaacaacaccugggugaaccagaccuacgugaacaucuccaacacgaacuucgccgcgggccagagcgucguguccgugaagcuggccgggaacagcucccucugcccggucagcggcugggccaucuacuccaaggacaacagcauccgcaucggcuccaagggggacguguucgugauccgggagcccuucaucagcugcagcccccuggagugccgcaccuucuuccugacccagggcgcccuccugaacgacaagcacuccaacgggaccaucaaggaccggucccccuaccgcacgcugaugagcugcccgaucggcgagguccccucccccuacaacagccgguucgagagcguggccugguccgcgagcgccugccacgacgggaucaacuggcucaccaucggcaucuccggccccgacaacggggccguggccguccugaaguacaacggcaucaucaccgacaccaucaagagcuggcgcaacaacauccugcggacgcaggaguccgagugcgcgugcgugaacgggagcugcuucaccgugaugaccgacggcccguccgacggccaggccagcuacaagaucuuccgcaucgagaaggggaagaucgucaaguccguggagaugaacgcccccaaccaccacuacgaggagugcagcugcuaccccgacuccagcgagaucacgugcgugugccgggacaacuggcacggcuccaaccgccccugggucagcuucaaccagaaccucgaguaccagaucggguacaucugcuccggcaucuucggggacaacccgcggcccaacgacaagaccggcagcugcggccccguguccagcaacggggccaacggcgugaagggguucuccuucaaguacggcaacggggucuggaucggccgcaccaagagcaucagcucccggaacggcuucgagaugaucugggaccccaacggguggaccggcaccgacaacaacuucagcaucaagcaggacaucguggggaucaacgagugguccggcuacagcggguccuucgugcagcacccggagcugacgggccuggacugcauccgccccugcuucugggucgagcucauccggggccgccccaaggagaacaccaucuggaccagcggguccagcaucuccuucugcggcgugaacagcgacaccgucgggugguccuggcccgacggcgccgagcugccguucacgaucgacaaguga

SEQ ID NO: 85444 - RNA, 1410 nt, Artificial Sequence; identical to SEQ ID NO: 80762
  derived and/or modified CDS sequence (opt1) from neuraminidase__InfluenzaA__AEW25547

SEQ ID NO: 85445 - RNA, 1410 nt, Artificial Sequence; identical to SEQ ID NO: 80762
  derived and/or modified CDS sequence (opt1) from neuraminidase__InfluenzaA__AEW25556

SEQ ID NO: 85446 - RNA, 1410 nt, Artificial Sequence; identical to SEQ ID NO: 80762
  derived and/or modified CDS sequence (opt1) from neuraminidase__InfluenzaA__AEW25566

SEQ ID NO: 85447 - RNA, 1410 nt, Artificial Sequence
  derived and/or modified CDS sequence (opt1) from neuraminidase__InfluenzaA__AEW25584
augaaccccaaccagaagaucaucaccaucggcagcgugugcaugaccaucgggauggccaaccugauccuccagaucggcaacaucaucuccaucuggaucagccacuccauccagcuggggaaccagaaccagaucgagacgugcaaccagagcgucaucaccuacgagaacaacaccugggugaaccagaccuacgugaacaucuccaacacgaacuucgccgcgggccagagcgucguguccgugaagcuggccgggaacagcucccucugcccggucagcggcugggccaucuacuccaaggacaacagcauccgcaucggcuccaagggggacguguucgugauccgggagcccuucaucagcugcagcccccuggagugccgcaccuucuuccugacccagggcgcccuccugaacgacaagcacuccaacgggaccaucaaggaccggucccccuaccgcacgcugaugagcugcccgaucggcgagguccccucccccuacaacagccgguucgagagcguggccugguccgcgagcgccugccacgacgggaucaacuggcucaccaucggcaucuccggccccgacaacggggccguggccguccugaaguacaacggcaucaucaccgacaccaucaagagcuggcgcaacaacauccugcggacgcaggaguccgagugcgcgugcgugaacgggagcugcuucaccgugaugaccgacggcccguccgacggccaggccagcuacaagaucuuccgcaucgagaaggggaagaucgucaaguccguggagaugaacgcccccaacuaccacuacgaggagugcagcugcuaccccgacuccagcgagaucacgugcgugugccgggacaacuggcacggcuccaaccgccccugggucagcuucaaccagaaccucgaguaccagaucggguacaucugcuccggcaucuucggggacaacccgcggcccaacgacaagaccggcagcugcggccccguguccagcaacggggccaacggcgugaagggguucuccuucaaguacggcaacggggucuggaucggccgcaccaagagcaucagcucccggaacggcuucgagaugaucugggaccccaacggguggaccggcaccgacaacaacuucagcaucaagcaggggaucgugggcaucaacgagugguccggguacggcggcagcuucgugcagcacccggagcugacggggcuggacugcauccgccccugcuucugggucgagcucauccggggccgccccaaggagaacaccaucuggaccuccgggagcuccaucagcuucugcggcgugaacuccgacaccgucggcuggagcuggcccgacggggccgagcugccguucacgaucgacaaguga

SEQ ID NO: 85448 - RNA, 1410 nt, Artificial Sequence; identical to SEQ ID NO: 80762
  derived and/or modified CDS sequence (opt1) from neuraminidase__InfluenzaA__AEW25592

SEQ ID NO: 85449 - RNA, 1410 nt, Artificial Sequence
  derived and/or modified CDS sequence (opt1) from neuraminidase__InfluenzaA__AEW25602
augaaccccaaccagaagaucaucaccaucggcagcgugugcaugaccaucgggauggccaaccugauccuccagaucggcaacaucaucuccaucuggaucagccacuccauccagcuggggaaccagaaccagaucgagacgugcaaccagagcgucaucaccuacgagaacaacaccugggugaaccagaccuacgugaacaucuccaacacgaacuucgccgcgggccagagcgucguguccgugaagcuggccgggaacagcucccucugcccggucagcggcugggccaucuacuccaaggacaacagcauccgcaucggcuccaagggggacguguucgugauccgggagcccuucaucagcugcagcccccuggagugccgcaccuucuuccugacccagggcgcccuccugaacgacaagcacuccaacgggaccaucaaggaccggucccccuaccgcacgcugaugagcugcccgaucggcgagguccccucccccuacaacagccgguucgagagcguggccugguccgcgagcgccugccacgacgggaucaacuggcucaccaucggcaucuccggccccgacaacggggccguggccguccugaaguacaacggcaucaucaccgacaccaucaagagcuggcgcaacaacauccugcggacgcaggaguccgagugcgcgugcgugaacgggagcugcuucaccgugaugaccgacggcccguccgacggccaggccagcuacaagaucuuccgcaucgagaaggggaagaucgucaaguccguggagaugaacgcccccaacuaccacuacgaggagugcagcugcuaccccgacuccagcgagaucacgugcgugugccgggacaacuggcacggcuccaaccgccccugggucagcuucaaccagaaccucgaguaccagaucggguacaucugcuccggcaucuucggggacaacccgcggcccaacgacaagaccggcagcugcggccccguguccagcaacggggccaacggcgugaagggguucuccuucaaguacggcaacggggucuggaucggccgcaccaagagcaucagcucccggaacggcuucgagaugaucugggaccccaacggguggaccggcaccgacaagaacuucagcaucaagcaggacaucguggggaucaacgagugguccggcuacagcggguccuucgugcagcacccggagcugacgggccuggacugcauccgccccugcuucugggucgagcucauccggggccgccccaaggagaacaccaucuggaccagcggguccagcaucuccuucugcggcgugaacagcgacaccgucgggugguccuggcccgacggcgccgagcugccguucacgaucgacaaguga

SEQ ID NO: 85450 - RNA, 1410 nt, Artificial Sequence
  derived and/or modified CDS sequence (opt1) from neuraminidase__InfluenzaA__AEW25612
augaaccccaaccagaagaucaucaccaucggcagcgugugcaugaccaucgggauggccaaccugauccuccagaucggcaacaucaucuccaucuggaucagccacuccauccagcuggggaaccagaaccagaucgagacgugcaaccagagcgucaucaccuacgagaacaacaccugggugaaccagaccuacgugaacaucuccaacacgaacuucgccgcgggccagagcgucguguccgugaagcuggccgggaacagcucccucugcccggucagcggcugggccaucuacuccaaggacaacagcauccgcaucggcuccaagggggacguguucgugauccgggagcccuucaucagcugcagcccccuggagugccgcaccuucuuccugacccagggcgcccuccugaacgacaagcacuccaacgggaccaucaaggaccggucccccuaccgcacgcugaugagcugcccgaucggcgagguccccucccccuacaacagccgguucgagagcguggccugguccgcgagcgccugccacgacgggaucaacuggcucaccaucggcaucuccggccccgacaacggggccguggccguccugaaguacaacggcaucaucaccgacaccaucaagagcuggcgcaacaacauccugcggacgcaggaguccgagugcgcgugcgugaacgggagcugcuucaccgugaugaccgacggcccguccgaccgccaggccagcuacaagaucuuccggaucgagaagggcaagaucgucaaguccguggagaugaacgcccccaacuaccacuacgaggagugcagcugcuaccccgacuccagcgagaucacgugcgugugccgcgacaacuggcacggguccaaccggcccugggucagcuucaaccagaaccucgaguaccagaucggcuacaucugcuccgggaucuucggcgacaacccgcgccccaacgacaagaccgggagcugcggccccguguccagcaacggcgccaacggggugaagggcuucuccuucaaguacgggaacggcgucuggaucgggcggaccaagagcaucagcucccgcaacggcuucgagaugaucugggaccccaacggcuggaccgggaccgacaacaacuucagcaucaagcaggacaucgugggcaucaacgagugguccggguacagcggcuccuucgugcagcacccggagcugacggggcuggacugcauccggcccugcuucugggucgagcucauccgcggccggcccaaggagaacaccaucuggaccagcggcuccagcaucuccuucugcggggugaacagcgacaccgucggcugguccuggcccgacggggccgagcugccguucacgaucgacaaguga

SEQ ID NO: 85451 - RNA, 1410 nt, Artificial Sequence
  derived and/or modified CDS sequence (opt1) from neuraminidase__InfluenzaA__AEW25622
augaaccccaaccagaagaucaucaccaucggcagcgugugcaugaccaucgggauggccaaccugauccuccagaucggcaacaucaucuccaucuggaucagccacuccauccagcuggggaaccagaaccagaucgagacgugcaaccagagcgucaucaccuacgagaacaacaccugggugaaccagaccuacgugaacaucuccaacacgaacuucgccgcgggccagagcgucguguccgugaagcuggccgggaacagcucccucugcccggucagcggcugggccaucuacuccaaggacaacagcauccgcaucggcuccaagggggacguguucgugauccgggagcccuucaucagcugcagcccccuggagugccgcaccuucuuccugacccagggcgcccuccugaacgacaagcacuccaacgggaccaucaaggaccggucccccuaccgcacgcugaugagcugcccgaucggcgagguccccucccccuacaacagccgguucgagagcguggccugguccgcgagcgccugccacgacgggaucaacuggcucaccaucggcaucuccggccccgacaacggggccguggccguccugaaguacaacggcaucaucaccgacaccaucaagagcuggcgcaacaacauccugcggacgcaggaguccgagugcgcgugcgugaacgggagcugcuucaccgugaugaccgacggcccguccgacggccaggccagcuacaagaucuuccgcaucgagaaggggaagaucgucaaguccguggagaugaacgcccccaacuaccacuacgaggagugcagcugcuaccccgacuccagcgagaucacgugcgugugccgggacaacuggcacggcuccaaccgccccugggucagcuucaaccagaaccucgaguaccagaucggguacaucugcuccggcaucuucggggacaacccgcggcccaacgacaagaccggcagcugcggccccguguccagcaacggggccaacggcgugaagggguucuccuucaaguacggcaacggggucuggaucggccgcaccaagagcaucagcucccggaacggcuucgagaugaucugggaccccaacggguggaccggcaccgacaacaacuucagcaucaagcaggacaucguggggaucaacgagugguccggcuacagcggguccuucgugcagcacccggagcugacgggccuggacugcauccgccccugcuucugggucgagcucauccggggccgccccaaggagaacagcaucuggaccuccgggagcuccaucagcuucugcggcgugaacuccgacaccgucggguggagcuggcccgacggcgccgagcugccguucaccaucgacaaguga

SEQ ID NO: 85452 - RNA, 1410 nt, Artificial Sequence
  derived and/or modified CDS sequence (opt1) from neuraminidase__InfluenzaA__AEW25631
augaaccccaaccagaagaucaucaccaucggcagcgugugcaugaccaucgggauggccaaccugauccuccagaucggcaacaucaucuccaucuggaucagccacuccauccagcuggggaaccagaaccagaucgagacgugcaaccagagcgucaucaccuacgagaacaacaccugggugaaccagaccuacgugaacaucuccaacacgaacuucgccgcgggccagagcgucguguccgugaagcuggccgggaacagcucccucugcccggucagcggcugggccaucuacuccaaggacaacagcauccgcaucggcuccaagggggacguguucgugauccgggagcccuucaucagcugcagcccccuggagugccgcaccuucuuccugacccagggcgcccuccugaacgacaagcacuccaacgggaccaucaaggaccggucccccuaccgcacgcugaugagcugcccgaucggcgagguccccucccccuacaacagccgguucgagagcguggccugguccgcgagcgccugccacgacgggaucaacuggcucaccaucggcaucuccggccccgacaacggggccguggccguccugaaguacaacggcaucaucaccgacaccaucaagagcuggcgcaacaacauccugcggacgcaggaguccgagugcgcgugcgugaacgggagcugcuucaccgugaugaccgacggcccguccgacggccaggccagcuacaagaucuuccgcaucgagaaggggaagaucgucaaguccguggagaugaacgcccccaacuaccacuacgaggagugcagcugcuaccccgacuccagcgagaucacgugcgugugccgggacaacuggcacggcuccaaccgccccugggucagcuucaaccagaaccucgaguaccagaucggguacaucugcuccggcaucuucggggacaacccgcggcccaacgacaagaccggcagcugcggccccguguccagcaacggggccuccggcgugaagggguucagcuucaaguacggcaacggggucuggaucggccgcaccaagagcaucuccagccggaacggcuucgagaugaucugggaccccaacggguggaccggcaccgacaacaacuucuccaucaagcaggacaucguggggaucaacgaguggagcggcuacuccgggagcuucgugcagcacccggagcugacgggccuggacugcauccgccccugcuucugggucgagcucauccggggccgccccaaggagaacaccaucuggaccuccgggagcuccaucagcuucugcggcgugaacuccgacaccgucggguggagcuggcccgacggcgccgagcugccguucacgaucgacaaguga

SEQ ID NO: 85453 - RNA, 1410 nt, Artificial Sequence; identical to SEQ ID NO: 80762
  derived and/or modified CDS sequence (opt1) from neuraminidase__InfluenzaA__AEW25639

SEQ ID NO: 85454 - RNA, 1410 nt, Artificial Sequence
  derived and/or modified CDS sequence (opt1) from neuraminidase__InfluenzaA__AEW25648
augaaccccaaccagaagaucaucaccaucggcagcgugugcaugaccaucgggauggccaaccugauccuccagaucggcaacaucaucuccaucuggaucagccacuccauccagcuggggaaccagaaccagaucgagacgugcaaccagagcgucaucaccuacgagaacaacaccugggugaaccacaccuacgugaacaucuccaacacgaacuucgccgcgggccagagcgucguguccgugaagcuggccgggaacagcucccucugcccggucagcggcugggccaucuacuccaaggacaacagcauccgcaucggcuccaagggggacguguucgugauccgggagcccuucaucagcugcagcccccuggagugccgcaccuucuuccugacccagggcgcccuccugaacgacaagcacuccaacgggaccaucaaggaccggucccccuaccgcacgcugaugagcugcccgaucggcgagguccccucccccuacaacagccgguucgagagcguggccugguccgcgagcgccugccacgacgggaucaacuggcucaccaucggcaucuccggccccgacaacggggccguggccguccugaaguacaacggcaucaucaccgacaccaucaagagcuggcgcaacaacauccugcggacgcaggaguccgagugcgcgugcgugaacgggagcugcuucaccgugaugaccgacggcccguccgacggccaggccagcuacaagaucuuccgcaucgagaaggggaagaucgucaaguccguggagaugaacgcccccaacuaccacuacgaggagugcagcugcuaccccgacuccagcgagaucacgugcgugugccgggacaacuggcacggcuccaaccgccccugggucagcuucaaccagaaccucgaguaccagaucggguacaucugcuccggcaucuucggggacaacccgcggcccaacgacaagaccggcagcugcggccccguguccagcaacggggccaacggcgugaagggguucuccuucaaguacggcaacggggucuggaucggccgcaccaagagcaucagcucccggaacggcuucgagaugaucugggaccccaacggguggaccggcaccgacaacaacuucagcaucaagcaggacaucguggggaucaacgagugguccggcuacagcggguccuucgugcagcacccggagcugacgggccuggacugcauccgccccugcuucugggucgagcucauccggggccgccccaaggagaacaccaucuggaccagcggguccagcaucuccuucugcggcgugaacagcgacaccgucgggugguccuggcccgacggcgccgagcugccguucacgaucgacaaguga

SEQ ID NO: 85455 - RNA, 1410 nt, Artificial Sequence
  derived and/or modified CDS sequence (opt1) from neuraminidase__InfluenzaA__AEW25656
augaaccccaaccagaagaucaucaccaucggcagcgugugcaugaccaucgggauggccaaccugauccuccagaucggcaacaucaucuccaucuggaucagccacuccauccagcuggggaaccagaaccagaucgagacgugcaaccagagcgucaucaccuacgagaacaacaccugggugaaccagaccuacgugaacaucuccaacacgaacuucgccgcgggccagagcgucguguccgugaagcuggccgggaacagcucccucugcccggucagcggcugggccaucuacuccaaggacaacagcauccgcaucggcuccaagggggacguguucgugauccgggagcccuucaucagcugcagcccccuggagugccgcaccuucuuccugacccagggcgcccuccugaacgacaagcacuccaacgggaccaucaaggaccggucccccuaccgcacgcugaugagcugcccgaucggcgagguccccucccccuacaacagccgguucgagagcguggccugguccgcgagcgccugccacgacgggaucaacuggcucaccaucggcaucuccggccccgacaacggggccguggccguccugaaguacaacggcaucaucaccgacaccaucaagagcuggcgcaacaacauccugcggacgcaggaguccgagugcgcgugcgugaacgggagcugcuucaccgugaugaccgacggcccguccgacggccaggccagcuacaagaucuuccgcaucgagaaggggaagaucgucaaguccguggagaugaacgcccccaacuaccacuacgaggagugcagcugcuaccccgacuccagcgagaucacgugcgugugccgggacaacuggcacggcuccaaccgccccugggucagcuucaaccagaaccucgaguaccagaucggguacaucugcuccggcaucuucggggacaacccgcggcccaacgacaagaccggcagcugcggccccguguccagcaacggggccaacggcgugaagggguucuccuucaaguacggcaacggggucuggaucggccgcaccaagagcaucagcucccggaacggcuucgagaugaucugggaccccaacggguggaccggcaccgacaacaacuucccgaucaagcaggacaucguggggaucaacgaguggagcggcuacuccgggagcuucgugcagcaccccgagcugacgggccuggacugcauccgccccugcuucugggucgagcucauccggggccgccccaaggagaacaccaucuggaccuccgggagcuccaucagcuucugcggcgugaacuccgacaccgucggguggagcuggccggacggcgccgagcugcccuucacgaucgacaaguga

SEQ ID NO: 85456 - RNA, 1410 nt, Artificial Sequence
  derived and/or modified CDS sequence (opt1) from neuraminidase__InfluenzaA__AEW25664
augaaccccaaccagaagaucaucaccaucggcagcgugugcaugaccaucgggauggccaaccugauccuccagaucggcaacaucaucuccaucuggaucagccacuccauccagcuggggaaccagaaccagaucgagacgugcaaccagagcgucaucaccuacgagaacaacaccugggugaaccagaccuacgugaacaucuccaacacgaacuucaccgccggccagagcgucguguccgugaagcuggcggggaacagcucccucugcccggucagcggcugggccaucuacuccaaggacaacagcauccgcaucggcuccaagggggacguguucgugauccgggagcccuucaucagcugcagcccccuggagugccgcaccuucuuccugacccagggcgcccuccugaacgacaagcacuccaacgggacgaucaaggaccggucccccuaccgcacccugaugagcugcccgaucggcgagguccccucccccuacaacagccgguucgagagcguggccugguccgccagcgcgugccacgacgggaucaacuggcucaccaucggcaucuccggccccgacaacggggccguggccguccugaaguacaacggcaucaucaccgacacgaucaagagcuggcgcaacaacauccugcggacccaggaguccgagugcgccugcgugaacgggagcugcuucaccgugaugaccgacggcccguccgacggccaggcgagcuacaagaucuuccgcaucgagaaggggaagaucgucaaguccguggagaugaacgcccccaacuaccacuacgaggagugcagcugcuaccccgacuccagcgagaucacgugcgugugccgggacaacuggcacggcuccaaccgccccugggucagcuucaaccagaaccucgaguaccagaucggguacaucugcuccggcaucuucggggacaacccgcggcccaacgacaagaccggcagcugcggccccguguccagcaacggggccaacggcgugaagggguucuccuucaaguacggcaacggggucuggaucggccgcaccaagagcaucagcucccggaacggcuucgagaugaucugggaccccaacggguggaccggcacggacaacaacuucagcaucaagcaggacaucguggggaucaacgagugguccggcuacagcggguccuucgugcagcacccggagcugaccggccuggacugcauccgccccugcuucugggucgagcucauccggggccgccccaaggagaacaccaucuggaccagcggguccagcaucuccuucugcggcgugaacagcgacaccgggggcugguccuggcccgacggcgccgagcugccguucacgaucgacaaguga

SEQ ID NO: 85457 - RNA, 1410 nt, Artificial Sequence; identical to SEQ ID NO: 85451
  derived and/or modified CDS sequence (opt1) from neuraminidase__InfluenzaA__AEW25671

SEQ ID NO: 85458 - RNA, 1410 nt, Artificial Sequence; identical to SEQ ID NO: 81939
  derived and/or modified CDS sequence (opt1) from neuraminidase__InfluenzaA__AEW25680

SEQ ID NO: 85459 - RNA, 1410 nt, Artificial Sequence
  derived and/or modified CDS sequence (opt1) from neuraminidase__InfluenzaA__AEW25689
augaaccccaaccagaagaucaucaccaucggcagcgugugcaugaccaucgggauggccaaccugauccuccagaucggcaacaucaucuccaucuggaucagccacuccauccagcuggggaaccagaaccagaucgagacgugcaaccagagcgucaucaccuacgagaacaacaccugggugaaccagaccuacgugaacaucuccaacacgaacuucgccgcgggccagagcgucguguccgugaagcuggccgggaacagcucccucugcccggucagcggcugggccaucuacuccaaggacaacagcauccgcgugggcuccaagggggacguguucgucauccgggagcccuucaucagcugcagcccccuggagugccgcaccuucuuccugacccagggcgcccuccugaacgacaagcacuccaacgggaccaucaaggaccggucccccuaccgcacgcugaugagcugcccgaucggcgaggugcccucccccuacaacagccgguucgagagcguggccugguccgcgagcgccugccacgacgggaucaacuggcucaccaucggcaucuccggccccgacaacggggccgucgccgugcugaaguacaacggcaucaucaccgacaccaucaagagcuggcgcaacaacauccugcggacgcaggaguccgagugcgcgugcgugaacgggagcugcuucaccgucaugaccgacggcccguccgacggccaggccagcuacaagaucuuccgcaucgagaaggggaagaucgugaaguccguggagaugaacgcccccaacuaccacuacgaggagugcagcugcuaccccgacuccagcgagaucacgugcgucugccgggacaacuggcacggcuccaaccgccccugggugagcuucaaccagaaccucgaguaccagaucggguacaucugcuccggcaucuucggggacaacccgcggcccaacgacaagaccggcagcugcggccccguguccagcaacggggccaacggcgucaagggguucuccuucaaguacggcaacgggguguggaucggccgcaccaagagcaucagcucccggaacggcuucgagaugaucugggaccccaacggguggaccggcaccgacaacaacuucagcaucaagcaggacaucguggggaucaacgagugguccggcuacagcggguccuucguccagcacccggagcugacgggccuggacugcauccgccccugcuucuggguggagcucauccggggccgccccaaggagaacaccaucuggaccagcggguccagcaucuccuucugcggcgucaacagcgacaccguggggugguccuggcccgacggcgccgagcugccguucacgaucgacaaguga

SEQ ID NO: 85460 - RNA, 1410 nt, Artificial Sequence; identical to SEQ ID NO: 85454
  derived and/or modified CDS sequence (opt1) from neuraminidase__InfluenzaA__AEW25698

SEQ ID NO: 85461 - RNA, 1410 nt, Artificial Sequence; identical to SEQ ID NO: 80762
  derived and/or modified CDS sequence (opt1) from neuraminidase__InfluenzaA__AEW25708

SEQ ID NO: 85462 - RNA, 1410 nt, Artificial Sequence; identical to SEQ ID NO: 80762
  derived and/or modified CDS sequence (opt1) from neuraminidase__InfluenzaA__AEX09177

SEQ ID NO: 85463 - RNA, 1413 nt, Artificial Sequence
  derived and/or modified CDS sequence (opt1) from neuraminidase__InfluenzaA__AEX33324
augaaccccaaccagaagaucaucaccaucggcagcaucuccaucgccaucgggaucaucagccugaugcuccagaucggcaacaucaucuccaucugggccagccacuccauccagaccgggagccagaaccacacgggcaucugcaaccagcgcaucaucaccuacgagaacuccaccugggugaaccacaccuacgucacgaucaacaacaccaacgugguggcggggaaggacaagaccagcgucacccuggccggcaacuccagccugugcuccaucagcggcugggccaucuacacgaaggacaacuccauccggaucgggagcaagggcgacguguucgugauccgcgagccguucaucuccugcagccaccucgagugccggaccuucuuccugacccagggggcccugcucaacgacaagcacuccaacggcaccgucaaggaccgcagccccuaccgggcccugauguccugcccccugggggaggcgcccagcccguacaacagcaaguucgaguccguggccuggagcgccuccgccugccacgacggcaugggcuggcucacgaucgggaucagcggccccgacaacggggcgguggccguccugaaguacaacggcaucaucaccgagaccaucaaguccuggaagaagcgcauccugcggacccaggagagcgagugcgugugcgugaacggcuccugcuucacgaucaugaccgacgggcccagcaacggcgccgccuccuacaagaucuucaagaucgagaaggggaaggucaccaagagcaucgagcucaacgcccccaacuuccacuacgaggagugcuccugcuacccggacaccggcacggugaugugcgugugccgcgacaacuggcacgggagcaaccggcccugggucuccuucaaccagaaccuggacuaccagaucggcuacaucugcagcggcguguucggggacaacccccgccccaaggacggcgagggguccugcaacccggugaccgucgacggcgcggacggggugaagggcuucagcuacaaguacggcaacgggguguggaucggccggaccaaguccaaccgccugcggaagggguucgagaugaucugggaccccaacggcuggaccgacacggacagcgacuucuccgucaagcaggacgugguggccaucaccgacuggagcggguacagcggcuccuucguccagcaccccgagcucaccggccuggacugcauccgccccugcuucuggguggagcugguccgggggcucccgcgcgagaacaccacgaucuggaccagcggcuccagcaucuccuucugcggggugaacagcgacaccgccaacugguccuggcccgacggcgccgagcugcccuucaccaucgacaaguga

SEQ ID NO: 85464 - RNA, 1413 nt, Artificial Sequence
  derived and/or modified CDS sequence (opt1) from neuraminidase__InfluenzaA__AEX33368
augaaccccaaccagaagaucaucaccaucggcagcaucuccaucgccaucgggaucaucagccugaugcuccagaucggcaacaucaucuccaucugggccagccacuccauccagaccgggagccagaaccacacgggcaucugcaaccagcgcaucaucaccuacgagaacuccaccugggugaaccacaccuacgucaacaucaacaacacgaacgugguggcggggaaggacaagaccagcgucacccuggccggcaacuccagccugugcgccaucuccggcugggccaucuacaccaaggacaacagcauccggaucggguccaagggcgacguguucgugauccgcgagccguucaucagcugcucccaccucgagugccggacguucuuccugacccagggggcccugcucaacgacaagcacagcaacggcaccgucaaggaccgcucccccuaccgggcgcugaugagcugcccccugggggaggcccccuccccguacaacagcaaguucgagagcguggccugguccgccagcgcgugccacgacggcaugggcuggcucaccaucgggaucuccggccccgacaacggggccguggccguccugaaguacaacggcaucaucacggagaccaucaagagcuggaagaagcgcauccugcggacccaggaguccgagugcgugugcgugaacggcagcugcuucaccaucaugacggacgggcccuccaacggcgccgccagcuacaagaucuucaagaucgagaaggggaaggucaccaaguccaucgagcucaacgcgcccaacuuccacuacgaggagugcagcugcuacccggacaccggcaccgugaugugcgugugccgcgacaacuggcacggguccaaccggcccugggucagcuucaaccagaaccuggacuaccagaucggcuacaucugcuccggcguguucggggacaacccccgccccaaggacggcgaggggagcugcaacccggugacggucgacggcgccgacggggugaagggcuucuccuacaaguacggcaacgggguguggaucggccggaccaagagcaaccgccugcggaagggguucgagaugaucugggaccccaacggcuggaccgacaccgacuccgacuucagcgucaagcaggacgugguggccaucacggacugguccggguacagcggcagcuucguccagcaccccgagcucaccggccuggacugcauccgccccugcuucuggguggagcugguccgggggcucccgcgcgagaacaccaccaucuggacguccggcagcuccaucagcuucugcggggugaacuccgacaccgccaacuggagcuggcccgacggcgccgagcugcccuucaccaucgacaaguga

SEQ ID NO: 85465 - RNA, 1413 nt, Artificial Sequence
  derived and/or modified CDS sequence (opt1) from neuraminidase__InfluenzaA__AEX33379
augaaccccaaccagaagaucaucaccaucggcagcaucuccaucgccaucgggaucaucagccugaugcuccagaucggcaacaucaucuccaucugggccagccacuccauccagaccgggauccagaaccacacgggcaucugcaaccagcgcaucaucaccuacgagaacagcaccugggugaaccacaccuacgucacgaucaacaacaccaacgugguggcggggaaggacaagaccuccgucacccuggccggcaacagcucccugugcagcaucuccggcugggccaucuacacgaaggacaacagcauccggaucggguccaagggcgacguguucgugauccgcgagccguucaucagcugcucccaccucgagugccggaccuucuuccugacccagggggcccugcucaacgacaagcacagcaacggcaccgucaaggaccgcucccccuaccgggcccugaugagcugcccccugggggaggcgcccuccccguacaacagcaaguucgagagcguggccugguccgccagcgccugccacgacggcaugggcuggcucacgaucgggaucuccggccccgacaacggggcgguggccguccugaaguacaacggcaucaucaccgagaccaucaagagcuggaagaagcgcauccugcggacccaggaguccgagugcgugugcgugaacggcagcugcuucacgaucaugaccgacgggcccuccaacggcgccgccagcuacaagaucuucaagaucgagaaggggaaggucaccaaguccaucgagcucaacgcccccaacuuccacuacgaggagugcagcugcuacccggacaccggcacggugaugugcgugugccgcgacaacuggcacggguccaaccggcccugggucagcuucaaccagaaccuggacuaccagaucggcuacaucugcuccggcguguucggggacaacccccgcccccgggacggcgaggggagcugcaacccggugaccgucgacggcgcggacggggugaagggcuucuccuacaaguacggcaacgggguguggaucggccgcaccaagagcaaccggcugcgcaagggguucgagaugaucugggaccccaacggcuggaccgacacggacuccgacuucagcgucaagcaggacgugguggccaucaccgacugguccggguacagcggcagcuucguccagcaccccgagcucaccggccuggacugcauccggcccugcuucuggguggagcugguccgcgggcucccgcgggagaacaccacgaucuggaccuccggcagcuccaucagcuucugcggggugaacuccgacaccgccaacuggagcuggcccgacggcgccgagcugcccuucaccaucgacaaguga

SEQ ID NO: 85466 - RNA, 1413 nt, Artificial Sequence; identical to SEQ ID NO: 85465
  derived and/or modified CDS sequence (opt1) from neuraminidase__InfluenzaA__AEX33390

SEQ ID NO: 85467 - RNA, 1413 nt, Artificial Sequence; identical to SEQ ID NO: 85465
  derived and/or modified CDS sequence (opt1) from neuraminidase__InfluenzaA__AEX33401

SEQ ID NO: 85468 - RNA, 1413 nt, Artificial Sequence; identical to SEQ ID NO: 85465
  derived and/or modified CDS sequence (opt1) from neuraminidase__InfluenzaA__AEX33412

SEQ ID NO: 85469 - RNA, 1413 nt, Artificial Sequence; identical to SEQ ID NO: 85465
  derived and/or modified CDS sequence (opt1) from neuraminidase__InfluenzaA__AEX33423

SEQ ID NO: 85470 - RNA, 1413 nt, Artificial Sequence; identical to SEQ ID NO: 85465
  derived and/or modified CDS sequence (opt1) from neuraminidase__InfluenzaA__AEX33434

SEQ ID NO: 85471 - RNA, 1413 nt, Artificial Sequence; identical to SEQ ID NO: 85465
  derived and/or modified CDS sequence (opt1) from neuraminidase__InfluenzaA__AEX33445

SEQ ID NO: 85472 - RNA, 1410 nt, Artificial Sequence
  derived and/or modified CDS sequence (opt1) from neuraminidase__InfluenzaA__AEX33544
augaaccccaaccagaagaucaucaccaucggcagcuucucccugaccaucgccgccaucugcuuccucaugcagaucgcgauccuggugacgaccgucacccugcacuucaagcagcacgagugcaacagcccgcccaacaaccaggugaugcucugcgagcccaccaucaucgagcgcaacaucacggagaucguguaccugaccaacaccaccaucgagaaggagaucugccccaagcuggccgaguaccggaacugguccaagccgcagugcaacaucacgggguucgcccccuucagcaaggacaacuccauccgccucagcgccggcggggacaucugggucacccgggagcccuacguguccugcgaccccgacaagugcuaccaguucgcccugggccaggggaccacccugaacaacggccacagcaacgacacggugcacgaccgcaccccguaccggacccuccugaugaacgagcugggcguccccuuccaccucgggacccgccaggugugcaucgcgugguccagcuccagcugccacgacggcaaggccuggcugcacgugugcgucacgggggacgacaagaacgccaccgccuccuucaucuacaacggccggcugguggacagcaucggguccuggagcaagaagauccuccgcacccaggaguccgagugcgugugcaucaacgggaccugcacggucgugaugaccgacggcagcgcguccgggaaggccgacaccaagauccuguucaucgaggagggcaagaucgugcacaucagcacccugagcggguccgcccagcacgucgaggagugcagcugcuacccccgguaccccggcgugcgcugcgugugccgggacaacuggaagggcuccaaccgcccgaucgucgacaucaacgugaaggacuacagcaucguguccagcuacgucugcuccgggcucgugggcgacacgccccggaagaacgacagcuucuccagcucccacugccuggaccccaacaacgaggagggcggccacggggugaagggcugggccuucgacgacggcaacgacgucuggauggggcgcaccaucagcgagaagcugcgguccggcuacgagaccuucaaggugaucgagggguggagcaagcccaacuccaagcuccagaucaaccgccaggucaucguggagcggggcaaccgcagcggguacuccggcaucuucagcguggagggcaaguccugcaucaaccggugcuucuacgucgagcugauccgcgggcggaaggagaagaccgaggugugguggacgagcaacagcaucguggucuucugcggcaccuccgggaccuacggcaccgggagcuggccggacggcgccgacaucaaccugaugcccaucuga

SEQ ID NO: 85473 - RNA, 1410 nt, Artificial Sequence; identical to SEQ ID NO: 78738
  derived and/or modified CDS sequence (opt1) from neuraminidase__InfluenzaA__AEX33555

SEQ ID NO: 85474 - RNA, 1410 nt, Artificial Sequence
  derived and/or modified CDS sequence (opt1) from neuraminidase__InfluenzaA__AEX33610
augaaccccaaccagaagaucaucaccaucggcagcgugucccugaccaucagcacgaucugcuucuucaugcagaucgccauccucaucaccaccgucacccugcacuucaagcaguacgaguucaacccgccgcccaacaaccaggugaugcugugcgagcccacgaucaucgagcgcaacaucaccgagaucguguaccucaccaacaccacgaucgagaaggagaucugccccaagcuggccgaguaccggaacugguccaagccccagugcgacaucaccggguucgcgcccuucagcaaggacaacuccauccgccugagcgccggcggggacaucugggucacccgggagcccuacguguccugcgacccggacaagugcuaccaguucgcccucggccaggggaccacgcugaacaacgugcacagcaacgacaccguccacgaccgcacccccuaccggacccugcucaugaacgagcugggcgugcccuuccaccugggcacgaagcaggucugcaucgccugguccagcuccagcugccacgacgggaaggccuggcuccacgugugcgugaccggcgacgacaagaacgcgaccgccuccuucaucuacaacgggcgccugguggacagcaucgucuccuggagcaagaagauccugcggacccaggaguccgagugcgugugcaucaacggcacgugcaccguggucaugaccgacgggagcgccuccggcaaggccgacaccaagauccucuucaucgaggagggcaagaucgugcacacgagcacccugagcggguccgcgcagcacguggaggagugcagcugcuacccccgcuacccgggcguccggugcgugugccgcgacaacuggaagggguccaaccggcccaucguggacaucaacaucaaggacuacaacaucgucagcuccuacgugugcagcggccuggugggcgacacgccccgcaagaacgacuccagcuccagcucccacugccucgaccccaacaacgaggagggcgggcacggggucaagggcugggccuucgacgacgggaacgacguguggaugggccggaccaucagcgagaagcugcgcuccggcuacgagaccuucaaggucaucgggggcuggagcaacccgaacuccaagcugcagaucaaccgccaggugaucguggaccgggggaaccggagcggcuacuccgggaucuucagcgucgagggcaaguccugcaucaaccgcugcuucuacguggagcucauccggggccgcaaggaggagaccgaggugcuguggaccagcaacagcaucgucguguucugcgggaccuccggcacguacgggaccggcagcuggcccgacggggccgacaucaaccugaugcccaucuga

SEQ ID NO: 85475 - RNA, 1410 nt, Artificial Sequence
  derived and/or modified CDS sequence (opt1) from neuraminidase__InfluenzaA__AEX33828
augaaccccaaccagaagaucaucaccaucggcagcgugucccugaccaucagcacgaucugcuucuucaugcagaucgccauccucaucaccaccgucacccugcacuucaagcaguacgaguucaacccgccgcccaacaaccaggugaugcugugcgagcccacgaucaucgagcgcaacaucaccgagaucguguaccucaccaacaccacgaucgagaaggagaucugccccaagcuggccgaguaccggaacugguccaagccccagugcgacaucaccggguucgcgcccuucagcaaggacaacuccauccgccugagcgccggcggggacaucugggucacccgggagcccuacguguccugcgacccggacaagugcuaccaguucgcccucggccaggggaccacgcugaacaacgugcacagcaacgacaccguccacgaccgcacccccuaccggacccugcucaugaacgagcugggcgugcccuuccaccugggcacgaagcaggucugcaucgccugguccagcuccagcugccacgacgggaaggccuggcuccacgugugcgugaccggcgacgacaagaacgcgaccgccuccuucaucuacaacgggcgccugguggacagcaucgucuccuggagcaaggagauccugcggacccaggaguccgagugcgugugcaucaacggcacgugcaccguggucaugaccgacgggagcgccuccggcaaggccgacaccaagauccucuucaucgaggagggcaagaucgugcacacgagcacccugagcggguccgcgcagcacguggaggagugcagcugcuacccccgcuacccgggcguccggugcgugugccgcgacaacuggaagggguccaaccggcccaucguggacaucaacaucaaggacuacagcaucgucuccagcuacgugugcuccggccuggugggcgacacgccccgcaagaacgacagcuccagcuccagccacugccucgaccccaacaacgaggagggcgggcacggggucaagggcugggccuucgacgacgggaacgacguguggaugggccggaccaucuccgagaagcugcgcagcggcuacgagaccuucaaggucaucgaggggugguccaacccgaacagcaagcugcagaucaaccgccaggugaucguggaccggggcaaccgguccggguacagcggcaucuucuccgucgagggcaagagcugcaucaaccgcugcuucuacguggagcucauccgggggcgcaaggaggagaccgaggugcuguggaccagcaacuccaucgucguguucugcggcaccagcgggacguacggcaccggguccuggcccgacggcgccgacaucaaccugaugcccaucuga

SEQ ID NO: 85476 - RNA, 1410 nt, Artificial Sequence; identical to SEQ ID NO: 78736
  derived and/or modified CDS sequence (opt1) from neuraminidase__InfluenzaA__AEX33839

SEQ ID NO: 85477 - RNA, 1413 nt, Artificial Sequence
  derived and/or modified CDS sequence (opt1) from neuraminidase__InfluenzaA__AEX33861
augaaccccaaccagaagaucaucaccaucggcagcaucuccaucgccaucgggaccaucagccugaugcuccaggugggcaacaucaucuccaucugggccagccacuccauccagacggggagccagaaccacaccggcaucugcaaccagcgcaucaucaccuacgagaacuccaccugggucaaccacacguacgugaacaucaacaacaccaacguggucgcggggaaggacaagaccagcguggcccuggccggcaacuccagccugugcuccaucagcggcugggccaucuacaccaaggacaacuccauccggaucgggagcaagggcgacguguucgucauccgcgagccguucaucuccugcagccaccucgagugccggacguucuuccugacccagggggcccugcucaacgacaagcacuccaacggcaccgugaaggaccgcagccccuaccgggcgcugauguccugcccccugggggaggcccccagcccguacaacagcaaguucgaguccguggccuggagcgccuccgcgugccacgacggcaugggcuggcucaccaucgggaucagcggccccgacaacggggccgucgccgugcugaaguacaacggcaucaucacggagaccaucaaguccuggaagaagcgcauccugcggacccaggagagcgagugcgugugcgucaacggcuccugcuucaccaucaugacggacgggcccagcaacggcgccgccuccuacaagaucuucaagaucgagaagggccaggugaccaagagcguggagcucaacgcgcccaacuuccacuacgaggagugcuccugcuacccggacaccgggaccgucaugugcgugugccgcgacaacuggcacgggagcaaccggcccuggguguccuucaaccagaaccuggacuaccagaucggcuacaucugcagcggcgucuucggggacaacccccgccccaaggacggcaagggguccugcaacccggugacgguggacggcgccgacggggucaagggcuucagcuacaaguacggcaacgggguguggaucggccggaccaaguccaaccgccugcggaagggguucgagaugaucugggaccccaacggcuggaccgacaccgacagcgacuucuccgugaagcaggacgucguggccaucacggacuggagcggguacagcggcuccuucguccagcaccccgagcucaccggccuggacugcauccgccccugcuucuggguggagcuggugcgggggcucccgcgcgagaacaccaccaucuggacgagcggcuccagcaucuccuucugcggggucgacagcgacaccgccaacugguccuggcccgacggcgccgagcugcccuucaccaucgacaaguga

SEQ ID NO: 85478 - RNA, 1410 nt, Artificial Sequence
  derived and/or modified CDS sequence (opt1) from neuraminidase__InfluenzaA__AEX33872
augaaccccaaccagaagaucaucaccaucggcagcgugucccugaccaucagcacgaucugcuucuucaugcagaucgccauccucaucaccaccgucacccugcacuucaagcaguacgaguucaacuccccgcccaacaaccaggugaugcagugcgagcccacgaucaucgagcgcaacaucaccgagaucguguaccugaccaacaccacgaucgagaaggagaucugccccaagcucgccgaguaccggaacuggagcaagccgcagugcgacaucaccggguucgcgcccuucuccaaggacaacagcauccgccuguccgccggcggggacaucugggucacccgggagcccuacgugagcugcgaccccgacaagugcuaccaguucgcccugggccaggggaccacgcucaacaacgugcacuccaacgacaccguccacgaccgcaccccguaccggacccugcugaugaacgagcucggcgugcccuuccaccugggcacgaagcaggucugcaucgccuggagcuccagcuccugccacgacgggaaggccuggcugcacgugugcgugaccggcgacgacaagaacgcgaccgccagcuucaucuacaacgggcgccucguggacuccaucgucagcugguccaaggagauccugcggacccaggagagcgagugcgugugcaucaacggcacgugcaccguggucaugaccgacggguccgccagcggcaaggccgacaccaagauccuguucaucgaggagggcaagaucgugcacacgagcacccucuccgggagcgcgcagcacguggaggagugcuccugcuacccccgcuaccccggcguccggugcgugugccgcgacaacuggaaggggagcaaccggccgaucguggacaucaacaucaaggacuacuccaucgucagcuccuacgugugcagcggccuggugggcgacacgccccgcaagaacgacuccagcuccagcucccacugccugaaccccaacaacgaggagggcgggcacggggucaagggcugggccuucgacgacgggaacgacguguggaugggccggaccaucagcgagaagcuccgccugggcuacgagaccuucaaggucaucgaggggugguccaaccccaacagcaagcugcagaucaaccgccaggugaucguggaccggggcaaccgguccggguacagcggcaucuucuccgucgagggcaagagcugcaucaaccgcugcuucuacguggagcucauccgggggcgcaaggaggagaccgaggugcuguggaccagcaacuccaucgucguguucugcggcaccagcgggacguacggcaccggguccuggccggacggcgccgacaucaaccugaugcccaucuga

SEQ ID NO: 85479 - RNA, 1410 nt, Artificial Sequence; identical to SEQ ID NO: 78736
  derived and/or modified CDS sequence (opt1) from neuraminidase__InfluenzaA__AEX33883

SEQ ID NO: 85480 - RNA, 1410 nt, Artificial Sequence
  derived and/or modified CDS sequence (opt1) from neuraminidase__InfluenzaA__AEX33894
augaaccccaaccagaagaucaucaccaucggcagcgugucccugaccaucagcacgaucugcuucuucaugcagaucgccauccucaucaccaccgucacccugcacuucaagcaguacgaguucaacuccccgcccaacaaccaggugaugcugugcgagcccacgaucaucgagcgcaacaucaccgagaucguguaccucaccaacaccacgaucgagaaggagaucugccccaagcuggccgaguaccggaacuggagcaagccgcagugcaacaucaccggguucgcgcccuucuccaaggacaacagcauccgccuguccgccggcggggacaucugggucacccgggagcccuacgugagcugcgaccccgacaagugcuaccaguucgcccucggccaggggaccacgcugaacaacgugcacuccaacgacaccguccacgaccgcaccccguaccggacccugcucaugaacgagcugggcgugcccuuccaccugggcacgaagcaggucugcaucgccuggagcuccagcuccugccacgacgggaaggccuggcuccacgugugcgugaccggcgacgacaagaacgcgaccgccagcuucaucuacaacgggcgccugguggacuccaucgucagcugguccaaggagauccugcggacccaggagagcgagugcgugugcaucgacggcacgugcaccguggucaugaccgacggguccgccagcggcaaggccgacaccaagauccucuucaucgaggagggcaagaucgugcacacgagcacccuguccgggagcgcgcagcacguggaggagugcuccugcuacccccgcuaccccggcguccggugcgugugccgcgacaacuggaaggggagcaaccggccgaucguggacaucaacaucaaggacuacuccaucgucagcuccuacgugugcagcggccuggugggcgacacgccccgcaagaacgacuccagcuccagcucccacugccucgaccccaacaacgaggagggcgggcacggggucaagggcugggccuucgacgacgggaacgacguguggaugggccggaccaucagcgagaagcugcgcuccggcuacgagaccuucaaggucaucgagggguggagcaaccccaacuccaagcugcagaucaaccgccaggugaucguggaccggggcaaccggagcggguacuccggcaucuucagcgucgagggcaagagcugcaucaaccgcugcuucuacguggagcucauccgggggcgcaaggaggagaccgaggugcuguggaccuccaacagcaucgucguguucugcggcaccuccgggacguacggcaccgggagcuggccggacggcgccgacaucaaccugaugcccaucuga

SEQ ID NO: 85481 - RNA, 1413 nt, Artificial Sequence
  derived and/or modified CDS sequence (opt1) from neuraminidase__InfluenzaA__AEX33916
augaaccccaaccagaagaucaucaccaucggcagcaucuccaucgccaucgggaucaucagccugauccuccagaucggcaacaucaucuccaucugggccagccacuccauccagaccgggagccagaaccacacgggcaucugcaaccagcgcaucaucaccuacgagaacuccaccugggugaacaacaccuacgucaacaucaacaacacgaacgugguggcggagaaggacaagaccagcgucacccuggccgggaacuccagccugugcuccaucagcggcugggccaucuacaccaaggacaacuccauccggaucggcagcaagggggacguguucgugauccgcgagccguucaucuccugcagccaccucgagugccggacguucuuccugacccagggcgcccugcucaacgacaagcacuccaacgggaccgucaaggaccgcagccccuaccgggcccugauguccugcccccugggcgaggcgcccagcccguacaacagccgcuucgaguccguggccuggagcgccuccgccugccacgacgggaugggcuggcucaccaucggcaucagcgggcccgacaacggcgcgguggccguccugaaguacaacgggaucaucacggagaccaucaaguccuggaagaagcggauccugcgcacccaggagagcgagugcgugugcaugaacggcuccugcuucaccaucaugacggacggccccagcaacggggccgccuccuacaagaucuucaagaucgagaagggcaaggugaccaagaccaucgagcucaacgcccccaacuuccacuacgaggagugcagcugcuacccggacaccgggacggucaugugcgugugccgggacaacuggcacggcuccaaccgccccugggugagcuucaaccagaaccuggacuaccagaccggguacaucugcuccggcgucuucggcgacaacccccggcccaaggacggggagggcagcugcaacccgaugaccguggacggggcggacggcgugaagggguucuccuacaaguacggcaacggcgucuggaucgggcgcaccaagagcaaccggcugcgcaagggcuucgagaugaucugggaccccaacggguggacgaacaccgacuccgacuucagcgugaagcaggacguggucgccaucaccgacugguccggcuacagcgggagcuucgugcagcaccccgagcucaccggccuggacugcauccggcccugcuucuggguggagcugguccgcggccucccgcgggagaacacgaccaucuggaccuccgggagcuccaucagcuucugcggcgugaacuccgggaccgccaacuggagcuggcccgacggcgccgagcugcccuucacgaucgacaaguga

SEQ ID NO: 85482 - RNA, 1413 nt, Artificial Sequence; identical to SEQ ID NO: 79893
  derived and/or modified CDS sequence (opt1) from neuraminidase__InfluenzaA__AEX33927

SEQ ID NO: 85483 - RNA, 1413 nt, Artificial Sequence
  derived and/or modified CDS sequence (opt1) from neuraminidase__InfluenzaA__AEX33938
augaaccccaaccagaagaucaucaccaucggcagcaucuccaucgccaucgggaucaucagccugauccuccagaucggcaacaucaucuccaucugggccagccacuccauccagaccgggagccagaaccacacgggcaucugcaaccagcgcaucaucaccuacgagaacuccaccugggugaacaacaccuacgucaacaucaacaacacgaacgugguggucgagaaggacaagaccagcgugacccuggcggggaacuccagccugugcuccaucagcggcugggccaucuacaccaaggacaacuccauccggaucggcagcaagggggacguguucgucauccgcgagccguucaucuccugcagccaccucgagugccggacguucuuccugacccagggcgcccugcucaacgacaagcacuccaacgggaccgugaaggaccgcagccccuaccgggcccugauguccugcccccugggcgaggcccccagcccguacaacagccgcuucgaguccguggcguggagcgccuccgccugccacgacgggaugggcuggcucaccaucggcaucagcgggcccgacaacggcgccgucgcggugcugaaguacaacgggaucaucacggagaccaucaaguccuggaagaagcggauccugcgcacccaggagagcgagugcgugugcaugaacggcuccugcuucaccaucaugacggacggccccagcaacggggccgccuccuacaagaucuucaagaucgagaagggcaaggucaccaagaccaucgagcucaacgcccccaacuuccacuacgaggagugcagcugcuacccggacaccgggacggugaugugcgugugccgggacaacuggcacggcuccaaccgccccugggucagcuucaaccagaaccuggacuaccagaucggguacaucugcuccggcguguucggcgacaacccccggcccaaggacggggagggcagcugcaacccggugaccgucgacggggccgacggcgugaagggguucuccuacaaguacggcaacggcguguggaucgggcgcaccaagagcaaccggcugcgcaagggcuucgagaugaucugggaccccaacggguggaccaacacggacuccgacuucagcgucaagcaggacgugguggcgaucaccgacugguccggcuacagcgggagcuucguccagcaccccgagcucaccggccuggacugcauccggcccugcuucuggguggagcugguccgcggccucccgcgggagaacaccacgaucuggaccuccgggagcuccaucagcuucugcggcgugaacuccgggaccaccaacuggagcuggcccgacggcgccgagcugcccuucacgaucgacaaguga

SEQ ID NO: 85484 - RNA, 1413 nt, Artificial Sequence
  derived and/or modified CDS sequence (opt1) from neuraminidase__InfluenzaA__AEX33949
augaaccccaaccagaagaucaucaccaucggcagcaucuccaucgccaucgggaucaucagccugauccuccagaucggcaacaucaucuccaucugggccagccacuccauccagaccgggagccagaaccacacgggcaucugcaaccagcgcaucaucaccuacgagaacuccaccugggugaacaacaccuacgucaacaucaacaacacgaacgugguggucgagaaggacaagaccagcgugacccuggcggggaacuccagccugugcuccaucagcggcugggccaucuacaccaaggacaacuccauccggaucggcagcaagggggacguguucgucauccgcgagccguucaucuccugcagccaccucgagugccggacguucuuccugacccagggcgcccugcucaacgacaagcacuccaacgggaccgugaaggaccgcagccccuaccgggcccugauguccugcccccugggcgaggcccccagcccguacaacagccgcuucgaguccguggcguggagcgccuccgccugccacgacgggaugggcuggcucaccaucggcaucagcgggcccgacaacggcgccgucgcggugcugaaguacaacgggaucaucacggagaccgugaaguccuggaagaagcggauccugcgcacccaggagagcgagugcgucugcaugaacggcuccugcuucaccaucaugacggacggccccagcaacggggccgccuccuacaagaucuucaagaucgagaagggcaaggugaccaagaccaucgagcucaacgcccccaacuuccacuacgaggagugcagcugcuacccggacaccgggacggugaugugcgucugccgggacaacuggcacggcuccaaccgccccugggugagcuucaaccagaaccuggacuaccagaucggguacaucugcuccggcguguucggcgacaacccccggcccaaggacggggagggcagcugcaacccggucaccguggacggggccgacggcgugaagggguucuccuacaaguacggcaacggcgucuggaucgggcgcaccaagagcaaccggcugcgcaagggcuucgagaugaucugggaccccaacggguggaccaacacggacuccgacuucagcgugaagcaggacguggucgcgaucaccgacugguccggcuacagcgggagcuucgugcagcaccccgagcucaccggccuggacugcauccggcccugcuucugggucgagcuggugcgcggccucccgcgggagaacaccacgaucuggaccuccgggagcuccaucagcuucugcggcgugaacuccgggaccgccaacuggagcuggcccgacggcgccgagcugcccuucaccaucgacaaguga

SEQ ID NO: 85485 - RNA, 1410 nt, Artificial Sequence
  derived and/or modified CDS sequence (opt1) from neuraminidase__InfluenzaA__AEX33971
augaaccccaaccagaagaucaucaccaucggcagcgugucccugaccaucagcacgaucugcuucuucaugcagaucgccauccucaucaccaccgucacccugcacuucaagcaguacgaguucuccagcccgcccaacaaccaggugaugcugugcgagcccgccaucaucgagcgcaacaucacggagaccguguaccucaccaacaccacgaccgagaaggagaucugccccaagcuggcggaguaccggaacugguccaagccgcagugcgacaucaccggguucgcccccuucagcaaggacaacuccauccgccugagcgccggcggggacaucugggucacccgggagcccuacguguccugcgaccccgacaagugcuaccaguucgcccucggccaggggacgacccugaacaacgugcacagcaacgacaccguccacgaccgcaccccguaccggacgcugcucaugaacgagcugggcgugcccuuccaccugggcaccaagcaggucugcaucgccugguccagcuccagcugccacgacgggaaggcguggcuccacgugugcgugaccggcgacgacaagaacgccaccgccuccuucaucuacaacgggcgccugguggacagcaucgucuccuggagcaaggagauccugcggacgcaggaguccgagugcgugugcaucaacgggaccugcaccguggucaugaccgacgggagcgccagcggcaaggcggacacgaagauccucuucaucgaggagggcaagaucgugcacaccuccacccugagcggguccgcccagcacguggaggagugcagcugcuacccccgcuaccccggcguccggugcgugugccgcgacaacuggaagggguccaaccggccgaucguggacaucaacaucaaggacuacagcaucgucucccgcuacgugugcagcggcaucgugggcgacacgccccggaagaacgacuccagcuccagcucccacugccuggaccccaacaacgaggagggcggccacggggucaagggcugggccuucgacgacgggaacgacguguggaugggccgcaccaucagcgagaagucccggagcggcuacgagaccuucaaggucaucgaggggugguccaaccccaacagcaagcuccagaucaaccgccaggugaucguggaccggggcaaccgcuccggguacagcggcaucuucagcgucgaggggaaguccugcaucaaccggugcuucuacguggagcugauccgcggccggaaggaggagaccgaggugcuguggaccagcaacuccaucgucguguucugcggcacgagcgggaccuacggcaccggguccuggccggacggcgccgacaucaaccucaugcccaucuga

SEQ ID NO: 85486 - RNA, 1410 nt, Artificial Sequence
  derived and/or modified CDS sequence (opt1) from neuraminidase__InfluenzaA__AEX33993
augaaccccaaccagaagaucaucaccaucggcagcgugucccugaccaucagcacgaucugcuucuucaugcagaucgccauccucaucaccaccgucacccugcacuucaagcaguacgaguucaacuccccgcccaacaaccaggugaugcugugcgagcccacgaucaucgagcgcaacaucaccgagaucguguaccucaccaacaccacgaucgagaaggagaucugccccaagcuggccgaguaccggaacuggagcaagccgcagugcgacaucaccggguucgcgcccuucuccaaggacaacagcauccgccuguccgccggcggggacaucugggucacccgggagcccuacgugagcugcgaccccgacaagugcuaccaguucgcccucggccaggggaccacgcugaacaacgugcacuccaacgacaccguccgcgaccggaccccguaccgcacccugcucaugaacgagcugggcgugcccuuccaccugggcacgaagcaggucugcaucgccuggagcuccagcuccugccacgacgggaaggccuggcuccacgugugcaucaccggcgacgacaagaacgcgaccgccagcuucaucuacaacgggcggcugguggacuccaucgugagcugguccaaggagauccugcgcacccaggagagcgagugcgucugcaucaacggcacgugcaccguggugaugaccgacggguccgccagcggcgaggccgacaccaagauccucuucaucgaggagggcaagaucguccacacgagcacccuguccgggagcgcgcagcacguggaggagugcuccugcuacccccgguaccccggcgugcgcugcgucugccgggacaacuggaaggggagcaaccgcccgaucguggacaucaacaucaaggaccacuccaucgugagcuccuacgucugcagcggccuggugggcgacacgccccggaagaacgacuccagcuccagcucccacugccucgaccccaacaacgaggagggcgggcacggggugaagggcugggccuucgacgacgggaacgacgucuggaugggccgcaccaucagcgagaagucccggcugggcuacgagaccuucaaggugaucgagggguggagcaaccccaaguccaagcugcagaucaaccgccaggucaucguggaccggggcaaccgcagcggguacuccggcaucuucagcguggagggcaagagcugcaucaaccggugcuucuacgucgagcucauccgcgggcggaaggaggagaccgaggugcuguggaccuccaacagcaucguggucuucugcggcaccuccgggacguacggcaccgggagcuggccggacggcgccgacaucaaccugaugcccguguga

SEQ ID NO: 85487 - RNA, 1410 nt, Artificial Sequence; identical to SEQ ID NO: 80536
  derived and/or modified CDS sequence (opt1) from neuraminidase__InfluenzaA__AEX34026

SEQ ID NO: 85488 - RNA, 1410 nt, Artificial Sequence
  derived and/or modified CDS sequence (opt1) from neuraminidase__InfluenzaA__AEX34036
augaaccccaaccagaagaucaucaccaucggcagcgugucccugaccaucagcacgaucugcuucuucaugcagaucgccauccucaucaccaccgucacccugcacuucaagcaguacgaguucuccagcccgcccaacaaccaggugaugcugugcgagcccacgaucaucgagcgcaacaucaccgagaucguguaccucaccaacaccacgaucgagaaggagaucugccccaagcuggccgaguaccggaacugguccaagccgcagugcgacaucaccggguucgcgcccuucagcaaggacaacuccauccgccugagcgccggcggggacaucugggucacccgggagcccuacguguccugcgaccccgacaagugcuaccaguucgcccucggccaggggaccacgcugaacaacgugcacagcaacgacaccguccacggccgcaccccguaccggacccugcucaugaacgagcugggcgugcccuuccaccuggggacgaagcaggucugcaucgccugguccagcuccagcugccacgacggcaaggccuggcuccacgugugcgugaccggggacgacaagaacgcgaccgccuccuucaucuacaacggccgccugguggacagcaucgucuccuggagcaaggagauccugcggacccaggaguccgagugcgugugcaucaacgggacgugcgccguggucaugaccgacggcagcgccagcggcaaggcggacaccaagauccucuucaucgaggaggggaagaucgugcacaccuccacgcugagcggcuccgcccagcacguggaggagugcagcugcuacccccgcuaccccgggguccggugcgugugccgcgacaacuggaagggcuccaaccggccgaucguggacaucaacaucaaggacuacagcaucgucucccgcuacgugugcagcggccuggugggggacacgccccggaagaacgacuccagcuccagcucccacugccucgaccccaacaacgaggagggcgggcacggcgucaaggggugggccuucgacgacggcgacgacguguggaugggccgcaccaucagcgagaagucccggagcggguacgagaccuucaaggucaucgagggcugguccaaccccaacagcaagcugcagaucaaccgccaggugaucguggaccgggggaaccgcuccggcuacagcgggaucuucagcgucgagggcaaguccugcaucaaccggugcuucuacguggagcugauccgcggccggaaggaggagaccgaggugcucuggaccagcaacuccaucgucguguucugcgggaccagcggcaccuacgggacgggcuccuggccggacggggccgacaucaaccugaugcccaucuga

SEQ ID NO: 85489 - RNA, 1410 nt, Artificial Sequence
  derived and/or modified CDS sequence (opt1) from neuraminidase__InfluenzaA__AEX34058
augaaccccaaccagaagaucaucaccaucggcagcgugucccugaccaucagcacgaucugcuucuucaugcagaucgccauccucaucaccaccgucacccugcacuucaagcaguacgaguucuccagcccgcccaacaaccaggugaugcugugcgagcccgccaucaucgagcgcaacaucacggagaucguguaccucaccaacaccaccaucgagaaggagaucugccccaagcugacggaguaccggaacugguccaagccgcagugcgacaucaccggguucgcgcccuucagcaaggacaacuccauccgccugagcgccggcggggacaucugggucacccgggagcccuacguguccugcgaccccgacaagugcuaccaguucgcccucggccaggggaccacgcugaacaacgugcacagcaacgacaccguccacgaccgcaccccguaccggacccugcucaugaacgagcugggcgugcccuuccaccugggcacgaagcaggucugcaucgccugguccagcuccagcugccacgacgggaaggccuggcuccacgugugcgugaccggcgacgacaagaacgcgaccgccuccuucaucuacaacgggcgccugguggacagcaucgucuccuggagcaaggagauccugcggacccaggaguccgagugcgugugcaucaacggcacgugcaccguggucaugaccgacgggagcgccagcggcaaggccgacaccaagauccucuucaucgaggagggcaagaucgugcacacguccacccugagcggguccgcgcagcacguggaggagugcagcugcuacccccgcuaccccggcguccggugcgugugccgcgacaacuggaagggguccaaccggccgaucguggacaucaacaucaaggacuacagcaucgucucccgcuacgugugcagcggccuggugggcgacacgccccggaagaacgacuccagcuccagcucccacugccucgaccccaacaacgaggagggcgggcacggggucaagggcugggccuucgacgacgggaacgacguguggaugggccgcaccaucagcgagaagucccggagcggcuacgagaccuucaaggucaucgaggggugguccaaccccaacagcaagcugcagaucaaccgccaggugaucguggaccggggcaaccgcuccggguacagcggcaucuucagcgucgaggggaaguccugcaucaaccggugcuucuacguggagcugauccgcggccggaaggaggagaccgaggugcucuggaccagcaacuccaucgucguguucugcggcaccagcgggacguacggcaccggguccuggccggacggcgccgacaucaaccugaugcccaucuga

SEQ ID NO: 85490 - RNA, 1410 nt, Artificial Sequence
  derived and/or modified CDS sequence (opt1) from neuraminidase__InfluenzaA__AEX34103
augaaccccaaccagaagaucaucaccaucggcagcgugucccugaccaucagcacgaucugcuucuucaugcagaucgccauccucaucaccaccgucacccugcacuucaagcaguacgaguucuccagcccgcccaacaaccaggugaugcugugcgagcccacgaucaucgagcgcaacaucaccgagaucguguaccucaccaacaccacgaucgagaaggaggucugccccaagcuggccgaguaccggaacugguccaagccgcagugcgacaucaccggguucgcgcccuucagcaaggacaacuccauccgccugagcgccggcggggacaucugggugacccgggagcccuacguguccugcgaccccgacaagugcuaccaguucgcccucggccaggggaccacgcugaacaacguccacagcaacgacaccgugcacgaccgcaccccguaccggacccugcucaugaacgagcugggcgugcccuuccaccugggcacgaagcaggucugcaucgccugguccagcuccagcugccacgacgggaaggccuggcuccacgugugcgugaccggcgacgacaagaacgcgaccgccuccuucaucuacaacgggcgccuggucgacagcaucguguccuggagcaaggagauccugcggacccaggaguccgagugcgugugcaucaacggcacgugcaccgucgugaugaccgacgggagcgccagcggcaaggccgacaccaagauccucuucaucgaggagggcaagaucgugcacacguccacccugagcgggaacgcgcagcacgucgaggagugcuccugcuacccccgcuaccccggcgugcggugcgugugccgcgacaacuggaaggggagcaaccggccgaucgucgacaucaacaucaaggacuacuccaucgugagccgcuacgugugcuccggccuggucggcgacacgccccggaagaacgacagcuccagcuccagccacugccucgaccccaacaacgaggagggcgggcacggggugaagggcugggccuucgacgacgggaacgacgucuggaugggccgcaccaucuccgagaagucccggagcggcuacgagaccuucaaggugaucgagggguggagcaaccccaacuccaagcugcagaucaaccgccaggugaucgucgaccggggcaaccgcagcggguacuccggcaucuucagcguggagggcaagagcugcaucaaccggugcuucuacguggagcugauccgcgggcggaaggaggagaccaagguccucuggaccuccaacagcaucgugguguucugcggcaccuccgggacguacggcaccgggagcuggccggacggcgccgacaucaaccugaugcccaucuga

SEQ ID NO: 85491 - RNA, 1410 nt, Artificial Sequence
  derived and/or modified CDS sequence (opt1) from neuraminidase__InfluenzaA__AEX34114
augaaccccaaccagaagaucaucaccaucggcagcgugucccugaccaucagcacgaucugcuucuucaugcagaucgccauccucaucaccaccgucacccugcacuucaagcaguacgaguucuccagcccgcccaacaaccaggugaugcugugcgagcccgccaucaucgagcgcaacaucacggagaucguguaccccaccaacaccaccaucgagaaggagaucugcccgaagcucgcggaguaccggaacugguccaagccccagugcgacaucacgggguucgcccccuucagcaaggacaacuccauccgccugagcgccggcggggacaucugggucacccgggagcccuacguguccugcgacccggacaagugcuaccaguucgcccugggccaggggaccacccucaacaacgugcacagcaacgacacgguccacgaccgcacccccuaccggacccugcugaugaacgagcucggcgugcccuuccaccugggcaccaagcaggucugcaucgccugguccagcuccagcugccacgacgggaaggcguggcugcacgugugcgugacgggcgacgacaagaacgccaccgccuccuucaucuacaacgggcgccucguggacagcaucgucuccuggagcaaggagauccugcggacccaggaguccgagugcgugugcaucaacgggaccugcacgguggucaugaccgacgggagcgccagcggcaaggcggacaccaagauccuguucaucgaggagggcaagaucgugcacaccuccacgcucagcggguccgcccagcacguggaggagugcagcugcuacccccgcuacccgggcguccggugcgugugccgcgacaacuggaagggguccaaccggcccaucguggacaucaacaucaaggacuacagcaucgucucccgcuacgugugcagcggccuggugggcgacacgccccggaagaacgacuccagcuccagcucccacugccuggaccccaacaacgaggagggcggccacggggucaagggcugggccuucgacgacgggaacgacguguggaugggccgcaccaucagcgagaagucccggagcggcuacgagaccuucaaggucaucgaggggugguccaacccgaacagcaagcuccagaucaaccgccaggugaucguggaccggggcaaccgcuccggguacagcggcaucuucagcgucgaggggaaguccugcaucaaccggugcuucuacguggagcugauccgcggccggaaggaggagaccgaggugcuguggaccagcaacuccaucgucguguucugcggcaccagcgggaccuacggcacgggguccuggcccgacggcgccgacaucaaccucaugcccaucuga

SEQ ID NO: 85492 - RNA, 1410 nt, Artificial Sequence
  derived and/or modified CDS sequence (opt1) from neuraminidase__InfluenzaA__AEX34137
augaaccccaaccagaagaucaucaccaucggcagcgugucccugaccaucagcacgaucugcuucuucaugcagaucgccauccucaucaccaccgucacccugcacuucaagcaguacgaguucaacuccccgcccaacaaccaggugaugcugugcgagcccacgaucaucgagcgcaacaucaccgagaucguguaccucaccaacaccacgaucgagaaggagaucugccccaagcuggccgaguaccggaacuggagcaagccgcagugcgacaucaccggguucgcgcccuucuccaaggacaacagcauccgccuguccgccggcggggacaucugggucacccgggagcccuacgugagcugcgaccccgacaagugcuaccaguucgcccucggccaggggaccacgcugaacaacgugcacuccaacgacaccguccgcggccggaccccguaccgcacccugcucaugaacgagcugggcgugcccuuccaccuggggacgaagcaggucugcaucgccuggagcuccagcuccugccacgacggcaaggccuggcuccacgugugcaucaccggggacgacaagaacgcgaccgccagcuucaucuacaacggccggcugguggacuccaucgugagcugguccaaggagauccugcgcacccaggagagcgagugcgucugcaucaacgggacgugcaccguggugaugaccgacggcuccgccagcggcaaggccgacaccaagauccucuucaucgaggaggggaagaucguccacacgagcacccuguccggcagcgcgcagcacguggaggagugcuccugcuacccccgguaccccggggugcgcugcgucugccgggacaacuggaagggcagcaaccgcccgaucguggacaucaacaucaaggaccacuccaucgugagcuccuacgucugcagcggccuggugggggacacgccccggaagaacgacuccagcuccagcucccacugccucgaccccaacaacgaggagggcgggcacggcgugaaggggugggccuucgacgacggcaacgacgucuggaugggccgcaccaucagcgagaagucccggcugggguacgagaccuucaaggugaucgagggcuggagcaaccccaaguccaagcugcagaucaaccgccaggucaucguggaccgggggaaccgcagcggcuacuccgggaucuucagcguggagggcaagagcugcaucaaccggugcuucuacgucgagcucauccgcggccggaaggaggagaccgaggugcuguggaccuccaacagcaucguggucuucugcgggaccuccggcacguacgggaccggcagcuggccggacggggccgacaucaaccugaugcccaucuga

SEQ ID NO: 85493 - RNA, 1410 nt, Artificial Sequence
  derived and/or modified CDS sequence (opt1) from neuraminidase__InfluenzaA__AEX34191
augaaccccaaccagaagaucaucaccaucggcagcgugucccugagcaucuccaccaucugcuucuucaugcagaucgccauccucaucacgaccgucacccugcacuucaagcaguacgaguucaacagcuccccgaacaaccaggugaugcugugcgagcccaccaucaucgagcgcaacaucacggagaucguguaccucaccaacaccaccaucgagaaggagaucugccccaagcuggccgaguaccggaacuggagcaagccccagugcgacaucacgggguucgcgccguucuccaaggacaacagcauccgccuguccgccggcggggacaucugggucacccgggagcccuacgugagcugcgaccccgacaagugcuaccaguucgcccucggccaggggaccacccugaacaacgugcacuccaacaacacgguccgcgaccggacccccuaccgcacccugcucaugaacgagcugggcgugccguuccaccugggcaccaagcaggucugcaucgccuggagcuccagcuccugccacgacgggaaggccuggcuccacgugugcaucacgggcgacgacaagaacgcgaccgccagcuucaucuacaacgggcggcugguggacuccaucgugagcugguccaaggagauccugcgcacccaggagagcgagugcgucugcaucaacgggaccugcacgguggugaugaccgacgggagcgccuccggcaaggccgacaccaagauccucuucaucgaggagggcaagaucguccacaccagcacgcuguccgggagcgcgcagcacguggaggagugcuccugcuacccccgguaccccggcgugcgcugcgucugccgggacaacuggaaggggagcaaccgccccaucguggacaucaacaucaaggaccacuccaucgugagcuccuacgucugcagcggccuggugggcgacaccccgcggaagaacgacuccagcuccagcucccacugccucgaccccaacaacgaggagggcggccacggggugaagggcugggccuucgacgacgggaacgacgucuggaugggccgcaccaucagcgagaagucccggcugggcuacgagaccuucaaggugaucgagggguggagcaaccccaaguccaagcugcagaucaaccgccaggucaucguggaccggggcaaccgcagcggguacagcggcaucuucuccguggagggcaagagcugcaucaaccggugcuucuacgucgagcucauccgcgggcggaaggaggagacggaggugcuguggaccuccaacagcaucguggucuucugcggcaccuccgggaccuacggcacggggagcuggcccgacggcgccgacaucaaccugaugccgaucuga

SEQ ID NO: 85494 - RNA, 1410 nt, Artificial Sequence
  derived and/or modified CDS sequence (opt1) from neuraminidase__InfluenzaA__AEX34224
augaaccccaaccagaagaucaucaccaucggcagcgugucccugaccaucagcacgaucugcuucuucaugcagaucgccauccucaucaccaccgucacccugcacuucaagcaguacgaguucuccagcccgcccaacaaccaggugaugcugugcgagcccacgaucaucgagcgcaacaucaccgagaucguguaccucaccaacaccacgaucgagaaggagaucugccccaagcuggccgaguaccggaacugguccaagccgcagugcgacaucaccggguucgcgcccuucagcaaggacaacuccauccgccugagcgccggcggggacaucugggucacccgggagcccuacguguccugcgaccccgacaagugcuaccaguucgcccucggccaggggaccacgcugaacaacgugcacagcaacgacaccguccacggccgcaccccguaccggacccugcucaugaacgagcugggcgugcccuuccaccuggggacgaagcaggucugcaucgccugguccagcuccagcugccacgacggcaaggccuggcuccacgugugcgugaccggggacgacaagaacgcgaccgccuccuucaucuacaacggccgccugguggacagcaucgucuccuggagcaaggagauccugcggacccaggaguccgagugcgugugcaucaacgggacgugcaccguggucaugaccgacggcagcgccagcggcaaggccgacaccaagauccucuucaucgaggaggggaagaucgugcacacguccacccugagcggcuccgcgcagcacguggaggagugcagcugcuacccccgcuaccccgggguccggugcgugugccgcgacaacuggaagggcuccaaccggccgaucguggacaucaacaucaaggacuacagcaucgucucccgcuacgugugcagcggccuggugggggacacgccccggaagaacgacuccagcuccagcucccacugccucgaccccaacaacgaggagggcgggcacggcgucaaggggugggccuucgacgacggcaacgacguguggaugggccgcaccaucagcgagaagcugcgguccggguacgagaccuucaaggucaucgagggcuggagcaaccccaacuccaagcugcagaucaaccgccaggugaucguggaccgggggaaccgcagcggcuacuccgggaucuucagcgucgagggcaagagcugcaucaaccggugcuucuacguggagcucauccgcggccggaaggaggagaccgaggugcuguggaccuccaacagcaucgucguguucugcgggaccuccggcacguacgggaccggcagcuggccggacggggccgacaucaaccugaugcccaucuga

SEQ ID NO: 85495 - RNA, 1410 nt, Artificial Sequence
  derived and/or modified CDS sequence (opt1) from neuraminidase__InfluenzaA__AEX34235
augaaccccaaccagaagaucaucaccaucggcagcgugucccugaccaucagcacgaucugcuucuucaugcagaucgccauccucaucaccaccgucacccugcacuucaagcaguacgaguucuccagcccgcccaacaaccaggugaugcugugcgagcccgccaucaucgagcgcaacaucacggagaucguguaccucaccaacaccaccaucgagaaggagaucugccccaagcuggcggaguaccggaacugguccaagccgcagugcgacaucacgggguucgcccccuucagcaaggacaacuccauccgccugagcgccggcggggacaucugggucacccgggagcccuacguguccugcgaccccgacaagugcuaccaguucgcccucggccaggggaccacccugaacaacgugcacagcaacgacacgguccacgaccgcaccccguaccggacccugcucaugaacgagcugggcgugcccuuccaccugggcaccaagcaggucugcaucgccugguccagcuccagcugccacgacgggaaggcguggcuccacgugugcgugacgggcgacgacaagaacgccaccgccuccuucaucuacaacgggcgccugguggacagcaucgucuccuggagcaaggagauccugcggacccaggaguccgagugcgugugcaucaacgggaccugcacgguggucaugaccgacgggagcgccagcggcaaggcggacaccaagauccucuucaucgaggagggcaagaucgugcacaccuccacgcugagcggguccgcccagcacguggaggagugcagcugcuacccccgcuaccccggcguccggugcgugugccgcgacaacuggaagggguccaaccggccgaucguggacaucaacaucaaggacuacagcaucgucucccgcuacgugugcagcggccuggugggcgacacgccccggaaguccgacagcuccagcuccagccacugccucgaccccaacaacgaggagggcggccacggggucaagggcugggccuucgacgacgggaacgacguguggaugggccgcaccaucuccgagaagucccggagcggcuacgagaccuucaaggucaucgagggguggagcaaccccaacuccaagcugcagaucaaccgccaggugaucguggaccggggcaaccgcagcggguacagcggcaucuucuccgucgagggcaagagcugcaucaaccggugcuucuacguggagcugauccgcgggcggaaggaggagaccgaggugcucuggaccuccaacagcaucgucguguucugcggcaccuccgggaccuacggcacggggagcuggccggacggcgccgacaucaaccugaugcccaucuga

SEQ ID NO: 85496 - RNA, 1410 nt, Artificial Sequence
  derived and/or modified CDS sequence (opt1) from neuraminidase__InfluenzaA__AEX34246
augaaccccaaccagaagaucaucaccaucggcagcgugucccugaccaucagcacgaucugcuucuucaugcagaucgccauccucaucaccaccgucacccugcacuucaagcaguacgaguucaacuccccgcccaacaaccaggugaugcugugcgagcccacgaucaucgagcgcaacaucaccgagaucguguaccucaccaacaccacgaucgagaaggagaucugccccaagcuggccgaguaccggaacuggagcaagccgcagugcgacaucaccggguucgcgcccuucuccaaggacaacagcauccgccuguccgccggcggggacaucugggucacccgggagcccuacgugagcugcgaccccgacaagugcuaccaguucgcccucggccaggggaccacgcugaacaacgugcacuccaacgacaccguccgcggccggaccccguaccgcacccugcucaugaacgagcugggcgugcccuuccaccuggggacgaagcaggucugcaucgccuggagcuccagcuccugccacgacggcaaggccuggcuccacgugugcaucaccggggacgacaagaacgcgaccgccagcuucaucuacaacggccggcugguggacuccaucgugagcugguccaaggagauccugcgcacccaggagagcgagugcgucugcaucaacgggacgugcaccguggugaugaccgacggcuccgccagcggcaaggccgacaccaagauccucuucaucgaggaggggaagaucguccacacgagcacccuguccggcagcgcgcagcacguggaggagugcuccugcuacccccgguaccccggggugcgcugcgucugccgggacaacuggaagggcagcaaccgcccgaucguggacaucaacaucaaggaccacuccaucgugagcuccuacgucugcagcggccuggugggggacacgccccggaagaacgacuccagcuccagcucccacugccucgaccccaacaacgaggagggcgggcacggcgugaaggggugggccuucgacgacggcaacgacgucuggaugggccgcaccaucagcgagaagucccggcugggguacgagaccuucaaggugaucgagggcuggagcaaccccaaguccaagcugcaggucaaccgccaggugaucguggaccgggggaaccgcagcggcuacuccgggaucuucagcgucgagggcaagagcugcaucaaccggugcuucuacguggagcucauccgcggccggaaggaggagaccgaggugcuguggaccuccaacagcaucgucguguucugcgggaccuccggcacguacgggaccggcagcuggccggacggggccgacaucaaccugaugcccaucuga

SEQ ID NO: 85497 - RNA, 1410 nt, Artificial Sequence
  derived and/or modified CDS sequence (opt1) from neuraminidase__InfluenzaA__AEX34257
augaaccccaaccagaagaucaucaccaucggcagcgugucccugaccaucagcacgaucugcuucuucaugcagaucgccauccucaucaccaccgucacccugcacuucaagcaguacgaguucaacuccagcccgaacaaccaggugaugcugugcgagcccacgaucaucgagcgcaacaucaccgagaucguguaccucaccaacaccacgaucgagaaggagaucugccccaagcuggccgaguaccggaacugguccaagccccagugcgacaucaccggguucgcgccguucagcaaggacaacuccauccgccugagcgccggcggggacaucugggucacccgggagcccuacguguccugcgaccccgacaagugcuaccaguucgcccucggccaggggaccacgcugaacaacgugcacagcaacaacaccguccgcaaccggacccccuaccgcacccugcucaugaacgagcugggcgugccguuccaccugggcacgaagcaggucugcaucgccugguccagcuccagcugccacgacgggaaggccuggcuccacgugugcaucaccggcgacgacaagaacgcgaccgccuccuucaucuacaacgggcggcugguggacagcaucguguccuggagcaaggagauccugcgcacccaggaguccgagugcgucugcaucaacggcacgugcaccguggugaugaccgacgggagcgccagcggcaaggccgacaccaagauccucuucaucgaggagggcaagaucguccacacguccacccugagcggguccgcgcagcacguggaggagugcagcugcuacccccgguaccccggcgugcgcugcgucugccgggacaacuggaagggguccaaccgccccaucguggacaucaacaucaaggaccacagcaucguguccagcuacgucugcuccggccuggugggcgacaccccgcggaagaacgacagcuccagcuccagccacugccucgaccccaacaacgaggagggcgggcacggggugaagggcugggccuucgacgacgggaacgacgucuggaugggccgcaccaucuccgagaagucccggcugggcuacgagacguucaaggugaucgagggguggagcaaccccaagagcaagcugcagaucaaccgccaggucaucguggaccggggcaaccgcuccggguacagcggcaucuucagcguggaggggaaguccugcaucaaccggugcuucuacgucgagcucauccgcggccggaaggaggagaccgaggugcuguggaccagcaacuccaucguggucuucugcggcaccagcgggacguacggcaccggguccuggcccgacggcgccgacaucaaccugaugccgaucuga

SEQ ID NO: 85498 - RNA, 1410 nt, Artificial Sequence
  derived and/or modified CDS sequence (opt1) from neuraminidase__InfluenzaA__AEX34268
augaaccccaacaagaagaucaucaccaucggcagcgugucccugaccaucagcacgaucugcuucuucaugcagaucgccauccucaucaccaccgucacccugcacuucaagcaguacgaguucaacuccccgcccaacaaccaggugaugcugugcgagcccacgaucaucgagcgcaacaucaccgagaucguguaccucaccaacaccacgaucgagaaggagaucugccccaagcuggccgaguaccggaacuggagcaagccgcagugcgacaucaccggguucgcgcccuucuccaaggacaacagcauccgccuguccgccggcggggacaucugggucacccgggagcccuacgugagcugcgaccccgacaagugcuaccaguucgcccucggccaggggaccacgcugaacaacgugcacuccaacgacaccguccgcaaccggaccccguaccgcacccugcucaugaacgagcugggcgugcccuuccaccugggcacgaagcaggucugcaucgccuggagcuccagcuccugccacgacgggaaggccuggcuccacgugugcaucaccggcgacgacaagaacgcgaccgccagcuucaucuacaacgggcggcugguggacuccaucgugagcugguccaaggagauccugcgcacccaggagagcgagugcgucugcaucaacggcacgugcaccguggugaugaccgacggguccgccagcggcaaggccgacaccaagauccucuucaucgaggagggcaagaucguccacacgagcaagcuguccgggagcgcgcagcacguggaggagugcuccugcuacccccgguaccccggcgugcgcugcgucugccgggacaacuggaaggggagcaaccgcccgaucguggacaucaacaucaaggaccacuccaucgugagcuccuacgucugcagcggccuggugggcgacacgccccggaagaacgacuccagcuccagcucccacugccucgaccccaacaacgaggagggcgggcacggggugaagggcugggccuucgacgacgggaacgacgucuggaugggccgcaccaucagcgagaagucccggcugggcuacgagaccuucaaggugaucgagggguggagcaaccccaaguccaagcugcagaucaaccgccaggucaucguggaccggggcaaccgcagcggguacuccggcaucuucagcguggagggcaagagcugcaucaaccggugcuucuacgucgagcucauccgcgggcggaaggaggagaccgaggugcuguggaccuccaacagcaucguggucuucugcggcaccuccgggaccuacggcacggggagcuggccggacggcgccgacaucaaccugaugcccaucuga

SEQ ID NO: 85499 - RNA, 1410 nt, Artificial Sequence
  derived and/or modified CDS sequence (opt1) from neuraminidase__InfluenzaA__AEX34278
augaaccccaaccagaagaucaucaccaucggcagcgugucccugaccaucagcacgaucugcuucuucaugcagaucgccauccucaucaccaccgucacccugcacuucaagcaguacgaguucuccagcccgcccaacaaccaggugaugcugugcgagcccgccaucaucgagcgcaacaucacggagaucguguaccucaccaacaccaccaucgagaaggagaucugccccaagcuggcggaguaccggaacugguccaagccgcagugcgacaucacgggguucgcccccuucagcaaggacaacuccauccgccugagcgccggcggggacaucugggucacccgggagcccuacguguccugcgaccccgacaagugcuaccaguucgcccucggccaggggaccacccugaacaacgugcacagcaacgacacgguccacgaccgcaccccguaccggacccugcucaugaacgagcugggcgugcccuuccaccugggcaccaagcaggucugcaucgccugguccagcuccagcugccacgacgggaaggcguggcuccacgugugcgugacgggcgacgacaagaacgccaccgccuccuucaucuacaacgggcgccugguggacagcaucgucuccuggagcaaggagauccugcggacccaggaguccgagugcgugugcaucaacgggaccugcacgguggucaugaccgacgggagcgccagcggcaaggcggacaccaagauccucuucaucgaggagggcaagaucgugcacaccuccacgcugagcggguccgcccagcacguggaggagugcagcugcuacccccgcuaccccggcguccggugcgugugccgcgacaacuggaagggguccaaccggccgaucguggacaucaacaucaaggacuacagcaucgucucccgcuacgugugcagcggccuggugggcgacacgccccggaagaacgacuccagcuccagcucccacugccucgaccccaacaacgagaagggcggccacggggucaagggcugggccuucgacgacgggaacgacguguggaugggccgcaccaucagcgagaagucccggagcggcuacgagaccuucaaggucaucgaggggugguccaaccccaacagcaagcugcagaucaaccgccaggugaucguggaccggggcaaccgcuccggguacagcggcaucuucagcgucgaggggaaguccugcaucaaccggugcuucuacguggagcugauccgcggccggaaggaggagaccgaggugcucuggaccagcaacuccaucgucguguucugcggcaccagcgggaccuacggcacgggguccuggccggacggcgccgacaucaaccugaugcccaucuga

SEQ ID NO: 85500 - RNA, 1413 nt, Artificial Sequence
  derived and/or modified CDS sequence (opt1) from neuraminidase__InfluenzaA__AEX34310
augaaccccaaccagaagaucaucaccaucggcagcaucuccaucgccaucgggaucaucagccugaugcuccagaucggcaacaucaucuccaucugggccagccacuccauccagaccgggacgcagaaccacaccggcaucugcaaccagcgcaucaucaccuacgagaacagcaccugggugaaccacacguacgucaacaucaacaacaccaacgugguggcggggaaggacaagaccccggucacccuggugggcaacuccagccugugcuccaucagcggcugggccaucuacacgaaggacaacuccauccggaucgggagcaagggcgacguguucgucauccgcgagcccuucaucuccugcagccaccucgagugcaagaccuucuuccugacccagggggcccugcucaacgacaagcacuccaacggcaccgugaaggaccggagccccuaccgcgcccugauguccugcccccugggggaggccccgagccccuacaacuccaaguucgagagcguggcguggagcgccuccgccugccacgacggcaucggcuggcucacgaucgggaucagcggccccgacaacggggccgucgcggugcugaaguacaagggcaucaucaccggcaccaucaaguccuggaagaagcagauccugcggacccaggagagcgagugcgugugcaugaacggguccugcuucacgaucaugaccgacggccccagcaacggggccgccuccuacaagaucuucaagaucgagaagggcaaggucaccaagagcauggagcucaacgccccgaacuuccacuacgaggagugcuccugcuaccccgacaccgggacggugaugugcgugugccgcgacaacuggcacggcagcaaccggcccugggucuccuucaaccagaaccuggacuaccagaucggcuacaucugcagcgggguguucggcgacaacccccgcccgaaggaccgggagggguccugcaaccccgugaccgucgacggcgccaacggggugaagggcuucagcuacaaguacggcaacgggguguggaucggccgcaccaaguccaaccggauccgcaagggguucgagaugaucugggaccccaacggcuggaccaacacggacagcgacuucuccgucaagcaggacaucguggcgaucaccgacuggagcggguacuccggcagcuucgugcagcaccccgagcugaccggccucgacugcauccggccgugcuucugggucgagcuggugcgcgggcugcccggcgagaacaccacgaucuggaccagcggguccagcaucuccuucugcggcgucaacggcgacaucgccaacuggagcuggcccgacggggccgagcuccccuucaccaucgacaaguga

SEQ ID NO: 85501 - RNA, 1413 nt, Artificial Sequence
  derived and/or modified CDS sequence (opt1) from neuraminidase__InfluenzaA__AEX34321
augaaccccaaccagaagaucaucaccaucggcagcaucuccaucgccaucgggaucaucagccugaugcuccagaucggcaacaucaucuccaucugggugagccacuccauccagaccgggagccagaacaacacgggcaucugcaaccagcgcaucaucaccuacgagaacuccaccugggucaaccacaccuacgugaacaucaacaacacgaacguggucgccggggaggacaagaccagcgugacccuggcgggcaacuccagccugugcuccaucagcggcugggccaucuacaccaaggacaacuccauccggaucgggagcaagggcgacguguucgucauccgcgagccguucaucuccugcagccaccucgagugccggacguucuuccugacccagggggcccugcucaacgacaagcacuccaacggcaccgugaaggaccgcagccccuaccgggcccugauguccugcccccugggggaggcccccagcccguacaacagcaaguucgaguccguggcguggagcgccuccgccugccacgacggcaugggcuggcucaccaucgggaucagcggccccgacaacggggccgucgcggugcugaaguacaacggcaucaucacgggcaccaucaaguccuggaagaagcagauccugcgcacccaggagagcgagugcgugugcaugaacggguccugcuucaccaucaugacggacggccccagcaacaaggccgccuccuacaagaucuucaagaucgagaaggggaaggucaccaagagcaucgagcucaacgcccccaacuucuacuacgaggagugcuccugcuacccggacaccggcaucgugaugugcgugugccgggacaacuggcacgggagcaaccgccccugggucuccuucaaccagaaccuggacuaccagaucggcuacaucugcagcggcguguucggggacaacccccggcccgaggacggcgagggguccugcaacccggugaccgucgacggcgccaacggggugaagggcuucagcuacaaguacggcaacgggguguggaucggccgcacgaaguccaaccggcugcgcaagggguucgagaugaucugggaccccaacggcuggaccaacaccgacagcgacuucuccgucaagcaggacgugguggcgaucaccgacuggagcggguacagcggcuccuucguccagcaccccgagcucacgggccuggacugcauccggcccugcuucuggguggagcugguccgcgggcucccgcgggagaacaccaccaucuggaccagcggcuccagcaucuccuucugcggggugaacagcgacacggccaacugguccuggcccgacggcgccgagcugcccuucaccaucgacaaguga

SEQ ID NO: 85502 - RNA, 1410 nt, Artificial Sequence; identical to SEQ ID NO: 80081
  derived and/or modified CDS sequence (opt1) from neuraminidase__InfluenzaA__AEX34356

SEQ ID NO: 85503 - RNA, 1410 nt, Artificial Sequence
  derived and/or modified CDS sequence (opt1) from neuraminidase__InfluenzaA__AEX34367
augaaccccaaccagaagaucaucaccaucggcagcgugucccugaccaucagcacgaucugcuucuucaugcagaucgccauccucaucaccaccgucacccugcacuucaagcaguacgaguucaacuccccgcccaacaaccaggugaugcugugcgagcccacgaucaucgagcgcaacaucaccgagaucguguaccucaccaacaccacgaucgagaaggagaucugccccaagcuggccgaguaccggaacuggagcaagccgcagugcgacaucaccggguucgcgcccuucuccaaggacaacagcauccgccuguccgccggcggggacaucugggucacccgggagcccuacgugagcugcgaccccgacaagugcuaccaguucgcccucggccaggggaccacgcugaacaacgugcacuccaacgacaccguccgcgaccggaccccguaccgcacccugcucaugaacgagcugggcgugcccuuccaccugggcacgaagcaggucugcaucgccuggagcuccagcuccugccacgacgggaaggccuggcuccacgugugcaucaccggcgacgacaagaacgcgaccgccagcuucaucuacaacgggcggcugguggacuccaucgugagcugguccaaggagauccugcgcacccaggagagcgagugcgucugcaucaacggcacgugcaccguggugaugaccgacggguccgccagcggcaaggccgacaccaagauccucuucaucgaggagggcaagaucguccacacgagcacccuguccgggagcgcgaagcacguggaggagugcuccugcuacccccggcaccccggcgugcgcugcgucugccgggacaacuggaaggggagcaaccgcccgaucguggacaucaacaucaaggaccacuccaucgugagcuccuacgucugcagcggccuggugggcgacacgccccggaagaacgacuccagcuccagcucccacugccucgaccccaacaacgaggagggcgggcacggggugaagggcugggccuucgacgacgggaacgacgucuggaugggccgcaccaucagcgagaagucccggcugggcuacgagaccuucaaggugaucgagggguggagcaaccccaaguccaagcugcagaucaaccgccaggucaucguggaccggggcaaccgcagcggguacuccggcaucuucagcguggagggcaagagcugcaucaaccggugcuucuacgucgagcucauccgcgggcggaaggaggagaccgaggugcuguggaccuccaacagcaucguggucuucugcggcaccuccgggacguacggcaccgggagcuggccggacggcgccgacaucaaccugaugcccaucuga

SEQ ID NO: 85504 - RNA, 1410 nt, Artificial Sequence
  derived and/or modified CDS sequence (opt1) from neuraminidase__InfluenzaA__AEX34378
augaaccccaaccagaagaucaucaccaucggcagcgugucccugaccaucagcacgaucugcuucuucaugcagaucgccauccucaucaccaccgucacccugcacuucaagcaguacgaguucaacuccccgcccaacaaccaggugaugcugugcgagcccacgaucaucgagcgcaacaucaccgagaucguguaccucaccaacaccacgaucgagaaggagaucugccccaaccuggccgaguaccggaacuggagcaagccgcagugcgacaucaccggguucgcgcccuucuccaaggacaacagcauccgccuguccgccggcggggacaucugggucacccgggagcccuacgugagcugcgaccccgacaagugcuaccaguucgcccucggccaggggaccacgcugaacaacgugcacuccaacgacaccguccgcgaccggaccccguaccgcacccugcucaugaacgagcugggcgugcccuuccaccugggcacgaagcaggucugcaucgccuggagcuccagcuccugccacgacgggaaggccuggcuccacgugugcaucaccggcgacgacaagaacgcgaccgccagcuucaucuacaacgggcggcugguggacuccaucgugagcugguccaaggagauccugcgcacccaggagagcgagugcgucugcaucaacggcacgugcaccguggugaugaccgacggguccgccagcggcaaggccgacaccaagauccucuucaucgaggagggcaagaucguccacacgagcacccuguccgggagcgcgaagcacguggaggagugcuccugcuacccccggcaccccggcgugcgcugcgucugccgggacaacuggaaggggagcaaccgcccgaucguggacaucaacaucaaggaccacuccaucgugagcuccuacgucugcagcggccuggugggcgacacgccccggaagaacgacuccagcuccagcucccacugccucgaccccaacaacgaggagggcgggcacggggugaagggcugggccuucgacgacgggaacgacgucuggaugggccgcaccaucagcgagaagucccggcugggcuacgagaccuucaaggugaucgagggguggagcaaccccaaguccaagcugcagaucaaccgccaggucaucguggaccggggcaaccgcagcggguacuccggcaucuucagcguggagggcaagagcugcaucaaccggugcuucuacgucgagcucauccgcgggcggaaggaggagaccgaggugcuguggaccuccaacagcaucguggucuucugcggcaccuccgggacguacggcaccgggagcuggccggacggcgccgacaucaaccugaugcccaucuga

SEQ ID NO: 85505 - RNA, 1410 nt, Artificial Sequence
  derived and/or modified CDS sequence (opt1) from neuraminidase__InfluenzaA__AEX34400
augaaccccaaccagaagaucaucaccaucggcagcgugucccugaccaucagcacgaucugcuucuucaugcagaucgccauccucaucaccaccgucacccugcacuucaagcaguacgaguucaacuccccgcccaacaaccaggugaugcugugcgagcccacgaucaucgagcgcaacaucaccgagaucguguaccucaccaacaccacgaucgagaaggagaucugccccaagcuggccgaguaccggaacuggagcaagccgcagugcgacaucaccggguucgcgcccuucuccaaggacaacagcauccgccuguccgccggcggggacaucugggucacccgggagcccuacgugagcugcgaccccgacaagugcuaccaguucgcccucggccaggggaccacgcugaacaacgugcacuccaacgacaccguccgcggccggaccccguaccgcacccugcucaugaacgagcugggcgugcccuuccaccuggggacgaagcaggucugcaucgccuggagcuccagcuccugccacgacggcaaggccuggcuccacgugugcaucaccggggacgacaagaacgcgaccgccagcuucaucuacaacggccggcugguggacuccguggucagcugguccaaggagauccugcgcacccaggagagcgagugcgugugcaucaacgggacgugcaccguggucaugaccgacggcuccgccagcggcaaggccgacaccaagauccucuucaucaaggaggggaagaucgugcacacgagcacccuguccggcagcgcgcagcacguggaggagugcuccugcuacccccgguaccccgggguccgcugcgugugccgggacaacuggaagggcagcaaccgcccgaucguggacaucaacaucaaggaccacuccaucgucagcuccuacgugugcagcggccuggugggggacacgccccggaagaacgacuccagcuccagcucccacugccucgaccccaacaacgaggagggcgggcacggcgucaaggggugggccuucgacgacggcaacgacguguggaugggccgcaccaucagcgagaagucccggcugggguacgagaccuucaaggucaucgagggcuggagcaaccccaaguccaagcugcagaucaaccgccaggugaucguggaccgggggaaccgcagcggcuacuccgggaucuucagcgucgagggcaagagcugcaucaaccggugcuucuacguggagcucauccgcggccggaaggaggagaccgaggugcuguggaccuccaacagcaucgucguguucugcgggaccuccggcacguacgggaccggcagcuggccggacggggccgacaucaaccugaugcccaucuga

SEQ ID NO: 85506 - RNA, 1413 nt, Artificial Sequence
  derived and/or modified CDS sequence (opt1) from neuraminidase__InfluenzaA__AEX34432
augaaccccaaccagaagaucaucaccaucggcagcaucuccaucgccaucgggaucaucagccugauccuccagaucggcaacaucaucuccaucugggccagccacuccauccagaccgggagccagaaccacacgggcaucugcaaccagcgcaucaucaccuacgagaacuccaccugggugaacaacaccuacgucaacaucaacaacacgaacgugguggucgagaaggacaagaccagcgugacccuggcggggaacuccagccugugcuccaucagcggcugggccaucuacaccaaggacaacuccauccggaucggcagcaagggggacguguucgucauccgcgagccguucaucuccugcagccaccucgagugccggacguucuuccugacccagggcgcccugcucaacgacaagcacuccaacgggaccgugaaggaccgcagccccuaccgggcccugauguccugcccccugggcgaggcccccagcccguacaacagccgcuucgaguccguggcguggagcgccuccgccugccacgacgggaugggcuggcucaccaucggcaucagcgggcccgacaacggcgccgucgcggugcugaaguacaacgggaucaucacggagaccaucaaguccuggaagaagcggauccugcgcacccaggagagcgagugcgugugcaugaacggcuccugcuucaccaucaugacggacggccccagcaacgggaccgccuccuacaagaucuucaagaucgagaagggcaaggucaccaagaccaucgagcucaacgcccccaacuuccacuacgaggagugcagcugcuacccggacacggggaccgugaugugcgugugccgggacaacuggcacggcuccaaccgccccugggucagcuucaaccagaaccuggacuaccagaucggguacaucugcuccggcguguucggcgacaacccccggcccaaggacggggagggcagcugcaacccggugaccgucgacggggccgacggcgugaagggguucuccuacaaguacggcaacggcguguggaucgggcgcaccaagagcaaccggcugcgcaagggcuucgagaugaucugggaccccaacggguggacgaacaccgacuccgacuucagcgucaagcaggacgugguggccaucaccgacugguccggcuacagcgggagcuucguccagcaccccgagcucaccggccuggacugcauccggcccugcuucuggguggagcugguccgcggccucccgcgggagaacacgaccaucuggaccuccgggagcuccaucagcuucugcggcgugaacuccgggaccgcgaacuggagcuggcccgacggcgccgagcugcccuucacgaucgacaaguga

SEQ ID NO: 85507 - RNA, 1413 nt, Artificial Sequence; identical to SEQ ID NO: 85506
  derived and/or modified CDS sequence (opt1) from neuraminidase__InfluenzaA__AEX34443

SEQ ID NO: 85508 - RNA, 1410 nt, Artificial Sequence; identical to SEQ ID NO: 80627
  derived and/or modified CDS sequence (opt1) from neuraminidase__InfluenzaA__AEX34454

SEQ ID NO: 85509 - RNA, 1413 nt, Artificial Sequence
  derived and/or modified CDS sequence (opt1) from neuraminidase__InfluenzaA__AEX34465
augaaccccaaccagaagaucaucaccaucggcagcaucuccaucgccaucgggaucaucagccugaugcuccagaucggcaacaucaucuccaucugggccagccacuccauccagaccgggagccagaaccacacgggcaucugcaaccagcgcaucaucaccuacgagaacuccaccugggugaaccacaccuacgucaacaucaacaacacgaacgugguggcggggaaggacaagaccagcgucacccuggccggcaacuccagccugugcuccaucagcggcugggccaucuacaccaaggacaacuccauccggaucgggagcaagggcgacguguucgugauccgcgagccguucaucuccugcagccaccucgagugccggacguucuuccugacccagggggcccugcucaacgacaagcacuccaacggcaccgucaaggaccgcagccccuaccgggcccugauguccugcccccugggggaggcgcccagcccguacaacagcaaguucgaguccguggccuggagcgccuccgccugccacgacggcaugggcuggcucaccaucgggaucagcggccccgacaacggggcgguggccguccugaaguacaacggcaucaucacggagaccaucaaguccuggaagaagcgcauccugcggacccaggagagcgagugcgugugcgugaacggcuccugcuucaccaucaugacggacgggcccagcaacggcgccgccuccuacaagaucuucaagaucgagaaggggaaggucaccaagagcaucgagcucaacgcccccaacuuccacuacgaggagugcuccugcuacccggacaccggcaccgugaugugcgugugccgcgacaacuggcacgggagcaaccggcccugggucuccuucaaccagaaccuggacuaccagaucggcuacaucugcagcggcguguucggggacaacccccgccccaaggacggcgagggguccugcaacccggugacggucgacggcgcggacgggaucaagggcuucagcuacaaguacggcaacgggguguggaucggccggaccaaguccaaccgccugcggaagggguucgagaugaucugggaccccaacggcuggaccgacaccgacagcgacuucuccgugaagcaggacgucguggccaucacggacuggagcggguacagcggcuccuucgugcagcaccccgagcucaccggccuggacugcaugcgccccugcuucugggucgagcuggugcgggggcucccgcgcgagaacaccaccaucuggacgagcggcuccagcaucuccuucugcggggucaacagcgacaccgccaacugguccuggcccgacggcgccgagcugcccuucaccaucgacaaguga

SEQ ID NO: 85510 - RNA, 1413 nt, Artificial Sequence; identical to SEQ ID NO: 85463
  derived and/or modified CDS sequence (opt1) from neuraminidase__InfluenzaA__AEX34476

SEQ ID NO: 85511 - RNA, 1413 nt, Artificial Sequence; identical to SEQ ID NO: 85465
  derived and/or modified CDS sequence (opt1) from neuraminidase__InfluenzaA__AEX34487

SEQ ID NO: 85512 - RNA, 1413 nt, Artificial Sequence; identical to SEQ ID NO: 85465
  derived and/or modified CDS sequence (opt1) from neuraminidase__InfluenzaA__AEX34498

SEQ ID NO: 85513 - RNA, 1413 nt, Artificial Sequence; identical to SEQ ID NO: 85465
  derived and/or modified CDS sequence (opt1) from neuraminidase__InfluenzaA__AEX34509

SEQ ID NO: 85514 - RNA, 1413 nt, Artificial Sequence; identical to SEQ ID NO: 85465
  derived and/or modified CDS sequence (opt1) from neuraminidase__InfluenzaA__AEX34520

SEQ ID NO: 85515 - RNA, 1413 nt, Artificial Sequence; identical to SEQ ID NO: 85465
  derived and/or modified CDS sequence (opt1) from neuraminidase__InfluenzaA__AEX34531

SEQ ID NO: 85516 - RNA, 1413 nt, Artificial Sequence; identical to SEQ ID NO: 85465
  derived and/or modified CDS sequence (opt1) from neuraminidase__InfluenzaA__AEX34542

SEQ ID NO: 85517 - RNA, 1413 nt, Artificial Sequence; identical to SEQ ID NO: 85465
  derived and/or modified CDS sequence (opt1) from neuraminidase__InfluenzaA__AEX34553

SEQ ID NO: 85518 - RNA, 1413 nt, Artificial Sequence; identical to SEQ ID NO: 85465
  derived and/or modified CDS sequence (opt1) from neuraminidase__InfluenzaA__AEX34564

SEQ ID NO: 85519 - RNA, 1413 nt, Artificial Sequence; identical to SEQ ID NO: 85465
  derived and/or modified CDS sequence (opt1) from neuraminidase__InfluenzaA__AEX34575

SEQ ID NO: 85520 - RNA, 1413 nt, Artificial Sequence; identical to SEQ ID NO: 85465
  derived and/or modified CDS sequence (opt1) from neuraminidase__InfluenzaA__AEX34586

SEQ ID NO: 85521 - RNA, 1413 nt, Artificial Sequence; identical to SEQ ID NO: 85465
  derived and/or modified CDS sequence (opt1) from neuraminidase__InfluenzaA__AEX34597

SEQ ID NO: 85522 - RNA, 1413 nt, Artificial Sequence; identical to SEQ ID NO: 85465
  derived and/or modified CDS sequence (opt1) from neuraminidase__InfluenzaA__AEX34608

SEQ ID NO: 85523 - RNA, 1413 nt, Artificial Sequence; identical to SEQ ID NO: 85465
  derived and/or modified CDS sequence (opt1) from neuraminidase__InfluenzaA__AEX34619

SEQ ID NO: 85524 - RNA, 1413 nt, Artificial Sequence; identical to SEQ ID NO: 85465
  derived and/or modified CDS sequence (opt1) from neuraminidase__InfluenzaA__AEX34630

SEQ ID NO: 85525 - RNA, 1413 nt, Artificial Sequence; identical to SEQ ID NO: 85465
  derived and/or modified CDS sequence (opt1) from neuraminidase__InfluenzaA__AEX34641

SEQ ID NO: 85526 - RNA, 1413 nt, Artificial Sequence
  derived and/or modified CDS sequence (opt1) from neuraminidase__InfluenzaA__AEX34653
augaaccccaaccagaagaucaucaccaucggcagcaucuccaucgccaucgggaucaucagccugaugcuccaggugggcaacaucaucuccaucugggccagccacuccauccagaccgggagccagaaccacacgggcaucugcaaccagcgcaucaucaccuacgagaacuccaccugggucaaccacaccuacgugaacaucaacaacacgaacguggucgcggggaaggacaagaccagcguggcccuggccggcaacuccagccugugcuccaucagcggcugggccaucuacaccaaggacaacuccauccggaucgggagcaagggcgacguguucgucauccgcgagccguucaucuccugcagccaccucgagugccggaccuucuuccugacgcagggggcccugcucaacgacaagcacuccaacggcaccgugaaggaccgcagccccuaccgggcgcugauguccugcccccugggggaggcccccagcccguacaacagcaaguucgaguccguggccuggagcgccuccgcgugccacgacggccucggcuggcugaccaucgggaucagcggccccgacaacggggccgucgccgugcugaaguacaacggcaucaucaccgagacgaucaaguccuggaagaagcgcauccuccggacccaggagagcgagugcgugugcgucaacggcuccugcuucaccaucaugaccgacgggcccagcaacggcgccgccuccuacaagaucuucaagaucgagaagggccaggugaccaagagcguggagcugaacgcgcccaacuuccacuacgaggagugcuccugcuacccggacacggggaccgucaugugcgugugccgcgacaacuggcacgggagcaaccggcccuggguguccuucaaccaggaccuggacuaccagaucggcuacaucugcagcggcgucuucggggacaacccccgccccaaggacggcaagggguccugcaacccggugaccguggacggcgccgacggggucaagggcuucagcuacaaguacggcaacgggguguggaucggccggacgaaguccaaccgccuccggaagggguucgagaugaucugggaccccaacggcuggaccgacaccgacagcgacuucuccgugaagcaggacgucguggccaucaccgacuggagcggguacagcggcuccuucguccagcaccccgagcugacgggccuggacugcauccgccccugcuucuggguggagcucgugcgggggcugccgcgcgagaacaccaccaucuggaccagcggcuccagcaucuccuucugcggggucgacagcgacacggccaacugguccuggcccgacggcgccgagcugcccuucaccaucgacaaguga

SEQ ID NO: 85527 - RNA, 1413 nt, Artificial Sequence
  derived and/or modified CDS sequence (opt1) from neuraminidase__InfluenzaA__AEX34664
augaaccccaaccagaagaucaucaccaucggcagcaucuccaucgccaucgggaucaucagccugaugcuccagaucggcaacaucaucuccaucugggccagccacuccauccagaccgggagccagaaccacacgggcaucugcaaccagcgcaucaucaccuacgagaacuccaccugggugaaccacaccuacgucaacaucaacaacacgaacgugguggcggggaaggacaagaccagcgucacccuggccggcaacuccagccugugcuccaucagcggcugggccaucuacaccaaggacaacuccauccggaucgggagcaagggcgacguguucgugauccgcgagccguucaucuccugcagccaccucgagugccggacguucuuccugacccagggggcccugcucaacgacaagcacuccaacggcaccgucaaggaccgcagccccuaccgggcccugauguccugcccccugggggaggcgcccagcccguacaacagcaaguucgaguccguggccuggagcgccuccgccugccacgacggcaugggcuggcucaccaucgggaucagcggccccgacaacggggcgguggccguccugaaguacaacggcaucaucacggagaccaucaaguccuggaagaagcgcauccugcggacccaggagagcgagugcgugugcgugaacggcuccugcuucaccaucaugacggacgggcccagcaacggcgccgccuccuacaagaucuucaagaucgagaaggggaaggucaccaagagccgcgagcucaacgcccccaacuuccacuacgaggagugcuccugcuacccggacaccggcaccgugaugugcgugugccgggacaacuggcacgggagcaaccgccccugggucuccuucaaccagaaccuggacuaccagaucggcuacaucugcagcggcguguucggggacaacccccggcccaaggacggcaagggguccugcaacccggugacggcggacggcgccgacggggucaagggcuucagcuacaaguacggcaacgggguguggaucggccgcaccaaguccaaccggcugcgcaagggguucgagaugaucugggaccccaacggcuggaccgacaccgacagcgacuucuccgugaagcaggacgucguggccaucacggacuggagcggguacagcggcuccuucgugcagcaccccgagcucaccggccuggacugcauccggcccugcuucugggucgagcuggugcgcgggcucccgcgggagaacaccaccaucuggacgagcggcuccagcaucuccuucugcggggucgacagcgacaccgccaacugguccuggcccgacggcgccgagcugcccuucaccaucgacaaguga

SEQ ID NO: 85528 - RNA, 1413 nt, Artificial Sequence; identical to SEQ ID NO: 85506
  derived and/or modified CDS sequence (opt1) from neuraminidase__InfluenzaA__AEX34686

SEQ ID NO: 85529 - RNA, 1413 nt, Artificial Sequence
  derived and/or modified CDS sequence (opt1) from neuraminidase__InfluenzaA__AEX34760
augaaccccaaccagaagaucaucaccaucggcagcaucuccaucgccaucgggaucaucagccugauccuccagaucggcaacaucaucuccaucugggccagccacuccauccagaccgggagccagaaccacacgggcaucugcaaccagcgcaucaucaccuacgagaacuccaccugggugaacaacaccuacgucaacaucaacaacacgaacgugguggucgagaaggacaagaccagcgugacccuggcggggaacuccagccugugcuccaucagcggcugggccaucuacaccaaggacaacuccauccggaucggcagcaagggggacguguucgucauccgcgagccguucaucuccugcagccaccucgagugccggacguucuuccugacccagggcgcccugcucaacgacaagcacuccaacgggaccgugaaggaccgcagccccuaccgggcccugauguccugcccccugggcgaggcccccagcccguacaacagccgcuucgaguccguggcguggagcgccuccgccugccacgacgggaugggcuggcucaccaucggcaucagcgggcccgacaacggcgccgucgcggugcugaaguacaacgggaucaucacggagaccaucaaguccuggaagaagcggauccugcgcacccaggagagcgagugcgugugcaugaacggcuccugcuucaccaucaugacggacggccccagcaacggggccgccuccuacaagaucuucaagaucgagaagggcaaggucaccaagaccaucgagcucaacgcccccaacuuccacuacgaggagugcagcugcuacccggacaccgggacggugaugugcgugugccgggacaacuggcacggcuccaaccgccccugggucagcuucaaccagaaccuggacuaccagaucggguacaucugcuccggcguguucggcgacaacccccggcccaaggacggggagggcagcugcaacccggugaccgucgacggggccgacggcgugaagggguucuccuacaaguacggcaacggcguguggaucgggcgcaccaagagcaaccggcugcgcaagggcuucgagaugaucugggaccccaacggguggaccaacacggacuccgacuucagcgucaagcaggacgugguggcgaucaccgacugguccggcuacagcgggagcuucguccagcaccccgagcucaccggccuggacugcauccggcccugcuucuggguggagcugguccgcggccucccgcgggagaacaccacgaucuggaccuccgggagcuccaucagcuucugcggcgugaacuccgggaccgugaacuggagcuggcccgacggcgccgagcugcccuucaccaucgacaaguga

SEQ ID NO: 85530 - RNA, 1413 nt, Artificial Sequence
  derived and/or modified CDS sequence (opt1) from neuraminidase__InfluenzaA__AEX34771
augaaccccaaccagaagaucaucaccaucggcagcaucuccaucgccaucgggaucaucagccugauccuccagaucggcaacaucaucuccaucugggccagccacuccauccagaccgggagccagaaccacacgggcaucugcaaccagcgcaucaucaccuacgagaacuccaccugggugaacaacaccuacgucaacaucaacaacacgaacgugguggucgagaaggacaagaccagcgugacccuggcggggaacuccagccugugcuccaucagcggcugggccaucuacaccaaggacaacuccauccggaucggcagcaagggggacguguucgucauccgcgagccguucaucuccugcagccaccucgagugccggacguucuuccugacccagggcgcccugcucaacgacaagcacuccaacgggaccgugaaggaccgcagccccuaccgggcccugauguccugcccccugggcgaggcccccagcccguacaacagccgcuucgaguccguggcguggagcgccuccgccugccacgacgggaugggcuggcucaccaucggcaucagcgggcccgacaacggcgccgucgcggugcugaaguacaacgggaucaucacggagaccaucaaguccuggaagaagcggauccugcgcacccaggagagcgagugcgugugcaugaacggcuccugcuucaccaucaugacggacggccccagcaacggggccgccuccuacaagaucuucaagaucgagaagggcaaggucaccaagaccaucgagcucaacgcccccaacuuccacuacgaggagugcagcugcuacccggacaccgggacggugaugugcgugugccgggacaacuggcacggcuccaaccgccccugggucagcuucaaccagaaccuggacuaccagaucggguacaucugcuccggcguguucggcgacaacccccggcccaaggacggggagggcagcugcaacccggugaccgucgacggggccgacggcgugaagggguucuccuacaaguacggcaacggcguguggaucgggcgcaccaagagcaaccggcugcgcaagggcuucgagaugaucugggaccccaacggguggaccaacacggacuccgacuucagcgucaagcaggacgugguggcgaucaccgacugguccggcuacagcgggagcuucguccagcaccccgagcucaccggccuggacugcauccggcccugcuucuggguggagcugguccgcggccucccgcgggagaacaccacgaucuggaccuccgggagcuccaucagcuucugcggcgugaacuccgggaccgccaacuggagcuggcccgacggcgccgagcugcccuucaccaucgacaaguga

SEQ ID NO: 85531 - RNA, 1413 nt, Artificial Sequence; identical to SEQ ID NO: 81485
  derived and/or modified CDS sequence (opt1) from neuraminidase__InfluenzaA__AEX34782

SEQ ID NO: 85532 - RNA, 1413 nt, Artificial Sequence
  derived and/or modified CDS sequence (opt1) from neuraminidase__InfluenzaA__AEX34793
augaaccccaaccagaagaucaucaccaucggcagcaucuccaucgccaucgggaucaucagccugaugcuccagaucggcaacaucaucuccaucugggccagccacuccauccagaccgggagccagaaccacacgggcaucugcaaccagcgcaucaucaccuacgagaacuccaccugggugaaccacaccuacgucaacaucaacaacacgaacgugguggcggggaaggacaagaccccggucacccuggugggcaacagcucccugugcagcaucuccggcugggccaucuacaccaaggacaacagcauccggaucggguccaagggcgacguguucgucauccgcgagcccuucaucagcugcucccaccucgagugcaagacguucuuccugacccagggggcccugcucaacgacaagcacagcaacggcaccgugaaggaccggucccccuaccgcgcccugaugagcugcccccugggggaggccccgucccccuacaacagcaaguucgagagcguggcgugguccgccagcgccugccacgacggcaucggcuggcucaccaucgggaucuccggccccgacaacggggccgucgcggugcugaaguacaagggcaucaucacgggcaccaucaagagcuggaagaagcagauccugcggacccaggaguccgagugcgugugcaugaacgggagcugcuucaccaucaugacggacggccccuccaacggggccgccagcuacaagaucuucaagaucgagaagggcaaggucaccaaguccauggagcucaacgccccgaacuuccacuacgaggagugcagcugcuaccccgacaccgggaccgugaugugcgugugccgcgacaacuggcacggcuccaaccggcccugggucagcuucaaccagaaccuggacuaccagaucggcuacaucugcuccgggguguucggcgacaacccccgcccgaaggaccgggaggggagcugcaaccccgugacggucgacggcgccaacggggugaagggcuucuccuacaaguacggcaacgggguguggaucggccgcaccaagagcaaccggauccgcaagggguucgagaugaucugggaccccaacggcuggaccaacaccgacuccgacuucagcgucaagcaggacaucguggcgaucacggacugguccggguacagcggcagcuucgugcagcaccccgagcugaccggccucgacugcauccggccgugcuucugggucgagcuggugcgcgggcugccccgggagaacaccaccaucuggacguccggcagcuccaucagcuucugcggggucaacggcgacaucgccaacugguccuggcccgacggcgccgagcuccccuucaccaucgacaaguga

SEQ ID NO: 85533 - RNA, 1413 nt, Artificial Sequence; identical to SEQ ID NO: 85532
  derived and/or modified CDS sequence (opt1) from neuraminidase__InfluenzaA__AEX34804

SEQ ID NO: 85534 - RNA, 1413 nt, Artificial Sequence
  derived and/or modified CDS sequence (opt1) from neuraminidase__InfluenzaA__AEX34815
augaaccccaaccagaagaucaucaccaucggcagcaucuccaucgccaucgggaucaucagccugaugcuccagaucggcaacaucaucuccaucugggccagccacuccauccagaccgggagccagaacaacacgggcaucugcaaccagcgcaucaucaccuacgagaacuccaccugggugaaccacaccuacgucaacaucaacaacacgaacgugguggcgggggaggacaagaccagcgucacccugaccggcaacuccagccugugcuccaucagcggcugggccaucuacacgaaggacaacuccauccggaucgggagcaagggcgacguguucgugauccgcgagccguucaucuccugcagccaccucgagugccggaccuucuuccugacccagggggcccugcucaacgacaagcacuccaacggcaccgucaaggaccgcagccccuaccgggcccugauguccugcccccugggggaggcccccagcccguacaacagcaaguucgaguccguggcguggagcgccuccgccugccacgacggcaugggcuggcucacgaucgggaucagcggccccgacaacggggccguggcgguccugaaguacaacggcaucaucaccggcaccaucaaguccuggaagaagcagauccugcgcacccaggagagcgagugcgugugcaugaacggguccugcuucacgaucaugaccgacggccccagcaacaaggccgccuccuacaagaucuucaagaucgagaaggggaaggugaccaagagcaucgagcucaacgcccccaacuucuacuacgaggagugcuccugcuacccggacaccggcaucgucaugugcgugugccgggacaacuggcacgggagcaaccgccccuggguguccuucaaccagaaccuggacuaccagaucggcuacaucugcagcggcgucuucggggacaacccccggcccgaggacggcgagggguccugcaacccggugacgguggacggcgccaacggggucaagggcuucagcuacaaguacggcaacgggguguggaucggccgcaccaaguccaaccggcugcgcaagggguucgagaugaucugggaccccaacggcuggaccaacaccgacagcgacuucuccgugaagcaggacgucguggcgaucacggacuggagcggguacagcggcuccuucgugcagcaccccgagcucaccggccuggacugcauccggcccugcuucugggucgagcuggugcgcgggcucccgcgggagaacaccaccaucuggacgagcggcuccagcaucuccuucugcggggucaacagcgacaccgccaacugguccuggcccgacggcgccgagcugcccuucaccaucgacaaguga

SEQ ID NO: 85535 - RNA, 1413 nt, Artificial Sequence; identical to SEQ ID NO: 85532
  derived and/or modified CDS sequence (opt1) from neuraminidase__InfluenzaA__AEX34826

SEQ ID NO: 85536 - RNA, 1413 nt, Artificial Sequence; identical to SEQ ID NO: 85532
  derived and/or modified CDS sequence (opt1) from neuraminidase__InfluenzaA__AEX34837

SEQ ID NO: 85537 - RNA, 1413 nt, Artificial Sequence
  derived and/or modified CDS sequence (opt1) from neuraminidase__InfluenzaA__AEX34859
augaaccccaaccagaagaucaucaccaucggcagcaccuccaucgccaucgggaucaucagccugaugcuccagaucggcaacaucaucuccaucugggccagccacuccauccagacggggagccagaaccacaccggcaucugcaaccagcgcaucaucaccuacgagaacuccaccugggugaaccacacguacgucaacaucaacaacaccaacgugguggcggggaaggacaagaccccggucacccugaucggcaacagcucccugugcagcaucuccggcugggccaucuacacgaaggacaacagcauccggaucggguccaagggcgacguguucgugauccgcgagcccuucaucagcugcucccaccucgagugcaagaccuucuuccugacccagggggcccugcucaacgacaagcacagcaacggcaccgucaaggaccggucccccuaccgcgcccugaugagcugcccccugggggaggccccgucccccuacaacagcaaguucgagagcguggcgugguccgccagcgccugccacgacggcaucggcuggcucacgaucgggaucuccggccccgacaacggggccguggcgguccugaaguacaagggcaucaucaccggcaccaucaagagcuggaagaagcagauccugcggacccaggaguccgagugcgugugcaugaacgggagcugcuucacgaucaugaccgacggccccuccaacggggccgccagcuacaagaucuucaagaucgagaagggcaaggugaccaaguccauggagcucaacgccccgaacuuccacuacgaggagugcagcugcuaccccgacaccgggacggucaugugcgugugccgcgacaacuggcacggcuccaaccggcccugggugagcuucaaccagaaccuggacuaccagaucggcuacaucugcuccggggucuucggcgacaacccccgcccgaaggaccgggaggggagcugcaaccccgugaccguggacggcgccaacggggucaagggcuucuccuacaaguacggcaacgggguguggaucggccgcaccaagagcaaccggauccgcaagggguucgagaugaucugggaccccaacggcuggaccaacacggacuccgacuucagcgugaagcaggacaucgucgcgaucaccgacugguccggguacagcggcagcuucgugcagcaccccgagcugaccggccucgacugcauccggccgugcuucuggguggagcugguccgcgggcugccccgggagaacaccacgaucuggaccuccggcagcuccaucagcuucugcggggugaacggcgacaucgccaacugguccuggcccgacggcgccgagcuccccuucaccaucgacaaguga

SEQ ID NO: 85538 - RNA, 1413 nt, Artificial Sequence
  derived and/or modified CDS sequence (opt1) from neuraminidase__InfluenzaA__AEX34870
augaaccccaaccagaagaucaucaccaucggcagcaucuccaucgccaucgggaucaucagccugaugcuccagaucggcaacaucaucuccaucugggccagccacuccauccagaccgggagccagaacaacacgggcaucugcaaccagcgcaucaucaccuacgagaacuccaccugggugaaccacaccuacgucaacaucaacaacacgaacgugguggcgggggaggacaagaucagcgucacccuggccggcaacuccagccugugcuccaucagcggcugggccaucuacaccaaggacaacuccauccggaucgggagcaagggcgacguguucgugauccgcgagccguucaucuccugcagccaccucgagugccggaccuucuuccugacgcagggggcccugcucaacgacaagcacuccaacggcaccgucaaggaccgcagccccuaccgggcccugauguccugcccccugggggaggcgcccagcccguacaacagcaaguucgaguccguggccuggagcgccuccgccugccacgacggcaucggcuggcucaccaucgggaucagcggccccgacaacggggcgguggccguccugaaguacaacggcaucaucaccggcacgaucaaguccuggaagaagcagauccugcgcacccaggagagcgagugcgugugcaugaacggguccugcuucaccaucaugaccgacggccccagcaacaaggccgccuccuacaagaucuucaagaucgagaaggggaaggugaccaagagcaucgagcucaacgcccccaacuucuacuacgaggagugcuccugcuacccggacacgggcaucgucaugugcgugugccgggacaacuggcacgggagcaaccgccccuggguguccuucaaccagaaccuggacuaccagaucggcuacaucugcagcggcgucuucggggacaacccccggcccgaggacggcgagggguccugcaacccggugaccguggacggcgcgaacggggucaagggcuucagcuacaaguacggcaacgggguguggaucggccgcaccaaguccaaccggcugcgcaagggguucgagaugaucugggaccccaacggcuggacgaacaccgacagcgacuucuccgugaagcaggacgucguggccaucaccgacuggagcggguacagcggcuccuucgugcagcaccccgagcucaccggccuggacugcauccggcccugcuucugggucgagcuggugcgcgggcucccgcgggagaacacgaccaucuggaccagcggcuccagcaucuccuucugcggggucaacagcgacaccgccaacugguccuggcccgacggcgccgagcugcccuucacgaucgacaaguga

SEQ ID NO: 85539 - RNA, 1413 nt, Artificial Sequence
  derived and/or modified CDS sequence (opt1) from neuraminidase__InfluenzaA__AEX34881
augaaccccaaccagaagaucaucaccaucggcagcaucuccaucgccaucgggaucaucagccugaugcuccagaucggcaacaucaucuccaucugggccagccacuccauccagaccgggagccagaaccacacgggcaucugcaaccagcgcaucaucaccuacgagaacuccaccugggugaaccacaccuacgucaacaucaacaacacgaacgugguggcggggaaggacaaggccccggucacccugaucggcaacagcucccugugcagcaucuccggcugggccaucuacaccaaggacaacagcauccggaucggguccaagggcgacguguucgugauccgcgagcccuucaucagcugcucccaccucgagugcaagaccuucuuccugacgcagggggcccugcucaacgacaagcacagcaacggcaccgucaaggaccggucccccuaccgcgcccugaugagcugcccccugggggaggcgccgucccccuacaacagcaaguucgagagcguggccugguccgccagcgccugccacgacggcaucggcuggcucaccaucgggaucuccggccccgacaacggggcgguggccguccugaaguacaagggcaucaucaccggcacgaucaagagcuggaagaagcagauccugcggacccaggaguccgagugcgugugcaugaacgggagcugcuucaccaucaugaccgacggccccuccaacggggccgccagcuacaagaucuucaagaucgagaagggcaaggugacgaaguccauggagcucaacgccccgaacuuccacuacgaggagugcagcugcuaccccgacaccgggaccgucaugugcgugugccgcgacaacuggcacggcuccaaccggcccugggugagcuucaaccagaaccuggacuaccagaucggcuacaucugcuccggggucuucggcgacaacccccgcccgaaggaccgggaggggagcugcaaccccgugaccguggacggcgcgaacggggucaagggcuucuccuacaaguacggcaacgggguguggaucggccgcaccaagagcaaccggauccgcaagggguucgagaugaucugggaccccaacggcuggacgaacaccgacuccgacuucagcgugaagcaggacaucgucgccaucaccgacugguccggguacagcggcagcuucgugcagcaccccgagcugacgggccucgacugcauccggccgugcuucuggguggagcugguccgcgggcugccccgggagaacaccaccaucuggaccuccggcagcuccaucagcuucugcggggugaacggcgacaucgccaacugguccuggcccgacggcgccgagcuccccuucacgaucgacaaguga

SEQ ID NO: 85540 - RNA, 1413 nt, Artificial Sequence
  derived and/or modified CDS sequence (opt1) from neuraminidase__InfluenzaA__AEX34892
augaaccccaaccagaagaucaucaccaucggcagcaucuccaucgccaucgggaucaucagccugaugcuccagaucggcaacaucaucuccaucugggccagccacuccauccagaccgggagccagaacaacacgggcaucugcaaccagcgcaucaucaccuacgagaacuccaccugggugaaccacaccuacgucaacaucaacaacacgaacgugguggcgggggaggacaagaccagcgucacccuggccggcaacuccagccugugcuccaucagcggcugggccaucuacaccaaggacaacuccauccggaucgggagcaagggcgacguguucgugauccgcgagccguucaucuccugcagccaccucgagugccggacguucuuccugacccagggggcccugcucaacgacaagcacuccaacggcaccgucaaggaccgcagccccuaccgggcccugauguccugcccccugggggaggcgcccagcccguacaacagcaaguucgaguccguggccuggagcgccuccgccugccacgacggcaugggcuggcucaccaucgggaucagcggccccgacaacggggcgguggccguccugaaguacaacggcaucaucacgggcaccaucaaguccuggaagaagcagauccugcgcacccaggagagcgagugcgugugcaugaacggguccugcuucaccaucaugacggacggccccagcaacaaggccgccuccuacaagaucuucaagaucgagaaggggaaggugaccaagagcaucgagcucaacgcccccaacuucuacuacgaggagugcuccugcuacccggacaccggcaucgucaugugcgugugccgggacaacuggcacgggagcaaccgccccuggguguccuucaaccagaaccuggacuaccagaucggcuacaucugcagcggcgucuucggggacaacccccggcccgaggacggcgagggguccugcaacccggugaccguggacggcgcgaacggggucaagggcuucagcuacaaguacggcaacgggguguggaucggccgcacgaaguccaaccggcugcgcaagggguucgagaugaucugggaccccaacggcuggaccaacaccgacagcgacuucuccgugaagcagaacgucguggccaucaccgacuggagcggguacagcggcuccuucgugcagcaccccgagcucacgggccuggacugcauccggcccugcuucugggucgagcuggugcgcgggcucccgcgggagaacaccaccaucuggaccagcggcuccagcaucuccuucugcggggucaacagcgacacggccaacugguccuggcccgacggcgccgagcugcccuucaccaucgacaaguga

SEQ ID NO: 85541 - RNA, 1413 nt, Artificial Sequence
  derived and/or modified CDS sequence (opt1) from neuraminidase__InfluenzaA__AEX34903
augaaccccaaccagaagaucaucaccaucggcagcaucuccaucgccaucgggaucaucagccugaugcuccagaucggcaacaucaucuccaucugggccagccgcuccauccagaccgggagccagaaccacacgggcaucugcaaccagcggaucaucaccuacgagaacuccaccugggugaaccacaccuacgucaacaucaacaacacgaacgugguggcggggaaggacaagaccccggucacccuggugggcaacagcucccugugcagcaucuccggcugggccaucuacaccaaggacaacagcauccgcaucggguccaagggcgacguguucgucauccgggagcccuucaucagcugcucccaccucgagugcaagacguucuuccugacccagggggcccugcucaacgacaagcacagcaacggcaccgugaaggaccgcucccccuaccgggcccugaugagcugcccccugggggaggccccgucccccuacaacagcaaguucgagagcguggcgugguccgccagcgccugccacgacggcaucggcuggcucaccaucgggaucuccggccccgacaacggggccgucgcggugcugaaguacaagggcaucaucacgggcaccaucaagagcuggaagaagcagauccugcgcacccaggaguccgagugcgugugcaugaacgggagcugcuucaccaucaugacggacggccccuccaacggggccgccagcuacaagaucuucaagaucgagaagggcaaggucaccaaguccauggagcucaacgccccgaacuuccacuacgaggagugcagcugcuaccccgacaccgggaccgugaugugcgugugccgggacaacuggcacggcuccaaccgccccugggucagcuucaaccagaaccuggacuaccagaucggcuacaucugcuccgggguguucggcgacaacccccggccgaaggaccgcgaggggagcugcaaccccgugacggucgacggcgccaacggggugaagggcuucuccuacaaguacggcaacgggguguggaucggccggaccaagagcaaccgcauccggaagggguucgagaugaucugggaccccaacggcuggaccaacaccgacuccgacuucagcguccgccaggacaucguggcgaucacggacugguccggguacagcggcagcuucgugcagcaccccgagcugaccggccucgacugcauccggccgugcuucugggucgagcuggugcgcgggcugccccgggagaacaccaccaucuggacguccggcagcuccaucagcuucugcggggucaacggcgacaucgccaacugguccuggcccgacggcgccgagcuccccuucaccaucgacaaguga

SEQ ID NO: 85542 - RNA, 1413 nt, Artificial Sequence; identical to SEQ ID NO: 81485
  derived and/or modified CDS sequence (opt1) from neuraminidase__InfluenzaA__AEX34914

SEQ ID NO: 85543 - RNA, 1413 nt, Artificial Sequence; identical to SEQ ID NO: 81485
  derived and/or modified CDS sequence (opt1) from neuraminidase__InfluenzaA__AEX34925

SEQ ID NO: 85544 - RNA, 1413 nt, Artificial Sequence; identical to SEQ ID NO: 81485
  derived and/or modified CDS sequence (opt1) from neuraminidase__InfluenzaA__AEX34936

SEQ ID NO: 85545 - RNA, 1413 nt, Artificial Sequence; identical to SEQ ID NO: 81485
  derived and/or modified CDS sequence (opt1) from neuraminidase__InfluenzaA__AEX34947

SEQ ID NO: 85546 - RNA, 1413 nt, Artificial Sequence; identical to SEQ ID NO: 81485
  derived and/or modified CDS sequence (opt1) from neuraminidase__InfluenzaA__AEX34958

SEQ ID NO: 85547 - RNA, 1413 nt, Artificial Sequence; identical to SEQ ID NO: 81485
  derived and/or modified CDS sequence (opt1) from neuraminidase__InfluenzaA__AEX34969

SEQ ID NO: 85548 - RNA, 1413 nt, Artificial Sequence; identical to SEQ ID NO: 81485
  derived and/or modified CDS sequence (opt1) from neuraminidase__InfluenzaA__AEX34980

SEQ ID NO: 85549 - RNA, 1413 nt, Artificial Sequence; identical to SEQ ID NO: 81485
  derived and/or modified CDS sequence (opt1) from neuraminidase__InfluenzaA__AEX34991

SEQ ID NO: 85550 - RNA, 1413 nt, Artificial Sequence
  derived and/or modified CDS sequence (opt1) from neuraminidase__InfluenzaA__AEX35002
augaaccccaaccagaagaucaucaccaucggcagcaucuccaucgccaucgggaucaucagccugaugcuccagaucggcaacaucaucuccaucugggccagccacuccauccagaccgggagccagaaccacacgggcaucugcaaccagcgcaucaucaccuacgagaacuccaccugggugaaccacaccuacgucaacaucaacaacacgaacgugguggcggggaaggacaagaccccggucacccugaucggcaacagcucccugugcagcaucuccggcugggccaucuacaccaaggacaacagcauccggaucggguccaagggcgacguguucgugauccgcgagcccuucaucagcugcucccaccucgagugcaagacguucuuccugacccagggggcccugcucaacgacaagcacagcaacggcaccgucaaggaccggucccccuaccgcgcccugaugagcugcccccugggggaggccccgucccccuacaacagcaaguucgagagcguggcgugguccgccagcgccugccacgacggcaucggcuggcucaccaucgggaucuccggccccgacaacggggccguggcgguccugaaguacaagggcaucaucacgggcaccaucaagagcuggaagaagcagauccugcggacccaggaguccgagugcgugugcaugaacgggagcugcuucaccaucaugacggacggccccuccaacggggccgccagcuacaagaucuucaagaucgagaagggcaaggugaccaaguccauggagcucaacgccccgaacuuccacuacgaggagugcagcugcuaccccgacaccgggaccgucaugugcgugugccgcgacaacuggcacggcuccaaccggcccugggugagcuucaaccagaaccuggacuaccagaucggcuacaucugcuccggggucuucggcgacaacccccgcccgaaggaccgggaggggagcugcaaccccgugacgguggacggcgccaacggggucaagggcuucuccuacaaguacggcaacgggguguggaucggccgcaccaagagcaaccggauccgcaagggguucgagaugaucugggaccccaacggcuggaccaacaccgacuccgacuucagcgugaagcaggacaucgucgcgaucacggacugguccggguacagcggcagcuucgugcagcaccccgagcugaccggccucgacugcauccggccgugcuucuggguggagcugguccgcgggcugccccgggagaacaccaccaucuggacguccggcagcuccaucagcuucugcggggugaacggcgacaucgccaacugguccuggcccgacggcgccgagcuccccuucaccaucgacaaguga

SEQ ID NO: 85551 - RNA, 1413 nt, Artificial Sequence; identical to SEQ ID NO: 81485
  derived and/or modified CDS sequence (opt1) from neuraminidase__InfluenzaA__AEX35013

SEQ ID NO: 85552 - RNA, 1413 nt, Artificial Sequence; identical to SEQ ID NO: 81485
  derived and/or modified CDS sequence (opt1) from neuraminidase__InfluenzaA__AEX35024

SEQ ID NO: 85553 - RNA, 1413 nt, Artificial Sequence; identical to SEQ ID NO: 81485
  derived and/or modified CDS sequence (opt1) from neuraminidase__InfluenzaA__AEX35035

SEQ ID NO: 85554 - RNA, 1413 nt, Artificial Sequence; identical to SEQ ID NO: 81485
  derived and/or modified CDS sequence (opt1) from neuraminidase__InfluenzaA__AEX35046

SEQ ID NO: 85555 - RNA, 1413 nt, Artificial Sequence; identical to SEQ ID NO: 81485
  derived and/or modified CDS sequence (opt1) from neuraminidase__InfluenzaA__AEX35057

SEQ ID NO: 85556 - RNA, 1413 nt, Artificial Sequence; identical to SEQ ID NO: 81485
  derived and/or modified CDS sequence (opt1) from neuraminidase__InfluenzaA__AEX35068

SEQ ID NO: 85557 - RNA, 1413 nt, Artificial Sequence
  derived and/or modified CDS sequence (opt1) from neuraminidase__InfluenzaA__AEX35079
augaaccccaaccagaagaucaucaccaucggcagcaucuccaucgccaucgggaucaucagccugaugcuccagaucggcaacaucaucuccaugugggccagccacuccauccagaccgggagccagaacaacacgggcaucugcaaccagcgcaucaucaccuacgagaacuccaccugggugaaccacaccuacgucaacaucaacaacacgaacgugguggcgggggaggacaagaccagcgucacccuggccggcaacuccagccugugcuccaucagcggcugggccaucuacaccaaggacaacuccauccggaucgggagcaagggcgacguguucgugauccgcgagccguucaucuccugcagccaccucgagugccggacguucuuccugacccagggggcccugcucaacgacaagcacuccaacggcaccgucaaggaccgcagccccuaccgggcccugauguccugcccccugggggaggcgcccagcccguacaacagcaaguucgaguccguggccuggagcgccuccgccugccacgacggcaugggcuggcucaccaucgggaucagcggccccgacaacggggcgguggccguccugaaguacaacggcaucaucacgggcaccaucaaguccuggaagaagcagauccugcgcacccaggagagcgagugcgugugcaugaacggguccugcuucaccaucaugacggacggccccagcaacaaggccgccuccuacaagaucuucaagaucgagaaggggaaggugaccaagagcaucgagcucaacgcccccaacuucuacuacgaggagugcuccugcuacccggacaccggcaucgucaugugcgugugccgggacaacuggcacgggagcaaccgccccuggguguccuucaaccaggaccuggacuaccagaucggcuacaucugcagcggcgucuucggggacaacccccggcccgaggacggcgagggguccugcaacccggugaccguggacggcgcgaacggggucaagggcuucagcuacaaguacggcaacgggguguggaucggccgcacgaaguccaaccggcugcgcaagggguucgagaugaucugggaccccaacggcuggaccaacaccgacagcgacuucuccgugaagcaggacgucguggccaucaccgacuggagcggguacagcggcuccuucgugcagcaccccgagcucacgggccuggacugcauccggcccugcuucugggucgagcuggugcgcgggcucccgcgggagaacaccaccaucuggaccagcggcuccagcaucuccuucugcggggucaacagcgacacggccaacugguccuggcccgacggcgccgagcugcccuucaccaucgacaaguga

SEQ ID NO: 85558 - RNA, 1413 nt, Artificial Sequence; identical to SEQ ID NO: 85532
  derived and/or modified CDS sequence (opt1) from neuraminidase__InfluenzaA__AEX35090

SEQ ID NO: 85559 - RNA, 1413 nt, Artificial Sequence
  derived and/or modified CDS sequence (opt1) from neuraminidase__InfluenzaA__AEX35101
augaaccccaaccagaagaucaucaccaucggcagcaucuccaucgccaucgggaucaucagccugaugcuccagaucggcaacaucaucuccaucugggccagccacuccauccagaccgggagccagaacaacacgggcaucugcaaccagcgcaucaucaccuacgagaacuccaccugggugaaccacaccuacgucaacaucaacaacacgaacgugguggcgggggaggacaagaccagcgucacccuggccggcaacuccagccugugcuccaucagcggcugggccaucuacaccaaggacaacuccauccggaucgggagcaagggcgacguguucgugauccgcgagccguucaucuccugcagccaccucgagugccggacguucuuccugacccagggggcccugcucaacgacaagcacuccaacggcaccgucaaggaccgcagccccuaccgggcccugauguccugcccccugggggaggcgcccagcccguacaacagcaaguucgaguccguggccuggagcgccuccgccugccacgacggcaugggcuggcucaccaucgggaucagcggccccgacaacggggcgguggccguccugaaguacaacggcaucaucacgggcaccaucaaguccuggaagaagcagauccugcgcacccaggagagcgagugcgugugcaugaacggguccugcuucaccaucaugacggacggccccagcaacaaggccgccuccuacaagaucuucaagaucgagaaggggaaggugaccaagagcaucgagcucaacgcccccaacuuccacuacgaggagugcuccugcuacccggacaccggcaucgucaugugcgugugccgggacaacuggcacgggagcaaccgccccuggguguccuucaaccagaaccuggacuaccagaucggcuacaucugcagcggcgucuucggggacaacccccggcccgaggacggcgagggguccugcaacccggugaccguggacggcgcgaacggggucaagggcuucagcuacaaguacgacaacggcguguggaucgggcgcacgaaguccaaccggcugcgcaagggcuucgagaugaucugggaccccaacggguggaccaacaccgacagcguguucuccgucaagcaggacgugguggccaucaccgacuggagcggcuacagcggguccuucguccagcaccccgagcucacgggccuggacugcauccggcccugcuucuggguggagcugguccgcggccucccgcgggagaacaccaccaucuggaccagcggguccagcaucuccuucugcggcgugaacagcgacacggccaacugguccuggcccgacggggccgagcugcccuucaccaucgacaaguga

SEQ ID NO: 85560 - RNA, 1413 nt, Artificial Sequence
  derived and/or modified CDS sequence (opt1) from neuraminidase__InfluenzaA__AEX35112
augaaccccaaccagaagaucaucaccaucggcagcaucuccaucgccaucgggaucaucagccugaugcuccagaucggcaacaucaucuccaucugggccagccacuccauccagaccgggagccagaacaacacgggcaucugcaaccagcgcaucaucaccuacgagaacuccaccugggugaaccacaccuacgucaacaucaacaacacgaacgugguggcgggggaggacaagaccagcgucacccuggccggcaacuccagccugugcuccaucagcggcugggccaucuacaccaaggacaacuccauccggaucgggagcaagggcgacguguucgugauccgcgagccguucaucuccugcagccaccucgagugccggacguucuuccugacccagggggcccugcucaacgacaagcacuccaacggcaccgucaaggaccgcagccccuaccgggcccugauguccugcccccugggggaggcgcccagcccguacaacagcaaguucgaguccguggccuggagcgccuccgccugccacgacggcaugggcuggcucaccaucgggaucagcggccccgacaacggggcgguggccguccugaaguacaacggcaucaucacgggcaccaucaaguccuggaagaagcagauccugcgcacccaggagagcgagugcgugugcaugaacggguccugcuucaccaucaugacggacggccccagcaacaaggccgccuccuacaagaucuucaagaucgagaaggggaaggugaccaagagcaucgagcucaacgccuccaacuucuacuacgaggagugcagcugcuaccccgacaccggcaucgucaugugcgugugccgggacaacuggcacggguccaaccgcccgugggugagcuucaaccagaaccuggacuaccagaucggcuacaucugcuccggcgucuucggggacaacccccggcccgaggacggcgaggggagcugcaaccccgugaccguggacggcgcgaacggggucaagggcuucuccuacaaguacggcaacgggguguggaucggccgcaccaagagcaaccggcugcgcaagggguucgagaugaucugggacccgaacggcuggacgaacaccgacuccgacuucagcgugaagcaggacgucguggccaucaccgacuggagcggguacuccggcagcuucgugcagcaccccgagcucacgggccuggacugcauccggcccugcuucugggucgagcuggugcgcgggcucccccgggagaacaccaccaucuggaccuccggcagcuccaucagcuucugcggggucaacuccgacacggccaacuggagcuggccggacggcgccgagcugcccuucaccaucgacaaguga

SEQ ID NO: 85561 - RNA, 1413 nt, Artificial Sequence; identical to SEQ ID NO: 81485
  derived and/or modified CDS sequence (opt1) from neuraminidase__InfluenzaA__AEX35123

SEQ ID NO: 85562 - RNA, 1413 nt, Artificial Sequence
  derived and/or modified CDS sequence (opt1) from neuraminidase__InfluenzaA__AEX35145
augaaccccaaccagaagaucaucaccaucggcagcaucuccaucgccaucgggaucaucagccugaugcuccagaucggcaacaucaucuccaucugggccagccacuccauccagaccgggagccagaacaacacgggcaucugcaaccagcgcaucaucaccuacgagaacuccaccugggugaaccacaccuacgucaacaucaacaacacgaacgugguggcgggggaggacaagaccagcgucacccuggccggcaacuccagccugugcuccaucagcggcugggccaucuacaccaaggacaacuccauccggaucgggagcaagggcgacguguucgugauccgcgagccguucaucuccugcagccaccucgagugccggacguucuuccugacccagggggcccugcucaacgacaagcacuccaacggcaccgucaaggaccgcagccccuaccgggcccugauguccugcccccugggggaggcgcccagcccguacaacagcaaguucgaguccguggccuggagcgccuccgccugccacgacggcaugggcuggcucaccaucgggaucagcggccccgacaacggggcgguggccguccugaaguacaacggcaucaucacgggcaccaucaaguccuggaagaagcagauccugcgcacccaggagagcgagugcgugugcaugaacggguccugcuucaccaucaugacggacggccccagcaacaaggccgccuccuacaagaucuucaagaucgagaaggggaaggugaccaagagcaucgagcucaacgcccccaacuucuacuacgaggagugcuccugcuacccggacaccggcaucgucaugugcgugugccgggacaacuggcacgggagcaaccgccccuggguguccuucaaccagaaccuggacuaccagaucggcuacaucugcagcggcgucuucggggacaacccccggcccgaggacggcgagggguccugcaacccggugaccguggacggcgcgaacggggucaagggcuucagcuacaaguacggcaacgggguguggaucggccgcacgaaguccaaccggcugcgcaagggguucgagaugaucugggaccccaacggcuggaccaacaccgacagcgacuucuccgugaagcaggacaucgucgccaucaccgacuggagcggguacagcggcuccuucgugcagcaccccgagcucacgggccuggacugcauccggcccugcuucuggguggagcugguccgcgggcucccgcgggagaacaccaccaucuggaccagcggcuccagcaucuccuucugcggggugaacagcgacacggccaacugguccuggcccgacggcgccgagcugcccuucaccaucgacaaguga

SEQ ID NO: 85563 - RNA, 1413 nt, Artificial Sequence; identical to SEQ ID NO: 85532
  derived and/or modified CDS sequence (opt1) from neuraminidase__InfluenzaA__AEX35156

SEQ ID NO: 85564 - RNA, 1413 nt, Artificial Sequence; identical to SEQ ID NO: 81485
  derived and/or modified CDS sequence (opt1) from neuraminidase__InfluenzaA__AEX35167

SEQ ID NO: 85565 - RNA, 1413 nt, Artificial Sequence
  derived and/or modified CDS sequence (opt1) from neuraminidase__InfluenzaA__AEX35178
augaaccccaaccagaagaucaucaccaucggcagcaucuccaucgccaucgggaucaucagccugaugcuccagaucggcaacaucaucuccaucugggccagccacuccauccagaccgggagccagaaccacacgggcaucugcaaccagcgcaucaucaccuacgagaacuccaccugggugaaccacaccuacgucaacaucaacaacacgaacgugguggcggggaaggacaagaccagcgucacccuggccggcaacuccagccugugcuccaucagcggcugggccaucuacaccaaggacaacuccauccggaucgggagcaagggcgacguguucgugauccgcgagccguucaucuccugcagccaccucgagugccggacguucuuccugacccagggggcccugcucaacgacaagcacuccaacggcaccgucaaggaccgcagccccuaccgggcccugauguccugcccccugggggaggcgcccagcccguacaacagcaaguucgaguccguggccuggagcgccuccgccugccacgacggcaugggcuggcucaccaucgggaucagcggccccgacaacggggcgguggccguccugaaguacaacggcaucaucacggagaccaucaaguccuggaaggagcgcauccugcggacccaggagagcgagugcgugugcgugaacggcuccugcuucaccaucaugacggacgggcccagcaacggcgccgccuccuacaagaucuucaagaucgagaaggggaaggucaccaagagccgcgagcucaacgcccccaacuuccacuacgaggagugcuccugcuacccggacaccggcaccgugaugugcgugugccgggacaacuggcacgggagcaaccgccccugggucuccuucaaccagaaccuggacuaccagaucggcuacaucugcagcggcguguucggggacaacccccggcccaaggacggcaagggguccugcaacccggugacggcggacggcgccgacggggucaagggcuucagcuacaaguacggcaacgggguguggaucggccgcaccaaguccaaccggcugcgcaagggguucgagaugaucugggaccccaacggcuggaccgacaccgacagcgacuucuccgugaagcaggacgucguggccaucacggacuggagcggguacagcggcuccuucgugcagcaccccgagcucaccggccuggacugcauccggcccugcuucugggucgagcuggugcgcgggcucccgcgggagaacaccaccaucuggacgagcggcuccagcaucuccuucugcggggucgacagcgacaccgccaacugguccuggcccgacggcgccgagcugcccuucaccaucgacaaguga

SEQ ID NO: 85566 - RNA, 1413 nt, Artificial Sequence; identical to SEQ ID NO: 85506
  derived and/or modified CDS sequence (opt1) from neuraminidase__InfluenzaA__AEX35189

SEQ ID NO: 85567 - RNA, 1413 nt, Artificial Sequence; identical to SEQ ID NO: 85506
  derived and/or modified CDS sequence (opt1) from neuraminidase__InfluenzaA__AEX35200

SEQ ID NO: 85568 - RNA, 1413 nt, Artificial Sequence; identical to SEQ ID NO: 81485
  derived and/or modified CDS sequence (opt1) from neuraminidase__InfluenzaA__AEX35211

SEQ ID NO: 85569 - RNA, 1410 nt, Artificial Sequence
  derived and/or modified CDS sequence (opt1) from neuraminidase__InfluenzaA__AEX35222
augaaccccaaccagaagaucaucaccaucggcagcgugucccugaccaucagcacgaucugcuucuucaugcagaucgccauccucgucaccaccgugacccugcacuucaagcaguacgagugcaacuccccgcccaacaaccaggugaugcugugcgagcccacgaucaucgagcgcaacaucaccgagaucgucuaccucaccaacaccacgaucgagaaggagaucugccccaagcuggccgaguaccggaacuggagcaagccgcagugcaacaucaccggguucgcgcccuucuccaaggacaacagcauccgccuguccgccggcggggacaucugggugacccgggagcccuacgugagcugcgaccccgacaagugcuaccaguucgcccucggccaggggaccacgcugaacaacggccacuccaacgacaccguccacgaccgcaccccguaccggacccugcucaugaacgagcugggcgugcccuuccaccuggggacgaagcaggucugcaucgccuggagcuccagcuccugccacgacggcaaggccuggcuccacgugugcgugaccggggacgacgagaacgcgaccgccagcuucaucuacaacggccgccugguggacuccaucgggagcugguccaagaagauccugcggacccaggagagcgagugcgucugcaucaacggcacgugcaccguggugaugaccgacggcuccgccagcgggaaggccgacaccaagauccucuucaucgaggagggcaagaucguccacacgagcacccuguccgggagcgcgcagcacguggaggagugcuccugcuacccccgcuaccccggcgugcggugcgucugccgcgacaacuggaagggcagcaaccggccgaucguggacaucaacaucaaggacuacuccaucgugagcuccuacgucugcagcgggcuggugggcgacacgccccgcaagaacgacuccagcuccagcucccacugccucgaccccaacaacgaggagggcgggcacggggugaagggcugggccuucgacgacggcaacgacgucuggauggggcggaccaucagcgagaagcugcgcuccggcuacgagaccuucaaggugaucgagggguggagcaagcccaacuccaagcugcagaucaaccggcaggucaucguggaccgcggcaaccggagcggguacuccggcaucuucagcguggagggcaagagcugcaucaaccgcugcuucuacgucgagcucauccgggggcgcaagcaggagaccgaggugcuguggaccuccaacagcaucguggucuucugcggcaccuccgggacguacggcaccgggagcuggccggacggcgccgacaucaaccugaugcccaucuga

SEQ ID NO: 85570 - RNA, 1413 nt, Artificial Sequence; identical to SEQ ID NO: 85465
  derived and/or modified CDS sequence (opt1) from neuraminidase__InfluenzaA__AEX35233

SEQ ID NO: 85571 - RNA, 1410 nt, Artificial Sequence
  derived and/or modified CDS sequence (opt1) from neuraminidase__InfluenzaA__AEX35244
augaaccccaaccagaagaucaucaccaucggcagcgugucccugaccaucagcacgaucugcuucuucaugcagaucgccauccucaucaacaccgucacccugcacuucaagcaguacgaguucaacuccccgcccaacaaccaggugaugcugugcgagcccaccaucaucgagcgcaacaucacggagaucguguaccucaccaacaccaccaucgagaaggagaucugccccaagcuggccgaguaccggaacuggagcaagccgcagugcaacaucacgggguucgcgcccuucuccaaggacaacagcauccgccuguccgccggcggggacaucugggucacccgggagcccuacgugagcugcgaccccgacaagugcuaccaguucgcccucggccaggggaccacccugaacaacgugcacuccaacgacacgguccacgaccgcaccccguaccggacccugcucaugaacgagcugggcgugcccuuccaccugggcaccaagcaggucugcaucgccuggagcuccagcuccugccacgacgggaaggccuggcuccacgugugcgugacgggcgacgacaagaacgcgaccgccagcuucaucuacaacgggcgccugguggacuccaucgucagcugguccaagaagauccugcggacccaggagagcgagugcgugugcaucaacgggaccugcacgguggucaugaccgacggguccgccagcggcaaggccgacaccaagauccucuucaucgaggagggcaagaucgugcacaccagcacgcuguccgggagcgcgcagcacguggaggagugcuccugcuacccccgcuaccccggcguccggugcgugugccgcgacaacuggaaggggagcaaccggccgaucguggacaucaacaucaaggacuacuccaucgucagcuccuacgugugcagcggccuggugggcgacacgccccgcaagaacgacuccagcuccagcucccacugccucgaccccaacaacgaggagggcggcaacggggucaagggcugggccuucgacgacgggaacgacguguggaugggccggaccaucagcgagaagcugcgcuccggcuacgagaccuucaaggucaucgagggguggagcaaccccaacuccaagcugcagaucaaccgccaggugaucguggaccggggcaaccggagcggguacuccggcaucuucagcgucgagggcaagagcugcaucaaccgcugcuucuacguggagcucauccgggggcgcaagcaggagaacgaggugcuguggaccuccaacagcaucgucguguucugcggcaccuccgggaccuacggcaccgggagcuggccggacggcgccgacaucaaccugaugcccguguga

SEQ ID NO: 85572 - RNA, 1410 nt, Artificial Sequence; identical to SEQ ID NO: 79953
  derived and/or modified CDS sequence (opt1) from neuraminidase__InfluenzaA__AEX35255

SEQ ID NO: 85573 - RNA, 1413 nt, Artificial Sequence; identical to SEQ ID NO: 85465
  derived and/or modified CDS sequence (opt1) from neuraminidase__InfluenzaA__AEX35266

SEQ ID NO: 85574 - RNA, 1413 nt, Artificial Sequence; identical to SEQ ID NO: 85465
  derived and/or modified CDS sequence (opt1) from neuraminidase__InfluenzaA__AEX35277

SEQ ID NO: 85575 - RNA, 1410 nt, Artificial Sequence
  derived and/or modified CDS sequence (opt1) from neuraminidase__InfluenzaA__AEX35288
augaaccccaaccagaagaucaucaccaucggcagcgugucccugaccaucagcacgaucugcuucuucaugcagaucgccauccucaucaccaccgucacccugcacuucaagcaguacgaguucaacuccccgcccaacaaccaggugaugcugugcgagcccacgaucaucgagcgcaacaucaccgagaucguguaccucaccaacaccacgaucgagaaggagaucugccccaagcuggccgaguaccggaacuggagcaagccgcagugcgacaucaccggguucgcgcccuucuccaaggacaacagcauccgccuguccgccggcggggacaucugggucacccgggagcccuacgugagcugcgaccccgacaagugcuaccaguucgcccucggccaggggaccacgcugaacaacgugcacuccaacgacaccguccacaaccgcaccccguaccggacccugcucaugaacgagcugggcgugcccuuccaccugggcacgaagcaggucugcaucgccuggagcuccagcuccugccacgacgggaaggccuggcuccacgugugcgugaccggcgacgacaagaacgcgaccgccagcuucaucuacaacgggcgccugguggacuccaucgucagcugguccaagaagauccugcggacccaggagagcgagugcgugugcaucaacggcacgugcaccguggucaugaccgacggguccgccagcggcaaggccgacaccaagauccucuucaucgaggagggcaagaucgugcacacgagcacccuguccgggagcgcgcagcacguggaggagugcuccugcuacccccgcuaccccggcguccggugcgugugccgcgacaacuggaaggggagcaaccggccgaucguggacaucaacaucaaggacuacuccaucgucagcuccuacgugugcagcggccuggugggcgacacgccccgcaagaacgacuccagcuccagcucccacugccucgaccccaacaacgaggagggcgggcacggggucaagggcugggccuucgacgacgggaacgacguguggaugggccggaccaucagcgagaagcugcgcuccggcuacgagaccuucaaggucaucgagggguggagcaaccccaacuccaagcugcagaucaaccgccaggugaucguggaccggggcaaccggagcggguacuccggcaucuucagcgucgagggcaagagcugcaucaaccgcugcuucuacguggagcucauccgggggcgcaaggaggagaccgaggugcuguggaccuccaacagcaucgucguguucugcggcaccuccgggacguacggcaccgggagcuggccggacggcgccgacaucaaccugaugcccaucuga

SEQ ID NO: 85576 - RNA, 1410 nt, Artificial Sequence; identical to SEQ ID NO: 78738
  derived and/or modified CDS sequence (opt1) from neuraminidase__InfluenzaA__AEX35299

SEQ ID NO: 85577 - RNA, 1410 nt, Artificial Sequence
  derived and/or modified CDS sequence (opt1) from neuraminidase__InfluenzaA__AEX35310
augaaccccaaccagaagaucaucaccaucggcagcgugucccugaccaucagcacgaucugcuucuucaugcagaucgccauccucaucaccaccgucacccugcacuucaagcaguacgaguucaacuccccgcccaacaaccaggugaugcugugcgagcccacgaucaucgagcgcaacaucaccgagaucguguaccucaccaacaccacgaucgagaaggagaucugccccaagcuggccgaguaccggaacuggagcaagccgcagugcaacaucaccggguucgcgcccuucuccaaggacaacagcauccgccuguccgccggcggggacaucugggucacccgggagcccuacgugagcugcgaccccgacaagugcuaccaguucgcccucggccaggggaccacgcugaacaacgugcacuccaacgacaccguccacgaccgcaccccguaccggacccugcucaugaacgagcugggcgugcccuuccaccugggcacgaagcaggucugcaucgccuggagcuccagcuccugccacgacgggaaggccuggcuccacgugugcgugaccggcgacgacgagaacgcgaccgccagcuucaucuacaacgggcgccugguggacuccaucgucagcugguccaagaagauccugcggacccaggagagcgagugcgugugcaucaacggcacgugcaccguggucaugaccgacggguccgccagcggcaaggccgacaccaagauccucuucaucgaggagggcaagaucgugcacacgagcacccuguccgggagcgcgcagcacguggaggagugcuccugcuacccccgcuaccccggcguccggugcgugugccgcgacaacuggaaggggagcaaccggccgaucguggacaucaacaucaaggacuacuccaucgucagcuccuacgugugcagcggccuggugggcgacacgccccgcaagaacgacuccagcuccagcucccacugccucgaccccaacaacgaggagggcgggcacggggucaagggcugggccuucgacgacggggacgacguguggaugggccggaccaucagcgagaagcugcgcuccggcuacgagaccuucaaggucaucgagggguggagcaaccccaacuccaagcugcagaucaaccgccaggugaucguggaccggggcaaccggagcggguacuccggcaucuucagcgucgagggcaagagcugcaucaaccgcugcuucuacguggagcucauccgggggcgcaaccaggagaccgaggugcuguggaccuccaacagcaucgucguguucugcggcaccuccgggacguacggcaccgggagcuggccggacggcgccgacaucaaccugaugcccaucuga

SEQ ID NO: 85578 - RNA, 1410 nt, Artificial Sequence; identical to SEQ ID NO: 78738
  derived and/or modified CDS sequence (opt1) from neuraminidase__InfluenzaA__AEX35321

SEQ ID NO: 85579 - RNA, 1410 nt, Artificial Sequence; identical to SEQ ID NO: 79953
  derived and/or modified CDS sequence (opt1) from neuraminidase__InfluenzaA__AEX35332

SEQ ID NO: 85580 - RNA, 1410 nt, Artificial Sequence; identical to SEQ ID NO: 79953
  derived and/or modified CDS sequence (opt1) from neuraminidase__InfluenzaA__AEX35343

SEQ ID NO: 85581 - RNA, 1410 nt, Artificial Sequence
  derived and/or modified CDS sequence (opt1) from neuraminidase__InfluenzaA__AEX35354
augaaccccaaccagaagaucaucaccaucggcagcgugucccugaccaucagcacgaucugcuucuucaugcagaucgccauccucaucaccaccgucacccugcacuucaagcaguacgaguucaacuccccgcccaacaaccaggugaugcugugcgagcccacgaucaucgagcgcaacaucaccgagaucguguaccucaccaacaccacgaucgagaaggagaucugccccaagcuggccgaguaccggaacuggagcaagccgcagugcgacaucaccggguucgcgcccuucuccaaggacaacagcauccgccuguccgccggcggggacaucugggucacccgggagcccuacgugagcugcgaccccgacaagugcuaccaguucgcccucggccaggggaccacgcugaacaacgugcacuccaacgacaccguccacgaccgcaccccguaccggacccugcucaugaacgagcugggcgugcccuuccaccugggcacgaagcaggucugcaucgccuggagcuccagcuccugccacgacgggaaggccuggcuccacgugugcgugaccggcgacgacaagaacgcgaccgccagcuucaucuacaacgggcgccugguggacuccaucgucagcugguccaagaagauccugcggacccaggagagcgagugcgugugcaucaacggcacgugcaccguggucaugaccgacggguccaccagcggcaaggccgacacgaagauccucuucaucgaggagggcaagaucgugcacaccagcacccuguccgggagcgcccagcacguggaggagugcuccugcuacccccgcuaccccggcguccggugcgugugccgcgacaacuggaaggggagcaaccggccgaucguggacaucaacaucaaggacuacuccaucgucagcuccuacgugugcagcggccuggugggcgacacgccccgcaagaacgacuccagcuccagcucccacugccucgaccccaacaacgaggagggcgggcacggggucaagggcugggcguucgacgacgggaacgacguguggaugggccggaccaucagcgagaagcugcgcuccggcuacgagaccuucaaggucaucgagggguggagcaaccccaacuccaagcugcagaucaaccgccaggugaucguggaccggggcaaccggagcggguacuccggcaucuucagcgucgagggcaagagcugcaucaaccgcugcuucuacguggagcucauccgggggcgcaaggaggagaccgaggugcuguggaccuccaacagcaucgucguguucugcggcacguccgggaccuacggcaccgggagcuggccggacggcgccgacaucaaccugaugcccaucuga

SEQ ID NO: 85582 - RNA, 1410 nt, Artificial Sequence; identical to SEQ ID NO: 78738
  derived and/or modified CDS sequence (opt1) from neuraminidase__InfluenzaA__AEX35365

SEQ ID NO: 85583 - RNA, 1410 nt, Artificial Sequence
  derived and/or modified CDS sequence (opt1) from neuraminidase__InfluenzaA__AEX35376
augaaccccaaccagaagaucaucaccaucggcagcgugucccugaccaucagcacgaucugcuucuucaugcagaucgccauccucaucaccaccgucacccugcacuucaagcaguacgaguucaacuccccgcccaacaaccaggugaugcugugcgagcccacgaucaucgagcgcaacaucaccgagaucguguaccucaccaacaccacgaucgagaaggagaucugccccaagcuggccgaguaccggaacuggagcaagccgcagugcgacaucaccggguucgcgcccuucuccaaggacaacagcauccgccuguccgccggcggggacaucugggucacccgggagcccuacgugagcugcgaccccgacaagugcuaccaguucgcccucggccaggggaccacgcugaacaacgugcacuccaacgacaccguccacgagcgcaccccguaccggacccugcucaugaacgagcugggcgugcccuuccaccugggcacgaagcaggucugcaucgccuggagcuccagcuccugccacgacgggaaggccuggcuccacgugugcgugaccggcgacgacaagaacgcgaccgccagcuucaucuacaacgggcgccugguggacuccaucgucagcugguccaagaagauccugcggacccaggagagcgagugcgugugcaucaacggcacgugcaccguggucaugaccgacggguccgccagcggcaaggccgacaccaagauccucuucaucgaggagggcaagaucgugcacacgagcacccuguccgggagcgcgcagcacguggaggagugcuccugcuacccccgcuaccccggcguccggugcgugugccgcgacaacuggaaggggagcaaccggccgaucguggacaucaacaucaaggacuacuccaucgucagcuccuacgugugcagcggccuggugggcgacacgccccgcaagaacgacuccagcuccagcucccacugccucgaccccaacaacgaggagggcgggcacggggucaagggcugggccuucgacgacgggaacgacguguggaugggccggaccaucagcgagaagcugcgcuccggcuacgagaccuucaaggucaucgagggguggagcaaccccaacuccaagcugcagaucaaccgccaggugaucguggaccggggcaaccggagcggguacuccggcaucuucagcgucgagggcaagagcugcaucaaccgcugcuucuacguggagcucauccgggggcgcaaggaggagaccgaggugcuguggaccuccaacagcaucgucguguucugcggcaccuccgggacguacggcaccgggagcuggccggacggcgccgacaucaaccugaugcccaucuga

SEQ ID NO: 85584 - RNA, 1410 nt, Artificial Sequence; identical to SEQ ID NO: 78738
  derived and/or modified CDS sequence (opt1) from neuraminidase__InfluenzaA__AEX35387

SEQ ID NO: 85585 - RNA, 1410 nt, Artificial Sequence
  derived and/or modified CDS sequence (opt1) from neuraminidase__InfluenzaA__AEX35398
augaaccccaaccagaagaucaucaccaucggcagcgugucccugaccaucagcacgaucugcuucuucaugcagaucgccauccucaucaccaccgucacccugcacuucaagcaguacgaguucaacuccccgcccaacaaccaggugaugcugugcgagcccacgaucaucgagcgcaacaucaccgagaucguguaccucaccaacaccacgaucgagaaggagaucugccccaagcuggccgaguaccggaacuggagcaagccgcagugcgacaucaccggguucgcgcccuucuccaaggacaacagcauccgccuguccgccggcggggacaucugggucacccgggagcccuacgugagcugcgaccccgacaagugcuaccaguucgcccucggccaggggaccacgcugaacaacgugcacuccaacgacaccguccacgaccgcaccccguaccggacccugcucaugaacgagcugggcgugcccuuccaccugggcacgaagcaggucugcaucgccuggagcuccagcuccugccacgacgggaaggccuggcuccacgugugcgugaccggcgacgacaagaacgcgaccgccagcuucaucuacaacgggcgccugguggacuccaucgucagcugguccaagaagauccugcggacccaggagagcgagugcgugugcaucaacggcacgugcgccguggucaugaccgacggguccgccagcggcaaggcggacaccaagauccucuucaucgaggagggcaagaucgugcacaccagcacgcuguccgggagcgcccagcacguggaggagugcuccugcuacccccgcuaccccggcguccggugcgugugccgcgacaacuggaaggggagcaaccggccgaucguggacaucaacaucaaggacuacuccaucgucagcuccuacgugugcagcggccuggugggcgacacgccccgcaagaacgacuccagcuccagcucccacugccucgaccccaacaacgaggagggcgggcacggggucaagggcugggccuucgacgacgggaacgacguguggaugggccggaccaucagcgagaagcugcgcuccggcuacgagaccuucaaggucaucgagggguggagcaaccccaacuccaagcugcagaucaaccgccaggugaucguggaccggggcaaccggagcggguacuccggcaucuucagcgucgagggcaagagcugcaucaaccgcugcuucuacguggagcucauccgggggcgcaaggaggagaccgaggugcuguggaccuccaacagcaucgucguguucugcggcaccuccgggaccuacggcacggggagcuggccggacggcgccgacaucaaccugaugcccaucuga

SEQ ID NO: 85586 - RNA, 1410 nt, Artificial Sequence; identical to SEQ ID NO: 78738
  derived and/or modified CDS sequence (opt1) from neuraminidase__InfluenzaA__AEX35409

SEQ ID NO: 85587 - RNA, 1410 nt, Artificial Sequence; identical to SEQ ID NO: 85575
  derived and/or modified CDS sequence (opt1) from neuraminidase__InfluenzaA__AEX35420

SEQ ID NO: 85588 - RNA, 1410 nt, Artificial Sequence
  derived and/or modified CDS sequence (opt1) from neuraminidase__InfluenzaA__AEX35431
augaaccccaaccagaagaucaucaccaucggcagcgugucccugaccaucagcacgaucugcuucuucaugcagaucgccauccucaucaccaccgucacccugcacuucaagcaguacgaguucaacuccccgcccaacaaccaggugaugcugugcgagcccacgaucaucgagcgcaacaucaccgagaucguguaccucaccaacaccacgaucgagaaggagaucugccccaagcuggccgaguaccggaacuggagcaagccgcagugcaacaucaccggguucgcgcccuucuccaaggacaacagcauccgccuguccgccggcggggacaucugggucacccgggagcccuacgugagcugcgaccccgacaagugcuaccaguucgcccucggccaggggaccacgcugaacaacgugcacuccaacgacaccguccacgaccgcaccccguaccggacccugcucaugaacgagcugggcgugcccuuccaccugggcacgaagcaggucugcaucgccuggagcuccagcuccugccacgacgggaaggccuggcuccacgugugcgugaccggcgacgacgagaacgcgaccgccagcuucaucuacaacgggcgccugguggacuccaucgucagcugguccaagaagauccugcggacccaggagagcgagugcgugugcaucaacggcacgugcaccguggucaugaccgacggguccgccagcggcaaggccgacaccaagauccucuucaucgaggagggcaagaucgugcacacgagcacccuguccgggagcgcgcagcacguggaggagugcuccugcuacccccgcuaccccggcguccggugcgugugccgcgacaacuggaaggggagcaaccggccgaucguggacaucaacaucaaggacuacuccaucgucagcuccuacgugugcagcggccuggugggcgacacgccccgcaagaacgacuccagcuccagcucccacugccucgaccccaacaacgaggagggcgggcacggggucaagggcugggccuucgacgacgggaacgacguguggaugggccggaccaucagcgagaagcugcgcuccggcuacgagaccuucaaggucaucgagggguggagcaaccccaacuccaagcugcagaucaaccgccaggugaucguggaccggggcaaccggagcggguacuccggcaucuucagcgucgagggcaagagcugcaucaaccgcugcuucuacguggagcucauccgggggcgcaagaaggagaccgaggugcuguggaccuccaacagcaucgucguguucugcggcaccuccgggacguacggcaccgggagcuggccggacggcgccgacaucaaccugaugcccaucuga

SEQ ID NO: 85589 - RNA, 1410 nt, Artificial Sequence; identical to SEQ ID NO: 78736
  derived and/or modified CDS sequence (opt1) from neuraminidase__InfluenzaA__AEX35453

SEQ ID NO: 85590 - RNA, 1410 nt, Artificial Sequence; identical to SEQ ID NO: 78736
  derived and/or modified CDS sequence (opt1) from neuraminidase__InfluenzaA__AEX35464

SEQ ID NO: 85591 - RNA, 1410 nt, Artificial Sequence; identical to SEQ ID NO: 78736
  derived and/or modified CDS sequence (opt1) from neuraminidase__InfluenzaA__AEX35475

SEQ ID NO: 85592 - RNA, 1410 nt, Artificial Sequence; identical to SEQ ID NO: 78736
  derived and/or modified CDS sequence (opt1) from neuraminidase__InfluenzaA__AEX35486

SEQ ID NO: 85593 - RNA, 1410 nt, Artificial Sequence
  derived and/or modified CDS sequence (opt1) from neuraminidase__InfluenzaA__AEX35497
augaaccccaaccagaagaucaucaccaucggcagcgugucccugaccaucagcacgaucugcuucuucaugcagaucgccauccucaucaccaccgucacccugcacuucaagcaguacgaguucaacuccccgcccaacaaccaggugaugcugugcgagcccacgaucaucgagcgcaacaucaccgagaucguguaccucaccaacaccacgaucgagaaggagaagugccccaagcuggccgaguaccggaacuggagcaagccgcagugcaacaucaccggguucgcgcccuucuccaaggacaacagcauccgccuguccgccggcggggacaucugggucacccgggagcccuacgugagcugcgaccccgacaagugcuaccaguucgcccucggccaggggaccacgcugaacaacgugcacuccaacgacaccguccacgaccgcaccccguaccggacccugcucaugaacgagcugggcgugcccuuccaccugggcacgaagcaggucugcaucgccuggagcuccagcuccugccacgacgggaaggccuggcuccacgugugcgugaccggcgacgacaagaacgcgaccgccagcuucaucuacaacgggcgccugguggacuccaucgucagcugguccaaggagauccugcggacccaggagagcgagugcgugugcaucaacggcacgugcaccguggucaugaccgacggguccgccagcggcaaggccgacaccaagauccucuucaucgaggagggcaagaucgugcacacgagcacccuguccgggagcgcgcagcacguggaggagugcuccugcuacccccgcuaccccggcguccggugcgugugccgcgacaacuggaaggggagcaaccggccgaucguggacaucaacaucaaggacuacuccaucgucagcuccuacgugugcagcggccuggugggcgacacgccccgcaagaacgacuccagcuccagcucccacugccucgaccccaacaacgaggagggcgggcacggggucaagggcugggccuucgacgacgggaacgacguguggaugggccggaccaucagcgagaagcugcgcuccggcuacgagaccuucaaggucaucgagggguggagcaaccccaacuccaagcugcagaucaaccgccaggugaucguggaccggggcaaccggagcggguacuccggcaucuucagcgucgagggcaagagcugcaucaaccgcugcuucuacguggagcucauccgggggcgcaaggaggagaccgaggugcuguggaccuccaacagcaucgucguguucugcggcaccuccgggacguacggcaccgggagcuggccggacggcgccgacaucaaccugaugcccaucuga

SEQ ID NO: 85594 - RNA, 1410 nt, Artificial Sequence; identical to SEQ ID NO: 78736
  derived and/or modified CDS sequence (opt1) from neuraminidase__InfluenzaA__AEX35508

SEQ ID NO: 85595 - RNA, 1410 nt, Artificial Sequence; identical to SEQ ID NO: 85593
  derived and/or modified CDS sequence (opt1) from neuraminidase__InfluenzaA__AEX35519

SEQ ID NO: 85596 - RNA, 1410 nt, Artificial Sequence
  derived and/or modified CDS sequence (opt1) from neuraminidase__InfluenzaA__AEX35530
augaaccccaaccagaagaucaucaccaucggcagcgugucccugaccaucagcacgaucugcuucuucaugcagaucgccauccucaucaccaccgucacccugcacuucaagcaguacgaguucaacuccccgcccaacaaccaggugaugcagugcgagcccacgaucaucgagcgcaacaucaccgagaucguguaccugaccaacaccacgaucgagaaggagaucugccccaagcucgccgaguaccggaacuggagcaagccgcagugcgacaucaccggguucgcgcccuucuccaaggacaacagcauccgccuguccgccggcggggacaucugggucacccgggagcccuacgugagcugcgaccccgacaagugcuaccaguucgcccugggccaggggaccacgcucaacaacgugcacuccaacgacaccguccacgaccgcaccccguaccggacccugcugaugaacgagcucggcgugcccuuccaccugggcacgaagcaggucugcaucgccuggagcuccagcuccugccacgacgggaaggccuggcugcacgugugcgugaccggcgacgacaagaacgcgaccgccagcuucaucuacaacgggcgccucguggacuccaucgucagcugguccaaggagauccugcggacccaggagagcgagugcgugugcaucaacggcacgugcaccguggucaugaccgacggguccgccagcggcaaggccgacaccaagauccuguucaucgaggagggcaagaucgugcacacgagcacccucuccgggagcgcgcagcacguggaggagugcuccugcuacccccgcuaccccggcguccggugcgugugccgcgacaacuggaaggggagcaaccggccgaucguggacaucaacaccaaggacuacuccaucgucagcuccuacgugugcagcggccuggugggcgacacgccccgcaagaacgacuccagcuccagcucccacugccugaaccccaacaacgaggagggcgggcacggggucaagggcugggccuucgacgacgggaacgacguguggaugggccggaccaucagcgagaagcuccgccugggcuacgagaccuucaaggucaucgaggggugguccaaccccaacagcaagcugcagaucaaccgccaggugaucguggaccggggcaaccgguccggguacagcggcaucuucuccgucgagggcaagagcugcaucaaccgcugcuucuacguggagcucauccgggggcgcaaggaggagaccgaggugcuguggaccagcaacuccaucgucguguucugcggcacgagcgggaccuacggcaccggguccuggccggacggcgccgacaucaaccugaugcccaucuga

SEQ ID NO: 85597 - RNA, 1410 nt, Artificial Sequence; identical to SEQ ID NO: 78736
  derived and/or modified CDS sequence (opt1) from neuraminidase__InfluenzaA__AEX35541

SEQ ID NO: 85598 - RNA, 1410 nt, Artificial Sequence
  derived and/or modified CDS sequence (opt1) from neuraminidase__InfluenzaA__AEX35552
augaaccccaaccagaagaucaucaccaucggcagcgccucccugaccaucagcacgaucugcuucuucaugcagaucgccauccucaucaccaccgugacccugcacuucaagcaguacgaguucaacccgccgcccaacaaccaggcgaugcugugcgagcccacgaucaucgagcgcaacaucaccgagaucgucuaccucaccaacaccacgaucgagaaggagaucugccccaagcuggccgaguaccggaacugguccaagccccagugcgacaucaccggguucgcccccuucagcaaggacaacuccauccgccugagcgccggcggggacaucugggugacccgggagcccuacguguccugcgacccggacaagugcuaccaguucgcccucggccaggggaccacgcugaacaacguccacagcaacgacaccgugcacgaccgcacccccuaccggacccugcucaugaacgagcugggcgugcccuuccaccugggcacgaagcaggucugcaucgcgugguccagcuccagcugccacgacgggaaggccuggcuccacgugugcgugaccggcgacgacaagaacgccaccgccuccuucaucuacaacgggcgccuggucgacagcaucguguccuggagcaaggagauccugcggacccaggaguccgagugcgugugcaucaacggcacgugcaccgucgugaugaccgacgggagcgcguccggcaaggccgacaccaagauccucuucaucgaggagggcaagaucgugcacacgagcacccugagcggguccgcccagcacgucgaggagugcagcugcuacccccgcuacccgggcgugcggugcgugugccgcgacaacuggaagggguccaaccggcccaucgucgacaucaacaucaaggacuacagcaucgccuccagcuacgugugcuccggccuggugggcgacacgccccgcaagaacgacagcuccagcuccagccacugccucgaccccaacaacgaggagggcgggcacggggucaagggcugggccuucgacgacgggaacgacguguggaugggccggaccaucuccgagaagcugcgcagcggcuacgagaccuucaaggugaucgaggggugguccaacccgaacagcaagcugcagaucaaccggcaggucaucguggaccgcggcaaccgguccggguacagcggcaucuucuccgucgagggcaagagcugcaucaaccgcugcuucuacguggagcucauccgggggcgcaaggaggagaccgaggugcuguggaccagcaacuccaucgucguguucugcggcaccagcgggacguacggcaccggguccuggcccgacggcgcggacaucaaccugaugcccaucuga

SEQ ID NO: 85599 - RNA, 1410 nt, Artificial Sequence
  derived and/or modified CDS sequence (opt1) from neuraminidase__InfluenzaA__AEX35563
augaaccccaaccagaagaucaucaccaucggcagcgugucccugaccaucagcacgaucugcuucuucaugcagaucgccauccucaucaccaccgucacccugcacuucaagcaguacgaguucaacuccccgcccaacaaccaggugaugcugugcgagcccacgaucaucgagcgcaacaucaccgagaucguguaccucaccaacaccacgaucgagaaggagaucugccccaagcuggccgaguaccggaacuggagcaagccgcagugcgacaucaccggguucgcgcccuucuccaaggacaacagcauccgccuguccgccggcggggacaucugggucacccgggagcccuacgugagcugcgaccccgacaagugcuaccaguucgcccucggccaggggaccacgcugaacaacgugcacuccaacgacaccguccacgaccgcaccccguaccggacccugcucaugaacgagcugggcgugcccuuccaccugggcacgaagcaggucugcaucgccuggagcuccagcuccugccacgacgggaaggccuggcuccacgugugcgugaccggcgacgacaagaacgcgaccgccagcuucaucuacaacgggcgccugguggacuccaucgucagcugguccaaggagauccugcggacccaggagagcgagugcgugugcaucaacggcacgugcaccguggucaugaccgacggguccgccagcggcaaggccgacaccaagauccucuucaucgaggagggcaagaucgugcacacgagcacccuguccgggagcgcgcagcacguggaggagugcuccugcuacccccgcuaccccggcguccggugcgugugccgcgacaacuggaaggggagcaaccggccgaucguggacaucaacaucaaggacuacuccaucgucagcuccuacgugugcagcggccuggugggcgacacgccccgcaagaacgacuccagcuccagcucccacugccucaaccccaacaacgaggagggcgggcacggggucaagggcugggccuucgacgacgggaacgacguguggaugggccggaccaucagcgagaagcugcgccugggcuacgagaccuucaaggucaucgaggggugguccaaccccaacagcaagcuccagaucaaccgccaggugaucguggaccggggcaaccgguccggguacagcggcaucuucuccgucgagggcaagagcugcaucaaccgcugcuucuacguggagcugauccgggggcgcaaggaggagaccgaggugcuguggaccagcaacuccaucgucguguucugcggcaccagcgggacguacggcaccggguccuggccggacggcgccgacaucaaccucaugcccaucuga

SEQ ID NO: 85600 - RNA, 1410 nt, Artificial Sequence; identical to SEQ ID NO: 85480
  derived and/or modified CDS sequence (opt1) from neuraminidase__InfluenzaA__AEX35585

SEQ ID NO: 85601 - RNA, 1410 nt, Artificial Sequence
  derived and/or modified CDS sequence (opt1) from neuraminidase__InfluenzaA__AEX35596
augaaccccaaccagaagaucaucaccaucggcagcgugucccugaccaucagcacgaucugcuucuucaugcagaucgccauccucaucaccaccgucacccugcacuucaagcaguacgaguucaacuccccgcccaacaaccaggugaugcugugcgagcccacgaucaucgagcgcaacaucaccgagaucguguaccucaccaacaccacgaucgagaaggagaucugccccaagcuggccgaguaccggaacuggagcaagccgcagugcaacaucaccggguucgcgcccuucuccaaggacaacagcauccgccuguccgccggcggggacaucugggucacccgggagcccuacgugagcugcgaccccgacaagugcuaccaguucgcccucggccaggggaccacgcugaacaacgugcacuccaacgacaccguccacgaccgcaccccguaccggacccugcucaugaacgagcugggcgugcccuuccaccugggcacgaagcaggucugcaucgccuggagcuccagcuccugccacgacgggaaggccuggcuccacgugugcgugaccggcgacgacaagaacgcgaccgccagcuucaucuacaacgggcgccugguggacuccaucgucagcugguccaaggagauccugcggacccaggagagcgagugcgugugcaucaacggcacgugcaccguggucaugaccgacggguccgccagcggcaaggccgacaccaagauccucuucaucgaggagggcaagaucgugcacacgagcacccuguccgggagcgcgcagcacguggaggagugcuccugcuacccccgcuaccccggcguccggugcgugugccgcgacaacuggaaggggagcaaccggccgaucguggacaucaacaucaaggacuacuccaucgucagcuccuacgugugcagcggccuggugggcgacacgccccgcaagaacgacuccagcuccagcucccacugccucgaccccaacaacgaggagggcgggcacggggucaagggcugggccuucgacgacgggaacgacguguggaugggccggaccaucagcgagaagcugcgcuccggcuacgagaccuucaaggucaucgagggguggagcaaccccgacuccaagcugcagaucaaccgccaggugaucguggaccggggcaaccggagcggguacuccggcaucuucagcgucgagggcaagagcugcaucaaccgcugcuucuacguggagcucauccgggggcgcaaggaggagaccgaggugcuguggaccuccaacagcaucgucguguucugcggcaccuccgggacguacggcaccgggagcuggccggacggcgccgacaucaaccugaugcccaucuga

SEQ ID NO: 85602 - RNA, 1410 nt, Artificial Sequence; identical to SEQ ID NO: 78736
  derived and/or modified CDS sequence (opt1) from neuraminidase__InfluenzaA__AEX35607

SEQ ID NO: 85603 - RNA, 1410 nt, Artificial Sequence
  derived and/or modified CDS sequence (opt1) from neuraminidase__InfluenzaA__AEX35618
augaaccccaaccagaagaucaucaccaucggcagcgugucccugaccaucagcacgaucugcuucuucaugcagaucgccauccucaucaccaccgucacccugcacuucaagcaguacgagcugaacuccccgcccaacaaccaggugaugcucugcgagcccacgaucaucgagcgcaacaucaccgagaucguguaccugaccaacaccacgaucgagaaggagaccugccccaagcuggccgaguaccggaacuggagcaagccgcagugcuacaucaccggguucgcgcccuucuccaaggacaacagcauccgccucuccgccggcggggacaucugggucacccgggagcccuacgugagcugcgaccccgacaagugcuaccaguucgcccugggccaggggacgacccugaacaacgugcacuccaacgacaccguccgcgaccggaccccguaccgcacgcuccugaugaacgagcugggcgugcccuuccaccucggcaccaagcaggucugcaucgccuggagcuccagcuccugccacgacgggaaggccuggcugcacgugugcaucaccggcgacgacaagaacgcgaccgccagcuucaucuacaacgggcggcugguggacuccaucgugagcugguccaaggagauccuccgcacgcaggagagcgagugcgucugcaucaacgggaccugcaccguggugaugaccgacggguccgccagcggcaaggccgacacgaagauccuguucaucgaggagggcaagaucguccacaccagcacccuguccgggagcgcgcagcacguggaggagugcuccugcuacccccgguaccccggcgugcgcugcgucugccgggacaacuggaaggggagcaaccgcccgaucguggacaucaacaucaaggaccacuccaucgugagcuccuacgucugcagcggccucgugggcgacacgccccggaagaacgacuccagcuccagcucccacugccuggaccccaacaacgaggagggcggccacggggugaagggcugggccuucgacgacgggaacgacgucuggaugggccgcaccaucagcgagaagucccggcugggcuacgagaccuucaaggugaucgagggguggagcaaccccaaguccaagcuccagaucaaccgccaggucaucguggaccgggacaaccgcagcggcuacuccgggaucuucagcguggagggcaagagcugcaucaaccggugcuucuacgucgagcugauccgcgggcggaaggaggagaccgaggugcuguggaccuccaacagcaucguggucuucugcggcacguccggcaccuacgggaccggcagcuggccggacggggccgacaucaaccucaugcccaucuga

SEQ ID NO: 85604 - RNA, 1410 nt, Artificial Sequence
  derived and/or modified CDS sequence (opt1) from neuraminidase__InfluenzaA__AEX35640
augaaccccaaccagaagaucaucaccaucggcagcgugucccugaccaucagcacgaucugcuucuucaugcagaucgccauccucaucaccaccgucacccugcacuucaagcaguacgaguucaacuccccgcccaacaaccaggugaugcugugcgagcccacgaucaucgagcgcaacaucaccgagaucguguaccucaccaacaccacgaucgagaaggagaucugccccaagcuggccgaguaccggaaguggagcaagccgcagugcaacaucaccggguucgcgcccuucuccaaggacaacagcauccgccuguccgccggcggggacaucugggucacccgggagcccuacgugagcugcgaccccgacaagugcuaccaguucgcccucggccaggggaccacgcugaacaacgugcacuccaacgacaccguccgcgaccggaccccguaccgcacccugcucaugaacgagcugggcgugcccuuccaccugggcacgaagcaggucugcaucgccuggagcuccagcuccugccacgacgggaaggccuggcuccacgugugcgugaccggcgacaacaagaacgcgaccgccagcuucaucuacaacgggcggcugguggacuccaucgucagcugguccaaggagauccugcgcacccaggagagcgagugcgugugcaucaacggcacgugcaccguggucaugaccgacggguccgccagcggcaaggccgacaccaagauccucuucaucgaggagggcaagaucgugcacacgagcacccuguccgggagcgcgcagcacguggaggagugcuccugcuacccccgguaccccggcguccgcugcgugugccgggacaacuggcgcgggagcaaccggccgaucguggacaucaacaugaaggacuacuccaucgucagcuccuacgugugcagcggccuggugggcgacacgccccgcaagaacgacuccagcuccagcgggcacugccucgaccccaacgacgaggagggcgggcacggcgucaaggggugggccuucgacgacggcaacgacguguggaugggccggaccaucuccgagaagucccgcagcggguacgagaccuucaaggucaucgagggcuggagcaaccccaacuccaagcugcagaucaaccgccaggugaucguggaccgggggaaccggagcggcuacuccgggaucuucagcgucgagggcaagagcugcaucaaccgcugcuucuacguggagcugauccggggccgcaaggaggagaccgaggugcucuggaccuccaacagcaucgucguguucugcgggaccuccggcacguacgggaccggcagcuggccggacggggccgacaucaaccugaugcccaucuga

SEQ ID NO: 85605 - RNA, 1410 nt, Artificial Sequence
  derived and/or modified CDS sequence (opt1) from neuraminidase__InfluenzaA__AEX35651
augaaccccaaccagaagaucaucaccaucggcagcgugucccugaccaucagcacgaucugcuucuucaugcagaucgccauccucaucaccaccgucacccugcacuucaagcaguacgaguucaacuccccgcccaacaaccaggugaugcugugcgagcccacgaucaucgagcgcaacaucaccgagaucguguaccucaccaacaccacgaucgagaaggagaucugccccaagcuggccgaguaccggaacuggagcaagccgcagugcgacaucaccggguucgcgcccuucuccaaggacaacagcauccgccuguccgccggcggggacaucugggucacccgggagcccuacgugagcugcgaccccgacaagugcuaccaguucgcccucggccaggggaccacgcugaacaacgugcacuccaacgacaccguccgcgaccggaccccguaccgcacccugcucaugaacgagcugggcgugcccuuccaccugggcacgaagcaggucugcaucgccuggagcuccagcuccugccacgacgggaaggccuggcuccacgugugcaucaccggcgacgacaagaacgcgaccgccagcuucaucuacaacgggcggcugguggacuccguggucagcugguccaaggagauccugcgcacccaggagagcgagugcgugugcaucaacggcacgugcaccguggucaugaccgacggguccgccagcggcaaggccgacaccaagauccucuucaucgaggagggcaagaucgugcacacgagcacccuguccgggagcgcgcagcacguggaggagugcuccugcuacccccgguaccccggcguccgcugcgugugccgggacaacuggaaggggagcaaccgcccgaucguggacaucaacaucaaggaccacuccaucgucagcuccuacgugugcagcggccuggugggcgacacgccccggaagaacgacuccagcuccagcucccacugccucgaccccaacaacgaggagggcgggcacggggucaagggcugggccuucgacgacgggaacgacguguggaugggccgcaccaucagcgagaagucccggcugggcuacgagaccuucaaggucaucgagggguggagcaaccccaaguccaagcugcagaucaaccgccaggugaucguggaccggggcaaccgcagcggguacuccggcaucuucagcgucgaggacaagagcugcaucaaccggugcuucuacguggagcucauccgcgggcggaaggaggagaccgaggugcuguggaccuccaacagcaucgucguguucugcggcaccuccggcacguacgggaccggcagcuggccggacggggccgacaucaaccugaugcccaucuga

SEQ ID NO: 85606 - RNA, 1410 nt, Artificial Sequence; identical to SEQ ID NO: 79908
  derived and/or modified CDS sequence (opt1) from neuraminidase__InfluenzaA__AEX36105

SEQ ID NO: 85607 - RNA, 1410 nt, Artificial Sequence
  derived and/or modified CDS sequence (opt1) from neuraminidase__InfluenzaA__AEX36116
augaaccccaaccagaagaucaucaccaucggcagcgugucccugaccaucagcacgaucugcuucuucaugcagaucgccauccucaucaccaccgucacccugcacuucaagcaguacgaguucaacuccccgcccaacaaccaggugaugcugugcgagcccacgaucaucgagcgcaacaucaccgagaucguguaccucaccaacaccacgaucgagaaggagaucugccccaagcuggccgaguaccggaacuggagcaagccgcagugcgacaucaccggguucgcgcccuucuccaaggacaacagcauccgccuguccgccggcggggacaucugggucacccgggagcccuacgugagcugcgaccccgacaagugcuaccaguucgcccucggccaggggaccacgcugaacaacgugcacuccaacgacaccguccgcaaccggaccccguaccgcacccugcucaugaacgagcugggcgugcccuuccaccugggcacgaagcaggucugcaucgccuggagcuccagcuccugccacgacgggaaggccuggcuccacgugugcaucaccggcgacgacaagaacgcgaccgccagcuucaucuacaacgggcggcugguggacuccaucgugagcugguccaaggagauccugcgcacccaggagagcgagugcgucugcaucaacggcacgugcaccguggugaugaccgacggguccgccagcggcgaggccgacaccaagauccucuucaucgaggagggcaagaucguccacacgagcacccuguccgggagcgcgcagcacguggaggagugcuccugcuacccccgguaccccggcgugcgcugcgucugccgggacaacuggaaggggagcaaccgcccgaucguggacaucaacaucaaggaccacuccaucgugagcuccuacgucugcagcggccuggugggcgacacgccccggaagaacgacuccagcuccagcucccacugccucgaccccaacaacgaggagggcgggcacggggugaagggcugggccuucgacgacgggaacgacgucuggaugggccgcaccaucagcgagaagucccggcugggcuacgagaccuucaaggugaucgagggguggagcaaccccaaguccaagcugcagaucaaccgccaggucaucguggaccggggcaaccgcagcggguacuccggcaucuucagcguggagggcaagagcugcaucaaccggugcuucuacgucgagcucauccgcgggcggaaggaggagaccgaggugcuguggaccuccaacagcaucguggucuucugcggcaccuccgggacguacggcaccgggagcuggccggacggcgccgacaucaaccugaugcccaucuga

SEQ ID NO: 85608 - RNA, 1410 nt, Artificial Sequence
  derived and/or modified CDS sequence (opt1) from neuraminidase__InfluenzaA__AEX36127
augaaccccaaccagaagaucaucaccaucggcagcgugucccugaccaucagcacgaucugcuucuucaugcagaucgccauccucaucaccaccgucacccugcacuucaagcaguacgaguucaacuccccgcccaacaaccaggugaugcugugcgagcccacgaucaucgagcgcaacaucaccgagaucguguaccucaccaacaccacgaucgagaaggagaucugccccaagcuggccgaguaccggaacuggcugaagccgcagugcgacaucaccggguucgcgcccuucagcaaggacaacuccauccgccucagcgccggcggggacaucugggucacccgggagcccuacguguccugcgaccccgacaagugcuaccaguucgcccugggccaggggaccacgcugaacaacgugcacagcaacgacaccguccgcgaccggaccccguaccgcacccuccugaugaacgagcugggcgugcccuuccaccucggcacgaagcaggucugcaucgccugguccagcuccagcugccacgacgggaaggccuggcugcacgugugcaucaccggcgacgacaagaacgcgaccgccuccuucaucuacaacgggcggcugguggacagcguggucuccuggagcaaggagauccuccgcacccaggaguccgagugcgugugcaucaacggcacgugcaccguggucaugaccgacgggagcgccuccggcaaggccgacaccaagauccuguucaucgaggagggcaagaucgugcacacgagcacccugagcggguccgcgcagcacguggaggagugcagcugcuacccccgguaccccggcguccgcugcgugugccgggacaacuggaagggguccaaccgcccgaucguggacaucaacaucaaggaccacagcaucgucuccagcuacgugugcuccggccucgugggcgacacgccccggaagaacgacagcuccagcuccagccacugccuggaccccaacaacgaggagggcgggcacggggucaagggcugggccuucgacgacggggacgacguguggaugggccgcaccaucuccgagaagucccggcugggcuacgagaccuucaaggucaucgagggguggagcaaccccaagagcaagcuccagaucaaccgccaggugaucguggaccggggcaaccgcuccggguacagcggcaucuucuccgucgagggcaagagcugcaucaaccggugcuucuacguggagcugauccgcgggcggaaggaggagaccgaggugcuguggaccagcaacuccaucgucguguucugcggcaccagcgggacguacggcaccggguccuggccggacggcgccgacaucaaccucaugcccaucuga

SEQ ID NO: 85609 - RNA, 1410 nt, Artificial Sequence
  derived and/or modified CDS sequence (opt1) from neuraminidase__InfluenzaA__AEX36149
augaaccccaaccagaagaucaucaccaucggcagcgugucccugaccaucagcacgaucugcuucuucaugcagaucgccauccucaucaccaccgucacccugcacuucaagcaguacgaguucaacuccccgcccaacaaccaggugaugcugugcgagcccacgaucaucgagcgcaacaucaccgagaucguguaccucaccaacaccacgaucgagaaggagaucugccccaagcuggccgaguaccggaacuggagcaagccgcagugcgacaucaccggguucgcgcccuucuccaaggacaacagcauccgccuguccgccggcggggacaucugggucacccgggagcccuacgugagcugcgaccccgacaagugcuaccaguucgcccucggccaggggaccacgcugaacaacgugcacuccaacgacaccguccgcgaccggaccccguaccgcacccugcucaugaacgagcugggcgugcccuuccaccugggcacgaagcaggucugcaucgccuggagcuccagcuccugccacgacgggaaggccuggcuccacgugugcaucaccggcgacgacaagaacgcgaccgccagcuucaucuacaacgggcggcugguggacuccguggucagcugguccaaggagauccugcgcacccaggagagcgagugcgugugcaucaacggcacgugcaccguggucaugaccgacggguccgccagcggcaaggccgacaccaagauccucuucaucgaggagggcaagaucgugcacacgagcacccuguccgggagcgcgcagcacguggaggagugcuccugcuacccccgguaccccggcguccgcugcgugugccgggacaacuggaaggggagcaaccgcccgaucguggacaucaacaucaaggaccacuccaucgucagcuccuacgugugcagcggccuggugggcgacacgccccggaagaacgacuccagcuccagcucccacugccucgaccccaacaacgaggagggcgggcacggggucaagggcugggccuucgacgacgggaacgacguguggaugggccgcaccaucagcgagaagucccggcugggcuacgagaccuucaaggucaucgagggguggagcaaccccaaguccaagcugcagaucaaccgccaggugaucguggaccggggcaaccgcagcggguacuccggcaucuucagcgucgaggacaagagcugcaucaaccggugcuucuacguggagcucauccgcgggcggaaggaggagaccgaggugcuguggaccaccaacuccaucgucguguucugcggcacgagcggcaccuacgggaccggcuccuggccggacggggccgacaucaaccugaugcccaucuga

SEQ ID NO: 85610 - RNA, 1410 nt, Artificial Sequence; identical to SEQ ID NO: 80536
  derived and/or modified CDS sequence (opt1) from neuraminidase__InfluenzaA__AEX36160

SEQ ID NO: 85611 - RNA, 1410 nt, Artificial Sequence
  derived and/or modified CDS sequence (opt1) from neuraminidase__InfluenzaA__AEX36171
augaaccccaaccagaagaucaucaccaucggcagcgugucccugaccaucagcacgaucugcuucuucaugcagaucgccauccucaucaccaccgucacccugcacuucaagcaguacgaguucuccagcccgcccaacaaccaggugaugcugugcgagcccacgaucaucgagcgcaacaucaccgagaucguguaccucaccaacaccacgaucgagaaggagaucugccccaagcuggccgaguaccggaacugguccaagccgcagugcgacaucaccggguucgcgcccuucagcaaggacaacuccauccgccugagcgccggcggggacaucugggucacccgggagcccuacguguccugcgaccccgacaagugcuaccaguucgcccucggccaggggaccacgcugaacaacgugcacagcaacgacaccguccacaaccgcaccccguaccggacccugcucaugaacgagcugggcgugcccuuccaccugggcacgaagcaggucugcaucgccugguccagcuccagcugccacgacgggaaggccuggcuccacgugugcgugaccggcgacgacaagaacgcgaccgccuccuucaucuacaacgggcgccugguggacagcaucgucuccuggagcaaggagauccugcggacccaggaguccgagugcgugugcaucaacggcacgugcgccguggucaugaccgacgggagcgccagcggcaaggcggacaccaagauccucuucaucgaggagggcaagaucgugcacaccuccacgcugagcggguccgcccagcacguggaggagugcagcugcuacccccgcuaccccggcguccggugcgugugccgcgacaacuggaagggguccaaccggccgaucguggacaucaacaucaaggacuacagcaucgucucccgcuacgugugcagcggccuggugggcgacacgccccggaagaacgacuccagcuccagcucccacugccucgaccccaacaacgaggagggcgggcacggggucaagggcugggccuucgacgacggggacgacguguggaugggccgcaccaucagcgagaagucccggagcggcuacgagaccuucaaggucaucgaggggugguccaaccccaacagcaagcugcagaucaaccgccaggugaucguggaccggggcaaccgcuccggguacagcggcaucuucagcgucgaggggaaguccugcaucaaccggugcuucuacguggagcugauccgcggccggaaggaggagaccgaggugcucuggaccagcaacuccaucgucguguucugcggcaccagcgggaccuacggcacgggguccuggccggacggcgccgacaucaaccugaugcccaucuga

SEQ ID NO: 85612 - RNA, 1410 nt, Artificial Sequence
  derived and/or modified CDS sequence (opt1) from neuraminidase__InfluenzaA__AEX36193
augaaccccaaccagaagaucaucaccaucggcagcgugucccugaccaucagcacgaucugcuucuucaugcagaucgccauccucaucaccaccgucacccugcacuucaagcaguacgaguucaacuccagcccgaacaaccaggugaugcugugcgagcccacgaucaucgagcgcaacaucaccgagaucguguaccucaccaacaccacgaucgagaaggagaucugccccaagcuggccgaguaccggaacugguccaagccccagugcgacaucaccggguucgcgccguucagcaaggacaacuccauccgccugagcgccggcggggacaucugggucacccgggagcccuacguguccugcgaccccgacaagugcuaccaguucgcccucggccaggggaccacgcugaacaacgugcacagcaacaacaccguccgcgaccggacccccuaccgcacccugcucaugaacgagcugggcgugccguuccaccugggcacgaagcaggucugcaucgccugguccagcuccagcugccacgacgggaaggccuggcuccacgugugcaucaccggcgacgacaagaacgcgaccgccuccuucaucuacaacgggaugcugguggacagcaucguguccuggagcaaggagauccugcggacccaggaguccgagugcgucugcaucaacggcacgugcaccguggugaugaccgacgggagcgccagcggcaaggccgacaccaagauccucuucaucgaggagggcaagaucguccacacguccacccugagcggguccgcgcagcacguggaggagugcagcugcuacccccgcuaccccggcgugcggugcgucugccgcgacaacuggaagggguccaaccggcccaucguggacaucaacaucaaggaccacagcaucguguccagcuacgucugcuccggccuggugggcgacaccccgcgcaagaacgacagcuccagcuccagccacugccucgaccccaacaacgaggagggcgggcacggggugaagggcugggccuucgacgacgggaacgacgucuggaugggccggaccaucuccgagaagucccgccugggcuacgagacguucaaggugaucgagggguggagcaaccccaagagcaagcugcagaucaaccggcaggucaucguggaccgcggcaaccgguccggguacagcggcaucuucagcguggaggggaaguccugcaucaaccgcugcuucuacgucgagcucauccggggccgcaaggaggagaccgaggugcuguggaccagcaacuccaucguggucuucugcggcaccagcgggacguacggcaccggguccuggcccgacggcgccgacaucaaccugaugccgaucuga

SEQ ID NO: 85613 - RNA, 1410 nt, Artificial Sequence
  derived and/or modified CDS sequence (opt1) from neuraminidase__InfluenzaA__AEX36204
augaaccccaaccagaagaucaucaccaucggcagcgugucccugaccaucagcacgaucugcuucuucaugcagaucgccauccucaucaccaccgucacccugcacuucaagcaguacgaguucaacuccccgcccaacaaccaggugaugcugugcgagcccgccaucaucgagcgcaacaucacggagaucguguaccucaccaacaccaccaucgagaaggagaucugccccaagcuggcggaguaccggaacuggagcaagccgcagugcgacaucacgggguucgcccccuucuccaaggacaacagcauccgccuguccgccggcggggacaucugggucacccgggagcccuacgugagcugcgaccccgacaagugcuaccaguucgcccucggccaggggaccacccugaacaacgugcacuccaacgacacgguccacgagcgcaccccguaccggacccugcucaugaacgagcugggcgugcccuuccaccugggcaccaagcaggucugcaucgccuggagcuccagcuccugccacgacgggaaggcguggcuccacgugugcgugacgggcgacgacaagaacgccaccgccagcuucaucuacaacgggcgccugguggacuccaucgucagcugguccaaggagauccugcggacccaggagagcgagugcgugugcaucaacgggaccugcacgguggucaugaccgacggguccgccagcggcaaggcggacaccaagauccucuucaucgaggagggcaagaucgugcacaccagcacgcuguccgggagcgcccagcacguggaggagugcuccugcuacccccgcuaccccggcguccggugcgugugccgcgacaacuggaaggggagcaaccggccgaucguggacaucaacaucaaggacuacuccaucgucagccgcuacgugugcuccggccuggugggcgacacgccccggaagaacgacagcuccagcuccagccacugccucgaccccaacaacgaggagggcggccacggggucaagggcugggccuucgacgacgggaacgacguguggaugggccgcaccaucuccgagaagucccggagcggcuacgagaccuucaaggucaucgagggguggagcaaccccaacuccaagcugcagaucaaccgccaggugaucguggaccggggcaaccgcagcggguacuccggcaucuucagcgucgagggcaagagcugcaucaaccggugcuucuacguggagcugauccgcgggcggaaggaggagaccgaggugcucuggaccuccaacagcaucgucguguucugcggcaccuccgggaccuacggcacggggagcuggccggacggcgccgacaucaaccugaugcccaucuga

SEQ ID NO: 85614 - RNA, 1410 nt, Artificial Sequence
  derived and/or modified CDS sequence (opt1) from neuraminidase__InfluenzaA__AEX36215
augaaccccaaccagaagaucaucaccaucggcagcgugucccugaccaucagcacgaucugcuucuucaugcagaucgccauccucaucaccaccgucacccugcacuucaagcaguacgaguucuccagcccgcccaacaaccaggugaugcugugcgagcccgccaucaucgagaagaacaucacggagaucguguaccucaccaacaccaccaucgagaaggagaucugccccaagcuggcggaguaccgcaacugguccaagccgcagugcgacaucacgggguucgcccccuucagcaaggacaacuccauccggcugagcgccggcggggacaucugggucacccgcgagcccuacguguccugcgaccccgacaagugcuaccaguucgcccucggccaggggaccacccugaacaacgugcacagcaacgacacgguccacgagcggaccccguaccgcacccugcucaugaacgagcugggcgugcccuuccaccugggcaccaagcaggucugcaucgccugguccagcuccagcugccacgacgggaaggcguggcuccacgugugcgugacgggcgacgacaagaacgccaccgccuccuucaucuacaacgggcggcugguggacagcaucgucuccuggagcaaggagauccugcgcacccaggaguccgagugcgugugcaucaacgggaccugcacgguggucaugaccgacgggagcgccagcggcaaggcggacaccaagauccucuucaucgaggagggcaagaucgugcacaccuccacgcugagcggguccgcccagcacguggaggagugcagcugcuacccccgguaccccggcguccgcugcgugugccgggacaacuggaagggguccaaccgcccgaucguggacaucaacaucaaggacuacagcaucgucucccgguacgugugcagcggccuggugggcgacacgccccgcaagaacgacuccagcuccagcucccacugccucgaccccaacaacgaggagggcggccacggggucaagggcugggccuucgacgacgggaacgacguguggaugggccggaccaucagcgagaagucccgcagcggcuacgagaccuucaaggucaucgaggggugguccaaccccaacagcaagcugcagaucaaccgccaggugaucguggaccggggcaaccgguccggguacagcggcaucuucagcgucgaggggaaguccugcaucaaccgcugcuucuacguggagcugauccggggccgcaaggaggagaccgaggugcucuggaccagcaacuccaucgucguguucugcggcaccagcgggaccuacggcacgggguccuggccggacggcgccgacaucaaccugaugcccaucuga

SEQ ID NO: 85615 - RNA, 1410 nt, Artificial Sequence
  derived and/or modified CDS sequence (opt1) from neuraminidase__InfluenzaA__AEX36226
augaaccccaaccagaagaucaucaccaucggcagcgugucccugaccaucagcacgaucugcuucuucaugcagaucgccauccucaucaccaccgucacccugcacuucaagcaguacgaguucuccagcccgcccaacaaccaggugaugcugugcgagcccgccaucaucgagcgcaacaucacggagaucguguaccucaccaacaccaccaucgagaaggagaucugccccaagcuggcggaguaccggaacugguccaagccgcagugcgacaucacgggguucgcccccuucagcaaggacaacuccauccgccugagcgccggcggggacaucugggucacccgggagcccuacguguccugcgaccccgacaagugcuaccaguucgcccucggccaggggaccacccugaacaacgugcacagcaacgacacgguccacaaccgcaccccguaccggacccugcucaugaacgagcugggcgugcccuuccaccugggcaccaagcaggucugcaucgccugguccagcuccagcugccacgacgggaaggcguggcuccacgugugcgugacgggcgacgacaagaacgccaccgccuccuucaucuacaacgggcgccugguggacagcaucgucuccuggagcaaggagauccugcggacccaggaguccgagugcgugugcaucaacgggaccugcacgguggucaugaccgacgggagcgccagcggcaaggcggacaccaagauccucuucaucgaggagggcaagaucgugcacaccuccacgcugagcggguccgcccagcacguggaggagugcagcugcuacccccgcuaccccggcguccggugcgugugccgcgacaacuggaagggguccaaccggccgaucguggacaucaacaucaaggacuacagcaucgucucccgcuacgugugcagcggcaucgugggcgacacgccccggaagaacgacuccagcuccagcucccacugccuggaccccaacaacgaggagggcggccacggggucaagggcugggccuucgacgacgggaacgacguguggaugggccgcaccaucagcgagaagucccggagcggcuacgagaccuucaaggucaucgaggggugguccaaccccaacagcaagcuccagaucaaccgccaggugaucguggaccggggcaaccgcuccggguacagcggcaucuucagcgucgaggggaaguccugcaucaaccggugcuucuacguggagcugauccgcggccggaaggaggagaccgaggugcuguggaccagcaacuccaucgucguguucugcggcaccagcgggaccuacggcacgggguccuggccggacggcgccgacaucaaccucaugcccaucuga

SEQ ID NO: 85616 - RNA, 1410 nt, Artificial Sequence
  derived and/or modified CDS sequence (opt1) from neuraminidase__InfluenzaA__AEX36237
augaaccccaaccagaagaucaucaccaucggcagcgugucccugaccaucagcacgaucugcuucuucaugcagaucgccauccucaucaccaccgucacccugcacuucaagcaguacgaguucaacuccccgcccaacaaccaggugaugcugugcgagcccacgaucaucgagcgcaacaucaccgagaucguguaccucaccaacaccacgaucgagaaggagaucugccccaagcuggccgaguaccggaaguggagcaagccgcagugcaacaucaccggguucgcgcccuucuccaaggacaacagcauccgccuguccgccggcggggacaucugggucacccgggagcccuacgugagcugcgaccccgacaagugcuaccaguucgcccucggccaggggaccacgcugaacaacgugcacuccaacgacaccguccgcgagcggaccccguaccgcacccugcucaugaacgagcugggcgugcccuuccaccugggcacgaagcaggucugcaucgccuggagcuccagcuccugccacgacgggaaggccuggcuccacgugugcgugaccggcgacgacaagaacgcgaccgccagcuucaucuacaacgggcggcugguggacuccaucgucagcugguccaaggagauccugcgcacccaggagagcgagugcgugugcaucaacggcacgugcaccguggucaugaccgacggguccgccagcggcaaggccgacaccaagauccucuucaucgaggagggcaagaucgugcacacgagcacccuguccgggagcgcgcagcacguggaggagugcuccugcuacccccgguaccccggcguccgcugcgugugccgggacaacuggcgcgggagcaaccggccgaucguggacaucaacaugaaggacuacuccaucgucagcuccuacgugugcagcggccuggugggcgacacgccccgcaagaacgacuccagcuccagcgggcacugccucgaccccaacgacgaggagggcgggcacggcgucaaggggugggccuucgacgacggcaacgacguguggaugggccggaccaucuccgagaagucccgcagcggguacgagaccuucaaggucaucgagggcuggagcaaccccaacuccaagcugcagaucaaccgccaggugaucguggaccgggggaaccggagcggcuacuccgggaucuucagcgucgagggcaagagcugcaucaaccgcugcuucuacguggagcugauccggggccgcaaggaggagaccgaggugcucuggaccuccaacagcaucgucguguucugcgggaccuccggcacguacgggaccggcagcuggccggacggggccgacaucaaccugaugcccaucuga

SEQ ID NO: 85617 - RNA, 1410 nt, Artificial Sequence
  derived and/or modified CDS sequence (opt1) from neuraminidase__InfluenzaA__AEX36248
augaaccccaaccagaagaucaucaccaucggcagcgugucccugaccaucagcacgaucugcuucuucaugcagaucgccauccucaucaccaccgucacccugcacuucaagcaguacgaguucuccagcccgcccaacaaccaggugaugcugugcgagcccgccaucaucgagcgcaacaucacggagaucguguaccucaccaacaccaccaucgagaaggagaucugccccaagcuggcggaguaccggaacugguccaagccgcagugcgacaucacgggguucgcccccuucagcaaggacaacuccauccgccugagcgccggcggggacaucugggucacccgggagcccuacguguccugcgaccccgacaagugcuaccaguucgcccucggccaggggaccacccugaacaacgugcacagcaacgacacgguccacaaccgcaccccguaccggacccugcucaugaacgagcugggcgugcccuuccaccugggcaccaagcaggucugcaucgccugguccagcuccagcugccacgacgggaaggcguggcuccacgugugcgugacgggcgacgacaagaacgccaccgccuccuucaucuacaacgggcgccugguggacagcaucgucuccuggagcaaggagauccugcggacccaggaguccgagugcgugugcaucaacgggaccugcacgguggucaugaccgacgggagcgccagcggccgcgcggacaccaagauccucuucaucgaggagggcaagaucgugcacaccuccacgcugagcggguccgcccagcacguggaggagugcagcugcuacccccgguaccccggcguccgcugcgugugccgggacaacuggaagggguccaaccgcccgaucguggacaucaacaucaaggacuacagcaucgucucccgguacgugugcagcggccuggugggcgacacgccccgcaagaacgacuccagcuccagcucccacugccucgaccccaacaacgaggagggcggccacggggucaagggcugggccuucgacgacgggaacgacguguggaugggccggaccaucagcgagaagucccgcagcggcuacgagaccuucaaggucaucgaggggugguccaaccccaacagcaagcugcagaucaaccgccaggugaucguggaccggggcaaccgguccggguacagcggcaucuucagcgucgaggggaaguccugcaucaaccgcugcuucuacguggagcugauccggggccgcaaggaggagaccgaggugcucuggaccagcaacuccaucgucguguucugcggcaccagcgggaccuacggcacgggguccuggccggacggcgccgacaucaaccugaugcccaucuga

SEQ ID NO: 85618 - RNA, 1410 nt, Artificial Sequence; identical to SEQ ID NO: 80536
  derived and/or modified CDS sequence (opt1) from neuraminidase__InfluenzaA__AEX36259

SEQ ID NO: 85619 - RNA, 1410 nt, Artificial Sequence
  derived and/or modified CDS sequence (opt1) from neuraminidase__InfluenzaA__AEX36270
augaaccccaaccagaagaucaucaccaucggcagcgugucccugaccaucagcacgaucugcuucuucaugcagaucgccauccucaucaccaccgucacccugcacuucaagcaguacgaguucuccagcccgcccaacaaccaggugaugcugugcgagcccgccaucaucgagcgcaacaucacggagaucguguaccucaccaacaccaccaucgagaaggagaucugccccaagcuggcggaguaccggaacugguccaagccgcagugcgacaucacgggguucgcccccuucagcaaggacaacuccauccgccugagcgccggcggggacaucugggucacccgggagcccuacguguccugcgaccccgacaagugcuaccaguucgcccucggccaggggaccacccugaacaacgugcacagcaacgacacgguccacggccgcaccccguaccggacccugcucaugaacgagcugggcgugcccuuccaccuggggaccaagcaggucugcaucgccugguccagcuccagcugccacgacggcaaggcguggcuccacgugugcgugacgggggacgacaagaacgccaccgccuccuucaucuacaacggccgccugguggacagcaucgucuccuggagcaaggagauccugcggacccaggaguccgagugcgugugcaucaacgggaccugcacgguggucaugaccgacggcagcgccagcggcaaggcggacaccaagauccucuucaucgaggaggggaagaucgugcacaccuccacgcugagcggcuccgcccagcacguggaggagugcagcugcuacccccgcuaccccgggguccggugcgugugccgcgacaacuggaagggcuccaaccggccgaucguggacaucaacaucaaggacuacagcaucgucucccgcuacgugugcagcggccuggugggggacacgccccggaagaacgacuccagcuccagcucccacugccucgaccccaacaacgaggagggcgggcacggcgucaaggggugggccuucgacgacggcaacgacguguggaugggccgcaccaucagcgagaagucccggagcggguacgagaccuucaaggucaucgagggcugguccaaccccaacagcaagcugcagaucaaccgccaggugaucguggaccgggggaaccgcuccggcuacagcgggaucuucagcgucgagggcaaguccugcaucaaccggugcuucuacguggagcugauccgcggccgggaggaggagaccaaggugcucuggaccagcaacuccaucgucguguucugcgggaccagcggcaccuacgggacgggcuccuggccggacggggccgacaucaaccugaugcccaucuga

SEQ ID NO: 85620 - RNA, 1410 nt, Artificial Sequence
  derived and/or modified CDS sequence (opt1) from neuraminidase__InfluenzaA__AEX36281
augaaccccaaccagaagaucaucaccaucggcagcgugucccugaccaucagcacgaucugcuucuucaugcagaucgccauccucaucaccaccgucacccugcacuucaagcaguacgaguucuccagcccgcccaacaaccaggugaugcugugcgagcccgccaucaucgagcgcaacaucacggagaucguguaccucaccaacaccaccaucgagaaggagaucugccccaagcuggcggaguaccggaacugguccaagccgcagugcgacaucacgggguucgcccccuucagcaaggacaacuccauccgccugagcgccggcggggacaucugggucacccgggagcccuacguguccugcgaccccgacaagugcuaccaguucgcccucggccaggggaccacccugaacaacgugcacagcaacgacacgguccacggccgcaccccguaccggacccugcucaugaacgagcugggcgugcccuuccaccuggggaccaagcaggucugcaucgccugguccagcuccagcugccacgacggcaaggcguggcuccacgugugcgugacgggggacgacaagaacgccaccgccuccuucaucuacaacggccgccugguggacagcaucgucuccuggagcaaggagauccugcggacccaggaguccgagugcgugugcaucaacgggaccugcacgguggucaugaccgacggcagcgccagcggcaaggcggacaccaagauccucuucaucgaggaggggaagaucgugcacaccuccacgcugagcggcuccgcccagcacguggaggagugcagcugcuacccccgcuaccccgggguccggugcgugugccgcgacaacuggaagggcuccaaccggccgaucguggacaucaacaucaaggacuacagcaucgucucccgcuacgugugcagcggccuggugggggacacgccccggaagaacgacuccagcuccagcucccacugccucgaccccaacaacgaggagggcgggcacggcgucaaggggugggccuucgacgacggcaacgacguguggaugggccgcaccaucagcgagaagucccggagcggguacgagaccuucaaggucaucgagggcugguccaaccccaacagcaagcugcagaucaaccgccaggugaucguggaccgggggaaccgcuccggcuacagcgggaucuucagcgucgagggcaaguccugcaucaaccggugcuucuacguggagcugauccgcggccggaaggaggagaccgaggugcucuggaccagcaacuccaucgucguguucugcgggaccagcggcaccuacgggacgggcuccuggccggacggggccgacaucaaccugaugcccaucuga

SEQ ID NO: 85621 - RNA, 1410 nt, Artificial Sequence; identical to SEQ ID NO: 85620
  derived and/or modified CDS sequence (opt1) from neuraminidase__InfluenzaA__AEX36292

SEQ ID NO: 85622 - RNA, 1410 nt, Artificial Sequence
  derived and/or modified CDS sequence (opt1) from neuraminidase__InfluenzaA__AEX36303
augaaccccaaccagaagaucaucaccaucggcagcgugucccugaccaucagcacgaucugcuucuucaugcagaucgccauccucaucaccaccgucacccugcacuucaagcaguacgaguucuccagcccgcccaacaaccaggugaugcugugcgagcccgccaucaucgagcgcaacaucacggagaucguguaccucaccaacaccaccaucgagaaggagaucugccccaagcuggcggaguaccggaacugguccaagccgcagugcgacaucacgggguucgcccccuucagcaaggacaacuccauccgccugagcgccggcggggacaucugggucacccgggagcccuacguguccugcgaccccgacaagugcuaccaguucgcccucggccaggggaccacccugaacaacgugcacagcaacgacacgguccacgagcgcaccccguaccggacccugcucaugaacgagcugggcgugcccuuccaccugggcaccaagcaggucugcaucgccugguccagcuccagcugccacgacgggaaggcguggcuccacgugugcgugacgggcgacgacaagaacgccaccgccuccuucaucuacaacgggcgccugguggacagcaucgucuccuggagcaaggagauccugcggacccaggaguccgagugcgugugcaucaacgggaccugcacgguggucaugaccgacgggagcgccagcggcaaggcggacaccaagauccucuucaucgaggagggcaagaucgugcacaccuccacgcugagcggguccgcccagcacguggaggagugcagcugcuacccccgcuaccccggcguccggugcgugugccgcgacaacuggaagggguccaaccggccgaucguggacaucaacaucaaggacuacagcaucgucucccgcuacgugugcagcggccuggugggcgacacgccccggaagaacgacuccagcuccagcucccacugccucgaccccaacaacgaggagggcggccacggggucaagggcugggccuucgacgacgggaacgacguguggaugggccgcaccaucagcgagaagucccggagcggcuacgagaccuucaaggucaucgaggggugguccaaccccaacagcaagcugcagaucaaccgccaggugaucguggaccggggcaaccgcuccggguacagcggcaucuucagcgucgaggggaaguccugcaucaaccggugcuucuacguggagcugauccgcggccggaaggaggagaccgaggugcucuggaccagcaacuccaucgucguguucugcggcaccagcgggaccuacggcacgggguccuggccggacggcgccgacaucaaccugaugcccaucuga

SEQ ID NO: 85623 - RNA, 1410 nt, Artificial Sequence
  derived and/or modified CDS sequence (opt1) from neuraminidase__InfluenzaA__AEX36314
augaaccccaaccagaagaucaucaccaucggcagcgugucccugaccaucagcacgaucugcuucuucaugcagaucgccauccucaucaccaccgucacccugcacuucaagcaguacgaguucuccagcccgcccaacaaccaggugaugcugugcgagcccacgaucaucgagcgcaacaucaccgagaucguguaccucaccaacaccacgaucgagaaggagaucugccccaagcuggccgaguaccggaacugguccaagccgcagugcgacaucaccggguucgcgcccuucagcaaggacaacuccauccgccugagcgccggcggggacaucugggucacccgggagcccuacguguccugcgaccccgacaagugcuaccaguucgcccucggccaggggaccacgcugaacaacgugcacagcaacgacaccguccacaaccgcaccccguaccggacccugcucaugaacgagcugggcgugcccuuccaccugggcacgaagcaggucugcaucgccugguccagcuccagcugccacgacgggaaggccuggcuccacgugugcgugaccggcgacgacaagaacgcgaccgccuccuucaucuacaacgggcgccugguggacagcaucgucuccuggagcaaggagauccugcggacccaggaguccgagugcgugugcaucaacggcacgugcgccguggucaugaccgacgggagcgccagcggcaaggcggacaccaagauccucuucaucgaggagggcaagaucgugcacaccuccacgcugagcggguccgcccagcacguggaggagugcagcugcuacccccgcuaccccggcguccggugcgugugccgcgacaacuggaagggguccaaccggccgaucguggacaucaacaucaaggacuacagcaucgucucccgcuacgugugcagcggccuggugggcgacacgccccggaagaacgacuccagcuccagcucccacugccucgaccccaacaacgaggagggggaccacggcgucaaggggugggccuucgacgacggcaacgacguguggauggggcgcaccaucagcgagaagucccggagcggcuacgagaccuucaaggucaucgagggcugguccaaccccaacagcaagcugcagaucaaccgccaggugaucguggaccgggggaaccgcuccggcuacagcgggaucuucagcgucgagggcaaguccugcaucaaccggugcuucuacguggagcugauccgcgggcggaaggaggagaccgaggugcucuggaccagcaacuccaucgucguguucugcggcaccagcggcaccuacgggacgggcuccuggccggacggggccgagaucaaccugaugcccaucuga

SEQ ID NO: 85624 - RNA, 1410 nt, Artificial Sequence; identical to SEQ ID NO: 85620
  derived and/or modified CDS sequence (opt1) from neuraminidase__InfluenzaA__AEX36336

SEQ ID NO: 85625 - RNA, 1410 nt, Artificial Sequence
  derived and/or modified CDS sequence (opt1) from neuraminidase__InfluenzaA__AEX36347
augaaccccaaccagaagaucaucaccaucggcagcgugucccugaccaucagcacgaucugcuucuucaugcagaucgccauccucaucaccaccgucacccugcacuucaagcaguacgaguucuccagcccgcccaacaaccaggugaugcugugcgagcccaucaucaucgagcgcaacaucacggagaucguguaccucaccaacaccaccaucgagaaggagaucugccccaagcuggccgaguaccggaacugguccaagccgcagugcgacaucacgggguucgcgcccuucagcaaggacaacuccauccgccugagcgccggcggggacaucugggucacccgggagcccuacguguccugcgaccccgacaagugcuaccaguucgcccucggccaggggaccacccugaacaacgugcacagcaacgacacgguccacaaccgcaccccguaccggacccugcucaugaacgagcugggcgugcccuuccaccugggcaccaagcaggucugcaucgccugguccagcuccagcugccacgacgggaaggccuggcuccacgugugcgugacgggcgacgacaagaacgcgaccgccuccuucaucuacaacgggcgccugguggacagcaucgucuccuggagcaaggagauccugcggacccaggaguccgagugcgugugcaucaacgggaccugcgccguggucaugacggacgggagcgccagcggcaaggcggacaccaagauccucuucaucgaggagggcaagaucgugcacgccuccacccugagcggguccgcccagcacguggaggagugcagcugcuacccccgcuaccccggcguccggugcgugugccgcgacaacuggaagggguccaaccggccgaucguggacaucaacaucaaggacuacagcaucgucucccgcuacgugugcagcggccuggugggcgacacgccccggaagaacgacuccagcuccagcucccacugccucgaccccaacaacgaggagggcggccacggggucaagggcugggccuucgacgacgggaacgacguguggaugggccgcaccaucagcgagaagucccggagcggcuacgagaccuucaaggucaucgaggggugguccaaccccaacagcaagcugcagaucaaccgccaggugaucguggaccggggcaaccgcuccggguacagcggcaucuucagcgucgaggggaaguccugcaucaaccggugcuucuacguggagcugauccgcggccggaaggaggagaccgaggugcucuggaccagcaacuccaucgucguguucugcggcacgagcgggaccuacggcaccggguccuggccggacggcgccgacaucaaccugaugcccaucuga

SEQ ID NO: 85626 - RNA, 1410 nt, Artificial Sequence; identical to SEQ ID NO: 79908
  derived and/or modified CDS sequence (opt1) from neuraminidase__InfluenzaA__AEX36358

SEQ ID NO: 85627 - RNA, 1410 nt, Artificial Sequence
  derived and/or modified CDS sequence (opt1) from neuraminidase__InfluenzaA__AEX36369
augaaccccaaccagaagaucaucaccaucggcagcgugucccugaccaucagcacgaucugcuucuucaugcagaucgccauccucaucaccaccgucacccugcacuucaagcaguacgaguucaacuccccgcccaacaaccaggugaugcugugcgagcccacgaucaucgagcgcaacaucaccgagaucguguaccucaccaacaccacgaucgagaaggagaucugccccaagcuggccgaguaccggaacuggagcaagccgcagugcgacaucaccggguucgcgcccuucuccaaggacaacagcauccgccuguccgccggcggggacaucugggucacccgggagcccuacgugagcugcgaccccgacaagugcuaccaguucgcccucggccaggggaccacgcugaacaacgugcacuccaacgacaccguccgcaaccggaccccguaccgcacccugcucaugaacgagcugggcgugcccuuccaccugggcacgaagcaggucugcaucgccuggagcuccagcuccugccacgacgggaaggccuggcuccacgugugcaucaccggcgacgacaagaacgcgaccgccagcuucaucuacaacgggcggcugguggacuccaucgugagcugguccaaggagauccugcgcacccaggagagcgagugcgucugcaucaacggcacgugcaccguggugaugaccgacggguccgccagcggcaaggccgacaccaagauccucuucaucgaggagggcaagaucguccacacgagcacccuguccgggagcgcgcagcacguggaggagugcuccugcuacccccgguaccccggcgugcgcugcgucugccgggacaacuggaaggggagcaaccgcccgaucguggacaucaacaucaaggaccacuccaucgugagcuccuacgucugcagcggccuggugggcgacacgccccggaagaacgacuccagcuccagcucccacugccucgaccccaacaacgaggagggcgggcacggggugaagggcugggccuucgacgacgggaacgacgucuggaugggccgcaccaucagcgagaagucccggcugggcuacgagaccuucaaggugaucgagggguggagcaaccccaaguccaagcugcagaucaaccgccaggucaucguggaccggggcaaccgcaccggguacagcggcaucuucuccguggagggcaagagcugcaucaaccggugcuucuacgucgagcucauccgcgggcggaaggaggagaccgaggugcuguggaccagcaacuccaucguggucuucugcggcacgagcgggaccuacggcaccggguccuggccggacggcgccgacaucaaccugaugcccaucuga

SEQ ID NO: 85628 - RNA, 1410 nt, Artificial Sequence
  derived and/or modified CDS sequence (opt1) from neuraminidase__InfluenzaA__AEX36391
augaaccccaaccagaagaucaucaccaucggcagcgugucccugaccaucagcacgaucugcuucuucaugcagaucgccauccucaucaccaccgucacccugcacuucaagcaguacgaguucaacuccccgcccaacaaccaggugaugcugugcgagcccacgaucaucgagcgcaacaucaccgagaucguguaccucaccaacaccacgaucgagaaggagaucugccccaagcuggccgaguaccggaacuggagcaagccgcagugcgacaucgcgggguucgcccccuucuccaaggacaacagcauccgccuguccgccggcggggacaucugggucacccgggagcccuacgugagcugcgaccccgacaagugcuaccaguucgcccucggccaggggaccacccugaacaacgugcacuccaacgacacgguccgcaaccggaccccguaccgcacccugcucaugaacgagcugggcgugcccuuccaccugggcaccaagcaggucugcaucgccuggagcuccagcuccugccacgacgggaaggcguggcuccacgugugcaucacgggcgacgacaagaacgccaccgccagcuucaucuacaacgggcggcugguggacuccaucgugagcugguccaaggagauccugcgcacccaggagagcgagugcgucugcaucaacgggaccugcacgguggugaugaccgacggguccgccagcggcaaggcggacaccaagauccucuucaucgaggagggcaagaucguccacaccagcacgcuguccgggagcgcccagcacguggaggagugcuccugcuacccccgguaccccggcgugcgcugcgucugccgggacaacuggaaggggagcaaccgcccgaucguggacaucaacaucaaggaccacuccaucgugagcuccuacgucugcagcggccuggugggcgacacgccccggaagaacgacuccagcuccagcucccacugccucgaccccaacaacgaggagggcggccacggggugaagggcugggccuucgacgacgggaacgacgucuggaugggccgcaccaucagcgagaagucccggcugggcuacgagaccuucaaggugaucgagggguggagcaaccccaaguccaagcugcagaucaaccgccaggucaucguggaccggggcgaccgcagcggguacuccggcaucuucagcguggagggcaagagcugcaucaaccggugcuucuacgucgagcucauccgcgggcggaaggaggagaccgaggugcuguggaccuccaacagcaucguggucuucugcggcaccuccgggaccuacggcacggggagcuggccggacggcgccgacaucaaccugaugcccaucuga

SEQ ID NO: 85629 - RNA, 1410 nt, Artificial Sequence
  derived and/or modified CDS sequence (opt1) from neuraminidase__InfluenzaA__AEX36402
augaaccccaaccagaagaucaucaccaucggcagcgugucccugaccaucagcacgaucugcuucuucaugcagaucgccauccucaucaccaccgucacccugcacuucaagcaguacgaguucaacuccccgcccaacaaccaggugaugcugugcgagcccacgaucaucgagcgcaacaucaccgagaucguguaccucaccaacaccacgaucgagaaggagaucugccccaagcuggccgaguaccggaacuggagcaagccgcagugcgacaucaccggguucgcgcccuucuccaaggacaacagcauccgccuguccgccggcggggacaucugggucacccgggagcccuacgugagcugcgaccccgacaagugcuaccaguucgcccucggccaggggaccacgcugaacaacgugcacuccaacgacaccguccgcggccggaccccguaccgcacccugcucaugaacgagcugggcgugcccuuccaccuggggacgaagcaggucugcaucgccuggagcuccagcuccugccacgacggcaaggccuggcuccacgugugcaucaccggggacgacaagaacgcgaccgccagcuucaucuacaacggccggcugguggacuccaucgugagcugguccaaggagauccugcgcacccaggagagcgagugcgucugcaucaacgggacgugcaccguggugaugaccgacggcuccgccagcggcaaggccgacaccaagauccucuucaucgaggaggggaagaucguccacacgagcacccuguccggcagcgcgcagcacguggaggagugcuccugcuacccccgguuccccggggugcgcugcgucugccgggacaacuggaagggcagcaaccgcccgaucguggacaucaacaucaaggaccacuccaucgugagcuccuacgucugcagcggccuggugggggacacgccccggaagaacgacuccagcuccagcucccacugccucgaccccaacaacgaggagggcgggcacggcgugaaggggugggccuucgacgacggcaacgacgucuggaugggccgcaccaucagcgagaagucccggcugggguacgagaccuucaaggugaucgagggcuggagcaaccccaaguccaagcugcagaucaaccgccaggucaucguggaccgggggaaccgcaccggcuacagcgggaucuucuccguggagggcaagagcugcaucaaccggugcuucuacgucgagcucauccgcggccggaaggaggagaccgaggugcuguggaccagcaacuccaucguggucuucugcgggacgagcggcaccuacgggaccggcuccuggccggacggggccgacaucaaccugaugcccaucuga

SEQ ID NO: 85630 - RNA, 1410 nt, Artificial Sequence; identical to SEQ ID NO: 79908
  derived and/or modified CDS sequence (opt1) from neuraminidase__InfluenzaA__AEX36413

SEQ ID NO: 85631 - RNA, 1410 nt, Artificial Sequence
  derived and/or modified CDS sequence (opt1) from neuraminidase__InfluenzaA__AEX36424
augaaccccaaccagaagaucaucaccaucggcagcgugucccugaccaucagcacgaucugcuucuucaugcagaucgccauccucaucaccaccgucacccugcacuucaagcaguacgaguucaacuccccgcccaacaaccaggugaugcugugcgagcccacgaucaucgagcgcaacaucaccgagaucguguaccucaccaacaccacgaucgagaaggagaucugcagcaagcuggccgaguaccggaacugguccaagccccagugcgacaucaccggguucgcgccguucagcaaggacaacuccauccgccugagcgccggcggggacaucugggucacccgggagcccuacguguccugcgaccccgacaagugcuaccaguucgcccucggccaggggaccacgcugaacaacgugcacagcaacgacaccauccgcgaccggacccccuaccgcacccugcucaugaacgagcugggcgucccguuccaccugggcacgaagcaggucugcaucgccugguccagcuccagcugccacgacgggaaggccuggcuccacgugugcaucaccggcgacgacaagaacgcgaccgccuccuucaucuacaacgggcggcugguggacagcgugguguccuggagcaaggagauccugcgcacccaggaguccgagugcgucugcaucaacggcacgugcaccguggugaugaccgacgggagcgccagcggcaaggccgacaccaagauccucuucaucgaggagggcaagaucguccacacguccacccugagcggguccgcgcagcacguggaggagugcagcugcuacccccgguaccccggcgugcgcugcgucugccgggacaacuggaagggguccaaccgccccaucguggacaucaacaucaaggaccacagcaucguguccagcuacgucugcuccggccuggugggcgacaccccgcggaagaacgacagcuccagcuccagccacugccucgaccccaacaacgaggagggcgggcacggggugaagggcugggccuucgacgacgggaacgacgucuggaugggccgcaccaucuccgagaagucccggcugggcuacgagacguucaaggugaucgagggguggagcaaccccaagagcaagcugcagaucaaccgccaggucaucguggaccggggcaaccgcuccggguacagcggcaucuucagcguggaggggaaguccugcaucaaccggugcuucuacgucgagcucauccgcggccggaaggaggagaccgaggugcuguggaccagcaacuccaucguggucuucugcggcaccagcgggacguacggcaccggguccuggcccgacggcgccgacaucaaccugaugccgaucuga

SEQ ID NO: 85632 - RNA, 1410 nt, Artificial Sequence
  derived and/or modified CDS sequence (opt1) from neuraminidase__InfluenzaA__AEX36435
augaaccccaaccagaagaucaucaccaucggcagcgugucccugaccaucagcacgaucugcuucuucaugcagaucgccauccucaucaccaccgucacccugcacuucaagcaguacgaguucaacuccccgcccaacaaccaggugaugcugugcgagcccacgaucaucgagcgcaacaucaccgagaucguguaccucaccaacaccacgaucgagaaggagaucugccccaagcuggccgaguaccggaacuggagcaagccgcagugcgacaucaccggguucgcgcccuucuccaaggacaacagcauccgccuguccgccggcggggacaucugggucacccgggagcccuacgugagcugcgaccccgacaagugcuaccaguucgcccucggccaggggaccacgcugaacaacgugcacuccaacgacaccguccgcgaccggaccccguaccgcacccugcucaugaacgagcugggcgugcccuuccaccugggcacgaagcaggucugcaucgccuggagcuccagcuccugccacgacgggaaggccuggcuccacgugugcaucaccggcgacgacaagaacgcgaccgccagcuucaucuacaacgggcggcugguggacuccguggucagcugguccaaggagauccugcgcacccaggagagcgagugcgugugcaucaacggcacgugcaccguggucaugaccgacggguccgccagcggcaaggccgacaccaagauccucuucaucaaggagggcaagaucgugcacacgagcacccuguccgggagcgcgcagcacguggaggagugcuccugcuacccccgguaccccggcguccgcugcgugugccgggacaacuggaaggggagcaaccgcccgaucguggacaucaacaucaaggaccacuccaucgucagcuccuacgugugcagcggccuggugggcgacacgccccggaagaacgacuccagcuccagcucccacugccucgaccccaacaacgaggagggcgggcacggggucaagggcugggccuucgacgacgggaacgacguguggaugggccgcaccaucagcgagaagucccggcugggcuacgagaccuucaaggucaucgagggguggagcaacuccaagagcaagcugcagaucaaccgccaggugaucguggaccggggcaaccgcuccggguacagcggcaucuucagcgucgaggggaaguccugcaucaaccggugcuucuacguggagcucauccgcggccggaaggaggagaccgaggugcuguggaccagcaacuccaucgucguguucugcggcaccagcgggacguacggcaccggguccuggcccgacggcgccgacaucaaccugaugccgaucuga

SEQ ID NO: 85633 - RNA, 1410 nt, Artificial Sequence; identical to SEQ ID NO: 80090
  derived and/or modified CDS sequence (opt1) from neuraminidase__InfluenzaA__AEX36446

SEQ ID NO: 85634 - RNA, 1410 nt, Artificial Sequence; identical to SEQ ID NO: 80090
  derived and/or modified CDS sequence (opt1) from neuraminidase__InfluenzaA__AEX36457

SEQ ID NO: 85635 - RNA, 1410 nt, Artificial Sequence
  derived and/or modified CDS sequence (opt1) from neuraminidase__InfluenzaA__AEX36468
augaaccccaaccagaagaucaucaccaucggcagcgugucccugaccaucagcacgaucugcuucuucaugcagaucgccauccucaucaccaccgucacccugcacuucaagcaguacgaguucuccagcccgcccaacaaccaggugaugcugugcgagcccacgaucaucgagcgcaacaucaccgagaucguguaccucaccaacaccacgaucgagaaggagaucugccccaagcuggccgaguaccggaacugguccaagccgcagugcgacaucaccggguucgcgcccuucagcaaggacaacuccauccgccugagcgccggcggggacaucugggucacccgggagcccuacguguccugcgaccccgacaagugcuaccaguucgcccucggccaggggaccacgcugaacaacgugcacagcaacgacaccguccacaaccgcaccccguaccggacccugcucaugaacgagcugggcgugcccuuccaccugggcacgaagcaggucugcaucgccugguccagcuccagcugccacgacgggaaggccuggcuccacgugugcgugaccggcgacgacaagaacgcgaccgccuccuucaucuacaacgggcgccugguggacagcaucgucuccuggagcaaggagauccugcggacccaggaguccgagugcgugugcaucaacggcacgugcaccguggucaugaccgacgggagcgccagcggcaaggccgacaccaagauccucuucaucgaggagggcaagaucgugcacacguccacccugagcgggaacgcgcagcacguggaggagugcuccugcuacccccgcuaccccggcguccggugcgugugccgcgacaacuggaaggggagcaaccggccgaucguggacaucaacaucaaggacuacuccaucgucagccgcuacgugugcuccggccuggugggcgacacgccccggaagaacgacagcuccagcuccagccacugccucgaccccaacaacgaggagggcgggcacggggucaagggcugggccuucgacgacgggaacgacguguggaugggccgcaccaucuccgagaagucccggagcggcuacgagaccuucaaggucaucgagggguggagcaaccccaacuccaagcugcagaucaaccgccaggugaucguggaccggggcaaccgcagcggguacuccggcaucuucagcgucgagggcaagagcugcaucaaccggugcuucuacguggagcugauccgcgggcggaaggaggagaccaaggugcucuggaccuccaacagcaucgucguguucugcggcaccuccgggacguacggcaccgggagcuggccggacggcgccgacaucaaccugaugcccaucuga

SEQ ID NO: 85636 - RNA, 1410 nt, Artificial Sequence
  derived and/or modified CDS sequence (opt1) from neuraminidase__InfluenzaA__AEX36479
augaaccccaaccagaagaucaucaccaucggcagcgugucccugaccaucagcacgaucugcuucuucaugcagaucgccauccucaucaccaccgucacccugcacuucaagcaguacgaguucuccagcccgcccaacaaccaggugaugcugugcgagcccacgaucaucgagcgcaacaucaccgagaucguguaccccaccaacaccacgaccgagaaggagaucugcccgaagcucgccgaguaccggaacugguccaagccccagugcgacaucaccggguucgcgcccuucagcaaggacaacuccauccgccugagcgccggcggggacaucugggucacccgggagcccuacguguccugcgacccggacaagugcuaccaguucgcccugggccaggggacgacccucaacaacgugcacagcaacgacaccguccacgaccgcacccccuaccggacgcugcugaugaacgagcucggcgugcccuuccaccugggcaccaagcaggucugcaucgccugguccagcuccagcugccacgacgggaaggccuggcugcacgugugcgugaccggcgacgacaagaacgcgaccgccuccuucaucuacaacgggcgccucguggacagcaucgucuccuggagcaaggagauccugcggacgcaggaguccgagugcgugugcaucaacgggaccugcaccguggucaugaccgacgggagcgccagcggcaaggccgacacgaagauccuguucaucgaggagggcaagaucgugcacaccuccacccucagcggguccgcgcagcacguggaggagugcagcugcuacccccgcuacccgggcguccggugcgugugccgcgacaacuggaagggguccaaccggcccaucguggacaucaacaucaaggacuacagcaucgucucccgcuacgugugcagcggccuggugggcgacacgccccggaagaacgacuccagcuccagcucccacugccuggaccccaacaacgaggagggcggccacggggucaagggcugggccuucgacgacgggaacgacguguggaugggccgcaccaucagcgagaagcuccgguccggcuacgagaccuucaaggucaucgagggguggagcaacccgaacuccaagcugcagaucaaccgccaggugaucguggaccggggcaaccgcagcggguacuccggcaucuucagcgucgagggcaagagcugcaucaaccggugcuucuacguggagcugauccgcgggcggaaggaggagaccgaggugcucuggaccuccaacagcaucgucguguucugcggcacguccgggaccuacggcaccgggagcuggcccgacggcgccgacaucaaccugaugcccaucuga

SEQ ID NO: 85637 - RNA, 1410 nt, Artificial Sequence
  derived and/or modified CDS sequence (opt1) from neuraminidase__InfluenzaA__AEX36490
augaaccccaaccagaagaucaucaccaucggcagcgugucccugaccaucagcacgaucugcuucuucaugcagaucgccauccucaucaccaccgucacccugcacuucaagcaguacgaguucuccuacccgcccaacaaccaggugaugcugugcgagcccacgaucaucgagcgcaacaucaccgagaucguguaccucaccaacaccacgaucgagaaggagaucugccccaagcuggccgaguaccggaacuggagcaagccgcagugcgacaucaccggguucgcgcccuucuccaaggacaacagcauccgccuguccgccggcggggacaucugggucacccgggagcccuacgugagcugcgaccccgacaagugcuaccaguucgcccucggccaggggaccacgcugaacaacgugcacuccaacgacaccguccacgaccgcaccccguaccggacccugcucaugaacgagcugggcgugcccuuccaccugggcacgaagcaggucugcaucgccuggagcuccagcuccugccacgacgggaaggccuggcuccacgugugcgugaccggcgacgacaagaacgcgaccgccagcuucaucuacaacgggcgccugguggacuccaucgucagcugguccaaggagauccugcggacccaggagagcgagugcgugugcaucaacggcacgugcaccguggucaugaccgacggguccgccagcggcaaggccgacaccaagauccucuucaucgaggagggcaagaucgugcacacgagcacccuguccgggaacgcgcagcacguggaggagugcagcugcuacccccgcuaccccggcguccggugcgugugccgcgacaacuggaagggguccaaccggccgaucguggacaucaacaucaaggacuacagcaucgucucccgcuacgugugcagcggccuggugggcgacacgccccggaagaacgacuccagcuccagcucccacugccucgaccccaacaacgaggagggcgggcacggggucaagggcugggccuucgacgacgggaacgacguguggaugggccgcaccaucagcgagaagucccggagcggcuacgagaccuucaaggucaucgaggggugguccaaccccaacagcaagcugcagaucaaccgccaggugaucguggaccggggcaaccgcuccggguacagcggcaucuucuccgucgagggcaagagcugcaucaaccggugcuucuacguggagcugauccgcgggcggaaggaggagaccaaggugcucuggaccagcaacuccaucgucguguucugcggcaccagcgggacguacggcaccggguccuggccggacggcgccgacaucaaccugaugcccaucuga

SEQ ID NO: 85638 - RNA, 1410 nt, Artificial Sequence
  derived and/or modified CDS sequence (opt1) from neuraminidase__InfluenzaA__AEX36501
augaaccccaaccagaagaucaucaccaucggcagcgugucccugaccaucagcacgaucugcuucuucaugcagaucgccauccucaucaccaccgucacccugcacuucaagcaguacgaguucuccagcccgcccaacaaccaggugaugcugugcgagcccgccaucaucgagcgcaacaucacggagaucguguaccucaccaacaccaccaucgagaaggagaagugccccaagcuggcggaguaccggaacugguccaagccgcagugcgacaucacgggguucgcccccuucagcaaggacaacuccauccgccugagcgccggcggggacaucugggucacccgggagcccuacguguccugcgaccccgacaagugcuaccaguucgcccucggccaggggaccacccugaacaacgugcacagcaacgacacgguccacggccgcaccccguaccggacccugcucaugaacgagcugggcgugcccuuccaccuggggaccaagcaggucugcaucgccugguccagcuccagcugccacgacggcaaggcguggcuccacgugugcgugacgggggacgacaagaacgccaccgccuccuucaucuacaacggccgccugguggacagcaucgucuccuggagcaaggagauccugcggacccaggaguccgagugcgugugcaucaacgggaccugcacgguggucaugaccgacggcagcgccagcggcaaggcggacaccaagauccucuucaucgaggaggggaagaucgugcacaccuccacgcugagcggcuccgcccagcacguggaggagugcagcugcuacccccgcuaccccgggguccggugcgugugccgcgacaacuggaagggcuccaaccggccgaucguggacaucaacaucaaggacuacagcaucgucucccgcuacgugugcagcggccuggugggggacacgccccggaaguccgacagcuccagcuccagccacugccucgaccccaacaacgaggagggcgggcacggcgucaaggggugggccuucgacgacggcaacgacguguggaugggccgcaccaucuccgagaagucccggagcggguacgagaccuucaaggucaucgagggcuggagcaaccccaacuccaagcugcagaucaaccgccaggugaucguggaccgggggaaccgcagcggcuacagcgggaucuucuccgucgagggcaagagcugcaucaaccggugcuucuacguggagcugauccgcggccggaaggaggagaccgaggugcucuggaccuccaacagcaucgucguguucugcgggaccuccggcaccuacgggacgggcagcuggccggacggggccgacaucaaccugaugcccaucuga

SEQ ID NO: 85639 - RNA, 1410 nt, Artificial Sequence
  derived and/or modified CDS sequence (opt1) from neuraminidase__InfluenzaA__AEX36512
augaaccccaaccagaagaucaucaccaucggcagcgugucccugaccaucagcacgaucugcuucuucaugcagaucgccauccucaucaccaccgucacccugcacuucaagcaguacgaguucuccagcccgcccaacaaccaggugaugcugugcgagcccgccaucaucgagcgcaacaucacggagaucguguaccucaccaacaccaccaucgagaaggagaucugccccaagcuggcggaguaccggaacugguccaagccgcagugcgacaucacgggguucgcccccuucagcaaggacaacuccauccgccugagcgccggcggggacaucugggucacccgggagcccuacguguccugcgaccccgacaagugcuaccaguucgcccucggccaggggaccacccugaacaacgugcacagcaacgacacgguccacgaccgcaccccguaccggacccugcucaugaacgagcugggcgugcccuuccaccugggcaccaagcaggucugcaucgccugguccagcuccagcugccacgacgggaaggcguggcuccacgugugcgugacgggcgacgacaagaacgccaccgccuccuucaucuacaacgggcgccugguggacagcaucgucuccuggagcaaggagauccugcggacccaggaguccgagugcgugugcaucaacgggaccugcacgguggucaugaccgacgggagcgccagcggcaaggcggacaccaagauccucuucaucgaggagggcaagaucgugcacaccuccacgcugagcggguccgcccagcacguggaggagugcagcugcuacccccgcuaccccggcguccggugcgugugccgcgacaacuggaagggguccaaccggccgaucguggacaucaacaucaaggacuacagcaucgucucccgcuacgugugcagcggccuggugggcgacacgccccggaagaacgacuccagcuccagcucccacugccucgaccccaacaacgaggagggcggccacggggucaagggcugggccuucgacgacgggaacgacguguggaugggccgcaccaucagcgagaagucccggagcggcuacgagaccuucaaggucaucgaggggugguccaaccccaacagcaagcugcagaucaaccgccaggugaucguggaccggggcaaccgcuccggguacagcggcaucuucagcgucgaggggaaguccugcaucaaccggugcuucuacguggagcugauccgcggccggaaggaggagaccgaggugcucuggaccagcaacuccaucgucguguucugcggcaccagcgggaccuacggcacgggguccuggccggacggcgccgacaucaaccugaugcccaucuga

SEQ ID NO: 85640 - RNA, 1410 nt, Artificial Sequence
  derived and/or modified CDS sequence (opt1) from neuraminidase__InfluenzaA__AEX36523
augaaccccaaccagaagaucaucaccaucggcagcgugucccugaccaucagcacgaucugcuucuucaugcagaucgccauccucaucaccaccgucacccugcacuucaagcaguacgaguucaacuccccgcccaacaaccaggugaugcugugcgagcccacgaucaucgagcgcaacaucaccgagaucguguaccucaccaacaccacgaucgagaaggagaucugccccaagcuggccgaguaccggaacuggagcaagccgcagugcgacaucaccggguucgcgcccuucuccaaggacaacagcauccgccuguccgccggcggggacaucugggucacccgggagcccuacgugagcugcgaccccgacaagugcuaccaguucgcccucggccaggggaccacgcugaacaacgugcacuccaacgacaccguccgcgaccggaccccguaccgcacccugcucaugaacgagcugggcgugcccuuccaccugggcacgaagcaggucugcaucgccuggagcuccagcuccugccacgacgggaaggccuggcuccacgugugcaucaccggcgacgacaagaacgcgaccgccagcuucaucuacaacgggcggcugguggacuccguggucagcugguccaaggagauccugcgcacccaggagagcgagugcgugugcaucaacggcacgugcaccguggucaugaccgacggguccgccagcggcgaggccgacaccaagauccucuucaucgaggagggcaagaucgugcacacgagcacccuguccgggagcgcgcagcacguggaggagugcuccugcuacccccgguaccccggcguccgcugcgugugccgggacaacuggaaggggagcaaccgcccgaucguggacaucaacaucaaggaccacuccaucgucagcuccuacgugugcagcggccuggugggcgacacgccccggaagaacgacuccagcuccagcucccacugccucgaccccaacaacgaggagggcgggcacggggucaagggcugggccuucgacgacgggaacgacguguggaugggccgcaccaucagcgagaagucccggcugggcuacgagaccuucaaggucaucgagggguggagcaaccccaaguccaagcugcagaucaaccgccaggugaucguggaccggggcaaccgcagcggguacuccggcaucuucagcgucgagggcaagagcugcaucaaccggugcuucuacguggagcucauccgcgggcggaaggaggagaccgaggugcuguggaccuccaacagcaucgucguguucugcggcaccuccgggacguacggcaccgggagcuggccggacggcgccgacaucaaccugaugcccaucuga

SEQ ID NO: 85641 - RNA, 1410 nt, Artificial Sequence; identical to SEQ ID NO: 80623
  derived and/or modified CDS sequence (opt1) from neuraminidase__InfluenzaA__AEX36534

SEQ ID NO: 85642 - RNA, 1410 nt, Artificial Sequence
  derived and/or modified CDS sequence (opt1) from neuraminidase__InfluenzaA__AEX36545
augaaccccaaccagaagaucaucaccaucggcagcgugucccugaccaucagcacgaucugcuucuucaugcagaucgccauccucaucaccaccgucacccugcacuucaagcaguacgaguucaacuccccgcccaacaaccaggugaugcugugcgagcccacgaucaucgagcgcaacaucaccgagaucguguaccucaccaacaccacgaucgagaaggagaucugccccaagcuggccgaguaccggaacuggagcaagccgcagugcgacaucaccggguucgcgcccuucuccaaggacaacagcauccgccuguccgccggcggggacaucugggucacccgggagcccuacgugagcugcgaccccgacaagugcuaccaguucgcccucggccaggggaccacgcugaacaacgugcacuccaacgacaccguccgcgaccggaccccguaccgcacccugcucaugaacgagcugggcgugcccuuccaccugggcacgaagcaggucugcaucgccuggagcuccagcuccugccacgacgggaaggccuggcuccacgugugcaucaccggcgacgacaagaacgcgaccgccagcuucaucuacaacgggcggcugguggacuccguggucagcugguccaaggagauccugcgcacccaggagagcgagugcgugugcaucaacggcacgugcaccguggucaugaccgacggguccgcccucggcaaggccgacaccaagauccuguucaucgaggagggcaagaucgugcacacgagcacccugagcggguccgcgcagcacguggaggagugcagcugcuacccccgguaccccggcguccgcugcgugugccgggacaacuggaagggguccaaccgcccgaucguggacaucaacaucaaggaccacagcaucgucuccagcuacgugugcuccggccucgugggcgacacgccccggaagaacgacagcuccagcuccagccacugccuggaccccaacaacgaggagggcgggcacggggucaagggcugggccuucgacgacgggaacgacguguggaugggccgcaccaucuccgagaagucccggcugggcuacgagaccuucaaggucaucgagggguggagcaaccccaagagcaagcuccagaucaaccgccaggugaucguggaccggggcaaccgcuccggguacagcggcaucuucuccgucgagggcaagagcugcaucaaccggugcuucuacguggagcugauccgcgggcggaaggaggagaccgaggugcuguggaccagcaacuccaucgucguguucugcggcaccagcgggacguacggcaccggguccuggccggacggcgccgacaucaaccucaugcccaucuga

SEQ ID NO: 85643 - RNA, 1410 nt, Artificial Sequence; identical to SEQ ID NO: 80536
  derived and/or modified CDS sequence (opt1) from neuraminidase__InfluenzaA__AEX36556

SEQ ID NO: 85644 - RNA, 1410 nt, Artificial Sequence; identical to SEQ ID NO: 80536
  derived and/or modified CDS sequence (opt1) from neuraminidase__InfluenzaA__AEX36567

SEQ ID NO: 85645 - RNA, 1410 nt, Artificial Sequence
  derived and/or modified CDS sequence (opt1) from neuraminidase__InfluenzaA__AEX36578
augaaccccaaccagaagaucaucaccaucggcagcgugucccugaccaucagcacgaucugcuucuucaugcagaucgccauccucaucaccaccgucacccugcacuucaagcaguacgaguucaacuccccgcccaacaaccaggugaugcugugcgagcccacgaucaucgagcgcaacaucaccgagaucguguaccucaccaacaccacgaucgagaaggagaucugccccaagcuggccgaguaccggaacuggagcaagccgcagugcgacaucaccggguucgcgcccuucuccaaggacaacagcauccgccuguccgccggcggggacaucugggucacccgggagcccuacgugagcugcgaccccgacaagugcuaccaguucgcccucggccaggggaccacgcugaacaacgugcacuccaacgacaccguccgcgaccggaccccguaccgcacccugcucaugaacgagcugggcgugcccuuccaccugggcacgaagcaggucugcaucgccuggagcuccagcuccugccacgacgggaaggccuggcuccacgugugcaucaccggcgacgacaagaacgcgaccgccagcuucaucuacaacgggcggcugguggacuccguggucagcugguccaaggagauccugcgcacccaggagagcgagugcgugugcaucaacggcacgugcaccguggucaugaccgacggguccgccagcggcaaggccgacaccaagauccucuucaucaaggagggcaagaucgugcacacgagcacccuguccgggagcgcgcagcacguggaggagugcuccugcuacccccgguaccccggcguccgcugcgugugccgggacaacuggaaggggagcaaccgcccgaucguggacaucaacaucaaggaccacuccaucgucagcuccuacgugugcagcggccuggugggcgacacgccccggaagaacgacuccagcuccagcucccacugccucgaccccaacaacgaggagggcgggcacggggucaagggcugggccuucgacgacgggaacgacguguggaugggccgcaccaucagcgagaagucccggcugggcuacgagaccuucaaggucaucgagggguggagcaaccccaaguccaagcugcagaucaaccgccaggugaucguggaccggggcaaccgcagcggguacuccggcaucuucagcgucgagggcaagagcugcaucaaccggugcuucuacguggagcucauccgcgggcggaaggaggagaccgaggugcuguggaccuccaacagcaucgucguguucugcggcaccuccgggacguacggcaccgggagcuggccggacggcgccgacaucaaccugaugcccaucuga

SEQ ID NO: 85646 - RNA, 1410 nt, Artificial Sequence; identical to SEQ ID NO: 85645
  derived and/or modified CDS sequence (opt1) from neuraminidase__InfluenzaA__AEX36589

SEQ ID NO: 85647 - RNA, 1410 nt, Artificial Sequence
  derived and/or modified CDS sequence (opt1) from neuraminidase__InfluenzaA__AEX36600
augaaccccaaccagaagaucaucaccaucggcagcgugucccugaccaucagcacgaucugcuucuucaugcagaucgccauccucaucaccaccgucacccugcacuucaagcaguacgaguucaacuccccgcccaacaaccaggugaugcugugcgagcccacgaucaucgagcgcaacaucaccgagaucguguaccucaccaacaccacgaucgagaaggagaucugccccaagcuggccgaguaccggaacuggagcaagccgcagugcgacaucaccggguucgcgcccuucuccaaggacaacagcauccgccuguccgccggcggggacaucugggucacccgggagcccuacgugagcugcgaccccgacaagugcuaccaguucgcccucggccaggggaccacgcugaacaacgugcacuccaacgacaccguccgcgaccggaccccguaccgcacccugcucaugaacgagcugggcgugcccuuccaccugggcacgaagcaggucugcaucgccuggagcuccagcuccugccacgacgggaaggccuggcuccacgugugcaucaccggcgacgacaagaacgcgaccgccagcuucaucuacaacgggcggcugguggacuccguggucagcugguccaaggagauccugcgcacccaggagagcgagugcgugugcaucaacggcacgugcaccguggucaugaccgacggguccgccagcggcaaggccgacaccaagauccucuucaucaaggagggcaagaucgugcacacgagcacccuguccgggagcgcgcagcacguggaggagugcuccugcuacccccgguaccccggcguccgcugcgugugccgggacaacuggaaggggagcaaccgcccgaucguggacaucaacaucaaggaccacuccaucgucagcuccuacgugugcagcggccuggugggcgacacgccccggaagaacgacuccagcuccagcucccacugccucgaccccaacaacgaggagggcgggcacggggucaagggcugggccuucgacgacgggaacaacguguggaugggccgcaccaucagcgagaagucccggcugggcuacgagaccuucaaggucaucgagggguggagcaaccccaaguccaagcugcagaucaaccgccaggugaucguggaccggggcaaccgcagcggguacuccggcaucuucagcgucgagggcaagagcugcaucaaccggugcuucuacguggagcucauccgcgggcggaaggaggagaccgaggugcuguggaccuccaacagcaucgucguguucugcggcaccuccgggacguacggcaccgggagcuggccggacggcgccgacaucaaccugaugcccaucuga

SEQ ID NO: 85648 - RNA, 1410 nt, Artificial Sequence; identical to SEQ ID NO: 78738
  derived and/or modified CDS sequence (opt1) from neuraminidase__InfluenzaA__AEX36622

SEQ ID NO: 85649 - RNA, 1410 nt, Artificial Sequence
  derived and/or modified CDS sequence (opt1) from neuraminidase__InfluenzaA__AEX63619
augaaccccaaccagaagaucaucaccaucggcagcaucugcaugaccaucgggaucgccucccugauccuccagaucggcaacaucaucagcaucuggaucucccacagcauccagacggagaaccagaaccagccggagaucugcaaccagaacgugaucaccuacgagaacaacaccugggucaaccagaccuacgugaacguguccaacacgaacuucgucgccgagcaggcgguggccagcgugaagcuggccgggaacuccagccugugccccgucuccggcugggccaucuacagcaaggacaacuccgugcgcaucgggagcaagggcgacguguucgucauccgggagcccuucaucuccugcagccacuccgagugccgcaccuucuuccucacccagggcgcccugcugaacgacaagcacagcaacgggaccaucaaggaccggucccccuaccgcacgcucaugagcugcccgaucggcgaggugcccucccccuacaacagccgguucgagagcguggcgugguccgccagcgccugccacgacgggaccuccuggcugaccaucggcaucagcgggcccgacaacggcgccgucgcggugcugaaguacaacggcaucaucaccgacacgaucaaguccuggcgcaagaacauccuccggacccaggagagcgagugcgccugcgugaacggguccugcuucaccgucaugaccgacggcccgagcaacgggcaggccuccuacaagguguucaagaucgagcgcggcaagguggucaagagcguggagcugaacgcccccaacuaccacuacgaggagugcuccugcuaccccgagagcuccgagaucacgugcgugugccgggacaacuggcacggcagcaaccgccccugggucuccuucaaccagaaccuggaguaccagaugggguacaucugcagcggcaucuucggggacaacccgcggcccaacgacaagaccggcuccugcgggcccguguucagcaacggcgccaacggcgugaagggguucuccuucaaguacggcaacggggucuggaucggccgcaccaagagcaccagcucccggaugggguucgagaugaucugggaccccgacggcuggacgaagaccgacgacaaguucagcgugaagcaggacaucaucggcaucaccgacugguccggguacagcggcuccuucguccagcacccggagcucaccgggcuggacugcaugcgccccugcuucuggguggagcugauccggggccgccccaaggagaacacgaucuggaccagcggguccagcaucuccuucugcggcgugaacagcgacaccgucggcugguccuggcccgacggggcggagcucccguucaccaucgacaaguga

SEQ ID NO: 85650 - RNA, 1365 nt, Artificial Sequence; identical to SEQ ID NO: 79743
  derived and/or modified CDS sequence (opt1) from neuraminidase__InfluenzaA__AEX92876

SEQ ID NO: 85651 - RNA, 1365 nt, Artificial Sequence; identical to SEQ ID NO: 79743
  derived and/or modified CDS sequence (opt1) from neuraminidase__InfluenzaA__AEX92887

SEQ ID NO: 85652 - RNA, 1365 nt, Artificial Sequence; identical to SEQ ID NO: 79743
  derived and/or modified CDS sequence (opt1) from neuraminidase__InfluenzaA__AEX92904

SEQ ID NO: 85653 - RNA, 1365 nt, Artificial Sequence; identical to SEQ ID NO: 79743
  derived and/or modified CDS sequence (opt1) from neuraminidase__InfluenzaA__AEX96924

SEQ ID NO: 85654 - RNA, 1410 nt, Artificial Sequence; identical to SEQ ID NO: 82493
  derived and/or modified CDS sequence (opt1) from neuraminidase__InfluenzaA__AEY69091

SEQ ID NO: 85655 - RNA, 1410 nt, Artificial Sequence; identical to SEQ ID NO: 80623
  derived and/or modified CDS sequence (opt1) from neuraminidase__InfluenzaA__AEY69101

SEQ ID NO: 85656 - RNA, 1410 nt, Artificial Sequence; identical to SEQ ID NO: 80623
  derived and/or modified CDS sequence (opt1) from neuraminidase__InfluenzaA__AEY69112

SEQ ID NO: 85657 - RNA, 1410 nt, Artificial Sequence
  derived and/or modified CDS sequence (opt1) from neuraminidase__InfluenzaA__AEY69145
augaacaccaaccagaagaucaucaccaucggcagcgugucccugacgaucagcaccaucugcuucuucaugcagaucgccauccucaucaccaccgucacgcugcacuucaagcaguacgaguucaacuccccgcccaacaaccaggugaugcugugcgagcccaccaucaucgagcgcaacaucaccgagaucguguaccucaccaacacgaccaucgagaaggagaucugccccaagcuggccgaguaccggaacuggagcaagccccagugcgacaucaccggguucgcgccguucuccaaggacaacagcauccgccuguccgccggcggggacaucugggucacccgggagcccuacgugagcugcgaccccgacaagugcuaccaguucgcccucggccaggggacgaccaucaacaacgugcacuccaacaacaccguccgcgaccggacccccuaccgcacgcugcugaugaacgagcucggcgugccguuccaccugggcaccaagcaggucugcaucgccuggagcuccagcuccugccacgacgggaaggccuggcugcacgugugcaucaccggcgacgacaagaacgcgaccgccagcuucaucuacaacgggcggcucguggacuccguggucagcugguccaaggagauccugcgcacgcaggagagcgagugcgugugcaucaacgggaccugcaccguggucaugaccgacggguccgccagcggcaaggccgacacgaagauccuguucaucgaggagggcaagaucgugcacaccagcacccucuccgggagcgcgcagcacguggaggagugcuccugcuacccccgguaccccggcguccgcugcgugugccgggacaacuggaaggggagcaaccgccccaucguggacaucaacaugaaggaccacuccaucgucagcuccuacgugugcagcggccuggugggcgacaccccgcggaagaacgacuccagcuccagcucccacugccuggaccccaacaacgaggagggcggccacggggucaagggcugggccuucgacgacgggaacgacguguggaugggccgcacgaucagcgagaagucccggcucggcuacgagaccuucaaggucaucgagggguggagcaaccccaaguccaagcugcagaucaaccgccaggugaucguggaccggggcaaccgcagcggguacuccggcaucuucagcgucgagggcaagagcugcaucaaccggugcuucuacguggagcugauccgcgggcggaaggaggagaccgaggugcucuggaccuccaacagcgucgugguguucugcggcacguccgggaccuacggcaccgggagcuggcccgacggcgccgacaucaaccugaugccgaucuga

SEQ ID NO: 85658 - RNA, 1410 nt, Artificial Sequence; identical to SEQ ID NO: 80623
  derived and/or modified CDS sequence (opt1) from neuraminidase__InfluenzaA__AEY69156

SEQ ID NO: 85659 - RNA, 1410 nt, Artificial Sequence
  derived and/or modified CDS sequence (opt1) from neuraminidase__InfluenzaA__AEY69167
augaaccccaaccagaagaucaucaccaucggcagcgugucccugaccaucagcacgaucugcuucuucaugcagaucgccauccucaucaccaccgucacccugcacuucaagcaguacgaguucaacuccccgcccaacaaccaggugaugcugugcgagcccacgaucaucgagcgcaacaucaccgagaucguguaccucaccaacaccacgaucgagaaggagaucugccccaagcuggccgaguaccggaacuggagcaagccgcagugcgacaucaccggguucgcgcccuucuccaaggacaacagcauccgccuguccgccggcggggacaucugggucacccgggagcccuacgugagcugcgaccccgacaagugcuaccaguucgcccucggccaggggaccacgcugaacaacgugcacuccaacaacaccguccgcgaccggaccccguaccgcacccugcucaugaacgagcugggcgugcccuuccaccugggcacgaagcaggucugcaucgccuggagcuccagcuccugccacgacgggaaggccuggcuccacgugugcaucaccggcgacgacaagaacgcgaccgccagcuucaucuacaacgggcggcugguggacuccguggucagcugguccaaggagauccugcgcacccaggagagcgagugcgugugcaucaacggcacgugcaccguggucaugaccgacggguccgccagcggcaaggccgacaccaagauccucuucaucgaggagggcaagaucgugcacacgagcacccuguccgggagcgcgcagcacguggaggagugcuccugcuacccccgguaccccggcguccgcugcgugugccgggacaacuggaaggggagcaaccgcccgaucguggacaucaacaucaaggaccacuccaucgucagcuccuacgugugcagcggccuggugggcgacacgccccggaagaacgacuccagcuccagcucccacugccucgaccccaacaacgaggagggcgggcacggggucaagggcugggccuucgacgacgggaacgacguguggaugggccgcaccaucagcgagaagucccggcugggcuacgagaccuucaaggucaucgagggguggagcaaccccaaguccaagcugcagaucaaccgccaggugaucguggaccggggcaaccgcagcggguacuccggcaucuucagcgucgagggcaagagcugcaucaaccggugcuucuacguggagcucauccgcgggcggaaggaggagaccgaggugcuguggaccuccaacagcaucgucguguucugcggcaccuccgggacguacggcaccgggagcuggccggacggcgccgacaucaaccugaugcccguguga

SEQ ID NO: 85660 - RNA, 1410 nt, Artificial Sequence; identical to SEQ ID NO: 85659
  derived and/or modified CDS sequence (opt1) from neuraminidase__InfluenzaA__AEY69178

SEQ ID NO: 85661 - RNA, 1410 nt, Artificial Sequence; identical to SEQ ID NO: 85659
  derived and/or modified CDS sequence (opt1) from neuraminidase__InfluenzaA__AEY69189

SEQ ID NO: 85662 - RNA, 1410 nt, Artificial Sequence
  derived and/or modified CDS sequence (opt1) from neuraminidase__InfluenzaA__AEY69211
augaaccccaaccagaagaucaucaccaucggcagcgugucccugaccaucagcacgaucugcuucuucaugcagaucgccauccucaucaccaccgucacccugcacuucaagcaguacaaguucaacuccccgcccaacaaccaggugaugcugugcgagcccacgaucaucgagcgcaacaucaccgagaucguguaccucaccaacaccacgaucgagaaggagaucugccccaagcuggccgaguaccggaacuggagcaagccgcagugcgacaucaccggguucgcgcccuucuccaaggacaacagcauccgccuguccgccggcggggacaucugggucacccgggagcccuacgugagcugcgaccccgacaagugcuaccaguucgcccucggccaggggaccacgcugaacaacgugcacuccaacaacaccguccgcgaccggaccccguaccgcacccugcucaugaacgagcugggcgugcccuuccaccugggcacgaagcaggucugcaucgccuggagcuccagcuccugccacgacgggaaggccuggcuccacgugugcaucaccggcgacgacaagaacgcgaccgccagcuucaucuacaacgggcggcugguggacuccguggucagcugguccaaggagauccugcgcacccaggagagcgagugcgugugcaucaacggcacgugcaccguggucaugaccgacggguccgccagcggcaaggccgacaccaagauccucuucaucgaggagggcaagaucgugcacacgagcacccuguccgggagcgcgcagcacguggaggagugcuccugcuacccccgguaccccggcguccgcugcgugugccgggacaacuggaaggggagcaaccgcccgaucguggacaucaacaucaaggaccacuccaucgucagcuccuacgugugcagcggccuggugggcgacacgccccggaagaacgacuccagcuccagcucccacugccucgaccccaacaacgaggagggcgggcacggggucaagggcugggccuucgacgacgggaacgacguguggaugggccgcaccaucagcgagaagucccggcugggcuacgagaccuucaaggucaucgagggguggagcaaccccaaguccaagcugcagaucaaccgccaggugaucguggaccggggcaaccgcagcggguacuccggcaucuucagcgucgagggcaagagcugcaucaaccggugcuucuacguggagcucauccgcgggcggaaggaggagaccgaggugcuguggaccuccaacagcaucgucguguucugcggcaccuccgggacguacggcaccgggagcuggccggacggcgccgacaucaaccugaugcccguguga

SEQ ID NO: 85663 - RNA, 1410 nt, Artificial Sequence; identical to SEQ ID NO: 85659
  derived and/or modified CDS sequence (opt1) from neuraminidase__InfluenzaA__AEY69233

SEQ ID NO: 85664 - RNA, 1410 nt, Artificial Sequence; identical to SEQ ID NO: 85659
  derived and/or modified CDS sequence (opt1) from neuraminidase__InfluenzaA__AEY69272

SEQ ID NO: 85665 - RNA, 1410 nt, Artificial Sequence; identical to SEQ ID NO: 85659
  derived and/or modified CDS sequence (opt1) from neuraminidase__InfluenzaA__AEY69283

SEQ ID NO: 85666 - RNA, 1410 nt, Artificial Sequence
  derived and/or modified CDS sequence (opt1) from neuraminidase__InfluenzaA__AEY69294
augaaccccaaccagaagaucaucaccaucggcagcgugucccugaccaucagcacgaucugcuucuucaugcagaccgccauccucaucaccaccgucacgcugcacuucaagcagugcgaguucaacuccccgcccaacaaccaggugaugcugugcgagcccaccaucaucgagcgcaacaucaccgagaucguguaccucaccaacacgaccaucgagaaggagaucugccccaagcuggccgaguaccggaacuggagcaagccgcagugcgacaucaccggguucgcgcccuucuccaaggacaacagcauccgccuguccgccggcggggacaucugggucacccgggagcccuacgugagcugcgaccccgacaagugcuaccaguucgcccucggccaggggacgacccugaacaacgugcacuccaacaacaccguccgcgaccggaccccguaccgcacgcugcucaugaacgagcugggcgugcccuuccaccugggcaccaagcaggucugcaucgccuggagcuccagcuccugccacgacgggaaggccuggcuccacgugugcaucaccggcgacgacaagaacgcgaccgccagcuucaucuacaacgggcggcugguggacuccguggucagcugguccaaggagauccugcgcacgcaggagagcgagugcgugugcaucaacgggaccugcaccguggucaugaccgacggguccgccagcggcaaggccgacacgaagauccucuucaucgaggagggcaagaucgugcacaccagcacccuguccgggagcgcgcagcacguggaggagugcuccugcuacccccgguaccccggcguccgcugcgugugccgggacaacuggaaggggagcaaccgcccgaucguggacaucaacaucaaggaccacuccaucgucagcuccuacgugugcagcggccuggugggcgacacgccccggaagaacgacuccagcuccagcucccacugccucgaccccaacaacgaggagggcggcaacggggucaagggcugggccuucgacgacgggaacgacguguggaugggccgcaccaucagcgagaagucccggcugggcuacgagaccuucaaggucaucgagggguggagcaaccccaaguccaagcugcagaucaaccgccaggugaucguggaccggggcaaccgcagcggguacuccggcaucuucagcgucgagggcaagagcugcaucaaccggugcuucuacguggagcucauccgcgggcggaaggaggagaccgaggugcuguggaccuccaacagcaucgucguguucugcggcacguccgggaccuacggcaccgggagcuggccggacggcgccgacaucaaccugaugcccaucuga

SEQ ID NO: 85667 - RNA, 1410 nt, Artificial Sequence; identical to SEQ ID NO: 85666
  derived and/or modified CDS sequence (opt1) from neuraminidase__InfluenzaA__AEY69305

SEQ ID NO: 85668 - RNA, 1410 nt, Artificial Sequence; identical to SEQ ID NO: 85666
  derived and/or modified CDS sequence (opt1) from neuraminidase__InfluenzaA__AEY69316

SEQ ID NO: 85669 - RNA, 1410 nt, Artificial Sequence; identical to SEQ ID NO: 85666
  derived and/or modified CDS sequence (opt1) from neuraminidase__InfluenzaA__AEY69788

SEQ ID NO: 85670 - RNA, 1410 nt, Artificial Sequence; identical to SEQ ID NO: 80623
  derived and/or modified CDS sequence (opt1) from neuraminidase__InfluenzaA__AEY69799

SEQ ID NO: 85671 - RNA, 1410 nt, Artificial Sequence; identical to SEQ ID NO: 80623
  derived and/or modified CDS sequence (opt1) from neuraminidase__InfluenzaA__AEY69810

SEQ ID NO: 85672 - RNA, 1410 nt, Artificial Sequence; identical to SEQ ID NO: 85659
  derived and/or modified CDS sequence (opt1) from neuraminidase__InfluenzaA__AEY69832

SEQ ID NO: 85673 - RNA, 1410 nt, Artificial Sequence
  derived and/or modified CDS sequence (opt1) from neuraminidase__InfluenzaA__AEY69843
augaaccccaaccagaagaucaucaccaucggcagcgugucccugaccaucagcacgaucugcuucuucaugcagaucgccauccucaucaccaccgucacccugcacuucaagcaguacgaguucaacuccccgcccaacaaccaggugaugcugugcgagcccacgaucaucgagcgcaacaucaccgagaucguguaccucaccaacaccacgaucgagaaggagaucugccccaagcuggccgaguaccggaacuggagcaagccgcagugcgacaucaccggguucgcgcccuucuccaaggacaacagcauccgccuguccgccggcggggacaucugggucacccgggagcccuacgugagcugcgaccccgacaagugcuaccaguucgcccucggccaggggaccacgcugaacaacgugcacuccaacaacaccguccgcgaccggaccccguaccgcacccugcucaugaacgagcugggcgugcccuuccaccugggcacgaagcaggucugcaucgccuggagcuccagcuccugccacgacgggaaggccuggcuccacgugugcaucgcgggcgacgacaagaacgccaccgccagcuucaucuacaacgggcggcugguggacuccguggucagcugguccaaggagauccugcgcacccaggagagcgagugcgugugcaucaacgggaccugcacgguggucaugaccgacggguccgccagcggcaaggcggacaccaagauccucuucaucgaggagggcaagaucgugcacaccagcacgcuguccgggagcgcccagcacguggaggagugcuccugcuacccccgguaccccggcguccgcugcgugugccgggacaacuggaaggggagcaaccgcccgaucguggacaucaacaucaaggaccacuccaucgucagcuccuacgugugcagcggccuggugggcgacacgccccggaagaacgacuccagcuccagcucccacugccucgaccccaacaacgaggagggcggccacggggucaagggcugggccuucgacgacgggaacgacguguggaugggccgcaccaucagcgagaagucccggcugggcuacgagaccuucaaggucaucgagggguggagcaaccccaaguccaagcugcagaucaaccgccaggugaucguggaccggggcaaccgcagcggguacuccggcaucuucagcgucgagggcaagagcugcaucaaccggugcuucuacguggagcucauccgcgggcggaaggaggagaccgaggugcuguggaccuccaacagcaucgucguguucugcggcaccuccgggaccuacggcacggggagcuggccggacggcgccgacaucaaccugaugcccguguga

SEQ ID NO: 85674 - RNA, 1410 nt, Artificial Sequence; identical to SEQ ID NO: 85659
  derived and/or modified CDS sequence (opt1) from neuraminidase__InfluenzaA__AEY69854

SEQ ID NO: 85675 - RNA, 1410 nt, Artificial Sequence; identical to SEQ ID NO: 85659
  derived and/or modified CDS sequence (opt1) from neuraminidase__InfluenzaA__AEY69876

SEQ ID NO: 85676 - RNA, 1410 nt, Artificial Sequence; identical to SEQ ID NO: 85659
  derived and/or modified CDS sequence (opt1) from neuraminidase__InfluenzaA__AEY69887

SEQ ID NO: 85677 - RNA, 1410 nt, Artificial Sequence; identical to SEQ ID NO: 85659
  derived and/or modified CDS sequence (opt1) from neuraminidase__InfluenzaA__AEY69898

SEQ ID NO: 85678 - RNA, 1410 nt, Artificial Sequence; identical to SEQ ID NO: 80623
  derived and/or modified CDS sequence (opt1) from neuraminidase__InfluenzaA__AEY69909

SEQ ID NO: 85679 - RNA, 1410 nt, Artificial Sequence
  derived and/or modified CDS sequence (opt1) from neuraminidase__InfluenzaA__AEY69942
augaaccccaaccagaagaucaucaccaucggcagcgugucccugaccaucagcacgaucugcuucuucaugcagaucgccauccucaucaccaccgucacccugcacuucaagcaguacgaguucaacuccccgcccaacaaccaggugaugcugugcgagcccacgaucaucgagcgcaacaucaccgagaucguguaccucaccaacaccacgaucgagaaggagaucugccccaagcuggccgaguaccggaacuggagcaagccgcagugcgacaucaccggguucgcgcccuucuccaaggacaacagcauccgccuguccgacggcggggacaucugggucacccgggagcccuacgugagcugcgaccccgacaagugcuaccaguucgcccucggccaggggaccacgcugaacaacauccacuccaacaacaccgugcgcgaccggaccccguaccgcacccugcucaugaacgagcugggcguccccuuccaccugggcacgaagcaggucugcaucgccuggagcuccagcuccugccacgacgggaaggccuggcuccacgugugcaucaccggcgacgacaagaacgccaccgcgagcuucaucuacaacgggcggcugguggacuccguggugagcugguccaaggagauccugcgcacccaggagagcgagugcgucugcaucaacggcacgugcaccguggugaugaccgacggguccgccagcggcaaggccgacaccaagauccucuucaucgaggagggcaagaucguccacacgagcacccuguccgggagcgcccagcacguggaggagugcuccugcuacccccgguaccccggcgugcgcugcgucugccgggacaacuggaaggggagcaaccgcccgaucguggacaucaacaucaaggaccacuccaucgugagcuccuacgucugcagcggccuggugggcgacacgccccggaagaacgacuccagcuccagcucccacugccucgaccccaacaacgaggagggcgggcacggggugaagggcugggcguucgacgacgggaacgacgucuggaugggccgcaccaucagcgagaagucccggcugggcuacgagaccuucaaggugaucgagggguggagcaaccccaaguccaagcugcagaucaaccgccaggucaucguggaccggggcaaccgcagcggguacuccggcaucuucagcguggagggcaagagcugcaucaaccggugcuucuacgucgagcucauccgcgggcggaaggaggagaccgaggugcuguggaccuccaacagcaucguggucuucugcggcaccuccgggacguacggcaccgggagcuggccggacggcgccgacaucaaccugaugcccguguga

SEQ ID NO: 85680 - RNA, 1410 nt, Artificial Sequence; identical to SEQ ID NO: 85679
  derived and/or modified CDS sequence (opt1) from neuraminidase__InfluenzaA__AEY69953

SEQ ID NO: 85681 - RNA, 1410 nt, Artificial Sequence; identical to SEQ ID NO: 85679
  derived and/or modified CDS sequence (opt1) from neuraminidase__InfluenzaA__AEY69964

SEQ ID NO: 85682 - RNA, 1410 nt, Artificial Sequence; identical to SEQ ID NO: 85659
  derived and/or modified CDS sequence (opt1) from neuraminidase__InfluenzaA__AEY69975

SEQ ID NO: 85683 - RNA, 1410 nt, Artificial Sequence; identical to SEQ ID NO: 85659
  derived and/or modified CDS sequence (opt1) from neuraminidase__InfluenzaA__AEY69986

SEQ ID NO: 85684 - RNA, 1410 nt, Artificial Sequence; identical to SEQ ID NO: 85659
  derived and/or modified CDS sequence (opt1) from neuraminidase__InfluenzaA__AEY69997

SEQ ID NO: 85685 - RNA, 1410 nt, Artificial Sequence; identical to SEQ ID NO: 85659
  derived and/or modified CDS sequence (opt1) from neuraminidase__InfluenzaA__AEY70008

SEQ ID NO: 85686 - RNA, 1410 nt, Artificial Sequence; identical to SEQ ID NO: 85659
  derived and/or modified CDS sequence (opt1) from neuraminidase__InfluenzaA__AEY70019

SEQ ID NO: 85687 - RNA, 1410 nt, Artificial Sequence; identical to SEQ ID NO: 85659
  derived and/or modified CDS sequence (opt1) from neuraminidase__InfluenzaA__AEY70259

SEQ ID NO: 85688 - RNA, 1410 nt, Artificial Sequence; identical to SEQ ID NO: 85659
  derived and/or modified CDS sequence (opt1) from neuraminidase__InfluenzaA__AEY70270

SEQ ID NO: 85689 - RNA, 1410 nt, Artificial Sequence; identical to SEQ ID NO: 85659
  derived and/or modified CDS sequence (opt1) from neuraminidase__InfluenzaA__AEY70281

SEQ ID NO: 85690 - RNA, 1410 nt, Artificial Sequence; identical to SEQ ID NO: 80623
  derived and/or modified CDS sequence (opt1) from neuraminidase__InfluenzaA__AEY70303

SEQ ID NO: 85691 - RNA, 1410 nt, Artificial Sequence; identical to SEQ ID NO: 80623
  derived and/or modified CDS sequence (opt1) from neuraminidase__InfluenzaA__AEY70314

SEQ ID NO: 85692 - RNA, 1410 nt, Artificial Sequence
  derived and/or modified CDS sequence (opt1) from neuraminidase__InfluenzaA__AEY70325
augaaccccaaccagaagaucaucaccaucggcagcgugucccugaccaucagcacgaucugcuucuucaugcagaucgccauccucaugaccaccgucacccugcacuucaagcaguacgaguucaacccgccgcccaacaaccaggugaugcugugcgagcccacgaucaucgagcgcaacaucaccgagaucguguaccucaccaacaccacgaucgagaaggagaucugcccgaagcuggccgaguaccggaacugguccaagccccagugcgacaucaccggguucgcgcccuucagcaaggacaacuccauccgccugagcgccggcggggacaucugggucacccgggagcccuacguguccugcgacccggacaagugcuaccaguucgcccucggccaggggaccacgcugaacaacgugcacagcaacaacaccguccgcgaccggacccccuaccgcacccugcucaugaacgagcugggcgugcccuuccaccugggcacgaagcaggucugcaucgccugguccagcuccagcugccacgacgggaaggccuggcuccacgugugcaucaccggcgacgacaagaacgcgaccgccuccuucaucuacaacgggcggcugguggacagcguggucuccuggagcaaggagauccugcgcacccaggaguccgagugcgugugcaucaacggcacgugcaccguggucaugaccgacgggagcgccuccggcaaggccgacaccaagauccucuucaucgaggagggcaagaucgugcacacgagcacccugagcggguccgcgcagcacguggaggagugcagcugcuacccccgguacccgggcguccgcugcgugugccgggacaacuggaagggguccaaccgccccaucguggacaucaacaucaaggaccacagcaucgucuccagcuacgugugcuccggccuggugggcgacacgccccggaagaacgacagcuccagcuccagccacugccucgaccccaacaacgaggagggcgggcacggggucaagggcugggccuucgacgacgggaacgacguguggaugggccgcaccaucuccgagaagucccggcugggcuacgagaccuucaaggucaucgagggguggagcaaccccaagagcaagcugcagaucaaccgccaggugaucguggaccggggcaaccgcuccggguacagcggcaucuucuccgucgagggcaagagcugcaucaaccggugcuucuacguggagcucauccgcgggcggaaggaggagaccgaggugcuguggaccagcaacuccaucgucguguucugcggcaccagcgggacguacggcaccggguccuggcccgacggcgccgacaucaaccugaugcccguguga

SEQ ID NO: 85693 - RNA, 1410 nt, Artificial Sequence
  derived and/or modified CDS sequence (opt1) from neuraminidase__InfluenzaA__AEY70336
augaaccccaaccagaagaucaucaccaucggcagcgugucccugaccaucagcacgaucugcuucuucaugcagaucgccauccucaucaccaccgucacccugcacuucaagcaguacgaguucaacuccccgcccaacaaccaggugaugcugugcgagcccacgaucaucgagcgcaacaucaccgagaucguguaccucaccaacaccacgaucgagaaggagaucugccccaagcuggccgaguaccggaacuggagcaagccgcagugcgacaucaccggguucgcgcccuucuccaaggacaacagcauccgccuguccgccggcggggacaucugggucacccgggagcccuacgugagcugcgaccccgacaagugcuaccaguucgcccucggccaggggaccacgcugaacaacgugcacuccaacaacaccguccgcgaccggaccccguaccgcacccugcucaugaacgagcugggcgugcccuuccaccugggcacgaagcaggucugcaucgccuggagcuccagcuccugccacgacgggaaggccuggcuccacgugugcaucaccggcgacgacaagaacgcgaccgccagcuucaucuacaacgggcggcugguggacuccguggucagcugguccaaggagauccugcgcacccaggagagcgagugcgugugcaucaacggcacgugcaccguggucaugaccgacggguccgccagcggcaaggccgacaccaagauccucuucaucgaggagggcaagaucgugcacacgagcacccuguccgggagcgcgcagcacguggaggagugcuccugcuacccccgguaccccggcguccgcugcaucugccgggacaacuggaaggggagcaaccgcccgaucguggacaucaacaucaaggaccacuccaucgugagcuccuacgucugcagcggccuggugggcgacacgccccggaagaacgacuccagcuccagcucccacugccucgaccccaacaacgaggagggcgggcacggggugaagggcugggccuucgacgacgggaacgacgucuggaugggccgcaccaucagcgagaagucccggcugggcuacgagaccuucaaggugaucgagggguggagcaaccccaaguccaagcugcagaucaaccgccaggucaucguggaccggggcaaccgcagcggguacuccggcaucuucagcguggaggacaagagcugcaucaaccggugcuucuacgucgagcucauccgcgggcggaaggaggagaccgaggugcuguggaccuccaacagcaucguggucuucugcggcaccuccggcacguacgggaccggcagcuggccggacggggccgacaucaaccugaugcccguguga

SEQ ID NO: 85694 - RNA, 1410 nt, Artificial Sequence; identical to SEQ ID NO: 80762
  derived and/or modified CDS sequence (opt1) from neuraminidase__InfluenzaA__AEY70358

SEQ ID NO: 85695 - RNA, 1410 nt, Artificial Sequence; identical to SEQ ID NO: 80623
  derived and/or modified CDS sequence (opt1) from neuraminidase__InfluenzaA__AEY70379

SEQ ID NO: 85696 - RNA, 1410 nt, Artificial Sequence; identical to SEQ ID NO: 82385
  derived and/or modified CDS sequence (opt1) from neuraminidase__InfluenzaA__AFB70139

SEQ ID NO: 85697 - RNA, 1410 nt, Artificial Sequence; identical to SEQ ID NO: 80762
  derived and/or modified CDS sequence (opt1) from neuraminidase__InfluenzaA__AFB70141

SEQ ID NO: 85698 - RNA, 1410 nt, Artificial Sequence; identical to SEQ ID NO: 82385
  derived and/or modified CDS sequence (opt1) from neuraminidase__InfluenzaA__AFB70147

SEQ ID NO: 85699 - RNA, 1410 nt, Artificial Sequence; identical to SEQ ID NO: 80762
  derived and/or modified CDS sequence (opt1) from neuraminidase__InfluenzaA__AFB70153

SEQ ID NO: 85700 - RNA, 1410 nt, Artificial Sequence; identical to SEQ ID NO: 80762
  derived and/or modified CDS sequence (opt1) from neuraminidase__InfluenzaA__AFB70155

SEQ ID NO: 85701 - RNA, 1410 nt, Artificial Sequence; identical to SEQ ID NO: 81732
  derived and/or modified CDS sequence (opt1) from neuraminidase__InfluenzaA__AFB70157

SEQ ID NO: 85702 - RNA, 1410 nt, Artificial Sequence; identical to SEQ ID NO: 80762
  derived and/or modified CDS sequence (opt1) from neuraminidase__InfluenzaA__AFB70159

SEQ ID NO: 85703 - RNA, 1410 nt, Artificial Sequence
  derived and/or modified CDS sequence (opt1) from neuraminidase__InfluenzaA__AFB70161
augaaccccaaccagaagaucaucaccaucggcagcgugugcaugaccaucgggauggccaaccugauccuccagaucggcaacaucaucuccaucuggaucagccacuccauccagcuggggaaccagaaccagaucgagacgugcaaccagagcgucaucaccuacgagaacaacaccugggugaaccagaccuacgugaacaucuccaacacgaacuucgccgcgggccagagcgucguguccgugaagcuggccgggaacagcucccucugcccggucagcggcugggccaucuacuccaaggacaacagcauccgcaucggcuccaagggggacguguucgugauccgggagcccuucaucagcugcagcccccuggagugccgcaccuucuuccugacccagggcgcccuccugaacgacaagcacuccaacgggaccaucaaggaccggucccccuaccgcacgcugaugagcugcccgaucggcgagguccccucccccuacaacagccgguucgagagcguggccugguccgcgagcgccugccacgacgggaucaacuggcucaccaucggcaucuccggccccgacaacggggccguggccguccugaaguacaacggcaucaucaccgacaccaucaagagcuggcgcaacaacauccugcggacgcaggaguccgagugcgcgugcgugaacgggagcugcuucaccgugaugaccgacggcccguccgacggccaggccagcuacaagaucuuccgcaucgagaaggggaagaucgucaaguccguggagaugaacgcccccaacuaccacuacgaggagugcagcugcuaccccgacuccagcgagaucacgugcgugugccgggacaacuggcacggcuccaaccgccccugggucagcuucaaccagaaccucgaguaccagaucggguacaucugcuccggcaucuucggggacaacccgcggcccaacgacaagaccggcagcugcggccccguguccagcaacggggccaacggcgugaagggguucuccuucaaguacggcaacggggucuggaucggccgcaccaagagcaucagcucccggaacggcuucgagaugaucugggaccccaacggguggaccggcaccgacaacaacuucagcacgaagcaggacaucguggggaucaacgagugguccggcuacagcggguccuucgugcagcacccggagcugaccggccuggacugcauccgccccugcuucugggucgagcucauccggggccgccccaaggagaacaccaucuggaccagcggguccagcaucuccuucugcggcgugaacagcgacacggucgggugguacuggcccgacggcgccgagcugccguucaccaucgacaaguga

SEQ ID NO: 85704 - RNA, 1410 nt, Artificial Sequence
  derived and/or modified CDS sequence (opt1) from neuraminidase__InfluenzaA__AFB70163
augaaccccaaccagaagaucaucaccaucggcagcgugugcaugaccaucgggauggccaaccugauccuccagaucggcaacaucaucuccaucuggaucagccacuccauccagcuggggaaccagaaccagaucgagacgugcaaccagagcgucaucaccuacgagaacaacaccugggugaaccagaccuacgugaacaucuccaacacgaacuucgccgcgggccagagcgucguguccgugaagcuggccgggaacagcucccucugcccggucagcggcugggccaucuacuccaaggacaacagcauccgcaucggcuccaagggggacguguucgugauccgggagcccuucaucagcugcagcccccuggagugccgcaccuucuuccugacccagggcgcccuccugaacgacaagcacuccaacgggaccaucaaggaccggucccccuaccgcacgcugaugagcugcccgaucggcgagguccccucccccuacaacagccgguucgagagcguggccugguccgcgagcgccugccacgacgggaucaacuggcucaccaucggcaucuccggccccgacaacggggccguggccguccugaaguacaacggcaucaucaccgacaccaucaagagcuggcgcaacaacauccugcggacgcaggaguccgagugcgcgugcgugaacgggagcugcuucaccgugaugaccgacggcccguccgacggccaggccagcuacaagaucuuccgcaucgagaaggggaagaucgucaaguccguggagaugaacgcccccaacuaccacuacgaggagugcagcugcuaccccgacuccagcgagaucacgugcgugugccgggacaacuggcacggcuccaaccgccccugggucagcuucaaccagaaccucgaguaccagaucggguacaucugcuccggcaucuucggggacaacccgcggcccaacgacaagaccggcagcugcggccccguguccagcaacggggccaacggcgugaagggguucuccuucaaguacggcaacggggucuggaucggccgcaccaagagcaucagcucccggaacggcuucgagaugaucugggaccccaacggguggaccggcaccgacaacaacuucagcaucaagcaggacaucguggggaucaacgagugguccggcuacagcggguccuucgugcagcacccggagcugacgggccuggacugcauccgccccugcuucugggucgagcucauccggggccgccccaaggagaacgccaucuggaccagcggguccagcaucuccuucugcggcgugaacagcgacaccgucgggugguccuggcccgacggcgcggagcugccguucaccaucgacaaguga

SEQ ID NO: 85705 - RNA, 1410 nt, Artificial Sequence
  derived and/or modified CDS sequence (opt1) from neuraminidase__InfluenzaA__AFB70169
augaaccccaaccagaagaucaucaccaucggcagcgugugcaugaccaucgggauggccaaccugauccuccagaucggcaacaucaucuccaucuggaucaaccacagcauccagcuggggaaccagaaccagaucgagacgugcaaccaguccgucaucaccuacgagaacaacaccugggugaaccagaccuacgugaacaucagcaacacgaacuucgccgcgggccaguccgucgugagcgugaagcuggccgggaacuccagccucugcccggucuccggcugggccaucuacagcaaggacaacuccauccgcaucggcagcaagggggacguguucgugauccgggagcccuucaucuccugcagcccccuggagugccgcaccuucuuccugacccagggcgcccuccugaacgacaagcacuccaacgggaccaucaaggaccggagccccuaccgcacgcugauguccugcccgaucggcgagguccccagccccuacaacucccgguucgagagcguggccuggagcgcguccgccugccacgacgggaucaacuggcucaccaucggcaucagcggccccgacaacggggccguggccguccugaaguacaacggcaucaucaccgacaccaucaaguccuggcgcaacaacauccugcggacgcaggagagcgagugcgcgugcgugaacggguccugcuucaccgugaugaccgacggcccgagcgacggccaggccuccuacaagaucuuccgcaucgagaaggggaagaucgucaagagcguggagaugaacgcccccaacuaccacuacgaggagugcuccugcuaccccgacagcuccgagaucacgugcgugugccgggacaacuggcacggcagcaaccgccccugggucuccuucaaccagaaccucgaguaccagaucggguacaucugcagcggcaucuucggggacaacccgcggcccaacgacaagaccggcuccugcggccccgugagcuccaacggggccaacggcgugaagggguucagcuucaaguacggcaacggggucuggaucggccgcaccaaguccaucagcagccggaacggcuucgagaugaucugggaccccaacggguggaccggcaccgacaacaacuucuccaucaagcaggacaucguggggaucaacgaguggagcggcuacuccgggagcuucgugcagcacccggagcugacgggccuggacugcauccgccccugcuucugggucgagcucauccggggccgccccaaggagaacaccaucuggaccuccgggagcuccaucagcuucugcggcgugaacuccgacaccgucggguggagcuggcccgacggcgccgagcugccguucacgaucgacaaguga

SEQ ID NO: 85706 - RNA, 1410 nt, Artificial Sequence; identical to SEQ ID NO: 80762
  derived and/or modified CDS sequence (opt1) from neuraminidase__InfluenzaA__AFB70199

SEQ ID NO: 85707 - RNA, 1410 nt, Artificial Sequence; identical to SEQ ID NO: 80762
  derived and/or modified CDS sequence (opt1) from neuraminidase__InfluenzaA__AFB70209

SEQ ID NO: 85708 - RNA, 1410 nt, Artificial Sequence; identical to SEQ ID NO: 80762
  derived and/or modified CDS sequence (opt1) from neuraminidase__InfluenzaA__AFB70219

SEQ ID NO: 85709 - RNA, 1410 nt, Artificial Sequence; identical to SEQ ID NO: 80762
  derived and/or modified CDS sequence (opt1) from neuraminidase__InfluenzaA__AFB70229

SEQ ID NO: 85710 - RNA, 1410 nt, Artificial Sequence; identical to SEQ ID NO: 80762
  derived and/or modified CDS sequence (opt1) from neuraminidase__InfluenzaA__AFB70239

SEQ ID NO: 85711 - RNA, 1410 nt, Artificial Sequence; identical to SEQ ID NO: 80762
  derived and/or modified CDS sequence (opt1) from neuraminidase__InfluenzaA__AFB70249

SEQ ID NO: 85712 - RNA, 1410 nt, Artificial Sequence; identical to SEQ ID NO: 80762
  derived and/or modified CDS sequence (opt1) from neuraminidase__InfluenzaA__AFB70259

SEQ ID NO: 85713 - RNA, 1410 nt, Artificial Sequence; identical to SEQ ID NO: 81732
  derived and/or modified CDS sequence (opt1) from neuraminidase__InfluenzaA__AFB70269

SEQ ID NO: 85714 - RNA, 1410 nt, Artificial Sequence; identical to SEQ ID NO: 80762
  derived and/or modified CDS sequence (opt1) from neuraminidase__InfluenzaA__AFB70279

SEQ ID NO: 85715 - RNA, 1410 nt, Artificial Sequence; identical to SEQ ID NO: 80762
  derived and/or modified CDS sequence (opt1) from neuraminidase__InfluenzaA__AFB70289

SEQ ID NO: 85716 - RNA, 1410 nt, Artificial Sequence; identical to SEQ ID NO: 80762
  derived and/or modified CDS sequence (opt1) from neuraminidase__InfluenzaA__AFB70299

SEQ ID NO: 85717 - RNA, 1410 nt, Artificial Sequence; identical to SEQ ID NO: 80762
  derived and/or modified CDS sequence (opt1) from neuraminidase__InfluenzaA__AFB70309

SEQ ID NO: 85718 - RNA, 1410 nt, Artificial Sequence; identical to SEQ ID NO: 82385
  derived and/or modified CDS sequence (opt1) from neuraminidase__InfluenzaA__AFB70319

SEQ ID NO: 85719 - RNA, 1410 nt, Artificial Sequence; identical to SEQ ID NO: 80762
  derived and/or modified CDS sequence (opt1) from neuraminidase__InfluenzaA__AFB70329

SEQ ID NO: 85720 - RNA, 1410 nt, Artificial Sequence; identical to SEQ ID NO: 80762
  derived and/or modified CDS sequence (opt1) from neuraminidase__InfluenzaA__AFB70349

SEQ ID NO: 85721 - RNA, 1410 nt, Artificial Sequence; identical to SEQ ID NO: 80762
  derived and/or modified CDS sequence (opt1) from neuraminidase__InfluenzaA__AFB70359

SEQ ID NO: 85722 - RNA, 1410 nt, Artificial Sequence; identical to SEQ ID NO: 80762
  derived and/or modified CDS sequence (opt1) from neuraminidase__InfluenzaA__AFB70369

SEQ ID NO: 85723 - RNA, 1410 nt, Artificial Sequence; identical to SEQ ID NO: 80762
  derived and/or modified CDS sequence (opt1) from neuraminidase__InfluenzaA__AFB70379

SEQ ID NO: 85724 - RNA, 1410 nt, Artificial Sequence; identical to SEQ ID NO: 80762
  derived and/or modified CDS sequence (opt1) from neuraminidase__InfluenzaA__AFB70389

SEQ ID NO: 85725 - RNA, 1410 nt, Artificial Sequence; identical to SEQ ID NO: 80762
  derived and/or modified CDS sequence (opt1) from neuraminidase__InfluenzaA__AFB70399

SEQ ID NO: 85726 - RNA, 1410 nt, Artificial Sequence; identical to SEQ ID NO: 80762
  derived and/or modified CDS sequence (opt1) from neuraminidase__InfluenzaA__AFB70409

SEQ ID NO: 85727 - RNA, 1410 nt, Artificial Sequence
  derived and/or modified CDS sequence (opt1) from neuraminidase__InfluenzaA__AFB77614
augcaccccaaccaggaggugaucagcaucgucuccgugugcaugaccaucggcauggccaaccugauccuccagaucgggaacaucaucagcaucuggaucucccacagcauccagcugggcaaccagaaccagaucgagaccugcaaccaguccgugaucacguacgagaacaacaccugggucaaccagaccuacgugaacaucagcaacaccaacuucgccgcggggcaguccguggucagcgugaagcuggccggcaacuccagccucugcccgguguccgggugggccaucuacagcaaggacaacuccauccgcaucggcagcaagggcgacgucuucgugauccgggagcccuucaucuccugcagcccccuggagugccgcacguucuuccugacccagggggcccuccugaacgacaagcacuccaacggcaccaucaaggaccggagccccuaccgcacccugauguccugcccgaucggggaggugcccagccccuacaacagccgguucgaguccgucgccuggagcgcguccgccugccacgacggcaucaacuggcucacgaucgggaucagcggccccgacaacggcgccguggccgugcugaaguacaacgggaucaucaccgacaccaucaaguccuggcgcaacaacauccugcggacccaggagagcgagugcgcgugcgucaacggcuccugcuucacgaucaugaccgacgggccgagcgacggccaggccuccuacaagaucuuccgcaucgagaagggcaagaucgucaagagcguggagaugaacgcccccaacuaccacuacgaggagugcuccugcuaccccgacagcuccgagaucacgugcgugugccgggacaacuggcacgggagcaaccgccccuggguguccuucaaccagaaccucgaguaccagaucggcuacaucugcagcgggaucuucggcgacaacccgcggcccaacgacaagaccggguccugcggccccgugagcuccaacggcgccaacggggucaagggcuucagcuucaaguacgggaacggcguguggaucgggcgcaccaagagcaucuccagccggaagggcuucgagaugaucugggaccccaacggcuggaccgggaccgacaacaacuucuccaucaagcaggacaucgugggcaucaacgaguggagcggguacuccggcagcuucguccagcacccggagcugaccgggcuggacugcauccgccccugcuucuggguggagcucauccggggccgccccaaggagaacacgaucuggaccuccggcagcuccaucagcuucugcggggucaacuccgacaccgugggcugguucuggcccgacggggccgagcugccguucaccaucgacaaguga

SEQ ID NO: 85728 - RNA, 1410 nt, Artificial Sequence
  derived and/or modified CDS sequence (opt1) from neuraminidase__InfluenzaA__AFB77615
augcaccccaaccaggagaucaucaccuucgugagcgucugcaugaccaucggcauggccaaccugauccuccagaucgggaacaucaucuccaucuggaucagccacuccauccagcugggcaaccagaaccagaucgagacgugcaaccagagcgugaucaccuacgagaacaacaccugggugaaccagaccuacgucaacaucuccaacacgaacuucgccgcggggcagagcgugguguccgucaagcuggccggcaacagcucccucugcccggugagcgggugggccaucuacuccaaggacaacagcauccgcaucggcuccaagggcgacguguucgucauccgggagcccuucaucagcugcagcccccuggagugccgcaccuucuuccugacccagggggcccuccugaacgacaagcacuccaacggcaccaucaaggaccggucccccuaccgcacgcugaugagcugcccgaucggggaggugcccucccccuacaacagccgguucgagagcguggccugguccgcgagcgccugccacgacggcaucaacuggcucaccaucgggaucuccggccccgacaacggcgccgucgccgugcugaaguacaacgggaucaucaccgacaccaucaagagcuggcgcaacaacauccugcggacgcaggaguccgagugcgcgugcgugaacggcagcugcuucaccaucaugaccgacgggccguccgacggccaggccagcuacaagaucuuccgcaucgagaagggcaagaucgucaaguccguggagaugaacgcccccaacuaccacuacgaggagugcagcugcuaccccgacuccagcgagaucacgugcgugugccgggacaacuggcacggguccaaccgccccugggucagcuucaaccagaaccucgaguaccagaucggcuacaucugcuccgggaucuucggcgacaacccgcggcccaacgacaagaccgggagcugcggccccguguccagcaacggcgccaacggggugaagggcuucuccuucaaguacgggaacggcgucuggaucgggcgcaccaagagcaucagcucccggaagggcuucgagaugaucugggaccccaacggcuggaccgggaccgacaacaacuucagcaucaagcaggacaucgugggcaucaacgagugguccggguacagcggcuccuucgugcagcacccggagcugacggggcuggacugcauccgccccugcuucugggucgagcucauccggggccgccccaaggagaacaccaucuggaccagcggcuccagcaucuccuucugcggggugaacagcgacaccgucggcugguccuggcccgacggggccgagcugccguucacgaucgacaaguga

SEQ ID NO: 85729 - RNA, 1410 nt, Artificial Sequence
  derived and/or modified CDS sequence (opt1) from neuraminidase__InfluenzaA__AFB78128
augaaccccaaccagaagaucaucaccaucggcagcgugucccugaccaucgccacgaucugcuuccucaugcagaucgucauccuggugaccaccgugacccugcacuucaagcagcacgagugcaacagcccgcccaacaaccaggucaugcucugcgagcccacgaucaucgagcgcaacaucaccgagaucguguaccugaccaacaccacgaucgagaaggagaucugccccaagcuggccgaguaccggaacugguccaagccgcagugcaagaucaccggguucgcgcccuucagcaaggacaacuccauccgccucagcgccggcggggacaucugggugacccgggagcccuacgucuccugcgaccccgacaagugcuaccaguucgcccugggccaggggaccacgcugaacaaccgccacagcaacgacaccgugcacgaccggaccccguaccgcacccuccugaugaacgagcugggcgugcccuuccaccucggcacgaagcaggucugcaucgccugguccagcuccagcugccacgacgggaaggccuggcugcacgugugcgugaccggccacgacgagaacgcgaccgccuccuucaucuacgacgggcggcuggucgacagcaucggcuccuggagcaagaagauccuccgcacccaggaguccgagugcgugugcaucaacgggacgugcaccguggucaugaccgacggcagcgccuccggccgggccgacaccaagauccuguucaucgaggaggggaagaucgugcacacgagcaagcugagcggcuccgcgcagcacguggaggagugcagcugcuacccccgcuaccccgggguccggugcgugugccgcgacaacuggaagggcuccaaccggccgaucguggacaucaacgucaaggacuacagcaucguguccagcuacgugugcuccggccucgucggggacacgccccgcaagaacgacagcuccagcuccagccacugccuggaccccaacaacgaggagggcgggcacggcgugaaggggugggccuucgacgacggcaacgacgucuggaugggccggaccaucuccgagaagucccgcagcggguacgagaccuucaaggugaucgagggcuggagcaagcccaacuccaagcugcagaucaaccgccaggugaucgucgagcgggggaacaugagcggcuacuccgggaucuucagcguggagggcaagagcugcaucaaccggugcuucuacguggagcucauccgcggccggaagcaggagaccgaggucugguggaccuccaacagcaucgugguguucugcgggaccuccggcaccuacgggacgggcagcuggccggacggggccgacaucaaccugaugcccaucuga

SEQ ID NO: 85730 - RNA, 1410 nt, Artificial Sequence
  derived and/or modified CDS sequence (opt1) from neuraminidase__InfluenzaA__AFC62078
augaaccccaaccagaagaucaucaccaucggcagcgugugcaugaccaucgggauggccaaccugauccuccagaucggcaacaucaucuccaucuggaucagccacuccauccagcuggggaaccagagccagaucgagacgugcaaccaguccgucaucaccuacgagaacaacaccugggugaaccagaccuacgugaacaucagcaacacgaacuucgccgcgggccaguccgucgugagcgugaagcuggccgggaacuccagccucugcccggucuccggcugggccaucuacagcaaggacaacuccauccgcaucggcagcaagggggacguguucgugauccgggagcuguucaucuccugcagcccccuggagugccgcaccuucuuccucacccagggcgcccugcugaacgacaagcacuccaacgggaccaucaaggaccggagccccuaccgcacgcucauguccugccccaucggcgaggucccgagccccuacaacagccgguucgaguccguggccuggagcgcguccgccugccacgacgggaucaacuggcugaccaucggcaucagcggccccgacaacggggccguggccguccugaaguacaacggcaucaucaccgacaccaucaaguccuggcgcaacgacauccuccggacgcaggagagcgagugcgcgugcgugaacggguccugcuucaccaucaugaccgacggccccagcgacggccaggccuccuacaagaucuuccgcaucgagaaggggaagaucgucaagagcguggagaugaacgccccgaacuaccacuacgaggagugcuccugcuaccccgacagcuccgagaucacgugcgugugccgggacaacuggcacggcagcaaccgccccuggguguccuucaaccagaaccuggaguaccagaucggguacaucugcagcggcaucuucggggacaacccccggccgaacgacaagaccggcuccugcggccccgucagcuccaacggggccaacggcgugaagggguucagcuucaaguacggcaacgggguguggaucggccgcaccaagagcaucuccagccggaagggcuucgagaugaucugggaccccaacggguggaccggcaccgacaacaacuucuccaucaagcaggacaucgucgggaucaacgaguggagcggcuacuccgggagcuucgugcagcaccccgagcugacgggcauggacugcauccgcccgugcuucuggguggagcucauccggggccgccccaaggagaacaccaucuggaccuccgggagcuccaucagcuucugcggcgucaacuccgacaccgugggguggagcuggcccgacggcgccgagcugcccuucacgaucgacaaguga

SEQ ID NO: 85731 - RNA, 1410 nt, Artificial Sequence
  derived and/or modified CDS sequence (opt1) from neuraminidase__InfluenzaA__AFC62079
augaaccccaaccagaagaucaucaccaucggcagcgugugcaugaccaucgggauggccaaccugauccuccagaucggcaacaucaucuccaucuggaucagccacuccauccagcuggggaaccagaaccagaucgagacgugcaaccagagcgucaucaccuacgagaacaacaccugggugaaccagaccuacgugaacaucuccaacacgaacuucgccgcgggccagagcgucguguccgugaagcuggccgggaacagcucccucugcccggucagcggcugggccaucuacuccaaggacaacagcauccgcaucggcuccaagggggacguguucgugauccgggagcccuucaucagcugcagcccccuggagugccgcaccuucuuccugacccagggcgcccuccugaacgacaagcacuccaacgggaccaucaaggaccggucccccuaccgcacgcugaugagcugcccgaucggcgagguccccucccccuacaacagccgguucgagagcguggccugguccgcgagcgccugccacgacgggaucaacuggcucaccaucggcaucuccggccccgacaacggggccguggccguccugaaguacaacggcaucaucaccgacaccaucaagagcuggcgcaacaacauccugcggacgcaggaguccgagugcgcgugcgugaacgggagcugcuucaccgugaugaccgacggcccguccgacggccaggccagcuacaagaucuuccgcaucgagaaggggaagaucaucaaguccgucgagaugaacgcccccaacuaccacuacgaggagugcagcugcuaccccgacuccagcgagaucacgugcgugugccgggacaacuggcacggcuccaaccgccccugggugagcuucaaccagaaccucgaguaccagaucggguacaucugcuccggcauccugggggacaacccgcggcccaacgacaagaccggcagcugcggccccgucuccagcaacggggccaacggcgugaagggguucuccuucaaguacggcaacggggugugggucggccgcaccaagagcaucagcucccggaacggcuucgagaugaucugggaccccaacggguggaccggcaccgacaacaacuucagcaucaagcaggacaucguggggaucaaggagugguccggcuacagcggguccuucgugcagcacccggagcugacgggccucgacugcauccgccccugcuucugggucgagcugauccggggccgccccaaggagaacaccaucuggaccagcggguccaucaucagcuucugcggcgugaacuccgacaccgucggguggagcuggcccgacggcgccgagcugccguucacgaucgacaaguga

SEQ ID NO: 85732 - RNA, 1410 nt, Artificial Sequence
  derived and/or modified CDS sequence (opt1) from neuraminidase__InfluenzaA__AFC62080
augaaccccaaccagaagaucaucaccaucggcagcgugugcaugaccaucgggauggccaaccugauccuccagaucggcaacaucaucuccaucuggaucagccacuccauccagcuggggaaccagagccagaucgagacgugcaaccaguccgucaucaccuacgagaacaacaccugggugaaccagaccuacgugaacaucagcaacacgaacuucgccgcgggccaguccgucgugagcgugaagcuggccgggaacuccagccucugcccggucuccggcugggccaucuacagcaaggacaacuccauccgcaucggcagcaagggggacguguucgugauccgggagcccuucaucuccugcagcccccuggagugccgcaccuucuuccugacccagggcgcccuccugaacgacaagcacuccaacgggaccaucaaggaccggagccccuaccgcacgcugauguccugcccgaucggcgagguccccagccccuacaacagccgguucgaguccguggccuggagcgcguccgccugccacgacgggaucaacuggcucaccaucggcaucagcggccccgacaacggggccguggccguccugaaguacaacggcaucaucaccgacaccaucaaguccuggcgcaacaacauccugcggacgcaggagagcgagugcgcgugcgugaacggguccugcuucaccaucaugaccgacggcccgagcgacggccaggccuccuacaagaucuuccgcaucgagaaggggaagaucgucaagagcguggagaugaacgcccccaacuacuacuacgaggagugcuccugcuaccccgacagcuccgagaucacgugcgugugccgggacaacuggcacggcagcaaccgccccuggguguccuucaaccagaaccucgaguaccagaucggguacaucugcagcggcaucuucggggacaacccgcggcccaacgacaagaccggcuccugcggccccgucagcuccaacggggccaacggcgugaagggguucagcuucaaguacggcaacgggguguggaucggccgcaccaagagcaucuccagccggaagggcuucgagaugaucugggaccccaacggguggaccggcaccgacaacaacuucuccaucaagcaggacaucgucgggaucaacgaguggagcggcuacuccgggagcuucgugcagcacccggagcugacgggcaugggcugcauccgccccugcuucuggguggagcugauccgggggcgccccaaggagaacaccaucuggaccuccggcagcuccaucagcuucugcggggucaacuccgacaccgugggcuggagcuggcccgacggcgccgagcucccguucacgaucgacaaguga

SEQ ID NO: 85733 - RNA, 1410 nt, Artificial Sequence
  derived and/or modified CDS sequence (opt1) from neuraminidase__InfluenzaA__AFC62082
augaaccccaaccagaagaucaucaccaucggcagcgugucccugaccaucagcacgaucugcuucuucaugcagaucgccauccucaucaccaccgucacccugcacuucaagcaguacgaguucaacuccccgcccaacaaccaggugaugcugugcgagcccacgaucaucgagcgcaacaucaccgagaucguguaccucaccaacaccacgaucgagaaggagaucugccccaagcuggccgaguaccggaacuggagcaagccgcagugcgacaucaccggguucgcgcccuucuccaaggacaacagcauccgccuguccgccggcggggacaucugggucacccgggagcccuacgugagcugcgaccccaacaagugcuaccaguucgcccucggccaggggaccacgcugaacaacgugcacuccaacaacaccguccgcggccggaccccguaccgcacccugcucaugaacgagcugggcgugcccuuccaccuggggacgaagcaggucugcaucgccuggagcuccagcuccugccacgacggcaaggccuggcuccacgugugcaucaccggggacgacaagaacgcgaccgccagcuucaucuacaacggccggcugguggacuccguggucagcugguccaaggagauccugcgcacccaggagagcgagugcgugugcaucaacgggacgugcaccguggucaugaccgacggcuccgccagcggcaaggccgacaccaagauccucuucaucgaggaggggaagaucgugcacacgagcacccuguccggcagcgcgcagcacguggaggagugcuccugcuacccccgguaccccgggguccgcugcgugugccgggacaacuggaagggcagcaaccgcccgaucguggacaucaacaugaaggaccacuccaucgucagcuccuacgugugcagcggccuggugggggacacgccccggaagaacgacuccagcuccagcucccacugcuucgaccccaacgacgaggagggcgggcacggcgucaaggggugggccuucgacgacggcaacgacguguggaugggccgcaccaucagcgagaagucccggcucggguacgagaccuucaaggucaucgagggcuggagcaaccccaaguccaagcugcagaucaaccgccaggugaucguggaccgcggggaccggagcggcuacuccgggaucuucagcgucgagggcaagagcugcaucaaccggugcuucuacguggagcugauccgcggcuccaaggaggagaccgaggugcucuggaccagcaacuccaucgucguguucugcgggaccagcggcacguacgggaccggcuccuggccggacggggccgacaucaaccugaugcccaucuga

SEQ ID NO: 85734 - RNA, 1410 nt, Artificial Sequence; identical to SEQ ID NO: 78249
  derived and/or modified CDS sequence (opt1) from neuraminidase__InfluenzaA__AFD63529

SEQ ID NO: 85735 - RNA, 1410 nt, Artificial Sequence; identical to SEQ ID NO: 78249
  derived and/or modified CDS sequence (opt1) from neuraminidase__InfluenzaA__AFD63540

SEQ ID NO: 85736 - RNA, 1410 nt, Artificial Sequence
  derived and/or modified CDS sequence (opt1) from neuraminidase__InfluenzaA__AFD63551
augaaccccaaccagaagaucaucaccaucggcagcgugucccugaccaucgccgccaucugcuuccucaugcagaucgcgauccuggucacgaccgugacccugcacuucaagcagcacgagugcaacccgccgcccaacaaccaggugaugcucugcgagcccaccaucaucgagcgcaacaucacggagaucgucuaccugaccaacaccaccaucgagaaggagaucugccccaagcuggccgaguaccggaacuggagcaagccccagugcaacaucacgggguucgcccccuucuccaaggacaacagcauccgccucuccgccggcggggacaucugggugacccgggagcccuacgugagcugcgacccggacaagugcuaccaguucgcccugggccaggggaccacccugaacaacggccacuccaacgacacgguccacggccgcacccccuaccggacccuccugaugaacgagcugggggugcccuuccaccucggcacccgccaggugugcaucgcguggagcuccagcuccugccacgacgggaaggccuggcugcacgucugcgugacgggcgacgacaagaacgccaccgccagcuucaucuacaacgggcggcugguggacuccaucggcagcugguccaagaagauccuccgcacccaggagagcgagugcgucugcaucaacgggaccugcacgguggugaugaccgacggguccgcgagcggcaaggccgacaccaagauccuguucaucgaggaggggaagaucguccacaucuccacccugagcggcagcgcccagcacguggaggagugcuccugcuacccccgguacccgggcgugcgcugcgucugccgggacaacuggaaggggagcaaccgccccaucguggacaucaacgugaaggacuacuccaucgucagcuccuacgugugcagcggccucgugggggacacgccccggaagaacgacuccuucagcuccagccacugccuggaccccaacaacgaggagggcgggcacggcgucaagggcugggccuucgacgacgggaacgacguguggaugggccgcaccaucuccgagaagcugcggagcggguacgagaccuucaaggucaucgagggcugguccaagccgaacagcaagcuccagaucaaccgccaggugaucguggagcgggggaaccgcuccggcuacagcggcaucuucuccgucgagggcaagagcugcaucaaccggugcuucuacguggagcugauccgcggccggaaggaggagaccgaggugugguggacguccaacagcaucgucguguucugcgggaccagcggcaccuacgggaccggcuccuggcccgacggcgccgacaucaaccugaugcccaucuga

SEQ ID NO: 85737 - RNA, 1410 nt, Artificial Sequence; identical to SEQ ID NO: 78249
  derived and/or modified CDS sequence (opt1) from neuraminidase__InfluenzaA__AFD63562

SEQ ID NO: 85738 - RNA, 1410 nt, Artificial Sequence
  derived and/or modified CDS sequence (opt1) from neuraminidase__InfluenzaA__AFD63573
augaaccccaaccagaagaucaucaccaucggcagcgugucccugaccaucgccacgaucugcuuccucaugcagaucgccauccuggucaccaccgugacccugcacuucaagcagcacgagugcaacagcccgcccaacaaccaggugaugcucugcgagcccacgaucaucgggcgcaacaucaccgagaucgucuaccugaccaacaccacgaucgagaaggagaucugccccaagcuggcggaguaccggaacugguccaagccgcagugcaacaucaccggcuucgcccccuucagcaaggacaacuccauccgccucagcgccgggggcgacaucugggugacccgggagcccuacguguccugcgaccccgacaagugcuaccaguucgcccuggggcagggcaccacgcugaacaacggccacagcaacgacaccguccacgaccgcaccccguaccggacccuccugaugaacgagcugggggugcccuuccaccucggcacgcgccaggugugcaucgccugguccagcuccagcugccacgacgggaaggcguggcugcacgucugcgugaccggcgacgacaagaacgccaccgccuccuucaucuacaacgggcggcugguggacagcaucggcuccuggagcaagaagauccuccgcacccaggaguccgagugcgucugcaucaacggcacgugcaccguggugaugaccgacgggagcgccuccggcaaggcggacaccaagauccuguucaucgaggaggggaagaucguccacaucagcacgcugagcggcuccgcccagcacguggaggagugcagcugcuacccccgguaccccggcgugcgcugcgucugccgggacaacuggaagggguccaaccgcccgaucguggacaucaacgugaaggacuacagcaucgucuccagcuacgugugcuccggccucgugggggacacgccccggaagaacgacagcuucuccagcucccacugccuggaccccaacaacgaggagggcgggcacggcgucaagggcugggccuucgacgacgggaacgacguguggaugggccgcaccaucagcgagaagcugcgguccggguacgagaccuucaaggucaucgagggcuggagcaagcccaacuccaagcuccagaucaaccgccaggugaucguggagcgggggaaccgcagcggcuacuccggcaucuucagcgucgaggggaaguccugcaucaaccggugcuucuacguggagcugauccgcggccggaaggaggagaccgaggugugguggaccagcaacagcaucgucguguucugcgggaccuccggcaccuacgggacgggcagcuggccggacggcgccgacaucaaccugaugcccaucuga

SEQ ID NO: 85739 - RNA, 1410 nt, Artificial Sequence
  derived and/or modified CDS sequence (opt1) from neuraminidase__InfluenzaA__AFD63584
augaaccccaaccagaagaucaucaccaucggcagcgugucccugaccaucgccacgaucugcuuccucaugcagaucgccauccuggucaccaccgugacccugcacuucaagcaguacgagugcaacagcccgcccaacaaccaggugaugcucugcgagcccacgaucaucgagcgcaacaucaccgagaucgucuaccugaccaacaccacgaucgagaaggagaucugccccaagcuggcggaguaccggaacugguccaagccgcagugcaacaucaccggguucgcccccuucagcaaggacaacuccauccgccucagcgccggcggggacaucugggugacccgggagcccuacguguccugcgaccccgacaagugcuaccaguucgcccugggccaggggaccacgcugaacaacggccacagcaacgacaccguccacgagcgcaccccguaccggacccuccugaugaacgagcugggcgugcccuuccaccucgggacgcgccaggugugcaucgccugguccagcuccagcugccacgacggcaaggcguggcugcacgucugcgugaccggggacgacaagaacgccaccgccuccuucaucuacaacggccggcugguggacagcaucggguccuggagcaagaagauccuccgcacccaggaguccgagugcgucugcaucaacggcacgugcaccguggugaugaccgacggcagcgccuccgggaaggcggacaccaagauccuguucaucgaggagggcaagaucauccacaucagcacgcugagcggguccgcccagcacgucgaggagugcagcugcuacccccgguaccccggcgugcgcugcgugugccgggacaacuggaagggcuccaaccgcccgaucgucgacaucaacgugaaggacuacagcaucguguccagcuacgucugcuccgggcucgugggcgacacgccccggaagaacgacagcuccagcuccagccacugccuggaccccaacaacgaggagggcgggcacggggugaagggcugggccuucgacgacggcaacgacgucuggauggggcgcaccaucuccgagaagcugcggagcggcuacgagaccuucaaggugaucgaggggugguccaagcccaacagcaagcuccagaucaaccgccaggucaucguggagcggggcaaccgcuccggguacagcggcaucuucuccguggagggcaagagcugcaucaaccggugcuucuacgucgagcugauccgcgggcggaaggaggagaccgaggugugguggaccagcaacuccaucguggucuucugcggcaccagcgggaccuacggcacgggguccuggccggacggcgccgacaucaaccugaugcccaucuga

SEQ ID NO: 85740 - RNA, 1410 nt, Artificial Sequence
  derived and/or modified CDS sequence (opt1) from neuraminidase__InfluenzaA__AFD63595
augaaccccaaccagaagaucaucaccaucggcagcgugucccugaccaucgccgccaucugcuuccucaugcagaucgcgauccuggucacgaccgugacccugcacuucaagcagcacgagugcaacagcccgcccaacaaccaggugaugcucugcgagcccaccaucaucgagcgcaacaucacggagaucgucuaccugaccaacaccaccaucgagaaggagaucugccccaagcuggccgaguaccggaacugguccaagccgcagugcaacaucacgggguucgcccccuucagcaaggacaacuccauccgccucagcgccggcggggacaucugggugacccgggagcccuacguguccugcgaccccgacaagugcuaccaguucgcccugggccaggggaccacccugaacaacggccacagcaacgacacgguccacgaccgcaccccguaccggacccuccugaugaacgagcugggcgugcccuuccaccucgggacccgccaggugugcaucgcgugguccagcuccagcugccacgacggcaaggccuggcugcacgucugcgugacgggggacgacaagaacgccaccgccuccuucaucuacaacggccggcugguggacagcaucggguccuggagcaagaagauccuccgcacccaggaguccgagugcgucugcaucaacgggaccugcacgguggugaugaccgacggcagcgcguccgggaaggccgacaccaagauccuguucaucgaggagggcaagaucguccacaucagcacccugagcggguccgcccagcacguggaggagugcagcugcuacccccgguaccccggcgugcgcugcgucugcaaggacaacuggaagggcuccaaccggccgaucguggacaucaacgugaaggacuacagcaucgucuccagcuacgugugcuccgggcucgugggcgacacgccccgcaagaacgacagcuucuccagcucccacugccuggaccccaacaacgaggagggcggccacggggucaagggcugggccuucgacgacggcaacgacguguggauggggcggaccaucagcgagaagcugcgcuccggcuacgagaccuucaaggucaucgagggguggagcaagcccaacuccaagcuccagaucaaccgccaggugaucguggagcggggcaaccggagcggguacuccggcaucuucagcgucgagggcaaguccugcaucaaccgcugcuucuacguggagcugauccgggggcgcaaggaggagaccgaggugugguggacgagcaacagcaucgucguguucugcggcaccuccgggaccuacggcaccgggagcuggccggacggcgccgacaucaaccugaugcccaucuga

SEQ ID NO: 85741 - RNA, 1410 nt, Artificial Sequence; identical to SEQ ID NO: 78249
  derived and/or modified CDS sequence (opt1) from neuraminidase__InfluenzaA__AFD63606

SEQ ID NO: 85742 - RNA, 1410 nt, Artificial Sequence; identical to SEQ ID NO: 78169
  derived and/or modified CDS sequence (opt1) from neuraminidase__InfluenzaA__AFD63628

SEQ ID NO: 85743 - RNA, 1410 nt, Artificial Sequence; identical to SEQ ID NO: 78249
  derived and/or modified CDS sequence (opt1) from neuraminidase__InfluenzaA__AFD63639

SEQ ID NO: 85744 - RNA, 1410 nt, Artificial Sequence; identical to SEQ ID NO: 78249
  derived and/or modified CDS sequence (opt1) from neuraminidase__InfluenzaA__AFD63650

SEQ ID NO: 85745 - RNA, 1410 nt, Artificial Sequence
  derived and/or modified CDS sequence (opt1) from neuraminidase__InfluenzaA__AFD63661
augaaccccaaccagaagaucaucaccaucggcagcgugucccugaccaucgccgccaucugcuuccucaugcagaucgcgauccuggucacgaccgugacccugcacuucaagcagcacgagugcaacagcccgcccaacaaccaggugaugcucugcgagcccaccaucaucgagcgcaacaucacggagaucgucuaccugaccaacuccaccaucgagaaggagaucugccccaagcuggccgaguaccggaacuggagcaagccgcagugcaacaucaccggguucgcccccuucuccaaggacaacagcauccgccucuccgccggcggggacaucugggugacgcgggagcccuacgugagcugcgaccccgacaagugcuaccaguucgcccugggccaggggaccacccugaacaacggccacuccaacgacaccguccacgaccgcacgccguaccggacccuccugaugaacgagcugggcgugcccuuccaccucgggacccgccaggugugcaucgcguggagcuccagcuccugccacgacggcaaggccuggcugcacgucugcgugaccggggacgacaagaacgccacggccagcuucaucuacaacggccggcugguggacuccaucgggagcugguccaagaagauccuccgcacccaggagagcgagugcgucugcaucaacgggaccugcaccguggugaugacggacggcuccgcgagcgggaaggccgacaccaagauccuguucaucgaggagggcaagaucguccacaucagcacccuguccgggagcgcccagcacguggaggagugcuccugcuacccccgguaccccggcgugcgcugcgucugccgggacaacuggaagggcagcaaccgcccgaucguggacaucaacgugaaggacuacuccaucgucagcuccuacgugugcagcgggcucgugggcgacacgccccggaagaacgacuccuucagcuccagccacugccuggaccccaacaacgaggagggcggccacggggucaagggcugggccuucgacgacggcaacgacguguggauggggcgcaccaucuccgagaagcugcggagcggcuacgagaccuucaaggucaucgaggggugguccaagcccaacagcaagcuccagaucaaccgccaggugaucguggagcggggcaaccgcuccggguacagcggcaucuucuccgucgagggcaagagcugcaucaaccggugcuucuacguggagcugauccgcgggcggaaggaggagaccgaggugugguggaccagcaacuccaucgucguguucugcggcacgagcgggaccuacggcaccggguccuggccggacggcgccgacaucaaccugaugcccaucuga

SEQ ID NO: 85746 - RNA, 1410 nt, Artificial Sequence; identical to SEQ ID NO: 79955
  derived and/or modified CDS sequence (opt1) from neuraminidase__InfluenzaA__AFD63672

SEQ ID NO: 85747 - RNA, 1410 nt, Artificial Sequence
  derived and/or modified CDS sequence (opt1) from neuraminidase__InfluenzaA__AFD63683
augaaccccaaccagaagaucaucaccaugggcagcgugucccugaccaucgccacgaucugcuuccucaugcagaucgccauccuggucaccaccgugacccugcacuucaagcaguacgagugcaacagcccgcccaacaaccaggugaugcucugcgagcccacgaucaucgagcgcaacaucaccgagaucgucuaccugaccaacaccacgaucgagaaggagaucugccccaagcuggcggaguaccggaacugguccaagccgcagugcaacaucaccggguucgcccccuucagcaaggacaacuccauccgccucagcgccggcggggacaucugggugacccgggagcccuacguguccugcgaccccgacaagugcuaccaguucgcccugggccaggggaccacgcugaacaacggccacagcaacgacaccguccacggccgcaccccguaccggacccuccugaugaacgagcugggggugcccuuccaccucggcacgcgccaggugugcaucgccugguccagcuccagcugccacgacgggaaggcguggcugcacgucugcgugaccggcgacgacaagaacgccaccgccuccuucaucuacaacgggcggcugguggacagcaucggcuccuggagcaagaagauccuccgcacccaggaguccgagugcgucugcaucaacggcacgugcaccguggugaugaccgacgggagcgccuccggcaaggcggacaccaagauccuguucaucgaggaggggaagaucauccacaucagcacgcugagcggcuccgcccagcacgucgaggagugcagcugcuacccccgguaccccggcgugcgcugcgugugccgggacaacuggaagggguccaaccgcccgaucgucgacaucaacgugaaggacuacagcaucguguccagcuacgucugcuccggccucgugggggacacgccccggaagaacgacagcuccagcuccagccacugccuggaccccaacaacgaggagggcgggcacggcgugaagggcugggccuucgacgacgggaacgacgucuggaugggccgcaccaucuccgagaagcugcggagcggguacgagaccuucaaggugaucgagggcugguccaagcccaacagcaagcuccagaucaaccgccaggucaucguggagcgggggaaccgcuccggcuacagcggcaucuucuccguggagggcaagagcugcaucaaccggugcuucuacgucgagcugauccgcgggcggaaggaggagaccgaggugugguggaccagcaacuccaucguggucuucugcgggaccagcggcaccuacgggacgggcuccuggccggacggcgccgacaucaaccugaugcccaucuga

SEQ ID NO: 85748 - RNA, 1410 nt, Artificial Sequence
  derived and/or modified CDS sequence (opt1) from neuraminidase__InfluenzaA__AFD63694
augaaccccaaccagaagaucaucaccaucggcagcgugucccugaccaucgccacgaucugcuuccucaugcagaucgccauccuggucaccaccaucacccugcacuucaagcagcacgagugcaacagcccgcccaacaaccaggugaugcucugcgagcccacgaucaucgagcgcaacaucaccgagaucguguaccugaccaacaccacgaucgagaaggagaucugccccaagcuggcggaguaccggaacugguccaagccgcagugcaacaucaccggguucgcccccuucagcaaggacaacuccauccgccucagcgccggcggggacaucugggucacccgggagcccuacguguccugcgaccccgacaagugcuaccaguucgcccugggccaggggaccacgcugaacaacggccacagcaacgacaccgugcacgaccgcaccccguaccggacccuccugaugaacgagcugggcguccccuuccaccucgggacgcgccaggugugcaucgccugguccagcuccagcugccacgacggcaaggcguggcugcacgugugcgucaccggggacgacaagaacgccaccgccuccuucaucuacaacggccggcugguggacagcaucggguccuggagcaagaagauccuccgcacccaggaguccgagugcgugugcaucaacggcacgugcaccgucgugaugaccgacggcagcgccuccgggaaggcggacaccaagauccuguucaucgaggagggcaagaucgugcacaucagcacgcugagcggguccgcccagcacgucgaggagugcagcugcuacccccgguaccccggcgugcgcugcgugugccgggacaacuggaagggcuccaaccgcccgaucgucgacaucaacgugaaggacuacagcaucguguccagcuacgucugcuccgggcucgugggcgacacgccccggaagaacgacagcuucuccagcucccacugccuggaccccaacaacgaggagggcgggcacggggugaagggcugggccuucgacgacggcaacgacgucuggauggggcgcaccaucagcgagaagcugcgguccggcuacgagaccuucaaggugaucgagggguggagcaagcccaacuccaagcuccagaucaaccgccaggucaucguggagcggggcaaccgcagcggguacuccggcaucuucagcguggagggcaaguccugcaucaaccggugcuucuacgucgagcugauccgcgggcggaaggaggagaccgaggugugguggaccagcaacagcaucguggucuucugcggcaccuccgggaccuacggcacggggagcuggccggacggcgccgacaucaaccugaugcccaucuga

SEQ ID NO: 85749 - RNA, 1410 nt, Artificial Sequence
  derived and/or modified CDS sequence (opt1) from neuraminidase__InfluenzaA__AFD63705
augaaccccaaccagaagaucaucaccaucggcagcgugucccugaccaucgccgccaucugcuuccucaugcagaucgcgauccuggucacgaccgugacccugcacuucaagcagcacgagugcaacagcccgcccaacaaccaggugaugcucugcgagcccaccaucaucgagcgcaacaucacggagaucgucuaccugaccaacaccaccaucgagaaggagaucugccccaagcuggccgaguaccggaacugguccaagccgcagugcaacaucacgggguucgcccccuucagcaaggacaacuccauccgccucagcgccggcggggacaucugggugacccgggagcccuacguguccugcgaccccgacaagugcuaccaguucgcccugggcaaggggaccacccugaacaacggccacagcaacgacacgguccacgaccgcaccccguaccggacccuccugaugaacgagcugggcgugcccuuccaccucgggacccgccaggugugcaucgcgugguccagcuccagcugccacgacggcaaggccuggcugcacgucugcgugacgggggacgacaagaacgccaccgccuccuucaucuacaacggccggcugguggacagcaucggguccuggagcaagaagauccuccgcacccaggaguccgagugcgucugcaucaacgggaccugcacgguggugaugaccgacggcagcgcguccgggaaggccgacaccaagauccuguucaucgaggagggcaagaucguccacaucagcacccugagcggguccgcccagcacguggaggagugcagcugcuacccccgguaccccggcgugcgcugcgucugccgggacaacuggaagggcuccaaccgcccgaucguggacaucaacgugaaggacuacagcaucgucuccagcuacgugugcuccgggcucgugggcgacacgccccggaagaacgacagcuucuccagcucccacugccuggaccccaacaacgaggagggcggccacggggucaagggcugggccuucgacgacggcaacgacguguggauggggcgcaccaucagcgagaagcugcgguccggcuacgagaccuucaaggucaucgagggguggagcaagcccaacuccaagcuccagaucaaccgccaggugaucguggagcggggcaaccgcagcggguacuccggcaucuucagcgucgagggcaaguccugcaucaaccggugcuucuacguggagcugauccgcgggcggaaggaggagaccgaggugugguggacgagcaacagcaucgucguguucugcggcaccuccgggaccuacggcaccgggagcuggccggacggcgccgacaucaaccugaugcccaucuga

SEQ ID NO: 85750 - RNA, 1410 nt, Artificial Sequence
  derived and/or modified CDS sequence (opt1) from neuraminidase__InfluenzaA__AFD63716
augaaccccaaccagaagaucaucaccaucggcagcgugucccugaccaucgccgccaucugcuuccucaugcagaucgcgauccuggucacgaccgugacccugcacuucaagcagcacgagugcaacagcccgcccaacaaccaggugaugcucugcgagcccaccaucaucgagcgcaacaucacggagaucgucuaccugaccaacaccaccaucgagaaggagaucugccccaagcuggccgaguaccggaacugguccaagccgcagugcaacaucacgggguucgcccccuucagcaaggacaacuccauccgccucagcgccggcggggacaucugggugacccgggagcccuacguguccugcgaccccgacaagugccaccaguucgcccugggccaggggaccacccugaacaacggccacagcaacgacacgguccacgaccgcaccccguaccggacccuccugaugaacgagcugggcgugcccuuccaccucgggacccgccaggugugcaucgcgugguccagcuccagcugccacgacggcaaggccuggcugcacgucugcgugacgggggacgacaagaacgccaccgccuccuucaucuacaacggccggcugguggacagcaucggguccuggagcaagaagauccuccgcacccaggaguccgagugcgucugcaucaacgggaccugcacgguggugaugaccgacggcagcgcguccgggaaggccgacaccaagauccuguucaucgaggagggcaagaucguccacaucagcacccugagcggguccgcccagcacguggaggagugcagcugcuacccccgguaccccggcgugcgcugcgucugccgggacaacuggaagggcuccaaccgcccgaucguggacaucaacgugaaggacuacagcaucgucuccagcuacgugugcuccgggcucgugggcgacacgccccggaagaacgacagcuucuccagcucccacugccuggaccccaacaacgaggagggcggccacggggucaagggcugggccuucgacgacggcaacgacguguggauggggcgcaccaucagcgagaagcugcgguccggcuacgagaccuucaaggucaucgagggguggagcaagcccaacuccaagcuccagaucaaccgccaggugaucguggagcggggcaaccgcagcggguacuccggcaucuucagcgucgagggcaaguccugcaucaaccggugcuucuacguggagcugauccgcgggcggaaggaggagaccgaggugugguggacgagcaacagcaucgucguguucugcggcaccuccgggaccuacggcaccgggagcuggccggacggcgccgacaucaaccugaugcccaucuga

SEQ ID NO: 85751 - RNA, 1410 nt, Artificial Sequence; identical to SEQ ID NO: 78249
  derived and/or modified CDS sequence (opt1) from neuraminidase__InfluenzaA__AFD63727

SEQ ID NO: 85752 - RNA, 1410 nt, Artificial Sequence; identical to SEQ ID NO: 78249
  derived and/or modified CDS sequence (opt1) from neuraminidase__InfluenzaA__AFD63738

SEQ ID NO: 85753 - RNA, 1410 nt, Artificial Sequence
  derived and/or modified CDS sequence (opt1) from neuraminidase__InfluenzaA__AFD63749
augaaccccaaccagaagaucaucaccaucagcuccgugagccugaccaucgccacgaucugcuuccucaugcagaucgccauccuggucaccaccgugacccugcacuucaagcagcacgagugcaacuccccgcccaacaaccaggugaugcucugcgagcccacgaucaucgagcgcaacaucaccgagaucgucuaccugaccaacaccacgaucgagaaggagaucugccccaagcuggcggaguaccggaacuggagcaagccgcagugcaacaucaccggcuucgcccccuucuccaaggacaacagcauccgccucuccgccgggggcgacaucugggugacccgggagcccuacgugagcugcgaccccgacaagugcuaccaguucgcccuggggcagggcaccacgcugaacaacgggcacuccaacgacaccguccacgaccgcaccccguaccggacccuccugaugaacgagcugggcgugcccuuccaccucggcacgcgccaggugugcaucgccuggagcuccagcuccugccacgacgggaaggcguggcugcacgucugcgugaccggcgacgacaagaacgccaccgccagcuucaucuacaacgggcggcugguggacuccaucggcagcugguccaagaagauccuccgcacccaggagagcgagugcgucugcaucaacgggacgugcaccguggugaugaccgacggcuccgccagcggcaaggcggacaccaagauccuguucaucgaggaggggaagaucguccacaucagcacgcuguccggcagcgcccagcacguggaggagugcuccugcuacccccgguaccccggggugcgcugcgucugccgggacaacuggaagggcagcaaccgcccgaucguggacaucaacgugaaggacuacuccaucgucagcuccuacgugugcagcggccucgugggggacacgccccggaagaacgacuccuucagcuccagccacugccuggaccccaacaacgaggagggcgggcacggcgucaaggggugggccuucgacgacggcaacgacguguggaugggccgcaccaucuccgagaagcugcggagcggguacgagaccuucaaggucaucgagggcugguccaagcccaacagcaagcuccagaucaaccgccaggugaucguggagcgggggaaccgcuccggcuacagcgggaucuucuccgucgagggcaagagcugcaucaaccggugcuucuacguggagcugauccgcggccggaaggaggagaccgaggugugguggaccagcaacuccaucgucguguucugcgggaccagcggcaccuacgggacgggcuccuggccggacggggccgacaucaaccugaugcccaucuga

SEQ ID NO: 85754 - RNA, 1410 nt, Artificial Sequence
  derived and/or modified CDS sequence (opt1) from neuraminidase__InfluenzaA__AFD63760
augaaccccaaccagaagaucaucaccaucggcagcgugucccugaccaucgccacgaucugcuuccucaugcagaucgccauccuggucaccaccgugacccugcacuucaagcaguacgagugcaacagcccgcccaacaaccaggugaugcucugcgagcccacgaucaucgagcgcaacaucaccgagaucgucuaccugaccaacaccacgaucgagaaggagaucugccccaagcuggcggaguaccggaacugguccaagccgcagugcaacaucaccggguucgcccccuucagcaaggacaacuccauccgccucagcgccggcggggacaucugggugacccgggagcccuacguguccugcgaccccgacaagugcuaccaguucgcccugggccaggggaccacgcugaacaacggccacagcaacgacaccguccacgaccgcaccccguaccggacccuccugaugaacgagcugggcgugcccuuccaccucgggacgcgccaggugugcaucgccugguccagcuccagcugccacgacggcaaggcguggcugcacgucugcgugaccggggacgacaagaacgccaccgccuccuucaucuacaacggccggcugguggacagcaucggguccuggagcaagaagauccuccgcacccaggaguccgagugcgucugcaucaacggcacgugcaccguggugaugaccgacggcagcgccuccgggaaggcggacaccaagauccuguucaucgaggagggcaagaucauccacaucagcacgcugagcggguccgcccagcacgucgaggagugcagcugcuacccccgguaccccggcgugcgcugcgugugccgggacaacuggaagggcuccaaccgcccgaucgucgacaucaacgugaaggacuacagcaucguguccagcuacgucugcuccgggcucgugggcgacacgccccggaagaacgacagcuccagcuccagccacugccuggaccccaacaacgaggagggcgggcacggggugaagggcugggccuucgacgacggcaacgacgucuggauggggcgcaccaucuccgagaagcugcggagcggcuacgagaccuucaaggugaucgaggggugguccaagcccaacagcaagcuccagaucaaccgccaggucaucguggagcggggcaaccgcuccggguacagcggcaucuucuccguggagggcaagagcugcaucaaccggugcuucuacgucgagcugauccgcgggcggaaggaggagaccgaggugugguggaccagcaacuccaucguggucuucugcggcaccagcgggaccuacggcacgggguccuggccggacggcgccgacaucaaccugaugcccaucuga

SEQ ID NO: 85755 - RNA, 1410 nt, Artificial Sequence; identical to SEQ ID NO: 78249
  derived and/or modified CDS sequence (opt1) from neuraminidase__InfluenzaA__AFD63771

SEQ ID NO: 85756 - RNA, 1410 nt, Artificial Sequence; identical to SEQ ID NO: 78249
  derived and/or modified CDS sequence (opt1) from neuraminidase__InfluenzaA__AFD63782

SEQ ID NO: 85757 - RNA, 1410 nt, Artificial Sequence; identical to SEQ ID NO: 85754
  derived and/or modified CDS sequence (opt1) from neuraminidase__InfluenzaA__AFD63793

SEQ ID NO: 85758 - RNA, 1410 nt, Artificial Sequence; identical to SEQ ID NO: 78249
  derived and/or modified CDS sequence (opt1) from neuraminidase__InfluenzaA__AFD63804

SEQ ID NO: 85759 - RNA, 1410 nt, Artificial Sequence; identical to SEQ ID NO: 78249
  derived and/or modified CDS sequence (opt1) from neuraminidase__InfluenzaA__AFD63815

SEQ ID NO: 85760 - RNA, 1410 nt, Artificial Sequence; identical to SEQ ID NO: 78249
  derived and/or modified CDS sequence (opt1) from neuraminidase__InfluenzaA__AFD63826

SEQ ID NO: 85761 - RNA, 1410 nt, Artificial Sequence; identical to SEQ ID NO: 85754
  derived and/or modified CDS sequence (opt1) from neuraminidase__InfluenzaA__AFD63837

SEQ ID NO: 85762 - RNA, 1410 nt, Artificial Sequence
  derived and/or modified CDS sequence (opt1) from neuraminidase__InfluenzaA__AFD63848
augaaccccaaccagaagaucaucaccaucggcagcgugucccugaccaucgccgccaucugcuuccucaugcagaucgcgauccuggucacgaccgugacccugcacuucaagcagcgcgagugcaacagcccgcccaacaaccaggugaugcucugcgagcccaccaucaucgagcggaacaucacggagaucgucuaccugaccaacaccaccaucgagaaggagaucugccccaagcuggccgaguaccgcaacugguccaagccgcagugcaacaucacgggguucgcccccuucagcaaggacaacuccauccggcucagcgccggcggggacaucugggugacccgcgagcccuacguguccugcgaccccgacaagugcuaccaguucgcccugggccaggggaccacccugaacaacggccacagcaacgacacgguccacgaccggaccccguaccgcacccuccugaugaacgagcugggcgugcccuuccaccucgggacccgccaggugugcaucgcgugguccagcuccagcugccacgacggcaaggccuggcugcacgucugcgugacgggggacgacaagaacgccaccgccuccuucaucuacaacggccggcugguggacagcaucggguccuggagcaagaagauccuccggacccaggaguccgagugcgucugcaucaacgggaccugcacgguggugaugaccgacggcagcgcguccgggaaggccgacaccaagauccuguucaucgaggagggcaagaucguccacaucagcacccugagcggguccgcccagcacguggaggagugcagcugcuacccccgcuaccccggcgugcggugcgucugccgcgacaacuggaagggcuccaaccggccgaucguggacaucaacgugaaggacuacagcaucgucuccagcuacgugugcuccgggcucgugggcgacacgccccgcaagaacgacagcuucuccagcucccacugccuggaccccaacaacgaggagggcggccacggggucaagggcugggccuucgacgacggcaacgacguguggauggggcggaccaucagcgagaagcugcgcuccggcuacgagaccuucaaggucaucgagggguggagcaagcccaacuccaagcuccagaucaaccgccaggugaucguggagcggggcaaccggagcggguacuccggcaucuucagcgucgagggcaaguccugcaucaaccgcugcuucuacguggagcugauccgggggcgcaaggagaagaccgaggugugguggacgagcaacagcaucgucguguucugcggcaccuccgggaccuacggcaccgggagcuggccggacggcgccgacaucaaccugaugcccaucuga

SEQ ID NO: 85763 - RNA, 1410 nt, Artificial Sequence; identical to SEQ ID NO: 78169
  derived and/or modified CDS sequence (opt1) from neuraminidase__InfluenzaA__AFD63859

SEQ ID NO: 85764 - RNA, 1410 nt, Artificial Sequence; identical to SEQ ID NO: 78169
  derived and/or modified CDS sequence (opt1) from neuraminidase__InfluenzaA__AFD63870

SEQ ID NO: 85765 - RNA, 1410 nt, Artificial Sequence; identical to SEQ ID NO: 78249
  derived and/or modified CDS sequence (opt1) from neuraminidase__InfluenzaA__AFD63881

SEQ ID NO: 85766 - RNA, 1410 nt, Artificial Sequence; identical to SEQ ID NO: 78249
  derived and/or modified CDS sequence (opt1) from neuraminidase__InfluenzaA__AFD63892

SEQ ID NO: 85767 - RNA, 1410 nt, Artificial Sequence
  derived and/or modified CDS sequence (opt1) from neuraminidase__InfluenzaA__AFD63903
augaaccccaaccagaagaucaucaccaucggcagcgugucccugaccaucgccgccaucugcuuccucaugcagaucgcgauccuggucacgaccgugacccugcacuucaagcagcacgagugcaacagcccgcccaacaaccaggugaugcucugcgagcccaccaucaucgagcgcaacaucacggggaucgucuaccugaccaacaccaccaucgagaaggagaucugccccaagcuggccgaguaccggaacugguccaagccgcagugcaacaucacgggcuucgcccccuucagcaaggacaacuccauccgccucagcgccgggggcgacaucugggugacccgggagcccuacguguccugcgaccccgacaagugcuaccaguucgcccuggggcagggcaccacccugaacaacggccacagcaacgacacgguccacgaccgcaccccguaccggacccuccugaugaacgagcugggggugcccuuccaccucggcacccgccaggugugcaucgcgugguccagcuccagcugccacgacgggaaggccuggcugcacgucugcgugacgggcgacgacaagaacgccaccgccuccuucaucuacaacgggcggcugguggacagcaucggcuccuggagcaagaagauccuccgcacccaggaguccgagugcgucugcaucaacgggaccugcacgguggugaugaccgacggcagcgcguccggcaaggccgacaccaagauccuguucaucgaggaggggaagaucguccacaucagcacccugagcggcuccgcccagcacguggaggagugcagcugcuacccccgguaccccggcgugcgcugcgucugccgggacaacuggaagggguccaaccgcccgaucguggacaucaacgugaaggacuacagcaucgucuccagcuacgugugcuccggccucgugggggacacgccccggaagaacgacagcuucuccagcucccacugccuggaccccaacaacgaggagggcgggcacggcgucaagggcugggccuucgacgacgggaacgacguguggaugggccgcaccaucagcgagaagcugcgguccggguacgagaccuucaaggucaucgagggcuggagcaagcccaacuccaagcuccagaucaaccgccaggugaucguggagcgggggaaccgcagcggcuacuccggcaucuucagcgucgaggggaaguccugcaucaaccggugcuucuacguggagcugauccgcggccggaaggaggagaccgaggugugguggacgagcaacagcaucgucguguucugcgggaccuccggcaccuacgggaccggcagcuggccggacggcgccgacaucaaccugaugcccaucuga

SEQ ID NO: 85768 - RNA, 1410 nt, Artificial Sequence
  derived and/or modified CDS sequence (opt1) from neuraminidase__InfluenzaA__AFD63914
augaaccccaaccagaagaucaucaccaucggcagcgugucccugaccaucgccgccaucugcuuccucaugcagaucgcgauccuggucacgaccgugacccugcacuucaagcagcacgagugcaacagcccgcccaacaaccaggugaugcucugcgagcccaccaucaucgagcgcaacaucacggagaucgucuaccugaccaacaccaccaucgagaaggagaucugccccaagcuggccgaguaccggaacugguccaagccgcagugcaacaucacgggguucgcccccuucagcaaggacaacuccauccgccucagcgccggcggggacaucugggugacccgggagcccuacguguccugcgaccccgacaagugcuaccaguucgcccugggccaggggaccacccugaacaacggccacagcaacgacacgguccacgaccgcaccccguaccggacccuccugaugaacgagcugggcgugcccuuccaccucgggacccgccaggugugcaucgcgugguccagcuccagcugccacgacggcaaggccuggcugcacgucugcgugacgggggacgacaagaacgccaccgccuccuucaucuacaacggccggcugguggacagcaucggguccuggagcaagaagauccuccgcacccaggaguccgagugcgucugcaucaacgggaccugcacgguggugaugaccgacggcagcgcguccgggaaggccgacaccaagauccuguucaucgaggagggcaagaucguccacaucagcacccugagcggguccgcccagcacguggaggagugcagcugcuacccccgguaccccggcgugcgcugcgucugccgggacaacuggaagggcuccaaccgcccgaucguggacaucaacgugaaggacuacagcaucgucuccagcuacgugugcuccgggcucgugggcgacacgccccggaagaacgacagcuucuccagcucccacugccuggaccccaacaacgaggagggcggccacggggucaagggcugggccuucgacgacggcaacgacguguggauggggcgcaccaucagcgagaagcugcgguccggcuacgagaccuucaaggucaucgagggguggagcaagcccaacuccaagcuccagaucaaccgccaggugaucguggagcggggcaaccgcagcggguacuccggcaucuucagcgucgagggcaaguccugcaucaaccggugcuucuacguggagcugauccgcgggcggaaggagaagaccgaggugugguggacgagcaacagcaucgucguguucugcggcaccuccgggaccuacggcaccgggagcuggccggacggcgccgacaucaaccugaugcccaucuga

SEQ ID NO: 85769 - RNA, 1410 nt, Artificial Sequence; identical to SEQ ID NO: 85754
  derived and/or modified CDS sequence (opt1) from neuraminidase__InfluenzaA__AFD63925

SEQ ID NO: 85770 - RNA, 1410 nt, Artificial Sequence
  derived and/or modified CDS sequence (opt1) from neuraminidase__InfluenzaA__AFD63936
augaaccccaaccagaagaucaucaccaucggcagcgugucccugaccaucgccacgaucugcuuccucaugcagaucgccauccuggucaccaccgugacccugcacuucaagcagcacgagugcaacccgccgcccaacaaccaggugaugcucugcgagcccacgaucaucgagcgcaacaucaccgagaucgucuaccugaccaacaccacgaucgagaaggagaucugccccaagcuggcggaguaccggaacuggagcaagccccagugcaacaucaccggguucgcccccuucuccaaggacaacagcauccgccucuccgccggcggggacaucugggugacccgggagcccuacgugagcugcgacccggacaagugcuaccaguucgcccugggccaggggaccacgcugaacaacggccacuccaacgacaccguccacgaccgcacccccuaccggacccuccugaugaacgagcugggcgugcccuuccaccucgggacgcgccaggugugcaucgccuggagcuccagcuccugccacgacggcaaggcguggcugcacgucugcgugaccggggacgacaagaacgccaccgccagcuucaucuacaacggccggcugguggacuccaucgggagcugguccaagaagauccuccgcacccaggagagcgagugcgucugcaucaacggcacgugcaccguggugaugaccgacggcuccgccagcgggaaggcggacaccaagauccuguucaucgaggagggcaagaucguccacaucuccacgcugagcgggagcgcccagcacguggaggagugcuccugcuacccccgguacccgggcgugcgcugcgucugccgggacaacuggaagggcagcaaccgccccaucguggacaucaacgugaaggacuacuccaucgucagcuccuacgugugcagcgggcucgugggcgacacgccccggaagaacgacuccuucagcuccagccacugccuggaccccaacaacgaggagggcgggcacggggucaagggcugggccuucgacgacggcaacgacguguggauggggcgcaccaucuccgagaagcugcggagcggcuacgagaccuucaaggucaucgaggggugguccaagccgaacagcaagcuccagaucaaccgccaggugaucguggagcggggcaaccgcuccggguacagcggcaucuucuccgucgagggcaagagcugcaucaaccggugcuucuacguggagcugauccgcgggcggaaggaggagaccgaggugugguggaccuccaacagcaucgucguguucugcggcaccagcgggaccuacggcacgggguccuggcccgacggcgccgacaucaaccugaugcccaucuga

SEQ ID NO: 85771 - RNA, 1410 nt, Artificial Sequence; identical to SEQ ID NO: 78249
  derived and/or modified CDS sequence (opt1) from neuraminidase__InfluenzaA__AFD63947

SEQ ID NO: 85772 - RNA, 1410 nt, Artificial Sequence; identical to SEQ ID NO: 78249
  derived and/or modified CDS sequence (opt1) from neuraminidase__InfluenzaA__AFD63958

SEQ ID NO: 85773 - RNA, 1410 nt, Artificial Sequence; identical to SEQ ID NO: 78249
  derived and/or modified CDS sequence (opt1) from neuraminidase__InfluenzaA__AFD63969

SEQ ID NO: 85774 - RNA, 1410 nt, Artificial Sequence; identical to SEQ ID NO: 78249
  derived and/or modified CDS sequence (opt1) from neuraminidase__InfluenzaA__AFD63980

SEQ ID NO: 85775 - RNA, 1410 nt, Artificial Sequence
  derived and/or modified CDS sequence (opt1) from neuraminidase__InfluenzaA__AFD64002
augaaccccaaccagaagaucaucaccaucggcagcgugucccugaccaucgccgccaucugcuuccucaugcagaucgcgauccuggucacgaccgugacccugcacuucaagcagcacgagugcaacagcccgcccaacaaccaggugaugcucugcgagcccaccaucaucgagcgcaacaucacggagaucgucuaccugaccaacaccaccaucgagaaggagaucugccccaagcuggccgaguaccggaacugguccaagccgcagugcaacaucacgggguucgcccccuucagcaaggacaacuccauccgccucagcgccggcggggacaucugggugacccgggagcccuacguguccugcgaccccgacaagugcuaccaguucgcccugggccaggggaccacccugaacaacggccacagcaacgacacgguccacgaccgcaccccguaccggacccuccugaugaacgagcugggcgugcccuuccaccucgggacccgccaggugugcaucgcgugguccagcuccagcugccacgacggcaaggccuggcugcacgucugcgugacgggggacgacaagaacgccaccgccuccuucaucuacaacggccggcugguggacagcaucggguccuggagcaagaagauccuccgcacccaggaguccgagugcgucugcaucaacgggaccugcacgguggugaugaccgacggcagcgcguccgggaaggccgacaccaagauccuguucaucgaggagggcaagaucguccacaucagcacccugagcggguccgcccagcacguggaggagugcagcugcuacccccgguaccccggcgugcgcugcgucugccgggacaacuggaagggcuccaaccgcccgaucguggacaucaacgugaaggacuacagcaucgucuccagcuacgugugcuccgggcucgugggcgacacgccccggaagaccgacagcuucuccagcucccacugccuggaccccaacaacgaggagggcggccacggggucaagggcugggccuucgacgacggcaacgacguguggauggggcgcaccaucagcgagaagcugcgguccggcuacgagaccuucaaggucaucgagggguggagcaagcccaacuccaagcuccagaucaaccgccaggugaucguggagcggggcaaccgcagcggguacuccggcaucuucagcgucgagggcaaguccugcaucaaccggugcuucuacguggagcugauccgcgggcggaaggaggagacggaggugugguggaccagcaacagcaucgucguguucugcggcaccuccgggaccuacggcacggggagcuggccggacggcgccgacaucaaccugaugcccaucuga

SEQ ID NO: 85776 - RNA, 1410 nt, Artificial Sequence; identical to SEQ ID NO: 78159
  derived and/or modified CDS sequence (opt1) from neuraminidase__InfluenzaA__AFD64013

SEQ ID NO: 85777 - RNA, 1410 nt, Artificial Sequence
  derived and/or modified CDS sequence (opt1) from neuraminidase__InfluenzaA__AFD64024
augaaccccaaccagaagaucaucaccaucggcagcgugucccugaccaucgccgccaucugcuuccucaugcagaucgcgauccuggucacgaccgugacccugcacuucaagcagcacgagugcaacagcccgcccaacaaccaggugaugcucugcgagcccaccaucaucgagaagaacaucacggagaucgucuaccugaccaacaccaccaucgagaaggagaucugccccaagcuggccgaguaccgcaacugguccaagccgcagugcaacaucacgggguucgcccccuucagcaaggacaacuccauccggcucagcgccggcggggacaucugggugacccgcgagcccuacguguccugcgaccccgacaagugcuaccaguucgcccugggccaggggaccacccugaacaacggccacagcaacgacacgguccacgaccggaccccguaccgcacccuccugaugaacgagcugggcgugcccuuccaccucgggacccgccaggugugcaucgcgugguccagcuccagcugccacgacggcaaggccuggcugcacgucugcgugacgggggacgacaagaacgccaccgccuccuucaucuacaacggccggcugguggacagcaucggguccuggagcaagaagauccuccggacccaggaguccgagugcgucugcaucaacgggaccugcacgguggugaugaccgacggcagcgcguccgggaaggccgacaccaagauccuguucaucgaggagggcaagaucguccacaucagcacccugagcggguccgcccagcacguggaggagugcagcugcuacccccgcuaccccggcgugcggugcgucugccgcgacaacuggaagggcuccaaccggccgaucguggacaucaacgugaaggacuacagcaucgucuccagcuacgugugcuccgggcucgugggcgacacgccccgcaagaacgacagcuucuccagcucccacugccuggaccccaacaacgaggagggcggccacggggucaagggcugggccuucgacgacggcaacgacguguggauggggcggaccaucagcgagaagcugcgcuccggcuacgagaccuucaaggucaucgagggguggagcaagcccaacuccaagcuccagaucaaccgccaggugaucguggagcggggcaaccggagcggguacuccggcaucuucagcgucgagggcaaguccugcaucaaccgcugcuucuacguggagcugauccgggggcgcaaggaggagaccgaggugugguggacgagcaacagcaucgucguguucugcggcaccuccgggaccuacggcaccgggagcuggccggacggcgccgacaucaaccugaugcccaucuga

SEQ ID NO: 85778 - RNA, 1410 nt, Artificial Sequence
  derived and/or modified CDS sequence (opt1) from neuraminidase__InfluenzaA__AFD64035
augaaccccaaccagaagaucaucaccaucggcagcgugucccugaccaucgccgccaucugcuuccucaugcagaucgcgauccuggucacgaccgugacccugcacuucaagcagcacgagugcaacagcccgcccaacaaccaggugaugcucugcgagcccaccaucaucgagcgcaacaucacggagaucgucuaccugaccaacaccaccaucgagaaggagaucugccccaagcuggccgaguaccggaacugguccaagccgcagugcaacaucacgggguucgcccccuucagcaaggacaacuccauccgccucagcgccggcggggacaucugggugacccgggagcccuacguguccugcgaccccgacaagugcuaccaguucgcccugggccaggggaccacccugaacaacggccacagcaacgacacgguccacgaccgcaccccguaccggacccuccugaugaacgagcugggcgugcccuuccaccucgggacccgccaggugugcaucgcgugguccagcuccagcugccacgacggcaaggccuggcugcacgucugcgugacgggggacgacaagaacgccaccgccuccuucaucuacaacggccggcugguggacagcaucggguccuggagcaagaagauccuccgcacccaggaguccgagugcgucugcaucaacgggaccugcacgguggugaugaccgacggcagcgcguccgggaaggccgacaccaagauccuguucaucgaggagggcaagaucguccacaucagcacccugagcggguccgcccagcacguggaggagugcagcugcuacccccgguaccccggcgugcgcugcgucugccgggacaacuggaagggcuccaaccgcccgaucguggacaucaacgugaaggacuacagcaucgucuccagcuacgugugcuccgggcucgugggcgacacgccccggaagaacgacagcuucuccagcucccacugccuggaccccaacaacgaggagggcggccacggggucaagggcugggccuucgacgacggcaacgacguguggauggggcgcaccaucagcgagaagcugcgguccggcuacgagaccuucaaggucaucgagggguggagcaagcccaacuccaagcuccagaucaaccgccaggugaucguggagcggggcaaccgcagcggguacuccggcaucuucagcgucgagggcaaguccugcaucaaccggugcuucuacguggagcugauccgcgggcggaaggaggagaccgaggugugguggacgagcaacagcgucgugguguucugcggcaccuccgggaccuacggcaccgggagcuggccggacggcgccgacaucaaccugaugcccaucuga

SEQ ID NO: 85779 - RNA, 1410 nt, Artificial Sequence
  derived and/or modified CDS sequence (opt1) from neuraminidase__InfluenzaA__AFD64046
augaaccccaaccagaagaucaucaccaucggcagcgugucccugaccaucgccacgaucugcuuccucaugcagaucgccauccuggucaccaccgugacccugcacuucaagcagcacgagugcaacagcccgcccaacaaccaggugaugcucugcgagcccacgaucaucgagcgcaacaucaccgagaucgucuaccugaccaacaccacgaucgagaaggagaucugccccaagcuggcggaguaccggaacugguccaagccgcagugcaacaucaccggguucgcccccuucagcaaggacaacuccauccgccucagcgccggcggggacaucugggugacccgggagcccuacguguccugcgaccccgacaagugcuaccaguucgcccugggccaggggaccacgcugaacaacggccacagcaacgacaccguccacgagcgcaccccguaccggacccuccugaugaacgagcugggcgugcccuuccaccucgggacgcgccaggugugcaucgccugguccagcuccagcugccacgacggcaaggcguggcugcacgucugcgugaccggggacgacaagaacgccaccgccuccuucaucuacaacggccggcugguggacagcaucggguccuggagcaagaagauccuccgcacccaggaguccgagugcgucugcaucaacggcacgugcaccguggugaugaccgacggcagcgccuccgggaaggcggacaccaagauccuguucaucgaggagggcaagaucguccacaucagcacgcugagcggguccgcccagcacguggaggagugcagcugcuacccccgguaccccggcgugcgcugcgucugccgggacaacuggaagggcuccaaccgcccgaucguggacaucaacgugaaggacuacagcaucgucuccagcuacgugugcuccgggcucgugggcgacacgccccggaagaacgacagcuucuccagcucccacugccuggaccccaacaacgaggagggcgggcacggggucaagggcugggccuucgacgacggcaacgacguguggauggggcgcaccaucagcgagaagcugcgguccggcuacgagaccuucaaggucaucgagggguggagcaagcccaacuccaagcuccagaucaaccgccaggugaucguggagcggggcaaccgcagcggguacuccggcaucuucagcgucgagggcaaguccugcaucaaccggugcuucuacguggagcugauccgcgggcggaaggaggagaccgaggugugguggaccagcaacagcaucgucguguucugcggcaccuccgggaccuacggcacggggagcuggccggacggcgccgacaucaaccugaugcccaucuga

SEQ ID NO: 85780 - RNA, 1410 nt, Artificial Sequence; identical to SEQ ID NO: 85754
  derived and/or modified CDS sequence (opt1) from neuraminidase__InfluenzaA__AFD64057

SEQ ID NO: 85781 - RNA, 1410 nt, Artificial Sequence
  derived and/or modified CDS sequence (opt1) from neuraminidase__InfluenzaA__AFD64068
augaaccccaaccagaagaucaucaccaucggcagcgugucccugaccaucagcacgaucugcuucuucaugcagaucgccauccucaucaccaccgucacccugcacuucaagcaguacgaguucaacuccccgcccaacaaccaggugaugcugugcgagcccacgaucaucgagcgcaacaucaccgagaucguguaccucaccaacaccacgaucgagaaggagaucugccccaagcuggccgaguaccggaacuggagcaagccgcagugcgacaucaccggguucgcgcccuucuccaaggacaacagcauccgccuguccgccggcggggacaucugggucacccgggagcccuacgugagcugcgaccccgacaagugcuaccaguucgcccucggccaggggaccacgcugaacaacgugcacuccaacgacaccguccacaaccgcaccccguaccggacccugcucaugaacgagcugggcgugcccuuccaccugggcacgaagcaggucugcaucgccuggagcuccagcuccugccacgacgggaaggccuggcuccacgugugcgugaccggcgacgacaagaacgcgaccgccagcuucaucuacaacgggcgccugguggacuccaucgucagcugguccaagaagauccugcggacccaggagagcgagugcgugugcaucaacggcacgugcaccguggucaugaccgacggguccgccagcggcaaggccgacaccaagauccucuucaucgaggagggcaagaucgugcacacgagcacccuguccgggagcgcgcagcacguggaggagugcuccugcuacccccgcuaccccggcguccggugcgugugccgcgacaacuggaaggggagcaaccggccgaucguggacaucaacaucaaggacuacuccaucgucagcuccuacgugugcagcggccuggugggcgacacgccccgcaagaacgacuccagcuccagcucccacugccucgaccccaacaacgaggagggcgggcacggggucaagggcugggccuucgacgacgggaacgacguguggaugggccggaccaucagcgagaagucccgcagcggcuacgagaccuucaaggucaucgaggggugguccaaccccaacagcaagcugcagaucaaccgccaggugaucguggaccggggcaaccgguccggguacagcggcaucuucagcgucgaggggaaguccugcaucaaccgcugcuucuacguggagcugauccggggccgcaaggaggagaccgaggugcucuggaccagcaacuccaucgucguguucugcggcaccagcgggacguacggcaccggguccuggccggacggcgccgacaucaaccugaugcccaucuga

SEQ ID NO: 85782 - RNA, 1410 nt, Artificial Sequence
  derived and/or modified CDS sequence (opt1) from neuraminidase__InfluenzaA__AFD64079
augaaccccaaccagaagaucaucaccaucggcagcgugucccugaccaucgccgccaucugcuuccucaugcagaucgcgauccuggucacgaccgugacccugcacuucaagcagcacgagugcaacagcccgcccaacaaccaggugaugcucugcgagcccaccaucaucgagcgcaacaucacggagaucgucuaccugaccaacaccaccaucgagaaggagaucugccccaagcuggccgaguaccggaacugguccaagccgcagugcaacaucacgggguucgcccccuucagcaaggacaacuccauccgcaucagcgccggcggggacaucugggugacccgggagcccuacguguccugcgaccccgacaagugcuaccaguucgcccucggccaggggaccacccugaacaacggccacagcaacgacacgguccacgaccgcaccccguaccggacccugcucaugaacgagcugggcgugcccuuccaccuggggacccgccaggugugcaucgcgugguccagcuccagcugccacgacggcaaggccuggcuccacgucugcgugacgggggacgacaagaacgccaccgccuccuucaucuacaacggccggcugguggacagcaucggguccuggagcaagaagauccugcgcacccaggaguccgagugcgucugcaucaacgggaccugcacgguggugaugaccgacggcagcgcguccgggaaggccgacaccaagauccucuucaucgaggagggcaagaucguccacaucagcacccugagcggguccgcccagcacguggaggagugcagcugcuacccccgguaccccggcgugcgcugcgucugccgggacaacuggaagggcuccaaccgcccgaucguggacaucaacgugaaggacuacagcaucgucuccagcuacgugugcuccgggcuggugggcgacacgccccggaagaacgacagcuucuccagcucccacugccucgaccccaacaacgaggagggcggccacggggucaagggcugggccuucgacgacggcaacgacguguggauggggcgcaccaucagcgagaagcugcgguccggcuacgagaccuucaaggucaucgagggguggagcaagcccaacuccaagcugcagaucaaccgccaggugaucguggagcggggcaaccgcagcggguacuccggcaucuucagcgucgagggcaaguccugcaucaaccggugcuucuacguggagcucauccgcgggcggaaggaggagaccgaggugugguggacgagcaacagcaucgucguguucugcggcaccuccgggaccuacggcaccgggagcuggccggacggcgccgacaucaaccugaugcccaucuga

SEQ ID NO: 85783 - RNA, 1410 nt, Artificial Sequence; identical to SEQ ID NO: 78249
  derived and/or modified CDS sequence (opt1) from neuraminidase__InfluenzaA__AFD64090

SEQ ID NO: 85784 - RNA, 1410 nt, Artificial Sequence
  derived and/or modified CDS sequence (opt1) from neuraminidase__InfluenzaA__AFD64101
augaaccccaaccagaagaucaucaccaucggcagcgugucccugaccaucgccgccaucugcuuccucaugcagaucgcgauccuggucacgaccgugacccugcacuucaagcagcacgagugcaacagcccgcccaacaaccaggugaugcucugcgagcccaccaucaucgagcgcaacaucacggagaucgucuaccugaccaacaccaccaucgagaaggagaucugccccaagcuggccgaguaccggaacugguccaagccgcagugcaacaucacgggguucgcccccuucagcaaggacaacuccauccgccucagcgccggcggggacaucugggugacccgggagcccuacguguccugcgaccccgacaagugcuaccaguucgcccugggccaggggaccacccugaacaacggccacagcaacgacacgguccacggccgcaccccguaccggacccuccugaugaacgagcugggggugcccuuccaccucggcacccgccaggugugcaucgcgugguccagcuccagcugccacgacgggaaggccuggcugcacgucugcgugacgggcgacgacaagaacgccaccgccuccuucaucuacaacgggcggcugguggacagcaucggcuccuggagcaagaagauccuccgcacccaggaguccgagugcgucugcaucaacgggaccugcacgguggugaugaccgacggcagcgcguccggcaaggccgacaccaagauccuguucaucgaggaggggaagaucguccacaucagcacccugagcggcuccgcccagcacguggaggagugcagcugcuacccccgguaccccggcgugcgcugcgucugccgggacaacuggaagggguccaaccgcccgaucguggacaucaacgugaaggacuacagcaucgucuccagcuacgugugcuccggccucgugggggacacgccccggaagaacgacagcuucuccagcucccacugccuggaccccaacaacgaggagggcgggcacggcgucaagggcugggccuucgacgacgggaacgacguguggaugggccgcaccaucagcgagaagcugcgguccggguacgagaccuucaaggucaucgagggcuggagcaagcccaacuccaagcuccagaucaaccgccaggugaucguggagcgggggaaccgcagcggcuacuccggcaucuucagcgucgaggggaaguccugcaucaaccggugcuucuacguggagcugauccgcggccggaaggaggagaccgaggugugguggacgagcaacagcaucgucguguucugcgggaccuccggcaccuacgggaccggcagcuggccggacggcgccgacaucaaccugaugcccaucuga

SEQ ID NO: 85785 - RNA, 1410 nt, Artificial Sequence
  derived and/or modified CDS sequence (opt1) from neuraminidase__InfluenzaA__AFD64112
augaaccccaaccagaagaucaucaccaucggcagcgugucccugaccaucgccacgaucugcuuccucaugcagaucgccauccuggucaccaccgugacccugcacuucaagcaguacgagugcaacagcccgcccaacaaccaggugaugcucugcgagcccacgaucaucgagcgcaacaucaccgagaucgucuaccugaccaacaccacgaucgagaaggagaucugccccaagcuggcggaguaccggaacugguccaagccgcagugcaacaucaccggguucgcccccuucagcaaggacaacuccauccgccucagcgccggcggggacaucugggugacccgggagcccuacguguccugcgaccccgacaagugcuaccaguucgcccugggccaggggaccacgcugaacaacggccacagcaacgacaccguccacgaccgcaccccguaccggacccuccugaugaacgagcugggcgugcccuuccaccucgggacgcgccaggugugcaucgccugguccagcuccagcugccacgacggcaaggcguggcugcacgucugcgugaccggggacgacaagaacgccaccgccuccuucaucuacaacggccggcugguggacagcaucggguccuggagcaagaagauccuccgcacccaggaguccgagugcgucugcaucaacggcacgugcaccguggugaugaccgacggcagcgccuccgggaaggcggacaccaagauccuguucaucgaggagggcaagaucauccacaucagcacgcugagcggguccgcccagcacgucgaggagugcagcugcuacccccgguaccccggcgugcgcugcgugugccgggacaacuggaagggcuccaaccgcccgaucgucgacaucaacgugaaggacuacagcaucguguccagcuacgucugcuccgggcucgugggcgacacgccccggaagaacgacagcuccagcuccagccacugccuggaccccaacaacgaggagggcgggcacggggugaagggcugggccuucgacgacggcaacgacgucuggauggggcgcaccaucuccgagaagcugcggagcggcuacgagaccuucaaggugaucgaggggugguccaagcccaacagcaagcuccagaucaaccgccaggucaucguggagcgggacaaccgcuccggcuacagcgggaucuucuccguggagggcaagagcugcaucaaccggugcuucuacgucgagcugauccgcggccggaaggaggagaccgaggugugguggaccagcaacuccaucguggucuucugcgggaccagcggcaccuacgggacgggcuccuggccggacggggccgacaucaaccugaugcccaucuga

SEQ ID NO: 85786 - RNA, 1410 nt, Artificial Sequence; identical to SEQ ID NO: 79955
  derived and/or modified CDS sequence (opt1) from neuraminidase__InfluenzaA__AFD64123

SEQ ID NO: 85787 - RNA, 1410 nt, Artificial Sequence; identical to SEQ ID NO: 78249
  derived and/or modified CDS sequence (opt1) from neuraminidase__InfluenzaA__AFD64134

SEQ ID NO: 85788 - RNA, 1410 nt, Artificial Sequence; identical to SEQ ID NO: 78249
  derived and/or modified CDS sequence (opt1) from neuraminidase__InfluenzaA__AFD64145

SEQ ID NO: 85789 - RNA, 1410 nt, Artificial Sequence; identical to SEQ ID NO: 78249
  derived and/or modified CDS sequence (opt1) from neuraminidase__InfluenzaA__AFD64156

SEQ ID NO: 85790 - RNA, 1410 nt, Artificial Sequence; identical to SEQ ID NO: 78169
  derived and/or modified CDS sequence (opt1) from neuraminidase__InfluenzaA__AFD64167

SEQ ID NO: 85791 - RNA, 1410 nt, Artificial Sequence; identical to SEQ ID NO: 78249
  derived and/or modified CDS sequence (opt1) from neuraminidase__InfluenzaA__AFD64181

SEQ ID NO: 85792 - RNA, 1410 nt, Artificial Sequence
  derived and/or modified CDS sequence (opt1) from neuraminidase__InfluenzaA__AFD64192
augaaccccaaccagaagaucaucaccaucggcagcgugucccugaccaucgccgccaucugcuuccucaugcagaucgcgauccuggucacgaccgugacccugcacuucaagcagcacgagugcaacagcccgcccaacaaccaggugaugcucugcgagcccaccaucaucgagcgcaacaucacggagaucgucuaccugaccaacaccaccaucgagaaggagaucugccccaagcuggccgaguaccggaacugguccaagccgcagugcaacaucacgggguucgcccccuucagcaaggacaacuccauccgccucagcgccggcggggacaucugggugacccgggagcccuacguguccugcgaccccgacaagugcuaccaguucgcccugggccaggggaccacccugaacaacggccacagcaacgacacgguccacgaccgcaccccguaccggacccuccugaugaacgagcugggcgugcccuuccaccucgggacccgccaggugugcaucgcgugguccagcuccagcugccacgacggcaaggccuggcugcacgucugcgugacgggggacgacaagaacgccaccgccuccuucaucuacaacggccggcugguggacagcaucggguccuggagcaagaagauccuccgcacccaggaguccgagugcgucugcaucaacgggaccugcacgguggugaugaccgacggcagcgcguccgggaaggccgacaccaagauccuguucaucgaggagggcaagaucguccacgugagcacccugagcggguccgcccagcacguggaggagugcagcugcuacccccgguaccccggcguccgcugcgugugccgggacaacuggaagggcuccaaccgcccgaucguggacaucaacgucaaggacuacagcaucguguccagcuacgugugcuccgggcucgucggcgacacgccccggaagaacgacagcuucuccagcucccacugccuggaccccaacaacgaggagggcggccacggggugaagggcugggccuucgacgacggcaacgacgucuggauggggcgcaccaucagcgagaagcugcgguccggcuacgagaccuucaaggugaucgagggguggagcaagcccaacuccaagcuccagaucaaccgccaggugaucgucgagcggggcaaccgcagcggguacuccggcaucuucagcguggagggcaaguccugcaucaaccggugcuucuacguggagcugauccgcgggcggaaggaggagaccgaggucugguggacgagcaacagcaucgugguguucugcggcaccuccgggaccuacggcaccgggagcuggccggacggcgccgacaucaaccugaugcccaucuga

SEQ ID NO: 85793 - RNA, 1410 nt, Artificial Sequence
  derived and/or modified CDS sequence (opt1) from neuraminidase__InfluenzaA__AFD64203
augaaccccaaccagaagaucaucaccaucggcagcgugucccugaccaucgccgccaucugcuuccucaugcagaucgcgauccuggucacgaccgugacccugcacuucaagcagcacgagugcaacagcccgcccaacaaccaggugaugcucugcgagcccaccaucaucgagcgcaacaucacggagaucgucuaccugaccaacaccaccaucgagaaggagaucugccccaagcuggccgaguaccggaacugguccaagccgcagugcaacaucacgggguucgcccccuucagcaaggacaacuccauccgccucagcgccggcggggacaucugggugacccgggagcccuacguguccugcgaccccgacaagugcuaccaguucgcccugggccaggggaccacccugaacaaccgccacagcaacgacacgguccacgaccggaccccguaccgcacccuccugaugaacgagcugggcgugcccuuccaccucggcacccgccaggugugcaucgcgugguccagcuccagcugccacgacgggaaggccuggcugcacgucugcgugacgggcgacgacaagaacgccaccgccuccuucaucuacaacgggcggcugguggacagcaucggcuccuggagcaagaagauccuccggacccaggaguccgagugcgucugcaucaacgggaccugcacgguggugaugaccgacggcagcgcguccggcaaggccgacaccaagauccuguucaucgaggaggggaagaucguccacaucagcacccugagcggcuccgcccagcacguggaggagugcagcugcuacccccgcuaccccggggugcggugcgucugccgcgacaacuggaagggcuccaaccggccgaucguggacaucaacgugaaggacuacagcaucgucuccagcuacgugugcuccggccucgugggggacacgccccgcaagaacgacagcuucuccagcucccacugccuggaccccaacaacgaggagggcgggcacggcgucaaggggugggccuucgacgacggcaacgacguguggaugggccggacccugagcgagaagcuccgcuccggguacgagaccuucaaggucaucgagggcuggagcaagcccaacuccaagcugcagaucaaccgccaggugaucguggagcgggggaaccggagcggcuacuccgggaucuucagcgucgagggcaaguccugcaucaaccgcugcuucuacguggagcugauccggggccgcaaggaggagaccgaggugugguggacgagcaacagcaucgucguguucugcgggaccuccggcaccuacgggaccggcagcuggccggacggggccgacaucaaccucaugcccaucuga

SEQ ID NO: 85794 - RNA, 1410 nt, Artificial Sequence; identical to SEQ ID NO: 85754
  derived and/or modified CDS sequence (opt1) from neuraminidase__InfluenzaA__AFD64214

SEQ ID NO: 85795 - RNA, 1410 nt, Artificial Sequence; identical to SEQ ID NO: 79953
  derived and/or modified CDS sequence (opt1) from neuraminidase__InfluenzaA__AFD64225

SEQ ID NO: 85796 - RNA, 1410 nt, Artificial Sequence; identical to SEQ ID NO: 78249
  derived and/or modified CDS sequence (opt1) from neuraminidase__InfluenzaA__AFD64317

SEQ ID NO: 85797 - RNA, 1410 nt, Artificial Sequence; identical to SEQ ID NO: 79955
  derived and/or modified CDS sequence (opt1) from neuraminidase__InfluenzaA__AFD64328

SEQ ID NO: 85798 - RNA, 1410 nt, Artificial Sequence; identical to SEQ ID NO: 85754
  derived and/or modified CDS sequence (opt1) from neuraminidase__InfluenzaA__AFD64339

SEQ ID NO: 85799 - RNA, 1410 nt, Artificial Sequence; identical to SEQ ID NO: 78249
  derived and/or modified CDS sequence (opt1) from neuraminidase__InfluenzaA__AFD64350

SEQ ID NO: 85800 - RNA, 1410 nt, Artificial Sequence; identical to SEQ ID NO: 85754
  derived and/or modified CDS sequence (opt1) from neuraminidase__InfluenzaA__AFD64361

SEQ ID NO: 85801 - RNA, 1410 nt, Artificial Sequence; identical to SEQ ID NO: 85754
  derived and/or modified CDS sequence (opt1) from neuraminidase__InfluenzaA__AFD64372

SEQ ID NO: 85802 - RNA, 1410 nt, Artificial Sequence; identical to SEQ ID NO: 78249
  derived and/or modified CDS sequence (opt1) from neuraminidase__InfluenzaA__AFD64383

SEQ ID NO: 85803 - RNA, 1410 nt, Artificial Sequence; identical to SEQ ID NO: 85754
  derived and/or modified CDS sequence (opt1) from neuraminidase__InfluenzaA__AFD64394

SEQ ID NO: 85804 - RNA, 1410 nt, Artificial Sequence; identical to SEQ ID NO: 78249
  derived and/or modified CDS sequence (opt1) from neuraminidase__InfluenzaA__AFD64405

SEQ ID NO: 85805 - RNA, 1410 nt, Artificial Sequence; identical to SEQ ID NO: 78249
  derived and/or modified CDS sequence (opt1) from neuraminidase__InfluenzaA__AFD64416

SEQ ID NO: 85806 - RNA, 1410 nt, Artificial Sequence; identical to SEQ ID NO: 78249
  derived and/or modified CDS sequence (opt1) from neuraminidase__InfluenzaA__AFD64427

SEQ ID NO: 85807 - RNA, 1410 nt, Artificial Sequence
  derived and/or modified CDS sequence (opt1) from neuraminidase__InfluenzaA__AFD64438
augaaccccaaccagaagaucaucaccaucggcagcgugucccugaccaucgccgccaucugcuuccucaugcagaucgcgauccuggucacgaccgugacccugcacuucaagcagcacgagugcaacagcccgcccaacaaccaggugaugcucugcgagcccaccaucaucgagcgcaacaucacggagaucgucuaccugaccaacaccaccaucgagaaggagaucugccccaaccuggccgaguaccggaacugguccaagccgcagugcaacaucacgggguucgcccccuucagcaaggacaacuccauccgccucagcgccggcggggacaucugggugacccgggagcccuacguguccugcgaccccgacaagugcuaccaguucgcccugggccaggggaccacccugaacaacggccacagcaacgacacgguccacgaccgcaccccguaccggacccuccugaugaacgagcugggcgugcccuuccaccucgggacccgccaggugugcaucgcgugguccagcuccagcugccacgacggcaaggccuggcugcacgucugcgugacgggggacgacaagaacgccaccgccuccuucaucuacaacggccggcugguggacagcaucggguccuggagcaagaagauccuccgcacccaggaguccgagugcgucugcaucaacgggaccugcacgguggugaugaccgacggcagcgcguccgggaaggccgacaccaagauccuguucaucgaggagggcaagaucguccacaucagcacccugagcggguccgcccagcacguggaggagugcagcugcuacccccgguaccccggcgugcgcugcgucugccgggacaacuggaagggcuccaaccgcccgaucguggacaucaacgugaaggacuacagcaucgucuccagcuacgugugcuccgggcucgugggcgacacgccccggaagaacgacagcuucuccagcucccacugccuggaccccaacaacgaggagggcggccacggggucaagggcugggccuucgacgacggcaacgacguguggauggggcgcaccaucagcgagaagcugcgguccggcuacgagaccuucaaggucaucgagggguggagcaagcccaacuccaagcuccagaucaaccgccaggugaucguggagcggggcaaccgcagcggguacuccggcaucuucagcgucgagggcaaguccugcaucaaccggugcuucuacguggagcugauccgcgggcggaaggaggagaccgaggugugguggacgagcaacagcaucgucguguucugcggcaccuccgggaccuacggcaccgggagcuggccggacggcgccgacaucaaccugaugcccaucuga

SEQ ID NO: 85808 - RNA, 1410 nt, Artificial Sequence; identical to SEQ ID NO: 78249
  derived and/or modified CDS sequence (opt1) from neuraminidase__InfluenzaA__AFD64449

SEQ ID NO: 85809 - RNA, 1410 nt, Artificial Sequence; identical to SEQ ID NO: 78169
  derived and/or modified CDS sequence (opt1) from neuraminidase__InfluenzaA__AFD64460

SEQ ID NO: 85810 - RNA, 1410 nt, Artificial Sequence; identical to SEQ ID NO: 85167
  derived and/or modified CDS sequence (opt1) from neuraminidase__InfluenzaA__AFD98098

SEQ ID NO: 85811 - RNA, 1410 nt, Artificial Sequence
  derived and/or modified CDS sequence (opt1) from neuraminidase__InfluenzaA__AFD98120
augaaccccaaccagaagaucaucaccaucggcagcgugucccugaccaucagcacgaucugcuucuucaugcagaucgccauccucaucaccaccgucacccugcacuucaagcaguacgaguucaacuccccgcccaacaaccaggugaugcugugcgagcccacgaucaucgagcgcaacaucaccgagaucguguaccucaccaacaccacgaucgagaaggagaucugccccaagcuggccgaguaccggaacuggagcaagccgcagugcgacaucaccggguucgcgcccuucuccaaggacaacagcauccgccuguccgccggcggggacaucugggucacccgggagcccuacgugagcugcgaccccgacaagugcuaccaguucgcccucggccaggggaccacgcugaacaacgugcacuccaacaacaccguccgcgaccggaccccguaccgcacccugcucaugaacgagcugggcgugcccuuccaccugggcacgaagcaggucugcaucgccuggagcuccagcuccugccacgacgggaaggccuggcuccacgugugcaucaccggcgacgacaagaacgcgaccgccagcuucaucuacaacgggcggcugguggacuccguggucagcugguccaaggagauccugcgcacccaggagagcgagugcgugugcaucaacggcacgugcaccguggucaugaccgacggguccgccagcggcaaggccgacaccaagauccucuucaucgaggagggcaagaucgugcacacgagcacccuguccgggagcgcgcagcacguggaggagugcuccugcuacccccgguaccccggcguccgcugcgugugccgggacaacuggaaggggagcaaccgcccgaucguggacaucaacaucaaggaccacuccaucgucagcuccuacgugugcagcggccuggugggcgacacgccccggaagaacgacuccagcuccagcucccacugccucgaccccaacaacgaggagggcgggcacggggucaagggcugggccuucgacgacgggaacgacguguggaugggccgcaccaucaacgagaccagccggcugggcuacgagaccuucaaggucaucgaggggugguccaaccccaagagcaagcugcagaucaaccgccaggugaucguggacaagggcaaccgguccggguacagcggcaucuucuccgucgagggcaagagcugcaucaaccgcugcuucuacguggagcucauccgggggcgcaaggaggagaccgaggugcuguggaccagcaacuccaucgucguguucugcggcacgagcgggaccuacggcaccggguccuggccggacggcgccgaccugaaccucaugcccaucuga

SEQ ID NO: 85812 - RNA, 1410 nt, Artificial Sequence; identical to SEQ ID NO: 83542
  derived and/or modified CDS sequence (opt1) from neuraminidase__InfluenzaA__AFD98131

SEQ ID NO: 85813 - RNA, 1410 nt, Artificial Sequence; identical to SEQ ID NO: 85167
  derived and/or modified CDS sequence (opt1) from neuraminidase__InfluenzaA__AFD98142

SEQ ID NO: 85814 - RNA, 1410 nt, Artificial Sequence; identical to SEQ ID NO: 85811
  derived and/or modified CDS sequence (opt1) from neuraminidase__InfluenzaA__AFD98164

SEQ ID NO: 85815 - RNA, 1410 nt, Artificial Sequence
  derived and/or modified CDS sequence (opt1) from neuraminidase__InfluenzaA__AFD98175
augaaccccaaccagaagaucaucaccaucggcagcgugucccugaccaucagcacgaucugcuucuucaugcagaucgccauccucaucaccaccgucacccugcacuucaagcaguacgaguucaacuccccgcccaacaaccaggugaugcugugcgagcccacgaucaucgagcgcaacaucaccgagaucguguaccucaccaacaccacgaucgagaaggagaucugccccaagcuggccgaguaccggaacuggagcaagccgcagugcgacaucaccggguucgcgcccuucuccaaggacaacagcauccgccuguccgccggcggggacaucugggucacccgggagcccuacgugagcugcgaccccgacaagugcuaccaguucgcccucggccaggggaccacgcugaacaacgugcacuccaacaacaccguccacgaccgcaccccguaccggacccugcucaugaacgagcugggcgugcccuuccaccugggcacgaagcaggucugcaucgccuggagcuccagcuccugccacgacgggaaggccuggcuccacgugugcaucaccggcgacgacaagaacgcgaccgccagcuucaucuacaacgggcgccugguggacuccguggucagcugguccaaggagauccugcggacccaggagagcgagugcgugugcaucaacggcacgugcaccguggucaugaccgacggguccgccagcggcaaggccgacaccaagauccucuucaucgaggagggcaagaucgugcacacgagcacccuguccgggagcgcgcagcacguggaggagugcuccugcuacccccgcuaccccggcguccggugcgugugccgcgacaacuggaaggggagcaaccggccgaucguggacaucaacaucaaggaccacuccaucgucagcuccuacgugugcagcggccuggugggcgacacgccccgcaagaacgacuccagcuccagcucccacugccucgaccccaacaacgaggagggcgggcacggggucaagggcugggccuucgacgacgggaacgacguguggaugggccggaccaucaacgagaccagccgccugggcuacgagaccuucaaggucaucgaggggugguccaaccccaagagcaagcugcagaucaaccgccaggugaucguggacaagggcaaccgguccggguacagcggcaucuucuccgucgagggcaagagcugcaucaaccggugcuucuacguggagcucauccgcgggcggaaggaggagaccgaggugcuguggaccagcaacuccaucgucguguucugcggcacgagcgggaccuacggcaccggguccuggccggacggcgccgaccugaaccucaugcccaucuga

SEQ ID NO: 85816 - RNA, 1410 nt, Artificial Sequence
  derived and/or modified CDS sequence (opt1) from neuraminidase__InfluenzaA__AFD98186
augaaccccaaccagaagaucaucaccaucggcagcgugucccugaccaucagcacgaucugcuucuucaugcagaucgccauccucaucaccaccgucacccugcacuucaagcaguacgaguucaacuccccgcccaacaaccaggugaugcugugcgagcccacgaucaucgagcgcaacaucaccgagaucguguaccucaccaacaccacgaucgagaaggagaucugccccaagcuggccgaguaccggaacuggagcaagccgcagugcgacaucaccggguucgcgcccuucuccaaggacaacagcauccgccuguccgccggcggggacaucugggucacccgggagcccuacgugagcugcgaccccgacaagugcuaccaguucgcccucggccaggggaccacgcugaacaacgugcacuccaacaacaccguccgcgaccggaccccguaccgcacccugcucaugaacgagcugggcgugcccuuccaccugggcacgaagcaggucugcaucgccuggagcuccagcuccugccacgacgggaaggccuggcuccacgugugcaucaccggcgacgacaagaacgcgaccgccagcuucaucuacaacgggaagcugguggacuccguggucagcugguccaaggagauccugcggacccaggagagcgagugcgugugcaucaacggcacgugcaccguggucaugaccgacggguccgccagcggcaaggccgacaccaagauccucuucguggaggagggcaagaucgugcacacgagcacccuguccgggagcgcgcagcacgucgaggagugcuccugcuacccccgcuaccccggcgugcggugcgugugccgcgacaacuggaaggggagcaaccggccgaucgucgacaucaacaucaaggaccacuccaucaucagcuccuacgugugcagcggccuggugggcgacacgccccgcaagaacgacuccagcuccagcucccacugccucgaccccaacaacgaggagggcgggcacggggucaagggcugggccuucgacgacgggaacgacguguggaugggccggaccaucaacgagaccagccgccugggcuacgagaccuucaaggucaucgaggggugguccaaccccaagagcaagcugcagaucaaccgccaggugaucguggaccggggcaaccgguccggguacagcggcaucuucuccgucgagggcaagagcugcaucaaccgcugcuucuacguggagcucauccgggggcgcaaggaggagaccgaggugcuguggaccagcaacuccaucgucguguucugcggcacgagcgggaccuacggcaccggguccuggccggacggcgccgaccugaaccucaugcccaucuga

SEQ ID NO: 85817 - RNA, 1410 nt, Artificial Sequence; identical to SEQ ID NO: 83542
  derived and/or modified CDS sequence (opt1) from neuraminidase__InfluenzaA__AFD98197

SEQ ID NO: 85818 - RNA, 1410 nt, Artificial Sequence; identical to SEQ ID NO: 84279
  derived and/or modified CDS sequence (opt1) from neuraminidase__InfluenzaA__AFD98208

SEQ ID NO: 85819 - RNA, 1410 nt, Artificial Sequence
  derived and/or modified CDS sequence (opt1) from neuraminidase__InfluenzaA__AFD98218
augaaccccaaccagaagaucaucaccaucggcagcgugucccugaccaucagcacgaucugcuucuucaugcagaucgccauccucaucaccaccgucacccugcacuucaagcaguacgaguucaacuccccgcccaacaaccaggugaugcugugcgagcccacgaucaucgagcgcaacaucaccgagaucguguaccucaccaacaccacgaucgagaaggagaucugccccaagccggccgaguaccggaacuggagcaagccccagugcgacaucaccggguucgcgcccuucuccaaggacaacagcauccgccuguccgccggcggggacaucugggucacccgggagcccuacgugagcugcgacccggacaagugcuaccaguucgcccugggccaggggaccacgcucaacaacgugcacuccaacaacaccguccgcgaccggacccccuaccgcacccugcugaugaacgagcucggcgugcccuuccaccugggcacgaagcaggucugcaucgccuggagcuccagcuccugccacgacgggaaggccuggcugcacgugugcaucaccggcgacgacaagaacgcgaccgccagcuucaucuacaacgggcggcucguggacuccguggucagcugguccaaggagauccugcgcacccaggagagcgagugcgugugcaucaacggcacgugcaccguggucaugaccgacggguccgccagcggcaaggccgacaccaagauccuguucaucgaggagggcaagaucgugcacacgagcacccucuccgggagcgcgcagcacguggaggagugcuccugcuacccccgguacccgggcguccgcugcgugugccgggacaacuggaaggggagcaaccgccccaucguggacaucaacaucaaggaccacuccaucgucagcuccuacgugugcagcggccuggugggcgacaccccgcggaagaacgacuccagcuccagcucccacugccuggaccccaacaacgaggagggcgggcacggggucaagggcugggccuucgacgacgggaacgacguguggaugggccgcaccaucgacgagacgagccggcucggcuacgagaccuucaaggucaucgaggggugguccaaccccaagagcaagcugcagaucaaccgccaggugaucguggacaagggcaaccgguccggguacagcggcaucuucuccgucgagggcaagagcugcaucaaccgcugcuucuacguggagcugauccgggggcgcaaggaggagaccgaggugcucuggaccagcaacuccaucgucgugagcugcggcacguccgggaccuacggcaccgggagcuggcccgacggcgccgaccugaaccugaugcccaucuga

SEQ ID NO: 85820 - RNA, 1410 nt, Artificial Sequence; identical to SEQ ID NO: 83542
  derived and/or modified CDS sequence (opt1) from neuraminidase__InfluenzaA__AFD98229

SEQ ID NO: 85821 - RNA, 1410 nt, Artificial Sequence; identical to SEQ ID NO: 83542
  derived and/or modified CDS sequence (opt1) from neuraminidase__InfluenzaA__AFD98240

SEQ ID NO: 85822 - RNA, 1410 nt, Artificial Sequence; identical to SEQ ID NO: 85811
  derived and/or modified CDS sequence (opt1) from neuraminidase__InfluenzaA__AFD98251

SEQ ID NO: 85823 - RNA, 1410 nt, Artificial Sequence; identical to SEQ ID NO: 85811
  derived and/or modified CDS sequence (opt1) from neuraminidase__InfluenzaA__AFD98262

SEQ ID NO: 85824 - RNA, 1410 nt, Artificial Sequence; identical to SEQ ID NO: 84733
  derived and/or modified CDS sequence (opt1) from neuraminidase__InfluenzaA__AFD98273

SEQ ID NO: 85825 - RNA, 1410 nt, Artificial Sequence; identical to SEQ ID NO: 84281
  derived and/or modified CDS sequence (opt1) from neuraminidase__InfluenzaA__AFD98283

SEQ ID NO: 85826 - RNA, 1410 nt, Artificial Sequence; identical to SEQ ID NO: 83542
  derived and/or modified CDS sequence (opt1) from neuraminidase__InfluenzaA__AFD98293

SEQ ID NO: 85827 - RNA, 1410 nt, Artificial Sequence; identical to SEQ ID NO: 84733
  derived and/or modified CDS sequence (opt1) from neuraminidase__InfluenzaA__AFD98313

SEQ ID NO: 85828 - RNA, 1410 nt, Artificial Sequence; identical to SEQ ID NO: 84281
  derived and/or modified CDS sequence (opt1) from neuraminidase__InfluenzaA__AFD98323

SEQ ID NO: 85829 - RNA, 1410 nt, Artificial Sequence; identical to SEQ ID NO: 84733
  derived and/or modified CDS sequence (opt1) from neuraminidase__InfluenzaA__AFD98333

SEQ ID NO: 85830 - RNA, 1410 nt, Artificial Sequence; identical to SEQ ID NO: 85811
  derived and/or modified CDS sequence (opt1) from neuraminidase__InfluenzaA__AFD98343

SEQ ID NO: 85831 - RNA, 1410 nt, Artificial Sequence
  derived and/or modified CDS sequence (opt1) from neuraminidase__InfluenzaA__AFD98354
augaaccccaaccagaagaucaucaccaucggcagcgugucccugaccaucagcacgaucugcuucuucaugcagaucgccauccucaucaccaccgucacccugcacuucaagcaguacgaguucaacuccccgcccaacaaccaggugaugcugugcgagcccacgaucaucgagcgcaacaucaccgagaucguguaccucaccaacaccacgaucgagaaggagaucugccccaagcuggccgaguaccggaacuggagcaagccgcagugcgacaucaccggguucgcgcccuucuccaaggacaacagcauccgccuguccgccggcggggacaucugggucacccgggagcccuacgugagcugcgaccccgacaagugcuaccaguucgcccucggccaggggaccacgcugaacaacgugcacuccaacaacaccguccgcgaccggaccccguaccgcacccugcucaugaacgagcugggcgugcccuuccaccugggcacgaagcaggucugcaucgccuggagcuccagcuccugccacgacgggaaggccuggcuccacgugugcaucaccggcgacgacaagaacgcgaccgccagcuucaucuacaacgggcggcugguggacuccguggucagcugguccaaggagauccugcgcacccaggagagcgagugcgugugcaucaacggcacgugcaccguggucaugaccgacgggaacgccuccggcaaggccgacaccaagauccucuucaucgaggagggcaagaucgugcacacgagcacccugcuggggagcgcgcagcacguggaggagugcuccugcuacccccgguaccccggcguccgcugcgugugccgggacaacuggaaggggagcaaccgcccgaucguggacaucaacaucaaggaccacuccaucgucagcuccuacgugugcagcggccucgugggcgacacgccccggaagaacgacuccagcuccagcucccacugccuggaccccaacaacgaggagggcgggcacggggucaagggcugggccuucgacgacgggaacgacguguggaugggccgcaccaucaacgagaccagccggcugggcuacgagaccuucaaggucaucgaggggugguccaaccccaagagcaagcuccagaucaaccgccaggugaucguggacaagggcaaccgguccggguacagcggcaucuucuccgucgagggcaagagcugcaucaaccgcugcuucuacguggagcugauccgggggcgcaaggaggagaccgaggugcuguggaccuccaacagcaucgucguguucugcggcacgagcgggaccuacggcaccggguccuggccggacggcgccgaccucaaccugaugcccaucuga

SEQ ID NO: 85832 - RNA, 1410 nt, Artificial Sequence
  derived and/or modified CDS sequence (opt1) from neuraminidase__InfluenzaA__AFD98365
augaaccccaaccagaagaucaucaccaucggcagcgugucccugaccaucagcacgaucugcuucuucaugcagaucgccauccucaucaccaccgucacccugcacuucaagcaguacgaguucuacuccccgcccaacaaccaggugaugcugugcgagcccacgaucaucgagcgcaacaucaccgagaucguguaccucaccaacaccacgaucgagaaggagaucugccccaagcuggccgaguaccggaacuggagcaagccgcagugcgacaucaccggguucgcgcccuucuccaaggacaacagcauccgccuguccgccggcggggacaucugggucacccgggagcccuacgugagcugcgaccccgacaagugcuaccaguucgcccucggccaggggaccacgcugaacaacgugcacuccaacaacaccguccgcgaccggaccccguaccgcacccugcucaugaacgagcugggcgugcccuuccaccugggcacgaagcaggucugcaucgccuggagcuccagcuccugccacgacgggaaggccuggcuccacgugugcaucaccggcgacgacaagaacgcgaccgccagcuucaucuacaacgggcggcugguggacuccguggucagcugguccaaggagauccugcgcacccaggagagcgagugcgugugcaucaacggcacgugcaccguggucaugaccgacggguccgccagcggcaaggccgacaccaagauccucuucaucgaggagggcaagaucgugcacacgagcacccuguccgggagcgcgcagcacguggaggagugcuccugcuacccccgguaccccggcguccgcugcgugugccgggacaacuggaaggggagcaaccgcccgaucguggacaucaacaucaaggaccacuccaucgucagcuccuacgugugcagcggccuggugggcgacacgccccggaagaacgacuccagcuccagcucccacugccucgaccccaacaacgaggagggcgggcacggggucaagggcugggccuucgacgacgggaacgacguguggaugggccgcaccaucaacgagaccagccggcugggcuacgagaccuucaaggucaucgaggggugguccaaccccaagagcaagcugcagaucaaccgccaggugaucguggaccggggcaaccgcuccggguacagcggcaucuucuccgucgagggcaagagcugcaucaaccggugcuucuacguggagcucauccgcgggcggaaggaggagaccaaggugcuguggaccagcaacuccaucgucguguucugcggcacgagcgggaccuacggcaccggguccuggccggacggcgccgaccugaaccucaugcccaucuga

SEQ ID NO: 85833 - RNA, 1410 nt, Artificial Sequence
  derived and/or modified CDS sequence (opt1) from neuraminidase__InfluenzaA__AFD98376
augaaccccaaccagaagaucaucaccaucggcagcgugucccugaccaucagcacgaucugcuucuucaugcagaucgccauccucaucaccaccgucacccugcacuucaagcaguacgaguucaacuucccgcccaacaaccaggugaugcugugcgagcccacgaucaucgagcgcaacaucaccgagaucguguaccucaccaacaccacgaucgagaaggagaucugccccaagcuggccgaguaccggaacugguccaagccgcagugcgacaucaccggguucgcgcccuucagcaaggacaacuccauccgccugagcgccggcggggacaucugggucacccgggagcccuacguguccugcgaccccgacaagugcuaccaguucgcccucggccaggggaccacgcugaacaacgugcacagcaacaacaccguccgcgaccggaccccguaccgcacccugcucaugaacgagcugggcgugcccuuccaccugggcacgaagcaggucugcaucgccugguccagcuccagcugccacgacgggaaggccuggcuccacgugugcaucaccggcgacgacaagaacgcgaccgccuccuucaucuacaacgggcggcugguggacagcguggucuccuggagcaaggagauccugcgcacccaggaguccgagugcgugugcaucaacggcacgugcaccguggucaugaccgacgggagcgccuccggcaaggccgacaccaagauccucuucaucgaggagggcaagaucgugcacacgagcacccugagcggguccgcgcagcacguggaggagugcagcugcuacccccgguaccccggcguccgcugcgugugccgggacaacuggaagggguccaaccgcccgaucguggacaucaacaucaaggaccacagcaucgucuccagcuacgugugcuccggccuggugggcgacacgccccggaagaacgacagcuccagcuccgggcacugccucgaccccaacaacgaggagggcgggcacggcgucaaggggugggccuucgacgacggcaacgacguguggaugggccgcaccaucaacgagaccagccggcugggguacgagaccuucaaggucaucgagggcugguccaaccccaagagcaagcugcagaucaaccgccaggugaucguggacaaggggaaccgguccggcuacagcgggaucuucuccgucgagggcaagagcugcaucaaccgcugcuucuacguggagcucauccggggccgcaaggaggagaccgaggugcuguggaccuccaacagcaucgucguguucugcgggacgagcggcaccuacgggaccggcuccuggccggacggggccgaccugaaccucaugcccaucuga

SEQ ID NO: 85834 - RNA, 1410 nt, Artificial Sequence
  derived and/or modified CDS sequence (opt1) from neuraminidase__InfluenzaA__AFD98387
augaaccccaaccagaagaucaucaccaucggcagcgugucccugaccaucagcacgaucugcuuccucaugcagaucgccauccugaucaccaccgucacccugcacuucaagcaguacgaguucaacuccccgcccaacaaccaggugaugcucugcgagcccacgaucaucgagcgcaacaucaccgagaucguguaccugaccaacaccacgaucgagaaggagaucugccccaagcuggccgaguaccgggacuggagcaagccgcagugcgacaucaccggguucgcgcccuucuccaaggacaacagcauccgccucuccgccggcggggacaucugggucacccgggagcccuacgugagcugcgaccccgacaagugcuaccaguucgcccugggccaggggaccacgcugaacaacgugcacuccaacaacaccguccgcgaccggaccccguaccgcacccuccugaugaacgagcugggcgugcccuuccaccucggcacgaagcaggucugcaucgccuggagcuccagcuccugccacgacgggaaggccuggcugcacgugugcaucaccggcgacgacaagaacgcgaccgccagcuucaucuacaacgggaagcugguggacuccguggucagcugguccaaggagauccuccggacccaggagagcgagugcgugugcaucaacggcacgugcaccguggucaugaccgacggguccgccagcggcaaggccgacaccaagauccuguucaucgaggagggcaagaucgugcacacgagcacccuguccgggagcgcgcagcacguggaggagugcuccugcuacccccgcuaccccggcguccggugcgugugccgcgacaacuggaaggggagcaaccggccgaucguggacaucaacaucaaggaccacuccaucgucagcuccuacgugugcagcggccucgugggcgacacgccccgcaagaacgaccgguccagcaacucccacugccuggaccccaacaacgaggagggcgggcacggggucaagggcugggccuucgacgacgggaacgacguguggaugggccgcaccaucaacgagaccagccggcugggcuacgagaccuucaaggucaucgaggggugguccaaccccaagagcaagcuccagaucaaccgccaggugaucguggaccggggcaaccgcuccggguacagcggcaucuucuccgucgagggcaagagcugcaucaaccggugcuucuacguggagcugauccgcgggcggaaggaggagaccgaggugcuguggaccuccaacagcaucgucguguucugcggcacgagcgggaccuacggcaccggguccuggccggacggcgccgaccucaaccugaugcccaucuga

SEQ ID NO: 85835 - RNA, 1410 nt, Artificial Sequence
  derived and/or modified CDS sequence (opt1) from neuraminidase__InfluenzaA__AFD98398
augaaccccaaccagaagaucaucaccaucggcagcgugucccugaccaucagcacgaucugcuucuucaugcagaucgccauccucaucaccaccgucacccugcacuucaagcaguacgaguucaacuccccgcccaacaaccaggugaugcugugcgagcccacgaucaucgagcgcaacaucaccgagaucguguaccucaccaacaccacgaucgagaaggagaucugccccaagcuggccgaguaccggaacuggagcaagccgcagugcgacaucaccggguucgcgcccuucuccaaggacaacagcauccgccuguccgccggcggggacaucugggucacccgggagcccuacgugagcugcgaccccgacaagugcuaccaguucgcccucggccaggggaccacgcugaacaacgugcacuccaacaacaccguccgcgaccggaccccguaccgcacccugcucaugaacgagcugggcgugcccuuccaccugggcacgcgccaggugugcaucgccuggagcuccagcuccugccacgacgggaaggccuggcuccacgucugcaucaccggcgacgacaagaacgcgaccgccagcuucaucuacaacgggcggcugguggacuccguggucagcugguccaaggagauccugcggacccaggagagcgagugcgugugcaucaacggcacgugcaccguggucaugaccgacggguccgccagcggcaaggccgacaccaagauccucuucaucgaggagggcaagaucgugcacacgagcacccuguccgggagcgcgcagcacguggaggagugcuccugcuacccccgcuaccccggcguccggugcgugugccgcgacaacuggaaggggagcaaccggccgaucguggacaucaacaucaaggaccacuccaucgucagcuccuacgugugcagcggccuggugggcgacacgccccgcaagaacgacuccagcuccagcucccacugccucgaccccaacaacgaggagggcgggcacggggucaagggcugggccuucgacgacgggaacgacguguggaugggccggaccaucaacgagaccagccgccugggcuacgagaccuucaaggucaucgaggggugguccaaccccaagagcaagcugcagaucaaccgccaggugaucguggacaagggcaaccgguccggguacagcggcaucuucuccgucgagggcaagagcugcaucaaccggugcuucuacguggagcucauccgcgggcggaaggaggagaccgaggugcuguggaccagcaacuccaucgucguguucugcggcacgagcgggaccuacggcaccggguccuggccggacggcgccgaccugaaccucaugcccaucuga

SEQ ID NO: 85836 - RNA, 1410 nt, Artificial Sequence
  derived and/or modified CDS sequence (opt1) from neuraminidase__InfluenzaA__AFD98409
augaaccccaaccagaagaucaucaccaucggcagcgugucccugaccaucagcacgaucugcuucuucaugcagaucgccauccucaucaccaccgucacccugcacuucaagcaguacgaguucaacuccccgcccaacaaccaggugaugcugugcgagcccacgaucaucgagcgcaacaucaccgagaucguguaccucaccaacaccacgaucgagaaggagaucugccccaagcuggccgaguaccggaacuggagcaagccgcagugcgacaucaccggguucgcgcccuucuccaaggacaacagcauccgccuguccgccggcggggacaucugggucacccgggagcccuacgugagcugcgaccccgacaagugcuaccaguucgcccucggccaggggaccacgcugaacaacgugcacuccaacaacaccguccgcgaccggaccccguaccgcacccugcucaugaacgagcugggcgugcccuuccaccugggcacgaagcaggucugcaucgccuggagcuccagcuccugccacgacgggaaggccuggcuccacgugugcaucaccggcgacgacaagaacgcgaccgccagcuucaucuacaacgggcggcugguggacuccguggucagcugguccaaggagauccugcgcacccaggagagcgagugcgugugcaucaacggcacgugcaccguggucaugaccgacggguccgccagcggcaaggccgacaccaagauccucuucaucgaggagggcaagaucgugcacacgagcacccuguccgggagcgcgcagcacguggaggagugcuccugcuacccccgguaccccggcguccgcugcgugugccgggacaacuggaaggggagcaaccgcccgaucguggacaucaacaucaaggaccacuccaucgucagcuccuacgugugcagcggccuggugggcgacacgccccggaagaacgacuccagcuccagcgggcacugccucgaccccaacaacgaggagggcgggcacggcgucaaggggugggccuucgacgacggcaacgacguguggaugggccgcaccaucaacgagaccucccggcugggguacgagaccuucaaggucaucgagggcuggagcaaccccaaguccaagcugcagaucaaccgccaggugaucguggacaaggggaaccggagcggcuacuccgggaucuucagcgucgagggcaaguccugcaucaaccgcugcuucuacguggagcucauccggggccgcaaggaggagaccgaggugcuguggaccagcaacagcaucgucguguucugcgggacguccggcaccuacgggaccggcagcuggccggacggggccgaccugaaccucaugcccaucuga

SEQ ID NO: 85837 - RNA, 1410 nt, Artificial Sequence; identical to SEQ ID NO: 85811
  derived and/or modified CDS sequence (opt1) from neuraminidase__InfluenzaA__AFD98420

SEQ ID NO: 85838 - RNA, 1410 nt, Artificial Sequence
  derived and/or modified CDS sequence (opt1) from neuraminidase__InfluenzaA__AFD98431
augaaccccaaccagaagaucaucaccaucggcagcgugucccugaccaucagcacgaucugcuucuucaugcagaucgccauccucaucaccaccgucacccugcacuucaagcaguacgaguucaacuccccgcccaacaaccaggugaugcugugcgagcccacgaucaucgagcgcaacaucaccgagaucguguaccucaccaacaccacgaucgagaaggagaucugccccaagcuggccgaguaccggaacuggagcaagccgcagugcgacaucaccggguucgcgcccuucuccaaggacaacagcauccgccuguccgccggcggggacaucugggucacccgggagcccuacgugagcugcgaccccgacaagugcuaccaguucgcccucggccaggggaccacgcugaacaacgugcacuccaacaacaccguccgcgaccggaccccguaccgcacccugcucaugaacgagcugggcgugcccuuccaccugggcacgaagcaggucugcaucgccuggagcuccagcuccugccacgacgggaaggccuggcuccacgugugcaucaccggcgacgacaagaacgcgaccgccagcuucaucuacaacgggcggcugguggacuccguggucagcugguccaaggagauccugcgcacccaggagagcgagugcgugugcaucaacggcacgugcaccguggucaugaccgacggguccgccagcggcaaggccgacaccaagauccucuucaucgaggagggcaagaucgugcacacgagcacccuguccgggagcgcgcagcacguggaggagugcuccugcuacccccgguaccccggcguccgcugcgugugccgggacaacuggaaggggagcaaccgcccgaucguggacaucaacaucaaggaccacuccaucgucagcuccuacgugugcagcggccuggugggcgacacgccccggaagaacgacuccagcuccagcucccacugccucgaccccaacaacgaggagggcgggcacggggucaagggcugggccuucgacgacgggaacgacguguggaugggccgcaccaucaacgagaccagccggcugggcuacgagaccuucaaggucaucgaggggugguccaaccccaagagcaagcugcagaucaaccgccaggugaucgugggccgggggaaccgcuccggcuacagcgggaucuucuccgucgagggcaagagcugcaucaaccggugcuucuacguggagcucauccgcggccggaaggaggagaccgaggugcuguggaccagcaacuccaucgucguguucugcgggacgagcggcaccuacgggaccggcuccuggccggacggggccgaccugaaccucaugcccaucuga

SEQ ID NO: 85839 - RNA, 1410 nt, Artificial Sequence
  derived and/or modified CDS sequence (opt1) from neuraminidase__InfluenzaA__AFD98442
augaaccccaaccagaagaucaucaccaucggcagcgugugcaugaccaucgggauggccaaccugauccuccagaucggcaacaucaucuccaucuggaucagccacuccauccagcuggggaaccagaaccagaucgagacgugcaaccagagcgucaucaccuacgagaacaacaccugggugaaccagaccuacgugaacaucuccaacacgaacuucgccgcgggccagagcgucguguccgugaagcuggccgggaacagcucccucugcccggucagcggcugggccaucuacuccaaggacaacagcauccgcaucggcuccaagggggacguguucgugauccgggagcccuucaucagcugcagcccccuggagugccgcaccuucuuccugacccagggcgcccuccugaacgacaagcacuccaacgggaccaucaaggaccggucccccuaccgcacgcugaugagcugcccgaucggcgagguccccucccccuacaacagccgguucgagagcguggccugguccgcgagcgccugccacgacgggaucaacuggcucaccaucggcaucuccggccccgacaacggggccguggccguccugaaguacaacggcaucaucaccgacaccaucaagagcuggcgcaacaacauccugcggacgcaggaguccgagugcgcgugcgugaacgggagcugcuucaccaucaugaccgacggcccguccgacggccaggccagcuacaagaucuuccgcaucgagaaggggaagaucgugaaguccgucgagaugaacgcccccaacuaccacuacgaggagugcagcugcuaccccgacuccggcgagaucacgugcgugugccgggacaacuggcacgggagcaaccgccccuggguguccuucaaccagaaccucgaguaccagaucggcuacaucugcagcgggaucuucggcgacaacccgcggcccaacgacaagaccggcuccugcgggcccgucagcuccaacggcgccaacggggugaagggcuucagcuucaaguacgggaacggcguguggaucggccgcaccaaguccaucagcagccggaagggguucgagaugaucugggaccccaacggcuggaccgggaccgacaacaacuucgccaucaagcaggacaucgucggcaucaacgagugguccggguacagcggcuccuucgugcagcacccggagcugacgggccuggacugcauccgccccugcuucuggguggagcucauccgggggcgccccaaggagaacaccaucuggaccagcggcuccagcaucuccuucugcggggucaacagcgacaccgugggcugguccuggcccgacggcgcggagcugccguucacgaucgacaaguga

SEQ ID NO: 85840 - RNA, 1410 nt, Artificial Sequence
  derived and/or modified CDS sequence (opt1) from neuraminidase__InfluenzaA__AFD98452
augaaccccaaccagaagaucaucacccugggcagcgugucccucaccaucagcacgaucugcuucuucauccagaucgccauccugaucaccaccgucacccugcacuucaagcaguacgaguucaacuccccgcccaacaaccaggugaugcucugcgagcccacgaucaucgagcgcaacaucaccgagaucguguaccugaccaacaccacgaucgagaaggagaucugccccaagcuggccgaguaccggaacuggagcaagccgcagugcgacaucaccggguucgcgcccuucuccaaggacaacagcauccgccucuccgccggcggggacaucugggucacccgggagcccuacgugagcugcgaccccgacaagugcuaccaguucgcccugggccaggggaccacgcugaacaacgugcacuccaacaacaccguccgcgaccggaccccguaccgcacccuccugaugaacgagcugggcgugcccuuccaccucggcacgaagcaggucugcaucgccuggagcuccagcuccugccacgacgggaaggccuggcugcacgugugcaucaccggcgacgacaagaacgcgaccgccagcuucaucuacaacgggcggcugguggacuccguggucagcugguccaaggagauccuccgcacccaggagagcgagugcgugugcaucaacggcacgugcaccguggucaugaccgacggguccgccagcggcaaggccgacaccaagauccuguucaucgaggagggcaagaucgugcacacgagcacccuguccgggagcgcgcagcacguggaggagugcuccugcuacccccgguaccccggcguccgcugcgugugccgggacaacuggaaggggagcaaccgcccgaucguggacaucaacaucaaggaccacuccaucgucagcuccuacgugugcagcggccucgugggcgacacgccccggaagaacgacuccagcuccagcucccacugccuggaccccaacaacgaggagggcgggcacggggucaagggcugggccuucgacgacgggaacgacguguggaugggccgcaccaucaacgagaccagccggcugggcuacgagaccuucaaggucaucgaggggugguccaaccccaagagcaagcuccagaucaaccgccaggugaucguggaccggggcaaccgcuccggguacagcggcaucuucuccgucgagggcaagagcugcaucaaccggugcuucuacguggagcugauccgcgggcggaaggaggagaccgaggugcuguggaccagcaacuccaucgucguguucugcggcacgagcgggaccuacggcaccggguccuggccggacggcgccgaccucaaccugaugcccaucuga

SEQ ID NO: 85841 - RNA, 1410 nt, Artificial Sequence; identical to SEQ ID NO: 85811
  derived and/or modified CDS sequence (opt1) from neuraminidase__InfluenzaA__AFD98463

SEQ ID NO: 85842 - RNA, 1410 nt, Artificial Sequence
  derived and/or modified CDS sequence (opt1) from neuraminidase__InfluenzaA__AFD98474
augaaccccaaccagaagaucaucaccaucggcagcgugugcaugaccaucgggauggccaaccugauccuccagaucggcaacaucaucuccaucuggaucagccacuccauccagcuggggaaccagaaccagaucgagacgugcaaccagagcgucaucaccuacgagaacaacaccugggugaaccagaccuacgugaacaucuccaacacgaacuucgccgcgggccagagcgucguguccgugaagcuggccgggaacagcucccucugcccggucagcggcugggccaucuacuccaaggacaacagcauccgcaucggcuccaagggggacguguucgugauccgggagcccuucaucagcugcagcccccuggagugccgcaccuucuuccugacccagggcgcccuccugaacgacaagcacuccaacgggaccaucaaggaccggucccccuaccgcacgcugaugagcugcccgaucggcgagguccccucccccuacaacagccgguucgagagcguggccugguccgcgagcgccugccacgacgggaucaacuggcucaccaucggcaucuccggccccgacaacggggccguggccguccugaaguacaacggcaucaucaccgacaccaucaagagcuggcgcaacaacauccugcggacgcaggaguccgagugcgcgugcgugaacgggagcugcuucaccaucaugaccgacggcccguccgacggccaggccagcuacaagaucuuccgcaucgagaaggggaagaucgugaaguccgucgagaugaacgcccccaacuaccacuacgaggagugcagcugcuaccccgacuccagcgagaucacgugcgugugccgggacaacuggcacggcuccaaccgccccugggugagcuucaaccagaaccucgaguaccagaucggguacaucugcuccggcaucuucggggacaacccgcggcccaacgacaagaccggcagcugcggccccgucuccagcaacggggccaacggcgugaagggguucuccuucaaguacggcaacgggguguggaucggccgcaccaagagcaucagcucccggaagggcuucgagaugaucugggaccccaacggguggaccggcaccgacaacaacuucagcaucaagcaggacaucaucgggaucaacgagugguccggcuacagcggguccuucguccagcacccggagcugacgggccuggacugcauccgccccugcuucuggguggagcucauccggggccgccccaaggagaacaccaucuggaccagcggguccagcaucuccuucugcggcgugaacagcgacaccgucgggugguccuggcccgacggcgccgagcugccguucacgaucgacaaguga

SEQ ID NO: 85843 - RNA, 1410 nt, Artificial Sequence
  derived and/or modified CDS sequence (opt1) from neuraminidase__InfluenzaA__AFD98484
augaaccccaaccagaagaucaucaccaucggcagcgugucccugaccaucagcacgaucugcuucuucaugcagaucgccauccucaucaccaccgucacccugcacuucaagcaguacgaguucaacuccccgcccaacaaccaggugaugcugugcgagcccacgaucaucgagcgcaacaucaccgagaucguguaccucaccaacaccacgaucgagaaggagaucugccccaagcuggccgaguaccggaacuggagcaagccgcagugcgacaucaccggguucgcgcccuucuccaaggacaacagcauccgccuguccgccggcggggacaucugggucacccgggagcccuacgugagcugcgaccccgacaagugcuaccaguucgcccucggccaggggaccacgcugaacaacgugcacuccaacaacaccguccgcgaccggaccccguaccgcacccugcucaugaacgagcugggcgugcccuuccaccugggcacgaagcaggucugcaucgccuggagcuccagcuccugccacgacgggaaggccuggcuccacgugugcaucaccggcgacgacaagaacgcgaccgccagcuucaucuacaacgggcggcugguggacuccguggucagcugguccaaggagauccugcgcacccaggagagcgagugcgugugcaucaacggcacgugcaccguggucaugaccgacggguccgccagcggcaaggccgacaccaagauccucuucaucgaggagggcaagaucgugcacacgagcacccuguccgggagcgcgcagcacguggaggagugcuccugcuacccccgguaccccggcguccgcugcgugugccgggacaacuggaaggggagcaaccgcccgaucguggacaucaacaucaaggaccacuccaucgucagcuccuacgugugcagcggccuggugggcgacacgccccggaagaacgacuccagcuccagcucccacugccucgaccccaacaacgaggagggcgggcacggggucaagggcugggccuucgacgacgggaacgacguguggaugggccgcaccaucaacgagaccagccggcugggcuacgagaccuucaaggucaucgaggggugguccaaccccaagagcaagcugcagaugaaccgccaggugaucguggaccggggcaaccgcuccggguacagcggcaucuucuccgucgagggcaagagcugcaucaaccggugcuucuacguggagcucauccgcgggcggaaggaggagaccgaggugcuguggaccagcaacuccaucgucguguucugcggcacgagcgggaccuacggcaccggguccuggccggacggcgccgaccugaaccucaugcccaucuga

SEQ ID NO: 85844 - RNA, 1410 nt, Artificial Sequence
  derived and/or modified CDS sequence (opt1) from neuraminidase__InfluenzaA__AFD98495
augaaccccaaccagaagaucaucaccaucggcagcgugucccugaccaucagcacgaucugcuucuucaugcagaucgccauccucaucaccaccgucacccugcacuucaagcaguacgaguucaacuccccgcccaacaaccaggugaugcugugcgagcccacgaucaucgagcgcaacaucaccgagaucguguaccucaccaacaccacgaucgagaaggagaucugccccaagcuggccgaguaccggaacuggagcaagccgcagugcgacaucaccggguucgcgcccuucuccaaggacaacagcauccgccuguccgccggcggggacaucugggucacccgggagcccuacgugagcugcgaccccgacaagugcuaccaguucgcccucggccaggggaccacgcugaacaacgugcacuccaacaacaccguccgcgaccggaccccguaccgcacccugcucaugaacgagcugggcgugcccuuccaccugggcacgaagcaggucugcaucgccuggagcuccagcuccugccacgacgggaaggccuggcuccacgugugcaucaccggcgacgacaagaacgcgaccgccagcuucaucuacaacgggaagcugguggacuccguggucagcugguccaaggagauccugcggacccaggagagcgagugcgugugcaucaacggcacgugcaccguggucaugaccgacggguccgccagcggcaaggccaacaccaagauccucuucaucgaggagggcaagaucgugcacacgagcacccuguccgggagcgcgcagcacguggaggagugcuccugcuacccccgcuaccccggcguccggugcgugugccgcgacaacuggaaggggagcaaccggccgaucguggacaucaacaucaaggaccacuccaucgucagcuccuacgugugcagcggccuggugggcgacacgccccgcaagaacgacuccagcuccagcucccacugccucgaccccaacaacgaggagggcgggcacggggucaagggcugggccuucgacgacgggaacgacguguggaugggccggaccaucaacgagaccagccgccugggcuacgagaccuucaaggucaucgaggggugguccaaccccaagagcaagcugcagaucaaccgccaggugaucguggaccggggcaaccgguccggguacagcggcaucuucuccgucgagggcaagagcugcaucaaccgcugcuucuacguggagcucauccgggggcgcaaggaggagaccgaggugcuguggaccagcaacuccaucgucguguucugcggcacgagcgggaccuacggcaccggguccuggccggacggcgccgaccugaaccucaugcccaucuga

SEQ ID NO: 85845 - RNA, 1410 nt, Artificial Sequence; identical to SEQ ID NO: 85811
  derived and/or modified CDS sequence (opt1) from neuraminidase__InfluenzaA__AFD98506

SEQ ID NO: 85846 - RNA, 1410 nt, Artificial Sequence
  derived and/or modified CDS sequence (opt1) from neuraminidase__InfluenzaA__AFD98517
augaaccccaaccagaagaucaucaccaucggcagcgugucccugaccaucagcacgaucugcuucuucaugcagaucgccauccucaucaccaccgucacccugcacuucaagcaguacgaguucaacuccccgcccaacaaccaggugaugcugugcgagcccacgaucaucgagcgcaacaucaccgagaucguguaccucaccaacaccacgaucgagaaggagaucugccccaagcuggccgaguaccggaacuggagcaagccgcagugcgacaucaccggguucgcgcccuucuccaaggacaacagcauccgccuguccgccggcggggacaucugggucacccgggagcccuacgugagcugcgaccccgacaagugcuaccaguucgcccucggccaggggaccacgcugaacaacgugcacuccaacaacaccguccgcgaccggaccccguaccgcacccugcucaugaacgagcugggcgugcccuuccaccugggcacgaagcaggucugcaucgccuggagcuccagcuccugccacgacgggaaggccuggcuccacgugugcaucaccggcgacgacaagaacgcgaccgccagcuucaucuacaacgggaagcugguggacuccguggucagcugguccaaggagauccugcggacccaggagagcgagugcgugugcaucaacggcacgugcaccguggucaugaccgacggguccgccagcggcaaggccgacaccaagauccucuucaucaaggagggcaagaucgugcacacgagcacccuguccgggagcgcgcagcacguggaggagugcuccugcuacccccgcuaccccggcguccggugcgugugccgcgacaacuggaaggggagcaaccggccgaucguggacaucaacaucaaggaccacuccaucgucagcuccuacgugugcagcggccuggugggcgacacgccccgcaagaacgacuccagcuccagcucccacugccucgaccccaacaacgaggagggcgggcacggggucaagggcugggccuucgacgacgggaacgacguguggaugggccggaccaucaacgagaccagccgccugggcuacgagaccuucaaggucaucgaggggugguccaaccccaagagcaagcugcagaucaaccgccaggugaucguggaccggggcaaccgguccggguacagcggcaucuucuccgucgagggcaagagcugcaucaaccgcugcuucuacguggagcucauccgggggcgcaaggaggagaccgaggugcuguggaccagcaacuccaucgucguguucugcggcacgagcgggaccuacggcaccggguccuggccggacggcgccgaccugaaccucaugcccaucuga

SEQ ID NO: 85847 - RNA, 1410 nt, Artificial Sequence; identical to SEQ ID NO: 83542
  derived and/or modified CDS sequence (opt1) from neuraminidase__InfluenzaA__AFD98528

SEQ ID NO: 85848 - RNA, 1410 nt, Artificial Sequence; identical to SEQ ID NO: 85811
  derived and/or modified CDS sequence (opt1) from neuraminidase__InfluenzaA__AFD98539

SEQ ID NO: 85849 - RNA, 1410 nt, Artificial Sequence; identical to SEQ ID NO: 85811
  derived and/or modified CDS sequence (opt1) from neuraminidase__InfluenzaA__AFD98550

SEQ ID NO: 85850 - RNA, 1410 nt, Artificial Sequence
  derived and/or modified CDS sequence (opt1) from neuraminidase__InfluenzaA__AFD98561
augaaccccaaccagaagaucaucaccaucggcagcgugucccugaccaucagcacgaucugcuucuucaugcagaucgccauccucaucaccaccgucacccugcacuucaagcaguacgaguucaacuccccgcccaacaaccaggugaugcugugcgagcccacgaucaucgagcgcaacaucaccgagaucguguaccucaccaacaccacgaucgagaaggagaucugccccaagcuggccgaguaccggaacuggagcaagccgcagugcgacaucaccggguucgcgcccuucuccaaggacaacagcauccgccuguccgccggcggggacaucugggucacccgggagcccuacgugagcugcgaccccgacaagugcuaccaguucgcccucggccaggggaccacgcugaacaacgugcacuccaacaacaccguccgcgaccggaccccguaccgcacccugcucaugaacgagcugggcgugcccuuccaccugggcacgaagcaggucugcaucgccuggagcuccagcuccugccacgacgggaaggccuggcuccacgugugcaucaccggcgacgacaagaacgcgaccgccagcuucaucuacaacgggcggcugguggacuccguggucagcugguccaaggagauccugcgcacccaggagagcgagugcgugugcaucaacggcacgugcgccguggucaugaccgacggguccgccagcggcaaggcggacaccaagauccucuucaucgaggagggcaagaucgugcacaccagcacgcuguccgggagcgcccagcacguggaggagugcuccugcuacccccgguaccccggcguccgcugcgugugccgggacaacuggaaggggagcaaccgcccgaucguggacaucaacaucaaggaccacuccaucgucagcuccuacgugugcagcggccuggugggcgacacgccccggaaguccgacagcuccagcuccagccacugccucgaccccaacaacgaggagggcgggcacggggucaagggcugggccuucgacgacgggaacgacguguggaugggccgcaccaucaacgagaccucccggcugggcuacgagaccuucaaggucaucgagggguggagcaaccccaaguccaagcugcagaucaaccgccaggugaucguggaccggggcaaccgcagcggguacuccggcaucuucagcgucgagggcaagagcugcaucaaccggugcuucuacguggagcucauccgcgggcggaaggaggagaccgaggugcuguggaccuccaacagcaucgucguguucugcggcaccuccgggacguacggcaccgggagcuggccggacggcgccgaccugaaccucaugcccaucuga

SEQ ID NO: 85851 - RNA, 1410 nt, Artificial Sequence
  derived and/or modified CDS sequence (opt1) from neuraminidase__InfluenzaA__AFD98572
augaaccccaaccagaagaucaucaccaucggcagcgugucccugaccaucagcacgaucugcuucuucaugcagaucgccauccucaucaccaccgucacccugcacuucaagcaguacgaguucaacuccccgcccaacaaccaggugaugcugugcgagcccacgaucaucgagcgcaacaucaccgagaucguguaccucaccaacaccacgcuggagaaggagaucugccccaagcuggccgaguaccggaacuggagcaagccgcagugcgacaucaccggguucgcgcccuucuccaaggacaacagcauccgccucuccgccggcggggacaucugggucacccgggagcccuacgugagcugcgaccccgacaagugcuaccaguucgcccugggccaggggaccacgcugaacaacgugcacuccaacaacaccguccgcgaccggaccccguaccgcacccuccugaugaacgagcugggcgugcccuuccaccucggcacgaagcaggucugcaucgccuggagcuccagcuccugccacgacgggaaggccuggcugcacgugugcaucaccggcgacgacaagaacgcgaccgccagcuucaucuacaacgggcggcugguggacuccguggucagcugguccaaggagauccuccgcacccaggagagcgagugcgugugcaucaacggcacgugcaccguggucaugaccgacggguccgccagcggcaaggccgacaccaagauccuguucaucgaggagggcaagaucgugcacacgagcacccuguccgggagcgcgcagcacguggaggagugcuccugcuacccccgguaccccggcguccgcugcgugugccgggacaacuggaaggggagcaaccgcccgaucguggacaucaacaucaaggaccacuccaucgucagcuccuacgugugcagcggccucgugggcgacacgccccggaagaacgacuccagcuccagcucccacugccuggaccccaacaacgaggagggcgggcacggggucaagggcugggccuucgacgacgggaacgacguguggaugggccgcaccaucaacgagaccagccggcugggcuacgagaccuucaaggucaucgaggggugguccaaccccaagagcaagcuccagaucaaccgccaggugaucguggaccggggcaaccgcuccggguacagcggcaucuucuccgucgagggcaagagcugcaucaaccggugcuucuacguggagcugauccgcgggcggaaggaggagaccgaggugcuguggaccagcaacuccaucgucguguucugcggcacgagcgggaccuacggcaccggguccuggccggacggcgccgaccucaaccugaugcccaucuga

SEQ ID NO: 85852 - RNA, 1410 nt, Artificial Sequence
  derived and/or modified CDS sequence (opt1) from neuraminidase__InfluenzaA__AFD98583
augaaccccaaccagaagaucaucaccaucggcagcgugucccugaccaucagcacgaucugcuucuucaugcagaucgccauccucaucaccaccgucacccugcacuucaagcaguacgaguucaacuccccgcccaacaaccaggugaugcugugcgagcccacgaucaucgagcgcaacaucaccgagaucguguaccucaccaacaccacgaucgagaaggagaucugccccaagcuggccgaguaccggaacuggagcaagccgcagugcgacaucaccggguucgcgcccuucucccgcgacaacagcauccggcuguccgccggcggggacaucugggucacccgcgagcccuacgugagcugcgaccccgacaagugcuaccaguucgcccucggccaggggaccacgcugaacaacgugcacuccaacaacaccguccgggaccgcaccccguaccggacccugcucaugaacgagcugggcgugcccuuccaccugggcacgaagcaggucugcaucgccuggagcuccagcuccugccacgacgggaaggccuggcuccacgugugcaucaccggcgacgacaagaacgcgaccgccagcuucaucuacaacgggcgccugguggacuccguggucagcugguccaaggagauccugcggacccaggagagcgagugcgugugcaucaacggcacgugcaccguggucaugaccgacggguccgccagcggcaaggccgacaccaagauccucuucaucgaggagggcaagaucgugcacacgagcacccuguccgggagcgcgcagcacguggaggagugcuccugcuacccccgcuaccccggcguccggugcgugugccgcgacaacuggaaggggagcaaccggccgaucguggacaucaacaucaaggaccacuccaucgucagcuccuacgugugcagcggccuggugggcgacacgccccgcaaguccgacagcuccagcuccagccacugccucgaccccaacaacgaggagggcgggcacggggucaagggcugggccuucgacgacgggaacgacguguggaugggccggaccaucaacgagaccucccgccugggcuacgagaccuucaaggucaucgagggguggagcaaccccaaguccaagcugcagaucaaccgccaggugaucguggaccggggcaaccggagcggguacuccggcaucuucagcgucgagggcaagagcugcaucaaccgcugcuucuacguggagcucauccgggggcgcaaggaggagaccgaggugcuguggaccuccaacagcaucgucguguucugcggcacguccgggaccuacggcaccgggagcuggccggacggcgccgaccugaaccucaugcccaucuga

SEQ ID NO: 85853 - RNA, 1410 nt, Artificial Sequence
  derived and/or modified CDS sequence (opt1) from neuraminidase__InfluenzaA__AFE02944
augaaccccaaccagaagaucaucaccaucggcagcgugugcaugaccaucgggauggccaaccugauccuccagaucggcaacaucaucuccaucuggaucagccacuccauccagcuggggaaccagaaccagaucgagacgugcaaccagagcgucaucaccuacgagaacaacaccugggugaaccagaccuacgugaacaucuccaacacgaacuucgccgcgggccagagcgucguguccgugaagcuggccgggaacagcucccucugcccggucagcggcugggccaucuacuccaaggacaacagcauccgcaucggcuccaagggggacguguucgugauccgggagcccuucaucagcugcagcccccuggagugccgcaccuucuuccugacccagggcgcccuccugaacgacaagcacuccaacgggaccaucaaggaccggucccccuaccgcacgcugaugagcugcccgaucggcgagguccccucccccuacaacagccgguucgagagcguggccugguccgcgagcgccugccacgacgggaucaacuggcucaccaucggcaucuccggccccgacaacggggccguggccguccugaaguacaacggcaucaucaccgacaccaucaagagcuggcgcaacaacauccugcggacgcaggaguccgagugcgcgugcgugaacgggagcugcuucaccgugaugaccgacggcccguccgacggccaggccagcuacaagaucuuccgcaucgagaaggggaagaucgucaaguccguggagaugaacgcccccaacuaccacuacgaggagugcagcugcuaccccgacuccagcgagaucacgugcgugugccgggacaacuggcacggcuccaaccgccccugggucagcuucaaccagaaccucgaguaccagaucggguacaucugcuccggcaucuucggggacaacccgcggcccaacgacaagaccggcagcugcggccccguguccagcaacggggccaacggcgugaagggguucuccuucaaguacggcaacggggucuggaucggccgcaccaagagcaucagcucccggaacggcuucgagaugaucugggaccccaacggguggaccggcaccgacaacaacuucagcaucaagcaggacaucguggggaucaacgagugguccggcuacagcggguccuucgugcagcacccggagcugacgggccugaacugcauccgccccugcuucugggucgagcucauccggggccgccccaaggagaacaccguguggaccagcggguccagcaucuccuucugcggcgucaacagcgacaccguggggugguccuggcccgacggcgccgagcugccguucacgaucgacaaguga

SEQ ID NO: 85854 - RNA, 1410 nt, Artificial Sequence
  derived and/or modified CDS sequence (opt1) from neuraminidase__InfluenzaA__AFE47627
augaaccccaaccagaagaucaucaccaucggcagcgugucccugaccaucgccacgaucugcuuccucaugcagaucgccauccuggucaccaccgugacccugcacuucaagcaguacgagugcaacagcccgcccaacaaccaggugaugcucugcgagcccacgaucaucgagcgcaacaucaccgagaucgucuaccugaccaacaccacgaucgagaaggagaucugccccaagcuggcggaguaccggaacugguccaagccgcagugcaacaucaccggguucgcccccuucagcaaggacaacuccauccgccucagcgccggcggggacaucugggugacccgggagcccuacguguccugcgaccccgacaagugcuaccaguucgcccugggccaggggaccacgcugaacaacggccacagcaacgacaccguccacgaccgcaccccguaccggacccuccugaugaacgagcugggcgugcccuuccaccucgggacgaagcaggucugcaucgccugguccagcuccagcugccacgacggcaaggcguggcugcacgugugcgugaccggggacgacgagaacgccaccgccuccuucaucuacaacggccgccugguggacagcaucggguccuggagcaagaagauccuccggacccaggaguccgagugcgucugcaucaacggcacgugcaccguggugaugaccgacggcagcgccuccgggaaggcggacaccaagauccuguucaucgaggagggcaagaucguccacacgagcagccuguccgggagcgcccagcacguggaggagugcuccugcuacccccgcuaccccggcgugcggugcgucugccgcgacaacuggaagggcagcaaccggccgaucguggacaucaacgugaaggacuacuccaucgucagcuccuacgugugcagcgggcucgugggcgacacgccccgcaagaacgacuccagcuccagcucccacugccuggaccccaacaacgaggagggcgggcacggggucaagggcugggccuucgacgacggcaacgacguguggauggggcggaccaucagcgagaagcugcgcuccggcuacgagaccuucaaggucaucgagggguggagcaagcccaacuccaagcuccagaccaaccgccaggugaucguggaccggggcaaccggagcggguacuccggcaucuucagcgucgagagcaaguccugcaucaaccgcugcuucuacguggagcugauccggggccgcaagcaggagaccgaggugcuguggaccagcaacuccaucgucguguucugcgggaccagcggcacguacgggaccggcuccuggccggacggggccgacaucaaccucaugcccaucuga

SEQ ID NO: 85855 - RNA, 1410 nt, Artificial Sequence; identical to SEQ ID NO: 85167
  derived and/or modified CDS sequence (opt1) from neuraminidase__InfluenzaA__AFF18509

SEQ ID NO: 85856 - RNA, 1410 nt, Artificial Sequence
  derived and/or modified CDS sequence (opt1) from neuraminidase__InfluenzaA__AFF57129
augaaccccaaccagaagaucaucaccaucggcagcgugugcaugaccaucgggauggccaaccugauccuccagaucggcaacaucaucuccaucuggaucagccacuccauccagcuggggaaccagaaccagaucgagacgugcaaccagagcgucaucaccuacgagaacaacaccugggugaaccagaccuacgugaacaucuccaacacgaacuucgccgcgggccagagcgucguguccgugaagcuggccgggaacagcucccucugcccggucagcggcugggccaucuacuccaaggacaacagcauccgcaucggcuccaagggggacguguucgugauccgggagcccuucaucagcugcagcccccuggagugccgcaccuucuuccugacccagggcgcccuccugaacgacaagcacuccaacgggaccaucaaggaccggucccccuaccgcacgcugaugagcugcccgaucggcgagguccccucccccuacaacagccgguucgagagcguggccugguccgcgagcgccugccacgacgggaucaacuggcucaccaucggcaucuccggccccgacaacggggccguggccguccugaaguacaacggcaucaucaccgacaccaucaagagcuggcgcaacaacauccugcggacgcaggaguccgagugcgcgugcgugaacgggagcugcuucaccaucaugaccgacggcccguccgacggccaggccagcuacaagaucuuccgcaucgagaaggggaagaucgugaaguccgucgagaugaacgcccccaacuaccacuacgaggagugcagcugcuaccccgacuccagcgagaucacgugcgugugccgggacaacuggcacggcuccaaccgccccugggugagcuucaaccagaaccucgaguaccagaucggguacaucugcuccggcaucuucggggacaacccgcggcccaacgacaagaccggcagcugcggccccgucuccagcaacggggccaacggcgugaagggguucuccuucaaguacggcaacgggguguggaucggccgcaccaagagcaucagcucccggaagggcuucgagaugaucugggaccccaacggguggaacggcaccgacaacaacuucagcaucaagcaggacaucgucgggaucaacgagugguccggcuacagcggguccuucgugcagcacccggagcugaccggccuggacugcauccgccccugcuucuggguggagcucauccggggccgccccaaggagaacacgaucuggaccagcggguccagcaucuccuucugcggcgucaacagcgacaccguggggugguccuggcccgacggcgccgagcugccguucaccaucgacaaguga

SEQ ID NO: 85857 - RNA, 1410 nt, Artificial Sequence
  derived and/or modified CDS sequence (opt1) from neuraminidase__InfluenzaA__AFF57133
augaaccccaaccagaagaucaucaccaucggcagcgugugcaugaccaucgggauggccaaccugauccuccagaucggcaacaucaucuccaucuggaucagccacuccauccagcuggggaaccagagccagaucgagacgugcaaccaguccgucaucaccuacgagaacaacaccuggcugaaccagaccuacgugaacaucagcaacacgaacuucgccgcgggccaguccguggucagcgugaagcucgccgggaacuccagccugugcccgguguccggcugggccaucuacagcaaggacaacuccauccgcaucggcagcaagggggacgucuucgugauccgggagcccuucaucuccugcagccccuccgagugccgcaccuucuuccugacccagggcgcccuccugaacgacaagcacagcaacgggaccaucaaggaccggucccccuaccgcacgcugaugagcugcccgaucggcgaggugcccagccccuacaacucccgguucgagagcgucgccugguccgcgagcgccugccacgacgggaucaacuggcucaccaucggcaucuccggccccgacaacggggccguggccgugcugaaguacaacggcaucaucaccgacaccaucaagagcuggcgcaacaacauccugcggacgcaggaguccgagugcgcgugcgucaacgggagcugcuucaccaucaugaccgacggcccguccgacggccaggccagcuacaagaucuuccgcaucgagaaggggaagaucgugaaguccguggagaugaacgcccccaacuaccacuacgaggagugcagcugcuaccccgacuccagcgagaucacgugcgucugccgggacaacuggcacggcuccaaccgccccugggugagcuucaaccagaaccucgaguaccagaucggguacaucugcuccggcaucuucggggacaacccgcggcccaacgacaagaccggcagcugcggccccguguccagcaacggggccaacggcgucaagggguucagcuucaaguacggcaacgggguguggaucggccgcaccaaguccaucagcucccggaagggcuucgagaugaucugggaccccaacggguggaccggcaccgacaacaacuucagcaucaagcaggacaucguggggaucaacgagugguccggcuacagcggguccuucguccagcacccggagcugacgggccuggacugcauccgccccugcuucuggguggagcucauccggggccgccccaaggagaacaccaucuggaccagcggguccagcaucuccuucugcggcgugaacagcgacaccgucgggugguccuggcccgacggcgccgagcugccguucacgaucgacaaguga

SEQ ID NO: 85858 - RNA, 1410 nt, Artificial Sequence; identical to SEQ ID NO: 80917
  derived and/or modified CDS sequence (opt1) from neuraminidase__InfluenzaA__AFF57137

SEQ ID NO: 85859 - RNA, 1410 nt, Artificial Sequence; identical to SEQ ID NO: 80917
  derived and/or modified CDS sequence (opt1) from neuraminidase__InfluenzaA__AFF57141

SEQ ID NO: 85860 - RNA, 1410 nt, Artificial Sequence; identical to SEQ ID NO: 80917
  derived and/or modified CDS sequence (opt1) from neuraminidase__InfluenzaA__AFF57145

SEQ ID NO: 85861 - RNA, 1410 nt, Artificial Sequence; identical to SEQ ID NO: 80917
  derived and/or modified CDS sequence (opt1) from neuraminidase__InfluenzaA__AFF57149

SEQ ID NO: 85862 - RNA, 1410 nt, Artificial Sequence; identical to SEQ ID NO: 80917
  derived and/or modified CDS sequence (opt1) from neuraminidase__InfluenzaA__AFF57153

SEQ ID NO: 85863 - RNA, 1410 nt, Artificial Sequence; identical to SEQ ID NO: 80917
  derived and/or modified CDS sequence (opt1) from neuraminidase__InfluenzaA__AFF57157

SEQ ID NO: 85864 - RNA, 1410 nt, Artificial Sequence; identical to SEQ ID NO: 80917
  derived and/or modified CDS sequence (opt1) from neuraminidase__InfluenzaA__AFF57161

SEQ ID NO: 85865 - RNA, 1410 nt, Artificial Sequence; identical to SEQ ID NO: 80917
  derived and/or modified CDS sequence (opt1) from neuraminidase__InfluenzaA__AFF57165

SEQ ID NO: 85866 - RNA, 1410 nt, Artificial Sequence; identical to SEQ ID NO: 80917
  derived and/or modified CDS sequence (opt1) from neuraminidase__InfluenzaA__AFF57169

SEQ ID NO: 85867 - RNA, 1410 nt, Artificial Sequence; identical to SEQ ID NO: 80917
  derived and/or modified CDS sequence (opt1) from neuraminidase__InfluenzaA__AFF57173

SEQ ID NO: 85868 - RNA, 1410 nt, Artificial Sequence; identical to SEQ ID NO: 80917
  derived and/or modified CDS sequence (opt1) from neuraminidase__InfluenzaA__AFF57177

SEQ ID NO: 85869 - RNA, 1410 nt, Artificial Sequence; identical to SEQ ID NO: 80917
  derived and/or modified CDS sequence (opt1) from neuraminidase__InfluenzaA__AFF57181

SEQ ID NO: 85870 - RNA, 1410 nt, Artificial Sequence; identical to SEQ ID NO: 80917
  derived and/or modified CDS sequence (opt1) from neuraminidase__InfluenzaA__AFF57185

SEQ ID NO: 85871 - RNA, 1410 nt, Artificial Sequence; identical to SEQ ID NO: 80917
  derived and/or modified CDS sequence (opt1) from neuraminidase__InfluenzaA__AFF57189

SEQ ID NO: 85872 - RNA, 1350 nt, Artificial Sequence
  derived and/or modified CDS sequence (opt1) from neuraminidase__InfluenzaA__AFF60789
augaaccccaacaagaagaucaucaccaucggcagcaucugcauggugaccgggauggucucccugaugcuccagaucggcaaccugaucagcaucugggugucccacagcauccacacggggaaccagcacaaggccgagccgaucuccaacaccaacuuccugaccgagaaggccguggcgagcgucaagcucgccggcaacuccagccugugccccaucaacgggugggccguguacuccaaggacaacagcauccgcaucggcuccaagggcgacguguucgucauccgggagcccuucaucagcugcucccaccuggagugccgcaccuucuuccucacgcagggggcccugcugaacgacaagcacagcaacggcaccgugaaggaccggagcccccaccgcacccucauguccugcccggugggggaggcccccucccccuacaacagccgguucgaguccgucgcguggagcgccagcgccugccacgacggcaccuccuggcugacgaucgggaucagcggccccgacaacggcgccguggcggugcugaaguacaacgggaucaucaccgacaccaucaaguccuggcgcaacaacauccuccggacccaggagagcgagugcgccugcgucaacggcuccugcuucacggugaugaccgacgggccgagcaacggccaggccucccacaagaucuucaagauggagaagggcaagguggucaagagcguggagcuggacgcccccaacuaccacuacgaggagugcuccugcuaccccgacgccggggagaucacgugcgugugccgcgacaacuggcacggcagcaaccggcccugggucuccuucaaccagaaccuggaguaccagaucggguacaucugcagcggcguguucggggacaacccgcgccccaacgacggcaccggcuccugcgggcccgugagcuccaacggcgcguacggggucaagggcuucagcuucaaguacgggaacggcguguggaucggccggaccaaguccaccaacagccgcuccggguucgagaugaucugggaccccaacggcuggaccgagaccgacagcagcuucuccgugaagcaggacaucgucgccaucacggacuggagcggguacuccggcagcuucgugcagcacccggagcucaccgggcuggacugcauccggcccugcuucugggucgagcugauccgcggccggcccaaggaguccaccaucuggaccagcggcuccagcaucuccuucugcggggugacgagcgacaccgugggcugguccuggcccgacggggccgagcucccguucaccaucgacaaguga

SEQ ID NO: 85873 - RNA, 1410 nt, Artificial Sequence
  derived and/or modified CDS sequence (opt1) from neuraminidase__InfluenzaA__AFG29043
augaaccccaaccagaagaucaucaccaucggcagcgugugcaugaccaucgggauggccaaccugauccuccagaucggcaacaucaucuccaucuggaucagccacuccauccagcuggggaaccagaaccagaucgagacgugcaaccagagcgucaucaccuacgagaacaacaccugggugaaccagaccuacgugaacaucuccaacacgaacuucgccgcgggccagagcgucguguccgugaagcuggccgggaacagcucccucugcccggucagcggcugggccaucuacuccaaggacaacagcauccgcaucggcuccaagggggacguguucgugauccgggagcccuucaucagcugcagcccccuggagugccgcaccuucuuccugacccagggcgcccuccugaacgacaagcacuccaacgggaccauccgggaccgcucccccuaccggacgcugaugagcugcccgaucggcgagguccccucccccuacaacagccgcuucgagagcguggccugguccgcgagcgccugccacgacgggaucaacuggcucaccaucggcaucuccggccccgacaacggggccguggccguccugaaguacaacggcaucaucaccgacaccaucaagagcuggcggaacaacauccugcgcacgcaggaguccgagugcgcgugcgugaacgggagcugcuucaccgugaugaccgacggcccguccgacggccaggccagcuacaagaucuuccggaucgagaaggggaagaucgucaaguccguggagaugaacgcccccaacuaccacuacgaggagugcagcugcuaccccgacuccagcgagaucacgugcgugugccgcgacaacuggcacggcuccaaccggcccugggucagcuucaaccagaaccucgaguaccagaucggguacaucugcuccggcaucuucggggacaacccgcgccccaacgacaagaccggcagcugcggccccguguccagcaacggggccaacggcgugaagggguucuccuucaaguacggcaacggggucuggaucggccggaccaagagcaucagcucccgcaacggcuucgagaugaucugggaccccaacggguggaccggcaccgacaacaacuucagcaucaagcaggacaucguggggaucaacgagugguccggcuacagcggguccuucgugcagcacccggagcugacgggccuggacugcauccggcccugcuucugggucgagcucauccgcggccggcccaaggagaacaccaucuggaccagcggguccagcaucuccuucugcggcgugaacagcgacaccgucgggugguccuggcccgacggcgccgagcugccguucacgaucgacaaguga

SEQ ID NO: 85874 - RNA, 1410 nt, Artificial Sequence; identical to SEQ ID NO: 82543
  derived and/or modified CDS sequence (opt1) from neuraminidase__InfluenzaA__AFG29045

SEQ ID NO: 85875 - RNA, 1410 nt, Artificial Sequence; identical to SEQ ID NO: 82675
  derived and/or modified CDS sequence (opt1) from neuraminidase__InfluenzaA__AFG31063

SEQ ID NO: 85876 - RNA, 1410 nt, Artificial Sequence; identical to SEQ ID NO: 80762
  derived and/or modified CDS sequence (opt1) from neuraminidase__InfluenzaA__AFG31073

SEQ ID NO: 85877 - RNA, 1410 nt, Artificial Sequence
  derived and/or modified CDS sequence (opt1) from neuraminidase__InfluenzaA__AFG31083
augaaccccaaccagaagaucaucaccaucggcagcgugugcaugaccaucgggauggccaaccugauccuccagaucggcaacaucaucuccaucuggaucagccacuccauccagcuggucaaccagaaccagaucgagacgugcaaccagagcgugaucaccuacgagaacaacaccugggugaaccagaccuacgucaacaucuccaacacgaacuucgccgcggggcagagcgugguguccgucaagcuggccggcaacagcucccucugcccggugagcgggugggccaucuacuccaaggacaacagcgugcgcaucggcuccaagggcgacgucuucgugauccgggagcccuucaucagcugcagcccccuggagugccgcaccuucuuccugacccagggggcccuccugaacgacaagcacuccaacggcaccaucaaggaccggucccccuaccgcacgcugaugagcugcccgaucggggaggugcccucccccuacaacagccgguucgagagcgucgccugguccgcgagcgccugccacgacggcaucaacuggcucaccaucgggaucuccggccccgacaacggcgccguggccgugcugaaguacaacgggaucaucaccgacaccaucaagagcuggcgcaacaacauccugcggacgcaggaguccgagugcgcgugcgucaacggcagcugcuucaccgugaugaccgacgggccguccaacggccaggccagcuacaagaucuuccgcaucgagaagggcaagaucgugaaguccgucgagaugaacgcccccaacuaccacuacgaggagugcagcugcuaccccgacuccagcgagaucacgugcgugugccgggacaacuggcacggguccaaccgccccugggugagcuucaaccagaaccucgaguaccagaucggcuacaucugcuccgggaucuucggcgacaacccgcggcccaacgacaagaccgggagcugcggccccgucuccagcaacggcgccaacggggugaagggcuucuccuucaaguacgggaacggcguguggaucgggcgcaccaagagcaucagcucccggaacggcuucgagaugaucugggaccccaacggcuggaccgggaccgacaacaacuucagcaucaagcaggacaucgucggcaucaacgagugguccggguacagcggcuccuucgugcagcacccggagcugacggggcuggacugcauccgccccugcuucugggucgagcucauccggggccgccccaaggagaacaccaucuggaccagcggcuccagcaucuccuucugcggggugaacagcgacaccgugggcugguccuggcccgacggggccgagcugccguucacgaucgacaaguga

SEQ ID NO: 85878 - RNA, 1410 nt, Artificial Sequence; identical to SEQ ID NO: 80762
  derived and/or modified CDS sequence (opt1) from neuraminidase__InfluenzaA__AFG31093

SEQ ID NO: 85879 - RNA, 1410 nt, Artificial Sequence; identical to SEQ ID NO: 80762
  derived and/or modified CDS sequence (opt1) from neuraminidase__InfluenzaA__AFG31103

SEQ ID NO: 85880 - RNA, 1410 nt, Artificial Sequence; identical to SEQ ID NO: 80762
  derived and/or modified CDS sequence (opt1) from neuraminidase__InfluenzaA__AFG31113

SEQ ID NO: 85881 - RNA, 1410 nt, Artificial Sequence; identical to SEQ ID NO: 80762
  derived and/or modified CDS sequence (opt1) from neuraminidase__InfluenzaA__AFG31123

SEQ ID NO: 85882 - RNA, 1410 nt, Artificial Sequence; identical to SEQ ID NO: 80762
  derived and/or modified CDS sequence (opt1) from neuraminidase__InfluenzaA__AFG31133

SEQ ID NO: 85883 - RNA, 1410 nt, Artificial Sequence; identical to SEQ ID NO: 80762
  derived and/or modified CDS sequence (opt1) from neuraminidase__InfluenzaA__AFG31143

SEQ ID NO: 85884 - RNA, 1410 nt, Artificial Sequence; identical to SEQ ID NO: 80762
  derived and/or modified CDS sequence (opt1) from neuraminidase__InfluenzaA__AFG31153

SEQ ID NO: 85885 - RNA, 1410 nt, Artificial Sequence; identical to SEQ ID NO: 80762
  derived and/or modified CDS sequence (opt1) from neuraminidase__InfluenzaA__AFG31163

SEQ ID NO: 85886 - RNA, 1410 nt, Artificial Sequence
  derived and/or modified CDS sequence (opt1) from neuraminidase__InfluenzaA__AFG31173
augaaccccaaccagaagaucaucaccaucggcagcgugugcaugaccaucgggauggccaaccugauccuccagaucggcaacaucaucuccaucuggaucagccacuccauccagcuggggaaccagaaccagaucgagacgugcaaccagagcgucaucaccuacgagaacaacaccugggugaaccagaccuacgugaacaucuccaacacgaacuucgccgcgggccagagcgucguguccgugaagcuggccgggaacagcucccucugcccggucagcggcugggccaucuacuccaaggacaacagcauccgcaucggcuccaagggggacguguucgugauccgggagcccuucaucagcugcagcccccuggagugccgcaccuucuuccugacccagggcgcccuccugaacgacaagcacuccaacgggaccaucaaggaccggucccccuaccgcacgcugaugagcugcccgaucggcgagguccccucccccuacaacagccgguucgagagcguggccugguccgcgagcgccugccacgacgggaucaacuggcucaccaucggcaucuccggccccgacaacggggccguggccguccugaaguacaacggcaucaucaccgacaccaucaagagcuggcgcaacaacauccugcggacgcaggaguccgagugcgcgugcgugaacgggagcugcuucaccgugaugaccgacggcccguccgacggccaggccagcuacaagaucuuccgcaucgagaaggggaagaucgucaaguccguggagaugaacgcccccaacuaccacuacgaggagugcagcugcuaccccgacuccagcgagaucacgugcgugugccgggacaacuggcacggcuccaaccgccccugggucagcuucaaccagaaccucgaguaccagaucggguacaucugcuccggcaucuucggggacaacccgcggcccaacgacaagaccggcagcugcggccccguguccagcaacggggccaacggcgugaagggguucuccuucaaguacggcaacggggucuggaucggccgcaccaagagcaucagcucccggaacggcuucgagaugaucugggaccccaacggguggaccggcaccgacaacaacuucagcaucaagcaggacaucguggggaucaacgagugguccggcuacagcggguccuucgugcagcacccggagcugacgggccuggacugcauccgccccugcuucugggucgagcucauccggggccugcccaaggagaacaccaucuggaccagcggguccagcaucuccuucugcggcgugaacagcgacaccgucgggugguccuggcccgacggcgccgagcugccguucacgaucgacaaguga

SEQ ID NO: 85887 - RNA, 1410 nt, Artificial Sequence; identical to SEQ ID NO: 85886
  derived and/or modified CDS sequence (opt1) from neuraminidase__InfluenzaA__AFG31183

SEQ ID NO: 85888 - RNA, 1410 nt, Artificial Sequence; identical to SEQ ID NO: 80762
  derived and/or modified CDS sequence (opt1) from neuraminidase__InfluenzaA__AFG31193

SEQ ID NO: 85889 - RNA, 1410 nt, Artificial Sequence; identical to SEQ ID NO: 80762
  derived and/or modified CDS sequence (opt1) from neuraminidase__InfluenzaA__AFG31203

SEQ ID NO: 85890 - RNA, 1410 nt, Artificial Sequence; identical to SEQ ID NO: 80762
  derived and/or modified CDS sequence (opt1) from neuraminidase__InfluenzaA__AFG31213

SEQ ID NO: 85891 - RNA, 1410 nt, Artificial Sequence; identical to SEQ ID NO: 80762
  derived and/or modified CDS sequence (opt1) from neuraminidase__InfluenzaA__AFG31223

SEQ ID NO: 85892 - RNA, 1410 nt, Artificial Sequence; identical to SEQ ID NO: 80762
  derived and/or modified CDS sequence (opt1) from neuraminidase__InfluenzaA__AFG31233

SEQ ID NO: 85893 - RNA, 1410 nt, Artificial Sequence
  derived and/or modified CDS sequence (opt1) from neuraminidase__InfluenzaA__AFG31243
augaaccccaaccagaagaucaucaccaucggcagcgugugcaugaccaucgggauggccaaccugauccuccagaucggcaacaucaucuccaucuggaucagccacuccauccagcuggggaaccagaaccagaucgagacgugcaaccagagcgucaucaccuacgagaacaacaccugggugaaccagaccuacgugaacaucuccaacacgaacuucgucgccggccagagcgugguguccgucaagcuggcggggaacagcucccucugcccggugagcggcugggccaucuacuccaaggacaacagcauccgcaucggcuccaagggggacguguucgucauccgggagcccuucaucagcugcagcccccuggagugccgcaccuucuuccugacccagggcgcccuccugaacgacaagcacuccaacgggaccaucaaggaccggucccccuaccgcacgcugaugagcugcccgaucggcgaggugcccucccccuacaacagccgguucgagagcguggccugguccgccagcgcgugccacgacgggaucaacuggcucaccaucggcaucuccggccccgacaacggggccgucgccgugcugaaguacaacggcaucaucaccgacaccaucaagagcuggcgcaacaacauccugcggacgcaggaguccgagugcgccugcgugaacgggagcugcuucaccgucaugaccgacggcccguccgacggccaggcgagcuacaagaucuuccgcaucgagaaggggaagaucgugaaguccguggagaugaacgcccccaacuaccacuacgaggagugcagcugcuaccccgacuccagcgagaucacgugcgucugccgggacaacuggcacggcuccaaccgccccugggugagcuucaaccagaaccucgaguaccagaucggguacaucugcuccggcaucuucggggacaacccgcggcccaacgacaagaccggcagcugcggccccguguccagcaacggggccaacggcgucaagggguucuccuucaaguacggcaacgggguguggaucggccgcaccaagagcaucagcucccggaacggcuucgagaugaucugggaccccaacggguggaccggcaccgacaacaacuucagcaucaagcaggacaucguggggaucaacgagugguccggcuacagcggguccuucguccagcacccggagcugacgggccuggacugcauccgccccugcuucuggguggagcucauccggggccgccccaaggagaacaccaucuggaccagcggguccagcaucuccuucugcggcgucaacagcgacaccguggggugguccuggcccgacggcgccgagcugccguucacgaucgacaaguga

SEQ ID NO: 85894 - RNA, 1410 nt, Artificial Sequence; identical to SEQ ID NO: 83754
  derived and/or modified CDS sequence (opt1) from neuraminidase__InfluenzaA__AFG31253

SEQ ID NO: 85895 - RNA, 1410 nt, Artificial Sequence; identical to SEQ ID NO: 80762
  derived and/or modified CDS sequence (opt1) from neuraminidase__InfluenzaA__AFG31263

SEQ ID NO: 85896 - RNA, 1410 nt, Artificial Sequence; identical to SEQ ID NO: 80762
  derived and/or modified CDS sequence (opt1) from neuraminidase__InfluenzaA__AFG31273

SEQ ID NO: 85897 - RNA, 1410 nt, Artificial Sequence; identical to SEQ ID NO: 80762
  derived and/or modified CDS sequence (opt1) from neuraminidase__InfluenzaA__AFG31283

SEQ ID NO: 85898 - RNA, 1410 nt, Artificial Sequence; identical to SEQ ID NO: 80762
  derived and/or modified CDS sequence (opt1) from neuraminidase__InfluenzaA__AFG31293

SEQ ID NO: 85899 - RNA, 1410 nt, Artificial Sequence; identical to SEQ ID NO: 80762
  derived and/or modified CDS sequence (opt1) from neuraminidase__InfluenzaA__AFG31303

SEQ ID NO: 85900 - RNA, 1410 nt, Artificial Sequence; identical to SEQ ID NO: 80762
  derived and/or modified CDS sequence (opt1) from neuraminidase__InfluenzaA__AFG31313

SEQ ID NO: 85901 - RNA, 1410 nt, Artificial Sequence; identical to SEQ ID NO: 80762
  derived and/or modified CDS sequence (opt1) from neuraminidase__InfluenzaA__AFG31326

SEQ ID NO: 85902 - RNA, 1410 nt, Artificial Sequence; identical to SEQ ID NO: 80762
  derived and/or modified CDS sequence (opt1) from neuraminidase__InfluenzaA__AFG31336

SEQ ID NO: 85903 - RNA, 1410 nt, Artificial Sequence; identical to SEQ ID NO: 83754
  derived and/or modified CDS sequence (opt1) from neuraminidase__InfluenzaA__AFG31346

SEQ ID NO: 85904 - RNA, 1410 nt, Artificial Sequence; identical to SEQ ID NO: 83754
  derived and/or modified CDS sequence (opt1) from neuraminidase__InfluenzaA__AFG31356

SEQ ID NO: 85905 - RNA, 1410 nt, Artificial Sequence; identical to SEQ ID NO: 83754
  derived and/or modified CDS sequence (opt1) from neuraminidase__InfluenzaA__AFG31366

SEQ ID NO: 85906 - RNA, 1410 nt, Artificial Sequence; identical to SEQ ID NO: 83754
  derived and/or modified CDS sequence (opt1) from neuraminidase__InfluenzaA__AFG31379

SEQ ID NO: 85907 - RNA, 1410 nt, Artificial Sequence; identical to SEQ ID NO: 83754
  derived and/or modified CDS sequence (opt1) from neuraminidase__InfluenzaA__AFG31389

SEQ ID NO: 85908 - RNA, 1410 nt, Artificial Sequence; identical to SEQ ID NO: 83754
  derived and/or modified CDS sequence (opt1) from neuraminidase__InfluenzaA__AFG31399

SEQ ID NO: 85909 - RNA, 1410 nt, Artificial Sequence; identical to SEQ ID NO: 83754
  derived and/or modified CDS sequence (opt1) from neuraminidase__InfluenzaA__AFG31409

SEQ ID NO: 85910 - RNA, 1410 nt, Artificial Sequence; identical to SEQ ID NO: 80762
  derived and/or modified CDS sequence (opt1) from neuraminidase__InfluenzaA__AFG31419

SEQ ID NO: 85911 - RNA, 1410 nt, Artificial Sequence; identical to SEQ ID NO: 80762
  derived and/or modified CDS sequence (opt1) from neuraminidase__InfluenzaA__AFG31429

SEQ ID NO: 85912 - RNA, 1410 nt, Artificial Sequence; identical to SEQ ID NO: 80762
  derived and/or modified CDS sequence (opt1) from neuraminidase__InfluenzaA__AFG31439

SEQ ID NO: 85913 - RNA, 1410 nt, Artificial Sequence; identical to SEQ ID NO: 80762
  derived and/or modified CDS sequence (opt1) from neuraminidase__InfluenzaA__AFG31449

SEQ ID NO: 85914 - RNA, 1410 nt, Artificial Sequence; identical to SEQ ID NO: 80762
  derived and/or modified CDS sequence (opt1) from neuraminidase__InfluenzaA__AFG31459

SEQ ID NO: 85915 - RNA, 1410 nt, Artificial Sequence; identical to SEQ ID NO: 80762
  derived and/or modified CDS sequence (opt1) from neuraminidase__InfluenzaA__AFG31469

SEQ ID NO: 85916 - RNA, 1410 nt, Artificial Sequence; identical to SEQ ID NO: 80762
  derived and/or modified CDS sequence (opt1) from neuraminidase__InfluenzaA__AFG31479

SEQ ID NO: 85917 - RNA, 1410 nt, Artificial Sequence; identical to SEQ ID NO: 80762
  derived and/or modified CDS sequence (opt1) from neuraminidase__InfluenzaA__AFG31499

SEQ ID NO: 85918 - RNA, 1410 nt, Artificial Sequence; identical to SEQ ID NO: 82653
  derived and/or modified CDS sequence (opt1) from neuraminidase__InfluenzaA__AFG31509

SEQ ID NO: 85919 - RNA, 1410 nt, Artificial Sequence; identical to SEQ ID NO: 83754
  derived and/or modified CDS sequence (opt1) from neuraminidase__InfluenzaA__AFG31519

SEQ ID NO: 85920 - RNA, 1410 nt, Artificial Sequence; identical to SEQ ID NO: 80762
  derived and/or modified CDS sequence (opt1) from neuraminidase__InfluenzaA__AFG31529

SEQ ID NO: 85921 - RNA, 1410 nt, Artificial Sequence; identical to SEQ ID NO: 82653
  derived and/or modified CDS sequence (opt1) from neuraminidase__InfluenzaA__AFG31539

SEQ ID NO: 85922 - RNA, 1410 nt, Artificial Sequence; identical to SEQ ID NO: 80762
  derived and/or modified CDS sequence (opt1) from neuraminidase__InfluenzaA__AFG31549

SEQ ID NO: 85923 - RNA, 1410 nt, Artificial Sequence; identical to SEQ ID NO: 80762
  derived and/or modified CDS sequence (opt1) from neuraminidase__InfluenzaA__AFG31559

SEQ ID NO: 85924 - RNA, 1410 nt, Artificial Sequence; identical to SEQ ID NO: 83754
  derived and/or modified CDS sequence (opt1) from neuraminidase__InfluenzaA__AFG31569

SEQ ID NO: 85925 - RNA, 1410 nt, Artificial Sequence; identical to SEQ ID NO: 80762
  derived and/or modified CDS sequence (opt1) from neuraminidase__InfluenzaA__AFG31579

SEQ ID NO: 85926 - RNA, 1410 nt, Artificial Sequence; identical to SEQ ID NO: 80762
  derived and/or modified CDS sequence (opt1) from neuraminidase__InfluenzaA__AFG31589

SEQ ID NO: 85927 - RNA, 1410 nt, Artificial Sequence; identical to SEQ ID NO: 80762
  derived and/or modified CDS sequence (opt1) from neuraminidase__InfluenzaA__AFG31599

SEQ ID NO: 85928 - RNA, 1410 nt, Artificial Sequence; identical to SEQ ID NO: 80762
  derived and/or modified CDS sequence (opt1) from neuraminidase__InfluenzaA__AFG31609

SEQ ID NO: 85929 - RNA, 1410 nt, Artificial Sequence; identical to SEQ ID NO: 80762
  derived and/or modified CDS sequence (opt1) from neuraminidase__InfluenzaA__AFG31619

SEQ ID NO: 85930 - RNA, 1410 nt, Artificial Sequence; identical to SEQ ID NO: 80762
  derived and/or modified CDS sequence (opt1) from neuraminidase__InfluenzaA__AFG31629

SEQ ID NO: 85931 - RNA, 1410 nt, Artificial Sequence; identical to SEQ ID NO: 83754
  derived and/or modified CDS sequence (opt1) from neuraminidase__InfluenzaA__AFG31639

SEQ ID NO: 85932 - RNA, 1410 nt, Artificial Sequence; identical to SEQ ID NO: 80762
  derived and/or modified CDS sequence (opt1) from neuraminidase__InfluenzaA__AFG31649

SEQ ID NO: 85933 - RNA, 1410 nt, Artificial Sequence; identical to SEQ ID NO: 80762
  derived and/or modified CDS sequence (opt1) from neuraminidase__InfluenzaA__AFG31659

SEQ ID NO: 85934 - RNA, 1410 nt, Artificial Sequence; identical to SEQ ID NO: 80762
  derived and/or modified CDS sequence (opt1) from neuraminidase__InfluenzaA__AFG31669

SEQ ID NO: 85935 - RNA, 1410 nt, Artificial Sequence; identical to SEQ ID NO: 78119
  derived and/or modified CDS sequence (opt1) from neuraminidase__InfluenzaA__AFG71868

SEQ ID NO: 85936 - RNA, 1410 nt, Artificial Sequence; identical to SEQ ID NO: 78119
  derived and/or modified CDS sequence (opt1) from neuraminidase__InfluenzaA__AFG71890

SEQ ID NO: 85937 - RNA, 1410 nt, Artificial Sequence; identical to SEQ ID NO: 78119
  derived and/or modified CDS sequence (opt1) from neuraminidase__InfluenzaA__AFG71901

SEQ ID NO: 85938 - RNA, 1410 nt, Artificial Sequence; identical to SEQ ID NO: 78138
  derived and/or modified CDS sequence (opt1) from neuraminidase__InfluenzaA__AFG71912

SEQ ID NO: 85939 - RNA, 1410 nt, Artificial Sequence
  derived and/or modified CDS sequence (opt1) from neuraminidase__InfluenzaA__AFG71934
augaaccccaaccagaagaucaucaccaucggcagcgugucccugaccaucgccacggucugcuuccucaugcagaucgccauccugaucaccaccgugacccugcacuucaagcaguacgagugcgacagcccggcgaacaaccaggugaugcccugcgagcccaucaucaucgagcgcaacaucacggagaucgucuaccucaccaacaccaccaucgagaaggagaucugccccaagcugguggaguaccggaacugguccaagccgcagugcaagaucacgggguucgcccccuucagcaaggacaacuccauccgccugagcgccggcggggacaucugggugacccgggagcccuacgucuccugcgaccccggcaagugcuaccaguucgcccucgggcagggcaccacccuggacaacaagcacagcaacgacacgauccacgaccgcaucccgcaccggacccugcucaugaacgagcugggcgugcccuuccaccuggggacccgccaggugugcaucgccugguccagcuccagcugccacgacggcaaggcguggcuccacgucugcgugaccggggacgacaagaacgccacggccuccuucaucuacgacggccggcugguggacagcaucggguccuggagccagaacauccugcgcacccaggaguccgagugcgucugcaucaacgggaccugcaccguggugaugacggacggcagcgccuccggccgggcggacacccgcauccucuucaucgaggagggcaagaucguccacaucagcccccugagcggguccgcccagcacguggaggagugcagcugcuacccccgguacccgggcgugcgcugcaucugccgggacaacuggaagggcuccaaccgccccgucguggacaucaacgugaaggacuacagcaucgacucccgguacgucugcagcgggcuggugggcgacacgccccgcaacaacgaccgguucuccaacagcaacugccgcaaccccaacaacgagcgggggaaccacggcgugaaggggugggccuucgacgacggcaacgacgucuggaugggccgcaccaucuccaaggacagccgguccggguacgagaccuucaaggugaucggcggguggagcaccccgaacuccaagagccagaucaaccgccaggucaucguggacuccgacaaccgcagcggcuacuccgggaucuucagcguggagggcaaguccugcaucaaccggugcuucuacgucgagcucauccgcggccgggagcaggagacccgcgugugguggaccagcaacagcaucguggucuucugcgggacguccggcaccuacgggaccggcagcuggcccgacggggccgacaucaaccugaugcccaucuga

SEQ ID NO: 85940 - RNA, 1410 nt, Artificial Sequence
  derived and/or modified CDS sequence (opt1) from neuraminidase__InfluenzaA__AFG71945
augaaccccaaccagaagaucaucaccaucggcagcgugucccugaccaucgccacggucugcuuccucaugcagaucgccauccuggugaccaccgugacccugcacuucaagcaguacgagugcgacagcccggcgaacaaccaggucaugcccugcgagcccaucaucaucgagcgcaacaucacggagaucguguaccucaccaacaccaccaucgagaaggagaucugccccaagcugguggaguaccggaacugguccaagccgcagugcaagaucacgggguucgcccccuucagcaaggacaacuccauccgccugagcgccggcggggacaucugggucacccgggagcccuacguguccugcgaccccggcaagugcuaccaguucgcccucgggcagggcaccacccuggacaacaagcacagcaacgacacgauccacgaccgcaucccgcaccggacccugcucaugaacgagcugggcgugcccuuccaccuggggacccgccaggucugcaucgccugguccagcuccagcugccacgacggcaaggcguggcuccacgugugcgugaccggggacgacgagaacgccacggccuccuucaucuacgacggccggcuggucgacagcaucggguccuggagccagaacauccugcgcacccaggaguccgagugcgugugcaucaacgggaccugcaccguggucaugacggacggcagcgccuccggccgggcggacacccgcauccucuucaucgaggagggcaagaucgugcacaucagcccccugagcggguccgcccagcacguggaggagugcagcugcuacccccgguacccgggcguccgcugcaucugccgggacaacuggaagggcuccaaccgccccgugguggacaucaacgucaaggacuacagcaucgacucccgguacgugugcagcgggcuggugggcgacacgccccgcaacaacgacaaguccagcaacuccaacugccggaaccccaacaacgacaaggggaaccacggcgucaaggggugggccuucgacgacggcaacgacguguggaugggccgcaccaucagcaaggacucccggagcggguacgagaccuucaaggucaucggcgggugguccaccccgaacagcaagucccagaucaaccgccaggugaucguggacagcgacaaccgguccggcuacagcgggaucuucuccgucgagggcaagagcugcaucaaccgcugcuucuacguggagcucauccgcggccgggagcaggagaccaaggugugguggaccagcaacuccaucgucguguucugcgggacgagcggcaccuacgggaccggcuccuggcccgacggggccgacaucaaccugaugagcaucuga

SEQ ID NO: 85941 - RNA, 1410 nt, Artificial Sequence; identical to SEQ ID NO: 78142
  derived and/or modified CDS sequence (opt1) from neuraminidase__InfluenzaA__AFG71967

SEQ ID NO: 85942 - RNA, 1410 nt, Artificial Sequence; identical to SEQ ID NO: 78142
  derived and/or modified CDS sequence (opt1) from neuraminidase__InfluenzaA__AFG71978

SEQ ID NO: 85943 - RNA, 1410 nt, Artificial Sequence
  derived and/or modified CDS sequence (opt1) from neuraminidase__InfluenzaA__AFG71988
augaaccccaaccagaagaucaucaccaucggcagcgugucccugaccaucgccacgaucugcuuccucaugcagaucgccauccuggucaccaccgugacccugcacuucaagcaguacgagugcgacagcccggcgaacaaccaggugaugcccugcgagcccaucaucaucgagcgcaacaucacggagaucgucuaccucaccaacaccaccaucgagaaggagaucugccccaagcugguggaguaccggaacugguccaagccgcagugcaagaucacgggguucgcccccuucagcaaggacaacuccauccgccugagcgccggcggggacaucugggugacccgggagcccuacgucuccugcgaccccggcaagugcuaccaguucgcccucgggcagggcaccacccuggacaacaagcacagcaacgacacgauccacgaccgcaccccgcaccggacccugcucaugaacgagcugggcgugcccuuccaccuggggacccgccaggugugcaucgccugguccagcuccagcugccacgacggcaaggcguggcuccacgucugcgugacgggguacgacaagaacgccaccgccuccuucaucuacgacggccggcugguggacagcaucggguccuggagccagaacauccugcgcacccaggaguccgagugcaucugcaucaacgggaccugcacggucgugaugaccgacggcagcgccuccggccgggcggacaccaagauccucuucaucgaggagggcaagaucgugcacaucagcccccugagcggguccgcccagcacgucgaggagugcagcugcuacccccgcuacccgggcgugcggugcaucugccgcgacaacuggaagggcuccaaccggcccguggucgacaucaacgugaaggacuacagcaucgacuccagcuacgugugcuccgggcuggucggcgacacgccccgcaacaacgaccggagcuccaacagcuacugccgcaaccccaacaacgagaaggggaaccacggcgugaaggggugggccuucgacgacggcaacgacguguggaugggccggaccaucuccgaggacagccgcuccggguacgagaccuucaaggucaucggcggguggagcaccccgaacuccaagcuccagaucaaccgccaggugaucgucgacagcgacaaccgguccggcuacagcgggaucuucuccguggagggcaagagcugcaucaaccggugcuucuacguggagcugauccgcggccgcgagcaggagacccgggucugguggacgagcaacuccaucgugguguucugcgggaccagcggcaccuacgggaccggcuccuggcccgacggggccgacaucaaccugaugcccaucuga

SEQ ID NO: 85944 - RNA, 1410 nt, Artificial Sequence; identical to SEQ ID NO: 78142
  derived and/or modified CDS sequence (opt1) from neuraminidase__InfluenzaA__AFG71999

SEQ ID NO: 85945 - RNA, 1410 nt, Artificial Sequence; identical to SEQ ID NO: 78600
  derived and/or modified CDS sequence (opt1) from neuraminidase__InfluenzaA__AFG72021

SEQ ID NO: 85946 - RNA, 1410 nt, Artificial Sequence
  derived and/or modified CDS sequence (opt1) from neuraminidase__InfluenzaA__AFG72032
augaaccccaaccagaagaucaucaccaucggcagcgugucccugaccaucgccacgaucugcuuccucaugcagaucgccauccuggucaccaccgugacccugcacuucaagcaguacgagugcagcuccccgcccaacaaccaggugaugcccugcgagcccaucaucaucgagcgcaacaucacggagaucgucuaccucaccaacaccaccaucgagaaggagaucugcccgaagcugguggaguaccggaacuggagcaagccccagugcaagaucacgggguucgcgcccuucuccaaggacaacagcauccgccuguccgccggcggggacaucugggugacccgggagcccuacgucagcugcgacccgggcaagugcuaccaguucgcccucgggcagggcaccacccuggacaacaagcacuccaacgacacgauccacgaccgcacccccuaccggacccugcucaugaacgagcugggcgugcccuuccaccuggggacccgccaggugugcaucgccuggagcuccagcuccugccacgacggcaaggccuggcuccacgucugcgugacgggguacgacaagaacgcgaccgccagcuucaucuacgacggccggcugguggacuccaucgggagcugguccaagaacauccugcgcacccaggagagcgagugcgucugcaucaacgggaccugcacgguggugaugaccgacggcuccgccagcgagcgggccgacaccaagauccucuucaucgaggagggcaagaucguccacaucagcccccuguccggcagcgcgcagcacguggaggagugcuccugcuacccgcgcuaccccggggugcggugcgucugccgcgacaacuggaagggcagcaaccggcccgugguggacaucaacgucaaggacuacuccaucgugagcuccuacgugugcagcggccuggucggggacacgccccgcaagaacgaccgguccagcuccagcuacugccgcaacccgaacaacgagaagggcaaccacggggugaagggcugggccuucgacgacgggaacgacgucuggaugggccggaccaucuccgaggagagccgcuccggcuacgagaccuucaaggugaucgggggcuggagcacccccaacuccaagcuccagaucaaccgccaggugaucgucgacagcgacaaccgguccggguacagcggcaucuucagcguggaggggaaguccugcaucaaccggugcuucuacguggagcugauccgcggccgcgagcaggagacccgggucugguggacgagcaacuccaucgugguguucugcggcaccagcgggaccuacggcaccggguccuggcccgacggcgccgacaucaaccugaugcccaucuga

SEQ ID NO: 85947 - RNA, 1410 nt, Artificial Sequence; identical to SEQ ID NO: 78837
  derived and/or modified CDS sequence (opt1) from neuraminidase__InfluenzaA__AFG72088

SEQ ID NO: 85948 - RNA, 1410 nt, Artificial Sequence
  derived and/or modified CDS sequence (opt1) from neuraminidase__InfluenzaA__AFG72121
augaaccccaaccagaagaucaucaccaucggcagcgugucccugaccaucgccacgaucugcuuccucaugcagaucgccauccuggucaccaccgugacccugcacuucaagcaguacgagugcagcuccccgcccaacaaccgcgugaugcccugcgagcccacgaucaucgagcggaacaucaccgagaucgucuaccucaccaacaccacgaucgagaaggagaucugcccgaagcugguggaguaccgcaacuggagcaagccccagugcaagaucaccggguucgcgcccuucuccaaggacaacagcauccggcuguccgccggcggggacaucugggugacccgcgagcccuacgucagcugcgacccgggcaagugcuaccaguucgcccucgggcagggcaccacgcugaacaaccggcacuccaacgacaccgugcacgaccgcacccccuaccggacccugcucaugaacgagcugggcgugcccuuccaccuggggacgaagcaggucugcauggccuggagcuccagcuccugccacgacggcaaggccuggcuccacgugugcgugaccgggcacgacgagaacgcgaccgccagcuucaucuacgacggccgccuggucgacuccaucgggagcugguccaagaacauccugcggacccaggagagcgagugcgugugcaucaacggcacgugcaccguggucaugaccgacggcuccgccagcgagcgcgccgacaccaagauccucuucaucgaggaggggaagaucgugcacaucagcccccuguccggcagcgcgcagcacguggaggagugcuccugcuacccgcgguaccccgggguccgcugcgugugccgggacaacuggaagggcagcaaccgccccaucguggacaucaacgucaaggacuacuccaucgugagcuccuacgugugcagcggccuggucggggacacgccccggaagaacgaccgcuccagcuccagcuacugccggaacccgaacaacgagaagggcucccacggggugaagggcugggccuucgacgacgggaacgacgucuggaugggccgcaccaucggcgaggagcuccggagcggguacgagaccuucaaggugaucggcgggugguccacccccaacagcaagcugcagaucaaccgccaggugaucgucgacuccggcaaccggagcggguacuccggcaucuucagcguggagggcaagagcugcaucaaccgcugcuucuacguggagcugauccgcgggcggaagcaggagacgcgcgucugguggaccuccaacagcaucgugguguucugcggcaccuccgggaccuacggcacggggagcuggcccgacggcgccgacaucaaccucaugcccaucuga

SEQ ID NO: 85949 - RNA, 1410 nt, Artificial Sequence
  derived and/or modified CDS sequence (opt1) from neuraminidase__InfluenzaA__AFG72143
augaaccccaaccagaagaucaucaccaucggcagcgugucccugaccaucgccacgaucugccuccugaugcagaucgccauccuggucaccaccgugacccuccacuucaagcaguacgagugcagcuccccgcccaacaaccaggugaugcccugcgagcccacgaucaucgagcgcaacaucaccgagaucgucuaccugaccaacaccacgaucgagaaggagaucugcccgaagcugguggaguaccggaacuggagcaagccccagugcaagaucaccggguucgcgcccuucuccaaggacaacagcauccgccucuccgccggcggggacaucugggugacccgggagcccuacgucagcugcgacccgggcaagugcuaccaguucgcccuggggcagggcaccacgcugaacaaccgccacuccaacgacaccgugcacgaccggacccccuaccgcacccuccugaugaacgagcugggcgugcccuuccaccucgggacgaagcaggucugcaucgccuggagcuccagcuccugccacgacggcaaggccuggcugcacgugugcgugaccgggcacgacgagaacgcgaccgccagcuucaucuacgacggccggcuggucgacuccaucgggagcugguccaagaacauccuccgcacccaggagagcgagugcgugugcaucaacggcacgugcaccguggucaugaccgacggcuccgccagcgagcgggccgacaccaagauccuguucaucgaggaggggaagaucgugcacaucagcccccuguccggcagcgcgcagcacguggaggagugcuccugcuacccgcgcuaccccgggguccggugcgugugccgcgacaacuggaagggcagcaaccggcccaucguggacaucaacgucaaggacuacuccaucgugagcuccuacgugugcagcggccucgucggggacacgccccgcaagaacgacuccagcuccagcuccuacugccggaacccgaacaacgagaagggcagccacggggugaagggcugggccuucgacgacgggaacgacgucuggaugggccgcaccaucggcgaggagcugcgguccggguacgagaccuucaaggugaucggcggguggagcacccccaacuccaagcugcagaucaaccgccaggugaucgucgacagcggcaaccgguccggguacagcggcaucuucagcguggagggcaaguccugcaucaaccgcugcuucuacguggagcucauccgggggcgcaagcaggagacgaaggucugguggaccagcaacuccaucgugguguucugcggcaccagcgggaccuacggcacgggguccuggcccgacggcgccgacaucaaccugaugcccaucuga

SEQ ID NO: 85950 - RNA, 1410 nt, Artificial Sequence
  derived and/or modified CDS sequence (opt1) from neuraminidase__InfluenzaA__AFG72165
augaaccccaaccagaagaucaucaccaucggcagcgugucccugaccaucgccacgaucugcuuccucaugcagaucgccauccuggucaccaccgugacccugcacuucaagcaguacgagugcaacagcccgcccaacaaccaggugaugcccugcgagcccacgaucaucgagcgcaacaucaccgagaucgucuaccucaccaacaccacgaucgagaaggagaucugcccgaagcugguggaguaccggaacugguccaagccccagugcaagaucaccggguucgcgcccuucagcaaggacaacuccauccgccugagcgccggcggggacaucugggugacccgggagcccuacgucuccugcgacccgggcaagugcuaccaguucgcccucgggcagggcaccacgcugaacaaccgccacagcaacgacaccgugcacgaccggacccccuaccgcacccugcucaugaacgagcugggcgugcccuuccaccuggggacgaagcaggucugcaucgccugguccagcuccagcugccacgacggcaaggccuggcuccacgugugcgugaccgggcacgacgagaacgcgaccgccuccuucaucuacgacggccggcuggucgacagcaucguguccuggagcaagaacauccugcgcacccaggaguccgagugcgugugcaucaacgggacgugcaccgucgugaugaccgacggcagcgccuccgagcgggccgacaccaagauccucuucaucgaggagggcaagaucgugcacaucagcccccugagcggguccgcgcagcacgucgaggagugcagcugcuacccgcgcuaccccggcgugcggugcgugugccgcgacaacuggaagggguccaaccggcccaucgucgacaucaacgugaaggacuacagcaucguguccagcuacgucugcuccggccuggugggcgacacgccccgcaagaacgacagcuccagcuccagcuacugccggaacccgaacaacgagaaggggucccacggcgucaaggggugggccuucgacgacggcaacgacguguggauggggcgcaccaucggcgaggagcuccggagcggcuacgagaccuucaaggugaucgggggcugguccacccccaacagcaagcugcagacgaaccgccaggucaucguggaccgggggaaccgcuccggcuacagcgggaucuucuccguggagggcaagagcugcaucaaccggugcuucuacgucgagcugauccgcggccgcaagcaggagaccaaggugugguggaccagcaacuccaucguggucuucugcgggaccagcggcacguacgggaccggcuccuggcccgacggggccgacaucaaccucaugcccaucuga

SEQ ID NO: 85951 - RNA, 1410 nt, Artificial Sequence
  derived and/or modified CDS sequence (opt1) from neuraminidase__InfluenzaA__AFG72176
augaaccccaaccagaagaucaucaccaucggcagcgugucccugaccaucgccacgaucugcuuccucaugcagaucaccauccuggucaccaccgugacgcugcacuucaagcaguacgagugcaacagcccgcccaacaaccaggugaugcucugcgagcccaccaucaucgagcgcaacaucaccgagaucgucuaccugaccaacacgaccaucgagaaggagaagugccccaagcugguggaguaccggaacugguccaagccgcagugcaagaucaccggguucgcccccuucagcaaggacaacuccauccgccucagcgcgggcggggacaucugggugacccgggagcccuacgucuccugcgaccccggcaagugcuaccaguucgcccuggggcagggcacgacccugaacaaccgccacagcaacgacaccgugcacgaccggaccccguaccgcacgcuccugaugaacgagcugggcgugcccuuccaccucgggaccaagcaggucugcaucgccugguccagcuccagcugccacgacggcaaggccuggcugcacgugugcgugaccgggcacgacgagaacgccaccgcguccuucaucuacgacggccggcuggucgacagcaucggguccuggagcaagaacauccuccgcacgcaggaguccgagugcgugugcaucaacgggaccugcaccguggucaugaccgacggcagcgccuccgagcgggccgacacgaagauccuguucaucgaggagggcaagaucgugcacaucagcccccugagcggcuccgcccagcacguggaggagugcagcugcuacccccgcuacccggggguccggugcgugugccgcgacaacuggaagggcuccaaccggcccaucguggacaucaacgucaaggacuacagcaucguguccagcuacgugugcuccggccucgucggggacacgccccgcaagaacgacagcuccagcuccagcuacugccggaaccccaacaacgagaagggcucccacggggugaagggcugggcguucgacgacgggaacgacgucuggaugggccgcaccaucagcgaggagcugcgguccggcuacgagaccuucaaggugaucgggggcuggagcaccccgaacuccaagcugcagaucaaccgccaggugaucgucgaccgggggaaccgcagcggcuacuccgggaucuucagcguggagggcaagagcugcaucaaccggugcuucuacguggagcucauccgcggccgcaagcaggagaacaaggucugguggaccuccaacagcaucgugguguucugcgggaccuccggcaccuacgggacgggcagcuggcccgacggggccgacaucaaccugaugcccaucuga

SEQ ID NO: 85952 - RNA, 1410 nt, Artificial Sequence; identical to SEQ ID NO: 85950
  derived and/or modified CDS sequence (opt1) from neuraminidase__InfluenzaA__AFG72198

SEQ ID NO: 85953 - RNA, 1410 nt, Artificial Sequence; identical to SEQ ID NO: 85950
  derived and/or modified CDS sequence (opt1) from neuraminidase__InfluenzaA__AFG72209

SEQ ID NO: 85954 - RNA, 1410 nt, Artificial Sequence
  derived and/or modified CDS sequence (opt1) from neuraminidase__InfluenzaA__AFG72220
augaaccccaaccagaagaucaucaccaucggcagcgugucccugaccaucgccacgaucugcuuccucaugcagaucgccauccuggucaccaccgugacccugcacuucaagcaguacgagugcaacagcccgcccaacaaccaggugaugcucugcgagcccacgaucaucgagcgcaacaucaccgagaucguccaccugaccaacaccacgaucgagaaggagaucugccccaagcuggcggaguaccggaacugguccaagccgcagugcaagaucaccggguucgcccccuucagcaaggacaacuccauccgccucagcgccggcggggacaucugggugacccgggagcccuacguguccugcgaccccggcaagugcuaccaguucgcccuggggcagggcaccacgcugaacaaccgccacagcaacgacaccguccacgaccggaccccguaccgcacccuccugaugaacgagcugggcgugcccuuccaccucgggacgaagcaggucugcaucgccugguccagcuccagcugccacgacggcaaggcguggcugcacgugugcgugaccgggcacgacgagaacgccaccgccuccuucaucuacgacggccggcugguggacagcaucggguccuggagcaagaacauccuccgcacccaggaguccgagugcgucugcaucaacggcacgugcaccguggugaugaccgacggcagcgccuccgagcgggcggacaccaagauccuguucaucgaggaggggaagaucguccacaucagcccccugagcggcuccgcccagcacguggaggagugcagcugcuacccccgcuacccgggggugcggugcgucugccgcgacaacuggaagggcuccaaccggcccaucguggacaucaacgugaaggacuacagcaucgucuccagcuacgugugcuccggccucgugggggacacgccccgcaagaacgacagcuccagcuccagcuacugccggaaccccaacaacgagaagggcucccacggggucaagggcugggccuucgacgacgggaacgacguguggaugggccgcaccaucagcgaggagcugcgguccggcuacgagaccuucaaggucaucgggggcuggagcaagccgaacuccaagcugcagaucaaccgccaggugaucguggaccgggggaaccgcagcggcuacuccgggaucuucagcgucgagggcaagagcugcaucaaccggugcuucuacguggagcucauccgcggccgcaagcaggagaccgaggugugguggacguccaacagcaucgucguguucugcgggaccuccggcaccuacgggaccggcagcuggcccgacggggccgacaucaaccugaugcccaucuga

SEQ ID NO: 85955 - RNA, 1410 nt, Artificial Sequence; identical to SEQ ID NO: 85950
  derived and/or modified CDS sequence (opt1) from neuraminidase__InfluenzaA__AFG72231

SEQ ID NO: 85956 - RNA, 1410 nt, Artificial Sequence
  derived and/or modified CDS sequence (opt1) from neuraminidase__InfluenzaA__AFG72297
augaaccccaaccagaagaucaucaccaucggcagcgugucccugaccaucgccacgaucugcuuccucaugcagaucgccauccuggucaccaccgugacccugcacuucaagcaguacgagugcaacagcccgcccaacaaccaggugaugcucugcgagcccacgaucaucgagcgcaacaucaccgagaucgucuaccugaccaacaccacgaucgagcgggagaucugccccaagcuggcggaguaccgcaacugguccaagccgcagugcaagaucaccggguucgcccccuucagcaaggacaacuccauccggcucagcgccggcggggacaucugggugacccgcgagcccuacguguccugcgaccccggcaagugcuaccaguucgcccuggggcagggcaccacgcugaacaaccggcacagcaacgacaccguccacgagcgcaccccguaccggacccuccugaugaacgagcugggcgugcccuuccaccucgggacgaagcaggucugcaucgccugguccagcuccagcugccacgacggcaaggcguggcugcacgugugcgugaccgggcacgacgagaacgccaccgccuccuucaucuacgacggccgccugguggacagcaucggguccuggagcaagaacauccuccggacccaggaguccgagugcgucugcaucaacggcacgugcaccguggugaugaccgacggcagcgccuccgagcgcgcggacaccaagauccuguucaucgaggaggggaagaucguccacaucagcccccugagcggcuccgcccagcacguggaggagugcagcugcuacccccgguacccgggggugcgcugcgucugccgggacaacuggaagggcuccaaccgccccaucguggacaucaacgugaaggacuacagcaucgucuccagcuacgugugcuccggccucgugggggacacgccccggaagaacgacagcuccagcuccagcuacugccgcaaccccaacaacgagaagggcucccacggggucaagggcugggccuucgacgacgggaacgacguguggaugggccggaccaucagcgaggagcugcgcuccggcuacgagaccuucaaggucaucgggggcuggagcaagccgaacuccaagcugcagaucaaccgccaggugaucguggaccgggggaaccggagcggcuacuccgggaucuucagcgucgagggcaagagcugcaucaaccgcugcuucuacguggagcucauccgcggccggaagcaggagaccgaggugugguggacguccaacagcaucgucguguucugcgggaccuccggcaccuacgggaccggcagcuggcccgacggggccgacaucaaccugaugcccaucuga

SEQ ID NO: 85957 - RNA, 1410 nt, Artificial Sequence
  derived and/or modified CDS sequence (opt1) from neuraminidase__InfluenzaA__AFG72308
augaaccccaaccagaagaucaucaccaucggcagcgugucccugaccaucgccacgaucugcuuccucaugcagaucgccauccuggucaccaccgugacccugcacuucaagcaguacgagugcaacagcccgcccuccaaccaggugaugcucugcgagcccacgaucaucgagcgcaacaucaccgagaucgucuaccugaccaacaccacgaucgagaaggagaucugccccaagcuggcggaguaccggaacuggagcaagccgcagugcaagaucaccggguucgcccccuucuccaaggacaacagcauccgccucuccgccggcggggacaucugggugacccgggagcccuacgugagcugcgaccccggcaagugcuaccaguucgcccuggggcagggcaccacgcugaacaaccgccacuccaacgacaccguccacgaccggaccccguaccgcacccuccugaugaacgagcugggcgugcccuuccaccucgggacgaagcaggucugcaucgccuggagcuccagcuccugccacgacggcaaggcguggcugcacgugugcgugaccgggcacgacgagaacgccaccgccagcuucaucuacgacggccggcugguggacuccaucgggagcugguccaagaacauccuccgcacccaggagagcgagugcgucugcaucaacggcacgugcaccguggugaugaccgacggcuccgccagcgagcgggcggacaccaagauccuguucaucgaggaggggaagaucguccacaucagcccccuguccggcagcgcccagcacguggaggagugcuccugcuacccccgcuacccgggggugcggugcgucugccgcgacaacuggaagggcagcaaccggcccaucguggacaucaacgugaaggacuacuccaucgucagcuccuacgugugcagcggccucgugggggacacgccccgcaagaacgacuccagcuccagcuccuacugccggaaccccaacaacgagaagggcagccacggggucaagggcugggccuucgacgacgggaacgacguguggaugggccgcaccaucuccgaggagcugcggagcggcuacgagaccuuccgcgucaucgggggcugguccaagccgaacagcaagcugcagaucaaccgccaggugaucguggaccgggggaaccgguccggcuacagcgggaucuucagcgucgagggcaaguccugcaucaaccgcugcuucuacguggagcucauccgcggccggaagcaggagaccgaggugugguggacgagcaacuccaucgucguguucugcgggaccagcggcaccuacgggaccggcuccuggcccgacggggccgacaucaaccugaugcccaucuga

SEQ ID NO: 85958 - RNA, 1410 nt, Artificial Sequence; identical to SEQ ID NO: 79209
  derived and/or modified CDS sequence (opt1) from neuraminidase__InfluenzaA__AFG72320

SEQ ID NO: 85959 - RNA, 1410 nt, Artificial Sequence
  derived and/or modified CDS sequence (opt1) from neuraminidase__InfluenzaA__AFG72331
augaaccccaaccagaagaucaucaccaucggcagcgugucccugaccgucgccacgaucugcuuccucaugcagaucgccauccuggugaccaccgugacccugcacuucaagcaguacgagugcaacagcccgcccaacaaccaggucaugcucugcgagcccacgaucaucgagcgcaacaucaccgagaucguguaccugaccaacaccacgaucgagaaggagaucugccccaagcuggcggaguaccggaacugguccaagccgcagugcaagaucaccggguucgcccccuucagcaaggacaacuccauccgccucagcgccggcggggacaucugggugacccgggagcccuacgucuccugcgaccccggcaagugcuaccaguucgcccuggggcagggcaccacgcugaacaaccgccacagcaacgacaccgugcacgaccggaccccguaccgcacccuccugaugaacgagcugggcgugcccuuccaccucgggacgaagcaggucugcaucgccugguccagcuccagcugccacgacggcaaggcguggcugcacgugugcgugaccgggcacgacgagaacgccaccgccuccuucaucuacgacggccggcuggucgacagcaucggguccuggagcaagaacauccuccgcacccaggaguccgagugcgugugcaucaacggcacgugcaccguggucaugaccgacggcagcgccuccgagcgggcggacaccaagauccuguucaucgaggaggggaagaucgugcacaucagcccccugagcggcuccgcccagcacguggaggagugcagcugcuacccccgcuacccggggguccggugcgugugccgcgacaacuggaagggcuccaaccggcccaucguggacaucaacgucaaggacuacagcaucguguccagcuacgugugcuccggccucgucggggacacgccccgcaagaacgacagcuccagcuccagcuacugccggaaccccaacaacgagaagggcucccacggggugaagggcugggccuucgacgacgggaacgacgucuggaugggccgcaccaucagcgaggagcugcgguccggcuacgagaccuucaaggugaucgggggcuggagcaagccgaacuccaagcugcagaucaaccgccaggugaucgucgaccgggggaaccgcagcggcuacuccgggaucuucagcguggagggcaagagcugcaucaaccggugcuucuacguggagcucauccgcggccgcaagcaggagaccgaggucugguggacguccaacagcaucgugguguucugcgggaccuccggcaccuacgggaccggcagcuggcccgacggggccgacaucaaccugaugcccaucuga

SEQ ID NO: 85960 - RNA, 1410 nt, Artificial Sequence
  derived and/or modified CDS sequence (opt1) from neuraminidase__InfluenzaA__AFG72353
augaaccccaaccagaagaucaucaccaucggcagcgugucccugaccaucgccacgaucugcuuccucaugcagaucgccauccuggucaccaccgugacccugcacuucaagcaguacgagugcaacagcccgcccaacaaccaggugaugcucugcgagcccacgaucaucgagcgcaacaucaccgagaucgucuaccugaccaacaccacgaucgagaaggagaucugccccaagcuggcggaguaccggaacugguccaagccgcagugcaagaucaccggguucgcccccuucagcaaggacaacuccauccgccucagcgccggcggggacaucugggugacccgggagcccuacguguccugcgacagcggcaagugcuaccaguucgcccuggggcagggcaccacgcugaacaaccgccacuccaacgacaccguccacgaccggacccccuaccgcacccuccugaugaacgagcugggcgugccguuccaccucgggacgaagcaggucugcaucgccuggagcuccagcuccugccacgacggcaaggcguggcugcacgugugcgugaccgggcacgacgagaacgccaccgccagcuucaucuacgacggccggcugguggacuccaucgggagcugguccaagaacauccuccgcacccaggagagcgagugcgucugcaucaacggcacgugcaccguggugaugaccgacggcuccgccagcgagcgggcggacaccaagauccuguucaucgaggaggggaagaucguccacaucagcccccuguccggcagcgcccagcacguggaggagugcuccugcuacccccgcuaccccggggugcggugcgucugccgcgacaacuggaagggcagcaaccggccgaucguggacaucaacgugaaggacuacuccaucgucagcuccuacgugugcagcggccucgugggggacacgccccgcaagaacgacuccagcuccagcuccuacugccggaaccccaacaacgagaagggcagccacggggucaagggcugggccuucgacgacgggaacgacguguggaugggccgcaccaucuccgaggagcugcggagcggcuacgagaccuucaaggucaucgggggcugguccaagcccaacagcaagcugcagaucaaccgccaggugaucguggaccgggggaaccgcuccggcuacagcgggaucuucagcgucgagggcaaguccugcaucaaccggugcuucuacguggagcucauccgcggccgcaagcaggagaccgaggugugguggacgagcaacuccaucgucguguucugcgggaccagcggcaccuacgggaccggcuccuggccggacggggccgacaucaaccugaugcccaucuga

SEQ ID NO: 85961 - RNA, 1410 nt, Artificial Sequence; identical to SEQ ID NO: 79209
  derived and/or modified CDS sequence (opt1) from neuraminidase__InfluenzaA__AFG72364

SEQ ID NO: 85962 - RNA, 1410 nt, Artificial Sequence
  derived and/or modified CDS sequence (opt1) from neuraminidase__InfluenzaA__AFG72430
augaaccccaaccagaagaucaucaccaucggcagcgugucccugaccaucacgaccaucugcuuccucaugcagaucgccauccuggucaucaccgugacccugcacuucaagcagugcgagugcaacagcccgcccaacaaccaggugaugcucugcgagcccacgaucaucgagcgcaacaucaccgagaucgucuaccugaccaacaccacgaucgagaaggagaucugccccaagcuggccgaguaccggaacugguccaagccgcagugcaagaucaccggguucgcgcccuucagcaaggacaacuccauccgccucagcgccggcggggacaucugggugacccgggagcccuacguguccugcgaccccggcaagugcuaccaguucgcccuggggcagggcaccacgcugaacaaccgccacagcaacgacaccguccacgaccggaccccguaccgcacccuccugaugaacgagcugggcgugcccuuccaccucgggacgaagcaggucugcaucgccugguccagcuccagcugccacgacggcaaggccuggcugcacgugugcgugaccgggcacaacgagaacgcgaccgccuccuucaucuacgacggccggcugguggacagcaucggguccuggagcaagaacauccuccgcacccaggaguccgagugcgucugcaucaacggcacgugcaccguggugaugaccgacggcagcgccuccgggcgggccgacaccaagauccuguucaucgaggagggcaagaucguccacaucagccagcugagcggguccgcgcagcacguggaggagugcagcugcuacccccgcuaccccggcgugcggugcgucugccgcgacaacuggaagggcuccaaccggccgaucguggacaucaacgugaaggacuacagcaucgucuccagcuacgugugcuccgggcucgugggcgacacgccccgcaagaacgacagcuccagcuccagcaacugccuggaccccaacaacgaggagggcgggcacggggucaagggcugggccuucgacgacggcaacgacguguggauggggcggaccaucuccgagaagcugcgcagcggcuacgagaccuucaaggucaucgggggcugguccaagcccaacagcaagcuccagaucaaccgccaggugaucguggaccgggggaaccgguccggcuacagcggcaucuucuccgucgagggcaagagcugcaucaaccgcugcuucuacguggagcugauccgggggcgcaagcaggagaccgaggugugguggacgagcaacuccaucgucguguucugcgggaccagcggcaccuacgggaccggcuccuggccggacggcgccgacaucaaccugaugcccaucuga

SEQ ID NO: 85963 - RNA, 1410 nt, Artificial Sequence; identical to SEQ ID NO: 79209
  derived and/or modified CDS sequence (opt1) from neuraminidase__InfluenzaA__AFG72452

SEQ ID NO: 85964 - RNA, 1410 nt, Artificial Sequence
  derived and/or modified CDS sequence (opt1) from neuraminidase__InfluenzaA__AFG72474
augaaccccaaccagaagaucaucaccaucggcagcgugucccugaccaucgccacgaucugcuuccucaugcagaucgccauccuggucaccaccgugacccugcacuucaagcaguacgagugcaacagcccgcccaacaaccaggugaugcucugcgagcccacgaucaucgagcgcaacaucaccgagaucgucuaccugaccaacaccacgaucgagaaggagaucugccccaagcuggcggaguaccggaacugguccaagccgcagugcgagaucaccggguucgcccccuucagcaaggacaacuccauccgccucagcgccggcggggacaucugggugacccgggagcccuacguguccugcgaccccggcaagugcuaccaguucgcccuggggcagggcaccacgcugaacaaccgccacagcaacgacaccguccacgaccggaccccguaccgcacccuccugaugaacgagcugggcgugcccuuccaccucgggacgaagcaggucugcaucgccugguccagcuccagcugccacgacggcaaggcguggcugcacgugugcgugaccgggcacgacgagaacgccaccgccuccuucaucuacgacggccggcugguggacagcaucggguccuggagcaagaacauccuccgcacccaggaguccgagugcgucugcaucaacggcacgugcaccguggugaugaccgacggcagcgccuccgagcgggcggacaccaagauccuguucaucgaggaggggaagaucguccacaucagcccccugagcggcuccgcccagcacguggaggagugcagcugcuacccccgcuacccgggggugcggugcgucugccgcgacaacuggaagggcuccaaccggcccaucguggacaucaacgugaaggacuacagcaucgucuccagcuacgugugcuccggccucgugggggacacgccccgcaagaacgacagcuccagcuccagcuacugccggaaccccaacaacgagaagggcucccacggggucaagggcugggccuucgacgacgggaacgacguguggaugggccgcaccaucagcgaggagcugcgguccggcuacgagaccuucaaggucaucgggggcuggagcaagccgaacuccaagcugcagaucaaccgccaggugaucguggaccgggggaaccgcagcggcuacuccgggaucuucagcgucgagggcaagagcugcaucaaccggugcuucuacguggagcucauccgcggccgcaagcaggagaccgaggugugguggacguccaacagcaucgucguguucugcgggaccuccggcaccuacgggaccggcagcuggcccgacggggccgacaucaaccugaugcccaucuga

SEQ ID NO: 85965 - RNA, 1410 nt, Artificial Sequence
  derived and/or modified CDS sequence (opt1) from neuraminidase__InfluenzaA__AFG72485
augaaccccaaccagaagaucaucaccaucggcagcgugucccugaccaucgccacgaucugcuuccucaugcagaucgccauccuggucaccaccgugacccugcacuucaagcagcacgagugcaacagcccgcccaacaaccaggugaugcucugcgagcccacgaucaucgagcgcaacaucaccgagaucgucuaccugaccaacaccacgaucgagaaggagaucugccccaagcuggcggaguaccggaacugguccaagccgcagugcaagaucaccggguucgcccccuucagcaaggacaacuccauccgccucagcgccggcggggacaucugggugacccgggagcccuacguguccugcgaccccggcaagugcuaccaguucgcccuggggcagggcaccacgcugaacaaccgccacagcaacgacaccguccacgaccggaccccguaccgcacccuccugaugaacgagcugggcgugcccuuccaccucgggacgaagcaggucugcaucgccugguccagcuccagcugccacgacggcaaggcguggcugcacgugugcgugaccgggcacgacgagaacgccaccgccuccuucaucuacgacggccggcugguggacagcaucggguccuggagcaagaacauccuccgcacccaggaguccgagugcgucugcaucaacggcacgugcaccguggugaugaccgacggcagcgccuccgagcgggcggacaccaagauccuguucaucgaggaggggaagaucguccacaucagcccccugagcggcuccgcccagcacguggaggagugcagcugcuacccccgcuacccgggggugcggugcgucugccgcgacaacuggaagggcuccaaccggcccaucguggacaucaacgugaaggacuacagcaucgucuccagcuacgugugcuccggccucgugggggacacgccccgcaagaacgacagcuccagcuccagcuacugccggaaccccaacaacgagaagggcucccacggggucaagggcugggccuucgacgacgggaacgacguguggaugggccgcaccaucagcgaggagcugcgguccggcuacgagaccuucaaggucaucgggggcuggagcaagccgaacuccaagcugcagaucaaccgccaggugaucguggaccgggggaaccgcagcggcuacuccgggaucuucagcgucgagggcaagagcugcaucaaccggugcuucuacguggagcucauccgcggccgcaagcaggagaccgaggugugguggacguccaacagcaucgucguguucugcgggaccuccggcaccuacgggaccggcagcuggcccgacggggccgacaucaaccugaugcccaucuga

SEQ ID NO: 85966 - RNA, 1410 nt, Artificial Sequence; identical to SEQ ID NO: 79125
  derived and/or modified CDS sequence (opt1) from neuraminidase__InfluenzaA__AFG72507

SEQ ID NO: 85967 - RNA, 1410 nt, Artificial Sequence
  derived and/or modified CDS sequence (opt1) from neuraminidase__InfluenzaA__AFG72529
augaaccccaaccagaagaucaucaccaucggcagcgugucccugaccaucgccacgaucugcuuccucaugcagaucgccauccuggucaccaccgugacccugcacuucaagcaguacgagugcaacagcccgcccaacaaccaggugaugcucugcgagcccacgaucaucgagcgcaacaucaccgagaucgucuaccugaccaacaccacgaucgagaaggagaucugccccaagcuggcggaguaccggaacugguccaagccgcagugcaagaucaccggguucgcccccuucagcaaggacaacuccauccgccucagcgccggcggggacaucugggugacccgggagcccuacguguccugcgaccccggcaagugcuaccaguucgcccuggggcagggcaccacgcugaacaaccgccacagcaacgacaccguccacgaccggaccccguaccgcacccuccugaugaacgagcugggcgugcccuuccaccucgggacgaagcaggucugcaucgccugguccagcuccagcugccacgacggcaaggcguggcugcacgugugcgugaccgggcacgacgagaacgccaccgccuccuucaucuacgacggccggcugguggacagcaucggguccuggagcaagaagauccuccgcacccaggaguccgagugcgucugcaucaacggcacgugcaccguggugaugaccgacggcagcgccuccgagcgggcggacaccaagauccuguucaucgaggaggggaagaucguccacaucagcccccugagcggcuccgcccagcacguggaggagugcagcugcuacccccgcuacccgggggugcggugcgucugccgcgacaacuggaagggcuccaaccggcccaucguggacaucaacgugaaggacuacagcaucgucuccagcuacgugugcuccggccucgugggggacacgccccgcaagaacgacagcuccagcuccagcuacugccagaaccccaacaacgagaacggcucccacggggucaagggcugggccuucgacgacgggaacgacguguggaugggccggaccaucagcgaggagcugcgcuccggcuacgagaccuucaaggucaucgggggcuggagcaagccgaacuccaagcugcagaucaaccgccaggugaucguggaccgggggaaccggagcggcuacuccgggaucuucagcgucgagggcaagagcugcaucaaccgcugcuucuacguggagcucauccggggccgcaagcaggagaccgaggugugguggacguccaacagcaucgucguguucugcgggaccuccggcaccuacgggaccggcagcuggcccgacggggccgacaucaaccugaugcccaucuga

SEQ ID NO: 85968 - RNA, 1410 nt, Artificial Sequence
  derived and/or modified CDS sequence (opt1) from neuraminidase__InfluenzaA__AFG72540
augaaccccaaccagaagaucaucaccaucggcagcgugucccugaccaucgccacgaucugcuuccucaugcagaucgccauccuggucaccaccgugacccugcacuucaagcaguacgagugcaacccgccgcccaacaaccaggugaugcucugcgagcccacgaucaucgagcgcaacaucaccgagaucgucuaccugaccaacaccacgaucaagaaggagaucugccccaagcuggcggaguaccggaacuggagcaagccccagugcaagaucaccggguucgcccccuucuccaaggacaacagcauccgccucuccgccggcggggacaucugggugacccgggagcccuacgugagcugcgacccgggcaagugcuaccaguucgcccuggggcagggcaccacgcugaacaaccgccacuccaacgacaccguccacgaccggacccccuaccgcacccuccugaugaacgagcugggcgugcccuuccaccucgggacgaagcaggucugcaucgccuggagcuccagcuccugccacgacggcaaggcguggcugcacgugugcgugaccgggcacgacgagaacgccaccgccagcuucaucuacgacggccggcugguggacuccaucgggagcugguccaagaacauccuccgcacccaggagagcgagugcgucugcaucaacggcacgugcaccguggugaugaccgacggcuccgccagcgagcgggcggacaccaagauccuguucaucgaggaggggaagaucguccacaucagcccccuguccggcagcgcccagcacguggaggagugcuccugcuacccgcgcuaccccggggugcggugcgucugccgcgacaacuggaagggcagcaaccggcccaucguggacaucaacgugaaggacuacuccaucgucagcuccuacgugugcagcggccucgugggggacacgccccgcaagaacgacuccagcuccagcuccuacugcuggaacccgaacaacgagaagggcgggcacggcgucaaggggugggccuucgacgacggcaacgacguguggaugggccggaccaucagcgaggagcugcgcuccggguacgagaccuucaaggucaucggcggguggagcaagcccaacuccaagcugcagaucaaccgccaggugaucguggaccggggcaaccggagcggguacuccggcaucuucagcgucgagggcaaguccugcaucaaccgcugcuucuacguggagcucauccgggggcgcaagcaggagaccgaggugugguggacgagcaacagcaucgucguguucugcggcaccuccgggaccuacggcaccgggagcuggcccgacggcgccgacaucaaccugaugcccaucuga

SEQ ID NO: 85969 - RNA, 1410 nt, Artificial Sequence
  derived and/or modified CDS sequence (opt1) from neuraminidase__InfluenzaA__AFG72562
augaaccccaaccagaagaucaucaccaucggcagcgugucccugaccaucgccacgaucugcuuccucaugcagaucgccauccuggucaccaccgugacccugcacuucaagcaguacgagugcaacagcccgcccaacaaccaggugaugcucugcgagcccacgaucaucgagcgcaacaucaccgagaucgucuaccugaccaacaccacgaucgagaaggagaucugccccaagcuggcggaguaccggaacugguccaagccgcagugcaagaucaccggguucgcccccuucagcaaggacaacuccauccgccucagcgccggcggggacaucugggugacccgggagcccuacguguccugcgaccccggcaagugcuaccaguucgcccuggggcagggcaccacgcugaacaaccgccacagcaacgacaccguccacgaccggaccccguaccgcacccuccugaugaacgagcugggcgugcccuuccaccucgggacgaagcaggucugcaucgccugguccagcuccagcugccacgacggcaaggcguggcugcacgugugcgugaccgggcacgacgagaacgccaccgccuccuucaucuacgacggccggcugguggacagcaucggguccuggagcaagaacauccuccgcacccaggaguccgagugcgucugcaucaacggcacgugcaccguggugaugaccgacggcagcgccuccgagcgggcggacaccaagauccuguucaucgaggaggggaagaucguccacaucagcccccugagcggcuccgcccagcacguggaggagugcagcugcuacccccgcuacccgggggugcggugcgucugccgcgacaacuggaagggcuccaaccggcccaucguggacaucaacgugaaggacuacagcaucgucuccagcuacgugugcuccggccucgugggggacacgccccgcaagaacgacagcuccagcuccagcuacugcuggaaccccaacaacgagaagggcgggcacggcgucaaggggugggccuucgacgacggcaacgacguguggaugggccggaccaucuccgaggagcugcgcagcggguacgagaccuucaaggucaucggcgggugguccaagccgaacagcaagcugcagaucaaccgccaggugaucguggaccggggcaaccgguccggguacagcggcaucuucuccgucgagggcaagagcugcaucaaccgcugcuucuacguggagcucauccgggggcgcaagcaggagaccgaggugugguggacgagcaacuccaucgucguguucugcggcaccagcgggaccuacggcaccggguccuggcccgacggcgccgacaucaaccugaugcccaucuga

SEQ ID NO: 85970 - RNA, 1410 nt, Artificial Sequence
  derived and/or modified CDS sequence (opt1) from neuraminidase__InfluenzaA__AFG72584
augaaccccaaccagaagaucaucaccaucggcagcgugucccugaccaucgccacgaucugcuuccucaugcagaucgccauccuggucaccaccgugacccugcacuucaagcaguacgagugcaacagcccgcccaacaaccaggugaugcucugcgagcccacgaucaucgagcgcaacaucaccgagaucgucuaccugaccaacaccacgaucgagaaggaggugugccccaagcuggcggaguaccggaacugguccaagccgcagugcaagaucaccggguucgcccccuucagcaaggacaacuccauccgccucagcgccggcggggacaucugggugacccgggagcccuacgucuccugcgaccccggcaagugcuaccaguucgcccuggggcagggcaccacgcugaacaacaagcacagcaacgacaccgugcacgaccgcaccccguaccggacccuccugaugaacgagcugggcgugcccuuccaccucgggacgaagcaggucugcaucgccugguccagcuccagcugccacgacggcaaggcguggcugcacgugugcgugaccgggcacgacgagaacgccaccgccuccuucaucuacgacggccgccuggucgacagcaucggguccuggagcaagaacauccuccggacccaggaguccgagugcgugugcaucaacggcacgugcaccguggucaugaccgacggcagcgccuccgagaaggcggacaccaagauccuguucaucgaggaggggaagaucgugcacaucagcccccugagcggcuccgcccagcacguggaggagugcagcugcuacccccgcuacccggggguccggugcgugugccgcgacaacuggaagggcuccaaccggcccaucguggacaucaacgucaaggacuacagcaucguguccagcuacgugugcuccggccucgucggggacacgccccgcaagaacgacagcuccagcuccagcuacugcuggaaccccaacaacgagaagggcgggcacggcgugaaggggugggccuucgacgacggcaacgacgucuggaugggccggaccaucuccgaggagcugcgcagcggguacgagaccuucaaggugaucggcgggugguccaagccgaacagcaagcugcagaucaaccgccaggugaucgucgaccggggcaaccgguccggguacagcggcaucuucuccguggagggcaagagcugcaucaaccgcugcuucuacguggagcucauccgggggcgcaagcaggagaccgaggucugguggacgagcaacuccaucgugguguucugcggcaccagcgggaccuacggcaccggguccuggcccgacggcgccgacaucaaccugaugcccaucuga

SEQ ID NO: 85971 - RNA, 1410 nt, Artificial Sequence
  derived and/or modified CDS sequence (opt1) from neuraminidase__InfluenzaA__AFG72606
augaaccccaaccagaagaucaucaccaucggcagcgugucccugaccaucgccacgaucugcuuccucaugcagaucgccauccuggucaccaccgugacccugcacuucaagcaguacgagugcaacagcccgcccaacaaccaggugaugcucugcgagcccacgaucaucgagcgcaacaucaccgagaucgucuaccugaccaacaccacgaucgagaaggagaucugccccaagcuggcggaguaccggaacugguccaagccgcagugcaagaucaccggguucgcccccuucagcaaggacaacuccauccgccucagcgccggcggggacaucugggugacccgggagcccuacguguccugcgaccccggcaagugcuaccaguucgcccuggggcagggcaccacgcugaacaaccgccacagcaacgacaccguccacgaccggaccccguaccgcacccuccugaugaacgagcugggcgugcccuuccaccucgggacgaagcaggucugcaucgccugguccagcuccagcugccacgacggcaaggcguggcugcacgugugcgugaccgggcacgacgagaacgccaccgccuccuucaucuacgacggccggcugguggacagcaucggguccuggagcaagaacauccuccgcacccaggaguccgagugcgucugcaucaacggcacgugcaccguggugaugaccgacggcagcgccuccgagcgggcggacaccaagauccuguucaucgaggaggggaagaucguccacaucagcccccugagcggcuccgcccagcacguggaggagugcagcugcuacccccgcuacccgggggugcggugcgucugccgcgacaacuggaagggcuccaaccggcccaucguggacaucaacgugaaggaccacagcaucgucuccagcuacgugugcuccggccucgugggggacacgccccgcaagaacgacagcuccagcuccagcuacugccugaaccccaacaacgaggagggcgggcacggcgucaaggggugggccuucgacgacggcaacgacguguggaugggccggaccaucuccgagaagcugcgcagcggguacgagaccuucaaggucaucggcgggugguccaagccgaacagcaagcuccagaucaaccgccaggugaucguggaccggggcaaccgguccggguacagcggcaucuucuccgucgagggcaagagcugcgugaaccgcugcuucuacguggagcugauccgggggcgcaagcaggagaccgaggucugguggacgagcaacuccaucgugguguucugcggcaccagcgggaccuacggcaccggguccuggcccgacggcgccgacaucaaccugaugcccaucuga

SEQ ID NO: 85972 - RNA, 1410 nt, Artificial Sequence
  derived and/or modified CDS sequence (opt1) from neuraminidase__InfluenzaA__AFG72617
augaaccccaaccagaagaucaucaccaucggcagcgugucccugaccaucacgaccaucugcuuccucaugcagaucgccauccuggucaucaccgugacccugcacuucaagcagugcgagugcaacagcccgcccaacaaccaggugaugcucugcgagcccacgaucaucgagcgcaacaucaccgagaucgucuaccugaccaacaccacgaucgagaaggagaucugccccaagcuggccgaguaccggaacugguccaagccgcagugcaagaucaccggguucgcgcccuucagcaaggacaacuccauccgccucagcgccggcggggacaucugggugacccgggagcccuacguguccugcgaccccggcaagugcuaccaguucgcccuggggcagggcaccacgcugaacaaccgccacagcaacgacaccguccacgaccggaccccguaccgcacccuccugaugaacgagcugggcgugcccuuccaccucgggacgaagcaggucugcaucgccugguccagcuccagcugccacgacggcaaggccuggcugcacgugugcgugaccgggcacaacgagaacgcgaccgccuccuucaucuacgacggccggcugguggacagcaucggguccuggagcaagaacauccuccgcacccaggaguccgagugcgucugcaucaacggcacgugcaccguggugaugaccgacggcagcgccuccgggcgggccgacaccaagauccuguucaucgaggagggcaagaucguccacaucagcccccugagcggguccgcgcagcacguggaggagugcagcugcuacccccgcuacccgggcgugcggugcgucugccgcgacaacuggaagggcuccaaccggcccaucguggacaucaacgugaaggacuacagcaucgucuccagcuacgugugcuccgggcucgugggcgacacgccccgcaagaacgacagcuccagcuccagcuacugccugaaccccaacaacgaggagggcgggcacggggucaagggcugggccuucgacgacggcaacgacguguggauggggcggaccaucuccgagaagcugcgcagcggcuacgagaccuucaaggucaucgggggcugguccaagccgaacagcaagcuccagaucaaccgccaggugaucguggaccgggggaaccgguccggcuacagcggcaucuucuccgucgagggcaagagcugcaucaaccgcugcuucuacguggagcugauccgggggcgcaagcaggagaccgaggugugguggacgagcaacuccaucgucguguucugcgggaccagcggcaccuacgggaccggcuccuggcccgacggcgccgacaucaaccugaugcccaucuga

SEQ ID NO: 85973 - RNA, 1410 nt, Artificial Sequence
  derived and/or modified CDS sequence (opt1) from neuraminidase__InfluenzaA__AFG72628
augaaccccaaccagaagaucaucaccaucggcagcgugucccugaccaucgccacgaucugcuuccucaugcagaucgccauccuggucaccaccgugacccugcacuucaagcaguacgagugcaacagcccgcccaacaaccaggugaugcucugcgagcccacgaucaucgagcgcaacaucaccgagaucgucuaccugaccaacaccacgaucgagaaggagaucugccccaagcuggcggaguaccggaacugguccaagccgcagugcaagaucaccggguucgcccccuucagcaaggacaacuccauccgccucagcgccggcggggacaucugggugacccgggagcccuacguguccugcgaccccgacaagugcuaccaguucgcccugggccaggggaccacgcugaacaaccgccacagcaacgacaccguccacgaccggaccccguaccgcacccuccugaugaacgagcugggcgugcccuuccaccucggcacgaagcaggucugcaucgccugguccagcuccagcugccacgacgggaaggcguggcugcacgugugcgugaccggccacgacgagaacgccaccgccuccuucaucuacgacgggcggcugguggacagcaucggcuccuggagcaagaagauccuccgcacccaggaguccgagugcgucugcaucaacgggacgugcaccguggugaugaccgacggcagcgccuccggccgggcggacaccaagauccuguucaucgaggaggggaagaucguccacaucagcccccugagcggcuccgcccagcacguggaggagugcagcugcuacccccgcuacuccggggugcggugcgucugccgcgacaacuggaagggcagcaaccggccgaucguggacaucaacgugaaggacuacuccaucgucagcuccuacgugugcagcggccucgugggggacacgccccgcaagaacgacuccagcuccagcucccacugccugaaccccaacaacgaggagggcgggcacggcgucaaggggugggccuucgacgacggcaacgacguguggaugggccggaccaucagcgagaagcugcgcuccggguacgagaccuucaaggucaucggcggguggagcaagcccaacuccaagcuccagaucaaccgccaggugaucguggaccggggcaaccggagcggguacuccggcaucuucagcgucgagggcaagagcugcaucaaccgcugcuucuacguggagcugauccgggggcgcaagcaggagaccgaggugugguggacguccaacagcaucgucguguucugcggcaccuccgggaccuacggcaccgggagcuggccggacggcgccgacaucaaccugaugcccaucuga

SEQ ID NO: 85974 - RNA, 1410 nt, Artificial Sequence; identical to SEQ ID NO: 79004
  derived and/or modified CDS sequence (opt1) from neuraminidase__InfluenzaA__AFG72639

SEQ ID NO: 85975 - RNA, 1410 nt, Artificial Sequence
  derived and/or modified CDS sequence (opt1) from neuraminidase__InfluenzaA__AFG72650
augaaccccaaccagaagaucaucaccaucggcagcgugucccugaccaucgccacgaucugcuuccucaugcagaucgccauccuggucaccaccgugacccugcacuucaagcaguacgagugcaacagcccgcccaacaaccaggugaugcucugcgagcccacgaucaucgagcgcaacaucaccgagaucgucuaccugaccaacaccacgaucgagaaggagaucugccccaagcuggcggaguaccggaacugguccaagccgcagugcaagaucaccggguucgcccccuucagcaaggacaacuccauccgccucagcgccggcggggacaucugggugacccgggagcccuacguguccugcgaccccggcaagugcuaccaguucgcccuggggcagggcaccacgcugaacaaccgccacagcaacgacaccguccacgaccggaccccguaccgcacccuccugaugaacgagcugggcgugcccuuccaccucgggacgaagcaggucugcaucgccugguccagcuccagcugccacgacggcaaggcguggcugcacgugugcgugaccgggcacgacgagaacgccaccgccuccuucaucuacgacggccggcugguggacagcaucggguccuggagcaagaacauccuccgcacccaggaguccgagugcgucugcaucaacggcacgugcaccguggugaugaccgacggcagcgccuccgagcgggcggacaccaagauccuguucaucgaggaggggaagaucguccacaucagcccccugagcggcuccgcccagcacguggaggagugcagcugcuacccccgcuacccgggggugcggugcgucugccgcgacaacuggaagggcuccaaccggcccaucguggacaucaacgugaaggacuacagcaucgucuccagcuacgugugcuccggccucgugggggacacgccccgcaagaacgacagcuccagcuccagcuacugccugaaccccaacaacgaggagggcgggcacggcgucaaggggugggccuucgacgacggcaacgacguguggaugggccggaccaucuccgagaagcugcgcagcggguacgagaccuucaaggucaucggcgggugguccaagccgaacagcaagcuccagaucaaccgccaggugaucguggaccggggcaaccgguccggguacagcggcaucuucuccgucgagggcaagagcugcgugaaccgcugcuucuacguggagcugauccgggggcgcaagcaggagaccgaggucugguggacgagcaacuccaucgugguguucugcggcaccagcgggaccuacggcaccggguccuggcccgacggcgccgacaucaaccugaugcccaucuga

SEQ ID NO: 85976 - RNA, 1410 nt, Artificial Sequence; identical to SEQ ID NO: 85973
  derived and/or modified CDS sequence (opt1) from neuraminidase__InfluenzaA__AFG72672

SEQ ID NO: 85977 - RNA, 1407 nt, Artificial Sequence
  derived and/or modified CDS sequence (opt1) from neuraminidase__InfluenzaA__AFG72683
augaaccccaaccagaagaucaucaccaucggcagcgugucccugaccaucgccacgaucugcuuccucaugcagaucgccauccuggucaucaccgugacccugcacuucaagcaguacgagugcaacagcccgcccaacaaccaggugaugcucugcgagcccaccaucaucgagcgcaacaucacggagaucgucuaccugaccaacaccaccaucgagaaggagaucugccccaagcuggcggaguaccggaacugguccaagccgcagugcaagaucacgggguucgcccccuucagcaaggacaacuccauccgccucagcgccggcggggacaucugggugacccgggagcccuacguguccugcgaccccggcaagugcuaccaguucgcccuggggcagggcaccacccugaacaaccgccacagcaacgagguccacgaccggacgccguaccgcacccuccugaugaacgagcugggcgugcccuuccaccucgggaccaagcaggucugcaucgccugguccagcuccagcugccacgacggcaaggcguggcugcacgugugcgugaccgggcacaacgagaacgccacggccuccuucaucuacgacggccggcugguggacagcaucggguccuggagcaagaacauccuccgcacccaggaguccgagugcgucugcaucaacgggaccugcaccguggugaugacggacggcagcgccuccgggcgggcggacaccaagauccuguucaucgaggagggcaagaucguccacaucagcccccugagcggguccgcccagcacguggaggagugcagcugcuacccccgcuacccgggcgugcggugcgucugccgcgacaacuggaagggcuccaaccggcccaucguggacaucaacgugaaggacuacagcaucgucuccagcuacgugugcuccgggcucgugggcgacacgccccgcaagaacgacagcuccagcuccagccacugccugaaccccaacaacgaggagggcggccacggggucaagggcugggccuucgacgacggcaacgacguguggauggggcggaccaucuccgagaagcugcgcagcggcuacgagaccuucaaggucaucgggggcugguccaagccgaacagcaagcuccagaucaaccgccaggugaucguggaccgggggaaccgguccggcuacagcggcaucuucuccgucgagggcaagagcugcaucaaccgcugcuucuacguggagcugauccgggggcgcaagcaggagaccgaggugugguggaccagcaacuccaucgucguguucugcgggaccagcggcacguacgggaccggcuccuggcccgacggcgccgacaucaaccugaugcccaucuga

SEQ ID NO: 85978 - RNA, 1410 nt, Artificial Sequence
  derived and/or modified CDS sequence (opt1) from neuraminidase__InfluenzaA__AFG72705
augaaccccaaccagaagaucaucaccaucggcagcgugucccugaccaucgccacgaucugcuuccucaugcagaucgccauccuggucaccaccgugacccugcacuucaagcaguacgagugcaacagcccgcccaacaaccaggugaugcucugcgagcccacgaucaucgagcgcaacaucaccgagaucgucuaccugaccaacaccacgaucgagaaggagaucugccccaagcuggcggaguaccggaacugguccaagccgcagugcaagaucaccggguucgcccccuucagcaaggacaacuccauccgccucagcgccggcggggacaucugggugacccgggagcccuacguguccugcgaccccgacaagugcuaccaguucgcccugggccaggggaccacgcugaacaaccgccacagcaacgacaccguccacgaccggaccccguaccgcacccuccugaugaacgagcugggcgugcccuuccaccucggcacgaagcaggucugcaucgccugguccagcuccagcugccacgacgggaaggcguggcugcacgugugcgugaccggccacgacgagaacgccaccgccuccuucaucuacgacgggcggcugguggacagcaucggcuccuggagcaagaagauccuccgcacccaggaguccgagugcgucugcaucaacgggacgugcaccguggugaugaccgacggcagcgccuccggccgggcggacaccaagauccuguucaucgaggaggggaagaucguccacaucagccagcugagcggcuccgcccagcacguggaggagugcagcugcuacccccgcuaccccggggugcggugcgucugccgcgacaacuggaagggcuccaaccggccgaucguggacaucaacgugaaggaccacagcaucgucuccagcuacgugugcuccggccucgugggggacacgccccgcaagaacgacagcuccagcuccagccacugccugaaccccaacaacgaggagggcgggcacggcgucaaggggugggccuucgacgacggcaacgacguguggaugggccggaccaucuccgagaagcugcgcagcggguacgagaccuucaaggucaucgagggcugguccaagcccaacagcaagcuccagaucaaccgccaggugaucguggaccgggggaaccgguccggcuacagcgggaucuucuccgucgagggcaagagcugcaucaaccgcugcuucuacguggagcugauccggggccgcaagcaggagaccgaggugugguggacgagcaacuccaucgucguguucugcgggaccagcggcaccuacgggaccggcuccuggccggacggggccgacaucaaccugaugcccaucuga

SEQ ID NO: 85979 - RNA, 1410 nt, Artificial Sequence
  derived and/or modified CDS sequence (opt1) from neuraminidase__InfluenzaA__AFG72716
augaaccccaaccagaagaucaucaccaucggcagcgugucccugaccaucacgaccaucugcuuccucaugcagaucgccauccuggucaucaccgugacccugcacuucaagcagugcgagugcaacagcccgcccaacaaccaggugaugcucugcgagcccacgaucaucgagcgcaacaucaccgagaucgucuaccugaccaacaccacgaucgagaaggagaucugccccaagcuggccgaguaccggaacugguccaagccgcagugcaagaucaccggguucgcgcccuucagcaaggacaacuccauccgccucagcgccggcggggacaucugggugacccgggagcccuacguguccugcgaccccggcaagugcuaccaguucgcccuggggcagggcaccacgcugaacaaccgccacagcaacgacaccguccacgaccggaccccguaccgcacccuccugaugaacgagcugggcgugcccuuccaccucgggacgaagcaggucugcaucgccugguccagcuccagcugccacgacggcaaggccuggcugcacgugugcgugaccgggcacaacgagaacgcgaccgccuccuucaucuacgacggccggcugguggacagcaucggguccuggagcaagaacauccuccgcacccaggaguccgagugcgucugcaucaacggcacgugcaccguggugaugaccgacggcagcgccuccgggcgggccgacaccaagauccuguucaucgaggagggcaagaucguccacaucagcccccugagcggguccgcgcagcacguggaggagugcagcugcuacccccgcuacccgggcgugcggugcgucugccgcgacaacuggaagggcuccaaccggcccaucguggacaucaacgugaaggacuacagcaucgucuccagcuacgugugcuccgggcucgugggcgacacgccccgcaagaacgacagcuccagcuccagcuacugccuggaccccaacaacgaggagggcgggcacggggucaagggcugggccuucgacgacggcaacgacguguggauggggcggaccaucuccgagaagucccgcagcggcuacgagaccuucaaggucaucgggggcuggagcaagccgaacuccaagcugcagaucaaccgccaggugaucguggaccgggggaaccggagcggcuacuccggcaucuucagcgucgagggcaagagcugcaucaaccgcugcuucuacguggagcucauccgggggcgccgccaggagaccgaggugugguggacguccaacagcaucgucguguucugcgggaccuccggcaccuacgggaccggcagcuggcccgacggcgccgacaucaaccugaugcccaucuga

SEQ ID NO: 85980 - RNA, 1410 nt, Artificial Sequence
  derived and/or modified CDS sequence (opt1) from neuraminidase__InfluenzaA__AFG72738
augaaccccaaccagaagaucaucaccaucggcagcgugucccugaccaucacgaccaucugcuuccucaugcagaucgccauccuggucaucaccgugacccugcacuucaagcagugcgagugcaacagcccgcccaacaaccaggugaugcucugcgagcccacgaucaucgagcgcaacaucaccgagaucgucuaccugaccaacaccacgaucgagaaggagaucugccccaagcuggccgaguaccggaacugguccaagccgcagugcaagaucaccggguucgcgcccuucagcaaggacaacuccauccgccucagcgccggcggggacaucugggugacccgggagcccuacguguccugcgaccccggcaagugcuaccaguucgcccuggggcagggcaccacgcugaacaaccgccacagcaacgacaccguccacgaccggaccccguaccgcacccuccugaugaacgagcugggcgugcccuuccaccucgggacgaagcaggucugcaucgccugguccagcuccagcugccacgacggcaaggccuggcugcacgugugcgugaccgggcacaacgagaacgcgaccgccuccuucaucuacgacggccggcugguggacagcaucggguccuggagcaagaacauccuccgcacccaggaguccgagugcgucugcaucaacggcacgugcaccguggugaugaccgacggcagcgccuccgggcgggccgacaccaagauccuguucaucgaggagggcaagaucguccacaucagccagcugagcggguccgcgcagcacguggaggagugcagcugcuacccccgcuaccccggcgugcggugcgucugccgcgacaacuggaagggcuccaaccggccgaucguggacaucaacgugaaggacuacagcaucgucuccagcuacgugugcuccgggcucgugggcgacacgccccgcaagaacgacagcuccagcuccagcuacugccuggaccccaacaacgaggagggcgggcacggggucaagggcugggccuucgacgacggcaacgacguguggauggggcggaccaucuccgagaagcugcgcagcggcuacgagaccuucaaggucaucgggggcugguccaagcccaacagcaagcuccagaucaaccgccaggugaucguggaccgggggaaccgguccggcuacagcggcaucuucuccgucgagggcaagagcugcaucaaccgcugcuucuacguggagcugauccgggggcgcaagcaggagaccgaggugugguggacgagcaacuccaucgucguguucugcgggaccagcggcaccuacgggaccggcuccuggccggacggcgccgacaucaaccugaugcccaucuga

SEQ ID NO: 85981 - RNA, 1410 nt, Artificial Sequence; identical to SEQ ID NO: 79209
  derived and/or modified CDS sequence (opt1) from neuraminidase__InfluenzaA__AFG72749

SEQ ID NO: 85982 - RNA, 1410 nt, Artificial Sequence; identical to SEQ ID NO: 78597
  derived and/or modified CDS sequence (opt1) from neuraminidase__InfluenzaA__AFG72760

SEQ ID NO: 85983 - RNA, 1410 nt, Artificial Sequence; identical to SEQ ID NO: 78064
  derived and/or modified CDS sequence (opt1) from neuraminidase__InfluenzaA__AFG72771

SEQ ID NO: 85984 - RNA, 1410 nt, Artificial Sequence
  derived and/or modified CDS sequence (opt1) from neuraminidase__InfluenzaA__AFG72782
augaaccccaaccagaagaucaucaccaucggcagcgugucccugaccaucgccacgaucugcuuccucaugcagaucgccauccuggucaccaccgugacccugcacuucaagcaguacgagugcaacagccucccgaacaaccaggugaugcugugcgagcccacgaucaucgagcgcaacaucaccgagaucgucuaccugaccaacaccacgaucgagaaggagaucugccccaagcucgcggaguaccggaacugguccaagccccagugcaagaucaccggguucgccccguucagcaaggacaacuccauccgccugagcgccggcggggacaucugggugacccgggagcccuacguguccugcgaccccgacaagugcuaccaguucgcccugggccaggggaccacgcucaacaaccgccacagcaacgacaccguccacgaccggacccccuaccgcacccugcugaugaacgagcucggcgugccguuccaccugggcacgaagcaggucugcaucgccugguccagcuccagcugccacgacgggaaggcguggcugcacgugugcgugaccggccacgacgagaacgccaccgccuccuucaucuacgacgggcggcucguggacagcaucggcuccuggagcaagaagauccugcgcacccaggaguccgagugcgucugcaucaacgggacgugcaccguggugaugaccgacggcagcgccuccggccgggcggacaccaagauccuguucaucgaggaggggaagaucauccacacgagccagcucagcggcuccgcccagcacgucgaggagugcagcugcuacccccgcuaccccggggugcggugcgugugccgcgacaacuggaagggcuccaaccggcccaucgucgacaucaacgugaaggacuacagcaucguguccagcuacgucugcuccggccuggugggggacaccccgcgcaagaacgacagcuccagcuccagccacugccugaaccccaacaacgaggagggcgggcacggcgugaaggggugggccuucgacgacggcaacgacgucuggaugggccggaccaucuccgagaaguuccgcagcggguacgagaccuucaaggugaucgagggcugguccaagcccaacagcaagcuccagaucaaccggcaggucaucguggaccgcgacaaccgguccggguacagcggcaucuucuccguggagggcaagagcugcaucaaccgcugcuucuacgucgagcugauccgggggcgcaagcaggagacggaggugugguggaccagcaacuccaucguggucuucugcggcaccagcgggaccuacggcacgggguccuggcccgacggcgccgacaucaaccugaugccgaucuga

SEQ ID NO: 85985 - RNA, 1410 nt, Artificial Sequence; identical to SEQ ID NO: 79773
  derived and/or modified CDS sequence (opt1) from neuraminidase__InfluenzaA__AFG72793

SEQ ID NO: 85986 - RNA, 1410 nt, Artificial Sequence; identical to SEQ ID NO: 78308
  derived and/or modified CDS sequence (opt1) from neuraminidase__InfluenzaA__AFG72804

SEQ ID NO: 85987 - RNA, 1410 nt, Artificial Sequence; identical to SEQ ID NO: 79953
  derived and/or modified CDS sequence (opt1) from neuraminidase__InfluenzaA__AFG72826

SEQ ID NO: 85988 - RNA, 1410 nt, Artificial Sequence
  derived and/or modified CDS sequence (opt1) from neuraminidase__InfluenzaA__AFG72837
augaaccccaaccagaagaucaucaccaucggcagcgugucccugaccaucgccacgaucugcuuccucaugcagaucgccauccuggucaccaccgugacccugcacuucaagcaguacgagugcaacagcccgcccaacaaccaggugaugcucugcgagcccacgaucaucgagcgcaacaucaccgagaucgucuaccugaccaacaccacgaucgagaaggagaucugccccaagcuggcggaguaccggaacugguccaagccgcagugcaacaucaccggguucgcccccuucagcaaggacaacuccauccgccucagcgccggcggggacaucugggugacccgggagcccuacguguccugcgaccccgacaagugcuaccaguucgcccugggccaggggaccacgcugaacaacggccacagcaacgacaccguccacgagcgcaccccguaccggacccuccugaugaacgagcugggcgugcccuuccaccucgggacgaagcaggucugcaucgccugguccagcuccagcugccacgacggcaaggcguggcugcacgugugcgugaccggggacgacgagaacgccaccgccuccuucaucuacaacggccgccugguggacagcaucggguccuggagcaagaagauccuccggacccaggaguccgagugcgucugcaucaacggcacgugcaccguggugaugaccgacggcagcgccuccgggaaggcggacaccaagauccuguucaucgaggagggcaagaucguccacaucagcacgcugagcggguccgcccagcacguggaggagugcagcugcuacccccgcuaccccggcgugcggugcgucugccgcgacaacuggaagggcuccaaccggccgaucguggacaucaacgugaaggacuacagcaucgucuccagcuacgugugcuccgggcucgugggcgacacgccccgcaagaacgacagcuucuccagcucccacugccuggaccccaacaacgaggagggcgggcacggggucaagggcugggccuucgacgacggcaacgacguguggauggggcggaccaucagcgagaagcugcgcuccggcuacgagaccuucaaggucaucgagggguggagcaagcccaacuccaagcuccagaucaaccgccaggugaucguggagcggggcaaccggagcggguacuccggcaucuucagcgucgagggcaaguccugcaucaaccgcugcuucuacguggagcugauccgggggcgcaaggaggagaccgaggugugguggaccagcaacagcaucgucguguucugcggcaccuccgggaccuacggcacggggagcuggccggacggcgccgacaucaaccugaugcccaucuga

SEQ ID NO: 85989 - RNA, 1413 nt, Artificial Sequence
  derived and/or modified CDS sequence (opt1) from neuraminidase__InfluenzaA__AFG72848
augaaccccaaccagaagaucaucaccaucggcagcgugucccugaccaucgccacgaucugcuuccucaugcagaucgccauccuggucaccaccgugacccugcacuucaagcaguacgagugcaacagcccgcccaacaaccaggugaugcucugcgagcccacgaucaucgagcgcaacaucaccgagaucgucuaccugaccaacaccacgaucgagaaggagaucugccccaaguccgcggaguaccggaacuggagcaagccgcagugcaacaucaccggguucgcccccuucuccaaggacaacagcauccgccuguccgccggcggggacaucugggugacccgggagcccuacgugagcugcgaccccgacaagugcuaccaguucgcccucggccaggggaccacgcugaacaacggccacuccaacgacaccguccacgaccgcaccccguaccggacccugcucaugaacgagcugggcgugcccuuccaccuggggacgcgccaggugugcaucgccuggagcuccagcuccugccacgacggcaaggcguggcuccacgucugcgugaccggggacgacaagaacgccaccgccagcuucaucuacaacggccggcugguggacuccaucgggagcugguccaagaaguacauccugcgcacccaggagagcgagugcgucugcaucaacggcacgugcaccguggugaugaccgacggcuccgccagcgggaaggcggacaccaagauccucuucaucgaggagggcaagaucauccacaucagcacgcuguccgggagcgcccagcacgucgaggagugcuccugcuacccccgguaccccggcgugcgcugcgugugccgggacaacuggaagggcagcaaccgcccgaucgucgacaucaacgugaaggacuacuccaucgugagcuccuacgucugcagcgggcuggugggcgacacgccccggaagaacgacuccagcuccagcucccacugccucgaccccaacaacgaggagggcgggcacggggugaagggcugggccuucgacgacggcaacgacgucuggauggggcgcaccaucagcgagaagcugcgguccggcuacgagaccuucaaggugaucgagggguggagcaagcccaacuccaagcugcagaucaaccgccaggucaucguggagcggggcaaccgcagcggguacuccggcaucuucagcguggagggcaagagcugcaucaaccggugcuucuacgucgagcucauccgcgggcggaaggaggagaccgaggugugguggaccuccaacagcaucguggucuucugcggcaccuccgggaccuacggcacggggagcuggccggacggcgccgacaucaaccugaugcccaucuga

SEQ ID NO: 85990 - RNA, 1410 nt, Artificial Sequence
  derived and/or modified CDS sequence (opt1) from neuraminidase__InfluenzaA__AFG72859
augaaccccaaccagaagaucaucaccaucggcagcgugucccugaccaucagcacgaucugcuucuucaugcagaucgccauccucaucaccaccgucacccugcacuucaagcaguacgaguucaacuccccgcccaacaaccaggugaugcugugcgagcccacgaucaucgagcgcaacaucaccgagaucguguaccucaccaacaccacgaucgagaaggagaucugccccaagcuggccgaguaccggaacuggagcaagccgcagugcaacaucaccggguucgcgcccuucuccaaggacaacagcauccgccuguccgccggcggggacaucugggucacccgggagcccuacgugagcugcgaccccgacaagugcuaccaguucgcccucggccaggggaccacgcugaacaacgugcacuccaacgacaucguccacgaccgcaccccguaccggacccugcucaugaacgagcugggcgugcccuuccaccugggcaccaagcaggucugcaucgccuggagcuccagcuccugccacgacgggaaggccuggcuccacgugugcgugacgggcgacgacgagaacgcgaccgccagcuucaucuacaacgggcgccugguggacuccaucgucagcugguccaagaagauccugcggacccaggagagcgagugcgugugcaucaacgggaccugcacgguggucaugaccgacggguccgccagcggcaaggccgacaccaagauccucuucaucgaggagggcaagaucgugcacaccagcacgcuguccgggagcgcgcagcacguggaggagugcuccugcuacccccgcuaccccggcguccggugcgugugccgcgacaacuggaaggggagcaaccggccgaucguggacaucaacaucaaggacuacuccaucgucagcuccuacgugugcagcggccuggugggcgacacgccccgcaagaacgacuccagcuccagcucccacugccucgaccccaacaacgaggagggcggccacggggucaagggcugggccuucgacgacgggaacgacguguggaugggccggaccaucagcgagaagcugcgcuccggcuacgagaccuucaaggucaucgagggguggagcaaccccaacuccaagcugcagaucaaccgccaggugaucguggaccggggcaaccggagcggguacuccggcaucuucagcgucgagggcaagagcugcaucaaccgcugcuucuacguggagcucauccgggggcgcaagcaggagaccgaggugcuguggaccuccaacagcaucgucguguucugcggcaccuccgggaccuacggcacggggagcuggccggacggcgccgacaucaaccugaugcccaucuga

SEQ ID NO: 85991 - RNA, 1410 nt, Artificial Sequence
  derived and/or modified CDS sequence (opt1) from neuraminidase__InfluenzaA__AFG72870
augaaccccaaccagaagaucaucaccaucggcagcgugucccugaccaucgccacgaucugcuuccucaugcagaucgccauccuggucaccaccgugacccugcacuucaagcaguacgagugcaacagcccgcccaacaaccaggugaugcucugcgagcccacgaucaucgagcgcaacaucaccgagaucgucuaccugaccaacaccacgaucgagaaggagaucugccccaagcuggcggaguaccggaacugguccaagccgcagugcaacaucaccggguucgcccccuucagcaaggacaacuccauccgccucagcgccggcggggacaucugggugacccgggagcccuacguguccugcgaccccgacaagugcuaccaguucgcccugggccaggggaccacgcugaacaacggccacagcaacgacaccguccacgaccgcaccccguaccggacccuccugaugaacgagcugggcgugcccuuccaccucgggacgaagcaggucugcaucgccugguccagcuccagcugccacgacggcaaggcguggcugcacgugugcgugaccggggacgacgagaacgccaccgccuccuucaucuacaacggccgccugguggacagcaucggguccuggagcaagaagauccuccggacccaggaguccgagugcgucugcaucaacggcacgugcaccguggugaugaccgacggcagcaccuccgggaaggccgacacgaagauccuguucaucgaggagggcaagaucguccacaucagcacccugagcggguccgcgcagcacguggaggagugcagcugcuacccccgcuaccccggcgugcggugcgucugccgcgacaacuggaagggcuccaaccggccgaucguggacaucaacgugaaggacuacagcaucgucuccagcuacgugugcuccgggcucgugggcgacacgccccgcaagaacgacagcuucuccagcucccacugccuggaccccaacaacgaggagggcgggcacggggucaagggcugggccuucgacgacggcaacgacguguggauggggcggaccaucagcgagaagcugcgcuccggcuacgagaccuucaaggucaucgagggguggagcaagcccaacuccaagcuccagaucaaccgccaggugaucguggagcggggcaaccggagcggguacuccggcaucuucagcgucgaguccaagagcugcaucaaccgcugcuucuacguggagcugauccggggccgcaaggaggagaccgaggugugguggaccagcaacuccaucgucguguucugcgggaccagcggcacguacgggaccggcuccuggccggacggggccgacaucaaccugaugcccaucuga

SEQ ID NO: 85992 - RNA, 1410 nt, Artificial Sequence
  derived and/or modified CDS sequence (opt1) from neuraminidase__InfluenzaA__AFG72892
augaaccccaaccagaagaucaucaccaucggcagcgugucccugaccaucagcacgaucugcuucuucaugcagaucgccauccucaucaccaccgucacccugcacuucaagcaguacgaguucaacuccccgcccaacaaccaggugaugcugugcgagcccacgaucaucgagcgcaacaucaccgagaucguguaccucaccaacaccacgaucgagaaggagaucugccccaagcuggccgaguaccggaacuggagcaagccgcagugcgacaucaccggguucgcgcccuucuccaaggacaacagcauccgccuguccgccggcggggacaucugggucacccgggagcccuacgugagcugcgaccccgacaagugcuaccaguucgcccucggccaggggaccacgcugaacaacgugcacuccaacgacaccguccacgaccgcaccccguaccggacccugcucaugaacgagcugggcgugcccuuccaccugggcacgaagcaggucugcaucgccuggagcuccagcuccugccacgacgggaaggccuggcuccacgugugcgugaccggcgacgacaagaacgcgaccgccagcuucaucuacaacgggcgccugguggacuccaucgucagcugguccaaggagauccugcggacccaggagagcgagugcgugugcaucaacggcacgugcaccguggucaugaccgacggguccgccagcggcaaggccgacaccaagauccucuucaucgaggagggcaagaucgugcacacgagcacccuguccgggagcgcgcagcacguggaggagugcuccugcuacccccgcuaccccggcguccggugcgugugccgcgacaacuggaaggggagcaaccggccgaucguggacaucaacaucaaggacuacuccaucgucagcuccuacgugugcagcggccuggugggcgacacgccccgcaagaacgacuccagcuccagcucccacugccucgaccccaacaacgaggagggcgggcacggggucaagggcugggccuucgacgacgggaacgacguguggaugggccggaccaucagcgagaagcugcgcuccggcuacgagaccuucaaggucaucgagggguggagcaaccccaacuccaagcugcagaucaaccgccaggugaucguggaccggggcaaccggagcggguacuccggcaucuucagcgucgagggcaagagcugcaucaaccgcugcuucuacguggagcucauccgggggcgcaaggagaagaccgaggugcuguggaccuccaacagcaucgucguguucugcggcaccuccgggacguacggcaccgggagcuggccggacggcgccgacaucaaccugaugcccaucuga

SEQ ID NO: 85993 - RNA, 1410 nt, Artificial Sequence
  derived and/or modified CDS sequence (opt1) from neuraminidase__InfluenzaA__AFG72903
augaaccccaaccagaagaucaucaccaucggcagcgugucccugaccaucagcacgaucugcuucuucaugcagaucgccauccucaucaccaccgucacccugcacuucaagcaguacgaguucaacuccccgcccaacaaccaggugaugcugugcgagcccacgaucaucgagcgcaacaucaccgagaucguguaccucaccaacaccacgaucgagaaggagaucugccccaagcuggccgaguaccggaacuggagcaagccgcagugcaacaucaccggguucgcgcccuucuccaaggacaacagcauccgccuguccgccggcggggacaucugggucacccgggagcccuacgugagcugcgaccccgacaagugcuaccaguucgcccucggccaggggaccacgcugaacaacgugcacuccaacgacaccguccacgaccgcaccccguaccggacccugcucaugaacgagcugggcgugcccuuccaccugggcacgaagcaggucugcaucgccuggagcuccagcuccugccacgacgggaaggccuggcuccacgugugcgugaccggcgacgacaagaacgcgaccgccagcuucaucuacaacgggcgccugguggacuccaucgucagcugguccaaggagauccugcggacccaggagagcgagugcgugugcaucaacggcacgugcaccguggucaugaccgacggguccgccagcggcaaggccgacaccaagauccucuucaucgaggagggcaagaucgugcacacgagcacccuguccgggagcgcgcagcacguggaggagugcuccugcuacccccgcuaccccggcguccggugcgugugccgcgacaacuggaaggggagcaaccggccgaucguggacaucaacaucaaggacuacuccaucgucagcuccuacgugugcagcggccuggugggcgacacgccccgcaagaaggacuccagcuccagcucccacugccucgaccccaacaacgaggagggcgggcacggggucaagggcugggccuucgacgacgggaacgacguguggaugggccggaccaucagcgagaagcugcgcuccggcuacgagaccuucaaggucaucgagggguggagcaaccccaacuccaagcugcagaucaaccgccaggugaucguggaccggggcgaccggagcggguacuccggcaucuucagcgucgagggcaagagcugcaucaaccgcugcuucuacguggagcucauccgggggcgcaaggaggagaccgaggugcuguggaccuccaacagcaucgucguguucugcggcaccuccgggacguacggcaccgggagcuggccggacggcgccgacaucaaccugaugcccaucuga

SEQ ID NO: 85994 - RNA, 1410 nt, Artificial Sequence
  derived and/or modified CDS sequence (opt1) from neuraminidase__InfluenzaA__AFG72936
augaaccccaaccagaagaucaucaccaucggcagcgugucccugaccaucagcacgaucugcuucuucauccagaucgccauccucaucaccaccgucacccugcacuucaagcaguacgaguucaacuccccgcccaacaaccaggugaugcugugcgagcccacgaucaucgagcgcaacaucaccgagaucguguaccucaccaacaccacgaucgagaaggagaucugccccaagcuggccgaguaccggaacuggagcaagccgcagugcgacaucaccggguucgcgcccuucuccaaggacaacagcauccgccuguccgccggcggggacaucugggucacccgggagcccuacgugagcugcgaccccgacaagugcuaccaguucgcccucggccaggggaccacgcugaacaacgugcacuccaacaacaucguccgcgaccggaccccguaccgcacccugcucaugaacgagcugggcgugcccuuccaccugggcaccaagcaggucugcaucgccuggagcuccagcuccugccacgacgggaaggccuggcuccacgugugcaucacgggcgacgacaagaacgcgaccgccagcuucaucuacaacgggcggcugguggacuccguggucagcugguccaaggagauccugcgcacccaggagagcgagugcgugugcaucaacgggaccugcacgguggucaugaccgacggguccgccagcggcaaggccgacaccaagauccucuucaucgaggagggcaagaucgugcacaccagcacgcuguccgggagcgcgcagcacguggaggagugcuccugcuacccccgguaccccggcguccgcugcgugugccgggacaacuggaaggggagcaaccgcccgaucguggacaucaacaucaaggaccacuccaucgucagcuccuacgugugcagcggccuggugggcgacacgccccggaagaacgacuccagcuccagcucccacugccucgaccccaacaacgaggagggcggccacggggucaagggcugggccuucgacgacgggaacgacguguggaugggccgcaccaucagcgagaagucccggcugggcuacgagaccuucaaggucaucgagggguggagcaaccacaaguccaagcugcagaucaaccgccaggugaucguggaccggggcaaccgcagcggguacuccggcaucuucagcgucgagggcaagagcugcaucaaccggugcuucuacguggagcucauccgcgggcggaaggaggagaccgaggugcuguggaccuccaacagcaucgucguguucugcggcaccuccgggaccuacggcacggggagcuggcccgacggcgccgaccugaaccucaugccgaucuga

SEQ ID NO: 85995 - RNA, 1410 nt, Artificial Sequence
  derived and/or modified CDS sequence (opt1) from neuraminidase__InfluenzaA__AFG72958
augaaccccaaccagaagaucaucaccaucggcagcgugucccugaccaucagcacgaucugcuucuucaugcagaucgccauccucaucaccaccgucacccugcacuucaagcaguacgaguucaacuccccgcccaacaaccaggugaugcugugcgagcccacgaucaucgagcgcaacaucaccgagaucguguaccucaccaacaccacgaucgagaaggagaucugccccaagcuggccgaguaccggaacuggagcaagccgcagugcgacaucaccggguucgcgcccuucuccaaggacaacagcauccgccuguccgccggcggggacaucugggucacccgggagcccuacgugagcugcgaccccgacaagugcuaccaguucgcccucggccaggggaccacgcugaacaacgugcacuccaacaacaucguccgcgaccggaccccguaccgcacccugcucaugaacgagcugggcgugcccuuccaccugggcaccaagcaggucugcaucgccuggagcuccagcuccugccacgacgggaaggccuggcuccacgugugcaucacgggcgacgacaagaacgcgaccgccagcuucaucuacaacgggcggcugguggacuccguggucagcugguccaaggagauccugcgcacccaggagagcgagugcgugugcaucaacgggaccugcacgguggucaugaccgacggguccgccagcggcaaggccgacaccaagauccucuucaucgaggagggcaagaucgugcacaccagcacgcuguccgggagcgcgcagcacguggaggagugcuccugcuacccccgguaccccggcguccgcugcgugugccgggacaacuggaaggggagcaaccgcccgaucguggacaucaacaucaaggaccacuccaucgucagcuccuacgugugcagcggccuggugggcgacacgccccggaagaacgacuccagcuccagcucccacugccucgaccccaacaacgaggagggcggccacggggucaagggcugggccuucgacgacgggaacgacguguggaugggccgcaccaucaacgagaccagccggcugggcuacgagaccuucaaggucaucgaggggugguccaaccccaagagcaagcugcagaucaaccgccaggugaucguggaccggggcaaccgcuccggguacagcggcaucuucuccgucgagggcaagagcugcaucaaccggugcuucuacguggagcucauccgcgggcggaaggaggagaccgaggugcuguggaccagcaacuccaucgucguguucugcggcaccagcgggacguacggcaccggguccuggccggacggcgccgaccugaaccucaugcccaucuga

SEQ ID NO: 85996 - RNA, 1410 nt, Artificial Sequence; identical to SEQ ID NO: 78127
  derived and/or modified CDS sequence (opt1) from neuraminidase__InfluenzaA__AFG98811

SEQ ID NO: 85997 - RNA, 1410 nt, Artificial Sequence
  derived and/or modified CDS sequence (opt1) from neuraminidase__InfluenzaA__AFG98822
augaaccccaaccagaagaucaucaccaucggcagcgugucccugaucaucgccaccgucugcuuccucaugcagaucgccauccuggugacgaccgugacccugcacuucaagcagcacgagugcgacagcccguccagcaaccaggucaugcucugcgagcccaucaucaucgagcgcaacaucaccgagaucguguaccugaacaacacgaccaucgagaaggagaccugccccaagcugguggaguaccggaacugguccaagccccagugcaagaucaccggguucgcgccguucagcaaggacaacuccauccgccucagcgccggcggggacaucugggucacgcgggagcccuacguguccugcgaccccggcaagugcuaccaguucgcccuggggcagggcaccacccuggacaacaagcacagcaacgacaccauccacgaccgcaucccccaccggacgcuccugaugaacgagcugggcgugccguuccaccucgggacccgccaggucugcaucgccugguccagcuccagcugccacgacggcaaggccuggcugcacgugugcgugaccggggacgacaagaacgcgaccgccuccuucaucuacgacggccggcuggucgacagcaucggguccuggagccagaacauccuccgcacgcaggaguccgagugcgugugcaucaacgggaccugcaccguggucaugaccgacggcagcgccagcggccgggccgacacgcgcauccuguucaucgaggagggcaagaucgugcacaucagcccccuguccggguccgcgcagcacguggaggagugcagcugcuacccccgguaccccgacguccgcugcaucugccgggacaacuggaagggcuccaaccgcccgaucguggacaucaacaugaaggacuacagcaucgacuccagcuacgugugcuccggccucgucggggacacgccccggaacgacgaccgcagcuccaagagcaacugccggaaccccaacaacgagcgcggcaaccacggggugaagggcugggccuucgacaacgggaacgacguguggaugggccggaccaucuccaaggaccugcgcagcggcuacgagaccuucaaggucaucgggggcugguccacccccaacagcaagucccagaucaaccgccaggugaucgucgacagcgacaaccgguccggguacagcggcaucuucagcguggaggggaaguccugcaucaaccgcugcuucuacguggagcugauccggggccgcgagcaggagacccgggucugguggaccagcaacuccaucgugguguucugcggcaccagcgggacguacggcaccggguccuggccggacggcgccaacaucaacuucaugcccaucuga

SEQ ID NO: 85998 - RNA, 1410 nt, Artificial Sequence; identical to SEQ ID NO: 84151
  derived and/or modified CDS sequence (opt1) from neuraminidase__InfluenzaA__AFG98833

SEQ ID NO: 85999 - RNA, 1410 nt, Artificial Sequence
  derived and/or modified CDS sequence (opt1) from neuraminidase__InfluenzaA__AFG98844
augaaccccaaccagaagaucaucaccaucggcagcgugucccugaccaucgccacgaucugcuuccucaugcagaucgccauccuggucaccaccgugacccugcacuucaagcaguacgagugcgacagcccggcgaacaaccaggugaugcccugcgagcccaucaucaucgagcgcaacaucacggagaucgucuaccucaccaacaccaccaucgagaaggagaugugccccaagcugguggaguaccggaacugguccaagccgcagugcaagaucacgggguucgcccccuucagcaaggacaacuccauccgccugagcgccggcggggacaucugggugacccgggagcccuacgucuccugcgaccccggcaagugcuaccaguucgcccucgggcagggcaccacccugaacaaccgccacagcaacgacacgauccacgaccggaucccgcaccgcacccugcucaugaacgagcugggcgugcccuuccaccuggggacccgccaggugugcaucgccugguccagcuccagcugccacgacggcaaggcguggcuccacgucugcgugaccggggacgacaagaacgccacggccuccuucaucuacgacggccgccugguggacagcaucggguccuggagccagaacauccugcggacccaggaguccgagugcgucugcaucaaccggaccugcaccguggugaugacggacggcagcgccuccggcaaggcggacacccggauccucuucaucgaggaggggaagaucguccacaucagcccccugagcggcuccgcccagcacguggaggagugcagcugcuacccccgcuacccgggggugcggugcaucugccgcgacaacuggaagggcuccaaccggcccgucguggacaucaacgugaaggacuacagcaucgacuccagcuacgucugcuccggccuggugggggacacgccccgcaacaacgaccggagcuccagcuccuacugccgcaaccccaacaacgagcggggcaaccacggggugaagggcugggccuucgacgacgagaacgacgucuggauggggcgcaccaucagcaaggacucccggagcggcuacgagaccuucaaggugaucggcgggugguccaccccgaacagcaagucccagaucaaccgccaggucaucguggacagcgacaaccgcuccggcuacagcgggaucuucagcguggagggcaaguccugcaucaaccggugcuucuacgucgagcucauccgcgggcgggagcaggagacccgcgugugguggaccagcaacuccaucguggucuucugcggcacgagcggcaccuacgggaccggcuccuggcccgacggggccgacaucaaccugaugcccaucuga

SEQ ID NO: 86000 - RNA, 1410 nt, Artificial Sequence; identical to SEQ ID NO: 78142
  derived and/or modified CDS sequence (opt1) from neuraminidase__InfluenzaA__AFG98855

SEQ ID NO: 86001 - RNA, 1410 nt, Artificial Sequence; identical to SEQ ID NO: 78996
  derived and/or modified CDS sequence (opt1) from neuraminidase__InfluenzaA__AFG98866

SEQ ID NO: 86002 - RNA, 1410 nt, Artificial Sequence
  derived and/or modified CDS sequence (opt1) from neuraminidase__InfluenzaA__AFG98877
augaaccccaaccagaagaucaucaccaucggcagcgugucccugaccaucgccacgaucugcuuccucaugcagaucgccauccuggucaccaccgugacccugcacuucaagcaguacgagugcgacagcccgcccaacaaccaggugaugcccugcgagcccaucaucaucgagcgcaacaucacggagaucgucuaccucaccaacaccaccaucgagaaggagaucugcccgaagcugguggaguaccggaacugguccaagccccagugcaagaucacgggguucgcgcccuucagcaaggacaacuccauccgccugagcgccggcggggacaucugggugacccgggagcccuacgucuccugcgacccgggcaagugcuaccaguucgcccucgggcagggcaccacccuggacaacaagcacagcaacgacacgauccacgaccgcacgccccaccggacccugcucaugaacgagcugggcgugcccuuccaccuggggacccgccaggugugcaucgccugguccagcuccagcugccacgacggcaaggccuggcuccacgucugcgugaccggguacgacaagaacgcgaccgccuccuucaucuacgacggccggcugguggacagcaucggguccuggagccagaacauccugcgcacccaggaguccgagugcgucugcaucaacgggaccugcacgguggugaugaccgacggcagcgccuccggccgggccgacaccaagauccucuucaucgaggagggcaagaucguccacaucagcccccugagcggguccgcgcagcacguggaggagugcagcugcuacccgcgcuaccccggcgugcggugcaucugccgcgacaacuggaagggcuccaaccggcccgucguggacaucaacgugaaggacuacagcaucgacuccagcuacgucugcuccgggcuggugggcgacacgccccgcaacaacgaccggagcuccaacagcuacugccgcaacccgaacaacgagaaggggaaccacggcgugaaggggugggccuucgacgacggcaacgacgucuggaugggccggaccaucuccgaggacagccgcuccggguacgagaccuucaaggugaucggcggguggagcacccccaacuccaagcuccagaucaaccggcaggucaucguggacagcgacaaccgcuccggcuacagcgggaucuucuccguggagggcaagagcugcaucaaccggugcuucuacgucgagcugauccgcggccgcgagcaggagacccgggugugguggacgagcaacuccaucguggucuucugcgggaccagcggcaccuacgggaccggcuccuggcccgacggggccgacaucaaccugaugcccaucuga

SEQ ID NO: 86003 - RNA, 1410 nt, Artificial Sequence; identical to SEQ ID NO: 78142
  derived and/or modified CDS sequence (opt1) from neuraminidase__InfluenzaA__AFG98888

SEQ ID NO: 86004 - RNA, 1410 nt, Artificial Sequence
  derived and/or modified CDS sequence (opt1) from neuraminidase__InfluenzaA__AFG98899
augaaccccaaccagaagaucaucaccaucggcagcgugucccugaucaucgccaccaucugcuuccucaugcagaucgccauccuggucacgaccgugacccugcacuucaagcaguacgagugcgacagcccggcgaacaaccaggugaugcccugcgagcccaucaucaucgagcgcaacaucaccgagaucgucuaccucacgaacaccaccaucgagaaggagaucugccccaagcugguggaguaccggaacugguccaagccgcagugcaagaucaccggguucgcccccuucagcaaggacaacuccauccgccugagcgccggcggggacaucugggugacgcgggagcccuacgucuccugcgaccccggcaagugcuaccaguucgcccucgggcagggcaccacccuggacaacaagcacagcaacgacaccauccacgaccgcacgccgcaccggacccugcucaugaacgagcugggcgugcccuuccaccuggggacccgccaggugugcaucgccugguccagcuccagcugccacgacggcaaggcguggcuccacgucugcgugaccggguacgacaagaacgccacggccuccuucaucuacgacggccggcugguggacagcaucggguccuggagccagaacauccugcgcacccaggaguccgagugcgucugcaucaacgggaccugcaccguggugaugacggacggcagcgccuccggccgggcggacaccaagauccucuucaucgaggagggcaagaucguccacaucagcccccugagcggguccgcccagcacguggaggagugcagcugcuacccccgcuacccgggcgugcggugcaucugccgcgacaacuggaagggcuccaaccggcccgucguggacaucaacgugaaggacuacagcaucgacuccagcuacgucugcuccgggcuggugggcgacacgccccgcaacaacgaccggagcuccaacagcuacugccgcaaccccaacaacgagaaggggaaccacggcgugaaggggugggccuucgacgacggcaacgacgucuggaugggccggaccaucuccgaggacagccgcuccggguacgagaccuucaaggugaucggcggguggagcaccccgaacuccaagcuccagaucaaccggcaggucaucguggacagcgacaaccgcuccggcuacagcgggaucuucuccguggagggcaagagcugcaucaaccggugcuucuacgucgagcugauccgcggccgcgagcaggagacccgggugugguggaccagcaacuccaucguggucuucugcgggacgagcggcaccuacgggaccggcuccuggcccgacggggccgacaucaaccugaugcccaucuga

SEQ ID NO: 86005 - RNA, 1410 nt, Artificial Sequence; identical to SEQ ID NO: 78142
  derived and/or modified CDS sequence (opt1) from neuraminidase__InfluenzaA__AFG98910

SEQ ID NO: 86006 - RNA, 1410 nt, Artificial Sequence; identical to SEQ ID NO: 78142
  derived and/or modified CDS sequence (opt1) from neuraminidase__InfluenzaA__AFG98921

SEQ ID NO: 86007 - RNA, 1410 nt, Artificial Sequence
  derived and/or modified CDS sequence (opt1) from neuraminidase__InfluenzaA__AFG98932
augaaccccaaccagaagaucaucaccaucggcagcgugucccugaccaucgccacgaucugcuuccucaugcagaucgccauccuggucaccaccgugacccugcacuucaagcaguacgagugcgacagcccggcgaacaaccaggugaugcccugcgagcccaucaucgucgagcgcaacaucacggagaucguguaccucaccaacaccaccaucgagaaggagaucugccccaagcugguggaguaccggaagugguccaagccgcagugcaagaucacgggguucgcccccuucagcaaggacaacuccauccgccugagcgccggcggggacaucugggucacccgggagcccuacguguccugcgaccccggcaagugcuaccaguucgcccucgggcagggcaccacccuggacaacaagcacagcaacgacacgauccacgaccgcaccccgcaccggacccugcucaugaacgagcugggcgugcccuuccaccuggggacccgccaggucugcaucgccugguccagcuccagcugccacgacggcaaggcguggcuccacgugugcgugacgggguacgacaagaacgccaccgccuccuucaucuacgacggccggcuggucgacagcaucggguccuggagccagaacauccugcgcacccaggaguccgagugcgugugcaucaacgggaccugcacgguggucaugaccgacggcagcgccuccggccgggcggacaccaagauccucuucaucgaggagggcaagaucgugcacaucagcccccugagcggguccgcccagcacguggaggagugcagcugcuacccccgcuacccgggcguccggugcaucugccgcgacaacuggaagggcuccaaccggcccgugguggacaucaacgucaaggacuacagcaucgacuccagcuacgugugcuccgggcuggugggcgacacgccccgcaacaacgaccggagcuccaacagcuacugccgcaaccccaacaacgagaaggggaaccacggcgucaaggggugggccuucgacgacggcaacgacguguggaugggccggaccaucuccgaggacagccgcuccggguacgagaccuucaaggucaucggcggguggagcaccccgaacuccaagcuccagaucaaccgccaggugaucguggacagcgacaaccgguccggcuacagcgggaucuucuccgucgagggcaagagcugcaucaaccggugcuucuacguggagcugauccgcggccgcgagcaggagacccgggugugguggacgagcaacuccaucgucguguucugcgggaccagcggcaccuacgggaccggcuccuggcccgacggggccgacaucaaccugaugcccaucuga

SEQ ID NO: 86008 - RNA, 1410 nt, Artificial Sequence
  derived and/or modified CDS sequence (opt1) from neuraminidase__InfluenzaA__AFG98943
augaaccccaaccagaagaucaucaccaucggcagcgugucccugaccaucgccacgaucugcuuccucaugcagaucgccauccuggucaccaccgugacccugcacuucaagcaguacgagugcgacagcccggcgaacaaccaggugaugcccugcgagcccaucaucaucgagcgcaacaucacggagaucgucuaccucaccaacaccaccaucgagaaggagaucugccccaagcugguggaguaccggaacugguccaagccgcagugcaagaucacgggguucgcccccuucagcaaggacaacuccauccgccugagcgccggcggggacaucugggugacccgggagcccuacgucuccugcgaccccggcaagugcuaccaguucgcccucgggcagggcaccacccuggacaacaagcacagcaacgacacgauccacgaccgcaccccgcaccggacccugcucaugaacgagcugggcgugcccuuccaccuggggacccgccaggugugcaucgccugguccagcuccagcugccacgacggcaaggcguggcuccacgucugcgugacgggguacgacaagaacgccaccgccuccuucaucuacgacggccggcugguggacagcaucggguccuggagccagaacauccugcgcacccaggaguccgagugcgucugcaucaacgggaccugcacgguggugaugaccgacggcagcgccuccggccgggcggacaccaagauccucuucaucgaggagggcaagaucguccacaucagcccccugagcggguccgcccagcacguggaggagugcagcugcuacccccgcuacccgggcgugcggugcaucugccgcgacaacuggaagggcuccaaccggcccgucguggacaucaacgugaaggacuacagcaucgacuccagcuacgucugcuccgggcuggugggcgacacgccccgcaagaacgaccggagcuccaacagcuacugccgcaaccccaacaacgagaaggggaaccacggcgugaaggggugggccuucgacgacggcaacgacgucuggaugggccggaccaucuccgaggacagccgcuccggguacgagaccuucaaggugaucggcggguggagcaccccgaacuccaagcuccagaucaaccggcaggucaucguggacagcgacaaccgcuccggcuacagcgggaucuucuccguggagggcaagagcugcaucaaccggugcuucuacgucgagcugauccgcggccgcgagcaggagacccgggugugguggacgagcaacuccaucguggucuucugcgggaccagcggcaccuacgggaccggcuccuggcccgacggggccgacaucgaccugaugcccaucuga

SEQ ID NO: 86009 - RNA, 1410 nt, Artificial Sequence
  derived and/or modified CDS sequence (opt1) from neuraminidase__InfluenzaA__AFG98965
augaaccccaaccagaagaucaucaccaucggcagcgugucccugaccaucgccacgaucugcuuccucaugcagaucgccauccuggucaccaccgugacccugcacuucaagcaguacgagugcgacagcccggcgaacaaccaggugaugcccugcgagcccacgaucaucgagcgcaacaucaccgagaucgucuaccucaccaacaucaccaucgagaaggagaucugccccaagcugguggaguaccggaacugguccaagccgcagugcaagaucacgggguucgcccccuucagcaaggacaacuccauccgccugagcgccggcggggacaucugggugacccgggagcccuacgucuccugcgaccccggcaagugcuaccaguucgcccucgggcagggcaccacccuggacaacaagcacagcaacgacacgauccacgaccgcaccccgcaccggacccugcucaugaacgagcugggcgugcccuuccaccuggggacccgccaggugugcaucgccugguccagcuccagcugccacgacggcaaggcguggcuccacgucugcgugacgggguacgacaagaacgccaccgccuccuucaucuacgacggccggcugguggacagcaucggguccuggagccagaacauccugcgcacccaggaguccgagugcgucugcaucaacgggaccugcacgguggugaugaccgacggcagcgccuccggccgggcggacaccaagauccucuucaucgaggagggcaagaucguccacaucagcccccugagcggguccgcccagcacguggaggagugcagcugcuacccccgcuacccgggcgugcggugcaucugccgcgacaacuggaagggcuccaaccggcccgucguggacaucaacgugaaggacuacagcaucgacuccagcuacgucugcuccgggcuggugggcgacacgccccgcaacaacgaccggagcuccaacagcuacugccgcaaccccaacaacgagaaggggaaccacggcgugaaggggugggccuucgacgacggcaacgacgucuggaugggccggaccaucuccgaggacagccgcuccggguacgagaccuucaaggugaucggcggguggagcaccccgaacuccaagcuccagaucaaccggcaggucaucguggacagcgacaaccgcuccggcuacagcgggaucuucuccguggagggcaagagcugcaucaaccggugcuucuacgucgagcugauccgcggccgcgagcaggagacccgggugugguggacgagcaacuccaucguggucuucugcgggaccagcggcaccuacggggccggcuccuggcccgacggggccgacaucaaccugaugcccaucuga

SEQ ID NO: 86010 - RNA, 1410 nt, Artificial Sequence
  derived and/or modified CDS sequence (opt1) from neuraminidase__InfluenzaA__AFG98976
augaaccccaaccagaagaucaucaccaucggcagcgugucccugaccaucgccacgaucugcuuccucaugcagaucgccauccuggucaccaccgugacccugcacuucaagcaguacgagugcgacagcccggcgaacaaccaggugaugcccugcgagcccaucaucaucgagcgcaacaucacggagaucgucuaccucgccaacaccaccaucgagaaggagaucugccccaagcugguggaguaccggaacugguccaagccgcagugcaagaucaccggguucgcccccuucagcaaggacaacuccauccgccugagcgccggcggggacaucugggugacgcgggagcccuacgucuccugcgaccccggcaagugcuaccaguucgcccucgggcagggcaccacccuggacaacaagcacagcaacgacaccauccacgaccgcacgccgcaccggacccugcucaugaacgagcugggcgugcccuuccaccuggggacccgccaggugugcaucgcgugguccagcuccagcugccacgacggcaaggccuggcuccacgucugcgugaccggguacgacaagaacgccacggccuccuucaucuacgacggccggcugguggacagcaucggguccuggagcaagaacauccugcgcacccaggaguccgagugcgucugcaucaacgggaccugcaccguggugaugacggacggcagcgcguccggccgggccgacaccaagauccucuucaucgaggagggcaagaucguccacaucagcccccugagcggguccgcccagcacguggaggagugcagcugcuacccccgcuacccgggcgugcggugcaucugccgcgacaacuggaagggcuccaaccggcccgucguggacaucaacgugaaggacuacagcaucgacuccagcuacgucugcuccgggcuggugggcgacacgccccgcaacaacgaccggagcuccagcuccuacugccgcaaccccaacaacgagaaggggaaccacggcgugaaggggugggccuucgacgacggcaacgacgucuggaugggccggaccaucagcgaggacucccgcagcggguacgagaccuucaaggugaucggcgggugguccaccccgaacagcaagcuccagaucaaccggcaggucaucguggacuccgacaaccgcagcggcuacuccgggguguucagcgucgagggcaagagcugcaucaaccggugcuucuacguggagcugauccgcggccgcgagcuggagacccgggugugguggaccuccaacagcaucgucguguucugcgggacguccggcaccuacgggaccggcagcuggcccgacggggccgacaucaaccucaugcccaucuga

SEQ ID NO: 86011 - RNA, 1410 nt, Artificial Sequence; identical to SEQ ID NO: 86010
  derived and/or modified CDS sequence (opt1) from neuraminidase__InfluenzaA__AFG98987

SEQ ID NO: 86012 - RNA, 1410 nt, Artificial Sequence
  derived and/or modified CDS sequence (opt1) from neuraminidase__InfluenzaA__AFG98998
augaaccccaaccagaagaucaucaccaucggcagcgugucccugaccaucgccacgaucugcuuccucaugcagaucgccauccuggucaccaccgugacccugcacuucaagcaguacgagugcgacagcccggcgaacaaccaggugaugcccugcgagcccaucaucaucgagcgcaacaucacggagaucgucuaccucaccaacaccaccaucgagaaggagaucugccccaagcugguggaguaccggaacugguccaagccgcagugcaagaucacgggguucgcccccuucagcaaggacaacuccauccgccugagcgccggcggggacaucugggugacccgggagcccuacgucuccugcgaccccggcaagugcuaccaguucgcccucgggcagggcaccacccuggagaacaagcacagcaacgacacgauccacgaccgcaccccgcaccggacccugcucaugaacgagcugggcgugcccuuccaccuggggacccgccaggugugcaucgccugguccagcuccagcugccacgacggcaaggcguggcuccacgucugcgugacgggguacgacaagaacgccaccgccuccuucaucuacgacggccggcugguggacagcaucggguccuggagccagaacauccugcgcacccaggaguccgagugcgucugcaucaacgggaccugcacgguggugaugaccgacggcagcgccuccggccgggcggacaccaagauccucuucaucgaggagggcaagaucguccacaucagcccccugagcggguccgcccagcacguggaggagugcagcugcuacccccgcuacccgggcgugcggugcaucugccgcgacaacuggaagggcuccaaccggcccgucguggacaucaacgugaaggacuacagcaucgacuccagcuacgucugcuccgggcuggugggcgacacgccccgcaagaacgaccggagcuccagcuccuacugccgcaaccccaacaacgagaaggggaaccacggcgugaaggggugggccuucgacgacggcaacgacgucuggaugggccggaccaucagcgaggacucccgcagcggguacgagaccuucaaggugaucggcgggugguccaccccgaacagcaagcuccagaucaaccggcaggucaucguggacuccgccaaccgcagcggcuacuccgggaucuucagcguggagggcaagagcugcaucaaccggugcuucuacgucgagcugauccgcggccgcgagcaggagacccgggugugguggacguccaacagcaucguggucuucugcgggaccuccggcaccuacgggaccggcagcuggcccgacggggccgacaucaaccugaugcccaucuga

SEQ ID NO: 86013 - RNA, 1410 nt, Artificial Sequence; identical to SEQ ID NO: 86010
  derived and/or modified CDS sequence (opt1) from neuraminidase__InfluenzaA__AFG99009

SEQ ID NO: 86014 - RNA, 1410 nt, Artificial Sequence
  derived and/or modified CDS sequence (opt1) from neuraminidase__InfluenzaA__AFG99020
augaaccccaaccagaagaucaucaccaucggcagcgugucccugaccaucgccacgaucugcuuccucaugcagaucgccauccuggucaccaccgugacccugcacuucaagcaguacgagugcgacagcccggcgaacaaccaggugaugcccugcgagcccaucaucaucgagcgcaacaucacggagaucgucuaccucaccaacaccaccaucgagaaggagaucugccccaagcugguggaguaccggaacugguccaagccgcagugcaagaucacgggguucgcccccuucagcaaggacaacuccauccgccugagcgccggcggggacaucugggugacccgggagcccuacgucuccugcgaccccggcaagugcuaccaguucgcccucgggcagggcaccacccuggacaacaagcacagcaacgacacgauccacgaccgcaccccgcaccggacccugcucaugaacgagcugggcgugcccuuccaccuggggacccgccaggugugcaucgccugguccagcuccagcugccacgacggcaaggcguggcuccacgucugcgugacgggguacgacaagaacgccaccgccuccuucaucuacgacggccggcugguggacagcaucggguccuggagccagaacauccugcgcacccaggaguccgagugcgucugcaucaacgggaccugcacgguggugaugaccgacggcagcgccuccggccgggcggacaccaagauccucuucaucgaggagggcaagaucguccacaccagcccccugagcggguccgcccagcacguggaggagugcagcugcuacccccgcuacccgggcgugcggugcaucugccgcgacaacuggaagggcuccaaccggcccgucguggacaucaacgugaaggacuacagcaucgacuccagcuacgucugcuccgggcuggugggcgacacgccccgcaacaacgaccggagcuccagcuccuacugccgcaaccccaacaacgagaaggggacccacggcgugaaggggugggccuucgacgacggcaacgacgucuggaugggccggaccaucagcgaggacucccgcagcggguacgagaccuucaaggugaucggcgggugguccacgccgaacagcaagcuccagaucaaccggcaggucaucguggacuccgacaaccgcagcggcuacuccgggaucuucagcguggagggcaagagcugcaucaaccggugcuucuacgucgagcugauccgcggccgcgagcaggagacccgggugugguggaccuccaacagcaucguggucuucugcgggaccuccggcacguacgggaccggcagcuggcccgacggggccgacaucaacaucaugcccaucuga

SEQ ID NO: 86015 - RNA, 1410 nt, Artificial Sequence
  derived and/or modified CDS sequence (opt1) from neuraminidase__InfluenzaA__AFG99031
augaaccccaaccagaagaucaucaccaucggcagcgugucccugaccaucgccacgaucugcuuccucaugcagaucgccauccuggucaccaccgugacccugcacuucaagcaguacgagugcgacagcccggcgaacaaccaggugaugcccugcgagcccaucaucaucgagcgcaacaucacggagaucgucuaccucaccaacaccaccaucgagaaggagaucugccccaagcugguggaguaccggaacugguccaagccgcagugcaagaucacgggguucgcccccuucagcaaggacaacuccauccgccugagcgccggcggggacaucugggugacccgggagcccuacgucuccugcgaccccggcaagugcuaccaguucgcccucgggcagggcaccacccuggacaacaagcacagcaacgacacgauccacgaccgcaccccgcaccggacccugcucaugaacgagcugggcgugcccuuccaccuggggacccgccaggugugcaucgccugguccagcuccagcugccacgacggcaaggcguggcuccacgucugcgugacgggguacgacaagaacgccaccgccuccuucaucuacgacggccggcugguggacagcaucggguccuggagccagaacauccugcgcacccaggaguccgagugcgucugcaucaacgggaccugcacgguggugaugaccgacggcagcgccuccggccgggcggacaccaagauccucuucaucgaggagggcaagaucguccacaccagcccccugagcggguccgcccagcacguggaggagugcagcugcuacccccgcuacccgggcgugcggugcaucugccgcgacaacuggcggggcuccaaccgccccgucguggacaucaacgugaaggacuacagcaucgacuccagcuacgucugcuccgggcuggugggcgacacgccccggaacaacgaccgcagcuccagcuccuacugccggaaccccaacaacgagaaggggacccacggcgugaaggggugggccuucgacgacggcaacgacgucuggaugggccgcaccaucagcgaggacucccggagcggguacgagaccuucaaggugaucggcgggugguccacgccgaacagcaagcuccagaucaaccgccaggucaucguggacuccgacaaccggagcggcuacuccgggaucuucagcguggagggcaagagcugcaucaaccgcugcuucuacgucgagcuggugcgcggccgggagcaggagacccgcgugugguggaccuccaacagcaucgucguguucugcgggaccuccggcacguacgggaccggcagcuggcccgacggggccgacaucaaccugaugcccaucuga

SEQ ID NO: 86016 - RNA, 1410 nt, Artificial Sequence; identical to SEQ ID NO: 78600
  derived and/or modified CDS sequence (opt1) from neuraminidase__InfluenzaA__AFG99042

SEQ ID NO: 86017 - RNA, 1410 nt, Artificial Sequence
  derived and/or modified CDS sequence (opt1) from neuraminidase__InfluenzaA__AFG99053
augaaccccaaccagaagaucaucaccaucggcagcgugucccugaccaucgccacgaucugcuuccucaugcagaucgccauccuggucaccaccgugacccugcacuucaagcaguacgagugcgacagcccggcgaacaaccaggugaugcccugcgagcccaucaucaucgagcgcaacaucacggagaucgucuaccucaccaacaccaccaucgagaaggagaucugccccaagcugguggaguaccggaacugguccaagccgcagugcaagaucacgggguucgcccccuucagcaaggacaacuccauccgccugagcgccggcggggacaucugggugacccgggagcccuacgucuccugcgaccccggcaagugcuaccaguucgcccucgggcagggcaccacccuggacaacaagcacagcaacgacacgauccacgaccgcaccccgcaccggacccugcucaugaacgagcugggcgugcccuuccaccuggggacccgccaggugugcaucgccugguccagcuccagcugccacgacggcaaggcguggcuccacgucugcgugacgggguacgacaagaacgccaccgccuccuucaucuacgacggccggcugguggacagcaucggguccuggagccagaacauccugcgcacccaggaguccgagugcgucugcaucaacgggaccugcacgguggugaugaccgacggcagcgccuccggccgggcggacaccaagauccucuucaucgaggagggcaagaucguccacaccagcagccuguccgggagcgcccagcacguggaggagugcuccugcuacccccgcuaccccggcgugcggugcaucugccgcgacaacuggaagggcagcaaccggccggucguggacaucaacgugaaggacuacuccaucgacagcuccuacgucugcagcgggcuggugggcgacacgccccgcaacaacgaccgguccagcuccagcuacugccgcaaccccaacaacgagaaggggacccacggcgugaaggggugggccuucgacgacggcaacgacgucuggaugggccggaccaucuccgaggacagccgcuccggguacgagaccuucaaggugaucggcggguggagcauccccaacuccaagcuccagaucaaccggcaggucaucguggacagcgacaaccgcuccggcuacagcgggaucuucagcguggagggcaaguccugcaucaaccggugcuucuacgucgagcugauccgcggccgcgagcaggagacgcgggugugguggaccagcaacuccaucguggucuucugcgggaccagcggcaccuacgggacgggcuccuggccggacggggccgacaucaaccugaugcccaucuga

SEQ ID NO: 86018 - RNA, 1410 nt, Artificial Sequence
  derived and/or modified CDS sequence (opt1) from neuraminidase__InfluenzaA__AFG99064
augaaccccaaccagaagaucaucaccaucggcagcgugucccugaccaucgccacggucugcuuccucaugcagaucgccauccuggugaccaccgugacccugcacuucaagcaguacgagugcgacagcccgcccaacaaccaggucaugcccugcgagcccaucaucaucgagcgcaacgugacggagaucguguaccucaccaacaccaccaucgagaaggagaucugcccgaagcuggucgaguaccggaacugguccaagccccagugcaagaucacgggguucgcgcccuucagcaaggacaacuccauccgccugagcgccggcggggacaucugggugacccgggagcccuacguguccugcgacccgagcaagugcuaccaguucgcccucggccaggggaccacccuggacaacaagcacuccaacgacacgauccacgaccgcacgccccaccggacccugcucaugaacgagcugggcguccccuuccaccugggcacccgccaggugugcaucgccuggagcuccagcuccugccacgacgggaaggccuggcuccacgugugcaucaccggcuacgacaagaacgcgaccgccagcuucaucuacgacgggcggcuggucgacuccaucggcagcugguccaagaacauccugcgcacccaggagagcgagugcgugugcaucaacgggaccugcacgguggucaugaccgacggcuccgccagcgagcgggccgacaccaagauccucuucaucgaggagggcaagaucgugcacaucagcccccuguccgggagcgcgcagcacguggaggagugcuccugcuacccgcgcuaccccggcguccggugcaucugccgcgacaacuggaaggggagcaaccggcccgugguggacaucaacgucaaggacuacuccaucgugagcuccuacgugugcagcggccuggucggcgacacgccccgcaagaacgaccgguccagcuccagcuacugccgcaacccgaacaacgagaaggggaaccacggcgugaaggggugggccuucgacgacggcaacgacgucuggauggggcggaccaucuccgaggagagccgcuccggcuacgagaccuucaaggugaucggcggguggagcacccccaacuccaagcuccagaucaaccgccaggugaucgucgacagcgacaaccgguccggcuacagcgggaucuucagcguggagggcaaguccugcaucaaccggugcuucuacguggagcugauccgcgggcgcgagcaggagacccgggucugguggacgagcaacuccaucgugguguucugcggcaccagcggcaccuacgggaccggcuccuggcccgacggggccgacaucaaccugaugcccaucuga

SEQ ID NO: 86019 - RNA, 1410 nt, Artificial Sequence
  derived and/or modified CDS sequence (opt1) from neuraminidase__InfluenzaA__AFG99086
augaaccccaaccagaagaucaucaccaucggcagcgugucccugaccaucgccacgaucugcuuccucaugcagaucgccauccuggucaccaccgugacccugcacuucaagcaguacgagugcgacagcccggcgaacaaccaggugaugcccugcgagcccaucaucaucgagcgcaacgucacggagaucguguaccucaccaacaccaccaucgagaaggagaucugccccaagcugguggaguaccggaacugguccaagccgcagugcaagaucacgggguucgcccccuucagcaaggacaacuccauccgccugagcgccggcggggacaucugggucacccgggagcccuacguguccugcgaccccggcaagugcuaccaguucgcccucgggcagggcaccacccuggacaacaagcacagcaacgacacgauccacgaccgcaccccguaccggacccugcucaugaacgagcugggcgugcccuuccaccuggggacccgccaggucugcaucgccugguccagcuccagcugccacgacggcaaggcguggcuccacgugugcgugacgggguacgacaagaacgccaccgccuccuucaucuacgacggccggcuggucgacagcaucggguccuggagcaagaacauccugcgcacccaggaguccgagugcgugugcaucaacgggaccugcacgguggucaugaccgacggcagcgccuccgagcgggcggacaccaagauccucuucaucgaggaggggaagaucgugcacaucagcccccugagcggcuccgcccagcacguggaggagugcagcugcuacccccgcuacccggggguccggugcaucugccgcgacaacuggaagggcuccaaccggcccgugguggacaucaacgucaaggacuacagcaucguguccagcuacgugugcuccggccuggucggggacacgccccgcaagaacgaccggagcuccagcuccuacugccgcaaccccaacaacgagaagggcaaccacggggugaagggcugggccuucgacgacgggaacgacgucuggaugggccggaccaucagcgaggagucccgcagcggcuacgagaccuucaaggugaucgggggcugguccaccccgaacagcaagcuccagaucaaccgccaggugaucgucgacuccgacaaccggagcggguacuccggcaucuucagcguggagggcaagagcugcaucaaccggugcuucuacguggagcugauccgcggccgcgagcaggagacccgggucugguggacguccaacagcaucgugguguucugcggcaccuccgggaccuacggcaccgggagcuggcccgacggcgccgacaucaaccugaugcccaucuga

SEQ ID NO: 86020 - RNA, 1410 nt, Artificial Sequence
  derived and/or modified CDS sequence (opt1) from neuraminidase__InfluenzaA__AFG99097
augaaccccaaccagaagaucaucaccaucggcagcgugucccugaccaucgccacgaucugcuuccucaugcagaucgccauccuggucaccaccgugacccugcacuucaagcaguacgagugcgacagcccggcgaacaaccaggugaugcccugcgagcccaucaucaucgagcgcaacgucacggagaucguguaccucaccaacaccaccaucgagaaggagaucugccccaagcugguggaguaccggaacugguccaagccgcagugcaagaucacgggguucgcccccuucagcaaggacaacuccauccgccugagcgccggcggggacaucugggucacccgggagcccuacguguccugcgaccccggcaagugcuaccaguucgcccucgggcagggcaccacccuggacaacaagcacagcaacgacacgauccacgaccgcaccccguaccggacccugcucaugaacgagcugggcgugcccuuccaccuggggacccgccaggucugcaucgccugguccagcuccagcugccacgacggcaaggcguggcuccacgugugcgugacgggguacgacaagaacgccaccgccuccuucaucuacgacggccggcuggucgacagcaucggguccuggagcaagaacauccugcgcacccaggaguccgagugcgugugcaucaacgggaccugcacgguggucaugaccgacggcagcgccuccgagcgggcggacaccaagauccucuucaucgaggaggggaagaucgugcacaucagcccccugagcggcuccgcccagcacguggaggagugcagcugcuacccccgcuacccggggguccggugcaucugccgcgacaacuggaagggcuccaaccggcccgugguggacaucaacgucaaggacuacagcaucguguccagcuacgugugcuccggccuggucggggacacgccccgcaagaacgaccggagcuccagcuccuacugccgcaaccccaacaacgagaagggcaaccacggggugaagggcugggccuucgacgacgggaacgacgucuggaugggccggaccaucagcgaggagucccgccucggcuacgagaccuucaaggugaucgggggcuggagcaccccgaacuccaagcugcagaucaaccgccaggugaucgucgacagcgacaaccgguccggguacagcggcaucuucuccguggagggcaagagcugcaucaaccggugcuucuacguggagcugauccgcggccgcgagcaggagacccgggucugguggacgagcaacuccaucgugguguucugcggcaccagcgggaccuacggcaccggguccuggcccgacggcgccgacaucaaccucaugcccaucuga

SEQ ID NO: 86021 - RNA, 1410 nt, Artificial Sequence
  derived and/or modified CDS sequence (opt1) from neuraminidase__InfluenzaA__AFG99119
augaaccccaaccagaagaucaucaccaucggcagcgugucccugaccaucgccacgaucugcuuccucaugcagaucgccauccuggucaccaccgugacccugcacuucaagcaguacgagugcagcuccccgcccaacaaccaggugaugcccugcgagcccaucaucaucgagcgcaacaucacggagaucgucuaccucaccaacaccaccaucgagaaggagaucugcccgaagcugguggaguaccggaacuggagcaagccccagugcaagaucacgggguucgcgcccuucuccaaggacaacagcauccgccuguccgccggcggggacaucugggugacccgggagcccuacgucagcugcgacccgggcaagugcuaccaguucgcccucgggcagggcaccacccuggacaacaagcacuccaacgacacgauccacgaccgcacccccuaccggacccugcucaugaacgagcugggcgugcccuuccaccuggggacccgccaggugugcaucgccuggagcuccagcuccugccacgacggcaaggccuggcuccacgucugcgugacggggcacgacaagaacgcgaccgccagcuucaucuacgacggccggcugguggacuccaucgggagcugguccaagaacauccugcgcacccaggagagcgagugcgucugcaucaacgggaccugcacgguggugaugaccgacggcuccgccagcgagcgggccgacaccaagauccucuucaucgaggagggcaagaucguccacaucagcccccuguccggcagcgcgcagcacguggaggagugcuccugcuacccgcgcuaccccggggugcggugcgucugccgcgacaacuggaagggcagcaaccggcccaucguggacaucaacgugaaggacuacuccaucgucagcuccuacgugugcagcggccuggugggggacacgccccgcaagaacgaccgguccagcuccagcuacugccgcaacccgaacaacgagaagggcaaccacggggucaagggcugggccuucgacgacgggaacgacguguggaugggccggaccaucuccgaggagagccgcuccggcuacgagaccuucaaggucaucgggggcuggagcacccccaacuccaagcuccagaucaaccgccaggugaucguggacagcgacaaccgguccggguacagcggcaucuucagcgucgaggggaaguccugcaucaaccggugcuucuacguggagcugauccgcggccgcgagcaggagacccgggugugguggacgagcaacuccaucgucguguucugcggcaccagcgggaccuacggcaccggguccuggcccgacggcgccgacaucaaccugaugcccaucuga

SEQ ID NO: 86022 - RNA, 1410 nt, Artificial Sequence
  derived and/or modified CDS sequence (opt1) from neuraminidase__InfluenzaA__AFG99130
augaaccccaaccagaagaucaucaccaucggcagcgugucccugaccaucgccacgaucugcuuccucaugcagaucgccauccuggucaccaccgugacccugcacuucaagcaguacgagugcagcuccccgcccaacaaccaggugaugcccugcgggcccaucaucaucgagcgcaacaucacggagaucgucuaccucaccaacaccaccaucgagaaggagaucugcccgaagcugguggaguaccggaacuggagcaagccccagugcaagaucacgggcuucgcgcccuucuccaaggacaacagcauccgccuguccgccgggggcgacaucugggugacccgggagcccuacgucagcugcgacccggggaagugcuaccaguucgcccucggccagggcaccacccuggacaacaagcacuccaacgacacgauccacgaccgcacccccuaccggacccugcucaugaacgagcugggggugcccuuccaccugggcacccgccaggugugcaucgccuggagcuccagcuccugccacgacgggaaggccuggcuccacgucugcgugacgggccacgacaagaacgcgaccgccagcuucaucuacgacgggcggcugguggacuccaucggcagcugguccaagaacauccugcgcacccaggagagcgagugcgucugcaucaacgggaccugcacgguggugaugaccgacggcuccgccagcgagcgggccgacaccaagauccucuucaucgaggagggcaagaucguccacaucagcccccuguccgggagcgcgcagcacguggaggagugcuccugcuacccgcgcuaccccggcgugcggugcgucugccgcgacaacuggaagggcagcaaccggcccgugguggacaucaacgucaaggacuacuccaucgugagcuccuacgugugcagcgggcuggucggcgacacgccccgcaagaacgaccgguccagcuccagcuacugccgcaacccgaacaacgagaaggggaaccacggcgugaaggggugggccuucgacgacggcaacgacgucuggaugggccggaccaucuccgaggagagccgcuccggguacgagaccuucaaggugaucggcggguggagcacccccaacuccaagcuccagaccaaccgccaggugaucgucgacagcgacaaccgguccggcuacagcgggaucuucagcguggagggcaaguccugcaucaaccggugcuucuacguggagcugauccgcggccgcgagcaggagacgcgggucugguggaccagcaacuccaucgugguguucugcgggaccagcggcaccuacgggacgggcuccuggcccgacggggccgacaucaaccugaugcccaucuga

SEQ ID NO: 86023 - RNA, 1410 nt, Artificial Sequence
  derived and/or modified CDS sequence (opt1) from neuraminidase__InfluenzaA__AFG99141
augaaccccaaccagaagaucaucaccaucggcagcgugucccugaccaucgccacgaucugcuuccucaugcagaucgccauccuggucaccaccgugacccugcacuucaagcaguacgagugcagcuccccgcccaacaaccaggugaugcccugcgagcccaucaucaucgagcgcaacaucacggagaucgucuaccucaccaacaccaccaucgagaaggagaucugcccgaagcugguggaguaccggaacuggagcaagccccagugcaagaucacgggguucgcgcccuucuccaaggacaacagcauccgccuguccgccggcggggacaucugggugacccgggagcccuacgucagcugcgacccgggcaagugcuaccaguucgcccucgggcagggcaccacccuggacaacaagcacuccaacgacacgauccacgaccgcacccccuaccggacccugcucaugaacgagcugggcgugcccuuccaccuggggacccgccaggugugcaucgccuggagcuccagcuccugccacgacggcaaggccuggcuccacgucugcgugacggggcacgacaagaacgcgaccgccagcuucaucuacgacggccggcugguggacuccaucgggagcugguccaagaacauccugcgcacccaggagagcgagugcgucugcaucaacgggaccugcacgguggugaugaccgacggcuccgccagcgagcgggccgagaccaagauccucuucaucgaggagggcaagaucguccacaucagcccccuguccggcagcgcgcagcacguggaggagugcuccugcuacccgcgcuaccccggggugcggugcgucugccgcgacaacuggaagggcagcaaccggcccgugguggacaucaacgucaaggacuacuccaucgugagcuccuacgugugcagcggccuggucggggacacgccccgcaagaacgaccgguccagcuccagcuacugccgcaacccgaacaacgagaagggcaaccacggggugaagggcugggccuucgacgacgggaacgacgucuggaugggccggaccaucuccgaggagagccgcuccggcuacgagaccuucaaggugaucgggggcuggagcacccccaacuccaagcuccagaucaaccgccaggugaucgucgacagcgacaaccgguccggguacagcggcaucuucagcguggaggggaaguccugcaucaaccggugcuucuacguggagcugauccgcggccgcgagcaggagacccgggucugguggacgagcaacuccaucgugguguucugcggcaccagcgggaccuacggcaccggguccuggcccgacggcgccgacaucaaccugaugcccaucuga

SEQ ID NO: 86024 - RNA, 1410 nt, Artificial Sequence
  derived and/or modified CDS sequence (opt1) from neuraminidase__InfluenzaA__AFG99152
augaaccccaaccagaagaucaugaccaucggcagcgugucccugaccaucgccacgaucugcuuccucaugcagaucgccauccuggucaccaccgugacccugcacuucaagcacuacgaguucagcuccccgcccaacaaccaggugaugcccugcgagcccaucaucaucgagcgcaacaucacggagaucgucuaccucaccaacaccaccaucgagaaggaggugugcccgaagcugguggaguaccggaacuggagcaagccccagugcaagaucacgggguucgcgcccuucuccaaggacaacagcauccgccuguccgccggcggggacaucugggucacccgggagcccuacgugagcugcgacccgggcaagugcuaccaguucgcccucgggcagggcaccacccugaacaacaagcacuccaacgacacgauccacgaccgcacccccuaccggacccugcucaugaacgagcugggcgugcccuuccaccuggggacccgccaggucugcaucgccuggagcuccagcuccugccacgacggcaaggccuggcuccacgugugcgugacggggcacgacaagaacgcgaccgccagcuucaucuacgacggccggcuggucgacuccaucgggagcugguccaagaacauccugcgcacccaggagagcgagugcgugugcaucaacgggaccugcacgguggucaugaccgacggcuccgccagcggccgggccgacaccaagauccucuucaucgaggagggcaagaucgugcacaucagcccccuguccgggagcgcgcagcacguggaggagugcuccugcuacccgcgcuaccccggcguccggugcgugugccgcgacaacuggaagggcagcaaccggcccaucguggacaucaacgucaaggacuacuccaucgugagcuccuacgugugcagcgggcuggucggcgacacgccccgcaagaacgaccgguccagcuccagcuacugccgcaacccgaacaacgagaaggggaaccacggcgugaaggggugggccuucgacgacggcaacgacgucuggaugggccggaccaucggggaggagcuccgcuccggcuacgagaccuucaaggugaucgggggcuggagcacccccaacuccaagcugcagaucaaccgccaggugaucgucgacagcgacaaccgguccggguacagcggcaucuucuccguggagggcaagagcugcaucaaccggugcuucuacguggagcugauccgcgggcgcgagcaggagacccggguccucuggacgagcaacuccaucgugguguucugcggcaccagcgggaccuacggcaccggguccuggcccgacggcgccgacaucaaccugaugcccaucuga

SEQ ID NO: 86025 - RNA, 1410 nt, Artificial Sequence; identical to SEQ ID NO: 83019
  derived and/or modified CDS sequence (opt1) from neuraminidase__InfluenzaA__AFG99163

SEQ ID NO: 86026 - RNA, 1410 nt, Artificial Sequence
  derived and/or modified CDS sequence (opt1) from neuraminidase__InfluenzaA__AFG99174
augaaccccagccagaagaucaucaccaucggcuccgugagccugaccaucgccacgaucugcuuccucaugcagaucgccauccuggucaccaccgugacccugcacuucaagcaguacgagugcuccagcccgcccaacaaccaggugaugcccugcgagcccaucaucaucgagcgcaacaucacggagaucgucuaccucaccaacaccaccaucgagaaggagaucugcccgaagcugauggaguaccggaacugguccaagccccagugcaagaucacgggguucgcgcccuucagcaaggacaacuccauccgccugagcgccggcggggacaucugggugacccgggagcccuacguguccugcgacccgggcaagugcuaccaguucgcccucgggcagggcaccacccuggacaacaagcacagcaacgacacgauccacgaccgcacccccuaccggacccugcucaugaacgagcugggcguccccuuccaccuggggacccgccaggugugcaucgccugguccagcuccagcugccacgacggcaaggccuggcuccacgugugcgucacggggcacgacaagaacgcgaccgccuccuucaucuacgacggccggcugguggacagcaucggguccuggagcaagaacauccugcgcacccaggaguccgagugcgugugcaucaacgggaccugcacggucgugaugaccgacggcagcgccagcgagcgggccgagaccaagauccucuucaucgaggaggggaagaucgugcacaucagcccccuguccggcuccgcgcagcacgucgaggagugcagcugcuacccgcgcuaccccggggugcggugcgugugccgcgacaacuggaagggcuccaaccggcccgucguggacaucaacgugaaggacuacagcaucgucuccagcuacgugugcuccggccuggugggggacacgccccgcaagaacgaccggagcuccagcuccuacugccgcaacccgaacaacgagaagggcaaccacggggucaagggcugggccuucgacgacgggaacgacguguggaugggccggaccaucagcgaggagucccgcagcggcuacgagaccuucaaggucaucgggggcugguccacccccaacagcaagcuccagaucaaccgccaggugaucguggacuccgacaaccggagcggguacagcggcaucuucuccgucgagggcaagagcugcaucaaccggugcuucuacguggagcugauccgcggccgcgagcaggagacccgggugugguggacguccaacagcaucgucguguucugcggcaccuccgggaccuacggcaccgggagcuggcccgacggcgccgacaucaaccugaugcccaucuga

SEQ ID NO: 86027 - RNA, 1410 nt, Artificial Sequence
  derived and/or modified CDS sequence (opt1) from neuraminidase__InfluenzaA__AFG99185
augaaccccaaccagaagaucaucaccaucggcagcgugucccugaccaucgccacgaucugcuuccucaugcagaucgccauccuggucaccaccgugacccugcacuucaagcaguacgagugcagcuccccgcccaacaaccaggugaugcccugcgagcccaucaucaucgagcgcaacaucacggagaucgucuaccucaccaacaccaccaucgagaaggagaucugcccgaagcugguggaguaccggaacuggagcaagccccagugcaagaucacgggguucgcgcccuucuccaaggacaacagcauccgccuguccgccggcggggacaucugggugacccgggagcccuacgucagcugcgacccgggcaagugcuaccaguucgcccucgggcagggcaccacccugaacaacaagcacuccaacgacacgauccacgaccgcacccccuaccggacccugcucaugaacgagcugggcgugcccuuccaccuggggaccaagcaggucugcaucgccuggagcuccagcuccugccacgacggcaaggccuggcuccacgugugcgugacggggcacgacaagaacgcgaccgccagcuucaucuacgacggccgccugguggacuccaucgggagcugguccaagaacauccugcggacccaggagagcgagugcgucugcaucaacgggaccugcacgguggugaugaccgacggcuccgccagcgagcgcgccgacaccaagauccucuucaucgaggagggcaagaucguccacaucagcccccuguccggcagcgcgcagcacguggaggagugcuccugcuacccgcgguaccccggggugcgcugcgucugccgggacaacuggaagggcagcaaccgccccaucguggacaucaacgugaaggacuacuccaucgucagcuccuacgugugcagcggccuggugggggacacgccccggaagaacgaccgcuccagcuccagcuacugccggaacccgaacaacgagaagggcaaccacggggucaagggcugggccuucgacgacgggaacgacguguggaugggccgcaccaucggcgaggagcuccgguccggguacgagaccuucaaggucaucggcggguggagcacccccaacuccaagcugcagaucaaccgccaggugaucguggacagcaagaaccgguccggcuacagcgggaucuucuccgucgagggcaagagcugcaucaaccgcugcuucuacguggagcugauccggggccgcgagcaggagacccgcgugugguggacgagcaacuccaucgucguguucugcgggaccagcggcaccuacgggaccggcuccuggcccgacggggccgacaucaaccucaugcccaucuga

SEQ ID NO: 86028 - RNA, 1410 nt, Artificial Sequence
  derived and/or modified CDS sequence (opt1) from neuraminidase__InfluenzaA__AFG99196
augaaccccaaccagaagaucaucaccaucggcagcgugucccugaccaucgccacgaucugcuuccucacccagaucgccauccuggucaccaccgugacgcugcacuucaagcaguacgagugcagcuccagcccgaacaaccaggugaugcccugcgagcccaucaucaucgagcgcaacaucaccgagaucgucuaccucaccaacaccacgaucgagaaggagaucugccccaagcugguggaguaccggaacugguccaagccgcagugcaagaucaccggguucgcgcccuucagcaaggacaacuccauccgccugagcgccggcggggacaucugggugacccgggagcccuacgucuccugcgaccccggcaagugcuaccaguucgcccucgggcagggcaccacgcugaacaacaagcacagcaacgacaccauccacgaccgcaccccguaccggacccugcucaugaacgagcugggcgugcccuuccaccuggggacgaagcaggucugcaucgccugguccagcuccagcugccacgacggcaaggccuggcuccacgugugcaucaccgggcacgacaagaacgcgaccgccuccuucaucuacgacggccgccugguggacagcaucggguccuggagcaagaacauccugcggacccaggaguccgagugcgugugcaucaacggcacgugcaccgucgugaugaccgacggcagcgccagcgagcgcgccgacaccaagauccucuucaucgaggaggggaagaucgugcacaucagcccccuguccggcuccgcgcagcacgucgaggagugcagcugcuacccccgguacccgggggugcgcugcgugugccgggacaacuggaagggcuccaaccgccccaucgucgacaucaacgugaaggacuacagcaucguguccagcuacgucugcuccggccuggugggggacacgccccggaagaacgaccgcagcuccagcuccuacugccggaaccccaacaacgagaagggcaaccacggggugaagggcugggccuucgacgacgggaacgacgucuggaugggccgcaccaucggcgaggagcuccggagcggguacgagaccuucaaggugaucggcgggugguccaccccgaacagcaagcugcagaucaaccgccaggucaucguggacuccggcaaccggagcggguacuccggcaucuucagcguggagggcaagagcugcaucaaccgcugcuucuacgucgagcugauccgggggcgcgagcaggagacgcgcgugugguggaccuccaacagcaucguggucuucugcggcaccuccgggaccuacggcacggggagcuggcccgacggcgccgacaucaaccucaugcccaucuga

SEQ ID NO: 86029 - RNA, 1410 nt, Artificial Sequence
  derived and/or modified CDS sequence (opt1) from neuraminidase__InfluenzaA__AFG99207
augaaccccaaccagaagaucaucaccaucggcagcgugucccugaccaucgccacgaucugcuuccucaugcagaucgccauccuggucaccaccgugacccugcacuucaagccguacgagugcagcuccccgcccaacaaccaggugaugcccugcgagcccaucaucaucgagcgcaacaucacggagaucgucuaccucaccaacaccaccaucgagaaggagaucugccccaagcugguggaguaccggaacuggagcaagccccagugcaagaucacgggguucgcgcccuucuccaaggacaacagcauccgccuguccgccggcggggacaucugggugacccgggagccguacgucagcugcgaccccggcaagugcuaccaguucgcccucgggcagggcaccacccugaacaacaagcacuccaacgacacgauccacgaccgcacccccuaccggacccugcucaugaacgagcugggcgugcccuuccaccuggggaccaagcaggucugcaucgccuggagcuccagcuccugccacgacggcaaggccuggcuccacgugugcgugacggggcacgacaagaacgcgaccgccagcuucaucuacgacggccgccugguggacuccaucgggagcugguccaagaacauccugcggacccaggagagcgagugcgucugcaucaacgggaccugcacgguggugaugaccgacggcuccgccagcgagcgcgccgacaccaagauccucuucaucgaggagggcaagaucguccacaucagcccgcuguccggcagcgcgcagcacguggaggagugcuccugcuacccccgguaccccggggugcgcugcgucugccgggacaacuggaagggcagcaaccgccccaucguggacaucaacgugaaggacuacuccaucgucagcuccuacgugugcagcggccuggugggggacaccccgcggaagaacgaccgcuccagcuccagcuacugccggaaccccaacaacgagaagggcaaccacggggucaagggcugggccuucgacgacgggaacgacguguggaugggccgcacgaucggcgaggagcuccgguccggguacgagaccuucaaggucaucggcggguggagcacccccaacuccaagcugcagaucaaccgccaggugaucguggacagcaagucccggagcggcuacuccgggaucuucagcgucgagggcaagagcugcaucaaccgcugcuucuacguggagcugauccggggccgcgagcaggagacccgcgugugguggacguccaacagcaucgucguguucugcgggaccuccggcaccuacgggaccggcagcuggcccgacggggccgacaucaaccucaugccgaucuga

SEQ ID NO: 86030 - RNA, 1410 nt, Artificial Sequence; identical to SEQ ID NO: 78838
  derived and/or modified CDS sequence (opt1) from neuraminidase__InfluenzaA__AFG99218

SEQ ID NO: 86031 - RNA, 1410 nt, Artificial Sequence
  derived and/or modified CDS sequence (opt1) from neuraminidase__InfluenzaA__AFG99229
augaaccccaaccagaagaucaucaccaucggcagcgugucccugaccaucgccacgaucugcuuccucaugcagaucgccauccuggucaccaccgugacccugcacuucaagcaguacgagugcagcuccccgcccaacaaccaggugaugcccugcgagcccaucaucaucgagcgcaacaucacgaagaucgucuaccucaccaacaccaccaucgagaaggagaucugcccgaagcugguggaguaccggaacuggagcaagccccagugcaagaucacgggguucgcgcccuucuccaaggacaacagcauccgccuguccgccggcggggacaucugggugacccgggagcccuacgucagcugcgacccgggcaagugcuaccaguucgcccucgggcagggcaccacccugaacaacaagcacuccaacgacacgauccacgaccgcacccccuaccggacccugcucaugaacgagcugggcgugcccuuccaccuggggaccaagcaggucugcaucgccuggagcuccagcuccugccacgacggcaaggccuggcuccacgugugcgugacggggcacgacaagaacgcgaccgccagcuucaucuacgacggccgccugguggacuccaucgggagcugguccaagaacauccugcggacccaggagagcgagugcgucugcaucaacgggaccugcacgguggugaugaccgacggcuccgccagcgagcgcgccgacaccaagauccucuucaucgaggagggcaagaucguccacaucagcccccuguccggcagcgcgcagcacguggaggagugcuccugcuacccgcgguaccccggggugcgcugcgucugccgggacaacuggaagggcagcaaccgccccaucguggacaucaacgugaaggacuacuccaucgucagcuccuacgugugcagcggccuggugggggacacgccccggaagaacgaccgcuccagcuccagcuacugccggaacccgaacaacgagaagggcaaccacggggucaagggcugggccuucgacgacgggaacgacguguggaugggccgcaccaucggcgaggagcuccgguccggguacgagaccuucaaggucaucggcggguggagcacccccaacuccaagcugcagaucaaccgccaggugaucguggacagcaagaaccgguccggcuacagcgggaucuucuccgucgagggcaagagcugcaucaaccgcugcuucuacguggagcugauccggggccgcgagcaggagacccgcgugugguggacgagcaacuccaucgucguguucugcgggaccagcggcaccuacgggaccggcuccuggcccgacggggccgacaucaaccucaugcccaucuga

SEQ ID NO: 86032 - RNA, 1410 nt, Artificial Sequence
  derived and/or modified CDS sequence (opt1) from neuraminidase__InfluenzaA__AFG99240
augaaccccaaccagaagaucaucaccaucggcagcgugucccugaccaucgccacgaucugcuuccucaugcagaucgccauccuggucaccaccgugacccugcacuucaagcaguacgagugcagcuccccgcccagcaaccaggugaugcccugcgagcccaucaucaucgagcgcaacaucacggagaucgucuaccucaccaacaccaccaucgagaaggagaucugcccgaagcccguggaguaccggaacugguccaagccccagugcaagaucacgggguucgcgcccuucagcaaggacaacuccauccgccugagcgccggcggggacaucugggugacccgggagccguacgucuccugcgaccccggcaagugcuaccaguucgcccuggggcagggcaccacccucaacaacaagcacagcaacgacacgauccacgaccgcacccccuaccggacccugcugaugaacgagcucggcgugcccuuccaccuggggaccaagcaggucugcaucgccugguccagcuccagcugccacgacggcaaggccuggcugcacgugugcgugacggggcacgacaagaacgcgaccgccuccuucaucuacgacggccgccucguggacagcaucggguccuggagcaagaacauccugcggacccaggaguccgagugcgucugcaucaacgggaccugcacgguggugaugaccgacggcagcgccagcgagcgcgccgacaccaagauccuguucaucgaggagggcaagaucguccacaucuccccgcucagcggcuccgcgcagcacguggaggagugcagcugcuacccccgguaccccggggugcgcugcgucugccgggacaacuggaagggcuccaaccgccccaucguggacaucaacgugaaggacuacagcaucgucuccagcuacgugugcuccggccuggugggggacaccccgcggaagaacgaccgcuucagcuccagcuacugccggaaccccaacaacgagaagggcaaccacggggucaagggcugggccuucgacgacgggaacgacguguggaugggccgcacgaucggcgaggagcugcgguccggguacgagaccuucaaggucaucggcggguggagcacccccaacuccaagcuccagaucaaccgccaggugaucguggacagcaagaaccgguccggcuacagcgggaucuucuccgucgagggcaagagcugcaucaaccgcugcuucuacguggagcugauccggggccgcgagcaggagacccgcgugugguggacgagcaacuccaucgucguguucugcgggaccagcggcaccuacgggaccggcuccuggcccgacggggccgacaucaaccugaugccgaucuga

SEQ ID NO: 86033 - RNA, 1410 nt, Artificial Sequence; identical to SEQ ID NO: 78837
  derived and/or modified CDS sequence (opt1) from neuraminidase__InfluenzaA__AFG99251

SEQ ID NO: 86034 - RNA, 1410 nt, Artificial Sequence
  derived and/or modified CDS sequence (opt1) from neuraminidase__InfluenzaA__AFG99273
augaaccccaaccagaagaucaucaccaucggcagcgugucccugaccaucgccacgaugugcuuccucaugcagaucgccauccuggucaccaccgugacccugcacuucaagcaguacgagugcagcuccccgcccaacaaccaggugaugcccugcgagcccacgaucaucgagcgcaacaucaccgagaucgucuaccucaccaacaccacgaucgagaaggagaucugcccgaagcugguggaguaccggaacuggagcaagccccagugcaagaucaccggguucgcgcccuucuccaaggacaacagcauccgccuguccgccggcggggacaucugggugacccgggagcccuacgucagcugcgacccgggcaagugcuaccaguucgcccucgggcagggcaccacgcugaacaaccgccacuccaacgacaccgugcacgaccggacccccuaccgcacccugcucaugaacgagcugggcgugcccuuccaccuggggacgaagcaggucugcaucgccuggagcuccagcuccugccacgacggcaaggccuggcuccacgugugcgugaccgggcacgacaagaacgcgaccgccagcuucaucuacgacggccggcuggucgacuccaucgggagcugguccaagaacauccugcgcacccaggagagcgagugcgugugcaucaacggcacgugcaccguggucaugaccgacggcuccgccagcgagcgggccgacaccaagauccucuucaucgaggaggggaagaucgugcacaucagcccccuguccggcagcgcgcagcacguggaggagugcuccugcuacccgcgcuaccccgggguccggugcgugugccgcgacaacuggaagggcagcaaccggcccaucguggacaucaacgucaaggacuacuccaucgugagcuccuacgugugcagcggccuggucggggacacgccccgcaagaacgaccgguccagcuccagcuacugccgcaacccgaacaacgagaagggcucccacggggugaagggcugggccuucgacgacgggaacgacgucuggaugggccggaccaucggcgaggagcuccgcagcggguacgagaccuucaaggugaucggcgggugguccacccccaacagcaagcugcagaucaaccgccaggugaucgucgacuccggcaaccggagcggguacuccggcaucuucagcguggagggcaagagcugcaucaaccggugcuucuacguggagcugauccgcgggcgcgagcaggagacgcgggucugguggaccuccaacagcaucgugguguucugcggcaccuccgggaccuacggcacggggagcuggcccgacggcgccgacaucaaccucaugcccaucuga

SEQ ID NO: 86035 - RNA, 1410 nt, Artificial Sequence
  derived and/or modified CDS sequence (opt1) from neuraminidase__InfluenzaA__AFG99284
augaaccccaaccagaagaucaucaccaucggcagcgugucccugaccaucgccacgaucugcuuccucaugcagaucgccauccuggucaccaccgugacccugcacuucaagcaguacgagugcagcuccccgcccagcaaccaggugaugcccugcgagcccaucaucaucgagcgcaacaucacgaagaucgucuaccucaccaacaccaccaucgagaaggagaucugcccgaagcugguggaguaccggaacugguccaagccccagugcaagaucacgggguucgcgcccuucagcaaggacaacuccauccgccugagcgccggcggggacaucugggugacccgggagcccuacgucuccugcgacccgagcaagugcuaccaguucgcccucggccaggggaccacccugaacaacaagcacuccaacgacacgauccacgaccgcacccccuaccggacccugcucaugaacgagcugggcgugcccuuccaccugggcaccaagcaggucugcaucgccuggagcuccagcuccugccacgacgggaaggccuggcuccacgugugcgugacgggccacgacgacaacgcgaccgccagcuucaucuacgacgggcgccugguggacuccaucggcagcugguccaagaacauccugcggacccaggagagcgagugcgucugcaucaacgggaccugcacgguggugaugaccgacggcagcgccuccgagcgcgccgacaccaagauccucuucaucgaggagggcaagaucguccacaucagcccccuguccgggagcgcgcagcacguggaggagugcuccugcuacccgcgguaccccggcgugcgcugcgucugccgggacaacuggaaggggagcaaccgccccaucguggacaucaacgugaaggacuacuccaucgucagcuccuacgugugcagcggccuggugggcgacacgccccggaagaacgaccgcuccagcuccagcuacugccggaacccgaacaacgagaaggggucccacggcgucaaggggugggccuucgacgacggcaacgacguguggauggggcgcaccaucggcgaggagcuccggagcggcuacgagaccuucaaggucaucgggggcugguccacccccaacagcaagcugcagaucaaccgccaggugaucguggacuccaagaaccggagcggguacagcggcaucuucuccgucgagggcaagagcugcaucaaccgcugcuucuacguggagcugauccgggggcgcgagcaggagacccgcgugugguggacguccaacagcaucgucguguucugcggcaccuccgggaccuacggcaccgggagcuggcccgacggcgccgacaucaaccucaugcccaucuga

SEQ ID NO: 86036 - RNA, 1410 nt, Artificial Sequence
  derived and/or modified CDS sequence (opt1) from neuraminidase__InfluenzaA__AFG99295
augaaccccaaccagaagaucaucaccaucggcagcgugucccugaccaucgccacgaucugcuuccucaugcagaucgccauccuggucaccaccgugacccugcacuucaagcaguacgagugcagcuccccgcccaacaaccaggugaugcccugcgagcccacgaucaucgagcgcaacaucaccgagaucgucuaccucaccaacaccacgaucgagaaggagaucugcccgaagcugguggaguaccggaacuggagcaagccccagugcaagaucaccggguucgcgcccuucuccaaggacaacagcauccgccuguccgccggcggggacaucugggugacccgggagcccuacgucagcugcgacccggacaagugcuaccaguucgcccucggccaggggaccacgcugaacaaccgccacuccaacgacaccgugcacgaccggacccccuaccgcacccugcucaugaacgagcugggcgugcccuuccaccugggcacgaagcaggucugcaucgccuggagcuccagcuccugccacgacgggaaggccuggcuccacgugugcgugaccggccacgacaagaacgcgaccgccagcuucaucuacaacgggcggcuggucgacuccaucggcagcugguccaagaacauccugcgcacccaggagagcgagugcgugugcaucaacgggacgugcaccguggucaugaccgacggcuccgccagcgagcgggccgacaccaagauccucuucaucgaggagggcaagaucgugcacaucagcccccuguccgggagcgcgcagcacguggaggagugcuccugcuacccgcgcuaccccggcguccggugcgugugccgcgacaacuggaaggggagcaaccggcccaucguggacaucaacgucaaggacuacuccaucaucagcuccuacgugugcagcggccuggugggcgacacgccccgcaagaacgaccgguccagcuccagcuacugccagaacccgaacaacgagaaggggucccacggcgucaaggggugggccuucgacgacggcaacgacguguggauggggcgcaccaucggcgaggagcuccggagcggcuacgagaccuucaaggucaucgggggcugguccacccccaacagcaagcugcagaucaaccgccaggugaucguggacuccgggaaccggagcggcuacuccgggaucuucagcgucgagggcaagagcugcaucaaccgcugcuucuacguggagcugauccggggccgcaagcaggagacgcgcgugugguggaccuccaacagcaucgucguguucugcgggaccuccggcaccuacgggacgggcagcuggcccgacggggccgacaucaaccucaugcccaucuga

SEQ ID NO: 86037 - RNA, 1410 nt, Artificial Sequence
  derived and/or modified CDS sequence (opt1) from neuraminidase__InfluenzaA__AFG99317
augaaccccaaccagaagaucaucaccaucggcagcgugucccugaccaucgccacgaucugcuuccucaugcagaucgccauccuggucaccaccgugacccugcacuucaagcaguacgagugcagcuccccgcccaacaaccaggugaugcccugcgagcccacgaucaucgagcgcaacaucaccgagaucgucuaccucaccaacaccacgaucgagaaggagaucugcccgaagcugguggaguaccggaacuggagcaagccccagugcaacaucaccggguucgcgcccuucuccaaggacaacagcauccgccuguccgccggcggggacaucugggugacccgggagcccuacgucagcugcgacccgggcaagugcuaccaguucgcccucgggcagggcaccacgcugaacaaccgccacuccaacgacaccgugcacgaccggacccccuaccgcacccugcucaugaacgagcugggcgugcccuuccaccuggggacgaagcaggucugcaucgccuggagcuccagcuccugccacgacggcaaggccuggcuccacgugugcgugaccgggcacgacgagaacgcgaccgccagcuucaucuacgacggccggcuggucgacuccaucgggagcugguccaagaacauccugcgcacccaggagagcgagugcgugugcaucaacggcacgugcaccguggucaugaccgacggcuccgccagcgagcgggccgacaccaagauccucuucaucgaggaggggaagaucgugcacaucagcccccuguccggcagcgcgcagcacguggaggagugcuccugcuacccgcgcuaccccgggguccggugcgugugccgcgacaacuggaagggcagcaaccggcccaucguggacaucaacgucaaggacuacuccaucgugagcuccuacgugugcagcggccuggucggggacacgccccgcaagaacgaccgguccagcuccagcuacugccgcaacccgaacaacgagaagggcucccacggggugaagggcugggccuucgacgacgggaacgacgucuggaugggccggaccaucgacgaggagcuccgcagcggcuacgagaccuucaaggugaucgggggcugguccacccccaacagcaagcugcagaucaaccgccaggugaucgucgacuccgggaaccggagcggcuacuccgggaucuucagcguggagggcaagagcugcaucaaccggugcuucuacguggagcugauccgcggccgcaagcaggagacgcgggucugguggaccuccaacagcaucgugguguucugcgggaccuccggcaccuacgggacgggcagcuggcccgacggggccgacaucaaccucaugcccaucuga

SEQ ID NO: 86038 - RNA, 1410 nt, Artificial Sequence
  derived and/or modified CDS sequence (opt1) from neuraminidase__InfluenzaA__AFG99328
augaaccccaaccagaagaucaucaccaucggcagcgugucccugacccucgccacgaucugcuuccugaugcagaucgccauccuggucaccaccgugacccuccacuucaagcaguacgagugcagcuccccgcccaacaaccaggugaugcccugcgagcccacgaucaucgagcgcaacaucaccgagaucgucuaccugaccaacaccacgaucgagaaggagaucugcccgaagcugguggaguaccggaacuggagcaagccccagugcaagaucaccggguucgcgcccuucuccaaggacaacagcauccgccucuccgccggcggggacaucugggugacccgggagcccuacgucagcugcgacccguccaagugcuaccaguucgcccugggccaggggaccacgcugaacaaccgccacagcaacgacaccgugcacgaccggacccccuaccgcacccuccugaugaacgagcugggcgugcccuuccaccucggcacgcggcaggucugcauggccugguccagcuccagcugccacgacgggaaggccuggcugcacgugugcgugaccggccacgacgagaacgcgaccgccuccuucaucuacgacgggcgccuggucgacagcaucggcuccuggagcaagaacgugcuccggacccaggaguccgagugcgugugcaucaacgggacgugcaccgucgugaugaccgacggcagcgccagcgagcgcgccgacaccaagauccuguucaucgaggagggcaagaucgugcacaucagcccccuguccgggaacgcgcagcacgucgaggagugcuccugcuacccgcgguaccccggcgugcgcugcgugugccgggacaacuggaaggggagcaaccgccccaucgucgacaucaacgugaaggacuacuccaucgugagcuccuacgucugcagcggccucgugggcgacacgccccggaagaacgaccgcuccagcuccagcuacugccggaacccgaacaacgagaaggggucccacggcgucaaggggugggccuucgacgacggcaacgacguguggauggggcgcaccaucggcgaggagcugcggagcggcuacgagaccuucaaggugaucgggggcugguccacccccaacagcaagcugcagaucaaccgccaggucaucguggacuccgggaaccggagcggcuacuccgggaucuucagcguggagggcaagagcugcaucaaccgcugcuucuacgucgagcucauccgcggccggaagcaggagacgcgcgugugguggaccuccaacagcaucguggucuucugcgggaccuccggcaccuacgggacgggcagcuggcccgacggggccgacaucaaccugaugcccaucuga

SEQ ID NO: 86039 - RNA, 1410 nt, Artificial Sequence
  derived and/or modified CDS sequence (opt1) from neuraminidase__InfluenzaA__AFG99350
augaaccccaaccagaagaucaucaccaucggcagcgugucccugacccucgccacgaucugcuuccugaugcagaucgccauccuggucaccaccgugacccuccacuucaagcaguacgagugcagcuccccgcccaacaaccaggugaugcccugcgagcccacgaucaucgagcgcaacaucaccgagaucgucuaccugaccaacaccacgaucgagaaggagaucugcccgaagcugguggaguaccggaacuggagcaagccccagugcaagaucaccggguucgcgcccuucuccaaggacaacagcauccgccucuccgccggcggggacaucugggugacccgggagcccuacgucagcugcgacccguccaagugcuaccaguucgcccugggccaggggaccacgcugaacaaccgccacagcaacgacaccgugcacgaccggacccccuaccgcacccuccugaugaacgagcugggcgugcccuuccaccucggcacgcggcaggucugcauggccugguccagcuccagcugccacgacgggaaggccuggcugcacgugugcgugaccggccacgacgagaacgcgaccgccuccuucaucuacgacgggcgccuggucgacagcaucggcuccuggagcaagaacauccuccggacccaggaguccgagugcgugugcaucaacgggacgugcaccguggucaugaccgacggcagcgccagcgagcgcgccgacaccaagauccuguucaucgaggagggcaagaucgugcacaucagcccccuguccggguccgcgcagcacguggaggagugcagcugcuacccgcgguaccccggcguccgcugcgugugccgggacaacuggaagggguccaaccgccccaucguggacaucaacgucaaggacuacagcaucguguccagcuacgugugcuccggccucgucggcgacacgccccggaagaacgaccgcagcuccagcuccuacugccggaacccgaacaacgagaaggggagccacggcgugaaggggugggccuucgacgacggcaacgacgucuggauggggcgcaccaucggcgaggagcugcgguccggcuacgagaccuucaaggugaucgggggcuggagcacccccaacuccaagcugcagaucaaccgccaggugaucgucgacagcgggaaccgguccggcuacagcgggaucuucagcguggagggcaaguccugcaucaaccgcugcuucuacguggagcucauccgcggccggaagcaggagacgcgcgucugguggaccagcaacuccaucgugguguucugcgggaccagcggcaccuacgggacgggcuccuggcccgacggggccgacaucaaccugaugcccaucuga

SEQ ID NO: 86040 - RNA, 1410 nt, Artificial Sequence
  derived and/or modified CDS sequence (opt1) from neuraminidase__InfluenzaA__AFG99361
augaaccccaaccagaagaucaucaccaucggcagcgugucccugaccaucgccacgaucugcuuccucaugcagaucgccauccuggucaccaccgugacccugcacuucaagcaguacgagugcaacagcccgcccaacaaccaggugaugcucugcgagcccacgaucaucgagcgcaacaucaccgagaucgucuaccugaccaacaccacgaucgagaaggagaagugccccaagcuggcggaguaccggaacugguccaagccgcagugcaagaucaccggguucgcccccuucagcaaggacaacuccauccgccucagcgccggcggggacaucugggugacccgggagcccuacguguccugcgaccccggcaagugcuaccaguucgcccuggggcagggcaccacgcugaacaaccgccacagcaacgacaccguccacgaccggaccccguaccgcacccuccugaugaacgagcugggcgugcccuuccaccucgggacgaagcaggucugcaucgccugguccagcuccagcugccacgacggcaaggcguggcugcacgugugcgugaccgggcacgacgagaacgccaccgccuccuucaucuacgacggccggcugguggacagcaucggguccuggagcaagaacauccuccgcacccaggaguccgagugcgucugcaucaacggcacgugcaccguggugaugaccgacggcagcgccuccgagcgggcggacaccaagauccuguucaucgaggaggggaagaucguccacaucagcccccugagcggcuccgcccagcacguggaggagugcagcugcuacccccgcuacccgggggugcggugcgucugccgcgacaacuggaagggcuccaaccggcccaucguggacaucaacgugaaggacuacagcaucgucuccagcuacgugugcuccggccucgugggggacacgccccgcaagaacgacagcuccagcuccagcuacugccggaaccccaacaacgagaagggcucccacggggucaagggcugggccuucgacgacgggaacgacguguggaugggccgcaccaucagcgaggagcugcgguccggcuacgagaccuucaaggucaucgggggcuggagcaagccgaacuccaagcugcagaucaaccgccaggugaucguggaccgggggaaccgcagcggcuacuccgggaucuucagcgucgagggcaagagcugcaucaaccggugcuucuacguggagcucauccgcggccgcaagcaggagaccgaggugugguggacguccaacagcaucgucguguucugcgggaccuccggcaccuacgggaccggcagcuggcccgacggggccgacaucaaccugaugcccaucuga

SEQ ID NO: 86041 - RNA, 1410 nt, Artificial Sequence
  derived and/or modified CDS sequence (opt1) from neuraminidase__InfluenzaA__AFG99383
augaaccccaaccagaagaucaucaccaucggcagcgugucccugaccaucgccacgaucugcuuccucaugcagaucgccauccuggucaccaccgugacccugcacuucaagcaguacgagugcagcuccccgcccaacaaccaggugaugcccugcgagcccacgaucaucgagcgcaacaucaccgagaucgucuaccucaccaacaccacgaucgagaaggagaucugcccgaagcugguggaguaccggaacuggagcaagccccagugcaagaucaccggguucgcgcccuucuccaaggacaacagcauccgccuguccgccggcggggacaucugggugacccgggagcccuacgucagcugcgacccgggcaagugcuaccaguucgcccucgggcagggcaccacgcugaacaaccgccacuccaacgacaccgugcacgaccggacccccuaccgcacccugcucaugaacgagcugggcgugcccuuccaccuggggacgaagcaggucugcaucgccuggagcuccagcuccugccacgacggcaaggccuggcuccacgugugcgugaccgggcacgacgagaacgcgaccgccagcuucaucuacgacggccggcuggucgacuccaucgggagcugguccaagaacauccugcgcacccaggagagcgagugcgugugcaucaacggcacgugcaccguggucaugaccgacggcuccgccagcgagcgggccgacaccaagauccucuucaucgaggaggggaagaucgugcacaucagcccccuguccggcagcgcgcagcacguggaggagugcuccugcuacccgcgcuaccccgggguccggugcgugugccgcgacaacuggaagggcagcaaccggcccaucguggacaucaacgucaaggacuacuccaucgugagcuccuacgugugcagcggccuggucggggacacgccccgcaagaacgacuccagcuccagcuccuacugccggaacccgaacaacgagaagggcagccacggggugaagggcugggccuucgacgacgggaacgacgucuggaugggccgcaccaucggcgaggagcuccgguccggguacgagaccuucaaggugaucggcggguggagcacccccaacuccaagcugcagaucaaccgccaggugaucgucgacagcggcaaccgguccggguacagcggcaucuucagcguggagggcaaguccugcaucaaccgcugcuucuacguggagcugauccgggggcgcaagcaggagacgaaggucugguggaccagcaacuccaucgugguguucugcggcaccagcgggaccuacggcacgggguccuggcccgacggcgccgacaucaaccucaugcccaucuga

SEQ ID NO: 86042 - RNA, 1410 nt, Artificial Sequence; identical to SEQ ID NO: 86041
  derived and/or modified CDS sequence (opt1) from neuraminidase__InfluenzaA__AFG99394

SEQ ID NO: 86043 - RNA, 1410 nt, Artificial Sequence
  derived and/or modified CDS sequence (opt1) from neuraminidase__InfluenzaA__AFG99405
augaaccccaaccagaagaucaucaccaucggcagcgugucccugaccaucgccacgaucugcuuccucaugcagaucgccauccuggucaccaccgugacccugcacuucaagcaguacgagugcagcuccccgcccaacaaccaggugaugcccugcgagcccacgaucaucgagcgcaacaucaccgagaucgucuaccucaccaacaccacgaucgagaaggagaucugcccgaagcugguggaguaccggaacuggagcaagccccagugcaagaucaccggguucgcgcccuucuccaaggacaacagcauccgccuguccgccggcggggacaucugggugacccgggagcccuacgucagcugcgacccgggcaagugcuaccaguucgcccucgggcagggcaccacgcugaacaaccgccacuccaacgacaccgugcacgaccggacccccuaccgcacccugcucaugaacgagcugggcgugcccuuccaccuggggacgaagcaggucugcaucgccuggagcuccagcuccugccacgacggcaaggccuggcuccacgugugcgugaccgggcacgacaagaacgcgaccgccagcuucaucuacgacggccggcuggucgacuccaucgggagcugguccaagaacauccugcgcacccaggagagcgagugcgugugcaucaacggcacgugcaccguggucaugaccgacggcuccgccagcgagcgggccgacaccaagauccucuucaucgaggaggggaagaucgugcacaucagcccccuguccggcagcgcgcagcacguggaggagugcuccugcuacccgcgcuaccccgggguccggugcgugugccgcgacaacuggaagggcagcaaccggcccaucguggacaucaacgucaaggacuacuccaucaucagcuccuacgugugcagcggccuggugggggacacgccccgcaagaacgaccgguccagcuccagcuacugccgcaacccgaacaacgagaagggcucccacggggucaagggcugggccuucgacgacgggaacgacguguggaugggccggaccaucggcgaggagcuccgcagcggguacgagaccuucaaggucaucggcgggugguccacccccaacagcaagcugcagaucaaccgccaggugaucguggacuccggcaaccggagcggguacuccggcaucuucagcgucgagggcaagagcugcaucaaccggugcuucuacguggagcugauccgcgggcgcgagcaggagacgcgggugugguggaccuccaacagcaucgucguguucugcggcaccuccgggaccuacggcacggggagcuggcccgacggcgccgacaucaaccucaugcccaucuga

SEQ ID NO: 86044 - RNA, 1410 nt, Artificial Sequence
  derived and/or modified CDS sequence (opt1) from neuraminidase__InfluenzaA__AFG99416
augaaccccaaccagaagaucaucaccaucggcagcgugucccugaccaucgccacgaucugcuuccucaugcagaucgccauccuggucaccaccgugacccugcacuucaagcaguacgagugcagcuccccgcccaacaaccaggugaugcccugcgagcccacgaucaucgagcgcaacaucaccgagaucgucuaccucaccaacaccacgaucgagaaggagaucugcccgaagcugguggaguaccggaacuggagcaagccccagugcaagaucaccggguucgcgcccuucuccaaggacaacagcauccgccuguccgccggcggggacaucugggugacccgggagcccuacgucagcugcgacccgggcaagugcuaccaguucgcccucgggcagggcaccacgcugaacaaccgccacuccaacgacaccgugcacgaccggacccccuaccgcacccugcucaugaacgagcugggcgugcccuuccaccuggggacgaagcaggucugcaucgccuggagcuccagcuccugccacgacggcaaggccuggcuccacgugugcgugaccgggcacgacgagaacgcgaccgccagcuucaucuacgacggccggcuggucgacuccaucgggagcugguccaagaacauccugcgcacccaggagagcgagugcgugugcaucaacggcacgugcaccguggucaugaccgacggcuccgccagcgagcgggccgacaccaagauccucuucaucgaggaggggaagaucauccacaucagcccccuguccggcagcgcgcagcacguggaggagugcuccugcuacccgcgcuaccccggggugcggugcgucugccgcgacaacuggaagggcagcaaccggcccaucguggacaucaacgugaaggacuacuccaucgucagcuccuacgugugcagcggccuggugggggacacgccccgcaagaacgacuccagcuccagcuccuacugccggaacccgaacaacgagaagggcagccacggggucaagggcugggccuucgacgacgggaacgacguguggaugggccgcaccaucggcgaggagcuccgguccggguacgagaccuucaaggucaucggcggguggagcacccccaacuccaagcugcagaucaaccgccaggugaucguggacggcgggaaccggagcggcuacuccggcaucuucagcgucgagggcaagagcugcaucaaccgcugcuucuacguggagcugauccgggggcgcaagcaggagacgaaggugugguggaccuccaacagcaucgucguguucugcgggaccuccggcaccuacgggacgggcagcuggcccgacggcgccgacaucaaccucaugcccaucuga

SEQ ID NO: 86045 - RNA, 1410 nt, Artificial Sequence
  derived and/or modified CDS sequence (opt1) from neuraminidase__InfluenzaA__AFG99427
augaaccccaaccagaagaucaucaccaucggcagcgugucccugaccaucgccacgaucugcuuccucaugcagaucgccauccuggucaccaccgugacccugcacuucaagcaguacgagugcagcuccccgcccaacaaccaggugaugcccugcgagcccacgaucaucgagcgcaacaucaccgagaucgucuaccucaccaacaccacgaucgagaaggaggugugcccgaagcugguggaguaccggaacuggagcaagccccagugcaagaucaccggguucgcgcccuucuccaaggacaacagcauccgccuguccgccggcggggacaucugggucacccgggagcccuacgugagcugcgacccgggcaagugcuaccaguucgcccucgggcagggcaccacgcugaacaaccgccacuccaacgacaccgugcacgaccggacccccuaccgcacccugcucaugaacgagcugggcguccccuuccaccuggggacgaagcaggucugcaucgccuggagcuccagcuccugccacgacggcaaggccuggcuccacgugugcgugaccgggcacgacgagaacgcgaccgccagcuucaucuacgacggccggcugguggacuccaucgggagcugguccaagaacauccugcgcacccaggagagcgagugcgugugcaucaacggcacgugcaccgucgugaugaccgacggcuccgccagcgagcgggccgacaccaagauccucuucaucgaggaggggaagaucauccacaucagcccccuguccggcagcgcgcagcacguggaggagugcuccugcuacccgcgcuaccccgggguccggugcgugugccgcgacaacuggaagggcagcaaccggcccaucguggacaucaacgucaaggacuacuccaucgugagcuccuacgugugcagcggccuggucggggacacgccccgcaagaacgacuccagcuccagcuccuacugccggaacccgaacaacgagaagggcagccacggggugaagggcugggccuucgacgacgggaacgacgucuggaugggccgcaccaucggcgaggagcuccgguccggguacgagaccuucaaggugaucggcggguggagcacccccaacuccaagcugcagaucaaccgccaggugaucgucgacagcggcaaccgguccggguacagcggcaucuucagcguggagggcaaguccugcaucaaccgcugcuucuacguggagcugauccgggggcgcaagcaggagacgaaggucugguggaccagcaacuccaucgugguguucugcggcaccagcgggaccuacggcacgggguccuggcccgacggcgccgacaucaaccucaugcccaucuga

SEQ ID NO: 86046 - RNA, 1410 nt, Artificial Sequence
  derived and/or modified CDS sequence (opt1) from neuraminidase__InfluenzaA__AFG99438
augaaccccaaccagaagaucaucaccaucggcagcgugucccugaccaucgccacgaucugcuuccucaugcagaucgccauccuggucaccaccgugacccugcacuuccgccaguacgagugcagcuccccgcccaacaaccaggugaugcccugcgagcccacgaucaucgagcggaacaucaccgagaucgucuaccucaccaacaccacgaucgagaaggagaucugcccgaagcugguggaguaccgcaacuggagcaagccccagugcaagaucaccggguucgcgcccuucuccaaggacaacagcauccggcuguccgccggcggggacaucugggugacccgcgagcccuacgucagcugcgacccgggcaagugcuaccaguucgcccucgggcagggcaccacgcugaacaaccggcacuccaacgacaccgugcacgaccgcacccccuaccggacccugcucaugaacgagcugggcgugcccuuccaccuggggacgaagcaggucugcauggccuggagcuccagcuccugccacgacggcaaggccuggcuccacgugugcgugaccgggcacgacgagaacgcgaccgccagcuucaucuacgacggccgccuggucgacuccaucgggagcugguccaagaacauccugcggacccaggagagcgagugcgugugcaucaacggcacgugcaccguggucaugaccgacggcuccgccagcgagcgcgccgacaccaagauccucuucaucgaggaggggaagaucgugcacaucagcccccuguccggcagcgcgcagcacguggaggagugcuccugcuacccgcgguaccccgggguccgcugcgugugccgggacaacuggaagggcagcaaccgccccaucguggacaucaacgucaaggacuacuccaucgugagcuccuacgugugcagcggccuggucggggacacgccccggaagaacgaccgcuccagcuccagcuacugccggaacccgaacaacgagaagggcucccacggggugaagggcugggccuucgacgacgggaacgacgucuggaugggccgcaccaucggcgaggagcuccggagcggguacgagaccuucaaggugaucggcgggugguccacccccaacagcaagcugcagaucaaccgccaggugaucgucgacuccggcaaccggagcggguacuccggcaucuucagcguggagggcaagagcugcaucaaccgcugcuucuacguggagcugauccgcgggcggaagcaggagacgcgcgucugguggaccuccaacagcaucgugguguucugcggcaccuccgggaccuacggcacggggagcuggcccgacggcgccgacaucaaccucaugcccaucuga

SEQ ID NO: 86047 - RNA, 1410 nt, Artificial Sequence
  derived and/or modified CDS sequence (opt1) from neuraminidase__InfluenzaA__AFG99449
augaaccccaaccagaagaucaucaccaucggcagcgugucccugaccaucgccacgaucugcuuccucaugcagaucgccauccuggucaccaccgugacccugcacuuccgccaguacgagugcagcuccccgcccaacaaccaggugaugcccugcgagcccacgaucaucgagcggaacaucaccgagaucgucuaccucaccaacaccacgaucgagaaggagaucugcccgaagcugguggaguaccgcaacuggagcaagccccagugcaagaucaccggguucgcgcccuucuccaaggacaacagcauccggcuguccgccggcggggacaucugggugacccgcgagcccuacgucagcugcgacccgggcaagugcuaccaguucgcccucgggcagggcaccacgcugaacaaccggcacuccaacgacaccgugcacgaccgcacccccuaccggacccugcucaugaacgagcugggcgugcccuuccaccuggggacgaagcaggucugcauggccuggagcuccagcuccugccacgacggcaaggccuggcuccacgugugcgugaccgggcacgacgagaacgcgaccgccagcuucaucuacgacggccgccuggucgacuccaucgggagcugguccaagaacauccugcggacccaggagagcgagugcgugugcaucaacggcacgugcaccguggucaugaccgacggcuccgccagcgagcgcgccgacaccaagauccucuucaucgaggaggggaagaucgugcacaucagcccccuguccggcagcgcgcagcacguggaggagugcuccugcuacccgcgguaccccgggguccgcugcgugugccgggacaacuggaagggcagcaaccgccccaucguggacaucaacgucaaggacuacuccaucgugagcuccuacgugugcagcggccuggucggggacacgccccggaagaacgaccgcuccagcuccagcuacugccggaacccgaacaacgagaagggcucccacggggugaagggcugggccuucgacgacgggaacgacgucuggaugggccgcaccaucggcgaggagcuccggagcggguacgagaccuucaaggugaucggcgggugguccacccccaacagcaagcugcagaucaaccgccaggugaucgucgacuccggcaaccggagcggguacuccggcaucuucagcguggagggcaagaacugcaucaaccgcugcuucuacguggagcugauccgcgggcggaagcaggagacgcgcgucugguggaccagcaacuccaucgugguguucugcggcaccagcgggaccuacggcacgggguccuggcccgacggcgccgacaucaaccucaugcccaucuga

SEQ ID NO: 86048 - RNA, 1410 nt, Artificial Sequence
  derived and/or modified CDS sequence (opt1) from neuraminidase__InfluenzaA__AFG99471
augaaccccaaccagaagaucaucaccaucggcagcgugucccugauccucgccaccaucugcuuccugaugcagaucgccauccuggucacgaccgugacccuccacuucaagcaguacgagugcagcuccccgcccaacaaccaggugaugcccugcgagcccaccaucaucgagcgcaacaucacggagaucgucuaccugaccaacaccaccaucgagaaggagaucugcccgaagcugguggaguaccggaacuggagcaagccccagugcaagaucacgggguucgcgcccuucuccaaggacaacagcauccgccucuccgccggcggggacaucugggugacccgggagcccuacgucagcugcgacccgggcaagugcuaccaguucgcccuggggcagggcaccacccugaacaaccgccacuccaacgacacggugcacgaccggaaccccuaccgcacccuccugaugaacgagcugggcgugcccuuccaccucgggacccggcaggucugcauggccuggagcuccagcuccugccacgacggcaaggccuggcugcacgugugcgugaccgggcacgacgagaacgcgacggccagcuucaucuacgacggccgccuggucgacuccaucgggagcugguccaagaacauccuccggacccaggagagcgagugcgugugcaucaacgggaccugcaccguggucaugacggacggcuccgccagcgagcgcgccgacaccaagauccuguucaucgaggagggcaagaucgugcacaucagcccccuguccggcagcgcgcagcacguggaggagugcuccugcuacccgcgguaccccgggguccgcugcgugugccgggacaacuggaagggcagcaaccgccccaucguggacaucaacgucaaggacuacuccaucgugagcuccuacgugugcagcggccucgucggggacacgccccggaagaacgaccgcuccagcuccagcuacugccggaacccgaacaacgagaagggcucccacggggugaagggcugggccuucgacgacgggaacgacgucuggaugggccgcaccaucggcgaggagcugcggagcggguacgagaccuucaaggugaucggcgggugguccacccccaacagcaagcugcagaucaaccgccaggugaucgucgacuccggcaaccggagcggguacuccggcaucuucagcguggagggcaagagcugcaucaaccgcugcuucuacguggagcucauccgcgggcggaagcaggagacccgcgucugguggaccuccaacagcaucgugguguucugcggcacguccgggaccuacggcaccgggagcuggcccgacggcgccgacaucaaccugaugcccaucuga

SEQ ID NO: 86049 - RNA, 1410 nt, Artificial Sequence
  derived and/or modified CDS sequence (opt1) from neuraminidase__InfluenzaA__AFG99482
augaaccccaaccagaagaucaucaccaucggcagcgugucccugaccaucgccacgaucugcuuccucaugcagaucgccauccuggucaccaccgugacccugcacuucaagcaguacgagugcaacagcccgcccaacaaccaggugaugcccugcgagcccacgaucaucgagcgcaacaucaccgagaucgucuaccucaccaacaccacgaucgagaaggagaucugcccgaagcugguggaguaccggaacugguccaagccccagugcaagaucaccggguucgcgcccuucagcaaggacaacuccauccgccugagcgccggcggggacaucugggugacccgggagcccuacgucuccugcgacccgggcaagugcuaccaguucgcccucgggcagggcaccacgcugaacaaccgccacagcaacgacaccgugcacgaccggacccccuaccgcacccugcucaugaacgagcugggcgugcccuuccaccuggggacgaagcaggucugcaucgccugguccagcuccagcugccacgacggcaaggccuggcuccacgugugcgugaccgggcacgacgagaacgcgaccgccuccuucaucuacgacggccggcuggucgacagcaucggguccuggagcaagaacauccugcgcacccaggaguccgagugcgugugcaucaacggcacgugcaccguggucaugaccgacggcagcgccuccgggcgggccgacaccaagauccucuucaucgaggagggcaagaucgugcacaucagcccccugagcggguccgcgcagcacguggaggagugcagcugcuacccgcgcuaccccggcguccggugcgugugccgcgacaacuggaagggcuccaaccggcccaucguggacaucaacgucaaggacuacagcaucguguccagcuacgugugcuccgggcuggucggcgacacgccccgcaagaacgacagcuccagcuccagcuacugccggaacccgaacaacgagaaggggucccacggcgugaaggggugggccuucgacgacggcaacgacgucuggaugggccgcaccaucggggaggagcuccggagcggcuacgagaccuucaaggugaucgggggcugguccacccccaacagcaagcugcagaucaaccgccaggugaucgucgaccgggggaaccgcuccggcuacagcggcaucuucuccguggaggggaagaacugcaucaaccggugcuucuacguggagcugauccgcggccgcaagcaggagacgaaggucugguggaccagcaacagcaucgugguguucugcgggaccuccggcaccuacgggacgggcagcuggcccgacggcgccgacaucaaccucauguccaucuga

SEQ ID NO: 86050 - RNA, 1410 nt, Artificial Sequence
  derived and/or modified CDS sequence (opt1) from neuraminidase__InfluenzaA__AFG99493
augaaccccaaccagaagaucaucaccaucggcagcgugucccugaccaucgccacgaucugcuuccucaugcagaucgccauccuggucaccaccgugacccugcacuucaagcaguacgagugcaacagcccgcccaacaaccaggugaugcccugcgagcccacgaucaucgagcgcaacaucaccgagaucgucuaccucaccaacaccacgaucgagaaggagaucugcccgaagcugguggaguaccggaacugguccaagccccagugcaagaucaccggguucgcgcccuucagcaaggacaacuccauccgccugagcgccggcggggacaucugggugacccgggagcccuacgucuccugcgacccgggcaagugcuaccaguucgcccucgggcagggcaccacgcugaacaaccgccacagcaacgacaccgugcacgaccggacccccuaccgcacccugcucaugaacgagcugggcgugcccuuccaccuggggacgaagcaggucugcaucgccugguccagcuccagcugccacgacggcaaggccuggcuccacgugugcgugaccgggcacgacgagaacgcgaccgccuccuucaucuacgacggccggcuggucgacagcaucggguccuggagcaagaacauccugcgcacccaggaguccgagugcgugugcaucaacggcacgugcaccguggucaugaccgacggcagcgccuccgggcgggccgacaccaagauccucuucaucgaggagggcaagaucgugcacaucagcccccugagcggguccgcgcagcacguggaggagugcagcugcuacccgcgcuaccccggcguccggugcgugugccgcgacaacuggaagggcuccaaccggcccaucguggacaucaacgucaaggacuacagcaucguguccagcuacgugugcuccgggcuggucggcgacacgccccgcaagaacgacagcuccagcuccagcuacugccggaacccgaacaacgagaaggggucccacggcgugaaggggugggccuucgacgacggcaacgacgucuggaugggccgcaccaucggggaggagcuccggagcggcuacgagaccuucaaggugaucgggggcugguccacccccaacagcaagcugcagaucaaccgccaggugaucgucgaccgggggaaccgcuccggcuacagcggcaucuucuccguggagggcaagagcugcaucaaccggugcuucuacguggagcugauccgcgggcgcaagcaggagacgaaggucugguggaccagcaacuccaucgugguguucugcgggaccagcggcaccuacgggacgggcuccuggcccgacggcgccgacaucaaccucaugcccaucuga

SEQ ID NO: 86051 - RNA, 1410 nt, Artificial Sequence
  derived and/or modified CDS sequence (opt1) from neuraminidase__InfluenzaA__AFG99504
augaaccccaaccagaagaucaucaccaucggcagcgugucccugaccaucgccacgaucugcuuccucaugcagaucgccauccuggucaccaccgugacccugcacuucaagcaguacgagugcagcuccccgcccaacaaccaggugaugcccugcgagcccacgaucaucgagcgcaacaucaccgagaucgucuaccucaccaacaccacgaucgagaaggagaucugcccgaagcugguggaguaccggaacuggagcaagccccagugcaagaucaccggguucgcgcccuucuccaaggacaacagcauccgccuguccgccggcggggacaucugggugacccgggagcccuacgucagcugcgacccgggcaagugcuaccaguucgcccucgggcagggcaccacgcugaacaaccgccacuccaacgacaccgugcacgaccggacccccuaccgcacccugcucaugaacgagcugggcgugcccuuccaccuggggacgaagcaggucugcaucgccuggagcuccagcuccugccacgacggcaaggccuggcuccacgugugcgugaccgggcacgacgagaacgcgaccgccagcuucaucuacgacggccggcuggucgacuccaucgggagcugguccaagaacauccugcgcacccaggagagcgagugcgugugcaucaacggcacgugcaccguggucaugaccgacggcuccgccagcgagcgggccgacaccaagauccucuucaucgaggaggggaagaucgugcacaucagcccccuguccggcagcgcgcagcacguggaggagugcuccugcuacccgcgcuaccccgggguccggugcgugugccgcgacaacuggaagggcagcaaccggcccaucguggacaucaacgucaaggacuacuccaucgugagcuccuacgugugcagcggccuggucggggacacgccccgcaagaacgaccgguccagcuccagcuacugccgcaacccgaacaacgagaagggcucccacggggugaagggcugggccuucgacgacgggaacgacgucuggaugggccggaccaucggcgaggagcuccgcagcggguacgagaccuucaaggugaucggcgggugguccacccccaacagcaagcugcagaucaaccgccaggugaucgucgacuccggcaaccggagcggguacuccggcaucuucagcguggagggcaagagcugcaucaaccggugcuucuacguggagcugauccgcgggcgcaagcaggagacgcgggucugguggaccuccaacagcaucgugguguucugcggcaccuccgggaccuacggcacggggagcuggcccgacggcgccgacaucaaccucaugcccaucuga

SEQ ID NO: 86052 - RNA, 1410 nt, Artificial Sequence
  derived and/or modified CDS sequence (opt1) from neuraminidase__InfluenzaA__AFG99515
augaaccccaaccagaagaucaucaccaucggcagcgugucccugaccaucgccacgaucugcuuccucaugcagaucgccauccuggucaccaccgugacccugcacuucaagcaguacgagugcaacagcccgcccaacaaccaggugaugcucugcgagcccacgaucaucgagcgcaacaucaccgagaucgucuaccugaccaacaccacgaucgagaaggagaucugccccaagcuggcggaguaccggaacugguccaagccgcagugcaagaucaccggguucgcccccuucagcaaggacaacuccauccgccucagcgccggcggggacaucugggugacccgggagcccuacguguccugcgaccccggcaagugcuaccaguucgcccuggggcagggcaccacgcugaacaaccgccacagcaacgacaccguccacgaccggaccccguaccgcacccuccugaugaacgagcugggcgugcccuuccaccucgggacgaagcaggucugcaucgccugguccagcuccagcugccacgacggcaaggcguggcugcacgugugcgugaccgggcacgacgagaacgccaccgccuccuucaucuacgacggccggcugguggacagcaucggguccuggagcaagaacauccuccgcacccaggaguccgagugcgucugcaucaacggcacgugcaccguggugaugaccgacggcagcgccuccgagcgggcggacaccaagauccuguucaucgaggaggggaagaucguccacaucagcccccugagcggcuccgcccagcacguggaggagugcagcugcuacccccgcuacccgggggugcggugcgucugccgcgacaacuggaagggcuccaaccggcccaucguggacaucaacgugaaggacuacagcaucgucuccagcuacgugugcuccggccucgugggggacacgccccgcaagaacgacagcuccagcuccagcuacugccggaaccccaacaacgagaagggcucccacggggucaagggcugggccuucgacgacgggaacgacguguggaugggccgcaccaucggcgaggagcugcggagcggguacgagaccuucaaggucaucggcgggugguccaccccgaacagcaagcugcagaucaaccgccaggugaucguggaccggggcaaccgcuccggguacagcggcaucuucuccgucgagggcaagagcugcaucaaccggugcuucuacguggagcucauccgcgggcgcaagcaggagacggaggugugguggaccagcaacuccaucgucguguucugcggcaccagcgggaccuacggcacgggguccuggcccgacggcgccgacaucaaccugaugcccaucuga

SEQ ID NO: 86053 - RNA, 1410 nt, Artificial Sequence
  derived and/or modified CDS sequence (opt1) from neuraminidase__InfluenzaA__AFG99526
augaaccccaaccagaagaucaucaccaucggcagcgugucccugacccucgccacgaucugcuuccugaugcagaucgccauccuggucaccaccgugacccuccacuucaagcaguacgagugcagcuccccgcccaacaaccaggugaugcccugcgagcccacgaucaucgagcgcaacaucaccgagaucgucuaccugaccaacaccacgaucgagaaggaggugugcccgaagcugguggaguaccggaacuggagcaagccccagugcaagaucaccggguucgcgcccuucuccaaggacaacagcauccgccucuccgccggcggggacaucugggucacccgggagcccuacgugagcugcgacccgggcaagugcuaccaguucgcccuggggcagggcaccacgcugaacaaccgccacuccaacgacaccgugcacgaccggacccccuaccgcacccuccugaugaacgagcugggcguccccuuccaccucgggacgcgccaggugugcauggccuggagcuccagcuccugccacgacggcaaggccuggcugcacgugugcgucaccgggcacgacgagaacgcgaccgccagcuucaucuacgacggccggcugguggacuccaucgggagcugguccaagaacauccuccggacccaggagagcgagugcgugugcaucaacggcacgugcaccgucgugaugaccgacggcuccgccagcgggcgcgccgacaccaagauccuguucaucgaggagggcaagaucgugcacaucagcccccuguccgggagcgcgcagcacgucgaggagugcuccugcuacccgcgguaccccggcgugcgcugcgugugccgggacaacuggaagggcagcaaccgccccaucgucgacaucaacgugaaggacuacuccaucgugagcuccuacgucugcagcgggcucgugggcgacacgccccggaagaacgaccgcuccagcuccagcuacugccggaacccgaacaacgagaaggggucccacggcgucaaggggugggccuucgacgacggcaacgacguguggaugggccgcaccaucggggaggagcugcggagcggcuacgagaccuucaaggugaucgggggcugguccacccccaacagcaagcugcagaucaaccgccaggucaucguggacuccgggaaccggagcggcuacuccggcaucuucagcguggagggcaagagcugcaucaaccgcugcuucuacgucgagcucauccgcgggcggaagcaggagacgcgcgugugguggaccuccaacagcaucguggucuucugcgggaccuccggcaccuacgggacgggcagcuggcccgacggcgccgacaucaaccugaugcccaucuga

SEQ ID NO: 86054 - RNA, 1410 nt, Artificial Sequence; identical to SEQ ID NO: 85950
  derived and/or modified CDS sequence (opt1) from neuraminidase__InfluenzaA__AFG99537

SEQ ID NO: 86055 - RNA, 1410 nt, Artificial Sequence; identical to SEQ ID NO: 85950
  derived and/or modified CDS sequence (opt1) from neuraminidase__InfluenzaA__AFG99548

SEQ ID NO: 86056 - RNA, 1410 nt, Artificial Sequence; identical to SEQ ID NO: 85950
  derived and/or modified CDS sequence (opt1) from neuraminidase__InfluenzaA__AFG99559

SEQ ID NO: 86057 - RNA, 1410 nt, Artificial Sequence; identical to SEQ ID NO: 85950
  derived and/or modified CDS sequence (opt1) from neuraminidase__InfluenzaA__AFG99570

SEQ ID NO: 86058 - RNA, 1410 nt, Artificial Sequence; identical to SEQ ID NO: 85950
  derived and/or modified CDS sequence (opt1) from neuraminidase__InfluenzaA__AFG99581

SEQ ID NO: 86059 - RNA, 1410 nt, Artificial Sequence
  derived and/or modified CDS sequence (opt1) from neuraminidase__InfluenzaA__AFG99592
augaaccccaaccagaagaucaucaccaucggcagcgugucccugaccaucgccacgaccugcuuccucaugcagaucgccauccuggucaccaccgugacgcugcacuucaagcaguacgagugcaacagcccgcccaacaaccaggugaugcccugcgagcccaccaucaucgagcgcaacaucaccgagaucgucuaccucaccaacacgaccaucgagaaggagaucugcccgaagcugguggaguaccggaacugguccaagccccagugcaagaucaccggguucgcgcccuucagcaaggacaacuccauccgccugagcgccggcggggacaucugggugacccgggagcccuacgucuccugcgacccgggcaagugcuaccaguucgcccucgggcagggcacgacccugaacaaccgccacagcaacgacaccgugcacgaccggacccccuaccgcacgcugcucaugaacgagcugggcgugcccuuccaccuggggaccaagcaggucugcaucgccugguccagcuccagcugccacgacggcaaggccuggcuccacgugugcgugaccgggcacgacgagaacgcgaccgccuccuucaucuacgacggccggcuggucgacagcaucguguccuggagcaagaacauccugcgcacgcaggaguccgagugcgugugcaucaacgggaccugcaccgucgugaugaccgacggcagcgccuccgagcgggccgacacgaagauccucuucaucgaggagggcaagaucgugcacaucagcccccugagcggguccgcgcagcacgucgaggagugcagcugcuacccgcgcuaccccggcgugcggugcgugugccgcgacaacuggaagggguccaaccggcccaucgucgacaucaacgugaaggacuacagcaucguguccagcuacgucugcuccggccuggugggcgacacgccccgcaagaacgacagcuccagcuccagcuacugccggaacccgaacaacgagaaggggucccacggcgucaaggggugggccuucgacgacggcaacgacguguggauggggcgcaccaucggcgaggagcuccggagcggcuacgagaccuucaaggugaucgggggcugguccacccccaacagcaagcugcagaccaaccgccaggucaucguggaccgggggaaccgcuccggcuacagcgggaucuucuccguggagggcaagagcugcaucaaccggugcuucuacgucgagcugauccgcggccgcaagcaggagaccaaggugugguggaccagcaacuccaucguggucuucugcgggacgagcggcaccuacgggaccggcuccuggcccgacggggccgacaucaaccucaugcccaucuga

SEQ ID NO: 86060 - RNA, 1410 nt, Artificial Sequence; identical to SEQ ID NO: 85950
  derived and/or modified CDS sequence (opt1) from neuraminidase__InfluenzaA__AFG99603

SEQ ID NO: 86061 - RNA, 1410 nt, Artificial Sequence; identical to SEQ ID NO: 85950
  derived and/or modified CDS sequence (opt1) from neuraminidase__InfluenzaA__AFG99614

SEQ ID NO: 86062 - RNA, 1410 nt, Artificial Sequence; identical to SEQ ID NO: 85950
  derived and/or modified CDS sequence (opt1) from neuraminidase__InfluenzaA__AFG99625

SEQ ID NO: 86063 - RNA, 1410 nt, Artificial Sequence
  derived and/or modified CDS sequence (opt1) from neuraminidase__InfluenzaA__AFG99636
augaaccccaaccagaagaucaucaccaucggcagcgugucccugaccaucgccacgaucugcuuccucaugcagaucgccauccuggucaccaccgugacccugcacuucaagcaguacgagugcaacagcccgcccaacaaccaggugaugcucugcgagcccacgaucaucgagcgcaacaucaccgagaucgucuaccugaccaacaccacgaucgagaaggagaucugccccaagcuggcggaguaccggaacugguccaagccgcagugcaagaucaccggguucgcccccuucagcaaggacaacuccauccgccucagcgccggcggggacaucugggugacccgggagcccuacguguccugcgaccccggcaagugcuaccaguucgcccuggggcagggcaccacgcugaacaaccgccacagcaacgacaccguccacgaccggaccccguaccgcacccuccugaugaacgagcugggcgugcccuuccaccucgggacgaagcaggucugcaucgccugguccagcuccagcugccacgacggcaaggcguggcugcacgugugcgugaccgggcacgacgagaacgccaccgccuccuucaucuacgacggccggcugguggacagcaucgucuccuggagcaagaacauccuccgcacccaggaguccgagugcgugugcaucaacgggacgugcaccguggucaugaccgacggcagcgccuccgagcgggcggacaccaagauccuguucaucgaggagggcaagaucgugcacaucagcccccugagcggguccgcccagcacguggaggagugcagcugcuacccccgcuacccgggcguccggugcgugugccgcgacaacuggaagggguccaaccggcccaucguggacaucaacgucaaggacuacagcaucguguccagcuacgugugcuccggccucgucggcgacacgccccgcaagaacgacagcuccagcuccagcuacugccggaaccccaacaacgagaaggggucccacggcgugaaggggugggccuucgacgacggcaacgacgucuggauggggcgcaccaucggcgaggaccugcggagcggcuacgagaccuucaaggugaucgggggcugguccaccccgaacagcaagcugcagacgaaccgccaggugaucgucgaccgggggaaccgcuccggcuacagcgggaucuucuccguggagggcaagagcugcaucaaccggugcuucuacguggagcucauccgcggccgcaagcaggagaccaaggucugguggaccagcaacuccaucgugguguucugcgggaccagcggcacguacgggaccggcuccuggcccgacggggccgacaucaaccugaugcccaucuga

SEQ ID NO: 86064 - RNA, 1410 nt, Artificial Sequence
  derived and/or modified CDS sequence (opt1) from neuraminidase__InfluenzaA__AFG99658
augaaccccaaccagaagaucaucaccaucggcagcgugucccugaccaucgccacgaucugcuuccucaugcagaucaccauccuggucaccaccgugacgcugcacuucaagcaguacgagugcaacagcccgcccaacaaccaggugaugcucugcgagcccaccaucaucgagcgcaacaucaccgagaucgucuaccugaccaacacgaccaucgagaaggagaucugccccaagcugguggaguaccggaacugguccaagccgcagugcaagaucaccggguucgcccccuucagcaaggacaacuccauccgccucagcgcgggcggggacaucugggugacccgggagcccuacgucuccugcgaccccggcaagugcuaccaguucgcccuggggcagggcacgacccugaacaaccgccacagcaacgacaccgugcacgaccggaccccguaccgcacgcuccugaugaacgagcugggcgugcccuuccaccucgggaccaagcaggucugcaucgccugguccagcuccagcugccacgacggcaaggccuggcugcacgugugcgugaccgggcacgacgagaacgccaccgcguccuucaucuacgacggccggcuggucgacagcaucuccagcugguccaagaacauccuccgcacgcaggagagcgagugcgugugcaucaacgggaccugcaccguggucaugaccgacggcuccgccagcgagcgggccgacacgaagauccuguucaucgaggagggcaagaucgugcacaucagcccccuguccgggagcgcccagcacguggaggagugcuccugcuacccccgcuacccgggcguccggugcgugugccgcgacaacuggaaggggagcaaccggcccaucguggacaucaacgucaaggacuacuccaucgugagcuccuacgugugcagcggccucgucggcgacacgccccgcaagaacgacuccagcuccagcuccuacugccggaaccccaacaacgagaaggggagccacggcgugaaggggugggcguucgacgacggcaacgacgucuggauggggcgcaccaucuccgaggagcugcggagcggcuacgagaccuucaaggugaucggcgggugguccaccccgaacagcaagcugcagaucaaccgccaggugaucgucgaccggggcaaccgcuccggguacagcggcaucuucagcguggaggggaaguccugcaucaaccggugcuucuacguggagcucauccgcggccgcaagcaggagaacaaggucugguggaccagcaacuccaucgugguguucugcggcaccagcgggaccuacggcacgggguccuggcccgacggcgccgacaucaaccugaugcccaucuga

SEQ ID NO: 86065 - RNA, 1410 nt, Artificial Sequence
  derived and/or modified CDS sequence (opt1) from neuraminidase__InfluenzaA__AFG99680
augaaccccaaccagaagaucaucaccaucggcagcgugucccugaccaucgccacgaucugcuuccucaugcagaucgccauccuggucaccaccgugacccugcacuucaagcaguacgagugcagcuccccgcccaacaaccaggugauccucugccagcccacgaucaucgagcgcaacaucaccgagaucgucuaccugaccaacaccacgaucgagaaggagaucugccccaagcugguggaguaccggaacuggagcaagccgcagugcaagaucaccggguucgcgcccuucuccaaggacaacagcauccgccucuccgccggcggggacaucugggugacccgggagcccuacgucagcugcgaccccuccaagugcuaccaguucgcccugggccaggggaccacgcugaacaaccgccacagcaacgacaccgugcacgaccggaccccguaccgcacccuccugaugaacgagcugggcgugcccuuccaccucggcacgaagcaggucugcaucgccugguccagcuccagcugccacgacgggaaggccuggcugcacgugugcgugaccggccacgacgagaacgcgaccgccuccuucaucuacgacgggcggcuggucgacagcaucggcuccuggagcaagaacauccuccgcacccaggaguccgagugcgugugcaucaacgggacgugcaccguggucaugaccgacggcagcgccagcgagcgggccgacaccaagauccuguucaucgaggagggcaagguggugcacaucagcccccuguccggguccgcgcagcacgucgaggagugcagcugcuacccccgcuacccgggcgugcggugcgugugccgcgacaacuggaagggguccaaccggcccaucgucgacaucaacgugaaggacuacagcaucguguccagcuacgucugcuccggccucgugggcgacacgccccgcaagaacgacagcuccagcuccagcuacugccggaaccccaacaacgagaaggggucccacggcgucaaggggugggccuucgacgacggcaacgacguguggauggggcgcaccaucagcgaggagcugcgguccggcuacgagaccuucaaggugaucggcggguggagcaccccgaacuccaagcugcagaucaaccgccaggucaucguggacagcggcaaccggagcggguacuccggcaucuucagcguggaggggaaguccugcaucaaccgcugcuucuacgucgagcucauccggggccgcaagcaggagacgaaggugugguggaccagcaacuccaucguggucuucugcggcaccagcgggaccuacggcacgggguccuggcccgacggcgccgacaucaaccugaugcccaucuga

SEQ ID NO: 86066 - RNA, 1410 nt, Artificial Sequence
  derived and/or modified CDS sequence (opt1) from neuraminidase__InfluenzaA__AFG99691
augaaccccaaccagaagaucaucaccaucggcagcgugucccugaccaucgccacgaucugcuuccucaugcagaucgccauccuggucaccaccgugacccugcacuucaagcaguacgagugcaacagcccgcccaacaaccaggugaugcccugcgagcccacgaucaucgagcgcaacaccaccgagaucgucuaccucaccaacacgaccaucgagaaggagaucugcccgaagcugguggaguaccggaacugguccaagccccagugcaagaucaccggguucgcgcccuucagcaaggacaacuccauccgccugagcgccggcggggacaucugggugacccgggagcccuacgucuccugcgacccgggcaagugcuaccaguucgcccucgggcagggcacgacccugaacaaccgccacagcaacgacaccgugcacgaccggacccccuaccgcacgcugcucaugaacgagcugggcgugcccuuccaccuggggaccaagcaggucugcaucgccugguccagcuccagcugccacgacggcaaggccuggcuccacgugugcgugaccgggcacgacgagaacgcgaccgccuccuucaucuacgacggccggcuggucgacagcaucguguccuggagcaagaacauccugcgcacgcaggaguccgagugcgugugcaucaacgggaccugcaccgucgugaugaccgacggcagcgccuccgagcgggccgacacgaagauccucuucaucgaggagggcaagaucgugcacaucagcccccugagcggguccgcgcagcacgucgaggagugcagcugcuacccgcgcuaccccggcgugcggugcgugugccgcgacaacuggaagggguccaaccggcccaucgucgacaucaacgugaaggacuacagcaucguguccagcuacgucugcuccggccuggugggcgacacgccccgcaagaacgacagcuccagcuccagcuacugccggaacccgaacaacgagaaggggucccacggcgucaaggggugggccuucgacgacggcaacgacguguggauggggcgcaccaucggcgaggagcuccggagcggcuacgagaccuucaaggugaucgggggcugguccacccccaacagcaagcugcagaccaaccgccaggucaucguggaccgggggaaccgcuccggcuacagcgggaucuucuccguggagggcaagagcugcaucaaccggugcuucuacgucgagcugauccgcggccgcaagcaggagaccaaggugugguggaccagcaacuccaucguggucuucugcgggacgagcggcaccuacgggaccggcuccuggcccgacggggccgacaucaaccucaugcccaucuga

SEQ ID NO: 86067 - RNA, 1410 nt, Artificial Sequence; identical to SEQ ID NO: 85950
  derived and/or modified CDS sequence (opt1) from neuraminidase__InfluenzaA__AFG99704

SEQ ID NO: 86068 - RNA, 1410 nt, Artificial Sequence; identical to SEQ ID NO: 85950
  derived and/or modified CDS sequence (opt1) from neuraminidase__InfluenzaA__AFG99715

SEQ ID NO: 86069 - RNA, 1410 nt, Artificial Sequence; identical to SEQ ID NO: 85950
  derived and/or modified CDS sequence (opt1) from neuraminidase__InfluenzaA__AFG99726

SEQ ID NO: 86070 - RNA, 1410 nt, Artificial Sequence
  derived and/or modified CDS sequence (opt1) from neuraminidase__InfluenzaA__AFG99737
augaaccccaaccagaagaucaucaccaucggcagcgugucccugaccaucgccacgaucugcuuccucaugcagaucaccauccuggucaccaccgugacgcugcacuucaagcaguacgagugcaacagcccgcccaacaaccaggugaugcucugcgagcccaccaucaucgagcgcaacaucaccgagaucgucuaccugaccaacacgaccaucgagaaggagaucugccccaagcugguggaguaccggaacugguccaagccgcagugcaagaucaccggguucgcccccuucagcaaggacaacuccauccgccucagcgcgggcggggacaucugggugacccgggagcccuacgucuccugcgaccccggcaagugcuaccaguucgcccuggggcagggcacgacccugaacaaccgccacagcaacgacaccgugcacgaccggaccccguaccgcacgcuccugaugaacgagcugggcgugcccuuccaccucgggaccaagcaggucugcaucgccugguccagcuccagcugccacgacggcaaggccuggcugcacgugugcgugaccgggcacgacgagaacgccaccgcguccuucaucuacgacggccggcuggucgacagcaucggguccuggagcaagaacauccuccgcacgcaggaguccgagugcgugugcaucaacgggaccugcaccguggucaugaccgacggcagcgccuccgagcgggccgacacgaagauccuguucaucgaggagggcaagaucgugcacaucagcccccugagcggcuccgcccagcacguggaggagugcagcugcuacccccgcuacccggggguccggugcgugugccgcgacaacuggaagggcuccaaccggcccaucguggacaucaacgucaaggacuacagcaucguguccagcuacgugugcuccggccucgucggggacacgccccgcaagaacgacagcuccagcuccagcuacugccggaaccccaacaacgagaagggcucccacggggugaagggcugggcguucgacgacgggaacgacgucuggaugggccgcaccaucagcgaggagcugcgguccggcuacgagaccuucaaggugaucgggggcuggagcaccccgaacuccaagcugcagaucaaccgccaggugaucgucgaccgggggaaccgcagcggcuacuccgggaucuucagcguggagggcaagagcugcaucaaccggugcuucuacguggagcucauccgcggccgcaagcaggagaacaaggucugguggaccuccaacagcaucgugguguucugcgggaccuccggcaccuacgggacgggcagcuggcccgacggggccgacaucaaccugaugcccaucuga

SEQ ID NO: 86071 - RNA, 1410 nt, Artificial Sequence
  derived and/or modified CDS sequence (opt1) from neuraminidase__InfluenzaA__AFG99748
augaaccccaaccagaagaucaucaccaucggcagcgugucccugaccaucgccacgaucugcuuccucaugcagaucgccauccuggucaccaccgugacccugcacuucaagcaguacgacugcaacagcccgcccaacaaccaggcgaugcucugcgagcccacgaucaucgagcgcaacaucaccgagaucguguaccugaccaacaccacgaucgagaaggagaucugccccaagcuggccgaguaccggaacugguccaagccgcagugcaagaucaccggguucgcccccuucagcaaggacaacuccauccgccucagcgccggcggggacaucugggucacccgggagcccuacguguccugcgaccccggcaagugcuaccaguucgcccuggggcagggcaccacgcugaacaaccgccacagcaacgacaccgugcacgaccggaccccguaccgcacccuccugaugaacgagcugggcguccccuuccaccucgggacgaagcaggucugcaucgcgugguccagcuccagcugccacgacggcaaggccuggcugcacgugugcgugaccgggcacgacgagaacgccaccgccuccuucaucuacgacggccggcugguggacagcaucggguccuggagcaagaacauccuccgcacccaggaguccgagugcgugugcaucaacggcacgugcaccgucgugaugaccgacggcagcgcguccgagcgggccgacaccaagauccuguucaucgaggaggggaagaucgugcacaucagcccccugagcggcuccgcccagcacgucgaggagugcagcugcuacccccgcuacccgggggugcggugcgugugccgcgacaacuggaagggcuccaaccggcccaucgucgacaucaacgugaaggacuacagcaucguguccagcuacgucugcuccggccucgugggggacacgccccgcaagaacgacagcuccagcuccagcuacugccggaaccccaacaacgagaagggcucccacggggugaagggcugggccuucgacgacgggaacgacgucuggaugggccgcaccaucggcgaggagcugcggagcggguacgagaccuucaaggugaucggcgggugguccaccccgaacagcaagcugcagaucaaccgccaggucaucguggaccggggcaaccgcuccggguacagcggcaucuucuccguggagggcaagagcugcacgaaccggugcuucuacgucgagcucauccgcgggcgcaagcaggagaccgaggugugguggaccagcaacuccaucguggucuucugcggcaccagcgggacguacggcaccggguccuggcccgacggcgccgacaucaaccugaugcccaucuga

SEQ ID NO: 86072 - RNA, 1410 nt, Artificial Sequence; identical to SEQ ID NO: 85950
  derived and/or modified CDS sequence (opt1) from neuraminidase__InfluenzaA__AFG99759

SEQ ID NO: 86073 - RNA, 1410 nt, Artificial Sequence
  derived and/or modified CDS sequence (opt1) from neuraminidase__InfluenzaA__AFG99770
augaaccccaaccagaagaucaucaccaucggcagcgugucccugaccaucgccacgaucugcuuccucaugcagaucgccauccuggucaccaccgugacccugcacuucaagcaguacgagugcaacagcccgcccaacaaccagaucaugcucugcgagcccacgaucaucgagcgcaacaucaccgagaucguguaccugaccaacaccacgaucgagcgggagaucugccccaagcuggucgaguaccgcaacugguccaagccgcagugcaagaucaccggguucgcgcccuucagcaaggacaacuccauccggcucagcgccggcggggacaucugggugacccgcgagcccuacguguccugcgaccccggcaagugcuaccaguucgcccuggggcagggcaccacgcugaacaaccggcacagcaacgacaccguccacgaccgcaccccguaccggacccuccugaugaacgagcugggcgugcccuuccaccucgggacgaagcaggucugcaucgccugguccagcuccagcugccacgacggcaaggccuggcugcacgugugcgugaccgggcacgacgagaacgcgaccgccuccuucaucuacgacggccgccugguggacagcaucggguccuggagcaagaacauccuccggacccaggaguccgagugcgucugcaucaacggcacgugcaccguggugaugaccgacggcagcgccuccgagcgcgccgacaccaagauccuguucaucgaggaggggaagaucguccacaucagcccccugagcggcuccgcgcagcacguggaggagugcagcugcuacccccgguacccgggggugcgcugcgucugccgggacaacuggaagggcuccaaccgccccaucguggacaucaacgugaaggacuacagcaucgucuccagcuacgugugcuccggccucgugggggacacgccccggaagaacgacagcuccagcuccagcuacugccgcaaccccaacaacgagaagggcucccacggggucaagggcugggccuucgacgacgggaacgacguguggaugggccggaccaucggcgaggagcugcgcagcggguacgagaccuucaaggucaucggcgggugguccaccccgaacagcaagcugcagaucaaccgccaggugaucguggaccggggcaaccgguccggguacagcggcaucuucuccgucgagggcaagagcugcaucaaccgcugcuucuacguggagcucauccgcgggcggaagcaggagacggaggugugguggaccagcaacuccaucgucguguucugcggcaccagcgggaccuacggcacgggguccuggcccgacggcgccgacaucaaccugaugcccaucuga

SEQ ID NO: 86074 - RNA, 1410 nt, Artificial Sequence
  derived and/or modified CDS sequence (opt1) from neuraminidase__InfluenzaA__AFG99781
augaaccccaaccagaagaucaucaccaucggcagcgugucccugaccaucgccacgaucugcuuccucaugcagaucgccauccuggucaccaccgugacccugcacuucaagcaguacgagugcagcuccccgcccaacaaccaggugaugcucugccagcccacgaucaucgagcgcaacaucaccgagaucgucuaccugaccaacaccacgaucgagaaggagaucugccccaagcugguggaguaccggaacuggagcaagccgcagugcaagaucaccggguucgcgcccuucuccaaggacaacagcauccgccucuccgccggcggggacaucugggugacccgggagcccuacgucagcugcgaccccggcaagugcuaccaguucgcccuggggcagggcaccacgcugaacaaccgccacuccaacgacaccgugcacgaccggaccccguaccgcacccuccugaugaacgagcugggcgugcccuuccaccucgggacgaagcaggucugcaucgccuggagcuccagcuccugccacgacggcaaggccuggcugcacgugugcgugaccgggcacgacgagaacgcgaccgccagcuucaucuacgacggccggcuggucgacuccaucgggagcugguccaagaacauccuccgcacccaggagagcgagugcgugugcaucaacggcacgugcaccguggucaugaccgacggcuccgccagcaagcgggccgacaccaagauccuguucaucgaggaggggaagaucgugcacaucagcccccuguccggcagcgcgcagcacguggaggagugcuccugcuacccccgcuacccggggguccggugcgugugccgcgacaacuggaagggcagcaaccggcccaucguggacaucaacgucaaggacuacuccaucgugagcuccuacgugugcagcggccucgucggggacacgccccgcaagaacgacuccagcuccagcuccuacugccggaaccccaacaacgagaagggcagccacggggugaagggcugggccuucgacgacgggaacgacgucuggaugggccgcaccaucuccgaggagcugcggagcggcuacgagaccuucaaggugaucgggggcugguccaccccgaacagcaagcugcagacgaaccgccaggugaucgucgacuccgggaaccggagcggcuacagcgggaucuucuccguggagggcaagagcugcaucaaccgcugcuucuacguggagcucauccggggccgcaagcaggagaccaaggucugguggaccuccaacagcaucgugguguucugcgggaccuccggcacguacgggaccggcagcuggcccgacggggccgacaucaaccugaugcccaucuga

SEQ ID NO: 86075 - RNA, 1410 nt, Artificial Sequence; identical to SEQ ID NO: 85950
  derived and/or modified CDS sequence (opt1) from neuraminidase__InfluenzaA__AFG99792

SEQ ID NO: 86076 - RNA, 1410 nt, Artificial Sequence; identical to SEQ ID NO: 86070
  derived and/or modified CDS sequence (opt1) from neuraminidase__InfluenzaA__AFG99803

SEQ ID NO: 86077 - RNA, 1410 nt, Artificial Sequence; identical to SEQ ID NO: 85950
  derived and/or modified CDS sequence (opt1) from neuraminidase__InfluenzaA__AFG99825

SEQ ID NO: 86078 - RNA, 1410 nt, Artificial Sequence; identical to SEQ ID NO: 85950
  derived and/or modified CDS sequence (opt1) from neuraminidase__InfluenzaA__AFG99836

SEQ ID NO: 86079 - RNA, 1410 nt, Artificial Sequence; identical to SEQ ID NO: 85950
  derived and/or modified CDS sequence (opt1) from neuraminidase__InfluenzaA__AFG99847

SEQ ID NO: 86080 - RNA, 1410 nt, Artificial Sequence; identical to SEQ ID NO: 85950
  derived and/or modified CDS sequence (opt1) from neuraminidase__InfluenzaA__AFG99858

SEQ ID NO: 86081 - RNA, 1410 nt, Artificial Sequence; identical to SEQ ID NO: 85950
  derived and/or modified CDS sequence (opt1) from neuraminidase__InfluenzaA__AFG99869

SEQ ID NO: 86082 - RNA, 1410 nt, Artificial Sequence; identical to SEQ ID NO: 85950
  derived and/or modified CDS sequence (opt1) from neuraminidase__InfluenzaA__AFG99880

SEQ ID NO: 86083 - RNA, 1410 nt, Artificial Sequence
  derived and/or modified CDS sequence (opt1) from neuraminidase__InfluenzaA__AFG99891
augaaccccaaccagaagaucaucaccaucggcagcgugucccugaccaucgccacgaucugcuuccucaugcagaucgccauccuggucaccaccgugacccugcacuucaagcaguacgagugcaacagcccgcccaacaaccaggugaugcucugcgagcccacgaucaucgagcgcaacaucaccgagaucgucuacuucaccaacaccacgaucgagaaggagaucugccccaagcuggcggaguaccggaacugguccaagccgcagugcaagaucaccggguucgcccccuucagcaaggacaacuccauccgccugagcgccggcggggacaucugggugacccgggagcccuacguguccugcgaccccggcaagugcuaccaguucgcccucgggcagggcaccacgcugaacaaccgccacagcaacgacaccguccacgaccggaccccguaccgcacccugcucaugaacgagcugggcgugcccuuccaccuggggacgaagcaggucugcaucgccugguccagcuccagcugccacgacggcaaggcguggcuccacgugugcgugaccgggcacgacgagaacgccaccgccuccuucaucuacgacggccggcugguggacagcaucggguccuggagcaagaacauccugcgcacccaggaguccgagugcgucugcaucaacggcacgugcaccguggugaugaccgacggcagcgccuccgagcgggcggacaccaagauccucuucaucgaggaggggaagaucguccacaucagcagccuguccggcagcgcccagcacguggaggagugcuccugcuacccccgcuaccccggggugcggugcgucugccgcgacaacuggaagggcagcaaccggccgaucguggacaucaacgugaaggacuacuccaucgucagcuccuacgugugcagcggccuggugggggacacgccccgcaagaacgacuccagcuccagcuccuacugccggaaccccaacaacgagaagggcagccacggggucaagggcugggccuucgacgacgggaacgacguguggaugggccgcaccaucggcgaggagcuccgguccggguacgagaccuuccgcgucaucggcggguggagcacccccaacuccaagcugcagaucaaccgccaggugaucguggaccggggcaaccggagcggguacuccggcaucuucagcgucgagggcaagagcugcaucaaccgcugcuucuacguggagcugauccgcgggcggaagcaggagacggaggugugguggaccuccaacagcaucgucguguucugcggcaccuccgggaccuacggcacggggagcuggccggacggcgccgacaucaaccucaugcccaucuga

SEQ ID NO: 86084 - RNA, 1410 nt, Artificial Sequence; identical to SEQ ID NO: 85950
  derived and/or modified CDS sequence (opt1) from neuraminidase__InfluenzaA__AFG99902

SEQ ID NO: 86085 - RNA, 1410 nt, Artificial Sequence; identical to SEQ ID NO: 85950
  derived and/or modified CDS sequence (opt1) from neuraminidase__InfluenzaA__AFG99913

SEQ ID NO: 86086 - RNA, 1410 nt, Artificial Sequence; identical to SEQ ID NO: 85950
  derived and/or modified CDS sequence (opt1) from neuraminidase__InfluenzaA__AFG99924

SEQ ID NO: 86087 - RNA, 1410 nt, Artificial Sequence
  derived and/or modified CDS sequence (opt1) from neuraminidase__InfluenzaA__AFG99935
augaaccccaaccagaagaucaucaccaucggcagcgugucccugaccaucgccacgaucugcuuccucaugcagaucgccauccuggucaccaccgugacccugcacuucaagcaguacgagugcaacagcccgcccaacaaccaggugaugcucugcgagcccacgaucgucgagcgcaacaucaccgagaucguguaccugaccaacaccacgaucgagaaggagaucugccccaagcuggcggaguaccggaacugguccaagccgcagugcaagaucaccggguucgcccccuucagcaaggacaacuccauccgccucagcgccggcggggacaucugggugacccgggagcccuacgucuccugcgaccccagcaagugcuaccaguucgcccugggccaggggaccacgcugaacaaccgccacuccaacgacaccgugcacgaccggaccccguaccgcacccuccugaugaacgagcugggcgugcccuuccaccucggcacgaagcaggucugcaucgccuggagcuccagcuccugccacgacgggaaggcguggcugcacgugugcgugaccggccacgacgagaacgccaccgccagcuucaucuacgacgggcggcuggucgacuccaucggcagcugguccaagaacauccuccgcacccaggagagcgagugcgugugcaucaacgggacgugcaccguggucaugaccgacggcuccgccagcgagcgggcggacaccaagauccuguucaucgaggagggcaagaucgugcacaucagcccccuguccgggagcgcccagcacguggaggagugcuccugcuacccccgcuacccgggcguccggugcgugugccgcgacaacuggaaggggagcaaccggcccaucguggacaucaacaugaaggacuacuccaucgucagcuccuacgugugcagcggccucgugggcgacacgccccgcaacaacgacuccagcuccagcuccuacugccggaaccccaacaacgagaaggggagccacggcgucaaggggugggccuucgacgacggcaacgacguguggauggggcgcaccaucggcgaggagcugcgguccggcuacgagaccuucaaggucaucgggggcuggagcaccccgaacuccaagcugcagaucaaccgccaggugaucguggaccgggggaaccgcagcggcuacuccgggaucuucagcgucgagggcaagagcugcaucaaccggugcuucuacguggagcucauccgcggccgcaagcaggagacggaggugugguggaccuccaacagcaucgucguguucugcgggaccuccggcaccuacgggacgggcagcuggcccgacggggccgacaucaaccugaugcccaucuga

SEQ ID NO: 86088 - RNA, 1410 nt, Artificial Sequence; identical to SEQ ID NO: 85950
  derived and/or modified CDS sequence (opt1) from neuraminidase__InfluenzaA__AFG99946

SEQ ID NO: 86089 - RNA, 1410 nt, Artificial Sequence
  derived and/or modified CDS sequence (opt1) from neuraminidase__InfluenzaA__AFG99957
augaaccccaaccagaagaucaucaccaucggcagcgugucccugaccaucgccacgaucugcuuccucaugcagaucgccauccuggucaccaccgugacccugcacuucaagcaguacgagugcaacagcccgcccaacaaccaggcgaugcucugcgagcccacgaucaucgagcgcaacaucaccgagaucguguaccugaccaacaccacgaucgagaaggagaucugccccaagcuggccgaguaccggaacugguccaagccgcagugcaagaucaccggguucgcccccuucagcaaggacaacuccauccgccucagcgccggcggggacaucugggucacccgggagcccuacguguccugcgaccccggcaagugcuaccaguucgcccuggggcagggcaccacgcugaacaaccgccacagcaacgacaccgugcacgaccggaccccguaccgcacccuccugaugaacgagcugggcguccccuuccaccucgggacgaagcaggucugcaucgcgugguccagcuccagcugccacgacggcaaggccuggcugcacgugugcgugaccgggcacgacgagaacgccaccgccuccuucaucuacgacggccggcugguggacagcaucggguccuggagcaagaacauccuccgcacccaggaguccgagugcgugugcaucaacggcacgugcaccgucgugaugaccgacggcagcgcguccgagcgggccgacaccaagauccuguucaucgaggaggggaagaucgugcacaucagcccccugagcggcuccgcccagcacgucgaggagugcagcugcuacccccgcuacccgggggugcggugcgugugccgcgacaacuggaagggcuccaaccggcccaucgucgacaucaacgugaaggacuacagcaucguguccagcuacgucugcuccggccucgugggggacacgccccgcaagaacgacagcuccagcuccagcuacugccggaaccccaacaacgagaagggcucccacggggugaagggcugggccuucgacgacgggaacgacgucuggaugggccgcaccaucggcgaggagcugcggagcggguacgagaccuucaaggugaucggcgggugguccaccccgaacagcaagcugcagaucaaccgccaggucaucguggaccggggcaaccgcuccggguacagcggcaucuucuccguggagggcaagagcugcacgaaccggugcuucuacgucgagcucauccgcgggcgcaagcaggagaccgaggugugguggaccagcaacuccaucguggucuucugcggcaccagcgggacguacggcaccggguccuggcccgacggcgccgacaucaaccugaugcccaucuga

SEQ ID NO: 86090 - RNA, 1410 nt, Artificial Sequence; identical to SEQ ID NO: 85950
  derived and/or modified CDS sequence (opt1) from neuraminidase__InfluenzaA__AFG99968

SEQ ID NO: 86091 - RNA, 1410 nt, Artificial Sequence
  derived and/or modified CDS sequence (opt1) from neuraminidase__InfluenzaA__AFG99979
augaaccccaaccagaagaucaucaccaucggcagcgugucccugaccaucgccacgaucugcuuccucaugcagaucgccauccuggucaccaccgugacccugcacuucaagcaguacgagugcaacagcccgcccaacaaccaggugaugcccugcgagcccacgaucaucgagcgcaacaucaccgagaucgucuaccucaccaacaccacgaucgagaaggagaucugcccgaagcugguggaguaccggaacugguccaagccccagugcaagaucaccggguucgcgcccuucagcaaggacaacuccauccgccugagcgccggcggggacaucugggugacccgggagcccuacgucuccugcgacccgggcaagugcuaccaguucgcccucgggcagggcaccacgcugaacaaccgccacagcaacgacaccgugcacgaccggacccccuaccgcacccugcucaugaacgagcugggcgugcccuuccaccuggggacgaagcaggucugcaucgccugguccagcuccagcugccacgacggcaaggccuggcuccacgugugcgugaccgggcacgacgagaacgcgaccgccuccuucaucuacgacggccggcuggucgacagcaucguguccuggagcaagaacauccugcgcacccaggaguccgagugcgugugcaucaacgggacgugcaccgucgugaugaccgacggcagcgccuccgagcgggccgacaccaagauccucuucaucgaggagggcaagaucgugcacaucagcccccugagcggguccgcgcagcacgucgaggagugcagcugcuacccgcgcuaccccggcgugcggugcgugugccgcgacaacuggaagggguccaaccggcccaucgucgacaucaacgugaaggacuacagcaucguguccagcuacgucugcuccggccuggugggcgacacgccccgcaagaacgacagcuccagcuccagcuacugccucaacccgaacaacgagaaggggucccacggcgucaaggggugggccuucgacgacggcaacgacguguggauggggcggaccaucggcgaggagcugcgcagcggcuacgagaccuucaaggugaucgggggcugguccacccccaacagcaagcugcagacgaaccggcaggucaucguggaccgcgggaaccgguccggcuacagcgggaucuucuccguggagagcaagagcugcaucaaccgcugcuucuacgucgagcucauccggggccgcaagcaggagaccaaggugugguggaccuccaacagcaucguggucuucugcggcaccuccgggacguacggcaccgggagcuggcccgacggcgccgacaucaaccugaugcccaucuga

SEQ ID NO: 86092 - RNA, 1410 nt, Artificial Sequence
  derived and/or modified CDS sequence (opt1) from neuraminidase__InfluenzaA__AFG99990
augaaccccaaccagaagaucaucaccaucggcagcgugucccugaccaucgccacgaucugcuuccucaugcagaucgccauccuggucaccaccgugacccugcacuucaagcaguacgagugcaacagcccgcccaacaaccaggcgaugcucugcgagcccaagaucaucgagcgcaacaucacggagaucguguaccugaccaacaccaccaucgagaaggagaucugccccaagcuggccgaguaccggaacugguccaagccgcagugcaagaucacgggguucgcccccuucagcaaggacaacuccauccgccucagcgccggcggggacaucugggucacccgggagcccuacguguccugcgaccccggcaagugcuaccaguucgcccuggggcagggcaccacccugaacaaccgccacagcaacgacacggugcacgaccggaccccguaccgcacccuccugaugaacgagcugggcguccccuuccaccucgggaccaagcaggucugcaucgcgugguccagcuccagcugccacgacggcaaggccuggcugcacgugugcgugacggggcacgacgagaacgccaccgccuccuucaucuacgacggccggcugguggacagcaucggguccuggagcaagaacauccuccgcacccaggaguccgagugcgugugcaucaacgggaccugcacggucgugaugaccgacggcagcgcguccgagcgggccgacaccaagauccuguucaucgaggagggcaagaucgugcacaucagcccccugagcggcuccgcccagcacgucgaggagugcagcugcuacccccgcuacccgggggugcggugcgugugccgcgacaacuggaagggcuccaaccggcccaucgucgacaucaacgugaaggacuacagcaucguguccagcuacgucugcuccggccucgugggggacacgccccgcaagaacgacagcuccagcuccagcuacugccggaaccccaacaacgagaagggcucccacggggugaagggcugggccuucgacgacgggaacgacgucuggaugggccgcaccaucagcgaggagcugcgguccggcuacgagaccuucaaggugaucgggggcuggagcaagccgaacuccaagcugcagaucaaccgccaggucaucguggaccgggggaaccgcagcggcuacuccgggaucuucagcguggagggcaagagcugcaucaaccggugcuucuacgucgagcucauccgcggccgcaagcaggagaccgaggugugguggaccuccaacagcaucguggucuucugcgggacguccggcaccuacgggaccggcagcuggcccgacggggccgacaucaaccugaugcccaucuga

SEQ ID NO: 86093 - RNA, 1410 nt, Artificial Sequence
  derived and/or modified CDS sequence (opt1) from neuraminidase__InfluenzaA__AFH00002
augaaccccaaccagaagaucaucaccaucggcagcgugucccugaccaucgccacgaucugcuuccucaugcagaucgccauccuggucaccaccgugacccugcacuucaagcaguacgagugcagcuccccgcccaacaaccaggugauccccugccagcccacgaucaucgagcgcaacaucaccgagaucgucuaccucaccaacaccacgaucgagaaggagaucugcccgaagcugguggaguaccggaacuggagcaagccccagugcaagaucaccggguucgcgcccuucuccaaggacaacagcauccgccuguccgccggcggggacaucugggugacccgggagcccuacgucagcugcgacccgggcaagugcuaccaguucgcccucgggcagggcaccacgcugaacaaccgccacuccaacgacaccgugcacgaccggacccccuaccgcacccugcucaugaacgagcugggcgugcccuuccaccuggggacgaagcaggucugcaucgccuggagcuccagcuccugccacgacggcaaggccuggcuccacgugugcgugaccgggcacgacgagaacgcgaccgccagcuucaucuacgacggccggcuggucgacuccaucgggagcugguccaagaacauccugcgcacccaggagagcgagugcgugugcaucaacggcacgugcgccguggucaugaccgacggcuccgccagcgagcgggcggacaccaagauccucuucaucgaggaggggaagguggugcacaucagcccccuguccggcagcgcccagcacgucgaggagugcuccugcuacccgcgcuaccccggggugcggugcgugugccgcgacaacuggaagggcagcaaccggcccaucgucgacaucaacgugaagaacuacuccaucgugagcuccuacgucugcagcggccuggugggggacacgccccgcaagaacgacuccagcuccagcuccuacugccggaacccgaacaacgagaagggcagccacggggucaagggcugggccuucgacgacgggaacgacguguggaugggccgcaccaucuccgaggagcuccggagcggcuacgagaccuucaaggugaucgggggcugguccacccccaacagcaagcugcagaucaaccgccaggucaucguggacuccgggaaccggagcggcuacagcgggaucuucuccguggagggcaagagcugcaucaaccgcugcuucuacgucgagcugauccggggccgcaagcaggagaccaaggugugguggacguccaacagcaucguggucuucugcgggaccuccggcaccuacgggaccggcagcuggcccgacggggccgacaucaaccucaugcccaucuga

SEQ ID NO: 86094 - RNA, 1410 nt, Artificial Sequence; identical to SEQ ID NO: 79209
  derived and/or modified CDS sequence (opt1) from neuraminidase__InfluenzaA__AFH00013

SEQ ID NO: 86095 - RNA, 1410 nt, Artificial Sequence
  derived and/or modified CDS sequence (opt1) from neuraminidase__InfluenzaA__AFH00024
augaaccccaaccagaagaucaucaccaucggcagcgugucccugaccaucgccacgaucugcuuccucaugcagaucaccauccuggucaccaccgugacgcugcacuucaagcaguacgagugcaacagcccgcccaacaaccaggugaugcucugcgagcccaccaucaucgagcgcaacaucaccgagaucgucuaccugaccaacacgaccaucgagaaggagaucugccccaagcugguggaguaccggaacugguccaagccgcagugcaagaucaccggguucgcccccuucagcaaggacaacuccauccgccucagcgcgggcggggacaucugggugacccgggagcccuacgucuccugcgaccccggcaagugcuaccaguucgcccuggggcagggcacgacccugaacaaccgccacagcaacgacaccgugcacgaccggaccccguaccgcacgcuccugaugaacgagcugggcgugcccuuccaccucgggaccaagcaggucugcaucgccugguccagcuccagcugccacgacggcaaggccuggcugcacgugugcgugaccgggcacgacgagaacgccaccgcguccuucaucuacgacggccggcuggucgacagcaucggguccuggagcaagaacauccuccgcacgcaggaguccgagugcgugugcaucaacgggaccugcaccguggucaugaccgacggcagcgccuccgagcgggccgacacgaagauccuguucaucgaggagggccgcaucgugcacaucagcccccugagcggcuccgcccagcacguggaggagugcagcugcuacccccgguacccggggguccgcugcgugugccgggacaacuggaagggcuccaaccgccccaucguggacaucaacgucaaggacuacagcaucguguccagcuacgugugcuccggccucgucggggacacgccccggaagaacgacagcuccagcuccagcuacugccgcaaccccaacaacgagaagggcucccacggggugaagggcugggcguucgacgacgggaacgacgucuggaugggccggaccaucagcgaggagcugcgcuccggcuacgagaccuucaaggugaucgggggcuggagcaccccgaacuccaagcugcagaucaaccgccaggugaucgucgaccgggggaaccggagcggcuacuccgggaucuucagcguggagggcaagagcugcaucaaccgcugcuucuacguggagcucauccgcggccggaagcaggagaacaaggucugguggaccuccaacagcaucgugguguucugcgggaccuccggcaccuacgggacgggcagcuggcccgacggggccgacaucaaccugaugcccaucuga

SEQ ID NO: 86096 - RNA, 1410 nt, Artificial Sequence; identical to SEQ ID NO: 79209
  derived and/or modified CDS sequence (opt1) from neuraminidase__InfluenzaA__AFH00035

SEQ ID NO: 86097 - RNA, 1410 nt, Artificial Sequence; identical to SEQ ID NO: 79209
  derived and/or modified CDS sequence (opt1) from neuraminidase__InfluenzaA__AFH00046

SEQ ID NO: 86098 - RNA, 1410 nt, Artificial Sequence
  derived and/or modified CDS sequence (opt1) from neuraminidase__InfluenzaA__AFH00057
augaaccccaaccagaagaucaucaccaucggcagcgugucccugaccaucgccacgaucugcuuccucaugcagaucgccauccuggucaccaccgugacccugcacuucaagcaguacgagugcaacagcccgcccaacaaccaggugaugcucugcgagcccacgaucaucgagcgcaacaucaccgagaucgucuaccugaccaacaccacgaucgagaaggagaucugccccaagcuggcggaguaccggaacugguccaagccgcagugcaagaucaccggguucgcccccuucagcaaggacaacuccauccgccucagcgccggcggggacaucugggugacccgggagcccuacguguccugcgaccccggcaagugcuaccaguucgcccuggggcagggcaccacgcugaacaaccgccacagcaacgacaccguccacgaccggaccccguaccgcacccuccugaugaacgagcugggcgugcccuuccaccucgggacgaagcaggucugcaucgccugguccagcuccagcugccacgacggcaaggcguggcugcacgugugcgugaccgggcacgacgagaacgccaccgccuccuucaucuacgacggccggcugguggacagcaucggguccuggagcaagaacguccuccgcacccaggaguccgagugcgugugcaucaacggcacgugcaccguggucaugaccgacggcagcgccuccgagcgggcggacaccaagauccuguucaucgaggaggggaagaucgugcacaucagcccccugagcggcuccgcccagcacguggaggagugcagcugcuacccccgcuacccggggguccggugcgugugccgcgacaacuggaagggcuccaaccggcccaucguggacaucaacgucaaggacuacagcaucguguccagcuacgugugcuccggccucgucggggacacgccccgcaagaacgacagcuccagcuccagcuacugccggaaccccaacaacgagaagggcucccacggggugaagggcugggccuucgacgacgggaacgacgucuggaugggccgcaccaucagcgaggagcugcgguccggcuacgagaccuucaaggugaucgggggcuggagcaacccgaacuccaagcugcagaucaaccgccaggugaucgucgaccgggggaaccgcagcggcuacuccgggaucuucagcguggagggcaagagcugcaucaaccggugcuucuacguggagcucauccgcggccgcaagcaggagaccgaggucugguggacguccaacagcaucgugguguucugcgggaccuccggcaccuacgggaccggcagcuggcccgacggggccgacaucaaccugaugcccaucuga

SEQ ID NO: 86099 - RNA, 1410 nt, Artificial Sequence; identical to SEQ ID NO: 79209
  derived and/or modified CDS sequence (opt1) from neuraminidase__InfluenzaA__AFH00068

SEQ ID NO: 86100 - RNA, 1410 nt, Artificial Sequence
  derived and/or modified CDS sequence (opt1) from neuraminidase__InfluenzaA__AFH00079
augaaccccaaccagaagaucaucaccaucggcagcgugucccugaccaucgccacgaucugcuuccucaugcagaucgccauccuggucaccaccgugacccugcacuucaagcaguacgagugcaacagcccgcccaacaaccaggugaugcucugcgagcccacgaucaucgagcgcaacaucaccgagaucgucuaccugaccaacaccacgaucgagaaggagaucugccccaagcuggcggaguaccggaacugguccaagccgcagugcaagaucaccggguucgcccccuucagcaaggacaacuccauccgccucagcgccggcggggacaucugggugacccgggagcccuacguguccugcgaccccggcaagugcuaccaguucgcccuggggcagggcaccacgcugaacaaccgccacagcaacgacaccguccacgaccggaccccguaccgcacccuccugaugaacgagcugggcgugcccuuccaccucgggacgaagcaggucugcaucgccugguccagcuccagcugccacgacggcaaggcguggcugcacgugugcgugaccgggcacgacgagaacgccaccgccuccuucaucuacgacggccggcugguggacagcaucggguccuggagcaagaacauccuccgcacccaggaguccgagugcgucugcaucaacggcacgugcaccguggugaugaccgacggcagcgccuccgagcgggcggacaccaagauccuguucaucgaggaggggaagaucguccacaucagcccccugagcggcuccgcccagcacguggaggagugcagcugcuacccccgcuacccgggggugcggugcgucugccgcgacaacuggaagggcuccaaccggcccaucguggacaucaacgugaaggacuacagcaucgucuccagcuacgugugcuccggccucgugggggacacgccccgcaagaacgacagcuccagcuccagcuacugccggaaccccaacaacgagaagggcucccacggggucaagggcugggccuucgacgacgggaacgacguguggaugggccgcaccaucagcgaggagcugcgguccggcuacgagaccuucaaggucaucgagggguggagcaagccgaacuccaagcugcagaucaaccgccaggugaucguggaccggggcaaccgcagcggguacuccggcaucuucagcgucgagggcaagagcugcaucaaccggugcuucuacguggagcucauccgcgggcgcaagcaggagaccgaggugugguggacguccaacagcaucgucguguucugcggcaccuccgggaccuacggcaccgggagcuggcccgacggcgccgacaucaaccugaugcccaucuga

SEQ ID NO: 86101 - RNA, 1410 nt, Artificial Sequence
  derived and/or modified CDS sequence (opt1) from neuraminidase__InfluenzaA__AFH00090
augaaccccaaccagaagaucaucaccaucggcagcgugucccugaccaucgccacgaucugcuuccucaugcagaucgccauccuggucaccaccgugacccugcacuucaagcaguacgagugcaacagcccgcccaacaaccaggugaugcucugcgagcccacgaucaucgagcgcaacaucaccgagaucgucuaccugaccaacaccacgaucgagaaggagaucugccccaagcuggcggaguaccggaacugguccaagccgcagugcaagaucaccggguucgcccccuucagcaaggacaacuccauccgccucagcgccggcggggacaucugggugacccgggagcccuacguguccugcgaccccggcaagugcuaccaguucgcccuggggcagggcaccacgcugaacaaccgccacagcaacgacaccguccacgaccggaccccguaccgcacccuccugaugaacgagcugggcgugcccuuccaccucgggacgaagcaggucugcaucgccugguccagcuccagcugccacgacggcaaggcguggcugcacgugugcgugaccgggcacgacgagaacgccaccgccuccuucaucuacgacggccggcugguggacagcaucggguccuggagcaagaacauccuccgcacccaggaguccgagugcgucugcaucaacggcacgugcaccguggugaugaccgacggcagcgccuccgagcgggcggacaccaagauccuguucaucgaggaggggaagaucguccacaucagcccccugagcggcuccgcccagcacguggaggagugcagcugcuacccccgcuacccgggggugcggugcgucugccgcgacaacuggaagggcuccaaccggcccaucguggacaucaacgugaaggacuacagcaucgucuccagcuacgugugcuccggccucgugggggacacgccccgcaagaacgacagcuccagcuccagcuacugcuggaaccccaacaacgagaagggcucccacggggucaagggcugggccuucgacgacgggaacgacguguggaugggccggaccaucagcgaggagcugcgcuccggcuacgagaccuucaaggucaucgggggcuggagcaagccgaacuccaagcugcagaucaaccgccaggugaucguggaccgggggaaccggagcggcuacuccgggaucuucagcgucgagggcaagagcugcaucaaccgcugcuucuacguggagcucauccggggccgcaagcaggagaccgaggugugguggacguccaacagcaucgucguguucugcgggaccuccggcaccuacgggaccggcagcuggcccgacggggccgacaucaaccugaugcccaucuga

SEQ ID NO: 86102 - RNA, 1410 nt, Artificial Sequence
  derived and/or modified CDS sequence (opt1) from neuraminidase__InfluenzaA__AFH00101
augaaccccaaccagaagaucaucaccaucggcagcgugucccugaccaucgccacgaucugcuuccucaugcagaucgccauccuggucaccaccgugacccugcacuucaagcaguacgagugcaacagcccgcccaacaaccaggugaugcucugcgagcccacgaucaucgagcgcaacaucaccgagaucgucuaccugaccaacaccacgaucgagaaggagaucugccccaagcuggcggaguaccggaacugguccaagccgcagugcaagaucaccggguucgcccccuucagcaaggacaacuccauccgccucagcgccggcggggacaucugggugacccgggagcccuacguguccugcgaccccggcaagugcuaccaguucgcccuggggcagggcaccacgcugaacaaccgccacagcaacgacaccguccacgaccggaccccguaccgcacccuccugaugaacgagcugggcgugcccuuccaccucgggacgaagcaggucugcaucgccugguccagcuccagcugccacgacggcaaggcguggcugcacgugugcgugaccgggcacgacgagaacgccaccgccuccuucaucuacgacggccggcugguggacagcaucggguccuggagcaagaagauccuccgcacccaggaguccgagugcgucugcaucaacggcacgugcaccguggugaugaccgacggcagcgccuccgagcgggcggacaccaagauccuguucaucgaggaggggaagaucguccacaucagcccccugagcggcuccgcccagcacguggaggagugcagcugcuacccccgcuacccgggggugcggugcgucugccgcgacaacuggaagggcuccaaccggcccaucguggacaucaacgugaaggacuacagcaucgucuccagcuacgugugcuccggccucgugggggacacgccccgcaagaacgacagcuccagcuccagcuacugccggaaccccaacaacgagaagggcucccacggggucaagggcugggccuucgacgacgggaacgacguguggaugggccgcaccaucagcgaggagcugcgguccggcuacgagaccuucaaggucaucgggggcuggagcaagccgaacuccaagcugcagaucaaccgccaggugaucguggaccgggggaaccgcagcggcuacuccgggaucuucagcgucgagggcaagagcugcaucaaccggugcuucuacguggagcucauccgcggccgcaagcaggagaccgaggugugguggacguccaacagcaucgucguguucugcgggaccuccggcaccuacgggaccggcagcuggcccgacggggccgacaucaaccugaugcccaucuga

SEQ ID NO: 86103 - RNA, 1410 nt, Artificial Sequence; identical to SEQ ID NO: 79125
  derived and/or modified CDS sequence (opt1) from neuraminidase__InfluenzaA__AFH00112

SEQ ID NO: 86104 - RNA, 1410 nt, Artificial Sequence; identical to SEQ ID NO: 79125
  derived and/or modified CDS sequence (opt1) from neuraminidase__InfluenzaA__AFH00123

SEQ ID NO: 86105 - RNA, 1410 nt, Artificial Sequence
  derived and/or modified CDS sequence (opt1) from neuraminidase__InfluenzaA__AFH00156
augaaccccaaccagaagaucaucaccaucggcagcgugucccugaccaucgccacgaucugcuuccucaugcagaucgccauccuggucaccaccgugacccugcacuucaagcaguacgagugcaacagcccgcccaacaaccaggugaugcucugcgagcccacgaucaucgagcgcaacaucaccgagaucgucuaccugaccaacaccacgaucgagaaggagaucugccccaagcuggcggaguaccggaacugguccaagccgcagugcaagaucaccggguucgcccccuucagcaaggacaacuccauccgccucagcgccggcggggacaucugggugacccgggagcccuacguguccugcgaccccggcaagugcuaccaguucgcccuggggcagggcaccacgcugaacaaccgccacagcaacgacaccguccacgaccggaccccguaccgcacccuccugaugaacgagcugggcgugcccuuccaccucgggacgaagcaggucugcaucgccugguccagcuccagcugccacgacggcaaggcguggcugcacgugugcgugaccgggcacgacgagaacgccaccgccuccuucaucuacgacggccggcugguggacagcaucggguccuggagcaagaacauccuccgcacccaggaguccgagugcgucugcaucaacggcacgugcaccguggugaugaccgacggcagcgccuccgagcgggcggacaccaagauccuguucaucgaggaggggaagaucguccacaucagcccccugagcggcuccgcccagcacguggaggagugcagcugcuacccccgcuacccgggggugcggugcgucugccgcgacaacuggaagggcuccaaccggcccaucaucgacaucaacgugaaggacuacagcaucguguccagcuacgucugcuccggccucgugggggacacgccccgcaagaacgacagcuccagcuccagcuacugccggaaccccaacaacgagaagggcucccacggggugaagggcugggccuucgacgacgggaacgacgucuggaugggccgcaccaucagcgaggagcugcgguccggcuacgagaccuucaaggugaucgggggcuggagcaagccgaacuccaagcugcagaucaaccgccaggucaucguggaccgggggaaccgcagcggcuacuccgggaucuucagcguggagggcaagagcugcaucaaccggugcuucuacgucgagcucauccgcggccgcaagcaggagaccgaggugugguggacguccaacagcaucguggucuucugcgggaccuccggcaccuacgggaccggcagcuggcccgacggggccgacaucaaccugaugcccaucuga

SEQ ID NO: 86106 - RNA, 1410 nt, Artificial Sequence
  derived and/or modified CDS sequence (opt1) from neuraminidase__InfluenzaA__AFH00167
augaaccccaaccagaagaucaucaccaucggcagcgugucccugaccaucgccacgaugugcuuccucaugcagaucgccauccuggucaccaccgugacccugcacuucaagcaguacgagugcaacagcccgcccaacaaccaggugaugcucugcgagcccacgaucaucgagcgcaacaucaccgagaucgucuaccugaccaacaccacgaucgagaaggagaucugccccaagcuggcggaguaccggaacugguccaagccgcagugcaagaucaccggguucgcccccuucagcaaggacaacuccauccgccucagcgccggcggggacaucugggugacccgggagcccuacguguccugcgaccccggcaagugcuaccaguucgcccuggggcagggcaccacgcugaacaaccgccacagcaacgacaccguccacgaccggaccccguaccgcacccuccugaugaacgagcugggcgugcccuuccaccucgggacgaagcaggucugcaucgccugguccagcuccagcugccacgacggcaaggcguggcugcacgugugcgugaccgggcacgacgagaacgccaccgccuccuucaucuacgacggccggcugguggacagcaucggguccuggagcaagaacauccuccgcacccaggaguccgagugcgucugcaucaacggcacgugcaccguggugaugaccgacggcagcgccuccgagcgggcggacaccaagauccuguucaucgaggaggggaagaucguccacaucagcccccugagcggcuccgcccagcacguggaggagugcagcugcuacccccgcuacccgggggugcggugcgucugccgcgacaacuggaagggcuccaaccggcccaucguggacaucaacgugaaggacuacagcaucgucuccagcuacgugugcuccggccucgugggggacacgccccgcaagaacgacagcuccagcuccagcuacugccggaaccccaacaacgagaagggcucccacggggucaagggcugggccuucgacgacgggaacgacguguggaugggccgcaccaucagcgaggagcugcgguccggcuacgagaccuucaaggucaucgggggcuggagcaagccgaacuccaagcugcagaucaaccgccaggugaucguggaccgggggaaccgcagcggcuacuccgggaucuucagcgucgagggcaagagcugcaucaaccggugcuucuacguggagcucauccgcggccgcaagcaggagaccgaggugugguggacguccaacagcaucgucguguucugcgggaccuccggcaccuacgggaccggcagcuggcccgacggggccgacaucaaccugaugcccaucuga

SEQ ID NO: 86107 - RNA, 1410 nt, Artificial Sequence; identical to SEQ ID NO: 86105
  derived and/or modified CDS sequence (opt1) from neuraminidase__InfluenzaA__AFH00178

SEQ ID NO: 86108 - RNA, 1410 nt, Artificial Sequence
  derived and/or modified CDS sequence (opt1) from neuraminidase__InfluenzaA__AFH00189
augaaccccaaccagaagaucaucaccaucggcagcgugucccugaccaucgccacgaucugcuuccucaugcagaucgccauccuggucaccaccgugacccugcacuucaagcaguacgaguacaacagcccgcccaacaaccaggugaugcucugcgagcccaagaucaucgagcgcaacaucacggagaucgucuaccugaccaacaccaccaucgagaaggagaucugccccaagcuggcggaguaccggaacugguccaagccgcagugcaagaucacgggguucgcccccuucagcaaggacaacuccauccgccucagcgccggcggggacaucugggugacccgggagcccuacguguccugcgaccccggcaagugcuaccaguucgcccuggggcagggcaccacccugaacaaccgccacagcaacgacacgguccacgaccggaccccguaccgcacccuccugaugaacgagcugggcgugcccuuccaccucgggaccaagcaggucugcaucgccugguccagcuccagcugccacgacggcaaggcguggcugcacgugugcgugacggggcacgacgagaacgccaccgccuccuucaucuacgacggccggcugguggacagcaucggguccuggagcaagaacauccuccgcacccaggaguccgagugcgucugcaucaacgggaccugcacgguggugaugaccgacggcagcgccuccgagcgggcggacaccaagauccuguucaucgaggagggcaagaucguccacaucagcccccugagcggcuccgcccagcacguggaggagugcagcugcuacccccgcuacccgggggugcggugcgucugccgcgacaacuggaagggcuccaaccggcccaucguggacaucaacgugaaggacuacagcaucgucuccagcuacgugugcuccggccucgugggggacacgccccgcaagaacgacagcuccagcuccagcuacugccggaaccccaacaacgagaagggcucccacggggucaagggcugggccuucgacgacgggaacgacguguggaugggccgcaccaucagcgaggagcugcgguccggcuacgagaccuucaaggucaucgggggcuggagcaagccgaacuccaagcugcagaucaaccgccaggugaucguggaccgggggaaccgcagcggcuacuccgggaucuucagcgucgagggcaagagcugcaucaaccggugcuucuacguggagcucauccgcggccgcaagcaggagaccgaggugugguggaccuccaacagcaucgucguguucugcgggacguccggcaccuacgggaccggcagcuggcccgacggggccgacaucaaccugaugcccaucuga

SEQ ID NO: 86109 - RNA, 1410 nt, Artificial Sequence; identical to SEQ ID NO: 79209
  derived and/or modified CDS sequence (opt1) from neuraminidase__InfluenzaA__AFH00200

SEQ ID NO: 86110 - RNA, 1410 nt, Artificial Sequence; identical to SEQ ID NO: 86106
  derived and/or modified CDS sequence (opt1) from neuraminidase__InfluenzaA__AFH00211

SEQ ID NO: 86111 - RNA, 1410 nt, Artificial Sequence
  derived and/or modified CDS sequence (opt1) from neuraminidase__InfluenzaA__AFH00222
augaaccccaaccagaagaucaucaccaucggcagcgugucccugaccaucgccacgaucugcuuccucaugcagaucgccauccuggucaccaccgugacccugcacuucaagcaguacgagugcaacagcccgcccaacaaccaggugaugcucugcgagcccacgaucaucgagcgcaacaucaccgagaucgucuaccugaccaacaccacgaucgagaaggagaucugccccaagcuggcggaguaccggaacugguccaagccgcagugcaagaucaccggguucgcccccuucagcaaggacaacuccauccgccucagcgccggcggggacaucugggugacccgggagcccuacguguccugcgaccccggcaagugcuaccaguucgcccuggggcagggcaccacgcugaacaaccgccacagcaacaacaccguccacgaccggaccccguaccgcacccuccugaugaacgagcugggcgugcccuuccaccucgggacgaagcaggucugcaucgccugguccagcuccagcugccacgacggcaaggcguggcugcacgugugcgugaccgggcacgacgagaacgccaccgccuccuucaucuacgacggccggcugguggacagcaucggguccuggagcaagaacauccuccgcacccaggaguccgagugcgucugcaucaacggcacgugcaccguggugaugaccgacggcagcgccuccgagcgggcggacaccaagauccuguucaucgaggaggggaagaucguccacaucagcccccugagcggcuccgcccagcacguggaggagugcagcugcuacccccgcuacccgggggugcggugcgucugccgcgacaacuggaagggcuccaaccggcccaucguggacaucaacgugaaggacuacagcaucgucuccagcuacgugugcuccggccucgugggggacacgccccgcaagaacgacagcuccagcuccagcuacugccggaaccccaacaacgagaagggcucccacggggucaagggcugggccuucgacgacgggaacgacguguggaugggccgcaccaucagcgaggagcugcgguccggcuacgagaccuucaaggucaucgggggcuggagcaagccgaacuccaagcugcagaucaaccgccaggugaucguggaccgggggaaccgcagcggcuacuccgggaucuucagcgucgagggcaagagcugcaucaaccggugcuucuacguggagcucauccgcggccgcaagcaggagaccgaggugugguggacguccaacagcaucgucguguucugcgggaccuccggcaccuacgggaccggcagcuggcccgacggggccgacaucaaccugaugcccaucuga

SEQ ID NO: 86112 - RNA, 1410 nt, Artificial Sequence; identical to SEQ ID NO: 79125
  derived and/or modified CDS sequence (opt1) from neuraminidase__InfluenzaA__AFH00233

SEQ ID NO: 86113 - RNA, 1410 nt, Artificial Sequence
  derived and/or modified CDS sequence (opt1) from neuraminidase__InfluenzaA__AFH00244
augaaccccaaccagaagaucaucaccaucggcagcgugucccugaccaucgccacgaucugcuuccucaugcagaucgccauccuggucaccaccgugacccuguacuucaagcaguacgagugcaacagcccgcccuccaaccaggugaugcucugcgagcccacgaucgucgagcgcaacaucaccgagaucguguaccugaccaacaccacgaucgagaaggagaucugccccaagcuggcggaguaccggaacuggagcaagccgcagugcaagaucaccggguucgcccccuucuccaaggacaacagcauccgccucuccgccggcggggacaucugggugacccgggagcccuacgucagcugcgaccccggcaagugcuaccaguucgcccuggggcagggcaccacgcugaacaaccgccacuccaacgacaccgugcacgaccggaccccguaccgcacccuccugaugaacgagcugggcgugcccuuccaccucgggacgaagcaggucugcaucgccuggagcuccagcuccugccacgacggcaaggcguggcugcacgugugcgugaccgggcacgacgagaacgccaccgccagcuucaucuacgacggccggcuggucgacuccaucgggagcugguccaagaacauccuccgcacccaggagagcgagugcgugugcaucaacggcacgugcaccguggucaugaccgacggcuccgccagcgagcgggcggacaccaagauccuguucaucgaggaggggaagaucgugcacaucagcccccuguccggcagcgccaagcacguggaggagugcuccugcuacccccgcuacccggggguccggugcgugugccgcgacaacuggaagggcagcaaccggcccaucguggacaucaacgucaaggacuacuccaucgugagcuccuacgugugcagcggccucgucggggacacgccccgcaagaacgacuccagcuccagcuccuacugccggaaccccaacaacgagaagggcagccacggggugaagggcugggccuucgacgacgggaacgacgucuggaugggccgcaccaucuccgaggagcugcggagcggcuacgagaccuucaaggugaucgggggcugguccaagccgaacagcaagcugcagaucaaccgccaggugaucgucgaccgggggaaccgcuccggcuacagcgggaucuucagcguggagggcaaguccugcaucaaccggugcuucuacguggagcucauccgcggccgcaagcaggagaccgaggucugguggacgagcaacuccaucgugguguucugcgggaccagcggcaccuacgggaccggcuccuggcccgacggggccgacaucaaccugaugcccaucuga

SEQ ID NO: 86114 - RNA, 1410 nt, Artificial Sequence; identical to SEQ ID NO: 79209
  derived and/or modified CDS sequence (opt1) from neuraminidase__InfluenzaA__AFH00255

SEQ ID NO: 86115 - RNA, 1410 nt, Artificial Sequence; identical to SEQ ID NO: 79209
  derived and/or modified CDS sequence (opt1) from neuraminidase__InfluenzaA__AFH00266

SEQ ID NO: 86116 - RNA, 1410 nt, Artificial Sequence
  derived and/or modified CDS sequence (opt1) from neuraminidase__InfluenzaA__AFH00277
augaaccccaaccagaagaucaucaccaucggcagcgugucccugaccaucgccacgaucugcuuccucaugcagaucgccauccuggucaccaccgugacccugcacuucaagcaguacgagugcaacagcccgcccuccaaccaggugaugcucugcgagcccacgaucaucgagcgcaacaucaccgagaucgucuaccugaccaacaccacgaucgagaaggagaucugccccaagcuggcggaguaccggaacuggagcaagccgcagugcaagaucaccggguucgcccccuucuccaaggacaacagcauccgccucuccgccggcggggacaucugggugacccgggagcccuacgugagcugcgaccccggcaagugcuaccaguucgcccuggggcagggcaccacgcugaacaaccgccacuccaacgacaccguccacgaccggaccccguaccgcacccuccugaugaacgagcugggcgugcccuuccaccucgggacgaagcaggucugcaucgccuggagcuccagcuccugccacgacggcaaggcguggcugcacgugugcgugaccgggcacgacgagaacgccaccgccagcuucaucuacgacggccggcugguggacuccaucgggagcugguccaagaacauccuccgcacccaggagagcgagugcgucugcaucaacggcacgugcaccguggugaugaccgacggcuccgccagcgagcgggcggacaccaagauccuguucaucgaggaggggaagaucguccacaucagcccccuguccggcagcgcccagcacguggaggagugcuccugcuacccccgcuacccgggggugcggugcgucugccgcgacaacuggaagggcagcaaccggcccaucguggacaucaacgugaaggacuacuccaucgucagcuccuacgugugcagcggccucgugggggacacgccccgcaagaacgacuccagcuccagcuccuacugccggaagcccaacaacgagaagggcagccacgggcugaagggcugggccuucgacgacgggaacgacgucuggaugggccgcaccaucuccgaggagcugcggagcggcuacgagaccuucaaggugaucgggggcugguccaagccgaacagcaagcuccagaucaaccgccaggucaucguggaccgggggaaccgcuccggcuacagcgggaucuucagcguggagggcaaguccugcaucaaccggugcuucuacgucgagcugauccgcggccgcaagcaggagaccgaggugugguggacgagcaacuccaucguggucuucugcgggaccagcggcaccuacgggaccggcuccuggcccgacggggccgacaucaaccugaugcccaucuga

SEQ ID NO: 86117 - RNA, 1410 nt, Artificial Sequence; identical to SEQ ID NO: 79209
  derived and/or modified CDS sequence (opt1) from neuraminidase__InfluenzaA__AFH00288

SEQ ID NO: 86118 - RNA, 1410 nt, Artificial Sequence; identical to SEQ ID NO: 86041
  derived and/or modified CDS sequence (opt1) from neuraminidase__InfluenzaA__AFH00299

SEQ ID NO: 86119 - RNA, 1410 nt, Artificial Sequence
  derived and/or modified CDS sequence (opt1) from neuraminidase__InfluenzaA__AFH00310
augaaccccaaccagaagaucaucaccaucggcagcgugucccugaccaucgccacgaucugcuuccucaugcagaucgccauccuggucaccaccgugacccugcacuucaagcaguacgagugcagcuccagcccgaacaaccaggugauccccugccagcccacgaucaucgagcgcaacaucaccgagaucgucuaccucaccaacaccacgaucgagaaggagaucugccccaagcugguggaguaccggaacugguccaagccgcagugcaagaucaccggguucgcgcccuucagcaaggacaacuccauccgccugagcgccggcggggacaucugggugacccgggagcccuacgucuccugcgaccccggcaagugcuaccaguucgcccucgggcagggcaccacgcugaacaaccgccacagcaacgacaccgugcacgaccggaccccguaccgcacccugcucaugaacgagcugggcgugcccuuccaccuggggacgaagcaggucugcaucgccugguccagcuccagcugccacgacggcaaggccuggcuccacgugugcgugaccgggcacgacgagaacgcgaccgccuccuucaucuacgacggccggcuggucgacagcaucggguccuggagcaagaacauccugcgcacccaggaguccgagugcgugugcaucaacggcacgugcaccguggucaugaccgacggcagcgccagcgagaaggccgacaccaagauccucuucaucgaggaggggaagguggugcacaucagcccccuguccggcuccgcgcagcacgucgaggagugcagcugcuacccccgguacccgggggugcgcugcgugugccgggacaacuggaagggcuccaaccgccccaucgucgacaucaacgugaagaacuacagcaucguguccagcuacgucugcuccggccuggugggggacacgccccggaagaacgacagcuccagcuccagcuacugccgcaaccccaacaacgagaagggcucccacggggucaagggcugggccuucgacgacgggaacgacguguggaugggccggaccaucagcgaggagcuccgcuccggcuacgagaccuucaaggugaucgggggcuggagcaccccgaacuccaagcugcagaucaaccggcaggucaucguggacagcgggaaccgcagcggcuacuccgggaucuucagcguggagggcaaguccugcaucaaccggugcuucuacgucgagcugauccgcggccggaagcaggagacgaaggugugguggaccagcaacucccucguggucuucugcgggaccagcggcaccuacgggacgggcuccuggcccgacggggccgacaucaaccugaugcccaucuga

SEQ ID NO: 86120 - RNA, 1410 nt, Artificial Sequence; identical to SEQ ID NO: 86119
  derived and/or modified CDS sequence (opt1) from neuraminidase__InfluenzaA__AFH00321

SEQ ID NO: 86121 - RNA, 1410 nt, Artificial Sequence
  derived and/or modified CDS sequence (opt1) from neuraminidase__InfluenzaA__AFH00332
augaaccccaaccagaagaucaucaccaucggcagcgugucccugaccaucgccacgaucugcuuccucaugcagaucgccauccuggucaccaccgugacccugcacuucaagcaguacgagugcaacagcccgcccaacaaccaggugaugcucugcgagcccacgaucaucgagcgcaacaucaccgagaucgucuaccugaccaacaccacgaucgagaaggagaucugccccaagcuggcggaguaccggaacugguccaagccgcagugcaagaucaccggguucgcccccuucagcaaggacaacuccauccgccucagcgccggcggggacaucugggugacccgggagcccuacguguccugcgaccccggcaagugcuaccaguucgcccuggggcagggcaccacgcugaacaaccgccacagcaacgacaccguccacgaccggaccccguaccgcacccuccugaugaacgagcugggcgugcccuuccaccucgggacgaagcaggucugcaucgccugguccagcuccagcugccacgacggcaaggcguggcugcacgugugcgugaccgggcacgacgagaacgccaccgccuccuucaucuacgacggccggcugguggacagcaucggguccuggagcaagaacauccuccgcacccaggaguccgagugcgucugcaucaacggcacgugcaccguggugaugaccgacggcagcgccuccgagcgggcggacaccaagauccuguucaucgaggaggggaagaucguccacaucagcccccugagcggcuccgcccagcacguggaggagugcagcugcuacccccgcuacccgggggugcggugcgucugccgcgacaacuggaagggcuccaaccggcccaucguggacaucaacgugaaggacuacagcaucgucuccagcuacgugugcuccggccucgugggggacacgccccgcaagaacgacagcuccagcuccagccacugccugaaccccaacaacgaggagggcgggcacggcgucaaggggugggccuucgacgacggcaacgacguguggaugggccggaccaucuccgagaagcugcgcagcggguacgagaccuucaaggucaucggcgggugguccaagccgaacagcaagcuccagaucaaccgccaggugaucguggaccggggcaaccgguccggguacagcggcaucuucuccgucgagggcaaggggugcaucaaccgcugcuucuacguggagcugauccggggccgcaagcaggagaccgaggugugguggacgagcaacagcaucgucguguucugcgggaccuccggcaccuacgggaccggcagcuggcccgacggcgccgacaucaaccugaugcccaucuga

SEQ ID NO: 86122 - RNA, 1410 nt, Artificial Sequence
  derived and/or modified CDS sequence (opt1) from neuraminidase__InfluenzaA__AFH00343
augaaccccaaccagaagaucaucaccaucggcagcgugucccugaccaucgccacgaucugcuuccucaugcagaucgccauccuggucaccaccgugacccugcacuucaagcaguacgagugcaacagcccgcccuccaaccaggcgaugcucugcgagcccacgaucaucgagcgcaacaucaccgagaucguguaccugaccaacaccacgaucgagaaggagaucugccccaagcuggccgaguaccggaacuggagcaagccgcagugcaagaucaccggguucgcccccuucuccaaggacaacagcauccgccucuccgccggcggggacaucugggucacccgggagcccuacgugagcugcgaccccggcaagugcuaccaguucgcccuggggcagggcaccacgcugaacaaccgccacuccaacgacaccgugcacgaccggaccccguaccgcacccuccugaugaacgagcugggcguccccuuccaccucgggacgaagcaggucugcaucgcguggagcuccagcuccugccacgacggcaaggccuggcugcacgugugcgugaccgggcacgacgagaacgccaccgccagcuucaucuacgacggccggcugguggacuccaucgggagcugguccaagaacauccuccgcacccaggagagcgagugcgugugcaucaacggcacgugcaccgucgugaugaccgacggcuccgcgagcgagcgggccgacaccaagauccuguucaucgaggaggggaagaucgugcacaucagcccccuguccggcagcgcccagcacgucgaggagugcuccugcuacccccgcuacccgggggugcggugcgugugccgcgacaacuggaagggcagcaaccggcccaucgucgacaucaacgugaaggacuacuccaucgugagcuccuacgucugcagcggccucgugggggacacgccccgcaagaacgacuccagcuccagcuccuacugccggaaccccaacaacgagaagggcagccacggggugaagggcugggccuucgacgacgggaacgacgucuggaugggccgcaccaucuccgaggagcugcggagcggcuacgagaccuucaaggugaucgggggcugguccaagccgaacagcaagcugcagaucaaccgccaggucaucguggaccgggggaaccgcuccggcuacagcgggaucuucagcguggagggcaaguccugcaucaaccggugcuucuacgucgagcucauccgcggccgcaagcaggagaccgaggugugguggacgagcaacuccaucguggucuucugcgggaccagcggcaccuacgggaccggcuccuggcccgacggggccgacaucaaccugaugcccaucuga

SEQ ID NO: 86123 - RNA, 1410 nt, Artificial Sequence
  derived and/or modified CDS sequence (opt1) from neuraminidase__InfluenzaA__AFH00354
augaaccccaaccagaagaucaucaccaucggcagcgugucccugaccaucgccacgaucugcuuccucaugcagaucgccauccuggucaccaccgugacccugcacuucaagcaguacgagugcaacagcccgcccaacaaccaggugaugcucugcgagcccacgaucaucgagcgcaacaucaccaagaucgucuaccugaccaacaccacgaucgagaaggagaucugccccaagcuggcggaguaccggaacugguccaagccgcagugcaagaucaccggguucgcccccuucagcaaggacaacuccauccgccucagcgccggcggggacaucugggugacccgggagcccuacguguccugcgaccccggcaagugcuaccaguucgcccuggggcagggcaccacgcugaacaaccgccacagcaacgacaccguccacgaccggaccccguaccgcacccuccugaugaacgagcugggcgugcccuuccaccucgggacgaagcaggucugcaucgccugguccagcuccagcugccacgacggcaaggcguggcugcacgugugcgugaccgggcacgacgagaacgccaccgccuccuucaucuacgacggccggcugguggacagcaucggguccuggagcaagaacauccuccgcacccaggaguccgagugcgucugcaucaacggcacgugcaccguggugaugaccgacggcagcgccuccgagcgggcggacaccaagauccuguucaucgaggaggggaagaucguccacaucagcccccugagcggcuccgcccagcacguggaggagugcagcugcuacccccgcuacccgggggugcggugcgucugccgcgacaacuggaagggcuccaaccggcccaucguggacaucaacgugaaggacuacagcaucgucuccagcuacgugugcuccggccucgugggggacacgccccgcaagaacgacagcuccagcuccagcuacugccugaaccccaacaacgaggagggcgggcacggcgucaaggggugggccuucgacgacggcaacgacguguggaugggccggaccaucuccgagaagcugcgcagcggguacgagaccuucaaggucaucggcgggugguccaagccgaacagcaagcuccagaucaaccgccaggugaucguggaccggggcaaccgguccggguacagcggcaucuucuccgucgagggcaagagcugcgugaaccgcugcuucuacguggagcugauccgggggcgcaagcaggagaccgaggucugguggacgagcaacuccaucgugguguucugcggcaccagcgggaccuacggcaccggguccuggcccgacggcgccgacaucaaccugaugcccaucuga

SEQ ID NO: 86124 - RNA, 1410 nt, Artificial Sequence; identical to SEQ ID NO: 79004
  derived and/or modified CDS sequence (opt1) from neuraminidase__InfluenzaA__AFH00365

SEQ ID NO: 86125 - RNA, 1410 nt, Artificial Sequence
  derived and/or modified CDS sequence (opt1) from neuraminidase__InfluenzaA__AFH00376
augaaccccaaccagaagaucaucaccaucggcagcgugucccugaccaucgccacgaucugcuuccucaugcagaucgccauccuggucaccaccgugacccugcacuucaagcagugcgagugcaacagcccgcccaacaaccaggugaugcucugcgagcccacgaucaucgagcgcaacaucaccgagaucgucuaccugaccaacaccacgaucgagaaggagaucugccccaagcuggcggaguaccggaacugguccaagccgcagugcaagaucaccggguucgcccccuucagcaaggacaacuccauccgccucagcgccggcggggacaucugggugacccgggagcccuacguguccugcgaccccggcaagugcuaccaguucgcccuggggcagggcaccacgcugaacaaccgccacagcaacgacaccguccacgaccggaccccguaccgcacccuccugaugaacgagcugggcgugcccuuccaccucgggacgaagcaggucugcaucgccugguccagcuccagcugccacgacggcaaggcguggcugcacgugugcgugaccgggcacgacgagaacgccaccgccuccuucaucuacgacggccggcugguggacagcaucggguccuggagcaagaacauccuccgcacccaggaguccgagugcgucugcaucaacggcacgugcaccguggugaugaccgacggcagcgccuccgggcgggcggacaccaagauccuguucaucgaggagggcaagaucguccacaucagcccccugagcggguccgcccagcacguggaggagugcagcugcuacccccgcuacccgggcgugcggugcgucugccgcgacaacuggaagggcuccaaccggcccaucguggacaucaacgugaaggacuacagcaucgucuccagcuacgugugcuccgggcucgugggcgacacgccccgcaagaacgacagcuccagcuccagcuacugccugaaccccaacaacgaggagggcgggcacggggucaagggcugggccuucgacgacggcaacgacguguggauggggcggaccaucuccgagaagcugcgcagcggcuacgagaccuucaaggucaucgggggcugguccaagccgaacagcaagcuccagaucaaccgccaggugaucguggaccgggggaaccgguccggcuacagcggcaucuucuccgucgagggcaagagcugcaucaaccgcugcuucuacguggagcugauccgggggcgcaagcaggagaccgaggugugguggacgagcaacuccaucgucguguucugcgggaccagcggcaccuacgggaccggcuccuggcccgacggcgccgacaucaaccugaugcccaucuga

SEQ ID NO: 86126 - RNA, 1410 nt, Artificial Sequence
  derived and/or modified CDS sequence (opt1) from neuraminidase__InfluenzaA__AFH00387
augaaccccaaccagaagaucaucaccaucggcagcgugucccugaccaucgccacgaucugcuuccucaugcagaucgccauccuggucaccaccgugacccugcacuucaagcaguacgagugcaacagcccgcccaacaaccaggugaugcucugcgagcccacgaucaucgagcgcaacaucaccgagaucgucuaccugaccaacaccacgaucgagaaggagaucugccccaagcuggcggaguaccggaacugguccaagccgcagugcaagaucaccggguucgcccccuucagcaaggacaacuccauccgccucagcgccggcggggacaucugggugacccgggagcccuacguguccugcgaccccgacaagugcuaccaguucgcccugggccaggggaccacgcugaacaaccgccacagcaacgacaccguccacgaccggaccccguaccgcacccuccugaugaacgagcugggcgugcccuuccaccucggcacgaagcaggucugcaucgccugguccagcuccagcugccacgacgggaaggcguggcugcacgugugcgugaccggccacgacgagaacgccaccgccuccuucaucuacgacgggcggcugguggacagcaucuccagcugguccaagaacauccuccgcacccaggagagcgagugcgucugcaucaacggcacgugcaccguggugaugaccgacggguccgccagcgagcgggcggacaccaagauccuguucaucgaggagggcaagaucguccacaucagcccccuguccggcagcgcccagcacguggaggagugcuccugcuacccccgcuacccgggggugcggugcgucugccgcgacaacuggaagggcagcaaccggcccaucguggacaucaacgugaaggacuacuccaucgucagcuccuacgugugcagcgggcucgugggcgacacgccccgcaagaacgacuccagcuccagcuccuacugccugaaccccaacaacgaggagggcgggcacggcgucaaggggugggccuucgacgacggcaacgacguguggauggggcggaccaucagcgagaagcugcgcuccggcuacgagaccuucaaggucaucggcggguggagcaagccgaacuccaagcuccagaucaaccgccaggugaucguggaccggggcaaccggagcggguacuccggcaucuucagcgucgagggcaagagcugcgugaaccgcugcuucuacguggagcugauccgggggcgcaagcaggagaccgaggucugguggacguccaacagcaucgugguguucugcggcaccuccgggaccuacggcaccgggagcuggcccgacggcgccgacaucaaccugaugcccaucuga

SEQ ID NO: 86127 - RNA, 1410 nt, Artificial Sequence
  derived and/or modified CDS sequence (opt1) from neuraminidase__InfluenzaA__AFH00398
augaaccccaaccagaagaucaucaccaucggcagcgugucccugaccaucgccacgaucugcuuccucaugcagaucgccauccuggucaccaccgugacccugcacuucaagcaguacgagugcaacagcccgcccaacaaccaggugaugcucugcgagcccacgaucaucgagcgcaacaucaccgagaucgucuaccugaccaacaccacgaucgagaaggagaucugccccaagcuggcggaguaccggaacugguccaagccgcagugcaagaucaccggguucgcccccuucagcaaggacaacuccauccgccucagcgccggcggggacaucugggugacccgggagcccuacguguccugcgaccccggcaagugcuaccaguucgcccuggggcagggcaccacgcugaacaaccgccacagcaacgacaccguccacgaccggaccccguaccgcacccuccugaugaacgagcugggcgugcccuuccaccucgggacgaagcaggucugcaucgccugguccagcuccagcugccacgacggcaaggcguggcugcacgugugcgugaccgggcacgacgagaacgccaccgccuccuucaucuacgacggccggcugguggacagcaucggguccuggagcaagaacauccuccgcacccaggaguccgagugcgucugcaucaacggcacgugcaccguggugaugaccgacggcagcgccuccgagcgggcggacaccaagauccuguucaucgaggaggggaagaucguccacaucagcccccugagcggcuccgcccagcacguggaggagugcagcugcuacccccgcuacccgggggugcggugcgucugccgcgacaacuggaagggcuccaaccggcccaucguggacaucaacgugaaggacuacagcaucgucuccagcuacgugugcuccggccucgugggggacacgccccgcaagaacgacagcuccagcuccagcuacugccugaaccccaacaacgaggagggcgggcacggcgucaaggggugggccuucgacgacggcaacgacguguggaugggccggaccaucuccgagaagcugcgcagcggguacgagaccuucaaggucaucggcgggugguccaagccgaacagcaagcuccagaucaaccgccaggugaucguggaccggggcaaccgguccggguacagcggcaucuucuccgucgagggcaagagcugcgugaaccgcugcuucuacguggagcugauccgggggcgcaagcaggagaccgaggucugguggacgagcaacuccaucgugguguucugcggcaccagcgggaccuacggcgccggguccuggcccgacggcgccgacaucaaccugaugcccaucuga

SEQ ID NO: 86128 - RNA, 1410 nt, Artificial Sequence
  derived and/or modified CDS sequence (opt1) from neuraminidase__InfluenzaA__AFH00409
augaaccccaaccagaagaucaucaccaucggcagcgugucccugaccaucgccacgaucugcuuccucaugcagaucgccauccuggucaccaccgugacccugcacuucaagcaguacgagugcaacagcccgcccaacaaccaggugaugcucugcgagcccacgaucaucgagcgcaacaucaccgagaucgucuaccugaccaacaccacgaucgagaaggagaucugccccaagcuggcggaguaccggaacugguccaagccgcagugcaagaucaccggguucgcccccuucagcaaggacaacuccauccgccucagcgccggcggggacaucugggugacccgggagcccuacguguccugcgaccccggcaagugcuaccaguucgcccuggggcagggcaccacgcugaacaaccgccacagcaacgacaccguccacgaccggaccccguaccgcacccuccugaugaacgagcugggcgugcccuuccaccucgggacgaagcaggucugcaucgccugguccagcuccagcugccacgacggcaaggcguggcugcacgugugcgugaccgggcacaacgagaacgccaccgccuccuucaucuacgacggccggcugguggacagcaucggguccuggagcaagaacauccuccgcacccaggaguccgagugcgucugcaucaacggcacgugcaccguggugaugaccgacggcagcgccuccgggcgggcggacaccaagauccuguucaucgaggagggcaagaucguccacaucagcccccugagcggguccgcccagcacguggaggagugcagcugcuacccccgcuacccgggcgugcggugcgucugccgcgacaacuggaagggcuccaaccggcccaucguggacaucaacgugaaggacuacagcaucgucuccagcuacgugugcuccgggcucgugggcgacacgccccgcaagaacgacagcuccagcuccagcuacugccugaaccccaacaacgaggagggcgggcacggggucaagggcugggccuucgacgacggcaacgacguguggauggggcggaccaucuccgagaagcugcgcagcggcuacgagaccuucaaggucaucgggggcugguccaagccgaacagcaagcuccagaucaaccgccaggugaucguggaccgggggaaccgguccggcuacagcggcaucuucuccgucgagggcaagagcugcaucaaccgcugcuucuacguggagcugauccgggggcgcaagcaggagaccgaggugugguggacgagcaacuccaucgucguguucugcgggaccagcggcaccuacgggaccggcuccuggcccgacggcgccgacaucaaccugaugcccaucuga

SEQ ID NO: 86129 - RNA, 1410 nt, Artificial Sequence; identical to SEQ ID NO: 79004
  derived and/or modified CDS sequence (opt1) from neuraminidase__InfluenzaA__AFH00420

SEQ ID NO: 86130 - RNA, 1410 nt, Artificial Sequence; identical to SEQ ID NO: 79137
  derived and/or modified CDS sequence (opt1) from neuraminidase__InfluenzaA__AFH00431

SEQ ID NO: 86131 - RNA, 1410 nt, Artificial Sequence
  derived and/or modified CDS sequence (opt1) from neuraminidase__InfluenzaA__AFH00442
augaaccccaaccagaagaucaucaccaucggcagcgugucccugaccaucgccacgaucugcuuccucaugcagaucgccauccuggucaucaccgugacccugcacuucaagcaguacgagugcaacagcccgcccaacaaccaggugaugcucugcgagcccaccaucaucgagcgcaacaucacggagaucgucuaccugaccaacaccaccaucgagaaggagaucugccccaagcuggcggaguaccggaacugguccaagccgcagugcaagaucacgggguucgcccccuucagcaaggacaacuccauccgccucagcgccggcggggacaucugggugacccgggagcccuacguguccugcgaccccggcaagugcuaccaguucgcccuggggcagggcaccacccugaacaaccgccacagcaacgacacgguccacgaccggaccccguaccgcacccuccugaugaacgagcugggcgugcccuuccaccucgggaccaagcaggucugcaucgccugguccagcuccagcugccacgacggcaaggcguggcugcacgugugcgugacggggcacaacgagaacgccaccgccuccuucaucuacgacggccggcugguggacagcaucggguccuggagcaagaacauccuccgcacccaggaguccgagugcgucugcaucaacgggaccugcacgguggugaugaccgacggcagcgccuccgggcgggcggacaccaagauccuguucaucgaggagggcaagaucguccacaucagcccccugagcggguccgcccagcacguggaggagugcagcugcuacccccgcuacccgggcgugcggugcgucugccgcgacaacuggaagggcuccaaccggcccaucguggacaucaacgugaaggacuacagcaucgucuccagcuacgugugcuccgggcucgugggcgacacgccccgcaagaacgacagcuccagcuccagccacugccugaaccccaacaacgaggagggcggccacggggucaagggcugggccuucgacgacggcaacgacguguggauggggcggaccaucuccgagaagcugcgcagcggcuacgagaccuucaaggucaucgggggcugguccaagccgaacagcaagcuccagaucaaccgccaggugaucguggaccgggggaaccgguccggcuacagcggcaucuucuccgucgagggcaagagcugcaucaaccgcugcuucuacguggagcugauccgggggcgcaagcaggagaccgaggugugguggaccagcaacuccaucgucguguucugcgggacgagcggcaccuacgggaccggcuccuggcccgacggcgccgacaucaaccugaugcccaucuga

SEQ ID NO: 86132 - RNA, 1410 nt, Artificial Sequence
  derived and/or modified CDS sequence (opt1) from neuraminidase__InfluenzaA__AFH00453
augaaccccaaccagaagaucaucaccaucggcagcgugucccugaccaucgccacgaucugcuuccucaugcagaucgccauccuggucaccaccgugacccugcacuucaagcaguacgagugcaacagcccgcccaacaaccaggugaugcucugcgagcccacgaucaucgagcgcaacaucaccgaggucguguaccugaccaacaccacgaucgagaaggagaucugccccaagcuggcggaguaccggaacugguccaagccgcagugcaagaucaccggguucgcccccuucagcaaggacaacuccauccgccucagcgccggcggggacaucugggugacccgggagcccuacgucuccugcgaccccgacaagugcuaccaguucgcccugggccaggggaccacgcugaacaaccgccacagcaacgacaucgugcacgaccggaccccguaccgcacccuccugaugaacgagcugggcgugcccuuccaccucggcaccaagcaggucugcaucgccugguccagcuccagcugccacgacgggaaggcguggcugcacgugugcgugacgggccacgacgagaacgccaccgccuccuucaucuacgacgggcggcuggucgacagcaucggcuccuggagcaagaagauccuccgcacccaggaguccgagugcgugugcaucaacgggaccugcacgguggucaugaccgacggcagcgccuccggccgggcggacaccaagauccuguucaucgaggaggggaagaucgugcacaucagcccccugagcggcuccgcccagcacguggaggagugcagcugcuacccccgcuacccggggguccggugcgugugccgcgacaacuggaagggcuccaaccggcccaucguggacaucaacgucaaggacuacagcaucguguccagcuacgugugcuccggccucgucggggacacgccccgcaagaacgacagcuccagcuccagccacugccugaaccccaacaacgaggagggcgggcacggcgugaaggggugggccuucgacgacggcaacgacgucuggaugggccggaccaucuccgagaagcugcgcagcggguacgagaccuucaaggugaucggcgggugguccaagccgaacagcaagcuccagaucaaccgccaggugaucgucgaccggggcaaccgguccggguacagcggcaucuucuccguggagggcaagagcugcaucaaccgcugcuucuacguggagcugauccgggggcgcaagcaggagaccgaggucugguggaccagcaacuccaucgugguguucugcggcacgagcgggaccuacggcaccggguccuggcccgacggcgccgacaucaaccugaugcccaucuga

SEQ ID NO: 86133 - RNA, 1410 nt, Artificial Sequence
  derived and/or modified CDS sequence (opt1) from neuraminidase__InfluenzaA__AFH00464
augaaccccaaccagaagaucaucaccaucggcagcgugucccugaccaucgccacgaucugcuuccucaugcagaucgccauccuggucaccaccgugacccugcacuucaagcaguacgagugcaacagcccgcccaacaaccaggugaugcucugcgagcccacgaucaucgagcgcaacaucaccgagaucgucuaccugaccaacaccacgaucgagaaggagaucugccccaagcuggcggaguaccggaacugguccaagccgcagugcaagaucaccggguucgcccccuucagcaaggacaacuccauccgccucagcgccggcggggacaucugggugacccgggagcccuacguguccugcgaccccggcaagugcuaccaguucgcccuggggcagggcaccacgcugaagaaccgccacagcaacgacaccguccacgaccggaccccguaccgcacccuccugaugaacgagcugggcgugcccuuccaccucgggacgaagcaggucugcaucgccugguccagcuccagcugccacgacggcaaggcguggcugcacgugugcgugaccgggcacgacgagaacgccaccgccuccuucaucuacggcgggcggcugguggacagcaucggcuccuggagcaagaagauccuccgcacccaggaguccgagugcgucugcaucaacggcacgugcaccguggugaugaccgacgggagcgccuccggccgggcggacaccaagauccuguucaucgaggaggggaagaucguccacaucagcccccugagcggcuccgcccagcacguggaggagugcagcugcuacccccgcuacccgggcgugcggugcgucugccgcgacaacuggaagggguccaaccggcccaucguggacaucaacgugaaggacuacagcaucgucuccagcuacgugugcuccggccucgugggggacacgccccgcaagaacgacagcuccagcuccagcuacugccugaaccccaacaacgaggagggcgggcacggcgucaagggcugggccuucgacgacgggaacgacguguggaugggccggaccaucuccgagaagcugcgcagcggguacgagaccuucaaggucaucggcgggugguccaagccgaacagcaagcuccagaucaaccgccaggugaucguggaccggggcaaccgguccggcuacagcgggaucuucuccgucgagggcaagagcugcaucaaccgcugcuucuacguggagcugauccgggggcgcaagcaggagaccgaggugugguggacgagcaacuccaucgucguguucugcggcaccagcgggaccuacggcaccggcuccuggcccgacggggccgacaucaaccugaugcccaucuga

SEQ ID NO: 86134 - RNA, 1410 nt, Artificial Sequence
  derived and/or modified CDS sequence (opt1) from neuraminidase__InfluenzaA__AFH00475
augaaccccaaccagaagaucaucaccaucggcagcgugucccugaccaucgccacgaucugcuuccucaugcagaucgccauccuggucaccaccgugacccugcacuucaagcaguacgagugcaacagcccgcccaacaaccaggugaugcucugcgagcccacgaucaucgagcgcaacaucaccgagaucgucuaccugaccaacaccacgaucgagaaggagaucugccccaagcuggcggaguaccggaacugguccaagccgcagugcaagaucaccggguucgcccccuucagcaaggacaacuccauccgccucagcgccggcggggacaucugggugacccgggagcccuacguguccugcaaccccgacaagugcuaccaguucgcccugggccaggggaccacgcugaacaaccgccacagcaacgacaccguccacgaccggaccccguaccgcacccuccugaugaacgagcugggcgugcccuuccaccucggcacgaagcaggucugcaucgccugguccagcuccagcugccacgacgggaaggcguggcugcacgugugcgugaccggccacgacgagaacgccaccgccuccuucaucuacgacgggcggcugguggacagcaucggcuccuggagcaagaagauccuccgcacccaggaguccgagugcgucugcaucaacgggacgugcaccguggugaugaccgacggcagcgccuccggccgggcggacaccaagauccuguucaucgaggaggggaagaucguccacaucagcccccugagcggcuccgcccagcacguggaggagugcagcugcuacccccgcuacccgggggugcggugcgucugccgcgacaacuggaagggcuccaaccggcccaucguggacaucaacgugaaggacuacagcaucgucuccagcuacgugugcuccggccucgugggggacacgccccgcaagaacgacagcuccagcuccagccacugccugaaccccaacaacgaggagggcgggcacggcgucaaggggugggccuucgacgacggcaacgacguguggaugggccggaccaucuccgagaagcugcgcagcggguacgagaccuucaaggucaucgagggcugguccaagccgaacagcaagcuccagaucaaccgccaggugaucguggaccgggggaaccgguccggcuacagcgggaucuucuccgucgagggcaagagcugcaucaaccgcugcuucuacguggagcugauccggggccgcaagcaggagaccgaggugugguggacgagcaacuccaucgucguguucugcgggaccagcggcaccuacgggaccggcuccuggcccgacggggccgacaucaaccugaugcccaucuga

SEQ ID NO: 86135 - RNA, 1410 nt, Artificial Sequence
  derived and/or modified CDS sequence (opt1) from neuraminidase__InfluenzaA__AFH00486
augaaccccaaccagaagaucaucaccaucggcagcgugucccugaccaucgccacgaucugcuuccucaugcagaucgccauccuggucaccaccgugacccugcacuucaagcaguacgagugcaacagcccgcccaacaaccaggugaugcucugcgagcccacgaucaucgagcgcaacaucaccgagaucgucuaccugaccaacaccacgaucgagaaggagaucugccccaagcuggcggaguaccggaacugguccaagccgcagugcaagaucaccggguucgcccccuucagcaaggacaacuccauccgccucagcgccggcggggacaucugggugacccgggagcccuacguguccugcgaccccgacaagugcuaccaguucgcccugggccaggggaccacgcugaacaaccgccacagcaacgacaccguccacgaccggaccccguaccgcacccuccugaugaacgagcugggcgugcccuuccaccucggcacgaagcaggucugcaucgccugguccagcuccagcugccacgacgggaaggcguggcugcacgugugcgugaccggccacgacgagaacgccaccgccuccuucaucuacgacgggcggcugguggacagcaucggcuccuggagcaagaagauccuccgcacccaggaguccgagugcgucugcaucaacgggacgugcaccguggugaugaccgacggcagcgccuccggccgggcggacaccaagauccuguucaucgaggaggggaagaucguccacaucagcccccugcucggcagcgcccagcacguggaggagugcuccugcuacccccgcuacccgggggugcggugcgucugccgcgacaacuggaagggcagcaaccggcccaucguggacaucaacgugaaggacuacuccaucgucagcuccuacgugugcagcggccuggugggggacacgccccgcaagaacgacuccagcuccagcucccacugccugaaccccaacaacgaggagggcgggcacggcgucaaggggugggccuucgacgacggcaacgacguguggaugggccggaccaucagcgagaagcuccgcuccggguacgagaccuucaaggucaucgagggcuggagcaagccgaacuccaagcugcagaucaaccgccaggugaucguggaccgggggaaccggagcggcuacuccgggaucuucagcgucgagggcaaguccugcaucaaccgcugcuucuacguggagcugauccggggccgcaagcaggagaccgaggugugguggacgagcaacagcaucgucguguucugcgggaccuccggcaccuacgggaccggcagcuggcccgacggggccgacaucaaccucaugcccaucuga

SEQ ID NO: 86136 - RNA, 1410 nt, Artificial Sequence
  derived and/or modified CDS sequence (opt1) from neuraminidase__InfluenzaA__AFH00497
augaaccccaaccagaagaucaucaccaucggcagcgugucccugaccaucgccacgaucugcuuccucaugcagaucgccauccuggucaccaccgugacccugcacuucaagcaguacgagugcaacagcccgcccaacaaccaggugaugcucugcgagcccacgaucaucgagcgcaacaucaccgagaucgucuaccugaccaacaccacgaucaagaaggagaucugccccaagcuggcggaguaccggaacugguccaagccgcagugcaagaucaccggguucgcccccuucagcaaggacaacuccauccgccucagcgccggcggggacaucugggugacccgggagcccuacguguccugcgaccccggcaagugcuaccaguucgcccuggggcagggcaccacgcugaacaaccgccacagcaacgacaccguccacgaccggaccccguaccgcacccuccugaugaacgagcugggcgugcccuuccaccucgggacgaagcaggucugcaucgccugguccagcuccagcugccacgacggcaaggcguggcugcacgugugcgugaccgggcacgacgagaacgccaccgccuccuucaucuacgacggccggcugguggacagcaucggguccuggagcaagaacauccuccgcacccaggaguccgagugcgucugcaucaacggcacgugcaccguggugaugaccgacggcagcgccuccgagcgggcggacaccaagauccuguucaucgaggaggggaagaucguccacaucagcccccugagcggcuccgcccagcacguggaggagugcagcugcuacccccgcuacccgggggugcggugcgucugccgcgacaacuggaagggcuccaaccggcccaucguggacaucaacgugaaggacuacagcaucgucuccagcuacgugugcuccggccucgugggggacacgccccgcaagaacgacagcuccagcuccagcuacugcuggaaccccaacaacgagaagggcgggcacggcgucaaggggugggccuucgacgacggcaacgacguguggaugggccggaccaucuccgaggagcugcgcagcggguacgagaccuucaaggucaucggcgggugguccaagccgaacagcaagcugcagaucaaccgccaggugaucguggaccggggcaaccgguccggguacagcggcaucuucuccgucgagggcaagagcugcaucaaccgcugcuucuacguggagcucauccgggggcgcaagcaggagaccgaggugugguggacgagcaacuccaucgucguguucugcggcaccagcgggaccuacggcaccggguccuggcccgacggcgccgacaucaaccugaugcccaucuga

SEQ ID NO: 86137 - RNA, 1410 nt, Artificial Sequence
  derived and/or modified CDS sequence (opt1) from neuraminidase__InfluenzaA__AFH00508
augaaccccaaccagaagaucaucaccaucggcagcgugucccugaccaucgccacgaucugcuuccucaugcagaucgccauccuggucaucaccgugacccugcacuucaagcaguacgagugcaacagcccgcccaacaaccaggugaugcucugcgagcccaccaucaucgagcgcaacaucacggagaucgucuaccugaccaacaccaccaucgagaaggagaucugccccaagcuggcggaguaccggaacugguccaagccgcagugcaagaucacgggguucgcccccuucagcaaggacaacuccauccgccucagcgccggcggggacaucugggugacccgggagcccuacguguccugcgaccccggcaagugcuaccaguucgcccuggggcagggcaccacccugaacaaccgccacagcaacgacacgguccacgaccggaccccguaccgcacccuccugaugaacgagcugggcgugcccuuccaccucgggaccaagcaggucugcaucgccugguccagcuccagcugccacgacggcaaggcguggcugcacgugugcgugacggggcacaacgagaacgccaccgccuccuucaucuacgacggccggcugguggacagcaucggguccuggagcaagaacauccuccgcacccaggaguccgagugcgucugcaucaacgggaccugcacgguggugaugaccgacggcagcgccuccgggcgggcggacaccaagauccuguucaucgaggagggcaagaucguccacaucagcccccugagcggguccgcccagcacguggaggagugcagcugcuacccccgcuacccgggcgugcggugcgucugccgcgacaacuggaagggcuccaaccggcccaucguggacaucaacgugaaggacuacagcaucgucuccagcuacgugugcuccgggcucgugggcgacacgccccgcaagaacgacagcuccagcuccagccacugccugaaccccaacaacgaggagggcggccacggggucaagggcugggccuucgacgacggcaacgacguguggauggggcggaccaucuccgagaagcugcgcagcggcuacgagaccuuccgggucaucgggggcugguccaagccgaacagcaagcuccagaucaaccgccaggugaucguggaccgggggaaccgcuccggcuacagcggcaucuucuccgucgagggcaagagcugcaucaaccggugcuucuacguggagcugauccgcgggcgcaagcaggagaccgaggugugguggaccagcaacuccaucgucguguucugcgggacgagcggcaccuacgggaccggcuccuggcccgacggcgccgacaucaaccugaugcccaucuga

SEQ ID NO: 86138 - RNA, 1410 nt, Artificial Sequence
  derived and/or modified CDS sequence (opt1) from neuraminidase__InfluenzaA__AFH00519
augaaccccaaccagaagaucaucaccaucggcagcgugucccugaccaucgccacgaugugcuuccucaugcagaucgccauccuggucaccaccgugacccugcacuucaagcaguacgagugcaacagcccgcccaacaaccaggugaugcucugcgagcccacgaucaucgagcgcaacaucaccgagaucgucuaccugaccaacaccacgaucgagaaggagaucugccccaagcuggcggaguaccggaacugguccaagccgcagugcaagaucaccggguucgcccccuucagcaaggacaacuccauccgccucagcgccggcggggacaucugggugacccgggagcccuacguguccugcgaccccggcaagugcuaccaguucgcccuggggcagggcaccacgcugaacaacggccacagcaacgacaccguccacgaccgcaccccguaccggacccuccugaugaacgagcugggggugcccuuccaccucggcacgaagcaggucugcaucgccugguccagcuccagcugccacgacgggaaggcguggcugcacgugugcgugaccggccacgacgagaacgccaccgccuccuucaucuacgacgggcgccugguggacagcaucggcuccuggagcaagaacauccuccggacccaggaguccgagugcgucugcaucaacggcacgugcaccguggugaugaccgacgggagcgccuccggccgcgcggacaccaagauccuguucaucgaggaggggaagaucguccacaucagcccccugagcggcuccgcccagcacguggaggagugcagcugcuacccccgguacccgggcgugcgcugcgucugccgggacaacuggaagggguccaaccgccccaucguggacaucaacgugaaggacuacagcaucgucuccagcuacgugugcuccggccucgugggggacacgccccggaagaacgacagcuccagcuccagccacugccugaaccccaacaacgaggagggcgggcacggcgucaagggcugggccuucgacgacgggaacgacguguggaugggccgcaccaucuccgagaagcugcggagcggguacgagaccuucaaggucaucggcgggugguccaagccgaacagcaagcuccagaucaaccgccaggugaucguggaccggggcaaccgcuccggcuacagcgggaucuucuccgucgagggcaagagcugcaucaaccggugcuucuacguggagcugauccgcgggcggaagcaggagaccgaggugugguggacgagcaacuccaucgucguguucugcggcaccagcgggaccuacggcaccggcuccuggcccgacggggccgacaucaaccugaugcccaucuga

SEQ ID NO: 86139 - RNA, 1410 nt, Artificial Sequence; identical to SEQ ID NO: 78597
  derived and/or modified CDS sequence (opt1) from neuraminidase__InfluenzaA__AFH00530

SEQ ID NO: 86140 - RNA, 1410 nt, Artificial Sequence; identical to SEQ ID NO: 78597
  derived and/or modified CDS sequence (opt1) from neuraminidase__InfluenzaA__AFH00541

SEQ ID NO: 86141 - RNA, 1410 nt, Artificial Sequence
  derived and/or modified CDS sequence (opt1) from neuraminidase__InfluenzaA__AFH00552
augaaccccaaccagaagaucaucaccaucggcagcgugucccugaccaucgccacgaucugcuuccucaugcagaucgccauccuggucaccaccgugacccugcacuucaagcaguacgagugcaacagccucccgaacaaccaggugaugcugugcgagcccacgaucaucgagcgcaacaucaccgagaucgucuaccugaccaacaccacgaucgagaaggagaucugccccaagcucgcggaguaccggaacugguccaagccccagugcaagaucaccggguucgccccguucagcaaggacaacuccauccgccugagcgccggcggggacaucugggugacccgggagcccuacguguccugcgaccccgacaagugcuaccaguucgcccugggccaggggaccacgcucaacaaccgccacagcaacgacaccguccacgaccggacccccuaccgcacccugcugaugaacgagcucggcgugccguuccaccugggcacgaagcaggucugcaucgccugguccagcuccagcugccacgacgggaaggcguggcugcacgugugcgugaccggccacgacgagaacgccaccgccuccuucaucuacgacgggcggcucguggacagcaucggcuccuggagcaagaagauccugcgcacccaggaguccgagugcgucugcaucaacgggacgugcaccguggugaugaccgacggcagcgccuccggccgggcggacaccaagauccuguucaucgaggaggggaagaucauccacaucagccagcucagcggcuccacgcagcacgucgaggagugcagcugcuacccccgcuaccccggggugcggugcgugugccgcgacaacuggaagggcuccaaccggcccaucgucgacaucaacgugaaggacuacagcaucguguccagcuacgucugcuccggccuggugggggacaccccgcgcaagaacgacagcuccagcuccagccacugccugaaccccaacaacgaggagggcgggcacggcgugaaggggugggccuucgacgacggcaacgacgucuggaugggccggaccaucuccgagaaguuccgcagcggguacgagaccuucaaggugaucgagggcugguccaagcccaacagcaagcuccagaucaaccggcaggucaucguggaccgcgacaaccgguccggguacagcggcaucuucuccguggagggcaagagcugcaucaaccgcugcuucuacgucgagcugauccgggggcgcaagcaggagacggaggugugguggaccagcaacuccaucguggucuucugcggcaccagcgggaccuacggcacgggguccuggcccgacggcgccgacaucaaccugaugccgaucuga

SEQ ID NO: 86142 - RNA, 1410 nt, Artificial Sequence
  derived and/or modified CDS sequence (opt1) from neuraminidase__InfluenzaA__AFH00563
augaaccccaaccagaagaucaucaccaucggcagcgugucccugaccaucgccacgaucugcuuccucaugcagaucgccauccuggucaccaccgugacccugcacuucaagcaguacgagugcaacagcccgcccaacaaccaggugaugcucugcgagcccacgaucaucgagcgcaacaucaccgagaucgucuaccugaccaacaccacgaucgagaaggagaucugccccaagcuggcggaguaccggaacugguccaagccgcagugcaacaucaccggguucgcccccuucagcaaggacaacuccauccgccucagcgccggcggggacaucugggugacccgggagcccuacguguccugcgaccccgacaagugcuaccaguucgcccugggccaggggaccacgcugaacaacggccacagcaacgacaccguccacgagcgcaccccguaccggacccuccugaugaacgagcugggcgugcccuuccaccucgggacgaagcaggucugcaucgccugguccagcuccagcugccacgacggcaaggcguggcugcacgugugcgugaccggggacgacgagaacgccaccgccuccuucaucuacaacggccgccugguggacagcaucggguccuggagcaagaagauccuccggacccaggaguccgagugcgucugcaucaacggcacgugcaccguggugaugaccgacggcagcgccuccgggaaggcggacaccaagauccuguucaucgaggagggcaagaucguccacacgagcccccugagcggguccgcccagcacguggaggagugcagcugcuacccccgcuacccgggcgugcggugcgucugccgcgacaacuggaagggcuccaaccggcccaucguggacaucaacgugaaggacuacagcaucgucuccagcuacgugugcuccgggcucgugggcgacacgccccgcaagaacgacagcuccagcuccagccacugccuggaccccaacaacgaggagggcgggcacggggucaagggcugggccuucgacgacggcaacgacguguggauggggcggaccaucuccgagaagcugcgcagcggcuacgagaccuucaaggucaucgaggggugguccaagccgaacagcaagcuccagaucaaccgccaggugaucguggaccggggcaaccgguccggguacagcggcaucuucuccgucgagggcaagagcugcaucaaccgcugcuucuacguggagcugauccgggggcgcaagcaggagaccgaggugcuguggaccagcaacuccaucgucguguucugcggcaccagcgggaccuacggcacgggguccuggcccgacggcgccgacaucaaccucaugcccaucuga

SEQ ID NO: 86143 - RNA, 1410 nt, Artificial Sequence
  derived and/or modified CDS sequence (opt1) from neuraminidase__InfluenzaA__AFH00574
augaaccccaaccagaagaucaucaccaucggcagcgugucccugaccaucgccacgaucugcuuccucaugcagaucgccauccuggucaccaccgugacccugcacuucaagcaguacgagugcaacagcccgcccaacaaccaggugaugcucugcgagcccaagaucaucgagcgcaacaucacggagaucgucuaccugaacaacaccaccaucgagaaggagaucugccccaagcuggcggaguaccggaacugguccaagccgcagugcaacaucaccggguucgcccccuucagcaaggacaacuccauccgccucagcgccggcggggacaucugggugacgcgggagcccuacguguccugcgaccccgacaagugcuaccaguucgcccugggccaggggaccacccugaacaacggccacagcaacgacaccguccacgaccgcacgccguaccggacccuccugaugaacgagcugggcgugcccuuccaccucgggaccaagcaggucugcaucgccugguccagcuccagcugccacgacggcaaggcguggcugcacgugugcgugaccggggacgacgagaacgccacggccuccuucaucuacaacggccgccugguggacagcaucggguccuggagcaagaagauccuccggacccaggaguccgagugcgucugcaucaacgggaccugcaccguggugaugacggacggcagcgccuccgggaaggcggacaccaagauccuguucaucgaggagggcaagaucguccacaccagccugcucagcggguccgcccagcacguggaggagugcagcugcuacccccgcuaccccggcgugcggugcgucugccgcgacaacuggaagggcuccaaccggccgaucguggacaucaacgugaaggacuacagcaucgucuccagcuacgugugcuccgggcuggugggcgacacgccccgcaagaacgacagcuccagcuccagccacugccuggaccccaacaacgaggagggcggccacggggucaagggcugggccuucgacgacggcaacgacguguggauggggcggaccaucuccgagaagcuccgcagcggcuacgagaccuucaaggucaucgaggggugguccaagcccaacagcaagcugcagaucaaccgccaggugaucguggaccggggcaaccgguccggguacagcggcaucuucuccgucgagggcaagagcugcaucaaccgcugcuucuacguggagcugauccgggggcgcaagcaggagaccgaggugcucuggaccagcaacuccaucgucguguucugcggcacgagcgggaccuacggcaccggguccuggccggacggcgccgacaucaaccugaugcccaucuga

SEQ ID NO: 86144 - RNA, 1410 nt, Artificial Sequence
  derived and/or modified CDS sequence (opt1) from neuraminidase__InfluenzaA__AFH00585
augaaccccaaccagaagaucaucaccaucggcagcgugucccugaccaucgccacgaucugcuuccucaugcagaucgccauccuggucaccaccgugacccugcacuucaagcaguacgagugcaacagcccgcccaacaaccaggugaugcucugcgagcccacgaucaucgagcgcaacaucaccgagaucgucuaccugaccaacaccacgaucaagaaggagaucugccccaagcuggcggaguaccggaacugguccaagccgcagugcaacaucaccggguucgcccccuucagcaaggacaacuccauccgccucagcgccggcggggacaucugggugacccgggagcccuacguguccugcgaccccgacaagugcuaccaguucgcccugggccaggggaccacgcugaacaaccgccacagcaacgacaagguccacgaccggaccccguaccgcacccuccugaugaacgagcugggcgugcccuuccaccucggcaccaagcaggucugcaucgccugguccagcuccagcugccacgacgggaaggcguggcugcacgugugcgugacgggcgacgacgagaacgccaccgccuccuucaucuacaacgggcggcugguggacagcaucggcuccuggagcaagaagauccuccgcacccaggaguccgagugcgucugcaucaacgggaccugcacgguggugaugaccgacggcagcgccuccggcaaggcggacaccaagauccuguucaucaaggaggggaagaucguccacaccagcagccuguccggcagcgcccagcacguggaggagugcuccugcuacccccgguaccccggggugcgcugcgucugccgggacaacuggaagggcagcaaccgcccgaucguggacaucaacgugaaggacuacuccaucgucagcuccuacgugugcagcggccucgugggggacacgccccggaagaacgacuccagcuccagcucccacugccuggaccccaacaacgaggagggcgggcacggcgucaaggggugggccuucgacgacggcaacgacguguggaugggccgcaccaucagcgagaagcugcgguccggguacgagaccuucaaggucaucgagggcuggagcaaggccaacuccaagcuccagaucaaccgccaggugaucguggaccgggggaaccgcagcggcuacuccgggaucuucagcgucgagagcaaguccugcaucaaccggugcuucuacguggagcugauccgcggccggaagcaggagaccgaggugcuguggacgagcaacuccaucgucguguucugcggcaccagcgggaccuacggcaccggguccuggcccgacggcgccgacaucaaccucaugccgaucuga

SEQ ID NO: 86145 - RNA, 1410 nt, Artificial Sequence; identical to SEQ ID NO: 78732
  derived and/or modified CDS sequence (opt1) from neuraminidase__InfluenzaA__AFH00596

SEQ ID NO: 86146 - RNA, 1410 nt, Artificial Sequence
  derived and/or modified CDS sequence (opt1) from neuraminidase__InfluenzaA__AFH00607
augaaccccaaccagaagaucaucaccaucggcuucguguucuucaccaucgccacgaucugcuuccugaugcagaucgccauccucgucaccaccgugacccugcacuucaagcaguacgagugcaacccgccgcccaacaaccaggugaugcugugcgagcccacgaucaucgagcgcaacaucaccgagaucgucuaccucaccaacaccacgaucgagaaggagaucugccccaagcuggcggaguaccggaacuggagcaagccccagugcaacaucaccggguucgcccccuucuccaaggacaacagcauccgccuguccgccggcggggacaucugggugacccgggagcccuacgugagcugcgacccggacaagugcuaccaguucgcccucggccaggggaccacgcugaacaacggccacuccaacgacaccguccacgaccgcacccccuaccggacccugcucaugaacgagcugggcgugcccuuccaccuggggacgcgccaggugugcaucgccuggagcuccagcuccugccacgacggcaaggcguggcuccacgucugcgugaccggggacgacgagaacgccaccgccagcuucaucuacaacggccggcugguggacuccaucgggagcugguccaagaagauccugcgcacccaggagagcgagugcgucugcaucaacggcacgugcaccguggugaugaccgacggcuccgccagcgggaaggcggacaccaagauccucuucaucgaggagggcaagaucguccacaucuccacgcugagcggguccgcccagcacguggaggagugcagcugcuacccccgguacccgggcgugcgcugcgucugccgggacaacuggaagggcagcaaccgccccaucguggacaucaacgugaaggacuacuccaucgucagcuccuacgugugcagcgggcuggugggcgacacgccccggaagaacgacuccuucagcuccagccacugccucgaccccaacaacgaggagggcgggcacggggucaagggcugggccuucgacgacggcaacgacguguggauggggcgcaccaucuccgagaagcugcggagcggcuacgagaccuucaaggucaucgaggggugguccaagccgaacagcaagcugcagaccaaccgccaggugaucguggagcggggcaaccgcuccggguacagcggcaucuucuccgucgagggcaagagcugcaucaaccggugcuucuacguggagcucauccgcgggcggaaggaggagaccgaggugugguggaccuccaacagcaucgucguguucugcggcaccuccgggacguacggcaccgggagcuggcccgacggcgccgacaucaaccugaugcccaucuga

SEQ ID NO: 86147 - RNA, 1410 nt, Artificial Sequence; identical to SEQ ID NO: 79953
  derived and/or modified CDS sequence (opt1) from neuraminidase__InfluenzaA__AFH00618

SEQ ID NO: 86148 - RNA, 1410 nt, Artificial Sequence
  derived and/or modified CDS sequence (opt1) from neuraminidase__InfluenzaA__AFH00629
augaaccccaaccagaagaucaucaccaucggcagcgugucccugaccaucgccacgaucugcuuccucaugcagaucaccauccuggucaccaccgugacgcugcacuucaagcaguacgagugcaacagcccgcccaacaaccaggugaugcucugcgagcccaccaucaucgagcgcaacaucaccgagaucgucuaccugaccaacacgaccaucgagaaggggaucugccccaagcuggccgaguaccggaacugguccaagccgcagugcaacaucaccggcuucgcgcccuucagcaaggacaacuccauccgccucagcgccgggggcgacaucugggugacccgggagcccuacguguccugcgaccccgacaagugcuaccaguucgcccuggggcagggcacgacccugaacaacggccacagcaacgacaccguccacgaccgcaccccguaccggacgcuccugaugaacgagcugggggugcccuuccaccucggcacccgccaggugugcaucgccugguccagcuccagcugccacgacgggaaggccuggcugcacgucugcgugaccggcgacgacaagaacgcgaccgccuccuucaucuacaacgggcggcugguggacagcaucggcuccuggagcaagaagauccuccgcacgcaggaguccgagugcgucugcaucaacgggaccugcaccguggugaugaccgacggcagcgccuccggcaaggccgacacgaagauccuguucaucgaggaggggaagaucauccacaucagcacccugcucggcagcgcgcagcacgucgaggagugcuccugcuacccccgguaccccggcgugcgcugcgugugccgggacaacuggaaggggagcaaccgcccgaucgucgacaucaacgugaaggacuacuccaucgugagcuccuacgucugcagcggccuggugggggacacgccccggaagaacgacuccagcuccagcucccacugccuggaccccaacaacgaggagggcgggcacggcgugaagggcugggccuucgacgacgggaacgacgucuggaugggccgcaccaucagcgagaagcuccgguccggguacgagaccuucaaggugaucgagggcuggagcaagcccaacuccaagcugcagaucaaccgccaggucaucguggagcgggggaaccgcagcggcuacuccggcaucuucagcguggaggggaaguccugcaucaaccggugcuucuacgucgagcugauccgcggccggaaggaggagaccgaggugugguggaccagcaacagcaucguggucuucugcgggaccuccggcacguacgggaccggcagcuggccggacggcgccgacaucaaccucaugcccaucuga

SEQ ID NO: 86149 - RNA, 1410 nt, Artificial Sequence; identical to SEQ ID NO: 78351
  derived and/or modified CDS sequence (opt1) from neuraminidase__InfluenzaA__AFH00640

SEQ ID NO: 86150 - RNA, 1410 nt, Artificial Sequence; identical to SEQ ID NO: 80480
  derived and/or modified CDS sequence (opt1) from neuraminidase__InfluenzaA__AFH00651

SEQ ID NO: 86151 - RNA, 1410 nt, Artificial Sequence; identical to SEQ ID NO: 78351
  derived and/or modified CDS sequence (opt1) from neuraminidase__InfluenzaA__AFH00662

SEQ ID NO: 86152 - RNA, 1410 nt, Artificial Sequence
  derived and/or modified CDS sequence (opt1) from neuraminidase__InfluenzaA__AFH00673
augaaccccaaccagaagaucaucaccaucggcagcgugucccugaccaucagcacgaucugcuucuucaugcagaucgccauccucaucaccaccgucacccugcacuucaagcaguacgaguucuccagcccgcccaacaaccaggugaugcugugcgagcccacgaucaucgagcgcaacaucaccgagaucguguaccucaccaacaccacgaucgagaaggagaccugccccaagcuggccgaguaccggaacugguccaagccgcagugcgacaucaccggguucgcgcccuucagcaaggacaacuccauccgccugagcgccggcggggacaucugggucacccgggagcccuacguguccugcgaccccgacaagugcuaccaguucgcccucggccaggggacgacccugaacaacgugcacagcaacgacaccguccacgaccgcaccccguaccggacgcugcucaugaacgagcugggcgugcccuuccaccugggcaccaagcaggucugcaucgccugguccagcuccagcugccacgacgggaaggccuggcuccacgugugcgugaccggcgacgacaagaacgcgaccgccuccuucaucuacaacgggcgccugguggacagcaucgucuccuggagcaaggagauccugcggacgcaggaguccgagugcgugugcaucaacgggaccugcaccguggucaugaccgacgggagcgccagcggcaaggccgacacgaagauccucuucaucgaggagggcaagaucgugcacaccuccacccugagcggguccgcgcagcacguggaggagugcagcugcuacccccgcuaccccggcguccggugcgugugccgcgacaacuggaagggguccaaccggccgaucguggacaucaacaucaaggacuacagcaucgucucccgcuacgugugcagcggccuggugggcgacacgccccggaagaacgacuccagcuccagcucccacugccucgaccccaacaacgaggagggcggccacggggucaagggcugggccuucgacgacgggaacgacguguggaugggccgcaccaucagcgucaagucccggagcggcuacgagaccuucaaggugaucgaggggugguccaaccccaacagcaagcugcagaucaaccgccaggugaucgucgaccggggcaaccgcuccggguacagcggcaucuucagcguggaggggaaguccugcaucaaccggugcuucuacguggagcugauccgcggccggaaggaggagaccgagguccucuggaccagcaacuccaucgugguguucugcggcacgagcgggaccuacggcaccggguccuggccggacggcgccgacaucaaccugaugcccaucuga

SEQ ID NO: 86153 - RNA, 1410 nt, Artificial Sequence
  derived and/or modified CDS sequence (opt1) from neuraminidase__InfluenzaA__AFH00684
augaaccccaaccagaagaucaucaccaucggcagcgugucccugaccaucagcacgaucugcuucuucaugcagaucgccauccucaucaccaccgucacccugcacuucaagcaguacgaguucaacuccccgcccaacaaccaggugaugcugugcgagcccacgaucaucgagcgcaacaucaccgagaucguguaccucaccaacaccacgaucgagaaggagaucugccccaagcuggccgaguaccggaacuggagcaagccgcagugcgacaucaccggguucgcgcccuucuccaaggacaacagcauccgccuguccgccggcggggacaucugggucacccgggagcccuacgugagcugcgaccccgacaagugcuaccaguucgcccucggccaggggaccacgcugaacaacgugcacuccaacaacaccguccgcgagcggaccccguaccgcacccugcucaugaacgagcugggcgugcccuuccaccugggcacgaagcaggucugcaucgccuggagcuccagcuccugccacgacgggaaggccuggcuccacgugugcaucaccggcgacgacaagaacgcgaccgccagcuucaucuacaacgggcggcugguggacuccaucgugagcugguccaaggagauccugcgcacccaggagagcgagugcgucugcaucaacggcacgugcaccguggugaugaccgacggguccgccagcggcaaggccgacaccaagauccucuucaucgaggagggcaagaucguccacacgagcacccuguccgggagcgcgcagcacguggaggagugcuccugcuacccccgguaccccggcgugcgcugcgucugccgggacaacuggaaggggagcaaccgcccgaucguggacaucaacaucaaggaccacuccaucgugagcuccuacgucugcagcggccuggugggcgacacgccccggaagaacgacuccagcuccagcucccacugccucgaccccaacaacgaggagggcgggcacggggugaagggcugggccuucgacgacgggaacgacgucuggaugggccgcaccaucagcgagaagucccggcugggcuacgagaccuucaaggugaucgagggguggagcaaccccaaguccaagcugcagaucaaccgccaggucaucguggaccggggcaaccgcagcggguacuccggcaucuucagcguggagggcaagagcugcaucaaccggugcuucuacgucgagcucauccgcgggcggaaggaggagaccgaggugcuguggaccuccaacagcaucguggucuucugcggcaccuccgggacguacggcaccgggagcuggccggacggcgccgacaucaaccugaugcccaucuga

SEQ ID NO: 86154 - RNA, 1410 nt, Artificial Sequence
  derived and/or modified CDS sequence (opt1) from neuraminidase__InfluenzaA__AFH00695
augaaccccaaccagaagaucaucaccaucggcagcgugucccugaccaucagcacgaucugcuucuucaugcagaucgccauccucaucaccaccgucacccugcacuucaagcaguacgaguucaacuccccgcccaacaaccaggugaugcugugcgagcccacgaucaucgagcgcaacaucaccgagaucguguaccucaccaacaccacgaucgagaaggagaucugccccaagcuggccgaguaccggaacuggagcaagccgcagugcgacaucaccggguucgcgcccuucuccaaggacaacagcauccgccuguccgccggcggggacaucugggucacccgggagcccuacgugagcugcgaccccgacaagugcuaccaguucgcccucggccaggggaccacgcugaacaacgugcacuccaacgacaccguccgcgagcggaccccguaccgcacccugcucaugaacgagcugggcgugcccuuccaccugggcacgaagcaggucugcaucgccuggagcuccagcuccugccacgacgggaaggccuggcuccacgugugcaucaccggcgacgacaagaacgcgaccgccagcuucaucuacaacgggcggcugguggacuccaucgugagcugguccaaggagauccugcgcacccaggagagcgagugcgucugcaucaacggcacgugcaccguggugaugaccgacggguccgccagcggcaaggccgacaccaagauccucuucaucgaggagggcaagaucguccacacgagcacccuguccgggagcgcgcagcacguggaggagugcuccugcuacccccgguaccccggcgugcgcugcgucugccgggacaacuggaaggggagcaaccgcccgaucguggacaucaacaucaaggaccacuccaucgugagcuccuacgucugcagcggccuggugggcgacacgccccggaagaacgacuccagcuccagcucccacugccucgaccccaacaacgaggagggcgggcacggggugaagggcugggccuucgacgacgggaacgacgucuggaugggccgcaccaucagcgagaagucccggcugggcuacgagaccuucaaggugaucgagggguggagcaaccccaaguccaagcugcagaucaaccgccaggucaucguggaccggggcaaccgcagcggguacuccggcaucuucagcguggagggcaagagcugcaucaaccggugcuucuacgucgagcucauccgcgggcggaaggaggagaccgaggugcuguggaccuccaacagcaucguggucuucugcggcaccuccgggacguacggcaccgggagcuggccggacggcgccgacaucaaccugaugcccaucuga

SEQ ID NO: 86155 - RNA, 1410 nt, Artificial Sequence
  derived and/or modified CDS sequence (opt1) from neuraminidase__InfluenzaA__AFH00706
augaaccccaaccagaagaucaucaccaucggcagcgugucccugaccaucagcacgaucugcuucuucaugcagaucgccauccucaucaccaccgucacccugcacuucaagcaguacgaguucaacuccccgcccaacaaccaggugaugcugugcgagcccacgaucaucgagcgcaacaucaccgagaucguguaccucaccaacaccacgaucgagaaggagaucugccccaagcuggccgaguaccggaacuggagcaagccgcagugcgacaucaccggguucgcgcccuucuccaaggacaacagcauccgccuguccgccggcggggacaucugggucacccgggagcccuacgugagcugcgaccccaacaagugcuaccaguucgcccucggccaggggaccacgcugaacaacgugcacuccaacaacaccguccgcgaccggaccccguaccgcacccugcucaugaacgagcugggcgugcccuuccaccugggcacgaagcaggucugcaucgccuggagcuccagcuccugccacgacgggaaggccuggcuccacgugugcaucaccggcgacgacaagaacgcgaccgccagcuucaucuacaacgggcggcugguggacuccguggucagcugguccaaggagauccugcgcacccaggagagcgagugcgugugcaucaacggcacgugcaccguggucaugaccgacggguccgccagcggcaaggccgacaccaagauccucuucaucgaggagggcaagaucgugcacacgagcacccuguccgggagcgcgcagcacguggaggagugcuccugcuacccccgguaccccggcguccgcugcgugugccgggacaacuggaaggggagcaaccgcccgaucguggacaucaacaugaaggaccacuccaucgucagcuccuacgugugcagcggccuggugggcgacacgccccggaagaacgacuccagcuccagcucccacugcuucgaccccaacaacgaggagggcgggcacggggucaagggcugggccuucgacgacgggaacgacguguggaugggccgcaccaucagcgagaagucccggcucggcuacgagaccuucaaggucaucgagggguggagcaaccccaaguccaagcugcagaucaaccgccaggugaucguggaccggggcgaccgcagcggguacuccggcaucuucagcgucgagggcaagagcugcaucaaccggugcuucuacguggagcugauccgcggguccaaggaggagaccgaggugcucuggaccagcaacuccaucgucguguucugcggcaccagcgggacguacggcaccggguccuggccggacggcgccgacaucaaccugaugcccaucuga

SEQ ID NO: 86156 - RNA, 1410 nt, Artificial Sequence
  derived and/or modified CDS sequence (opt1) from neuraminidase__InfluenzaA__AFH00728
augaaccccaaccagaagaucaucaccaucggcagcgugucccugaccaucgccacgaucugcuuccucaugcagaucgccauccuggucaccaccgugacccugcacuucaagcaguacgagugcagcuccccgcccaacaaccaggugaugcccugcgagcccaucaucaucgagcgcaacaucacggagaucgucuaccucaccaacaccaccaucgagaaggagaucugcccgaagcugguggaguaccggaacuggagcaagccccagugcaagaucacgggguucgcgcccuucuccaaggacaacagcauccgccuguccgccggcggggacaucugggugacccgggagcccuacgucagcugcgacccgggcaagugcuaccaguucgcccucgggcagggcaccacccugaacaacaagcacuccaacgacacgauccacgaccgcacccccuaccggacccugcucaugaacgagcugggcgugcccuuccaccuggggacccgccaggugugcaucgccuggagcuccagcuccugccacgacggcaaggccuggcuccacgucugcgugacggggcacgacaagaacgcgaccgccagcuucaucuacaacggccggcugguggacuccaucgggagcugguccaagaacauccugcgcacccaggagagcgagugcgucugcaucaacgggaccugcacgguggugaugaccgacggcuccgccagcgagcgggccgacaccaagauccucuucaucgaggagggcaagaucguccacaucagcccccuguccggcagcgcgcagcacguggaggagugcuccugcuacccgcgcuaccccggggugcggugcgucugccgcgacaacuggaagggcagcaaccggcccaucguggacaucaacgugaaggacuacuccaucgucagcuccuacgugugcagcggccuggugggggacacgccccgcaagaacgaccgguccagcuccagcuacugccgcaacccgaacaacgagaagggcaaccacggggucaagggcugggccuucgacgacgggaacgacguguggaugggccggaccaucggcgaggagcuccgcuccggguacgagaccuucaaggucaucggcggguggagcacccccaacuccaagcugcagaucaaccgccaggugaucguggacagcgacaaccgguccggcuacagcgggaucuucuccgucgagggcaagagcugcaucaaccggugcuucuacguggagcugauccgcggccgcgagcaggagacccgggugcucuggacgagcaacuccaucgucguguucugcgggaccagcggcaccuacgggaccggcuccuggcccgacggggccgacaucaaccugaugcccaucuga

SEQ ID NO: 86157 - RNA, 1410 nt, Artificial Sequence
  derived and/or modified CDS sequence (opt1) from neuraminidase__InfluenzaA__AFH00739
augaaccccaaccagaagaucaucaccaucggcagcgugucccugaccaucgccacgaucugcuuccucaugcagaucgccauccuggucaccaccgugacccugcacuucaagcaguacgagugcagcuccccgcccaacaaccaggugaugcccugcgagcccacgaucaucgagcgcaacaucaccgagaucgucuaccucaccaacaccacgaucgagaaggagaucugcccgaagcugguggaguaccggaacuggagcaagccccagugcaagaucaccggguucgcgcccuucuccaaggacaacagcauccgccuguccgccggcggggacaucugggugacccgggagcccuacgucagcugcgacccgggcaagugcuaccaguucgcccucgggcagggcaccacgcugaacaaccgccacuccaacgacaccgugcacgaccggacccccuaccgcacccugcucaugaacgagcugggcgugcccuuccaccuggggacgaagcaggucugcaucgccuggagcuccagcuccugccacgacggcaaggccuggcuccacgugugcgugaccgggcacgacaagaacgcgaccgccagcuucaucuacgacggccggcuggucgacuccaucgggagcugguccaagaacauccugcgcacccaggagagcgagugcgugugcaucaacggcacgugcaccguggucaugaccgacggcuccgccagcgagcgggccgacaccaagauccucuucaucgaggaggggaagaucgugcacaucagcccccuguccggcagcgcgcagcacguggaggagugcuccugcuacccgcgcuaccccgggguccggugcgugugccgcgacaacuggaagggcagcaaccggcccaucguggacaucaacgucaaggacuacuccaucgugagcuccuacgugugcagcggccuggucggggacacgccccgcaagaacgaccgguccagcuccagcuacugccgcaacccgaacaacgagaagggcucccacggggugaagggcugggccuucgacgacgggaacgacgucuggaugggccggaccaucggcgaggagcuccgcagcggguacgagaccuucaaggugaucggcgggugguccacccccaacagcaagcugcagaucaaccgccaggugaucgucgacuccggcaaccggagcggguacuccggcaucuucagcguggagggcaagagcugcaucaaccggugcuucuacguggagcugauccgcgggcgcggccaggagacgcgggucugguggaccuccaacagcaucgugguguucugcgggaccuccggcaccuacgggacgggcagcuggcccgacggcgccgacaucaaccucaugcccaucuga

SEQ ID NO: 86158 - RNA, 1410 nt, Artificial Sequence
  derived and/or modified CDS sequence (opt1) from neuraminidase__InfluenzaA__AFH00750
augaaccccaaccagaagaucaucaccaucggcagcgugucccugaccaucgccacgaucugcuuccucaugcagaucgccauccuggucaccaccgugacccugcacuucaagcaguacgagugcagcuccccgcccaacaaccaggugaugcccugcgagcccacgaucaucgagcgcaacaucaccgagaucgucuaccucaccaacaccacgaucgagaaggagaucugcccgaagcugguggaguaccggaacuggagcaagccccagugcaagaucaccggguucgcgcccuucuccaaggacaacagcauccgccuguccgccggcggggacaucugggugacccgggagcccuacgucagcugcgacccgggcaagugcuaccaguucgcccucgggcagggcaccacgcugaacaaccgccacuccaacgacaccgugcacgaccggacccccuaccgcacccugcucaugaacgagcugggcgugcccuuccaccuggggacgaagcaggucugcaucgccuggagcuccagcuccugccacgacggcaaggccuggcuccacgugugcgugaccgggcacgacaagaacgcgaccgccagcuucaucuacgacggccggcuggucgacuccaucgggagcugguccaagaacauccugcgcacccaggagagcgagugcgugugcaucaacggcacgugcaccguggucaugaccgacggcuccgccagcgagcgggccuacaccaagauccucuucaucaaggaggggaagaucgugcacaucagcccccuguccggcagcgcgcagcacguggaggagugcuccugcuacccgcgcuaccccgggguccggugcgugugccgcgacaacuggaagggcagcaaccggcccaucguggacaucaacgucaaggacuacuccaucgugagcuccuacgugugcagcggccuggucggggacacgccccgcaagaacgaccgguccagcuccagcuacugccgcaacccgaacaacgagaagggcucccacggggugaagggcugggccuucgacgacgggaacgacgucuggaugggccggaccaucggcgaggagcuccgcagcggguacgagaccuucaaggugaucggcgggugguccacccccaacagcaagcugcagaucaaccgccaggugaucgucgaguccggcaaccggagcggguacuccggcaucuucagcguggagggcaagagcugcaucaaccggugcuucuacguggagcugauccgcgggcgcgagcaggagacgcgggucugguggaccuccaacagcaucgugguguucugcggcaccuccgggaccuacggcacggggagcuggcccgacggcgccgacaucaaccucaugcccaucuga

SEQ ID NO: 86159 - RNA, 1410 nt, Artificial Sequence
  derived and/or modified CDS sequence (opt1) from neuraminidase__InfluenzaA__AFH00761
augaaccccaaccagaagaucaucaccaucggcagcgugucccugaccaucgccacgaucugcuuccucaugcagaucgccauccuggucaccaccgugacccugcacuucaagcaguacgagugcaacagcccgcccaacaaccaggugaugcccugcgagcccacgaucaucgagcgcaacaucaccgagaucgucuaccucaccaacaccacgaucgagaaggagaucugcccgaagcugguggaguaccggaacugguccaagccccagugcaagaucaccggguucgcgcccuucagcaaggacaacuccauccgccugagcgccggcggggacaucugggugacccgggagcccuacgucuccugcgacccgggcaagugcuaccaguucgcccucgggcagggcaccacgcugaacaaccgccacagcaacgacaccgugcacgaccggacccccuaccgcacccugcucaugaacgagcugggcgugcccuuccaccuggggacgaagcaggucugcaucgccugguccagcuccagcugccacgacggcaaggccuggcuccacgugugcgugaccgggcacgacgagaacgcgaccgccuccuucaucuacgacggccggcuggucgacagcaucggguccuggagcaagaacauccugcgcacccaggaguccgagugcgugugcaucaacggcacgugcaccguggucaugaccgacggcagcgccuccgagcgggccgacaccaagauccucuucaucgaggaggggaagaucgugcacaucagcccccugagcggcuccgcgcagcacguggaggagugcagcugcuacccgcgcuaccccgggguccggugcgugugccgcgacaacuggaagggcuccaaccggcccaucguggacaucaacgucaaggacuacagcaucguguccagcuacgugugcuccggccuggucggggacacgccccgcaagaacgacagcuccagcuccagcuacugccggaacccgaacaacgagaagggcucccacggggugaagggcugggccuucgacgacggggacgacgucuggaugggccgcaccaucggcgaggagcuccggagcggguacgagaccuucaaggugaucggcgggugguccacccccaacagcaagcugcagaucaaccgccaggugaucgucgaccggggcaaccgcuccggguacagcggcaucuucuccguggagggcaagagcugcaucaaccggugcuucuacguggagcugauccgcgggcgcaagcaggagacgaaggucugguggaccagcaacuccaucgugguguucugcggcaccagcgggaccuacggcacgggguccuggcccgacggcgccgacaucaaccucaugcccaucuga

SEQ ID NO: 86160 - RNA, 1410 nt, Artificial Sequence
  derived and/or modified CDS sequence (opt1) from neuraminidase__InfluenzaA__AFH00783
augaaccccaaccagaagaucaucaccaucggcagcgugucccugaccaucgccacgaucugcuuccucaugcagaucgccauccuggucaccaccgugacccugcacuucaagcaguacgagugcaacagcccgcccaacaaccaggugaugcucugcgagcccacgaucaucgagcgcaacaucaccgagaucgucuaccugaccaacaccacgaucgagaaggagaucugccccaagcuggcggaguaccggaacugguccaagccgcagugcaagaucaccggguucgcccccuucagcaaggacaacuccauccgccucagcgccggcggggacaucugggugacccgggagcccuacguguccugcgaccccgacaagugcuaccaguucgcccugggccgcgggaccacgcugaacaaccggcacagcaacgacaccguccacgaccgcaccccguaccggacccuccugaugaacgagcugggcgugcccuuccaccucggcacgaagcaggucugcaucgccugguccagcuccagcugccacgacgggaaggcguggcugcacgugugcgugaccggccacgacgagaacgccaccgccuccuucaucuacgacgggcgccugguggacagcaucggcuccuggagcaagaagauccuccggacccaggaguccgagugcgucugcaucaacgggacgugcaccguggugaugaccgacggcagcgccuccggccgcgcggacaccaagauccuguucaucgaggaggggaagaucguccacaucagcccccugagcggcuccgcccagcacguggaggagugcagcugcuacccccgguacuccggggugcgcugcgucugccgggacaacuggaagggcagcaaccgcccgaucguggacaucaacgugaaggacuacuccaucgucagcuccuacgugugcagcggccucgugggggacacgccccggaagaacgacuccagcuccagcucccacugccugaaccccaacaacgaggagggcgggcacggcgucaaggggugggccuucgacgacggcaacgacguguggaugggccgcaccaucagcgagaaguuccgguccggguacgagaccuucaaggucaucggcggguggagcaagcccaacuccaagcugcagaucaaccgccaggugaucguggaccggggcaaccgcagcggguacuccggcaucuucagcgucgagggcaagagcugcaucaaccggugcuucuacguggagcucauccgcgggcgcaagcaggagaccgaggugugguggacguccaacagcaucgucguguucugcggcaccuccgggaccuacggcaccgggagcuggccggacggcgccgacaucaaccugaugcccaucuga

SEQ ID NO: 86161 - RNA, 1410 nt, Artificial Sequence
  derived and/or modified CDS sequence (opt1) from neuraminidase__InfluenzaA__AFH00794
augaaccccaaccagaagaucaucaccaucggcagcgugucccugaccaucgccacgaucugcuuccucaugcagaucgccauccuggucaccaccgugacccugcacuucaagcaguacgagugcaacagcccgcccaacaaccaggugaugcucugcgagcccacgaucaucgagcgcaacaucaccgagaucgucuaccugaccaacaccacgaucgagaaggagaucugccccaagcuggcggaguaccggaacugguccaagccgcagugcaagaucaccggguucgcccccuucagcaaggacaacuccauccgccucgccgccggcggggacaucugggugacccgggagcccuacgugagcugcgaccccgacaagugcuaccaguucgcccugggccaggggaccacgcugaacaaccgccacuccaacgacaccguccacgaccggaccccguaccgcacccuccugaugaacgagcugggcgugcccuuccaccucggcacgaagcaggucugcaucgcguggagcuccagcuccugccacgacgggaaggccuggcugcacgugugcgugaccggccacgacgagaacgccaccgccagcuucaucuacgacgggcggcugguggacuccaucggcagcugguccaagaagauccuccgcacccaggagagcgagugcgucugcaucaacgggacgugcaccguggugaugaccgacggcuccgcgagcgagcgggccgacaccaagauccuguucaucgaggagggcaagaucguccacaucucccagcugagcgggagcgcccagcacguggaggagugcuccugcuacccccgcuaccccggcgugcggugcgucugccgcgacaacuggaaggggagcaaccggccgaucguggacaucaacgugaaggacuacuccaucgucagcuccuacgugugcagcggccucgugggcgacacgccccgcaagaacgacuccagcuccagcucccacugccugaaccccaacaacgaggagggcgggcacggggucaagggcugggccuucgacgacggggacgacguguggaugggccggaccaucagcgagaagcugcgcuccggcuacgagaccuucaaggucaucgagggguggagcaagcccaacuccaagcuccagaccaaccgccaggugaucguggaccggggcaaccggagcggguacuccggcaucuucagcgucgaggggaaguccugcaucaaccgcugcuucuacguggagcugauccggggccgcaagcaggagacggaggugugguggaccagcaacagcaucgucguguucugcggcaccuccgggaccuacggcacggggagcuggccggacggcgccgacaucaaccugaugcccaucuga

SEQ ID NO: 86162 - RNA, 1410 nt, Artificial Sequence; identical to SEQ ID NO: 79512
  derived and/or modified CDS sequence (opt1) from neuraminidase__InfluenzaA__AFH00805

SEQ ID NO: 86163 - RNA, 1410 nt, Artificial Sequence; identical to SEQ ID NO: 83542
  derived and/or modified CDS sequence (opt1) from neuraminidase__InfluenzaA__AFH00816

SEQ ID NO: 86164 - RNA, 1410 nt, Artificial Sequence
  derived and/or modified CDS sequence (opt1) from neuraminidase__InfluenzaA__AFH00827
augaaccccaaccagaagaucaucaccaucggcagcgugucccugaccaucagcacgaccugcuucuucaugcagaucgccauccucaucaccaccgucacgcugcacuucaagcaguacgaguucaacuccccgcccaacaaccaggugaugcugugcgagcccaccaucaucgagcgcaacaugaccgagaucguguaccucaccaacacgaccaucgagaaggagaucugccccaagccggccgaguaccggaacuggagcaagccccagugcgacaucaccggguucgcgcccuucuccaaggacaacagcauccgccuguccgccggcggggacaucugggucacccgggagcccuacgugagcugcgacccggacaagugcuaccaguucgcccugggccaggggacgacccucaacaacgugcacuccaacaacaccguccgcgaccggacccccuaccgcacgcugcugaugaacgagcucggcgugcccuuccaccugggcaccaagcaggucugcaucgccuggagcuccagcuccugccacgacgggaaggccuggcugcacgugugcaucaccggcgacgacaagaacgcgaccgccagcuucaucuacaacgggcggcucguggacuccguggucagcugguccaaggagauccugcgcacgcaggagagcgagugcgugugcaucaacgggaccugcaccguggucaugaccgacggguccgccagcggcaaggccgacacgaagauccuguucaucgaggagggcaagaucgugcacaccagcacccucuccgggagcgcgcagcacguggaggagugcuccugcuacccccgguacccgggcguccgcugcgugugccgggacaacuggaaggggagcaaccgccccaucguggacaucaacaucaaggaccacuccaucgucagcuccuacgugugcagcggccuggugggcgacaccccgcggaagaacgacuccagcuccagcucccacugccuggaccccaacaacgaggagggcggccacggggucaagggcugggccuucgacgacgggaacgacguguggaugggccgcacgaucaacgagaccagccggcucggcuacgagaccuucaaggucaucgaggggugguccaaccccaagagcaagcugcagaucaaccgccaggugaucguggaccggggcgaccgcuccggguacagcggcaucuucuccgucgagggcaagagcugcaucaaccggugcuucuacguggagcugauccgcgggcggaaggaggagaccgaggugcucuggacgagcaacuccaucgucguguucugcggcaccagcgggaccuacggcaccggguccuggcccgacggcgccgaccugaaccugaugccccucuga

SEQ ID NO: 86165 - RNA, 1410 nt, Artificial Sequence; identical to SEQ ID NO: 79953
  derived and/or modified CDS sequence (opt1) from neuraminidase__InfluenzaA__AFH01410

SEQ ID NO: 86166 - RNA, 1410 nt, Artificial Sequence
  derived and/or modified CDS sequence (opt1) from neuraminidase__InfluenzaA__AFH34942
augaaccccaaccagaagaucaucaccaucggcagcgugucccugaccaucagcacgaucugcuucuucaugcagaucgccauccucaucaccaccgucacccugcacuucaagcaguacgaguucaacuccccgcccaacaaccaggugaugcugugcgagcccaagaucaucgagcgcaacaucacggagaucguguaccucaccaacaccaccaucgagaaggagaucugccccaagccggccgaguaccggaacuggagcaagccccagugcgacaucacgggguucgcgcccuucuccaaggacaacagcauccgccuguccgccggcggggacaucugggucacccgggagcccuacgugagcugcgacccggacaagugcuaccaguucgcccugggccaggggaccacccucaacaacgugcacuccaacaacacgguccgcaaccggacccccuaccgcacccugcugaugaacgagcucggcgugcccuuccaccugggcaccaagcaggucugcaucgccuggagcuccagcuccugccacgacgggaaggccuggcugcacgugugcaucacgggcgacgacaagaacgcgaccgccagcuucaucuacaacgggaagcucguggacuccguggucagcugguccaaggagauccugcggacccaggagagcgagugcgugugcaucaacgggaccugcacgguggucaugaccgacggguccgccagcggcaaggccgacaccaagauccuguucaucgaggagggcaagaucgugcacaccagcacgcucuccgggagcgcgcagcacguggaggagugcuccugcuacccccgcuacccgggcguccggugcgugugccgcgacaacuggaaggggagcaaccggcccaucguggacaucaacaucaaggaccacuccaucgucagcuccuacgugugcagcggccuggugggcgacaccccgcgcaagaacgacuccagcuccagcucccacugccuggaccccaacaacgaggagggcggccacggggucaagggcugggccuucgacgacgggaacgacguguggaugggccggaccaucaacgagaccagccgccucggcuacgagacguucaaggucaucgaggggugguccaaccccaagagcaagcugcagaucaaccgccaggugaucguggaccggggcgaccgguccggguacagcggcaucuucuccgucgagggcaagagcugcaucaaccgcugcuucuacguggagcugauccgggggcgcaaggaggagaccgaggugcucuggaccagcaacuccaucgucguguucugcggcaccagcgggacguacggcaccggguccuggcccgacggcgccgaccugaaccugaugcccaucuga

SEQ ID NO: 86167 - RNA, 1410 nt, Artificial Sequence
  derived and/or modified CDS sequence (opt1) from neuraminidase__InfluenzaA__AFH34956
augaaccccaaccagaagaucaucaccaucggcagcgugucccugaccaucagcacgaucugcuucuucaugcagaucgccauccucaucaccaccgucacccugcacuucaagcaguacgaguucaacuccccgcccaacaaccaggugaugcugugcgagcccacgaucaucgagcgcaacaucaccgagaucguguaccucaccaacaccacgaucgagaaggagaucugccccaagccggccgaguaccggaacuggagcaagccccagugcgacaucaccggguucgcgcccuucuccaaggacaacagcauccgccuguccgccggcggggacaucugggucacccgggagcccuacgugagcugcgacccggacaagugcuaccaguucgcccugggccaggggaccacgcucaacaacgugcacuccaacaacaccguccgcggccggacccccuaccgcacccugcugaugaacgagcucggcgugcccuuccaccuggggacgaagcaggucugcaucgccuggagcuccagcuccugccacgacggcaaggccuggcugcacgugugcaucaccggggacgacaagaacgcgaccgccagcuucaucuacaacggccggcucguggacuccguggucagcugguccaaggagauccugcgcacccaggagagcgagugcgugugcaucaacgggacgugcaccguggucaugaccgacggcuccgccagcggcaaggccgacaccaagauccuguucaucgaggaggggaagaucgugcacacgagcacccucuccggcagcgcgcagcacguggaggagugcuccugcuacccccgguacccggggguccgcugcgugugccgggacaacuggaagggcagcaaccgccccaucguggacaucaacaucaaggaccacuccaucgucagcuccuacgugugcagcggccuggugggggacaccccgcggaagaacgacuccagcuccagcucccacugccuggaccccaacaacgaggagggcgggcacggcgucaaggggugggccuucgacgacggcaacgacguguggaugggccgcaccaucaacgagacgagccggcucggguacgagaccuucaaggucaucgagggcugguccaaccccaagagcaagcugcagaucaaccgccaggugaucguggaccgcggggaccgguccggcuacagcgggaucuucuccgucgagggcaagagcugcaucaaccggugcuucuacguggagcugauccgcggccggaaggaggagaacgaggugcucuggaccagcaacuccaucgucguguucugcgggaccagcggcacguacgggaccggcuccuggcccgacggggccgaccugaaccugaugcccaucuga

SEQ ID NO: 86168 - RNA, 1410 nt, Artificial Sequence
  derived and/or modified CDS sequence (opt1) from neuraminidase__InfluenzaA__AFH34963
augaaccccaaccagaagaucaucaccaucggcagcgugucccugaccaucagcacgaucugcuucuucaugcagaucgccauccucaucaccaccgucacccugcacuucaagcaguacgaguucaacuccccgcccaacaaccaggugaugcugugcgagcccacgaucaucgagcgcaacaucaccgagaucguguaccucaccaacaccacgaucgagaaggagaucugccccaagccggccgaguaccggaacuggagcaagccccagugcgacaucaccggguucgcgcccuucuccaaggacaacagcauccgccuguccgccggcggggacaucugggucacccgggagcccuacgugagcugcgacccggacaagugcuaccaguucgcccugggccaggggaccacgcucaacaacgugcacuccaacaacaucguccgcgaccggacccccuaccgcacccugcugaugaacgagcucggcgugcccuuccaccugggcaccaagcaggucugcaucgccuggagcuccagcuccugccacgacgggaaggccuggcugcacgugugcaucacgggcgacgacaagaacgcgaccgccagcuucaucuacaacgggcggcucguggacuccguggucagcugguccaaggagauccugcgcacccaggagagcgagugcgugugcaucaacgggaccugcacgguggucaugaccgacggguccgccagcggcaaggccgacaccaagauccuguucaucgaggagggcaagaucgugcacaccagcacgcucuccgggagcgcgcagcacguggaggagugcuccugcuacccccgguacccgggcguccgcugcgugugccgggacaacuggaaggggagcaaccgccccaucguggacaucaacaucaaggaccacuccaucgucagcuccuacgugugcagcggccuggugggcgacaccccgcggaagaacgacuccagcuccagcucccacugccuggaccccaacaacgaggagggcggccacggggucaagggcugggccuucgacgacgggaacgacguguggaugggccgcaccaucaacgagaccagccggcucggcuacgagacguucaaggucaucgaggggugguccaaccccaagagcaagcugcagaucaaccgccaggugaucguggaccggggcgaccgcuccggguacagcggcaucuucuccgucgagggcaagagcugcaucaaccggugcuucuacguggagcugauccgcgggcggaaggaggagaacgaggugcucuggaccagcaacuccaucgucguguucugcggcaccagcgggaccuacggcacgggguccuggcccgacggcgccgaccugaaccugaugcccaucuga

SEQ ID NO: 86169 - RNA, 1410 nt, Artificial Sequence
  derived and/or modified CDS sequence (opt1) from neuraminidase__InfluenzaA__AFH34970
augaaccccaaccagaagaucaucaccaucggcagcgugucccugaccaucagcacgaucugcuucuucaugcagaucgccauccucaucaccaccgucacccugcacuucaagcaguacgaguucaacuccccgcccaacaaccaggugaugcuguacgagcccacgaucaucgagcgcaacaucaccgagaucguguaccucaccaacaccacgaucgagaaggagaucugccccaagccggccgaguaccggaacuggagcaagccccagugcgacaucaccggguucgcgcccuucuccaaggacaacagcauccgccuguccgccggcggggacaucugggucacccgggagcccuacgugagcugcgacccggacaagugcuaccaguucgcccugggccaggggaccacgcucaacaacgugcacuccaacaacaccguccgcgaccggacccccuaccgcacccugcugaugaacgagcucggcgugcccuuccaccugggcacgaagcaggucugcaucgccuggagcuccagcuccugccacgacgggaaggccuggcugcacgugugcaucaccggcgacgacaagaacgcgaccgccagcuucaucuacaacgggcggcucguggacuccguggucagcugguccaaggagauccugcgcacccaggagagcgagugcgugugcaucaacggcacgugcaccguggucaugaccgacggguccgccagcggcaaggccgacaccaagauccuguucaucgaggagggcaagaucgugcacacgagcacccucuccgggagcgcgcagcacguggaggagugcuccugcuacccccgguacccgggcguccgcugcgugugccgggacaacuggaaggggagcaaccgccccaucguggacaucaacaucaaggaccacuccaucgucagcuccuacgugugcagcggccuggugggcgacaccccgcggaagaacgacuccagcuccagcucccacugccuggaccccaacaacgaggagggcgggcacggggucaagggcugggccuucgacgacgggaacgacguguggaugggccgcaccaucaacgagacgagccggcucggcuacgagaccuucaaggucaucgaggggugguccaaccccaagagcaagcugcagaucaaccgccaggugaucguggaccggggcgaccgcuccggguacagcggcaucuucuccgucgagggcaagagcugcaucaaccggugcuucuacguggagcugauccgcgggcggaaggaggagaacgaggugcucuggaccagcaacuccaucgucguguucugcggcaccagcgggacguacggcaccggguccuggcccgacggcgccgaccugaaccugaugcccaucuga

SEQ ID NO: 86170 - RNA, 1410 nt, Artificial Sequence
  derived and/or modified CDS sequence (opt1) from neuraminidase__InfluenzaA__AFH34977
augaaccccaaccagaagaucaucaccaucggcagcgugucccugaccaucagcacgaucugcuucuucaugcagaucgccauccucaucaccaccgucacccugcacuucaagcaguacgaguucaacuccccgcccaacaaccaggugaugcugugcgagcccacgaucaucgagcgcaacaucaccgagaucguguaccucaccaacaccacgaucgagaaggagaucugccccaagccggccgaguaccggaacuggagcaagccccagugcgggaucaccggcuucgcgcccuucuccaaggacaacagcauccgccuguccgccgggggcgacaucugggucacccgggagcccuacgugagcugcgacccggacaagugcuaccaguucgcccuggggcagggcaccacgcucaacaacgugcacuccaacaacaccguccgcgaccggacccccuaccgcacccugcugaugaacgagcucggcgugcccuuccaccuggggacgaagcaggucugcaucgccuggagcuccagcuccugccacgacggcaaggccuggcugcacgugugcaucaccggggacgacaagaacgcgaccgccagcuucaucuacaacggccggcucguggacuccguggucagcugguccaaggagauccugcgcacccaggagagcgagugcgugugcaucaacgggacgugcaccguggucaugaccgacggcuccgccagcggcaaggccgacaccaagauccuguucaucgaggaggggaagaucgugcacacgagcacccucuccggcagcgcgcagcacguggaggagugcuccugcuacccccgguacccggggguccgcugcgugugccgggacaacuggaagggcagcaaccgccccaucguggacaucaacaucaaggaccacuccaucgucagcuccuacgugugcagcggccuggugggggacaccccgcggaagaacgacuccagcuccagcucccacugccuggaccccaacaacgaggagggcgggcacggcgucaaggggugggccuucgacgacggcaacgacguguggaugggccgcaccaucaacgagacgagccggcucggguacgagaccuucaaggucaucgagggcugguccaaccccaagagcaagcugcagaucaaccgccaggugaucguggaccgcggggaccgguccggcuacagcgggaucuucuccgucgagggcaagagcugcaucaaccggugcuucuacguggagcugauccgcggccggaaggaggagaccgaggugcucuggaccagcaacuccaucgucguguucugcgggacgagcggcaccuacgggaccggcuccuggcccgacggggccgaccugaaccugaugcccaucuga

SEQ ID NO: 86171 - RNA, 1410 nt, Artificial Sequence
  derived and/or modified CDS sequence (opt1) from neuraminidase__InfluenzaA__AFH74468
augaaccccaaccagaagaucaucaccaucggcagcgugucccugaccaucagcacgaucugcuucuucaugcagaccgccauccucaucaccaccgucacgcugcacuucaagcagugcgaguucaacuccccgcccaacaaccaggugaugcugugcgagcccaccaucaucgagcgcaacaucaccgagaucguguaccucaccaacacgaccaucgagaaggagaucugccccaagcuggccgaguaccggaacuggagcaagccgcagugcgacaucaccggguucgcgcccuucuccaaggacaacagcauccgccuguccgccggcggggacaucugggucacccgggagcccuacgugagcugcgaccccgacaagugcuaccaguucgcccucggccaggggacgacccugaacaacgugcacuccaacaacaccguccgcgaccggaccccguaccgcacgcugcucaugaacgagcugggcgugcccuuccaccugggcaccaagcaggucugcaucgccuggagcuccagcuccugccacgacgggaaggccuggcuccacgugugcaucaccggcgacgacaagaacgcgaccgccagcuucaucuacaacgggcggcugguggacuccguggucagcugguccaaggagauccugcgcacgcaggagagcgagugcgugugcaucaacgggaccugcaccguggucaugaccgacggcuccgccagcggcaaggccgacacgaagauccucuucaucgaggagggccggaucgugcacaccagcacccuguccgggagcgcgcagcacguggaggagugcuccugcuacccccgcuaccccggcguccggugcgugugccgcgacaacuggaaggggagcaaccggccgaucguggacaucaacaucaaggaccacuccaucgucagcuccuacgugugcagcggccuggugggcgacacgccccgcaagaacgacuccagcuccagcucccacugccucgaccccaacaacgaggagggggacaacggcgucaaggggugggccuucgacgacggcaacgacguguggauggggcggaccaucagcgagaagucccgccugggcuacgagaccuucaaggucaucgagggcuggagcaaccccaaguccaagcugcagaucaaccgccaggugaucguggaccgggggaaccggagcggcuacuccgggaucuucagcgucgagggcaagagcugcaucaaccgcugcuucuacguggagcucauccgggggcgcaaggaggagaccgaggugcuguggaccuccaacagcaucgucguguucugcggcacguccggcaccuacgggaccggcagcuggccggacggggccgacaucaaccugaugcccaucuga

SEQ ID NO: 86172 - RNA, 1410 nt, Artificial Sequence; identical to SEQ ID NO: 82675
  derived and/or modified CDS sequence (opt1) from neuraminidase__InfluenzaA__AFH74469

SEQ ID NO: 86173 - RNA, 1410 nt, Artificial Sequence; identical to SEQ ID NO: 80623
  derived and/or modified CDS sequence (opt1) from neuraminidase__InfluenzaA__AFH74480

SEQ ID NO: 86174 - RNA, 1410 nt, Artificial Sequence; identical to SEQ ID NO: 80623
  derived and/or modified CDS sequence (opt1) from neuraminidase__InfluenzaA__AFH74491

SEQ ID NO: 86175 - RNA, 1410 nt, Artificial Sequence; identical to SEQ ID NO: 85666
  derived and/or modified CDS sequence (opt1) from neuraminidase__InfluenzaA__AFH74502

SEQ ID NO: 86176 - RNA, 1410 nt, Artificial Sequence
  derived and/or modified CDS sequence (opt1) from neuraminidase__InfluenzaA__AFH74513
augaaccccaaccagaagaucaucaccaucggcagcgugucccugaccaucagcacgaucugcuucuucaugcagaucgccauccucaucaccaccgucacccugcacuucaagcaguacgaguucaacuccccgcccaacaaccaggugaugcugugcgagcccacgaucaucgagcgcaacaucaccgagaucguguaccucaccaacaccacgaucgagaaggagaccugccccaagcuggccgaguaccggaacuggagcaagccgcagugcgacaucaccggguucgcgcccuucuccaaggacaacagcauccgccuguccgccggcggggacaucugggucacccgggagcccuacgugagcugcgaccccgacaagugcuaccaguucgcccucggccaggggacgacccugaacaacgugcacuccaacaacaccguccgcgaccggaccccguaccgcacgcugcucaugaacgagcugggcgugcccuuccaccugggcaccaagcaggucugcaucgccuggagcuccagcuccugccacgacgggaaggccuggcuccacgugugcaucaccggcgacgacaagaacgcgaccgccagcuucaucuacaacgggcggcugguggacuccguggucagcugguccaaggagauccugcgcacgcaggagagcgagugcgugugcaucaacgggaccugcaccguggucaugaccgacggguccgccagcggcaaggccgacacgaagauccucuucaucgaggagggcaagaucgugcacaccagcacccuguccgggagcgcgcagcacguggaggagugcuccugcuacccccgguaccccggcguccgcugcgugugccgggacaacuggaaggggagcaaccgcccgaucguggacaucaacaucaaggaccacuccaucgucagcuccuacgugugcagcggccuggugggcgacacgccccggaagaacgacuccagcuccagcucccacugccucgaccccaacaacgaggagggcggccacggggucaagggcugggccuucgacgacgggaacgacguguggaugggccgcaccaucagcgagaagucccggcugggcuacgagaccuucaaggucaucgagggguggagcaaccccaaguccaagcugcagaucaaccgccaggugaucguggaccggggcaaccgcagcggguacuccggcaucuucagcgucgagggcaagagcugcaucaaccggugcuucuacguggagcucauccgcgggcggaaggaggagaccgaggugcuguggaccuccaacagcaucgucguguucugcggcacguccgggaccuacggcaccgggagcuggccggacggcgccgacaucaaccugaugcccguguga

SEQ ID NO: 86177 - RNA, 1410 nt, Artificial Sequence
  derived and/or modified CDS sequence (opt1) from neuraminidase__InfluenzaA__AFH74524
augaaccccaaccagaagaucaucaccaucggcagcgugucccugaccaucagcacgaucugcuucuucaugcagaucgccauccucaucaccaccgucacccugcacuucaagcaguacgaguucaacuccccgcccaacaaccaggugaugcugugcgagcccacgaucaucgagcgcaacaucaccgagaucguguaccucaccaacaccacgaucgagaaggagaucugccccaagcuggccgaguaccggaacuggagcaagccgcagugcgacaucaccggguucgcgcccuucuccaaggacaacagcauccgccuguccgccggcggggacaucugggucacccgggagcccuacgugagcugcgaccccgacaagugcuaccaguucgcccucggccaggggaccacgaucaacaacgugcacuccaacaacaccguccgcgaccggaccccguaccgcacccugcugaugaacgagcucggcgugcccuuccaccugggcacgaagcaggucugcaucgccuggagcuccagcuccugccacgacgggaaggccuggcugcacgugugcaucaccggcgacgacaagaacgcgaccgccagcuucaucuacaacgggcggcucguggacuccguggucagcugguccaaggagauccugcgcacccaggagagcgagugcgugugcaucaacggcacgugcaccguggucaugaccgacggguccgccagcggcaaggccgacaccaagauccuguucaucgaggagggcaagaucgugcacacgagcacccucuccgggagcgcgcagcacguggaggagugcuccugcuacccccgguaccccggcguccgcugcgugugccgggacaacuggaaggggagcaaccgcccgaucguggacaucaacaugaaggaccacuccaucgucagcuccuacgugugcagcggccuggugggcgacacgccccggaagaacgacuccagcuccagcucccacugccuggaccccaacaacgaggagggcgggcacggggucaagggcugggccuucgacgacgggaacgacguguggaugggccgcaccaucagcgagaagucccggcucggcuacgagaccuucaaggucaucgagggguggagcaaccccaaguccaagcugcagaucaaccgccaggugaucguggaccggggcaaccgcagcggguacuccggcaucuucagcgucgagggcaagagcugcaucaaccggugcuucuacguggagcugauccgcgggcggaaggaggagaccgaggugcucuggaccuccaacagcgucgugguguucugcggcaccuccgggacguacggcaccgggagcuggccggacggcgccgacaucaaccugaugcccaucuga

SEQ ID NO: 86178 - RNA, 1410 nt, Artificial Sequence; identical to SEQ ID NO: 80623
  derived and/or modified CDS sequence (opt1) from neuraminidase__InfluenzaA__AFH74535

SEQ ID NO: 86179 - RNA, 1410 nt, Artificial Sequence; identical to SEQ ID NO: 85659
  derived and/or modified CDS sequence (opt1) from neuraminidase__InfluenzaA__AFH74546

SEQ ID NO: 86180 - RNA, 1410 nt, Artificial Sequence; identical to SEQ ID NO: 85659
  derived and/or modified CDS sequence (opt1) from neuraminidase__InfluenzaA__AFH74557

SEQ ID NO: 86181 - RNA, 1410 nt, Artificial Sequence; identical to SEQ ID NO: 85659
  derived and/or modified CDS sequence (opt1) from neuraminidase__InfluenzaA__AFH74568

SEQ ID NO: 86182 - RNA, 1410 nt, Artificial Sequence; identical to SEQ ID NO: 85662
  derived and/or modified CDS sequence (opt1) from neuraminidase__InfluenzaA__AFH74579

SEQ ID NO: 86183 - RNA, 1410 nt, Artificial Sequence
  derived and/or modified CDS sequence (opt1) from neuraminidase__InfluenzaA__AFH74590
augaaccccaaccagaagaucaucaccaucggcagcgugucccugaccaucagcacgaucugcuucuucaugcagaucgccauccucaucaccaccgucacccugcacuucaagcaguacgaguucaacuccccgcccaacaaccaggugaugcugugcgagcccacgaucaucgagcgcaacaucaccgagaucguguaccucaccaacaccacgaucgagaaggagaucugccccaagcuggccgaguaccggaacuggagcaagccgcagugcgacaucaccggguucgcgcccuucuccaaggacaacagcauccgccuguccgccggcggggacaucugggucacccgggagcccuacgugagcugcgaccccgacaagugcuaccaguucgcccucggccaggggaccacgcugaacaacgugcacuccaacaacaccguccgcgaccggaccccguaccgcacccugcucaugaacgagcugggcgugcccuuccaccugggcacgaagcaggucugcaucgccuggagcuccagcuccugccacgacgggaaggccuggcuccacgugugcaucaccggcgacgacaagaacgcgaccgccagcuucaucuacaacgggcggcugguggacuccguggucagcugguccaaggagauccugcgcacccaggagagcgagugcgugugcaucaacggcacgugcaccguggucaugaccgacggguccgccagcggcaaggccgacaccaagauccucuucaucgaggagggcaagaucgugcacacgagcacccuguccgggagcgcgcagcacguggaggagugcuccugcuacccccgguaccccggcguccgcugcgugugccgggacaacuggaaggggagcaaccgcccgaucguggacaucaacaucaaggaccacuccaucgucagcuccuacgugugcagcggccuggugggcgacacgccccggaagaacgacuccagcuccagcucccacugccucgaccccaacaacgaggagggcgggcacggggucaagggcugggccuucgacgacgggaacgacguguggaugggccgcaccaucagcgagaagucccggcugggcuacgagaccuucaaggucaucgagggguggagcaaccccaaguccaagcugcagaucaaccgccaggugaucguggaccggggcaaccgcagcggguacuccggcaucuucagcgucgagggcaagagcugcaucaaccggugcuucuacguggagcucauccgcgggcggaaggaggagaccgaggugcuguggaccuccaacagcaucgucguguucugcggcaccuccgggacguacggcaccgggagcuggccggacggcgccgacaucaaccugauguccguguga

SEQ ID NO: 86184 - RNA, 1410 nt, Artificial Sequence; identical to SEQ ID NO: 85659
  derived and/or modified CDS sequence (opt1) from neuraminidase__InfluenzaA__AFH74601

SEQ ID NO: 86185 - RNA, 1410 nt, Artificial Sequence
  derived and/or modified CDS sequence (opt1) from neuraminidase__InfluenzaA__AFH74612
augaaccccaaccagaagaucaucaccaucggcagcgugucccugaccaucagcacgaucugcuucuucaugcagaccgccauccucaucaccaccgucacgcugcacuucaagcagugcgaguucaacuccccgcccaacaaccaggugaugcugugcgagcccaccaucaucgagcgcaacaucaccgagaucguguaccucaccaacacgaccaucgagaaggagaucugccccaagcuggccgaguaccggaacuggagcaagccgcagugcgacaucaccggguucgcgcccuucuccaaggacaacagcauccgccuguccgccggcggggacaucugggucacccgggagcccuacgugagcugcgaccccgacaagugcuaccaguucgcccucggccaggggacgacccuguccaacgugcacagcaacaacaccguccgcgaccggaccccguaccgcacgcugcucaugaacgagcugggcgugcccuuccaccugggcaccaagcaggucugcaucgccugguccagcuccagcugccacgacgggaaggccuggcuccacgugugcaucaccggcgacgacaagaacgcgaccgccuccuucaucuacaacgggcggcugguggacagcguggucuccuggagcaaggagauccugcgcacgcaggaguccgagugcgugugcaucaacgggaccugcaccguggucaugaccgacgggagcgccagcggcaaggccgacacgaagauccucuucaucgaggagggcaagaucgugcacaccuccacccugagcggguccgcgcagcacguggaggagugcagcugcuacccccgguaccccggcguccgcugcgugugccgggacaacuggaagggguccaaccgcccgaucguggacaucaacaucaaggaccacagcaucgucuccagcuacgugugcuccggccuggugggcgacacgccccggaagaacgacagcuccagcuccagccacugccucgaccccaacaacgaggagggcggccacggggucaagggcugggccuucgacgacgggaacgacguguggaugggccgcaccaucuccgagaagucccggcugggcuacgagaccuucaaggucaucgagggguggagcaaccccaagagcaagcugcagaucaaccgccaggugaucguggaccggggcaaccgcuccggguacagcggcaucuucagcgucgaggggaaguccugcaucaaccggugcuucuacguggagcucauccgcggccggaaggaggagaccgaggugcuguggaccagcaacuccaucgucguguucugcggcacgagcgggaccuacggcaccggguccuggccggacggcgccgacaucaaccugaugcccaucuga

SEQ ID NO: 86186 - RNA, 1410 nt, Artificial Sequence; identical to SEQ ID NO: 85659
  derived and/or modified CDS sequence (opt1) from neuraminidase__InfluenzaA__AFH74623

SEQ ID NO: 86187 - RNA, 1410 nt, Artificial Sequence; identical to SEQ ID NO: 85659
  derived and/or modified CDS sequence (opt1) from neuraminidase__InfluenzaA__AFH74634

SEQ ID NO: 86188 - RNA, 1410 nt, Artificial Sequence; identical to SEQ ID NO: 85666
  derived and/or modified CDS sequence (opt1) from neuraminidase__InfluenzaA__AFH74645

SEQ ID NO: 86189 - RNA, 1410 nt, Artificial Sequence; identical to SEQ ID NO: 85666
  derived and/or modified CDS sequence (opt1) from neuraminidase__InfluenzaA__AFH74656

SEQ ID NO: 86190 - RNA, 1410 nt, Artificial Sequence; identical to SEQ ID NO: 85666
  derived and/or modified CDS sequence (opt1) from neuraminidase__InfluenzaA__AFH74667

SEQ ID NO: 86191 - RNA, 1410 nt, Artificial Sequence; identical to SEQ ID NO: 85666
  derived and/or modified CDS sequence (opt1) from neuraminidase__InfluenzaA__AFH74678

SEQ ID NO: 86192 - RNA, 1410 nt, Artificial Sequence; identical to SEQ ID NO: 80623
  derived and/or modified CDS sequence (opt1) from neuraminidase__InfluenzaA__AFH74689

SEQ ID NO: 86193 - RNA, 1410 nt, Artificial Sequence; identical to SEQ ID NO: 80623
  derived and/or modified CDS sequence (opt1) from neuraminidase__InfluenzaA__AFH74700

SEQ ID NO: 86194 - RNA, 1410 nt, Artificial Sequence
  derived and/or modified CDS sequence (opt1) from neuraminidase__InfluenzaA__AFH74711
augaaccccaaccagaagaucaucaccaucggcagcgugucccugaccaucagcacgaucugcuucuucaugcagaucgccauccucaucaccaccgucacccugcacuucaagcaguacgaguucaacuccccgcccaacaaccaggugaugcugugcgagcccacgaucaucgagcgcaacaucaccgagaucguguaccucaccaacaccacgaucgagaaggagaucugccccaagcuggccgaguaccggaacuggagcaagccgcagugcgacaucaccggguucgcgcccuucuccaaggacaacagcauccgccuguccgccggcggggacaucugggucacccgggagcccuacgugagcugcgaccccgacaagugcuaccaguucgcccucggccaggggaccacgcugaacaacgugcacuccaacaacaccguccgcgaccggaccccguaccgcacccugcucaugaacgagcugggcgugcccuuccaccugggcacgaagcaggucugcaucgccuggagcuccagcuccugccacgacgggaaggccuggcuccacgugugcaucaccggcgacgacaagaacgcgaccgccagcuucaucuacaacgggcggcugguggacuccguggucagcugguccaaggagauccugcgcacccaggagagcgagugcgugugcaucaacggcacgugcaccguggucaugaccgacggguccgccagcggcaaggccgacaccaagauccucuucaucgaggagggcaagaucgugcacacgagcacccuguccgggagcgcgcagcacguggaggagugcuccugcuacccccgguaccccugcguccgcugcgugugccgggacaacuggaagggcagcaaccgcccgaucguggacaucaacaucaaggaccacuccaucgucagcuccuacgugugcagcgggcuggugggcgacacgccccggaagaacgacuccagcuccagcucccacugccucgaccccaacaacgaggagggcgggcacggcgucaaggggugggccuucgacgacggcaacgacguguggauggggcgcaccaucagcgagaagucccggcugggcuacgagaccuucaaggucaucgagggcuggagcaaccccaaguccaagcugcagaucaaccgccaggugaucguggaccgggggaaccgcagcggcuacuccgggaucuucagcgucgagggcaagagcugcaucaaccggugcuucuacguggagcucauccgcgggcggaaggaggagaccgaggugcuguggaccuccaacagcaucgucguguucugcggcaccuccggcacguacgggaccggcagcuggccggacggggccgacaucaaccugaugcccguguga

SEQ ID NO: 86195 - RNA, 1410 nt, Artificial Sequence; identical to SEQ ID NO: 85659
  derived and/or modified CDS sequence (opt1) from neuraminidase__InfluenzaA__AFH74722

SEQ ID NO: 86196 - RNA, 1410 nt, Artificial Sequence; identical to SEQ ID NO: 85659
  derived and/or modified CDS sequence (opt1) from neuraminidase__InfluenzaA__AFH74733

SEQ ID NO: 86197 - RNA, 1410 nt, Artificial Sequence
  derived and/or modified CDS sequence (opt1) from neuraminidase__InfluenzaA__AFH74744
augaaccccaaccagaagaucaucaccaucggcagcgugucccugaccaucagcacgaucugcuucuucaugcagaucgccauccucaucaccaccgucacccugcacuucaagcaguacgaguucaacuccccgcccaacaaccaggugaugcugugcgagcccacgaucaucgagcgcaacaucaccgagaucguguaccucaccaacaccacgaucgagaaggagaucugccccaagcuggccgaguaccggaacuggagcaagccgcagugcgacaucaccggguucgcgcccuucuccaaggacaacagcauccgccuguccgccggcggggacaucugggucacccgggagcccuacgugagcugcgaccccgacaagugcuaccaguucgcccucggccaggggaccacgcugaacaacgugcacuccaacaacaccguccgcgaccggaccccguaccgcacccugcucaugaacgagcugggcgugcccuuccaccugggcacgaagcaggucugcaucgccuggagcuccagcuccugccacgacgggaaggccuggcuccacgugugcaucaccggcgacgacaagaacgcgaccgccagcuucaucuacaacgggcggcugguggacuccguggucagcugguccaaggagauccugcgcacccaggagagcgagugcgugugcaucaacggcacgugcaccguggucaugaccgacggguccgccagcggcaaggccgacaccaagauccucuucaucgaggagggcaagaucgugcacacgagcacccuguccgggagcgcgcagcacguggaggagugcuccugcuacccccgguaccccggcguccgcugcgugugccgggacaacuggaaggggagcaaccgcccgaucguggacaucaacaucaaggaccacuccaucgucagcaacuacgugugcuccggccuggugggcgacacgccccggaagaacgacagcuccagcuccagccacugccucgaccccaacaacgaggagggcgggcacggggucaagggcugggccuucgacgacgggaacgacguguggaugggccgcaccaucuccgagaagucccggcugggcuacgagaccuucaaggucaucgagggguggagcaaccccaagagcaagcugcagaucaaccgccaggugaucguggaccggggcaaccgcuccggguacagcggcaucuucuccgucgagggcaagagcugcaucaaccggugcuucuacguggagcucauccgcgggcggaaggaggagaccgaggugcuguggaccagcaacuccaucgucguguucugcggcaccagcgggacguacggcaccggguccuggccggacggcgccgacaucaaccugaugcccguguga

SEQ ID NO: 86198 - RNA, 1410 nt, Artificial Sequence; identical to SEQ ID NO: 85659
  derived and/or modified CDS sequence (opt1) from neuraminidase__InfluenzaA__AFH74755

SEQ ID NO: 86199 - RNA, 1410 nt, Artificial Sequence; identical to SEQ ID NO: 85659
  derived and/or modified CDS sequence (opt1) from neuraminidase__InfluenzaA__AFH74766

SEQ ID NO: 86200 - RNA, 1410 nt, Artificial Sequence; identical to SEQ ID NO: 85659
  derived and/or modified CDS sequence (opt1) from neuraminidase__InfluenzaA__AFH74777

SEQ ID NO: 86201 - RNA, 1410 nt, Artificial Sequence; identical to SEQ ID NO: 80623
  derived and/or modified CDS sequence (opt1) from neuraminidase__InfluenzaA__AFH74788

SEQ ID NO: 86202 - RNA, 1410 nt, Artificial Sequence
  derived and/or modified CDS sequence (opt1) from neuraminidase__InfluenzaA__AFH74799
augaaccccaaccagaagaucaucaccaucggcagcgugucccugaccaucagcacgaucugcuucuucaugcagaucgccauccucaucaccaccgucacccugcacuucaagcaguacgaguucaacuccccgcccaacaaccaggugaugcugugcgagcccacgaucaucgagcgcaacaucaccgagaucguguaccucaccaacaccacgaucgagaaggagaucugccccaagcuggccgaguaccggaacuggagcaagccgcagugcgacaucaccggguucgcgcccuucuccaaggacaacagcauccgccuguccgccggcggggacaucugggucacccgggagcccuacgugagcugcggccccgacaagugcuaccaguucgcccucgggcagggcaccacgcugaacaacgugcacuccaacaacaccguccgcgaccggaccccguaccgcacccugcucaugaacgagcugggcgugcccuuccaccuggggacgaagcaggucugcaucgccuggagcuccagcuccugccacgacggcaaggccuggcuccacgugugcaucaccggggacgacaagaacgcgaccgccagcuucaucuacaacggccggcugguggacuccguggucagcugguccaaggagauccugcgcacccaggagagcgagugcgugugcaucaacgggacgugcaccguggucaugaccgacggcuccgccagcggcaaggccgacaccaagauccucuucaucgaggaggggaagaucgugcacacgagcacccuguccggcagcgcgcagcacguggaggagugcuccugcuacccccgguaccccgggguccgcugcgugugccgggacaacuggaagggcagcaaccgcccgaucguggacaucaacaucaaggaccacuccaucgucagcuccuacgugugcagcggccuggugggggacacgccccggaagaacgacuccagcuccagcucccacugccucgaccccaacaacgaggagggcgggcacggcgucaaggggugggccuucgacgacggcaacgacguguggaugggccgcaccaucagcgagaagucccggcugggguacgagaccuucaaggucaucgagggcuggagcaaccccaaguccaagcugcagaucaaccgccaggugaucguggaccgggggaaccgcagcggcuacuccgggaucuucagcgucgagggcaagagcugcaucaaccggugcuucuacguggagcucauccgcggccggaaggaggagaccgaggugcuguggaccuccaacagcaucgucguguucugcgggaccuccggcacguacgggaccggcagcuggccggacggggccgacaucaaccugaugcccguguga

SEQ ID NO: 86203 - RNA, 1410 nt, Artificial Sequence; identical to SEQ ID NO: 85679
  derived and/or modified CDS sequence (opt1) from neuraminidase__InfluenzaA__AFH74810

SEQ ID NO: 86204 - RNA, 1410 nt, Artificial Sequence; identical to SEQ ID NO: 85679
  derived and/or modified CDS sequence (opt1) from neuraminidase__InfluenzaA__AFH74821

SEQ ID NO: 86205 - RNA, 1410 nt, Artificial Sequence; identical to SEQ ID NO: 85679
  derived and/or modified CDS sequence (opt1) from neuraminidase__InfluenzaA__AFH74832

SEQ ID NO: 86206 - RNA, 1410 nt, Artificial Sequence; identical to SEQ ID NO: 85679
  derived and/or modified CDS sequence (opt1) from neuraminidase__InfluenzaA__AFH74843

SEQ ID NO: 86207 - RNA, 1410 nt, Artificial Sequence; identical to SEQ ID NO: 85659
  derived and/or modified CDS sequence (opt1) from neuraminidase__InfluenzaA__AFH74854

SEQ ID NO: 86208 - RNA, 1410 nt, Artificial Sequence; identical to SEQ ID NO: 85659
  derived and/or modified CDS sequence (opt1) from neuraminidase__InfluenzaA__AFH74865

SEQ ID NO: 86209 - RNA, 1410 nt, Artificial Sequence; identical to SEQ ID NO: 85659
  derived and/or modified CDS sequence (opt1) from neuraminidase__InfluenzaA__AFH74876

SEQ ID NO: 86210 - RNA, 1410 nt, Artificial Sequence; identical to SEQ ID NO: 85659
  derived and/or modified CDS sequence (opt1) from neuraminidase__InfluenzaA__AFH74887

SEQ ID NO: 86211 - RNA, 1410 nt, Artificial Sequence; identical to SEQ ID NO: 85659
  derived and/or modified CDS sequence (opt1) from neuraminidase__InfluenzaA__AFH74898

SEQ ID NO: 86212 - RNA, 1410 nt, Artificial Sequence; identical to SEQ ID NO: 85659
  derived and/or modified CDS sequence (opt1) from neuraminidase__InfluenzaA__AFH74909

SEQ ID NO: 86213 - RNA, 1410 nt, Artificial Sequence
  derived and/or modified CDS sequence (opt1) from neuraminidase__InfluenzaA__AFH74920
augaaccccaaccagaagaucaucaccaucggcagcgugucccugaccaucagcacgaucugcuucuucaugcagaccgccauccucaucaccaccgucacgcugcacuucaagcagugcgaguucaacuccccgcccaacaaccaggugaugcugugcgagcccaccaucaucgagcgcaacaucaccgagaucguguaccucaccaacacgaccaucgagaaggagaucugccccaagcuggccgaguaccggaacuggagcaagccgcagugcgacaucaccggguucgcgcccuucuccaaggacaacagcauccgccuguccgccggcggggacaucugggucacccgggagcccuacgugagcugcgaccccgacaagugcuaccaguucgcccucggccaggggacgacccugaacaacgugcacuccaacaacaccguccgcgaccggaccccguaccgcacgcugcucaugaacgagcugggcgugcccuuccaccugggcaccaagcaggucugcaucgccuggagcuccagcuccugccacgacgggaaggccuggcuccacgugugcaucaccggcgacgacaagaacgcgaccgccagcuucaucuacaacgggcggcugguggacuccguggucagcugguccaaggagauccugcgcacgcaggagagcgagugcgugugcaucaacgggaccugcaccguggucaugaccgacggcuccgccagcggcaaggccgacacgaagauccucuucaucgaggagggcaagaucgugcacaccagcacccuguccgggagcgcgcagcacguggaggagugcuccugcuacccccgguaccccggcguccgcugcgugugccgggacaacuggaaggggagcaaccgcccgaucguggacaucaacaucaaggaccacuccaucgucagcuccuacgugugcagcggccuggugggcgacacgccccggaagaacgacuccagcuccagcucccacugccucgaccccaacaacgaggagggggaccacggcgucaaggggugggccuucgacgacggcaacgacguguggauggggcgcaccaucagcgagaagucccggcugggcuacgagaccuucaaggucaucgagggcuggagcaaccccaaguccaagcugcagaucaaccgccaggugaucguggaccgggggaaccgcagcggcuacuccgggaucuucagcgucgagggcaagagcugcaucaaccggugcuucuacguggagcucauccgcgggcggaaggaggagaccgaggugcuguggaccuccaacagcaucgucguguucugcggcacguccggcaccuacgggaccggcagcuggccggacggggccgacaucaaccugaugcccaucuga

SEQ ID NO: 86214 - RNA, 1410 nt, Artificial Sequence; identical to SEQ ID NO: 80623
  derived and/or modified CDS sequence (opt1) from neuraminidase__InfluenzaA__AFH74931

SEQ ID NO: 86215 - RNA, 1410 nt, Artificial Sequence; identical to SEQ ID NO: 80623
  derived and/or modified CDS sequence (opt1) from neuraminidase__InfluenzaA__AFH74942

SEQ ID NO: 86216 - RNA, 1410 nt, Artificial Sequence; identical to SEQ ID NO: 85659
  derived and/or modified CDS sequence (opt1) from neuraminidase__InfluenzaA__AFH74953

SEQ ID NO: 86217 - RNA, 1410 nt, Artificial Sequence
  derived and/or modified CDS sequence (opt1) from neuraminidase__InfluenzaA__AFH74964
augaaccccaaccagaagaucaucaccaucggcagcgugucccugaccaucagcacgaucugcuucuucaugcagaucgccauccucaucaccaccgucacccugcacuucaagcaguacgaguucaacuccccgcccaacaaccaggugaugcugugcgagcccacgaucaucgagcgcaacaucaccgagaucguguaccucaccaacaccacgaucgagaaggagaucugccccaagcuggccgaguaccggaacuggagcaagccgcagugcgacaucaccggguucgcgcccuucuccaaggacaacagcauccgccuguccgccggcggggacaucugggucacccgggagcccuacgugagcugcgaccccgacaagugcuaccaguucgcccucggccaggggaccacgcugaacaacgugcacuccaacaacaccguccgcgaccggaccccguaccgcacccugcucaugaacgagcugggcgugcccuuccaccugggcacgaagcaggucugcaucgccuggagcuccagcuccugccacgacgggaaggccuggcuccacgugugcaucaccggcgacgacaagaacgcgaccgccagcuucaucuacaacgggcggcugguggacuccguggucagcugguccaaggagauccugcgcacccaggagagcgagugcgugugcaucaacggcacgugcaccguggucaugaccgacggguccgccagcggcaaggccgacaccaagauccucuucaucgaggagggcaagaucgugcacacgagcauccuguccgggagcgcgcagcacguggaggagugcuccugcuacccccgguaccccggcguccgcugcgugugccgggacaacuggaaggggagcaaccgcccgaucguggacaucaacaucaaggaccacuccaucgucagcuccuacgugugcagcggccuggugggcgacacgccccggaagaacgacuccagcuccagcucccacugccucgaccccaacaacgaggagggcgggcacggggucaagggcugggccuucgacgacgggaacgacguguggaugggccgcaccaucagcgagaagucccggcugggcuacgagaccuucaaggucaucgagggguggagcaaccccaaguccaagcugcagaucaaccgccaggugaucguggaccggggcaaccgcagcggguacuccggcaucuucagcgucgagggcaagagcugcaucaaccggugcuucuacguggagcucauccgcgggcggaaggaggagaccgaggugcuguggaccuccaacagcaucgucguguucugcggcaccuccgggaccuacggcacggggagcuggccggacggcgccgacaucaaccugaugcccguguga

SEQ ID NO: 86218 - RNA, 1410 nt, Artificial Sequence; identical to SEQ ID NO: 85659
  derived and/or modified CDS sequence (opt1) from neuraminidase__InfluenzaA__AFH75391

SEQ ID NO: 86219 - RNA, 1410 nt, Artificial Sequence; identical to SEQ ID NO: 80762
  derived and/or modified CDS sequence (opt1) from neuraminidase__InfluenzaA__AFH97143

SEQ ID NO: 86220 - RNA, 1410 nt, Artificial Sequence
  derived and/or modified CDS sequence (opt1) from neuraminidase__InfluenzaA__AFI56407
augaaccccaaccagaagaucaucaccaucggcagcgugugcaugaccaucgggauggccaaccugauccuccagaucggcaacaucaucuccaucuggaucagccacuccauccagcuggggaaccagaaccagaucgagacgugcaaccagagcgucaucaccuacgagaacaacaccugggugaaccagaccuacgugaacaucuccaacacgaacuucgccgcgggccagagcgucguguccgugaagcuggccgggaacagcucccucugcccggucagcggcugggccaucuacuccaaggacaacagcauccgcaucggcuccaaggggaacguguucgugauccgggagcccuucaucagcugcagcccccuggagugccgcaccuucuuccugacccagggcgcccuccugaacgacaagcacuccaacgggaccaucaaggaccggucccccuaccgcacgcugaugagcugcccgaucggcgagguccccucccccuacaacagccgguucgagagcguggccugguccgcgagcgccugccacgacgggaucaacuggcucaccaucggcaucuccggccccgacaacggggccguggccguccugaaguacaacggcaucaucaccgacaccaucaagagcuggcgcaacaacauccugcggacgcaggaguccgagugcgcgugcgugaacgggagcugcuucaccaucaugaccgacggcccguccgacggccaggccagcuacaagaucuuccgcaucgagaaggggaagaucgugaaguccgucgagaugaacgcccccaacuaccacuacgaggagugcagcugcuaccccgacuccagcgagaucacgugcgugugccgggacaacuggcacggcuccaaccgccccugggugagcuucaaccagaaccucgaguaccagaucggguacaucugcuccggcaucuucggggacaacccgcggcccaacgacaagaccggcagcugcggccccgucuccagcaacggggccaacggcgugaagggguucuccuucaaguacggcaacgggguguggaucggccgcaccaagagcaucagcucccggaagggcuucgagaugaucugggaccccaacggguggaccggcaccgacaacagcuucuccaucaagcaggacaucgucgggaucaacgaguggagcggcuacuccgggagcuucgugcagcacccggagcugacgggccuggacugcauccgccccugcuucuggguggagcucauccggggccgccccaaggagaacaccaucuggaccuccgggagcuccaucagcuucugcggcgucaacuccgggaccgugggcuggagcuggcccgacggcgccgagcugccguucacgaucgacaaguga

SEQ ID NO: 86221 - RNA, 1410 nt, Artificial Sequence
  derived and/or modified CDS sequence (opt1) from neuraminidase__InfluenzaA__AFJ05141
augaaccccaaccagaagaucaucaccaucggcagcgugucccugaccaucagcacgaucugcuucuucaugcagaucgccauccucaucaccaccgucacccugcacuucaagcaguacgaguucaacuccccgcccaacaaccaggugaugcugugcgagcccacgaucaucgagcgcaacaucaccgagaucguguaccucaccaacaccacgaucgagaaggagaucugccccaagccggccgaguaccggaacuggagcaagccccagugcgacaucaccggguucgcgcccuucuccaaggacaacagcauccgccuguccgccggcggggacaucugggucacccgggagcccuacgugagcugcgacccggacaagugcuaccaguucgcccugggccaggggaccacgcucaacaacgugcacuccaacaacaccguccgcgaccggacccccuaccgcagccugcugaugaacgagcucggcgugcccuuccaccugggcaccaagcaggucugcaucgccugguccagcuccagcugccacgacgggaaggccuggcugcacgugugcaucacgggcgacgacaagaacgcgaccgccuccuucaucuacaacgggcggcucguggacagcguggucuccuggagcaaggagauccugcgcacccaggaguccgagugcgugugcaucaacgggaccugcacgguggucaugaccgacgggagcgccagcggcaaggccgacaccaagauccuguucaucgaggagggcaagaucgugcacaccuccacgcucagcggguccgcgcagcacguggaggagugcagcugcuacccccgguacccgggcguccgcugcgugugccgggacaacuggaagggguccaaccgccccaucguggacaucaacaucaaggaccacagcaucgucuccagcuacgugugcuccggccuggugggcgacacgccccggaagaacgacagcuccagcuccagccacugccuggaccccaacaacgaggagggcggccacggggucaagggcugggccuucgacgacgggaacgacguguggaugggccgcaccaucaacgagaccucccggcucggcuacgagaccuucaaggucaucgagggguggagcaacccgaaguccaagcugcagaucaaccgccaggugaucguggaccggggcgaccgcagcggguacuccggcaucuucagcgucgagggcaagagcugcaucaaccggugcuucuacguggagcugauccgcgggcggaaggaggagaccgaggugcucuggaccuccaacagcaucgucguguucugcggcaccuccgggacguacggcaccgggagcuggcccgacggcgccgaccugaaccugaugcccaucuga

SEQ ID NO: 86222 - RNA, 1410 nt, Artificial Sequence
  derived and/or modified CDS sequence (opt1) from neuraminidase__InfluenzaA__AFJ05145
augaaccccaaccagaagaucaucaccaucggcagcgugucccugaccaugagcacgaucugcuucuucaugcagaucgccauccucaucaccaccgucacccugcacuucaagcaguacgaguucaacuccccgcccaacaaccaggugaugcugugcgagcccacgaucaucgagcgcaacaucaccgagaucguguaccucaccaacaccacgaucgagaaggagaucugccccaagccggccgaguaccggaacuggagcaagccccagugcgacaucaccggguucgcgcccuucuccaaggacaacagcauccgccuguccgccggcggggacaucugggucacccgggagcccuacgugagcugcgacccggacaagugcuaccaguucgcccugggccaggggaccacgcucaacaacgugcacuccaacaacaccguccgcgaccggacccccuaccgcacccugcugaugaacgagcucggcgugcccuuccaccugggcacgaagcaggucugcaucgccuggagcuccagcuccugccacgacgggaaggccuggcugcacgugugcaucaccggcgacgacaagaacgcgaccgccagcuucaucuacaacgggcggcucguggacuccguggucagcugguccaaggagauccugcgcacccaggagagcgagugcgugugcaucaacggcacgugcaccguggucaugaccgacggguccgccagcggcaaggccgacaccaagauccuguucaucgaggagggcaagaucgugcacacgagcacccucuccgggagcgcgcagcacguggaggagugcuccugcuacccccgguacccgggcguccgcugcgugugccgggacaacuggaaggggagcaaccgccccaucguggacaucaacaucaaggaccacuccaucgucagcuccuacgugugcagcggccuggugggcgacaccccgcggaagaacgacuccagcuccagcucccacugccuggaccccaacaacgaggagggcgggcacggggucaagggcugggccuucgacgacgggaacgacguguggaugggccgcaccaucaacgagacgagccggcucggcuacgagaccuucaaggucaucgaggggugguccaaccccaagagcaagcugcagaucaaccgccaggugaucguggaccggggcgaccgcuccggguacagcggcaucuucuccgucgagggcaagagcugcaucaaccggugcuucuacguggagcugauccgcgggcggaaggaggagaccgaggugcucuggaccagcaacuccaucgucguguucugcggcacgagcgggaccuacggcaccggguccuggcccgacggcgccgaccugaaccugaugcccaucuga

SEQ ID NO: 86223 - RNA, 1410 nt, Artificial Sequence
  derived and/or modified CDS sequence (opt1) from neuraminidase__InfluenzaA__AFJ05635
augaaccccaaccagaagaucaucaccaucggcagcgugugcaugaccaucgggauggccaaccugauccuccagaucggcaacaucaucuccaucuggaucagccacuccauccagcugcgcaaccagagccagaucgagacgugcaaccaguccgucaucaccuacgagaacaacaccugggugaaccagaccuacgugaacaucagcaacacgaacuucgccgcggggcaguccgucgugagcaugaagcuggccggcaacuccagccucugcccgguguccgggugggccaucuacagcaaggacaacuccauccggaucggcagcaagggcgacgucuucgugauccgcgagcccuucaucuccugcagcccccuggagugccggaccuucuuccugacccagggggcccuccugaacgacaagcacuccaacggcaccaucaaggaccgcagccccuaccggacgcugauguccugcccgaucggggaggugcccagccccuacaacagccgcuucgaguccgucgccuggagcgcguccgccugccacgacggcaucaacuggcucaccaucgggaucagcggccccgacaacggcgccguggccgugcugaaguacaacgggaucaucaccgacaccaucaaguccuggcggaacaacauccugcgcacgcaggagagcgagugcgcgugcgucaacggcuccugcuucaccaucaugaccgacgggccgagcgacggccaggccuccuacaagaucuuccggaucgagaagggcaagaucgucaagagcguggagaugaacgcccccaacuaccacuacgaggagugcuccugcuaccccgacagcuccgagaucacgugcgugugccgcgacaacuggcacgggagcaaccggcccuggguguccuucaaccagaaccucgaguaccagaucggcuacaucugcagcgggaucuucggcgacaacccgcgccccaacgacaagaccggguccugcggccccgugagcuccaacggcgccaacggggucaagggcuucagcuucaaguacgggaacggcguguggaucgggcggaccaagagcaucuccagccgcaagggcuucgagaugaucugggaccccaacggcuggaccgggaccgacaacaacuucuccaucaagcaggacaucgugggcaucaacgaguggagcggguacuccggcagcuucguccagcacccggagcugacggggcuggacugcauccggcccugcuucuggguggagcucauccgcggccggcccaaggagaacaccaucuggaccuccggcagcuccaucagcuucugcggggugaacuccgacaccgucggcuggagcuggcccgacggggccgagcugccguucacgaucgacaaguga

SEQ ID NO: 86224 - RNA, 1410 nt, Artificial Sequence
  derived and/or modified CDS sequence (opt1) from neuraminidase__InfluenzaA__AFJ11709
augaaccccaaccagaagaucaucaccaucggcagcgugucccugaccaucagcacgaucugcuucuucaugcagaucgccauccucaucaccaccgucacccugcacuucaagcaguacgaguucaacuccccgcccaacaaccaggugaugcugugcgagcccacgaucaucgagcgcaacaucaccgagaucguguaccucaccaacaccacgaucgagaaggagaucugccccaagcuggccgaguaccggaacuggagcaagccgcagugcgacaucaccggguucgcgcccuucuccaaggacaacagcauccgccuguccgccggcggggacaucugggucacccgggagcccuacgugagcugcgaccccgacaagugcuaccaguucgcccucggccaggggaccacgcugaacaacgugcacuccaacaacaccguccgcgaccggaccccguaccgcacccugcucaugaacgagcugggcgugcccuuccaccugggcacgaagcaggucugcaucgccuggagcuccagcuccugccacgacgggaaggccuggcuccacgugugcaucaccggcgacgacaagaacgcgaccgccagcuucaucuacaacgggcggcugguggacuccguggucagcugguccaaggagauccugcgcacccaggagagcgagugcgugugcaucaacggcacgugcaccguggucaugaccgacggguccgccagcggcaaggccgacaccaagauccucuucaucgaggagggcaagaucgugcacacgagcacccuguccgggagcgcgcagcacguggaggagugcuccugcuacccccgguaccccggcguccgcugcgugugccgggacaacuggaaggggagcaaccgcccgaucguggacaucaacaucaaggaccacuccaucgucagcuccuacgugugcagcggccuggugggcgacacgccccggaagaacgacuccagcuccagcucccacugccucgaccccaacaacgaggagggcgggcacggggucaagggcugggccuucgacgacgggaacgacguguggaugggccgcaccaucaacgagaccagccggcugggcuacgagaccuucaaggucaucgaggggugguccaaccccaagagcaagcugcagaucaaccgccaggugaucguggaccggggcaaccgcuccggguacagcggcaucuucuccgucgagggcaagagcugcaucaaccggugcuucuacguggagcucauccgcgggcggaaggaggagaccgaggugcuguggaccagcaacuccaucgucguguucugcggcacgagcgggaccuacggcaccggguccuggccggacggcgccgaccugaaccucaugcugaucuga

SEQ ID NO: 86225 - RNA, 1410 nt, Artificial Sequence
  derived and/or modified CDS sequence (opt1) from neuraminidase__InfluenzaA__AFJ11720
augaaccccaaccagaagaucaucaccaucggcagcgugucccugaccaucagcacgaucugcuucuucaugcagaucgccauccucaucaccaccgucacccugcacuucaagcaguacgaguucaacuccccgcccaacaaccaggugaugcugugcgagcccacgaucaucgagcgcaacaucaccgagaucguguaccucaccaacaccacgaucgagaaggagaucugccccaagcuggccgaguaccggaacuggagcaagccgcagugcgacaucaccggguucgcgcccuucuccaaggacaacagcauccgccuguccgccggcggggacaucugggucacccgggagcccuacgugagcugcgaccccgacaagugcuaccaguucgcccucggccaggggaccacgcugaacaacgugcacuccaacaacaccguccgcgaccggaccccguaccgcacccugcucaugaacgagcugggcgugcccuuccaccugggcacgaagcaggucugcaucgccuggagcuccagcuccugccacgacgggaaggccuggcuccacgugugcaucaccggcgacgacaagaacgcgaccgccagcuucaucuacaacgggcggcugaucgacuccguggugagcugguccaaggagauccugcgcacccaggagagcgagugcgucugcaucaacggcacgugcaccguggugaugaccgacggguccgccagcggcaaggccgacaccaagauccucuucaucgaggagggcaagaucguccacacgagcacccuguccgggagcgcgcagcacguggaggagugcuccugcuacccccgguaccccggcgugcgcugcgucugccgggacaacuggaaggggagcaaccgcccgaucguggacaucaacaucaaggaccacuccaucgugagcuccuacgucugcagcggccuggugggcgacacgccccggaagaacgacuccagcuccagcucccacugccucgaccccaacaacgaggagggcgggcacggggugaagggcugggccuucgacgacgggaacgacgucuggaugggccgcaccaucaacgagaccagccggcugggcuacgagaccuucaaggugaucgaggggugguccaaccccaagagcaagcugcagaucaaccgccaggucaucguggacaagggcaaccgguccggguacagcggcaucuucuccguggagggcaagagcugcaucaaccgcugcuucuacgucgagcucauccgggggcgcaaggaggagaccgaggugcuguggaccagcaacuccaucguggucuucugcggcacgagcgggaccuacggcaccggguccuggccggacggcgccgaccugaaccucaugcccaucuga

SEQ ID NO: 86226 - RNA, 1410 nt, Artificial Sequence; identical to SEQ ID NO: 85167
  derived and/or modified CDS sequence (opt1) from neuraminidase__InfluenzaA__AFJ11731

SEQ ID NO: 86227 - RNA, 1410 nt, Artificial Sequence
  derived and/or modified CDS sequence (opt1) from neuraminidase__InfluenzaA__AFJ19845
augaaccccaaccagaagaucaucaccaucggcagcgugucccugaccaucagcacgaucugcuucuucaugcagaucgccauccucaucaccaccgucacccugcacuucaagcaguacgaguucaacuccccgcccaacaaccaggugaugcugugcgagcccacgaucaucgagcgcaacaucaccgagaucguguaccucaccaacaccacgaucgagaaggagaucugccccaagcuggccgaguaccggaacuggagcaagccgcagugcgacaucaccggguucgcgcccuucuccaaggacaacagcauccgccuguccgccggcggggacaucugggucacccgggagcccuacgugagcugcgaccccgacaagugcuaccaguucgcccucggccaggggaccacgcugaacaacgugcacuccaacaacaccguccgcgaccggaccccguaccgcacccugcucaugaacgagcugggcgugcccuuccaccugggcacgaagcaggucugcaucgccuggagcuccagcuccugccacgacgggaaggccuggcuccacgugugcaucaccggcgacgacaagaacgcgaccgccagcuucaucuacaacgggcggcugguggacuccguggucagcugguccaaggagauccugcgcacccaggagagcgagugcgugugcaucaacggcacgugcaccguggucaugaccgacggguccgccagcggcaaggccgacaccaagauccucuucaucgaggagggcaagaucgugcacacgagcacccuguccgggagcgcgcagcacguggaggagugcuccugcuacccccgguaccccgacguccgcugcgugugccgggacaacuggaagggcagcaaccgcccgaucguggacaucaacaucaaggaccacuccaucgucagcuccuacgugugcagcgggcuggugggcgacacgccccggaagaacgacuccagcuccagcucccacugccucgaccccaacaacgaggagggcgggcacggcgucaaggggugggccuucgacgacggcaacgacguguggauggggcgcaccaucaacgagaccagccggcugggcuacgagaccuucaaggucaucgagggcugguccaaccccaagagcaagcugcagaucaaccgccaggugaucguggacaaggggaaccgguccggcuacagcgggaucuucuccgucgagggcaagagcugcaucaaccgcugcuucuacguggagcucauccgggggcgcaaggaggagaccgaggugcuguggaccagcaacuccaucgucguguucugcggcacgagcggcaccuacgggaccggcuccuggccggacggggccgaccugaaccucaugcccaucuga

SEQ ID NO: 86228 - RNA, 1410 nt, Artificial Sequence; identical to SEQ ID NO: 80762
  derived and/or modified CDS sequence (opt1) from neuraminidase__InfluenzaA__AFJ44697

SEQ ID NO: 86229 - RNA, 1410 nt, Artificial Sequence; identical to SEQ ID NO: 84281
  derived and/or modified CDS sequence (opt1) from neuraminidase__InfluenzaA__AFJ69989

SEQ ID NO: 86230 - RNA, 1410 nt, Artificial Sequence
  derived and/or modified CDS sequence (opt1) from neuraminidase__InfluenzaA__AFJ69990
augaaccccaaccagaagaucaucaccaucggcagcgugugcaugaccaucgggauggccaaccugauccuccagaucggcaacaucacguccaucuggaucagccacuccauccagcuggggaaccagaaccagaucgagaccugcaaccagagcgucaucaccuacgagaacaacaccugggugaaccagacguacgugaacaucuccaacaccaacuucgccgcgggccagagcgucguguccgugaagcuggccgggaacagcucccucugcccggucagcggcugggccaucuacuccaaggacaacagcauccgcaucggcuccaagggggacguguucgugauccgggagcccuucaucagcugcagcccccuggagugccgcaccuucuuccugacccagggcgcccuccugaacgacaagcacuccaacgggacgaucaaggaccggucccccuaccgcacccugaugagcugcccgaucggcgagguccccucccccuacaacagccgguucgagagcguggccugguccgcgagcgccugccacgacgggaucaacuggcucaccaucggcaucuccggccccgacaacggggccguggccguccugaaguacaacggcaucaucaccgacacgaucaagagcuggcgcaacaacauccugcggacccaggaguccgagugcgcgugcgugaacgggagcugcuucaccgugaugaccgacggcccguccgacggccaggccagcuacaagaucuuccgcaucgagaaggggaagaucgucaaguccguggagaugaacgcccccaacuaccacuacgaggagugcagcugcuaccccgacuccagcgagaucacgugcgugugccgggacaacuggcacggcuccaaccgccccugggucagcuucaaccagaaccucgaguaccggaucggguacaucugcuccggcaucuucggggacaacccgcgccccaacgacaagaccggcagcugcggccccguguccagcaacggggccaacggcgugaagggguucuccuucaaguacggcaacggggucuggaucggccggaccaagagcaucagcucccgcaacggcuucgagaugaucugggaccccaacggguggaccggcacggacaacaacuucagcaucaagcaggacaucaucgggaucaacgagugguccggcuacagcggguccuucgugcagcacccggagcugaccggccuggacugcauccggcccugcuucuggguggagcucauccgcggccggcccaaggagaacaccaucuggaccagcggguccagcaucuccuucugcggcgucaacagcgacacgguggggugguccuggcccgacggcgccgagcugccguucaccaucgacaaguga

SEQ ID NO: 86231 - RNA, 1410 nt, Artificial Sequence
  derived and/or modified CDS sequence (opt1) from neuraminidase__InfluenzaA__AFJ69991
augaaccccaaccagaagaucaucaccaucggcagcgugugcaugaccaucgggauggccaaccugauccuccagaucggcaacaucaucuccaucuggaucagccacuccauccagcuggggaaccagagccagaucgagacgugcaaccaguccgucaucaccuacgagaacaacaccugggugaaccagaccuacgugaacaucagcaacacgaacuucgccgcgggccaguccgucgugagcgugaagcuggccgggaacuccagccucugcccggucuccggcugggccaucuacagcaaggacaacuccauccgcaucggcagcaagggggacguguucgugauccgggagcccuucaucuccugcagcccccuggagugccgcaccuucuuccugacccagggcgcccuccugaacgacaagcacuccaacgggaccaucaaggaccggagccccuaccgcacgcugauguccugcccgaucggcgagguccccagccccuacaaccaggaccucagccacuccgccuggagcgcguccgccugccacgacgggaucaacuggcugaccaucggcaucagcggccccgacaacggggccguggccgugcugaaguacaacggcaucaucaccgacaccaucaaguccuggcggaacaacauccuccgcacgcaggagagcgagugcgcgugcgucaacggguccugcuucaccaucaugaccgacggcccgagcgacggccaggccuccuacaagaucuuccggaucgagaaggggaagaucgucaagagcguggagaugaacgcccccaacuaccacuacgaggagugcuccugcuaccccgacagcuccgagaucacgugcgugugccgcgacaacuggcacggcagcaaccggcccuggguguccuucaaccagaaccuggaguaccagaucggguacaucugcagcggcaucuucggggacaacccgcgccccaacgacaagaccggcuccugcggccccgugagcuccaacggggccaacggcgucaagggguucagcuucaaguacggcaacgggguguggaucggccggaccaagagcaucuccagccgcaagggcuucgagaugaucugggaccccaacggguggaccggcaccgacaacaacuucuccaucaagcaggacaucguggggaucaacgaguggagcggcuacuccgggagcuucguccagcacccggagcugacgggccucgacugcauccggcccugcuucuggguggagcugauccgcggccggcccaaggagaacaccaucuggaccuccgggagcuccaucagcuucugcggcgugaacuccgacaccgucggguggagcuggcccgacggcgccgagcugccguucacgaucgacaaguga

SEQ ID NO: 86232 - RNA, 1410 nt, Artificial Sequence; identical to SEQ ID NO: 81588
  derived and/or modified CDS sequence (opt1) from neuraminidase__InfluenzaA__AFJ69992

SEQ ID NO: 86233 - RNA, 1410 nt, Artificial Sequence
  derived and/or modified CDS sequence (opt1) from neuraminidase__InfluenzaA__AFJ69993
augaaccccaaccagaagaucaucaccaucggcagcgugucccugaccaucagcacgaucugcuucuucaugcagaucgccauccucaucaccaccgucacccugcacuucaagcaguacgaguucaacuccccgcccaacaaccaggugaugcugugcgagcccacgaucaucgagcgcaacaucaccgagaucguguaccucaccaacaccacgaucgagaaggagaucugccccaagcuggccgaguaccggaacuggagcaagccgcagugcgacaucaccggguucgcgcccuucuccaaggacaacagcauccgccuguccgccggcggggacaucugggucacccgggagcccuacgugagcugcgaccccgacaagugcuaccaguucgcccucggccaggggaccacgcugaacaacgugcacuccaacaacaccguccgcgaccggaccccguaccgcacccugcucaugaacgagcugggcgugcccuuccaccugggcacgaagcaggucugcaucgccuggagcuccagcuccugccacgacgggaaggccuggcuccacgugugcaucaccggcgacgacaagaacgcgaccgccagcuucaucuacaacgggcggcugguggacuccguggucagcugguccaaggagauccugcgcacccaggagagcgagugcgugugcaucaacggcacgugcaccguggucaugaccgacggguccgccagcggcaaggccgacaccaagauccucuucaucgaggagggcaagaucgugcacacgagcacccuguccgggagcgcgcagcacguggaggagugcuccugcuacccccgguaccccggcguccgcugcgugugccgggacaacuggaaggggagcaaccgcccgaucguggacaucaacaucaaggaccacuccaucgucagcuccuacgugugcagcggccuggugggcgacacgccccggaagaacgacuccagcuccagcucccacugccucgaccccaacaacgaggagggcgggcacggggucaagggcugggccuucgacgacgggaacgacguguggaugggccgcaccaucaacgagaccagccggcugggcuacgagaccuucaaggucaucgaggggugguccaaccccaagagcaagcugcagaucaaccgccaggugaucgugggccgggggaaccgcuccggcuacagcgggaucuucuccgucgagggcaagagcugcaucaaccggugcuucuacguggagcucauccgcggccggaaggaggagaccgaggugcuguggaccagcaacuccaucgucguguucugcgggacgagcggcaccuacgggaccggcuccuggccggacggggccaaccugaaccucaugcccaucuga

SEQ ID NO: 86234 - RNA, 1410 nt, Artificial Sequence; identical to SEQ ID NO: 83542
  derived and/or modified CDS sequence (opt1) from neuraminidase__InfluenzaA__AFJ69994

SEQ ID NO: 86235 - RNA, 1413 nt, Artificial Sequence
  derived and/or modified CDS sequence (opt1) from neuraminidase__InfluenzaA__AFJ74389
augaaccccaaccagaagaucaucaccaucggcagcaucuccaucgccaucgggaucaucagccugauccuccagaucggcaacaucaucuccaucugggccagccacuccauccagaccgggagccagaaccacacgggcgugugcaaccagcgcaucaucaccuacgagaacuccaccugggucaaccagaccuacgugaacaucaacaacacgaacguggucgcggggaaggacaagaccagcaugacccuggccggcaacuccagccugugcccgauccggggcugggccaucuacaccaaggacaacuccauccgcaucgggagcaagggcgacguguucgugauccgggagcccuucaucuccugcagccaccucgagugccgcacguucuuccugacccagggggcccugcucaacgacaagcacuccaacggcaccgucaaggaccggagccccuaccgcgcccugauguccugcccccugggggaggcgccgagccccuacaacucccgguucgagagcguggccuggagcgccuccgccugccacgacggccucggcuggcugaccaucgggaucagcggccccgacaacggggcgguggccguccugaaguacaacggcaucaucacggagaccaucaaguccuggaagaagcgcauccuccggacccaggagagcgagugcgugugcaugaacggcuccugcuucaccaucaugacggacgggcccagcaacggcgccgccuccuaccgcaucuucaagaucgagaaggggcgggugaccaagagcaucgagcuggacgccccgaacuaccacuacgaggagugcuccugcuaccccgacaccggcaccgucaugugcgugugccgcgacaacuggcacgggagcaaccggcccuggguguccuucaaccagaaccuggacuaccagaucggcuacaucugcagcggcgucuucggggacaacccccgcccgaaggacggcgagggguccugcaaccccgugacgguggacggcgcggacggggucaagggcuucagcuaccgguacggcaacgggguguggaucggccgcaccaaguccaaccggcuccgcaagggguucgagaugaucugggaccccaacggcuggaccgacaccgacagcgacuucuccaugaagcaggacaucguggccaugacggacuggagcggguacuccggcagcuucguccagcaccccgagcugaccggccuggacugcaugcggccgugcuucuggguggagcucgugcgcgggcugccccgggagaacaccaccaucuggacgagcggcuccagcaucuccuucugcggggucaacagcgacaccgccaacugguccuggcccgacggcgccgagcugcccuucaccaucgacaaguga

SEQ ID NO: 86236 - RNA, 1410 nt, Artificial Sequence
  derived and/or modified CDS sequence (opt1) from neuraminidase__InfluenzaA__AFJ74399
augaaccccaaccagaagaucaucaccaucggcagcgugucccugaccaucgccacgaucugcuuccucaugcagaucgccauccuggucaucacccugacccuccacuucaagcaguacgagugcaacagcccgcccaacaaccaggugaugcugugcgagcccaccaucaucgagcgcaacaucacggagaucguguaccugaccaacaccaccaucgagaaggagaucugccccaagcucgcggaguaccggaacugguccaagccgcagugcaagaucacgggguucgcccccuucagcaaggacaacuccauccgccugagcgccggcggggacaucugggucacccgggagcccuacguguccugcgaccccggcaagugcuaccaguucgcccuggggcagggcaccacccucaacaaccgccacagcaacgacacggugcacgaccggaccccguaccgcacccugcugaugaacgagcucggcguccccuuccaccuggggaccaagcaggucugcaucgccugguccagcuccagcugccacgacggcaaggcguggcugcacgugugcgugacggggcacaacgagaacgccaccgccuccuucaucuacgacggccggcucguggacagcaucggguccuggagcaagaacauccugcgcacccaggaguccgagugcgugugcaucaacgggaccugcacggucgugaugaccgacggcagcgccuccgggcgggcggacaccaagauccuguucaucgaggagggcaagaucgugcacaucagcccccucagcggguccgcccagcacgucgaggagugcagcugcuacccccgcuacccgggcgugcggugcgugugccgcgacaacuggaagggcuccaaccggcccaucgucgacaucaacgugaaggacuucagcaucguguccagcuacgucugcuccgggcuggugggcgacacgccccgcaagaacgacagcuccagcuccagccacugccugaaccccaacaacgaggagggcggccacggggugaagggcugggccuucgacgacggcaacgacgucuggauggggcggaccaucuccgagaagcuccgcagcggcuacgagaccuucaaggugaucgggggcugguccaagccgaacagcaagcugcagaucaaccggcaggucaucguggaccgcgggaaccgguccggcuacagcggcaucuucuccguggagggcaagagcugcaucaaccgcugcuucuacgucgagcugauccgggggcgcaagcaggagaccgaggugugguggaccagcaacuccaucguggucuucugcgggacgagcggcaccuacgggaccggcuccuggcccgacggcgccgacaucaaccucaugcccaucuga

SEQ ID NO: 86237 - RNA, 1410 nt, Artificial Sequence
  derived and/or modified CDS sequence (opt1) from neuraminidase__InfluenzaA__AFJ74410
augaaccccaaccagaagaucaucaccaucggcagcgugucccugaccaucgccacgaucugcuuccucaugcagaucgccauccuggucaugaccgugacccugcacuucaagcaguacgagugcaacagcccgcccaacaaccaggugaugcucugcgagcccaccaucaucgagcgcaacaucacggagaucgucuaccugaccaacaccaccaucgagaaggagaucugccccaagcuggcggaguaccggaacugguccaagccgcagugcaagaucacgggguucgcccccuucagcaaggacaacuccauccgccucagcgccggcggggacaucugggugacccgggagcccuacguguccugcgaccccggcaagugcuaccaguucgcccuggggcagggcaccacccugaacaaccgccacagcaacgacacgguccacgaccggaccccguaccgcacccuccugaugaacgagcugggcgugcccuuccaccucgggaccaagcaggucugcaucgccugguccagcuccagcugccacgacggcaaggcguggcugcacgugugcgugacggggcacaacgagaacgccaccgccuccuucaucuacgacggccggcugguggacagcaucggguccuggagcaagaacauccuccgcacccaggaguccgagugcgucugcaucaacgggaccugcacgguggugaugaccgacggcagcgccuccgggcgggcggacaccaagauccuguucaucgaggagggcaagaucguccacaucagcccccugagcggguccgcccagcacguggaggagugcagcugcuacccccgcuacccgggcgugcggugcgucugccgcgacaacuggaagggcuccaaccggcccaucguggacaucaacgugaaggacuacagcaucaucuccagcuacgucugcuccgggcucgugggcgacacgccccgcaagaacgacagcuccagcuccagccacugccugaaccccaacaacgaggagggcggccacggggugaagggcugggccuucgacgacggcaacgacgucuggauggggcggaccaucuccgagaagcugcgcagcggcuacgagaccuucaaggugaucgggggcugguccaagccgaacagcaagcuccagaucaaccggcaggucaucguggaccgcgggaaccgguccggcuacagcggcaucuucuccguggagggcaagagcugcaucaaccgcugcuucuacgucgagcugauccgggggcgcaagcaggagaccgaggugugguggaccagcaacuccaucguggucuucugcgggacgagcggcaccuacgggaccggcuccuggcccgacggcgccgacaucaaccugaugcccaucuga

SEQ ID NO: 86238 - RNA, 1410 nt, Artificial Sequence; identical to SEQ ID NO: 78339
  derived and/or modified CDS sequence (opt1) from neuraminidase__InfluenzaA__AFJ74451

SEQ ID NO: 86239 - RNA, 1413 nt, Artificial Sequence
  derived and/or modified CDS sequence (opt1) from neuraminidase__InfluenzaA__AFJ74462
augaaccccaaccagaagaucaucaccaucggcagcaucuccguggccaucgggaucaucagccugauccuccagaucggcaacaucaucuccaucugggccagccacuccauccagaccgggagccagaacuacacgggcaucugcaaccagcgcaucaucaccuacgagaacuccaccugggucaaccagaccuacgugaacaucaacaacacgaacguggucgcggggaaggacaagaccagcaugacccuggccggcaacuccagccugugcccgauccggggcugggccaucuacaccaaggacaacuccauccgcaucgggagcaagggcgacguguucgugauccgggagcccuucaucuccugcagccaccucgagugccgcacguucuuccugacccagggggcccugcucaacgacaagcacuccaacggcaccgucaaggaccggagccccuaccgcgcccugauguccugcccccugggggaggcgccgagccccuacaacucccgguucgagagcguggccuggagcgccuccgccugccacgacggccucggcuggcugaccaucgggaucagcggccccgacaacggggcgguggccguccugaaguacaacggcaucaucacggagaccaucaaguccuggaagaagcagauccuccgcacccaggagagcgagugcgugugcgugaacggcuccugcuucaccaucaugacggacgggcccagcaaccgggccgccuccuaccgcaucuucaagaucgagaagggccgggucaccaagagcaucgagcuggacgccccgaacuaccacuacgaggagugcuccugcuaccccgacaccgggaccgugaugugcgugugccgcgacaacuggcacggcagcaaccggcccugggucuccuucaaccagaaccuggacuaccagaucggguacaucugcagcggcguguucggcgacaacccccgcccgaaggacggggagggcuccugcaaccccgugacggucgacggggcggacggcgugaagggguucagcuaccgguacggcaacggcguguggaucgggcgcaccaaguccaaccggcuccgcaagggcuucgagaugaucugggaccccaacggguggaccgacaccgacagcgacuucuccaugaagcaggacgucguggccaugacggacuggagcggcuacuccgggagcuucgugcagcaccccgagcugaccggccuggacugcaugcggccgugcuucugggucgagcucgugcgcggccugccccgggagaacaccaccaucuggacgagcggguccagcaucuccuucugcggcgucaacagcgagaccgccaacugguccuggcccgacggggccgagcugcccuucaccaucgacaaguga

SEQ ID NO: 86240 - RNA, 1410 nt, Artificial Sequence
  derived and/or modified CDS sequence (opt1) from neuraminidase__InfluenzaA__AFJ74517
augaaccccaaccagaagaucaucaccaucggcagcgugucccugaccaucgccacgaucugcuuccucaugcagaucgccauccuggucaccaccgugacccugcacuucaagcaguacgagugcaacagcccgcccaacaaccaggugaugcucugcgagcccacgaucaucgagcgcaacaucaccgagaucgucuacaugaccaacaccacgaucgagaaggagaucugccccaagcuggcggaguaccggaacugguccaagccgcagugcaagaucaccggguucgcccccuucagcaaggacaacuccauccgccugagcgccggcggggacaucugggugacccgggagcccuacguguccugcgaccccgacaagugcuaccaguucgcccucggccaggggaccacgcugaacaaccgccacagcaacgacaccguccacgaccggaccccguaccgcacccugcucaugaacgagcugggcgugcccuuccaccugggcacgaagcaggucugcaucgccugguccagcuccagcugccacgacgggaaggcguggcuccacgugugcgugaccggccacgacgagaacgccaccgccuccuucaucuacgacgggcggcugguggacagcaucggcuccuggagcaagaagauccugcgcacccaggaguccgagugcgucugcaucaacgggacgugcaccguggugaugaccgacggcagcgccuccggccgggcggacaccaagauccucuucaucgaggaggggaagaucguccacaucagccagcugagcggcuccgcccagcacguggaggagugcagcugcuacccccgcuaccccggggugcggugcgucugccgcgacaacuggaagggcuccaaccggccgaucguggacaucaacgugaaggacuacagcaucgucuccagcuacgugugcuccggccuggugggggacacgccccgcaagaacgacagcuccagcuccagccacugccucaaccccaacaacgaggagggcgggcacggcgucaaggggugggccuucgacgacggcaacgacguguggaugggccggaccaucuccgagaagcugcgcagcggguacgagaccuucaaggucaucgagggcugguccaagcccaacagcaagcugcagaucaaccgccaggugaucguggaccgggggaaccgguccggcuacagcgggaucuucuccgucgagggcaagagcugcaucaaccgcugcuucuacguggagcucauccggggccgcaagcaggagaacgaggugugguggaccagcaacuccaucgucguguucugcgggacgagcggcaccuacgggaccggcuccuggccggacggggccgacaucaaccugaugcccaucuga

SEQ ID NO: 86241 - RNA, 1410 nt, Artificial Sequence
  derived and/or modified CDS sequence (opt1) from neuraminidase__InfluenzaA__AFJ74564
augaaccccaaccagaagaucaucaccaucggcagcgugucccugaccaucgccacgaucugcuuccucaugcagaucgccauccuggucaccaccgugacccugcacuucaagcaguacgagugcaacagcccgcccaacaaccaggugaugcucugcgagcccacgaucaucgagcgcaacaucaccgagaucgucuaccugaccaacaccacgaccgagaaggagaucugccccaagcuggcggaguaccggaacugguccaagccgcagugcaacaucaccggguucgcccccuucagcaaggacaacuccauccgccucagcgccggcggggacaucugggugacccgggagcccuacguguccugcgaccccgacaagugcuaccaguucgcccugggccaggggacgacccugaacaacggccacagcaacgacaccguccacgaccgcaccccguaccggacgcuccugaugaacgagcugggcgugcccuuccaccucgggacccgccaggugugcaucgccugguccagcuccagcugccacgacggcaaggcguggcugcacgucugcgugaccggggacgacgagaacgccaccgccuccuucaucuacaacggccggcugguggacagcaucggguccuggagcaagaagauccuccgcacgcaggaguccgagugcgucugcaucaacgggaccugcaccguggugaugaccgacggcagcgccuccgggaaggcggacacgaagauccuguucaucgaggagggcaagaucguccacaucagcacccugagcggguccgcccagcacguggaggagugcagcugcuacccccgguaccccggcgugcgcugcgucugccgggacaacuggaagggcuccaaccgcccgaucguggacaucaacgugaaggacuacagcaucgucuccagcuacgugugcuccgggcucgugggcgacacgccccggaagaacgacagcuucuccagcucccacugccuggaccccaacaacgaggagggcggccacggggucaagggcugggccuucgacgacggcaacgacguguggauggggcgcaccaucagcgagacccugcgguccggcuacgagaccuucaaggucaucgagggguggagcaagcccaacuccaagcuccagaucaaccgccaggugaucguggagcggggcaaccgcagcggguacuccggcaucuucagcgucgagggcaaguccugcaucaaccggugcuucuacguggagcugauccgcgggcggaaggaggagaccgaggugugguggaccagcaacagcaucgucguguucugcggcacguccgggaccuacggcaccgggagcuggccggacggcgccgacaucaaccugaugcccaucuga

SEQ ID NO: 86242 - RNA, 1413 nt, Artificial Sequence
  derived and/or modified CDS sequence (opt1) from neuraminidase__InfluenzaA__AFJ74639
augaaccccaaccagaagaucaucaccaucggcagcaucuccaucgccaucgggaucaucagccugaugcuccagaucggcaacaucaucuccaucugggccagccacuccauccagaccgggagccagaaccacacgggcaucugcaaccagcgcaucaucaccuacgagaacaacaccugggugaaccacaccuacgucaacaucaacaacacgaacgugguggcggggaaggacaagaccuccgucacccuggccggcaacagcucccugugcagcaucuccggcugggccaucuacaccaaggacaacagcauccggaucggguccaagggcgacguguucgugauccgcgagccguucaucagcugcucccaccucgagugccggacguucuuccugacccagggggcccugcucaacgacaagcacagcaacggcaccgucaaggaccgcucccccuaccgggcccugaugagcugcccccugggggaggcgcccuccccguacaacagcaaguucgagagcguggccugguccgccagcgccugccacgacggcaugggcuggcucaccaucgggaucuccggccccgacaacggggcgguggccguccugaaguacaacggcaucaucacggagaccaucaagagcuggaagaagcgcauccugcggacccaggaguccgagugcgugugcaugaacggcagcugcuucaccaucaugacggacgggcccuccaacggcgccgccagcuacaagaucuucaagaucgagaaggggaaggugaccaaguccaucgagcucaacgcccccagcuuccacuacgaggagugcuccugcuacccggacaccggcaccgucaugugcgugugccgcgacaacuggcacgggagcaaccggcccuggguguccuucaaccagaaccuggacuaccagaucggcuacaucugcagcggcgucuucggggacaacccccgccccaaggacggcgagggguccugcaacccggugacgguggacggcgcggacggggucaagggcuucagcuacaaguacggcaacgggguguggaucggccggaccaaguccaaccgccugcggaagggguucgagaugaucugggaccccaacggcuggaccaacaccgacagcgacuucuccgugaagcaggacgucguggccaucacggacuggagcggguacagcggcuccuucgugcagcaccccgagcucaccggccuggacugcauccgccccugcuucugggucgagcuggugcgggggcucccgcgcgagaacaccaccaucuggacgagcggcuccagcaucuccuucugcggggucaacagcgacaccgccaacugguccuggcccgacggcgccgagcugcccuucaccaucgacaaguga

SEQ ID NO: 86243 - RNA, 1410 nt, Artificial Sequence
  derived and/or modified CDS sequence (opt1) from neuraminidase__InfluenzaA__AFJ74640
augaaccccaaccagaagaucaucaccaucggcagcgugucccugaccaucagcacgaucugcuucuucaugcagaucgccauccucaucaccaccgucacccugcacuucaagcaguacgaguucaacuccccgcccaacaaccaggugaugcugugcgagcccacgaucaucgagcgcaacaucaccgagaucguguaccucaccaacaccacgaucgagaaggagaucugccccaagcuggccggguaccggaacuggagcaagccgcagugcaacaucaccggcuucgcgcccuucuccaaggacaacagcauccgccuguccgccgggggcgacaucugggucacccgggagcccuacgugagcugcgaccccgacaagugcuaccaguucgcccucgggcagggcaccacgcugaacaacgugcacuccaacgacaccguccacgaccgcaccccguaccggacccugcucaugaacgagcugggcgugcccuuccaccuggggacgaagcaggucugcaucgccuggagcuccagcuccugccacgacggcaaggccuggcuccacgugugcgugaccggggacgacgagaacgcgaccgccagcuucaucuacaacggccgccugguggacuccaucgucagcugguccaagaagauccugcggacccaggagagcgagugcgugugcaucaacgggacgugcaccguggucaugaccgacggcuccgccagcggcaaggccgacaccaagauccucuucaucgaggaggggaagaucgugcacacgagcacccuguccggcagcgcgcagcacguggaggagugcuccugcuacccccgcuaccccgggguccggugcgugugccgcgacaacuggaagggcagcaaccggccgaucguggacaucaacaucaaggacuacuccaucgucagcuccuacgugugcagcggccuggugggggacacgccccgcaagaacgacuccagcuccagcucccacugccucgaccccaacaacgaggagggcgggcacggcgucaaggggugggccuucgacgacggcaacgacguguggaugggccggaccaucagcgagaagcugcgcuccggguacgagaccuucaaggucaucgagggcuggagcaaccccaacuccaagcugcagaucaaccgccaggugaucguggacaaggggaaccggagcggcuacuccgggaucuucagcgucgagggcaagagcugcaucaaccggugcuucuacguggagcucauccgcggccggaagcaggagaccgaggugcuguggaccuccaacagcaucgucguguucugcgggaccuccggcacguacgggaccggcagcuggccggacggggccgacaucaaccugaugcccaucuga

SEQ ID NO: 86244 - RNA, 1413 nt, Artificial Sequence; identical to SEQ ID NO: 86242
  derived and/or modified CDS sequence (opt1) from neuraminidase__InfluenzaA__AFJ74659

SEQ ID NO: 86245 - RNA, 1413 nt, Artificial Sequence
  derived and/or modified CDS sequence (opt1) from neuraminidase__InfluenzaA__AFJ74679
augaaccccaaccagaagaucaucaccaucggcagcaucuccaucgccaucgggaucaucagccugaugcuccagaucggcaacaucaucuccaucugggccagccacuccauccagaccgggagccagaaccacacgggcaucugcaaccagcgcaucaucaccuacgagaacaacaccugggugaaccacaccuacgucaacaucaacaacacgaacgugguggcggggaaggacaagaccuccgucacccuggccggcaacagcucccugugcagcaucuccggcugggccaucuacaccaaggacaacagcauccggaucggguccaagggcgacguguucgugauccgcgagccguucaucagcugcucccaccucgagugccggacguucuuccugacccagggggcccugcucaacgacaagcacagcaacggcaccgucaaggaccgcucccccuaccgggcccugaugagcugcccccugggggaggcgcccuccccguacaacagcaaguucgagagcguggccugguccgccagcgccugccacgacggcaugggcuggcucaccaucgggaucuccggccccgacaacggggcgguggccguccugaaguacaacggcaucaucacggagaccaucaagagcuggaagaagcgcauccugcggacccaggaguccgagugcgugugcaugaacggcagcugcuucaccaucaugacggacgggcccuccaacggcgccgccagcuacaagaucuucaagaucgagaaggggaaggugaccaaguccaucgagcucaacgcccccagcuuccacuacgaggagugcuccugcuacccggacaccggcaccgucaugugcgugugccgcgacaacuggcacgggagcaaccggcccuggguguccuucaaccagaaccuggacuaccagaucggcuacaucugcagcggcgucuucggggacaacccccgccccaaggacggcgagggguccugcaacccggugacgguggacggcgcggacggggucaagggcuucagcuacaaguacgacaacggcguguggaucgggcggaccaaguccaaccgccugcggaagggcuucgagaugaucugggaccccaacggguggaccaacaccgacagcgacuucuccgugaagcaggacgucguggccaucacggacuggagcggcuacagcggguccuucgugcagcaccccgagcucaccggccuggacugcauccgccccugcuucugggucgagcuggugcggggccucccgcgcgagaacaccaccaucuggacgagcggguccagcaucuccuucugcggcgucaacagcgacaccgccaacugguccuggcccgacggggccgagcugcccuucaccaucgacaaguga

SEQ ID NO: 86246 - RNA, 1410 nt, Artificial Sequence
  derived and/or modified CDS sequence (opt1) from neuraminidase__InfluenzaA__AFJ74680
augaaccccaaccagaagaucaucaccaucggcagcgugucccugaccaucagcacgaucugcuucuucaugcagaucgccauccucaucaccaccgucacccugcacuucaagcaguacgaguucaacuccccgcccaacaaccaggugauccugugcgagcccacgaucaucgagcgcaacaucaccgagaucguguaccucaccaacaccacgaucgagaaggagaucugccccaagcuggccgaguaccggaacuggagcaagccgcagugcaacaucaccggguucgcgcccuucuccaaggacaacagcauccgccuguccgccggcggggacaucugggucacccgggagcccuacgugagcugcgaccccgacaagugcuaccaguucgcccucggccaggggaccacgcugaacaacgugcacuccaacgacaccguccacgaccgcaccccguaccggacccugcucaugaacgagcugggcgugcccuuccaccugggcacgaagcaggucugcaucgccuggagcuccagcuccugccacgacgggaaggccuggcuccacgugugcgugaccggcgacgacgagaacgcgaccgccagcuucaucuacaacgggcgccugguggacuccaucgucagcugguccaagaagauccugcggacccaggagagcgagugcgugugcaucaacggcacgugcaccguggucaugaccgacggguccgccagcggcaaggccgacaccaagauccucuucaucaaggagggcaagaucgugcacacgagcacccuguccgggagcgcgcagcacguggaggagugcuccugcuacccccgcuaccccggcguccggugcgugugccgcgacaacuggaaggggagcaaccggccgaucguggacaucaacaucaaggacuacuccaucgucagcuccuacgugugcagcggccuggugggcgacacgccccgcaagaacgacuccagcuccagcucccacugccucgaccccaacaacgaggagggcgggcacggggucaagggcugggccuucgacgacgggaacgacguguggaugggccggaccaucagcgagaagcugcgcuccggcuacgagaccuucaaggucaucgagggguggagcaaccccaacuccaagcugcagaucaaccgccaggugaucguggaccggggcaaccggagcggguacuccggcaucuucagcgucgagggcaagagcugcaucaaccgcugcuucuacguggagcucauccgggggcgcaagcaggagaccgaggugcuguggaccuccaacagcaucgucguguucugcggcaccuccgggacguacggcaccgggagcuggccggacggcgccgacaucaaccugaugcccaucuga

SEQ ID NO: 86247 - RNA, 1410 nt, Artificial Sequence
  derived and/or modified CDS sequence (opt1) from neuraminidase__InfluenzaA__AFJ74701
augaaccccaaccagaagaucaucaccaucggcagcgugucccugaccaucgccacgaucugcuuccucaugcagaucgccauccuggucaccaccgugacccugcacuucaaccaguacgagugcaacagcccgcccaacaaccaggugaugcucugcgagcccacgaucaucgagcgcaacaucaccgagaucgucuaccugaccaacaccacgaucgagaaggagaucugccccaagcuggcggaguaccggaucugguccaagccgcagugcaacaucaccggguucgcccccuucagcaaggacaacuccauccgccucagcgccggcggggacaucugggugacccgggagcccuacguguccugcgaccccgacaagugcuaccaguucgcccugggccaggggaccacgcugaacaacggccacagcaacgacaccguccacgaccgcaccccguaccggacccuccugaugaacgagcugggcgugcccuuccaccucgggacgcgccaggugugcauggccugguccagcuccagcugccacgacggcaaggcguggcugcacgucugcgugaccggggacgacgagaacgccaccgccuccuucaucuacaacggccggcugguggacagcaucggguccuggagcaagaagauccuccgcacccaggaguccgagugcgucugcaucaacggcacgugcaccguggugaugaccgacggcagcgccuccgggaaggcggacaccaagauccuguucaucgaggagggcaagaucguccacaucagcacgcugagcggguccgcccagcacguggaggagugcagcugcuacccccgguaccccggcgugcgcugcgucugccgggacaacuggaagggcuccaaccgcccgaucguggacaucaacgugaaggacuacagcaucgucuccagcuacgugugcuccgggcucgugggcgacacgccccggaagaacgacagcuucuccagcucccacugccuggaccccaacaacgaggagggcgggcacggggucaagggcugggccuucgacgacggcaacgacguguggauggggcgcaccaucagcgagaagcugcgguccggcuacgagaccuucaaggucaucgagggguggagcaagcccaacuccaagcuccaggugaaccgccaggugaucgucgagcggggcaaccgcagcggguacuccggcaucuucagcguggagggcaaguccugcaucaaccggugcuucuacguggagcugauccgcgggcggaaggaggagaccgaggucugguggaccagcaacagcaucgugguguucugcggcaccuccgggaccuacggcacggggagcuggccggacggcgccgacaucaaccugaugcccaucuga

SEQ ID NO: 86248 - RNA, 1410 nt, Artificial Sequence
  derived and/or modified CDS sequence (opt1) from neuraminidase__InfluenzaA__AFJ74731
augaaccccaaccagaagaucaucaccaucggcagcgugucccugaccaucagcacgaucugcuucuucaugcagaucgccauccucaucaccaccgucacccugcacuucaagcaguacgaguucaacuccccgcccaacaaccaggugaugcugugcgagcccacgaucaucgagcgcaacaucaccgagaucguguaccucaccaacaccacgaucgagaaggagaucugccccaagcuggccgaguaccggaacuggagcaagccgcagugcaacaucaccggguucgcgcccuucuccaaggacaacagcauccgccuguccgccggcggggacaucugggucacccgggagcccuacgugagcugcgaccccgacaagugcuaccaguucgcccucggccaggggaccacgcugaacaacgugcacuccaacgacaccguccacgaccgcaccccguaccggacccugcucaugaacgagcugggcgugcccuuccaccugggcacgaagcaggucugcaucgccuggagcuccagcuccugccacgacgggaaggccuggcuccacgugugcgugaccggcgacgacgagaacgcgaccgccagcuucaucuacaacgggcgccugguggacuccaucgucagcugguccaagaagauccugcggacccaggagagcgagugcgugugcaucaacggcacgugcaccguggucaugaccgacggguccgccagcggcaaggccgacaccaagauccucuucaucgaggagggcaagaucgugcacacgagcacccuguccgggagcgcgcagcacguggaggagugcuccugcuacccccgcuaccccggcguccggugcgugugccgcgacaacuggaaggggagcaaccggccgaucguggacaucaacaucaaggacuacuccaucgucagcuccuacgugugcagcggccuggugggcgacacgccccgcaagaccgacuccagcuccagcucccacugccucgaccccaacaacgaggagggcgggcacggggucaagggcugggccuucgacgacgggaacgacguguggaugggccggaccaucagcgagaagcugcgcuccggcuacgagaccuucaaggucaucgagggguggagcaaccccaacuccaagcugcagaucaaccgccaggugaucguggaccggggcaaccggagcggguacuccggcaucuucagcgucgagggcaagagcugcaucaaccgcugcuucuacguggagcucauccgggggcgcaaccaggagaccgaggugcuguggaccuccaacagcaucgucguguucugcggcacguccgggaccuacggcaccgggagcuggccggacggcgccgagaucaaccugaugcccaucuga

SEQ ID NO: 86249 - RNA, 1413 nt, Artificial Sequence; identical to SEQ ID NO: 86242
  derived and/or modified CDS sequence (opt1) from neuraminidase__InfluenzaA__AFJ74766

SEQ ID NO: 86250 - RNA, 1410 nt, Artificial Sequence
  derived and/or modified CDS sequence (opt1) from neuraminidase__InfluenzaA__AFJ74767
augaaccccaaccagaagaucaucaccaucggcagcgugucccugaccaucagcacgaucugcuucuucaugcagaucgccauccucaucaccaccgucacccugcacuucaagcaguacgaguucaacuccccgcccaacaaccaggugaugcugugcgagcccacgaucaucgagcgcaacaucaccgagaucguguaccucaccaacaccacgaucgagaaggagaucugccccaagcuggccgaguaccggaacuggagcaagccgcagugcaacaucaccggguucgcgcccuucuccaaggacaacagcauccgccuguccgccggcggggacaucugggucacccgggagcccuacgugagcugcgaccccgacaagugcuaccaguucgcccucggccaggggaccacgcugaacaacgugcacuccaacgacaccguccacgaccgcaccccguaccggacccugcucaugaacgagcugggcgugcccuuccaccugggcacgaagcaggucugcaucgccuggagcuccagcuccugccacgacgggaaggccuggcuccacgugugcgugaccggcgacgacgagaacgcgaccgccagcuucaucuacaacgggcgccugguggacuccaucgucagcugguccaagaagauccugcggacccaggagagcgagugcgugugcaucaacggcacgugcaccguggucaugaccgacggguccgccagcggcaaggccgacaccaagauccucuucaucgaggagggcaagaucgugcacacgagcacccuguccgggagcgcgcagcacguggaggagugcuccugcuacccccgcuaccccggcguccggugcgugugccgcgacaacuggaaggggagcaaccggccgaucguggacaucaacaucaaggacuacuccaucgucagcuccuacgugugcagcggccuggugggcgacacgccccgcaagaacgacuccagcuccagcucccacugccucgaccccaacaacgaggagggcgggcacggggucaagggcugggccuucgacgacgggaacgacguguggaugggccggaccaucagcgagaagcugcgcuccggcuacgagaccuucaaggucaucgagggguggagcaaccccaacuccaagcugcagaucaaccgccaggugaucguggaccggggcaaccggagcggguacuccggcaucuucagcgucgagggcaagagcugcaucaaccgcugcuucuacguggagcucauccgggggcgcaaccaggagaccgaggugcuguggaccuccaacagcaucgucguguucugcggcaccuccgggacguacggcaccgggagcuggccggacggcgccgacaucaaccugaugcccaucuga

SEQ ID NO: 86251 - RNA, 1410 nt, Artificial Sequence; identical to SEQ ID NO: 86250
  derived and/or modified CDS sequence (opt1) from neuraminidase__InfluenzaA__AFJ74783

SEQ ID NO: 86252 - RNA, 1410 nt, Artificial Sequence; identical to SEQ ID NO: 78169
  derived and/or modified CDS sequence (opt1) from neuraminidase__InfluenzaA__AFJ74807

SEQ ID NO: 86253 - RNA, 1410 nt, Artificial Sequence; identical to SEQ ID NO: 78169
  derived and/or modified CDS sequence (opt1) from neuraminidase__InfluenzaA__AFJ74822

SEQ ID NO: 86254 - RNA, 1410 nt, Artificial Sequence; identical to SEQ ID NO: 78738
  derived and/or modified CDS sequence (opt1) from neuraminidase__InfluenzaA__AFJ74834

SEQ ID NO: 86255 - RNA, 1410 nt, Artificial Sequence; identical to SEQ ID NO: 78169
  derived and/or modified CDS sequence (opt1) from neuraminidase__InfluenzaA__AFJ74845

SEQ ID NO: 86256 - RNA, 1413 nt, Artificial Sequence
  derived and/or modified CDS sequence (opt1) from neuraminidase__InfluenzaA__AFJ75039
augaaccccaaccagaagaucaucaccaucggcagcaucuccaucgccaucgggaucaucagccugaugcuccagaucggcaacaucaucuccaucugggccagccacuccauccagaccgggagccagaaccacacgggcaucugcaaccagcgcaucaucaccuacgagaacuccaccugggugaacaacaccuacgucaacaucaacaacacgagcgugguggcggagaaggacaagaccuccgucacccuggccgggaacagcucccugugcagcaucuccggcugggccaucuacaccaaggacaacagcauccggaucggcuccaagggggacguguucgugauccgcgagccguucaucagcugcucccaccucgagugccggacguucuuccugacccagggcgcccugcucaacgacaagcacagcaacgggaccgucaaggaccgcucccccuaccgggcccugaugagcugcccccugggcgaggcgcccagcccguacaacuccaaguucgagagcguggccugguccgccagcgccugccacgacgggaugggcuggcucaccaucggcaucuccgggcccgacaacggcgcgguggccguccugaaguacaacgggaucaucacggagaccaucaagagcuggaagaagcgcauccugcggacccaggaguccgagugcgugugcaugaacggcagcugcuucaccaucaugacggacggccccuccaacgggggcgccagcuacaagaucuucaagaucgagaaggggaaggugaccaaguccaucgagcucaacgcccccaacuuccacuacgaggagugcagcugcuacccggacaccggcaccgucaugugcgugugccgcgacaacuggcacggguccaaccggcccugggugagcuucaaccagaaccuggacuaccagaucggcuacaucugcuccggcgucuucggggacaacccccgccccaaggacggcgaggggagcugcaacccggugacgaucgacggcgccgacggggugaagggcuucuccuacaaguacggcaacggggucuggaucggccggaccaagagcaaccgccugcggaagggguucgagaugaucugggaccccaacggcuggaccaacaccgacuccgacuucagcgugaagcaggacguggucgcgaucacggacuggagcggguacuccggcagcuucgugcagcaccccgagcucaccggccuggacugcauccgccccugcuucuggguggagcugguccgggggcucccgcgcgagaacaccaccaucuggacguccggcagcuccaucagcuucugcggggugaacuccgacaccgccaacuggagcuggcccgacggcgccgagcugcccuucaccaucgacaaguga

SEQ ID NO: 86257 - RNA, 1410 nt, Artificial Sequence
  derived and/or modified CDS sequence (opt1) from neuraminidase__InfluenzaA__AFJ75050
augaaccccaaccagaagaucaucaccaucggcagcgugucccugaccaucagcacgaucugcuucuucaugcagaucgccauccucaucaccaccgucacccugcacuucaagcaguacgaguucaacuccccgcccaacaaccaggugaugcugugcgagcccacgaucaucgagcgcaacaucaccgagaucguguaccucaccaacaccacgaucgagaaggagaucugccccaagcuggccgaguaccggaacuggagcaagccgcagugcaacaucaccggguucgcgcccuucuccaaggacaacagcguccgccuguccgccggcggggacaucugggugacccgggagcccuacgugagcugcgaccccgacaagugcuaccaguucgcccucggccaggggaccacgcugaacaacguccacuccaacgacaccgugcacgaccgcaccccguaccggacccugcucaugaacgagcugggcgugcccuuccaccugggcacgaagcaggucugcaucgccuggagcuccagcuccugccacgacgggaaggccuggcuccacgugugcgugaccggcgacgacaagaacgcgaccgccagcuucaucuacaacgggcgccuggucgacuccaucgugagcugguccaaggagauccugcggacccaggagagcgagugcgugugcaucaacggcacgugcaccgucgugaugaccgacggguccgccagcggcaaggccgacaccaagauccucuucaucguggagggcaagaucguccacacgagcgcgcuguccgggagcgcccagcacguggaggagugcuccugcuacccccgcuaccccggcgugcggugcgucugccgcgacaacuggaaggggagcaaccggccgaucguggacaucaacaucaaggacuacuccaucgugagcuccuacgucugcagcggccuggugggcgacacgccccgcaagaacgacuccagcuccagcucccacugccucgaccccaacaacgaggagggcgggcacggggucaagggcugggccuucgacgacgggaacgacguguggaugggccggaccaucagcgagaagcugcgcuccggcuacgagaccuucaaggugaucgagggguggagcaaccccaacuccaagcugcagaucaaccggcaggucaucguggaccgcggcaaccggagcggguacuccggcaucuucagcguggagggcaagagcugcaucaaccgcugcuucuacgucgagcucauccgggggcgcaaggaggagaccgaggugcuguggaccuccaacagcaucguggucuucugcggcaccuccgggaccuacggcacggggagcuggccggacggcgccgacaucaaccugaugcccaucuga

SEQ ID NO: 86258 - RNA, 1410 nt, Artificial Sequence
  derived and/or modified CDS sequence (opt1) from neuraminidase__InfluenzaA__AFJ75094
augaaccccaaccagaagaucaucaccaucggcagcgugucccugaccaucagcacgaucugcuucuucaugcagaucgccauccucaucaccaccgucacccugcacuucaagcaguacgaguucaacuccccgcccaacaaccaggugaugcugugcgagcccacgaucaucgagaagaacaucaccgagaucguguaccucaccaacaccacgaucgagaaggagaucugccccaagcuggccgaguaccgcaacuggagcaagccgcagugcgacaucaccggguucgcgcccuucuccaaggacaacagcauccggcuguccgccggcggggacaucugggucacccgcgagcccuacgugagcugcgaccccgacaagugcuaccaguucgcccucggccaggggaccacgcugaacaacgugcacuccaacgacaccguccgggaccgcaccccguaccggacccugcucaugaacgagcugggcgugcccuuccaccugggcacgaagcaggucugcaucgccuggagcuccagcuccugccacgacgggaaggccuggcuccacgugugcaucaccggcgacgacaagaacgcgaccgccagcuucaucuacaacgggcgccugguggacuccaucgugagcugguccaaggagauccugcggacccaggagagcgagugcgucugcaucaacggcacgugcaccguggugaugaccgacggguccgccagcggcaaggccgacaccaagauccucuucaucgaggagggcaagaucguccacacgagcacccuguccgggagcgcgcagcacguggaggagugcuccugcuacccccgcuaccccggcgugcggugcgucugccgcgacaacuggaaggggagcaaccggccgaucguggacaucaacaucaaggaccacuccaucgugagcuccuacgucugcagcggccuggugggcgacacgccccgcaagaacgacuccagcuccagcuccaacugccucgaccccaacaacgaggagggcgggcacggggugaagggcugggccuucgacgacgggaacgacgucuggaugggccggaccaucagcgagaagucccgccugggcuacgagaccuucaaggugaucgagggguggagcaaccccaacuccaagcugcagaucaaccggcaggucaucguggaccgcggcaaccggagcggguacuccggcaucuucagcguggagggcaagagcugcaucaaccgcugcuucuacgucgagcucauccgggggcgcaaggaggagaucgaggugcuguggaccuccaacagcaucguggucuucugcggcaccuccgggaccuacggcacggggagcuggccggacggcgccgacaucaacaucaugcccaucuga

SEQ ID NO: 86259 - RNA, 1413 nt, Artificial Sequence
  derived and/or modified CDS sequence (opt1) from neuraminidase__InfluenzaA__AFJ75104
augaaccccaaccagaagaucaucaccaucggcagcaucuccaucgccaucgggaucaucagccugaugcuccagaucggcaacaucaucuccaucugggccagccacuccauccagaccgggagccagaaccacacgggcaucugcaaccagcgcaucaucaccuacgagaacuccaccugggugaaccacaccuacgucaacaucaacaacacgaacgugguggcggggaaggacaagaccccggucacccuggccggcaacagcucccugugcagcaucuccggcugggccauccacaccaaggacaacagcauccggaucggguccaagggcgacguguucgugauccgcgagcccuucaucagcugcucccaccucgagugcaagacguucuuccugacccagggggcccugcucaacgacaagcacagcaacggcaccgucaaggaccggucccccuaccgcgcccugaugagcugcccccugggggaggcgccgucccccuacaacagcaaguucgagagcguggccugguccgccagcgccugccacgacggcaucggcuggcucaccaucgggaucuccggccccgacaacggggcgguggccguccugaaguacaacggcaucaucacgggcaccaucaagagcuggaagaagcagauccugcggacccaggaguccgagugcgugugcaugaacgggagcugcuucaccaucaugacggacggccccuccaacggggccgccagcuacaagaucuucaagaucgagaagggcaaggugaccaaguccauggagcucaacgccccgaacuuccacuacgaggagugcagcugcuaccccgacaccgggaccgucaugugcgugugccgcgacaacuggcacggcuccaaccggcccugggugagcuucaaccagaaccuggacuaccagaucggcuacaucugcuccggggucuucggcgacaacccccgcccggaggacggggagggcagcugcaaccccgugacgguggacggggcgaacggcgucaagggcuucuccuacaaguacgggaacggcguguggaucgggcggaccaagagcaaccgcauccggaagggcuucgagaugaucugggaccccaacggguggaccaacaccgacuccgacuucagcgugaagcaggacaucgucgccaucacggacugguccggcuacagcggcagcuucgugcagcaccccgagcugaccgggcucgacugcauccgcccgugcuucuggguggagcugguccggggccugccccgcgagaacaccaccaucuggacguccgggagcuccaucagcuucugcggcgugaacuccgacaucgccaacuggagcuggcccgacggcgccgagcuccccuucaccaucgacaaguga

SEQ ID NO: 86260 - RNA, 1410 nt, Artificial Sequence; identical to SEQ ID NO: 79908
  derived and/or modified CDS sequence (opt1) from neuraminidase__InfluenzaA__AFJ75114

SEQ ID NO: 86261 - RNA, 1410 nt, Artificial Sequence; identical to SEQ ID NO: 79908
  derived and/or modified CDS sequence (opt1) from neuraminidase__InfluenzaA__AFJ75452

SEQ ID NO: 86262 - RNA, 1410 nt, Artificial Sequence; identical to SEQ ID NO: 79908
  derived and/or modified CDS sequence (opt1) from neuraminidase__InfluenzaA__AFJ75463

SEQ ID NO: 86263 - RNA, 1413 nt, Artificial Sequence; identical to SEQ ID NO: 86259
  derived and/or modified CDS sequence (opt1) from neuraminidase__InfluenzaA__AFJ75552

SEQ ID NO: 86264 - RNA, 1413 nt, Artificial Sequence
  derived and/or modified CDS sequence (opt1) from neuraminidase__InfluenzaA__AFJ75574
augaaccccaaccagaagaucaucaccaucggcagcaucuccaucgccaucgggaucaucagccugaugcuccagaucggcaacaucaucuccaucugggccagccacuccauccagaccgggagccagaaccacacgggcaucugcaaccagcgcaucaucaccuacgagaacuccaccugggugaaccacaccuacgucaacaucaacaacacgaacgugguggcggggaaggacaagaccccggucacccuggccggcaacagcucccugugcagcaucuccggcugggccauccacaccaaggacaacagcauccggaucggguccaagggcgacguguucgugauccgcgagcccuucaucagcugcucccaccucgagugcaagacguucuuccugacccagggggcccugcucaacgacaagcacagcaacggcaccgucaaggaccggucccccuaccgcgcccugaugagcugcccccugggggaggcgccgucccccuacaacagcaaguucgagagcguggccugguccgccagcgccugccacgacggcaucggcuggcucaccaucgggaucuccggccccgacaacggggcgguggccguccugaaguacaacggcaucaucacgggcaccaucaagagcuggaaggggcagauccugcggacccaggaguccgagugcgugugcaugaacggcagcugcuucaccaucaugacggacgggcccuccaacggcgccgccagcuacaagaucuucaagaucgagaaggggaaggugaccaaguccauggagcucaacgccccgaacuuccacuacgaggagugcagcugcuaccccgacaccggcaccgucaugugcgugugccgcgacaacuggcacggcuccaaccggcccugggugagcuucaaccagaaccuggacuaccagaucggguacaucugcuccggcgucuucggggacaacccccgcccggaggacggcgaggggagcugcaaccccgugacgguggacggcgcgaacggcgucaagggguucuccuacaaguacggcaacgggguguggaucggccggaccaagagcaaccgcauccggaagggguucgagaugaucugggaccccaacggcuggaccaacaccgacuccgacuucagcgugaagcaggacaucgucgccaucacggacugguccggcuacagcgggagcuucgugcagcaccccgagcugaccggccucgacugcauccgcccgugcuucuggguggagcugguccgggggcugccccgcgagaacaccaccaucuggacguccggcagcuccaucagcuucugcggcgugaacuccgacaucgccaacuggagcuggcccgacggggccgagcuccccuucaccaucgacaaguga

SEQ ID NO: 86265 - RNA, 1410 nt, Artificial Sequence; identical to SEQ ID NO: 79908
  derived and/or modified CDS sequence (opt1) from neuraminidase__InfluenzaA__AFJ75585

SEQ ID NO: 86266 - RNA, 1410 nt, Artificial Sequence
  derived and/or modified CDS sequence (opt1) from neuraminidase__InfluenzaA__AFJ75596
augaaccccaaccagaagaucaucaccaucggcagcgugucccugaccaucagcacgaucugcuucuucaugcagaccgccauccucaucaccaccgucacgcugcacuucaagcaguacgaguucaacuccccgcccaacaaccaggugaugcugugcgagcccaccaucaucgagcgcaacaucaccgagaucguguaccucaccaacacgaccaucgagaaggagaucugccccaagcuggccgaguaccggaacuggagcaagccgcagugcgggaucaccggcuucgcgcccuucuccaaggacaacagcauccgccuguccgccgggggcgacaucugggucacccgggagcccuacgugagcugcgaccccgacaagugcuaccaguucgcccucgggcagggcacgacccugaacaacgugcacuccaacaacaccguccgcgaccggaccccguaccgcacgcugcucaugaacgagcugggcgugcccuuccaccuggggaccaagcaggucugcaucgccuggagcuccagcuccugccacgacggcaaggccuggcuccacgugugcaucaccggggacgacaagaacgcgaccgccagcuucaucuacaacggccggcugguggacuccaucgugagcugguccaaggagauccugcgcacgcaggagagcgagugcgucugcaucaacgggaccugcaccguggugaugaccgacggcuccgccagcggcaaggccgacacgaagauccucuucaucgaggaggggaagaucguccacaccagcacccuguccggcagcgcgcagcacguggaggagugcuccugcuacccccgguaccccggggugcgcugcgucugccgggacaacuggaagggcagcaaccgcccgaucguggacaucaacaucaaggaccacuccaucgugagcuccuacgucugcagcggccuggugggggacacgccccggaagaacgacuccagcuccagcucccacugccucgaccccaacaacgaggagggcgggcacggcgugaaggggugggccuucgacgacggcaacgacgucuggaugggccgcaccaucagcgagaagucccggcugggguacgagaccuucaaggugaucgagggcuggagcaaccccaaguccaagcugcagaucaaccgccaggucaucguggaccgggggaaccgcagcggcuacuccgggaucuucagcguggagggcaagagcugcaucaaccggugcuucuacgucgagcucauccgcggccggaaggaggagaccgaggugcuguggaccuccaacagcaucguggucuucugcgggacguccggcaccuacgggaccggcagcuggccggacggggccgacaucaaccugaugcccaucuga

SEQ ID NO: 86267 - RNA, 1410 nt, Artificial Sequence
  derived and/or modified CDS sequence (opt1) from neuraminidase__InfluenzaA__AFJ75607
augaaccccacccagaagaucaucaccaucggcagcgugucccugacgaucagcaccaucugcuucuucaugcagaccgccauccucaucaccacggucacccugcacuucaagcaguacgaguucaacuccccgcccaacaaccaggugaugcugugcgagcccaccaucaucgagcgcaacaucaccgagaucguguaccucacgaacaccaccaucgagaaggagaucugccccaagcuggccgaguaccggaacuggagcaagccgcagugcgacaucaccggguucgcgcccuucuccaaggacaacagcauccgccuguccgccggcggggacaucugggucacgcgggagcccuacgugagcugcgaccccgagaagugcuaccaguucgcccucggccaggggaccacccugaacaacgugcacuccaacaacaccguccgcgaccggacgccguaccgcacccugcucaugaacgagcugggcgugcccuuccaccugggcaccaagcaggucugcaucgccuggagcuccagcuccugccacgacgggaaggccuggcuccacgugugcaucaccggcgacgacaagaacgcgacggccagcuucaucuacaacgggcggcugguggacuccaucgugagcugguccaaggagauccugcgcacccaggagagcgagugcgucugcaucaacgggaccugcaccguggugaugacggacggcuccgccagcggcaaggccgacaccaagauccucuucaucgaggagggcaagaucguccacaccagcaagcuguccgggagcgcgcagcacguggaggagugcuccugcuacccccgguaccccggcgugcgcugcgucugccgggacaacuggaaggggagcaaccgcccgaucguggacaucaacaucaaggaccacuccaucgugagcuccuacgucugcagcggccuggugggcgacacgccccggaagaacgacuccagcggguccagccacugccucgaccccaacaacgaggagggcgggcacggcgugaaggggugggccuucgacgacggcaacgacgucuggaugggccgcaccaucuccgagaagucccggcugggguacgagaccuucaaggugaucgagggcuggagcaaccccaagagcaagcugcagaucaaccgccaggucaucguggaccgggggaaccgcuccggcuacagcgggaucuucuccguggagggcaagagcugcaucaaccggugcuucuacgucgagcucauccgcggccggaaggaggagaccgaggugcuguggaccagcaacuccaucguggucuucugcgggacgagcggcaccuacgggaccggcuccuggccggacggggccgacaucaaccugaugcccaucuga

SEQ ID NO: 86268 - RNA, 1410 nt, Artificial Sequence
  derived and/or modified CDS sequence (opt1) from neuraminidase__InfluenzaA__AFJ75633
augaaccccaaccagaagaucaucaccaucggcagcgugucccugaccaucagcacgaucugcuucuucaugcagaucgccauccucaucaccaccgucacccugcacuucaagcaguacgaguucaacuccccgcccaacaaccaggugaugcugugcgagcccacgaucaucgagcgcaacaucaccgagaucguguaccucaccaacaccacgaucgagaaggagaucugccccaagcuggccgaguaccggaacuggagcaagccgcagugcgacaucaccggguucgcgcccuucuccaaggacaacagcauccgccuguccgccggcggggacaucugggucacccgggagcccuacgugagcugcgaccccgacaagugcuaccaguucgcccucggccaggggaccacgcugaacaacgugcacuccaacgacaccguccgcgaccggaccccguaccgcacccugcucaugaacgagcugggcgugcccuuccaccugggcacgaagcaggucugcaucgccuggagcuccagcuccugccacgacgggaaggccuggcuccacgugugcaucaccggcgacgacaagaacgcgaccgccagcuucaucuacaacgggcggcugguggacuccguggucagcugguccaaggacauccugcgcacccaggagagcgagugcgugugcaucaacggcacgugcaccguggucaugaccgacggguccgccagcggcaaggccgacaccaagauccucuucaucgaggagggcaagaucgugcacacgagcacccuguccgggagcgcgcagcacguggaggagugcuccugcuacccccgguaccccggcguccgcugcgugugccgggacaacuggaaggggagcaaccgcccgaucguggacaucaacaucaagaaccacuccaucgucagcuccuacgugugcagcggccuggugggcgacacgccccggaagaacgacuccagcuccagcucccacugccucgaccccaacaacgaggagggcgggcacggggucaagggcugggccuucgacgacgggaacgacguguggaugggccgcaccaucagcgagaagucccggcugggcuacgagaccuucaaggucaucgagggguggagcaaccccaaguccaagcugcagaucaaccgccaggugaucguggaccggggcaaccgcagcggguacuccggcaucuucagcgucgagggcaagagcugcaucaaccggugcuucuacguggagcucauccgcgggcggaaggaggagaccgaggugcuguggaccuccaacagcaucgucguguucugcggcaccuccgggacguacggcaccgggagcuggccggacggcgccgacaucaaccugaugcccaucuga

SEQ ID NO: 86269 - RNA, 1413 nt, Artificial Sequence; identical to SEQ ID NO: 81485
  derived and/or modified CDS sequence (opt1) from neuraminidase__InfluenzaA__AFJ75654

SEQ ID NO: 86270 - RNA, 1410 nt, Artificial Sequence; identical to SEQ ID NO: 79908
  derived and/or modified CDS sequence (opt1) from neuraminidase__InfluenzaA__AFJ75665

SEQ ID NO: 86271 - RNA, 1413 nt, Artificial Sequence
  derived and/or modified CDS sequence (opt1) from neuraminidase__InfluenzaA__AFJ75676
augaaccccaaccagaagaucaucaccaucggcagcaucuccaucgccaucgggaucaucagccugaugcuccagaucggcaacaucaucuccaucugggccagccacuccauccagaccgggagccagaaccacacgggcaucugcaaccagcgcaucaucaccuacgagaacuccaccugggugaaccacaccuacgucaacaucaacaacacgaacgugguggcggggaaggacaagaccccggucacccuggccggcaacagcucccugugcagcaucuccggcugggccauccacaccaaggacaacagcauccggaucggguccaagggcgacguguucgugauccgcgagcccuucaucagcugcucccaccucgagugcaagacguucuuccugacccagggggcccugcucaacgacaagcacagcaacggcaccgucaaggaccggucccccuaccgcgcccugaugagcugcccccugggggaggcgccgucccccuacaacagcaaguucgagagcguggccugguccgccagcgccugccacgacggcaucggcuggcucaccaucgggaucuccggccccgacaacggggcgguggccguccugaaguacaacggcaucaucacgggcaccaucaagagcuggaagaagcagauccugcggacccaggaguccgagugcgugugcaugaacgggagcugcuucaccaucaugacggacggccccuccaacggggccgccagcuacaagaucuucaagaucgagaagggcaaggugaccaaguccauggagcucaacgccccgaacuuccacuacgaggagugcagcugcuaccccgacaccgggaccgucaugugcgugugccgcgacaacuggcacggcuccaaccggcccugggugagcuucaaccagaaccuggacuaccagaucggcuacaucugcuccggggucuucggcgacaacccccgcccgaaggacggggagggcagcugcaaccccgugacgguggacggggcgaacggcgucaagggcuucuccuacaaguacgggaacggcguguggaucgggcggaccaagagcaaccgcauccggaagggcuucgagaugaucugggaccccaacggguggaccaacaccgacuccgacuucagcgugaagcaggacaucgucgccaucacggacugguccggcuacagcggcagcuucgugcagcaccccgagcugaccgggcucgacugcauccgcccgugcuucuggguggagcugguccggggccugccccgcgagaacaccaccaucuggacguccgggagcuccaucagcuucugcggcgugaacuccgacaucgccaacuggagcuggcccgacggcgccgagcuccccuucaccaucgacaaguga

SEQ ID NO: 86272 - RNA, 1413 nt, Artificial Sequence; identical to SEQ ID NO: 81485
  derived and/or modified CDS sequence (opt1) from neuraminidase__InfluenzaA__AFJ75687

SEQ ID NO: 86273 - RNA, 1410 nt, Artificial Sequence; identical to SEQ ID NO: 80762
  derived and/or modified CDS sequence (opt1) from neuraminidase__InfluenzaA__AFJ76122

SEQ ID NO: 86274 - RNA, 1410 nt, Artificial Sequence; identical to SEQ ID NO: 85340
  derived and/or modified CDS sequence (opt1) from neuraminidase__InfluenzaA__AFJ76134

SEQ ID NO: 86275 - RNA, 1410 nt, Artificial Sequence; identical to SEQ ID NO: 80762
  derived and/or modified CDS sequence (opt1) from neuraminidase__InfluenzaA__AFJ76146

SEQ ID NO: 86276 - RNA, 1410 nt, Artificial Sequence; identical to SEQ ID NO: 80762
  derived and/or modified CDS sequence (opt1) from neuraminidase__InfluenzaA__AFJ76159

SEQ ID NO: 86277 - RNA, 1410 nt, Artificial Sequence; identical to SEQ ID NO: 80762
  derived and/or modified CDS sequence (opt1) from neuraminidase__InfluenzaA__AFJ76173

SEQ ID NO: 86278 - RNA, 1410 nt, Artificial Sequence; identical to SEQ ID NO: 80762
  derived and/or modified CDS sequence (opt1) from neuraminidase__InfluenzaA__AFJ76191

SEQ ID NO: 86279 - RNA, 1413 nt, Artificial Sequence
  derived and/or modified CDS sequence (opt1) from neuraminidase__InfluenzaA__AFJ76192
augaaccccaaccagaagaucaucaccaucggcagcaucuccaucgccaucgggaucaucagccugauggugcagaucggcaacaucaucuccaucugggccagccacuccauccagaccgggauccagaacaacacgggcaucugcaaccagcgcaucaucaccuacgagaacagcaccugggucaaccacaccuacgugaacaucaacaacacgaacguggucgcgggggaggacaagaccuccgugacccucgccggcaacagcucccugugcagcaucuccggcugggccaucuacaccaaggacaacagcauccggaucggguccaagggcgacguguucgucauccgcgagccguucaucagcugcucccaccuggagugccggacguucuuccucacccagggggcccugcugaacgacaagcacagcaacggcaccgugaaggaccgcucccccuaccgggcccucaugagcugcccccugggggaggcgcccuccccguacaacagcaaguucgagagcguggccugguccgccagcgccugccacgacggcaugggcuggcugaccaucgggaucuccggccccgacaacggggcggucgccgugcucaaguacaacggcaucaucacgggcaccaucaagagcuggaagaagcagauccugcgcacccaggaguccgagugcgugugcaugaacgggagcugcuucaccaucaugacggacggccccuccaacaaggccgccagcuacaagaucuucaagaucgagaaggggaaggucaccaaguccaucgagcugaacgcccccaacuucuacuacgaggagugcagcugcuacccggacaccggcaucgugaugugcgugugccgggacaacuggcacggguccaaccgccccugggucagcuucaaccagaaccucgacuaccagaucggcuacaucugcuccggcguguucggggacaacccccggcccgaggacggcgaggggagcugcaacccggugaccgucgacggcgcgaacggggugaagggcuucuccuacaaguacggcaacgggguguggaucggccgcaccaagagcaaccggcugcgcaagggguucgagaugaucugggaccccaacggcuggacgaacaccgacuccgacuucagcgucaagcaggacgugguggccaucaccgacugguccggguacagcggcagcuucguccagcaccccgagcugacgggccucgacugcauccggcccugcuucuggguggagcugguccgcgggcugccgcgggagaacaccaccaucuggaccuccggcagcuccaucagcuucugcggggugaacuccgacacggccaacuggagcuggcccgacggcgccgagcuccccuucaccaucgacaaguga

SEQ ID NO: 86280 - RNA, 1410 nt, Artificial Sequence; identical to SEQ ID NO: 80762
  derived and/or modified CDS sequence (opt1) from neuraminidase__InfluenzaA__AFJ76206

SEQ ID NO: 86281 - RNA, 1410 nt, Artificial Sequence
  derived and/or modified CDS sequence (opt1) from neuraminidase__InfluenzaA__AFJ76216
augaaccccaaccagaagaucaucaccaucggcagcgugucccugaccaucgccacgaucugcuuccucaugcagaucgccauccuggucaccaccgugacccugcacuucaagcagcacgagugcaacagcccgcccaacaaccaggugaugcucugcgagcccacgaucaucaagcgcaacaucaccgagaucgucuaccugaccaacaccacgaucgagaaggagaucugccccaagcuggcggaguaccggaacugguccaagccgcagugcaacaucaccggguucgcccccuucagcaaggacaacuccauccgccucagcgccggcggggacaucugggugacccgggagcccuacguguccugcgaccccgacaagugcuaccaguucgcccugggccaggggaccacgcugaacaacggccacagcaacgacaccguccacgaccgcaccccguaccggacccuccugaugaacgagcugggcgugcccuuccaccucgggacgcgccaggugugcaucgccugguccagcuccagcugccacgacggcaaggcguggcugcacgucugcgugaccggggacgacaagaacgccaccgccuccuucaucuacaacggccggcugguggacagcaucggguccuggagcaagaagauccuccgcacccaggaguccgagugcgucugcaucaacggcacgugcaccguggugaugaccgacggcagcgccuccgggaaggcggacaccaagauccuguucaucgaggagggcaagaucguccacaucagcacgcugagcggguccgcccagcacguggaggagugcagcugcuacccccgguaccccggcgugcgcugcgucugccgggacaacuggaagggcuccaaccgcccgaucguggacaucaacgugaaggacuacagcaucgucuccagcuacgugugcuccgggcucgugggcgacacgccccggaagaacgacagcuucuccagcucccacugccuggaccccaacaacgaggagggcgggcacggggucaagggcugggccuucgacgacggcaacgacguguggauggggcgcaccaucagcgagaagcugcgguccggcuacgagaccuucaaggucaucgagggguggagcaagcccaacuccaagcuccagaucaaccgccaggugaucguggagcggggcaaccgcagcggguacuccggcaucuucagcgucgagggcaaguccugcaucaaccggugcuucuacguggagcugauccgcgggcggaaggaggagaccgaggugugguggaccagcaacagcaucgucguguucugcggcaccuccgggaccuacggcacggggagcuggccggacggcgccgacaucaaccugaugcccaucuga

SEQ ID NO: 86282 - RNA, 1410 nt, Artificial Sequence
  derived and/or modified CDS sequence (opt1) from neuraminidase__InfluenzaA__AFJ77411
augaaccccaaccagaagaucaucaccaucggcagcgugucccugaccaucgccacgaucugcuuccucaugcagaucgucauccuggugaccaccgugacccugcacuucaagcaguacgagugcaacagcccgcccaacaaccaggucaugcucugcgagcccacgaucaucgagcgcaacaucaccgagaucguguaccugaccaacaccacgaucgagaaggagaucugccccaagcuggccgaguaccggaacugguccaagccgcagugcaagaucaccggguucgcgcccuucagcaaggacaacuccauccgccucagcgccggcggggacaucugggugacccgggagcccuacgucuccugcgaccccggcaagugcuaccaguucgcccuggggcagggcaccacgcugaacaaccgccacagcaacgacaccgugcacgaccggaccccguaccgcacccuccugaugaacgagcugggcgugcccuuccaccucgggacgaagcaggucugcaucgccugguccagcuccagcugccacgacggcaaggccuggcugcacgugugcgugaccgggcacgacgagaacgcgaccgccuccuucaucuacgacggccggcuggucgacagcaucggguccuggagcaagaacauccuccgcacccaggaguccgagugcgugugcaucaacggcacgugcaccguggucaugaccgacggcagcgccuccgagcgggccgacaccaagauccuguucaucgaggaggggaagaucgugcacaucagcccccugagcggcuccgcgcagcacguggaggagugcagcugcuacccccgcuacccggggguccggugcgugugccgcgacaacuggaagggcuccaaccggcccaucguggacaucaacgucaaggacuacagcaucguguccagcuacgugugcuccggccucgucggggacacgccccgcaagaacgacagcuccagcuccagcuacugccugaaccccaacaacgaggagggcgggcacggcgugaaggggugggccuucgacgacggcaacgacgucuggaugggccggaccaucuccgagaagcugcgcagcggguacgagaccuucaaggugaucggcgggugguccaagccgaacagcaagcuccagaucaaccgccaggugaucgucgaccggggcaaccgguccggguacagcggcaucuucuccguggagggcaagagcugcgugaaccgcugcuucuacgucgagcugauccgggggcgcaagcaggagaccgaggugugguggacgagcaacuccaucguggucuucugcggcaccagcgggaccuacggcaccggguccuggcccgacggcgccgacaucaaccugaugcccaucuga

SEQ ID NO: 86283 - RNA, 1410 nt, Artificial Sequence
  derived and/or modified CDS sequence (opt1) from neuraminidase__InfluenzaA__AFJ77422
augaaccccaaccagaagaucaucaccaucggcagcgugucccugaccaucgccacgaucugcuuccucaugcagaucgccauccuggucaucaccgugacccugcacuucaagcaguacgagugcaacagcccgcccaacaaccaggugaugcucugcgagcccaccaucaucgagcgcaacaucacggagaucgucuaccugaccaacaccaccaucgagaaggagaucugccccaagcuggcggaguaccggaacugguccaagccgcagugcaagaucacgggguucgcccccuucagcaaggacaacuccauccgccucagcgccggcggggacaucugggugacccgggagcccuacguguccugcgaccccgacaagugcuaccaguucgcccugggccaggggaccacccugaacaaccgccacagcaacgacacgguccacgaccggaccccguaccgcacccuccugaugaacgagcugggcgugcccuuccaccucggcaccaagcaggucugcaucgccugguccagcuccagcugccacgacgggaaggcguggcugcacgugugcgugacgggccacgacgagaacgccaccgccuccuucaucuacgacgggcggcugguggacagcaucggcuccuggagcaagaagauccuccgcacccaggaguccgagugcgucugcaucaacgggaccugcacgguggugaugaccgacggcagcgccuccggccgggcggacaccaagauccuguucaucgaggaggggaagaucguccacaucagcccccugagcggcuccgcccagcacguggaggagugcagcugcuacccccgcuacuccggggugcggugcgucugccgcgacaacuggaagggcagcaaccggccgaucguggacaucaacgugaaggacuacuccaucgucagcuccuucgugugcagcggccucgugggggacacgccccgcaagaacgacuccagcuccagcucccacugccugaaccccaacaacgaggagggcgggcacggcgucaaggggugggccuucgacgacggcaacgacguguggaugggccggaccaucagcgagaagcugcgcuccggguacgagaccuucaaggucaucggcggguggagcaagcccaacuccaagcuccagaucaaccgccaggugaucguggaccggggcaaccggagcggguacuccggcaucuucagcgucgagggcaagagcugcaucaaccgcugcuucuacguggagcugauccgggggcgcaagcaggagaccgaggugugguggaccuccaacagcaucgucguguucugcggcacguccgggaccuacggcaccgggagcuggccggacggcgccgacaucaaccugaugcccaucuga

SEQ ID NO: 86284 - RNA, 1410 nt, Artificial Sequence
  derived and/or modified CDS sequence (opt1) from neuraminidase__InfluenzaA__AFJ77433
augaaccccaaccagaagaucaucaccaucggcagcgugucccugaccaucgccacgaucugcuuccucaugcagaucgucauccuggugaccaccgugacccugcacuucaagcaguacgagugcaacagcccgcccaacaaccaggucaugcucugcgagcccacgaucaucgagcgcaacaucaccgagaucguguaccugaccaacaccacgaucgagaaggagaucugccccaagcuggccgaguaccggaacugguccaagccgcagugcaagaucaccggguucgcgcccuucagcaaggacaacuccauccgccucagcgccggcggggacaucugggugacccgggagcccuacgucuccugcgaccccggcaagugcuaccaguucgcccuggggcagggcaccacgcugaacaaccgccacagcaacgacaccgugcacgaccggaccccguaccgcacccuccugaugaacgagcugggcgugcccuuccaccucgggacgaagcaggucugcaucgccugguccagcuccagcugccacgacggcaaggccuggcugcacgugugcgugaccgggcacgacgagaacgcgaccgccuccuucaucuacgacggccggcuggucgacagcaucggguccuggagcaagaacauccuccgcacccaggaguccgagugcgugugcaucaacggcacgugcaccguggucaugaccgacggcagcgccuccgagcgggccgacaccaagauccuguucaucgaggaggggaagaucgugcacaucagcccccugagcggcuccgcgcagcacguggaggagugcagcugcuacccccgcuacccggggguccggugcgugugccgcgacaacuggaagggcuccaaccggcccaucguggacaucaacgucaaggacuacagcaucguguccagcuacgugugcuccggccucgucggggacacgccccgcaagaccgacagcuccagcuccagcgacugccugaaccccaacaacgaggagggcgggcacggcgugaaggggugggccuucgacgacggcaacgacgucuggaugggccggaccaucuccgagaagcugcgcagcggguacgagaccuucaaggugaucggcgggugguccaagccgaacagcaagcuccagaucaaccgccaggugaucgucgaccggggcaaccgguccggguacagcggcaucuucuccguggagggcaagagcugcgugaaccgcugcuucuacgucgagcugauccgggggcgcaagcaggagacggaggugugguggaccagcaacuccaucguggucuucugcggcaccagcgggaccuacggcacgggguccuggcccgacggcgccgacaucaaccugaugcccaucuga

SEQ ID NO: 86285 - RNA, 1410 nt, Artificial Sequence
  derived and/or modified CDS sequence (opt1) from neuraminidase__InfluenzaA__AFJ77443
augaaccccaaccagaagaucaucaccaucggcagcgugucccugaccaucgccacgaucugcuuccucaugcagaucgccauccuggucaucacccugacccuccacuucaagcaguacgagugcaacagcccgcccaacaaccaggugaugcugugcgagcccaccaucaucgagcgcaacaucacggagaucguguaccugaccaacaccaccaucgagaaggagaucugccccaagcucgcggaguaccggaacugguccaagccgcagugcaagaucacgggguucgcccccuucagcaaggacaacuccauccgccugagcgccggcggggacaucugggucacccgggagcccuacguguccugcgaccccggcaagugcuaccaguucgcccuggggcagggcaccacccucaacaaccgccacagcaacgacacggugcacgaccggaccccguaccgcacccugcugaugaacgagcucggcguccccuuccaccuggggaccaagcaggucugcaucgccugguccagcuccagcugccacgacggcaaggcguggcugcacgugugcgugacggggcacaacgagaacgccaccgccuccuucaucuacgacggccggcucguggacagcaucggguccuggagcaagaacauccugcgcacccaggaguccgagugcgugugcaucaacgggaccugcacggucgugaugaccgacggcagcgccuccgggcgggcggacaccaagauccuguucaucgaggagggcaagaucgugcacaucagcccccucagcggguccgcccagcacgucgaggagugcagcugcuacccccgcuacccgggcgugcggugcgugugccgcgacaacuggaagggcuccaaccggcccaucgucgacaucaacgugaaggacuucagcaucguguccagcuacgucugcuccgggcuggugggcgacacgccccgcaagaacgacagcuccagcuccagccacugccugaaccccaacaacgaggagggcggcaacggggugaagggcugggccuucgacgacggcaacgacgucuggauggggcggaccaucuccgagaagcuccgcagcggcuacgagaccuucaaggugaucgggggcugguccaagccgaacagcaagcugcagaucaaccggcaggucaucguggaccgcgggaaccgguccggcuacagcggcaucuucuccguggagggcaagagcugcaucaaccgcugcuucuacgucgagcugauccgggggcgcaagcaggagaccgaggugugguggaccagcaacuccaucguggucuucugcgggacgagcggcaccuacgggaccggcuccuggcccgacggcgccgacaucaaccucaugcccaucuga

SEQ ID NO: 86286 - RNA, 1410 nt, Artificial Sequence
  derived and/or modified CDS sequence (opt1) from neuraminidase__InfluenzaA__AFJ77465
augaaccccaaccagaagaucaucaccaucggcagcgugucccugaccaucgccacgaucugcuuccucaugcagaucgccauccuggucaccaccgugacccugcacuucaagcaguacgagugcaacccgccgcccaacaaccaggugaugcucugcgagcccacgaucaucgagcgcaacaucaccgagaucgucuaccugaccaacaccacgaucgagaaggagaucugccccaagcuggcggaguaccggaacuggagcaagccccagugcaagaucaccggguucgcccccuucuccaaggacaacagcauccgccucuccgccggcggggacaucugggugacccgggagcccuacgugagcugcgacccggacaagugcuaccaguucgcccugggccaggggaccacgcugaacaaccgccacuccaacgacaccguccacgaccggacccccuaccgcacccuccugaugaacgagcugggcgugcccuuccaccucggcacgaagcaggucugcaucgccuggagcuccagcuccugccacgacgggaaggcguggcugcacgugugcgugaccggccacgacgagaacgccaccgccagcuucaucuacgacgggcggcugguggacuccaucggcagcugguccaagaagauccuccgcacccaggagagcgagugcgucugcaucaacgggacgugcaccguggugaugaccgacggcuccgccagcggccgggcggacaccaagauccuguucaucgaggaggggaagaucguccacaucagcccccuguccggcagcgcccagcacguggaggagugcuccugcuacccgcgcuaccccggggugcggugcgucugccgcgacaacuggaagggcagcaaccggcccaucguggacaucaacgugaagaacuacuccaucgucagcuccuacgugugcagcggccucgugggggacacgccccgcaagaacgacuccagcuccagcucccacugccugaacccgaacaacgaggagggcgggcacggcgucaaggggugggccuucgacgacggcaacgacguguggaugggccggaccaucagcgagaagcugcgcuccggguacgagaccuucaaggucaucgagggcuggagcaagcccaacuccaagcuccagaucaaccgccaggugaucguggaccgggggaaccggagcggcuacuccgggaucuucagcgucgagggcaaguccugcaucaaccgcugcuucuacguggagcugauccggggccgcaagcaggagaccgaggugugguggacgagcaacagcaucgucguguucugcgggaccuccggcaccuacgggaccggcagcuggcccgacggggccgacaucaaccugaugcccaucuga

SEQ ID NO: 86287 - RNA, 1410 nt, Artificial Sequence
  derived and/or modified CDS sequence (opt1) from neuraminidase__InfluenzaA__AFJ77476
augaaccccaaccagaagaucaucaccaucggcagcgugucccugaccaucgccacgaucugcuuccucaugcagaucgccauccuggucaccaccgugacccugcacuucaagcaguacgagugcaacagccucccgaacaaccaggugaugcugugcgagcccacgaucaucgagcgcaacaucaccgagaucgucuaccugaccaacaccacgaucgagaaggagaucugccccaagcucgcggaguaccggaacugguccaagccccagugcaagaucaccggguucgccccguucagcaaggacaacuccauccgccugagcgccggcggggacaucugggugacccgggagcccuacguguccugcgaccccgacaagugcuaccaguucgcccugggccaggggaccacgcucaacaaccgccacagcaacgacaccguccacgaccggacccccuaccgcacccugcugaugaacgagcucggcgugccguuccaccugggcacgaagcaggucugcaucgccugguccagcuccagcugccacgacgggaaggcguggcugcacgugugcgugaccggccacgacgagaacgccaccgccuccuucaucuacgggggccggcucguggacagcaucggguccuggagcaagaagauccugcgcacccaggaguccgagugcgucugcaucaacggcacgugcaccguggugaugaccgacggcagcgccuccgggcgggcggacaccaagauccuguucaucgaggagggcaagaucauccacaucagccagcucagcggguccgcccagcacgucgaggagugcagcugcuacccccgcuaccccggcgugcggugcgugugccgcgacaacuggaagggcuccaaccggcccaucgucgacaucaacgugaaggacuacagcaucguguccagcuacgucugcuccgggcuggugggcgacacgccgcgcaagaacgacagcuccagcuccagccacugccuggaccccaacaacgaggagggcgggcacggggugaagggcugggccuucgacgacggcaacgacgucuggauggggcggaccaucuccgagaaguuccgcagcggcuacgagaccuucaaggugaucgaggggugguccaagcccaacagcaagcuccagaucaaccggcagaucaucgucgaccgcgacaaccgguccggcuacagcgggaucuucuccguggagggcaagagcugcaucaaccgcugcuucuacguggagcugauccggggccgcaagcaggagaccgaggucugguggacgagcaacuccaucgugguguucugcgggaccagcggcaccuacgggaccggcuccuggcccgacggggccgacaucaaccugaugccgaucuga

SEQ ID NO: 86288 - RNA, 1410 nt, Artificial Sequence; identical to SEQ ID NO: 78339
  derived and/or modified CDS sequence (opt1) from neuraminidase__InfluenzaA__AFJ77487

SEQ ID NO: 86289 - RNA, 1410 nt, Artificial Sequence
  derived and/or modified CDS sequence (opt1) from neuraminidase__InfluenzaA__AFJ77498
augaaccccaaccagaagaucaucaccaucggcagcgugucccugaccaucgccacgaucugcuuccucaugcagaucgccauccuggucaccaccgugacccugcacuucaagcaguacgagugcaacagcccgcccaacaaccaggugaugcucugcgagcccacgaucaucgagcgcaacaucaccgagaucgucuaccugaccaacaccacgaucgagaaggagaucugccccaagcuggcggaguaccggaacugguccaagccgcagugcaagaucaccggguucgcccccuucagcaaggacaacuccauccgccucagcgccggcggggacaucugggugacccgggagcccuacguguccugcgaccccgacaagugcuaccaguucgcccugggccaggggaccacgcugaacaaccgccacagcaacgacaccguccacgaccggaccccguaccgcacccuccugaugaacgagcugggcgugcccuuccaccucggcacgaagcaggucugcaucgccugguccagcuccagcugccacgacgggaaggcguggcugcacgugugcgugaccggccacgacgagaacgccaccgccuccuucaucuacgacgggcggcugguggacagcaucggcuccuggagcaagaagauccuccgcacccaggaguccgagugcgucugcaucaacgggacgugcaccguggugaugaccgacggcagcgccuccggccgggcggacaccaagauccuguucaucgaggaggggaagaucguccacacgagcaagcugagcggcuccgcccagcacguggaggagugcagcugcuacccccgcuaccccggggugcggugcgucugccgcgacaacuggaagggcuccaaccggccgaucguggacaucaacgugaaggacuacagcaucaucuccagcuacgucugcuccggccucgugggggacacgccccgcaagaacgacagcuccagcuccagccacugccuggaccccaacaacgaggagggcgggcacggcgugaaggggugggccuucgacgacggcaacgacgucuggaugggccggaccaucuccgagaagucccgcagcggguacgagaccuucaaggugaucgagggcuggagcaagcccaacuccaagcugcagaucaaccggcaggucaucguggagcgcgggaacaugagcggcuacuccgggaucuucagcguggagggcaagagcugcaucaaccggugcuucuacgucgagcucauccgcggccggaagcaggagaccgaggugugguggaccuccaacagcaucguggucuucugcgggaccuccggcaccuacgggacgggcagcuggccggacggggccgacaucaaccugaugcccaucuga

SEQ ID NO: 86290 - RNA, 1410 nt, Artificial Sequence; identical to SEQ ID NO: 78339
  derived and/or modified CDS sequence (opt1) from neuraminidase__InfluenzaA__AFJ77509

SEQ ID NO: 86291 - RNA, 1410 nt, Artificial Sequence
  derived and/or modified CDS sequence (opt1) from neuraminidase__InfluenzaA__AFJ77520
augaaccccaaccagaagaucaucaccaucggcagcgugucccugaccaucgccacgaucugcuuccucaugcagaucgccauccuggucaccaccgugacccugcacuucaagcaguacgagugcaacagcccgcccaacaaccaggugaugcucugcgagcccacgaucaucgagcgcaacaucaccgagaucgucuaccugaccaacaccacgaucgagaaggagaucugccccaagcuggcggaguaccggaacugguccaagccgcagugcaacaucaccggguucgcccccuucagcaaggacaacuccauccgccucagcgccggcggggacaucugggugacccgggagcccuacguguccugcgaccccgacaagugcuaccaguucgcccugggccaggggaccacgcugaacaacggccacagcaacgacaccguccacgaccgcaccccguaccggacccuccugaugaacgagcugggcgugcccuuccaccucgggacgaagcaggucugcaucgccugguccagcuccagcugccacgacggcaaggcguggcugcacgugugcgugaccggggacgacgagaacgccaccgccuccuucaucuacaacggccgccugguggacagcaucggguccuggagcaagaagauccuccggacccaggaguccgagugcgucugcaucaacggcacgugcaccguggugaugaccgacggcagcgccuccgggaaggcggacaccaagauccuguucaucgaggagggcaagaucguccacacgagcagccuguccgggagcgcccagcacguggaggagugcuccugcuacccccgcuaccccggcgugcggugcgucugccgcgacaacuggaagggcagcaaccggccgaucguggacaucaacgugaaggacuacuccaucgucagcuccuacgugugcagcgggcucgugggcgacacgccccgcaagaacgacuccagcuccagcucccacugccuggaccccaacaacgaggagggcgggcacggggucaagggcugggccuucgacgacggcaacgacguguggauggggcggaccaucagcgagaagcugcgcuccggcuacgagaccuucaaggucaucgagggguggagcaagcccaacuccaagcuccagaucaaccgccaggugaucguggaccggggcaaccggagcggguacuccggcaucuucagcgucgagggcaagagcugcaucaaccgcugcuucuacguggagcugauccgggggcgcaagcaggagaucgaggugcuguggaccuccaacagcaucgucguguucugcggcaccuccgggaccuacggcaccgggagcuggccggacggcgccgacaucaaccucaugcccaucuga

SEQ ID NO: 86292 - RNA, 1410 nt, Artificial Sequence
  derived and/or modified CDS sequence (opt1) from neuraminidase__InfluenzaA__AFJ77531
augaaccccaaccagaagaucaucaccaucggcagcgugucccugaccaucacgaccaucugcuuccucaugcagaucgccauccuggucaucaccgugacccugcacuucaagcagugcgagugcaacagcccgcccaacaaccaggugaugcucugcgagcccacgaucaucgagcgcaacaucaccgagaucgucuaccugaccaacaccacgaucgagaaggagaucugccccaagcuggccgaguaccggaacugguccaagccgcagugcaaggugaccggguucgcgcccuucagcaaggacaacuccauccgccucagcgccggcggggacaucugggugacccgggagcccuacgucuccugcgaccccggcaagugcuaccaguucgcccuggggcagggcaccacgcugaacaaccgccacagcaacgacaccgugcacgaccggaccccguaccgcacccuccugaugaacgagcugggcgugcccuuccaccucgggacgaagcaggucugcaucgccugguccagcuccagcugccacgacggcaaggccuggcugcacgugugcgugaccgggcacaacgagaacgcgaccgccuccuucaucuacgacggccggcuggucgacagcaucggguccuggagcaagaacauccuccgcacccaggaguccgagugcgugugcaucaacggcacgugcaccguggucaugaccgacggcagcgccuccgggcgggccgacaccaagauccuguucaucgaggagggcaagaucgugcacaucagcccccugagcggguccgcgcagcacguggaggagugcagcugcuacccccgcuacccgggcguccggugcgugugccgcgacaacuggaagggcuccaaccggcccaucguggacaucaacgucaaggacuacagcaucguguccagcuacgugugcuccgggcucgucggcgacacgccccgcaagaacgacagcuccagcuccagcuacugccuggaccccaacaacgaggagggcgggcacggggugaagggcugggccuucgacgacggcaacgacgucuggauggggcggaccaucuccgagaagcugcgcagcggcuacgagaccuucaaggugaucgggggcugguccaagccgaacagcaagcuccagaucaaccgccaggugaucgucgaccgggggaaccgguccggcuacagcggcaucuucuccguggagggcaagagcugcaucaaccgcugcuucuacguggagcugauccgggggcgcaagcaggagaccgaggucugguggacgagcaacuccaucgugguguucugcgggaccagcggcaccuacgggaccggcuccuggcccgacggcgccgacaucaaccugaugcccaucuga

SEQ ID NO: 86293 - RNA, 1410 nt, Artificial Sequence
  derived and/or modified CDS sequence (opt1) from neuraminidase__InfluenzaA__AFJ77542
augaaccccaaccagaagaucaucaccaucggcagcgugucccugaccaucagcacgaucugcuuccucaugcagaucgccauccuggucaccaccgugacccugcacuucaagcaguacgagugcaacuccccgcccaacaaccaggugaugcucugcgagcccacgaucaucgagcgcaacaucaccgagaucgucuaccugaccaacaccacgaucgagaaggagaucugccccaagcuggccgaguaccggaacuggagcaagccgcagugcaacaucaccggguucgcgcccuucuccaaggacaacagcauccgccucuccgccggcggggacaucugggugacccgggagcccuacgugagcugcgaccccgacaagugcuaccaguucgcccugggccaggggaccacgcugaacaacggccacuccaacgacaccguccacgaccgcaccccguaccggacccuccugaugaacgagcugggcgugcccuuccaccucgggacgaagcaggucugcaucgccuggagcuccagcuccugccacgacggcaaggccuggcugcacgugugcgugaccggggacgacgagaacgcgaccgccagcuucaucuacaacggccgccugguggacuccaucgggagcugguccaagaagauccuccggacccaggagagcgagugcgucugcaucaacggcacgugcaccguggugaugaccgacggcuccgccagcgggaaggccgacaccaagauccuguucaucgaggagggcaagaucguccacacgagcacccuguccgggagcgcgcagcacguggaggagugcuccugcuacccccgcuaccccggcgugcggugcgucugccgcgacaacuggaagggcagcaaccggccgaucguggacaucaacaucaaggacuacuccaucgugagcuccuacgucugcagcgggcucgugggcgacacgccccgcaagaacgacuccagcuccagcucccacugccuggaccccaacaacgaggagggcgggcacggggugaagggcugggccuucgacgacggcaacgacgucuggauggggcggaccaucagcgagaagcugcgcuccggcuacgagaccuucaaggugaucgagggguggagcaagcccaacuccaagcuccagaucaaccggcaggucaucguggaccgcggcaaccggagcggguacuccggcaucuucagcguggagggcaagagcugcaucaaccgcugcuucuacgucgagcugauccgggggcgcaagcaggagaccgaggugcuguggaccuccaacagcaucguggucuucugcggcaccuccgggacguacggcaccgggagcuggccggacggcgccgacaucaaccucaugcccaucuga

SEQ ID NO: 86294 - RNA, 1410 nt, Artificial Sequence; identical to SEQ ID NO: 78277
  derived and/or modified CDS sequence (opt1) from neuraminidase__InfluenzaA__AFJ77553

SEQ ID NO: 86295 - RNA, 1410 nt, Artificial Sequence
  derived and/or modified CDS sequence (opt1) from neuraminidase__InfluenzaA__AFJ77564
augaaccccaaccagaagaucaucaccaucggcagcgugucccugaccaucgccacgaucugcuuccucaugcagaucgccauccuggucaccaccgugacccugcacuucaagcaguacgagugcaacagcccgcccaacaaccaggugaugcucugcgagcccacgaucaucgagcgcaacaucaccgagaucgucuaccugaccaacaccacgaucgagaaggagaucugccccaagcuggcggaguaccggaacugguccaagccgcagugcaagaucaccggguucgcccccuucagcaaggacaacuccauccgccucagcgccggcggggacaucugggugacccgggagcccuacguguccugcgaccccgacaagugcuaccaguucgcccugggccaggggaccacgcugaacaaccgccacagcaacgacaccguccacgaccggaccccguaccgcacccuccugaugaacgagcugggcgugcccuuccaccucggcacgaagcaggucugcaucgccugguccagcuccagcugccacgacgggaaggcguggcugcacgugugcgugaccggccacgacgagaacgccaccgccuccuucaucuacgacgggcggcugguggacagcaucggcuccuggagcaagaagauccuccgcacccaggaguccgagugcgucugcaucaacgggacgugcaccguggugaugaccgacggcagcgccuccggccgggcggacaccaagauccuguucaucgaggaggggaagaucguccacaucagccagcugagcggcuccgcccagcacguggaggagugcagcugcuacccccgcuaccccggggugcggugcgucugccgcgacaacuggaagggcuccaaccggccgaucguggacaucaacgugaaggacuacagcaucgucuccagcuacgugugcuccggccucgugggggacacgccccgcaagaacgacagcuccagcuccagccacugccugaaccccaacaacgaggagggcgggcacggcgucaaggggugggccuucgacgacggcaacgacguguggaugggccggaccaucuccgagaagcugcgcagcggguacgagaccuucaaggucaucgagggcugguccaagcccaacagcaagcuccagaucaaccgccaggugaucguggaccgggggaaccgguccggcuacagcgggaucuucuccgucgagggcaagagcugcaucaaccgcugcuucuacguggagcugauccggggccgcaagcaggagaacgaggugugguggaccagcaacuccaucgucguguucugcgggacgagcggcaccuacgggaccggcuccuggccggacggggccgacaucaaccugaugcccaucuga

SEQ ID NO: 86296 - RNA, 1329 nt, Artificial Sequence
  derived and/or modified CDS sequence (opt1) from neuraminidase__InfluenzaA__AFJ77575
augaaccccaaccagaagaucaucaccaucggcagcgugucccugaccaucgccacgaucugcuuccucaugcagaucgccauccuggucaucgagcgcaacaucaccgagaucguguaccugaccaacaccacgaucgagaaggagaucugcccgaagcucgcggaguaccggaacuggagcaagccccagugcaacaucaccggguucgcccccuucuccaaggacaacagcauccgccuguccgccggcggggacaucugggugacccgggagcccuacgucagcugcgacccggacaagugcuaccaguucgcccugggccaggggaccacgcucaacaacggccacuccaacgacaccgugcacgaccgcacccccuaccggacccugcugaugaacgagcucggcgugcccuuccaccuggggacgaagcaggucugcaucgccuggagcuccagcuccugccacgacggcaaggcguggcugcacgugugcgugaccggggacgacgagaacgccaccgccagcuucaucuacaacggccgccucgucgacuccaucgggagcugguccaagaagauccugcggacccaggagagcgagugcgugugcaucaacggcacgugcaccguggucaugaccgacggcuccgccagcgggaaggcggacaccaagauccuguucaucgaggagggcaagaucgugcacacguccagccucagcggguccgcccagcacguggaggagugcagcugcuacccccgcuacccgggcguccggugcgugugccgcgacaacuggaagggcuccaaccggcccaucguggacaucaacgucaaggacuacagcaucguguccagcuacgugugcuccgggcuggucggcgacacgccccgcaagaacgacagcuccagcuccagccacugccuggaccccaacaacgaggagggcgggcacggggugaagggcugggccuucgacgacggcaacgacguguggauggggcggaccaucuccgagaagcuccgcagcggcuacgagaccuucaaggucaucgaggggugguccaagccgaacagcaagcugcagaucaaccgccaggugaucgucgaccggggcaaccgguccggguacagcggcaucuucuccguggagggcaagagcugcaucaaccgcugcuucuacguggagcugauccgggggcgcaagcaggagaccgagguccucuggaccagcaacuccaucgugguguucugcggcaccagcgggaccuacggcacgggguccuggcccgacggcgccgacaucaaccugaugcccaucuga

SEQ ID NO: 86297 - RNA, 1410 nt, Artificial Sequence
  derived and/or modified CDS sequence (opt1) from neuraminidase__InfluenzaA__AFJ77597
augaaccccaaccagaagaucaucaccaucggcagcgugucccugaccaucgccacgaucugcuuccucaugcagaucgccauccuggucaccaccgugacccugcacuucaagcaguacgagugcaacagcccgcccaacaaccaggugaugcucugcgagcccacgaucaucgagcgcaacaucaccgagaucgucuaccugaccaacaccacgaucgagaaggagaucugccccaagcuggcggaguaccggaacugguccaagccgcagugcaacaucaccggguucgcccccuucagcaaggacaacuccauccgccucagcgccggcggggacaucugggugacccgggagcccuacguguccugcgaccccgacaagugcuaccaguucgcccugggccaggggaccacgcugaacaacggccacagcaacgacaccguccacgaccgcaccccguaccggacccuccugaugaacgagcugggcgugcccuuccaccucgggacgaagcaggucugcaucgccugguccagcuccagcugccacgacggcaaggcguggcugcacgugugcgugaccggggacgacgagaacgccaccgccuccuucaucuacaacggccgccugguggacagcaucggguccuggagcaagaagauccuccggacccaggaguccgagugcgucugcaucaacggcacgugcaccguggugaugaccgacggcagcgccuccgggaaggcggacaccaagauccuguucaucgaggagggcaagaucguccacacgcgcccccugagcgggagcgcccagcacguggaggagugcuccugcuacccccgguacccgggcgugcgcugcgucugccgggacaacuggaagggcagcaaccgccccaucguggacaucaacgugaaggacuacuccaucgucagcuccuacgugugcagcgggcucgugggcgacacgccccggaagaacgacuccagcuccagcucccacugccuggaccccaacaacgaggagggcgggcacggggucaagggcugggccuucgacgacggcaacgacguguggauggggcgcaccaucagcgagaagcugcgguccggcuacgagaccuucaaggucaucgagggguggagcaagccgaacuccaagcuccagaucaaccgccaggugaucguggaccggggcaaccgcagcggguacuccggcaucuucagcgucgagggcaaguccugcaucaaccggugcuucuacguggagcugauccgcgggcggaagcaggagaccgaggugcuguggaccagcaacagcaucgucguguucugcggcaccuccgggaccuacggcacggggagcuggcccgacggcgccgacaucaaccucaugcccaucuga

SEQ ID NO: 86298 - RNA, 1410 nt, Artificial Sequence
  derived and/or modified CDS sequence (opt1) from neuraminidase__InfluenzaA__AFJ77608
augaaccccaaccagaagaucaucaccaucggcagcgugucccugaccaucgccacgaucugcuuccucaugcagaccgccauccuggucaccaccgugacgcugcacuucaagcaguacgagugcaacagcccgcccaacaaccaggugaugcucugcgagcccaccaucaucgagcgcaacaugaccgagaucgucuaccugaccaacacgaccaucgagaaggagaucugccccaagcuggcggaguaccggaacugguccaagccgcagugcaacaucaccggguucgcccccuucagcaaggacaacuccauccgccucagcgccggcggggaccugugggugacccgggagcccuacguguccugcgaccccgacaagugcuaccaguucgcccugggccaggggacgacccucaacaacggccacagcaacgacaccguccacgaccgcaccccguaccggacgcugcugaugaacgagcucggcgugcccuuccaccuggggaccaagcaggucugcaucgccugguccagcuccagcugccacgacggcaaggcguggcugcacgugugcgugaccggggacgacgagaacgccaccgccuccuucaucuacaacggccgccucguggacagcaucggguccuggagcaagaagauccugcggacgcaggaguccgagugcgucugcaucaacgggaccugcaccguggugaugaccgacggcagcgccuccgggaaggcggacacgaagauccuguucaucgaggagggcaagaucguccacaccagcagccucuccgggagcgcccagcacguggaggagugcuccugcuacccccgcuaccccggcgugcggugcgucugccgcgacaacuggaagggcagcaaccggccgaucguggacaucaacgugaaggacuacuccaucgucagcuccuacgugugcagcgggcuggugggcgacacgccccgcaagaacgacuccagcuccagcucccacugccuggaccccaacaacgaggagggcggccacggggucaagggcugggccuucgacgacggcaacgacguguggauggggcggaccaucagcgagaagcuccgcuccggcuacgagaccuucaaggucaucgagggguggagcaagcccaacuccaagcugcagaucaaccgccaggugaucguggaccggggcaaccggagcggguacuccggcaucuucagcgucgagggcaagagcugcaucaaccgcugcuucuacguggagcugauccgggggcgcaagcaggagaccgaggugcucuggaccuccaacagcaucgucguguucugcggcaccuccgggacguacggcaccgggagcuggccggacggcgccgacaucaaccugaugcccaucuga

SEQ ID NO: 86299 - RNA, 1410 nt, Artificial Sequence; identical to SEQ ID NO: 86297
  derived and/or modified CDS sequence (opt1) from neuraminidase__InfluenzaA__AFJ77619

SEQ ID NO: 86300 - RNA, 1410 nt, Artificial Sequence; identical to SEQ ID NO: 86297
  derived and/or modified CDS sequence (opt1) from neuraminidase__InfluenzaA__AFJ77630

SEQ ID NO: 86301 - RNA, 1410 nt, Artificial Sequence; identical to SEQ ID NO: 86293
  derived and/or modified CDS sequence (opt1) from neuraminidase__InfluenzaA__AFJ77641

SEQ ID NO: 86302 - RNA, 1410 nt, Artificial Sequence; identical to SEQ ID NO: 86293
  derived and/or modified CDS sequence (opt1) from neuraminidase__InfluenzaA__AFJ77652

SEQ ID NO: 86303 - RNA, 1410 nt, Artificial Sequence; identical to SEQ ID NO: 78064
  derived and/or modified CDS sequence (opt1) from neuraminidase__InfluenzaA__AFJ77663

SEQ ID NO: 86304 - RNA, 1410 nt, Artificial Sequence; identical to SEQ ID NO: 78064
  derived and/or modified CDS sequence (opt1) from neuraminidase__InfluenzaA__AFJ77674

SEQ ID NO: 86305 - RNA, 1410 nt, Artificial Sequence; identical to SEQ ID NO: 78064
  derived and/or modified CDS sequence (opt1) from neuraminidase__InfluenzaA__AFJ77685

SEQ ID NO: 86306 - RNA, 1410 nt, Artificial Sequence
  derived and/or modified CDS sequence (opt1) from neuraminidase__InfluenzaA__AFJ77696
augaaccccaaccagaagaucaucaccaucggcagcgugucccugaccaucgccacgaucugcuuccucaugcagaucgccauccuggucaccaccgugacccugcacuucaagcaguacgagugcaacagcccgcccaacaaccaggugaugcucugcgagcccacgaucaucgagcgcaacaucaccgagaucgucuaccugaccaacaccacgaucgagaaggagaucugccccaagcuggcggaguaccggaacugguccaagccgcagugcaacaucaccggguucgcccccuucagcaaggacaacuccauccgccucagcgccggcggggacaucugggugacccgggagcccuacguguccugcgaccccgacaagugcuaccaguucgcccugggccaggggaccacgcugaacaacggccacagcaacgacaccguccacgaccgcaccccguaccggacccuccugaugaacgagcugggcgugcccuuccaccucgggacgaagcaggucugcaucgccugguccagcuccagcugccacgacggcaaggcguggcugcacgugugcgugaccggggacgacgagaacgccaccgccuccuucaucuacaacggccgccugguggacagcaucggguccuggagcaagaagauccuccggacccaggaguccgagugcgucugcaucaacggcacgugcaccguggugaugaccgacggcagcgccuccgagaaggcggacaccaagauccuguucaucgaggaggggaagaucguccacacgagccugcucagcggcuccgcccagcacguggaggagugcagcugcuacccccgcuaccccggggugcggugcgucugccgcgacaacuggaagggcuccaaccggccgaucguggacaucaacgugaaggacuacagcaucgucuccagcuacgugugcuccggccuggugggggacacgccccgcaagaacgacagcuccagcuccagccacugccuggaccccaacaacgaggagggcgggcacggcgucaaggggugggccuucgacgacggcaacgacguguggaugggccggaccaucuccgagaagcuccgcagcggguacgagaccuucaaggucaucgagggcugguccaagcccaacagcaagcugcagaucaaccgccaggugaucguggaccgggggaaccgguccggcuacagcgggaucuucuccgucgagggcaagagcugcaucaaccgcugcuucuacguggagcugauccggggccgcaagcaggagaccgaggugcucuggaccagcaacuccaucgucguguucugcgggaccagcggcaccuacgggacgggcuccuggccggacggggccgacaucaaccugaugcccaucuga

SEQ ID NO: 86307 - RNA, 1410 nt, Artificial Sequence; identical to SEQ ID NO: 78064
  derived and/or modified CDS sequence (opt1) from neuraminidase__InfluenzaA__AFJ77707

SEQ ID NO: 86308 - RNA, 1410 nt, Artificial Sequence; identical to SEQ ID NO: 78085
  derived and/or modified CDS sequence (opt1) from neuraminidase__InfluenzaA__AFJ77718

SEQ ID NO: 86309 - RNA, 1410 nt, Artificial Sequence; identical to SEQ ID NO: 78085
  derived and/or modified CDS sequence (opt1) from neuraminidase__InfluenzaA__AFJ77729

SEQ ID NO: 86310 - RNA, 1410 nt, Artificial Sequence
  derived and/or modified CDS sequence (opt1) from neuraminidase__InfluenzaA__AFJ77740
augaaccccaaccagaagaucaucaccaucggcagcgugucccugaccaucagcacgaucugcuucuucaugcagaucgccauccucaucaccaccgucacccugcacuucaagcaguacgaguucaacuccccgcccaacaaccaggugaugcugugcgagcccacgaucaucgagcgcaacaucaccgagaucguguaccucaccaacaccacgaucgagaaggagaucugccccaagcuggccgaguaccggaacuggagcaagccgcagugcaacaucaccggguucgcgcccuucuccaaggacaacagcauccgccuguccgccggcggggacaucugggucacccgggagcccuacgugagcugcgaccccgacaagugcuaccaguucgcccucggccaggggaccacgcugaacaacgugcacuccaacgacaccguccacgaccgcaccccguaccggacccugcucaugaacgagcugggcgugcccuuccaccugggcacgaagcaggucugcaucgccuggagcuccagcuccugccacgacgggaaggccuggcuccacgugugcgugaccggcgacgacgagaacgcgaccgccagcuucaucuacaacgggcgccugguggacuccaucgucagcugguccaagaagauccugcggacccaggagagcgagugcgugugcaucaacggcacgugcaucguggucaugaccgacggguccgccagcggcaaggccgacaccaagauccucuucaucgaggagggcaagaucgugcacaccagcacgcuguccgggagcgcgcagcacguggaggagugcuccugcuacccccgcuaccccggcguccggugcgugugccgcgacaacuggaaggggagcaaccggccgaucguggacaucaacaucaaggacuacuccaucgucagcuccuacgugugcagcggccuggugggcgacacgccccgcaagaacgacuccagcuccagcucccacugccucgaccccaacaacgaggagggcgggcacggggucaagggcugggccuucgacgacgggaacgacguguggaugggccggaccaucagcgagaagcugcgcuccggcuacgagaccuucaaggucaucgagggguggagcaaccccaacuccaagcugcagaucaaccgccaggugaucguggaccggggcaaccggagcggguacuccggcaucuucagcgucgagggcaagagcugcaucaaccgcugcuucuacguggagcucauccgggggcgcaagcaggagaccgaggugcuguggaccuccaacagcaucgucguguucugcggcaccuccgggaccuacggcacggggagcuggccggacggcgccgacaucaaccugaugcccaucuga

SEQ ID NO: 86311 - RNA, 1410 nt, Artificial Sequence
  derived and/or modified CDS sequence (opt1) from neuraminidase__InfluenzaA__AFJ77751
augaaccccaaccagaagaucaucaccaucggcagcgugucccugaccaucgccacgaucugcuuccucaugcagaucgccauccuggucaccaccgugacccugcacuucaagcagcacgagugcaacagcccgcccaacaaccaggugaugcucugcgagcccacgaucaucgagcgcaacaucaccgagaucgucuaccugaccaacaccacgaucgagaaggagaucugccccaagcuggcggaguaccggaacugguccaagccgcagugcaacaucaccggguucgcccccuucagcaaggacaacuccauccgccucagcgccggcggggacaucugggugacccgggagcccuacguguccugcgaccccgacaagugcuaccaguucgcccugggccaggggaccacgcugaacaacggccacagcaacgacaccguccgcgaccggaccccguaccgcacccuccugaugaacgagcugggcgugcccuuccaccucgggacgcgccaggugugcaucgccugguccagcuccagcugccacgacggcaaggcguggcugcacgucugcgugaccggggacgacaagaacgccaccgccuccuucaucuacaacggccggcugguggacagcaucggguccuggagcaagaagauccuccggacccaggaguccgagugcgucugcaucaacggcacgugcaccguggugaugaccgacggcagcgccuccgggaaggcggacaccaagauccuguucaucgaggagggcaagaucguccacaucagcacgcugagcggguccgcccagcacguggaggagugcagcugcuacccccgcuaccccggcgugcggugcgucugccgcgacaacuggaagggcuccaaccggccgaucguggacaucaacgugaaggacuacagcaucuucuccagcuacgucugcuccgggcucgugggcgacacgccccgcaagaacgacagcuucuccagcucccacugccuggaccccaacaacgaggagggcgggcacggggugaagggcugggccuucgacgacggcaacgacgucuggauggggcggaccaucagcgagaagcugcgcuccggcuacgagaccuucaaggugaucgagggguggagcaagcccaacuccaagcuccagaucaaccggcaggucaucguggagcgcggcaaccggagcggguacuccggcaucuucagcguggagggcaaguccugcaucaaccgcugcuucuacgucgagcugauccgggggcgcaaggaggagaccgaggugugguggaccagcaacagcaucguggucuucugcggcaccuccgggaccuacggcacggggagcuggccggacggcgccgacaucaaccugaugcccaucuga

SEQ ID NO: 86312 - RNA, 1410 nt, Artificial Sequence; identical to SEQ ID NO: 78169
  derived and/or modified CDS sequence (opt1) from neuraminidase__InfluenzaA__AFJ77762

SEQ ID NO: 86313 - RNA, 1410 nt, Artificial Sequence; identical to SEQ ID NO: 78169
  derived and/or modified CDS sequence (opt1) from neuraminidase__InfluenzaA__AFJ77773

SEQ ID NO: 86314 - RNA, 1410 nt, Artificial Sequence; identical to SEQ ID NO: 78169
  derived and/or modified CDS sequence (opt1) from neuraminidase__InfluenzaA__AFJ77784

SEQ ID NO: 86315 - RNA, 1410 nt, Artificial Sequence; identical to SEQ ID NO: 78738
  derived and/or modified CDS sequence (opt1) from neuraminidase__InfluenzaA__AFJ77795

SEQ ID NO: 86316 - RNA, 1410 nt, Artificial Sequence; identical to SEQ ID NO: 78738
  derived and/or modified CDS sequence (opt1) from neuraminidase__InfluenzaA__AFJ77806

SEQ ID NO: 86317 - RNA, 1410 nt, Artificial Sequence; identical to SEQ ID NO: 78738
  derived and/or modified CDS sequence (opt1) from neuraminidase__InfluenzaA__AFJ77817

SEQ ID NO: 86318 - RNA, 1410 nt, Artificial Sequence; identical to SEQ ID NO: 78738
  derived and/or modified CDS sequence (opt1) from neuraminidase__InfluenzaA__AFJ77828

SEQ ID NO: 86319 - RNA, 1410 nt, Artificial Sequence
  derived and/or modified CDS sequence (opt1) from neuraminidase__InfluenzaA__AFJ77839
augaaccccaaccagaagaucaucaccaucggcagcgugucccugaccaucagcacgaucugcuucuucaugcagaucgccauccucaucaccaccgucacccugcacuucaagcaguacgaguucaacuccccgcccaacaaccaggugaugcugugcgagcccacgaucaucgagcgcaacaucaccgagaucguguaccucaccaacaccacgaucgagaaggagaucugccccaagcuggccgaguaccggaacuggagcaagccgcagugcgacaucaccggguucgcgcccuucuccaaggacaacagcauccgccuguccgccggcggggacaucugggucacccgggagcccuacgugagcugcgaccccgacaagugcuaccaguucgcccucggccaggggaccacgcugaacaacgugcacuccaacgacaccguccacgaccgcaccccguaccggacccugcucaugaacgagcugggcgugcccuuccaccugggcacgaagcaggucugcaucgccuggagcuccagcuccugccacgacgggaaggccuggcuccacgugugcgugaccggcgacgacaagaacgcgaccgccagcuucaucuacaacgggcgccugguggacuccaucgucagcugguccaagaagauccugcggacccaggagagcgagugcgugugcaucaacggcacgugcaccguggucaugaccgacggguccgccagcggcaaggccgacaccaagauccucuucaucgaggagggcaagaucauccacacgagcacccuguccgggagcgcgcagcacguggaggagugcuccugcuacccccgcuaccccggcgugcggugcgucugccgcgacaacuggaaggggagcaaccggccgaucguggacaucaacaucaaggacuacuccaucgugagcuccuacgucugcagcggccuggugggcgacacgccccgcaagaacgacuccagcuccagcucccacugccucgaccccaacaacgaggagggcgggcacggggugaagggcugggccuucgacgacgggaacgacgucuggaugggccggaccaucagcgagaagcugcgcuccggcuacgagaccuucaaggugaucgagggguggagcaaccccaacuccaagcugcagaucaaccggcaggucaucguggaccgcggcaaccggagcggguacuccggcaucuucagcguggagggcaagagcugcaucaaccgcugcuucuacgucgagcucauccgggggcgcaaggaggagaccgaggugcuguggaccuccaacagcaucguggucuucugcggcaccuccgggacguacggcaccgggagcuggccggacggcgccgacaucaaccugaugcccaucuga

SEQ ID NO: 86320 - RNA, 1410 nt, Artificial Sequence
  derived and/or modified CDS sequence (opt1) from neuraminidase__InfluenzaA__AFJ77850
augaaccccaaccagaagaucaucaccaucggcagcgugucccugaccaucagcacgaucugcuucuucaugcagaucgccauccucaucaccaccgucacccugcacuucaagcaguacgaguucaacuccccgcccaacaaccaggugaugcugugcgagcccacgaucaucgagcgcaacaucaccgagaucguguaccucaccaacaccacgaucgagaaggagaucugccccaagcuggccaaguaccggaacuggagcaagccgcagugcgacaucaccggguucgcgcccuucuccaaggacaacagcauccgccuguccgccggcggggacaucugggucacccgggagcccuacgugagcugcgaccccgacaagugcuaccaguucgcccucggccaggggaccacgcugaacaacgugcacuccaacgacaccguccacgaccgcaccccguaccggacccugcucaugaacgagcugggcgugcccuuccaccugggcacgaagcaggucugcaucgccuggagcuccagcuccugccacgacgggaaggccuggcuccacgugugcgugaccggcgacgacaagaacgcgaccgccagcuucaucuacaacgggcgccugguggacuccaucgucagcugguccaagaagauccugcggacccaggagagcgagugcgugugcaucaacggcacgugcaccguggucaugaccgacggguccgccagcggcaaggccgacaccaagauccucuucaucgaggagggcaagaucgugcacacgagcacccuguccgggagcgcgcagcacguggaggagugcuccugcuacccccgcuaccccggcguccggugcgugugccgcgacaacuggaaggggagcaaccggccgaucguggacaucaacaucaaggacuacuccaucgucagcuccuacgugugcagcggccuggugggcgacacgccccgcaagaacgacuccagcuccagcucccacugccucgaccccaacaacgaggagggcgggcacggggucaagggcugggccuucgacgacgggaacgacguguggaugggccggaccaucagcgagaagcugcgcuccggcuacgagaccuucaaggucaucgagggguggagcaaccccaacuccaagcugcagaucaaccgccaggugaucguggaccggggcaaccggagcggguacuccggcaucuucagcgucgagggcaagagcugcaucaaccgcugcuucuacguggagcucauccgggggcgcaaggaggagaccgaggugcuguggaccuccaacagcaucgucguguucugcggcaccuccgggacguacggcaccgggagcuggccggacggcgccgacaucaaccugaugcccaucuga

SEQ ID NO: 86321 - RNA, 1410 nt, Artificial Sequence; identical to SEQ ID NO: 78738
  derived and/or modified CDS sequence (opt1) from neuraminidase__InfluenzaA__AFJ77861

SEQ ID NO: 86322 - RNA, 1410 nt, Artificial Sequence; identical to SEQ ID NO: 78738
  derived and/or modified CDS sequence (opt1) from neuraminidase__InfluenzaA__AFJ77872

SEQ ID NO: 86323 - RNA, 1410 nt, Artificial Sequence; identical to SEQ ID NO: 79204
  derived and/or modified CDS sequence (opt1) from neuraminidase__InfluenzaA__AFJ77883

SEQ ID NO: 86324 - RNA, 1410 nt, Artificial Sequence; identical to SEQ ID NO: 78738
  derived and/or modified CDS sequence (opt1) from neuraminidase__InfluenzaA__AFJ77894

SEQ ID NO: 86325 - RNA, 1410 nt, Artificial Sequence; identical to SEQ ID NO: 78738
  derived and/or modified CDS sequence (opt1) from neuraminidase__InfluenzaA__AFJ77905

SEQ ID NO: 86326 - RNA, 1410 nt, Artificial Sequence
  derived and/or modified CDS sequence (opt1) from neuraminidase__InfluenzaA__AFJ77916
augaaccccaaccagaagaucaucaccaucggcagcgugucccugaccaucagcacgaucugcuucuucaugcagaucgccauccucaucaccaccgucacccugcacuucaagcaguacgaguucaacuccccgcccaacaaccaggugaugcugugcgagcccacgaucaucgagcgcaacaucaccgagaucguguaccucaccaacaccacgaucgagaaggagaucugccccaagcuggccgaguaccggaacuggagcaagccgcagugcgacaucaccggguucgcgcccuucuccaaggacaacagcauccgccuguccgccggcggggacaucugggucacccgggagcccuacgugagcugcgaccccgacaagugcuaccaguucgcccucggccaggggaccacgcugaacaacgugcacuccaacgacaccguccacgaccgcaccccguaccggacccugcucaugaacgagcugggcgugcccuuccaccugggcacgaagcaggucugcaucgccuggagcuccagcuccugccacgacgggaaggccuggcuccacgugugcgugaccggcgacgacaagaacgcgaccgccagcuucaucuacaacgggcgccugguggacuccaucgucagcugguccaagaagauccugcggacccaggagagcgagugcgugugcaucaacggcacgugcaccguggucaugaccgacggguccgccagcggcaaggccgacaccaagauccucuucaucgaggagggcaagaucgugcacacgagcacccuguccgggagcgcgcagcacguggaggagugcuccugcuacccccgcuaccccggcguccggugcgugugccgcgacaacuggaaggggagcaaccggccgaucguggacaucaacaucaaggacuacuccaucgucagcuccuacgugugcagcggccuggugggcgacacgccccgcaagaacgacuccagcuccagcucccacugccucgaccccaacaacgaggagggcgggcacggggucaagggcugggccuucgacgacgggaacgacguguggaugggccggaccaucagcgagaagcugcgcuccggcuacgagaccuucaaggucaucgagggguggagcaaccccaacuccaagcugcagaucaaccgccaggugaucguggaccggggcaaccggagcggguacuccggcaucuucagcgucgagggcaagagcugcaucaaccgcugcuucuacguggagcucauccgggggcgcaaggaggagaccgaggugcuguggaccuccaacagcaucaucgucuucugcggcaccuccgggacguacggcaccgggagcuggccggacggcgccgacaucaaccugaugcccaucuga

SEQ ID NO: 86327 - RNA, 1410 nt, Artificial Sequence; identical to SEQ ID NO: 78760
  derived and/or modified CDS sequence (opt1) from neuraminidase__InfluenzaA__AFJ77927

SEQ ID NO: 86328 - RNA, 1410 nt, Artificial Sequence; identical to SEQ ID NO: 78760
  derived and/or modified CDS sequence (opt1) from neuraminidase__InfluenzaA__AFJ77938

SEQ ID NO: 86329 - RNA, 1410 nt, Artificial Sequence; identical to SEQ ID NO: 78738
  derived and/or modified CDS sequence (opt1) from neuraminidase__InfluenzaA__AFJ77949

SEQ ID NO: 86330 - RNA, 1410 nt, Artificial Sequence; identical to SEQ ID NO: 78738
  derived and/or modified CDS sequence (opt1) from neuraminidase__InfluenzaA__AFJ77960

SEQ ID NO: 86331 - RNA, 1410 nt, Artificial Sequence
  derived and/or modified CDS sequence (opt1) from neuraminidase__InfluenzaA__AFJ77971
augaaccccaaccagaagaucaucaccaucggcagcgugucccugaccaucagcacgaucugcuucuucaugcagaucgccauccucaucaccaccgucacccugcacuucaagcaguacgaguucaacuccccgcccaacaaccaggugaugcugugcgagcccacgaucaucgagcgcaacaucaccgagaucguguaccucaccaacaccacgaucgagaaggagaucugccccaagcuggccgaguaccggaacuggagcaagccgcagugcaacaucaccggguucgcgcccuucuccaaggacaacagcauccgccuguccgccggcggggacaucugggucacccgggagcccuacgugagcugcgaccccgacaagugcuaccaguucgcccucggccaggggaccacgcugaacaacgugcacuccaacgacaccguccacgaccgcaccccguaccggacccugcucaugaacgagcugggcgugcccuuccaccugggcacgaagcaggucugcaucgccuggagcuccagcuccugccacgacgggaaggccuggcuccacgugugcgugaccggcgacgacaagaacgcgaccgccagcuucaucuacaacgggcgccugguggacuccaucgucagcugguccaaggagauccugcggacccaggagagcgagugcgugugcaucaacggcacgugcaccguggucaugaccgacggguccgccagcggcaaggccgacaccaagauccucuucaucgaggagggcaagaucgugcacacgagcacccuguccgggagcgcgcagcacguggaggagugcuccugcuacccccgcuaccccggcguccggugcgugugccgcgacaacuggaaggggagcaaccggccgaucguggacaucaacaucaaggacuacuccaucgucagcuccuacgugugcagcggccuggugggcgacacgccccgcaagaacgacuccagcuccagcucccacugccucgaccccaacaacgaggagggcgggcacggggucaagggcugggccuucgacgacgggaacgacguguggaugggccggaccaucagcgagaagcugcgcuccggcuacgagaccuucaaggucaucgagggguggagcaaccccaacuccaagcugcagaucaaccgccaggugaucguggaccggggcaaccggagcggguacuccggcaucuucagcgucgagggcaagagcugcaucaaccgcugcuucuacguggagcucauccgggggcgcaaggacgagaccgaggugcuguggaccuccaacagcaucgucguguucugcggcaccuccgggacguacggcaccgggagcuggccggacggcgccgacaucaaccugaugcccaucuga

SEQ ID NO: 86332 - RNA, 1410 nt, Artificial Sequence
  derived and/or modified CDS sequence (opt1) from neuraminidase__InfluenzaA__AFJ77982
augaaccccaaccagaagaucaucaccaucggcuucgugagccugaccaucuccacgaucugcuucuucaugcagaucgccauccucaucaccaccgucccgcugcacuucaagcaguacgaguucaacagcccgcccaacaaccaggugaugcugugcgagcccaccaucaucgagcgcaacaucacggagaucguguaccucaccaacaccaccaucgagaaggagaucugccccaagcuggccgaguaccggaacugguccaagccccagugcaacaucacgggguucgcgcccuucagcaaggacaacuccauccgccugagcgccggcggggacaucugggucacccgggagcccuacguguccugcgacccggacaagugcuaccaguucgcccucggccaggggaccacccugaacaacgugcacagcaacgacacgguccacgaccgcacccccuaccggacccugcucaugaacgagcugggcgugcccuuccaccugggcaccaagcaggucugcaucgccugguccagcuccagcugccacgacgggaaggccuggcuccacgugugcgugacgggcgacgacaagaacgcgaccgccuccuucaucuacaacgggcgccugguggacagcaucgucuccuggagcaaggagauccugcggacccaggaguccgagugcgugugcaucaacgggaccugcacgguggucaugaccgacgggagcgccuccggcaaggccgacaccaagauccucuucaucgaggagggcaagaucgugcacaccagcacgcugagcggguccgcgcagcacguggaggagugcagcugcuacccccgcuacccgggcguccggugcgugugccgcgacaacuggaagggguccaaccggcccaucguggacaucaacaucaaggacuacagcaucgucuccagcuacgugugcuccggcaucgugggcgacacgccccgcaagaacgacagcuccagcuccagccacugccuggaccccaacaacgaggagggcggccacggggucaagggcugggccuucgacgacgggaacgacguguggaugggccggaccaucuccgagaagcuccgcagcggcuacgagaccuucaaggucaucgaggggugguccaacccgaacagcaagcugcagaucaaccgccaggugaucguggaccggggcaaccgguccggguacagcggcaucuucuccgucgagggcaagagcugcaucaaccgcugcuucuacguggagcugauccgggggcgcaaggaggagaccgaggugcucuggaccagcaacuccaucgucguguucugcggcaccagcgggaccuacggcacgggguccuggcccgacggcgccgacaucaaccugaugcccaucuga

SEQ ID NO: 86333 - RNA, 1410 nt, Artificial Sequence; identical to SEQ ID NO: 78736
  derived and/or modified CDS sequence (opt1) from neuraminidase__InfluenzaA__AFJ77993

SEQ ID NO: 86334 - RNA, 1410 nt, Artificial Sequence
  derived and/or modified CDS sequence (opt1) from neuraminidase__InfluenzaA__AFJ78004
augaaccccaaccagaagaucaucaccaucggcagcgugucccugaccaucagcacgaucugcuucuucaugcagaucgccauccucaucaccaccgucacccugcacuucaagcaguacgaguucaacuccccgcccaacaaccaggugaugcugugcgagcccacgaucaucgagaagaacaucaccgagaucguguaccucaccaacaccacgaucgagaaggagaucugccccaagcuggccgaguaccgcaacuggagcaagccgcagugcaacaucaccggguucgcgcccuucuccaaggacaacagcauccggcuguccgccggcggggacaucugggucacccgcgagcccuacgugagcugcgaccccgacaagugcuaccaguucgcccucggccaggggaccacgcugaacaacgugcacuccaacgacaccguccacgaccggaccccguaccgcacccugcucaugaacgagcugggcgugcccuuccaccugggcacgaagcaggucugcaucgccuggagcuccagcuccugccacgacgggaaggccuggcuccacgugugcgugaccggcgacgacaagaacgcgaccgccagcuucaucuacaacgggcggcugguggacuccaucgucagcugguccaaggagauccugcgcacccaggagagcgagugcgugugcaucaacggcacgugcaccguggucaugaccgacggguccgccagcggcaaggccgacaccaagauccucuucaucgaggagggcaagaucgugcacacgagcacccuguccgggagcgcgcagcacguggaggagugcuccugcuacccccgguaccccggcguccgcugcgugugccgggacaacuggaaggggagcaaccgcccgaucguggacaucaacaucaaggacuacuccaucgucagcuccuacgugugcagcggccuggugggcgacacgccccggaagaacgacuccagcuccagcucccacugccucgaccccaacaacgaggagggcgggcacggggucaagggcugggccuucgacgacgggaacgacguguggaugggccgcaccaucagcgagaagcugcgguccggcuacgagaccuucaaggucaucgagggguggagcaaccccaacuccaagcugcagaucaaccgccaggugaucguggaccggggcaaccgcagcggguacuccggcaucuucagcgucgagggcaagagcugcaucaaccggugcuucuacguggagcucauccgcgggcggaaggaggagaccgaggugcuguggaccuccaacagcaucgucguguucugcggcaccuccgggacguacggcaccgggagcuggccggacggcgccgacaucaaccugaugcccaucuga

SEQ ID NO: 86335 - RNA, 1410 nt, Artificial Sequence; identical to SEQ ID NO: 78736
  derived and/or modified CDS sequence (opt1) from neuraminidase__InfluenzaA__AFJ78015

SEQ ID NO: 86336 - RNA, 1410 nt, Artificial Sequence; identical to SEQ ID NO: 85593
  derived and/or modified CDS sequence (opt1) from neuraminidase__InfluenzaA__AFJ78026

SEQ ID NO: 86337 - RNA, 1410 nt, Artificial Sequence; identical to SEQ ID NO: 85593
  derived and/or modified CDS sequence (opt1) from neuraminidase__InfluenzaA__AFJ78037

SEQ ID NO: 86338 - RNA, 1410 nt, Artificial Sequence
  derived and/or modified CDS sequence (opt1) from neuraminidase__InfluenzaA__AFJ78048
augaaccccaaccagaagaucaucaccaucggcagcgugucccugaccaucagcacgaucugcuucuucaugcagaucgccauccucaucaccaccgucacccugcacuucaagcaguacgaguucaacuccccgcccaacaaccaggugaugcugugcgagcccacgaucaucgagcgcaacaucaccgagaucguguaccucaccaacaccacgaucgagaaggagaucugccccaagcuggccgaguaccggaacuggagcaagccgcagugcaacaucaccggguucgcgcccuucuccaaggacaacagcauccgccuguccgccggcggggacaucugggucacccgggagcccuacgugagcugcgaccccgacaagugcuaccaguucgcccucggccaggggaccacgcugaacaacgugcacuccaacgacaccguccacgaccgcaccccguaccggacccugcucaugaacgagcugggcgugcccuuccaccugggcacgaagcaggucugcaucgccuggagcuccagcuccugccacgacgggaaggccuggcuccacgugugcgugaccggcgacgacaagaacgcgaccgccagcuucaucuacaacgggcgccugguggacuccaucgucagcugguccaaggagauccugcggacccaggagagcgagugcgugugcaucaacggcacgugcaccguggucaugaccgacgggaacgccuccggcaaggccgacaccaagauccucuucaucgaggagggcaagaucgugcacacgagcacccugagcggguccgcgcagcacguggaggagugcagcugcuacccccgcuaccccggcguccggugcgugugccgcgacaacuggaagggguccaaccggccgaucguggacaucaacaucaaggacuacagcaucgucuccagcuacgugugcuccggccuggugggcgacacgccccgcaagaacgacagcuccagcuccagccacugccucgaccccaacaacgaggagggcgggcacggggucaagggcugggccuucgacgacgggaacgacguguggaugggccggaccaucuccgagaagcugcgcagcggcuacgagaccuucaaggucaucgaggggugguccaaccccaacagcaagcugcagaucaaccgccaggugaucguggaccggggcaaccgguccggguacagcggcaucuucuccgucgagggcaagagcugcaucaaccgcugcuucuacguggagcucauccgggggcgcaaggaggagaccgaggugcuguggaccagcaacuccaucgucguguucugcggcaccagcgggacguacggcaccggguccuggccggacggcgccgacaucaaccugaugcccaucuga

SEQ ID NO: 86339 - RNA, 1410 nt, Artificial Sequence
  derived and/or modified CDS sequence (opt1) from neuraminidase__InfluenzaA__AFJ78059
augaaccccaaccagaagaucaucaccaucggcagcgugucccugaccaucagcacgaucugcuucuucaugcagaucgccauccucaucaccaccgucacccugcacuucaagcaguacgaguucaacccgccgcccaacaaccaggugaugcugugcgagcccacgaucaucgagcgcaacaucaccgagaucguguaccucaccaacaccacgaucgagaaggagaucugccccaagcuggccgaguaccggaacugguccaagccccagugcaacaucaccggguucgcgcccuucagcaaggacaacuccauccgccugagcgccggcggggacaucugggucacccgggagcccuacguguccugcgacccggacaagugcuaccaguucgcccucggccaggggaccacgcugaacaacgugcacagcaacgacaccguccacgaccgcacccccuaccggacccugcucaugaacgagcugggcgugcccuuccaccugggcacgaagcaggucugcaucgccugguccagcuccagcugccacgacgggaaggccuggcuccacgugugcgugaccggcgacgacaagaacgcgaccgccuccuucaucuacaacgggcgccugguggacagcaucgucuccuggagcaaggagauccugcggacccaggaguccgagugcgugugcaucaacggcacgugcaccguggucaugaccgacgggagcgccuccggcaaggccgacaccaagauccucuucaucgaggagggcaagaucgugcacacgagcacccugagcggguccgcgcagcacguggaggagugcagcugcuacccccgcuacccgggcguccggugcgugugccgcgacaacuggaagggguccaaccggcccaucguggacaucaacaucaaggacuacagcaucgucuccagcuacgugugcuccggccuggugggcgacacgccccgcaagaacgacagcuccagcuccagccacugccucgaccccaacaacgaggagggcgggcacggggucaagggcugggccuucgacgacgggaacgacguguggaugggccggaccaucuccgagaagcugcgcagcggcuacgagaccuucaaggucaucgaggggugguccaacccgaacagcaagcugcagaucaaccgccaggugaucguggaccggggcaaccgguccggguacagcggcaucuucuccgucgagggcaagagcugcaucaaccgcugcuucuacguggagcucauccgggggcgcaaggacgagaccgaggugcuguggaccagcaacuccaucgucguguucugcggcaccagcgggacguacggcaccggguccuggcccgacggcgccgacaucaaccugaugcccaucuga

SEQ ID NO: 86340 - RNA, 1410 nt, Artificial Sequence
  derived and/or modified CDS sequence (opt1) from neuraminidase__InfluenzaA__AFJ78070
augaaccccaaccagaagaucaucaccaucggcagcgugucccugaccaucagcacgaucugcuucuucaugcagaucgccauccucaucaccaccgucacccugcacuucaagcaguacgaguucaacuccccgcccaacaaccaggugaugcugugcgagcccacgaucaucgagcgcaacaucaccgagaucguguaccucaccaacaccacgaucgagaaggagaucugccccaagcuggccgaguaccggaaguggagcaagccgcagugcaacaucaccggguucgcgcccuucuccaaggacaacagcauccgccuguccgccggcggggacaucugggucacccgggagcccuacgugagcugcgaccccgacaagugcuaccaguucgcccucggccaggggaccacgcugaacaacgugcacuccaacgacaccguccgcgaccggaccccguaccgcacccugcucaugaacgagcugggcgugcccuuccaccugggcacgaagcaggucugcaucgccuggagcuccagcuccugccacgacgggaaggccuggcuccacgugugcgugaccggcgacgacaagaacgcgaccgccagcuucaucuacaacgggcggcugguggacuccaucgucagcugguccaaggagauccugcgcacccaggagagcgagugcgugugcaucaacggcacgugcaccguggucaugaccgacggguccgccagcggcaaggccgacaccaagauccucuucaucgaggagggcaagaucgugcacacgagcacccuguccgggagcgcgcagcacguggaggagugcuccugcuacccccgguaccccggcguccgcugcgugugccgggacaacuggaaggggagcaaccgcccgaucguggacaucaacaucaaggacuacuccaucgucagcuccuacgugugcagcggccuggugggcgacacgccccggaagaacgacuccagcuccagcgggcacugccucgaccccaacaacgaggagggcgggcacggcgucaaggggugggccuucgacgacggcaacgacguguggaugggccgcaccaucuccgagaagucccggagcggguacgagaccuucaaggucaucgagggcuggagcaaccccaacuccaagcugcagaucaaccgccaggugaucguggaccgggggaaccgcagcggcuacuccgggaucuucagcgucgagggcaagagcugcaucaaccggugcuucuacguggagcugauccgcggccggaaggaggagaccgaggugcucuggaccuccaacagcaucgucguguucugcgggaccuccggcacguacgggaccggcagcuggccggacggggccgacaucaaccugaugcccaucuga

SEQ ID NO: 86341 - RNA, 1410 nt, Artificial Sequence
  derived and/or modified CDS sequence (opt1) from neuraminidase__InfluenzaA__AFJ78081
augaaccccaaccagaagaucaucaccaucggcagcgugucccugaccaucagcacgaucugcuucuucaugcagaucgccauccucaucaccaccgucacccugcacuucaagcaguacgaguucaacuccccgcccaacaaccaggugaugcugugcgagcccacgaucaucgagcgcaacaucaccgagaucguguaccucaccaacaccacgaucgagaaggagaucugccccaagcuggccgaguaccggaacuggagcaagccgcagugcgacaucaccggguucgcgcccuucuccaaggacaacagcauccgccuguccgccggcggggacaucugggucacccgggagcccuacgugagcugcgaccccgacaagugcuaccaguucgcccucggccaggggaccacgcugaacaacgugcacuccaacgacaccguccgcgaccggaccccguaccgcacccugcucaugaacgagcugggcgugcccuuccaccugggcacgaagcaggucugcaucgccuggagcuccagcuccugccacgacgggaaggccuggcuccacgugugcaucaccggcgacgacaagaacgcgaccgccagcuucaucuacaacgggcggcugguggacuccaucgugagcugguccaaggagauccugcgcacccaggagagcgagugcgucugcaucaacggcacgugcaccguggugaugaccgacggguccgccagcggcaaggccgacaccaagauccucuucaucgaggagggcaagaucguccacacgagcacccuguccgggagcgcgcagcacguggaggagugcuccugcuacccccgguaccccggcgugcgcugcgucugccgggacaacuggaaggggagcaaccgcccgaucguggacaucaacaucaaggaccacuccaucgugagcuccuacgucugcagcggccuggugggcgacacgccccggaagaacgacaacuccagcuccagccacugccucgaccccaacaacgaggagggcgggcacggggugaagggcugggccuucgacgacgggaacgacgucuggaugggccgcaccaucuccgagaagucccggcugggcuacgagaccuucaaggugaucgagggguggagcaaccccaacagcaagcugcagaugaaccgccaggucaucguggaccggggcaaccgcuccggguacagcggcaucuucuccguggagggcaagagcugcaucaaccggugcuucuacgucgagcucauccgcgggcggaaggaggagaccgaggugcuguggaccagcaacuccaucguggucuucugcggcaccagcgggacguacggcaccggguccuggccggacggcgccgacaucaaccugaugcccaucuga

SEQ ID NO: 86342 - RNA, 1410 nt, Artificial Sequence; identical to SEQ ID NO: 86258
  derived and/or modified CDS sequence (opt1) from neuraminidase__InfluenzaA__AFJ78092

SEQ ID NO: 86343 - RNA, 1410 nt, Artificial Sequence
  derived and/or modified CDS sequence (opt1) from neuraminidase__InfluenzaA__AFJ78103
augaaccccaaccagaagaucaucaccaucggcagcgugucccugaccaucagcacgaucugcuucuucaugcagaucgccauccucaucaccaccgucacccugcacuucaagcaguacgaguucaacuccccgcccaacaaccaggugaugcugugcgagcccacgaucaucgagcgcaacaucaccgagaucguguaccucaccaacaccacgaucgagaaggagaucugccccaagcuggccgaguaccggaacuggagcaagccgcagugcgacaucaccggguucgcgcccuucuccaaggacaacagcauccgccuguccgccggcggggacaucugggucacccgggagcccuacgugagcugcgaccccgacaagugcuaccaguucgcccucggccaggggaccacgcugaacaacgugcacuccaacgacaccguccgcgaccggaccccguaccgcacccugcucaugaacgagcugggcgugcccuuccaccugggcacgaagcaggucugcaucgccuggagcuccagcuccugccacgacgggaaggccuggcuccacgugugcaucaccggcgacgacaagaacgcgaccgccagcuucaucuacaacgggcggcugguggacuccaucgugagcugguccaaggagauccugcgcacccaggagagcgagugcgucugcaucaacggcacgugcaccguggugaugaccgacggguccgccagcggcaaggccgacaccaagauccucuucaucgaggagggcaagaucguccacacgagcacccugcugggguccgcgcagcacguggaggagugcagcugcuacccccgguaccccggcgugcgcugcgucugccgggacaacuggaagggguccaaccgcccgaucguggacaucaacaucaaggaccacagcaucguguccagcuacgucugcuccggccucgugggcgacacgccccggaagaacgacagcuccagcuccgggcacugccuggaccccaacaacgaggagggcgggcacggcgugaaggggugggccuucgacgacggcaacgacgucuggaugggccgcaccaucagcgagaagucccggcugggguacgagaccuucaaggugaucgagggcuggagcaaccccuccagcaagcuccagaucaaccgccaggucaucguggaccgggggaaccgcuccggcuacagcgggaucuucuccguggagggcaagagcugcaucaaccggugcuucuacgucgagcugauccgcggccggaaggaggagaccgaggugcuguggaccagcaacuccaucguggucuucugcgggaccagcggcacguacgggaccggcuccuggccggacggggccgacaucaaccucaugcccaucuga

SEQ ID NO: 86344 - RNA, 1410 nt, Artificial Sequence
  derived and/or modified CDS sequence (opt1) from neuraminidase__InfluenzaA__AFJ78114
augaaccccaaccagaagaucaucaccaucggcagcgugucccugaccaucagcacgaucugcuucuucaugcagaucgccauccucaucaccaccgucacccugcacuucaagcaguacgagcugaacuccccgcccaacaaccaggugaugcucugcgagcccacgaucaucgagcgcaacaucaccgagaucguguaccugaccaacaccacgaucgagaaggagaucugccccaagcuggccgaguaccggaacuggagcaagccgcagugcgacaucaccggguucgcgcccuucuccaaggacaacagcauccgccucuccgccggcggggacaucugggucacccgggagcccuacgugagcugcgaccccgacaagugcuaccaguucgcccugggccaggggaccacgcugaacaacgugcacuccaacgacaccguccgcgaccggaccccguaccgcacccuccugaugaacgagcugggcgugcccuuccaccucggcacgaagcaggucugcaucgccuggagcuccagcuccugccacgacgggaaggccuggcugcacgugugcaucaccggcgacgacaagaacgcgaccgccagcuucaucuacaacgggcggcugguggacuccaucgugagcugguccaaggagauccuccgcacccaggagagcgagugcgucugcaucaacggcacgugcaccguggugaugaccgacggguccgccagcggcaaggccgacaccaagauccuguucaucgaggagggcaagaucguccacacgagcacccuguccgggagcgcgcagcacguggaggagugcuccugcuacccccgguaccccggcgugcgcugcgucugccgggacaacuggaaggggagcaaccgcccgaucguggacaucaacaucaaggaccacuccaucgugagcuccuacgucugcagcggccucgugggcgacacgccccggaagaacgacuccagcuccagcucccacugccuggaccccaacaacgaggagggcgggcacggggugaagggcugggccuucgacgacgggaacgacgucuggaugggccgcaccaucagcgagaagucccggcugggcuacgagaccuucaaggugaucgagggguggagcaaccccaacuccaagcuccagaucaaccgccaggucaucguggaccggagcaaccgcuccggcuacagcgggaucuucagcguggagggcaaguccugcaucaaccggugcuucuacgucgagcugauccgcgggcggaaggaggagaccgaggugcuguggaccagcaacuccaucguggucuucugcggcaccagcggcacguacgggaccggcuccuggccggacggggccgacaucaaccucaugcccaucuga

SEQ ID NO: 86345 - RNA, 1410 nt, Artificial Sequence
  derived and/or modified CDS sequence (opt1) from neuraminidase__InfluenzaA__AFJ78125
augaaccccaaccagaagaucaucaccaucggcagcgugucccugaccaucagcacgaucugcuucuucaugcagaucgccauccucaucaccaccgucacccugcacuucaagcaguacgaguucaacuccccgcccaacaaccaggugaugcugugcgagcccacgaucaucgagcgcaacaucaccgagaucguguaccucaccaacaccacgaucgagaaggagaugugccccaagcuggccgaguaccggaacuggagcaagccgcagugcgacaucaccggguucgcgcccuucuccaaggacaacagcauccgccuguccgccggcggggacaucugggucacccgggagcccuacgugagcugcgaccccgacaagugcuaccaguucgcccucggccaggggaccacgcugaacaacgugcacuccaacgacaccguccgcgaccggaccccguaccgcacccugcucaugaacgagcugggcgugcccuuccaccugggcacgaagcaggucugcaucgccuggagcuccagcuccugccacgacgggaaggccuggcuccacgugugcaucaccggcgacgacaagaacgcgaccgccagcuucaucuacaacgggcggcugguggacuccaucgugagcugguccaaggagauccugcgcacccaggagagcgagugcgucugcaucaacggcacgugcaccguggugaugaccgacggguccgccagcggcaaggccgacaccaagauccucuucaucgaggagggcaagaucguccacacgagcacccuguccgggagcgcgcagcacguggaggagugcuccugcuacccccgguaccccggcgugcgcugcgucugccgggacaacuggaaggggagcaaccgcccgaucguggacaucaacaucaaggaccacuccaucgugagcuccuacgucugcagcggccuggugggcgacacgccccggaagaacgacuccagcuccagcucccacugccucgaccccaacaacgaggagggcgggcacggggugaagggcugggccuucgacgacgggaacgacgucuggaugggccgcaccaucagcgagaagucccggcugggcuacgagaccuucaaggugaucgagggguggagcaaccccaacuccaagcugcagaugaaccgccaggucaucguggaccggggcaaccgcagcggguacuccggcaucuucagcguggagggcaagagcugcaucaaccggugcuucuacgucgagcucauccgcgggcggaaggaggagaccgaggugcuguggaccuccaacagcaucguggucuucugcggcaccuccgggacguacggcaccgggagcuggccggacggcgccgacaucaaccugaugcccaucuga

SEQ ID NO: 86346 - RNA, 1410 nt, Artificial Sequence
  derived and/or modified CDS sequence (opt1) from neuraminidase__InfluenzaA__AFJ78136
augaaccccaaccagaagaucaucaccaucggcagcgugucccugaccaucagcacgaucugcuucuucaugcagaccgccauccucaucaccaccgucacgcugcacuucaagcaguacgaguucaacuccccgcccaacaaccaggugaugcugugcgagcccaccaucaucgagcgcaacaucaccgagaucguguaccucaccaacacgaccaucgagaaggagaucugccccaagcuggccgaguaccggaacuggagcaagccgcagugcgacaucaccggguucgcgcccuucuccaaggacaacagcauccgccuguccgccggcggggacaucugggucacccgggagcccuacgugagcugcgaccccgacaagugcuaccaguucgcccucggccaggggacgacccugaacaacgugcacuccaacaacaccguccgcgaccggaccccguaccgcacgcugcucaugaacgagcugggcgugcccuuccaccugggcaccaagcaggucugcaucgccuggagcuccagcuccugccacgacgggaaggccuggcuccacgugugcaucaccggcgacgacaagaacgcgaccgccagcuucaucuacaacgggcggcugguggacuccaucgugagcugguccaaggagauccugcgcacgcaggagagcgagugcgucugcaucaacgggaccugcaccguggugaugaccgacggguccgccagcggcaaggccgacacgaagauccucuucaucgaggagggcaagaucguccacaccagcacccuguccgggagcgcgcagcacguggaggagugcuccugcuacccccgguaccccggcgugcgcugcgucugccgggacaacuggaaggggagcaaccgcccgaucguggacaucaacaucaaggaccacuccaucgugagcuccuacgucugcagcggccuggugggcgacacgccccggaagaacgacuccagcuccagcucccacugccucgaccccaacaacgaggagggcggccacggggugaagggcugggccuucgacgacgggaacgacgucuggaugggccgcaccaucagcgagaagucccggcugggcuacgagaccuucaaggugaucgagggguggagcaaccccaaguccaagcugcagaucaaccgccaggucaucguggaccggggcaaccgcagcggguacuccggcaucuucagcguggagggcaagagcugcaucaaccggugcuucuacgucgagcucauccgcgggcggaaggaggagaccgaggugcuguggaccuccaacagcaucguggucuucugcggcacguccgggaccuacggcaccgggagcuggccggacggcgccgacaucaaccugaugcccaucuga

SEQ ID NO: 86347 - RNA, 1410 nt, Artificial Sequence; identical to SEQ ID NO: 86346
  derived and/or modified CDS sequence (opt1) from neuraminidase__InfluenzaA__AFJ78147

SEQ ID NO: 86348 - RNA, 1410 nt, Artificial Sequence; identical to SEQ ID NO: 86346
  derived and/or modified CDS sequence (opt1) from neuraminidase__InfluenzaA__AFJ78158

SEQ ID NO: 86349 - RNA, 1410 nt, Artificial Sequence; identical to SEQ ID NO: 79908
  derived and/or modified CDS sequence (opt1) from neuraminidase__InfluenzaA__AFJ78169

SEQ ID NO: 86350 - RNA, 1410 nt, Artificial Sequence; identical to SEQ ID NO: 80426
  derived and/or modified CDS sequence (opt1) from neuraminidase__InfluenzaA__AFJ78180

SEQ ID NO: 86351 - RNA, 1410 nt, Artificial Sequence; identical to SEQ ID NO: 79908
  derived and/or modified CDS sequence (opt1) from neuraminidase__InfluenzaA__AFJ78191

SEQ ID NO: 86352 - RNA, 1410 nt, Artificial Sequence
  derived and/or modified CDS sequence (opt1) from neuraminidase__InfluenzaA__AFJ78202
augaaccccaaccagaagaucaucaccaucggcagcgugucccugaccaucagcacgaucugcuucuucaugcagaccgccauccucaucaccaccgucacgcugcacuucaagcaguacgaguucaacuccccgcccaacaaccaggugaugcugugcgagcccaccaucaucgagcgcaacaucaccgagaucguguaccucaucaacaccacgaucgagaaggagaucugccccaagcuggccgaguaccggaacuggagcaagccgcagugcgacaucaccggguucgcgcccuucuccaaggacaacagcauccgccuguccgccggcggggacaucugggucacccgggagcccuacgugagcugcgaccccgacaagugcuaccaguucgcccucggccaggggaccacgcugaacaacgugcacuccaacaacaccguccgcgaccggaccccguaccgcacccugcucaugaacgagcugggcgugcccuuccaccugggcacgaagcaggucugcaucgccuggagcuccagcuccugccacgacgggaaggccuggcuccacgugugcaucaccggcgacgacaagaacgcgaccgccagcuucaucuacaacgggcggcugguggacuccaucgugagcugguccaaggagauccugcgcacccaggagagcgagugcgucugcaucaacggcacgugcaccguggugaugaccgacggguccgccagcggcaaggccgacaccaagauccucuucaucgaggagggcaagaucguccacacgagcacccuguccgggggcgcgcagcacguggaggagugcagcugcuacccccgguaccccggggugcgcugcgucugccgggacaacuggaagggcuccaaccgcccgaucguggacaucaacaucaaggaccacagcaucguguccagcuacgucugcuccggccuggugggggacacgccccggaagaacgacagcuccagcuccagccacugccucgaccccaacaacgaggagggcgggcacggcgugaaggggugggccuucgacgacggcaacgacgucuggaugggccgcaccaucuccgagaagucccggcugggguacgagaccuucaaggugaucgagggcuggagcaaccccaagagcaagcugcagaucaaccgccaggucaucguggaccgggggaaccgcuccggcuacagcgggaucuucuccguggagggcaagagcugcaucaaccggugcuucuacgucgagcucauccgcggccggaaggaggagaccgaggugcuguggaccagcaacuccaucguggucuucugcgggaccagcggcacguacgggaccggcuccuggccggacggggccgacaucagccugaugcccaucuga

SEQ ID NO: 86353 - RNA, 1410 nt, Artificial Sequence
  derived and/or modified CDS sequence (opt1) from neuraminidase__InfluenzaA__AFJ78213
augaaccccaaccagaagaucaucaccaucggcagcgugucccugaccaucagcacgaucugcuucuucaugcagaucgccauccucaucaccaccgucacccugcacuucaagcaguacgaguucaacuccccgcccaacaaccaggugaugcugugcgagcccacgaucaucgagcgcaacaucaccgagaucguguaccucaccaacaccacgaucgagaaggagaucugccccaagcuggccgaguaccggaacuggagcaagccgcagugcgacaucaccggguucgcgcccuucuccaaggacaacagcauccgccuguccgccggcggggacaucugggucacccgggagcccuacgugagcugcgaccccgacaagugcuaccaguucgcccucggccaggggaccacgcugaacaacgugcacuccaacgacaccguccgcgaccggaccccguaccgcacccugcucaugaacgagcugggcgugcccuuccaccugggcacgaagcaggucugcaucgccuggagcuccagcuccugccacgacgggaaggccuggcuccacgugugcaucaccggcgacgacaagaacgcgaccgccagcuucaucuacaacgggcggcugguggacuccaucgugagcugguccaaggagauccugcgcacccaggagagcgagugcgucugcaucaacggcacgugcaccguggugaugaccgacggguccgccagcggcaaggccgacaccaagauccucuucaucgaggagggcaagaucguccacacgagcacccuguccgggagcgcgcagcacguggaggagugcuccugcuacccccgguaccccggcgugcgcugcgucugccgggacaacuggaaggggagcaaccgcccgaucguggacaucaacaucaaggaccacuccaucgugagcuccuacgucugcagcggccuggugggcgacacgccccggaagaacgacuccagcuccagcucccacugccucgaccccaacaacgaggagggcgggcacggggugaagggcugggccuucgacgacgggaacgacgucuggaugggccgcaccaucagcgagaagucccggcugggcuacgagaccuucaaggugaucgagggguggagcaaccccaaguccaagcugcagaucaaccgccaggucaucguggaccggggcaaccgcagcggguacuccggcaucuucagcguggagggcaagagcugcaucaaccggugcuucuacgucgagcucauccgcgggcggaaggaggagaccgaggugcuguggaccuccaacagcaucguggucuucugcggcaccuccgggacguacggcaccgggagcuggccggacggcgccgacaucaaccugaugcucaucuga

SEQ ID NO: 86354 - RNA, 1410 nt, Artificial Sequence; identical to SEQ ID NO: 79908
  derived and/or modified CDS sequence (opt1) from neuraminidase__InfluenzaA__AFJ78224

SEQ ID NO: 86355 - RNA, 1410 nt, Artificial Sequence; identical to SEQ ID NO: 79908
  derived and/or modified CDS sequence (opt1) from neuraminidase__InfluenzaA__AFJ78235

SEQ ID NO: 86356 - RNA, 1410 nt, Artificial Sequence
  derived and/or modified CDS sequence (opt1) from neuraminidase__InfluenzaA__AFJ78246
augaaccccaaccagaagaucaucaccaucggcagcgugucccugaccaucagcacgaucugcuucuucaugcagaucgccauccucaucaccaccgucacccugcacuucaagcaguacgaguucaacuccccgcccaacaaccaggccaugcugugcgagcccacgaucaucgagcgcaacaucaccgagaucguguaccucaccaacaccacgaucgagaaggagaucugccccaagcuggcggaguaccggaacuggagcaagccgcagugcgacaucaccggguucgcccccuucuccaaggacaacagcauccgccuguccgccggcggggacaucugggugacccgggagcccuacgucagcugcgaccccgacaagugcuaccaguucgcccucggccaggggaccacgcugaacaacgugcacuccaacgacaccgugcgcgaccggaccccguaccgcacccugcucaugaacgagcugggcguccccuuccaccugggcacgaagcaggucugcaucgccuggagcuccagcuccugccacgacgggaaggcguggcuccacgugugcaucaccggcgacgacaagaacgccaccgccagcuucaucuacaacgggcggcugguggacuccaucgugagcugguccaaggagauccugcgcacccaggagagcgagugcgugugcaucaacggcacgugcaccgucgugaugaccgacggguccgccagcggcaaggcggacaccaagauccucuucaucgaggagggcaagaucgugcacacgagcacccuguccgggagcgcccagcacgucgaggagugcuccugcuacccccgguaccccggcgugcgcugcgugugccgggacaacuggaaggggagcaaccgcccgaucgucgacaucaacaucaaggaccacuccaucgugagcuccuacgugugcagcggccuggucggcgacacgccccggaagaacgacuccagcuccagcucccacugccucgaccccaacaacgaggagggcgggcacggggugaagggcugggccuucgacgacgggaacgacguguggaugggccgcaccaucagcgagaagucccggcugggcuacgagaccuucaaggucaucgagggguggagcaaccccaaguccaagcugcagaucaaccgccaggugaucgucgaccggggcaaccgcagcggguacuccggcaucuucagcguggagggcaagagcugcaucaaccggugcuucuacguggagcucauccgcgggcggaaggaggagaccgagguccuguggaccuccaacagcaucgugguguucugcggcaccuccgggacguacggcaccgggagcuggccggacggcgccgacaucaaccugaugcccaucuga

SEQ ID NO: 86357 - RNA, 1410 nt, Artificial Sequence
  derived and/or modified CDS sequence (opt1) from neuraminidase__InfluenzaA__AFJ78268
augaaccccaaccagaagaucaucaccaucggcagcgugucccugaccaucagcacgaucugcuucuucaugcagaccgccauccucaucaccaccgucacgcugcacuucaagcaguacgaguucaacuccccgcccaacaaccaggugaugcugugcgagcccaccaucaucgagcgcaacaucaccgagaucguguaccucaccaacacgaccaucgagaaggagaucugccccaagcuggccgaguaccggaacuggagcaagccgcagugcgacaucaccggguucgcgcccuucuccaaggacaacagcauccgccuguccgccggcggggacaucugggucacccgggagcccuacgugagcugcgaccccgacaagugcuaccaguucgcccucggccaggggacgacccugaacaacgugcacuccaacaacaccguccgcgaccggaccccguaccgcacgcugcucaugaacgagcugggcgugcccuuccaccugggcaccaagcaggucugcaucgccuggagcuccagcuccugccacgacgggaaggccuggcuccacgugugcaucaccggcgacgacaagaacgcgaccgccagcuucaucuacaacgggcggcugguggacuccaucgugagcugguccaaggagauccugcgcacgcaggagagcgagugcgucugcaucaacgggaccugcaccguggugaugaccgacggguccgccagcggcaaggccgacacgaagauccucuucaucgaggagggcaagaucguccacaccagcaagcuguccgggagcgcgcagcacguggaggagugcuccugcuacccccgguaccccggcgugcgcugcgucugccgggacaacuggaaggggagcaaccgcccgaucguggacaucaacaugaaggaccacuccaucgugagcuccuacgucugcagcggccuggugggcgacacgccccggaagaacgacuccagcuccagcucccacugccucgaccccaacaacgaggagggcggccacggggugaagggcugggccuucgacgacgggaacgacgucuggaugggccgcaccaucagcgagaagucccggcugggcuacgagaccuucaaggugaucgagggguggagcaaccccaaguccaagcugcagaucaaccgccaggucaucguggaccggggcaaccgcagcggguacuccggcaucuucagcguggagggcaagagcugcaucaaccggugcuucuacgucgagcucauccgcgggcggaaggaggagaccgaggugcuguggaccuccaacagcaucguggucuucugcggcaccuccgggacguacggcaccgggagcuggccggacggcgccgacaucaaccugaugcccaucuga

SEQ ID NO: 86358 - RNA, 1410 nt, Artificial Sequence
  derived and/or modified CDS sequence (opt1) from neuraminidase__InfluenzaA__AFJ78279
augaaccccaaccagaagaucaucaccaucggcagcgugucccugaccaucagcacgaucugcuucuucaugcagaccgccauccucaucaccaccgucacgcugcacuucaagcaguacgaguucaacuccccgcccaacaaccaggugaugcugugcgagcccaccaucaucgagcgcaacaucaccgagaucguguaccucaucaacaccacgaucgagaaggagaucugccccaagcuggccgaguaccggaacuggagcaagccgcagugcgacaucaccggguucgcgcccuucuccaaggacaacagcauccgccuguccgccggcggggacaucugggucacccgggagcccuacgugagcugcgaccccgacaagugcuaccaguucgcccucggccaggggaccacgcugaacaacgugcacuccaacaacaccguccgcgaccggaccccguaccgcacccugcucaugaacgagcugggcgugcccuuccaccugggcacgaagcaggucugcaucgccuggagcuccagcuccugccacgacgggaaggccuggcuccacgugugcaucaccggcgacgacaagaacgcgaccgccagcuucaucuacaacgggcggcugguggacuccaucgugagcugguccaaggagauccugcgcacccaggagagcgagugcgucugcaucaacggcacgugcaccguggugaugaccgacggguccgccagcggcaaggccgacaccaagauccucuucaucgaggagggcaagaucguccacacgagcacccuguccgggggcgcgcagcacguggaggagugcagcugcuacccccgguaccccggggugcgcugcgucugccgggacaacuggaagggcuccaaccgcccgaucguggacaucaacaucaaggaccacagcaucguguccagcuacgucugcuccggccuggugggggacacgccccggaagaacgacagcuccagcuccagccacugccucgaccccaacaacgaggagggcgggcacggcgugaaggggugggccuucgacgacggcaacgacgucuggaugggccgcaccaucuccgagaagucccggcugggguacgagaccuucaaggugaucgagggcuggagcaaccccaagagcaagcugcagaucaaccgccaggucaucguggaccgggggaaccgcuccggcuacagcgggaucuucuccguggagggcaagagcugcaucaaccggugcuucuacgucgagcucauccgcggccggaaggaggagaccgaggugcuguggaccagcaacuccaucguggucuucugcgggaccagcggcacguacgggaccggcuccuggccggacggggccgacaucaaccugaugcccaucuga

SEQ ID NO: 86359 - RNA, 1410 nt, Artificial Sequence
  derived and/or modified CDS sequence (opt1) from neuraminidase__InfluenzaA__AFJ78290
augaaccccaaccagaagaucaucaccaucggcagcgugucccugaccaucagcacgaucugcuucuucaugcagaucgccauccucaucaccaccgucacccugcacuucaagcaguacgaguucaacuccccgcccaacaaccaggugaugcugugcgagcccacgaucaucgagcgcaacaucaccgagaucguguaccucaccaacaccacgaucgagaaggagaucugccccaagcuggccgaguaccggaacuggagcaagccgcagugcgacaucaccggguucgcgcccuucuccaaggacaacagcauccgccuguccgccggcggggacaucugggucacccgggagcccuacgugagcugcgaccccgacaagugcuaccaguucgcccucggccaggggaccacgcugaacaacgugcacuccaacaacaccguccgcgaccggaccccguaccgcacccugcucaugaacgagcugggcgugcccuuccaccugggcacgaagcaggucugcaucgccuggagcuccagcuccugccacgacgggaaggccuggcuccacgugugcaucaccggcgacgacaagaacgcgaccgccagcuucaucuacaacgggcggcugguggacuccguggucagcugguccaaggagauccugcgcacccaggagagcgagugcgugugcaucaacggcacgugcaccguggucaugaccgacggguccgccagcggcaaggccgacaccaagauccucuucaucgaggagggcaagaucgugcacacgagcgcgcuguccgggagcgcccagcacguggaggagugcuccugcuacccccgguaccccggcguccgcugcgugugccgggacaacuggaaggggagcaaccgcccgaucguggacaucaacaucaaggaccacuccaucgucagcuccuacgugugcagcggccuggugggcgacacgccccggaagaacgacuccagcuccagcucccacugccucgaccccaacaacgaggagggcgggcacggggucaagggcugggccuucgacgacgggaacgacguguggaugggccgcaccaucagcgagaagucccggcugggcuacgagaccuucaaggucaucgagggguggagcaaccccaaguccaagcugcagaucaaccgccaggugaucguggaccggggcaaccgcagcggguacuccggcaucuucagcgucgagggcaagagcugcaucaaccggugcuucuacguggagcucauccgcgggcggaaggaggagaccgaggugcuguggaccuccaacagcaucgucguguucugcggcaccuccgggaccuacggcacggggagcuggccggacggcgccgacaucaaccugaugcccaucuga

SEQ ID NO: 86360 - RNA, 1413 nt, Artificial Sequence
  derived and/or modified CDS sequence (opt1) from neuraminidase__InfluenzaA__AFJ78312
augaaccccaaccagaagaucaucaccaucggcagcaucuccaucgccaucgggaucaucagccugaugcuccagaucggcaacaucaucuccaucugggccagccacuccauccagaccgggagccagaaccacacgggcaucugcaaccagcgcaucaucaccuacgagaacuccaccugggugaaccacaccuacgucaacaucaacaacacgaacgugguggcggggaaggacaagaccagcgucacccuggccggcaacuccagccugugcuccaucagcggcugggccaucuacaccaaggacaacuccauccggaucgggagcaagggcgacguguucgugauccgcgagccguucaucuccugcagccaccucgagugccggacguucuuccugacccagggggcccugcucaacgacaagcacuccaacggcaccgucaaggaccgcagccccuaccgggcccugauguccugcccccugggggaggcgcccagcccguacaacagcaaguucgaguccguggccuggagcgccuccgccugccacgacggcaugggcuggcucaccaucgggaucagcggccccgacaacggggcgguggccguccugaaguacaacggcaucaucacggagaccaucaaguccugggagaagcgcauccugcggacccaggagagcgagugcgugugcgugaacggcuccugcuucaccaucaugacggacgggcccagcaacggcgccgccuccuacaagaucuucaagaucgagaaggggaaggucaccaagagcaucgagcucaacgcccccaacucccacuacgaggagugcagcugcuacccggacaccggcaccgugaugugcgugugccgcgacaacuggcacggguccaaccggcccugggucagcuucaaccagaaccuggacuaccagaucggcuacaucugcuccggcguguucggggacaacccccgccccaaggacggcgaggggagcugcaacccggugacggcggacggcgccgacggggucaagggcuucuccuacaaguacggcaacgggguguggaucggccggaccaagagcaaccgccugcggaagggguucgagaugaucugggaccccaacggcuggaccgacaccgacuccgacuucagcgugaagcaggacgucguggccaucacggacuggagcggguacuccggcagcuucgugcagcaccccgagcucaccggccuggacugcauccgccccugcuucugggucgagcuggugcgggggcgcccgcgggagaacaccaccaucuggacguccggcagcuccaucagcuucugcggggucaacuccgacaccgccaacuggagcuggcccgacggcgccgagcuccccuucaccaucgacaaguga

SEQ ID NO: 86361 - RNA, 1410 nt, Artificial Sequence; identical to SEQ ID NO: 86293
  derived and/or modified CDS sequence (opt1) from neuraminidase__InfluenzaA__AFJ78323

SEQ ID NO: 86362 - RNA, 1413 nt, Artificial Sequence
  derived and/or modified CDS sequence (opt1) from neuraminidase__InfluenzaA__AFJ78334
augaaccccaaccagaagaucaucaccaucggcagcaucuccaucgccaucgggaucaucagccugaugcuccagaucggcaacaucaucuccaucugggccagccacuccauccagaccgggagccagaaccacacgggcaucugcaaccagcgcaucaucaccuacgagaacuccaccugggugaaccacaccuacgucaacaucaacaacacgaacgugguggcggggaaggacaagaccagcgucacccuggccggcaacuccagccugugcuccaucagcggcugggccaucuacaccaaggacaacuccauccggaucgggagcaagggcgacguguucgugauccgcgagccguucaucuccugcagccaccucgagugccggacguucuuccugacccagggggcccugcucaacgacaagcacuccaacggcaccgucaaggaccgcagccccuaccgggcccugauguccugcccccugggggaggcgcccagcccguacaacagcaaguucgaguccguggccuggagcgccuccgccugccacgacggcaugggcuggcucaccaucgggaucagcggccccgacaacggggcgguggccguccugaaguacaacggcaucaucacggagaccaucaaguccuggaagaagcagauccugcgcacccaggagagcgagugcgugugcgugaacggcuccugcuucaccaucaugacggacgggcccagcaacggcgccgccuccuacaagaucuucaagaucgagaaggggaaggucaccaagagcaucgagcucaacgcccccaacuuccacuacgaggagugcuccugcuacccggacaccggcaccgugaugugcgugugccgggacaacuggcacgggagcaaccgccccugggucuccuucaaccagaaccuggacuaccagaucggcuacaucugcagcggcguguucggggacaacccccggcccaaggacggcgagggguccugcaacccggugacggucgacggcgcggacggggugaagggcuucagcuacaaguacggcaacgggguguggaucggccgcaccaaguccaaccggcugcgcaagggguucgagaugaucugggaccccaacggcuggaccgacaccgacagcgacuucuccgucaagcaggacgugguggccaucacggacuggagcggguacagcggcuccuucguccagcaccccgagcucaccggccuggacugcauccggcccugcuucuggguggagcugguccgcgggcucccgcgggagaacaccaccaucuggacgagcggcuccagcaucuccuucugcggggugaacagcgacaccgccaacugguccuggcccgacggcgccgagcugcccuucaccaucgacaaguga

SEQ ID NO: 86363 - RNA, 1413 nt, Artificial Sequence; identical to SEQ ID NO: 86362
  derived and/or modified CDS sequence (opt1) from neuraminidase__InfluenzaA__AFJ78345

SEQ ID NO: 86364 - RNA, 1413 nt, Artificial Sequence
  derived and/or modified CDS sequence (opt1) from neuraminidase__InfluenzaA__AFJ78356
augaaccccaaccagaagaucaucaccaucggcagcaucuccaucgccaucgggaucaucagccugaugcuccagaucggcaacaucaucuccaucugggccagccacuccauccagaccgggagccagaaccacacgggcaucugcaaccagcgcaucaucaccuacgagaacuccaccugggugaaccacaccuacgucaacaucaacaacacgaacgugguggucgggaaggacaagaccagcgugacccuggcgggcaacuccagccugugcuccaucagcggcugggccaucuacaccaaggacaacuccauccggaucgggagcaagggcgacguguucgucauccgcgagccguucaucuccugcagccaccucgagugccggacguucuuccugacccagggggcccugcucaacgacaagcacuccaacggcaccgugaaggaccgcagccccuaccgggcccugauguccugcccccugggggaggcccccagcccguacaacagcaaguucgaguccguggcguggagcgccuccgccugccacgacggcaugggcuggcucaccaucgggaucagcggccccgacaacggggccgucgcggugcugaaguacaacggcaucaucacggagaccaucaaguccuggaagaagcagauccugcgcacccaggagagcgagugcgugugcgucaacggcuccugcuucaccaucaugacggacgggcccagcaacggcgccgccuccuacaagaucuucaagaucgagaaggggaaggugaccaagagcaucgagcucaacgcccccaacuuccacuacgaggagugcuccugcuacccggacaccggcaccgugaugugcaucugccgggacaacuggcacgggagcaaccgccccugggucuccuucaaccagaaccuggacuaccagaucggcuacaucugcagcggcguguucggggacaacccccggcccaaggacggcgagggguccugcaacccggugacggucgacggcgccgacggggugaagggcuucagcuacaaguacggcaacgggguguggaucggccgcaccaaguccaaccggcugcgcaagggguucgagaugaucugggaccccaacggcuggaccgacaccgacagcgacuucuccgucaagcaggacgugguggcgaucacggacuggagcggguacagcggcuccuucguccagcaccccgagcucaccggccuggacugcauccggcccugcuucuggguggagcugguccgcgggcucccgcgggagaacaccaccaucuggacgagcggcuccagcaucuccuucugcggggugaacagcgacaccgccaacugguccuggcccgacggcgccgagcugcccuucaccaucgacaaguga

SEQ ID NO: 86365 - RNA, 1413 nt, Artificial Sequence
  derived and/or modified CDS sequence (opt1) from neuraminidase__InfluenzaA__AFJ78367
augaaccccaaccagaagaucaucaccaucggcagcaucuccaucgccaucgggaucaucagccugaugcuccagaucggcaacaucaucuccaucugggccagccacuccauccagaccgggagccagaaccacacgggcaucugcaaccagcgcaucaucaccuacgagaacuccaccugggugaaccacaccuacgucaacaucaacaacacgaacgugguggcggggaaggacaagaccagcgucacccuggccggcaacuccagccugugcuccaucagcggcugggccaucuacaccaaggacaacuccauccggaucgggagcaagggcgacguguucgugauccgcgagccguucaucuccugcagccaccucgagugccggacguucuuccugacccagggggcccugcucaacgacaagcacuccaacggcaccgucaaggaccgcagccccuaccgggcccugauguccugcccccugggggaggcgcccagcccguacaacagcaaguucgaguccguggccuggagcgccuccgccugccacgacggcaugggcuggcucaccaucgggaucagcggccccgacaacggggcgguggccguccugaaguacaacggcaucaucacggagaccaucaaguccuggaagaagcgcauccugcggacccaggagagcgagugcgugugcgugaacggcuccugcuucaccaucaugacggacgggcccagcaacggcgccgccuccuacaagaucuucaagaucgagaaggggaaggucaccaagagcaucgagcucaacgcccccaacucccacuacgaggagugcagcugcuacccggacaccggcaccgugaugugcgugugccgcgacaacuggcacggguccaaccggcccugggucagcuucaaccagaaccuggacuaccagaucggcuacaucugcuccggcguguucggggacaacccccgccccaaggacggcgaggggagcugcaacccggugacggcggacggcgccgacggggucaagggcuucuccuacaaguacggcaacgggguguggaucggccggaccaagagcaaccgccugcggaagggguucgagaugaucugggaccccaacggcuggaccgacaccgacuccgacuucagcgugaagcaggacgucguggccaucacggacuggagcggguacuccggcagcuucgugcagcaccccgagcucaccggccuggacugcauccgccccugcuucugggucgagcuggugcgggggcgcccgcgggagaacaccaccaucuggacguccggcagcuccaucagcuucugcggggucaacggcgacaccgccaacugguccuggcccgacggcgccgagcuccccuucaccaucgacaaguga

SEQ ID NO: 86366 - RNA, 1413 nt, Artificial Sequence
  derived and/or modified CDS sequence (opt1) from neuraminidase__InfluenzaA__AFJ78378
augaaccccaaccagaaggugaucaccaucggcagcaucuccaucgccaucgggaucaucagccugaugcuccagaucggcaacaucaucuccaucugggccagccacuccauccagaccgggagccagaaccacacgggcaucugcaaccagcgcaucaucaccuacgagaacuccaccugggucaaccacaccuacgugaacaucaacaacacgaacguggucgcggggaaggacaagaccagcgugacccuggccggcaacuccagccugugcuccaucagcggcugggccaucuacaccaaggacaacuccauccggaucgggagcaagggcgacguguucgucauccgcgagccguucaucuccugcagccacauggagugccggacguucuuccucacccagggggcccugcugaacgacaagcacuccaacggcaccgugaaggaccgcagccccuaccgggcccucauguccugcccccugggggaggcgcccagcccguacaacagcaaguucgaguccguggccuggagcgccuccgccugccacgacggcaugggcuggcugaccaucgggaucagcggccccgacaacggggcggucgccgugcucaaguacaacggcaucaucacggagaccaucaaguccuggaagaagcgcauccugcggacccaggagagcgagugcgugugcgucaacggcuccugcuucaccaucaugacggacgggcccagcaacggcgccgccuccuacaagaucuucaagaucgagaaggggaaggugaccaagagcaucgagcugaacgcccccaacucccacuacgaggagugcagcugcuacccggacaccggcaccgugaugugcgucugccgcgacaacuggcacggguccaaccggcccugggugagcuucaaccagaaccucgacuaccagaucggcuacaucugcuccggcguguucggggacaacccccgcccccgggacggcgaggggagcugcaacccggucacgguggacggcgcggacggggugaagggcuucuccuacaaguacggcaacggggucuggaucggccgcaccaagagcaaccggcugcgcaagggguucgagaugaucugggaccccaacggcuggaccgacaccgacuccgacuucgccgugaagcaggacguggucgccaucacggacuggagcggguacagcggcuccuucgugcagcaccccgagcugaccggccucgacugcauccggcccugcuucugggucgagcuggugcgcgggcugccgcgggagaacaccaccaucuggacgagcggcuccagcaucuccuucugcggggugaacagcgacaccgccaacugguccuggcccgacggcgccgagcuccccuucaccaucgacaaguga

SEQ ID NO: 86367 - RNA, 1413 nt, Artificial Sequence; identical to SEQ ID NO: 78410
  derived and/or modified CDS sequence (opt1) from neuraminidase__InfluenzaA__AFJ78389

SEQ ID NO: 86368 - RNA, 1413 nt, Artificial Sequence; identical to SEQ ID NO: 78410
  derived and/or modified CDS sequence (opt1) from neuraminidase__InfluenzaA__AFJ78400

SEQ ID NO: 86369 - RNA, 1413 nt, Artificial Sequence; identical to SEQ ID NO: 78410
  derived and/or modified CDS sequence (opt1) from neuraminidase__InfluenzaA__AFJ78411

SEQ ID NO: 86370 - RNA, 1413 nt, Artificial Sequence
  derived and/or modified CDS sequence (opt1) from neuraminidase__InfluenzaA__AFJ78422
augaaccccaaccagaagaucaucaccaucggcagcaucuccaucgccaucgggaucaucagccugaugcuccagaucggcaacaucaucuccaucugggccagccacuccauccagaccgggagccagaaccacacgggcaucugcaaccagcgcaucaucaccuacgagaacuccaccugggugaaccacaccuacgucaacaucaacaacacgaacgugguggcggggaaggacaagaccagcgucacccuggccggcaacuccagccugugcuccaucagcggcugggccaucuacaccaaggacaacuccauccggaucgggagcaagggcgacguguucgugauccgcgagccguucaucuccugcagccaccucgagugccggacguucuuccugacccagggggcccugcucaacgacaagcacuccaacggcaccgucaaggaccgcagccccuaccgggcccugauguccugcccccugggggaggcgcccagcccguacaacagcaaguucgaguccguggccuggagcgccuccgccugccacgacggcaccggcuggcucacgaucgggaucagcggccccgacaacggggcgguggccguccugaaguacaacggcaucaucaccgagaccaucaaguccuggaagaagcgcauccugcggacccaggagagcgagugcgugugcaugaacggcuccugcuucacgaucaugaccgacgggcccagcaacggcgccgccuccuacaagaucuucaagaucgagaaggggaaggugaccaagagcaucgagcucaacgcccccuccuuccacuacgaggagugcagcugcuacccggacaccggcacggucaugugcgugugccgcgacaacuggcacggguccaaccggcccugggugagcuucaaccagaaccuggacuaccagaucggcuacaucugcuccggcgucuucggggacaacccccgcccccaggacggcgaggggagcugcaacccggugaccguggacggcgcggacggggucaagggcuucuccuacaaguacggcaacgggguguggaucggccggaccaagagcaaccgccugcggaagggguucgagaugaucugggaccccaacggcuggaccaacacggacuccgacuucagcgugaagcaggacgucguggccaucaccgacuggagcggguacuccggcagcuucgugcagcaccccgagcucaccggccuggacugcauccgccccugcuucugggucgagcuggugcgggggcucccgcgcgagaacaccacgaucuggaccuccggcagcuccaucagcuucugcggggucaacuccgacaccgccaacuggagcuggcccgacggcgccgagcugcccuucaccaucgacaaguga

SEQ ID NO: 86371 - RNA, 1413 nt, Artificial Sequence; identical to SEQ ID NO: 80517
  derived and/or modified CDS sequence (opt1) from neuraminidase__InfluenzaA__AFJ78433

SEQ ID NO: 86372 - RNA, 1413 nt, Artificial Sequence; identical to SEQ ID NO: 80517
  derived and/or modified CDS sequence (opt1) from neuraminidase__InfluenzaA__AFJ78444

SEQ ID NO: 86373 - RNA, 1413 nt, Artificial Sequence
  derived and/or modified CDS sequence (opt1) from neuraminidase__InfluenzaA__AFJ78466
augaaccccaaccagaagaucaucaccaucggcagcaucuccaucgccaucgggaucaucagccugaugcuccagaucggcaacaucaucuccaucugggccagccacuccauccagaccgggagccagaaccacacgggcaucugcaaccagcgcaucaucaccuacgagaacuccaccugggugaaccacaccuacgucaacaucaacaacacgaacgugguggcggggaaggacaagaccagcgucacccuggccggcaacuccagccugugcuccaucagcggcugggccaucuacaccaaggacaacuccauccggaucgggagcaagggcgacguguucgugauccgcgagccguucaucuccugcagccaccucgagugccggacguucuuccugacccagggggcccugcucaacgacaagcacuccaacggcaccgucaaggaccgcagccccuaccgggcccugauguccugcccccugggggaggcgcccagcccguacaacagcaaguucgaguccguggccuggagcgccuccgccugccacgacggcaucggcuggcucaccaucgggaucagcggccccgacaacggggcgguggccguccugaaguacaacggcaucaucacgggcaccaucaaguccuggaagaagcagauccugcgcacccaggagagcgagugcgugugcaucaacggguccugcuucaccaucaugacggacggccccagcaacggggccgccuccuacaagaucuucaagaucgagaagggcaaggugaccaagagcaucgagcucaacgcccccaacuuccacuacgaggagugcuccugcuacccggacaccgggaccgucaugugcgugugccgggacaacuggcacggcagcaaccgccccuggguguccuucaaccagaaccuggacuaccagaucggcuacaucugcagcggggucuucggcgacaacccccggcccaaggacggggagggccgcugcaacccggugacgguggacggggcggacggcgucaagggcuucuccuacaaguacgggaacggcguguggaucgggcggaccaagagcaaccgccugcggaagggcuucgagaugaucugggaccccaacggguggaccaacaccgacuccgacuucagcgugaagcaggacgucguggccaucacggacugguccggcuacagcggcagcuucgugcagcaccccgagcucaccgggcuggacugcauccgccccugcuucugggucgagcuggugcggggccucccgcgcgagaacaccaccaucuggacguccgggagcuccaucagcuucugcggcgucaacuccgacaccgccaacuggagcuggcccgacggcgccgagcugcccuucaccaucgacaaguga

SEQ ID NO: 86374 - RNA, 1413 nt, Artificial Sequence
  derived and/or modified CDS sequence (opt1) from neuraminidase__InfluenzaA__AFJ78477
augaaccccaaccagaagaucaucaccaucggcagcaucuccaucgccaucgggaucaucggccugaugcuccagaucgggaacaucaucagcaucugggccucccacagcauccagaccggcucccagaaccacacggggaucugcagccagcgcaucaucaccuacgagaacuccaccugggugaacaacaccuacgucaacaucaacaacacgaacgugguggcggagaaggacaagaccagcgucacccuggccggcaacuccagccugugcuccaucagcggcugggccaucuacaccaaggacaacuccauccggaucgggagcaagggcgacguguucgugauccgcgagccguucaucuccugcagccaccucgagugccggacguucuuccugacccagggggcccugcucaacgacaagcacuccaacggcaccgucaaggaccgcagccccuaccgggcccugauguccugcccccugggggaggcgcccagcccguacaacagccgcuucgaguccguggccuggagcgccuccgccugccacgacggcaugggcuggcucaccaucgggaucagcggccccgacaacggggcgguggccguccugaaguacaacggcaucaucacggagaccaucaaguccuggaagaagcggauccugcgcacccaggagagcgagugcgugugcaugaacggcuccugcuucaccaucaugacggacgggcccagcaacggcgccgccuccuacaagaucuucaagaucgagaaggggaaggugaccaagagcaucgagcucaacgcccccaacuuccacuacgaggagugcuccugcuacccggacaccggcaccgucaugugcgugugccgggacaacuggcacgggagcaaccgccccuggguguccuucaaccagaaccuggacuaccagaucggcuacaucugcagcggcgucuucggggacaacccccggcccaaggacggcgagggguccugcaacccggugacgguggacggcgcggacggggucaagggcuucagcuacaaguacggcaacgggguguggaucggccgcaccaaguccaaccggcugcgcaagggguucgagaugaucugggaccccaacggcuggaccaacaccgacagcgacuucuccgugaagcaggacgucguggccaucacggacuggagcggguacagcggcuccuucgugcagcaccccgagcucaccggccuggacugcauccggcccugcuucugggucgagcuggugcgcgggcucccgcgggagaacaccaccaucuggacgagcggcuccagcaucuccuucugcggggucaacagcggcaccgccaacugguccuggcccgacggcgccgagcugcccuucaccaucgacaaguga

SEQ ID NO: 86375 - RNA, 1413 nt, Artificial Sequence
  derived and/or modified CDS sequence (opt1) from neuraminidase__InfluenzaA__AFJ78488
augaaccccaaccagaagaucaucaccaucggcagcaucuccaucgccaucgggaucaucagccugauccuccagaucggcaacaucaucuccaucugggccagccacuccauccagaccgggagccagaaccacacgggcaucugcaaccagcgcaucaucaccuacgagaacuccaccugggugaacaacaccuacgucaacaucaacaacacgaacgugguggcggagaaggacaagaccagcgucacccuggccgggaacuccagccugugcuccaucagcggcugggccaucuacaccaaggacaacuccauccggaucggcagcaagggggacguguucgugauccgcgagccguucaucuccugcagccaccucgagugccggacguucuuccugacccagggcgcccugcucaacgacaagcacuccaacgggaccgucaaggaccgcagccccuaccgggcccugauguccugcccccugggcgaggcgcccagcccguacaacagccgcuucgaguccguggccuggagcgccuccgccugccacgacgggaugggcuggcucaccaucggcaucagcgggcccgacaacggcgcgguggccguccugaaguacaacgggaucaucacggagaccaucaaguccuggaagaagcggauccugcgcacccaggagagcgagugcgugugcaugaacggcuccugcuucaccaucaugacggacggccccagcaacggggccgccuccuacaagaucuucaagaucgagaagggcaaggugaccaagaccaucgagcucaacgcccccaacuuccacuacgaggagugcagcugcuacccggacaccgggacggucaugugcgugugccgggacaacuggcacggcuccaaccgccccugggugagcuucaaccagaaccuggacuaccagaucggguacaucugcuccggcgucuucggcgacaacccccggcccaaggacggggagggcagcugcaacccggugaccguggacggggcggacggcgucaagggguucuccuacaaguacggcaacggcguguggaucgggcgcaccaagagcaaccggcugcgcaagggcuucgagaugaucugggaccccaacggguggaccaacacggacuccgacuucagcaugaagcaggacguggucgccaucaccgacugguccggcuacagcgggagcuucgugcagcaccccgagcucaccggccuggacugcauccggcccugcuucuggguggagcugguccgcggccucccgcgggagaacaccacgaucuggaccuccgggagcuccaucagcuucugcggcgugaacuccgggaccgccaacuggagcuggcccgacggcgccgagcugcccuucaccaucgacaaguga

SEQ ID NO: 86376 - RNA, 1413 nt, Artificial Sequence
  derived and/or modified CDS sequence (opt1) from neuraminidase__InfluenzaA__AFJ78510
augaaccccaaccagaagaucaucaccaucggcagcaucuccaucgccaucgggaucaucagccugaugcuccagaucggcaacaucaucuccaucugggccagccacuccauccagaccgggagccagaaccacacgggcaucugcaaccagcgcaucaucaccuacgagaacuccaccugggugaaccacaccuacgucaacaucaacaacacgaacgugguggcggggaaggacaagaccagcgucacccuggccggcaacuccagccugugcuccaucagcggcugggccaucuacaccaaggacaacuccauccggaucgggagcaagggcgacguguucgugauccgcgagccguucaucuccugcagccaccucgagugccggacguucuuccugacccagggggcccugcucaacgacaagcacuccaacggcaccgucaaggaccgcagccccuaccgggcccugauguccugcccccugggggaggcgcccagcccguacaacagcaaguucgaguccguggccuggagcgccuccgccugccacgacggcaugggcuggcucaccaucgggaucagcggccccgacaacggggcgguggccguccugaaguacaacggcaucaucacgggcaccaucaaguccuggaagaagcagauccugcgcacccaggagagcgagugcgugugcaugaacggguccugcuucaccaucaugacggacggccccagcaacggggccgccuccuacaagaucuucaagaucgagaagggcaaggugaccaagagcaucgagcucaacgcccccaacuuccacuacgaggagugcuccugcuacccggacaccgggaucgucaugugcgugugccgggacaacuggcacggcagcaaccgccccuggguguccuucaaccagaaccuggacuaccagaucggcuacaucugcagcggggucuucggcgacaacccccggcccaaggacggggagggcuccugcaacccggugaccguggacggggcggacggcgucaagggcuucagcuacaaguacgacaacgggguguggaucggccgcacgaaguccaaccggcugcgcaagggguucgagaugaucugggaccccaacggcuggaccaacaccgacagcgacuucuccgugaagcaggacgucguggccaucaccgacuggagcggguacagcggcuccuucgugcagcaccccgagcucacgggccuggacugcauccggcccugcuucugggucgagcuggugcgcgggcucccgcgggagaacaccaccaucuggaccagcggcuccagcaucuccuucugcggggucaacagcgacacggccaacugguccuggcccgacggcgccgagcugcccuucaccaucgacaaguga

SEQ ID NO: 86377 - RNA, 1413 nt, Artificial Sequence
  derived and/or modified CDS sequence (opt1) from neuraminidase__InfluenzaA__AFJ78521
augaaccccaaccagaagaucaucaccaucggcagcaucuccaucgccaucgggaucaucagccugauccuccagaucggcaacaucaucuccaucugggccagccacuccauccagaccgggagccagaaccacacgggcaucugcaaccagcgcaucaucaccuacgagaacuccaccugggugaacaacaccuacgucaacaucaacaacacgaacgugguggcggagaaggacaagaccagcgucacccuggccgggaacuccagccugugcuccaucagcggcugggccaucuacaccaaggacaacuccauccggaucggcagcaagggggacguguucgugauccgcgagccguucaucuccugcagccaccucgagugccggacguucuuccugacccagggcgcccugcucaacgacaagcacuccaacgggaccgucaaggaccgcagccccuaccgggcccugauguccugcccccugggcgaggcgcccagcccguacaacagccgcuucgaguccguggccuggagcgccuccgccugccacgacgggaugggcuggcucaccaucggcaucagcgggcccgacaacggcgcgguggccguccugaaguacaacgggaucaucacggagaccaucaaguccuggaagaagcggauccugcgcacccaggagagcgagugcgugugcaugaacggcuccugcuucaccaucaugacggacggccccagcaacggggccgccuccuacaagaucuucaagaucgagaagggcaaggugaccaagaccaucgagcucaacgcccccaacuuccacuacgaggagugcagcugcuacccggacaccgggacggucaugugcgugugccgggacaacuggcacggcuccaaccgccccugggugagcuucaaccagaaccuggacuaccagaucggguacaucugcuccggcgucuucggcgacaacccccggcccaaggacggggagggcagcugcaacccggugaccguggacggggcggacggcgucaagggguucuccuacaaguacggcaacggcguguggaucgggcgcaccaagagcaaccggcugcgcaagggcuucgagaugaucugggaccccaacggguggaccaacacggacuccgacuucagcgugaagcaggacgucguggccaucaccgacugguccggcuacagcgggagcuucgugcagcaccccgagcucaccggccuggacugcauccggcccugcuucugggucgagcuggugcgcggccucccgcgggagaacaccacgaucuggaccuccgggagcuccaucagcuucugcggcgucaacuccgggaccgccaacuggagcuggcccgacggcgccgagcugcccuucaccaucgacaaguga

SEQ ID NO: 86378 - RNA, 1413 nt, Artificial Sequence; identical to SEQ ID NO: 86271
  derived and/or modified CDS sequence (opt1) from neuraminidase__InfluenzaA__AFJ78532

SEQ ID NO: 86379 - RNA, 1413 nt, Artificial Sequence; identical to SEQ ID NO: 86271
  derived and/or modified CDS sequence (opt1) from neuraminidase__InfluenzaA__AFJ78543

SEQ ID NO: 86380 - RNA, 1413 nt, Artificial Sequence; identical to SEQ ID NO: 86271
  derived and/or modified CDS sequence (opt1) from neuraminidase__InfluenzaA__AFJ78554

SEQ ID NO: 86381 - RNA, 1413 nt, Artificial Sequence; identical to SEQ ID NO: 86259
  derived and/or modified CDS sequence (opt1) from neuraminidase__InfluenzaA__AFJ78565

SEQ ID NO: 86382 - RNA, 1413 nt, Artificial Sequence
  derived and/or modified CDS sequence (opt1) from neuraminidase__InfluenzaA__AFJ78576
augaaccccaaccagaagaucaucaccaucggcagcaucuccaucgccaucgggaucaucagccugaugcuccagaucggcaacaucaucuccaucugggccagccacuccauccagaccgggagccagaaccacacgggcaucugcaaccagcgcaucaucaccuacgagaacuccaccugggugaaccacaccuacgucaacaucaacaacacgaacgugguggcggggaaggacaagaccccggucacccuggccggcaacagcucccugugcagcaucuccggcugggccauccacaccaaggacaacagcauccggaucggguccaagggcgacguguucgugauccgcgagcccuucaucagcugcucccaccucgagugcaagacguucuuccugacccagggggcccugcucaacgacaagcacagcaacggcaccgucaaggaccggucccccuaccgcgcccugaugagcugcccccugggggaggcgccgucccccuacaacagcaaguucgagagcguggccugguccgccagcgccugccacgacggcaucggcuggcucaccaucgggaucuccggccccgacaacggggcgguggccguccugaaguacaacggcaucaucacgggcaccaucaagagcuggaagaagcagauccugcggacccaggaguccgagugcgugugcaugaacgggagcugcuucaccaucaugacggacggccccuccaacggggccgccagcuacaagaucuucaagaucgagaagggcaaggugaccaaguccauggagcucaacgccccgaacuuccacuacgaggagugcagcugcuaccccgacaccgggaccgucaugugcgugugccgcgacaacuggcacggcuccaaccggcccugggugagcuucaaccagaaccuggacuaccagaucggcuacaucugcacgggggucuucggcgacaacccccgcccggaggacggggagggcuccugcaaccccgugaccguggacggggcgaacggcgucaagggcuucagcuacaaguacgggaacggcguguggaucgggcggaccaaguccaaccgcauccggaagggcuucgagaugaucugggaccccaacggguggaccaacacggacagcgacuucuccgugaagcaggacaucgucgccaucaccgacuggagcggcuacuccggcagcuucgugcagcaccccgagcugaccgggcucgacugcauccgcccgugcuucuggguggagcugguccggggccugccccgcgagaacaccacgaucuggaccagcggguccagcaucuccuucugcggcgugaacagcgacaucgccaacugguccuggcccgacggcgccgagcuccccuucaccaucgacaaguga

SEQ ID NO: 86383 - RNA, 1413 nt, Artificial Sequence
  derived and/or modified CDS sequence (opt1) from neuraminidase__InfluenzaA__AFJ78598
augaaccccaaccagaagaucaucaccaucggcagcaucuccaucgccaucgggaucaucagccugaugcuccagaucggcaacaucaucuccaucugggccagccacuccauccagaccgggauccagaacaacacgggcaucugcaaccagcgcaucaucaccuacgagaacagcaccugggugaaccacaccuacgucaacaucaacaacacgaacgugguggcgggggaggacaagaccuccgucacccuggccggcaacagcucccugugcagcaucuccggcugggccaucuacaccaaggacaacagcauccggaucggguccaagggcgacguguucgugauccgcgagccguucaucagcugcucccaccucgagugccggacguucuuccugacccagggggcccugcucaacgacaagcacagcaacggcaccgucaaggaccgcucccccuaccgggcccugaugagcugcccccugggggaggcgcccuccccguacaacagcaaguucgagagcguggccugguccgccagcgccugccacgacggcaugggcuggcucaccaucgggaucuccggccccgacaacggggcgguggccguccugaaguacaacggcaucaucacgggcaccaucaagagcuggaagaagcagauccugcgcacccaggaguccgagugcgugugcaugaacgggagcugcuucaccaucaugacggacggccccuccaacaaggccgccagcuacaagaucuucaagaucgagaaggggaaggugaccaaguccaucgagcucaacgcccccaacuuccacuacgaggagugcagcugcuacccggacaccggcaucgucaugugcgugugccgggacaacuggcacggguccaaccgccccugggugagcuucaaccagaaccuggacuaccagaucggcuacaucugcuccggcgucuucggggacaacccccggcccgaggacggcgaggggagcugcaacccggugaccguggacggcgcgaacggggucaagggcuucuccuacaaguacgacaacggcguguggaucgggcgcaccaagagcaaccggcugcgcaagggcuucgagaugaucugggaccccaacggguggacgaacaccgacuccgacuucagcgugaagcaggacgucguggccaucaccgacugguccggcuacagcgggagcuucgugcagcaccccgagcucacgggccuggacugcauccggcccugcuucugggucgagcuggugcgcggccucccgcgggagaacaccaccaucuggaccuccgggagcuccaucagcuucugcggcgucaacuccgacacggccaacuggagcuggcccgacggggccgagcugcccuucaccaucgacaaguga

SEQ ID NO: 86384 - RNA, 1413 nt, Artificial Sequence
  derived and/or modified CDS sequence (opt1) from neuraminidase__InfluenzaA__AFJ78609
augaaccccaaccagaagaucaucaccaucggcagcaucuccaucgccaucgggaucaucagccugaugcuccagaucggcaacaucaucuccaucugggccagccacuccauccagaccgggagccagaacaacacgggcaucugcaaccagcgcaucaucaccuacgagaacuccaccugggugaaccacaccuacgucaacaucaacaacacgaacgugguggcgggggaggacaagaccagcgucauccuggccggcaacuccagccugugcuccaucagcggcugggccaucuacaccaaggacaacuccauccggaucgggagcaagggcgacguguucgugauccgcgagccguucaucuccugcagccaccucgagugccggaccuucuuccugacgcagggggcccugcucaacgacaagcacuccaacggcaccgucaaggaccgcagccccuaccgggcccugauguccugcccccugggggaggcgcccagcccguacaacagcaaguucgaguccguggccuggagcgccuccgccugccacgacggcaugggcuggcucaccaucgggaucagcggccccgacaacggggcgguggccguccugaaguacaacggcaucaucaccggcacgaucaaguccuggaagaagcagauccugcgcacccaggagagcgagugcgugugcaugaacggguccugcuucaccaucaugaccgacggccccagcaacaaggccgccuccuacaagaucuucaagaucgagaaggggaaggugaccaagagcaucgagcucaacgcccccaacuucuacuacgaggagugcuccugcuacccggacacgggcaucgucaugugcgugugccgggacaacuggcacgggagcaaccgccccuggguguccuucaaccagaaccuggacuaccagaucggcuacaucugcagcggcgucuucggggacaacccccggcccgaggacggcgagggguccugcaacccggugaccguggacggcgcgaacggggucaagggcuucagcuacaaguacggcaacgggguguggaucggccgcaccaaguccaaccggcugcgcaagggguucgagaugaucugggaccccaacggcuggacgaacaccgacagcgacuucuccgugaagcaggacgucguggccaucaccgacuggagcggguacagcggcuccuucgugcagcaccccgagcucaccggccuggacugcauccggcccugcuucugggucgagcuggugcgcgggcucccgcgggagaacacgaccaucuggaccagcggcuccagcaucuccuucugcggggucaacagcgacaccgccaacugguccuggcccgacggcgccgagcugcccuucacgaucgacaaguga

SEQ ID NO: 86385 - RNA, 1413 nt, Artificial Sequence; identical to SEQ ID NO: 81485
  derived and/or modified CDS sequence (opt1) from neuraminidase__InfluenzaA__AFJ78620

SEQ ID NO: 86386 - RNA, 1413 nt, Artificial Sequence; identical to SEQ ID NO: 86259
  derived and/or modified CDS sequence (opt1) from neuraminidase__InfluenzaA__AFJ78631

SEQ ID NO: 86387 - RNA, 1413 nt, Artificial Sequence; identical to SEQ ID NO: 81485
  derived and/or modified CDS sequence (opt1) from neuraminidase__InfluenzaA__AFJ78642

SEQ ID NO: 86388 - RNA, 1413 nt, Artificial Sequence; identical to SEQ ID NO: 81485
  derived and/or modified CDS sequence (opt1) from neuraminidase__InfluenzaA__AFJ78653

SEQ ID NO: 86389 - RNA, 1410 nt, Artificial Sequence; identical to SEQ ID NO: 80762
  derived and/or modified CDS sequence (opt1) from neuraminidase__InfluenzaA__AFJ78664

SEQ ID NO: 86390 - RNA, 1410 nt, Artificial Sequence; identical to SEQ ID NO: 80762
  derived and/or modified CDS sequence (opt1) from neuraminidase__InfluenzaA__AFJ78674

SEQ ID NO: 86391 - RNA, 1410 nt, Artificial Sequence; identical to SEQ ID NO: 80762
  derived and/or modified CDS sequence (opt1) from neuraminidase__InfluenzaA__AFJ78684

SEQ ID NO: 86392 - RNA, 1410 nt, Artificial Sequence; identical to SEQ ID NO: 80762
  derived and/or modified CDS sequence (opt1) from neuraminidase__InfluenzaA__AFJ78694

SEQ ID NO: 86393 - RNA, 1410 nt, Artificial Sequence; identical to SEQ ID NO: 80762
  derived and/or modified CDS sequence (opt1) from neuraminidase__InfluenzaA__AFJ78704

SEQ ID NO: 86394 - RNA, 1410 nt, Artificial Sequence; identical to SEQ ID NO: 80762
  derived and/or modified CDS sequence (opt1) from neuraminidase__InfluenzaA__AFJ78714

SEQ ID NO: 86395 - RNA, 1410 nt, Artificial Sequence
  derived and/or modified CDS sequence (opt1) from neuraminidase__InfluenzaA__AFJ78724
augaaccccaaccagaagaucaucaccaucggcagcgugugcaugaccaucgggauggccaaccugauccuccagaucggcaacaucaucuccaucuggaucagccacuccauccagcuggggaaccagaaccagaucgagacgugcaaccagagcgucaucaccuacgagaacaacaccugggugaaccagaccuacgugaacaucuccaacacgaacuucgccgcgggccagagcgucguguccgugaagcuggccgggaacagcucccucugcccggucagcggcugggccaucuacuccaaggacaacagcauccgcaucggcuccaagggggacguguucgugauccgggagcccuucaucagcugcagcccccuggagugccgcaccuucuuccugacccagggcgcccuccugaacgacaagcacuccaacgggaccaucaaggaccggucccccuaccgcacgcugaugagcugcccgaucggcgagguccccucccccuacaacagccgguucgagagcguggccugguccgcgagcgccugccacgacgggaucaacuggcucaccaucggcaucuccggccccgacaacggggccguggccguccugaaguacaacggcaucaucaccgacaccaucaagagcuggcgcaacaacauccugcggacgcaggaguccgagugcgcgugcgugaacgggagcugcuucacccucaugaccgacggcccguccgacggccaggccagcuacaagaucuuccgcaucgagaaggggaagaucgugaaguccgucgagaugaacgcccccaacuaccacuacgaggagugcagcugcuaccccgacuccagcgagaucacgugcgugugccgggacaacuggcacggcuccaaccgccccugggugagcuucaaccagaaccuggaguaccagaucggguacaucugcuccggcaucuucggggacaacccgcggcccaacgacaagaccggcagcugcggccccgucuccagcaacggggccaacggcgugaagggguucuccuucaaguacggcaacgggguguggaucggccgcaccaagagcaucagcucccggaacggcuucgagaugaucugggaccccaacggguggaccggcaccgacaacaacuucagcaucaagcaggacaucgucgggaucaacgagugguccggcuacagcggguccuucgugcagcacccggagcugacgggccucgacugcauccgccccugcuucuggguggagcugauccggggccgccccaaggagaacaccaucuggaccagcggguccagcaucuccuucugcggcgucaacagcgacaccguggggugguccuggcccgacggcgccgagcugccguucacgaucgacaaguga

SEQ ID NO: 86396 - RNA, 1410 nt, Artificial Sequence; identical to SEQ ID NO: 80762
  derived and/or modified CDS sequence (opt1) from neuraminidase__InfluenzaA__AFJ78734

SEQ ID NO: 86397 - RNA, 1410 nt, Artificial Sequence; identical to SEQ ID NO: 80762
  derived and/or modified CDS sequence (opt1) from neuraminidase__InfluenzaA__AFJ78744

SEQ ID NO: 86398 - RNA, 1410 nt, Artificial Sequence; identical to SEQ ID NO: 80762
  derived and/or modified CDS sequence (opt1) from neuraminidase__InfluenzaA__AFJ78754

SEQ ID NO: 86399 - RNA, 1410 nt, Artificial Sequence; identical to SEQ ID NO: 80762
  derived and/or modified CDS sequence (opt1) from neuraminidase__InfluenzaA__AFJ78764

SEQ ID NO: 86400 - RNA, 1410 nt, Artificial Sequence; identical to SEQ ID NO: 80762
  derived and/or modified CDS sequence (opt1) from neuraminidase__InfluenzaA__AFJ78774

SEQ ID NO: 86401 - RNA, 1410 nt, Artificial Sequence; identical to SEQ ID NO: 80762
  derived and/or modified CDS sequence (opt1) from neuraminidase__InfluenzaA__AFJ78784

SEQ ID NO: 86402 - RNA, 1410 nt, Artificial Sequence
  derived and/or modified CDS sequence (opt1) from neuraminidase__InfluenzaA__AFJ78794
augaaccccaaccagaagaucaucaccaucggcagcgugugcaugaccaucgggauggccaaccugauccuccagaucggcaacaucaucuccaucuggaucagccacuccauccagcuggggaaccagaaccagaucgagacgugcaaccagagcgucaucaccuacgagaacaacaccugggugaaccagaccuacgugaacaucuccaacacgaacuucgccgcgggccagagcgucguguccgugaagcuggccgggaacagcucccucugcccggucagcggcugggccaucuacuccaaggacaacagcauccgcaucggcuccaagggggacguguucgugauccgggagcccuucaucagcugcagcccccuggagugccgcaccuucuuccugacccagggcgcccuccugaacgacaagcacuccaacgggaccaucaaggaccggucccccuaccgcacgcugaugagcugcccgaucggcgagguccccucccccuacaacagccgguucgagagcguggccugguccgcgagcgccugccacgacgggaucaacuggcucaccaucggcaucuccggccccgacaacggggccguggccguccugaaguacaacggcaucaucaccgacaccaucaagagcuggcgcaacaacauccugcggacgcaggaguccgagugcgcgugcgugaacgggagcugcuucaccgugaugaccgacggcccguccgacggccaggccagcuacaagaucuuccgcaucgagaaggggaagaucgucaaguccguggagaugaacgcccccaacuaccacuacgaggagugcagcugcuaccccgacuccggcgagaucacgugcgugugccgggacaacuggcacgggagcaaccgccccugggucuccuucaaccagaaccucgaguaccagaucggcuacaucugcagcgggaucuucggcgacaacccgcggcccaacgacaagaccggcuccugcgggcccgugagcuccaacggcgccaacggggugaagggcuucagcuucaaguacgggaacggcgucuggaucggccgcaccaaguccaucagcagccggaacggguucgagaugaucugggaccccaacggcuggaccgggaccgacaacaacuucuccaucaagcaggacaucgugggcaucaacgaguggagcggguacuccggcagcuucgugcagcacccggagcugacgggccuggacugcauccgccccugcuucugggucgagcucauccgggggcgccccaaggagaacaccaucuggaccuccggcagcuccaucagcuucugcggggugaacuccgacaccgucggcuggagcuggcccgacggcgccgagcugccguucacgaucgacaaguga

SEQ ID NO: 86403 - RNA, 1410 nt, Artificial Sequence; identical to SEQ ID NO: 80762
  derived and/or modified CDS sequence (opt1) from neuraminidase__InfluenzaA__AFJ78804

SEQ ID NO: 86404 - RNA, 1410 nt, Artificial Sequence; identical to SEQ ID NO: 80762
  derived and/or modified CDS sequence (opt1) from neuraminidase__InfluenzaA__AFJ78814

SEQ ID NO: 86405 - RNA, 1410 nt, Artificial Sequence; identical to SEQ ID NO: 80762
  derived and/or modified CDS sequence (opt1) from neuraminidase__InfluenzaA__AFJ78824

SEQ ID NO: 86406 - RNA, 1410 nt, Artificial Sequence; identical to SEQ ID NO: 80762
  derived and/or modified CDS sequence (opt1) from neuraminidase__InfluenzaA__AFJ78834

SEQ ID NO: 86407 - RNA, 1410 nt, Artificial Sequence; identical to SEQ ID NO: 80762
  derived and/or modified CDS sequence (opt1) from neuraminidase__InfluenzaA__AFJ78844

SEQ ID NO: 86408 - RNA, 1410 nt, Artificial Sequence; identical to SEQ ID NO: 83011
  derived and/or modified CDS sequence (opt1) from neuraminidase__InfluenzaA__AFJ78854

SEQ ID NO: 86409 - RNA, 1410 nt, Artificial Sequence; identical to SEQ ID NO: 80762
  derived and/or modified CDS sequence (opt1) from neuraminidase__InfluenzaA__AFJ78864

SEQ ID NO: 86410 - RNA, 1410 nt, Artificial Sequence; identical to SEQ ID NO: 80762
  derived and/or modified CDS sequence (opt1) from neuraminidase__InfluenzaA__AFJ78874

SEQ ID NO: 86411 - RNA, 1410 nt, Artificial Sequence; identical to SEQ ID NO: 80762
  derived and/or modified CDS sequence (opt1) from neuraminidase__InfluenzaA__AFJ78884

SEQ ID NO: 86412 - RNA, 1410 nt, Artificial Sequence; identical to SEQ ID NO: 80762
  derived and/or modified CDS sequence (opt1) from neuraminidase__InfluenzaA__AFJ78894

SEQ ID NO: 86413 - RNA, 1410 nt, Artificial Sequence; identical to SEQ ID NO: 80762
  derived and/or modified CDS sequence (opt1) from neuraminidase__InfluenzaA__AFJ78904

SEQ ID NO: 86414 - RNA, 1410 nt, Artificial Sequence; identical to SEQ ID NO: 80762
  derived and/or modified CDS sequence (opt1) from neuraminidase__InfluenzaA__AFJ78914

SEQ ID NO: 86415 - RNA, 1410 nt, Artificial Sequence
  derived and/or modified CDS sequence (opt1) from neuraminidase__InfluenzaA__AFJ78924
augaaccccaaccagaagaucaucaccaucggcagcgugugcaugaccaucgggauggccaaccugauccuccagaucggcaacaucaucuccaucuggaucagccacuccauccagcuggggaaccagaaccagaucgagacgugcaaccagagcgucaucaccuacgagaacaacaccugggugaaccagaccuacguggacaucuccaacacgaacuucgccgcgggccagagcgucguguccgugaagcuggccgggaacagcucccucugcccggucagcggcugggccaucuacuccaaggacaacagcauccgcaucggcuccaagggggacguguucgugauccgggagcccuucaucagcugcagcccccuggagugccgcaccuucuuccugacccagggcgcccuccugaacgacaagcacuccaacgggaccaucaaggaccggucccccuaccgcacgcugaugagcugcccgaucggcgagauccccucccccuacaacagccgguucgagagcgucgccugguccgcgagcgccugccacgacgggaucaacuggcucaccaucggcaucuccggccccgacaacggggccguggccgugcugaaguacaacggcaucaucaccgacaccaucaagagcuggcgcaacaacauccugcggacgcaggaguccgagugcgcgugcgucaacgggagcugcuucaccgugaugaccgacggcccguccgacggccaggccagcuacaagaucuuccgcaucgagaaggggaagaucgugaaguccgucgagaugaacgcccccaacuaccacuacgaggagugcagcugcuaccccgacuccagcgagaucacgugcgugugccgggacaacuggcacggcuccaaccgccccugggugagcuucaaccagaaccucgaguaccagaucggguacaucugcuccggcaucuucggggacaacccgcggcccaacgacaagaccggcagcugcggccccgucuccagcaacggggccaacggcgugaagggguucuccuucaaguacggcaacgggguguggaucggccgcaccaagagcaucagcucccggaacggcuucgagaugaucugggaccccaacggguggaccggcaccgacaacaacuucagcaucaagcaggacaucgucgggaucaacgagugguccggcuacagcggguccuucgugcagcacccggagcugacgggccuggacugcauccgccccugcuucuggguggagcucauccggggccgccccaaggagaacaccaucuggaccagcggguccagcaucuccuucugcggcgucaacagcgacaccguggggugguccuggcccgacggcgccgagcugccguucacgaucgacaaguga

SEQ ID NO: 86416 - RNA, 1410 nt, Artificial Sequence
  derived and/or modified CDS sequence (opt1) from neuraminidase__InfluenzaA__AFJ97569
augaaccccaaccagaagaucaucaccaucggcagcgugugcaugaccaucgggauggccaaccugauccuccagaucggcaacaucaucuccaucuggaucagccacuccauccagcuggggaaccagaaccagaucgagacgugcaaccagagcgucaucaccuacgagaacaacaccugggugaaccagaccuacgugaacaucuccaacacgaacuucgccgcgggccagagcgucguguccgugaagcuggccgggaacagcucccucugcccggucagcggcugggccaucuacuccaaggacaacagcauccgcaucggcuccaagggggacguguucgugauccgggagcccuucaucagcugcagcccccuggagugccgcaccuucuuccugacccagggcgcccuccugaacgacaagcacuccaacgagaccaucaaggaccggucccccuaccgcacgcugaugagcugcccgaucggggagguccccucccccuacaacagccgguucgagagcguggccugguccgcgagcgccugccacgacggcaucaacuggcucaccaucgggaucuccggccccgacaacggcgccguggccguccugaaguacaacgggaucaucaccgacaccaucaagagcuggcgcaacaacauccugcggacgcaggaguccgagugcgcgugcgugaacggcagcugcuucaccgugaugaccgacgggccguccgacggccaggccagcuacaagaucuuccgcaucgagaagggcaagaucgucaaguccguggagaugaacgcccccaacuaccacuacgaggagugcagcugcuaccccgacuccagcgagaucacgugcgugugccgggacaacuggcacggguccaaccgccccugggucagcuucaaccagaaccucgaguaccagaucggcuacaucugcuccgggaucuucggcgacaacccgcggcccaacgacaagaccgggagcugcggccccguguccagcaacggcgccaacggggugaagggcuucuccuucaaguacgggaacggcgucuggaucgggcgcaccaagagcaucagcucccggaacggcuucgagaugaucugggaccccaacggcuggaccgggaccgacaacaacuucagcaucaagcaggacaucgugggcaucaacgagugguccggguacagcggcuccuucgugcagcacccggagcugacggggcuggacugcauccgccccugcuucugggucgagcucauccggggccgccccaaggagaacaccaucuggaccagcggcuccagcaucuccuucugcggggugaacagcgacaccgucuccuggagcuggcccgacggcgccgagcugccguucacgaucgacaaguga

SEQ ID NO: 86417 - RNA, 1410 nt, Artificial Sequence; identical to SEQ ID NO: 80752
  derived and/or modified CDS sequence (opt1) from neuraminidase__InfluenzaA__AFK14107

SEQ ID NO: 86418 - RNA, 1410 nt, Artificial Sequence; identical to SEQ ID NO: 80762
  derived and/or modified CDS sequence (opt1) from neuraminidase__InfluenzaA__AFK14117

SEQ ID NO: 86419 - RNA, 1410 nt, Artificial Sequence; identical to SEQ ID NO: 81529
  derived and/or modified CDS sequence (opt1) from neuraminidase__InfluenzaA__AFK14141

SEQ ID NO: 86420 - RNA, 1410 nt, Artificial Sequence
  derived and/or modified CDS sequence (opt1) from neuraminidase__InfluenzaA__AFK14150
augaaccccaaccagaagaucaucaccaucggcagcgugugcaugaccaucgggauggccaaccugauccuccagaucggcaacaucaucuccaucuggaucagccacuccauccgccuggggaaccagaaccagaucgagacgugcaaccagagcgucaucaccuacgagaacaacaccugggugaaccagaccuacgugaacaucuccaacacgaacuucgccgcgggccagagcgucguguccgugaagcuggccgggaacagcucccucugcccggucagcggcugggccaucuacuccaaggacaacagcauccggaucggcuccaagggggacguguucgugauccgcgagcccuucaucagcugcagcccccuggagugccggaccuucuuccugacccagggcgcccuccugaacgacaagcacuccaacgggaccaucaaggaccgcucccccuaccggacgcugaugagcugcccgaucggcgagguccccucccccuacaacagccgcuucgagagcguggccugguccgcgagcgccugccacgacgggaucaacuggcucaccaucggcaucuccggccccgacaacggggccguggccguccugaaguacaacggcaucaucaccgacaccaucaagagcuggcggaacaacauccugcgcacgcaggaguccgagugcgcgugcgugaacgggagcugcuucaccgugaugaccgacggcccguccgacgagcaggccagcuacaagaucuuccggaucgagaagggcaagaucgucaaguccguggagaugaacgcccccaacuaccacuacgaggagugcagcugcuaccccgacuccagcgagaucacgugcgugugccgcgacaacuggcacggguccaaccggcccugggucagcuucaaccagaaccucgaguaccagaucggcuacaucugcuccgggaucuucggcgacaacccgcgccccaacgacaagaccgggagcugcggccccguguccagcaacggcgccaacggggugaagggcuucuccuucaaguacgggaacggcgucuggaucgggcggaccaagagcaucagcucccgcaacggcuucgagaugaucugggaccccaacggcuggaccgggaccgacaacaacuucagcaucaagcaggacaucgugggcaucaacgagugguccggguacagcggcuccuucgugcagcacccggagcugacggggcuggacugcauccggcccugcuucugggucgagcucauccgcggccggcccaaggagaacaccaucuggaccagcggcuccagcaucuccuucugcggggugaacagcgacaccgucggcugguccuggcccgacggggccgagcugccguucacgaucgacaaguga

SEQ ID NO: 86421 - RNA, 1410 nt, Artificial Sequence; identical to SEQ ID NO: 81345
  derived and/or modified CDS sequence (opt1) from neuraminidase__InfluenzaA__AFK14159

SEQ ID NO: 86422 - RNA, 1410 nt, Artificial Sequence; identical to SEQ ID NO: 80762
  derived and/or modified CDS sequence (opt1) from neuraminidase__InfluenzaA__AFK14168

SEQ ID NO: 86423 - RNA, 1410 nt, Artificial Sequence; identical to SEQ ID NO: 80762
  derived and/or modified CDS sequence (opt1) from neuraminidase__InfluenzaA__AFK14177

SEQ ID NO: 86424 - RNA, 1410 nt, Artificial Sequence
  derived and/or modified CDS sequence (opt1) from neuraminidase__InfluenzaA__AFK14186
augaaccccaaccagaagaucaucaccaucggcagcgugugcaugaccaucgggauggccaaccugauccuccagaucggcaacaucaucuccaucuggaucagccacuccauccagcuggggaaccagaaccagaucgagacgugcaaccagagcgucaucaccuacgagaacaacaccugggugaaccagaccuacgugaacaucuccaacacgaacuucgccgcgggccagagcgucguguccgugaagcuggccgggaacagcucccucugcccggucagcggcugggccaucuacuccaaggacaacagcauccgcaucggcuccaagggggacguguucgugauccgggagcccuucaucagcugcagcccccuggagugccgcaccuucuuccugacccagggcgcccuccugaacgacaagcacuccaacgggaccaucaaggaccggucccccuaccgcacgcugaugagcugcccgaucggcgagguccccucccccuacaacagccgguucgagagcguggccugguccgcgagcgccugccacgacgggaucaacuggcucaccaucggcaucuccggccccgacaacggggccguggccguccugaaguacaacggcaucaucaccgacaccaucaagagcuggcgcaacaacauccugcggacgcaggaguccgagugcgcgugcgugaacgggagcugcuucaccgugaugaccgacggcccguccgacggccaggccagcuacaagaucuuccgcaucgagaaggggaagaucgucaaguccguggagaugaacgcccccaacuaccacuucgaggagugcagcugcuaccccgacuccagcgagaucacgugcgugugccgggacaacuggcacggcuccaaccgccccugggucagcuucaaccagaaccucgaguaccagaucggguacaucugcuccggcaucuucggggacaacccgcggcccaacgacaagaccggcagcugcggccccguguccagcaacggggccaacggcgugaagggguucuccuucaaguacggcaacggggucuggaucggccgcaccaagagcaucagcucccggaacggcuucgagaugaucugggaccccaacggguggaccggcaccgacaacaacuucagcaucaagcaggacaucguggggaucaacgagugguccggcuacagcggguccuucgugcagcacccggagcugacgggccuggacugcauccgccccugcuucugggucgagcucauccggggccgccccaaggagaacaccaucuggaccagcggguccagcaucuccuucugcggcgugaacagcgacaccgucgggugguccuggcccgacggcgccgagcugccguucacgaucgacaaguga

SEQ ID NO: 86425 - RNA, 1410 nt, Artificial Sequence; identical to SEQ ID NO: 82743
  derived and/or modified CDS sequence (opt1) from neuraminidase__InfluenzaA__AFK14195

SEQ ID NO: 86426 - RNA, 1410 nt, Artificial Sequence; identical to SEQ ID NO: 80762
  derived and/or modified CDS sequence (opt1) from neuraminidase__InfluenzaA__AFK14204

SEQ ID NO: 86427 - RNA, 1410 nt, Artificial Sequence; identical to SEQ ID NO: 82743
  derived and/or modified CDS sequence (opt1) from neuraminidase__InfluenzaA__AFK14213

SEQ ID NO: 86428 - RNA, 1410 nt, Artificial Sequence
  derived and/or modified CDS sequence (opt1) from neuraminidase__InfluenzaA__AFK14222
augaaccccaaccagaagaucaucaccaucggcagcgugugcaugaccaucgggauggccaaccugauccuccagaucggcaacaucaucuccaucuggaucagccacuccauccgccuggggaaccagaaccagaucgagacgugcaaccagagcgucaucaccuacgagaacaacaccugggugaaccagaccuacgugaacaucuccaacacgaacuucgccgcgggccagagcgucguguccgugaagcuggccgggaacagcucccucugcccggucagcggcugggccaucuacuccaaggacaacagcauccggaucggcuccaagggggacguguucgugauccgcgagcccuucaucagcugcagcccccuggagugccggaccuucuuccugacccagggcgcccuccugaacgacaagcacuccaacgggaccaucaaggaccgcucccccuaccggacgcugaugagcugcccgaucggcgagguccccucccccuacaacagccgcuucgagagcguggccugguccgcgagcgccugccacgacgggaucaacuggcucaccaucggcaucuccggccccgacaacggggccguggccguccugaaguacaacggcaucaucaccgacaccaucaagagcuggcggaacaacauccugcgcacgcaggaguccgagugcgcgugcgugaacgggagcugcuucaccgugaugaccgacggcccguccgacggccaggccagcuacaagaucuuccggaucgagaaggggaagaucgucaaguccguggagaugaacgcccccaacuaccacuacgaggagugcagcugcuaccccgacuccagcgagaucacgugcgugugccgcgacaacuggcacggcuccaaccggcccugggucagcuucaaccagaaccucgaguaccagaucggguacaucugcuccggcaucuucggggacaacccgcgccccaacgacaagaccggcagcugcggccccguguccagcaacggggccaacggcgugaagggguucuccuucaaguacggcaacggggucuggaucggccggaccaagagcaucagcucccgcaacggcuucgagaugaucugggaccccaacggguggaccggcaccgacaacaacuucagcaucaagcaggacaucguggggaucaacgagugguccggcuacagcggguccuucgugcagcacccggagcugacgggccuggacugcauccggcccugcuucugggucgagcucauccgcggccggcccaaggagaacaccaucuggaccagcggguccagcaucuccuucugcggcgugaacagcgacaccgucgggugguccuggcccgacggcgccgagcugccguucacgaucgacaaguga

SEQ ID NO: 86429 - RNA, 1410 nt, Artificial Sequence; identical to SEQ ID NO: 81345
  derived and/or modified CDS sequence (opt1) from neuraminidase__InfluenzaA__AFK14231

SEQ ID NO: 86430 - RNA, 1410 nt, Artificial Sequence; identical to SEQ ID NO: 80762
  derived and/or modified CDS sequence (opt1) from neuraminidase__InfluenzaA__AFK14240

SEQ ID NO: 86431 - RNA, 1410 nt, Artificial Sequence; identical to SEQ ID NO: 81529
  derived and/or modified CDS sequence (opt1) from neuraminidase__InfluenzaA__AFK14249

SEQ ID NO: 86432 - RNA, 1410 nt, Artificial Sequence; identical to SEQ ID NO: 80762
  derived and/or modified CDS sequence (opt1) from neuraminidase__InfluenzaA__AFK14257

SEQ ID NO: 86433 - RNA, 1410 nt, Artificial Sequence; identical to SEQ ID NO: 80762
  derived and/or modified CDS sequence (opt1) from neuraminidase__InfluenzaA__AFK14266

SEQ ID NO: 86434 - RNA, 1410 nt, Artificial Sequence; identical to SEQ ID NO: 80762
  derived and/or modified CDS sequence (opt1) from neuraminidase__InfluenzaA__AFK14274

SEQ ID NO: 86435 - RNA, 1410 nt, Artificial Sequence
  derived and/or modified CDS sequence (opt1) from neuraminidase__InfluenzaA__AFK14281
augaaccccaaccagaagaucaucaccaucggcagcgugugcaugaccaucgggauggccaaccugauccuccagaucggcaacaucaucuccaucuggaucagccacuccauccagcuggggaaccagaaccagaucgagacgugcaaccagagcgucaucaccuacgagaacaacaccugggugaaccagaccgacgugaacaucuccaacacgaacuucgccgcgggccagagcgucguguccgugaagcuggccgggaacagcucccucugcccggucagcggcugggccaucuacuccaaggacaacagcauccgcaucggcuccaagggggacguguucgugauccgggagcccuucaucagcugcagcccccuggagugccgcaccuucuuccugacccagggcgcccuccugaacgacaagcacuccaacgggaccaucaaggaccggucccccuaccgcacgcugaugagcugcccgaucggcgagguccccucccccuacaacagccgguucgagagcguggccugguccgcgagcgccugccacgacgggaucaacuggcucaccaucggcaucuccggccccgacaacggggccguggccguccugaaguacaacggcaucaucaccgacaccaucaagagcuggcgcaacaacauccugcggacgcaggaguccgagugcgcgugcgugaacgggagcugcuucaccgugaugaccgacggcccguccgacggccaggccagcuacaagaucuuccgcaucgagaaggggaagaucgucaaguccguggagaugaacgcccccaacuaccacuacgaggagugcagcugcuaccccgacuccagcgagaucacgugcgugugccgggacaacuggcacggcuccaaccgccccugggucagcuucaaccagaaccucgaguaccagaucggguacaucugcuccggcaucuucggggacaacccgcggcccaacgacaagaccggcagcugcggccccguguccagcaacggggccaacggcgugaagggguucuccuucaaguacggcaacggggucuggaucggccgcaccaagagcaucagcucccggaacggcuucgagaugaucugggaccccaacggguggaccggcaccgacaacaacuucagcaucaagcaggacaucguggggaucaacgagugguccggcuacagcggguccuucgugcagcacccggagcugacgggccuggacugcauccgccccugcuucugggucgagcucauccggggccgccccaaggagaacaccaucuggaccagcggguccagcaucuccuucugcggcgugaacagcgacaccgucgggugguccuggcccgacggcgccgagcugccguucacgaucgacaaguga

SEQ ID NO: 86436 - RNA, 1410 nt, Artificial Sequence; identical to SEQ ID NO: 80762
  derived and/or modified CDS sequence (opt1) from neuraminidase__InfluenzaA__AFK14289

SEQ ID NO: 86437 - RNA, 1410 nt, Artificial Sequence; identical to SEQ ID NO: 81345
  derived and/or modified CDS sequence (opt1) from neuraminidase__InfluenzaA__AFK14298

SEQ ID NO: 86438 - RNA, 1410 nt, Artificial Sequence; identical to SEQ ID NO: 80762
  derived and/or modified CDS sequence (opt1) from neuraminidase__InfluenzaA__AFK14307

SEQ ID NO: 86439 - RNA, 1410 nt, Artificial Sequence; identical to SEQ ID NO: 82743
  derived and/or modified CDS sequence (opt1) from neuraminidase__InfluenzaA__AFK14316

SEQ ID NO: 86440 - RNA, 1410 nt, Artificial Sequence
  derived and/or modified CDS sequence (opt1) from neuraminidase__InfluenzaA__AFK14325
augaaccccaaccagaagaucaucaccaucggcagcgugugcaugaccaucgggauggccaaccugauccuccagaucggcaacaucaucuccaucuggaucagccacuccauccagcuggggaaccagaaccagaucgagacgugcaaccagagcgucaucaccuacgagaacaacaccugggugaaccagaccuacgugaacaucuccaacacgaacuucgccgcgggccagagcgucguguccgugaagcuggccgggaacagcucccucugcccggucagcggcugggccaucuacuccaaggacaacagcauccgcaucggcuccaagggggacguguucgugauccgggagcccuucaucagcugcagcccccuggagugccgcaccuucuuccugacccagggcgcccuccugaacgacaagcacuccaacgggaccaucaaggaccggucccccuaccgcacgcugaugagcugcccgaucggcgagguccccucccccuacaacagccgguucgagagcguggccugguccgcgagcgccugccacgacgggaucaacuggcucaccaucggcaucuccggccccgacaacggggccguggccguccugaaguacaacggcaucaucaccgacaccaucaagagcuggcgcaacaacauccugcggacgcaggaguccgagugcgcgugcgugaacgggagcugcuucaccgugaugaccgacggcccguccgacggccaggccagcuacaagaucuuccgcaucgagcgggggaagaucgucaaguccguggagaugaacgcccccaacuaccacuacgaggagugcagcugcuaccccgacuccagcgagaucacgugcgugugccgcgacaacuggcacggcuccaaccggcccugggucagcuucaaccagaaccucgaguaccagaucggguacaucugcuccggcaucuucggggacaacccgcgccccaacgacaagaccggcagcugcggccccguguccagcaacggggccaacggcgugaagggguucuccuucaaguacggcaacggggucuggaucggccggaccaagagcaucagcucccgcaacggcuucgagaugaucugggaccccaacggguggaccggcaccgacaacaacuucagcaucaagcaggacaucguggggaucaacgagugguccggcuacagcggguccuucgugcagcacccggagcugacgggccuggacugcauccggcccugcuucugggucgagcucauccgcggccggcccaaggagaacaccaucuggaccagcggguccagcaucuccuucugcggcgugaacagcgacaccgucgggugguccuggcccgacggcgccgagcugccguucacgaucgacaaguga

SEQ ID NO: 86441 - RNA, 1410 nt, Artificial Sequence; identical to SEQ ID NO: 80762
  derived and/or modified CDS sequence (opt1) from neuraminidase__InfluenzaA__AFK14334

SEQ ID NO: 86442 - RNA, 1410 nt, Artificial Sequence; identical to SEQ ID NO: 80762
  derived and/or modified CDS sequence (opt1) from neuraminidase__InfluenzaA__AFK14343

SEQ ID NO: 86443 - RNA, 1410 nt, Artificial Sequence; identical to SEQ ID NO: 80762
  derived and/or modified CDS sequence (opt1) from neuraminidase__InfluenzaA__AFK14352

SEQ ID NO: 86444 - RNA, 1410 nt, Artificial Sequence; identical to SEQ ID NO: 80762
  derived and/or modified CDS sequence (opt1) from neuraminidase__InfluenzaA__AFK14360

SEQ ID NO: 86445 - RNA, 1410 nt, Artificial Sequence; identical to SEQ ID NO: 80762
  derived and/or modified CDS sequence (opt1) from neuraminidase__InfluenzaA__AFK14369

SEQ ID NO: 86446 - RNA, 1410 nt, Artificial Sequence
  derived and/or modified CDS sequence (opt1) from neuraminidase__InfluenzaA__AFK14387
augaaccccaaccagaagaucaucaccaucggcagcgugugcaugaccaucgggauggccaaccugauccuccagaucggcaacaucacguccaucuggaucagccacuccauccagcuggggaaccagaaccagaucgacacgugcaaccagagcgucaucaccuacgagaacaacaccugggugaaccagaccuacgugaacaucuccaacaccaacuucgccgcgggccagagcgucguguccgugaagcuggccgggaacagcucccucugcccggucagcggcugggccaucuacuccaaggacaacagcauccgcaucggcuccaagggggacguguucgugauccgggagcccuucaucagcugcagcccccuggagugccgcaccuucuuccugacccagggcgcccuccugaacgacaagcacuccaacgggacgaucaaggaccggucccccuaccgcacccugaugagcugcccgaucggcgagguccccucccccuacaacagccgguucgagagcguggccugguccgcgagcgccugccacgacgggaucaacuggcucaccaucggcaucuccggccccgacaacggggccguggccguccugaaguacaacggcaucaucaccgacacgaucaagagcuggcgcaacaacauccugcggacccaggaguccgagugcgcgugcgugaacgggagcugcuucaccgugaugaccgacggcccguccgacggccaggccagcuacaagaucuuccgcaucgagaaggggaagaucgucaaguccguggagaugaacgcccccaacuaccacuacgaggagugcagcugcuaccccgacuccagcgagaucacgugcgugugccgggacaacuggcacggcuccaaccgccccugggucagcuucaaccagaaccucgaguaccagaucggguacaucugcuccggcaucuucggggacaacccgcggcccaacgacaagaccggcagcugcggccccguguccagcaacggggccaacggcgugaagggguucuccuucaaguacggcaacggggucuggaucggccgcaccaagagcaucagcucccggaacggcuucgagaugaucugggaccccaacggguggaccggcacggacaacaacuucagcaucaagcaggacaucguggggaucaacgagugguccggcuacagcggguccuucgugcagcacccggagcugaccggccuggacugcauccgccccugcuucugggucgagcucauccggggccgccccaaggagaacaccaucuggaccagcggguccagcaucuccuucugcggcgugaacagcgacacggucgggugguccuggcccgacggcgccgagcugccguucaccaucgacaaguga

SEQ ID NO: 86447 - RNA, 1410 nt, Artificial Sequence; identical to SEQ ID NO: 81345
  derived and/or modified CDS sequence (opt1) from neuraminidase__InfluenzaA__AFK14397

SEQ ID NO: 86448 - RNA, 1410 nt, Artificial Sequence; identical to SEQ ID NO: 80762
  derived and/or modified CDS sequence (opt1) from neuraminidase__InfluenzaA__AFK14406

SEQ ID NO: 86449 - RNA, 1410 nt, Artificial Sequence; identical to SEQ ID NO: 80762
  derived and/or modified CDS sequence (opt1) from neuraminidase__InfluenzaA__AFK14415

SEQ ID NO: 86450 - RNA, 1410 nt, Artificial Sequence; identical to SEQ ID NO: 80762
  derived and/or modified CDS sequence (opt1) from neuraminidase__InfluenzaA__AFK14424

SEQ ID NO: 86451 - RNA, 1410 nt, Artificial Sequence
  derived and/or modified CDS sequence (opt1) from neuraminidase__InfluenzaA__AFK14433
augaaccccaaccagaagaucaucaccaucggcagcgugugcaugaucaucgggauggccaaccugauccuccagaucggcaacaucaucuccaucuggaucagccacuccauccagcuggggaaccagaaccagaucgagaccugcaaccagagcgucaucacguacgagaacaacaccugggugaaccagaccuacgugaacaucuccaacaccaacuucgccgcgggccagagcgucguguccgugaagcuggccgggaacagcucccucugcccggucagcggcugggccaucuacuccaaggacaacagcauccgcaucggcuccaagggggacguguucgugauccgggagcccuucaucagcugcagcccccuggagugccgcacguucuuccugacccagggcgcccuccugaacgacaagcacuccaacgggaccaucaaggaccggucccccuaccgcacccugaugagcugcccgaucggcgagguccccucccccuacaacagccgguucgagagcguggccugguccgcgagcgccugccacgacgggaucaacuggcucacgaucggcaucuccggccccgacaacggggccguggccguccugaaguacaacggcaucaucaccgacaccaucaagagcuggcgcaacaacauccugcggacccaggaguccgagugcgcgugcgugaacgggagcugcuucacggugaugaccgacggcccguccgacggccaggccagcuacaagaucuuccgcaucgagaaggggaagaucgucaaguccguggagaugaacgcccccaacuaccacuacgaggagugcagcugcuaccccgacuccagcgagaucacgugcgugugccgggacaacuggcacggcuccaaccgccccugggucagcuucaaccagaaccucgaguaccagaucggguacaucugcuccggcaucuucggggacaacccgcggcccaacgacaagaccggcagcugcggccccguguccagcaacggggccaacggcgugaagggguucuccuucaaguacggcaacggggucuggaucggccgcaccaagagcaucagcucccggaacggcuucgagaugaucugggaccccaacggguggaccggcaccgacaacaacuucagcaucaagcaggacaucguggggaucaacgagugguccggcuacagcggguccuucgugcagcacccggagcugaccggccuggacugcauccgccccugcuucugggucgagcucauccggggccgccccaaggagaacacgaucuggaccagcggguccagcaucuccuucugcggcgugaacagcgacaccgucgggugguccuggcccgacggcgccgagcugccguucaccaucgacaaguga

SEQ ID NO: 86452 - RNA, 1410 nt, Artificial Sequence; identical to SEQ ID NO: 80762
  derived and/or modified CDS sequence (opt1) from neuraminidase__InfluenzaA__AFK14442

SEQ ID NO: 86453 - RNA, 1410 nt, Artificial Sequence
  derived and/or modified CDS sequence (opt1) from neuraminidase__InfluenzaA__AFK14451
augaaccccaaccagaagaucaucaccaucggcagcgugugcaugaccaucgggauggccaaccugauccuccagaucggcaacaucaucuccaucuggaucagccacuccauccagcuggggaaccagaaccagaucgagacgugcaaccagagcgucaucaccuacgagaacaacaccugggugaaccagaccuacgugaacaucuccaacacgaacuucgccgcgggccagagcgucgccuccgccaagcuggccgggaacagcucccucugcccggugagcggcugggccaucuacuccaaggacaacagcauccgcaucggcuccaagggggacguguucgucauccgggagcccuucaucagcugcagcccccuggagugccgcaccuucuuccugacccagggcgcgcuccugaacgacaagcacuccaacgggaccaucaaggaccggucccccuaccgcacgcugaugagcugcccgaucggcgaggugcccucccccuacaacagccgguucgagagcguggccugguccgccagcgccugccacgacgggaucaacuggcucaccaucggcaucuccggccccgacaacggggcggucgccgugcugaaguacaacggcaucaucaccgacaccaucaagagcuggcgcaacaacauccugcggacgcaggaguccgagugcgccugcgugaacgggagcugcuucaccgucaugaccgacggcccguccgacggccaggccagcuacaagaucuuccgcaucgagaaggggaagaucgugaaguccguggagaugaacgcccccaacuaccacuacgaggagugcagcugcuaccccgacuccagcgagaucacgugcgucugccgggacaacuggcacggcuccaaccgccccugggugagcuucaaccagaaccucgaguaccagaucggguacaucugcuccggcaucuucggggacaacccgcggcccaacgacaagaccggcagcugcggccccguguccagcaacggggcgaacggcgucaagggguucuccuucaaguacggcaacgggguguggaucggccgcaccaagagcaucagcucccggaacggcuucgagaugaucugggaccccaacggguggaccggcaccgacaacaacuucagcaucaagcaggacaucguggggaucaacgagugguccggcuacagcggguccuucguccagcacccggagcugacgggccuggacugcauccgccccugcuucuggguggagcucauccggggccgccccaaggagaacaccaucuggaccagcggguccaucaucagcuucugcggcgugaacuccgacaccgucggguggagcuggcccgacggcgccgagcugccguucacgaucgacaaguga

SEQ ID NO: 86454 - RNA, 1410 nt, Artificial Sequence; identical to SEQ ID NO: 80762
  derived and/or modified CDS sequence (opt1) from neuraminidase__InfluenzaA__AFK14458

SEQ ID NO: 86455 - RNA, 1410 nt, Artificial Sequence; identical to SEQ ID NO: 80762
  derived and/or modified CDS sequence (opt1) from neuraminidase__InfluenzaA__AFK14467

SEQ ID NO: 86456 - RNA, 1410 nt, Artificial Sequence; identical to SEQ ID NO: 80762
  derived and/or modified CDS sequence (opt1) from neuraminidase__InfluenzaA__AFK14476

SEQ ID NO: 86457 - RNA, 1410 nt, Artificial Sequence; identical to SEQ ID NO: 83821
  derived and/or modified CDS sequence (opt1) from neuraminidase__InfluenzaA__AFK14485

SEQ ID NO: 86458 - RNA, 1410 nt, Artificial Sequence; identical to SEQ ID NO: 80762
  derived and/or modified CDS sequence (opt1) from neuraminidase__InfluenzaA__AFK14504

SEQ ID NO: 86459 - RNA, 1410 nt, Artificial Sequence; identical to SEQ ID NO: 80762
  derived and/or modified CDS sequence (opt1) from neuraminidase__InfluenzaA__AFK14514

SEQ ID NO: 86460 - RNA, 1410 nt, Artificial Sequence; identical to SEQ ID NO: 80762
  derived and/or modified CDS sequence (opt1) from neuraminidase__InfluenzaA__AFK14522

SEQ ID NO: 86461 - RNA, 1410 nt, Artificial Sequence; identical to SEQ ID NO: 80762
  derived and/or modified CDS sequence (opt1) from neuraminidase__InfluenzaA__AFK14529

SEQ ID NO: 86462 - RNA, 1410 nt, Artificial Sequence; identical to SEQ ID NO: 80762
  derived and/or modified CDS sequence (opt1) from neuraminidase__InfluenzaA__AFK14538

SEQ ID NO: 86463 - RNA, 1410 nt, Artificial Sequence; identical to SEQ ID NO: 83137
  derived and/or modified CDS sequence (opt1) from neuraminidase__InfluenzaA__AFK14547

SEQ ID NO: 86464 - RNA, 1410 nt, Artificial Sequence
  derived and/or modified CDS sequence (opt1) from neuraminidase__InfluenzaA__AFK14555
augaaccccaaccagaagaucaucaccaucggcagcgugugcaugaccaucgggauggccaaccugauccuccagaucggcaacaucaucuccaucuggaucagccacuccauccagcuggggaaccagaaccagaucgagacgugcaaccagagcgucaucaccuacgagaacaacaccugggugaaccagaccuacgugaacaucuccaacacgaacuucgccgcgggccagagcgucaucuccgugaagcuggccgggaacagcucccucugcccggugagcggcugggccaucuacuccaaggacaacagcauccgcaucggcuccaagggggacgucuucgugauccgggagcccuucaucagcugcagcccccuggagugccgcaccuucuuccugacccagggcgcccuccugaacgacaagcacuccaacgggaccaucaaggaccggucccccuaccgcacgcugaugagcugcccgaucggcgaggugcccucccccuacaacagccgguucgagagcgucgccugguccgcgagcgccugccacgacgggaucaacuggcucaccaucggcaucuccggccccgacaacggggccguggccgugcugaaguacaacggcaucaucaccgacaccaucaagagcuggcgcaacaacauccugcggacgcaggaguccgagugcgcgugcgucaacgggagcugcuucaccgugaugaccgacggcccguccgacggccaggccagcuacaagaucuuccgcaucgagaaggggaagaucgugaaguccgucgagaugaacgcccccaacuaccacuacgaggagugcagcugcuaccccgacuccagcgagaucacgugcgugugccgggacaacuggcacggcuccaaccgccccugggugagcuucaaccagaaccucgaguaccagaucggguacaucugcuccggcaucuucggggacaacccgcggcccaacgacaagaccggcagcugcggccccgucuccagcaacggggccaacggcgugaagggguucuccuucaaguacggcaacgggguguggaucggccgcaccaagagcaucagcucccggaacggcuucgagaugaucugggaccccaacggguggaccggcaccgacaacaacuucagcaucaagcaggacaucgucgggaucaacgagugguccggcuacagcggguccuucgugcagcacccggagcugacgggccuggacugcauccgccccugcuucuggguggagcucauccggggccgccccaaggagaacaccaucuggaccagcggguccagcaucuccuucugcggcgucaacagcgacaccguggggugguccuggcccgacggcgccgagcugccguucacgaucgacaaguga

SEQ ID NO: 86465 - RNA, 1410 nt, Artificial Sequence; identical to SEQ ID NO: 80762
  derived and/or modified CDS sequence (opt1) from neuraminidase__InfluenzaA__AFK14564

SEQ ID NO: 86466 - RNA, 1410 nt, Artificial Sequence; identical to SEQ ID NO: 80762
  derived and/or modified CDS sequence (opt1) from neuraminidase__InfluenzaA__AFK14573

SEQ ID NO: 86467 - RNA, 1410 nt, Artificial Sequence
  derived and/or modified CDS sequence (opt1) from neuraminidase__InfluenzaA__AFK14579
augaaccccaaccagaagaucaucaccaucggcagcgugugcaugaccaucgggauggccaaccugauccuccagaucggcaacaucaucuccaucuggaucagccacuccauccagcuggggaaccagaaccagaucgagacgugcaaccagagcgucaucaccuacgagaacaacaccugggugaaccagaccuacgugaacaucuccaacacgaacuucgccgcgggccagagcgucguguccgugaagcuggccgggaacagcucccucugcccggucagcggcugggccaucuacuccaaggacaacagcauccgcaucggcuccaagggggacguguucgugauccgggagcccuucaucagcugcagcccccuggagugccgcaccuucuuccugacccagggcgcccuccugaacgacaagcacuccaacgggaccaucaaggaccggucccccuaccgcacgcugaugagcugcccgaucggcgagguccccucccccuacaacagccgguucgagagcguggccugguccgcgagcgccugccacgacgggaucaacuggcucaccaucggcaucuccggccccgacaacggggccguggccguccugaaguacaacggcaucaucaccgacaccaucaagagcuggcgcaacaacauccugcggacgcaggaguccgagugcgcgugcgugaacgggagcugcuucaccgugaugaccgacggcccguccgacggccaggccagcuacaagaucuuccgcaucgagaaggggaagaucgucaaguccguggagaugaacgcccccaacuaccacuacgaggagugcagcugcuaccccgacuccagcgagaucacgugcgugugccgggacaacuggcacggcuccaaccgccccugggucagcuucaaccagaaccucgaguaccagaucggguacaugugcuccggcaucuucggggacaacccgcggcccaacgacaagaccggcagcugcggccccguguccagcaacggggccaacggcgugaagggguucuccuucaaguacggcaacggggucuggaucggccgcaccaagagcaucagcucccggaacggcuucgagaugaucugggaccccaacggguggaccggcaccgacaacaacuucagcaucaagcaggacaucguggggaucaacgagugguccggcuacagcggguccuucgugcagcacccggagcugacgggccuggacugcauccgccccugcuucugggucgagcucauccggggccgccccaaggagaacaccaucuggaccagcggguccagcaucuccuucugcggcgugaacagcgacaccgucgggugguccuggcccgacggcgccgagcugccguucacgaucgacaaguga

SEQ ID NO: 86468 - RNA, 1410 nt, Artificial Sequence; identical to SEQ ID NO: 80762
  derived and/or modified CDS sequence (opt1) from neuraminidase__InfluenzaA__AFK14588

SEQ ID NO: 86469 - RNA, 1410 nt, Artificial Sequence; identical to SEQ ID NO: 80762
  derived and/or modified CDS sequence (opt1) from neuraminidase__InfluenzaA__AFK14597

SEQ ID NO: 86470 - RNA, 1410 nt, Artificial Sequence; identical to SEQ ID NO: 80762
  derived and/or modified CDS sequence (opt1) from neuraminidase__InfluenzaA__AFK14604

SEQ ID NO: 86471 - RNA, 1410 nt, Artificial Sequence; identical to SEQ ID NO: 80762
  derived and/or modified CDS sequence (opt1) from neuraminidase__InfluenzaA__AFK14632

SEQ ID NO: 86472 - RNA, 1410 nt, Artificial Sequence; identical to SEQ ID NO: 80752
  derived and/or modified CDS sequence (opt1) from neuraminidase__InfluenzaA__AFK14641

SEQ ID NO: 86473 - RNA, 1410 nt, Artificial Sequence; identical to SEQ ID NO: 80762
  derived and/or modified CDS sequence (opt1) from neuraminidase__InfluenzaA__AFK14651

SEQ ID NO: 86474 - RNA, 1410 nt, Artificial Sequence; identical to SEQ ID NO: 80762
  derived and/or modified CDS sequence (opt1) from neuraminidase__InfluenzaA__AFK14656

SEQ ID NO: 86475 - RNA, 1410 nt, Artificial Sequence; identical to SEQ ID NO: 80762
  derived and/or modified CDS sequence (opt1) from neuraminidase__InfluenzaA__AFK14663

SEQ ID NO: 86476 - RNA, 1410 nt, Artificial Sequence; identical to SEQ ID NO: 80762
  derived and/or modified CDS sequence (opt1) from neuraminidase__InfluenzaA__AFK14672

SEQ ID NO: 86477 - RNA, 1410 nt, Artificial Sequence; identical to SEQ ID NO: 80762
  derived and/or modified CDS sequence (opt1) from neuraminidase__InfluenzaA__AFK14680

SEQ ID NO: 86478 - RNA, 1410 nt, Artificial Sequence; identical to SEQ ID NO: 80762
  derived and/or modified CDS sequence (opt1) from neuraminidase__InfluenzaA__AFK14690

SEQ ID NO: 86479 - RNA, 1410 nt, Artificial Sequence; identical to SEQ ID NO: 80762
  derived and/or modified CDS sequence (opt1) from neuraminidase__InfluenzaA__AFK14707

SEQ ID NO: 86480 - RNA, 1410 nt, Artificial Sequence; identical to SEQ ID NO: 80762
  derived and/or modified CDS sequence (opt1) from neuraminidase__InfluenzaA__AFK14715

SEQ ID NO: 86481 - RNA, 1410 nt, Artificial Sequence; identical to SEQ ID NO: 80762
  derived and/or modified CDS sequence (opt1) from neuraminidase__InfluenzaA__AFK14724

SEQ ID NO: 86482 - RNA, 1410 nt, Artificial Sequence; identical to SEQ ID NO: 80762
  derived and/or modified CDS sequence (opt1) from neuraminidase__InfluenzaA__AFK14733

SEQ ID NO: 86483 - RNA, 1410 nt, Artificial Sequence; identical to SEQ ID NO: 80762
  derived and/or modified CDS sequence (opt1) from neuraminidase__InfluenzaA__AFK14751

SEQ ID NO: 86484 - RNA, 1410 nt, Artificial Sequence; identical to SEQ ID NO: 80762
  derived and/or modified CDS sequence (opt1) from neuraminidase__InfluenzaA__AFK14757

SEQ ID NO: 86485 - RNA, 1410 nt, Artificial Sequence; identical to SEQ ID NO: 80762
  derived and/or modified CDS sequence (opt1) from neuraminidase__InfluenzaA__AFK14766

SEQ ID NO: 86486 - RNA, 1410 nt, Artificial Sequence; identical to SEQ ID NO: 81345
  derived and/or modified CDS sequence (opt1) from neuraminidase__InfluenzaA__AFK14774

SEQ ID NO: 86487 - RNA, 1410 nt, Artificial Sequence; identical to SEQ ID NO: 86464
  derived and/or modified CDS sequence (opt1) from neuraminidase__InfluenzaA__AFK14781

SEQ ID NO: 86488 - RNA, 1410 nt, Artificial Sequence; identical to SEQ ID NO: 81345
  derived and/or modified CDS sequence (opt1) from neuraminidase__InfluenzaA__AFK14790

SEQ ID NO: 86489 - RNA, 1410 nt, Artificial Sequence
  derived and/or modified CDS sequence (opt1) from neuraminidase__InfluenzaA__AFK14800
augaaccccaaccagaagaucaucaccaucggcagcgugugcaugaccaucgggauggccaaccugauccuccagaucggcaacaucaucuccaucuggaucagccacuccauccagcuggggaaccagaaccagaucgagacgugcaaccagagcgucaucaccuacgagaacaacaccugggugaaccagaccuacgugaacaucuccaacacgaacuucgccgcgggccagagcgucguguccgugaagcuggccgggaacagcucccucugcccggucagcggcugggccaucuacuccaaggacaacagcauccgcaucggcuccaagggggacguguucgugauccgggagcccuucaucagcugcagcccccuggagugccgcaccuucuuccugacccagggcgcccuccugaacgacaagcacuccaacgggaccaucaaggaccggucccccuaccgcacgcugaugagcugcccgaucggcgagguccccucccccuacaacagccgguucgagagcguggccugguccgcgagcgccugccacgacgggaucaacuggcucaccaucggcaucuccggccccgacaacggggccguggccguccugaaguacaacggcaucaucaccgacaccaucaagagcuggcgcaacaacauccugcggacgcaggaguccgagugcgcgugcgugaacgggagcugcuucaccgugaugaccgacggcccguccgacggccaggccagcuacaagaucuuccgcaucgagaaggggaagaucgucaaguccguggagaugaacgcccccaacuaccacuacgaggagugcagcugcuaccccgacuccagcgagaucacgugcgugugccgggacaacuggcacggcuccaaccgccccugggucagcuucaaccagaaccucgaguaccagaucggguacaucugcuccggcaucuucggggacaacccgcggcccaacgacaagaccggcagcugcggccccguguccagcaacggggccaacggcgugaagggguucuccuucaaguacggcaacggggucuggaucggccgcaccaagagcaucagcucccggaacggcuucgagaugaucugggaccccaacggguggaccggcaccgacaacaacuucagcaucaagcaggacaucguggggaucaacgagugguccggcuacagcggguccuucgugcagcacccggagcugacgggccuggacugcauccgccccugcuucugggucgagcucauccggggccgcccccgggagaacaccaucuggaccagcggguccagcaucuccuucugcggcgugaacagcgacaccgucgggugguccuggcccgacggcgccgagcugccguucacgaucgacaaguga

SEQ ID NO: 86490 - RNA, 1410 nt, Artificial Sequence; identical to SEQ ID NO: 82743
  derived and/or modified CDS sequence (opt1) from neuraminidase__InfluenzaA__AFK14809

SEQ ID NO: 86491 - RNA, 1410 nt, Artificial Sequence; identical to SEQ ID NO: 82743
  derived and/or modified CDS sequence (opt1) from neuraminidase__InfluenzaA__AFK14816

SEQ ID NO: 86492 - RNA, 1410 nt, Artificial Sequence; identical to SEQ ID NO: 80762
  derived and/or modified CDS sequence (opt1) from neuraminidase__InfluenzaA__AFK14824

SEQ ID NO: 86493 - RNA, 1410 nt, Artificial Sequence; identical to SEQ ID NO: 80762
  derived and/or modified CDS sequence (opt1) from neuraminidase__InfluenzaA__AFK14841

SEQ ID NO: 86494 - RNA, 1410 nt, Artificial Sequence; identical to SEQ ID NO: 81835
  derived and/or modified CDS sequence (opt1) from neuraminidase__InfluenzaA__AFK14849

SEQ ID NO: 86495 - RNA, 1410 nt, Artificial Sequence
  derived and/or modified CDS sequence (opt1) from neuraminidase__InfluenzaA__AFK14856
augaaccccaaccagaagaucaucaccaucggcagcgugugcaugaccaucgggauggccaaccugauccuccagaucggcaacaucaucuccaucuggaucagccacuccauccagcuggggaaccagaaccagaucgagacgugcaaccagagcgucaucaccuacgagaacaacaccugggugaaccagaccuacgugaacaucuccaacacgaacuucgccgcgggccagagcgucguguccgugaagcuggccgggaacagcucccucugcccggucagcggcugggccaucuacuccaaggacaacagcgugcgcaucggcuccaagggggacguguucgucauccgggagcccuucaucagcugcagcccccuggagugccgcaccuucuuccugacccagggcgcccuccugaacgacaagcacuccaacgggaccaucaaggaccggucccccuaccgcacgcugaugagcugcccgaucggcgaggugcccucccccuacaacagccgguucgagagcguggccugguccgcgagcgccugccacgacgggaucaacuggcucaccaucggcaucuccggccccgacaacggggccgucgccgugcugaaguacaacggcaucaucaccgacaccaucaagagcuggcgcaacaacauccugcggacgcaggaguccgagugcgcgugcgugaacgggagcugcuucaccgucaugaccgacggcccguccaacggccaggccagcuacaagaucuucaagaucgagaaggggaagaucgugaaguccguggagaugaacgcccccaacuaccacuacgaggagugcagcugcuaccccgacuccagcgagaucacgugcgucugccgcgacaacuggcacggcuccaaccggcccugggugagcuucaaccagaaccucgaguaccagaucggguacaucugcuccggcaucuucggggacaacccgcgccccaucgacaagaccggcagcugcggccccguguccagcaacggggccaacggcgucaagggguucuccuucaaguacggcaacgggguguggaucggccggaccaagagcaucagcucccgcaacggcuucgagaugaucugggaccccaacggguggaccggcaccgacaacaacuucagcaucaagcaggacaucguggggaucaacgagugguccggcuacagcggguccuucguccagcacccggagcugacgggccuggacugcauccggcccugcuucuggguggagcucauccgcggccggcccaaggagaacaccaucuggaccagcggguccagcaucuccuucugcggcgucaacagcgacaccguggggugguccuggcccgacggcgccgagcugccguucacgaucgacaaguga

SEQ ID NO: 86496 - RNA, 1410 nt, Artificial Sequence; identical to SEQ ID NO: 80762
  derived and/or modified CDS sequence (opt1) from neuraminidase__InfluenzaA__AFK14870

SEQ ID NO: 86497 - RNA, 1410 nt, Artificial Sequence; identical to SEQ ID NO: 80762
  derived and/or modified CDS sequence (opt1) from neuraminidase__InfluenzaA__AFK14879

SEQ ID NO: 86498 - RNA, 1410 nt, Artificial Sequence; identical to SEQ ID NO: 80762
  derived and/or modified CDS sequence (opt1) from neuraminidase__InfluenzaA__AFK14885

SEQ ID NO: 86499 - RNA, 1410 nt, Artificial Sequence; identical to SEQ ID NO: 80762
  derived and/or modified CDS sequence (opt1) from neuraminidase__InfluenzaA__AFK14894

SEQ ID NO: 86500 - RNA, 1410 nt, Artificial Sequence; identical to SEQ ID NO: 80762
  derived and/or modified CDS sequence (opt1) from neuraminidase__InfluenzaA__AFK14903

SEQ ID NO: 86501 - RNA, 1410 nt, Artificial Sequence; identical to SEQ ID NO: 80762
  derived and/or modified CDS sequence (opt1) from neuraminidase__InfluenzaA__AFK14912

SEQ ID NO: 86502 - RNA, 1410 nt, Artificial Sequence; identical to SEQ ID NO: 80762
  derived and/or modified CDS sequence (opt1) from neuraminidase__InfluenzaA__AFK14921

SEQ ID NO: 86503 - RNA, 1410 nt, Artificial Sequence; identical to SEQ ID NO: 80762
  derived and/or modified CDS sequence (opt1) from neuraminidase__InfluenzaA__AFK14931

SEQ ID NO: 86504 - RNA, 1410 nt, Artificial Sequence
  derived and/or modified CDS sequence (opt1) from neuraminidase__InfluenzaA__AFK25604
augaaccccaaccagaagaucaucaccaucggcagcgugugcaugaccaucgggauggccaaccugauccuccagaucggcaacaucaucuccaucuggaucagccacuccauccagcugcgcaaccagagccagaucgagacgugcaaccaguccgucaucaccuacgagaacaacaccugggugaaccagaccuacgugaacaucagcaacacgaacuucgccgcggggcaguccgucgugagcgugaagcuggccggcaacuccagccucugcccggucuccgggugggccaucuacagcaaggacaacuccauccggaucggcagcaagggcgacguguucgugauccgcgagcccuucaucuccugcagcccccuggagugccggaccuucuuccugacccagggggcccuccugaacgacaagcacuccaacggcaccaucaaggaccgcagccccuaccggacgcugauguccugcccgaucggggagguccccagccccuacaacagccgcuucgaguccguggccuggagcgcguccgccugccacgacggcaucaacuggcucaccaucgggaucagcggccccgacaacggcgccguggccguccugaaguacaacgggaucaucaccgacaccaucaaguccuggcggaacaacauccugcgcacgcaggagagcgagugcgcgugcgugaacggcuccugcuucaccaucaugaccgacgggccgagcgacggccaggccuccuacaagaucuuccggaucgagaagggcaagaucgucaagagcguggagaugaacgcccccaacuacuacuacgaggagugcuccugcuaccccgacagcuccgagaucacgugcgugugccgcgacaacuggcacgggagcaaccggcccuggguguccuucaaccagaaccucgaguaccagaucggcuacaucugcagcgggaucuucggcgacaacccgcgccccaacgacaagaccggguccugcggccccgucagcuccaacggcgccaacggggugaagggcuucagcuucaaguacgggaacggcguguggaucgggcggaccaagagcaucuccagccgcaagggcuucgagaugaucugggaccccaacggcuggaccgggaccgacaacaacuucuccaucaagcaggacaucgucggcaucaacgaguggagcggguacuccggcagcuucgugcagcacccggagcugacggggcuggacugcauccggcccugcuucuggguggagcucauccgcggccggcccaaggagaacaccaucuggaccuccggcagcuccaucagcuucugcggggucaacuccgacaccgugggcuggagcuggcccgacggggccgagcugccguucacgaucgacaaguga

SEQ ID NO: 86505 - RNA, 1410 nt, Artificial Sequence; identical to SEQ ID NO: 86504
  derived and/or modified CDS sequence (opt1) from neuraminidase__InfluenzaA__AFK25606

SEQ ID NO: 86506 - RNA, 1410 nt, Artificial Sequence; identical to SEQ ID NO: 82113
  derived and/or modified CDS sequence (opt1) from neuraminidase__InfluenzaA__AFK74537

SEQ ID NO: 86507 - RNA, 1410 nt, Artificial Sequence; identical to SEQ ID NO: 80762
  derived and/or modified CDS sequence (opt1) from neuraminidase__InfluenzaA__AFK74547

SEQ ID NO: 86508 - RNA, 1410 nt, Artificial Sequence; identical to SEQ ID NO: 83754
  derived and/or modified CDS sequence (opt1) from neuraminidase__InfluenzaA__AFK74557

SEQ ID NO: 86509 - RNA, 1410 nt, Artificial Sequence; identical to SEQ ID NO: 80762
  derived and/or modified CDS sequence (opt1) from neuraminidase__InfluenzaA__AFK74567

SEQ ID NO: 86510 - RNA, 1410 nt, Artificial Sequence; identical to SEQ ID NO: 80762
  derived and/or modified CDS sequence (opt1) from neuraminidase__InfluenzaA__AFK74578

SEQ ID NO: 86511 - RNA, 1410 nt, Artificial Sequence; identical to SEQ ID NO: 85877
  derived and/or modified CDS sequence (opt1) from neuraminidase__InfluenzaA__AFK74588

SEQ ID NO: 86512 - RNA, 1410 nt, Artificial Sequence; identical to SEQ ID NO: 80762
  derived and/or modified CDS sequence (opt1) from neuraminidase__InfluenzaA__AFK74598

SEQ ID NO: 86513 - RNA, 1410 nt, Artificial Sequence; identical to SEQ ID NO: 80762
  derived and/or modified CDS sequence (opt1) from neuraminidase__InfluenzaA__AFK74608

SEQ ID NO: 86514 - RNA, 1410 nt, Artificial Sequence; identical to SEQ ID NO: 80762
  derived and/or modified CDS sequence (opt1) from neuraminidase__InfluenzaA__AFK74618

SEQ ID NO: 86515 - RNA, 1410 nt, Artificial Sequence; identical to SEQ ID NO: 80762
  derived and/or modified CDS sequence (opt1) from neuraminidase__InfluenzaA__AFK74628

SEQ ID NO: 86516 - RNA, 1410 nt, Artificial Sequence; identical to SEQ ID NO: 80762
  derived and/or modified CDS sequence (opt1) from neuraminidase__InfluenzaA__AFK74638

SEQ ID NO: 86517 - RNA, 1410 nt, Artificial Sequence; identical to SEQ ID NO: 80762
  derived and/or modified CDS sequence (opt1) from neuraminidase__InfluenzaA__AFK74648

SEQ ID NO: 86518 - RNA, 1410 nt, Artificial Sequence; identical to SEQ ID NO: 85886
  derived and/or modified CDS sequence (opt1) from neuraminidase__InfluenzaA__AFK74658

SEQ ID NO: 86519 - RNA, 1410 nt, Artificial Sequence; identical to SEQ ID NO: 85886
  derived and/or modified CDS sequence (opt1) from neuraminidase__InfluenzaA__AFK74668

SEQ ID NO: 86520 - RNA, 1410 nt, Artificial Sequence; identical to SEQ ID NO: 80762
  derived and/or modified CDS sequence (opt1) from neuraminidase__InfluenzaA__AFK74678

SEQ ID NO: 86521 - RNA, 1410 nt, Artificial Sequence; identical to SEQ ID NO: 80762
  derived and/or modified CDS sequence (opt1) from neuraminidase__InfluenzaA__AFK74688

SEQ ID NO: 86522 - RNA, 1410 nt, Artificial Sequence; identical to SEQ ID NO: 80762
  derived and/or modified CDS sequence (opt1) from neuraminidase__InfluenzaA__AFK74698

SEQ ID NO: 86523 - RNA, 1410 nt, Artificial Sequence; identical to SEQ ID NO: 85893
  derived and/or modified CDS sequence (opt1) from neuraminidase__InfluenzaA__AFK74708

SEQ ID NO: 86524 - RNA, 1410 nt, Artificial Sequence; identical to SEQ ID NO: 83754
  derived and/or modified CDS sequence (opt1) from neuraminidase__InfluenzaA__AFK74718

SEQ ID NO: 86525 - RNA, 1410 nt, Artificial Sequence; identical to SEQ ID NO: 80762
  derived and/or modified CDS sequence (opt1) from neuraminidase__InfluenzaA__AFK74728

SEQ ID NO: 86526 - RNA, 1410 nt, Artificial Sequence; identical to SEQ ID NO: 80762
  derived and/or modified CDS sequence (opt1) from neuraminidase__InfluenzaA__AFK74738

SEQ ID NO: 86527 - RNA, 1410 nt, Artificial Sequence; identical to SEQ ID NO: 80762
  derived and/or modified CDS sequence (opt1) from neuraminidase__InfluenzaA__AFK74748

SEQ ID NO: 86528 - RNA, 1410 nt, Artificial Sequence; identical to SEQ ID NO: 80762
  derived and/or modified CDS sequence (opt1) from neuraminidase__InfluenzaA__AFK74758

SEQ ID NO: 86529 - RNA, 1410 nt, Artificial Sequence; identical to SEQ ID NO: 80762
  derived and/or modified CDS sequence (opt1) from neuraminidase__InfluenzaA__AFK74768

SEQ ID NO: 86530 - RNA, 1410 nt, Artificial Sequence; identical to SEQ ID NO: 80762
  derived and/or modified CDS sequence (opt1) from neuraminidase__InfluenzaA__AFK74778

SEQ ID NO: 86531 - RNA, 1410 nt, Artificial Sequence; identical to SEQ ID NO: 83754
  derived and/or modified CDS sequence (opt1) from neuraminidase__InfluenzaA__AFK74788

SEQ ID NO: 86532 - RNA, 1410 nt, Artificial Sequence; identical to SEQ ID NO: 83754
  derived and/or modified CDS sequence (opt1) from neuraminidase__InfluenzaA__AFK74798

SEQ ID NO: 86533 - RNA, 1410 nt, Artificial Sequence; identical to SEQ ID NO: 83754
  derived and/or modified CDS sequence (opt1) from neuraminidase__InfluenzaA__AFK74808

SEQ ID NO: 86534 - RNA, 1410 nt, Artificial Sequence; identical to SEQ ID NO: 83754
  derived and/or modified CDS sequence (opt1) from neuraminidase__InfluenzaA__AFK74818

SEQ ID NO: 86535 - RNA, 1410 nt, Artificial Sequence; identical to SEQ ID NO: 80762
  derived and/or modified CDS sequence (opt1) from neuraminidase__InfluenzaA__AFK74828

SEQ ID NO: 86536 - RNA, 1410 nt, Artificial Sequence; identical to SEQ ID NO: 82653
  derived and/or modified CDS sequence (opt1) from neuraminidase__InfluenzaA__AFK74838

SEQ ID NO: 86537 - RNA, 1410 nt, Artificial Sequence; identical to SEQ ID NO: 80762
  derived and/or modified CDS sequence (opt1) from neuraminidase__InfluenzaA__AFK74848

SEQ ID NO: 86538 - RNA, 1410 nt, Artificial Sequence; identical to SEQ ID NO: 80762
  derived and/or modified CDS sequence (opt1) from neuraminidase__InfluenzaA__AFK74898

SEQ ID NO: 86539 - RNA, 1410 nt, Artificial Sequence; identical to SEQ ID NO: 80762
  derived and/or modified CDS sequence (opt1) from neuraminidase__InfluenzaA__AFK74908

SEQ ID NO: 86540 - RNA, 1410 nt, Artificial Sequence; identical to SEQ ID NO: 80762
  derived and/or modified CDS sequence (opt1) from neuraminidase__InfluenzaA__AFK74918

SEQ ID NO: 86541 - RNA, 1410 nt, Artificial Sequence; identical to SEQ ID NO: 80762
  derived and/or modified CDS sequence (opt1) from neuraminidase__InfluenzaA__AFK74928

SEQ ID NO: 86542 - RNA, 1410 nt, Artificial Sequence
  derived and/or modified CDS sequence (opt1) from neuraminidase__InfluenzaA__AFK74938
augaaccccaaccagaagaucaucaccaucggcagcgugugcaugaccaucgggauggccaaccugauccuccagaucggcaacaucaucuccaucuggaucagccacuccauccagcuggggaaccagaaccagaucgagacgugcaaccagagcgucaucaccuacgagaacaacaccugggugaaccagaccuacgugaacaucuccaacacgaacuucgccgcgggccagagcgucguguccgugaagcuggccgggaacagcucccucugcccggucagcggcugggccaucuacuccaaggacaacagcauccgcaucggcuccaagggggacguguucgugauccgggagcccuucaucagcugcagcccccuggagugccgcaccuucuuccugacccagggcgcccuccugaacgacaagcacuccaacgggaccaucaaggaccggucccccuaccgcacgcugaugagcugcccgaucggcgagguccccucccccuacaacagccgguucgagagcguggccugguccgcgagcgccugccacgacgggaucaacuggcucaccaucggcaucuccggccccgacaacggggccguggccguccugaaguacaacggcaucaucaccgacaccaucaagagcuggcgcaacaacauccugcggacgcaggaguccgagugcgcgugcgugaacgggagcugcuucaccgugaugaccgacggcccguccgacggccaggccagcuacaagaucuuccgcaucgagaaggggaagaucgucaaguccguggagaugaacgcccccaacuaccacuacgaggagugcagcugcuaccccgacuccagcgagaucacgugcgugugccgggacaacuggcacggcuccaaccgccccugggucagcuucaaccagaaccucgaguaccagaucggguacaucugcuccggcaucuucggggacaacccgcggcccaacgacaacaccggcagcugcggccccguguccagcaacggggccaacggcgugaagggguucuccuucaaguacggcaacggggucuggaucggccgcaccaagagcaucagcucccggaacggcuucgagaugaucugggaccccaacggguggaccggcaccgacaacaacuucagcaucaagcaggacaucguggggaucaacgagugguccggcuacagcggguccuucgugcagcacccggagcugacgggccuggacugcauccgccccugcuucugggucgagcucauccggggccgccccaaggagaacaccaucuggaccagcggguccagcaucuccuucugcggcgugaacagcgacaccgucgggugguccuggcccgacggcgccgagcugccguucacgaucgacaaguga

SEQ ID NO: 86543 - RNA, 1410 nt, Artificial Sequence; identical to SEQ ID NO: 80762
  derived and/or modified CDS sequence (opt1) from neuraminidase__InfluenzaA__AFK74948

SEQ ID NO: 86544 - RNA, 1410 nt, Artificial Sequence; identical to SEQ ID NO: 82653
  derived and/or modified CDS sequence (opt1) from neuraminidase__InfluenzaA__AFK74958

SEQ ID NO: 86545 - RNA, 1410 nt, Artificial Sequence; identical to SEQ ID NO: 83754
  derived and/or modified CDS sequence (opt1) from neuraminidase__InfluenzaA__AFK74968

SEQ ID NO: 86546 - RNA, 1410 nt, Artificial Sequence; identical to SEQ ID NO: 80762
  derived and/or modified CDS sequence (opt1) from neuraminidase__InfluenzaA__AFK74978

SEQ ID NO: 86547 - RNA, 1410 nt, Artificial Sequence; identical to SEQ ID NO: 82653
  derived and/or modified CDS sequence (opt1) from neuraminidase__InfluenzaA__AFK74988

SEQ ID NO: 86548 - RNA, 1410 nt, Artificial Sequence; identical to SEQ ID NO: 80762
  derived and/or modified CDS sequence (opt1) from neuraminidase__InfluenzaA__AFK74998

SEQ ID NO: 86549 - RNA, 1410 nt, Artificial Sequence; identical to SEQ ID NO: 83754
  derived and/or modified CDS sequence (opt1) from neuraminidase__InfluenzaA__AFK75008

SEQ ID NO: 86550 - RNA, 1410 nt, Artificial Sequence; identical to SEQ ID NO: 80762
  derived and/or modified CDS sequence (opt1) from neuraminidase__InfluenzaA__AFK75018

SEQ ID NO: 86551 - RNA, 1410 nt, Artificial Sequence; identical to SEQ ID NO: 80762
  derived and/or modified CDS sequence (opt1) from neuraminidase__InfluenzaA__AFK75028

SEQ ID NO: 86552 - RNA, 1410 nt, Artificial Sequence; identical to SEQ ID NO: 80762
  derived and/or modified CDS sequence (opt1) from neuraminidase__InfluenzaA__AFK75038

SEQ ID NO: 86553 - RNA, 1410 nt, Artificial Sequence; identical to SEQ ID NO: 80762
  derived and/or modified CDS sequence (opt1) from neuraminidase__InfluenzaA__AFK75048

SEQ ID NO: 86554 - RNA, 1410 nt, Artificial Sequence; identical to SEQ ID NO: 80762
  derived and/or modified CDS sequence (opt1) from neuraminidase__InfluenzaA__AFK75058

SEQ ID NO: 86555 - RNA, 1410 nt, Artificial Sequence; identical to SEQ ID NO: 83754
  derived and/or modified CDS sequence (opt1) from neuraminidase__InfluenzaA__AFK75068

SEQ ID NO: 86556 - RNA, 1410 nt, Artificial Sequence; identical to SEQ ID NO: 80762
  derived and/or modified CDS sequence (opt1) from neuraminidase__InfluenzaA__AFK75078

SEQ ID NO: 86557 - RNA, 1410 nt, Artificial Sequence; identical to SEQ ID NO: 80762
  derived and/or modified CDS sequence (opt1) from neuraminidase__InfluenzaA__AFK75088

SEQ ID NO: 86558 - RNA, 1410 nt, Artificial Sequence; identical to SEQ ID NO: 80762
  derived and/or modified CDS sequence (opt1) from neuraminidase__InfluenzaA__AFK75098

SEQ ID NO: 86559 - RNA, 1410 nt, Artificial Sequence; identical to SEQ ID NO: 82675
  derived and/or modified CDS sequence (opt1) from neuraminidase__InfluenzaA__AFK75108

SEQ ID NO: 86560 - RNA, 1410 nt, Artificial Sequence; identical to SEQ ID NO: 80762
  derived and/or modified CDS sequence (opt1) from neuraminidase__InfluenzaA__AFK77860

SEQ ID NO: 86561 - RNA, 1410 nt, Artificial Sequence; identical to SEQ ID NO: 80762
  derived and/or modified CDS sequence (opt1) from neuraminidase__InfluenzaA__AFK77870

SEQ ID NO: 86562 - RNA, 1410 nt, Artificial Sequence; identical to SEQ ID NO: 80762
  derived and/or modified CDS sequence (opt1) from neuraminidase__InfluenzaA__AFK77880

SEQ ID NO: 86563 - RNA, 1410 nt, Artificial Sequence
  derived and/or modified CDS sequence (opt1) from neuraminidase__InfluenzaA__AFK77890
augaaccccaaccagaagaucaucaccaucggcagcgugugcaugaccaucgggauggccaaccugauccuccagaucggcaacaucaucuccaucuggaucagccacuccauccagcuggggaaccagaaccagaucgagacgugcaaccagagcgucaucaccuacgagaacaacaccugggugaaccagaccuacgugaacaucuccaacacgaacuucgccgcgggccagagcgucguguccgugaagcuggccgggaacagcucccucugcccggucagcggcugggccaucuacuccaaggacaacagcauccgcaucggcuccaagggggacguguucgugauccgggagcccuucaucagcugcagcccccuggagugccgcaccuucuuccugacccagggcgcccuccugaacgacaagcacuccaacgggaccaucaaggaccggucccccuaccgcacgcugaugagcugcccgaucggcgagguccccucccccuacaacagccgguucgagagcguggccugguccgcgagcgccugccacgacgggaucaacuggcucaccaucggcaucuccggccccgacaacggggccguggccguccugaaguacaacggcaucaucaccgacaccaucaagagcuggcgcaacaacauccugcggacgcaggaguccgagugcgcgugcgugaacgggagcugcuucaccgugaugaccgacggcccguccgacggccaggccagcuacaagaucuuccgcaucgagaaggggaagaucgucaaguccguggagaugaacgcccccaacuaccacuacgaggagugcagcugcuaccccgacuccagcgagaucacgugcgugugccgggacaacuggcacggcuccaaccgccccugggucagcuucaaccagaaccucgaguaccagaucggguacaucugcuccggcaucuucggggacaacccgcggcccaacgacaagaccggcagcugcggccccguguccagcaacggggccaacggcgugaagggguucuccuucaaguacggcaacggggucuggaucggccgcaccaagggcaucagcagccggaacggguucgagaugaucugggaccccaacggcuggaccgggaccgacaacaacuucuccaucaagcaggacaucgugggcaucaacgaguggagcggguacuccggcagcuucgugcagcacccggagcugacgggccuggacugcauccgccccugcuucugggucgagcucauccgggggcgccccaaggagaacaccaucuggaccuccggcagcuccaucagcuucugcggggugaacuccgacaccgucggcuggagcuggcccgacggcgccgagcugccguucacgaucgacaaguga

SEQ ID NO: 86564 - RNA, 1410 nt, Artificial Sequence
  derived and/or modified CDS sequence (opt1) from neuraminidase__InfluenzaA__AFK77900
augaaccccaaccagaagaucaucaccaucggcagcgugugcaugaccaucgggauggccaaccugauccuccagaucggcaacaucaucuccaucuggaucagccacuccauccagaucgggaaccagaaccagaucgagacgugcaaccagagcgucaucaccuacgagaacaacaccugggugaaccagaccuacgugaacaucuccaacacgaacuucgccgcgggccagagcgucgccuccgugaagcuggccgggaacagcucccugugcccggugagcggcugggccaucuacuccaaggacaacagcauccgcaucggcuccaagggggacgucuucgugauccgggagcccuucaucagcugcagcccccucgagugccgcaccuucuuccugacccagggcgcccugcucaacgacaagcacuccaacgggaccaucaaggaccggucccccuaccgcgcgcugaugagcugcccgaucggcgaggugcccucccccuacaacagccgguucgagagcgucgccugguccgccagcgccugccacgacgggaucaacuggcugacgaucggcaucuccggccccgacaacggggcgguggccgugcucaaguacaacggcaucaucaccgacaccaucaagagcuggcgcaacaacauccugcggacccaggaguccgagugcgccugcgucaacgggagcugcuucacgaucaugaccgacggcccguccgacggccaggccagcuacaagaucuuccgcaucgagaaggggaagaucgugaaguccguggagaugaacgcccccaacuaccacuacgaggagugcagcugcuaccccgacuccagcgagaucacgugcgucugccgggacaacuggcacggcuccaaccgccccugggugagcuucaaccagaaccuggaguaccagaucggguacaucugcuccggcaucuucggggacaacccgcggcccaacgacaagaccggcagcugcggccccguguccagcaacggggcgaacggcgucaagggguucuccuucaaguacggcaacgggguguggaucggccgcaccaagagcaucagcucccggaagggcuucgagaugaucugggaccccaacggguggaccggcaccgacaacaacuucagcaucaagcaggacaucguggggaugaacgagugguccggcuacagcggguccuucguccagcacccggagcucaccggccuggacugcauccgccccugcuucuggguggagcugauccggggccgccccaaggagaacacgaucuggaccagcggguccagcaucuccuucugcggcgugaacagcgacaccgucgggugguccuggcccgacggcgccgagcucccguucaccaucgacaaguga

SEQ ID NO: 86565 - RNA, 1410 nt, Artificial Sequence
  derived and/or modified CDS sequence (opt1) from neuraminidase__InfluenzaA__AFK78031
augaaccccaaccagaagaucaucaccaucggcagcgugugcaugaccaucgggauggccaaccugauccuccagaucggcaacaucaucuccaucuggaucagccacuccauccagcuggggaaccagaaccagaucgagacgugcaaccagagcgucaucaccuacgagaacaacaccugggugaaccagaccuacgugaacaucuccaacacgaacuucgccgcgggccagagcgucgccuccgugaagcuggccgggaacagcucccucugcccggugagcggcugggccaucuacuccaaggacaacagcauccgcaucggcuccaagggggacgucuucgugauccgggagcccuucaucagcugcagcccccuggagugccgcaccuucuuccugacccagggcgcccuccugaacgacaagcacuccaacgggaccaucaaggaccggucccccuaccgcgcgcugaugagcugcccgaucggcgaggugcccucccccuacaacagccgguucgagagcgucgccugguccgccagcgccugccacgacgggaucaacuggcucacgaucggcaucuccggccccgacaacggggcgguggccgugcugaaguacaacggcaucaucaccgacaccaucaagagcuggcgcaacaacauccugcggacccaggaguccgagugcgccugcgucaacgggagcugcuucacgaucaugaccgacggcccguccgacggccaggccagcuacaagaucuuccgcaucgagaaggggaagaucgugaaguccguggagaugaacgcccccaacuaccacuacgaggagugcagcugcuaccccgacuccagcgagaucacgugcgucugccgggacaacuggcacggcuccaaccgccccugggugagcuucaaccagaaccucgaguaccagaucggguacaucugcuccggcaucuucggggacaacccgcggcccaacgacaagaccggcagcugcggccccguguccagcaacggggcgaacggcgucaagggguucuccuucaaguacggcaacgggguguggaucggccgcaccaagagcaucagcucccggaagggcuucgagaugaucugggaccccaacggguggaccggcaccgacaacaacuucagcaucaagcaggacaucguggggaugaacgagugguccggcuacagcggguccuucguccagcacccggagcugaccggccuggacugcauccgccccugcuucuggguggagcucauccggggccgccccaaggagaacacgaucuggaccagcggguccagcaucuccuucugcggcgugaacagcgacaccgucgggugguccuggcccgacggcgccgagcugccguucaccaucgacaaguga

SEQ ID NO: 86566 - RNA, 1410 nt, Artificial Sequence; identical to SEQ ID NO: 80762
  derived and/or modified CDS sequence (opt1) from neuraminidase__InfluenzaA__AFK78190

SEQ ID NO: 86567 - RNA, 1362 nt, Artificial Sequence
  derived and/or modified CDS sequence (opt1) from neuraminidase__InfluenzaA__AFM68957
augaaccccaaccagaagaucaucaccaucggcagcaucugcaugguggucgggaucaucucccugauccuccagaucggcaacaucaucagcaucuggaucucccacagcauccagaccgggaaccagaaccacacgggcaucugcaaccaggggaucaucacccacaacgugguggccggccaggacuccaccagcgucauccugaccggcaacuccagccugugcccgauccgcgggugggccauccacuccaaggacaacggcauccggaucgggagcaagggcgacguguucgugauccgcgagcccuucaucuccugcagccaccucgagugccggacguucuuccugacccagggggcgcugcucaacgacaagcacuccuacggcaccagcaaggaccgcucccccuaccgggcccugaugagcugccccgucggcgaggccccgucccccuacaacagccgcuucgaguccguggccuggagcgccagcgcgugccacgacgggaugggcuggcugaccaucgggaucuccggccccgacaacggcgccguggccguccucaaguacaacgggaucaucacggagaccaucaagagcuggcggaagaagauccugcgcacccaggaguccgagugcacgugcgugaacggcagcugcuucaccaucaugaccgacgggcccuccgacggccuggccagcuacaagaucuucaagaucgagaaggggaaggugaccaaguccaucgagcucaacgcgccgaacagccacuacgaggagugcuccugcuaccccgacaccggcaaggucaugugcgugugccgggacaacuggcacggcagcaaccgccccuggguguccuucgaccagaaccuggacuaccagaucggguacaucugcagcggcgucuucggggacaacccccggccgaaggacggcacgggguccugcggccccgugagcgccgacggcgccaacggggugaagggcuucuccuaccgcuacgggaacggcgucuggaucgggcggaccaagagcgacuccagccgccacggcuucgagaugaucugggaccccaacggcuggaccgagaccgacucccgguucagcgugcgccaggacguggucgccaugacggaccggagcggguacuccggcagcuucgugcagcaccccgagcugaccgggcucgacugcaugcgcccgugcuucuggguggagcugauccggggccagcccgaggaggagaccaucuggaccuccggcagcaucaucuccuucugcggggucaacagcgacacgguggacugguccuggcccgacggcgccgagcugcccuucaccaucgacaaguga

SEQ ID NO: 86568 - RNA, 1410 nt, Artificial Sequence
  derived and/or modified CDS sequence (opt1) from neuraminidase__InfluenzaA__AFM68968
augaaccccaaccagaagaucaucaccaucggcagcgugucccugaccaucgccacgaucugcuuccucaugcagaucgccauccuggucaccaccgugacccugcacuucaagcaguacgagugcgacagcccggcgaacaaccaggugaugcccugcgagcccaucaucaucgagcgcaacaucacggagaucgucuaccucaccaacaccaccaucgagaaggagaucugccccaagcugguggaguaccggaacugguccaagccgcagugcaagaucacgggguucgcccccuucagcaaggacaacuccauccgccugagcgccggcggggacaucugggugacccgggagcccuacgucuccugcgaccccggcaagugcuaccaguucgcccucgggcagggcaccacccuggacaacaagcacagcaacgacacgauccacgaccgcaccccgcaccggacccugcucaugaacgagcugggcgugcccuuccaccuggggacccgccaggugugcaucgccugguccagcuccagcugccacgacggcaaggcguggcuccacgucugcgugacgggguacgacaagaacgccaccgccuccuucaucuacgacggccggcugguggacagcaucggguccuggagcaagaacauccugcgcacccaggaguccgagugcgucugcaucaacgggaccugcacgguggugaugaccgacggcagcgccuccgagcgggcggacaccaagauccucuucaucgaggaggggaagaucguccacaucagcccccugagcggcuccgcccagcacguggaggagugcagcugcuacccccgcuacccgggggugcggugcgucugccgcgacaacuggaagggcuccaaccggcccaucguggacaucaacgugaaggacuacagcaucgccuccagcuacgucugcuccggccuggugggggacacgccccgcaagaacgaccggagcuccagcuccuacugccgcaaccccaacaacgagaagggcaaccacggggugaagggcugggccuucgacgacgggaacgacgucuggaugggccggaccaucagcgaggagucccgcagcggcuacgagaccuucaaggugaucgggggcugguccaccccgaacagcaagcuccagaucaaccggcaggucaucguggacuccgacaaccgcagcggguacuccggcaucuucagcguggagggcaagagcugcaucaaccggugcuucuacgucgagcugauccgcggccgcgagcaggagacccgggugugguggacguccaacagcaucguggucuucugcggcaccuccgggaccuacggcaccgggagcuggcccgacggcgccgacaucaaccugaugcccaucuga

SEQ ID NO: 86569 - RNA, 1410 nt, Artificial Sequence
  derived and/or modified CDS sequence (opt1) from neuraminidase__InfluenzaA__AFM68979
augaaccccaaccagaagaucaucaccaucggcagcgugucccugaccaucgccacgaucugcuuccucaugcagaucgccauccuggucaccaccgugacccugcacuucaagcaguacgagugcagcuccccgcccaacaaccaggugaugcccugcgagcccaucaucaucgagcgcaacaucacggagaucgucuaccucaccaacaccaccaucgagaaggagaucugcccgaagcugguggaguaccggaacuggagcaagccccagugcaagaucacgggguucgcgcccuucuccaaggacaacagcauccgccuguccgccggcgggggcaucugggugacccgggagcccuacgucagcugcgacccggggaagugcuaccaguucgcccucggccagggcaccacccuggacaacaagcacuccaacgacacgauccacgaccgcacccccuaccggacccugcucaugaacgagcugggggugcccuuccaccugggcacccgccaggugugcaucgccuggagcuccagcuccugccacgacgggaaggccuggcuccacgucugcgugacgggcuacgacaagaacgcgaccgccagcuucaucuacgacgggcggcugguggacuccaucggcagcugguccaagaacauccugcgcacccaggagagcgagugcgucugcaucaacgggaccugcacgguggugaugaccgacggcuccgccagcgagcgggccgacaccaagauccucuucaucgaggagggcaagaucguccacaucagcccccuguccgggagcgcgcagcacguggaggagugcuccugcuacccgcgcuaccccggcgugcggugcgucugccgcgacaacuggaagggcagcaaccggcccgugguggacaucaacgucaaggacuacuccaucgugagcuccuacgugugcagcgggcuggucggcgacacgccccgcaagaacgaccgguccagcuccagcuacugccgcaacccgaacaacgagaaggggaaccacggcgugaaggggugggccuucgacgacggcaacgacgucuggaugggccggaccaucuccgaggagagccgcuccggguacgagaccuucaaggugaucggcggguggagcacccccaacuccaagcuccagaucaaccgccaggugaucgucgacagcgacaaccgguccggcuacagcgggaucuucagcguggagggcaaguccugcaucaaccggugcuucuacguggagcugauccgcggccgcgagcaggagacccgggucugguggacgagcaacuccaucgugguguucugcgggaccagcggcaccuacgggaccggcuccuggcccgacggggccgacaucaaccugaugcccaucuga

SEQ ID NO: 86570 - RNA, 1410 nt, Artificial Sequence; identical to SEQ ID NO: 86569
  derived and/or modified CDS sequence (opt1) from neuraminidase__InfluenzaA__AFM68990

SEQ ID NO: 86571 - RNA, 1410 nt, Artificial Sequence; identical to SEQ ID NO: 78837
  derived and/or modified CDS sequence (opt1) from neuraminidase__InfluenzaA__AFM71723

SEQ ID NO: 86572 - RNA, 1410 nt, Artificial Sequence; identical to SEQ ID NO: 86159
  derived and/or modified CDS sequence (opt1) from neuraminidase__InfluenzaA__AFM71734

SEQ ID NO: 86573 - RNA, 1410 nt, Artificial Sequence; identical to SEQ ID NO: 85973
  derived and/or modified CDS sequence (opt1) from neuraminidase__InfluenzaA__AFM71745

SEQ ID NO: 86574 - RNA, 1410 nt, Artificial Sequence; identical to SEQ ID NO: 82633
  derived and/or modified CDS sequence (opt1) from neuraminidase__InfluenzaA__AFM71771

SEQ ID NO: 86575 - RNA, 1410 nt, Artificial Sequence; identical to SEQ ID NO: 85659
  derived and/or modified CDS sequence (opt1) from neuraminidase__InfluenzaA__AFM71782

SEQ ID NO: 86576 - RNA, 1410 nt, Artificial Sequence; identical to SEQ ID NO: 85659
  derived and/or modified CDS sequence (opt1) from neuraminidase__InfluenzaA__AFM71794

SEQ ID NO: 86577 - RNA, 1410 nt, Artificial Sequence; identical to SEQ ID NO: 80623
  derived and/or modified CDS sequence (opt1) from neuraminidase__InfluenzaA__AFM71805

SEQ ID NO: 86578 - RNA, 1410 nt, Artificial Sequence
  derived and/or modified CDS sequence (opt1) from neuraminidase__InfluenzaA__AFM71827
augaaccccaaccagaagaucaucaccaucggcagcgugucccugaccaucagcacgaucugcuucuucaugcagaucgccauccucaucaccaccgucacccugcacuucaagcaguacgaguucaacuccccgcccaacaaccaggugaugcugugcgagcccacgaucaucgagcgcaacaucaccgagaucguguaccucaccaacaccacgaucgagaaggagaucugccccaagcuggccgaguaccggaacuggagcaagccgcagugcgacaucaccggguucgcgcccuucuccaaggacaacagcauccgccuguccgccggcggggacaucugggucacccgggagcccuacgugagcugcgaccccgacaagugcuaccaguucgcccucggccaggggaccacgcugaacaacgugcacuccaacaacaccguccgcgaccggaccccguaccgcacccugcucaugaacgagcugggcgugcccuuccaccugggcacgaagcaggucugcaucgccuggagcuccagcuccugccacgacgggaaggccuggcuccacgugugcaucaccggcgacgacaagaacgcgaccgccagcuucaucuacaacgggcggcugguggacuccguggucagcugguccaaggagauccugcgcacccaggagagcgagugcgugugcaucaacggcacgugcaccguggucaugaccgacggguccgccagcggcaaggccgacaccaagauccucuucaucgaggagggcaagaucgugcacacgagcacccuguccgggagcgcgcagcacguggaggagugcuccugcuacccccgguaccccggcguccgcugcgugugccgggacaacuggaaggggagcaaccgcccgaucguggacaucaacaucaaggaccacuccaucgucagcuccuacgugugcagcggccuggugggcgacacgccccggaagaacgacuccagcuccagcucccacugccucgaccccaacaacgaggagggcgggcacggggucaagggcugggccuucgacgacgggaaggacguguggaugggccgcaccaucagcgagaagucccggcugggcuacgagaccuucaaggucaucgagggguggagcaaccccaaguccaagcugcagaucaaccgccaggugaucguggaccggggcaaccgcagcggguacuccggcaucuucagcgucgagggcaagagcugcaucaaccggugcuucuacguggagcucauccgcgggcggaaggaggagaccgaggugcuguggaccuccaacagcaucgucguguucugcggcaccuccgggacguacggcaccgggagcuggccggacggcgccgacaucaaccugaugcccaucuga

SEQ ID NO: 86579 - RNA, 1410 nt, Artificial Sequence; identical to SEQ ID NO: 83542
  derived and/or modified CDS sequence (opt1) from neuraminidase__InfluenzaA__AFM71838

SEQ ID NO: 86580 - RNA, 1365 nt, Artificial Sequence; identical to SEQ ID NO: 79743
  derived and/or modified CDS sequence (opt1) from neuraminidase__InfluenzaA__AFM71849

SEQ ID NO: 86581 - RNA, 1410 nt, Artificial Sequence; identical to SEQ ID NO: 78119
  derived and/or modified CDS sequence (opt1) from neuraminidase__InfluenzaA__AFM71860

SEQ ID NO: 86582 - RNA, 1410 nt, Artificial Sequence; identical to SEQ ID NO: 78351
  derived and/or modified CDS sequence (opt1) from neuraminidase__InfluenzaA__AFM71871

SEQ ID NO: 86583 - RNA, 1410 nt, Artificial Sequence; identical to SEQ ID NO: 78351
  derived and/or modified CDS sequence (opt1) from neuraminidase__InfluenzaA__AFM71882

SEQ ID NO: 86584 - RNA, 1410 nt, Artificial Sequence
  derived and/or modified CDS sequence (opt1) from neuraminidase__InfluenzaA__AFM71893
augaaccccaaccagaagaucaucaccaucggcagcgugucccugaccaucgccacggucugcuuccucaugcagaucgccauccuggcgaccaccgugacccugcacuucaagcagcacgagugcgacagcccggccuccaaccaggugaugcccugcgagcccaucaucaucgagcgcaacaucacggagaucgucuaccucaacaacaccaccaucgagaaggagaucugccccgaggugguggaguaccggaacuggagcaagccgcagugccagaucaccggguucgcccccuucuccaaggacaacagcauccgccuguccgccggcggggacaucugggucacgcgggagcccuacgugagcugcgaccccggcaagugcuaccaguucgcccuggggcagggcaccacccucgacaacaagcacuccaacggcaccauccacgaccgcaucccgcaccggacgcugcugaugaacgagcucggggugcccuuccaccugggcaccaagcaggucugcguggcguggagcuccagcuccugccacgacgggaaggccuggcugcacgugugcgucaccggcgacgaccgcaacgccaccgccagcuucaucuacgacgggcggcucguggacuccaucggcagcuggucccagaacauccugcgcacgcaggagagcgagugcgugugcaucaacgggaccugcaccgucgugaugaccgacggcuccgcgagcggccgggccgacacgcgcauccuguucaucaaggaggggaagaucgugcacaucagcccccucuccggcagcgcccagcacaucgaggagugcuccugcuacccccgguacccggacguccgcugcaucugccgggacaacuggaagggcagcaaccgccccgugaucgacaucaacauggaggacuacuccaucgacagcuccuacgugugcagcgggcuggucggcgacacgccccggaacgacgacuccagcuccaacagcaacugccgcgaccccaacaacgagcgggggaacccgggcgugaaggggugggccuucgacaacggcgacgacguguggaugggccgcaccaucaacaaggagucccggagcggguacgagaccuucaaggucaucggcgggugguccacccccaacagcaagucccaggugaaccgccaggucaucguggacaacaacaacuggagcggcuacuccgggaucuucagcguggagggcaagagcugcaucaaccggugcuucuacgucgagcugauccgcggccgcccccaggagacccgggugugguggaccuccaacagcaucguggucuucugcgggaccuccggcacguacgggaccggcagcuggcccgacggggccaacaucaacuucaugccgaucuga

SEQ ID NO: 86585 - RNA, 1410 nt, Artificial Sequence
  derived and/or modified CDS sequence (opt1) from neuraminidase__InfluenzaA__AFM71904
augaaccccaaccagaagaucaucaccaucggcagcgugucccugaccaucgccacggucugcuuccucaugcagaucgccauccuggcgaccaccgugacccugcacuucaagcagcacgagugcgacagcccggccuccaaccaggugaugcccugcgagcccaucaucaucgagcgcaacaucacggagaucgucuaccucaacaacaccaccaucgagaaggagaucugccccgaggugguggaguaccggaacuggagcaagccgcagugccagaucaccggguucgcccccuucuccaaggacaacagcauccgccuguccgccggcggggacaucugggucacgcgggagcccuacgugagcugcgaccccggcaagugcuaccaguucgcccuggggcagggcaccacccucgacaacaagcacuccaacgugaccauccacgaccgcaucccgcaccggacgcugcugaugaacgagcucggcguccccuuccaccuggggaccaagcaggucugcguggcguggagcuccagcuccugccacgacggcaaggccuggcugcacgugugcgugaccggggacgaccgcaacgccaccgccagcuucaucuacgacggccggcucguggacuccaucgggagcuggucccagaacauccugcgcacgcaggagagcgagugcgucugcaucaacgggaccugcaccguggugaugaccgacggcuccgcgagcggccgggccgacacgcgcauccuguucaucaaggagggcaagaucguccacaucagcccccucuccgggagcgcccagcacaucgaggagugcuccugcuacccccgguacccggacgugcgcugcaucugccgggacaacuggaagggcagcaaccgccccgugaucgacaucaacauggaggacuacuccaucgacagcggcuacgucugcuccgggcuggugggcgacacgccccggaacgacgacagcuccagcaacuccaacugccgcgaccccaacaacgagcgggggaacccgggcgugaaggggugggccuucgacaacggcgacgacgucuggaugggccgcaccaucaacaaggagagccgguccggguacgagaccuucaaggugaucggcggguggagcacccccaacuccaagagccaggucaaccgccaggugaucguggacaacaacaacugguccggcuacagcgggaucuucuccgucgagggcaagagcugcaucaaccggugcuucuacguggagcugauccgcggccgcccccaggagacccgggugugguggaccagcaacuccaucgucguguucugcgggaccagcggcacguacgggaccggcuccuggcccgacggggccaacaucaacuucaugccgaucuga

SEQ ID NO: 86586 - RNA, 1410 nt, Artificial Sequence; identical to SEQ ID NO: 78996
  derived and/or modified CDS sequence (opt1) from neuraminidase__InfluenzaA__AFM71915

SEQ ID NO: 86587 - RNA, 1410 nt, Artificial Sequence; identical to SEQ ID NO: 78996
  derived and/or modified CDS sequence (opt1) from neuraminidase__InfluenzaA__AFM71926

SEQ ID NO: 86588 - RNA, 1410 nt, Artificial Sequence; identical to SEQ ID NO: 78996
  derived and/or modified CDS sequence (opt1) from neuraminidase__InfluenzaA__AFM71937

SEQ ID NO: 86589 - RNA, 1410 nt, Artificial Sequence; identical to SEQ ID NO: 86004
  derived and/or modified CDS sequence (opt1) from neuraminidase__InfluenzaA__AFM71948

SEQ ID NO: 86590 - RNA, 1410 nt, Artificial Sequence; identical to SEQ ID NO: 86004
  derived and/or modified CDS sequence (opt1) from neuraminidase__InfluenzaA__AFM71959

SEQ ID NO: 86591 - RNA, 1410 nt, Artificial Sequence
  derived and/or modified CDS sequence (opt1) from neuraminidase__InfluenzaA__AFM71970
augaaccccaaccagaagaucaucaccaucggcagcgugucccugaccaucgccacgaucugcuuccucaugcagaucgccauccuggucaccaccgugacccugcacuucaagcaguacgagugcgacagcccggcgaacaaccaggugaugcccuacgagcccaucaucaucgagcgcaacaucacggagaucgucuaccucaccaacaccaccaucgagaaggagaucugccccaagcugguggaguaccggaacugguccaagccgcagugcaagaucacgggguucgcccccuucagcaaggacaacuccauccgccugagcgccggcggggacaucugggugacccgggagcccuacgucuccugcgaccccggcaagugcuaccaguucgcccucgggcagggcaccacccuggagaacaagcacagcaacgacacgauccacgaccgcaccccgcaccggacccugcucaugaacgagcugggcgugcccuuccaccuggggacccgccaggugugcaucgccugguccagcuccagcugccacgacggcaaggcguggcuccacgucugcgugacgggguacgacaagaacgccaccgccuccuucaucuacgacggccggcugguggacagcaucggguccuggagccagaacauccugcgcacccaggaguccgagugcgucugcaucaacgggaccugcacgguggugaugaccgacggcagcgccuccggccgggcggacaccaagauccucuucaucgaggagggcaagaucguccacaucagcccccugagcggguccgcccagcacguggaggagugcagcugcuacccccgcuacccgggcgugcggugcaucugccgcgacaacuggaagggcuccaaccggcccgucguggacaucaacgugaaggacuacagcaucgacuccagcuacgucugcuccgggcuggugggcgacacgccccgcaagaacgaccggagcuccagcuccuacugccgcaaccccaacaacgagaaggggaaccacggcgugaaggggugggccuucgacgacggcaacgacgucuggaugggccggaccaucagcgaggacucccgcagcggguacgagaccuucaaggugaucggcgggugguccaccccgaacagcaagcuccagaucaaccggcaggucaucguggacuccgccaaccgcagcggcuacuccgggaucuucagcguggagggcaagagcugcaucaaccggugcuucuacgucgagcugauccgcggccgcgagcaggagacccgggugugguggacguccaacagcaucguggucuucugcgggaccuccggcaccuacgggaccggcagcuggcccgacggggccgacaucaaccugaugcccaucuga

SEQ ID NO: 86592 - RNA, 1410 nt, Artificial Sequence; identical to SEQ ID NO: 86012
  derived and/or modified CDS sequence (opt1) from neuraminidase__InfluenzaA__AFM71981

SEQ ID NO: 86593 - RNA, 1410 nt, Artificial Sequence
  derived and/or modified CDS sequence (opt1) from neuraminidase__InfluenzaA__AFM71992
augaaccccaaccagaagaucaucaccaucggcagcgugucccugaccaucagcacgaucugcuucuucaugcagaucgccauccucaucaccaccgucacccugcacuucaagcaguacgaguucaacuccccgcccaacaaccaggugaugcugugcgagcccacgaucaucgagcgcaacaucaccgagaucguguaccucaccaacaccacgaucgagaaggagaucugccccaagcuggccgaguaccggaacuggagcaagccgcagugcgacaucaccggguucgcgcccuucuccaaggacaacagcauccgccuguccgccggcggggacaucugggucacccgggagcccuacgugagcugcgaccccgacaagugcuaccaguucgcccucggccaggggaccacgcugaacaacgugcacuccaacaacaccguccgcgaccggaccccguaccgcacccugcucaugaacgagcugggcgugcccuuccaccugggcacgaagcaggucugcaucgccuggagcuccagcuccugccacgacgggaaggccuggcuccacgugugcaucaccggcgacgacaagaacgcgaccgccagcuucaucuacaacgggcggcugguggacuccguggucagcuggucccaggagauccugcgcacccaggagagcgagugcgugugcaucaacggcacgugcaccguggucaugaccgacggguccgccagcggcaaggccgacaccaagauccucuucaucgaggagggcaagaucgugcacacgagcacccuguccgggagcgcgcagcacguggaggagugcuccugcuacccccgguaccccggcguccgcugcgugugccgggacaacuggaaggggagcaaccgcccgaucguggacaucaacaucaaggaccacuccaucgucagcuccuacgugugcagcggccuggugggcgacacgccccggaagaacgacuccagcuccagcucccacugccucgaccccaacaacgaggagggcgggcacggggucaagggcugggccuucgacgacgggaacgacguguggaugggccgcaccaucaacgagaccagccggcugggcuacgagaccuucaaggucaucgaggggugguccaaccccaagagcaagcugcagaugaaccgccaggugaucguggaccggggcaaccgcuccggguacagcggcaucuucuccgucgagggcaagagcugcaucaaccggugcuucuacguggagcucauccgcgggcggaaggaggagaccgaggugcuguggaccagcaacuccaucgucguguucugcggcacgagcgggaccuacggcaccggguccuggccggacggcgccgaccugaaccucaugcccaucuga

SEQ ID NO: 86594 - RNA, 1410 nt, Artificial Sequence; identical to SEQ ID NO: 86568
  derived and/or modified CDS sequence (opt1) from neuraminidase__InfluenzaA__AFM72013

SEQ ID NO: 86595 - RNA, 1365 nt, Artificial Sequence; identical to SEQ ID NO: 79743
  derived and/or modified CDS sequence (opt1) from neuraminidase__InfluenzaA__AFM72024

SEQ ID NO: 86596 - RNA, 1410 nt, Artificial Sequence; identical to SEQ ID NO: 83019
  derived and/or modified CDS sequence (opt1) from neuraminidase__InfluenzaA__AFM72035

SEQ ID NO: 86597 - RNA, 1410 nt, Artificial Sequence; identical to SEQ ID NO: 83019
  derived and/or modified CDS sequence (opt1) from neuraminidase__InfluenzaA__AFM72046

SEQ ID NO: 86598 - RNA, 1413 nt, Artificial Sequence
  derived and/or modified CDS sequence (opt1) from neuraminidase__InfluenzaA__AFM72057
augaaccccaaccagaagaucaucaccaucggcagcaucugcaccacgaucgggaucaucucccugauccuccagaucggcaacaucaucagcaucugggugucccacagcauccagaccgggucccagaaccacaccggcaucugcaaccagcgcaucaucaccuacgagaacagcacgugggucaaccagaccuacgugaacaucaacaacaccaacguggucgccgggaaggacaccacguccgugacccuggccggcaacagcucccugugcccgauccggggcugggcgaucuacagcaaggacaacuccauccgcaucgggagcaagggcgacguguucgucauccgggagcccuucaucuccugcagccaccucgagugccgcaccuucuuccugacccagggggcccugcucaacgacaagcacuccaacggcacggugaaggaccggagccccuaccgcgcccugauguccugccccaucggggaggccccgagccccuacaacucccgguucgagagcguggccuggagcgcguccgccugccacgacggcaugggcuggcugaccaucgggaucagcggccccgacgacggggccgucgccgugcucaaguacaacggcaucaucaccgagaccaucaaguccuggcgcaagcggauccugcgcacgcaggagagcgagugcgugugcgucaacggcuccugcuucaccaucaugaccgacgggcccagcaacggcccggcguccuaccggaucuucaagaucgagaaggggaagaucaccaagagcaucgagcuggacgcccccaacucccacuacgaggagugcagcugcuaccccgacacgggcaccgugaugugcgugugccgcgacaacuggcacggguccaaccggcccugggucagcuucaaccagaaccucgacuaccagaucggcuacaucugcuccggcguguucggggacaacccgcgccccaaggacggcaaggggagcugcgaccccgugaccgucgacggcgccgacggggugaagggcuucuccuaccgguacggcaacgggguguggaucggccgcaccaagagcaacuccagccggaagggguucgagaugaucugggaccccaacggcuggacggacaccgacuccaacuuccuggucaagcaggacgugguggccaugaccgacuggagcggguacagcggcuccuucguccagcacccggagcugaccggccucgacugcaugcgccccugcuucuggguggagcugauccgggggcgcccccgggagaagacgaccaucuggaccagcggcuccagcaucuccuucugcggggucaacagcgacaccgccaacugguccuggcccgacggcgcggagcugccguucacgaucgacaaguga

SEQ ID NO: 86599 - RNA, 1413 nt, Artificial Sequence; identical to SEQ ID NO: 79083
  derived and/or modified CDS sequence (opt1) from neuraminidase__InfluenzaA__AFM72068

SEQ ID NO: 86600 - RNA, 1410 nt, Artificial Sequence
  derived and/or modified CDS sequence (opt1) from neuraminidase__InfluenzaA__AFM72090
augaaccccaaccagaagaucaucaccaucggcagcgugucccugaccaucgccacgaucugcuuccucaugcagaucgccauccuggucaccaccgugacccugcacuucaagcaguacgagugcagcuccccgcccaacaaccaggugaugcccugcgagcccaucaucaucgagcgcaacaucacggagaucgucuaccucaccaacaccaccaucgagaaggagaucugcccgaagcugguggaguaccggaacuggagcaagccccagugcaagaucacgggguucgcgcccuucuccaaggacaacagcauccgccuguccgccggcggggacaucugggugacccgggagcccuacgucagcugcgacccgggcaagugcuaccaguucgcccucgggcagggcaccacccugaacaacaagcacuccaacgacacggugcacgaccgcacccccuaccggacccugcucaugaacgagcugggcgugcccuuccaccuggggaccaagcaggucugcaucgccuggagcuccagcuccugccacgacggcaaggccuggcuccacgugugcgugacggggcacgacaagaacgcgaccgccagcuucaucuacgacggccgccuggucgacuccaucgggagcugguccaagaacauccugcggacccaggagagcgagugcgugugcaucaacgggaccugcacgguggucaugaccgacggcuccgccagcgagcgcgccgacaccaagauccucuucaucgaggagggcaagaucgugcacaucagcccccuguccggcagcgcgcagcacguggaggagugcuccugcuacccgcgguaccccgggguccgcugcgugugccgggacaacuggaagggcagcaaccgccccaucguggacaucaacgucaaggacuacuccaucgugagcuccuacgugugcagcggccuggucggggacacgccccggaagaacgaccgcuccagcuccagcuacugccggaacccgaacaacgagaagggcaaccacggggugaagggcugggccuucgacgacgggaacgacgucuggaugggccgcaccaucggcgaggagcuccggcugggguacgagaccuucaaggugaucggcgggugguccacccccaacagcaagcugcagaucaaccgccaggugaucgucgacuccaagaaccggagcggcuacuccgggaucuucagcguggagggcaaguccugcaucaaccgcugcuucuacguggagcucauccggggccgcgagcaggagacccgcgucugguggacgagcaacagcaucgugguguucugcgggaccuccggcaccuacgggaccggcagcuggcccgacggggccgacaucaaccugaugcccaucuga

SEQ ID NO: 86601 - RNA, 1410 nt, Artificial Sequence
  derived and/or modified CDS sequence (opt1) from neuraminidase__InfluenzaA__AFM72101
augaaccccaaccagaagaucaucaccaucggcagcgugucccugaccaucgccacgaucugcuuccucaugcagaucgccauccuggucaccaccgugacccugcacuucaagcaguacgagugcagcuccccgcccaacaaccaggcgaugcccugcgagcccacgaucaucgagcgcaacaucaccgagaucguguaccucaccaacaccacgaucgagaaggagaucugcccgaagcuggucgaguaccggaacuggagcaagccccagugcaagaucaccggguucgcccccuucuccaaggacaacagcauccgccuguccgccggcggggacaucugggugacccgggagcccuacgugagcugcgacccgggcaagugcuaccaguucgcccucgggcagggcaccacgcugaacaaccgccacuccaacgacaccguccacgaccggacccccuaccgcacccugcucaugaacgagcugggcgugcccuuccaccuggggacgaagcaggucugcaucgccuggagcuccagcuccugccacgacggcaaggcguggcuccacgugugcgugaccgggcacgacaagaacgccaccgccagcuucaucuacgacggccggcugguggacuccaucgggagcugguccaagaacauccugcgcacccaggagagcgagugcgucugcaucaacggcacgugcaccguggugaugaccgacggcuccgccagcgagcgggcggacaccaagauccucuucaucgaggaggggaagaucguccacaucagcccccuguccggcagcgcccagcacguggaggagugcuccugcuacccgcgcuaccccggggugcggugcgucugccgcgacaacuggaagggcagcaaccggcccaucguggacaucaacgugaaggacuacuccaucgucagcuccuacgugugcagcggccuggugggggacacgccccgcaagaacgaccgguccagcuccagcuacugccgcaacccgaacaacgagaagggcucccacggggucaagggcugggccuucgacgacgggaacgacguguggaugggccggaccaucggcgaggagcuccgcagcggguacgagaccuucaaggucaucggcgggugguccacccccaacagcaagcugcagaucaaccgccaggugaucguggacuccggcaaccggagcggguacuccggcaucuucagcgucgagggcaagagcugcaucaaccggugcuucuacguggagcugauccgcgggcgcgagcaggagacgcgggugugguggaccuccaacagcaucgucguguucugcggcaccuccgggaccuacggcacggggagcuggcccgacggcgccgacaucaaccucaugcccaucuga

SEQ ID NO: 86602 - RNA, 1410 nt, Artificial Sequence; identical to SEQ ID NO: 78837
  derived and/or modified CDS sequence (opt1) from neuraminidase__InfluenzaA__AFM72112

SEQ ID NO: 86603 - RNA, 1410 nt, Artificial Sequence
  derived and/or modified CDS sequence (opt1) from neuraminidase__InfluenzaA__AFM72123
augaaccccaaccagaagaucaucaccaucggcagcgugucccugaccaucgccacgaucugcuuccucaugcagaucgccauccuggucaccaccgugacccugcacuucaagcaguacgagugcagcuccccgcccaacaaccaggugaugcccugcgagcccacgaucaucgagcgcaacaucaccgagaucgucuaccucaccaacaccacgaucgagaaggagaucugcccgaagcugguggaguaccggaacuggagcaagccccagugcaagaucaccggguucgcgcccuucuccaaggacaacagcauccgccuguccgccggcggggacaucugggugacccgggagcccuacgucagcugcgacccgggcaagugcuaccaguucgcccucgggcagggcaccacgcugaacaaccgccacuccaacgacaccgugcacgaccggacccccuaccgcacccugcucaugaacgagcugggcgugcccuuccaccuggggacgaagcaggucugcaucgccuggagcuccagcuccugccacgacggcaaggccuggcuccacgugugcgugaccgggcacgacaagaacgcgaccgccagcuucaucuacgacggccggcuggucgacuccaucgggagcugguccaagaacauccugcgcacccaggagagcgagugcgugugcaucaacggcacgugcaccguggucaugaccgacggcuccgccagcgagcgggccgacaccaagauccucuucaucgaggaggggaagaucgugcacaucagcccccuguccggcagcgcgcagcacguggaggagugcuccugcuacccgcgcuaccccgggguccggugcgugugccgcgacaacuggaagggcagcaaccggcccaucguggacaucaacgucaaggacuacuccaucgugagcuccuacgugugcagcggccuggucggggacacgccccgcaagaacgaccgguccagcuccagcuacugccgcaacccgaacaacgagaagggcucccacggggugaagggcugggccuucgacgacgggaacgacgucuggaugggccggaccaucggcgaggagcuccgcagcggguacgagaccuucaaggugaucggcgggugguccacccccaacagcaagcugcagacgaaccgccaggugaucgucgacuccggcaaccggagcggguacuccggcaucuucagcguggagggcaagagcugcaucaaccggugcuucuacguggagcugauccgcgggcgcgagcaggagacccgggucugguggaccuccaacagcaucgugguguucugcggcaccuccgggacguacggcaccgggagcuggcccgacggcgccgacaucaaccucaugcccaucuga

SEQ ID NO: 86604 - RNA, 1410 nt, Artificial Sequence; identical to SEQ ID NO: 86159
  derived and/or modified CDS sequence (opt1) from neuraminidase__InfluenzaA__AFM72134

SEQ ID NO: 86605 - RNA, 1410 nt, Artificial Sequence
  derived and/or modified CDS sequence (opt1) from neuraminidase__InfluenzaA__AFM72145
augaaccccaaccagaagaucaucaccaucggcagcgugucccugaccaucgccacgaucugcuuccucaugcagaucgccauccuggcgaucaccgucacccugcacuucaagcaguacgagugcaacagcccgcccaacaaccaggugaugcucugcgagcccaccaucaucgagcgcaacacgaccgagaucguguaccugaccaacaccacgaucgagaaggaggucugccccaagcuggccgaguaccggaacugguccaagccgcagugcaagaucaccggguucgcccccuucagcaaggacaacuccauccgccucagcgccggcggggacaucugggugacccgggagcccuacguguccugcgaccccggcaagugcuaccaguucgcccuggggcagggcaccacgcugaacaaccgccacagcaacgacaccguccacgaccggaccccguaccgcacccuccugaugaacgagcugggcgugcccuuccaccucgggacgaagcaggucugcaucgcgugguccagcuccagcugccacgacggcaaggccuggcugcacgugugcgugaccgggcacgacgagaacgccaccgccuccuucaucuacgacggccggcugguggacagcaucggguccuggagcaagaacauccuccgcacccaggaguccgagugcgucugcaucaacggcacgugcaccguggugaugaccgacggcagcgcguccgagcgggccgacaccaagauccuguucaucgaggaggggaagaucguccacaucagcccccugagcggcuccgcccagcacguggaggagugcagcugcuacccccgcuacccgggggugcggugcgucugccgcgacaacuggaagggcuccaaccggcccaucguggacaucaacgugaaggacuacagcaucgucuccagcuacgugugcuccggccucgugggggacacgccccgcaagaacgacagcuccagcuccagcuacugccggaaccccaacaacgagaagggcucccacggggucaagggcugggccuucgacgacgggaacgacguguggaugggccgcaccaucagcgaggagcugcgguccggcuacgagaccuucaaggucaucgggggcuggagcaagccgaacuccaagcugcagaucaaccgccaggugaucguggaccgggggaaccgcagcggcuacuccgggaucuucagcgucgagggcaagagcugcaucaaccggugcuucuacguggagcucauccgcggccgcaagcaggagaccgaggugugguggacguccaacagcaucgucguguucugcgggaccuccggcaccuacgggaccggcagcuggcccgacggggccgacaucaaccugaugcccaucuga

SEQ ID NO: 86606 - RNA, 1410 nt, Artificial Sequence; identical to SEQ ID NO: 79209
  derived and/or modified CDS sequence (opt1) from neuraminidase__InfluenzaA__AFM72156

SEQ ID NO: 86607 - RNA, 1410 nt, Artificial Sequence
  derived and/or modified CDS sequence (opt1) from neuraminidase__InfluenzaA__AFM72167
augaaccccaaccagaagaucaucaccaucggcagcaucucccugaccaucgccacgaucugcuuccucaugcagaucgccauccuggugaccaccgucacccugcacuucaagcaguacgagugcaacagcccgcccaacaaccaggugaugcucugcgagcccacgaucaucgagcgcaacaucaccgagaucguguaccugaccaacaccacgaucgagaaggagaucugccccgagcuggcggaguaccggaacugguccaagccgcagugcaagaucaccggguucgcccccuucagcaaggacaacuccauccgccucagcgccggcggggacaucugggucacccgggagcccuacguguccugcgaccccggcaagugcuaccaguucgcccuggggcagggcaccacgcugaacaaccgccacagcaacgacaccgugcacgaccggaccccguaccgcacccuccugaugaacgagcugggcguccccuuccaccucgggacgaagcaggucugcaucgccugguccagcuccagcugccacgacggcaaggcguggcugcacgugugcgugaccgggcacgacgagaacgccaccgccuccuucaucuacgacggccggcugguggacagcaucggguccuggagcaagaacauccuccgcacccaggaguccgagugcgugugcaucaacggcacgugcaccgucgugaugaccgacggcagcgccuccgagcgggcggacaccaagauccuguucaucgaggaggggaagaucgugcacaucagcccccugagcggcuccgcccagcacgucgaggagugcagcugcuacccccgcuacccgggggugcggugcgugugccgcgacaacuggaagggcuccaaccggcccaucgucgacaucaacgugaaggacuacagcaucguguccagcuacgucugcuccggccucgugggggacacgccccgcaagaacgacagcuccagcuccagcuacugcuggaaccccaacaacgagaagggcgggcacggcgugaaggggugggccuucgacgacggcaacgacgucuggaugggccggaccaucuccgaggagcugcgcagcggguacgagaccuucaaggugaucggcgggugguccaagccgaacagcaagcugcagaucaaccggcaggucaucguggaccgcggcaaccgguccggguacagcggcaucuucuccguggagggcaagagcugcaucaaccgcugcuucuacgucgagcucauccgggggcgcaagcaggagaccgaggugugguggacgagcaacuccaucguggucuucugcggcaccagcgggaccuacggcaccggguccuggcccgacggcgccgacaucaaccugaugcccaucuga

SEQ ID NO: 86608 - RNA, 1410 nt, Artificial Sequence
  derived and/or modified CDS sequence (opt1) from neuraminidase__InfluenzaA__AFM72178
augaaccccaaccagaagaucaucaccaucggcagcgugucccugaccaucgccacgaucugcuuccucaugcagaucgccauccuggucaccaccgugacccugcacuucaagcaguacgagugcaacagcccgcccaacaaccaggugaugcucugcgagcccacgaucaucgagcgcaacaucaccgagaucgucuaccugaccaacaccacgaucgagaaggagaucugccccgagcuggcggaguaccggaacugguccaagccgcagugcaagaucaccggguucgcccccuucagcaaggacaacuccauccgccucagcgccggcggggacaucugggugacccgggagcccuacguguccugcgaccccggcaagugcuaccaguucgcccuggggcagggcaccacgcugaacaaccgccacagcaacgacaccguccacgaccggaccccguaccgcacccuccugaugaacgagcugggcgugcccuuccaccucgggacgaagcaggucugcaucgccugguccagcuccagcugccacgacggcaaggcguggcugcacgugugcgugaccgggcacgacgagaacgccaccgccuccuucaucuacgacggccggcugguggacagcaucggguccuggagcaagaacauccuccgcacccaggaguccgagugcgucugcaucaacggcacgugcaccguggugaugaccgacggcagcgccuccgagcgggcggacaccaagauccuguucaucgaggaggggaagaucguccacaucagcccccugagcggcuccgcccagcacguggaggagugcagcugcuacccccgcuacccgggggugcggugcgucugccgcgacaacuggaagggcuccaaccggcccaucguggacaucaacgugaaggacuacagcaucgucuccagcuacgugugcuccggccucgugggggacacgccccgcaagaacgacagcuccagcuccagcuacugcuggaaccccaacaacgagaagggcgggcacggcgucaaggggugggccuucgacgacggcaacgacguguggaugggccggaccaucuccgaggagcugcgcagcggguacgagaccuucaaggucaucggcgggugguccaagccgaacagcaagcugcagaucaaccgccaggugaucguggaccggggcaaccgguccggguacagcggcaucuucuccgucgagggcaagagcugcaucaaccgcugcuucuacguggagcucauccgggggcgcaagcaggagaccgaggugugguggacgagcaacuccaucgucguguucugcggcaccagcgggaccuacggcaccggguccuggcccgacggcgccgacaucaaccugaugcccaucuga

SEQ ID NO: 86609 - RNA, 1410 nt, Artificial Sequence
  derived and/or modified CDS sequence (opt1) from neuraminidase__InfluenzaA__AFM72189
augaaccccaaccagaagaucaucaccaucggcagcgugucccugaccaucgccacgaucugcuuccucaugcagaucgccauccuggucaccaccgugacccugcacuucaagcaguacgagugcaacagcccgcccaacaaccaggugaugcucugcgagcccacgaucaucgagcgcaacaucaccgagaucgucuaccugaccaacaccacgaucgagaaggagaucugccccaagcuggcggaguaccggaacugguccaagccgcagugcaagaucaccggguucgcccccuucagcaaggacaacuccauccgccucagcgccggcggggacaucugggugacccgggagcccuacguguccugcgaccccgacaagugcuaccaguucgcccugggccaggggaccacgcugaacaaccgccacagcaacgacaccguccacgaccggaccccguaccgcacccuccugaugaacgagcugggcgugcccuuccaccucggcacgaagcaggucugcaucgccugguccagcuccagcugccacgacgggaaggcguggcugcacgugugcgugaccggccacgacgagaacgccaccgccuccuucaucuacgacgggcggcugguggacagcaucggcuccuggagcaagaagauccuccgcacccaggaguccgagugcgucugcaucaacgggacgugcaccguggugaugaccgacggcagcgccuccggccgggcggacaccaagauccuguucaucgaggaggggaagaucguccacaucagcccccugcucggcagcgcccagcacguggaggagugcuccugcuacccccgcuacccgggggugcggugcgucugccgcgacaacuggaagggcagcaaccggcccaucguggacaucaacgugaaggacuacuccaucgucagcuccuacgugugcagcggccuggugggggacacgccccgcaagaacgacuccagcuccagcucccacugccugaaccccaacaacgaggagggcgggcacggcgucaaggggugggccuucgacgacggcgacgacguguggaugggccggaccaucagcgagaagcuccgcuccggguacgagaccuucaaggucaucgagggcuggagcaagccgaacuccaagcugcagaucaaccgccaggugaucguggaccgggggaaccggagcggcuacuccgggaucuucagcgucgagggcaaguccugcaucaaccgcugcuucuacguggagcugauccggggccgcaagcaggagaccgaggugugguggacgagcaacagcaucgucguguucugcgggaccuccggcaccuacgggaccggcagcuggcccgacggggccgacaucaaccucaugcccaucuga

SEQ ID NO: 86610 - RNA, 1410 nt, Artificial Sequence; identical to SEQ ID NO: 86609
  derived and/or modified CDS sequence (opt1) from neuraminidase__InfluenzaA__AFM72200

SEQ ID NO: 86611 - RNA, 1410 nt, Artificial Sequence; identical to SEQ ID NO: 79773
  derived and/or modified CDS sequence (opt1) from neuraminidase__InfluenzaA__AFM72211

SEQ ID NO: 86612 - RNA, 1410 nt, Artificial Sequence; identical to SEQ ID NO: 79773
  derived and/or modified CDS sequence (opt1) from neuraminidase__InfluenzaA__AFM72222

SEQ ID NO: 86613 - RNA, 1413 nt, Artificial Sequence; identical to SEQ ID NO: 80477
  derived and/or modified CDS sequence (opt1) from neuraminidase__InfluenzaA__AFM72233

SEQ ID NO: 86614 - RNA, 1410 nt, Artificial Sequence; identical to SEQ ID NO: 78597
  derived and/or modified CDS sequence (opt1) from neuraminidase__InfluenzaA__AFM72249

SEQ ID NO: 86615 - RNA, 1410 nt, Artificial Sequence; identical to SEQ ID NO: 78085
  derived and/or modified CDS sequence (opt1) from neuraminidase__InfluenzaA__AFM72260

SEQ ID NO: 86616 - RNA, 1410 nt, Artificial Sequence; identical to SEQ ID NO: 78085
  derived and/or modified CDS sequence (opt1) from neuraminidase__InfluenzaA__AFM72271

SEQ ID NO: 86617 - RNA, 1410 nt, Artificial Sequence
  derived and/or modified CDS sequence (opt1) from neuraminidase__InfluenzaA__AFM72293
augaaccccaaccagaagaucaucaccaucggcagcgugucccugaccaucgccacgaucugcuuccucaugcagaucgccauccuggucaccaccgugacccugcacuucaagcaguacgagugcaacagcccgcccaacaaccaggugaugcucugcgagcccacgaucaucgagcgcaacaucaccgagaucgucuaccugaccaacaccacgaucgagaaggagaucugccccaagcuggcggaguaccggaacugguccaagccgcagugcaacaucaccggguucgcccccuucagcaaggacaacuccauccgccucagcgccggcggggacaucugggugacccgggagcccuacguguccugcgaccccgacaagugcuaccaguucgcccugggccaggggaccacgcugaacaacggccacagcaacuacaccguccacgaccgcaccccguaccggacccuccugaugaacgagcugggcgugcccuuccaccucgggacgaagcaggucugcaucgccugguccagcuccagcugccacgacggcaaggcguggcugcacgugugcgugaccggggacgacgagaacgccaccgccuccuucaucuacaacggccgccugguggacagcaucggguccuggagcaagaagauccuccggacccaggaguccgagugcgucugcaucaacggcacgugcaccguggugaugaccgacggcagcgccuccgggaaggcggacaccaagauccuguucaucgaggagggcaagaucguccacacgagcagccuguccgggagcgcccagcacguggaggagugcuccugcuacccccgcuaccccggcgugcggugcgucugccgcgacaacuggaagggcagcaaccggccgaucguggacaucaacgugaaggacuacuccaucgucagcuccuacgugugcagcgggcucgugggcgacacgccccgcaagaacgacuccagcuccagcucccacugccuggaccccaacaacgaggagggcgggcacggggucaagggcugggccuucgacgacggcaacgacguguggauggggcggaccaucagcgagaagcugcgcuccggcuacgagaccuucaaggucaucgagggguggagcaagcccaacuccaagcuccagaucaaccgccaggugaucguggaccggggcaaccggagcggguacuccggcaucuucagcgucgagggcaagagcugcaucaaccgcugcuucuacguggagcugauccgggggcgcaagcaggagaccgaggugcuguggaccuccaacagcaucgucguguucugcggcaccuccgggaccuacggcacggggagcuggccggacggcgccgacaucaaccucaugcccaucuga

SEQ ID NO: 86618 - RNA, 1410 nt, Artificial Sequence; identical to SEQ ID NO: 79953
  derived and/or modified CDS sequence (opt1) from neuraminidase__InfluenzaA__AFM72304

SEQ ID NO: 86619 - RNA, 1410 nt, Artificial Sequence
  derived and/or modified CDS sequence (opt1) from neuraminidase__InfluenzaA__AFM72315
augaaccccaaccagaagaucaucaccaucggcagcgugucccugaccaucagcacgaucugcuucuucaugcagaucgccauccucaucaccaccgucacccugcacuucaagcaguacgaguucaacuccccgcccaacaaccaggugaugcugugcgagcccacgaucaucgagcgcaacaucaccgagaucguguaccucaccaacaccacgaucgagaaggagaucugccccaagcuggccgaguaccggaacuggagcaagccgcagugcaacaucaccggguucgcgcccuucuccaaggacaacagcauccgccuguccgccggcggggacaucugggucacccgggagcccuacgugagcugcgaccccgacaagugcuaccaguucgcccucggccaggggaccacgcugaacaacgugcacuccaacgacaccguccacgaccgcaccccguaccggacccugcucaugaacgagcugggcgugcccuuccaccugggcacgaagcaggucugcaucgccuggagcuccagcuccugccacgacgggaaggccuggcuccacgugugcgugaccggcgacgacgagaacgcgaccgccagcuucaucuacaacgggcgccugguggacuccaucgucagcugguccaagaagauccugcggacccaggagagcgagugcgugugcaucaacggcacgugcaccguggucaugaccgacggguccgccagcggcaaggccgacaccaagauccucuucaucgaggagggcaagaucgugcacacgagcacccuguccgggagcgcgcagcacguggaggagugcuccugcuacccccgcuaccccggcguccggugcgugugccgcgacaacuggaaggggagcaaccggccgaucguggacaucaacaucaaggacuacuccaucgucagcuccuacgugugcagcggccuggugggcgacacgccccgcaagaacgacuccagcuccagcucccacugccucgaccccaacaacgagaagggcgggcacggggucaagggcugggccuucgacgacgggaacgacguguggaugggccggaccaucagcgagaagcugcgcuccggcuacgagaccuucaaggucaucgagggguggagcaaccccaacuccaagcugcagaucaaccgccaggugaucguggaccgggacaaccggagcggcuacuccgggaucuucagcgucgagggcaagagcugcaucaaccgcugcuucuacguggagcucauccgggggcgcaaccaggagaccgaggugcuguggaccuccaacagcaucgucguguucugcggcaccuccggcacguacgggaccggcagcuggccggacggggccgacaucaaccugaugcccaucuga

SEQ ID NO: 86620 - RNA, 1410 nt, Artificial Sequence
  derived and/or modified CDS sequence (opt1) from neuraminidase__InfluenzaA__AFM72326
augaaccccaaccagaagaucaucaccaucggcagcgugucccugaccaucagcacgaucugcuucuucaugcagaucgccauccucaucaccaccgucacccugcacuucaagcaguacgaguucaacuccccgcccaacaaccaggugaugcugugcgagcccacgaucaucgagcgcaacaucaccgagaucguguaccucaccaacaccacgaucgagaaggagaucugccccaagcuggccgaguaccggaacuggagcaagccgcagugcaacaucaccggguucgcgcccuucuccaaggacaacagcauccgccuguccgccggcggggacaucugggucacccgggagcccuacgugagcugcgaccccgacaagugcuaccaguucgcccucggccaggggaccacgcugaacaacgugcacuccaacgacaccguccacgaccgcaccccguaccggacccugcucaugaacgagcugggcgugcccuuccaccugggcacgaagcaggucugcaucgccuggagcuccagcuccugccacgacgggaaggccuggcuccacgugugcgugaccggcgacgacgagaacgcgaccgccagcuucaucuacaacgggcgccugguggacuccaucgucagcugguccaagaagauccugcggacccaggagagcgagugcgugugcaucaacggcacgugcaccguggucaugaccgacggguccgccagcggcaaggccgacaccaagauccucuucaucgaggagggcaagaucgugcacacgagcacccuguccgggagcgcgcagcacguggaggagugcuccugcuacccccgcuaccccggcguccggugcgugugccgcgacaacuggaaggggagcaaccggccgaucguggacaucaacaucaaggacuacuccaucgucagcuccuacgugugcagcggccuggugggcgacacgccccgcaagaacgacuccagcuccagcucccacugccucgaccccaacaacgaggagggcgggcacggggucaagggcugggccuucgacgacgggaacgacguguggaugggccggaccaucagcgagaagcugcgcuccggcuacgagaccuucaaggucaucgagggguggagcaaccccaacuccaaguuccagaucaaccgccaggugaucguggaccgggacaaccggagcggcuacuccgggaucuucagcgucgagggcaagagcugcaucaaccgcugcuucuacguggagcugauccgggggcgcaaccaggagaccgaggugcucuggaccuccaacagcaucgucguguucugcggcaccuccggcacguacgggaccggcagcuggccggacggggccgacaucaaccugaugcccaucuga

SEQ ID NO: 86621 - RNA, 1410 nt, Artificial Sequence
  derived and/or modified CDS sequence (opt1) from neuraminidase__InfluenzaA__AFM72337
augaaccccaaccagaagaucaucaccaucggcagcgugucccugaccaucagcacgaucugcuucuucaugcagaucgccauccucaucaccaccgucacccugcacuucaagcaguacgaguucaacuccccgcccaacaaccaggugaugcugugcgagcccacgaucaucgagcgcaacaucaccgagaucguguaccucaccaacaccacgaucgagaaggagaucugccccaagcuggccgaguaccggaacuggagcaagccgcagugcgacaucaccggguucgcgcccuucuccaaggacaacagcauccgccuguccgccggcggggacaucugggucacccgggagcccuacgugagcugcgaccccgacaagugcuaccaguucgcccucggccaggggaccacgcugaacaacgugcacuccaacgacaccguccgcgaccggaccccguaccgcacccugcucaugaacgagcugggcgugcccuuccaccugggcacgaagcaggucugcaucgccuggagcuccagcuccugccacgacgggaaggccuggcuccacgugugcaucaccggcgacgacaagaacgcgaccgccagcuucaucuacaacgggcggcugguggacuccguggucagcugguccaaggagauccugcgcacccaggagagcgagugcgugugcaucaacggcacgugcaccguggucaugaccgacggguccgccagcggcaaggccgacaccaagauccucuucaucgaggagggcaagaucgugcacacgagcacccuguccgggagcgcgcagcacguggaggagugcuccugcuacccccgguaccccggcguccgcugcgugugccgggacaacuggaaggggagcaaccgcccgaucguggacaucaacaucaaggaccacuccaucgucagcuccuacgugugcagcggccuggugggcgacacgccccggaagaacgacuccagcuccagcucccacugccucgaccccaacaacgaggagggcgggcacggggucaagggcugggccuucgacgacgggaacgacguguggaugggccgcaccaucaacgagaccagccggcugggcuacgagaccuucaaggucaucgaggggugguccaaccccaagagcaagcugcagaucaaccgccaggugaucguggaccggggcaaccgcuccggguacagcggcaucuucuccgucgagggcaagagcugcaucaaccggugcuucuacguggagcucauccgcgggcggaaggaggagaccgaggugcuguggaccagcaacuccaucgucguguucugcggcacgagcgggaccuacggcaccggguccuggccggacggcgccgaccugaaccucaugcccaucuga

SEQ ID NO: 86622 - RNA, 1410 nt, Artificial Sequence
  derived and/or modified CDS sequence (opt1) from neuraminidase__InfluenzaA__AFM72348
augaaccccaaccagaagaucaucaccaucggcagcgugucccugaccaucgccacgaucugcuuccucaugcagaucgccauccuggucaccaccgugacccugcacuucaagcagcacgagugcaacagcccgcccaacaaccaggugaugcucugcgagcccacgaucaucgagcgcaacaucaccgagaucgucuaccugaccaacaccacgaucgagaaggagaucugccccaagcuggcggaguaccggaacugguccaagccgcagugcaacaucaccggguucgcccccuucagcaaggacaacuccauccgccucagcgccggcggggacaucugggugacccgggagcccuacguguccugcgaccccgacaagugcuaccaguucgcccugggccaggggaccacgcugaacaacggccacagcaacgacaccguccacgaccgcaccccguaccggacccuccugaugaacgagcugggcauccccuuccaccucgggacgcgccaggugugcaucgccugguccagcuccagcugccacgacggcaaggcguggcugcacgugugcgucaccggggacgacaagaacgccaccgccuccuucaucuacaacggccggcugguggacagcaucggguccuggagcaagaagauccuccgcacccaggaguccgagugcgugugcaucaacggcacgugcaccgucgugaugaccgacggcagcgccuccgggaaggcggacaccaagauccuguucaucgaggagggcaagaucgugcacaucagcacgcugagcggguccgcccagcacgucgaggagugcagcugcuacccccgguaccccggcgugcgcugcgugugccgggacaacuggaagggcuccaaccgcccgaucgucgacaucaacgugaaggacuacagcaucguguccagcuacgucugcuccgggcucgugggcgacacgccccggaagaacgacagcuccagcuccagccacugccuggaccccaacaacgaggagggcgggcacggggugaagggcugggccuucgacgacggcaacgacgucuggauggggcgcaccaucuccgagaagcugcggagcggcuacgagaccuucaaggugaucgaggggugguccaagcccaacagcaagcuccagaucaaccgccaggucaucguggagcggggcaaccgcuccggguacagcggcaucuucuccguggagggcaagagcugcaucaaccggugcuucuacgucgagcugauccgcgggcggaaggaggagaccgaggugugguggaccagcaacuccaucguggucuucugcggcaccagcgggaccuacggcacgggguccuggccggacggcgccgacaucaaccugaugcccaucuga

SEQ ID NO: 86623 - RNA, 1410 nt, Artificial Sequence
  derived and/or modified CDS sequence (opt1) from neuraminidase__InfluenzaA__AFM72359
augaaccccaaccagaagaucaucaccaucggcagcgugucccugaccaucagcacgaucugcuucuucaugcagaucgccauccucaucaccaccgucacccugcacuucaagcaguacgaguucaacuccccgcccaacaaccaggugaugcugugcgagcccacgaucaucgagcgcaacaucaccgagaucguguaccucaccaacaccacgaucgagaaggagaucugccccaagcuggccgaguaccggaacuggagcaagccgcagugcgacaucaccggguucgcgcccuucuccaaggacaacagcauccgccuguccgccggcggggacaucugggucacccgggagcccuacgugagcugcgaccccgacaagugcuaccaguucgcccucggccaggggaccacgcugaacaacgugcacuccaacgacaccguccacgaccgcaccccguaccggacccugcucaugaacgagcugggcgugcccuuccaccugggcacgaagcaggucugcaucgccuggagcuccagcuccugccacgacgggaaggccuggcuccacgugugcgugaccggcgacgacaagaacgcgaccgccagcuucaucuacaacgggcgccugguggacuccaucgucagcugguccaagaagauccugcggacccaggagagcgagugcgugugcaucaacggcacgugcaccguggucaugaccgacggguccgccagcggcaaggccgacaccaagauccucuucaucgaggagggcaagaucgugcacacgagcacccuguccgggagcgcgcagcacguggaggagugcuccugcuacccccgcuaccccggcguccggugcgugugccgcgacaacuggaaggggagcaaccggccgaucguggacaucaacaucaaggacuacuccaucgucagcuccuacgugugcagcggccuggugggcgacacgccccgcaagaacgacuccagcuccagcucccacugccucgaccccaacaacgaggagggcgggcacggggucaagggcugggccuucgacgacgggaacgacguguggaugggccggaccaucagcgagaagcugcgcuccggcuacgagaccuucaaggucaucgagggguggagcaaccccaacuccaagcugcagaucaaccgccaggugaucguggaccggggcaaccggagcggguacuccggcaucuucagcgucgagggcaagagcugcaucaaccgcugcuucuacguggagcucauccgggggcgcaaggaggagaccaaggugcuguggaccuccaacagcaucgucguguucugcggcaccuccgggacguacggcaccgggagcuggccggacggcgccgacaucaaccugaugcccaucuga

SEQ ID NO: 86624 - RNA, 1410 nt, Artificial Sequence; identical to SEQ ID NO: 86623
  derived and/or modified CDS sequence (opt1) from neuraminidase__InfluenzaA__AFM72370

SEQ ID NO: 86625 - RNA, 1410 nt, Artificial Sequence; identical to SEQ ID NO: 83542
  derived and/or modified CDS sequence (opt1) from neuraminidase__InfluenzaA__AFM72381

SEQ ID NO: 86626 - RNA, 1410 nt, Artificial Sequence; identical to SEQ ID NO: 83542
  derived and/or modified CDS sequence (opt1) from neuraminidase__InfluenzaA__AFM72392

SEQ ID NO: 86627 - RNA, 1410 nt, Artificial Sequence; identical to SEQ ID NO: 80426
  derived and/or modified CDS sequence (opt1) from neuraminidase__InfluenzaA__AFM72403

SEQ ID NO: 86628 - RNA, 1410 nt, Artificial Sequence; identical to SEQ ID NO: 80426
  derived and/or modified CDS sequence (opt1) from neuraminidase__InfluenzaA__AFM72414

SEQ ID NO: 86629 - RNA, 1410 nt, Artificial Sequence; identical to SEQ ID NO: 80090
  derived and/or modified CDS sequence (opt1) from neuraminidase__InfluenzaA__AFM72425

SEQ ID NO: 86630 - RNA, 1410 nt, Artificial Sequence; identical to SEQ ID NO: 80090
  derived and/or modified CDS sequence (opt1) from neuraminidase__InfluenzaA__AFM72436

SEQ ID NO: 86631 - RNA, 1410 nt, Artificial Sequence; identical to SEQ ID NO: 80090
  derived and/or modified CDS sequence (opt1) from neuraminidase__InfluenzaA__AFM72447

SEQ ID NO: 86632 - RNA, 1410 nt, Artificial Sequence; identical to SEQ ID NO: 80090
  derived and/or modified CDS sequence (opt1) from neuraminidase__InfluenzaA__AFM72458

SEQ ID NO: 86633 - RNA, 1410 nt, Artificial Sequence; identical to SEQ ID NO: 80090
  derived and/or modified CDS sequence (opt1) from neuraminidase__InfluenzaA__AFM72469

SEQ ID NO: 86634 - RNA, 1410 nt, Artificial Sequence
  derived and/or modified CDS sequence (opt1) from neuraminidase__InfluenzaA__AFM72491
augaaccccaaccagaagaucaucaccaucggcagcgugucccugaccaucagcacgaucugcuucuucaugcagaucgccauccucaucaccaccgucacccugcacuucaagcaguacgaguucaacuccccgcccaacaaccaggugaugaugugcgagcccacgaucaucgagcgcaacaucaccgagaucguguaccugaccaacaccacgaucgagaaggagaucugccccaagcucgccgaguaccggaacuggagcaagccgcagugcgacaucaccggguucgcgcccuucuccaaggacaacagcauccgccuguccgccggcggggacaucugggucacccgggagcccuacgugagcugcgaccccgacaagugcuaccaguucgcccugggccaggggaccacgcucaacaacgugcacuccaacgacaccguccgcgaccggaccccguaccgcacccugcugaugaacgagcucggcgugcccuuccaccugggcacgaagcaggucugcaucgccuggagcuccagcuccugccacgacgggaaggccuggcugcacgugugcaucaccggcgacgacaagaacgcgaccgccagcuucaucuacaacgggcggcucguggacuccaucgugagcugguccaaggagauccugcgcacccaggagagcgagugcgucugcaucaacggcacgugcaccguggugaugaccgacggguccgccagcggcaaggccgacaccaagauccuguucaucgaggagggcaagaucguccacacgagcacccucuccgggagcgcgcagcacguggaggagugcuccugcuacccccgguaccccggcgugcgcugcgucugccgggacaacuggaaggggagcaaccgcccgaucguggacaucaacaucaaggaccacuccaucgugagcuccuacgucugcagcggccuggugggcgacacgccccggaagaacgacuccagcuccagcucccacugccuggaccccaacaacgaggagggcgggcacggggugaagggcugggccuucgacgacgggaacgacgucuggaugggccgcaccaucagcgagaagucccggcucggcuacgagaccuucaaggugaucgagggguggagcaaccccaacuccaagcugcagaucaaccgccaggucaucguggaccggggcaaccgcagcggguacuccggcaucuucagcguggagggcaagagcugcaucaaccggugcuucuacgucgagcugauccgcgggcggaaggaggagaccgaggugcucuggaccuccaacagcaucguggucuucugcggcaccuccgggacguacggcaccgggagcuggccggacggcgccgacaucaaccugaugcccaucuga

SEQ ID NO: 86635 - RNA, 1410 nt, Artificial Sequence; identical to SEQ ID NO: 86634
  derived and/or modified CDS sequence (opt1) from neuraminidase__InfluenzaA__AFM72502

SEQ ID NO: 86636 - RNA, 1413 nt, Artificial Sequence; identical to SEQ ID NO: 80656
  derived and/or modified CDS sequence (opt1) from neuraminidase__InfluenzaA__AFM72513

SEQ ID NO: 86637 - RNA, 1413 nt, Artificial Sequence; identical to SEQ ID NO: 80656
  derived and/or modified CDS sequence (opt1) from neuraminidase__InfluenzaA__AFM72524

SEQ ID NO: 86638 - RNA, 1413 nt, Artificial Sequence; identical to SEQ ID NO: 80656
  derived and/or modified CDS sequence (opt1) from neuraminidase__InfluenzaA__AFM72535

SEQ ID NO: 86639 - RNA, 1413 nt, Artificial Sequence; identical to SEQ ID NO: 80656
  derived and/or modified CDS sequence (opt1) from neuraminidase__InfluenzaA__AFM72546

SEQ ID NO: 86640 - RNA, 1413 nt, Artificial Sequence; identical to SEQ ID NO: 80656
  derived and/or modified CDS sequence (opt1) from neuraminidase__InfluenzaA__AFM72557

SEQ ID NO: 86641 - RNA, 1410 nt, Artificial Sequence
  derived and/or modified CDS sequence (opt1) from neuraminidase__InfluenzaA__AFM72579
augaaccccaaccagaagaucaucaccaucggcagcgugucccugaccaucagcacgaucugcuucuucaugcagaccgccauccucaucaccaccgucacgcugcacuucaagcaguacgaguucaacuccccgcccaacaaccaggugaugcugugcgagcccaccaucaucgagcgcaacaucaccgagaucguguaccucaccaacacgaccaucgagaaggagaucugccccaagcuggccgaguaccggaacuggagcaagccgcagugcgacaucaccggguucgcgcccuucuccaaggacaacagcauccgccuguccgccggcggggacaucugggucacccgggagcccuacgugagcugcgaccccgacaagugcuaccaguucgcccucggccaggggacgacccugaacaacgugcacuccaacgacaccguccacgaccgcaccccguaccggacgcugcucaugaacgagcugggcgugcccuuccaccugggcaccaagcaggucugcaucgccuggagcuccagcuccugccacgacgggaaggccuggcuccacgugugcaucaccggcgacgacaagaacgcgaccgccagcuucaucuacaacgggcgccugguggacuccaucgugagcugguccaaggagauccugcggacgcaggagagcgagugcgucugcaucaacgggaccugcaccguggugaugaccgacggguccgccagcggcaaggccgacacgaagauccucuucaucgaggagggcaagaucguccacaccagcauccuguccgggagcgcgcagcacguggaggagugcuccugcuacccccgcuaccccggcgugcggugcgucugccgcgacaacuggaaggggagcaaccggccgaucguggacaucaacaucaaggaccacuccaucgugagcuccuacgucugcagcggccuggugggcgacacgccccgcaagaacgacuccagcuccagcucccacugccucgaccccaacaacgaggagggcggccacggggugaagggcugggccuucgacgacgggaacgacgucuggaugggccggaccaucagcgagaagucccgccugggcuacgagaccuucaaggugaucgagggguggagcaaccccaaguccaagcugcagaucaaccggcaggucaucguggaccgcggcaaccggagcggguacuccggcaucuucagcguggagggcaagagcugcaucaaccgcugcuucuacgucgagcucauccgggggcgcaaggaggagaccgaggugcuguggaccuccaacagcaucguggucuucugcggcaccuccgggacguacggcaccgggagcuggccggacggcgccgacaucaaccugaugcccaucuga

SEQ ID NO: 86642 - RNA, 1413 nt, Artificial Sequence
  derived and/or modified CDS sequence (opt1) from neuraminidase__InfluenzaA__AFM72802
augaaccccaaccagaagaucaucaccaucggcagcaucuccaucgccaucgggaucaucagccugaugcuccagaucggcaacaucaucuccaucugggccagccacuccauccagaccgggagccagaaccacacgggcaugugcaaccagcgcaucaucaccuacgagaacuccaccugggugaaccacaccuacgucaacaucaacaacacgaacgugguggcggggaaggacaagaccccggucacccuggccggcaacagcucccugugcagcaucuccggcugggccauccacaccaaggacaacagcauccggaucggguccaagggcgacguguucgugauccgcgagcccuucaucagcugcucccaccucgagugcaagacguucuuccugacccagggggcccugcucaacgacaagcacagcaacggcaccgucaaggaccggucccccuaccgcgcccugaugagcugcccccugggggaggcgccgucccccuacaacagcaaguucgagagcguggccugguccgccagcgccugccacgacggcaucggcuggcucaccaucgggaucuccggccccgacaacggggcgguggccguccugaaguacaacggcaucaucacgggcaccaucaagagcuggaagaagcagauccugcggacccaggaguccgagugcgugugcaugaacgggagcugcuucaccaucaugacggacggccccuccaacggggccgccagcuacaagaucuucaagaucgagaagggcaaggugaucaaguccauggagcucaacgccccgaacuuccacuacgaggagugcagcugcuaccccgacaccgggaccgucaugugcgugugccgcgacaacuggcacggcuccaaccggcccugggugagcuucaaccagaaccuggacuaccagaucggcuacaucugcuccggggucuucggcgacaacccccgcccggaggacggggagggcagcugcaaccccgugaccguggacggggcgaacggcgucaagggcuucuccuacaaguacgggaacggcguguggaucgggcggaccaagagcaaccgcauccggaagggcuucgagaugaucugggaccccaacggguggacgaacaccgacuccgacuucagcgugaagcaggacaucgucgccaucaccgacugguccggcuacagcggcagcuucgugcagcaccccgagcugacggggcucgacugcauccgcccgugcuucuggguggagcugguccggggccugccccgcgagaacaccaccaucuggaccuccgggagcuccaucagcuucugcggcgugaacuccgacaucgccaacuggagcuggcccgacggcgccgagcuccccuucacgaucgacaaguga

SEQ ID NO: 86643 - RNA, 1413 nt, Artificial Sequence; identical to SEQ ID NO: 86642
  derived and/or modified CDS sequence (opt1) from neuraminidase__InfluenzaA__AFM72813

SEQ ID NO: 86644 - RNA, 1413 nt, Artificial Sequence; identical to SEQ ID NO: 86642
  derived and/or modified CDS sequence (opt1) from neuraminidase__InfluenzaA__AFM72824

SEQ ID NO: 86645 - RNA, 1410 nt, Artificial Sequence; identical to SEQ ID NO: 80752
  derived and/or modified CDS sequence (opt1) from neuraminidase__InfluenzaA__AFM72835

SEQ ID NO: 86646 - RNA, 1410 nt, Artificial Sequence; identical to SEQ ID NO: 80752
  derived and/or modified CDS sequence (opt1) from neuraminidase__InfluenzaA__AFM72845

SEQ ID NO: 86647 - RNA, 1410 nt, Artificial Sequence; identical to SEQ ID NO: 80752
  derived and/or modified CDS sequence (opt1) from neuraminidase__InfluenzaA__AFM72855

SEQ ID NO: 86648 - RNA, 1410 nt, Artificial Sequence; identical to SEQ ID NO: 80752
  derived and/or modified CDS sequence (opt1) from neuraminidase__InfluenzaA__AFM72865

SEQ ID NO: 86649 - RNA, 1410 nt, Artificial Sequence
  derived and/or modified CDS sequence (opt1) from neuraminidase__InfluenzaA__AFM72875
augaaccccaaccagaagaucaucaccaucggcagcgugucccugaccaucagcacgaucugcuucuucaugcagaucgccauccucaucaccaccgucacccugcacuucaagcaguacgaguucaacuccccgcccaacaaccaggugaugcugugcgagcccacgaucaucgagcgcaacaucaccgagaucguguaccucaccaacaccacgaucgagaaggagaucugccccaagcuggccgaguaccggaacuggagcaagccgcagugcgacaucaccggguucgcgcccuucuccaaggacaacagcauccgccuguccgccggcggggacaucugggucacccgggagcccuacgugagcugcgaccccgacaagugcuaccaguucgcccucggccaggggaccacgcugaacaacgugcacuccaacaacaccguccgcgaccggaccccguaccgcacccugcucaugaacgagcugggcgugcccuuccaccugggcacgaagcaggucugcaucgccuggagcuccagcuccugccacgacgggaaggccuggcuccacgugugcaucaccggcgacgacaagaacgcgaccgccagcuucaucuacaacgggcggcugguggacuccguggucagcugguccaaggagauccugcgcacccaggagagcgagugcgugugcaucaacggcacgugcaccguggucaugaccgacggguccgccagcggcaaggccgacaccaagauccucuucaucgaggagggcaagaucgugcacacgagcacccuguccgggagcgcgcagcacguggaggagugcuccugcuacccccgguaccccggcguccgcugcgugugccgggacaacuggaaggggagcaaccgcccgaucguggacaucaacaucaaggaccacuccaucgucagcuccuacgugugcagcggccuggugggcgacacgccccggaaguccgacagcuccagcuccagccacugccucgaccccaacaacgaggagggcgggcacggggucaagggcugggccuucgacgacgggaacgacguguggaugggccgcaccaucuccgagaagucccggcugggcuacgagaccuucaaggucaucgagggguggagcaaccccaagagcaagcugcagaucaaccgccaggugaucguggaccggggcaaccgcuccggguacagcggcaucuucagcgucgaggggaaguccugcaucaaccggugcuucuacguggagcucauccgcggccggaaggaggagaccgaggugcuguggaccagcaacuccaucgucguguucugcggcaccagcgggacguacggcaccggguccuggccggacggcgccgacaucaaccugaugcccguguga

SEQ ID NO: 86650 - RNA, 1410 nt, Artificial Sequence; identical to SEQ ID NO: 80623
  derived and/or modified CDS sequence (opt1) from neuraminidase__InfluenzaA__AFM72886

SEQ ID NO: 86651 - RNA, 1410 nt, Artificial Sequence; identical to SEQ ID NO: 80623
  derived and/or modified CDS sequence (opt1) from neuraminidase__InfluenzaA__AFM72897

SEQ ID NO: 86652 - RNA, 1410 nt, Artificial Sequence
  derived and/or modified CDS sequence (opt1) from neuraminidase__InfluenzaA__AFM72908
augaaccccaaccagaagaucaucaccaucggcagcgugucccugaccaucagcacgaucugcuucuucaugcagaucgccauccucaucaccaccgucacccugcacuucaagcaguacgaguucaacuccccgcccaacaaccaggugaugcugugcgagcccacgaucaucgagcgcaacaucaccgagaucguguaccucaccaacaccacgaucgagaaggagaucugccccaagcuggccgaguaccggaacuggagcaagccgcagugcgacaucaccggguucgcgcccuucuccaaggacaacagcauccgccuguccgccggcggggacaucugggucacccgggagcccuacgugagcugcgaccccgacaagugcuaccaguucgcccucggccaggggaccacgcugaacaacgugcacuccaacaacaccguccgcgaccggaccccguaccgcacccugcucaugaacgagcugggcgugcccuuccaccugggcacgaagcaggucugcaucgccuggagcuccagcuccugccacgacgggaaggccuggcuccacgugugcaucaccggcgacgacaagaacgcgaccgccagcuucaucuacaacgggcggcugguggacuccguggucagcugguccaaggagauccugcgcacccaggagagcgagugcgugugcaucaacggcacgugcaccguggucaugaccgacggguccgccagcggcaaggccgacaccaagauccucuucaucgaggagggcaagaucgugcacacgagcacccuguccgggagcgcgcagcacguggaggagugcuccugcuacccccgguaccccggcguccgcugcgugugccgggacaacuggaaggggagcaaccgcccgaucguggacaucaacaccaaggaccacuccaucgucagcuccuacgugugcagcggccuggugggcgacacgccccggaagaacgacuccagcuccagcucccacugccucgaccccaacaacgaggagggcgggcacggggucaagggcugggccuucgacgacgggaacgacguguggaugggccgcaccaucagcgagaagucccggcugggcuacgagaccuucaaggucaucgagggguggagcaaccccaaguccaagcugcagaucaaccgccaggugaucguggaccggggcaaccgcagcggguacuccggcaucuucagcgucgagggcaagagcugcaucaaccggugcuucuacguggagcucauccgcgggcggaaggaggagaccgaggugcuguggaccuccaacagcaucgucguguucugcggcacguccgggaccuacggcaccgggagcuggccggacggcgccgacaucaaccugaugcccguguga

SEQ ID NO: 86653 - RNA, 1410 nt, Artificial Sequence
  derived and/or modified CDS sequence (opt1) from neuraminidase__InfluenzaA__AFM72919
augaaccccaaccagaagaucaucaccaucggcagcgugucccugaccaucagcacgaucugcuucuucaugcagaucgccauccucaucaccaccgucacccugcacuucaagcagcacgaguucaacuccccgcccaacaaccaggugaugcugugcgagcccacgaucaucgagcgcaacaucaccgagaucguguaccucaccaacaccacgaucgagaaggagaucugccccaagcuggccgaguaccggaacuggagcaagccgcagugcgacaucaccggguucgcgcccuucuccaaggacaacagcauccgccuguccgccggcggggacaucugggucacccgggagcccuacgugagcugcgaccccgacaagugcuaccaguucgcccucggccaggggaccacgcugaacaacgugcacuccaacaacaccguccgcgaccggaccccguaccgcacccugcucaugaacgagcugggcgugcccuuccaccugggcacgaagcaggucugcaucgccuggagcuccagcuccugccacgacgggaaggccuggcuccacgugugcaucaccggcgacgacaagaacgcgaccgccagcuucaucuacaacgggcggcugguggacuccguggucagcugguccaaggagauccugcgcacccaggagagcgagugcgugugcaucaacggcacgugcaccguggucaugaccgacggguccgccagcggcaaggccgacaccaagauccucuucaucgaggagggcaagaucgugcacacgagcacccuguccgggagcgcgcagcacguggaggagugcuccugcuacccccgguaccccggcguccgcugcgugugccgggacaacuggaaggggagcaaccgcccgaucguggacaucaacaccaaggaccacuccaucgucagcuccuacgugugcagcggccuggugggcgacacgccccggaagaacgacuccagcuccagcucccacugccucgaccccaacaacgaggagggcgggcacggggucaagggcugggccuucgacgacgggaacgacguguggaugggccgcaccaucagcgagaagucccggcugggcuacgagaccuucaaggucaucgagggguggagcaaccccaaguccaagcugcagaucaaccgccaggugaucguggaccggggcaaccgcagcggguacuccggcaucuucagcgucgagggcaagagcugcaucaaccggugcuucuacguggagcucauccgcgggcggaaggaggagaccgaggugcuguggaccuccaacagcaucgucguguucugcggcacguccgggaccuacggcaccgggagcuggccggacggcgccgacaucaaccugaugcccguguga

SEQ ID NO: 86654 - RNA, 1410 nt, Artificial Sequence; identical to SEQ ID NO: 81929
  derived and/or modified CDS sequence (opt1) from neuraminidase__InfluenzaA__AFM72930

SEQ ID NO: 86655 - RNA, 1410 nt, Artificial Sequence; identical to SEQ ID NO: 81929
  derived and/or modified CDS sequence (opt1) from neuraminidase__InfluenzaA__AFM72941

SEQ ID NO: 86656 - RNA, 1410 nt, Artificial Sequence; identical to SEQ ID NO: 81929
  derived and/or modified CDS sequence (opt1) from neuraminidase__InfluenzaA__AFM72952

SEQ ID NO: 86657 - RNA, 1410 nt, Artificial Sequence; identical to SEQ ID NO: 81929
  derived and/or modified CDS sequence (opt1) from neuraminidase__InfluenzaA__AFM72963

SEQ ID NO: 86658 - RNA, 1410 nt, Artificial Sequence; identical to SEQ ID NO: 81929
  derived and/or modified CDS sequence (opt1) from neuraminidase__InfluenzaA__AFM72974

SEQ ID NO: 86659 - RNA, 1410 nt, Artificial Sequence; identical to SEQ ID NO: 83542
  derived and/or modified CDS sequence (opt1) from neuraminidase__InfluenzaA__AFM72985

SEQ ID NO: 86660 - RNA, 1410 nt, Artificial Sequence; identical to SEQ ID NO: 83542
  derived and/or modified CDS sequence (opt1) from neuraminidase__InfluenzaA__AFM72996

SEQ ID NO: 86661 - RNA, 1410 nt, Artificial Sequence; identical to SEQ ID NO: 83542
  derived and/or modified CDS sequence (opt1) from neuraminidase__InfluenzaA__AFM73007

SEQ ID NO: 86662 - RNA, 1410 nt, Artificial Sequence
  derived and/or modified CDS sequence (opt1) from neuraminidase__InfluenzaA__AFM73018
augaaccccaaccagaagaucaucaccaucggcagcgugugcaugaccaucgggauggccaaccugauccuccagaucggcaacaucaucuccaucuggaucagccacuccauccagcuggggaaccagagccagaucgagacgugcaaccaguccgucaucaccuacgagaacaacaccugggugaaccagaccuacgugaacaucagcaacacgaacuucgccgcgggccaguccgucgugagcgugaagcuggccgggaacuccagccucugcccggucuccggcugggccaucuacagcaaggacaacuccauccgcaucggcagcaagggggacguguucgugauccgggagcccuucaucuccugcagcccccuggagugccgcaccuucuuccugacccagggcgcccuccugaacgacaagcacuccaacgggaccaucaaggaccggagccccuaccgcacgcugauguccugcccgaucggcgagguccccagccccuacaacagccgguucgaguccguggccuggagcgcguccgccugccacgacgggaucaacuggcucaccaucggcaucagcggccccgacaacggggccguggccguccugaaguacaacggcaucaucaccgacaccaucaaguccuggcgcaacaacauccugcggacgcaggagagcgagugcgcgugcgugaacggguccugcuucaccaucaugaccgacggcccgagcgacggccaggccuccuacaagaucuuccgcaucgagaaggggaagaucgucaagagcguggagaugaacgcccccaacuaccacuacgaggagugcuccugcuaccccgacagcuccgagaucacgugcgugugccgggacaacuggcacggcagcaaccgccccuggguguccuucaaccagaaccucgaguaccagaucggguacaucugcagcggcaucuucggggacaacccgcggcccaacgacaagaccggcuccugcggccccgucagcuccaacggggccaacggcgugaagggguucagcuucaaguacggcaacgggaucuggaucggccgcaccaagagcaucuccagccggaagggcuucgagaugaucugggaccccaacggguggaccggcaccgacaacaacuucuccaucaagcaggacaucguggggaucaacgaguggagcggcuacuccgggagcuucguccagcacccggagcugacgggccuggacugcauccgccccugcuucuggguggagcucauccggggccgccccaaggagaacaccaucuggaccuccgggagcuccaucagcuucugcggcgugaacuccgacaccgucggguggagcuggcccgacggcgccgagcugccguucacgaucgacaaguga

SEQ ID NO: 86663 - RNA, 1410 nt, Artificial Sequence; identical to SEQ ID NO: 86662
  derived and/or modified CDS sequence (opt1) from neuraminidase__InfluenzaA__AFM73028

SEQ ID NO: 86664 - RNA, 1410 nt, Artificial Sequence; identical to SEQ ID NO: 86662
  derived and/or modified CDS sequence (opt1) from neuraminidase__InfluenzaA__AFM73038

SEQ ID NO: 86665 - RNA, 1410 nt, Artificial Sequence; identical to SEQ ID NO: 82497
  derived and/or modified CDS sequence (opt1) from neuraminidase__InfluenzaA__AFM73048

SEQ ID NO: 86666 - RNA, 1410 nt, Artificial Sequence
  derived and/or modified CDS sequence (opt1) from neuraminidase__InfluenzaA__AFM73058
augaaccccaaccagaagaucaucaccaucggcagcuucugcaugaccaucgggcuggccaaccucauccugcagaucggcaacaucaucuccaucuggaucagccacuccauccagcuggggaaccagaaccagaucgagacgugcaaccagagcgugaucaccuacgagaacaacaccugggucaaccagaccuacgugaacaucuccaacacgaacuucgccgcgggccagagcguggucuccgugaagcucgccgggaacagcucccugugcccggugagcggcugggccaucuacuccaaggacaacagcguccgcaucggcuccaagggggacguguucgugauccgggagcccuucaucagcugcagcccccuggagugccgcaccuucuuccucacccagggcgcccugcugaacgacaagcacuccaacgggaccaucaaggaccggucccccuaccgcacgcucaugagcugcccgaucggcgagguccccucccccuacaacagccgguucgagagcguggccugguccgcgagcgccugccacgacgggaucaacuggcugaccaucggcaucuccggccccgacaacggggccguggccguccugaaguacaacggcaucaucaccgacaccaucaagagcuggcgcaacaacauccuccggacgcaggaguccgagugcgcgugcgugaacgggagcugcuucaccgugaugaccgacggcccguccgacggccaggccagcuacaagaucuuccgcaucgagaaggggaagaucgucaaguccguggagaugaacgcccccaacuaccacuacgaggagugcagcugcuaccccgacuccagcgagaucacgugcgugugccgggacaacuggcacggcuccaaccgccccugggucagcuucaaccagaaccuggaguaccggaucggguacaucugcuccggcaucuucggggacaacccgcgccccaacgacaagaccggcagcugcggccccguguccagcaacggggccaacggcgugaagggguucuccuucaaguacggcaacggggucuggaucggccggaccaagagcaucagcucccgcaacggcuucgagaugaucugggaccccaacggguggaccggcaccgacaagaacuucagcaucaagcaggacaucguggggaucaacgagugguccggcuacagcggguccuucgugcagcacccggagcugacgggccucgacugcauccggcccugcuucugggucgagcugauccgcggccggcccaaggagaacaccaucuggaccagcggguccagcaucuccuucugcggcgugaacagcgacaccgucgggugguccuggcccgacggcgccgagcugccguucacgaucgacaaguga

SEQ ID NO: 86667 - RNA, 1410 nt, Artificial Sequence; identical to SEQ ID NO: 82497
  derived and/or modified CDS sequence (opt1) from neuraminidase__InfluenzaA__AFM73068

SEQ ID NO: 86668 - RNA, 1413 nt, Artificial Sequence; identical to SEQ ID NO: 78975
  derived and/or modified CDS sequence (opt1) from neuraminidase__InfluenzaA__AFM73480

SEQ ID NO: 86669 - RNA, 1350 nt, Artificial Sequence
  derived and/or modified CDS sequence (opt1) from neuraminidase__InfluenzaA__AFM78569
augaaccccaaccagaagaucaucaccaucggcagcaucugcauggugaucgggaucgucucccugaugcuccagaucggcaacaugaucagcaucugggugauccacuccauccagaccgggaaccagcaccaggccgagagcaucuccaacacgaacccgcugaccgagaaggccguggcgagcgucacccuggccggcaacuccagccucugccccauccgcgggugggccgugcacuccaaggacaacaacauccggaucggcagcaagggcgacguguucgucauccgcgagcccuucaucuccugcagccaccuggagugccggaccuucuuccugacgcagggggcccuccugaacgacaagcacuccaacggcaccgugaaggaccgcagcccccaccggacccugauguccugcccggugggggaggcccccagccccuacaacucccgcuucgagagcgucgcgugguccgccagcgccugccacgacggcaccagcuggcucacgaucgggaucuccggccccgacaacgaggccguggcggugcugaaguacaacggcaucaucaccgacaccaucaagagcuggcggaacgacauccugcgcacccaggaguccgagugcgccugcgucaacgggagcugcuucacggugaugaccgacggcccguccaacgggcaggccagcuacaagaucuucaagauggagaagggcaagguggucaaguccguggagcucgacgcccccaacuaccacuacgaggagugcagcugcuaccccgacgccggcgagaucacgugcgugugccgggacaacuggcacggguccaaccgccccugggucagcuucaaccagaaccuggaguaccagaucggcuacaucugcuccgggguguucggcgacaacccgcggcccaacgacgggaccggcagcugcggccccaugucccccaacggggcguacggcgugaagggguucagcuucaaguacggcaacggggucuggaucggccgcaccaaguccaccaacagccgguccggcuucgagaugaucugggacccgaacggguggaccggcaccgacagcuccuucagcgugaagcaggacaucguggccaucacggacuggagcggguacuccggcagcuucguccagcaccccgagcugaccgggcucgacugcauccgccccugcuucuggguggagcugauccggggccgccccaaggaguccaccaucuggaccagcggcuccagcaucuccuucugcggggucaacagcgacacgguguccuggagcuggccggacggcgccgagcugcccuucaccaucgacaaguga

SEQ ID NO: 86670 - RNA, 1410 nt, Artificial Sequence
  derived and/or modified CDS sequence (opt1) from neuraminidase__InfluenzaA__AFM85180
augaaccccaaccagaagaucaucaccaucggcagcgugucccugaccaucgccacgaucugcuuccucacccagaucgccauccuggucaccaccgugacgcugcacuucaagcaguacgagugcaacagcuccccgaacaaccaggugaugcucugcgagcccaccaucaucgagcgcaacaucaccgagaucgucuaccugaccaacacgaccaucgagaaggagaucugccccaagcuggcggaguaccggaacuggagcaagccccagugcaacaucaccggguucgccccguucuccaaggacaacagcauccgccucuccgccggcggggacaucugggugacccgggagcccuacgugagcugcggccccgacaagugcuaccaguucgcccuggggcagggcacgacccugaacaacggccacuccaacgacaccguccacgaccgcacccccuaccggacgcuccugaugaacgagcugggggugccguuccaccucggcaccaagcaggucugcaucgccuggagcuccagcuccugccacgacgggaaggcguggcugcacgugugcgugaccggcgacgacaagaacgccaccgccagcuucaucuacaacgggcgccugguggacuccaucggcagcugguccaagaagauccuccggacgcaggagagcgagugcgucugcaucaacgggaccugcaccguggugaugaccgacggguccgccagcggcaaggcggacacgaagauccuguucaucgaggaggggaagaucguccacaccagccugcucuccggcagcgcccagcacguggaggagugcuccugcuacccccgcuaccccggcgugcggugcgucugccgcgacaacuggaaggggagcaaccggcccaucguggacaucaacgugaaggacuacuccaucgucagcuccuacgugugcagcggccuggugggggacaccccgcgcaagaacgacuccagcuccagcucccacugccuggaccccaacaacgaggagggcgggcacggcgucaagggcugggccuucgacgacgggaacgacguguggaugggccggaccaucagcgagaagcuccgcuccggguacgagacguucaaggucaucgagggcuggagcaagcccaacuccaagcugcagaucaaccgccaggugaucguggaccgggggaaccggagcggcuacuccggcaucuucagcgucgagggcaagagcugcaucaaccgcugcuucuacguggagcugauccggggccgcaaccaggagaccgaggugcucuggaccuccaacagcaucgucguguucugcgggaccuccggcacguacgggaccggcagcuggcccgacggcgccgacaucaaccugaugccgaucuga

SEQ ID NO: 86671 - RNA, 1410 nt, Artificial Sequence; identical to SEQ ID NO: 78127
  derived and/or modified CDS sequence (opt1) from neuraminidase__InfluenzaA__AFN11830

SEQ ID NO: 86672 - RNA, 1410 nt, Artificial Sequence
  derived and/or modified CDS sequence (opt1) from neuraminidase__InfluenzaA__AFN11831
augaaccccaaccagaagaucaucaccaucggcagcgugucccugaccaucgccacgaucugcuuccucaugcagaucgccauccuggucaccaccgugacccugcacuucaagcaguacgagugcgacagcccggcgaacaaccaggugaugcccugcgagcccaucaucaucgagcgcaacaucacggagaucgucuaccucaccaacaccaccaucgagaaggagaucugccccaagcugguggaguaccggaacugguccaagccgcagugcaagaucacgggguucgcccccuucagcaaggacaacuccauccgccugagcgccggcggggacaucugggugacccgggagcccuacgucuccugcgaccccggcaagugcuaccaguucgcccucgggcagggcaccacccuggacaacaagcacagcaacgacacgauccacgaccgcaccccgcaccggacccugcucaugaacgagcugggcgugcccuuccaccuggggacccgccaggugugcaucgccugguccagcuccagcugccacgacggcaaggcguggcuccacgucugcgugacgggguacgacaagaacgccaccgccuccuucaucuacgacggccggcugguggacagcaucggguccuggagcaagaacauccugcgcacccaggaguccgagugcgucugcaucaacgggaccugcacgguggugaugaccgacggcagcgccuccggccgggcggacaccaagauccucuucaucgaggagggcaagaucguccacaucagcccccugagcggguccgcccagcacguggaggagugcagcugcuacccccgcuacccgggcgugcggugcgucugccgcgacaacuggaagggcuccaaccggcccgugguggacaucaacgucaaggacuacagcaucguguccagcuacgugugcuccgggcuggucggcgacacgccccgcaacaacgaccggagcuccagcuccuacugccgcaaccccaacaacgagaaggggaaccacggcgugaaggggugggccuucgacgacggcaacgacgucuggaugggccggaccaucagcgaggagucccgcagcggguacgagaccuucaaggugaucggcgggugguccaccccgaacagcaagcuccagaucaaccgccaggugaucgucgacuccgacaaccggagcggcuacuccgggaucuucagcguggagggcaagagcugcaucaaccggugcuucuacguggagcugauccgcggccgcgagcaggagacccgggucugguggacguccaacagcaucgugguguucugcgggaccuccggcaccuacgggaccggcagcuggcccgacggggccgacaucaaccugaugcccaucuga

SEQ ID NO: 86673 - RNA, 1410 nt, Artificial Sequence; identical to SEQ ID NO: 78600
  derived and/or modified CDS sequence (opt1) from neuraminidase__InfluenzaA__AFN11833

SEQ ID NO: 86674 - RNA, 1410 nt, Artificial Sequence; identical to SEQ ID NO: 80535
  derived and/or modified CDS sequence (opt1) from neuraminidase__InfluenzaA__AFN11835

SEQ ID NO: 86675 - RNA, 1410 nt, Artificial Sequence
  derived and/or modified CDS sequence (opt1) from neuraminidase__InfluenzaA__AFN11836
augaaccccaaccagaagaucaucaccaucggcagcgugucccugaccaucgccacgaugugcuuccucaugcagaucgccauccuggucaccaccgugacccugcacuucaagcaguacgagugcagcuccccgcccaacaaccaggugaugcccugcgagcccacgaucaucgagcgcaacaucaccgagaucgucuaccucaccaacaccacgaucgagaaggagaucugcccgaagcugguggaguaccggaacuggagcaagccccagugcaagaucaccggguucgcgcccuucuccaaggacaacagcauccgccuguccgccggcggggacaucugggugacccgggagcccuacgucagcugcgacccgggcaagugcuaccaguucgcccucgggcagggcaccacgcugaacaaccgccacuccaacgacaccgugcacgaccggacccccuaccgcacccugcucaugaacgagcugggcgugcccuuccaccuggggacgaagcaggucugcaucgccuggagcuccagcuccugccacgacggcaaggccuggcuccacgugugcgugaccgggcacgacaagaacgcgaccgccagcuucaucuacgacggccggcuggucgacuccaucgggagcugguccaagaacauccugcgcacccaggagagcgagugcgugugcaucaacggcacgugcaccguggucaugaccgacggcuccgccagcgagcgggccgacaccaagauccucuucaucgaggaggggaagaucauccacaucagcccccuguccggcagcgcgcagcacguggaggagugcuccugcuacccgcgcuaccccggggugcggugcgucugccgcgacaacuggaagggcagcaaccggcccaucguggacaucaacgugaaggacuacuccaucgucagcuccuacgugugcagcggccuggugggggacacgccccgcaagaacgaccgguccagcuccagcuacugccgcaacccgaacaacgagaagggcucccacggggucaagggcugggccuucgacgacgggaacgacguguggaugggccggaccaucggcgaggagcuccgcagcggguacgagaccuucaaggucaucggcgggugguccacccccaacagcaagcugcagaucaaccgccaggugaucguggacuccggcaaccggagcggguacuccggcaucuucagcgucgagggcaagagcugcaucaaccggugcuucuacguggagcugauccgcgggcgcgagcaggagacgcgggugugguggaccuccaacagcaucgucguguucugcggcaccuccgggaccuacggcacggggagcuggcccgacggcgccgacaucaaccucaugcccaucuga

SEQ ID NO: 86676 - RNA, 1410 nt, Artificial Sequence
  derived and/or modified CDS sequence (opt1) from neuraminidase__InfluenzaA__AFN11839
augaaccccaaccagaagaucaucaccaucggcagcgugucccugaccaucgccacgaucugcuuccucaugcagaucgccauccuggucaccaccgugacccugcacuucaagcaguacgagugcagcuccccgcccaacaaccaggugaugcccugccagcccacgaucaucgagcgcaacaucaccgagaucgucuaccucaccaacaccacgaucgagaaggagaucugcccgaagcugguggaguaccggaacuggagcaagccccagugcaagaucaccggguucgcgcccuucuccaaggacaacagcauccgccuguccgccggcggggacaucugggugacccgggagcccuacgucagcugcgacccgggcaagugcuaccaguucgcccucgggcagggcaccacgcugaacaaccgccacuccaacgacaccgugcacgaccggacccccuaccgcacccugcucaugaacgagcugggcgugcccuuccaccuggggacgaagcaggucugcaucgccuggagcuccagcuccugccacgacggcaaggccuggcuccacgugugcgugaccgggcacgacgagaacgcgaccgccagcuucaucuacgacggccggcuggucgacuccaucgggagcugguccaagaacauccugcgcacccaggagagcgagugcgugugcaucaacggcacgugcaccguggucaugaccgacggcuccgccagcgagcgggccgacaccaagauccucuucaucgaggaggggaagaucgugcacaucagcccccuguccggcagcgcgcagcacguggaggagugcuccugcuacccgcgcuaccccgggguccggugcgugugccgcgacaacuggaagggcagcaaccggcccaucguggacaucaacaugaaggacuacuccaucgucagcuccuacgugugcagcggccuggugggggacacgccccgcaagaacgacuccagcuccagcuccuacugccggaacccgaacaacgagaagggcagccacggggucaagggcugggccuucgacgacgggaacgacguguggaugggccgcaccaucuccgaggagcuccggagcggcuacgagaccuucaaggucaucgggggcugguccacccccaacagcaagcugcagaucaaccgccaggugaucguggacuccgggaaccggagcggcuacagcgggaucuucuccgucgagggcaagagcugcaucaaccgcugcuucuacguggagcugauccggggccgcaagcaggagacgaaggugugguggaccuccaacagcaucgucguguucugcgggaccuccggcaccuacgggacgggcagcuggcccgacggggccgacaucaaccucaugcccaucuga

SEQ ID NO: 86677 - RNA, 1410 nt, Artificial Sequence
  derived and/or modified CDS sequence (opt1) from neuraminidase__InfluenzaA__AFN11840
augaaccccaaccagaagaucaucaccaucggcagcgugucccugaccaucgccacgaucugcuuccucaugcagaucgccauccuggucaccaccgugacccugcacuucaagcaguacgagugcaacagcccgcccaacaaccaggugaugcucugcgagcccacgaucaucgagcgcaacaucaccgagaucgucuaccugaccaacaccacgaucgagaaggagaucugccccaagcuggcggaguaccggaacugguccaagccgcagugcaagaucaccggguucgcccccuucagcaaggacaacuccauccgccucagcgccggcggggacaucugggugacccgggagcccuacguguccugcgaccccggcaagugcuaccaguucgcccuggggcagggcaccacgcugaacaaccgccacagcaacgacaccguccacgaccggaccccguaccgcacccuccugaugaacgagcugggcgugcccuuccaccucgggacgaagcaggucugcaucgccugguccagcuccagcugccacgacggcaaggcguggcugcacgugugcgugaccgggcacgacgagaacgccaccgccuccuucaucuacgacggccggcugguggacagcaucggguccuggagcaagaacauccuccgcacccaggaguccgagugcgucugcaucaacggcacgugcaccguggugaugaccgacggcagcgccuccgagcgggcggacaccaagauccuguucaucgaggaggggaagaucguccacaucagcccccugagcggcuccgcccagcacguggaggagugcagcugcuacccccgcuacccgggggugcggugcgucugccgcgacaacuggaagggcuccaaccggcccaucguggacaucaacgugaaggacuacagcaucgucuccagcuacgugugcuccggccucgugggggacacgccccgcaagaacgacagcuccagcuccagcuacugccggaaccccaacaacgagaagggcucccacggggucaagggcugggccuucgacgacgggaacgacguguggaugggccgcaccaucggcgaggagcugcggagcggguacgagaccuucaaggucaucggcgggugguccaccccgaacagcaagcugcagaucaaccgccaggugaucguggaccggggcaaccgcuccggguacagcggcaucuucuccgucgagggcaagagcugcaucaaccggugcuucuacguggagcucgugcgcgggcgcaagcaggagacggaggucugguggaccagcaacuccaucgugguguucugcggcaccagcgggaccuacggcacgggguccuggcccgacggcgccgacaucaaccugaugcccaucuga

SEQ ID NO: 86678 - RNA, 1410 nt, Artificial Sequence; identical to SEQ ID NO: 79953
  derived and/or modified CDS sequence (opt1) from neuraminidase__InfluenzaA__AFN11841

SEQ ID NO: 86679 - RNA, 1410 nt, Artificial Sequence; identical to SEQ ID NO: 86041
  derived and/or modified CDS sequence (opt1) from neuraminidase__InfluenzaA__AFN11842

SEQ ID NO: 86680 - RNA, 1410 nt, Artificial Sequence
  derived and/or modified CDS sequence (opt1) from neuraminidase__InfluenzaA__AFN11844
augaaccccaaccagaagaucaucaccaucggcagcgugucccugaccaucagcacgaucugcuucuucaugcagaucgccauccucaucaccaccgucacccugcacuucaagcaguacgaguucaacuccccgcccaacaaccaggugaugcugugcgagcccacgaucaucgagcgcaacaucaccgagaucguguaccucaccaacaccacgaucgagaaggagaucugccccaagcuggccgaguaccggaacuggagcaagccgcagugcaacaucaccggguucgcgcccuucuccaaggacaacagcauccgccuguccgccggcggggacaucugggucacccgggagcccuacgugagcugcgaccccgacaagugcuaccaguucgcccucggccaggggaccacgcugaacaacgugcacuccaacgacaccguccgcgaccggaccccguaccgcacccugcucaugaacgagcugggcgugcccuuccaccugggcacgaagcaggucugcaucgccuggagcuccagcuccugccacgacgggaaggccuggcuccacgugugcgugaccggcgacgacaagaacgcgaccgccagcuucaucuacaacgggcggcugguggacuccaucgucagcugguccaaggagauccugcgcacccaggagagcgagugcgugugcaucaacggcacgugcaccguggucaugaccgacggguccgccagcggcaaggccgacaccaagauccucuucaucgaggagggcaagaucgugcacacgagcacccuguccgggagcgcgcagcacguggaggagugcuccugcuacccccgguaccccggcguccgcugcgugugccgggacaacuggaaggggagcaaccgcccgaucguggacaucaacaucaaggacuacuccaucgucagcuccuacgugugcagcggccuggugggcgacacgccccggaagaacgacuccagcuccagcucccacugccucgaccccaacaacgaggagggcgggcacggggucaagggcugggccuucgacgacgggaacgacguguggaugggccgcaccaucagcgagaagcugcgguccggcuacgagaccuucaaggucaucgagggguggagcaaccccaacuccaagcugcagaucaaccgccaggugaucguggaccggggcaaccgcagcggguacuccggcaucuucagcgucgagggcaagagcugcaucaaccggugcuucuacguggagcucauccgcgggcggaaggaggagaccgaggugcuguggaccuccaacagcaucgucguguucugcggcaccuccgggacguacggcaccgggagcuggccggacggcgccgacaucgggcugaugcccauguga

SEQ ID NO: 86681 - RNA, 1410 nt, Artificial Sequence; identical to SEQ ID NO: 86600
  derived and/or modified CDS sequence (opt1) from neuraminidase__InfluenzaA__AFN11845

SEQ ID NO: 86682 - RNA, 1410 nt, Artificial Sequence; identical to SEQ ID NO: 86128
  derived and/or modified CDS sequence (opt1) from neuraminidase__InfluenzaA__AFN11847

SEQ ID NO: 86683 - RNA, 1410 nt, Artificial Sequence
  derived and/or modified CDS sequence (opt1) from neuraminidase__InfluenzaA__AFN11848
augaaccccaaccagaagaucaucaccaucggcagcgugucccugaccaucagcacgaucugcuucuucaugcagaucgccauccucaucaccaccgucacccugcacuucaagcaguacgaguucaacuccccgcccaacaaccaggugaugcugugcgagcccacgaucaucgagcgcaacaucaccgagaucguguaccucaccaacaccacgaucgagaaggagaucugccccaagcuggccgaguaccggaacuggagcaagccgcagugcaacaucaccggguucgcgcccuucuccaaggacaacagcauccgccuguccgccggcggggacaucugggucacccgggagcccuacgugagcugcgaccccgacaagugcuaccaguucgcccucggccaggggaccacgcugaacaacgugcacuccaacgacaccguccacgaccgcaccccguaccggacccugcucaugaacgagcugggcgugcccuuccaccugggcacgaagcaggucugcaucgccuggagcuccagcuccugccacgacgggaaggccuggcuccacgugugcgugaccggcgacgacgagaacgcgaccgccagcuucaucuacaacgggcgccugguggacuccaucgucagcugguccaagaagauccugcggacccaggagagcgagugcgugugcaucaacggcacgugcaccguggucaugaccgacggguccgccagcggcaaggccgacaccaagauccucuucaucgaggagggcaagaucgugcacacgagcacccuguccgggagcgcgcagcacguggaggagugcuccugcuacccccgcuaccccggcguccggugcgugugccgcgacaacuggaaggggagcaaccggccgaucguggacaucaacaucaaggacuacuccaucgucagcuccuacgugugcagcggccuggugggcgacacgccccgcaagaacgacuccagcuccagcucccacugccucgggcccaacaacgaggagggcgggcacggcgucaaggggugggccuucgacgacggcaacgacguguggaugggccggaccaucagcgagaagcugcgcuccggguacgagaccuucaaggucaucgagggcuggagcaaccccaacuccaagcugcagaucaaccgccaggugaucguggaccgggggaaccggagcggcuacuccgggaucuucagcgucgagggcaagagcugcaucaaccgcugcuucuacguggagcucauccggggccgcaagcaggagaccgaggugcuguggaccuccaacagcaucgucguguucugcgggaccuccggcacguacgggaccggcagcuggccggacggggccgacaucaaccugaugcccaucuga

SEQ ID NO: 86684 - RNA, 1410 nt, Artificial Sequence
  derived and/or modified CDS sequence (opt1) from neuraminidase__InfluenzaA__AFN11850
augaaccccaaccagaagaucaucaccaucggcagcgugucccugaccaucagcacgaucugcuucuucaugcagaucgccauccucaucaccaccgucacccugcacuucaagcaguacgaguucaacuccccgcccaacaaccaggugaugcugugcgagcccacgaucaucgagcgcaacaucaccgagaucguguaccucaccaacaccacgaucgagaaggagaucugccccaagcuggccgaguaccggaacuggagcaagccgcagugcgacaucaccggguucgcgcccuucuccaaggacaacagcauccgccuguccgccggcggggacaucugggucacccgggagcccuacgugagcugcgaccccgacaagugcuaccaguucgcccucggccaggggaccacgcugaacaacgugcacuccaacaacaccguccgcggccggaccccguaccgcacccugcucaugaacgagcugggcgugcccuuccaccuggggacgaagcaggucugcaucgccuggagcuccagcuccugccacgacggcaaggccuggcuccacgugugcaucaccggggacgacaagaacgcgaccgccagcuucaucuacaacggccggcugguggacuccguggucagcugguccaaggagauccugcgcacccaggagagcgagugcgugugcaucaacgggacgugcaccguggucaugaccgacggcuccgccagcggcaaggccgacaccaagauccucuucaucgaggaggggaagaucgugcacacgagcacccuguccggcagcgcgcagcacguggaggagugcuccugcuacccccgguaccccgggguccgcugcgugugccgggacaacuggaagggcagcaaccgcccgaucguggacaucaacaucaaggaccacuccaucgucagcuccuacgugugcagcggccuggugggggacacgccccggaagaacgacuccagcuccagcucccacugccucgaccccaacaacgaggagggcgggcacggcgucaaggggugggccuucgacgacggcaacgacguguggaugggccgcaccaucagcgagaagucccggcugggguacgagaccuucaaggucaucgagggcuggagcaaccacaaguccaagcugcagaucaaccgccaggugaucguggaccgggggaaccgcagcggcuacuccgggaucuucagcgucgagggcaagagcugcaucaaccggugcuucuacguggagcucauccgcggccggaaggaggagaccgaggugcuguggaccuccaacagcaucgucguguucugcgggaccuccggcacguacgggaccggcagcuggcccgacggggccgaccugaaccucaugccgaucuga

SEQ ID NO: 86685 - RNA, 1410 nt, Artificial Sequence
  derived and/or modified CDS sequence (opt1) from neuraminidase__InfluenzaA__AFN11851
augaaccccaaccagaagaucaucaccaucggcagcgugucccugaccaucgccacgaucugccuccugaugcagaucgccauccuggucaccaccgugacccuccacuucaagcaguacgagugcaacagcccgcccaacaaccaggugaugcugugcgagcccacgaucaucgagcgcaacaucaccaagaucgucuaccugaccaacaccacgaucgagaaggagaucugccccaagcucgcggaguaccggaacugguccaagccgcagugcaagaucaccggguucgcccccuucagcaaggacaacuccauccgccugagcgccggcggggacaucugggugacccgggagcccuacguguccugcgaccccggcaagugcuaccaguucgcccuggggcagggcaccacgcucaacaaccgccacagcaacgacaccguccacgaccggaccccguaccgcacccugcugaugaacgagcucggcgugcccuuccaccuggggacgaagcaggucugcaucgccugguccagcuccagcugccacgacggcaaggcguggcugcacgugugcgugaccgggcacgacgagaacgccaccgccuccuucaucuacgacggccggcucguggacagcaucggguccuggagcaagaacauccugcgcacccaggaguccgagugcgucugcaucaacggcacgugcaccguggugaugaccgacggcagcgccuccgagcgggcggacaccaagauccuguucaucgaggaggggaagaucguccacaucagcccccucagcggcuccgcccagcacguggaggagugcagcugcuacccccgcuacccgggggugcggugcgucugccgcgacaacuggaagggcuccaaccggcccaucguggacaucaacgugaaggacuacagcaucgucuccagcuacgugugcuccggccuggugggggacacgccccgcaagaacgacagcuccagcuccagcuacugccggaaccccaacaacgagaagggcucccacggggucaagggcugggccuucgacgacgggaacgacguguggaugggccgcaccaucagcgaggagcugcgguccggcuacgagaccuucaaggucaucgggggcuggagcaagccgaacuccaagcuccagaucaaccgccaggugaucguggaccgggggaaccgcagcggcuacuccgggaucuucagcgucgagggcaagagcugcaucaaccggugcuucuacguggagcugauccgcggccgcaagcaggagaccgaggugugguggacguccaacagcaucgucguguucugcgggaccuccggcaccuacgggaccggcagcuggcccgacggggccgacaucaaccugaugcccaucuga

SEQ ID NO: 86686 - RNA, 1410 nt, Artificial Sequence; identical to SEQ ID NO: 78351
  derived and/or modified CDS sequence (opt1) from neuraminidase__InfluenzaA__AFN11853

SEQ ID NO: 86687 - RNA, 1410 nt, Artificial Sequence
  derived and/or modified CDS sequence (opt1) from neuraminidase__InfluenzaA__AFN11855
augaaccccaaccagaagaucaucaccaucggcagcgugucccugaccaucagcacgaucugcuucuucaugcagaccgccauccucaucaccaucgucacccugcacuucaagcaguacgaguucaacuccccgcccaacaaccaggugaugcugugcgagcccacgaucaucgagcgcaacaucaccgagaucguguaccucaccaacaccacgaucgagaaggagaucugccccaagcuggccgaguaccggaacuggagcaagccgcagugcgacaucaccggguucgcgcccuucuccaaggacaacagcauccgccuguccgccggcggggacaucugggucacccgggagcccuacgugagcugcgaccccgacaagugcuaccaguucgcccucggccaggggaccacgcugaacaacgugcacuccaacgacaccguccacgaccgcaccccguaccggacccugcucaugaacgagcugggcgugcccuuccaccugggcacgaagcaggucugcaucgccuggagcuccagcuccugccacgacgggaaggccuggcuccacgugugcaucaccggcgacgacaagaacgcgaccgccagcuucaucuacaacgggcgccugguggacuccaucgugagcugguccaaggagauccugcggacccaggagagcgagugcgucugcaucaacggcacgugcaccguggugaugaccgacggguccgccagcggcaaggccgacaccaagauccucuucaucgaggagggcaagaucguccacacgagcauccuguccgggagcgcgcagcacguggaggagugcuccugcuacccccgcuaccccggcgugcggugcgucugccgcgacaacuggaaggggagcaaccggccgaucguggacaucaacaucaaggaccacuccaucgugagcuccuacgucugcagcggccuggugggcgacacgccccgcaagaacgacuccagcuccagcucccacugccucgaccccaacaacgaggagggcgggcacggggugaagggcugggccuucgacgacgggaacgacgucuggaugggccggaccaucagcgagaagucccgccugggcuacgagaccuucaaggugaucgagggguggagcaaccccaaguccaagcugcagaucaaccggcaggucaucguggaccgcggcaaccggagcggguacuccggcaucuucagcguggagggcaagagcugcaucaaccgcugcuucuacgucgagcucauccgggggcgcaaggaggagaccgaggugcuguggaccuccaacagcaucguggucuucugcggcaccuccgggaccuacggcacggggagcuggccggacggcgccgacaucaaccugaugcccaucuga

SEQ ID NO: 86688 - RNA, 1410 nt, Artificial Sequence; identical to SEQ ID NO: 79953
  derived and/or modified CDS sequence (opt1) from neuraminidase__InfluenzaA__AFN11857

SEQ ID NO: 86689 - RNA, 1410 nt, Artificial Sequence; identical to SEQ ID NO: 80762
  derived and/or modified CDS sequence (opt1) from neuraminidase__InfluenzaA__AFN17373

SEQ ID NO: 86690 - RNA, 1410 nt, Artificial Sequence; identical to SEQ ID NO: 86395
  derived and/or modified CDS sequence (opt1) from neuraminidase__InfluenzaA__AFN17383

SEQ ID NO: 86691 - RNA, 1410 nt, Artificial Sequence; identical to SEQ ID NO: 80762
  derived and/or modified CDS sequence (opt1) from neuraminidase__InfluenzaA__AFN17393

SEQ ID NO: 86692 - RNA, 1410 nt, Artificial Sequence; identical to SEQ ID NO: 80762
  derived and/or modified CDS sequence (opt1) from neuraminidase__InfluenzaA__AFN17403

SEQ ID NO: 86693 - RNA, 1410 nt, Artificial Sequence; identical to SEQ ID NO: 80762
  derived and/or modified CDS sequence (opt1) from neuraminidase__InfluenzaA__AFN17413

SEQ ID NO: 86694 - RNA, 1410 nt, Artificial Sequence; identical to SEQ ID NO: 80762
  derived and/or modified CDS sequence (opt1) from neuraminidase__InfluenzaA__AFN17423

SEQ ID NO: 86695 - RNA, 1410 nt, Artificial Sequence; identical to SEQ ID NO: 80762
  derived and/or modified CDS sequence (opt1) from neuraminidase__InfluenzaA__AFN17433

SEQ ID NO: 86696 - RNA, 1410 nt, Artificial Sequence; identical to SEQ ID NO: 80762
  derived and/or modified CDS sequence (opt1) from neuraminidase__InfluenzaA__AFN17443

SEQ ID NO: 86697 - RNA, 1410 nt, Artificial Sequence; identical to SEQ ID NO: 80762
  derived and/or modified CDS sequence (opt1) from neuraminidase__InfluenzaA__AFN17453

SEQ ID NO: 86698 - RNA, 1410 nt, Artificial Sequence; identical to SEQ ID NO: 80762
  derived and/or modified CDS sequence (opt1) from neuraminidase__InfluenzaA__AFN17459

SEQ ID NO: 86699 - RNA, 1410 nt, Artificial Sequence; identical to SEQ ID NO: 80762
  derived and/or modified CDS sequence (opt1) from neuraminidase__InfluenzaA__AFN17469

SEQ ID NO: 86700 - RNA, 1410 nt, Artificial Sequence; identical to SEQ ID NO: 80762
  derived and/or modified CDS sequence (opt1) from neuraminidase__InfluenzaA__AFN17479

SEQ ID NO: 86701 - RNA, 1410 nt, Artificial Sequence; identical to SEQ ID NO: 80762
  derived and/or modified CDS sequence (opt1) from neuraminidase__InfluenzaA__AFN17489

SEQ ID NO: 86702 - RNA, 1410 nt, Artificial Sequence; identical to SEQ ID NO: 80762
  derived and/or modified CDS sequence (opt1) from neuraminidase__InfluenzaA__AFN17499

SEQ ID NO: 86703 - RNA, 1410 nt, Artificial Sequence; identical to SEQ ID NO: 80762
  derived and/or modified CDS sequence (opt1) from neuraminidase__InfluenzaA__AFN17509

SEQ ID NO: 86704 - RNA, 1410 nt, Artificial Sequence; identical to SEQ ID NO: 80762
  derived and/or modified CDS sequence (opt1) from neuraminidase__InfluenzaA__AFN17519

SEQ ID NO: 86705 - RNA, 1410 nt, Artificial Sequence; identical to SEQ ID NO: 80762
  derived and/or modified CDS sequence (opt1) from neuraminidase__InfluenzaA__AFN17529

SEQ ID NO: 86706 - RNA, 1410 nt, Artificial Sequence; identical to SEQ ID NO: 80762
  derived and/or modified CDS sequence (opt1) from neuraminidase__InfluenzaA__AFN17539

SEQ ID NO: 86707 - RNA, 1410 nt, Artificial Sequence; identical to SEQ ID NO: 80762
  derived and/or modified CDS sequence (opt1) from neuraminidase__InfluenzaA__AFN17549

SEQ ID NO: 86708 - RNA, 1410 nt, Artificial Sequence; identical to SEQ ID NO: 80762
  derived and/or modified CDS sequence (opt1) from neuraminidase__InfluenzaA__AFN17559

SEQ ID NO: 86709 - RNA, 1410 nt, Artificial Sequence; identical to SEQ ID NO: 80762
  derived and/or modified CDS sequence (opt1) from neuraminidase__InfluenzaA__AFN17569

SEQ ID NO: 86710 - RNA, 1410 nt, Artificial Sequence; identical to SEQ ID NO: 80762
  derived and/or modified CDS sequence (opt1) from neuraminidase__InfluenzaA__AFN17575

SEQ ID NO: 86711 - RNA, 1410 nt, Artificial Sequence; identical to SEQ ID NO: 80762
  derived and/or modified CDS sequence (opt1) from neuraminidase__InfluenzaA__AFN17581

SEQ ID NO: 86712 - RNA, 1410 nt, Artificial Sequence; identical to SEQ ID NO: 80762
  derived and/or modified CDS sequence (opt1) from neuraminidase__InfluenzaA__AFN17587

SEQ ID NO: 86713 - RNA, 1410 nt, Artificial Sequence; identical to SEQ ID NO: 80762
  derived and/or modified CDS sequence (opt1) from neuraminidase__InfluenzaA__AFN17597

SEQ ID NO: 86714 - RNA, 1410 nt, Artificial Sequence; identical to SEQ ID NO: 86395
  derived and/or modified CDS sequence (opt1) from neuraminidase__InfluenzaA__AFN17607

SEQ ID NO: 86715 - RNA, 1410 nt, Artificial Sequence; identical to SEQ ID NO: 80762
  derived and/or modified CDS sequence (opt1) from neuraminidase__InfluenzaA__AFN17617

SEQ ID NO: 86716 - RNA, 1410 nt, Artificial Sequence; identical to SEQ ID NO: 80762
  derived and/or modified CDS sequence (opt1) from neuraminidase__InfluenzaA__AFN17627

SEQ ID NO: 86717 - RNA, 1410 nt, Artificial Sequence; identical to SEQ ID NO: 80762
  derived and/or modified CDS sequence (opt1) from neuraminidase__InfluenzaA__AFN17637

SEQ ID NO: 86718 - RNA, 1410 nt, Artificial Sequence; identical to SEQ ID NO: 80762
  derived and/or modified CDS sequence (opt1) from neuraminidase__InfluenzaA__AFN17647

SEQ ID NO: 86719 - RNA, 1410 nt, Artificial Sequence; identical to SEQ ID NO: 80762
  derived and/or modified CDS sequence (opt1) from neuraminidase__InfluenzaA__AFN17657

SEQ ID NO: 86720 - RNA, 1410 nt, Artificial Sequence; identical to SEQ ID NO: 80762
  derived and/or modified CDS sequence (opt1) from neuraminidase__InfluenzaA__AFN17667

SEQ ID NO: 86721 - RNA, 1410 nt, Artificial Sequence; identical to SEQ ID NO: 80762
  derived and/or modified CDS sequence (opt1) from neuraminidase__InfluenzaA__AFN17677

SEQ ID NO: 86722 - RNA, 1410 nt, Artificial Sequence; identical to SEQ ID NO: 86395
  derived and/or modified CDS sequence (opt1) from neuraminidase__InfluenzaA__AFN17687

SEQ ID NO: 86723 - RNA, 1410 nt, Artificial Sequence; identical to SEQ ID NO: 80762
  derived and/or modified CDS sequence (opt1) from neuraminidase__InfluenzaA__AFN17697

SEQ ID NO: 86724 - RNA, 1410 nt, Artificial Sequence; identical to SEQ ID NO: 86395
  derived and/or modified CDS sequence (opt1) from neuraminidase__InfluenzaA__AFN17707

SEQ ID NO: 86725 - RNA, 1410 nt, Artificial Sequence; identical to SEQ ID NO: 80762
  derived and/or modified CDS sequence (opt1) from neuraminidase__InfluenzaA__AFN17717

SEQ ID NO: 86726 - RNA, 1410 nt, Artificial Sequence; identical to SEQ ID NO: 86395
  derived and/or modified CDS sequence (opt1) from neuraminidase__InfluenzaA__AFN17727

SEQ ID NO: 86727 - RNA, 1410 nt, Artificial Sequence; identical to SEQ ID NO: 80762
  derived and/or modified CDS sequence (opt1) from neuraminidase__InfluenzaA__AFN17737

SEQ ID NO: 86728 - RNA, 1410 nt, Artificial Sequence; identical to SEQ ID NO: 80762
  derived and/or modified CDS sequence (opt1) from neuraminidase__InfluenzaA__AFN17743

SEQ ID NO: 86729 - RNA, 1410 nt, Artificial Sequence; identical to SEQ ID NO: 86395
  derived and/or modified CDS sequence (opt1) from neuraminidase__InfluenzaA__AFN17749

SEQ ID NO: 86730 - RNA, 1410 nt, Artificial Sequence; identical to SEQ ID NO: 80762
  derived and/or modified CDS sequence (opt1) from neuraminidase__InfluenzaA__AFN17759

SEQ ID NO: 86731 - RNA, 1410 nt, Artificial Sequence; identical to SEQ ID NO: 80762
  derived and/or modified CDS sequence (opt1) from neuraminidase__InfluenzaA__AFN17769

SEQ ID NO: 86732 - RNA, 1410 nt, Artificial Sequence; identical to SEQ ID NO: 80762
  derived and/or modified CDS sequence (opt1) from neuraminidase__InfluenzaA__AFN17775

SEQ ID NO: 86733 - RNA, 1410 nt, Artificial Sequence
  derived and/or modified CDS sequence (opt1) from neuraminidase__InfluenzaA__AFN17785
augaaccccaaccagaagaucaucaccaucggcagcgugugcaugaccaucgggauggccaaccugauccuccagaucggcaacaucaucuccaucuggaucagccacuccauccagcuggggaaccagaaccagaucgagacgugcaaccagagcgucaucaccuacgagaacaacaccugggugaaccagaccuacgugaacaucuccaacacgaacuucgccgcgggccagagcgucguguccgugaagcuggccgggaacagcucccucugcccggucagcggcugggccaucuacuccaaggacaacagcauccgcaucggcuccaagggggacguguucgugauccgggagcccuucaucagcugcagcccccuggagugccgcaccuucuuccugacccagggcgcccuccugaacgacaagcacuccaacgggaccaucaaggaccggucccccuaccgcacgcugaugagcugcccgaucggcgagguccccucccccuacaacagccgguucgagagcguggccugguccgcgagcgccugccacgacgggaucaacuggcucaccaucggcaucuccggccccgacaacggggccguggccguccugaaguacaacggcaucaucaccgacaccaucaagagcuggcgcaacaacauccugcggacgcaggaguccgagugcgcgugcgugaacgggagcugcuucacccucaugaccgacggcccguccgacggccaggccagcuacaagaucuuccgcaucgagaaggggaagaucgugaaguccgucgagaugaacgcccccaacuaccacuacgaggagugcagcugcuaccccgacuccagcgagaucacgugcgugugccgggacaacuggcacggcuccaaccgccccugggugagcuucaaccagaaccuggaguaccagaucggguacaucugcuccggcaucuucggggacaacccgcggcccaacgacaagaccggcagcugcggccccgucuccagcaacggggccaacggcgugaagggguucuccuucaaguacggcaacgggguguggaucggccgcaccaagagcaucagcucccggaacggcuucgagaugaucugggaccccaacggguggaccggcaccgacaacacguucagcaucaagcaggacaucgucgggaucaacgagugguccggcuacagcggguccuucgugcagcacccggagcugaccggccucgacugcauccgccccugcuucuggguggagcugauccggggccgccccaaggagaacaccaucuggaccagcggguccagcaucuccuucugcggcgucaacagcgacacgguggggugguccuggcccgacggcgccgagcugccguucaccaucgacaaguga

SEQ ID NO: 86734 - RNA, 1410 nt, Artificial Sequence
  derived and/or modified CDS sequence (opt1) from neuraminidase__InfluenzaA__AFN17795
augaaccccaaccagaagaucaucaccaucggcagcgugugcaugaccaucgggauggccaaccugauccuccagaucggcaacaucaucuccaucuggaucagccacuccauccagcuggggaaccagaaccagaucgagacgugcaaccagagcgucaucaccuacgagaacaacaccugggugaaccagaccuacgugaacaucuccaacacgaacuucgccgcgggccagagcgucguguccgugaagcuggccgggaacagcucccucugcccggucggcggcugggccaucuacagcaaggacaacuccauccgcaucgggagcaagggcgacguguucgugauccgggagcccuucaucuccugcagcccccuggagugccgcaccuucuuccugacccagggggcccuccugaacgacaagcacuccaacggcaccaucaaggaccggagccccuaccgcacgcugauguccugcccgaucggggagguccccagccccuacaacucccgguucgagagcguggccuggagcgcguccgccugccacgacggcaucaacuggcucaccaucggcaucagcgggcccgacaacggcgccguggccguccugaaguacaacgggaucaucaccgacaccaucaaguccuggcgcaacaacauccugcggacgcaggagagcgagugcgcgugcgugaacggcuccugcuucaccgugaugaccgacggcccgagcgacgggcaggccuccuacaagaucuuccgcaucgagaagggcaagaucgucaagagcguggagaugaacgcccccaacuaccacuacgaggagugcuccugcuaccccgacagcuccgagaucacgugcgugugccgggacaacuggcacgggagcaaccgccccugggucuccuucaaccagaaccucgaguaccagaucggcuacaucugcagcgggaucuucggcgacaacccgcggcccaacgacaagaccggcuccugcgggcccgugagcuccaacggcgccaacggggugaagggcuucagcuucaaguacgggaacggcgucuggaucggccgcaccaaguccaucagcagccggaacggguucgagaugaucugggaccccaacggcuggaccgggaccgacaacaacuucuccaucaagcaggacaucgugggcaucaacgaguggagcggguacuccggcagcuucgugcagcacccggagcugacgggccuggacugcauccgccccugcuucugggucgagcucauccgggggcgccccaaggagaacaccaucuggaccuccggcagcuccaucagcuucugcggggugaacuccgacaccgucggcuggagcuggcccgacggcgccgagcugccguucacgaucgacaaguga

SEQ ID NO: 86735 - RNA, 1410 nt, Artificial Sequence; identical to SEQ ID NO: 80762
  derived and/or modified CDS sequence (opt1) from neuraminidase__InfluenzaA__AFN17805

SEQ ID NO: 86736 - RNA, 1410 nt, Artificial Sequence
  derived and/or modified CDS sequence (opt1) from neuraminidase__InfluenzaA__AFN17815
augaaccccaaccagaagaucaucaccaucggcagcguguccaugaccaucgggauggccaaccugauccuccagaucggcaacaucaucagcaucuggaucucccacagcauccagcuggggaaccagaaccagaucgagacgugcaaccaguccgucaucaccuacgagaacaacaccugggugaaccagaccuacgugaacaucagcaacacgaacuucgccgcgggccaguccgucgugagcgugaagcuggccgggaacuccagccucugcccggucuccggcugggccaucuacagcaaggacaacuccauccgcaucggcagcaagggggacguguucgugauccgggagcccuucaucuccugcagcccccuggagugccgcaccuucuuccugacccagggcgcccuccugaacgacaagcacuccaacgggaccaucaaggaccggagccccuaccgcacgcugauguccugcccgaucggcgagguccccagccccuacaacagccgguucgaguccguggccuggagcgcguccgccugccacgacgggaucaacuggcucaccaucggcaucagcggccccgacaacggggccguggccguccugaaguacaacggcaucaucaccgacaccaucaaguccuggcgcaacaacauccugcggacgcaggagagcgagugcgcgugcgugaacggguccugcuucaccgugaugaccgacggcccgagcgacggccaggccuccuacaagaucuuccgcaucgagaaggggaagaucgucaagagcguggagaugaacgcccccaacuaccacuacgaggagugcuccugcuaccccgacagcuccgagaucacgugcgugugccgggacaacuggcacggcagcaaccgccccugggucuccuucaaccagaaccucgaguaccagaucggguacaucugcagcggcaucuucggggacaacccgcggcccaacgacaagaccggcuccugcggccccgugagcuccaacggggccaacggcgugaagggguucagcuucaaguacggcaacggggucuggaucggccgcaccaagagcaucuccagccggaacggcuucgagaugaucugggaccccaacggguggaccggcaccgacaacaacuucuccaucaagcaggacaucguggggaucaacgaguggagcggcuacuccgggagcuucgugcagcacccggagcugacgggccuggacugcauccgccccugcuucugggucgagcucauccggggccgccccaaggagaacaccaucuggaccuccgggagcuccaucagcuucugcggcgugaacuccgacaccgucggguggagcuggcccgacggcgccgagcugccguucacgaucgacaaguga

SEQ ID NO: 86737 - RNA, 1410 nt, Artificial Sequence; identical to SEQ ID NO: 80762
  derived and/or modified CDS sequence (opt1) from neuraminidase__InfluenzaA__AFN17825

SEQ ID NO: 86738 - RNA, 1410 nt, Artificial Sequence; identical to SEQ ID NO: 86395
  derived and/or modified CDS sequence (opt1) from neuraminidase__InfluenzaA__AFN17835

SEQ ID NO: 86739 - RNA, 1410 nt, Artificial Sequence; identical to SEQ ID NO: 80762
  derived and/or modified CDS sequence (opt1) from neuraminidase__InfluenzaA__AFN17845

SEQ ID NO: 86740 - RNA, 1410 nt, Artificial Sequence; identical to SEQ ID NO: 80762
  derived and/or modified CDS sequence (opt1) from neuraminidase__InfluenzaA__AFN17855

SEQ ID NO: 86741 - RNA, 1410 nt, Artificial Sequence; identical to SEQ ID NO: 82576
  derived and/or modified CDS sequence (opt1) from neuraminidase__InfluenzaA__AFN17865

SEQ ID NO: 86742 - RNA, 1410 nt, Artificial Sequence; identical to SEQ ID NO: 86395
  derived and/or modified CDS sequence (opt1) from neuraminidase__InfluenzaA__AFN17875

SEQ ID NO: 86743 - RNA, 1410 nt, Artificial Sequence; identical to SEQ ID NO: 86395
  derived and/or modified CDS sequence (opt1) from neuraminidase__InfluenzaA__AFN17885

SEQ ID NO: 86744 - RNA, 1410 nt, Artificial Sequence; identical to SEQ ID NO: 80762
  derived and/or modified CDS sequence (opt1) from neuraminidase__InfluenzaA__AFN17895

SEQ ID NO: 86745 - RNA, 1410 nt, Artificial Sequence; identical to SEQ ID NO: 86395
  derived and/or modified CDS sequence (opt1) from neuraminidase__InfluenzaA__AFN17905

SEQ ID NO: 86746 - RNA, 1410 nt, Artificial Sequence; identical to SEQ ID NO: 80762
  derived and/or modified CDS sequence (opt1) from neuraminidase__InfluenzaA__AFN17911

SEQ ID NO: 86747 - RNA, 1410 nt, Artificial Sequence; identical to SEQ ID NO: 86395
  derived and/or modified CDS sequence (opt1) from neuraminidase__InfluenzaA__AFN17921

SEQ ID NO: 86748 - RNA, 1410 nt, Artificial Sequence
  derived and/or modified CDS sequence (opt1) from neuraminidase__InfluenzaA__AFN17931
augaaccccaaccagaagaucaucaccaucggcagcgugugcaugaccaucgggauggccaaccugauccuccagaucggcaacaucaucuccaucuggaucagccacuccauccagcuggggaaccagaaccagaucgagacgugcaaccagagcgucaucaccuacgagaacaacaccugggugaaccagaccuacgugaacaucuccaacacgaacuucgccgcgggccagagcgucguguccgugaagcuggccgggaacagcucccucugcccggucagcggcugggccaucuacuccaaggacaacagcauccgcaucggcucccgcggggacguguucgugauccgggagcccuucaucagcugcagcccccuggagugccggaccuucuuccugacccagggcgcccuccugaacgacaagcacuccaacgggaccaucaaggaccgcucccccuaccggacgcugaugagcugcccgaucggcgagguccccucccccuacaacagccgcuucgagagcguggccugguccgcgagcgccugccacgacgggaucaacuggcucaccaucggcaucuccggccccgacaacggggccguggccguccugaaguacaacggcaucaucaccgacaccaucaagagcuggcggaacaacauccugcgcacgcaggaguccgagugcgcgugcgugaacgggagcugcuucaccgugaugaccgacggcccguccgacggccaggccagcuacaagaucuuccggaucgagaaggggaagaucgucaaguccguggagaugaacgcccccaacuaccacuacgaggagugcagcugcuaccccgacuccagcgagaucacgugcgugugccgcgacaacuggcacggcuccaaccggcccugggucagcuucaaccagaaccucgaguaccgcaucggguacaucugcuccggcaucuucggggacaacccgcggcccaacgacaagaccggcagcugcggccccguguccagcaacggggccaacggcgugaagggguucuccuucaaguacggcaacggggucuggaucggccgcaccaagagcaucagcucccggaacggcuucgagaugaucugggaccccaacggguggaccggcaccgacaacaacuucagcaucaagcaggacaucguggggaucaacgagugguccggcuacagcggguccuucgugcagcacccggagcugacgggccuggacugcauccgccccugcuucugggucgagcucauccggggccgccccaaggagaacaccaucuggaccagcggguccagcaucuccuucugcggcgugaacagcgacaccgucgggugguccuggcccgacggcgccgagcugccguucacgaucgacaaguga

SEQ ID NO: 86749 - RNA, 1410 nt, Artificial Sequence; identical to SEQ ID NO: 80762
  derived and/or modified CDS sequence (opt1) from neuraminidase__InfluenzaA__AFN17941

SEQ ID NO: 86750 - RNA, 1410 nt, Artificial Sequence; identical to SEQ ID NO: 80762
  derived and/or modified CDS sequence (opt1) from neuraminidase__InfluenzaA__AFN17951

SEQ ID NO: 86751 - RNA, 1410 nt, Artificial Sequence
  derived and/or modified CDS sequence (opt1) from neuraminidase__InfluenzaA__AFN17961
augaaccccaaccagaagaucaucaccaucggcagcgugugcaugaccaucgggauggccaaccugauccuccagaucggcaacaucaucuccaucuggaucagccacuccauccagcuggggaaccagaaccagaucgagacgugcaaccagagcgucaucaccuacgagaacaacaccugggugaaccagaccuacgugaacaucuccaacacgaacuucgccgcgggccagagcgucguguccgugaagcuggccgggaacagcucccucugcccggucagcggcugggccaucuacuccaaggacaacagcauccgcaucggcuccaagggggacguguucgugauccgggagcccuucaucagcugcagcccccuggagugccgcaccuucuuccugacccagggcgcccuccugaacgacaagcacuccaacgggaccaucaaggaccggucccccuaccgcacgcugaugagcugcccgaucggcgagguccccucccccuacaacagccgguucgagagcguggccugguccgcgagcgccugccacgacgggaucaacuggcucaccaucggcaucuccggccccgacaacggggccguggccguccugaaguacaacggcaucaucaccgacaccaucaagagcuggcgcaacaacauccugcggacgcaggaguccgagugcgcgugcgugaacgggagcugcuucaccgugaugaccgacggcccguccgacggccaggccagcuacaagaucuuccgcaucgagaaggggaagaucgucaacuccguggagaugaacgcccccaacuaccacuacgaggagugcagcugcuaccccgacuccagcgagaucacgugcgugugccgggacaacuggcacggcuccaaccgccccugggucagcuucaaccagaaccucgaguaccagaucggguacaucugcuccggcaucuucggggacaacccgcggcccaacgacaagaccggcagcugcggccccguguccagcaacggggccaacggcgugaagggguucuccuucaaguacggcaacggggucuggaucggccgcaccaagagcaucagcucccggaacggcuucgagaugaucugggaccccaacggguggaccggcaccgacaacaacuucagcaucaagcaggacaucguggggaucaacgagugguccggcuacagcggguccuucgugcagcacccggagcugacgggccuggacugcauccgccccugcuucugggucgagcucauccggggccgccccaaggagaacaccaucuggaccagcggguccagcaucuccuucugcggcgugaacagcgacaccgucgggugguccuggcccgacggcgccgagcugccguucacgaucgacaaguga

SEQ ID NO: 86752 - RNA, 1410 nt, Artificial Sequence; identical to SEQ ID NO: 80762
  derived and/or modified CDS sequence (opt1) from neuraminidase__InfluenzaA__AFN17971

SEQ ID NO: 86753 - RNA, 1410 nt, Artificial Sequence; identical to SEQ ID NO: 80762
  derived and/or modified CDS sequence (opt1) from neuraminidase__InfluenzaA__AFN17981

SEQ ID NO: 86754 - RNA, 1410 nt, Artificial Sequence; identical to SEQ ID NO: 80762
  derived and/or modified CDS sequence (opt1) from neuraminidase__InfluenzaA__AFN17991

SEQ ID NO: 86755 - RNA, 1410 nt, Artificial Sequence
  derived and/or modified CDS sequence (opt1) from neuraminidase__InfluenzaA__AFN18001
augaaccccaaccagaagaucaucaccaucagcuccgugugcaugaccaucggcauggccaaccugauccuccagaucgggaacaucaucagcaucuggaucucccacagcauccagcugggcaaccagaaccagaucgagacgugcaaccaguccgucaucaccuacgagaacaacaccugggugaaccagaccuacgugaacaucagcaacacgaacuucgccgcggggcaguccgucgugagcgugaagcuggccggcaacuccagccucugcccggucuccgggugggccaucuacagcaaggacaacuccauccgcaucggcagcaagggcgacguguucgugauccgggagcccuucaucuccugcagcccccuggagugccgcaccuucuuccugacccagggggcccuccugaacgacaagcacuccaacggcaccaucaaggaccggagccccuaccgcacgcugauguccugcccgaucggggagguccccagccccuacaacagccgguucgaguccguggccuggagcgcguccgccugccacgacggcaucaacuggcucaccaucgggaucagcggccccgacaacggcgccguggccguccugaaguacaacgggaucaucaccgacaccaucaaguccuggcgcaacaacauccugcggacgcaggagagcgagugcgcgugcgugaacggcuccugcuucacccucaugaccgacgggccgagcgacggccaggccuccuacaagaucuuccgcaucgagaagggcaagaucgucaagagcguggagaugaacgcccccaacuaccacuacgaggagugcuccugcuaccccgacagcuccgagaucacgugcgugugccgggacaacuggcacgggagcaaccgccccuggguguccuucaaccagaaccuggaguaccagaucggcuacaucugcagcgggaucuucggcgacaacccgcggcccaacgacaagaccggguccugcggccccgucagcuccaacggcgccaacggggugaagggcuucagcuucaaguacgggaacggcguguggaucgggcgcaccaagagcaucuccagccggaacggcuucgagaugaucugggaccccaacggcuggaccgggaccgacaacaacuucuccaucaagcaggacaucgucggcaucaacgaguggagcggguacuccggcagcuucgugcagcacccggagcugacggggcucgacugcauccgccccugcuucuggguggagcugauccggggccgccccaaggagaacaccaucuggaccuccggcagcuccaucagcuucugcggggucaacuccgacaccgugggcuggagcuggcccgacggggccgagcugccguucacgaucgacaaguga

SEQ ID NO: 86756 - RNA, 1410 nt, Artificial Sequence; identical to SEQ ID NO: 80762
  derived and/or modified CDS sequence (opt1) from neuraminidase__InfluenzaA__AFN18011

SEQ ID NO: 86757 - RNA, 1410 nt, Artificial Sequence; identical to SEQ ID NO: 80762
  derived and/or modified CDS sequence (opt1) from neuraminidase__InfluenzaA__AFN18021

SEQ ID NO: 86758 - RNA, 1410 nt, Artificial Sequence
  derived and/or modified CDS sequence (opt1) from neuraminidase__InfluenzaA__AFN18031
augaaccccaaccagaagaucaucaccaucggcagcaucugcaugaccaucgggauggccaaccugauccuccagaucggcaacaucaucuccaucuggaucagccacuccauccagcuggggaaccagaaccagaucgagacgugcaaccagagcgugaucaccuacgagaacaacaccugggucaaccagaccuacgugaacaucuccaacacgaacuucgccgcgggccagagcguggucuccgugaagcuggccgggaacagcucccucugcccggugagcggcugggccaucuacuccaaggacaacagcauccgcaucggcuccaagggggacgucuucgugauccgggagcccuucaucagcugcagcccccuggagugccgcaccuucuuccugacccagggcgcccuccugaacgacaagcacuccaacgggaccaucaaggaccggucccccuaccgcacgcugaugagcugcccgaucggcgaggugcccucccccuacaacagccgguucgagagcgucgccugguccgcgagcgccugccacgacgggaucaacuggcucaccaucggcaucuccggccccgacaacggggccguggccgugcugaaguacaacggcaucaucaccgacaccaucaagagcuggcgcaacaacauccugcggacgcaggaguccgagugcgcgugcgucaacgggagcugcuucacccucaugaccgacggcccguccgacggccaggccagcuacaagaucuuccgcaucgagaaggggaagaucgugaaguccguggagaugaacgcccccaacuaccacuacgaggagugcagcugcuaccccgacuccagcgagaucacgugcgucugccgggacaacuggcacggcuccaaccgccccugggugagcuucaaccagaaccuggaguaccagaucggguacaucugcuccggcaucuucggggacaacccgcggcccaacgacaagaccggcagcugcggccccguguccagcaacggggccaacggcgucaagggguucuccuucaaguacggcaacgggguguggaucggccgcaccaagagcaucagcucccggaacggcuucgagaugaucugggaccccaacggguggaccggcaccgacaacaacuucagcaucaagcaggacaucguggggaucaacgagugguccggcuacagcggguccuucguccagcacccggagcugacgggccucgacugcauccgccccugcuucuggguggagcugauccggggccgccccaaggagaacaccaucuggaccagcggguccagcaucuccuucugcggcgugaacagcgacaccgucgggugguccuggcccgacggcgccgagcugccguucacgaucgacaaguga

SEQ ID NO: 86759 - RNA, 1410 nt, Artificial Sequence; identical to SEQ ID NO: 80762
  derived and/or modified CDS sequence (opt1) from neuraminidase__InfluenzaA__AFN18041

SEQ ID NO: 86760 - RNA, 1410 nt, Artificial Sequence; identical to SEQ ID NO: 86395
  derived and/or modified CDS sequence (opt1) from neuraminidase__InfluenzaA__AFN18051

SEQ ID NO: 86761 - RNA, 1410 nt, Artificial Sequence; identical to SEQ ID NO: 86395
  derived and/or modified CDS sequence (opt1) from neuraminidase__InfluenzaA__AFN18061

SEQ ID NO: 86762 - RNA, 1410 nt, Artificial Sequence; identical to SEQ ID NO: 80762
  derived and/or modified CDS sequence (opt1) from neuraminidase__InfluenzaA__AFN18070

SEQ ID NO: 86763 - RNA, 1410 nt, Artificial Sequence; identical to SEQ ID NO: 80762
  derived and/or modified CDS sequence (opt1) from neuraminidase__InfluenzaA__AFN18080

SEQ ID NO: 86764 - RNA, 1410 nt, Artificial Sequence; identical to SEQ ID NO: 80762
  derived and/or modified CDS sequence (opt1) from neuraminidase__InfluenzaA__AFN18090

SEQ ID NO: 86765 - RNA, 1410 nt, Artificial Sequence; identical to SEQ ID NO: 80762
  derived and/or modified CDS sequence (opt1) from neuraminidase__InfluenzaA__AFN18100

SEQ ID NO: 86766 - RNA, 1410 nt, Artificial Sequence; identical to SEQ ID NO: 80762
  derived and/or modified CDS sequence (opt1) from neuraminidase__InfluenzaA__AFN18106

SEQ ID NO: 86767 - RNA, 1410 nt, Artificial Sequence
  derived and/or modified CDS sequence (opt1) from neuraminidase__InfluenzaA__AFN18108
augaaccccaaccagaagaucaucaccaucggcagcgugugcaugaccaucgggauggccaaccugauccuccagaucggcaacaucaucuccaucuggaucagccacuccauccagcuggggaaccagaaccagaucgagacgugcaaccagagcgucaucaccuacgagaacaacaccugggugaaccagaccuacgugaacaucuccaacacgaacuucgccgcgggccagagcgucguguccgugaagcuggccgggaacagcucccucugcccggucagcggcugggccaucuacuccaaggacaacagcauccgcaucggcuccaagggggacguguucgugauccgggagcccuucaucagcugcagcccccuggagugccgcaccuucuuccugacccagggcgcccuccugaacgacaagcacuccaacgggaccaucaaggaccggucccccuaccgcacgcugaugagcugcccgaucggcgagguccccucccccuacaacagccgguucgagagcguggccugguccgcgagcgccugccacgacgggaucaacuggcucaccaucggcaucuccggccccgacaacggggccguggccguccugaaguacaacggcaucaucaccgacaccaucaagagcuggcgcaacaacauccugcggacgcaggaguccgagugcgcgugcgugaacgggagcugcuucaccgugaugaccgacggcccguccgacggccaggccagcuacaagaucuuccgcaucgagaaggggaagaucgucaaguccguggagaugaacgcccccaacuaccacuacgaggagugcagcugcuaccccgacuccagcgagaucacgugcgugugccgggacaacuggcacggcuccaaccgccccugggucagcuucaaccagaaccucgaguaccggaucggguacaucugcuccggcaucuucggggacaacccgcgccccaacgacaagaccggcagcugcggccccgugcuguccaacggggccaacggcgugaagggguucagcuucaaguacggcaacggggucuggaucggccggaccaaguccaucagcagccgcaacggcuucgagaugaucugggaccccaacggguggaccggcaccgacaacaacuucuccaucaagcaggacaucguggggaucaacgaguggagcggcuacuccgggagcuucgugcagcacccggagcugacgggccucgacugcauccggcccugcuucugggucgagcugauccgcggccggcccaaggagaacaccaucuggaccuccgggagcuccaucagcuucugcggcgugaacuccgacaccgucggguggagcuggcccgacggcgccgagcugccguucacgaucgacaaguga

SEQ ID NO: 86768 - RNA, 1410 nt, Artificial Sequence
  derived and/or modified CDS sequence (opt1) from neuraminidase__InfluenzaA__AFN18118
augaaccccaaccagaagaucaucaccaucggcagcgugugcaugaccaucgggauggccaaccugauccuccagaucggcaacaugaucuccaucuggaucagccacuccauccagcuggggaaccagaaccagaucgagacgugcaaccagagcgucaucaccuacgagaacaacaccugggugaaccagaccuacgugaagaucuccaacacgaacuucgccgcgggccagagcgucguguccgugaagcuggccgggaacagcucccucugcccggucagcggcugggccaucuacuccaaggacaacagcauccgcaucggcuccaagggggacguguucgugauccgggagcccuucaucagcugcagcccccuggagugccgcaccuucuuccugacccagggcgcccuccugaacgacaagcacuccaacgggaccaucaaggaccggucccccuaccgcacgcugaugagcugcccgaucggcgagguccccucccccuacaacagccgguucgagagcguggccugguccgcgagcgccugccacgacgggaucaacuggcucaccaucggcaucuccggccccgacaacggggccguggccguccugaaguacaacggcaucaucaccgacaccaucaagagcuggcgcaacaacauccugcggacgcaggaguccgagugcgcgugcgugaacgggagcugcuucacccucaugaccgacggcccguccgacggccaggccagcuacaagaucuuccgcaucgagaaggggaagaucgugaaguccgucgagaugaacgcccccaacuaccacuacgaggagugcagcugcuaccccgacuccagcgagaucacgugcgugugccgggacaacuggcacggcuccaaccgccccugggugagcuucaaccagaaccuggaguaccagaucggguacaucugcuccggcaucuucggggacaacccgcggcccaacgacaagaccggcagcugcggccccgucuccagcaacggggccaacggcgugaagggguucuccuucaaguacggcaacgggguguggaucggccgcaccaagagcaucagcucccggaacggcuucgagaugaucugggaccccaacggguggaccggcaccgacaacaacuucagcaucaagcaggacaucgucgggaucaacgagugguccggcuacagcggguccuucgugcagcacccggagcugacgggccucgacugcauccgccccugcuucuggguggagcugauccggggccgccccaaggagaacaccaucuggaccagcggguccagcaucuccuucugcggcgucaacagcgacaccguggggugguccuggcccgacggcgccgagcugccguucacgaucgacaaguga

SEQ ID NO: 86769 - RNA, 1410 nt, Artificial Sequence; identical to SEQ ID NO: 80762
  derived and/or modified CDS sequence (opt1) from neuraminidase__InfluenzaA__AFN18120

SEQ ID NO: 86770 - RNA, 1410 nt, Artificial Sequence; identical to SEQ ID NO: 80762
  derived and/or modified CDS sequence (opt1) from neuraminidase__InfluenzaA__AFN18122

SEQ ID NO: 86771 - RNA, 1410 nt, Artificial Sequence; identical to SEQ ID NO: 86395
  derived and/or modified CDS sequence (opt1) from neuraminidase__InfluenzaA__AFN18128

SEQ ID NO: 86772 - RNA, 1410 nt, Artificial Sequence; identical to SEQ ID NO: 86395
  derived and/or modified CDS sequence (opt1) from neuraminidase__InfluenzaA__AFN18134

SEQ ID NO: 86773 - RNA, 1410 nt, Artificial Sequence; identical to SEQ ID NO: 80762
  derived and/or modified CDS sequence (opt1) from neuraminidase__InfluenzaA__AFN18136

SEQ ID NO: 86774 - RNA, 1410 nt, Artificial Sequence; identical to SEQ ID NO: 80762
  derived and/or modified CDS sequence (opt1) from neuraminidase__InfluenzaA__AFN18138

SEQ ID NO: 86775 - RNA, 1410 nt, Artificial Sequence
  derived and/or modified CDS sequence (opt1) from neuraminidase__InfluenzaA__AFN18140
augaaccccaaccagaagaucaucaccaucggcagcgugugcaugaccaucgggauggccaaccugauccuccagaucggcaacaucaucuccaucuggaucagccacuccauccagcuggggaaccagaaccagaucgagacgugcaaccagagcgucaucaccuacgagaacaacaccugggugaaccagaccuacgugaacaucuccaacacgaacuucgccgcgggccagagcgucguguccgugaagcuggccgggaacagcucccucugcccggucagcggcugggccaucuacuccaaggacaacagcauccgcaucggcuccaagggggacguguucgugauccgggagcccuucaucagcugcagcccccuggagugccgcaccuucuuccugacccagggcgcccuccugaacgacaagcacuccaacgggaccaucaaggaccggucccccuaccgcacgcugaugagcugcccgaucggcgagguccccucccccuacaacagccgguucgagagcguggccugguccgcgagcgccugccacgacgggaucaacuggcucaccaucggcaucuccggccccgacaacggggccguggccguccugaaguacaacggcaucaucaccgacaccaucaagagcuggcgcaacaacauccugcggacgcaggaguccgagugcgcgugcgugaacgggagcugcuucaccgugaugaccgacggcccguccgacggccaggccagcuacaagaucuuccgcaucgagaaggggaagaucgucaaguccguggagaugaacgcccccaacuaccacuacgaggagugcagcugcuaccccgacuccagcgagaucacgugcgugugccgggacaacuggcacggcuccaaccgccccugggucagcuucaaccagaaccucgaguaccggaucggguacaucugcuccggcaucuucggggacaacccgcgccccaacgacaagaccggcagcugcggccccguguccagcaacggggccaacggcgugaagggguucuccuucaaguacggcaacgggaucuggaucggccggaccaagagcaucagcucccgcaacggcuucgagaugaucugggaccccaacggguggaccggcaccgacaacaacuucagcaucaagcaggacaucgucgggaucaacgagugguccggcuacagcggguccuucgugcagcacccggagcugacgggccuggacugcauccggcccugcuucuggguggagcucauccgcggccggcccaaggagaacaccaucuggaccagcggguccagcaucuccuucugcggcgucaacagcgacaccguggggugguccuggcccgacggcgccgagcugccguucacgaucgacaaguga

SEQ ID NO: 86776 - RNA, 1410 nt, Artificial Sequence; identical to SEQ ID NO: 80762
  derived and/or modified CDS sequence (opt1) from neuraminidase__InfluenzaA__AFN18144

SEQ ID NO: 86777 - RNA, 1410 nt, Artificial Sequence; identical to SEQ ID NO: 80762
  derived and/or modified CDS sequence (opt1) from neuraminidase__InfluenzaA__AFN18150

SEQ ID NO: 86778 - RNA, 1410 nt, Artificial Sequence; identical to SEQ ID NO: 80762
  derived and/or modified CDS sequence (opt1) from neuraminidase__InfluenzaA__AFN18156

SEQ ID NO: 86779 - RNA, 1410 nt, Artificial Sequence; identical to SEQ ID NO: 80762
  derived and/or modified CDS sequence (opt1) from neuraminidase__InfluenzaA__AFN18158

SEQ ID NO: 86780 - RNA, 1410 nt, Artificial Sequence; identical to SEQ ID NO: 82576
  derived and/or modified CDS sequence (opt1) from neuraminidase__InfluenzaA__AFN18160

SEQ ID NO: 86781 - RNA, 1410 nt, Artificial Sequence
  derived and/or modified CDS sequence (opt1) from neuraminidase__InfluenzaA__AFN18166
augaaccccaaccagaagaucaucaccaucggcagcgugugcaugaccaucgggauggccaaccugauccuccagaucggcaacaucaucuccaucuggaucagccacuccauccagcuggggaaccagaaccagaucgagacgugcaaccagagcgucaucaccuacgagaacaagaccugggugaaccagaccuacgugaacaucuccaacgccaacuucgcggccggccagagcgucguguccgugaagcuggccgggaacagcucccucugcccggucagcggcugggccaucuacuccaaggacaacagcauccgcaucggcuccaagggggacguguucgugauccgggagcccuucaucagcugcagcccccuggagugccgcacguucuuccugacccagggcgcccuccugaacgacaagcacuccaacgggaccaucaaggaccggucccccuaccgcacccugaugagcugcccgaucggcgagguccccucccccuacaacagcaaguucgagagcguggcgugguccgccagcgccugccacgacgggaucaacuggcucacgaucggcaucuccggccccgacaacggggccguggcgguccugaaguacaacggcaucaucaccgacaccaucaagagcuggcggaacaacauccugcgcacccaggaguccgagugcgccugcgugaacgggagcugcuucacggugaugaccgacggcccguccgacggccaggccagcuacaagaucuuccggaucgagaaggggaagaucgucaaguccguggagaugaacgcccccaacuaccacuacgaggagugcagcugcuaccccgacuccagcgagaucacgugcgugugccgcgacaacuggcacggcuccaaccggcccugggucagcuucaaccagaaccucgaguaccagaucggguacaucugcuccggcaucuucggggacaacccgcgccccaacgacaagaccggcagcugcggccccguguccagcaacggggccaacggcgugaagggguucuccuucaaguacggcaacggggucuggaucggccggaccaagagcaucagcucccgcaacggcuucgagaugaucugggaccccaacggguggaccggcaccgacaacaacuucagcaucaagcaggacaucguggggaucaacgagugguccggcuacagcggguccuucgugcagcacccggagcugaccggccuggacugcauccggcccugcuucugggucgagcucauccgcggccggcccaaggagaacacgaucuggaccagcggguccagcaucuccuucugcggcgugaacagcgacaccgucgggugguccuggcccgacggcgcggagcugccguucaccaucgacaaguga

SEQ ID NO: 86782 - RNA, 1410 nt, Artificial Sequence; identical to SEQ ID NO: 80762
  derived and/or modified CDS sequence (opt1) from neuraminidase__InfluenzaA__AFN18172

SEQ ID NO: 86783 - RNA, 1410 nt, Artificial Sequence; identical to SEQ ID NO: 81780
  derived and/or modified CDS sequence (opt1) from neuraminidase__InfluenzaA__AFN18178

SEQ ID NO: 86784 - RNA, 1410 nt, Artificial Sequence
  derived and/or modified CDS sequence (opt1) from neuraminidase__InfluenzaA__AFN18184
augaaccccaaccagaagaucaucaccaucggcagcgugugcaugaccaucgggauggccaaccugauccuccagaucggcaacaucaucuccaucuggaucagccacuccauccagcuggggaaccagaaccagaucgagacgugcaaccagagcgucaucaccuacgagaacaacaccugggugaaccagaccuacgugaacaucuccaacacgaacuucgccgcgggccagagcauggucuccgugaagcuggccgggaacagcucccucugcccggugagcggcugggccaucuacuccaaggacaacagcauccgcaucggcuccaagggggacgucuucgugauccgggagcccuucaucagcugcagcccccuggagugccgcaccuucuuccugacccagggcgcccuccugaacgacaagcacuccaacgggaccaucaaggaccggucccccuaccgcacgcugaugagcugcccgaucggcgaggugcccucccccuacaacagccgguucgagagcgucgccugguccgcgagcgccugccacgacgggaucaacuggcucaccaucggcaucuccggccccgacaacggggccguggccgugcugaaguacaacggcaucaucaccgacaccaucaagagcuggcgcaacaacauccugcggacgcaggaguccgagugcgcgugcgucaacgggagcugcuucaccgugaugaccgacggcccguccgacggccaggccagcuacaagaucuuccgcaucgagaaggggaagaucgugaaguccgucgagaugaacgcccccaacuaccacuacgaggagugcagcugcuaccccgacuccagcgagaucacgugcgugugccgggacaacuggcacggcuccaaccgccccugggugagcuucaaccagaaccucgaguaccagaucggguacaucugcuccggcaucuucggggacaacccgcggcccaacgacaagaccggcagcugcggccccgucuccagcaacggggccaacggcgugaagggguucuccuucaaguacggcaacgggguguggaucggccgcaccaagagcaucagcucccggaacggcuucgagaugaucugggaccccaacggguggaccggcaccgacaacaacuucagcaucaagcaggacaucgucgggaucaacgagugguccggcuacagcggguccuucgugcagcacccggagcugacgggccuggacugcauccgccccugcuucuggguggagcucauccggggccgccccaaggagaacaccaucuggaccagcggguccagcaucuccuucugcggcgucaacagcgacaccguggggugguccuggcccgacggcgccgagcugccguucacgaucgacaaguga

SEQ ID NO: 86785 - RNA, 1410 nt, Artificial Sequence; identical to SEQ ID NO: 83754
  derived and/or modified CDS sequence (opt1) from neuraminidase__InfluenzaA__AFN18190

SEQ ID NO: 86786 - RNA, 1410 nt, Artificial Sequence; identical to SEQ ID NO: 84775
  derived and/or modified CDS sequence (opt1) from neuraminidase__InfluenzaA__AFN18196

SEQ ID NO: 86787 - RNA, 1410 nt, Artificial Sequence
  derived and/or modified CDS sequence (opt1) from neuraminidase__InfluenzaA__AFN18202
augaaccccaaccagaagaucaucaccaucggcagcgugugcaugaccaucgggauggccaaccugauccuccagaucggcaacaucaucuccaucuggaucagccacuccauccagcuggggaaccagaaccagaucgagacgugcaaccagagcgucaucaccuacgagaacaacaccugggugaaccagaccuacgugaacaucuccaacacgaacuucgccgcgggccgcagcgucguguccgugaagcuggccgggaacagcucccucugcccggucagcggcugggccaucuacuccaaggacaacagcauccggaucggcuccaagggggacguguucgugauccgcgagcccuucaucagcugcagcccccuggagugccggaccuucuuccugacccagggcgcccuccugaacgacaagcacuccaacgggaccaucaaggaccgcucccccuaccggacgcugaugagcugcccgaucggcgagguccccucccccuacaacagccgcuucgagagcguggccugguccgcgagcgccugccacgacgggaucaacuggcucaccaucggcaucuccggccccgacaacggggccguggccguccugaaguacaacggcaucaucaccgacaccaucaagagcuggcggaacaacauccugcgcacgcaggaguccgagugcgcgugcgugaacgggagcugcuucaccgugaugaccgacggcccguccgacggccaggccagcuacaagaucuuccggaucgagaaggggaagaucgucaaguccguggagaugaacgcccccaacuaccacuacgaggagugcagcugcuaccccgacuccagcgagaucacgugcgugugccgcgacaacuggcacggcuccaaccggcccugggucagcuucaaccagaaccucgaguaccagaucggguacaucugcuccggcaucuucggggacaacccgcgccccaacgacaagaccggcagcugcggccccguguccagcaacggggccaacggcgugaagggguucuccuucaaguacggcaacggggucuggaucggccggaccaagagcaucagcucccgcaacggcuucgagaugaucugggaccccaacggguggaccggcaccgacaacaacuucagcaucaagcaggacaucguggggaucaacgagugguccggcuacagcggguccuucgugcagcacccggagcugacgggccuggacugcauccggcccugcuucugggucgagcucauccgcggccggcccaaggagaacaccaucuggaccagcggguccagcaucuccuucugcggcgugaacagcgacaccgucgggugguccuggcccgacggcgccgagcugccguucacgaucgacaaguga

SEQ ID NO: 86788 - RNA, 1410 nt, Artificial Sequence; identical to SEQ ID NO: 80762
  derived and/or modified CDS sequence (opt1) from neuraminidase__InfluenzaA__AFN18208

SEQ ID NO: 86789 - RNA, 1410 nt, Artificial Sequence
  derived and/or modified CDS sequence (opt1) from neuraminidase__InfluenzaA__AFN18210
augaaccccaaccagaagaucaucaccaucggcagcgugugcaugaccaucgggauggccaaccugauccuccagaucggcaacaucaucuccaucuggaucagccacuccauccagcuggggaaccagaaccagaucgagacgugcaaccagagcgucaucaccuacgagaacaacaccugggugaaccagaccuacgugaacaucuccaacacgaacuucgccgcgggccagagcgucguguccgugaagcuggccgggaacagcucccucugcccggucagcggcugggccaucuacuccaaggacaacagcauccgcaucggcuccaagggggacguguucgugauccgggagcccuucaucagcugcagcccccuggagugccgcgccuucuuccugacccagggcgcccuccugaacgacaagcacuccaacgggaccaucaaggaccggucccccuaccgcacccugaugagcugcccgaucggcgagguccccucccccuacaacagccgguucgagagcguggcgugguccgccagcgccugccacgacgggaucaacuggcucacgaucggcaucuccggccccgacaacggggccguggcgguccugaaguacaacggcaucaucaccgacaccaucaagagcuggcgcaacaacauccugcggacccaggaguccgagugcgccugcgugaacgggagcugcuucacggugaugaccgacggcccguccgacggccaggccagcuacaagaucuuccgcaucgagaaggggaagaucgucaaguccguggagaugaacgcccccaacuaccacuacgaggagugcagcugcuaccccgacuccagcgagaucacgugcgugugccgggacaacuggcacggcuccaaccgccccugggucagcuucaaccagaaccucgaguaccggaucggguacaucugcuccggcaucuucggggacaacccgcgccccaacgacaagaccggcagcugcggccccguguccagcaacggggccaacggcgugaagggguucuccuucaaguacggcaacggggucuggaucggccggaccaagagcaucagcucccgcaacggcuucgagaugaucugggaccccaacggguggaccggcaccgacaacaacuucagcaucaagcaggacaucguggggaucaacgagugguccggcuacagcggguccuucgugcagcacccggagcugaccggccuggacugcauccggcccugcuucugggucgagcucauccgcggccggcugaaggagaacacgaucuggaccagcggguccagcaucuccuucugcggcgugaacagcgacaccgucgggugguccuggcccgacggcgcggagcugcccuucaccaucgacaaguga

SEQ ID NO: 86790 - RNA, 1410 nt, Artificial Sequence; identical to SEQ ID NO: 81345
  derived and/or modified CDS sequence (opt1) from neuraminidase__InfluenzaA__AFN18216

SEQ ID NO: 86791 - RNA, 1410 nt, Artificial Sequence; identical to SEQ ID NO: 83091
  derived and/or modified CDS sequence (opt1) from neuraminidase__InfluenzaA__AFN18226

SEQ ID NO: 86792 - RNA, 1410 nt, Artificial Sequence; identical to SEQ ID NO: 80762
  derived and/or modified CDS sequence (opt1) from neuraminidase__InfluenzaA__AFN18232

SEQ ID NO: 86793 - RNA, 1410 nt, Artificial Sequence; identical to SEQ ID NO: 80762
  derived and/or modified CDS sequence (opt1) from neuraminidase__InfluenzaA__AFN18234

SEQ ID NO: 86794 - RNA, 1410 nt, Artificial Sequence; identical to SEQ ID NO: 80762
  derived and/or modified CDS sequence (opt1) from neuraminidase__InfluenzaA__AFN18244

SEQ ID NO: 86795 - RNA, 1410 nt, Artificial Sequence; identical to SEQ ID NO: 80762
  derived and/or modified CDS sequence (opt1) from neuraminidase__InfluenzaA__AFN18246

SEQ ID NO: 86796 - RNA, 1410 nt, Artificial Sequence; identical to SEQ ID NO: 83091
  derived and/or modified CDS sequence (opt1) from neuraminidase__InfluenzaA__AFN18256

SEQ ID NO: 86797 - RNA, 1410 nt, Artificial Sequence; identical to SEQ ID NO: 80762
  derived and/or modified CDS sequence (opt1) from neuraminidase__InfluenzaA__AFN18262

SEQ ID NO: 86798 - RNA, 1410 nt, Artificial Sequence; identical to SEQ ID NO: 80762
  derived and/or modified CDS sequence (opt1) from neuraminidase__InfluenzaA__AFN18268

SEQ ID NO: 86799 - RNA, 1410 nt, Artificial Sequence; identical to SEQ ID NO: 80762
  derived and/or modified CDS sequence (opt1) from neuraminidase__InfluenzaA__AFN18270

SEQ ID NO: 86800 - RNA, 1410 nt, Artificial Sequence; identical to SEQ ID NO: 83751
  derived and/or modified CDS sequence (opt1) from neuraminidase__InfluenzaA__AFN18272

SEQ ID NO: 86801 - RNA, 1410 nt, Artificial Sequence; identical to SEQ ID NO: 80762
  derived and/or modified CDS sequence (opt1) from neuraminidase__InfluenzaA__AFN18274

SEQ ID NO: 86802 - RNA, 1410 nt, Artificial Sequence; identical to SEQ ID NO: 80762
  derived and/or modified CDS sequence (opt1) from neuraminidase__InfluenzaA__AFN18282

SEQ ID NO: 86803 - RNA, 1410 nt, Artificial Sequence; identical to SEQ ID NO: 80762
  derived and/or modified CDS sequence (opt1) from neuraminidase__InfluenzaA__AFN18304

SEQ ID NO: 86804 - RNA, 1410 nt, Artificial Sequence
  derived and/or modified CDS sequence (opt1) from neuraminidase__InfluenzaA__AFN18306
augaaccccaaccagaagaucaucaccaucggcagcgugugcaugaccaucgggaucgccaaccugauccuccagaucggcaacaucaucuccaucuggaucagccacuccauccagcuggggaaccagaaccagaucgagacgugcaaccagagcgucaucaccuacgagaacaacaccugggugaaccagaccuacgugaacaucuccaacacgaacuucgccgcgggccagagcgucguguccgugaagcuggccgggaacagcucccucugcccggucagcggcugggccaucuacuccaaggacaacagcauccgcaucggcuccaagggggacguguucgugauccgggagcccuucaucagcugcagcccccuggagugccgcaccuucuuccugacccagggcgcccuccugaacgacaagcacuccaacgggaccaucaaggaccggucccccuaccgcacgcugaugagcugcccgaucggcgagguccccucccccuacaacagccgguucgagagcguggccugguccgcgagcgccugccacgacgggaucaacuggcucaccaucggcaucuccggccccgacaacggggccguggccguccugaaguacaacggcaucaucaccgacaccaucaagagcuggcgcaacaacauccugcggacgcaggaguccgagugcgcgugcgugaacgggagcugcuucaccgugaugaccgacggcccguccgacggccaggccagcuacaagaucuuccgcaucgagaaggggaagaucgucaaguccguggagaugaacgcccccaacuaccacuacgaggagugcagcugcuaccccgacuccagcgagaucacgugcgugugccgggacaacuggcacggcuccaaccgccccugggucagcuucaaccagaaccucgaguaccagaucggguacaucugcuccggcaucuucggggacaacccgcggcccaacgacaagaccggcagcugcggccccguguccagcaacggggccaacggcgugaagggguucuccuucaaguacggcaacggggucuggaucggccgcaccaagagcaucagcucccggaacggcuucgagaugaucugggaccccaacggguggaccggcaccgacaacaacuucagcaucaagcaggacaucguggggaucaacgagugguccggcuacagcggguccuucgugcagcacccggagcugacgggccuggacugcauccgccccugcuucugggucgagcucauccggggccgccccaaggagaacaccaucuggaccagcggguccagcaucuccuucugcggcgugaacagcgacaccgucgggugguccuggcccgacggcgccgagcugccguucacgaucgacaaguga

SEQ ID NO: 86805 - RNA, 1410 nt, Artificial Sequence
  derived and/or modified CDS sequence (opt1) from neuraminidase__InfluenzaA__AFN18308
augaaccccaaccagaagaucaucaccaucggcagcgugugcaugaccaucgggauggccaaccugauccuccagaucggcaacaucaucuccaucuggaucagccacuccauccagcuggggaaccagaaccagaucgagacgugcaaccagagcgucaucaccuacgagaacaacaccugggugaaccagaccuacgugaacaucuccaacacgaacuucgccgcgggccagagcgucguguccgugaagcuggccgggaacagcucccucugcccggucagcggcugggccaucuacuccaaggacaacagcauccgcaucggcuccaagggggacguguucgugauccgggagcccuucaucagcugcagcccccuggagugccgcaccuucuuccugacccagggcgcccuccugaacgacaagcacuccaacgggaccaucaaggaccggucccccuaccgcacgcugaugagcugcccgaucggcgagguccccucccccuacaacagccgguucgagagcguggccugguccgcgagcgccugccacgacgggaucaacuggcucaccaucggcaucuccggccccgacaacggggccguggccguccugaaguacaacggcaucaucaccgacaccaucaagagcuggcgcaacaacauccugcggacgcaggaguccgagugcgcgugcgugaacgggagcugcuucaccgugaugaccgacggcccguccgacggccaggccagcuacaagaucuuccgcaucgagaaggggaagaucgucaaguccguggagaugaacgcccccaacuaccacuacgaggagugcagcugcuaccccgacuccagcgagaucacgugcgugugccgggacaacuggcacggcuccaaccgccccugggucagcuucaaccagaaccucgaguaccagaucggguacaucugcuccggcaucuucggggacaacccgcggcccaacgacaagaccggcagcugcggccccguguccagcaagggggccaacggcgugaagggguucuccuucaaguacggcaacggggucuggaucggccgcaccaagagcaucagcucccggaacggcuucgagaugaucugggaccccaacggguggaccggcaccgacaacaacuucagcaucaagcaggacaucguggggaucaacgagugguccggcuacagcggguccuucgugcagcacccggagcugacgggccuggacugcauccgccccugcuucugggucgagcucauccggggccgccccaaggagaacaccaucuggaccagcggguccagcaucuccuucugcggcgugaacagcgacaccgucgggugguccuggcccgacggcgccgagcugccguucacgaucgacaaguga

SEQ ID NO: 86806 - RNA, 1410 nt, Artificial Sequence
  derived and/or modified CDS sequence (opt1) from neuraminidase__InfluenzaA__AFN18314
augaaccccaaccagaagaucaucaccaucggcagcgugugcaugaccaucgggauggccaaccugauccuccagaucggcaacaucaucuccaucuggaucagccacuccauccagcuggggaaccagaaccagaucgagacgugcaaccagagcgucaucaccuacgagaacaacaccugggugaaccagaccuacgugaacaucuccaacacgaacuucgccgcgggccagagcgucguguccgugaagcuggccgggaacagcucccucugcccggucagcggcugggccaucuacuccaaggacaacagcauccgcaucggcuccaagggggacguguucgugauccgggagcccuucaucagcugcagcccccuggagugccgcaccuucuuccugacccagggcgcccuccugaacgacaagcacuccaacgggaccaucaaggaccggucccccuaccgcacgcugaugagcugcccgaucggcgagguccccucccccuacaacagccgguucgagagcguggccugguccgcgagcgccugccacgacgggaucaacuggcucaccaucggcaucuccggccccgacaacggggccguggccguccugaaguacaacggcaucaucaccgacaccaucaagagcuggcgcaacaacauccugcggacgcaggaguccgagugcgcgugcgugaacgggagcugcuucaccgugaugaccgacggcccguccgacggccaggccagcuacaagaucuuccgcaucgagaaggggaagaucgucaaguccguggagaugaacgcccccaacuaccacuacgaggagugcagcugcuaccccgacuccagcgagaucacgugcgugugccgggacaacuggcacggcuccaaccgccccugggucagcuucaaccagaaccucgaguaccagaucggguacaucugcuccggcaucuucggggacaacccgcggcccaacgacaagaccggcagcugcggccccguguccagcaacggggccaacggcgugaagggguucuccuucaaguacggcaacggggucuggaucggccgcaccaagagcaucagcucccggaacggcuucgagaugaucugggaccccaacggguggaccggcaccgacaacaacuucagcaucaagcaggacaucguggggaucaacgagugguccggcuacagcggguccuucgugcagcacccggagcugacgggccuggacugcauccgccccugcuucugggucgagcucauccggggccgccccaaggagaagaccaucuggaccagcggguccagcaucuccuucugcggcgugaacagcgacaccgucgggugguccuggcccgacggcgccgagcugccguucacgaucgacaaguga

SEQ ID NO: 86807 - RNA, 1410 nt, Artificial Sequence; identical to SEQ ID NO: 80762
  derived and/or modified CDS sequence (opt1) from neuraminidase__InfluenzaA__AFN18320

SEQ ID NO: 86808 - RNA, 1410 nt, Artificial Sequence
  derived and/or modified CDS sequence (opt1) from neuraminidase__InfluenzaA__AFN18326
augaaccccaaccagaagaucaucaccaucggcagcgugugcaugaccaucgggauggccaaccugcuccugcagaucggcaacaucaucuccaucuggaucagccacuccauccagcuggggaaccagaaccagaucgagacgugcaaccagagcgucaucaccuacgagaacaacaccugggugaaccagaccuacgugaacaucuccaacacgaacuucgccgcgggccagagcgucguguccgugaagcucgccgggaacagcucccugugcccggucagcggcugggccaucuacuccaaggacaacagcauccgcaucggcuccaagggggacguguucgugauccgggagcccuucaucagcugcagcccccuggagugccgcaccuucuuccucacccagggcgcccugcugaacgacaagcacuccaacgggaccaucaaggaccggucccccuaccgcacgcucaugagcugcccgaucggcgagguccccucccccuacaacagccgguucgagagcguggccugguccgcgagcgccugccacgacgggaucaacuggcugaccaucggcaucuccggccccgacaacggggccguggccguccugaaguacaacggcaucaucaccgacaccaucaagagcuggcgcaacaacauccuccggacgcaggaguccgagugcgcgugcgugaacgggagcugcuucaccgugaugaccgacggcccguccgacggccaggccagcuacaagaucuuccgcaucgagaaggggaagaucgucaaguccguggagaugaacgcccccaacuaccacuacgaggagugcagcugcuaccccgacuccagcgagaucacgugcgugugccgggacaacuggcacggcuccaaccgccccugggucagcuucaaccagaaccuggaguaccagaucggguacaucugcuccggcaucuucggggacaacccgcggcccaacgacaagaccggcagcugcggccccguguccagcaacggggccaacggcgugaagggguucuccuucaaguacggcaacggggucuggaucggccgcaccaagagcaucagcucccggaacggcuucgagaugaucugggaccccaacggguggaccggcaccgacaacaacuucagcaucaagcaggacaucguggggaucaacgagugguccggcuacagcggguccuucgugcagcacccggagcugacgggccucgacugcauccgccccugcuucugggucgagcugauccggggccgccccaaggagaacaccaucuggaccagcggguccagcaucuccuucugcggcgugaacagcgacaccgucgggugguccuggcccgacggcgccgagcugccguucacgaucgacaaguga

SEQ ID NO: 86809 - RNA, 1410 nt, Artificial Sequence; identical to SEQ ID NO: 80762
  derived and/or modified CDS sequence (opt1) from neuraminidase__InfluenzaA__AFN18336

SEQ ID NO: 86810 - RNA, 1410 nt, Artificial Sequence; identical to SEQ ID NO: 80762
  derived and/or modified CDS sequence (opt1) from neuraminidase__InfluenzaA__AFN18346

SEQ ID NO: 86811 - RNA, 1410 nt, Artificial Sequence; identical to SEQ ID NO: 86395
  derived and/or modified CDS sequence (opt1) from neuraminidase__InfluenzaA__AFN18356

SEQ ID NO: 86812 - RNA, 1410 nt, Artificial Sequence
  derived and/or modified CDS sequence (opt1) from neuraminidase__InfluenzaA__AFN18366
augaaccccaaccagaagaucaucaccaucggcagcgugugcaugaccaucgggauggccaaccugauccuccagaucggcaacaucaucuccaucuggaucagccacuccauccagcuggggaaccagaaccagaucgagacgugcaaccagagcgucaucaccuacgagaacaacaccugggugaaccagaccuacgugaacaucuccaacacgaacuucgccgcggagcagagcgucguguccgugaagcuggccggcaacagcucccucugcccggucagcgggugggccaucuacuccaaggacaacagcauccgcaucggcuccaagggcgacguguucgugauccgggagcccuucaucagcugcagcccccuggagugccgcaccuucuuccugacccagggggcccuccugaacgacaagcacuccaacggcaccaucaaggaccggucccccuaccgcacgcugaugagcugcccgaucggggagguccccucccccuacaacagccgguucgagagcguggccugguccgcgagcgccugccacgacggcaucaacuggcucaccaucgggaucuccggccccgacaacggcgccguggccguccugaaguacaacgggaucaucaccgacaccaucaagagcuggcgcaacaacauccugcggacgcaggaguccgagugcgcgugcgugaacggcagcugcuucaccgugaugaccgacgggccguccgacggccaggccagcuacaagaucuuccgcaucgagaagggcaagaucgucaaguccguggagaugaacgcccccaacuaccacuacgaggagugcagcugcuaccccgacuccagcgaggugaccugcgucugccgggacaacuggcacggguccaaccgccccugggugagcuucaaccagaaccucgaguaccagaucggcuacaucugcuccgggaucuucggcgacaacccgcggcccaacgacaagacggggagcugcggccccguguccagcaacggcgccaacggggucaagggcuucuccuucaaguacgggaacggcguguggaucgggcgcaccaagagcaucagcucccggaacggcuucgagaugaucugggaccccaacggcuggaccgggaccgacaacaacuucagcaucaagcaggacaucgugggcaucaacgagugguccggguacagcggcuccuucguccagcacccggagcugacggggcuggacugcauccgccccugcuucuggguggagcucauccggggccgccccaaggagaacaccaucuggaccagcggcuccagcaucuccuucugcggggucaacagcgacaccgugggcugguccuggcccgacggggccgagcugccguucacgaucgacaaguga

SEQ ID NO: 86813 - RNA, 1410 nt, Artificial Sequence; identical to SEQ ID NO: 86395
  derived and/or modified CDS sequence (opt1) from neuraminidase__InfluenzaA__AFN18376

SEQ ID NO: 86814 - RNA, 1410 nt, Artificial Sequence; identical to SEQ ID NO: 80762
  derived and/or modified CDS sequence (opt1) from neuraminidase__InfluenzaA__AFN18382

SEQ ID NO: 86815 - RNA, 1410 nt, Artificial Sequence; identical to SEQ ID NO: 80762
  derived and/or modified CDS sequence (opt1) from neuraminidase__InfluenzaA__AFN18392

SEQ ID NO: 86816 - RNA, 1410 nt, Artificial Sequence; identical to SEQ ID NO: 80762
  derived and/or modified CDS sequence (opt1) from neuraminidase__InfluenzaA__AFN18402

SEQ ID NO: 86817 - RNA, 1410 nt, Artificial Sequence; identical to SEQ ID NO: 80762
  derived and/or modified CDS sequence (opt1) from neuraminidase__InfluenzaA__AFN18412

SEQ ID NO: 86818 - RNA, 1410 nt, Artificial Sequence; identical to SEQ ID NO: 80762
  derived and/or modified CDS sequence (opt1) from neuraminidase__InfluenzaA__AFN18422

SEQ ID NO: 86819 - RNA, 1410 nt, Artificial Sequence; identical to SEQ ID NO: 80762
  derived and/or modified CDS sequence (opt1) from neuraminidase__InfluenzaA__AFN18432

SEQ ID NO: 86820 - RNA, 1410 nt, Artificial Sequence; identical to SEQ ID NO: 80762
  derived and/or modified CDS sequence (opt1) from neuraminidase__InfluenzaA__AFN18442

SEQ ID NO: 86821 - RNA, 1410 nt, Artificial Sequence; identical to SEQ ID NO: 80762
  derived and/or modified CDS sequence (opt1) from neuraminidase__InfluenzaA__AFN18452

SEQ ID NO: 86822 - RNA, 1410 nt, Artificial Sequence; identical to SEQ ID NO: 80762
  derived and/or modified CDS sequence (opt1) from neuraminidase__InfluenzaA__AFN18462

SEQ ID NO: 86823 - RNA, 1410 nt, Artificial Sequence
  derived and/or modified CDS sequence (opt1) from neuraminidase__InfluenzaA__AFN18472
augaaccccaaccagaagaucaucaccaucggcagcgugugcaugaccaucgggauggccaaccugauccuccagaucggcaacaucaucuccaucuggaucagccacuccauccagcuggggaaccagaaccagaucgagacgugcaaccagagcgucaucaccuacgagaacaacaccugggugaaccagaccuacgugaacaucuccaacacgaacuucgccgcgggccagagcgucguguccgugaagcuggccgggaacagcucccucugcccggucagcggcugggccaucuacuccaaggacaacagcauccgcaucggcuccaagggggacguguucgugauccgggagcccuucaucagcugcagcccccuggagugccgcaccuucuuccugacccagggcgcccuccugaacgacaagcacuccaacgggaccaucaaggaccggucccccuaccgcacgcugaugagcugcccgaucggcgagguccccucccccuacaacagccgguucgagagcguggccugguccgcgagcgccugccacgacgggaucaacuggcucaccaucggcaucuccggccccgacaacggggccguggccguccugaaguacaacggcaucaucaccgacaccaucaagagcuggcgcaacaacauccugcggacgcaggaguccgagugcgcgugcgugaacgggagcugcuucaccgugaugaccgacggcccguccgacggccaggccagcuacaagaucuuccgcaucgagaaggggaagaucgucaaguccguggagaugaacgcccccaacuaccacuacgaggagugcagcugcuaccccgacuccagcgagaucacgugcgugugccgggacaacuggcacggcuccaaccgccccugggucagcuucaaccagaaccucgaguaccagaucggguacaucugcuccggcaucuucggggacaacccgcggcccaacgacaagaccggcagcugcggccccguguccagcaacggggccaagggcgugaagggguucuccuucaaguacggcaacggggucuggaucggccgcaccaagagcaucagcucccggaacggcuucgagaugaucugggaccccaacggguggaccggcaccgacaacaacuucagcaucaagcaggacaucguggggaucaacgagugguccggcuacagcggguccuucgugcagcacccggagcugacgggccuggacugcauccgccccugcuucugggucgagcucauccggggccgccccaaggagaacaccaucuggaccagcggguccagcaucuccuucugcggcgugaacagcgacaccgucgggugguccuggcccgacggcgccgagcugccguucacgaucgacaaguga

SEQ ID NO: 86824 - RNA, 1410 nt, Artificial Sequence; identical to SEQ ID NO: 80762
  derived and/or modified CDS sequence (opt1) from neuraminidase__InfluenzaA__AFN18482

SEQ ID NO: 86825 - RNA, 1410 nt, Artificial Sequence; identical to SEQ ID NO: 80762
  derived and/or modified CDS sequence (opt1) from neuraminidase__InfluenzaA__AFN18492

SEQ ID NO: 86826 - RNA, 1410 nt, Artificial Sequence
  derived and/or modified CDS sequence (opt1) from neuraminidase__InfluenzaA__AFN18514
augaaccccaaccagaagaucaucaccaucggcagcgugugcaugaccaucgggauggccaaccugauccuccagaucggcaacaucaucuccaucuggaucagccacuccauccagcuggggaaccagaaccagaucgagacgugcaaccagagcgucaucaccuacgagaacaacaccugggugaaccagaccuacgugaacaucuccaacacgaacuucgccgcgggccagagcgucguguccgugaagcuggucgggaacagcucccucugcccggugagcggcugggccaucuacuccaaggacaacagcauccgcaucggcuccaagggggacguguucgucauccgggagcccuucaucagcugcagcccccuggagugccgcaccuucuuccugacccagggcgcccuccugaacgacaagcacuccaacgggaccaucaaggaccggucccccuaccgcacgcugaugagcugcccgaucggcgaggugcccucccccuacaacagccgguucgagagcguggccugguccgccagcgcgugccacgacgggaucaacuggcucaccaucggcaucuccggccccgacaacggggccgucgccgugcugaaguacaacggcaucaucaccgacaccaucaagagcuggcgcaacaacauccugcggacgcaggaguccgagugcgccugcgugaacgggagcugcuucaccgucaugaccgacggcccguccgacggccaggcgagcuacaagaucuuccgcaucgagaaggggaagaucgugaaguccguggagaugaacgcccccaacuaccacuacgaggagugcagcugcuaccccgacuccagcgagaucacgugcgucugccgggacaacuggcacggcuccaaccgccccugggugagcuucaaccagaaccucgaguaccagaucggguacaucugcuccggcaucuucggggacaacccgcggcccaacgacaagaccggcagcugcggccccguguccagcaacggggccaacggcgucaagggguucuccuucaaguacggcaacgggguguggaucggccgcaccaagagcaucagcucccggaacggcuucgagaugaucugggaccccaacggguggaccggcaccgacaacaacuucagcaucaagcaggacaucguggggaucaacgagugguccggcuacagcggguccuucguccagcacccggagcugacgggccuggacugcauccgccccugcuucuggguggagcucauccggggccgccccaaggagaacaccaucuggaccagcggguccagcaucuccuucugcggcgucaacagcgacaccguggggugguccuggcccgacggcgccgagcugccguucacgaucgacaaguga

SEQ ID NO: 86827 - RNA, 1410 nt, Artificial Sequence
  derived and/or modified CDS sequence (opt1) from neuraminidase__InfluenzaA__AFN18520
augaaccccaaccagaagaucaucaccaucggcagcgugugcaugaccaucgggauggccaaccugauccuccagaucggcaacaucaucuccaucuggaucagccacuccauccagcuggggaaccagaaccagaucgagacgugcaaccagagcgucaucaccuacgagaacaacaccugggugaaccagaccuacgugaacaucuccaacacgaacuucgccgcgggccagagcgucguguccgugaagcuggccgggaacagcucccucugcccggucagcggcugggccaucuacuccaaggacaacagcauccgcaucggcuccaagggggacguguucgugauccgggagcccuucaucagcugcagcccccuggagugccgcaccuucuuccugacccagggcgcccuccugaacgacaagcacuccaacgggaccaucaaggaccggucccccuaccgcacgcugaugagcugcccgaucggcgagguccccucccccuacaacagccgguucgagagcguggccugguccgcgagcgccugccacgacgggaucaacuggcucaccaucggcaucuccggccccgacaacggggccguggccguccugaaguacaacggcgugaucaccgacaccaucaagagcuggcgcaacaacauccugcggacgcaggaguccgagugcgcgugcgugaacgggagcugcuucacccucaugaccgacggcccguccgacggccaggccagcuacaagaucuuccgcaucgagaaggggaagaucgucaaguccguggagaugaacgcccccaacuaccacuacgaggagugcagcugcuaccccgacuccagcgagaucacgugcgugugccgggacaacuggcacggcuccaaccgccccugggucagcuucaaccagaaccuggaguaccagaucggguacaucugcuccggcaucuucggggacaacccgcggcccaacgacaagaccggcagcugcggccccguguccagcaacggggccaacggcgugaagggguucuccuucaaguacggcaacggggucuggaucggccgcaccaagagcaucagcucccggaacggcuucgagaugaucugggaccccaacggguggaccggcaccgacaacaacuucagcaucaagcaggacaucguggggaucaacgagugguccggcuacagcggguccuucgugcagcacccggagcugacgggccucgacugcauccgccccugcuucugggucgagcugauccggggccgccccaaggagaacaccaucuggaccagcggguccagcaucuccuucugcggcgugaacagcgacaccgucgggugguccuggcccgacggcgccgagcugccguucacgaucgacaaguga

SEQ ID NO: 86828 - RNA, 1410 nt, Artificial Sequence; identical to SEQ ID NO: 80762
  derived and/or modified CDS sequence (opt1) from neuraminidase__InfluenzaA__AFN18522

SEQ ID NO: 86829 - RNA, 1410 nt, Artificial Sequence; identical to SEQ ID NO: 80762
  derived and/or modified CDS sequence (opt1) from neuraminidase__InfluenzaA__AFN18524

SEQ ID NO: 86830 - RNA, 1410 nt, Artificial Sequence; identical to SEQ ID NO: 86395
  derived and/or modified CDS sequence (opt1) from neuraminidase__InfluenzaA__AFN18530

SEQ ID NO: 86831 - RNA, 1410 nt, Artificial Sequence; identical to SEQ ID NO: 80762
  derived and/or modified CDS sequence (opt1) from neuraminidase__InfluenzaA__AFN18532

SEQ ID NO: 86832 - RNA, 1410 nt, Artificial Sequence; identical to SEQ ID NO: 80762
  derived and/or modified CDS sequence (opt1) from neuraminidase__InfluenzaA__AFN18538

SEQ ID NO: 86833 - RNA, 1410 nt, Artificial Sequence; identical to SEQ ID NO: 80762
  derived and/or modified CDS sequence (opt1) from neuraminidase__InfluenzaA__AFN18544

SEQ ID NO: 86834 - RNA, 1410 nt, Artificial Sequence; identical to SEQ ID NO: 80762
  derived and/or modified CDS sequence (opt1) from neuraminidase__InfluenzaA__AFN18546

SEQ ID NO: 86835 - RNA, 1410 nt, Artificial Sequence; identical to SEQ ID NO: 80762
  derived and/or modified CDS sequence (opt1) from neuraminidase__InfluenzaA__AFN18552

SEQ ID NO: 86836 - RNA, 1410 nt, Artificial Sequence; identical to SEQ ID NO: 80762
  derived and/or modified CDS sequence (opt1) from neuraminidase__InfluenzaA__AFN18558

SEQ ID NO: 86837 - RNA, 1410 nt, Artificial Sequence; identical to SEQ ID NO: 80762
  derived and/or modified CDS sequence (opt1) from neuraminidase__InfluenzaA__AFN18560

SEQ ID NO: 86838 - RNA, 1410 nt, Artificial Sequence; identical to SEQ ID NO: 80762
  derived and/or modified CDS sequence (opt1) from neuraminidase__InfluenzaA__AFN18562

SEQ ID NO: 86839 - RNA, 1410 nt, Artificial Sequence; identical to SEQ ID NO: 80762
  derived and/or modified CDS sequence (opt1) from neuraminidase__InfluenzaA__AFN18564

SEQ ID NO: 86840 - RNA, 1410 nt, Artificial Sequence; identical to SEQ ID NO: 80762
  derived and/or modified CDS sequence (opt1) from neuraminidase__InfluenzaA__AFN18566

SEQ ID NO: 86841 - RNA, 1410 nt, Artificial Sequence; identical to SEQ ID NO: 80762
  derived and/or modified CDS sequence (opt1) from neuraminidase__InfluenzaA__AFN18572

SEQ ID NO: 86842 - RNA, 1410 nt, Artificial Sequence; identical to SEQ ID NO: 80762
  derived and/or modified CDS sequence (opt1) from neuraminidase__InfluenzaA__AFN18582

SEQ ID NO: 86843 - RNA, 1410 nt, Artificial Sequence; identical to SEQ ID NO: 80762
  derived and/or modified CDS sequence (opt1) from neuraminidase__InfluenzaA__AFN18592

SEQ ID NO: 86844 - RNA, 1410 nt, Artificial Sequence; identical to SEQ ID NO: 86395
  derived and/or modified CDS sequence (opt1) from neuraminidase__InfluenzaA__AFN18602

SEQ ID NO: 86845 - RNA, 1410 nt, Artificial Sequence
  derived and/or modified CDS sequence (opt1) from neuraminidase__InfluenzaA__AFN18612
augaaccccaaccagaagaucaucaccaucggcagcgugugcaugaccaucgggauggccaaccugauccuccagaucggcaacaucaucuccaucuggaucagccacuccauccagcuggggaaccagaaccagaucgagacgugcaaccagagcgucaucaccuacgagaacaacaccugggugaaccagaccuacgugaacaucuccaacacgaacuucgccgcgggccagagcgucguguccgugaagcuggccgggaacagcucccucugcccggucagcggcugggccaucuacuccaaggacaacagcauccgcaucggcuccaagggggacguguucgugauccgggagcccuucaucagcugcagcccccuggagugccgcaccuucuuccugacccagggcgcccuccugaacgacaagcacuccaacgggaccaucaaggaccggucccccuaccgcacgcugaugagcugcccgaucggcgagguccccucccccuacaacagccgguucgagagcguggccugguccgcgagcgccugccacgacgggaucaacuggcucaccaucggcaucuccggccccgacaacggggccguggccguccugaaguacaacggcaucaucaccgacaccaucaagagcuggcgcaacaacauccugcggacgcaggaguccgagugcgcgugcgugaacgggagcugcuucaccgugaugaccgacggcccguccgacggccaggccagcuacaagaucuuccgcaucgagaaggggaagaucaucaaguccgucgagaugaacgcccccaacuaccacuacgaggagugcagcugcuaccccgacuccagcgagaucacgugcgugugccgggacaacuggcacggcuccaaccgccccugggugagcuucaaccagaaccucgaguaccagaucggguacaucugcuccggcaucuucggggacaacccgcggcccaacgacaagaccggcagcugcggccccgucuccagcaacggggccaacggcgugaagggguucuccuucaaguacggcaacgggguguggaucggccgcaccaagagcaucagcucccggaacggcuucgagaugaucugggaccccaacggguggaccggcaccgacaacaacuucagcaucaagcaggacaucgucgggaucaacgagugguccggcuacagcggguccuucgugcagcacccggagcugacgggccuggacugcauccgccccugcuucuggguggagcucauccggggccgccccaaggagaacaccaucuggaccagcggguccagcaucuccuucugcggcgucaacagcgacaccguggggugguccuggcccgacggcgccgagcugccguucacgaucgacaaguga

SEQ ID NO: 86846 - RNA, 1410 nt, Artificial Sequence; identical to SEQ ID NO: 80762
  derived and/or modified CDS sequence (opt1) from neuraminidase__InfluenzaA__AFN18618

SEQ ID NO: 86847 - RNA, 1410 nt, Artificial Sequence; identical to SEQ ID NO: 81588
  derived and/or modified CDS sequence (opt1) from neuraminidase__InfluenzaA__AFN18624

SEQ ID NO: 86848 - RNA, 1410 nt, Artificial Sequence
  derived and/or modified CDS sequence (opt1) from neuraminidase__InfluenzaA__AFN18630
augaaccccaaccagaagaucaucaccaucggcagcgugugcaugaccaucgggauggccaaccugauccuccagaucggcaacaucaucuccaucuggaucagccacuccauccagcuggggaaccagaaccagaucgagacgugcaaccagagcgucaucaccuacgagaacaacaccugggugaaccagaccuacgugaacaucuccaacacgaacuucgccgcgggccagagcgucguguccgugaagcuggccgggaacagcucccucugcccggucagcggcugggccaucuacuccaaggacaacagcauccgcaucggcuccaagggggacguguucgugauccgggagcccuucaucagcugcagcccccuggagugccgcaccuucuuccugacccagggcgcccuccugaacgacaagcacuccaacgggaccaucaaggaccggucccccuaccgcacgcugaugagcugcccgaucggcgagguccccucccccuacaacagccgguucgagagcguggccugguccgcgagcgccugccacgacgggaucaacuggcucaccaucggcaucuccggccccgacaacggggccguggccguccugaaguacaacggcaucaucaccgacaccaucaagagcuggcgcaacaacauccugcggacgcaggaguccgagugcgcgugcgugaacgggagcugcuucaccgugaugaccgacggcccguccgacggccaggccagcuacaagaucuuccgcaucgagaaggggaagaucgucaaguccguggagaugaacgcccccaacuaccacuacgaggagugcagcugcuaccccgacuccagcgagaucacgugcgugugccgggacaacuggcacggcuccaaccgccccugggucagcuucaaccagaaccucgaguaccagaucggguacaucugcuccggcaucuucggggacaacccgcggcccaacgacaagaccggcagcugcggccccguguccagcaacggggccaacggcgugaagggguucuccuucaaguacggcaacggggucuggaucggccgcaccaagagcaucagcucccggaacggcuucgagaugaucugggaccccaacggguggaccggcaccgacaacaacuucagcaucaagcaggacaucguggggaucaacgagugguccggcuacagcggguccuucgugcagcacccggagcugacgggccugggcugcauccgccccugcuucugggucgagcucauccgggggcgccccaaggagaacaccaucuggaccagcggcuccagcaucuccuucugcggggugaacagcgacaccgucggcugguccuggcccgacggcgccgagcugccguucacgaucgacaaguga

SEQ ID NO: 86849 - RNA, 1410 nt, Artificial Sequence
  derived and/or modified CDS sequence (opt1) from neuraminidase__InfluenzaA__AFN18636
augaaccccaaccagaagaucaucaccaucggcagcgugugcaugaccaucgggauggccaaccugauccuccagaucggcaacaucaucuccaucuggaucagccacuccauccagcuggggaaccagaaccagaucgagacgugcaaccagagcgucaucaccuacgagaacaacaccugggugaaccagaccuacgugaacaucuccaacacgaacuucgccgcgggccagagcgucguguccgugaagcuggccgggaacagcucccucugcccggucagcggcugggccaucuacuccaaggacaacagcauccgcaucggcuccaagggggacguguucgugauccgggagcccuucaucagcugcagcccccuggagugccgcaccuucuuccugacccagggcgcccuccugaacgacaagcacuccaacgggaccaucaaggaccggucccccuaccgcacgcugaugagcugcccgaucggcgagguccccucccccuacaacagccgguucgagagcguggccugguccgcgagcgccugccacgacgggaucaacuggcucaccaucggcaucuccggccccgacaacggggccguggccguccugaaguacaacggcaucaucaccgacaccaucaagagcuggcgcaacaacauccugcggacgcaggaguccgagugcgcgugcgugaacgggagcugcuucaccgugaugaccgacggcccguccgacggccaggccagcuacaagaucuuccgcaucgagaaggggaagaucgucaaguccguggagaugaacgcccccaacuaccacuacgaggagugcagcugcuaccccgacuccagcgagaucacgugcgugugccgggacaacuggcacggcuccaaccgccccugggucagcuucaaccagaaccucgaguaccggaucggguacaucugcuccggcaucuucggggacaacccgcgccccaacgacaagaccggcagcugcggccccguguccagcaacggggccaacggcgugaagggguucuccuucaaguacggcaacggggucuggaucggccggaccaagagcaucagcucccgcaacggcuucgagaugaucugggaccccaacggguggaccggcaccgacaacaacuucagcaucaagcaggacaucguggggaucaacgagugguccggcuacagcggguccuucgugcagcacccggagcugacgggccuggacugcauccggcccugcuucugggucgagcucauccgcggccggagcaaggagaacaccaucuggaccuccgggagcuccaucagcuucugcggcgugaacuccgacaccgucggguggagcuggcccgacggcgccgagcugcccuucacgaucgacaaguga

SEQ ID NO: 86850 - RNA, 1410 nt, Artificial Sequence; identical to SEQ ID NO: 80762
  derived and/or modified CDS sequence (opt1) from neuraminidase__InfluenzaA__AFN18646

SEQ ID NO: 86851 - RNA, 1410 nt, Artificial Sequence; identical to SEQ ID NO: 80762
  derived and/or modified CDS sequence (opt1) from neuraminidase__InfluenzaA__AFN18656

SEQ ID NO: 86852 - RNA, 1410 nt, Artificial Sequence
  derived and/or modified CDS sequence (opt1) from neuraminidase__InfluenzaA__AFN18666
augaaccccaaccagaagaucaucaccaucggcagcgugugcaugaccaucgggauggccaaccugauccuccagaucggcaacaucaucuccaucuggaucagccacuccauccagcuggggaaccagaaccagaucgagacgugcaaccagagcgucaucaccuacgagaacaacaccugggugaaccagaccuacgugaacaucuccaacacgaacuucgccgcgggccagagcgucguguccgugaagcuggccgggaacagcucccucugcccggucagcggcugggccaucuacuccaaggacaacagcauccgcaucggcuccaagggggacguguucgugauccgggagcccuucaucagcugcagcccccuggagugccgcaccuucuuccugacccagggcgcccuccugaacgacaagcacuccaacgggaccaucaaggaccggucccccuaccgcacgcugaugagcugcccgaucggcgagguccccucccccuacaacagccgguucgagagcguggccugguccgcgagcgccugccacgacgggaucaacuggcucaccaucggcaucuccggccccgacaacggggccguggccguccugaaguacaacggcaucaucaccgacaccaucaagagcuggcgcaacaacauccugcggacgcaggaguccgagugcgcgugcgugaacgggagcugcuucaccgugaugaccgacggcccguccgacggccaggccagcuacaagaucuuccgcaucgagaaggggaagaucgucaaguccguggagaugaacgcccccaacuaccacuacgaggagugcagcugcuaccccgacuccagcgagaucacgugcgugugccgggacaacuggcacggcuccaaccgccccugggucagcuucaaccagaaccucgaguaccagaucggguacaucugcuccggcaucuucggggacaacccgcggcccaacgacaagaccggcagcugcggccccguguccagcaacggggccaacggcgugaagggguucuccuucaaguacggcaacggggucuggaucggccgcaccaagagcaucagcucccggaacggcuucgagaugaucugggaccccaacggguggaccggcaccgacaacaacuucagcaucaagcaggacaucguggggaucaacgagugguccggcuacagcggguccuucgugcagcacccggagcugacgggccuggacugcauccgccccugcuucugggucgagcucauccggggccgccccaaggagaacaccaucuggaccagcggguccagcaucuccuucugcggcgugaacagcgacaccgucgggugguccuggcccgacggcgccgagcugccguucaucaucgacaaguga

SEQ ID NO: 86853 - RNA, 1410 nt, Artificial Sequence
  derived and/or modified CDS sequence (opt1) from neuraminidase__InfluenzaA__AFN18676
augaaccccaaccagaagaucaucaccaucggcagcgugugcaugaccaucgggauggccaaccugauccuccagaucggcaacaucaucuccaucuggaucagccacuccauccagcuggggaaccagaaccagaucgagacgugcaaccagagcgucaucaccuacgagaacaacaccugggugaaccagaccuacgugaacaucuccaacacgaacuucgccgcgggccagagcgucguguccgugaagcuggccgggaacagcucccucugcccggucagcggcugggccaucuacuccaaggacaacagcauccgcaucggcuccaagggggacguguucgugauccgggagcccuucaucagcugcagcccccuggagugccgcaccuucuuccugacccagggcgcccuccugaacgacaagcacuccaacgggaccaucaaggaccggucccccuaccgcacgcugaugagcugcccgaucggcgagguccccucccccuacaacagccgguucgagagcguggccugguccgcgagcgccugccacgacgggaucaacuggcucaccaucggcaucuccggccccgacaacggggccguggccguccugaaguacaacggcaucaucaccgacaccaucaagagcuggcgcaacaacauccugcggacgcaggaguccgagugcgcgugcgugaacgggagcugcuucaccgugaugaccgacggcccguccgacggccaggccagcuacaagaucuuccgcaucgagaaggggaagaucgucaaguccguggagaugaacgcccccaacuaccacuacgaggagugcagcugcuaccccgacuccagcgagaucacgugcgugugccgggacaacuggcacggcuccaaccgccccugggucagcuucaaccagaaccucgaguaccggaucggguacaucugcuccggcaucuucggggacaacccgcgccccaacgacaagaccggcagcugcggccccguguccagcaacggggccaacggcgugaagggguucuccuucaaguacggcaacggggucuggaucggccggaccaagagcaucagcucccgcaacggcuucgagaugaucugggaccccaacggguggaccgagaccgacaacaacuucagcaucaagcaggacaucgugggcaucaacgagugguccggguacagcggcuccuucgugcagcacccggagcugacggggcuggacugcauccggcccugcuucugggucgagcucauccgcggccggcccaaggagaacaccaucuggaccagcggcuccagcaucuccuucugcggggugaacagcgacaccgucggcugguccuggcccgacggggccgagcugccguucacgaucgacaaguga

SEQ ID NO: 86854 - RNA, 1410 nt, Artificial Sequence
  derived and/or modified CDS sequence (opt1) from neuraminidase__InfluenzaA__AFN18686
augaaccccaaccagaagaucaucaccaucggcagcgugugcaugaccaucgggauggccaaccugauccuccagaucggcaacaucaucuccaucuggaucagccacuccauccagcuggggaaccagaaccagaucgagacgugcaaccagagcgucaucaccuacgagaacaacaccugggugaaccagaccuacgugaacaucuccagcacgaacuucgccgcgggccaguccgucgugagcgugaagcuggccgggaacuccagccucugcccggucuccggcugggccaucuacagcaaggacaacuccauccgcaucggcagcaagggggacguguucgugauccgggagcccuucaucuccugcagcccccuggagugccgcaccuucuuccugacccagggcgcccuccugaacgacaagcacuccaacgggaccaucaaggaccggagccccuaccgcacgcugauguccugcccgaucggcgagguccccagccccuacaacagccgguucgaguccguggccuggagcgcguccgccugccacgacgggaucaacuggcucaccaucggcaucagcggccccgacaacggggccguggccguccugaaguacaacggcaucaucaccgacaccaucaaguccuggcgcaacaacauccugcggacgcaggagagcgagugcgcgugcgugaacggguccugcuucacccucaugaccgacggcccgagcgacggccaggccuccuacaagaucuuccgcaucgagaaggggaagaucgucaagagcguggagaugaacgcccccaacuaccacuacgaggagugcuccugcuaccccgacagcuccgagaucacgugcgugugccgggacaacuggcacggcagcaaccgccccuggguguccuucaaccagaaccuggaguaccagaucggguacaucugcagcggcaucuucggggacaacccgcggcccaacgacaagaccggcuccugcggccccgucagcuccaacggggccaacggcgugaagggguucagcuucaaguacggcaacgggguguggaucggccgcaccaagagcaucuccagccggaacggcuucgagaugaucugggaccccaacggguggaccggcaccgacaacaacuucuccaucaagcaggacaucgucgggaucaacgaguggagcggcuacuccgggagcuucgugcagcacccggagcugacgggccucgacugcauccgccccugcuucuggguggagcugauccggggccgccccaaggagaacaccaucuggaccuccgggagcuccaucagcuucugcggcgucaacuccgacaccgugggguggagcuggcccgacggcgccgagcugccguucacgaucgacaaguga

SEQ ID NO: 86855 - RNA, 1410 nt, Artificial Sequence; identical to SEQ ID NO: 80762
  derived and/or modified CDS sequence (opt1) from neuraminidase__InfluenzaA__AFN18696

SEQ ID NO: 86856 - RNA, 1410 nt, Artificial Sequence; identical to SEQ ID NO: 83349
  derived and/or modified CDS sequence (opt1) from neuraminidase__InfluenzaA__AFN18706

SEQ ID NO: 86857 - RNA, 1410 nt, Artificial Sequence; identical to SEQ ID NO: 80762
  derived and/or modified CDS sequence (opt1) from neuraminidase__InfluenzaA__AFN18716

SEQ ID NO: 86858 - RNA, 1410 nt, Artificial Sequence; identical to SEQ ID NO: 80762
  derived and/or modified CDS sequence (opt1) from neuraminidase__InfluenzaA__AFN18727

SEQ ID NO: 86859 - RNA, 1410 nt, Artificial Sequence
  derived and/or modified CDS sequence (opt1) from neuraminidase__InfluenzaA__AFN18737
augaaccccaaccagaagaucaucaccaucggcagcgugugcaugaccaucgggauggccaaccugauccuccagaucggcaacaucaucuccaucuggaucagccacuccauccagcuggggaaccagaaccagaucgagacgugcaaccagagcgucaucaccuacgagaacaacaccugggugaaccagaccuacgugaacaucuccaacacgaacuucgccgcgggccagagcgucguguccgugaagcuggccgggaacagcucccucugcccggucagcggcugggccaucuacuccaaggacaacagcauccgcaucggcuccaagggggacguguucgugauccgggagcccuucaucagcugcagcccccuggagugccgcaccuucuuccugacccagggcgcccuccugaacgacaagcacuccaacgggaccaucaaggaccggucccccuaccgcacgcugaugagcugcccgaucggcgagguccccucccccuacaacagccgguucgagagcguggccugguccgcgagcgccugccacgacgggaucaacuggcucaccaucggcaucuccggccccgacaacggggccguggccguccugaaguacaacggcaucaucaccgacaccaucaagagcuggcgcaacaacauccugcggacgcaggaguccgagugcgcgugcgugaacgggagcugcuucaccgugaugaccgacggcccguccgacggccaggccagcuacaagaucuuccgcaucgagaaggggaagaucgucaaguccguggagaugaacgcccccaacuaccacuacgaggagugcagcugcuaccccgacuccagcgagaucacgugcgugugccgggacaacuggcacggcuccaaccgccccugggucagcuucaaccagaaccucgaguaccagaucggguacaucugcuccggcaucuucggggacaacccgcggcccaacgacaagaccggcagcugcggccccguguccagcaacggggccaacggcgugaagggguucuccuucaaguacggcaacggggucuggaucggccgcaccaagagcaucagcucccggaacggcuucgagauggugugggaccccaacggguggaccggcaccgacaacaacuucagcaucaagcaggacaucguggggaucaacgagugguccggcuacagcggguccuucguccagcacccggagcugacgggccuggacugcauccgccccugcuucuggguggagcucauccggggccgccccaaggagaacaccaucuggaccagcggguccagcaucuccuucugcggcgucaacagcgacaccguggggugguccuggcccgacggcgccgagcugccguucacgaucgacaaguga

SEQ ID NO: 86860 - RNA, 1410 nt, Artificial Sequence; identical to SEQ ID NO: 80762
  derived and/or modified CDS sequence (opt1) from neuraminidase__InfluenzaA__AFN18743

SEQ ID NO: 86861 - RNA, 1410 nt, Artificial Sequence; identical to SEQ ID NO: 80762
  derived and/or modified CDS sequence (opt1) from neuraminidase__InfluenzaA__AFN18749

SEQ ID NO: 86862 - RNA, 1410 nt, Artificial Sequence; identical to SEQ ID NO: 80762
  derived and/or modified CDS sequence (opt1) from neuraminidase__InfluenzaA__AFN18759

SEQ ID NO: 86863 - RNA, 1410 nt, Artificial Sequence
  derived and/or modified CDS sequence (opt1) from neuraminidase__InfluenzaA__AFN18769
augaaccccaaccagaagaucaucaccaucggcagcgugugcaugaccaucgggauggccaaccugauccuccagaucggcaacaucaucuccaucuggaucagccacuccauccagcuggggaaccagaaccagaucgagacgugcaaccagagcgucaucaccuacgagaacaacaccugggugaaccagaccuacgugaacaucuccaacacgaacuucgccgcgggccagagcgucguguccgugaagcuggccgggaacagcucccucugcccggucagcggcugggccaucuacuccaaggacaacagcauccgcaucggcuccaagggggacguguucgugauccgggagcccuucaucagcugcagcccccuggagugccgcaccuucuuccugacccagggcgcccuccugaacgacaagcacuccaacgggaccaucaaggaccggucccccuaccgcacgcugaugagcugcccgaucggcgagguccccucccccuacaacagccgguucgagagcguggccugguccgcgagcgccugccacgacgggaucaacuggcucaccaucggcaucuccggccccgacaacggggccguggccguccugaaguacaacggcaucaucaccgacaccaucaagagcuggcgcaacaacauccugcggacgcaggaguccgagugcgcgugcgugaacgggagcugcuucacccucaugaccgacggcccguccgacggccaggccagcuacaagaucuuccgcaucgagaaggggaagaucgugaaguccgucgagaugaacgcccccaacuaccacuacgaggagugcagcugcuaccccgacuccaacgagaucacgugcgugugccgggacaacuggcacggcagcaaccgccccuggguguccuucaaccagaaccuggaguaccagaucggguacaucugcagcggcaucuucggggacaacccgcggcccaacgacaagaccggcuccugcggccccgucagcuccaacggggccaacggcgugaagggguucagcuucaaguacggcaacgggguguggaucggccgcaccaaguccaucagcagccggaacggcuucgagaugaucugggaccccaacggguggaccggcaccgacaacaacuucuccaucaagcaggacaucgucgggaucaacgaguggagcggcuacuccgggagcuucgugcagcacccggagcugacgggccucgacugcauccgccccugcuucuggguggagcugauccggggccgccccaaggagaacaccaucuggaccuccgggagcuccaucagcuucugcggcgucaacuccgacaccgugggguggagcuggcccgacggcgccgagcugccguucacgaucgacaaguga

SEQ ID NO: 86864 - RNA, 1410 nt, Artificial Sequence; identical to SEQ ID NO: 82664
  derived and/or modified CDS sequence (opt1) from neuraminidase__InfluenzaA__AFN18775

SEQ ID NO: 86865 - RNA, 1410 nt, Artificial Sequence; identical to SEQ ID NO: 80762
  derived and/or modified CDS sequence (opt1) from neuraminidase__InfluenzaA__AFN18777

SEQ ID NO: 86866 - RNA, 1410 nt, Artificial Sequence; identical to SEQ ID NO: 80762
  derived and/or modified CDS sequence (opt1) from neuraminidase__InfluenzaA__AFN18779

SEQ ID NO: 86867 - RNA, 1410 nt, Artificial Sequence
  derived and/or modified CDS sequence (opt1) from neuraminidase__InfluenzaA__AFN18785
augaaccccaaccagaagaucaucaccaucggcagcgugugcaugaccaucgggauggccaaccugauccuccagaucggcaacaucaucuccaucuggaucagccacuccauccagcuggggaaccagaaccagaucgagacgugcaaccagagcgucaucaccuacgagaacaacaccugggugaaccagaccuacgugaacaucuccaacacgaacuucgccgcgggccagagcgucguguccgugaagcuggccgggaacagcucccucugcccggucagcggcugggccaucuacuccaaggacaacagcauccgcaucggcuccaagggggacguguucgugauccgggagcccuucaucagcugcagcccccuggagugccgcaccuucuuccugacccagggcgcccuccugaacgacaagcacuccaacgggaccaucaaggaccggucccccuaccgcacgcugaugagcugcccgaucggcgagguccccucccccuacaacagccgguucgagagcguggccugguccgcgagcgccugccacgacgggaucaacuggcucaccaucggcaucuccggccccgacaacggggccguggccguccugaaguacaacggcaucaucaccgacaccaucaagagcuggcgcaacaacauccugcggacgcaggaguccgagugcgcgugcgugaacgggagcugcuucaccgugaugaccgacggcccguccgacggccaggccagcuacaagaucuuccgcaucgagaaggggaagaucgucaaguccguggagaugaacgcccccaacuaccacuacgaggagugcagcugcuaccccgacuccagcgagaucacgugcgugugccgggacaacuggcacggcuccaaccgccccugggucagcuucaaccagaaccucgaguaccagaucggguacaucugcuccggcaucuucggggacaacccgcggcccaacgacaagaccggcagcugcggccccguguccagcaacggggccaacggcgugaagggguucuccuucaaguacggcaacggggucuggaucggccgcaccaagagcaucagcucccggaacggcuucgagaugaucugggaccccaacggguggaccggcaccgacaacaacuucagcauccgccaggacaucguggggaucaacgagugguccggcuacagcggguccuucgugcagcacccggagcugacgggccuggacugcauccggcccugcuucugggucgagcucauccgcggccggcccaaggagaacaccaucuggaccagcggguccagcaucuccuucugcggcgugaacagcgacaccgucgggugguccuggcccgacggcgccgagcugccguucacgaucgacaaguga

SEQ ID NO: 86868 - RNA, 1410 nt, Artificial Sequence
  derived and/or modified CDS sequence (opt1) from neuraminidase__InfluenzaA__AFN18791
augaaccccaaccagaagaucaucaccaucggcagcgugugcaugaccaucgggauggccaaccugauccuccagaucggcaacaucaucuccaucuggaucagccacuccauccagcuggggaaccagaaccagaucgagacgugcaaccagagcgucaucaccuacgagaacaacaccugggugaaccagaccuacgugaacaucuccaacacgaacuucgccgcgggccagagcgucguguccgugaagcuggccgggaacagcucccucugcccggucagcggcugggccaucuacuccaaggacaacagcauccgcaucggcuccaagggggacguguucgugauccgggagcccuucaucagcugcagcccccuggagugccgcaccuucuuccugacccagggcgcccuccugaacgacaagcacuccaacgggaccaucaaggaccggucccccuaccgcacgcugaugagcugcccgaucggcgagguccccucccccuacaacagccgguucgagagcguggccugguccgcgagcgccugccacgacgggaucaacuggcucaccaucggcaucuccggccccgacaacggggccguggccguccugaaguacaacggcaucaucaccgacaccaucaagagcuggcgcaacaacauccugcggacgcaggaguccgagugcgcgugcgugaacgggagcugcuucaccgugaugaccgacggcccguccgacggccaggccagcuacaagaucuuccgcaucgagaaggggaagaucgucaaguccguggagaugaacgcccccaacuaccacuacgaggagugcagcugcuaccccgaguccagcgagaucacgugcgugugccgggacaacuggcacggcuccaaccgccccugggucagcuucaaccagaaccucgaguaccagaucggguacaucugcuccggcaucuucggggacaacccgcggcccaacgacaagaccggcagcugcggccccguguccagcaacggggccaacggcgugaagggguucuccuucaaguacggcaacggggucuggaucggccgcaccaagagcaucagcucccggaacggcuucgagaugaucugggaccccaacggguggaccggcaccgacaacaacuucagcaucaagcaggacaucguggggaucaacgagugguccggcuacagcggguccuucgugcagcacccggagcugacgggccuggacugcauccgccccugcuucugggucgagcucauccggggccgccccaaggagaacaccaucuggaccagcggguccagcaucuccuucugcggcgugaacagcgacaccgucgggugguccuggcccgacggcgccgagcugccguucacgaucgacaaguga

SEQ ID NO: 86869 - RNA, 1410 nt, Artificial Sequence; identical to SEQ ID NO: 80762
  derived and/or modified CDS sequence (opt1) from neuraminidase__InfluenzaA__AFN18801

SEQ ID NO: 86870 - RNA, 1410 nt, Artificial Sequence; identical to SEQ ID NO: 83181
  derived and/or modified CDS sequence (opt1) from neuraminidase__InfluenzaA__AFN18811

SEQ ID NO: 86871 - RNA, 1410 nt, Artificial Sequence; identical to SEQ ID NO: 80762
  derived and/or modified CDS sequence (opt1) from neuraminidase__InfluenzaA__AFN18817

SEQ ID NO: 86872 - RNA, 1410 nt, Artificial Sequence; identical to SEQ ID NO: 80762
  derived and/or modified CDS sequence (opt1) from neuraminidase__InfluenzaA__AFN18819

SEQ ID NO: 86873 - RNA, 1410 nt, Artificial Sequence; identical to SEQ ID NO: 83754
  derived and/or modified CDS sequence (opt1) from neuraminidase__InfluenzaA__AFN18821

SEQ ID NO: 86874 - RNA, 1410 nt, Artificial Sequence; identical to SEQ ID NO: 80762
  derived and/or modified CDS sequence (opt1) from neuraminidase__InfluenzaA__AFN18823

SEQ ID NO: 86875 - RNA, 1410 nt, Artificial Sequence; identical to SEQ ID NO: 80762
  derived and/or modified CDS sequence (opt1) from neuraminidase__InfluenzaA__AFN18825

SEQ ID NO: 86876 - RNA, 1410 nt, Artificial Sequence; identical to SEQ ID NO: 80762
  derived and/or modified CDS sequence (opt1) from neuraminidase__InfluenzaA__AFN18827

SEQ ID NO: 86877 - RNA, 1410 nt, Artificial Sequence; identical to SEQ ID NO: 80762
  derived and/or modified CDS sequence (opt1) from neuraminidase__InfluenzaA__AFN18829

SEQ ID NO: 86878 - RNA, 1410 nt, Artificial Sequence; identical to SEQ ID NO: 80762
  derived and/or modified CDS sequence (opt1) from neuraminidase__InfluenzaA__AFN18831

SEQ ID NO: 86879 - RNA, 1410 nt, Artificial Sequence; identical to SEQ ID NO: 81899
  derived and/or modified CDS sequence (opt1) from neuraminidase__InfluenzaA__AFN18833

SEQ ID NO: 86880 - RNA, 1410 nt, Artificial Sequence; identical to SEQ ID NO: 81937
  derived and/or modified CDS sequence (opt1) from neuraminidase__InfluenzaA__AFN18835

SEQ ID NO: 86881 - RNA, 1410 nt, Artificial Sequence; identical to SEQ ID NO: 80762
  derived and/or modified CDS sequence (opt1) from neuraminidase__InfluenzaA__AFN18841

SEQ ID NO: 86882 - RNA, 1410 nt, Artificial Sequence
  derived and/or modified CDS sequence (opt1) from neuraminidase__InfluenzaA__AFN18851
augaaccccaaccagaagaucaucaccaucggcagcgugugcaugaccaucgggauggccaaccugauccuccagaucggcaacaugaucuccaucuggaucagccacuccauccagcuggggaaccagaaccagaucgagacgugcaaccagagcgucaucaccuacgagaacaacaccugggugaaccagaccuacgugaacaucuccaacacgaacuucgccgcgggccagagcgucguguccgugaagcuggccgggaacagcucccucugcccggucagcggcugggccaucuacuccaaggacaacagcauccgcaucggcuccaagggggacguguucgugauccgggagcccuucaucagcugcagcccccuggagugccgcaccuucuuccugacccagggcgcccuccugaacgacaagcacuccaacgggaccaucaaggaccggucccccuaccgcacgcugaugagcugcccgaucggcgagguccccucccccuacaacagccgguucgagagcguggccugguccgcgagcgccugccacgacgggaucaacuggcucaccaucggcaucuccggccccgacaacggggccguggccguccugaaguacaacggcaucaucaccgacaccaucaagagcuggcgcaacaacauccugcggacgcaggaguccgagugcgcgugcgugaacgggagcugcuucaccgugaugaccgacggcccguccgacggccaggccagcuacaagaucuuccgcaucgagaaggggaagaucgucaaguccguggagaugaacgcccccaacuaccacuacgaggagugcagcugcuaccccgacuccagcgagaucacgugcgugugccgggacaacuggcacggcuccaaccgccccugggucagcuucaaccagaaccucgaguaccagaucggguacaucugcuccggcaucuucggggacaacccgcggcccaacgacaagaccggcagcugcggccccguguccagcaacggggccaacggcgugaagggguucuccuucaaguacggcaacggggucuggaucggccgcaccaagagcaucagcucccggaacggcuucgagaugaucugggaccccaacggguggaccggcaccgacaacaacuucagcaucaagcaggacaucguggggaucaacgagugguccggcuacagcggguccuucgugcagcacccggagcugacgggccuggacugcauccgccccugcuucugggucgagcucauccggggccgccccaaggagaacaccaucuggaccagcggguccagcaucuccuucugcggcgugaacagcgacaccgucgggugguccuggcccgacggcgccgagcugccguucacgaucgacaaguga

SEQ ID NO: 86883 - RNA, 1410 nt, Artificial Sequence; identical to SEQ ID NO: 80762
  derived and/or modified CDS sequence (opt1) from neuraminidase__InfluenzaA__AFN18857

SEQ ID NO: 86884 - RNA, 1410 nt, Artificial Sequence
  derived and/or modified CDS sequence (opt1) from neuraminidase__InfluenzaA__AFN18859
augaaccccaaccagaagaucaucaccaucggcagcgugugcaugaccaucgggcuggccaaccucauccugcagaucggcaacaucaucuccaucuggaucagccacuccauccagcuggggaaccagaaccagaucgagacgugcaaccagagcgucaucaccuacgagaacaacaccugggugaaccagaccuacgugaacaucuccaacacgaacuucgccgcgggccagagcgucguguccgugaagcucgccgggaacagcucccugugcccggucagcggcugggccaucuacuccaaggacaacagcauccgcaucggcuccaagggggacguguucgugauccgggagcccuucaucagcugcagcccccuggagugccgcaccuucuuccucacccagggcgcccugcugaacgacaagcacuccaacgggaccaucaaggaccggucccccuaccgcacgcucaugagcugcccgaucggcgagguccccucccccuacaacagccgguucgagagcguggccugguccgcgagcgccugccacgacgggaucaacuggcugaccaucggcaucuccggccccgacaacggggccguggccguccugaaguacaacggcaucaucaccgacaccaucaagagcuggcgcaacaacauccuccggacgcaggaguccgagugcgcgugcgugaacgggagcugcuucaccgugaugaccgacggcccguccgacggccaggccagcuacaagaucuuccgcaucgagaaggggaagaucgucaaguccguggagaugaacgcccccaacuaccacuacgaggagugcagcugcuaccccgacuccagcgagaucacgugcgugugccgggacaacuggcacggcuccaaccgccccugggucagcuucaaccagaaccuggaguaccagaucggguacaucugcuccggcaucuucggggacaacccgcggcccaacgacaagaccggcagcugcggccccguguccagcaacggggccaacggcgugaagggguucuccuucaaguacggcaacggggucuggaucggccgcaccaagagcaucagcucccggaacggcuucgagaugaucugggaccccaacggguggaccggcaccgacaacaacuucagcaucaagcaggacaucguggggaucaacgagugguccggcuacagcggguccuucgugcagcacccggagcugacgggccucgacugcauccgccccugcuucugggucgagcugauccggggccgccccaaggagaacaccaucuggaccagcggguccagcaucuccuucugcggcgugaacagcgacaccgucgggugguccuggcccgacggcgccgagcugccguucacgaucgacaaguga

SEQ ID NO: 86885 - RNA, 1410 nt, Artificial Sequence
  derived and/or modified CDS sequence (opt1) from neuraminidase__InfluenzaA__AFN18861
augaaccccaaccagaagaucaucaccaucggcagcgugugcaugaccaucgggauggccaaccugauccuccagaucggcaacaucaucuccaucuggaucagccacuccauccagcuggggaaccagaaccagaucgagacgugcaaccagagcgucaucaccuacgagaacaacaccugggugaaccagaccuacgugaacaucuccaacacgaacuucgccgcgggccagagcgucguguccgugaagcuggccgggaacagcucccucugcagcgucuccggcugggccaucuacagcaaggacaacuccauccgcaucggcagcaagggggacguguucgugauccgggagccguucaucuccugcagcccccuggagugccgcaccuucuuccugacccagggcgcccuccugaacgacaagcacuccaacgggaccaucaaggaccggagccccuaccgcacgcugauguccugccccaucggcgaggucccgagccccuacaacagccgguucgaguccguggccuggagcgcguccgccugccacgacgggaucaacuggcucaccaucggcaucagcggccccgacaacggggccguggccguccugaaguacaacggcaucaucaccgacaccaucaaguccuggcgcaacaacauccugcggacgcaggagagcgagugcgcgugcgugaacggguccugcuucaccgugaugaccgacggccccagcgacggccaggccuccuacaagaucuuccgcaucgagaaggggaagaucgucaagagcguggagaugaacgccccgaacuaccacuacgaggagugcuccugcuaccccgacagcuccgagaucacgugcgugugccgggacaacuggcacggcagcaaccgccccugggucuccuucaaccagaaccucgaguaccagaucggguacaucugcagcggcaucuucggggacaacccccggccgaacgacaagaccggcuccugcggccccgugagcuccaacggggccaacggcgugaagggguucagcuucaaguacggcaacggggucuggaucggccgcaccaagagcaucuccagccggaacggcuucgagaugaucugggaccccaacggguggaccggcaccgacaacaacuucuccaucaagcaggacaucguggggaucaacgaguggagcggcuacuccgggagcuucgugcagcaccccgagcugacgggccuggacugcauccgcccgugcuucugggucgagcucauccggggccgccccaaggagaacaccaucuggaccuccgggagcuccaucagcuucugcggcgugaacuccgacaccgucggguggagcuggcccgacggcgccgagcugcccuucacgaucgacaaguga

SEQ ID NO: 86886 - RNA, 1410 nt, Artificial Sequence; identical to SEQ ID NO: 80762
  derived and/or modified CDS sequence (opt1) from neuraminidase__InfluenzaA__AFN18867

SEQ ID NO: 86887 - RNA, 1410 nt, Artificial Sequence; identical to SEQ ID NO: 82576
  derived and/or modified CDS sequence (opt1) from neuraminidase__InfluenzaA__AFN18877

SEQ ID NO: 86888 - RNA, 1410 nt, Artificial Sequence; identical to SEQ ID NO: 80762
  derived and/or modified CDS sequence (opt1) from neuraminidase__InfluenzaA__AFN18887

SEQ ID NO: 86889 - RNA, 1410 nt, Artificial Sequence; identical to SEQ ID NO: 81780
  derived and/or modified CDS sequence (opt1) from neuraminidase__InfluenzaA__AFN18893

SEQ ID NO: 86890 - RNA, 1410 nt, Artificial Sequence
  derived and/or modified CDS sequence (opt1) from neuraminidase__InfluenzaA__AFN18895
augaaccccaaccagaagaucaucaccaucggcagcgugugcaugaccaucgggauggccaaccugauccuccagaucggcaacaucaucuccaucuggaucagccacuccauccagcuggggaaccagaaccagaucgagacgugcaaccagagcgucaucaccuacgagaacaacaccugggugaaccagaccuacgugaacaucuccaacacgaacuucgccgcgggccagagcgucguguccgugaagcuggccgggaacagcucccucugcccggucagcggcugggccaucuacuccaaggacaacagcauccgcaucggcuccaagggggacguguucgugauccgggagcccuucaucagcugcagcccccuggagugccgcaccuucuuccugacccagggcgcccuccugaacgacaagcacuccaacgggaccaucaaggaccggucccccuaccgcacgcugaugagcugcccgaucggcgagguccccucccccuacaacagccgguucgagagcguggccugguccgcgagcgccugccacgacgggaucaacuggcucaccaucggcaucuccggccccgacaacggggccguggccguccugaaguacaacggcaucaucaccgacaccaucaagagcuggcgcaacaacauccugcggacgcaggaguccgagugcgcgugcgugaacgggagcugcuucaccgugaugaccgacggcccguccgacggccaggccagcuacaagaucuuccgcaucgagaaggggaagaucgucaaguccguggagaugaacgcccccaacuaccacuacgaggagugcagcugcuaccccgacuccagcgagaucacgugcgugugccgggacaacuggcacggcuccaaccgccccugggucagcuucaaccagaaccucgaguaccggaucggguacaucugcuccggcaucuucggggacaacccgcgccccaacgacaagaccggcagcugcggccccguguccagcaacggggccaacggcgugaagggguucuccuucaaguacggcaacggggucuggaucggccggaccaagagcaucagcucccgcaacggcuucgagaugaucugggaccccaacggguggaccggcaccgacaacaacuucagcaucaagcaggacaucguggggaucaacgagugguccggcuacagcggguccuucgugcagcacccggagcugacgggccuggacugcauccggcccugcuucugggucgagcucaucaagggccgccccaaggagaacaccaucuggaccagcggguccagcaucuccuucugcggcgugaacagcgacaccgucgggugguccuggcccgacggcgccgagcugccguucacgaucgacaaguga

SEQ ID NO: 86891 - RNA, 1410 nt, Artificial Sequence; identical to SEQ ID NO: 82664
  derived and/or modified CDS sequence (opt1) from neuraminidase__InfluenzaA__AFN18905

SEQ ID NO: 86892 - RNA, 1410 nt, Artificial Sequence; identical to SEQ ID NO: 82576
  derived and/or modified CDS sequence (opt1) from neuraminidase__InfluenzaA__AFN18913

SEQ ID NO: 86893 - RNA, 1410 nt, Artificial Sequence
  derived and/or modified CDS sequence (opt1) from neuraminidase__InfluenzaA__AFN18919
augaaccccaaccagaagaucaucaccaucggcagcgugugcaugaccaucgggauggccaaccugauccuccagaucggcaacaucaucuccaucuggaucagccacuccauccagcuggggaaccagaaccagaucgagacgugcaaccagagcgucaucaccuacgagaacaacaccugggugaaccagaccuacgugaacaucuccaacacgaacuucgccgcgggccagagcgucguguccgugaagcuggccgggaacagcucccucugcccggucagcggcugggccaucuacuccaaggacaacagcauccgcaucggcuccaagggggacguguucgugauccgggagcccuucaucagcugcagcccccuggagugccgcaccuucuuccugacccagggcgcccuccugaacgacaagcacuccaacgggaccaucaaggaccggucccccuaccgcacgcugaugagcugcccgaucggcgagguccccucccccuacaacagccgguucgagagcguggccugguccgcgagcgccugccacgacgggaucaacuggcucaccaucggcaucuccggccccgacaacggggccguggccguccugaaguacaacggcaucaucaccgacaccaucaagagcuggcgcaacaacauccugcggacgcaggaguccgagugcgcgugcgugaacgggagcugcuucaccgugaugaccgacggcccguccgacggccaggccagcuacaagaucuuccgcaucgagaaggggaagaucgucaaguccguggagaugaacgcccccaacuaccacuacgaggagugcagcugcuaccccgacuccagcgagaucacgugcgugugccgggacaacuggcacggcuccaaccgccccugggucagcuucaaccagaaccucgaguaccagaucggguacaucugcuccggcaucuucggggacaacccgcggcccaacgacaagaccggcagcugcggccccguguccagcaacggggagaacggcgugaagggguucuccuucaaguacggcaacggggucuggaucggccgcaccaagagcaucagcucccggaacggcuucgagaugaucugggaccccaacggguggaccggcaccgacaacaacuucagcaucaagcaggacaucguggggaucaacgagugguccggcuacagcggguccuucgugcagcacccggagcugacgggccuggacugcauccgccccugcuucugggucgagcucauccggggccgccccaaggagaacaccaucuggaccagcggguccagcaucuccuucugcggcgugaacagcgacaccgucgggugguccuggcccgacggcgccgagcugccguucacgaucgacaaguga

SEQ ID NO: 86894 - RNA, 1410 nt, Artificial Sequence
  derived and/or modified CDS sequence (opt1) from neuraminidase__InfluenzaA__AFN18929
augaaccccaaccagaagaucaucaccaucggcagcgugugcaugaccaucgggauggccaaccugauccuccagaucggcaacaucaucuccaucuggaucagccacuccauccagcuggggaaccagaaccagaucgagacgugcaaccagagcgucaucaccuacgagaacaacaccugggugaaccagaccuacgugaacaucuccaacacgaacuucgccgcgggccagagcgucguguccgugaagcuggccgggaacagcucccucugcccggucagcggcugggccaucuacuccaaggacaacagcauccgcaucggcuccaagggggacguguucgugauccgggagcccuucaucagcugcagcccccuggagugccgcaccuucuuccugacccagggcgcccuccugaacgacaagcacuccaacgggaccaucaaggaccggucccccuaccgcacgcugaugagcugcccgaucggcgagguccccucccccuacaacagccgguucgagagcguggccugguccgcgagcgccugccacgacgggaucaacuggcucaccaucggcaucuccggccccgacaacggggccguggccguccugaaguacaacggcaucaucaccgacaccaucaagagcuggcgcaacaacauccugcggacgcaggaguccgagugcgcgugcgugaacgggagcugcuucacccucaugaccgacggcccguccgacggccaggccagcuacaagaucuuccgcaucgagaaggggaagaucgugaaguccgucgagaugaacgcccccaacuaccacuacgaggagugcagcugcuaccccgacuccagcgagaucacgugcgugugccgggacaacuggcacggcuccaaccgccccugggugagcuucaaccagaaccuggaguaccagaucggguacaucugcuccggcaucuucggggacaacccgcggcccaacgacaagaccggcagcugcggccccgucuccagcaacggggccaacggcgugaagggguucuccuucaaguacggcaacgggguguggaucggccgcaccaagagcaucagcucccggaacggcuucgagaugaucugggaccccaacggguggaccggcaccgacaacaacuucagcaucaagcaggacaucgucgggaucaacgagugguccggcuacagcggguccuucgugcagcacccggagcugacgggccucgacugcauccgccccugcuucuggguggagcugauccggggccgccccaaggagaacaccaucuggaccagcggguccagcaucuccuucugcggcgucaacagcgacaccguggggugguccuggagcgacggcgccgagcugcccuucacgaucgacaaguga

SEQ ID NO: 86895 - RNA, 1410 nt, Artificial Sequence; identical to SEQ ID NO: 80762
  derived and/or modified CDS sequence (opt1) from neuraminidase__InfluenzaA__AFN18939

SEQ ID NO: 86896 - RNA, 1410 nt, Artificial Sequence; identical to SEQ ID NO: 80762
  derived and/or modified CDS sequence (opt1) from neuraminidase__InfluenzaA__AFN18953

SEQ ID NO: 86897 - RNA, 1410 nt, Artificial Sequence; identical to SEQ ID NO: 80762
  derived and/or modified CDS sequence (opt1) from neuraminidase__InfluenzaA__AFN18959

SEQ ID NO: 86898 - RNA, 1410 nt, Artificial Sequence; identical to SEQ ID NO: 80762
  derived and/or modified CDS sequence (opt1) from neuraminidase__InfluenzaA__AFN18965

SEQ ID NO: 86899 - RNA, 1410 nt, Artificial Sequence; identical to SEQ ID NO: 84832
  derived and/or modified CDS sequence (opt1) from neuraminidase__InfluenzaA__AFN18975

SEQ ID NO: 86900 - RNA, 1410 nt, Artificial Sequence; identical to SEQ ID NO: 80762
  derived and/or modified CDS sequence (opt1) from neuraminidase__InfluenzaA__AFN18981

SEQ ID NO: 86901 - RNA, 1410 nt, Artificial Sequence
  derived and/or modified CDS sequence (opt1) from neuraminidase__InfluenzaA__AFN18983
augaaccccaaccagaagaucaucaccaucggcagcgugugcaugaccaucgggauggccaaccugauccuccagaucggcaacaucaucuccaucuggaucagccacuccauccagcuggggaaccagaaccagaucgagacgugcaaccagagcgucaucaccuacgagaacaacaccugggugaaccagaccuacgugaacaucuccaacacgaacuucgccgcgggccagagcgucguguccgugaagcuggccgggaacagcucccucugcccggucagcggcugggccaucuacuccaaggacaacagcauccgcaucggcuccaagggggacguguucgugauccgggagcccuucaucagcugcagcccccuggagugccgcaccuucuuccugacccagggcgcccuccugaacgacaagcacuccaacgggaccaucaaggaccggucccccuaccgcacgcugaugagcugcccgaucggcgagguccccucccccuacaacagccgguucgagagcguggccugguccgcgagcgccugccacgacgggaucaacuggcucaccaucggcaucuccggccccgacaacggggccguggccguccugaaguacaacggcaucaucaccgacaccaucaagagcuggcgcaacaacauccugcggacgcaggaguccgagugcgcgugcgugaacgggagcugcuucaccgugaugaccgacggcccguccgacggccaggccagcuacaagaucuuccgcaucgagaaggggaagaucgucaaguccguggagaugaacgccagcaacuaccacuacgaggagugcuccugcuaccccgacagcuccgagaucacgugcgugugccgggacaacuggcacggcagcaaccgccccugggucuccuucaaccagaaccucgaguaccagaucggguacaucugcagcggcaucuucggggacaacccccggccgaacgacaagaccggcuccugcggccccgugagcuccaacggggccaacggcgugaagggguucagcuucaaguacggcaacggggucuggaucggccgcaccaagagcaucuccagccggaacggcuucgagaugaucugggaccccaacggguggaccggcaccgacaacaacuucuccaucaagcaggacaucguggggaucaacgaguggagcggcuacuccgggagcuucgugcagcaccccgagcugacgggccuggacugcauccgcccgugcuucugggucgagcucauccggggccgccccaaggagaacaccaucuggaccuccgggagcaucaucuccuucugcggcgugaacagcgacaccgucgggugguccuggcccgacggcgccgagcugcccuucacgaucgacaaguga

SEQ ID NO: 86902 - RNA, 1410 nt, Artificial Sequence; identical to SEQ ID NO: 80762
  derived and/or modified CDS sequence (opt1) from neuraminidase__InfluenzaA__AFN18985

SEQ ID NO: 86903 - RNA, 1410 nt, Artificial Sequence
  derived and/or modified CDS sequence (opt1) from neuraminidase__InfluenzaA__AFN18987
augaaccccaaccagaagaucaucaccaucggcagcgugugcaugaccaucgggauggccaaccugauccuccagaucggcaacaucaucuccaucuggaucagccacuccauccagcuggggaaccagaaccagaucgagacgugcaaccagagcgucaucaccuacgagaacaacaccugggugaaccagaccuacgugaacaucuccaacacgaacuucgccgcgggccagagcgucguguccgugaagcuggccgggaacagcucccucugcccggucagcggcugggccaucuacuccaaggacaacagcauccgcaucggcuccaagggggacguguucgugauccgggagcccuucaucagcugcagcccccuggagugccgcaccuucuuccugacccagggcgcccuccugaacgacaagcacuccaacgggaccaucaaggaccggucccccuaccgcacgcugaugagcugcccgaucggcgagguccccucccccuacaacagccgguucgagagcguggccugguccgcgagcgccugccacgacgggaucaacuggcucaccaucggcaucuccggccccgacaacggggccguggccguccugaaguacaacggcaucaucaccgacaccaucaagagcuggcgcaacaacauccugcggacgcaggaguccgagugcgcgugcgugaacgggagcugcuucaccgugaugaccgacggcccguccgacggccaggccagcuacaagaucuuccgcaucgagaaggggaagaucgucaaguccguggagaugaacgcccccaacuaccacuacgaggagugcagcugcuaccccgacuccagcgagaucacgugcgugugccgggacaacuggcacggcuccaaccgccccugggucagcuucaaccagaaccucgaguaccagaucggguacaucugcuccggcaucuucggggacaacccgcggcccaucgacaagaccggcagcugcggccccguguccagcaacggggccaacggcgugaagggguucuccuucaaguacggcaacggggucuggaucggccgcaccaagagcaucagcucccggaacggcuucgagaugaucugggaccccaacggguggaccggcaccgacaacaacuucagcaucaagcaggacaucguggggaucaacgagugguccggcuacagcggguccuucgugcagcacccggagcugacgggccuggacugcauccgccccugcuucugggucgagcucauccggggccgccccaaggagaacaccaucuggaccagcggguccagcaucuccuucugcggcgugaacagcgacaccgucgggugguccuggcccgacggcgccgagcugccguucacgaucgacaaguga

SEQ ID NO: 86904 - RNA, 1410 nt, Artificial Sequence; identical to SEQ ID NO: 80762
  derived and/or modified CDS sequence (opt1) from neuraminidase__InfluenzaA__AFN18989

SEQ ID NO: 86905 - RNA, 1410 nt, Artificial Sequence; identical to SEQ ID NO: 80762
  derived and/or modified CDS sequence (opt1) from neuraminidase__InfluenzaA__AFN18995

SEQ ID NO: 86906 - RNA, 1410 nt, Artificial Sequence; identical to SEQ ID NO: 86884
  derived and/or modified CDS sequence (opt1) from neuraminidase__InfluenzaA__AFN19001

SEQ ID NO: 86907 - RNA, 1410 nt, Artificial Sequence; identical to SEQ ID NO: 80762
  derived and/or modified CDS sequence (opt1) from neuraminidase__InfluenzaA__AFN19007

SEQ ID NO: 86908 - RNA, 1410 nt, Artificial Sequence; identical to SEQ ID NO: 80762
  derived and/or modified CDS sequence (opt1) from neuraminidase__InfluenzaA__AFN19024

SEQ ID NO: 86909 - RNA, 1410 nt, Artificial Sequence
  derived and/or modified CDS sequence (opt1) from neuraminidase__InfluenzaA__AFN19025
augaaccccaaccagaagaucaucaccaucggcagcgugugcaugaccaucgggauggccaaccugauccuccagaucggcaacaucaucuccaucuggaucagccacuccauccagcuggggaaccagaaccagaucgagacgugcaaccagagcgucaucaccuacgagaacaacaccugggugaaccagaccuacgugaacaucuccaacacgaacuucgccgcgggccagagcgucguguccgugaagcuggccgggaacagcucccucugcccggucagcggcugggccaucuacuccaaggacaacagcauccgcaucggcuccaagggggacguguucgugauccgggagcccuucaucagcugcagcccccuggagugccgcaccuucuuccugacccagggcgcccuccugaacgacaagcacuccaacgggaccaucaaggaccggucccccuaccgcacgcugaugagcugcccgaucggcgagguccccucccccuacaacagccgguucgagagcguggccugguccgcgagcgccugccacgacgggaucaacuggcucaccaucggcaucuccggccccgacaacggggccguggccguccugaaguacaacggcaucaucaccgacaccaucaagagcuggcgcaacaagauccugcggacgcaggaguccgagugcgcgugcgugaacgggagcugcuucaccgugaugaccgacggcccguccgacggccaggccagcuacaagaucuuccgcaucgagaaggggaagaucgucaaguccguggagaugaacgcccccaacuaccacuacgaggagugcagcugcuaccccgacuccagcgagaucacgugcgugugccgggacaacuggcacggcuccaaccgccccugggucagcuucaaccagaaccucgaguaccagaucggguacaucugcuccggcaucuucggggacaacccgcggcccaacgacaagaccggcagcugcggccccguguccagcaacggggccaacggcgugaagggguucuccuucaaguacggcaacggggucuggaucggccgcaccaagagcaucagcucccggaacggcuucgagaugaucugggaccccaacggguggaccggcaccgacaacaacuucagcaucaagcaggacaucguggggaucaacgagugguccggcuacagcggguccuucgugcagcacccggagcugacgggccuggacugcauccgccccugcuucugggucgagcucauccggggccgccccaaggagaacaccaucuggaccagcggguccagcaucuccuucugcggcgugaacagcgacaccgucgggugguccuggcccgacggcgccgagcugccguucacgaucgacaaguga

SEQ ID NO: 86910 - RNA, 1410 nt, Artificial Sequence; identical to SEQ ID NO: 80762
  derived and/or modified CDS sequence (opt1) from neuraminidase__InfluenzaA__AFN19027

SEQ ID NO: 86911 - RNA, 1410 nt, Artificial Sequence; identical to SEQ ID NO: 80762
  derived and/or modified CDS sequence (opt1) from neuraminidase__InfluenzaA__AFN19032

SEQ ID NO: 86912 - RNA, 1410 nt, Artificial Sequence; identical to SEQ ID NO: 80762
  derived and/or modified CDS sequence (opt1) from neuraminidase__InfluenzaA__AFN19038

SEQ ID NO: 86913 - RNA, 1410 nt, Artificial Sequence; identical to SEQ ID NO: 86395
  derived and/or modified CDS sequence (opt1) from neuraminidase__InfluenzaA__AFN19049

SEQ ID NO: 86914 - RNA, 1410 nt, Artificial Sequence; identical to SEQ ID NO: 80762
  derived and/or modified CDS sequence (opt1) from neuraminidase__InfluenzaA__AFN19055

SEQ ID NO: 86915 - RNA, 1410 nt, Artificial Sequence; identical to SEQ ID NO: 80762
  derived and/or modified CDS sequence (opt1) from neuraminidase__InfluenzaA__AFN19065

SEQ ID NO: 86916 - RNA, 1410 nt, Artificial Sequence; identical to SEQ ID NO: 80762
  derived and/or modified CDS sequence (opt1) from neuraminidase__InfluenzaA__AFN19071

SEQ ID NO: 86917 - RNA, 1410 nt, Artificial Sequence; identical to SEQ ID NO: 80762
  derived and/or modified CDS sequence (opt1) from neuraminidase__InfluenzaA__AFN19077

SEQ ID NO: 86918 - RNA, 1410 nt, Artificial Sequence; identical to SEQ ID NO: 80762
  derived and/or modified CDS sequence (opt1) from neuraminidase__InfluenzaA__AFN19083

SEQ ID NO: 86919 - RNA, 1410 nt, Artificial Sequence; identical to SEQ ID NO: 80762
  derived and/or modified CDS sequence (opt1) from neuraminidase__InfluenzaA__AFN19089

SEQ ID NO: 86920 - RNA, 1410 nt, Artificial Sequence; identical to SEQ ID NO: 80762
  derived and/or modified CDS sequence (opt1) from neuraminidase__InfluenzaA__AFN19099

SEQ ID NO: 86921 - RNA, 1410 nt, Artificial Sequence; identical to SEQ ID NO: 80762
  derived and/or modified CDS sequence (opt1) from neuraminidase__InfluenzaA__AFN19105

SEQ ID NO: 86922 - RNA, 1410 nt, Artificial Sequence; identical to SEQ ID NO: 80762
  derived and/or modified CDS sequence (opt1) from neuraminidase__InfluenzaA__AFN19114

SEQ ID NO: 86923 - RNA, 1410 nt, Artificial Sequence; identical to SEQ ID NO: 80762
  derived and/or modified CDS sequence (opt1) from neuraminidase__InfluenzaA__AFN19126

SEQ ID NO: 86924 - RNA, 1410 nt, Artificial Sequence; identical to SEQ ID NO: 80762
  derived and/or modified CDS sequence (opt1) from neuraminidase__InfluenzaA__AFN19136

SEQ ID NO: 86925 - RNA, 1410 nt, Artificial Sequence; identical to SEQ ID NO: 80762
  derived and/or modified CDS sequence (opt1) from neuraminidase__InfluenzaA__AFN19146

SEQ ID NO: 86926 - RNA, 1410 nt, Artificial Sequence; identical to SEQ ID NO: 80762
  derived and/or modified CDS sequence (opt1) from neuraminidase__InfluenzaA__AFN19156

SEQ ID NO: 86927 - RNA, 1410 nt, Artificial Sequence; identical to SEQ ID NO: 80762
  derived and/or modified CDS sequence (opt1) from neuraminidase__InfluenzaA__AFN19166

SEQ ID NO: 86928 - RNA, 1410 nt, Artificial Sequence; identical to SEQ ID NO: 80762
  derived and/or modified CDS sequence (opt1) from neuraminidase__InfluenzaA__AFN19186

SEQ ID NO: 86929 - RNA, 1410 nt, Artificial Sequence; identical to SEQ ID NO: 86395
  derived and/or modified CDS sequence (opt1) from neuraminidase__InfluenzaA__AFN19196

SEQ ID NO: 86930 - RNA, 1410 nt, Artificial Sequence; identical to SEQ ID NO: 80762
  derived and/or modified CDS sequence (opt1) from neuraminidase__InfluenzaA__AFN19205

SEQ ID NO: 86931 - RNA, 1410 nt, Artificial Sequence; identical to SEQ ID NO: 80762
  derived and/or modified CDS sequence (opt1) from neuraminidase__InfluenzaA__AFN19215

SEQ ID NO: 86932 - RNA, 1410 nt, Artificial Sequence; identical to SEQ ID NO: 80762
  derived and/or modified CDS sequence (opt1) from neuraminidase__InfluenzaA__AFN19225

SEQ ID NO: 86933 - RNA, 1410 nt, Artificial Sequence; identical to SEQ ID NO: 80762
  derived and/or modified CDS sequence (opt1) from neuraminidase__InfluenzaA__AFN19235

SEQ ID NO: 86934 - RNA, 1410 nt, Artificial Sequence; identical to SEQ ID NO: 80762
  derived and/or modified CDS sequence (opt1) from neuraminidase__InfluenzaA__AFN19245

SEQ ID NO: 86935 - RNA, 1410 nt, Artificial Sequence; identical to SEQ ID NO: 80762
  derived and/or modified CDS sequence (opt1) from neuraminidase__InfluenzaA__AFN19251

SEQ ID NO: 86936 - RNA, 1410 nt, Artificial Sequence; identical to SEQ ID NO: 80762
  derived and/or modified CDS sequence (opt1) from neuraminidase__InfluenzaA__AFN19261

SEQ ID NO: 86937 - RNA, 1410 nt, Artificial Sequence; identical to SEQ ID NO: 86395
  derived and/or modified CDS sequence (opt1) from neuraminidase__InfluenzaA__AFN19271

SEQ ID NO: 86938 - RNA, 1410 nt, Artificial Sequence; identical to SEQ ID NO: 82493
  derived and/or modified CDS sequence (opt1) from neuraminidase__InfluenzaA__AFN19281

SEQ ID NO: 86939 - RNA, 1410 nt, Artificial Sequence
  derived and/or modified CDS sequence (opt1) from neuraminidase__InfluenzaA__AFN19287
augaaccccaaccagaagaucaucaccaucggcagcgugugcaugaccaucgggauggccaaccugauccuccagaucggcaacaucaucuccaucuggaucagccacuccauccagcuggggaaccagaaccagaucgagacgugcaaccagagcgucaucaccuacgagaacaacaccugggugaaccagaccuacgugaacaucuccaacacgaacuucgccgcgggccagagcgucguguccgugaagcuggccgggaacagcucccucugcccggucagcggcugggccaucuacuccaaggacaacagcauccgcaucggcuccaagggggacguguucgugauccgggagcccuucaucagcugcagcccccuggagugccgcaccuucuuccugacccagggcgcccuccuguccgacaagcacuccaacgggaccaucaaggaccggagccccuaccgcacgcugauguccugcccgaucggcgagguccccagccccuacaacagccgguucgaguccguggccuggagcgcguccgccugccacgacgggaucaacuggcucaccaucggcaucagcggccccgacaacggggccguggccguccugaaguacaacggcaucaucaccgacaccaucaaguccuggcgcaacaacauccugcggacgcaggagagcgagugcgcgugcgugaacggguccugcuucaccgugaugaccgacggcccgagcgacggccaggccuccuacaagaucuuccgcaucgagaaggggaagaucgucaagagcguggagaugaacgcccccaacuaccacuacgaggagugcuccugcuaccccgacagcuccgagaucacgugcgugugccgggacaacuggcacggcagcaaccgccccugggucuccuucaaccagaaccucgaguaccagaucggguacaucugcagcggcaucuucggggacaacccgcggcccaacgacaagaccggcuccugcggccccgugagcuccaacggggccaacggcgugaagggguucagcuucaaguacggcaacggggucuggaucggccgcaccaagagcaucuccagccggaacggcuucgagaugaucugggaccccaacggguggaccggcaccgacaacaacuucuccaucaagcaggacaucguggggaucaacgaguggagcggcuacuccgggagcuucgugcagcacccggagcugacgggccuggacugcauccgccccugcuucugggucgagcucauccggggccgccccaaggagaacaccaucuggaccuccgggagcuccaucagcuucugcggcgugaacuccgacaccgucggguggagcuggcccgacggcgccgagcugccguucacgaucgacaaguga

SEQ ID NO: 86940 - RNA, 1410 nt, Artificial Sequence; identical to SEQ ID NO: 80762
  derived and/or modified CDS sequence (opt1) from neuraminidase__InfluenzaA__AFN19297

SEQ ID NO: 86941 - RNA, 1410 nt, Artificial Sequence; identical to SEQ ID NO: 80762
  derived and/or modified CDS sequence (opt1) from neuraminidase__InfluenzaA__AFN19307

SEQ ID NO: 86942 - RNA, 1410 nt, Artificial Sequence; identical to SEQ ID NO: 80762
  derived and/or modified CDS sequence (opt1) from neuraminidase__InfluenzaA__AFN19317

SEQ ID NO: 86943 - RNA, 1410 nt, Artificial Sequence; identical to SEQ ID NO: 86395
  derived and/or modified CDS sequence (opt1) from neuraminidase__InfluenzaA__AFN19327

SEQ ID NO: 86944 - RNA, 1410 nt, Artificial Sequence; identical to SEQ ID NO: 80762
  derived and/or modified CDS sequence (opt1) from neuraminidase__InfluenzaA__AFN19346

SEQ ID NO: 86945 - RNA, 1410 nt, Artificial Sequence
  derived and/or modified CDS sequence (opt1) from neuraminidase__InfluenzaA__AFN19352
augaaccccaaccagaagaucaucaccaucggcagcgugucccugaccaucagcacgaucugcuucuucaugcagaucgccauccucaucaccaccgucacccugcacuucaagcaguacgaguucaacuccccgcccaacaaccaggugaugcugugcgagcccacgaucaucgagcgcaacaugaccgagaucguguaccucaccaacaccacgaucgagaaggagaucugccccaagccggccgaguaccggaacuggagcaagccccagugcgacaucaccggguucgcgcccuucuccaaggacaacagcauccgccuguccgccggcggggacaucugggucacccgggagcccuacgugagcugcgacccggacaagugcuaccaguucgcccugggccaggggaccacgcucaacaacgugcacuccaacaacaccguccgcgaccggacccccuaccgcacccugcugaugaacgagcucggcgugcccuuccaccugggcacgaagcaggucugcaucgccuggagcuccagcuccugccacgacgggaaggccuggcugcacgugugcaucaccggcgacgacaagaacgcgaccgccagcuucaucuacaacgggcggcucguggacuccguggucagcugguccaaggagauccugcgcacccaggagagcgagugcgugugcaucaacggcacgugcaccguggucaugaccgacggguccgccagcggcaaggccgacaccaagauccuguucaucgaggagggcaagaucgugcacacgagcacccucuccgggagcgcgcagcacguggaggagugcuccugcuacccccgguacccgggcguccgcugcgugugccgggacaacuggaaggggagcaaccgccccaucguggacaucaacaucaaggaccacuccaucgucagcuccuacgugugcagcggccuggugggcgacacgccccggaagaacgacuccagcuccagcgggcacugccuggaccccaacaacgaggagggcgggcacggcgucaaggggugggccuucgacgacggcaacgacguguggaugggccgcaccaucaacgagaccucccggcucggguacgagaccuucaaggucaucgagggcuggagcaacccgaaguccaagcugcagaucaaccgccaggugaucguggaccggagcgaccgcuccggguacagcggcaucuucuccgucgagggcaagagcugcaucaaccggugcuucuacguggagcugauccgcgggcggaaggaggagaccgaggugcucuggaccagcaacuccaucgucguguucugcggcacgagcgggaccuacggcaccggguccuggcccgacggcgccgaccugaaccugaugcccaucuga

SEQ ID NO: 86946 - RNA, 1410 nt, Artificial Sequence
  derived and/or modified CDS sequence (opt1) from neuraminidase__InfluenzaA__AFN19354
augaaccccaaccagaagaucaucaccaucggcagcgugucccugaccaucagcacgaucugcuucuucaugcagaucgccauccucaucaccaccgucacccugcacuucaagcaguacgaguucaacuccccgcccaacaaccaggugaugcugugcgagcccacgaucaucgagcgcaacaucaccgagaucguguaccucaccaacaccacgaucgagaaggagaucugccccaagccggccgaguaccggaacuggagcaagccccagugcgacaucaccggguucgcgcccuucuccaaggacaacagcauccgccuguccgccggcggggacaucugggucacccgggagcccuacgugagcugcgacccggacaagugcuaccaguucgcccugggccaggggaccacgcucaacaacgugcacuccaacaacaccguccgcgaccggacccccuaccgcacccugcugaugaacgagcucggcgugcccuuccaccugggcacgaagcaggucugcaucgccuggagcuccagcuccugccacgacgggaaggccuggcugcacgugugcaucaccggcgacgacaagaacgcgaccgccagcuucaucuacaacgggcggcucguggacuccguggucagcugguccaaggagauccugcgcacccaggagagcgagugcgugugcaucaacggcacgugcaccguggucaugaccgacggguccgccagcggcaaggccgacaccaagauccuguucaucgaggagggcaagaucgugcacacgagcacccucuccgggagcgcgcagcacguggaggagugcuccugcuacccccgguacccgggcguccgcugcgugugccgggacaacuggaaggggagcaaccgccccaucguggacaucaacaucaaggaccacuccaucgucagcuccuacgugugcagcggccuggugggcgacaccccgcggaagaacgacuccagcuccagcucccacugccuggaccccaacaacgaggagggcgggcacggggucaagggcugggccuucgacgacgggaacgacguguggaugggccgcaccaucaacgagacgagccggcucggcuacgagaccuucaaggucaucgaggggugguccaaccccaagagcaagcugcagaucaaccgccaggugaucguggaccggggcgaccgcuccggguacagcggcaucuucuccgucgagggcaagagcugcaucaaccggugcuucuacguggagcugauccgcgggcggaaggaggagaccgaggugcucuggaccagcaacuccaucgucguguucugcggcacgagcgggaccuacggcaccggguccuggcccgacggcgccgaccugaaccugaugcccaucuga

SEQ ID NO: 86947 - RNA, 1410 nt, Artificial Sequence; identical to SEQ ID NO: 86946
  derived and/or modified CDS sequence (opt1) from neuraminidase__InfluenzaA__AFN19356

SEQ ID NO: 86948 - RNA, 1410 nt, Artificial Sequence; identical to SEQ ID NO: 86946
  derived and/or modified CDS sequence (opt1) from neuraminidase__InfluenzaA__AFN19358

SEQ ID NO: 86949 - RNA, 1410 nt, Artificial Sequence; identical to SEQ ID NO: 86946
  derived and/or modified CDS sequence (opt1) from neuraminidase__InfluenzaA__AFN19360

SEQ ID NO: 86950 - RNA, 1410 nt, Artificial Sequence
  derived and/or modified CDS sequence (opt1) from neuraminidase__InfluenzaA__AFN19362
augaaccccaaccagaagaucaucaccaucggcagcgugucccugaccaucagcacgaucugcuucuucaugcagaucgccauccucaucaccaccgucacccugcacuucaagcaguacgaguucaacuccccgcccaacaaccaggugaugcugugcgagcccacgaucaucgagcgcaacaucaccgagaucguguaccucaccaacaccacgaucgagaaggagaucugccccaagccggccgaguaccggaacuggagcaagccccagugcgacaucaccggguucgcgcccuucuccaaggacaacagcauccgccuguccgccggcggggacaucugggucacccgggagcccuacgugagcugcgacccggacaagugcuaccaguucgcccugggccaggggaccacgcucaacaacgugcacuccaacaacaccguccgcgaccggacccccuaccgcacccugcugaugaacgagcucggcgugcccuuccaccugggcacgaagcaggucugcaucgccuggagcuccagcuccugccacgacgggaaggccuggcugcacgugugcaucaccggcgacgacaagaacgcgaccgccagcuucaucuacaacgggcggcucguggacuccguggucagcugguccaaggagauccugcgcacccaggagagcgagugcgugugcaucaacggcacgugcaccguggucaugaccgacggguccgccagcggcaaggccgacaccaagauccuguucaucgaggagggcaagaucgugcacacgagcacccucuccgggagcgcgcagcacguggaggagugcuccugcuacccccgguacccgggcguccgcugcgugugccgggacaacuggaaggggagcaaccgccccaucguggacaucaacaucaaggaccacuccaucgucagcuccuacgugugcagcggccuggugggcgacaccccgcggaagaacgacuccagcuccagcucccacugccuggaccccaacaacgaggagggcgggcacggggucaagggcugggccuucgacgacgggaacgacguguggaugggccgcaccaucaacgagacgagccggcucggcuacgagaccuucaaggucaucgaggggugguccaaccccaagagcaagcugcagaucaaccgccaggugaucguggaccggggcgaccgcuccggguacagcggcaucuucuccgucgaggggaagcggugcaucaaccgcugcuucuacguggagcugauccggggccgcaaggaggagaccgaggugcucuggaccagcaacagcaucgucguguucugcggcacguccgggaccuacggcaccgggagcuggcccgacggcgccgaccugaaccugaugcccaucuga

SEQ ID NO: 86951 - RNA, 1410 nt, Artificial Sequence; identical to SEQ ID NO: 86946
  derived and/or modified CDS sequence (opt1) from neuraminidase__InfluenzaA__AFN19364

SEQ ID NO: 86952 - RNA, 1410 nt, Artificial Sequence; identical to SEQ ID NO: 83542
  derived and/or modified CDS sequence (opt1) from neuraminidase__InfluenzaA__AFN19366

SEQ ID NO: 86953 - RNA, 1410 nt, Artificial Sequence; identical to SEQ ID NO: 86946
  derived and/or modified CDS sequence (opt1) from neuraminidase__InfluenzaA__AFN19370

SEQ ID NO: 86954 - RNA, 1410 nt, Artificial Sequence
  derived and/or modified CDS sequence (opt1) from neuraminidase__InfluenzaA__AFN19374
augaaccccaaccagaagaucaucaccaucggcagcgugucccugaccaucagcacgaucugcuucuucaugcagaucgccauccucaucaccaccgucacccugcacuucaagcaguacgaguucaacuccccgcccaacaaccaggugaugcugugcgagcccacgaucaucgagcgcaacaucaccgagaucguguaccucaccaacaccacgaucgagaaggagaucugccccaagccggccgaguaccggaacuggagcaagccccagugcgggaucaccggcuucgcgcccuucuccaaggacaacagcauccgccuguccgccgggggcgacaucugggucacccgggagcccuacgugagcugcgacccggacaagugcuaccaguucgcccuggggcagggcaccacgcucaacaacgugcacuccaacaacaccguccgcgaccggacccccuaccgcacccugcugaugaacgagcucggcgugcccuuccaccuggggacgaagcaggucugcaucgccuggagcuccagcuccugccacgacggcaaggccuggcugcacgugugcaucaccggggacgacaagaacgcgaccgccagcuucaucuacaacggccggcucguggacuccguggucagcugguccaaggagauccugcgcacccaggagagcgagugcgugugcaucaacgggacgugcaccguggucaugaccgacggcuccgccagcggcaaggccgacaccaagauccuguucaucaaggaggggaagaucgugcacacgagcacccucuccggcagcgcgcagcacguggaggagugcuccugcuacccccgguacccggggguccgcugcgugugccgggacaacuggaagggcagcaaccgccccaucguggacaucaacaucaaggaccacuccaucgucagcuccuacgugugcagcggccuggugggggacaccccgcggaagaccgacuccagcuccagcucccacugccuggaccccaacaacgaggagggcgggcacggcgucaaggggugggccuucgacgacggcaacgacguguggaugggccgcacgaucaacgagaccagccggcucggguacgagaccuucaaggucaucgagggcugguccaaccccaagagcaagcugcagaucaaccgccaggugaucguggaccgcggggaccgguccggcuacagcgggaucuucuccgucgagggcaagagcugcaucaaccggugcuucuacguggagcugauccgcggccggaaggaggagaccgaggugcucuggacgagcaacuccaucgucguguucugcgggaccagcggcaccuacgggaccggcuccuggcccgacggggccgaccugaaccugaugcccaucuga

SEQ ID NO: 86955 - RNA, 1410 nt, Artificial Sequence; identical to SEQ ID NO: 86946
  derived and/or modified CDS sequence (opt1) from neuraminidase__InfluenzaA__AFN19376

SEQ ID NO: 86956 - RNA, 1410 nt, Artificial Sequence; identical to SEQ ID NO: 86946
  derived and/or modified CDS sequence (opt1) from neuraminidase__InfluenzaA__AFN19378

SEQ ID NO: 86957 - RNA, 1410 nt, Artificial Sequence
  derived and/or modified CDS sequence (opt1) from neuraminidase__InfluenzaA__AFN19380
augaaccccaaccagaagaucaucaccaucggcagcgugucccugaccaucagcacgaucugcuucuucaugcagaucgccauccucaucaccaccgucacccugcacuucaagcaguacgaguucaacuccccgcccaacaaccaggugaugcugugcgagcccacgaucaucgagcgcaacaucaccgagaucguguaccucaccaacaccacgaucgagaaggagaucugccccaagccgagcgaguaccggaacugguccaagccccagugcgacaucaccggguucgcccccuucagcaaggacaacuccauccgccugagcgcgggcggggacaucugggucacccgggagcccuacguguccugcgacccggacaagugcuaccaguucgcccugggccaggggaccacgcucaacaacgugcacagcaacaacaccguccgcgaccggacccccuaccgcacccugcugaugaacgagcucggcgugcccuuccaccugggcacgaagcaggucugcaucgccugguccagcuccagcugccacgacgggaaggccuggcugcacgugugcaucaccggcgacgacaagaacgccaccgcguccuucaucuacaacgggcggcucguggacagcguggucuccuggagcaaggagauccugcgcacccaggaguccgagugcgugugcaucaacggcacgugcaccguggucaugaccgacgggagcgccagcggcaaggccgacaccaagauccuguucaucgaggagggcaagaucgugcacacguccacccucagcggguccgcccagcacguggaggagugcagcugcuacccccgguacccgggcguccgcugcgugugccgggacaacuggaagggguccaaccgccccaucguggacaucaacaucaaggaccacagcaucgucuccagcuacgugugcuccggccuggugggcgacacgccccggaagaacgacagcuccagcuccagccacugccuggaccccaacaacgaggagggcgggcacggggucaagggcugggcguucgacgacgggaacgacguguggaugggccgcaccaucaacgagaccucccggcucggcuacgagaccuucaaggucaucgagggguggagcaacccgaaguccaagcugcagaucaaccgccaggugaucguggaccggggcgaccgcagcggguacuccggcaucuucagcgucgagggcaagagcugcaucaaccggugcuucuacguggagcugauccgcgggcggaaggaggagaccgaggugcucuggaccuccaacagcaucgucguguucugcggcacguccgggaccuacggcaccgggagcuggcccgacggcgccgaccugaaccugaugcccaucuga

SEQ ID NO: 86958 - RNA, 1410 nt, Artificial Sequence; identical to SEQ ID NO: 86954
  derived and/or modified CDS sequence (opt1) from neuraminidase__InfluenzaA__AFN19382

SEQ ID NO: 86959 - RNA, 1410 nt, Artificial Sequence; identical to SEQ ID NO: 86946
  derived and/or modified CDS sequence (opt1) from neuraminidase__InfluenzaA__AFN19384

SEQ ID NO: 86960 - RNA, 1410 nt, Artificial Sequence
  derived and/or modified CDS sequence (opt1) from neuraminidase__InfluenzaA__AFN19386
augaaccccaaccagaagaucaucaccaucggcagcgugucccugaccaucagcacgaucugcuucuucaugcagaucgccauccucaucaccaccgucacccugcacuucaagcaguacgaguucaacuccccgcccaacaaccaggugaugcugugcgagcccacgaucaucgagcgcaacaucaccgagaucguguaccucaccaacaccacgaucgagaaggagaucugccccaagccggccgaguaccggaacuggagcaagccccagugcgacaucaccggguucgcgcccuucuccaaggacaacagcauccgccuguccgccggcggggacaucugggucacccgggagcccuacgugagcugcgacccggacaagugcuaccaguucgcccugggccaggggaccacgcucaacaacgugcacuccaacaacaccguccgcgaccggacccccuaccgcacccugcugaugaacgagcucggcgugcccuuccaccugggcacgaagcaggucugcaucgccuggagcuccagcuccugccacgacgggaaggccuggcugcacgugugcaucaccggcgacgacaagaacgcgaccgccagcuucaucuacaacgggcggcucguggacuccguggucagcugguccaaggagauccugcgcacccaggagagcgagugcgugugcaucaacggcacgugcaccguggucaugaccgacggguccgccagcggcaaggccgacaccaagauccuguucaucgaggagggcaagaucgugcacacgagcacccucuccgggagcgcgcagcacguggaggagugcuccugcuacccccgguacccgggcguccgcugcgugugccgggacaacuggaaggggagcaaccgccccaucguggacaucaacaucaaggaccacuccaucgucagcuccuacgugugcagcggccuggugggcgacaccccgcggaagaacgacuccagcuccagcucccacugccuggaccccaacaacgaggagggcgggcacggggucaagggcugggccuucgacgacgggaacgacguguggaugggccgcaccaucaacgagacgagccggcucggcuacgagaccuucaaggucaucgaggggugguccaaccccaagagcaagcugcagaucaaccgccagaucaucguggaccggggcgaccgcuccggguacagcggcaucuucuccguggagggcaagagcugcaucaaccggugcuucuacgucgagcugauccgcgggcggaaggaggagaccgaggugcucuggaccagcaacuccaucguggucuucugcggcacgagcgggaccuacggcaccggguccuggcccgacggcgccgaccugaaccugaugcccaucuga

SEQ ID NO: 86961 - RNA, 1410 nt, Artificial Sequence; identical to SEQ ID NO: 86946
  derived and/or modified CDS sequence (opt1) from neuraminidase__InfluenzaA__AFN19388

SEQ ID NO: 86962 - RNA, 1410 nt, Artificial Sequence; identical to SEQ ID NO: 86946
  derived and/or modified CDS sequence (opt1) from neuraminidase__InfluenzaA__AFN19390

SEQ ID NO: 86963 - RNA, 1410 nt, Artificial Sequence
  derived and/or modified CDS sequence (opt1) from neuraminidase__InfluenzaA__AFN19392
augaaccccaaccagaagaucaucaccaucggcagcgugucccugaccaucagcacgaucugcuucuucaugcagaucgccguccucaucaccaccgugacccugcacuucaagcaguacgaguucaacuccccgcccaacaaccaggugaugcugugcgagcccacgaucaucgagcgcaacaucaccgagaucgucuaccucaccaacaccacgaucgagaaggagaucugccccaagccggccgaguaccggaacuggagcaagccccagugcgacaucaccggguucgcgcccuucuccaaggacaacagcauccgccuguccgccggcggggacaucugggugacccgggagcccuacgugagcugcgacccggacaagugcuaccaguucgcccugggccaggggaccacgcucaacaacguccacuccaacaacaccgugcgcgaccggacccccuaccgcacccugcugaugaacgagcucggcgugcccuuccaccugggcacgaagcaggucugcaucgccuggagcuccagcuccugccacgacgggaaggccuggcugcacgugugcaucaccggcgacgacaagaacgcgaccgccagcuucaucuacaacgggcggcucguggacuccgucgugagcugguccaaggagauccugcgcacccaggagagcgagugcgugugcaucaacggcacgugcaccgucgugaugaccgacggguccgccagcggcaaggccgacaccaagauccuguucaucgaggagggcaagaucgugcacacgagcacccucuccgggagcgcgcagcacgucgaggagugcuccugcuacccccgguacccgggcgugcgcugcgugugccgggacaacuggaaggggagcaaccgccccaucgucgacaucaacaucaaggaccacuccaucgugagcuccuacgugugcagcggccuggucggcgacaccccgcggaagaacgacuccagcuccagcucccacugccuggaccccaacaacgaggagggcgggcacggggugaagggcugggccuucgacgacgggaacgacgucuggaugggccgcaccaucaacgagacgagccggcucggcuacgagaccuucaaggugaucgaggggugguccaaccccaagagcaagcugcagaucaaccgccaggugaucgucgaccggggcgaccgcuccggguacagcggcaucuucuccguggagggcaagagcugcaucaaccggugcuucuacguggagcugauccgcgggcggaaggaggagaccgagguccucuggaccagcaacuccaucgugguguucugcggcacgagcgggaccuacggcaccggguccuggcccgacggcgccgaccugaaccugaugcccaucuga

SEQ ID NO: 86964 - RNA, 1410 nt, Artificial Sequence; identical to SEQ ID NO: 85811
  derived and/or modified CDS sequence (opt1) from neuraminidase__InfluenzaA__AFN19394

SEQ ID NO: 86965 - RNA, 1410 nt, Artificial Sequence
  derived and/or modified CDS sequence (opt1) from neuraminidase__InfluenzaA__AFN19396
augaaccccaaccagaagaucaucaccaucggcagcgugucccugaccaucagcacgaucugcuucuucaugcagaucgccauccucaucaccaccgucacccugcacuucaagcaguacgaguucaacuccccgcccaacaaccaggugaugcugugcgagcccacgaucaucgagcgcaacaucaccgagaucguguaccucaccaacaccacgaucgagaaggagaucugccccaagcuggccgaguaccggaacuggagcaagccgcagugcgacaucaccggguucgcgcccuucuccaaggacaacagcauccgccuguccgccggcggggacaucugggucacccgggagcccuacgugagcugcgaccccgacaagugcuaccaguucgcccucggccaggggaccacgcugaacaacgugcacuccaacaacaccguccgcgaccggaccccguaccgcacccugcucaugaacgagcugggcgugcccuuccaccugggcacgaagcaggucugcaucgccuggagcuccagcuccugccacgacgggaaggccuggcuccacgugugcaucaccggcgacgacaagaacgcgaccgccagcuucaucuacaacgggcggcugguggacuccguggucagcugguccaaggacauccugcgcacccaggagagcgagugcgugugcaucaacggcacgugcgccguggucaugaccgacggguccgccagcggcaaggcggacaccaagauccucuucaucgaggagggcaagaucgugcacaccagcacgcuguccgggagcgcccagcacguggaggagugcuccugcuacccccgguaccccggcguccgcugcgugugccgggacaacuggaaggggagcaaccgcccgaucguggacaucaacaucaaggaccacuccaucgucagcuccuacgugugcagcggccuggugggcgacacgccccggaagaacgacuccagcuccagcucccacugccucgaccccaacaacgaggagggcgggcacggggucaagggcugggccuucgacgacgggaacgacguguggaugggccgcaccaucaacgagaccagccggcugggcuacgagaccuucaaggucaucgaggggugguccaaccccaagagcaagcugcagaucaaccgccaggugaucguggaccggggcaaccgcuccggguacagcggcaucuucuccgucgaggggaagaacugcaucaaccggugcuucuacguggagcucauccgcggccggaaggaggagaccgaggugcuguggaccagcaacagcaucgucguguucugcggcaccuccgggacguacggcaccgggagcuggccggacggcgccgaccugaaccucaugcccaucuga

SEQ ID NO: 86966 - RNA, 1410 nt, Artificial Sequence
  derived and/or modified CDS sequence (opt1) from neuraminidase__InfluenzaA__AFN19398
augaaccccaaccagaagaucaucaccaucggcagcgugucccugaccaucagcacgaucugcuucuucaugcagaucgccauccucaucaccaccgucacccugcacuucaagcaguacgaguucaacuccccgcccaacaaccaggugaugcugugcgagcccacgaucaucgagcgcaacaucaccgagaucguguaccucaccaacaccacgaucgagaaggagaucugccccaagccggccgaguaccggaacuggagcaagccccagugcgacaucaccggguucgcgcccuucuccaaggacaacagcauccgccuguccgccggcggggacaucugggucacccgggagcccuacgugagcugcgacccggacaagugcuaccaguucgcccugggccaggggaccacgcucaacaacgugcacuccaacaacaccguccgcgaccggacccccuaccgcacccugcugaugaacgagcucggcgugcccuuccaccugggcacgaagcaggucugcaucgccuggagcuccagcuccugccacgacgggaaggccuggcugcacgugugcaucaccggcgacgacaagaacgcgaccgccagcuucaucuacaacgggcggcucguggacuccguggucagcugguccaaggagauccugcgcacccaggagagcgagugcgugugcaucaacggcacgugcaccguggucaugaccgacggguccgccagcggcaaggccgacaccaagauccuguucaucgaggagggcaagaucgugcacacgagcacccucuccgggagcgcgcagcacguggaggagugcuccugcuacccccgguacccgggcguccgcugcgugugccgggacaacuggcgcgggagcaaccggcccaucguggacaucaacaucaaggaccacuccaucgucagcuccuacgugugcagcggccuggugggcgacaccccgcgcaagaacgacuccagcuccagcucccacugccuggaccccaacaacgaggagggcgggcacggggucaagggcugggccuucgacgacgggaacgacguguggaugggccggaccaucaacgagacgagccgccucggcuacgagaccuucaaggucaucgaggggugguccaaccccaagagcaagcugcagaucaaccgccaggugaucguggaccggggcgaccgguccggguacagcggcaucuucuccgucgagggcaagagcugcaucaaccgcugcuucuacguggagcugauccgggggcgcaaggaggagaccgaggugcucuggaccagcaacuccaucgucguguucugcggcacgagcgggaccuacggcaccggguccuggcccgacggcgccgaccugaaccugaugcccaucuga

SEQ ID NO: 86967 - RNA, 1410 nt, Artificial Sequence
  derived and/or modified CDS sequence (opt1) from neuraminidase__InfluenzaA__AFN19400
augaaccccaaccagaagaucaucaccaucggcagcgugucccugaccaucagcacgaucugcuucuucaugcagaucgccauccucaucaccaccgucacccugcacuucaagcaguacgaguucaacuccccgcccaacaaccaggugaugcugugcgagcccacgaucaucgagcgcaacaucaccgagaucguguaccucaccaacaccacgaucgagaaggagaucugccccaagccgagcgaguaccggaacugguccaagccccagugcgacaucaccggguucgcccccuucagcaaggacaacuccauccgccugagcgacggcggggacaucugggucacccgggagcccuacguguccugcgacccggacaagugcuaccaguucgcgcugggccaggggaccacgcucaacaacgugcacagcaacaacaccguccgcgaccggacccccuaccgcacccugcugaugaacgagcucggcgugcccuuccaccugggcacgaagcaggucugcaucgccugguccagcuccagcugccacgacgggaaggccuggcugcacgugugcaucaccggcgacgacaagaacgccaccgccuccuucaucuacaacgggcggcucguggacagcguggucuccuggagcaaggagauccugcgcacccaggaguccgagugcgugugcaucaacggcacgugcaccguggucaugaccgacgggagcgcgagcggcaaggccgacaccaagauccuguucaucgaggagggcaagaucgugcacacguccacccucagcggguccgcccagcacguggaggagugcagcugcuacccccgguacccgggcguccgcugcgugugccgggacaacuggaagggguccaaccgccccaucguggacaucaacaucaaggaccacagcaucgucuccagcuacgugugcuccggccuggugggcgacacgccccggaagaacgacagcuccagcuccagccacugccuggaccccaacaacgaggagggcgggcacggggucaagggcugggccuucgacgacgggaacgacguguggaugggccgcaccaucaacgagaccucccggcucggcuacgagaccuucaaggucaucgagggguggagcaacccgaaguccaagcugcagaucaaccgccaggugaucguggaccggggcgaccgcagcggguacuccggcaucuucagcgucgagggcaagagcugcaucaaccggugcuucuacguggagcugauccgcgggcggaaggaggagaccgaggugcucuggaccuccaacagcaucgucguguucugcggcacguccgggaccuacggcaccgggagcuggcccgacggcgcggaccugaaccugaugcccaucuga

SEQ ID NO: 86968 - RNA, 1410 nt, Artificial Sequence; identical to SEQ ID NO: 86946
  derived and/or modified CDS sequence (opt1) from neuraminidase__InfluenzaA__AFN19402

SEQ ID NO: 86969 - RNA, 1410 nt, Artificial Sequence; identical to SEQ ID NO: 86946
  derived and/or modified CDS sequence (opt1) from neuraminidase__InfluenzaA__AFN19404

SEQ ID NO: 86970 - RNA, 1410 nt, Artificial Sequence; identical to SEQ ID NO: 86946
  derived and/or modified CDS sequence (opt1) from neuraminidase__InfluenzaA__AFN19406

SEQ ID NO: 86971 - RNA, 1410 nt, Artificial Sequence; identical to SEQ ID NO: 86946
  derived and/or modified CDS sequence (opt1) from neuraminidase__InfluenzaA__AFN19410

SEQ ID NO: 86972 - RNA, 1410 nt, Artificial Sequence; identical to SEQ ID NO: 86946
  derived and/or modified CDS sequence (opt1) from neuraminidase__InfluenzaA__AFN19412

SEQ ID NO: 86973 - RNA, 1410 nt, Artificial Sequence; identical to SEQ ID NO: 86946
  derived and/or modified CDS sequence (opt1) from neuraminidase__InfluenzaA__AFN19414

SEQ ID NO: 86974 - RNA, 1410 nt, Artificial Sequence; identical to SEQ ID NO: 86946
  derived and/or modified CDS sequence (opt1) from neuraminidase__InfluenzaA__AFN19416

SEQ ID NO: 86975 - RNA, 1410 nt, Artificial Sequence
  derived and/or modified CDS sequence (opt1) from neuraminidase__InfluenzaA__AFN19418
augaaccccaaccagaagaucaucaccaucggcagcgugucccugaccaucagcacgaucugcuucuucaugcagaucgccauccucaucaccaccgucacccugcacuucaagcaguacgaguucaacuccccgcccaacaaccaggugaugcugugcgagcccacgaucaucgagcgcaacaucaccgagaucguguaccucaccaacaccacgaucgagaaggagaucugccccaagccggccgaguaccggaacuggagcaagccccagugcgacaucaccggguucgcgcccuucuccaaggacaacagcauccgccuguccgccggcggggacaucugggucacccgggagcccuacgugagcugcgacccggacaagugcuaccaguucgcccugggccaggggaccacgcucaacaacgugcacuccaacaacaccguccgcgaccggacccccuaccgcacccugcugaugaacgagcucggcgugcccuuccaccugggcacgaagcaggucugcaucgccuggagcuccagcuccugccacgacgggaaggccuggcugcacgugugcaucaccggcgacgacaagaacgcgaccgccagcuucaucuacaacgggcggcucguggacuccguggucagcugguccaaggagauccugcgcacccaggagagcgagugcgugugcaucaacggcacgugcaccguggucaugaccgacggguccgccagcggccgggccgacaccaagauccuguucaucgaggagggcaagaucgugcacacgagcacccucuccgggagcgcgcagcacguggaggagugcuccugcuacccccgcuacccgggcguccggugcgugugccgcgacaacuggaaggggagcaaccggcccaucguggacaucaacaucaaggaccacuccaucgucagcuccuacgugugcagcggccuggugggcgacaccccgcgcaagaacgacuccagcuccagcucccacugccuggaccccaacaacgaggagggcgggcacggggucaagggcugggccuucgacgacgggaacgacguguggaugggccggaccaucaacgagacgagccgccucggcuacgagaccuucaaggucaucgaggggugguccaaccccaagagcaagcugcagaucaaccgccaggugaucguggaccggggcgaccgguccggguacagcggcaucuucuccgucgagggcaagagcugcaucaaccgcugcuucuacguggagcugauccgggggcgcaaggaggagaccgaggugcucuggaccagcaacuccaucgucguguucugcggcacgagcgggaccuacggcaccggguccuggcccgacggcgccgaccugaaccugaugcccaucuga

SEQ ID NO: 86976 - RNA, 1410 nt, Artificial Sequence
  derived and/or modified CDS sequence (opt1) from neuraminidase__InfluenzaA__AFN19420
augaaccccaaccagaagaucaucaccaucggcagcgugucccugaccaucagcacgaucugcuucuucaugcagaucgccauccucaucaccaccgucacccugcacuucaagcaguacgaguucaacuccccgcccaacaaccaggugaugcugugcgagcccacgaucaucgagcgcaacaugaccgagaucguguaccucaccaacaccacgaucgagaaggagaucugccccaagccggccgaguaccggaacuggagcaagccccagugcgacaucaccggguucgcgcccuucuccaaggacaacagcauccgccuguccgccggcggggacaucugggucacccgggagcccuacgugagcugcgacccggacaagugcuaccaguucgcccugggccaggggaccacgcucaacaacgugcacuccaacaacaccguccgcgaccggacccccuaccgcacccugcugaugaacgagcucggcgugcccuuccaccugggcacgaagcaggucugcaucgccuggagcuccagcuccugccacgacgggaaggccuggcugcacgugugcaucaccggcgacgacaagaacgcgaccgccagcuucaucuacaacgggcggcucguggacuccguggucagcugguccaaggagauccugcgcacccaggagagcgagugcgugugcaucaacggcacgugcaccguggucaugaccgacggguccgccagcggcaaggccgacaccaagauccuguucaucgaggagggcaagaucgugcacacgagcacccucuccgggagcgcgcagcacguggaggagugcuccugcuacccccgguacccgggcguccgcugcgugugccgggacaacuggaaggggagcaaccgccccaucguggacaucaacaucaaggaccacuccaucgucagcuccuacgugugcagcggccuggugggcgacaccccgcggaagaacgacuccagcuccagcucccacugccuggaccccaacaacgaggagggcgggcacggggucaagggcugggccuucgacgacgggaacgacguguggaugggccgcaccaucaacgagacgagccggcucggcuacgagaccuucaaggucaucgaggggugguccaaccccaagagcaagcugcagaucaaccgccaggugaucguggaccggggcgaccgcuccggguacagcggcaucuucuccgucgagggcaagagcugcaucaaccggugcuucuacguggagcugauccgcgggcggaaggaggagaccgaggugcucuggaccagcaacuccaucgucguguucugcggcacgagcgggaccuacggcaccggguccuggcccgacggcgccgaccugaaccugaugcccaucuga

SEQ ID NO: 86977 - RNA, 1410 nt, Artificial Sequence
  derived and/or modified CDS sequence (opt1) from neuraminidase__InfluenzaA__AFN19422
augaaccccaaccagaagaucaucaccaucggcagcgugucccugaccaucagcacgaucugcuucuucaugcagaucgccauccucaucaccaccgucacccugcacuucaagcaguacgaguucaacuccccgcccaacaaccaggugaugcugugcgagcccacgaucaucgagcgcaacaucaccgagaucguguaccucaccaacaccacgaucgagaaggagaucugccccaagccggccgaguaccggaacuggagcaagccccagugcgggaucaccggcuucgcgcccuucuccaaggacaacagcauccgccuguccgccgggggcgacaucugggucacccgggagcccuacgugagcugcgacccggacaagugcuaccaguucgcccuggggcagggcaccacgcucaacaacgugcacuccaacaacaccguccgcgaccggacccccuaccgcacccugcugaugaacgagcucggcgugcccuuccaccuggggacgaagcaggucugcaucgccuggagcuccagcuccugccacgacggcaaggccuggcugcacgugugcaucaccgggaacgacaagaacgcgaccgccagcuucaucuacaacggccggcucguggacuccguggucagcugguccaaggaggugcugcgcacccaggagagcgagugcgugugcaucaacgggacgugcaccgucgugaugaccgacggcuccgccagcggcaaggccgacaccaagauccuguucaucgaggaggggaagaucgugcacacgagcacccucuccggcagcgcgcagcacgucgaggagugcuccugcuacccccgguacccgggggugcgcugcgugugccgggacaacuggaagggcagcaaccgccccaucgucgacaucaacaucaaggaccacuccaucgugagcuccuacgugugcagcggccuggucggggacaccccgcggaagaacgacuccagcuccagcucccacugccuggaccccaacaacgaggagggcgggcacggcgugaaggggugggccuucgacgacggcaacgacgucuggaugggccgcaccaucaacgagacgagccggcucggguacgagaccuucaaggugaucgagggcugguccaaccccaagagcaagcugcagaucaaccgccaggugaucgucgaccgcggggaccgguccggcuacagcgggaucuucuccguggagggcaagagcugcaucaaccggugcuucuacguggagcugauccgcggccggaaggaggagaccgagguccucuggaccagcaacuccaucgugguguucugcgggacgagcggcaccuacgggaccggcuccuggcccgacggggccgaccugaaccugaugcccaucuga

SEQ ID NO: 86978 - RNA, 1410 nt, Artificial Sequence
  derived and/or modified CDS sequence (opt1) from neuraminidase__InfluenzaA__AFN19426
augaaccccaaccagaagaucaucaccaucggcagcgugucccugaccaucagcacgaucugcuucuucaugcagaucgccauccucaucaccaccgucacccugcacuucaagcaguacgaguucaacuccccgcccaacaaccaggugaugcugugcgagcccacgaucaucgagcgcaacaucaccgagaucguguaccucaccaacaccacgaucgagaaggagaucugccccaagccggccgaguaccggaacuggagcaagccccagugcgacaucaccggguucgcgcccuucuccaaggacaacagcauccgccuguccgccggcggggacaucugggucacccgggagcccuacgugagcugcgacccggacaagugcuaccaguucgcccugggccaggggaccacgcucaacaacgugcacuccaacaacaccguccgcgaccggacccccuaccgcacccugcugaugaacgagcucggcgugcccuuccaccugggcacgaagcaggucugcaucgccuggagcuccagcuccugccacgacgggaaggccuggcugcacgugugcaucaccggcgacgacgagaacgcgaccgccagcuucaucuacaacgggcggcucguggacuccguggucagcugguccaaggagauccugcgcacccaggagagcgagugcgugugcaucaacggcacgugcaccguggucaugaccgacggguccgccagcggcaaggccgacaccaagauccuguucaucgaggagggcaagaucgugcacacgagcacccucuccgggagcgcgcagcacguggaggagugcuccugcuacccccgguacccgggcguccgcugcgugugccgggacaacuggaaggggagcaaccgccccaucguggacaucaacaucaaggaccacuccaucgucagcuccuacgugugcagcggccuggugggcgacaccccgcggaagaacgacuccagcuccagcucccacugccuggaccccaacaacgaggagggcgggcacggggucaagggcugggccuucgacgacgggaacgacguguggaugggccgcaccaucaacgagacgagccggcucggcuacgagaccuucaaggucaucgaggggugguccaaccccaagagcaagcugcagaucaaccgccaggugaucguggaccggggcgaccgcuccggguacagcggcaucuucuccgucgagggcaagagcugcaucaaccggugcuucuacguggagcugauccgcgggcggaaggaggagaccgaggugcucuggaccagcaacuccaucgucguguucugcggcacgagcgggaccuacggcaccggguccuggcccgacggcgccgaccugaaccugaugcccaucuga

SEQ ID NO: 86979 - RNA, 1410 nt, Artificial Sequence; identical to SEQ ID NO: 86946
  derived and/or modified CDS sequence (opt1) from neuraminidase__InfluenzaA__AFN19428

SEQ ID NO: 86980 - RNA, 1410 nt, Artificial Sequence
  derived and/or modified CDS sequence (opt1) from neuraminidase__InfluenzaA__AFN19430
augaaccccaaccagaagaucaucaccaucggcagcgugucccugaccaucagcacgaucugcuucuucaugcagaucgccauccucaucaucaccgucacccugcacuucaagcaguacgaguucaacuccccgcccaacaaccaggugaugcugugcgagcccaccaucaucgagcgcaacaugacggagaucguguaccucaccaacaccaccaucgagaaggagaucugccccaagccggccgaguaccggaacuggagcaagccccagugcgacaucacgggguucgcgcccuucuccaaggacaacagcauccgccuguccgccggcggggacaucugggucacccgggagcccuacgugagcugcgacccggacaagugcuaccaguucgcccugggccaggggaccacccucaacaacgugcacuccaacaacacgguccgcgaccggacccccuaccgcacccugcugaugaacgagcucggcgugcccuuccaccugggcaccaagcaggucugcaucgccuggagcuccagcuccugccacgacgggaaggccuggcugcacgugugcaucacgggcgacgacaagaacgcgaccgccagcuucaucuacaacgggcggcucguggacuccguggucagcugguccaaggagauccugcgcacccaggagagcgagugcgugugcaucaacgggaccugcacgguggucaugaccgacggguccgccagcggcaaggccgacaccaagauccuguucaucgaggagggcaagaucgugcacaccagcacgcucuccgggagcgcgcagcacguggaggagugcuccugcuacccccgguacccgggcguccgcugcgugugccgggacaacuggaaggggagcaaccgccccaucguggacaucaacaucaaggaccacuccaucgucagcuccuacgugugcagcggccuggugggcgacaccccgcggaagaacgacuccagcuccagcucccacugccuggaccccaacaacgaggagggcggccacggggucaagggcugggccuucgacgacgggaacgacguguggaugggccgcaccaucaacgagaccagccggcucggcuacgagacguucaaggucaucgaggggugguccaaccccaagagcaagcugcagaucaaccgccaggugaucguggaccgguccgaccgcagcggcuacuccgggaucuucagcgucgagggcaagagcugcaucaaccggugcuucuacguggagcugauccgcgggcggaaggaggagaccgaggugcucuggaccuccaacagcaucgucguguucugcggcaccuccggcacguacgggaccggcagcuggcccgacggggccgaccugaaccugaugcccaucuga

SEQ ID NO: 86981 - RNA, 1410 nt, Artificial Sequence
  derived and/or modified CDS sequence (opt1) from neuraminidase__InfluenzaA__AFN19432
augaaccccaaccagaagaucaucaccaucggcagcgugucccugaccaucagcacgaucugcuucuucaugcagaucgccauccucaucaccaccgucacccugcacuucaagcaguacgaguucaacuccccgcccaacaaccaggugaugcugugcgagcccacgaucaucgagcgcaacaucaccgagaucguguaccucaccaacaccacgaucgagaaggagaucugccccaagccggccgaguaccggaacuggagcaagccccagugcgacaucaccggguucgcgcccuucuccaaggacaacagcauccgccuguccgccggcggggacaucugggucacccgggagcccuacgugagcugcgacccggacaagugcuaccaguucgcccugggccaggggaccacgcucaacaacgugcacuccaacaacaccguccgcgaccggaccccgcaccgcacccugcugaugaacgagcucggcgugcccuuccaccugggcacgaagcaggucugcaucgccuggagcuccagcuccugccacgacgggaaggccuggcugcacgugugcaucaccggcgacgacaagaacgcgaccgccagcuucaucuacaacgggcggcucguggacuccguggucagcugguccaaggagauccugcgcacccaggagagcgagugcgugugcaucaacggcacgugcaccguggucaugaccgacggguccgccagcggcaaggccgacaccaagauccuguucaucgaggagggcaagaucgugcacacgagcacccucuccgggagcgcgcagcacguggaggagugcuccugcuacccccgguacccgggcguccgcugcgugugccgggacaacuggaaggggagcaaccgccccaucguggacaucaacaucaaggaccacuccaucgucagcuccuacgugugcagcggccuggugggcgacacgccccggaagaacgacuccagcuccagcucccacugccuggaccccaacaacgaggagggcgggcacggggucaagggcugggccuucgacgacgggaacgacguguggaugggccgcaccaucaacgagaccagccggcucggcuacgagaccuucaaggucaucgaggggugguccaaccccaagagcaagcugcagaucaaccgccaggugaucguggaccggggcgaccgcuccggguacagcggcaucuucuccgucgagggcaagagcugcaucaaccggugcuucuacguggagcugauccgcgggcggaaggaggagaccgaggugcucuggaccagcaacuccaucgucguguucugcggcacgagcgggaccuacggcaccggguccuggcccgacggcgccgaccugaaccugaugcccaucuga

SEQ ID NO: 86982 - RNA, 1410 nt, Artificial Sequence
  derived and/or modified CDS sequence (opt1) from neuraminidase__InfluenzaA__AFN19434
augaaccccaaccagaagaucaucaccaucggcagcgugucccugaccaucagcacgaucugcuucuucaugcagaucgccauccucaucaccaccgucacccugcacuucaagcaguacgaguucaacuccccgcccaacaaccaggugaugcugugcgagcccacgaucaucgagcgcaacaugaccgagaucguguaccucaccaacaccacgaucgagaaggagaucugccccaagccggccgaguaccggaacuggagcaagccccagugcgacaucaccggguucgcgcccuucuccaaggacaacagcauccgccuguccgccggcggggacaucugggucacccgggagcccuacgugagcugcgacccggacaagugcuaccaguucgcccugggccaggggaccacgcucaacaacgugcacuccaacaacaccguccgcgaccggacccccuaccgcacccugcugaugaacgagcucggcgugcccuuccaccugggcacgaagcaggucugcaucgccuggagcuccagcuccugccacgacgggaaggccuggcugcacgugugcaucaccggcgacgacaagaacgcgaccgccagcuucaucuacaacgggcggcucguggacuccguggucagcugguccaaggagauccugcgcacccaggagagcgagugcgugugcaucaacggcacgugcaccguggucaugaccgacggguccgccagcggcaaggccgacaccaagauccuguucaucgaggagggcaagaucgugcacacgagcacccucuccgggagcgcgcagcacguggaggagugcuccugcuacccccgguacccgggcguccgcugcgugugccgggacaacuggaaggggagcaaccgccccaucguggacaucaacaucaaggaccacuccaucgucagcuccuacgugugcagcggccuggugggcgacaccccgcggaagaacgacuccagcuccagcucccacugccuggaccccaacaacgaggagggcgggcacggggucaagggcugggccuucgacgacgggaacgacguguggaugggccgcaccaucaacgagacgagccggcucggcuacgagaccuucaaggucaucgaggggugguccaaccccaagagcaagcugcagaucaaccgccaggugaucguggaccgguccgaccgcagcggcuacuccgggaucuucagcgucgagggcaagagcugcaucaaccggugcuucuacguggagcugauccgcgggcggaaggaggagaccgaggugcucuggaccuccaacagcaucgucguguucugcggcacguccggcaccuacgggaccggcagcuggcccgacggggccgaccugaaccugaugcccaucuga

SEQ ID NO: 86983 - RNA, 1410 nt, Artificial Sequence; identical to SEQ ID NO: 86170
  derived and/or modified CDS sequence (opt1) from neuraminidase__InfluenzaA__AFN19436

SEQ ID NO: 86984 - RNA, 1410 nt, Artificial Sequence
  derived and/or modified CDS sequence (opt1) from neuraminidase__InfluenzaA__AFN19438
augaaccccaaccagaagaucaucaccaucggcagcgugucccugaccaucagcacgaucugcuucuucaugcagaucgccauccucaucaccaccgucacccugcacuucaagcaguacgaguucaacuccccgcccaacaaccaggugaugcugugcgagcccacgaucaucgagcgcaacaugaccgagaucguguaccucaccaacaccacgaucgagaaggagaucugccccaagccggccgaguaccggaacuggagcaagccccagugcgacaucaccggguucgcgcccuucuccaaggacaacagcauccgccuguccgccggcggggacaucugggucacccgggagcccuacgugagcugcgacccggacaagugcuaccaguucgcccugggccaggggaccacgcucaacaacgugcacuccaacaacaccguccgcgaccggacccccuaccgcacccugcugaugaacgagcucggcgugcccuuccaccugggcacgaagcaggucugcaucgccuggagcuccagcuccugccacgacgggaaggccuggcugcacgugugcaucaccggcgacgacaagaacgcgaccgccagcuucaucuacaacgggcggcucguggacuccguggucagcugguccaaggagauccugcgcacccaggagagcgagugcgugugcaucaacggcacgugcaccguggucaugaccgacggguccgccagcggcaaggccgacaccaagauccuguucaucgaggagggcaagaucgugcacacgagcacccucuccgggagcgcgcagcacguggaggagugcuccugcuacccccgguacccgggcguccgcugcgugugccgggacaacuggaaggggagcaaccgccccaucguggacaucaacaucaaggaccacuccaucgucagcuccuacgugugcagcggccuggugggcgacaccccgcggaagaacgacuccagcuccagcucccacugccuggaccccaacaacgaggagggcgggcacggggucaagggcugggccuucgacgacgggaacgacguguggaugggccgcaccaucaacgagacgagccggcucggcuacgagaccuucaaggucaucgaggggugguccaaccccaagagcaagcugcagaucaaccgccaggugaucguggaccgguccgaccgcagcggcuacuccgggaucuucagcgucgagggcaagagcugcaucaaccggugcuucuacguggagcugauccgcgggcggaaggaggagaccgaggugcucuggaccuccaacagcaucgucguguucugcggcacguccggcaccuacgggaccggcagcuggcccgacggggccgaccugaaccugauguccaucuga

SEQ ID NO: 86985 - RNA, 1410 nt, Artificial Sequence
  derived and/or modified CDS sequence (opt1) from neuraminidase__InfluenzaA__AFN19442
augaaccccaaccagaagaucaucaccaucggcagcgugucccugaccaucagcacgaucugcuucuucaugcagaucgccauccucaucaccaccgucacccugcacuucaagcaguacgaguucaacuccccgcccaacaaccaggugaugcugugcgagcccacgaucaucgagcgcaacaucaccgagaucguguaccucaccaacaccaucaucgagaaggagaucugccccaagccgacggaguaccggaacuggagcaagccccagugcgacaucaccggguucgcccccuucuccaaggacaacagcauccgccuguccgcgggcggggacaucugggucacccgggagcccuacgugagcugcgacccggacaagugcuaccaguucgcccugggccaggggaccacgcucaacaacgugcacuccaacaacaccguccgcgaccggacccccuaccgcacccugcugaugaacgagcucggcgugcccuuccaccugggcacgaagcaggucugcaucgccuggagcuccagcuccugccacgacgggaaggccuggcugcacgugugcaucaccggcgacgacaagaacgccaccgcgagcuucaucuacaacgggcggcucguggacuccguggucagcugguccaaggagauccugcgcacccaggagagcgagugcgugugcaucaacggcacgugcaccguggucaugaccgacggguccgccagcggcaaggccgacaccaagauccuguucaucgaggagggcaagaucgugcacacgagcacccucuccgggagcgcccagcacguggaggagugcuccugcuacccccgguacccgggcguccgcugcgugugccgggacaacuggaaggggagcaaccgccccaucguggacaucaacaucaaggaccacuccaucgucagcuccuacgugugcagcggccuggugggcgacaccccgcggaagaacgacuccagcuccagcucccacugccuggaccccaacaacgaggagggcgggcacggggucaagggcugggcguucgacgacgggaacgacguguggaugggccgcaccaucaacgagacgagccggcucggcuacgagaccuucaaggucaucgaggggugguccaaccccaagagcaagcugcagaucaaccgccaggugaucguggaccggggcgaccgcuccggguacagcggcaucuucuccgucgagggcaagagcugcaucaaccggugcuucuacguggagcugauccgcgggcggaaggaggagaccgaggugcucuggaccagcaacuccaucgucguguucugcggcacgagcgggaccuacggcaccggguccuggcccgacggcgccgaccugaaccugaugcacaucuga

SEQ ID NO: 86986 - RNA, 1410 nt, Artificial Sequence; identical to SEQ ID NO: 86170
  derived and/or modified CDS sequence (opt1) from neuraminidase__InfluenzaA__AFN19446

SEQ ID NO: 86987 - RNA, 1410 nt, Artificial Sequence; identical to SEQ ID NO: 86170
  derived and/or modified CDS sequence (opt1) from neuraminidase__InfluenzaA__AFN19448

SEQ ID NO: 86988 - RNA, 1410 nt, Artificial Sequence; identical to SEQ ID NO: 86946
  derived and/or modified CDS sequence (opt1) from neuraminidase__InfluenzaA__AFN19458

SEQ ID NO: 86989 - RNA, 1410 nt, Artificial Sequence
  derived and/or modified CDS sequence (opt1) from neuraminidase__InfluenzaA__AFN19460
augaaccccaaccagaagaucaucaccaucggcagcgugucccugaccaucagcacgaucugcuucuucaugcagaucgccauccucaucaccaccgucacccugcacuucaagcaguacgaguucaacuccccgcccaacaaccaggugaugcugugcgagcccacgaucaucgagcgcaacaucaccgagaucguguaccucaccaacaccacgaucgagaaggagaucugccccaagccggccgaguaccggaacuggagcaagccccagugcgggaucaccggcuucgcgcccuucuccaaggacaacagcauccgccuguccgccgggggcgacaucugggucacccgggagcccuacgugagcugcgacccggacaagugcuaccaguucgcccuggggcagggcaccacgcucaacaacaugcacuccaacaacaccgugcgcgaccggacccccuaccgcacccugcugaugaacgagcucggcguccccuuccaccuggggacgaagcaggucugcaucgccuggagcuccagcuccugccacgacggcaaggccuggcugcacgugugcaucaccggggacgacaagaacgcgaccgccagcuucaucuacaacggccggcucguggacuccguggugagcugguccaacgagauccugcgcacccaggagagcgagugcgucugcaucaacgggacgugcaccguggugaugaccgacggcuccgccagcggcaaggccgacaccaagauccuguucaucgaggaggggaagaucguccacacgagcacccucuccggcagcgcgcagcacguggaggagugcuccugcuacccccgguacccgggggugcgcugcgucugccgggacaacuggaagggcagcaaccgccccaucguggacaucaacaucaaggaccacuccaucgugagcuccuacgucugcagcggccuggugggggacaccccgcggaagaacgacuccagcuccagcucccacugccuggaccccaacaacgaggagggcgggcacggcgugaaggggugggccuucgacgacggcaacgacgucuggaugggccgcaccaucaacgagacgagccggcucggguacgagaccuucaaggugaucgagggcugguccaaccccaagagcaagcugcagaucaaccgccaggucaucguggaccgcggggaccgguccggcuacagcgggaucuucuccguggagggcaagagcugcaucaaccggugcuucuacgucgagcugauccgcggccggaaggaggagaacgaggugcucuggaccagcaacuccaucguggucuucugcgggaccagcggcacguacgggaccggcuccuggcccgacggggccgaccugaaccugaugcccaucuga

SEQ ID NO: 86990 - RNA, 1410 nt, Artificial Sequence; identical to SEQ ID NO: 86170
  derived and/or modified CDS sequence (opt1) from neuraminidase__InfluenzaA__AFN19462

SEQ ID NO: 86991 - RNA, 1410 nt, Artificial Sequence
  derived and/or modified CDS sequence (opt1) from neuraminidase__InfluenzaA__AFN19466
augaaccccaaccagaagaucaucaccaucggcagcgugucccugaccaucagcacgaucugcuucuucaugcagaucgccauccucaucaccaccgucacccugcacuucaagcaguacgaguucaacuccccgcccaacaaccaggugaugcugugcgagcccacgaucaucgagcgcaacaucaccgagaucguguaccucaccaacaccacgaucgagaaggagaucugccccaagccggccgaguaccggaacuggagcaagccccagugcgacaucgcgggguucgcccccuucuccaaggacaacagcauccgccuguccgccggcggggacaucugggucacccgggagcccuacgugagcugcgacccggacaagugcuaccaguucgcccugggccaggggaccacccucaacaacgugcacuccaacaacacgguccgcgaccggacccccuaccgcacccugcugaugaacgagcucggcgugcccuuccaccugggcaccaagcaggucugcaucgccuggagcuccagcuccugccacgacgggaaggcguggcugcacgugugcaucacgggcgacgacaagaacgccaccgccagcuucaucuacaacgggcggcucguggacuccguggucagcugguccaaggagauccugcgcacccaggagagcgagugcgugugcaucaacgggaccugcacgguggucaugaccgacggguccgccagcggcaaggcggacaccaagauccuguucaucgaggagggcaagaucgugcacaccagcacgcucuccgggagcgcccagcacguggaggagugcuccugcuacccccgguacccgggcguccgcugcgugugccgggacaacuggaaggggagcaaccgccccaucguggacaucaacaucaaggaccacuccaucgucagcuccuacgugugcagcggccuggugggcgacaccccgcggaagaacgacuccagcuccagcucccacugccuggaccccaacaacgaggagggcggccacggggucaagggcugggccuucgacgacgggaacgacguguggaugggccgcaccaucaacgagaccagccggcucggcuacgagacguucaaggucaucgaggggugguccaaccccaagagcaagcugcagaucaaccgccaggugaucguggaccggggcgaccgcuccggguacagcggcaucuucuccgucgagggcaagagcugcaucaaccggugcuucuacguggagcugauccgcgggcggaaggaggagaccgaggugcucuggaccagcaacuccaucgucguguucugcggcaccagcgggacguacggcaccggguccuggcccgacggcgccgaccugaaccugaugcccaucuga

SEQ ID NO: 86992 - RNA, 1410 nt, Artificial Sequence; identical to SEQ ID NO: 86170
  derived and/or modified CDS sequence (opt1) from neuraminidase__InfluenzaA__AFN19468

SEQ ID NO: 86993 - RNA, 1410 nt, Artificial Sequence
  derived and/or modified CDS sequence (opt1) from neuraminidase__InfluenzaA__AFN19470
augaaccccaaccagaagaucaucaccaucggcagcgugucccugaccaucagcacgaucugcuucuucaugcagaucgccauccucaucaccaccgucacccugcacuucaagcaguacgaguucaacuccccgcccaacaaccaggugaugcugugcgagcccacgaucaucgagcgcaacaugaccgagaucguguaccucaccaacaccacgaucgagaaggagaucugccccaagccggccgaguaccggaacuggagcaagccccagugcgacaucaccggguucgcgcccuucuccaaggacaacagcauccgccuguccgccggcggggacaucugggucacccgggagcccuacgugagcugcgacccggacaagugcuaccaguucgcccugggccaggggaccacgcucaacaacgugcacuccaacaacaccguccgcgaccggacccccuaccgcacccugcugaugaacgagcucggcgugcccuuccaccugggcacgaagcaggucugcaucgccuggagcuccagcuccugccacgacgggaaggccuggcugcacgugugcaucaccggcgacgacaagaacgcgaccgccagcuucaucuacaacgggcggcucguggacuccguggucagcugguccaaggagauccugcgcacccaggagagcgagugcgugugcaucaacggcacgugcaccguggucaugaccgacggguccgccagcggcaaggccgacaccaagauccuguucaucgaggagggcaagaucgugcacacgagcacccucuccgggagcgcgcagcacguggaggagugcuccugcuacccccgguacccgggcguccgcugcgugugccgggacaacuggaaggggagcaaccgccccaucguggacaucaacaucaaggaccacuccaucgucagcuccuacgugugcagcggccuggugggcgacaccccgcggaagaacgacuccagcuccagcucccacugccuggaccccaacaacgaggagggcgggcacggggucaagggcugggccuucgacgacgggaacgacguguggaugggccgcaccaucaacgagacgagccggcucggcuacgagaccuucaaggucaucgaggggugguccaaccccaagagcaagcugcagaucaaccgccaggugaucgugaacaaguccgaccggagcggcuacuccgggaucuucagcgucgagggcaagagcugcaucaaccgcugcuucuacguggagcugauccgggggcgcaaggaggagaccgaggugcucuggaccuccaacagcaucgucguguucugcggcacguccggcaccuacgggaccggcagcuggcccgacggggccgaccugaaccugaugcccaucuga

SEQ ID NO: 86994 - RNA, 1410 nt, Artificial Sequence; identical to SEQ ID NO: 86946
  derived and/or modified CDS sequence (opt1) from neuraminidase__InfluenzaA__AFN19472

SEQ ID NO: 86995 - RNA, 1410 nt, Artificial Sequence
  derived and/or modified CDS sequence (opt1) from neuraminidase__InfluenzaA__AFN19476
augaaccccaaccagaagaucaucaccaucggcagcgugucccugaccaucagcacgaucugcuucuucaugcagaucgccauccucaucaccaccgucacccugcacuucaagcaguacgaguucaacuccccgcccaacaaccaggugaugcugugcgagcccacgaucaucgagcgcaacaucaccgagaucguguaccucaccaacaccacgaucgagaaggagaucugccccaagccggccgaguaccggaacuggagcaagccccagugcgggaucaccggcuucgcgccccuguccaaggacaacagcauccgccuguccgccgggggcgacaucugggucacccgggagcccuacgugagcugcgacccggacaagugcuaccaguucgcccucgggcagggcaccacgcugaacaacgugcacuccaacaacaccguccgcgaccggacccccuaccgcacccugcucaugaacgagcugggcgugcccuuccaccuggggacgaagcaggucugcaucgccuggagcuccagcuccugccacgacggcaaggccuggcuccacgugugcaucaccggggacgacaagaacgcgaccgccagcuucaucuacaacggccggcugguggacuccguggucagcugguccaaggagauccugcgcacccaggagagcgagugcgugugcaucaacgggacgugcaccguggucaugaccgacggcuccgccagcggcaaggccgacaccaagauccucuucaucgaggaggggaagaucgugcacacgagcacccuguccggcagcgcgcagcacguggaggagugcuccugcuacccccgguacccggggguccgcugcgugugccgggacaacuggaagggcagcaaccgccccaucguggacaucaacaucaaggaccacuccaucgucagcuccuacgugugcagcggccuggugggggacaccccgcggaagaacgacuccagcuccagcucccacugccucgaccccaacaacgaggagggcgggcacggcgucaaggggugggccuucgacgacggcaacgacguguggaugggccgcaccaucaacgagacgagccggcugggguacgagaccuucaaggucaucgagggcugguccaaccccaagagcaagcugcagaucaaccgccaggugaucguggaccgcggggaccgguccggcuacagcgggaucuucuccgucgagggcaagagcugcaucaaccggugcuucuacguggagcucauccgcggccggaaggaggagaccgaggugcuguggaccagcaacuccaucgucguguucugcgggacgagcggcaccuacgggaccggcuccuggcccgacggggccgaccugaaccucaugcccaucuga

SEQ ID NO: 86996 - RNA, 1410 nt, Artificial Sequence; identical to SEQ ID NO: 86946
  derived and/or modified CDS sequence (opt1) from neuraminidase__InfluenzaA__AFN19478

SEQ ID NO: 86997 - RNA, 1410 nt, Artificial Sequence
  derived and/or modified CDS sequence (opt1) from neuraminidase__InfluenzaA__AFN19480
augaaccccaaccagaagaucaucaccaucggcagcgugucccugaccaucagcacgaucugcuucuucaugcagaucgccauccucaucaccaccgucacccugcacuucaagcaguacgaguucaacuccccgcccaacaaccaggugaugcugugcgagcccacgaucaucgagcgcaacaugaccgagaucguguaccucaccaacaccacgaucgagaaggagaucugccccaagccggccgaguaccggaacuggagcaagccccagugcgacaucaccggguucgcgcccuucuccaaggacaacagcauccgccuguccgccggcggggacaucugggucacccgggagcccuacgugagcugcgacccggacaagugcuaccaguucgcccugggccaggggaccacgcucaacaacgugcacuccaacaacaccgucggcgaccgcacccccuaccggacccugcugaugaacgagcucggcgugcccuuccaccuggggacgaagcaggucugcaucgccuggagcuccagcuccugccacgacggcaaggccuggcugcacgugugcaucaccggggacgacaagaacgcgaccgccagcuucaucuacaacggccgccucguggacuccguggucagcugguccaaggagauccugcggacccaggagagcgagugcgugugcaucaacgggacgugcaccguggucaugaccgacggcuccgccagcggcaaggccgacaccaagauccuguucaucgaggaggggaagaucgugcacacgagcacccucuccggcagcgcgcagcacguggaggagugcuccugcuacccccgcuacccggggguccggugcgugugccgcgacaacuggaagggcagcaaccggcccaucguggacaucaacaucaaggaccacuccaucgucagcuccuacgugugcagcggccuggugggggacaccccgcgcaagaacgacuccagcuccagcucccacugccuggaccccaacaacgaggagggcgggcacggcgucaaggggugggccuucgacgacggcaacgacguguggaugggccggaccaucaacgagacgagccgccucggguacgagaccuucaaggucaucgagggcugguccaaccccaagagcaagcugcagaucaaccgccaggugaucguggaccgguccgaccggagcggguacuccggcaucuucagcgucgagggcaagagcugcaucaaccgcugcuucuacguggagcugauccgggggcgcaaggaggagaccgaggugcucuggaccuccaacagcaucgucguguucugcggcacguccgggaccuacggcaccgggagcuggcccgacggcgccgaccugaaccugaugcccaucuga

SEQ ID NO: 86998 - RNA, 1410 nt, Artificial Sequence
  derived and/or modified CDS sequence (opt1) from neuraminidase__InfluenzaA__AFN19482
augaaccccaaccagaagaucaucaccaucggcagcgugucccugaccaucagcacgaucugcuucuucaugcagaucgccauccucaucaccaccgucacccugcacuucaagcaguacgaguucaacuccccgcccaacaaccaggugaugcugugcgagcccacgaucaucgagcgcaacaucaccgagaucguguaccucaccaacaccacgaucgagaaggagaucugccccaagccggccaaguaccggaacuggagcaagccccagugcgacaucaccggguucgcgcccuucuccaaggacaacagcauccgccuguccgccggcggggacaucugggucacccgggagcccuacgugagcugcgacccggacaagugcuaccaguucgcccugggccaggggaccacgcucaacaacgugcacuccaacaacaccguccgcgaccggacccccuaccgcacccugcugaugaacgagcucggcgugcccuuccaccugggcacgaagcaggucugcaucgccuggagcuccagcuccugccacgacgggaaggccuggcugcacgugugcaucaccggcgacgacaagaacgcgaccgccagcuucaucuacaacgggcggcucguggacuccguggucagcugguccaaggagauccugcgcacccaggagagcgagugcgugugcaucaacggcacgugcaccguggucaugaccgacggguccgccagcggcaaggccgacaccaagauccuguucaucgaggagggcaagaucgugcacacgagcacccucuccgggagcgcgcagcacguggaggagugcuccugcuacccccgguacccgggcguccgcugcgugugccgggacaacuggaaggggagcaaccgccccaucguggacaucaacaucaaggaccacuccaucgucagcuccuacgugugcagcggccuggugggcgacaccccgcggaagaacgacuccagcuccagcucccacugccuggaccccaacaacgaggagggcgggcacggggucaagggcugggccuucgacgacgggaacgacguguggaugggccgcaccaucaacgagacgagccggcucggcuacgagaccuucaaggucaucgaggggugguccaaccccaagagcaagcugcagaucaaccgccaggugaucguggaccgguccgaccgcagcggcuacuccgggaucuucagcgucgagggcaagagcugcaucaaccggugcuucuacguggagcugauccgcgggcggaaggaggagaccgaggugcucuggaccuccaacagcaucgucguguucugcggcacguccggcaccuacgggaccggcagcuggcccgacggggccgaccugaaccugaugcccaucuga

SEQ ID NO: 86999 - RNA, 1410 nt, Artificial Sequence; identical to SEQ ID NO: 86170
  derived and/or modified CDS sequence (opt1) from neuraminidase__InfluenzaA__AFN19484

SEQ ID NO: 87000 - RNA, 1410 nt, Artificial Sequence; identical to SEQ ID NO: 86946
  derived and/or modified CDS sequence (opt1) from neuraminidase__InfluenzaA__AFN19488

SEQ ID NO: 87001 - RNA, 1410 nt, Artificial Sequence
  derived and/or modified CDS sequence (opt1) from neuraminidase__InfluenzaA__AFN19492
augaaccccaaccagaagaucaucaccaucggcagcgugucccugaccaucagcacgaucugcuucuucaugcagaucgccauccucaucaccaccgucacccugcacuucaagcaguacgaguucaacuccccgcccaacaaccaggugaugcugugcgagcccacgaucaucgagcgcaacaucaccgagaucguguaccucaccaacaccacgaucgagaaggagaucugccccaagccggccgaguaccggaacuggagcaagccccagugcgacaucaccggguucgcgcccuucuccaaggacaacagcauccgccuguccgccggcggggacaucugggucacccgggagcccuacgugagcugcgacccggacaagugcuaccaguucgcccugggccaggggaccacgcucaacaacgugcacuccaacaacaccguccgcgaccggacccccuaccgcacccugcugaugaacgagcucggcgugcccuuccaccugggcacgaagcaggucugcaucgccuggagcuccagcuccugccacgacgggaaggccuggcugcacgugugcaucaccggcgacgacaagaacgcgaccgccagcuucaucuacaacgggaagcucguggacuccguggucagcugguccaaggagauccugcggacccaggagagcgagugcgugugcaucaacggcacgugcaccguggucaugaccgacggguccgccagcggcaaggccgacaccaagauccuguucaucgaggagggcaagaucgugcacacgagcacccucuccgggagcgcgcagcacguggaggagugcuccugcuacccccgcuacccgggcguccggugcgugugccgcgacaacuggaaggggagcaaccggcccaucguggacaucaacaucaaggaccacuccaucgucagcuccuacgugugcagcggccuggugggcgacaccccgcgcaagaacgacuccagcuccagcucccacugccuggaccccaacaacgaggagggcgggcacggggucaagggcugggccuucgacgacgggaacgacguguggaugggccggaccaucaacgagacgagccgccucggcuacgagaccuucaaggucaucgaggggugguccaaccccaagagcaagcugcagaucaaccgccaggugaucguggaccggggcgaccgguccggguacagcggcaucuucuccgucgagggcaagagcugcaucaaccgcugcuucuacguggagcugauccgggggcgcaaggaggagaccgaggugcucuggaccagcaacuccaucgucguguucugcggcacgagcgggaccuacggcaccggguccuggcccgacggcgccgaccugaaccugaugcccaucuga

SEQ ID NO: 87002 - RNA, 1410 nt, Artificial Sequence
  derived and/or modified CDS sequence (opt1) from neuraminidase__InfluenzaA__AFN19494
augaaccccaaccagaagaucaucaccaucggcagcgugucccugaccaucagcacgaucugcuucuucaugcagaucgccauccucaucaccaccgucacccugcacuucaagcaguacgaguucaacuccccgcccaacaaccaggugaugcugugcgagcccacgaucaucgagcgcaacaucaccgagaucguguaccucaccaacaccacgaucgagaaggagaucugccccaagcuggccgaguaccggaacuggagcaagccgcagugcgacaucaccggguucgcgcccuucuccaaggacaacagcauccgccuguccgccggcggggacaucugggucacccgggagcccuacgugagcugcgaccccgacaagugcuaccaguucgcccucggccaggggaccacgcugaacaacaugcacuccaacaacaccgugcgcgaccggaccccguaccgcacccugcucaugaacgagcugggcguccccuuccaccugggcacgaagcaggucugcaucgccuggagcuccagcuccugccacgacgggaaggccuggcuccacgugugcaucaccggcgacgacaagaacgcgaccgccagcuucaucuacaacgggcggcugguggacuccguggugagcugguccaaggagauccugcgcacccaggagagcgagugcgucugcaucaacggcacgugcaccguggugaugaccgacggguccgccagcggcaaggccgacaccaagauccucuucaucgaggagggcaagaucguccacacgagcacccuguccgggagcgcgcagcacguggaggagugcuccugcuacccccgguaccccggcgugcgcugcgucugccgggacaacuggaaggggagcaaccgcccgaucguggacaucaacaucaaggaccacuccaucgugagcuccuacgucugcagcggccuggugggcgacacgccccggaagaacgacuccagcuccagcucccacugccucgaccccaacaacgaggagggcgggcacggggugaagggcugggccuucgacgacgggaacgacgucuggaugggccgcaccaucaacgagaccagccggcugggcuacgagaccuucaaggugaucgaggggugguccaaccccaagagcaagcugcagaucaaccgccaggucaucguggaccggggcaaccgcuccggguacagcggcaucuucuccguggagggcaagagcugcaucaaccggugcuucuacgucgagcucauccgcgggcggaaggaggagaccgaggugcuguggaccagcaacuccaucguggucuucugcggcacgagcgggaccuacggcaccggguccuggccggacggcgccgaccugaaccucaugcccaucuga

SEQ ID NO: 87003 - RNA, 1410 nt, Artificial Sequence; identical to SEQ ID NO: 85811
  derived and/or modified CDS sequence (opt1) from neuraminidase__InfluenzaA__AFN19496

SEQ ID NO: 87004 - RNA, 1410 nt, Artificial Sequence
  derived and/or modified CDS sequence (opt1) from neuraminidase__InfluenzaA__AFN19498
augaaccccaaccagaagaucaucaccaucggcagcgugucccugaccaucagcacgaucugcuucuucaugcagaucgccauccucaucaccaccgucacccugcacuucaagcaguacgaguucaacuccccgcccaacaaccaggugaugcugugcgagcccacgaucaucgagcgcaacaucaccgagaucguguaccucaccaacaccacgaucgagaaggagaucugccccaagcuggccgaguaccggaacuggagcaagccgcagugcgacaucaccggguucgcgcccuucuccaaggacaacagcauccgccuguccgccggcggggacaucugggucacccgggagcccuacgugagcugcgaccccgacaagugcuaccaguucgcccucggccaggggaccacgcugaacaacgugcacuccaacaacaccguccgcgaccggaccccguaccgcacccugcucaugaacgagcugggcgugcccuuccaccugggcacgaagcaggucugcaucgccuggagcuccagcuccugccacgacgggaaggccuggcuccacgugugcaucaccggcgacgacaagaacgcgaccgccagcuucaucuacaacgggaagcugguggacuccguggucagcugguccaaggagauccugcggacccaggagagcgagugcgugugcaucaacggcacgugcaccguggucaugaccgacggguccgccagcggcaaggccgacaccaagauccucuucaucgaggagggcaagaucgugcacacgagcacccuguccgggagcgcgcagcacguggaggagugcuccugcuacccccgcuaccccggcguccggugcgugugccgcgacaacuggaaggggagcaaccggccgaucguggacaucaacaucaaggaccacuccaucgucagcuccuacgugugcagcggccuggugggcgacacgccccgcaagaacgacuccagcuccagcucccacugccucgaccccaacaacgaggagggcgggcacggggucaagggcugggccuucgacgacgggaacgacguguggaugggccggaccaucaacgagaccagccgccugggcuacgagaccuucaaggucaucgaggggugguccaaccccaagagcaagcugcagaucaaccgccaggugaucguggaccggggcaaccgguccggguacagcggcaucuucuccgucgagggcaagagcugcaucaaccgcugcuucuacguggagcucauccgggggcgcaccgaggagaccgaggugcuguggacgagcaacuccaucgucguguucugcggcaccagcgggaccuacggcaccggguccuggccggacggcgccgaccugaaccucaugcccaucuga

SEQ ID NO: 87005 - RNA, 1410 nt, Artificial Sequence; identical to SEQ ID NO: 86954
  derived and/or modified CDS sequence (opt1) from neuraminidase__InfluenzaA__AFN19500

SEQ ID NO: 87006 - RNA, 1410 nt, Artificial Sequence; identical to SEQ ID NO: 86946
  derived and/or modified CDS sequence (opt1) from neuraminidase__InfluenzaA__AFN19502

SEQ ID NO: 87007 - RNA, 1410 nt, Artificial Sequence; identical to SEQ ID NO: 83542
  derived and/or modified CDS sequence (opt1) from neuraminidase__InfluenzaA__AFN19504

SEQ ID NO: 87008 - RNA, 1410 nt, Artificial Sequence; identical to SEQ ID NO: 83542
  derived and/or modified CDS sequence (opt1) from neuraminidase__InfluenzaA__AFN19506

SEQ ID NO: 87009 - RNA, 1410 nt, Artificial Sequence; identical to SEQ ID NO: 86954
  derived and/or modified CDS sequence (opt1) from neuraminidase__InfluenzaA__AFN19508

SEQ ID NO: 87010 - RNA, 1410 nt, Artificial Sequence; identical to SEQ ID NO: 86946
  derived and/or modified CDS sequence (opt1) from neuraminidase__InfluenzaA__AFN19510

SEQ ID NO: 87011 - RNA, 1410 nt, Artificial Sequence; identical to SEQ ID NO: 86946
  derived and/or modified CDS sequence (opt1) from neuraminidase__InfluenzaA__AFN19512

SEQ ID NO: 87012 - RNA, 1410 nt, Artificial Sequence; identical to SEQ ID NO: 86946
  derived and/or modified CDS sequence (opt1) from neuraminidase__InfluenzaA__AFN19516

SEQ ID NO: 87013 - RNA, 1410 nt, Artificial Sequence; identical to SEQ ID NO: 86954
  derived and/or modified CDS sequence (opt1) from neuraminidase__InfluenzaA__AFN19518

SEQ ID NO: 87014 - RNA, 1410 nt, Artificial Sequence; identical to SEQ ID NO: 86954
  derived and/or modified CDS sequence (opt1) from neuraminidase__InfluenzaA__AFN19520

SEQ ID NO: 87015 - RNA, 1410 nt, Artificial Sequence; identical to SEQ ID NO: 86946
  derived and/or modified CDS sequence (opt1) from neuraminidase__InfluenzaA__AFN19522

SEQ ID NO: 87016 - RNA, 1410 nt, Artificial Sequence
  derived and/or modified CDS sequence (opt1) from neuraminidase__InfluenzaA__AFN19524
augaaccccaaccagaagaucaucaccaucggcagcgugucccugaccaucagcacgaucugcuucuucaugcagaucgccauccucaucaccaccgucacccugcacuucaagcaguacgaguucaacuccccgcccaacaaccaggugaugcugugcgagcccacgaucaucgagcgcaacaucaccgagaucguguaccucaccaacaccacgaucgagaaggagaucugccccaagccggccgaguaccggaacuggagcaagccccagugcgacaucaccggguucgcgcccuucuccaaggacaacagcauccgccuguccgccggcggggacaucugggucacccgggagcccuacgugagcugcgacccggacaagugcuaccaguucgcccugggccaggggaccacgcucaacaacgugcacuccaacaacaccguccgcgaccggacccccuaccgcacccugcugaugaacgagcucggcgugcccuuccaccugggcacgaagcaggucugcaucgccuggagcuccagcuccugccacgacgggaaggccuggcugcacgugugcaucaccggcgacgacaagaacgcgaccgccagcuucaucuacaacgggcggcucguggacuccguggucagcugguccaaggagauccugcgcacccaggagagcgagugcgugugcaucaacggcacgugcaccguggucaugaccgacggguccgccagcggcaaggccgacaccaagauccuguucaucgaggagggcaagaucgugcacacgagcacccucuccgggagcgcgcagcacguggaggagugcuccugcuacccccgguacccgggcguccgcugcgugugccgggacaacuggaaggggagcaaccgccccaucguggacaucaacaucaaggaccacuccaucgucagcuccuacgugugcagcggccuggugggcgacaccccgcggaagaacgacuccagcuccagcucccacugccuggaccccaacaacgaggagggcgggcacggggucaagggcugggccuucgacgacgggaacgacguguggaugggccgcaccaucaacgagacgagccggcucggcuacgagaccuucaaggucaucgaggggugguccaaccccaagagcaagcugcagaucaaccgccaggugaucguggaccggggcgaccgcuccggguacagcggcaucuucuccgucgagggcaagagcugcaucaaccggugcuucuacguggagcugauccgcgggcggaaggaggagaccgaggugcucuggaccagcaacuccaucgucguguucugcggcacgagcgggaccuacggcaccggguccuggcccgacggcgccgaccugagccugaugcccaucuga

SEQ ID NO: 87017 - RNA, 1410 nt, Artificial Sequence
  derived and/or modified CDS sequence (opt1) from neuraminidase__InfluenzaA__AFN19526
augaaccccaaccagaagaucaucaccaucggcagcgugucccugaccaucagcacgaucugcuucuucaugcagaucgccauccucaucaccaccgucacccugcacuucaagcagugcgaguucaacuccccgcccaacaaccaggugaugcugugcgagcccacgaucaucgagcgcaacaucaccgagaucguguaccucaccaacaccacgaccgagaaggagaucugccccaagccggccgaguaccggaacuggagcaagccccagugcgacaucaccggguucgcgcccuucuccaaggacaacagcauccgccuguccgccggcggggacaucugggucacccgggagcccuacgugagcugcgacccggacaagugcuaccaguucgcccugggccaggggacgacccucaacaacgugcacuccaacaacaccguccgcgaccggacccccuaccgcacgcugcugaugaacgagcucggcgugcccuuccaccugggcaccaagcaggucugcaucgccuggagcuccagcuccugccacgacgggaaggccuggcugcacgugugcaucaccggcgacgacaagaacgcgaccgccagcuucaucuacaacgggcggcucguggacuccguggucagcugguccaaggagauccugcgcacgcaggagagcgagugcgugugcaucaacgggaccugcaccguggucaugaccgacggguccgccagcggcaaggccgacacgaagauccuguucaucgaggagggcaagaucgugcacaccagcacccucuccgggagcgcgcagcacguggaggagugcuccugcuacccccgguacccgggcguccgcugcgugugccgggacaacuggaaggggagcaaccgccccaucguggacaucaacaucaaggaccacuccaucgucagcuccuacgugugcagcggccuggugggcgacaccccgcggaagacggacuccagcuccagcucccacugccuggaccccaacaacgaggagggcggccacggggucaagggcugggccuucgacgacgggaacgacguguggaugggccgcaccaucaacgagaccagccggcucggcuacgagaccuucaaggucaucgaggggugguccaaccccaagagcaagcugcagaucaaccgccaggugaucguggaccggggcgaccgcuccggguacagcggcaucuucuccgucgagggcaagagcugcaucaaccggugcuucuacguggagcugauccgcgggcggaaggaggagacggaggugcucuggaccagcaacuccaucgucguguucugcggcaccagcgggaccuacggcacgggguccuggcccgacggcgccgaccugaaccugaugcccaucuga

SEQ ID NO: 87018 - RNA, 1410 nt, Artificial Sequence
  derived and/or modified CDS sequence (opt1) from neuraminidase__InfluenzaA__AFN19528
augaaccccaaccagaagaucaucaccaucggcagcgugucccugaccaucagcacgaucugcuucuucaugcagaucgccauccucaucaccaccgucacccugcacuucaagcaguacgaguucaacuccccgcccaacaaccaggugaugcugugcgagcccacgaucaucgagcgcaacaugaccgagaucguguaccucaccaacaccacgaucgagaaggagaucugccccaagccggccgaguaccggaacuggagcaagccccagugcgacaucaccggguucgcgcccuucuccaaggacaacagcauccgccuguccgccggcggggacaucugggucacccgggagcccuacgugagcugcgacccggacaagugcuaccaguucgcccugggccaggggaccacgcucaacaacgugcacuccaacaacaccguccgcgaccggacccccuaccgcacccugcugaugaacgagcucggcgugcccuuccaccugggcacgaagcaggucugcaucgccuggagcuccagcuccugccacgacgggaaggccuggcugcacgugugcaucaccggcgacgacaagaacgcgaccgccagcuucaucuacaacgggcggcucguggacuccguggucagcugguccaaggagauccugcgcacccaggagagcgagugcgugugcaucaacggcacgugcaccguggucaugaccgacggguccgccagcggcaagagcgacaccaagauccuguucaucgaggagggcaagaucgugcacacguccacccucagcggguccgcccagcacguggaggagugcagcugcuacccccgguacccgggcguccgcugcgugugccgggacaacuggaagggguccaaccgccccaucguggacaucaacaucaaggaccacagcaucgucuccagcuacgugugcuccggccuggugggcgacacgccccggaagaacgacagcuccagcuccagccacugccuggaccccaacaacgaggagggcgggcacggggucaagggcugggcguucgacgacgggaacgacguguggaugggccgcaccaucaacgagaccucccggcucggcuacgagaccuucaaggucaucgagggguggagcaacccgaaguccaagcugcagaucaaccgccaggugaucguggaccggagcgaccgcuccggcuacagcgggaucuucagcgucgagggcaaguccugcaucaaccggugcuucuacguggagcugauccgcgggcggaaggaggagaccgaggugcucuggaccagcaacuccaucgucguguucugcggcacgagcggcaccuacgggaccggcuccuggcccgacggggccgaccugaaccugaugcccaucuga

SEQ ID NO: 87019 - RNA, 1410 nt, Artificial Sequence; identical to SEQ ID NO: 86982
  derived and/or modified CDS sequence (opt1) from neuraminidase__InfluenzaA__AFN19530

SEQ ID NO: 87020 - RNA, 1410 nt, Artificial Sequence; identical to SEQ ID NO: 86946
  derived and/or modified CDS sequence (opt1) from neuraminidase__InfluenzaA__AFN19532

SEQ ID NO: 87021 - RNA, 1410 nt, Artificial Sequence; identical to SEQ ID NO: 86982
  derived and/or modified CDS sequence (opt1) from neuraminidase__InfluenzaA__AFN19534

SEQ ID NO: 87022 - RNA, 1410 nt, Artificial Sequence; identical to SEQ ID NO: 86946
  derived and/or modified CDS sequence (opt1) from neuraminidase__InfluenzaA__AFN19536

SEQ ID NO: 87023 - RNA, 1410 nt, Artificial Sequence; identical to SEQ ID NO: 86946
  derived and/or modified CDS sequence (opt1) from neuraminidase__InfluenzaA__AFN19538

SEQ ID NO: 87024 - RNA, 1410 nt, Artificial Sequence; identical to SEQ ID NO: 86946
  derived and/or modified CDS sequence (opt1) from neuraminidase__InfluenzaA__AFN19544

SEQ ID NO: 87025 - RNA, 1410 nt, Artificial Sequence
  derived and/or modified CDS sequence (opt1) from neuraminidase__InfluenzaA__AFN19546
augaaccccaaccagaagaucaucaccaucggcagcgugucccugaccaucagcacgaucugcuucuucaugcagaucgccauccucaucaccaccgucacccugcacuucaagcaguacgaguucaacuccccgcccaacaaccaggugaugcugugcgagcccacgaucaucgagcgcaacaucaccgagaucguguaccucaccaacaccacgaucgagaaggagaucugccccaagccggccgaguaccggaacuggagcaagccccagugcgggaucaccggcuucgcgcccuucuccaaggacaacagcauccgccuguccgccgggggcgacaucugggucacccgggagcccuacgugagcugcgacccggacaagugcuaccaguucgcccuggggcagggcaccacgcucaacaacgugcacuccaacaacaccguccgcgaccggacccccuaccgcacccugcugaugagcgagcucggcgugcccuuccaccuggggacgaagcaggucugcaucgccugguccagcuccagcugccacgacggcaaggccuggcugcacgugugcaucaccggggacgacaagaacgcgaccgccuccuucaucuacaacggccggcucguggacagcguggucuccuggagcaaggagauccugcgcacccaggaguccgagugcgugugcaucaacgggacgugcaccguggucaugaccgacggcagcgccagcggcaaggccgacaccaagauccuguucaucgaggaggggaagaucgugcacacguccacccucagcggcuccgcgcagcacguggaggagugcagcugcuacccccgguacccggggguccgcugcgugugccgggacaacuggaagggcuccaaccgccccaucguggacaucaacaucaaggaccacagcaucgucuccagcuacgugugcuccggccuggugggggacacgccccggaagaacgacagcuccagcuccagccacugccuggaccccaacaacgaggagggcgggcacggcgucaaggggugggccuucgacgacggcaacgacguguggaugggccgcaccaucaacgagaccucccggcucggguacgagaccuucaaggucaucgagggcuggagcaacccgaaguccaagcugcagaucaaccgccaggugaucguggaccgcggggaccggagcggcuacuccgggaucuucagcgucgagggcaagagcugcaucaaccggugcuucuacguggagcugauccgcggccggaaggaggagaccgaggugcucuggaccuccaacagcaucgucguguucugcgggacguccggcaccuacgggaccggcagcuggcccgacggggccgaccugaaccugaugcccaucuga

SEQ ID NO: 87026 - RNA, 1410 nt, Artificial Sequence
  derived and/or modified CDS sequence (opt1) from neuraminidase__InfluenzaA__AFN19548
augaaccccaaccagaagaucaucaccaucggcagcgugucccugaccaucagcacgaucugcuucuucaugcagaucgccauccucaucaccaccgucacccugcacuucaagcaguacgaguucaacuccccgcccaacaaccaggugaugcugugcgagcccacgaucaucgagcgcaacaucaccgagaucguguaccucaccaacaccacgaucgagaaggagaucugccccaagccggccgaguaccggaacuggagcaagccccagugcgacaucaccggguucgcgcccuucuccaaggacaacagcauccgccuguccgccggcggggacaucugggucacccgggagcccuacgugagcugcgacccggacaagugcuaccaguucgcccugggccaggggaccacgcucaacaacgugcacuccaacaacaccguccgcgaccggacccccuaccgcacccugcugaugaacgagcucggcgugcccuuccaccugggcacgaagcaggucugcaucgccuggagcuccagcuccugccacgacgggaaggccuggcugcacgugugcaucaccggcgacgacaagaacgcgaccgccagcuucaucuacaacgggcggcucguggacuccguggucagcugguccaaggagauccugcgcacccaggagagcgagugcgugugcaucaacggcacgugcaccguggucaugaccgacggguccgccagcggcaaggccgacaccaagauccuguucaucgaggagggcaagaucgugcacacgagcacccucuccgggagcgcgcagcacguggaggagugcuccugcuacccccgguacccgggcguccgcugcgugugccgggacaacuggaaggggagcaaccgccccaucguggacaucaacaucaaggaccacuccaucgucagcuccuacgugugcagcggccuggugggcgacacgccccggaagaacgacuccuucagcuccagccacugccuggaccccaacaacgaggagggcgggcacggggucaagggcugggccuucgacgacgggaacgacguguggaugggccgcaccaucaacgagaccucccggcucggcuacgagaccuucaaggucaucgagggguggagcaacccgaaguccaagcugcagaucaaccgccaggugaucguggaccggggcgaccgcagcggguacuccggcaucuucagcgucgaggggaaguccugcaucaaccggugcuucuacguggagcugauccgcggccggaaggaggagaccgaggugcucuggaccagcaacagcaucgucguguucugcggcacguccgggaccuacggcaccgggagcuggcccgacggcgccgaccugaaccugaugcccaucuga

SEQ ID NO: 87027 - RNA, 1410 nt, Artificial Sequence
  derived and/or modified CDS sequence (opt1) from neuraminidase__InfluenzaA__AFN19550
augaaccccaaccagaagaucaucaccaucggcagcgugucccugaccaucagcacgaucugcuucuucaugcagaucgccauccucaucaccaccgucacccugcacuucaagcaguacgaguucaacuccccgcccaacaaccaggugaugcugugcgagcccacgaucaucgagcgcaacaucaccgagaucguguaccucaccaacaccacgaucgagaaggagaucugccccaagcuggccgaguaccggaacuggagcaagccgcagugcgacaucaccggguucgcgcccuucuccaaggacaacagcauccgccuguccgccggcggggacaucugggucacccgggagcccuacgugagcugcgaccccgacaagugcuaccaguucgcccucggccaggggaccacgcugaacaacgugcacuccaacaacaccguccgcgaccggaccccguaccgcacccugcucaugaacgagcugggcgugcccuuccaccugggcacgaagcaggucugcaucgccuggagcuccagcuccugccacgacgggaaggccuggcuccacgugugcaucaccggcgacgacaagaacgcgaccgccagcuucaucuacaacgggcggcugguggacuccguggucagcugguccaaggagauccugcgcacccaggagagcgagugcgugugcaucaacggcacgugcaccguggucaugaccgacggguccgccagcggcgaggccgacaccaagauccucuucaucgaggagggcaagaucauccacacgagcacccuguccgggagcgcgcagcacguggaggagugcuccugcuacccccgguaccccggcgugcgcugcgucugccgggacaacuggaaggggagcaaccgcccgaucguggacaucaacaucaaggaccacuccaucgugagcuccuacgucugcagcggccuggugggcgacacgccccggaagaacgacuccagcuccagcucccacugccucgaccccaacaacgaggagggcgggcacggggugaagggcugggccuucgacgacgggaacgacgucuggaugggccgcaccaucaacgagaccagccggcugggcuacgagaccuucaaggugaucgaggggugguccaaccccaagagcaagcugcagaucaaccgccaggucaucguggaccggggcaaccgcuccggguacagcggcaucuucuccguggagggcaagagcugcaucaaccggugcuucuacgucgagcucauccgcgggcggaaggaggagaccgaggugcuguggaccagcaacuccaucguggucuucugcggcacgagcgggaccuacggcaccggguccuggccggacggcgccgaccugaaccucaugcccaucuga

SEQ ID NO: 87028 - RNA, 1410 nt, Artificial Sequence; identical to SEQ ID NO: 86946
  derived and/or modified CDS sequence (opt1) from neuraminidase__InfluenzaA__AFN19552

SEQ ID NO: 87029 - RNA, 1410 nt, Artificial Sequence; identical to SEQ ID NO: 86170
  derived and/or modified CDS sequence (opt1) from neuraminidase__InfluenzaA__AFN19554

SEQ ID NO: 87030 - RNA, 1410 nt, Artificial Sequence; identical to SEQ ID NO: 86170
  derived and/or modified CDS sequence (opt1) from neuraminidase__InfluenzaA__AFN19556

SEQ ID NO: 87031 - RNA, 1410 nt, Artificial Sequence
  derived and/or modified CDS sequence (opt1) from neuraminidase__InfluenzaA__AFN19558
augaaccccaaccagaagaucaucaccaucggcagcgugucccugaccaucagcacgaucugcuucuucaugcagaucgccauccucaucaccaccgucacccugcacuucaagcaguacgaguucaacuccccgcccaacaaccaggugaugcugugcgagcccacgaucaucgagcgcaacaucaccgagaucguguaccucaccaacaccacgaucgagaaggagaucugccccaagccggccgaguaccggaacuggagcaagccccagugcgacaucaccggguucgcgcccuucuccaaggacaacagcauccgccuguccgccggcggggacaucugggucacccgggagcccuacgugagcugcgacccggacaagugcuaccaguucgcccugggccaggggaccacgcucaacaacgugcacuccaacaacaccguccgcgaccggacccccuaccgcacccugcugaugaacgagcucggcgugcccuuccaccugggcacgaagcaggucugcaucgccuggagcuccagcuccugccacgacgggaaggccuggcugcacgugugcaucaccggcgacgacaagaacgcgaccgccagcuucaucuacaacgggcggcucguggacuccguggucagcugguccaaggagauccugcgcacccaggagagcgagugcgugugcaucaacggcacgugcaccguggucaugaccgacggguccgccagcggcaaggccgacaccaagauccuguucaucgaggagggcaagaucgugcacacgagcacccucuccgggagcgcgcagcacguggaggagugcuccugcuacccccgguacccgggcguccgcugcgugugccgggacaacuggaaggggagcaaccgccccaucguggacaucaacaucaaggaccacuccaucgucagcuccuacgugugcagcggccuggugggcgacaccccgcggaagaacgacuccagcuccagcucccacugccuggaccccaacaacgaggagggcgggcacggggucaagggcugggccuucgacgacgggaacgacguguggaugggccgcaccaucaacgagacgagccggcucggcuacgagaccuucaaggucaucgaggggugguccaaccccaagagcaagcugcagaugaaccgccaggugaucguggaccggggcgaccgcuccggguacagcggcaucuucuccgucgagggcaagagcugcaucaaccggugcuucuacguggagcugauccgcgggcggaaggaggagaccgaggugcucuggaccagcaacuccaucgucguguucugcggcacgagcgggaccuacggcaccggguccuggcccgacggcgccgaccugaaccugaugcccaucuga

SEQ ID NO: 87032 - RNA, 1410 nt, Artificial Sequence
  derived and/or modified CDS sequence (opt1) from neuraminidase__InfluenzaA__AFN19560
augaaccccaaccagaagaucaucaccaucggcagcgugucccugaccaucagcacgaucugcuucuucaugcagaucgccauccucaucaccaccgucacccugcacuucaagcaguacgaguucaacuccccgcccaacaaccaggugaugcugugcgagcccacgaucaucgagcgcaacaucaccgagaucguguaccucaccaacaccacgaucgagaaggagaucugccccaagccggccgaguaccggaacuggagcaagccccagugcgggaucaccggcuucgcgcccuucuccaaggacaacagcauccgccuguccgccgggggcgacaucugggucacccgggagcccuacgugagcugcgacccggacaagugcuaccaguucgcccuggggcagggcaccacgcucaacaacgugcacuccaacaacaccguccgcgaccggacccccuaccgcacccugcugaugaacgagcucggcgugcccuuccaccuggggacgaagcaggucugcaucgccuggagcuccagcuccugccacgacggcaaggccuggcugcacgugugcaucaccggggacgacaagaacgcgaccgccagcuucaucuacaacggccggcucguggacuccguggucagcugguccaaggagauccugcgcacccaggagagcgagugcgugugcaucaacgggacgugcaccguggucaugaccgacggcuccgccagcggcaaggccgacaccaagauccuguucaucgaggaggggaagaucgugcacacgagcacccucuccggcagcgcgcagcacguggaggagugcuccugcuacccccgguacccggggguccgcugcgugugccgggacaacuggaagggcagcaaccgccccaucguggacaucaacaucaaggaccacuccaucgucagcuccuacgugugcagcggccuggugggggacaccccgcggaagaacgacuccagcuccagcucccacugccuggaccccaacaacgagggcgggggccacggggucaagggcugggccuucgacgacggcaacgacguguggauggggcgcaccaucaacgagacgagccggcucggcuacgagaccuucaaggucaucgaggggugguccaaccccaagagcaagcugcagaucaaccgccaggugaucguggaccggggcgaccgcuccggguacagcggcaucuucuccgucgagggcaagagcugcaucaaccggugcuucuacguggagcugauccgcgggcggaaggaggagaccgaggugcucuggaccagcaacuccaucgucguguucugcggcacgagcgggaccuacggcaccggguccuggcccgacggcgccgaccugaaccugaugcccaucuga

SEQ ID NO: 87033 - RNA, 1410 nt, Artificial Sequence; identical to SEQ ID NO: 86993
  derived and/or modified CDS sequence (opt1) from neuraminidase__InfluenzaA__AFN19562

SEQ ID NO: 87034 - RNA, 1410 nt, Artificial Sequence
  derived and/or modified CDS sequence (opt1) from neuraminidase__InfluenzaA__AFN19564
augaaccccaaccagaagaucaucaccaucggcagcgugucccugaccaucagcacgaucugcuucuucaugcagaucgccauccucaucaccaccgucacccugcacuucaagcaguacgaguucaacuccccgcccaacaaccaggugaugcugugcgagcccacgaucaucgagcgcaacaucaccgagaucguguaccucaccaacaccacgaucgagaaggagaucugccccaagccggccgaguaccggaacuggagcaagccccagugcgggaucaccggcuucgcgcccuucuccaaggacaacagcauccgccuguccgccgggggcgacaucugggucacccgggagcccuacgugagcugcgacccggacaagugcuaccaguucgcccuggggcagggcaccacgcucaacaacgugcacuccaacaacaccguccgcgaccggacccccuaccgcacccugcugaugaacgagcucggcgugcccuuccaccuggggacgaagcaggucugcaucgccuggagcuccagcuccugccacgacggcaaggccuggcugcacgugugcaucaccggggacgacaagaacgcgaccgccagcuucaucuacaacggccggcucguggacuccguggucagcugguccaaggagauccugcgcacccaggagagcgagugcgugugcaucaacgggacgugcaccguggucaugaccgacggcuccgccagcggcaaggccgacaccaagauccuguucaucgaggaggggaagaucgugcacacgagcacccucuccggcagcgcgcagcacguggaggagugcuccugcuacccccgguacccggggguccgcugcgugugccgggacaacuggaagggcagcaaccgccccaucguggacaucaacaucaaggaccacuccaucgucagcuccuacgugugcagcggccuggugggggacaccccgcggaagaccgacuccagcuccagcucccacugccuggaccccaacaacgaggagggcgggcacggcgucaaggggugggccuucgacgacggcaacgacguguggaugggccgcacgaucaacgagaccagccggcucggguacgagaccuucaaggucaucgagggcugguccaaccccaagagcaagcugcagaucaaccgccaggugaucguggaccgcggggaccgguccggcuacagcgggaucuucuccgucgagggcaagagcugcaucaaccggugcuucuacguggagcugauccgcggccggaaggaggagaccgaggugcucuggacgagcaacuccaucgucguguucugcgggaccagcggcaccuacgggaccggcuccuggcccgacggggccgaccugaaccugaugcccaucuga

SEQ ID NO: 87035 - RNA, 1410 nt, Artificial Sequence
  derived and/or modified CDS sequence (opt1) from neuraminidase__InfluenzaA__AFN19566
augaaccccaaccagaagaucaucaccaucggcagcgugucccugaccaucagcacgaucugcuucuucaugcagaucgccauccucaucaccaccgucacccugcacuucaagcaguacgaguucaacuccccgcccaacaaccaggugaugcugugcgagcccacgaucaucgagcgcaacaucaccgagaucguguaccucaccaacaccacgaucgagaaggagaucugccccaagccggccgaguaccggaacuggagcaagccccagugcgggaucaccggcuucgcgcccuucuccaaggacaacagcauccgccuguccgccgggggcgacaucugggucacccgggagcccuacgugagcugcgacccggacaagugcuaccaguucgcccuggggcagggcaccacgcucaacaacgugcacuccaacaacaccguccgcgaccggacccccuaccgcacccugcugaugaacgagcucggcgugcccuuccaccuggggacgaagcaggucugcaucgccuggagcuccagcuccugccacgacggcaaggccuggcugcacgugugcaucaccggggacgacaagaacgcgaccgccagcuucaucuacaacggccggcucguggacuccguggucagcugguccaacgagauccugcgcacccaggagagcgagugcgugugcaucaacgggacgugcaccguggucaugaccgacggcuccgccagcggcaaggccgacaccaagauccuguucaucgaggaggggaagaucgugcacacgagcacccucuccggcagcgcgcagcacguggaggagugcuccugcuacccccgguacccggggguccgcugcgugugccgggacaacuggaagggcagcaaccgccccaucguggacaucaacaucaaggaccacuccaucgucagcuccuacgugugcagcggccuggugggggacaccccgcggaagaacgacuccagcuccagcucccacugccuggaccccaacaacgaggagggcgggcacggcgucaaggggugggccuucgacgacggcaacgacguguggaugggccgcaccaucaacgagacgagccggcucggguacgagaccuucaaggucaucgagggcugguccaaccccaagagcaagcugcagaucaaccgccaggugaucguggaccgcggggaccgguccggcuacagcgggaucuucuccgucgagggcaagagcugcaucaaccggugcuucuacguggagcugauccgcggccggaaggaggagaacgaggugcucuggaccagcaacuccaucgucguguucugcgggaccagcggcacguacgggaccggcuccuggcccgacggggccgaccugaaccugaugcccaucuga

SEQ ID NO: 87036 - RNA, 1410 nt, Artificial Sequence
  derived and/or modified CDS sequence (opt1) from neuraminidase__InfluenzaA__AFN19568
augaaccccaaccagaagaucaucaccaucggcagcgugucccugaccaucagcacgaucugcuucuucaugcagaucgccauccucaucaccaccgucacccugcacuucaagcaguacgaguucaacuccccgcccaacaaccaggugaugcugugcgagcccacgaucaucgagcgcaacaucaccgagaucguguaccucaccaacaccacgaucgagaaggagaucugccccaagccggccgaguaccggaacuggagcaagccccagugcgggaucaccggcuucgcgcccuucuccaaggacaacagcauccgccuguccgccgggggcgacaucugggucacccgggagcccuacgugagcugcgacccggacaagugcuaccaguucgcccuggggcagggcaccacgcucaacaacgugcacuccaacaacaccguccgcgaccggacccccuaccgcacccugcugaugaacgagcucggcgugcccuuccaccuggggacgaagcaggucugcaucgccuggagcuccagcuccugccacgacggcaaggccuggcugcacgugugcaucaccggggacgacaagaacgcgaccgccagcuucaucuacaacggccggcucguggacuccguggucagcugguccaaggagauccugcgcacccaggagagcgagugcgugugcaucaacgggacgugcaccguggucaugaccgacggcuccgccagcggcaaggccgacaccaagauccuguucaucgaggaggggaagaucgugcacacgagcacccucuccggcagcgcgcagcacguggaggagugcuccugcuacccccgguacccggggguccgcugcgugugccgggacaacuggaagggcagcaaccgccccaucguggacaucaacaucaaggaccacuccaucgucagcuccuacgugugcagcggccuggugggggacaccccgcggaagaacgacuccagcuccagcucccacugccuggaccccaacaacgaggagggcgggcacggcgucaaggggugggccuucgacgacggcaacgacguguggaugggccgcaccaucaacgagacgagccggcucggguacgagaccuucaaggucaucgagggcugguccaaccccaagagcaagcuccaggugaaccgccaggugaucgucgaccgcggggaccgguccggcuacagcgggaucuucuccguggagggcaagagcugcaucaaccggugcuucuacguggagcugauccgcggccggaaggaggagaucgagguccuguggaccagcaacuccaucgugguguucugcgggaccagcggcacguacgggaccggcuccuggcccgacggggccgaccugaaccugaugcccaucuga

SEQ ID NO: 87037 - RNA, 1410 nt, Artificial Sequence
  derived and/or modified CDS sequence (opt1) from neuraminidase__InfluenzaA__AFN19570
augaaccccaaccagaagaucaucaccaucggcagcgugucccugaccaucagcacgaucugcuucuucaugcagaucgccauccucaucaccaccgucacccugcacuucaagcaguacgaguucaacuacccgcccaacaaccaggugaugcugugcgagcccacgaucaucgagcgcaacaucaccgagaucguguaccucaccaacaccacgaucgagaaggagaucugccccaagccggccgaguaccggaacugguccaagccccagugcgggaucaccggcuucgcgcccuucagcaaggacaacuccauccgccugagcgccgggggcgacaucugggucacccgggagcccuacguguccugcgacccggacaagugcuaccaguucgcccuggggcagggcaccacgcucaacaacaugcacagcaacaacaccgugcgcgaccggacccccuaccgcacccugcugaugaacgagcucggcguccccuuccaccuggggacgaagcaggucugcaucgccugguccagcuccagcugccacgacggcaaggccuggcugcacgugugcaucaccggggacgacaagaacgcgaccgccuccuucaucuacaacggccggcucguggacagcgugguguccuggagcaacgagauccugcgcacccaggaguccgagugcgucugcaucaacgggacgugcaccguggugaugaccgacggcagcgccuccggcaaggccgacaccaagauccuguucaucgaggaggggaagaucguccacacgagcacccucagcggcuccgcgcagcacguggaggagugcagcugcuacccccgguacccgggggugcgcugcgucugccgggacaacuggaagggcuccaaccgccccaucguggacaucaacaucaaggaccacagcaucguguccagcuacgucugcuccggccuggugggggacacgccccggaagaacgacagcuccagcuccagccacugccuggaccccaacaacgaggagggcgggcacggcgugaaggggugggccuucgacgacggcaacgacgucuggaugggccgcaccaucaacgagaccucccggcucggguacgagaccuucaaggugaucgagggcuggagcaacccgaaguccaagcugcagaucaaccgccaggucaucguggaccgcggggaccggagcggcuacuccgggaucuucagcguggagggcaaguccugcaucaaccggugcuucuacgucgagcugauccgcggccggaaggaggagaacgaggugcucuggaccagcaacagcaucguggucuucugcgggaccuccggcacguacgggaccggcagcuggcccgacggggccgaccugaaccugaugcccaucuga

SEQ ID NO: 87038 - RNA, 1410 nt, Artificial Sequence
  derived and/or modified CDS sequence (opt1) from neuraminidase__InfluenzaA__AFN19572
augaaccccaaccagaagaucaucaccaucggcagcgugucccugaccaucagcacgaucugcuucuucaugcagaucgccauccucaucaccaccgucacccugcacuucaagcaguacgaguucaacuccccgcccaacaaccaggugaugcugugcgagcccacgaucaucgagcgcaacaucaccgagaucguguaccucaccaacaccacgaucgagaaggagaucugccccaagccggccgaguaccggaacuggagcaagccccagugcgacaucaccggguucgcgcccuucuccaaggacaacagcauccgcaucuccgccggcggggacaucugggucacccgggagcccuacgugagcugcgacccggacaagugcuaccaguucgcccugggccaggggaccacgcugaacaacgugcacuccaacaacaccguccgcgaccggacccccuaccgcacccuccugaugaacgagcugggcgugcccuuccaccucggcacgaagcaggucugcaucgccuggagcuccagcuccugccacgacgggaaggccuggcugcacgugugcaucaccggcgacgacaagaacgcgaccgccagcuucaucuacaacgggaagcugguggacuccguggucagcugguccaaggagauccuccggacccaggagagcgagugcgugugcaucaacggcacgugcaccguggucaugaccgacggguccgccagcggcaaggccgacaccaagauccuguucaucgaggagggcaagaucgugcacacgagcacccuguccgggagcgcgcagcacguggaggagugcuccugcuacccccgcuacccgggcguccggugcgugugccgcgacaacuggaaggggagcaaccggcccaucguggacaucaacaucaaggaccacuccaucgucagcuccuacgugugcagcggccucgugggcgacaccccgcgcaagaacgacuccagcuccagcucccacugccuggaccccaacaacgaggagggcgggcacggggucaagggcugggccuucgacgacgggaacgacguguggaugggccggaccaucaacgagacgagccgccugggcuacgagaccuucaaggucaucgaggggugguccaaccccaagagcaagcuccagaucaaccgccaggugaucguggaccggggcgaccgguccggguacagcggcaucuucuccgucgagggcaagagcugcaucaaccgcugcuucuacguggagcugauccgggggcgcaaggaggagaccgaggugcuguggaccagcaacuccaucgucguguucugcggcacgagcgggaccuacggcaccggguccuggcccgacggcgccgaccucaaccugaugcccaucuga

SEQ ID NO: 87039 - RNA, 1410 nt, Artificial Sequence
  derived and/or modified CDS sequence (opt1) from neuraminidase__InfluenzaA__AFN19574
augaaccccaaccagaagaucaucaccaucggcagcgugucccugaccaucagcacgaucugcuucuucaugcagaucgccauccucaucaccaccgucacccugcacuucaagcaguacgaguucaacuccccgcccaacaaccaggugaugcugugcgagcccacgaucaucgagcgcaacaucaccgagaucguguaccucaccaacaccacgaucgagaaggagaucugccccaagcuggccgaguaccggaacuggagcaagccgcagugcgacaucaccggguucgcgcccuucuccaaggacaacagcauccgccuguccgccggcggggacaucugggucacccgggagcccuacgugagcugcgaccccaacaagugcuaccaguucgcccucggccaggggaccacgcugaacaacgugcacuccaacaacaccguccgcgaccggaccccguaccgcacccugcucaugaacgagcugggcgugcccuuccaccugggcacgaagcaggucugcaucgccuggagcuccagcuccugccacgacgggaaggccuggcuccacgugugcaucaccggcgacgacaagaacgcgaccgccagcuucaucuacaacgggcggcugguggacuccguggucagcugguccaagaagauccugcgcacccaggagagcgagugcgugugcaucaacggcacgugcaccguggucaugaccgacggguccgccagcggcaaggccgacaccaagauccucuucaucgaggagggcaagaucgugcacacgagcacccuguccgggagcgcgcagcacguggaggagugcuccugcuacccccgguaccccggcguccgcugcgugugccgggacaacuggaaggggagcaaccgcccgaucguggacaucaacaugaaggaccacuccaucgucagcuccuacgugugcagcggccuggugggcgacacgccccggaagaacgacuccagcuccagcucccacugcuucgaccccaacgacgaggagggcgggcacggggucaagggcugggccuucgacgacgggaacgacguguggaugggccgcaccaucagcgagaagucccggcucggcuacgagaccuucaaggucaucgagggguggagcaaccccaaguccaagcugcagaucaaccgccaggugaucguggaccggggcgaccgcagcggguacuccggcaucuucagcgucgagggcaagagcugcaucaaccggugcuucuacguggagcugauccgcggguccaaggaggagaccgaggugcucuggaccagcaacuccaucgucguguucugcggcaccagcgggacguacggcaccggguccuggccggacggcgccgacaucaaccugaugcccaucuga

SEQ ID NO: 87040 - RNA, 1410 nt, Artificial Sequence
  derived and/or modified CDS sequence (opt1) from neuraminidase__InfluenzaA__AFN19576
augaaccccaaccagaagaucaucaccaucggcagcgugucccugaccaucagcacgaucugcuucuucaugcagaucgccauccucaucaccaccgucacccugcacuucaagcaguacgaguucaacuccccgcccaacaaccagaugaugcugugcgagcccacgaucaucgagcgcaacaucaccgagaucguguaccucaccaacaccacgaucgagaaggagaucugccccaagccggccgaguaccggaacuggagcaagccccagugcgacaucaccggguucgcgcccuucuccaaggacaacagcauccgccuguccgccggcggggacaucugggugacccgggagcccuacgucagcugcgacccggacaagugcuaccaguucgcccugggccaggggaccacgcucaacaacgugcacuccaacaacaccgugcgcgaccggacccccuaccgcacccugcugaugaacgagcucggcguccccuuccaccugggcacgaagcaggucugcaucgccuggagcuccagcuccugccacgacgggaaggccuggcugcacgugugcaucaccggcgacgacaagaacgcgaccgccagcuucaucuacaacgggcggcucguggacuccguggugagcugguccaaggagauccugcgcacccaggagagcgagugcgucugcaucaacggcacgugcaccguggugaugaccgacggguccgccagcggcaaggccgacaccaagauccuguucaucgaggagggcaagaucguccacacgagcacccucuccgggagcgcgcagcacguggaggagugcuccugcuacccccgguacccgggcgugcgcugcgucugccgggacaacuggaaggggagcaaccgccccaucguggacaucaacaucaaggaccacuccaucgugagcuccuacgucugcagcggccuggugggcgacaccccgcggaagaacgacuccagcuccagcucccacugccuggaccccaacaacgaggagggcgggcacggggugaagggcugggccuucgacgacgggaacgacgucuggaugggccgcaccaucaacgagacgagccggcucggcuacgagaccuucaaggugaucgaggggugguccaaccccaagagcaagcugcagaucaaccgccaggucaucguggaccggggcgaccgcuccggguacagcggcaucuucuccguggagggcaagagcugcaucaaccggugcuucuacgucgagcugauccgcgggcggaaggaggagaccgaggugcucuggaccagcaacuccaucguggucuucugcggcacgagcgggaccuacggcaccggguccuggcccgacggcgccgaccugaaccugaugcccaucuga

SEQ ID NO: 87041 - RNA, 1410 nt, Artificial Sequence; identical to SEQ ID NO: 86946
  derived and/or modified CDS sequence (opt1) from neuraminidase__InfluenzaA__AFN19578

SEQ ID NO: 87042 - RNA, 1410 nt, Artificial Sequence; identical to SEQ ID NO: 86946
  derived and/or modified CDS sequence (opt1) from neuraminidase__InfluenzaA__AFN19582

SEQ ID NO: 87043 - RNA, 1410 nt, Artificial Sequence; identical to SEQ ID NO: 86946
  derived and/or modified CDS sequence (opt1) from neuraminidase__InfluenzaA__AFN19584

SEQ ID NO: 87044 - RNA, 1410 nt, Artificial Sequence; identical to SEQ ID NO: 86946
  derived and/or modified CDS sequence (opt1) from neuraminidase__InfluenzaA__AFN19588

SEQ ID NO: 87045 - RNA, 1410 nt, Artificial Sequence; identical to SEQ ID NO: 86946
  derived and/or modified CDS sequence (opt1) from neuraminidase__InfluenzaA__AFN19590

SEQ ID NO: 87046 - RNA, 1410 nt, Artificial Sequence; identical to SEQ ID NO: 86982
  derived and/or modified CDS sequence (opt1) from neuraminidase__InfluenzaA__AFN19592

SEQ ID NO: 87047 - RNA, 1410 nt, Artificial Sequence; identical to SEQ ID NO: 86946
  derived and/or modified CDS sequence (opt1) from neuraminidase__InfluenzaA__AFN19594

SEQ ID NO: 87048 - RNA, 1410 nt, Artificial Sequence; identical to SEQ ID NO: 86954
  derived and/or modified CDS sequence (opt1) from neuraminidase__InfluenzaA__AFN19596

SEQ ID NO: 87049 - RNA, 1410 nt, Artificial Sequence; identical to SEQ ID NO: 86954
  derived and/or modified CDS sequence (opt1) from neuraminidase__InfluenzaA__AFN19600

SEQ ID NO: 87050 - RNA, 1410 nt, Artificial Sequence
  derived and/or modified CDS sequence (opt1) from neuraminidase__InfluenzaA__AFN19602
augaaccccaaccagaagaucaucaccaucggcagcgugucccugacccucagcacgaucugcuucuucaugcagaucgccauccugaucaccaccgucacccugcacuucaagcaguacgaguucaacuccccgcccaacaaccaggugaugcucugcgagcccacgaucaucgagcgcaacaugaccgagaucguguaccugaccaacaccacgaucgagaaggagaucugccccaagccggccgaguaccggaacuggagcaagccccagugcgacaucaccggguucgcgcccuucuccaaggacaacagcauccgccuguccgccggcggggacaucugggucacccgggagcccuacgugagcugcgacccggacaagugcuaccaguucgcccucggccaggggaccacgcugaacaacgugcacuccaacaacaccguccgcgaccggacccccuaccgcacccugcucaugaacgagcugggcgugcccuuccaccugggcacgaagcaggucugcaucgccuggagcuccagcuccugccacgacgggaaggccuggcuccacgugugcaucaccggcgacgacaagaacgcgaccgccagcuucaucuacaacgggcggcugguggacuccguggucagcugguccaaggagauccugcgcacccaggagagcgagugcgugugcaucaacggcacgugcaccguggucaugaccgacggguccgccagcggcaaggccgacaccaagauccucuucaucgaggagggcaagaucgugcacacgagcacccuguccgggagcgcgcagcacguggaggagugcuccugcuacccccgguacccgggcguccgcugcgugugccgggacaacuggaaggggagcaaccgccccaucguggacaucaacaucaaggaccacuccaucgucagcuccuacgugugcagcggccuggugggcgacaccccgcggaagaacgacuccagcuccagcucccacugccucgaccccaacaacgaggagggcgggcacggggucaagggcugggccuucgacgacgggaacgacguguggaugggccgcaccaucaacgagacgagccggcugggcuacgagaccuucaaggucaucgaggggugguccaaccccaagagcaagcugcagaucaaccgccaggugaucguggaccgguccgaccgcagcggcuacuccgggaucuucagcgucgagggcaagagcugcaucaaccggugcuucuacguggagcucauccgcgggcggaaggaggagaccgaggugcuguggaccuccaacagcaucgucguguucugcggcacguccggcaccuacgggaccggcagcuggcccgacggggccgaccugaaccucaugcccaucuga

SEQ ID NO: 87051 - RNA, 1410 nt, Artificial Sequence; identical to SEQ ID NO: 86946
  derived and/or modified CDS sequence (opt1) from neuraminidase__InfluenzaA__AFN19604

SEQ ID NO: 87052 - RNA, 1410 nt, Artificial Sequence; identical to SEQ ID NO: 86946
  derived and/or modified CDS sequence (opt1) from neuraminidase__InfluenzaA__AFN19606

SEQ ID NO: 87053 - RNA, 1410 nt, Artificial Sequence; identical to SEQ ID NO: 86946
  derived and/or modified CDS sequence (opt1) from neuraminidase__InfluenzaA__AFN19608

SEQ ID NO: 87054 - RNA, 1410 nt, Artificial Sequence; identical to SEQ ID NO: 86946
  derived and/or modified CDS sequence (opt1) from neuraminidase__InfluenzaA__AFN19610

SEQ ID NO: 87055 - RNA, 1410 nt, Artificial Sequence; identical to SEQ ID NO: 86954
  derived and/or modified CDS sequence (opt1) from neuraminidase__InfluenzaA__AFN19612

SEQ ID NO: 87056 - RNA, 1410 nt, Artificial Sequence; identical to SEQ ID NO: 86170
  derived and/or modified CDS sequence (opt1) from neuraminidase__InfluenzaA__AFN19614

SEQ ID NO: 87057 - RNA, 1410 nt, Artificial Sequence
  derived and/or modified CDS sequence (opt1) from neuraminidase__InfluenzaA__AFN19618
augaaccccaaccagaagaucaucaccaucggcagcgugucccugaccaucagcacgaucugcuucuucaugcagaucgccauccucaucaccaccgucacccugcacuucaagcaguacgaguucaacuccccgcccaacaaccaggugaugcugugcgagcccacgaucaucgagcgcaacaucaccgagaucguguaccucaccaacaccacgaucgagaaggagaucugccccaagccggccgaguaccggaacuggagcaagccccagugcgggaucaccggcuucgcgcccuucuccaaggacaacagcauccgccuguccgccgggggcgacaucugggucacccgggagcccuacgugagcugcgacccggacaagugcuaccaguucgcccuggggcagggcaccacgcucaacaacgugcacuccaacaacaccguccgcgaccggacccccuaccgcacccugcugaugaacgagcucggcgugcccuuccaccuggggacgaagcaggucugcaucgccuggagcuccagcuccugccacgacggcaaggccuggcugcacgugugcaucaccggggacgacaagaacgcgaccgccagcuucaucuacaacggccggcucguggacuccguggucagcugguccaacgagauccugcgcacccaggagagcgagugcgugugcaucaacgggacgugcaccguggucaugaccgacggcuccgccagcggcaaggccgacaccaagauccuguucaucgaggaggggaagaucgugcacacgagcacccucuccggcagcgcgcagcacguggaggagugcuccugcuacccccgguacccggggguccgcugcgugugccgggacaacuggaagggcagcaaccgccccaucguggacaucaacaucaaggaccacuccaucgucagcuccuacgugugcagcggccuggugggggacaccccgcggaagaacgacuccagcuccagcucccacugccuggaccccaacaacgaggagggcgggcacggcgucaaggggugggccuucgacgacggcaacgacguguggaugggccgcaccaucaacgagacgagccggcucggguacgagaccuucaaggucaucgagggcugguccaaccccaagagcaagcugcagaucaaccgccaggugaucguggaccgcggggaccgguccggcuacagcgggaucuucuccgucgagggcaagagcugcaucaaccggugcuucuacguggagcugauccgcggccggaaggaggagaccgaggugcucuggaccagcaacuccaucgucguguucugcgggacgagcggcaccuacgggaccggcuccuggcccgacggggccgaccugaaccugaugcccaucuga

SEQ ID NO: 87058 - RNA, 1410 nt, Artificial Sequence; identical to SEQ ID NO: 86946
  derived and/or modified CDS sequence (opt1) from neuraminidase__InfluenzaA__AFN19620

SEQ ID NO: 87059 - RNA, 1410 nt, Artificial Sequence; identical to SEQ ID NO: 86982
  derived and/or modified CDS sequence (opt1) from neuraminidase__InfluenzaA__AFN19624

SEQ ID NO: 87060 - RNA, 1410 nt, Artificial Sequence; identical to SEQ ID NO: 86946
  derived and/or modified CDS sequence (opt1) from neuraminidase__InfluenzaA__AFN19630

SEQ ID NO: 87061 - RNA, 1410 nt, Artificial Sequence
  derived and/or modified CDS sequence (opt1) from neuraminidase__InfluenzaA__AFN19632
augaaccccaaccagaagaucaucaccaucggcagcgugucccugaccaucagcacgaucugcuucuucaugcagaucgccauccucaucaccaccgucacccugcacuucaagcaguacgaguucaacuccccgcccaacaaccaggugaugcugugcgagcccacgaucaucgagcgcaacaucaccgagaucguguaccucaccaacaccacgaucgagaaggagaucugccccaagccgaccgaguaccggaacuggagcaagccccagugcgacaucaccggguucgcccccuucuccaaggacaacagcauccgccuguccgcgggcggggacaucugggucacccgggagcccuacgugagcugcgacccggacaagugcuaccaguucgcccugggccaggggacgacccucaacaacgugcacuccaacaacaccguccgcgaccggacccccuaccgcacgcugcugaugaacgagcucggcgugcccuuccaccugggcaccaagcaggucugcaucgccuggagcuccagcuccugccacgacgggaaggccuggcugcacgugugcaucaccggcgacgacaagaacgccaccgcgagcuucaucuacaacgggcggcucguggacuccguggucagcugguccaaggagauccugcgcacgcaggagagcgagugcgugugcaucaacgggaccugcaccguggucaugaccgacggguccgccagcggcaaggccgacacgaagauccuguucaucgaggagggcaagaucgugcacaccagcacccucuccgggagcgcccagcacguggaggagugcuccugcuacccccgguacccgggcguccgcugcgugugccgggacaacuggaaggggagcaaccgccccaucguggacaucaacaucaaggaccacuccaucgucagcuccuacgugugcagcggccuggugggcgacaccccgcggaagaacgacuccagcuccagcucccacugccuggaccccaacaacgaggagggcggccacggggucaagggcugggcguucgacgacgggaacgacguguggaugggccgcacgaucaacgagaccagccggcucggcuacgagaccuucaaggucaucgaggggugguccaaccccaagagcaagcugcagaucaaccgccaggugaucguggaccggggcgaccgcuccggguacagcggcaucuucuccgucgagggcaagagcugcaucaaccggugcuucuacguggagcugauccgcgggcggaaggaggagaccgaggugcucuggacgagcaacuccaucgucguguucugcggcaccagcgggaccuacggcaccggguccuggcccgacggcgccgaccugaaccugaugcccaucuga

SEQ ID NO: 87062 - RNA, 1410 nt, Artificial Sequence
  derived and/or modified CDS sequence (opt1) from neuraminidase__InfluenzaA__AFN19634
augaaccccaaccagaagaucaucaccaucggcagcgugucccugaccaucagcacgaucugcuucuucaugcagaucgccauccucaucaccaccgucacccugcacuucaagcaguacgaguucaacuccccgcccaacaaccaggugaugcugugcgagcccacgaucaucgagcgcaacaucaccgagaucguguaccucaccaacaccacgaucgagaaggagaucugccccaagccggccgaguaccggaacuggagcaagccccagugcgacaucaccggguucgcgcccuucuccaaggacaacagcauccgccuguccgccggcggggacaucugggucacccgggagcccuacgugagcugcgacccggacaagugcuaccaguucgcccugggccaggggaccacgcucaacaacgugcacuccaacaacaccguccgcgaccggaccagcuaccgcacccugcugaugaacgagcucggcgugcccuuccaccugggcacgaagcaggucugcaucgccugguccagcuccagcugccacgacgggaaggccuggcugcacgugugcaucaccggcgacgacaagaacgcgaccgccuccuucaucuacaacgggcggcucguggacagcguggucuccuggagcaaggagauccugcgcacccaggaguccgagugcgugugcaucaacggcacgugcaccguggucaugaccgacgggagcgccagcggcaaggccgacaccaagauccuguucaucgaggagggcaagaucgugcacacguccacccucagcggguccgcgcagcacguggaggagugcagcugcuacccccgguaccccggcguccgcugcgugugccgggacaacuggaagggguccaaccgcccgaucguggacaucaacaucaaggaccacagcaucgucuccagcuacgugugcuccggccuggugggcgacacgccccggaagaacgacagcuccagcuccagccacugccuggaccccaacaacgaggagggcgggcacggggucaagggcugggccuucgacgacgggaacgacguguggaugggccgcaccaucaacgagaccucccggcucggcuacgagaccuucaaggucaucgagggguggagcaaccccaaguccaagcugcagaucaaccgccaggugaucguggaccggggcgaccgcagcggguacuccggcaucuucagcgucgagggcaagagcugcaucaaccggugcuucuacguggagcugauccgcgggcggaaggaggagaccgaggugcucuggaccuccaacagcaucgucguguucugcggcacguccgggaccuacggcaccgggagcuggccggacggcgccgaccugaaccugaugcccaucuga

SEQ ID NO: 87063 - RNA, 1410 nt, Artificial Sequence
  derived and/or modified CDS sequence (opt1) from neuraminidase__InfluenzaA__AFN19636
augaaccccaaccagaagaucaucaccaucggcagcgugucccugaccaucagcacgaucugcuucuucaugcagaucgccauccucaucaccaccgucacccugcacuucaagcaguacgaguucaacuccccgcccaacaaccaggugaugcugugcgagcccacgaucaucgagcgcaacaucaccgagaucguguaccucaccaacaccaucaucgagaaggagaucugccccaagccgacggaguaccggaacuggagcaagccccagugcgacaucaccggguucgcccccuucuccaaggacaacagcauccgccuguccgcgggcggggacaucugggucacccgggagcccuacgugagcugcgacccggacaagugcuaccaguucgcccugggccaggggaccacgcucaacaacgugcacuccaacaacaccguccgcgaccggacccccuaccgcacccugcugaugaacgagcucggcgugcccuuccaccugggcacgaagcaggucugcaucgccuggagcuccagcuccugccacgacgggaaggccuggcugcacgugugcaucaccggcgacgacaagaacgccaccgcgagcuucaucuacaacgggcggcucguggacuccguggucagcugguccaaggagauccugcgcacccaggagagcgagugcgugugcaucaacggcacgugcaccguggucaugaccgacggguccgccagcggcaaggccgacaccaagauccuguucaucgaggagggcaagaucgugcacacgagcacccucuccgggagcgcccagcacguggaggagugcuccugcuacccccgguacccgggcguccgcugcgugugccgggacaacuggaaggggagcaaccgccccaucguggacaucaacaucaaggaccacuccaucgucagcuccuacgugugcagcggccuggugggcgacaccccgcggaagaacgacuccagcuccagcucccacugccuggaccccaacaacgaggagggcgggcacggggucaagggcugggcguucgacgacgggaacgacguguggaugggccgcaccaucaacgagacgagccggcucggcuacgagaccuucaaggucaucgaggggugguccaaccccaagagcaagcugcagaucaaccgccaggugaucguggaccggggcgaccgcuccggguacagcggcaucuucuccgucgagggcaagagcugcaucaaccggugcuucuacguggagcugauccgcgggcggaaggaggagaccgaggugcucuggaccagcaacuccaucgucguguucugcggcacgagcgggaccuacggcaccggguccuggcccgacggcgccgaccugaaccugaugcccaucuga

SEQ ID NO: 87064 - RNA, 1410 nt, Artificial Sequence; identical to SEQ ID NO: 87063
  derived and/or modified CDS sequence (opt1) from neuraminidase__InfluenzaA__AFN19638

SEQ ID NO: 87065 - RNA, 1410 nt, Artificial Sequence; identical to SEQ ID NO: 86946
  derived and/or modified CDS sequence (opt1) from neuraminidase__InfluenzaA__AFN19640

SEQ ID NO: 87066 - RNA, 1410 nt, Artificial Sequence
  derived and/or modified CDS sequence (opt1) from neuraminidase__InfluenzaA__AFN19642
augaaccccaaccagaagaucaucaccaucggcagcgugucccugaccaucagcacgaucugcuucuucaugcagaucgccauccucaucaccaccgucacccugcacuucaagcaguacgaguucaacuccccgcccaacaaccaggugaugcugugcgagcccacgaucaucgagcgcaacaugaccgagaucguguaccucaccaacaccacgaucgagaaggagaucugccccaagccggccgaguaccggaacuggagcaagccccagugcgacaucaccggguucgcgcccuucuccaaggacaacagcauccgccuguccgccggcggggacaucugggucacccgggagcccuacgugagcugcgacccggacaagugcuaccaguucgcccugggccaggggaccacgcucaacaacgugcacuccaacaacaccgucagcgaccgcacccccuaccggacccugcugaugaacgagcucggcgugcccuuccaccugggcacgaagcaggucugcaucgccugguccagcuccagcugccacgacgggaaggccuggcugcacgugugcaucaccggcgacgacaagaacgcgaccgccuccuucaucuacaacgggcgccucguggacagcguggucuccuggagcaaggagauccugcggacccaggaguccgagugcgugugcaucaacggcacgugcaccguggucaugaccgacgggagcgccagcggcaaggccgacaccaagauccuguucaucgaggagggcaagaucgugcacacguccacccucagcggguccgcgcagcacguggaggagugcagcugcuacccccgcuacccgggcguccggugcgugugccgcgacaacuggaagggguccaaccggcccaucguggacaucaacaucaaggaccacagcaucgucuccagcuacgugugcuccggccuggugggcgacacgccccgcaagaacgacagcuccagcuccagccacugccuggaccccaacaacgaggagggcgggcacggggucaagggcugggccuucgacgacgggaacgacguguggaugggccggaccaucaacgagaccucccgccucggcuacgagaccuucaaggucaucgagggguggagcaacccgaaguccaagcugcagaucaaccgccaggugaucguggaccggagcgaccgguccggcuacagcgggaucuucagcgucgagggcaaguccugcaucaaccgcugcuucuacguggagcugauccgggggcgcaaggaggagaccgaggugcucuggaccagcaacuccaucgucguguucugcggcacgagcggcaccuacgggaccggcuccuggcccgacggggccgaccugaaccugaugcccaucuga

SEQ ID NO: 87067 - RNA, 1410 nt, Artificial Sequence; identical to SEQ ID NO: 87063
  derived and/or modified CDS sequence (opt1) from neuraminidase__InfluenzaA__AFN19644

SEQ ID NO: 87068 - RNA, 1410 nt, Artificial Sequence
  derived and/or modified CDS sequence (opt1) from neuraminidase__InfluenzaA__AFN19646
augaaccccaaccagaagaucaucaccaucggcagcgugucccugaccaucagcacgaucugcuucuucauccagaucgccauccucaucaccaccgucacccugcacuucaagcaguacgaguucaacuccccgcccaacaaccaggugaugcugugcgagcccacgaucaucgagcgcaacaucaccgagaucguguaccucaccaacaccacgaucgagaaggagaucugccccaagccggccgaguaccggaacuggagcaagccccagugcgacaucaccggguucgcgcccuucuccaaggacaacagcauccgccuguccgccggcggggacaucugggucacccgggagcccuacgugagcugcgacccggacaagugcuaccaguucgcccugggccaggggaccacgcucaacaacgugcacuccaacaacaccguccgcgaccggacccccuaccgcacccugcugaugaacgagcucggcgugcccuuccaccugggcacgaagcaggucugcaucgccuggagcuccagcuccugccacgacgggaaggccuggcugcacgugugcaucaccggcgacgacaagaacgcgaccgccagcuucaucuacaacgggcggcucguggacuccguggucagcugguccaaggagauccugcgcacccaggagagcgagugcgugugcaucaacggcacgugcaccguggucaugaccgacggguccgccagcggcaaggccgacaccaagauccuguucaucgaggagggcaagaucgugcacacgagcacccucuccgggagcgcgcagcacguggaggagugcuccugcuacccccgguacccgggcguccgcugcgugugccgggacaacuggaaggggagcaaccgccccaucguggacaucaacaucaaggaccacuccaucgucagcuccuacgugugcagcggccuggugggcgacaccccgcggaagaacgacuccagcuccagcucccacugccuggaccccaacaacgaggagggcgggcacggggucaagggcugggccuucgacgacgggaacgacguguggaugggccgcaccaucaacgagacgagccggcucggcuacgagaccuucaaggucaucgaggggugguccaaccccaagagcaagcugcagaucaaccgccaggugaucgugaaccgguccgaccgcagcggcuacuccgggaucuucagcgucgagggcaagagcugcaucaaccggugcuucuacguggagcugauccgcgggcggaaggaggagaccgaggugcucuggaccuccaacagcaucgucguguucugcggcacguccggcaccuacgggaccggcagcuggcccgacggggccgaccugaaccugaugcccaucuga

SEQ ID NO: 87069 - RNA, 1410 nt, Artificial Sequence; identical to SEQ ID NO: 86946
  derived and/or modified CDS sequence (opt1) from neuraminidase__InfluenzaA__AFN19648

SEQ ID NO: 87070 - RNA, 1410 nt, Artificial Sequence; identical to SEQ ID NO: 86982
  derived and/or modified CDS sequence (opt1) from neuraminidase__InfluenzaA__AFN19650

SEQ ID NO: 87071 - RNA, 1410 nt, Artificial Sequence
  derived and/or modified CDS sequence (opt1) from neuraminidase__InfluenzaA__AFN19652
augaaccccaaccagaagaucaucaccaucggcagcgugucccugaccaucagcacgaucugcuucuucaugcagaucgccauccucaucaccaccgucacccugcacuucaagcaguacgaguucaacuccccgcccaacaaccaggugaugcugugcgagcccacgaucaucgagcgcaacaucaccgagguggucuaccucaccaacaccacgaucgagaaggagaucugccccaagccggccgaguaccggaacuggagcaagccccagugcgacaucaccggguucgcgcccuucuccaaggacaacagcauccgccuguccgccggcggggacaucugggugacccgggagcccuacgugagcugcgacccggacaagugcuaccaguucgcccugggccaggggaccacgcucaacaacguccacuccaacaacaccgugcgcgaccggacccccuaccgcacccugcugaugaacgagcucggcgugcccuuccaccugggcacgaagcaggucugcaucgccuggagcuccagcuccugccacgacgggaaggccuggcugcacgugugcaucaccggcgacgacaagaacgcgaccgccagcuucaucuacaacgggcggcucguggacuccgucgugagcugguccaaggagauccugcgcacccaggagagcgagugcgugugcaucaacggcacgugcaccgucgugaugaccgacggguccgccagcggcaaggccgacaccaagauccuguucaucgaggagggcaagaucgugcacacgagcacccucuccgggagcgcgcagcacgucgaggagugcuccugcuacccccgguacccgggcgugcgcugcgugugccgggacaacuggaaggggagcaaccgccccaucgucgacaucaacaucaaggaccacuccaucgugagcuccuacgugugcagcggccuggucggcgacaccccgcggaagaacgacuccagcuccagcucccacugccuggaccccaacaacgaggagggcgggcacggggugaagggcugggccuucgacgacgggaacgacgucuggaugggccgcaccaucaacgagacgagccggcucggcuacgagaccuucaaggugaucgaggggugguccaaccccaagagcaagcugcagaucaaccgccaggugaucgucgaccggggcgaccgcuccggguacagcggcaucuucuccguggagggcaagagcugcaucaaccggugcuucuacguggagcugauccgcgggcggaaggaggagaccgagguccucuggaccagcaacuccaucgugguguucugcggcacgagcgggaccuacggcaccggguccuggcccgacggcgccgaccugaaccugaugcccaucuga

SEQ ID NO: 87072 - RNA, 1410 nt, Artificial Sequence
  derived and/or modified CDS sequence (opt1) from neuraminidase__InfluenzaA__AFN19654
augaaccccaaccagaagaucaucaccaucggcagcgugucccugaccaucagcacgaucugcuucuucaugcagaucgccauccucaucaccaccgucacccugcacuucaagcaguacgaguucaacuccccgcccaacaaccaggugaugcugugcgagcccacgaucaucgagcgcaacaucaccgagaucguguaccucaccaacaccacgaucgagaaggagaccugccccaagccgaccgaguaccggaacuggagcaagccccagugcgacaucaccggguucgcccccuucuccaaggacaacagcauccgccuguccgcgggcggggacaucugggucacgcgggagcccuacgugagcugcgacccggacaagugcuaccaguucgcccugggccaggggaccacccucaacaacgugcacuccaacaacaccguccgcgaccggacgcccuaccgcacccugcugaugaacgagcucggcgugcccuuccaccugggcaccaagcaggucugcaucgccuggagcuccagcuccugccacgacgggaaggccuggcugcacgugugcaucaccggcgacgacaagaacgccacggcgagcuucaucuacaacgggcggcucguggacuccguggucagcugguccaaggagauccugcgcacccaggagagcgagugcgugugcaucaacgggaccugcaccguggucaugacggacggguccgccagcggcaaggccgacaccaagauccuguucaucgaggagggcaagaucgugcacaccagcacccucuccgggagcgcccagcacguggaggagugcuccugcuacccccgguacccgggcguccgcugcgugugccgggacaacuggaaggggagcaaccgccccaucguggacaucaacaucaaggaccacuccaucgucagcuccuacgugugcagcggccuggugggcgacacgccccggaagaacgacuccagcuccagcucccacugccuggaccccaacaacgaggagggcggccacggggucaagggcugggcguucgacgacgggaacgacguguggaugggccgcaccaucaacgagaccagccggcucggcuacgagaccuucaaggucaucgaggggugguccaaccccaagagcaagcugcagaucaaccgccaggugaucguggaccggggcgaccgcuccggguacagcggcaucuucuccgucgagggcaagagcugcaucaaccggugcuucuacguggagcugauccgcgggcggaaggaggagacggaggugcucuggaccagcaacuccaucgucguguucugcggcaccagcgggaccuacggcacgggguccuggccggacggcgccgaccugaaccugaugcccaucuga

SEQ ID NO: 87073 - RNA, 1410 nt, Artificial Sequence; identical to SEQ ID NO: 86946
  derived and/or modified CDS sequence (opt1) from neuraminidase__InfluenzaA__AFN19656

SEQ ID NO: 87074 - RNA, 1410 nt, Artificial Sequence; identical to SEQ ID NO: 86170
  derived and/or modified CDS sequence (opt1) from neuraminidase__InfluenzaA__AFN19658

SEQ ID NO: 87075 - RNA, 1410 nt, Artificial Sequence; identical to SEQ ID NO: 87063
  derived and/or modified CDS sequence (opt1) from neuraminidase__InfluenzaA__AFN19660

SEQ ID NO: 87076 - RNA, 1410 nt, Artificial Sequence; identical to SEQ ID NO: 86170
  derived and/or modified CDS sequence (opt1) from neuraminidase__InfluenzaA__AFN19662

SEQ ID NO: 87077 - RNA, 1410 nt, Artificial Sequence
  derived and/or modified CDS sequence (opt1) from neuraminidase__InfluenzaA__AFN19664
augaaccccaaccagaagaucaucaccaucggcagcgugucccugaccaucagcacgaucugcuucuucaugcagaucgccauccucaucaccaccgucacccugcacuucaagcaguacgaguucaacuccccgcccaacaaccaggugaugcugugcgagcccacgaucaucgagcgcaacaucaccgagaucguguaccucaccaacaacaccaucgagaaggagaucugccccaagccggccgaguaccggaacuggagcaagccccagugcgggaucacgggcuucgcgcccuucuccaaggacaacagcauccgccuguccgccgggggcgacaucugggucacccgggagcccuacgugagcugcgacccggacaagugcuaccaguucgcccuggggcagggcaccacccucaacaacgugcacuccaacaacacgguccgcgaccggacccccuaccgcacccugcugaugaacgagcucggcgugcccuuccaccuggggaccaagcaggucugcaucgccuggagcuccagcuccugccacgacggcaaggccuggcugcacgugugcaucacgggggacgacaagaacgcgaccgccagcuucaucuacaacggccggcucguggacuccguggucagcugguccaaggagauccugcgcacccaggagagcgagugcgugugcaucaacgggaccugcacgguggucaugaccgacggcuccgccagcggcaaggccgacaccaagauccuguucaucgaggaggggaagaucgugcacaccagcacgcucuccggcagcgcgcagcacguggaggagugcuccugcuacccccgguacccggggguccgcugcgugugccgggacaacuggaagggcagcaaccgccccaucguggacaucaacaucaaggaccacuccaucgucagcuccuacgugugcagcggccuggugggggacaccccgcggaagaacgacuccagcuccagcucccacugccuggaccccaacaacgaggagggcgggcacggcgucaaggggugggccuucgacgacggcaacgacguguggaugggccgcaccaucaacgagaccagccggcucggguacgagacguucaaggucaucgagggcugguccaaccccaagagcaagcugcagaucaaccgccaggugaucguggaccgcggggaccgguccggcuacagcgggaucuucuccgucgagggcaagagcugcaucaaccggugcuucuacguggagcugauccgcggccggaaggaggagaccgaggugcucuggaccagcaacuccaucgucguguucugcgggaccagcggcacguacgggaccggcuccuggcccgacggggccgaccugaaccugaugcccaucuga

SEQ ID NO: 87078 - RNA, 1410 nt, Artificial Sequence
  derived and/or modified CDS sequence (opt1) from neuraminidase__InfluenzaA__AFN19666
augaaccccaaccagaagaucaucaccaucggcagcgugucccugaccaucagcacgaucugcuucuucaugcagaucgccauccucaucaccaccgucacccugcacuucaagcaguacgaguucaacuccccgcccaacaaccaggugaugcugugcgagcccacgaucaucgagcgcaacaugaccgagaucguguaccucaccaacaccacgaucgagaaggagaucugccccaagccggccgaguaccggaacuggagcaagccccagugcgacaucaccggguucgcgcccuucuccaaggacaacagcauccgccuguccgccggcggggacaucugggucacccgggagcccuacgugagcugcgacccggacaagugcuaccaguucgcccugggccaggggaccacgcucaacaacgugcacuccaacaacaccguccgcgaccggacccccuaccgcacccugcugaugaacgagcucggcgugcccuuccaccugggcacgaagcaggucugcaucgccuggagcuccagcuccugccacgacgggaaggccuggcugcacgugugcaucaccggcgacgacaagaacgcgaccgccagcuucaucuacaacgggcggcucguggacuccguggucagcugguccaaggagauccugcgcacccaggagagcgagugcgugugcaucaacggcacgugcaccguggucaugaccgacggguccgccagcggcaaggccgacaccaagauccuguucaucgaggagggcaagaucgugcacacgagcacccucuccgggagcgcgcagcacguggaggagugcuccugcuacccccgguacccgggcguccgcugcgugugccgggacaacuggaaggggagcaaccgccccaucguggacaucaacaucaaggaccacuccaucgucagcuccuacgugugcagcggccuggugggcgacaccccgcggaagaacgacuccagcuccagcucccacugccuggaccccaacaacgaggagggcgggcacggggucaagggcugggccuucgacgacgggaacgacguguggaugggccgcaccaucaacgagacgagccggcucggcuacgagaccuucaaggucaucgaggggugguccaaccccaagagcaagcugcagaucaaccgccaggugaucgugaaccgguccgaccgcagcggcuacuccgggaucuucagcgucgagggcaagagcugcaucaaccggugcuucuacguggagcugauccgcgggcggaaggaggagaccgaggugcucuggaccuccaacagcaucgucguguucugcggcacguccggcaccuacgggaccggcagcuggcccgacggggccgaccugaaccugaugcccaucuga

SEQ ID NO: 87079 - RNA, 1410 nt, Artificial Sequence
  derived and/or modified CDS sequence (opt1) from neuraminidase__InfluenzaA__AFN19668
augaaccccaaccagaagaucaucaccaucggcagcgugucccugaccaucagcacgaucugcuucuucaugcagaucgccauccucaucaccaccgucacccugcacuucaagcaguacgaguucaacuccccgcccaacaaccaggugaugcugugcgagcccacgaucaucgagcgcaacaugaccgagaucguguaccucaccaacaccacgaucgagaaggagaucugccccaagccggccgaguaccggaacuggagcaagccccagugcgacaucaccggguucgcgcccuucuccaaggacaacagcauccgccuguccgccggcggggacaucugggucacccgggagcccuacgugagcugcgacccggacaagugcuaccaguucgcccugggccaggggaccacgcucaacaacgagcacuccaacaacaccgugcgcgaccggacccccuaccgcacccugcugaugaacgagcucggcguccccuuccaccugggcacgaagcaggucugcaucgccuggagcuccagcuccugccacgacgggaaggccuggcugcacgugugcaucaccggcgacgacaagaacgcgaccgccagcuucaucuacaacgggcggcucguggacuccguggugagcugguccaaggagauccugcgcacccaggagagcgagugcgucugcaucaacggcacgugcaccguggugaugaccgacggguccgccagcggcaaggccgacaccaagauccuguucaucgaggagggcaagaucguccacacgagcacccucuccgggagcgcgcagcacguggaggagugcuccugcuacccccgguacccgggcgugcgcugcgucugccgggacaacuggaaggggagcaaccgccccaucguggacaucaacaucaaggaccacuccaucgugagcuccuacgucugcagcggccuggugggcgacaccccgcggaagaacgacuccagcuccagcucccacugccuggaccccaacaacgaggagggcgggcacggggugaagggcugggccuucgacgacgggaacgacgucuggaugggccgcaccaucaacgagacgagccggcucggcuacgagaccuucaaggugaucgaggggugguccaaccccaagagcaagcugcagaucaaccgccaggucaucguggaccgguccgaccgcagcggcuacuccgggaucuucagcguggagggcaagagcugcaucaaccggugcuucuacgucgagcugauccgcgggcggaaggaggagaccgaggugcucuggaccuccaacagcaucguggucuucugcggcacguccggcaccuacgggaccggcagcuggcccgacggggccgaccugaaccugaugcccaucuga

SEQ ID NO: 87080 - RNA, 1410 nt, Artificial Sequence; identical to SEQ ID NO: 86982
  derived and/or modified CDS sequence (opt1) from neuraminidase__InfluenzaA__AFN19670

SEQ ID NO: 87081 - RNA, 1410 nt, Artificial Sequence; identical to SEQ ID NO: 86170
  derived and/or modified CDS sequence (opt1) from neuraminidase__InfluenzaA__AFN19673

SEQ ID NO: 87082 - RNA, 1410 nt, Artificial Sequence; identical to SEQ ID NO: 86946
  derived and/or modified CDS sequence (opt1) from neuraminidase__InfluenzaA__AFN19675

SEQ ID NO: 87083 - RNA, 1410 nt, Artificial Sequence
  derived and/or modified CDS sequence (opt1) from neuraminidase__InfluenzaA__AFN19677
augaaccccaaccagaagaucaucaccaucggcagcgugucccugaccaucagcaucaucugcuucuucaugcagaucgccauccucaucacgaccgucacccugcacuucaagcaguacgaguucaacuccccgcccaacaaccaggugaugcugugcgagcccaccaucaucgagcgcaacaucacggagaucguguaccucaccaacaccaccaucgagaaggagaucugccccaagccggccgaguaccggaacuggagcaagccccagugcgacaucacgggguucgcgcccuucuccaaggacaacagcauccgccuguccgccggcggggacaucugggucacccgggagcccuacgugagcugcgacccggacaagugcuaccaguucgcccugggccaggggaccacccucaacaacgugcacuccaacaacacgguccgcgaccggacccccuaccgcacccugcugaugaacgagcucggcgugcccuuccaccugggcaccaagcaggucugcaucgccuggagcuccagcuccugccacgacgggaaggccuggcugcacgugugcaucacgggcgacgacaagaacgcgaccgccagcuucaucuacaacgggcggcucguggacuccguggucagcugguccaaggagauccugcgcacccaggagagcgagugcgugugcaucaacgggaccugcacgguggucaugaccgacggguccgccagcggcaaggccgacaccaagauccuguucaucgaggagggcaagaucgugcacaccagcacgcucuccgggagcgcgcagcacguggaggagugcuccugcuacccccgguacccgggcguccgcugcgugugccgggacaacuggaaggggagcaaccgccccaucguggacaucaacaucaaggaccacuccaucgucagcuccuacgugugcagcggccuggugggcgacaccccgcggaagaacgacuccagcuccagcucccacugccuggaccccaacaacgaggagggcggccacggggucaagggcugggccuucgacgacgggaacgacguguggaugggccgcaccaucaacgagaccagccggcucggcuacgagacguucaaggucaucgaggggugguccaaccccaagagcaagcugcagaucaaccgccaggugaucguggaccggggcgaccgcuccggguacagcggcaucuucuccgucgagggcaagagcugcaucaaccggugcuucuacguggagcugauccgcgggcggaaggaggagaccgaggugcucuggaccagcaacuccaucgucguguucugcggcaccagcgggacguacggcaccggguccuggcccgacggcgccgaccugaaccugaugcccaucuga

SEQ ID NO: 87084 - RNA, 1410 nt, Artificial Sequence; identical to SEQ ID NO: 86982
  derived and/or modified CDS sequence (opt1) from neuraminidase__InfluenzaA__AFN19683

SEQ ID NO: 87085 - RNA, 1410 nt, Artificial Sequence; identical to SEQ ID NO: 86946
  derived and/or modified CDS sequence (opt1) from neuraminidase__InfluenzaA__AFN19685

SEQ ID NO: 87086 - RNA, 1410 nt, Artificial Sequence; identical to SEQ ID NO: 86946
  derived and/or modified CDS sequence (opt1) from neuraminidase__InfluenzaA__AFN19687

SEQ ID NO: 87087 - RNA, 1410 nt, Artificial Sequence; identical to SEQ ID NO: 86946
  derived and/or modified CDS sequence (opt1) from neuraminidase__InfluenzaA__AFN19689

SEQ ID NO: 87088 - RNA, 1410 nt, Artificial Sequence; identical to SEQ ID NO: 86170
  derived and/or modified CDS sequence (opt1) from neuraminidase__InfluenzaA__AFN19691

SEQ ID NO: 87089 - RNA, 1410 nt, Artificial Sequence
  derived and/or modified CDS sequence (opt1) from neuraminidase__InfluenzaA__AFN19693
augaaccccaaccagaagaucaucaccaucggcagcgugucccugaccaucagcacgaucugcuucuucaugcagaucgccauccucaucaccaccgucacccugcacuucaagcaguacgaguucaacuccccgcccaacaaccaggugaugcugugcgagcccacgaucaucgagcgcaacaucaccgagaucguguaccucaccaacaccacgaucgagaaggagaucugccccaagcuggccgaguaccggaacuggagcaagccgcagugcgacaucaccggguucgcgcccuucuccaaggacaacagcauccgccuguccgccggcggggacaucugggucacccgggagcccuacgugagcugcgaccccgacaagugcuaccaguucgcccucggccaggggaccacgcugaacaacgugcacuccaacaacaccguccgcgaccggaccccguaccgcacccugcucaugaacgagcugggcgugcccuuccaccugggcacgaagcaggucugcaucgccuggagcuccagcuccugccacgacgggaaggccuggcuccacgugugcaucaccggcgacgacaagaacgcgaccgccagcuucaucuacaacgggcggcugguggacuccguggucagcugguccaaggacauccugcgcacccaggagagcgagugcgugugcaucaacggcacgugcgccguggucaugaccgacggguccgccagcggcaaggcggacaccaagauccucuucaucgaggagggcaagaucgugcacaccagcacgcuguccgggagcgcccagcacguggaggagugcuccugcuacccccgguaccccggcguccgcugcgugugccgggacaacuggaaggggagcaaccgcccgaucguggacaucaacaucaaggaccacuccaucgucagcuccuacgugugcagcggccuggugggcgacacgccccggaagaacgacuccagcuccagcuccaacugccucgaccccaacaacgaggagggcgggcacggggucaagggcugggccuucgacgacgggaacgacguguggaugggccgcaccaucaacgagaccagccggcugggcuacgagaccuucaaggucaucgaggggugguccaaccccaagagcaagcugcagaucaaccgccaggugaucguggaccggggcaaccgcuccggguacagcggcaucuucuccgucgaggggaagaacugcaucaaccggugcuucuacguggagcucauccgcggccggaaggaggagaccgaggugcuguggaccagcaacagcaucgucguguucugcggcaccuccgggacguacggcaccgggagcuggccggacggcgccgaccugaaccucaugcccaucuga

SEQ ID NO: 87090 - RNA, 1410 nt, Artificial Sequence
  derived and/or modified CDS sequence (opt1) from neuraminidase__InfluenzaA__AFN19697
augaaccccaaccagaagaucaucaccaucggcagcgugucccugaccaucagcacgaucugcuucuucaugcagaucgccauccucaucaccaccgucacccugcacuucaagcaguacgaguucaacuccccgcccaacaaccaggugaugcugugcgagcccacgaucaucgagcgcaacaucaccgagaucguguaccucaccaacaccacgaucgagaaggagaucugccccaagccggccgaguaccggaacuggagcaagccccagugcgggaucaccggcuucgcgcccuucuccaaggacaacagcauccgccuguccgccgggggcgacaucugggucacccgggagcccuacgugagcugcgacccggacaagugcuaccaguucgcccuggggcagggcaccacgcucaacaacgugcacuccaacaacaccguccgcgaccggacccccuaccgcacccugcugaugaacgagcucggcgugcccuuccaccuggggacgaagcaggucugcaucgccuggagcuccagcuccugccacgacggcaaggccuggcugcacgugugcaucaccggggacgacaagaacgcgaccgccagcuucaucuacaacggccggcucguggacuccguggucagcugguccaaggagacccugcgcacgcaggagagcgagugcgugugcaucaacgggaccugcaccguggucaugaccgacggcuccgccagcggcaaggccgacacgaagauccuguucaucgaggaggggaagaucgugcacaccagcacccucuccggcagcgcgcagcacguggaggagugcuccugcuacccccgguacccggggguccgcugcgugugccgggacaacuggaagggcagcaaccgccccaucguggacaucaacaucaaggaccacuccaucgucagcuccuacgugugcagcggccuggugggggacaccccgcggaagaacgacuccagcuccagcucccacugccuggaccccaacaacgaggagggcgggcacggcgucaaggggugggccuucgacgacggcaacgacguguggaugggccgcacgaucaacgagaccagccggcucggguacgagaccuucaaggucaucgagggcugguccaaccccaagagcaagcugcagaucaaccgccaggugaucguggaccgcggggaccgguccggcuacagcgggaucuucuccgucgagggcaagagcugcaucaaccggugcuucuacguggagcugauccgcggccggaaggaggagaccgaggugcucuggacgagcaacuccaucgucguguucugcgggaccagcggcaccuacgggaccggcuccuggcccgacggggccgaccugaaccugaugcccaucuga

SEQ ID NO: 87091 - RNA, 1410 nt, Artificial Sequence; identical to SEQ ID NO: 86946
  derived and/or modified CDS sequence (opt1) from neuraminidase__InfluenzaA__AFN19699

SEQ ID NO: 87092 - RNA, 1410 nt, Artificial Sequence; identical to SEQ ID NO: 86982
  derived and/or modified CDS sequence (opt1) from neuraminidase__InfluenzaA__AFN19701

SEQ ID NO: 87093 - RNA, 1410 nt, Artificial Sequence
  derived and/or modified CDS sequence (opt1) from neuraminidase__InfluenzaA__AFN19703
augaaccccaaccagaagaucaucaccaucggcagcgugucccugaccaucagcacgaucugcuucuucaugcagaucgccauccucaucaccaccgucacccugcacuucaagcaguacgaguucaacuccccgcccaacaaccaggugaugcugugcgagcccacgaucaucgagcgcaacaucaccgagaucguguaccucaccaacaccacgaucgagaaggagaucugccccaagccggccgaguaccggaacuggagcaagccccagugcgggaucaccggcuucgcgcccuucuccaaggacaacagcauccgccuguccgccgggggcgacaucugggucacccgggagcccuacgugagcugcgacccggacaagugcuaccaguucgcccuggggcagggcaccacgcucgacaacgugcacuccaacaacaccguccgcgaccggacccccuaccgcacccugcugaugaacgagcucggcgugcccuuccaccuggggacgaagcaggucugcaucgccuggagcuccagcuccugccacgacggcaaggccuggcugcacgugugcaucaccggggacgacaagaacgcgaccgccagcuucaucuacaacggccggcucguggacuccguggucagcugguccaaggagauccugcgcacccaggagagcgagugcgugugcaucaacgggacgugcaccguggucaugaccgacggcuccgccagcggcaaggccgacaccaagauccuguucaucgaggaggggaagaucgugcacacgagcacccucuccggcagcgcgcagcacguggaggagugcuccugcuacccccgguacccggggguccgcugcgugugccgggacaacuggaagggcagcaaccgccccaucguggacaucaacaucaaggaccacuccaucgucagcuccuacgugugcagcggccuggugggggacaccccgcggaagaacgacuccagcuccagcucccacugccuggaccccaacaacgaggagggcgggcacggcgucaaggggugggccuucgacgacggcaacgacguguggaugggccgcaccaucaacgagacgagccggcucggguacgagaccuucaaggucaucgagggcugguccaaccccaagagcaagcugcagaucaaccgccaggugaucguggaccgcggggaccgguccggcuacagcgggaucuucuccgucgagggcaagagcugcaucaaccggugcuucuacguggagcugauccgcggccggaaggaggagaccgaggugcucuggaccagcaacuccaucgucguguucugcgggacgagcggcaccuacgggaccggcuccuggcccgacggggccgaccugaaccugaugcccaucuga

SEQ ID NO: 87094 - RNA, 1410 nt, Artificial Sequence; identical to SEQ ID NO: 84281
  derived and/or modified CDS sequence (opt1) from neuraminidase__InfluenzaA__AFN19711

SEQ ID NO: 87095 - RNA, 1410 nt, Artificial Sequence
  derived and/or modified CDS sequence (opt1) from neuraminidase__InfluenzaA__AFN19721
augaaccccaaccagaagaucaucaccaucggcagcgugugcaugaccaucgggauggccaaccugauccuccagaucggcaacaucaucuccaucuggaucagccacuccauccagcuggggaaccagagccagaucgagacgugcaaccaguccgucaucaccuacgagaacaacaccugggugaaccagaccuacgugaacaucagcaacacgaacuucgccgcgggccaguccgucgugagcgugaagcuggccgggaacuccagccucugcccggucuccggcugggccaucuacagcaaggacaacuccauccgcaucggcagcaagggggacguguucgugauccgggagcccuucaucuccugcagccccauggagugccgcaccuucuuccugacccagggcgcccugcucaacgacaagcacuccaacgggaccaucaaggaccggagccccuaccgcacgcugauguccugcccgaucggcgagguccccagccccuacaacagccgguucgaguccguggccuggagcgcguccgccugccacgacgggaucaacuggcugaccaucggcaucagcggccccgacaacggggccguggccguccucaaguacaacggcaucaucaccgacaccaucaaguccuggcgcaacaacauccugcggacgcaggagagcgagugcgcgugcgugaacggguccugcuucaccaucaugaccgacggcccgagcgacggccaggccuccuacaagaucuuccgcaucgagaaggggaagaucgucaagagcguggagaugaacgcccccaacuaccacuacgaggagugcuccugcuaccccgacagcuccgagaucacgugcgugugccgggacaacuggcacggcagcaaccgccccuggguguccuucaaccagaaccuggaguaccagaucggguacaucugcagcggcaucuucggggacaacccgcggcccaacgacaagaccggcuccugcggccccgucagcuccaacggggccaacggcgugaagggguucagcuucaaguacggcaacgggguguggaucggccgcaccaagagcaucuccagccggaagggcuucgagaugaucugggaccccaacggguggaccggcaccgacaacaacuucuccaucaagcaggacaucgucgggaucaacgaguggagcggcuacuccgggagcuucgugcagcacccggagcucacgggccuggacugcauccgccccugcuucuggguggagcugauccggggccgccccaaggagaacaccaucuggaccuccgggagcuccaucagcuucugcggcgucaacuccgacaccgugggguggagcuggcccgacggcgccgagcucccguucacgaucgacaaguga

SEQ ID NO: 87096 - RNA, 1410 nt, Artificial Sequence; identical to SEQ ID NO: 85102
  derived and/or modified CDS sequence (opt1) from neuraminidase__InfluenzaA__AFN19731

SEQ ID NO: 87097 - RNA, 1410 nt, Artificial Sequence; identical to SEQ ID NO: 84281
  derived and/or modified CDS sequence (opt1) from neuraminidase__InfluenzaA__AFN19737

SEQ ID NO: 87098 - RNA, 1410 nt, Artificial Sequence
  derived and/or modified CDS sequence (opt1) from neuraminidase__InfluenzaA__AFN19747
augaaccccaaccagaagaucaucaccaucggcagcgugugcaugaccaucgggauggccaaccugauccuccagaucggcaacaucaucuccaucuggaucagccacuccauccagcuggggaaccagaaccagaucgagacgugcaaccagagcgucaucacccacgagaacaacaccugggugaaccagaccuacgugaacaucuccaacacgaacuucgccgcgggccagagcgucguguccgugaagcuggccgggaacagcucccucugcccggucagcggcugggccaucuacuccaaggacaacagcauccgcaucggcuccaagggggacguguucgugauccgggagcccuucaucagcugcagcccccuggagugccgcaccuucuuccugacccagggcgcccuccugaacgacaagcacuccaacgggaccaucaaggaccggucccccuaccgcacgcugaugagcugcccgaucggcgagguccccucccccuacaacagccgguucgagagcguggccugguccgcgagcgccugccacgacgggaucaacuggcucaccaucggcaucuccggccccgacaacggggccguggccguccugaaguacaacggcaucaucaccgacaccaucaagagcuggcgcaacaacauccugcggacgcaggaguccgagugcgcgugcgugaacgggagcugcuucaccgugaugaccgacggcccguccgacggccaggccagcuacaagaucuuccgcaucgagaaggggaagaucgucaaguccguggagaugaacgcccccaacuaccacuacgaggagugcagcugcuaccccgacuccagcgagaucacgugcgugugccgggacaacuggcacggcgccaaccgccccugggucuccuucaaccagaaccucgaguaccagaucggguacaucugcagcggcaucuucggggacaacccgcggcccaacgacaagaccggcuccugcggccccgugagcuccaacggggccaacggcgugaagggguucagcuucaaguacggcaacggggucuggaucggccgcaccaaguccaucagcagccggaacggcuucgagaugaucugggaccccaacggguggaccggcaccgacaacaacuucuccaucaagcaggacaucguggggaucaacgaguggagcggcuacuccgggagcuucgugcagcacccggagcugacgggccuggacugcauccgccccugcuucugggucgagcucauccggggccgccccaaggagaacaccaucuggaccuccgggagcuccaucagcuucugcggcgugaacuccgacaccgucggguggagcuggcccgacggcgcggagcugccguucacgaucgacaaguga

SEQ ID NO: 87099 - RNA, 1410 nt, Artificial Sequence; identical to SEQ ID NO: 84281
  derived and/or modified CDS sequence (opt1) from neuraminidase__InfluenzaA__AFN19749

SEQ ID NO: 87100 - RNA, 1410 nt, Artificial Sequence; identical to SEQ ID NO: 84281
  derived and/or modified CDS sequence (opt1) from neuraminidase__InfluenzaA__AFN19759

SEQ ID NO: 87101 - RNA, 1410 nt, Artificial Sequence
  derived and/or modified CDS sequence (opt1) from neuraminidase__InfluenzaA__AFN19769
augaaccccaaccagaagaucaucaccaucggcagcgugugcaugaccaucgggauggccaaccugauccuccagaucggcaacaucaucuccaucuggaucagccacuccauccagcuggggaaccagagccagaucgagacgugcaaccaguccgucaucaccuacgagaacaacaccugggugaaccagaccuacgugaacaucagcaacacgaacuucgccgcgggccaguccgucgugagcgugaagcuggccgggaacuccagccucugcccggucuccggcugggccaucuacagcaaggacaacuccauccgcaucggcagcaagggggacguguucgugauccgggagcccuucaucuccugcagcccccuggagugccgcaccuucuuccugacccagggcgcccuccugaacgacaagcacuccaacgggaccaucaaggaccggagccccuaccgcacgcugauguccugcccgaucggcgagguccccagccccuacaacagccgguucgaguccguggccuggagcgcguccgccugccacgacgggaucaacuggcucaccaucggcaucagcggccccgacaaccgcgccguggccguccugaaguacaacgggaucaucaccgacaccaucaaguccuggcggaacaacauccugcgcacgcaggagagcgagugcgcgugcgugaacggcuccugcuucaccaucaugaccgacgggccgagcgacggccaggccuccuacaagaucuuccggaucgagaagggcaagaucgucaagagcguggagaugaacgcccccaacuaccacuacgaggagugcuccugcuaccccgacagcuccgagaucacgugcgugugccgcgacaacuggcacgggagcaaccggcccuggguguccuucaaccagaaccucgaguaccagaucggcuacaucugcagcgggaucuucggcgacaacccgcgccccaacgacaagaccggguccugcggccccgucagcuccaacggcgccaacggggugaagggcuucagcuucaaguacgggaacggcguguggaucgggcggaccaagagcaucuccagccgcaagggcuucgagaugaucugggaccccaacggcuggaccgggaccgacaacaacuucuccaucaagcaggacaucgucggcaucaacgaguggagcggguacuccggcagcuucgugcagcacccggagcugacggggcuggacugcauccggcccugcuucuggguggagcucauccgcggccggcccaaggagaacaccaucuggaccuccggcagcuccaucagcuucugcggggucaacuccgacaccgugggcuggagcuggcccgacggggccgagcugccguucacgaucgacaaguga

SEQ ID NO: 87102 - RNA, 1410 nt, Artificial Sequence; identical to SEQ ID NO: 84281
  derived and/or modified CDS sequence (opt1) from neuraminidase__InfluenzaA__AFN19783

SEQ ID NO: 87103 - RNA, 1410 nt, Artificial Sequence; identical to SEQ ID NO: 84982
  derived and/or modified CDS sequence (opt1) from neuraminidase__InfluenzaA__AFN19793

SEQ ID NO: 87104 - RNA, 1410 nt, Artificial Sequence; identical to SEQ ID NO: 84281
  derived and/or modified CDS sequence (opt1) from neuraminidase__InfluenzaA__AFN19807

SEQ ID NO: 87105 - RNA, 1410 nt, Artificial Sequence
  derived and/or modified CDS sequence (opt1) from neuraminidase__InfluenzaA__AFN19809
augaaccccaaccagaagaucaucaccaucggcagcgugugcaugaucaucgggauggccaaccugaugcuccagaucggcaacaucaucuccaucuggaucagccacuccauccagcuggggaaccagaaccagaucgagaccugcaaccagagcgucaucacguacgagaacaacaccugggugaaccagaccuacgugaacaucuccaacaccaacuucgccgcgggccagagcgucaucuccgugaagcuggccgggaacagcucccucugcccggugagcggcugggccaucuacuccaaggacaacagcauccgcaucggcuccaagggggacgucuucgugauccgggagcccuucaucagcugcagcccccuggagugccgcacguucuuccugacccagggcgcccuccugaacgacaagcacuccaacgggaccaucaaggaccggucccccuaccgcacccugaugagcugcccgaucggcgaggugcccucccccuacaacagccgguucgagagcgucgccugguccgcgagcgccugccacgacgggaucaacuggcucacgaucggcaucuccggccccgacaacggggccguggccgugcugaaguacaacggcaucaucaccgacaccaucaagagcuggcgcaacaacauccugcggacccaggaguccgagugcgcgugcgucaacgggagcugcuucacggugaugaccgacggcccguccgacggccaggccagcuacaagaucuuccgcaucgagaaggggaagaucgugaaguccgucgagaugaacgcccccaacuaccacuacgaggagugcagcugcuaccccgacuccagcgagaucacgugcgugugccgggacaacuggcacggcuccaaccgccccugggugagcuucaaccagaaccucgaguaccagaucggguacaucugcuccggcaucuucggggacaacccgcggcccaacgacaagaccggcagcugcggccccgucuccaccaacggggccaacggcgugaagggguucagcuucaaguacggcaacgggguguggaucggccgcaccaaguccaucagcagccggaacggcuucgagaugaucugggaccccaacggguggaccggcaccgacaacaaguucuccaucaagcaggacaucgucgggaucaacgaguggagcggcuacuccgggagcuucgugcagcacccggagcugacgggccuggacugcauccgccccugcuucuggguggagcucauccggggccgccccaaggagaacaccaucuggaccuccgggagcuccaucagcuucugcggcgucaacuccgacaccgugggguggagcuggcccgacggcgccgagcugccguucacgaucgacaaguga

SEQ ID NO: 87106 - RNA, 1410 nt, Artificial Sequence; identical to SEQ ID NO: 85104
  derived and/or modified CDS sequence (opt1) from neuraminidase__InfluenzaA__AFN19815

SEQ ID NO: 87107 - RNA, 1410 nt, Artificial Sequence
  derived and/or modified CDS sequence (opt1) from neuraminidase__InfluenzaA__AFN19833
augaaccccaaccagaagaucaucaccaucggcagcgugugcaugaccaucgggauggccaaccugauccuccagaucggcaacaucaucuccaucuggaucagccacuccauccagcuggggaaccagagccagaucgagacgugcaaccaguccgucaucaccuacgagaacaacaccugggugaaccagaccuacgugaacaucagcaacacgaacuucgccgcgggccaguccgucgugagcgugaagcuggccgggaacuccagccucugcccggucuccggcugggccaucuacagcaaggacaacuccauccgcaucggcagcaagggggacguguucgugauccgggagcccuucaucuccugcagcccccuggagugccgcaccuucuuccugacccagggcgcccuccugaacgacaagcacuccaacgggaccaucaaggaccggagccccuaccgcacgcugauguccugcccgaucggcgagguccccagccccuacaacagccgguucgaguccguggccuggagcgcguccgccugccacgacgggaucaacuggcucaccaucggcaucagcggccccgacaacggggccguggccguccugaaguacaacggcaucaucaccgacaccaucaaguccuggaagaacaacauccugcgcacgcaggagagcgagugcgcgugcgugaacggguccugcuucaccaucaugaccgacggcccgagcgacggccaggccuccuacaagaucuuccggaucgagaaggggaagaucgucaagagcguggagaugaacgcccccaacuaccacuacgaggagugcuccugcuaccccgacagcuccgagaucacgugcgugugccgcgacaacuggcacggcagcaaccggcccuggguguccuucaaccagaaccucgaguaccagaucggguacaucugcagcggcaucuucggggacaacccgcgccccaacgacaagaccggcuccugcggccccgucagcuccaacggggccaacggcgugaagggguucagcuucaaguacggcaacgggguguggaucggccggaccaagagcaucuccagccgcaagggcuucgagaugaucugggaccccaacggguggaccggcaccgacaacaacuucuccaucaagcaggacaucgucgggaucaacgaguggagcggcuacuccgggagcuucgugcagcacccggagcugacgggccuggacugcauccggcccugcuucuggguggagcucauccgcggccggcccaaggagaacaccaucuggaccuccgggagcuccaucagcuucugcggcgucaacuccgacaccgugggguggagcuggcccgacggcgccgagcugccguucacgaucgacaaguga

SEQ ID NO: 87108 - RNA, 1410 nt, Artificial Sequence; identical to SEQ ID NO: 84740
  derived and/or modified CDS sequence (opt1) from neuraminidase__InfluenzaA__AFN19851

SEQ ID NO: 87109 - RNA, 1410 nt, Artificial Sequence; identical to SEQ ID NO: 84281
  derived and/or modified CDS sequence (opt1) from neuraminidase__InfluenzaA__AFN19857

SEQ ID NO: 87110 - RNA, 1410 nt, Artificial Sequence
  derived and/or modified CDS sequence (opt1) from neuraminidase__InfluenzaA__AFN19867
augaaccccaaccagaagaucaucaccaucggcagcgugugcaugaccaucgggauggccaaccugauccuccagaucggcaacaucaucuccaucuggaucagccacuccauccagaucgggaaccagaaccagaucgagacgugcaaccagagcgucaucaccuacgagaacaacaccugggugaaccagaccuacgugaacaucuccaacacgaacuucgccgcgggccagagcgucguguccgugaagcuggccgggaacagcucccugugcccggucagcggcugggccaucuacuccaaggacaacagcauccgcaucggcuccaagggggacguguucgugauccgggagcccuucaucagcugcagcccccucgagugccgcaccuucuuccugacccagggcgcccugcucaacgacaagcacuccaacgggaccaucaaggaccggucccccuaccgcacgcugaugagcugcccgaucggcgagguccccucccccuacaacagccgguucgagagcguggccugguccgcgagcgccugccacgacgggaucaacuggcugaccaucggcaucuccggccccgacaacggggccguggccguccucaaguacaacggcaucaucaccgacaccaucaagagcuggcgcaacaacauccugcggacgcaggaguccgagugcgcgugcgugaacgggagcugcuucaccaucaucaccgacggcccguccgacggccaggccagcuacaagaucuuccgcaucgagaaggggaagaucgugaaguccgucgagaugaacgcccccaacuaccacuacgaggagugcagcugcuaccccgacuccagcgagaucacgugcgugugccgggacaacuggcacggcuccaaccgccccugggugagcuucaaccagaaccuggaguaccagaucggguacaucugcuccggcaucuucggggacaacccgcggcccaacgacaagaccggcagcugcggccccgucuccagcaacggggccaacggcgugaagggguucuccuucaaguacggcaacgggguguggaucggccgcaccaagagcaucagcucccggaagggcuucgagaugaucugggaccccaacggguggaccggcaccgacaacaacuucagcaucaagcaggacaucgucgggaucaacgagugguccggcuacagcggguccuucgugcagcacccggagcucacgggccuggacugcauccgccccugcuucuggguggagcugauccggggccgccccaaggagaacaccaucuggaccagcggguccagcaucuccuucugcggcgucaacagcgacaccguggggugguccuggcccgacggcgccgagcucccguucacgaucgacaaguga

SEQ ID NO: 87111 - RNA, 1410 nt, Artificial Sequence; identical to SEQ ID NO: 84733
  derived and/or modified CDS sequence (opt1) from neuraminidase__InfluenzaA__AFN19877

SEQ ID NO: 87112 - RNA, 1410 nt, Artificial Sequence; identical to SEQ ID NO: 84281
  derived and/or modified CDS sequence (opt1) from neuraminidase__InfluenzaA__AFN19887

SEQ ID NO: 87113 - RNA, 1410 nt, Artificial Sequence
  derived and/or modified CDS sequence (opt1) from neuraminidase__InfluenzaA__AFN19897
augaaccccaaccagaagaucaucaccaucggcagcgugugcaugaccaucgggauggccaaccugauccuccagaucggcaacaucaucuccaucuggaucagccacuccauccagcuggggaaccagagccagaucgagacgugcaaccaguccgucaucaccuacgagaacaacaccugggugaaccagaccuacgugaacaucagcaacacgaacuucgccgcgggccaguccgucgugagcgugaagcuggccgggaacuccagccucugcccggucuccggcugggccaucuacagcaaggacaacuccauccgcaucggcagcaagggggacguguucgugauccgggagcccuucaucuccugcagcccccuggagugccgcaccuucuuccugacccagggcgcccuccugaacgacaagcacuccaacgggaccaucaaggaccggagccccuaccgcacgcugauguccugcccgaucggcgagguccccagccccugcaacagccgguucgaguccguggccuggagcgcguccgccugccacgacgggaucaacuggcucaccaucggcaucagcggccccgacaacggggccguggccguccugaaguacaacggcaucaucaccgacaccaucaaguccuggcgcaacaacauccugcggacgcaggagagcgagugcgcgugcgugaacggguccugcuucaccaucaugaccgacggcccgagcgacggccaggccuccuacaagaucuuccgcaucgagaaggggaagaucgucaagagcguggagaugaacgcccccaacuaccacuacgaggagugcuccugcuaccccgacagcuccgagaucacgugcgugugccgggacaacuggcacggcagcaaccgccccuggguguccuucaaccagaaccucgaguaccagaucggguacaucugcagcggcaucuucggggacaacccgcggcccaacgacaagaccggcuccugcggccccgucagcuccaacggggccaacggcgugaagggguucagcuucaaguacggcaacgggguguggaucggccgcaccaagagcaucuccagccggaagggcuucgagaugaucugggaccccaacggguggaccggcaccgacaacaacuucuccaucaagcaggacaucgucgggaucaacgaguggagcggcuacuccgggagcuucgugcagcacccggagcugacgggccuggacugcauccgccccugcuucuggguggagcucauccggggccgccccaaggagaacaccaucuggaccuccgggagcuccaucagcuucugcggcgucaacuccgacaccgugggguggagcuggcccgacggcgccgagcugccguucacgaucgacaaguga

SEQ ID NO: 87114 - RNA, 1410 nt, Artificial Sequence; identical to SEQ ID NO: 84281
  derived and/or modified CDS sequence (opt1) from neuraminidase__InfluenzaA__AFN19907

SEQ ID NO: 87115 - RNA, 1410 nt, Artificial Sequence; identical to SEQ ID NO: 84740
  derived and/or modified CDS sequence (opt1) from neuraminidase__InfluenzaA__AFN19917

SEQ ID NO: 87116 - RNA, 1410 nt, Artificial Sequence
  derived and/or modified CDS sequence (opt1) from neuraminidase__InfluenzaA__AFN19923
augaaccccaaccagaagaucaucaccaucggcagcgugugcaugaccaucgggauggccaaccugauccuccagaucggcaacaucaucuccaucuggaucagccacuccauccagcuggggaaccagagccagaucgagacgugcaaccagaacgucaucaccuacgagaacaacaccugggugaaccagaccuacgugaacaucuccaacacgaacuucgccgcgggccagagcgucguguccgugaagcuggccgggaacagcucccucugcccggucagcggcugggccaucuacuccaaggacaacagcauccgcaucggcuccaagggggacguguucgugauccgggagcccuucaucagcugcagcccccuggagugccgcaccuucuuccugacccagggcgcccuccugaacgacaagcacuccaacgggaccaucaaggaccggucccccuaccgcacgcugaugagcugcccgaucggcgagguccccucccccuacaacagccgguucgagagcguggccugguccgcgagcgccugccacgacgggaucaacuggcucaccaucggcaucuccggccccgacaacggggccguggccguccugaaguacaacggcaucaucaccgacaccaucaagagcuggcgcaacaacauccugcggacgcaggaguccgagugcgcgugcgugaacgggagcugcuucaccaucaugaccgacggcccguccgacggccaggccagcuacaagaucuuccgcaucgagaaggggaagaucgugaaguccgucgagaugaacgcccccaacuaccacuacgaggagugcagcugcuaccccgacuccagcgagaucacgugcgugugccgggacaacuggcacggcuccaaccgccccugggugagcuucaaccagaaccucgaguaccagaucggguacaucugcuccggcaucuucggggacaacccgcggcccaacgacaagaccggcagcugcggccccgucuccagcaacggggccaacggcgugaagggguucuccuucaaguacggcaacgggguguggaucggccgcaccaagagcaucagcucccggaagggcuucgagaugaucugggaccccaacggguggaccggcaccgacaacaacuucagcaucaagcaggacaucgucgggaucaacgagugguccggcuacagcggguccuucgugcagcacccggagcugacgggccuggacugcauccgccccugcuucuggguggagcucauccggggccgccccaaggagaacaccaucuggaccagcggguccagcaucuccuucugcggcgucaacagcgacaccguggggugguccuggcccgacggcgccgagcugccguucacgaucgacaaguga

SEQ ID NO: 87117 - RNA, 1410 nt, Artificial Sequence; identical to SEQ ID NO: 84281
  derived and/or modified CDS sequence (opt1) from neuraminidase__InfluenzaA__AFN19933

SEQ ID NO: 87118 - RNA, 1410 nt, Artificial Sequence; identical to SEQ ID NO: 84740
  derived and/or modified CDS sequence (opt1) from neuraminidase__InfluenzaA__AFN19943

SEQ ID NO: 87119 - RNA, 1410 nt, Artificial Sequence
  derived and/or modified CDS sequence (opt1) from neuraminidase__InfluenzaA__AFN19953
augaaccccaaccagaagaucaucaccaucggcagcgugugcaugaccaucgggauggccaaccugauccuccagaucggcaacaucaucuccaucuggaucagccacuccauccagcuggggaaccagagccagaucgagacgugcaaccagcgcgucaucaccuacgagaacaacaccugggugaaccagaccuacgugaacaucuccaacacgaacuucgccgcgggccagagcgucguguccgugaagcuggccgggaacagcucccucugcccggucagcggcugggccaucuacuccaaggacaacagcauccggaucggcuccaagggggacguguucgugauccgcgagcccuucaucagcugcagcccccuggagugccggaccuucuuccugacccagggcgcccuccugaacgacaagcacuccaacgggaccaucaaggaccgcucccccuaccggacgcugaugagcugcccgaucggcgagguccccucccccuacaacagccgcuucgagagcguggccugguccgcgagcgccugccacgacgggaucaacuggcucaccaucggcaucuccggccccgacaacggggccguggccguccugaaguacaacggcaucaucaccgacaccaucaagagcuggcggaacaacauccugcgcacgcaggaguccgagugcgcgugcgugaacgggagcugcuucaccaucaugaccgacggcccguccgacggccaggccagcuacaagaucuuccggaucgagaaggggaagaucgugaaguccgucgagaugaacgcccccaacuaccacuacgaggagugcagcugcuaccccgacuccagcgagaucacgugcgugugccgcgacaacuggcacggcuccaaccggcccugggugagcuucaaccagaaccucgaguaccagaucggguacaucugcuccggcaucuucggggacaacccgcgccccaacgacaagaccggcagcugcggccccgucuccagcaacggggccaacggcgugaagggguucuccuucaaguacggcaacgggguguggaucggccggaccaagagcaucagcucccgcaagggcuucgagaugaucugggaccccaacggguggaccggcaccgacaacaacuucagcaucaagcaggacaucgucgagaucaacgagugguccggguacagcggcuccuucgugcagcacccggagcugacggggcuggacugcauccggcccugcuucuggguggagcucauccgcggccggcccaaggagaacaccaucuggaccagcggcuccagcaucuccuucugcggggucaacagcgacaccgugggcugguccuggcccgacggggccgagcugccguucacgaucgacaaguga

SEQ ID NO: 87120 - RNA, 1410 nt, Artificial Sequence
  derived and/or modified CDS sequence (opt1) from neuraminidase__InfluenzaA__AFN19967
augaaccccaaccagaagaucaucaccaucggcagcgugugcaugaccaucgggauggccaaccugauccuccagaucggcaacaucaucuccaucuggaucagccacuccauccagcuggggaaccagagccagaucgagacgugcaaccaguccgucaucaccuacgagaacaacaccugggugaaccagaccuacgugaacaucagcaacacgaacuucgccgcgggccaguccgucgugagcgugaagcuggccgggaacuccagccucugcccggucuccggcugggccaucuacagcaaggacaacuccauccgcaucggcagcaagggggacguguucgugauccgggagcccuucaucuccugcagcccccuggagugccgcaccuucuuccugacccagggcgcccuccugaacgacaagcacuccaacgggaccaucaaggaccggagccccuaccgcacgcugauguccugcccgaucggcgagguccccagccccuacaacagccgguucgaguccguggccuggagcgcguccgccugccacgacgggaucaacuggcucaccaucggcaucagcggccccgacaacggggccguggccguccugaaguacaacggcaucaucaccgacaccaucaaguccuggcgcagcaacauccugcggacgcaggaguccgagugcgcgugcgugaacgggagcugcuucaccaucaugaccgacggcccguccgacggccaggccagcuacaagaucuuccgcaucgagaaggggaagaucgugaaguccgucgagaugaacgcccccaacuaccacuacgaggagugcagcugcuaccccgacuccagcgagaucacgugcgugugccgggacaacuggcacggcuccaaccgccccugggugagcuucaaccagaaccucgaguaccagaucggguacaucugcuccggcaucuucggggacaacccgcggcccaacgacaagaccggcagcugcggccccgucuccagcaacggggccaacggcgugaagggguucagcuucaaguacggcaacgggguguggaucggccgcaccaaguccaucagcucccggaagggcuucgagaugaucugggaccccaacggguggaccggcaccgacaacaacuucagcaucaagcaggacaucgucgggaucaacgagugguccggcuacagcggguccuucgugcagcacccggagcugacgggccuggacugcauccgccccugcuucuggguggagcucauccggggccgccccaaggagaacaccaucuggaccagcggguccagcaucuccuucugcggcgucaacagcgacaccguggggugguccuggcccgacggcgccgagcugccguucacgaucgacaaguga

SEQ ID NO: 87121 - RNA, 1410 nt, Artificial Sequence
  derived and/or modified CDS sequence (opt1) from neuraminidase__InfluenzaA__AFN19973
augaaccccaaccagaagaucaucaccaucggcagcgugugcaugaccaucgggauggccaaccugauccuccagaucggcaacaucaucuccaucuggaucagccacuccauccagcuggggaaccagagccagaucgagacgugcaaccaguccgucaucaccuacgagaacaacaccugggugaaccagaccuacgugaacaucagcaacacgaacuucgccgcgggccaguccgucgugagcgugaagcuggccgggaacuccagccucugcccggucuccggcugggccaucuacagcaaggacaacuccauccgcaucggcagcaagggggacguguucgugauccgggagcccuucaucuccugcagcccccuggagugccgcaccuucuuccugacccagggcgcccuccugaacgacaagcacuccaacgggaccaucaaggaccggagccccuaccgcacgcugauguccugcccgaucggcgagguccccagccccuacaacagccgguucgaguccguggccuggagcgcguccgccugccacgacgggaucaacuggcucaccaucggcaucagcggccccgacaacggggccguggccguccugaaguacaacggcaucaucaccgacaccaucaaguccuggcgcaacaacauccugcggacgcaggagagcgagugcgcgugcgugaacggguccugcuucaccaucaugaccgacggcagcuccgacggccaggccagcuacaagaucuuccgcaucgagaaggggaagaucgugaaguccgucgagaugaacgccccgaacuaccacuacgaggagugcagcugcuaccccgacuccagcgagaucacgugcgugugccgggacaacuggcacggcuccaaccgccccugggugagcuucaaccagaaccucgaguaccagaucggguacaucugcuccggcaucuucggggacaacccccggccgaacgacaagaccggcagcugcggccccgucuccagcaacggggccaacggcgugaagggguucagcuucaaguacggcaacgggguguggaucggccgcaccaaguccaucagcucccggaagggcuucgagaugaucugggaccccaacggguggaccggcaccgacaacaacuucagcaucaagcaggacaucgucgggaucaacgagugguccggcuacagcggguccuucgugcagcaccccgagcugacgggccuggacugcauccgcccgugcuucuggguggagcucauccggggccgccccaaggagaacaccaucuggaccagcggguccagcaucuccuucugcggcgucaacagcgacaccguggggugguccuggcccgacggcgccgagcugcccuucacgaucgacaaguga

SEQ ID NO: 87122 - RNA, 1410 nt, Artificial Sequence; identical to SEQ ID NO: 84281
  derived and/or modified CDS sequence (opt1) from neuraminidase__InfluenzaA__AFN19979

SEQ ID NO: 87123 - RNA, 1410 nt, Artificial Sequence
  derived and/or modified CDS sequence (opt1) from neuraminidase__InfluenzaA__AFN19985
augaaccccaaccagaagaucaucaccaucggcagcgugugcaugaccaucgggauggccaaccugauccuccagaucggcaacaucaucuccaucuggaucagccacuccauccagcuggggaaccagagccagaucgagacgugcaaccaguccgucaucaccuacgagaacaacaccugggugaaccagaccuacgugaacaucagcaacacgaacuucgccgcgggccaguccgucgugagcgugaagcuggccgggaacuccagccucugcccggucuccggcugggccaucuacagcaaggacaacuccauccgcaucggcagcaagggggacguguucgugauccgggagcccuucaucuccugcagcccccuggagugccgcaccuucuuccugacccagggcgcccuccugaacgacaagcacuccaacgggaccaucaaggaccggagccccuaccgcacgcugauguccugcccgaucggcgagguccccagccccuacaacagccgguucgaguccguggccuggagcgcguccgccugccacgacgggaucaacuggcucaccaucggcaucagcggccccgacaacggggccguggccguccugaaguacaacggcaucaucaccgacaccaucaaguccuggcgcaacaacauccugcggacgcaggagagcgagugcgcgugcgugaacggguccugcuucaccaucaugaccgacggcccgagcgacggccaggccuccuacaagaucuuccgcaucgagaaggggaagaucgucaagagcguggagaugaacgcccccaacuaccacuacgaggagugcuccugcuaccccgacagcuccgagaucacgugcgugugccgggacaacuggcacggcagcaaccgccccuggguguccuucaaccagaaccucgaguaccagaucggguacaucugcagcggcaucuucggggacaacccgcggcccaacgacaagaccggcuccugcggccccgucagcuccaacggggccaacggcgugaagggguucagcuucaaguacggcaacgggguguggaucggccgcaccaagagcgucuccagccggaagggcuucgagaugaucugggaccccaacggguggaccggcaccgacaacaacuucuccaucaagcaggacaucguggggaucaacgaguggagcggcuacuccgggagcuucgugcagcacccggagcugacgggccuggacugcauccgccccugcuucugggucgagcucauccggggccgccccaaggagaacaccaucuggaccuccgggagcuccaucagcuucugcggcgugaacuccgacaccgucggguggagcuggcccgacggcgccgagcugccguucacgaucgacaaguga

SEQ ID NO: 87124 - RNA, 1410 nt, Artificial Sequence
  derived and/or modified CDS sequence (opt1) from neuraminidase__InfluenzaA__AFN19995
augaaccccaaccagaagaucaucaccaucggcagcgugugcaugaccaucgggauggccaaccugauccuccagaucggcaacaucaucuccaucuggaucagccacuccauccagcuggggaaccagagccagacggagaccugcaaccaguccgucaucaccuacgagaacaacaccugggugaaccagacguacgugaacaucagcaacaccaacuucgccgcgggccaguccgucgugagcgugaagcuggccgggaacuccagccucugcccggucuccggcugggccaucuacagcaaggacaacuccauccgcaucggcagcaagggggacguguucgugauccgggagcccuucaucuccugcagcccccuggagugccgcaccuucuuccugacccagggcgcccuccugaacgacaagcacuccaacgggacgaucaaggaccggagccccuaccgcacccugauguccugcccgaucggcgagguccccagccccuacaacagccgguucgaguccguggccuggagcgcguccgccugccacgacgggaucaacuggcucaccaucggcaucagcggccccgacaacggggccguggccguccugaaguacaacggcaucaucaccgacacgaucaaguccuggcgcaacaacauccugcggacccaggagagcgagugcgcgugcgugaacggguccugcuucaccaucaugaccgacggcccgagcgacggccaggccuccuacaagaucuuccgcaucgagaaggggaagaucgucaagagcguggagaugaacgcccccaacuaccacuacgaggagugcuccugcuaccccgacagcuccgagaucacgugcgugugccgggacaacuggcacggcagcaaccgccccuggguguccuucaaccagaaccucgaguaccagaucggguacaucugcagcggcaucuucggggacaacccgcggcccaacgacaagaccggcuccugcggccccgucagcuccaacggggccaacggcgugaagggguucagcuucaaguacggcaacgggguguggaucggccgcaccaagagcaucuccagccggaagggcuucgagaugaucugggaccccaacggguggaccggcacggacaacaacuucuccaucaagcaggacaucgucgggaucaacgaguggagcggcuacuccgggagcuucgugcagcacccggagcugaccggccuggacugcauccgccccugcuucuggguggagcucauccggggccgccccaaggagaacaccaucuggaccuccgggagcuccaucagcuucugcggcgucaacuccgacacggugggguggagcuggcccgacggcgccgagcugccguucaccaucgacaaguga

SEQ ID NO: 87125 - RNA, 1410 nt, Artificial Sequence; identical to SEQ ID NO: 84281
  derived and/or modified CDS sequence (opt1) from neuraminidase__InfluenzaA__AFN20001

SEQ ID NO: 87126 - RNA, 1410 nt, Artificial Sequence
  derived and/or modified CDS sequence (opt1) from neuraminidase__InfluenzaA__AFN20013
augaaccccaaccagaagaucaucaccaucggcagcgugugcaugaccaucgggauggccaaccugauccuccagaucggcaacaucaucuccaucuggaucagccacuccauccagcuggggaaccagagccagaucgagacgugcaaccaguccgucaucaccuacgagaacaacaccugggugaaccagaccuacgugaacaucagcaacacgaacuucgccgcgggccaguccgucgugagcgugaagcuggccgggaacuccagccucugcccggucuccggcugggccaucuacagcaaggacaacuccauccgcaucggcagcaagggggacguguucgugauccgggagcccuucaucuccugcagcccccuggagugccgcaccuucuuccugacccagggcgcccuccugaacgacaagcacuccaacgggaccaucaaggaccggagccccuaccgcacgcugauguccugcccgaucggcgagguccccagccccuacaacagccgguucgaguccguggccuggagcgcguccgccugccacgacgggaucaacuggcucaccaucggcaucagcggccccgacaacggggccguggccguccugaaguacaacggcaucaucaccgacaccaucaaguccuggcgcaacaacauccugcggacgcaggagagcgagugcgcgugcgugaacggguccugcuucaccaucaugaccgacggcccgagcgacggccaggccuccuacaagaucuuccgcaucgagaaggggaagaucgucaagagcguggagaugaacgcccccaacuaccacuacgaggagugcuccugcuaccccgacagcuccgagaucacgugcgugugccgggacaacuggcacggcagcaaccgccccuggguguccuucaaccagaaccucgaguaccagaucggguacaucugcagcggcaucuucggggacaacccgcggcccaacgacaagaccggcuccugcgaccccgucagcuccaacggcgccaacggggugaagggcuucagcuucaaguacgggaacggcguguggaucgggcgcaccaagagcaucuccagccggaagggcuucgagaugaucugggaccccaacggcuggaccgggaccgacaacaacuucuccaucaagcaggacaucgucggcaucaacgaguggagcggguacuccggcagcuucgugcagcacccggagcugacggggcuggacugcauccgccccugcuucuggguggagcucauccggggccgccccaaggagaacaccaucuggaccuccggcagcuccaucagcuucugcggggucaacuccgacaccgugggcuggagcuggcccgacggggccgagcugccguucacgaucgacaaguga

SEQ ID NO: 87127 - RNA, 1410 nt, Artificial Sequence
  derived and/or modified CDS sequence (opt1) from neuraminidase__InfluenzaA__AFN20020
augaaccccaaccagaagaucaucaccaucggcagcgugugcaugaccaucgggauggccaaccugauccuccagaucggcaacaucaucuccaucuggaucagccacuccauccagcuggggaaccagagccagaucgagacgugcaaccaguccgucaucaccuacgagaacaacaccugggugaaccagaccuacgugaacaucagcaacacgaacuucgccgcgggccaguccgucgugagcgugaagcuggccgggaacuccagccucugcccggucuccggcugggccaucuacagcaaggacaacuccauccgcaucggcagcaagggggacguguucgugauccgggagcccuucaucuccugcagcccccuggagugccgcaccuucuuccugacccagggcgcccuccugaacgacaagcacuccaacgggaccaucaaggaccggagccccuaccgcacgcugauguccugcccgaucggcgagguccccagccccuacaacagccgguucgaguccguggccuggagcgcguccgccugccacgacgggaucaacuggcucaccaucggcaucagcggccccgacaacggggccguggccguccugaaguacaacggcaucaucaccgacaccaucaaguccuggcgcaacaacauccugcggacgcaggagagcgagugcgcgugcgugaacggguccugcuucaccaucaugaccgacggcccgagcgacggccaggccuccuacaagaucuuccgcaucgagaaggggaagaucgucaagagcguggagaugaacgcccccaacuaccacuacgaggagugcuccugcuaccccgacagcuccgagaucacgugcgugugccgggacaacuggcacggcagcaaccgccccuggguguccuucaaccagaaccucgaguaccagaucggguacaucugcagcggcaucuucggggacaacccgcggcccaacgacaagaccggcuccugcggccccgucagcuccaacggggccaacggcgugaagggguucagcuucaaguacggcaacgggguguggaucggccgcaccaagagcaucuccagccggaagggcuucgagaugaucugggaccccaacggguggaccggcaccgacaacaacuucuccaucaagcaggacaucgucgggcugaacgaguggagcggcuacuccgggagcuucgugcagcacccggagcugacgggccucgacugcauccgccccugcuucuggguggagcugauccggggccgccccaaggagaacaccaucuggaccuccgggagcuccaucagcuucugcggcgucaacuccgacaccgugggguggagcuggcccgacggcgccgagcugccguucacgaucgacaaguga

SEQ ID NO: 87128 - RNA, 1410 nt, Artificial Sequence; identical to SEQ ID NO: 84281
  derived and/or modified CDS sequence (opt1) from neuraminidase__InfluenzaA__AFN20022

SEQ ID NO: 87129 - RNA, 1410 nt, Artificial Sequence
  derived and/or modified CDS sequence (opt1) from neuraminidase__InfluenzaA__AFN20035
augaaccccaaccagaagaucaucaccaucggcagcgugugcaugaccaucgggaucgccaaccugauccuccagaucggcaacaucaucuccaucuggaucagccacuccauccagcuggggaaccagagccagaucgagacgugcaaccaguccgucaucaccuacgagaacaacaccugggugaaccagaccuacgugaacaucagcaacacgaacuucgccgcgggccaguccgucgugagcgugaagcuggccgggaacuccagccucugcccggucuccggcugggccaucuacagcaaggacaacuccauccgcaucggcagcaagggggacguguucgugauccgggagcccuucaucuccugcagcccccuggagugccgcaccuucuuccugacccagggcgcccuccugaacgacaagcacuccaacgggaccaucaaggaccggagccccuaccgcacgcugauguccugcccgaucggcgagguccccagccccuacaacagccgguucgaguccguggccuggagcgcguccgccugccacgacgggaucaacuggcucaccaucggcaucagcggccccgacaacggggccguggccguccugaaguacaacggcaucaucaccgacaccaucaaguccuggcgcaacaacauccugcggacgcaggagagcgagugcgcgugcgugaacggguccugcuucaccaucaugaccgacggcccgagcgacggccaggccuccuacaagaucuuccgcaucgagaaggggaagaucgucaagagcguggagaugaacgcccccaacuaccacuacgaggagugcuccugcuaccccgacagcuccgagaucacgugcgugugccgggacaacuggcacggcagcaaccgccccuggguguccuucaaccagaaccucgaguaccagaucggguacaucugcagcggcaucuucggggacaacccgcggcccaacgacaagaccggcuccugcggccccgucagcuccaacggggccaacggcgugaagggguucagcuucaaguacggcaacgggguguggaucggccgcaccaagagcaucuccagccggaagggcuucgagaugaucugggaccccaacggguggaccggcaccgacaacaacuucuccaucaagcaggacaucgucgggaucaacgaguggagcggcuacuccgggagcuucgugcagcacccggagcugacgggccuggacugcauccgccccugcuucuggguggagcucauccggggccgccccaaggagaacaccaucuggaccuccgggagcuccaucagcuucugcggcgucaacuccgacaccgugggguggagcuggcccgacggcgccgagcugccguucacgaucgacaaguga

SEQ ID NO: 87130 - RNA, 1410 nt, Artificial Sequence; identical to SEQ ID NO: 84281
  derived and/or modified CDS sequence (opt1) from neuraminidase__InfluenzaA__AFN20041

SEQ ID NO: 87131 - RNA, 1410 nt, Artificial Sequence; identical to SEQ ID NO: 84281
  derived and/or modified CDS sequence (opt1) from neuraminidase__InfluenzaA__AFN20047

SEQ ID NO: 87132 - RNA, 1410 nt, Artificial Sequence; identical to SEQ ID NO: 85104
  derived and/or modified CDS sequence (opt1) from neuraminidase__InfluenzaA__AFN20063

SEQ ID NO: 87133 - RNA, 1410 nt, Artificial Sequence
  derived and/or modified CDS sequence (opt1) from neuraminidase__InfluenzaA__AFN20077
augaaccccaaccagaagaucaucaccaucggcagcgugugcaugaccaucgggauggccaaccugauccuccagaucggcaacaucaucuccaucuggaucagccacuccauccagcuggggaaccagagccagaucgagacgugcaaccaguccgucaucaccuacgagaacaacaccugggugaaccagaccuacgugaacaucagcaacacgaacuucgccgcgggccaguccgucgugagcgugaagcuggccgggaacuccagccucugcccggucuccggcugggccaucuacagcaaggacaacuccauccgcaucggcagcaagggggacguguucgugauccgggagcccuucaucuccugcagcccccuggagugccgcaccuucuuccugacccagggcgcccuccugaacgacaagcacuccaacgggaccaucaaggaccggagccccuaccgcacgcugauguccugcccgaucggcgagguccccagccccuacaacagccgguucgaguccguggccuggagcgcguccgccugccacgacgggaucaacuggcucaccaucggcaucagcggccccgacaacggggccguggccguccugaaguacaacggcaucaucaccgacaccaucaaguccuggcgcaacaacauccugcggacgcaggagagcgagugcgcgugcgugaacggguccugcuucaccaucaugaccgacggcccgagcgacggccaggccuccuacaagaucuucaagaucgagaaggggaagaucgucaagagcguggagaugaacgcccccaacuaccacuacgaggagugcuccugcuaccccgacagcuccgagaucacgugcgugugccgcgacaacuggcacggcagcaaccggcccuggguguccuucaaccagaaccucgaguaccagaucggguacaucugcagcggcaucuucggggacaacccgcgccccaacgacaagaccggcuccugcggccccgucagcuccaacggggccaacggcgugaagggguucagcuucaaguacggcaacgggguguggaucggccggaccaagagcaucuccagccgcaagggcuucgagaugaucugggaccccaacggguggaccggcaccgacaacaacuucuccaucaagcaggacaucgucgggaucaacgaguggagcggcuacuccgggagcuucgugcagcacccggagcugacgggccuggacugcauccggcccugcuucuggguggagcucauccgcggccggcccaaggagaacaccaucuggaccuccgggagcuccaucagcuucugcggcgucaacuccgacaccgugggguggagcuggcccgacggcgccgagcugccguucacgaucgacaaguga

SEQ ID NO: 87134 - RNA, 1410 nt, Artificial Sequence; identical to SEQ ID NO: 84281
  derived and/or modified CDS sequence (opt1) from neuraminidase__InfluenzaA__AFN20083

SEQ ID NO: 87135 - RNA, 1410 nt, Artificial Sequence
  derived and/or modified CDS sequence (opt1) from neuraminidase__InfluenzaA__AFN20094
augaaccccaaccagaagaucaucaccaucggcagcgugugcaugaccaucgggauggccaaccugauccuccagaucggcaacaucaucuccaucuggaucagccacuccauccagcuggggaaccagagccagaucgagacgugcaaccaguccgucaucaucuacgagaacaacaccugggugaaccagaccuacgugaacaucagcaacaccaacuucgccgcgggccaguccgucgugagcgugaagcuggccgggaacuccagccucugcccggucuccggcugggccaucuacagcaaggacaacuccauccgcaucggcagcaagggggacguguucgugauccgggagcccuucaucuccugcagcccccuggagugccgcacguucuuccugacccagggcgcccuccugaacgacaagcacuccaacgggaccaucaaggaccggagccccuaccgcacccugauguccugcccgaucggcgagguccccagccccuacaacagccgguucgaguccguggccuggagcgcguccgccugccacgacgggaucaacuggcucacgaucggcaucagcggccccgacaacggggccguggccguccugaaguacaacggcaucaucaccgacaccaucaaguccuggcgcaacaacauccugcggacccaggagagcgagugcgcgugcgugaacggguccugcuucacgaucaugaccgacggcccgagcgacggccaggccuccuacaagaucuuccgcaucgagaaggggaagaucgucaagagcguggagaugaacgcccccaacuaccacuacgaggagugcuccugcuaccccgacagcuccgagaucacgugcgugugccgggacaacuggcacggcagcaaccgccccuggguguccuucaaccagaaccucgaguaccagaucggguacaucugcagcggcaucuucggggacaacccgcggcccaacgacaaggccggcuccugcggccccgucagcuccaacggggccaacggcgugaagggguucagcuucaaguacggcaacgggguguggaucggccgcaccaagagcaucuccagccggaagggcuucgagaugaucugggaccccaacggguggaccggcaccgacaacaacuucuccaucaagcaggacaucgucgggaucaacgaguggagcggcuacuccgggagcuucgugcagcacccggagcugaccggccuggacugcauccgccccugcuucuggguggagcucauccggggccgccccaaggagaacaccaucuggacguccgggagcuccaucagcuucugcggcgucaacuccgacaccaugggguggagcuggcccgacggcgcggagcugccguucaccaucgacaaguga

SEQ ID NO: 87136 - RNA, 1410 nt, Artificial Sequence; identical to SEQ ID NO: 84740
  derived and/or modified CDS sequence (opt1) from neuraminidase__InfluenzaA__AFN20100

SEQ ID NO: 87137 - RNA, 1410 nt, Artificial Sequence
  derived and/or modified CDS sequence (opt1) from neuraminidase__InfluenzaA__AFN20114
augaaccccaaccagaagaucaucaccaucggcagcgugugcaugaccaucgggauggccaaccugauccuccagaucggcaacaucaucuccaucuggaucagccacuccauccagcuggggaaccagaaccagaucgagacgugcaaccagagcgucaucaccuacgagaacaacaccugggugaaccagaccuacgugaacaucuccaacacgaacuucgccgcgggccagagcgucguguccgugaagcuggccgggaacagcucccucugcccggucagcggcugggccaucuacuccaaggacaacagcauccgcaucggcuccaagggggacguguucgugauccgggagcccuucaucagcugcagcccccuggagugccgcaccuucuuccugacccagggcgcccuccugaacgacaagcacuccaacgggaccaucaaggaccggucccccuaccgcacgcugaugagcugcccgaucggcgagguccccucccccuacaacagccgguucgagagcguggccugguccgcgagcgccugccacgacgggaucaacuggcucaccaucggcaucuccggccccgacaacggggccguggccguccugaaguacaacggcaucaucaccgacaccaucaagagcuggcgcaacaacauccugcggacgcaggaguccgagugcgcgugcgugaacgggagcugcuucaccgugaugaccgacggcccguccgacggccaggccagcuacaagaucuucaagaucgagaaggggaagaucgucaaguccguggagaugaacgcccccaacuaccacuacgaggagugcagcugcuaccccgacuccagcgagaucacgugcgugugccgcgacaacuggcacggcuccaaccggcccugggucagcuucaaccagaaccucgaguaccagaucggguacaucugcuccggcaucuucggggacaacccgcgccccaacgacaagaccggcagcugcucccccgugagcuccaacggcgccaacggggugaagggcuucagcuucaaguacgggaacggcgucuggaucgggcggaccaagagcaccuccagccgcaacggcuucgagaugaucugggaccccaacggcuggaccgggacggacaacuccuucagcaugaagcaggacaucgugggcaucaacgagugguccggguacagcggcuccuucgugcagcacccggagcugaccgggcuggacugcauccggcccugcuucugggucgagcucauccgcggccggcccaaggagaacaccguguggaccagcggcuccagcaucuccuucugcggggucaacagcgacacggugggcugguccuggcccgacggggccgagcugccguucaccaucgacaaguga

SEQ ID NO: 87138 - RNA, 1410 nt, Artificial Sequence
  derived and/or modified CDS sequence (opt1) from neuraminidase__InfluenzaA__AFN20128
augaaccccaaccagaagaucaucaccaucggcagcgugugcaugaccaucgggauggccaaccugauccuccagaucggcaacaucaucuccaucuggaucagccacuccauccagcuggggaaccagagccagaucgagacgugcaaccaguccgucaucaccuacgagaacaacaccugggugaaccagaccuacgugaacaucagcaacacgaacuucgccgcgggccaguccgucgugagcgugaagcuggccgggaacuccagccucugcccggucuccggcugggccaucuacagcaaggacaacuccauccgcaucggcagcaagggggacguguucgugauccgggagcccuucaucuccugcagcccccuggagugccgcaccuucuuccugacccagggcgcccuccugaacgacaagcacuccaacgggaccaucaaggaccggagccccuaccgcacgcugauguccugcccgaucggcgagguccccagccccuacaacagccgguucgaguccguggccuggagcgcguccgccugccacgacgggaucaacuggcucaccaucggcaucagcggccccgacaacggggccguggccguccugaaguacaacggcaucaucaccgacaccauccgcuccuggcggaacaacauccugcgcacgcaggagagcgagugcgcgugcgugaacggguccugcuucaccaucaugaccgacggcccgagcgacggccaggccuccuacaagaucuuccggaucgagaaggggaagaucaucaagagcguggagaugaacgcccccaacuaccacuacgaggagugcuccugcuaccccgacagcuccgagaucacgugcgucugccgcgacaacuggcacggcagcaaccggcccuggguguccuucaaccagaaccucgaguaccagaucggguacaucugcagcggcaucuucggggacaacccgcgcuccaacgacaagaccggcagcugcggccccguguccagcaacggggccaacggcgucaagggguucagcuucaaguacggcaacgggguguggaucggccggaccaaguccaucagcucccgcaagggcuucgagaugaucugggaccccaacggguggaccggcaccgacaacaacuucagcaucaagcaggacaucguggggaucaacgagugguccggcuacagcggguccuucguccagcaccccgagcugacgggccuggacugcauccggccgugcuucuggguggagcucauccgcggccggcccaaggagaacaccaucuggaccagcggguccagcaucuccuucugcggcgugaacagcgacaccgucgggugguccuggcccgacggcgccgagcugcccuucacgaucgacaaguga

SEQ ID NO: 87139 - RNA, 1410 nt, Artificial Sequence; identical to SEQ ID NO: 84281
  derived and/or modified CDS sequence (opt1) from neuraminidase__InfluenzaA__AFN87935

SEQ ID NO: 87140 - RNA, 1410 nt, Artificial Sequence
  derived and/or modified CDS sequence (opt1) from neuraminidase__InfluenzaA__AFN87937
augaaccccaaccagaagaucaucaccaucggcagcgugugcaugaccaucgggauggccaaccugauccuccagaucggcaacaucaucuccaucuggaucagccacuccauccagcuggggaaccagaaccagaucgagacgugcaaccagagcgucaucaccuacgagaacaacaccugggugaaccagaccuacgugaacaucuccaacacgaacuucgccgcgggccagagcgucguguccgugaagcuggccgggaacagcucccucugcccggucagcggcugggccaucuacuccaaggacaacagcauccgcaucggcuccaagggggacguguucgugauccgggagcccuucaucagcugcagcccccuggagugccgcaccuucuuccugacccagggcgcccuccugaacgacaagcacuccaacgggaccaucaaggaccggucccccuaccgcacgcugaugagcugcccgaucggcgagguccccucccccuacaacagccgguucgagagcguggccugguccgcgagcgccugccacgacgggaucaacuggcucaccaucggcaucuccggccccgacaacggggccguggccguccugaaguacaacggcaucaucaccgacaccaucaagagcuggcgcaacaacauccugcggacgcaggaguccgagugcgcgugcgugaacgggagcugcuucaccgugaugaccgacggcccguccgacggccaggccagcuacaagaucuucaagaucgagaaggggaagaucgucaaguccguggagaugaacgcccccaacuaccacuacgaggagugcagcugcuaccccgacuccagcgagaucacgugcgugugccgcgacaacuggcacggcuccaaccggcccugggucagcuucaaccagaaccucgaguaccagaucggguacaucugcuccggcaucuucggggacaacccgcgccccaacgacaagaccggcagcugcggccccguguccagcaacggggccaacggcgugaagggguucuccuucaaguacggcaacggggucuggaucggccggaccaagagcaccagcucccgcaacggcuucgagaugaucugggaccccaacggguggaccggcacggacaacagcuucuccaugaagcaggacaucguggggaucaacgaguggagcggcuacuccgggagcuucgugcagcacccggagcugaccggccuggacugcauccggcccugcuucugggucgagcucauccgcggccggcccaaggagaacaccguguggaccuccgggagcuccaucagcuucugcggcgucaacuccgacacggugggguggagcuggcccgacggcgccgagcugccguucaccaucgacaaguga

SEQ ID NO: 87141 - RNA, 1410 nt, Artificial Sequence
  derived and/or modified CDS sequence (opt1) from neuraminidase__InfluenzaA__AFN87940
augaaccccaaccagaagaucaucaccaucggcagcgugugcaugaccaucgggauggccaaccugauccuccagaucggcaacaucaucuccaucuggaucagccacuccauccagcuggggaaccagaaccagaucgagacgugcaaccagagcgucaucaccuacgagaacaacaccugggugaaccagaccuacgugaacaucuccaacacgaacuucgccgcgggccagagcgucguguccgugaagcuggccgggaacagcucccucugcccggucagcggcugggccaucuacuccaaggacaacagcauccgcaucggcuccaagggggacguguucgugauccgggagcccuucaucagcugcagcccccuggagugccgcaccuucuuccugacccagggcgcccuccugaacgacaagcacuccaacgggaccaucaaggaccggucccccuaccgcacgcugaugagcugcccgaucggcgagguccccucccccuacaacagccgguucgagagcguggccugguccgcgagcgccugccacgacgggaucaacuggcucaccaucggcaucuccggccccgacaacggggccguggccguccugaaguacaacggcaucaucaccgacaccaucaagagcuggcgcaacaacauccugcggacgcaggaguccgagugcgcgugcgugaacgggagcugcuucaccgugaugaccgacggcccguccgacggccaggccagcuacaagaucuucaagaucgagaaggggaagaucgucaaguccguggagaugaacgcccccaacuaccacuacgaggagugcagcugcuaccccgacuccagcgagaucacgugcgugugccgcgacaacuggcacggcuccaaccggcccugggucagcuucaaccagaaccucgaguaccagaucggguacaucugcuccggcaucuucggggacaacccgcgccccaacgacaagaccggcagcugcggccccguguccagcaacggggccaacggcgugaagggguucuccuucaaguacggcaacggggucuggaucggccggaccaagagcaccagcucccgcaacggcuucgagaugaucugggaccccaacggguggaccggcacggacaacagcuucuccaucaagcaggacaucguggggaucaacgaguggagcggcuacuccgggagcuucgugcagcacccggagcugaccggccuggacugcauccggcccugcuucugggucgagcucauccgcggccggcccaaggagaacaccaucuggaccuccgggagcuccaucagcuucugcggcgugaacuccgacacggucggguggagcuggcccgacggcgccgagcugccguucaccaucgacaaguga

SEQ ID NO: 87142 - RNA, 1410 nt, Artificial Sequence; identical to SEQ ID NO: 80762
  derived and/or modified CDS sequence (opt1) from neuraminidase__InfluenzaA__AFN87942

SEQ ID NO: 87143 - RNA, 1410 nt, Artificial Sequence; identical to SEQ ID NO: 87140
  derived and/or modified CDS sequence (opt1) from neuraminidase__InfluenzaA__AFN87944

SEQ ID NO: 87144 - RNA, 1410 nt, Artificial Sequence
  derived and/or modified CDS sequence (opt1) from neuraminidase__InfluenzaA__AFN87946
augaaccccaaccagaagaucaucaccaucggcagcgugugcaugaccaucgggauggccaaccugacgcuccagaucggcaacaucaucuccaucuggaucagccacuccauccagcuggggaaccagaaccagaucgagaccugcaaccagagcgucaucaacuacgagaacaacaccugggugaaccagaccuacgugaacaucuccaacacgaacuucgccgcgggccagagcgucguguccgugaagcuggccgggaacagcucccucugcccggucagcggcugggccaucuacuccaaggacaacagcauccgcaucggcuccaagggggacguguucgugauccgggagcccuucgucagcugcagcccccuggagugccgcaccuucuuccugacccagggcgcccuccugaacgacaagcacuccaacgggaccaucaaggaccggucccccuaccgcacgcugaugagcugcccgaucggcgaggugcccucccccuacaacagccgguucgagagcguggccugguccgcgagcgccugccacgacgggaucaacuggcucaccaucggcaucuccggccccgacaacggggccgucgccgugcugaaguacaacggcaucaucaccgacaccaucaagagcuggcgcaacaacauccugcggacgcaggaguccgagugcgcgugcgugaacgggagcugcuucaccgucaugaccgacggcccguccgacggccaggccagcuacaagaucuuccgcaucgagaaggggaagaucgugaaguccguggagaugaacgcccccaacuaccacuacgaggagugcagcugcuaccccgacuccagcgaggugaccugcgucugccgggacaacuggcacggcuccaaccgccccugggugagcuucaaccagaaccucgaguaccagaucggguacaucugcuccggcaucuucggggacaacccgcggcccaacgacaagacgggcagcugcggccccgucuccagcaacggggccaacggcgugaagggguucuccuucaaguacggcaacgggguguggaucggccgcaccaagagcaucagcucccggaacggcuucgagaugaucugggaccccaacggguggaccggcaccgacaacaacuucagcaucaagcaggacaucgucgggaucaacgagugguccggcuacagcggguccuucgugcagcacccggagcugacgggccuggacugcauccgccccugcuucugggucgagcucauccggggccgccccaaggagaacaccaucuggaccagcggguccagcaucuccuucugcggcgugaacagcgacaccguggggugguccuggcccgacggcgccgagcugccguucacgaucgacaaguga

SEQ ID NO: 87145 - RNA, 1410 nt, Artificial Sequence
  derived and/or modified CDS sequence (opt1) from neuraminidase__InfluenzaA__AFN87948
augaaccccaaccagaagaucaucaccaucggcagcgugugcaugaccaucgggauggccaaccugauccuccagaucggcaacaucaucuccaucuggaucagccacuccauccagcuggggaaccagaaccagaucgagacgugcaaccagagcgucaucaccuacgagaacaacaccugggugaaccagaccuacgugaacaucuccaacacgaacuucgccgcgggccagagcgucguguccgugaagcuggccgggaacagcucccucugcccggucagcggcugggccaucuacuccaaggacaacagcauccgcaucggcuccaagggggacguguucgugauccgggagcccuucaucagcugcagcccccuggagugccgcaccuucuuccugacccagggcgcccuccugaacgacaagcacuccaacgggaccaucaaggaccggucccccuaccgcacgcugaugagcugcccgaucggcgagguccccucccccuacaacagccgguucgagagcguggccugguccgcgagcgccugccacgacgggaucaacuggcucaccaucggcaucuccggccccgacaacggggccguggccguccugaaguacaacggcaucaucaccgacaccaucaagagcuggcgcaacaacauccugcggacgcaggaguccgagugcgcgugcgugaacgggagcugcuucaccgugaugaccgacggcccguccgacggccaggccagcuacaagaucuucaagaucgagaaggggaagaucgucaaguccguggagaugaacgcccccaacuaccacuacgaggagugcagcugcuaccccgacuccagcgagaucacgugcgugugccgcgacaacuggcacggcuccaaccggcccugggucagcuucaaccagaaccucgaguaccagaucggguacaucugcuccggcaucuucggggacaacccgcgccccaacgacaagaccggcagcugcggccccguguccagcaacggggccaacggcgugaagggguucuccuucaaguacggcaacggggucuggaucggccggaccaagagcaccagcucccgcaacggcuucgagaugaucugggaccccaacggguggaccggcacggacaacagcuucuccaucaagcaggacaucguggggaucaacgaguggagcggcuacuccgggagcuucgugcagcacccggagcugaccggccuggacugcauccggcccugcuucugggucgagcucauccgcggccggcccaaggagaacaccaucuggaccuccgggagcuccaucagcuucugcggcgugaacuccgacaucgucggguggagcuggcccgacggcgccgagcugccguucacgaucgacaaguga

SEQ ID NO: 87146 - RNA, 1410 nt, Artificial Sequence
  derived and/or modified CDS sequence (opt1) from neuraminidase__InfluenzaA__AFN87950
augaaccccaaccagaagaucaucaccaucggcagcgugugcaugaccaucgggauggccaaccugauccuccagaucggcaacaucaucuccaucuggaucagccacuccauccagcuggggaaccagagccagaucgagacgugcaaccaguccgucaucaccuacgagaacaacaccugggugaaccagaccuacgugaacaucagcaacacgaacuucgccgcgggccaguccgucgugagcgugaagcuggccgggaacuccagccucugcccggucuccggcugggccaucuacagcaaggacaacuccauccgcaucggcagcaagggggacguguucgugauccgggagcccuucaucuccugcagcccccuggagugccgcaccuucuuccugacccagggcgcccuccugaacgacaagcacuccaacgggaccaucaaggaccggagccccuaccgcacgcugauguccugcccgaucggcgagguccccagccccuacaacagccgguucgaguccguggccuggagcgcguccgccugccacgacgggaucaacuggcucaccaucggcaucagcggccccgacaacggggccguggccguccugaaguacaacggcaucaucaccgacaccaucaaguccuggcgcaacaacauccugcggacgcaggagagcgagugcgcgugcgugaacggguccugcuucaccgugaugaccgacggcccgagcgacggccaggccuccuacaagaucuuccgcaucgagaaggggaagaucgucaagagcguggagaugaacgcccccaacuaccacuacgaggagugcuccugcuaccccgacagcuccgagaucacgugcgugugccgggacaacuggcacggcagcaaccgccccugggucuccuucaaccagaaccucaaguaccagaucggguacaucugcagcggcaucuucggggacaacccgcggcccaacgacaagaccggcuccugcggccccgugagcuccaacggggccaacggcgugaagggguucagcuucaaguacggcaacggggucuggaucggccgcaccaagagcaucuccagccggaagggcuucgagaugaucugggaccccaacggguggaccggcaccgacaacaacuucuccaucaagcaggacaucaucgggaucaacgaguggagcggcuacuccgggagcuucgugcagcacccggagcugacgggccuggacugcauccgccccugcuucuggguggagcucauccggggccgccccaaggagaacaccaucuggaccuccgggagcuccaucagcuucugcggcgucaacuccgacaccgugggguggagcuggcccgacggcgccgagcugccguucacgaucgacaaguga

SEQ ID NO: 87147 - RNA, 1410 nt, Artificial Sequence; identical to SEQ ID NO: 84733
  derived and/or modified CDS sequence (opt1) from neuraminidase__InfluenzaA__AFN87952

SEQ ID NO: 87148 - RNA, 1410 nt, Artificial Sequence
  derived and/or modified CDS sequence (opt1) from neuraminidase__InfluenzaA__AFN87954
augaaccccaaccagaagaucaucaccaucggcagcgugugcaugaccaucgggauggccaaccugauccuccagaucggcaacaucaucuccaucuggaucagccacuccauccagcuggggaaccagaaccagaucgagacgugcaaccagagcgucaucaccuacgagaacaacaccugggugaaccagaccuacgugaacaucuccaacacgaacuucgccgcgggccagagcgucguguccgugaagcuggccgggaacagcucccucugcccggucagcggcugggccaucuacuccaaggacaacagcauccgcaucggcuccaagggggacguguucgugauccgggagcccuucaucagcugcagcccccuggagugccgcaccuucuuccugacccagggcgcccuccugaacgacaagcacuccaacgggaccaucaaggaccggucccccuaccgcacgcugaugagcugcccgaucggcgagguccccucccccuacaacagccgguucgagagcguggccugguccgcgagcgccugccacgacgggaucaacuggcucaccaucggcaucuccggccccgacaacggggccguggccguccugaaguacaacggcaucaucaccgacaccaucaagagcuggcgcaacaacauccugcggacgcaggaguccgagugcgcgugcgugaacgggagcugcuucaccgugaugaccgacggcccguccgacggccaggccagcuacaagaucuuccgcaucgagaaggggaagaucgucaaguccguggagaugaacgcccccaacuaccacuacgaggagugcagcugcuaccccgacuccagcgagaucacgugcgugugccgggacaacuggcacggcuccaaccgccccugggucagcuucaaccagaaccucgaguaccagaucggguacaucugcuccggcaucuucggggacaacccgcggcccaacgacaagaccggcagcugcggccccguguccagcaacggggccaacggcgugaagggguucuccuucaaguacggcaacggggucuggaucggccgcaccaagagcaucagcucccggaagggcuucgagaugaucugggaccccaacggguggaccggcaccgacaacaacuucagcaucaagcaggacaucguggggaucaacgagugguccggcuacagcggguccuucgugcagcacccggagcugacgggccuggacugcauccgccccugcuucugggucgagcucauccggggccgccccaaggagaacaccaucuggaccagcggguccagcaucuccuucugcggcgugaacagcgacaccauggggugguccuggcccgacggcgccgagcugccguucacgaucgacaaguga

SEQ ID NO: 87149 - RNA, 1410 nt, Artificial Sequence
  derived and/or modified CDS sequence (opt1) from neuraminidase__InfluenzaA__AFN87956
augaaccccaaccagaagaucaucaccaucggcagcgugugcaugaccaucgggauggccaaccugauccuccagaucggcaacaucaucuccaucuggaucagccacuccauccagcuggggaaccagagccagaucgagacgugcaaccaguccgucaucaccuacgagaacaacaccugggugaaccagaccuacgugaacaucagcaacacgaacuucgccgcgggccaguccgucgugagcgugaagcuggucgggaacuccagccucugcccgguguccggcugggccaucuacagcaaggacaacuccauccgcaucggcagcaagggggacguguucgucauccgggagcccuucaucuccugcagcccccuggagugccgcaccuucuuccugacccagggcgcccuccugaacgacaagcacuccaacgggaccaucaaggaccggagccccuaccgcacgcugauguccugcccgaucggcgaggugcccagccccuacaacagccgguucgaguccguggccuggagcgccuccgcgugccacgacgggaucaacuggcucaccaucggcaucagcggccccgacaacggggccgucgccgugcugaaguacaacggcaucaucaccgacaccaucaaguccuggcgcaacaacauccugcggacgcaggagagcgagugcgccugcgugaacggguccugcuucaccaucaugaccgacggcccgagcgacggccaggcguccuacaagaucuuccgcaucgagaaggggaagaucgucaagagcguggagaugaacgcccccaacuaccacuacgaggagugcuccugcuaccccgacagcuccgagaucacgugcgugugccgggacaacuggcacggcagcaaccgccccugggucuccuucaaccagaaccucgaguaccagaucggguacaucugcagcggcaucuucggggacaacccgcggcccaacgacaagaccggcuccugcggccccgugagcuccaacggggccaacggcgugaagggguucagcuucaaguacggcaacggggucuggaucggccgcaccaagagcaucuccagccggaagggcuucgagaugaucugggaccccaacggguggaccggcaccgacaacaacuucuccaucaagcaggacaucguggggacgaacgaguggagcggcuacuccgggagcuucgugcagcacccggagcugaccggccuggacugcauccgccccugcuucugggucgagcucauccggggccgccccaaggagaacaccaucuggaccuccgggagcuccaucagcuucugcggcgugaacuccgacacggucggguggagcuggcccgacggcgccgagcugccguucaccaucgacaacuga

SEQ ID NO: 87150 - RNA, 1410 nt, Artificial Sequence
  derived and/or modified CDS sequence (opt1) from neuraminidase__InfluenzaA__AFN87958
augaaccccaaccagaagaucaucaccaucggcagcgugugcaugaccaucgggauggccaaccugauccuccagaucggcaacaucaucuccaucuggaucagccacuccauccagcuggggaaccagaaccagaucgagacgugcaaccagagcgucaucaccuacgagaacaacaccugggugaaccagaccuacgugaacaucuccaacacgaacuucgccgcgggccagagcgucguguccgugaagcuggccgggaacagcucccucugcccggucagcggcugggccaucuacuccaaggacaacagcauccgcaucggcuccaagggggacguguucgugauccgggagcccuucaucagcugcagcccccuggagugccgcaccuucuuccugacccagggcgcccuccugaacgacaagcacuccaacgggaccaucaaggaccggucccccuaccgcacgcugaugagcugcccgaucggcgagguccccucccccuacaacagccgguucgagagcguggccugguccgcgagcgccugccacgacgggaucaacuggcucaccaucggcaucuccggccccgacaacggggccguggccguccugaaguacaacggcaucaucaccgacaccaucaagagcuggcgcaacaacauccugcggacgcaggaguccgagugcgcgugcgugaacgggagcugcuucaccgugaugaccgacggcccguccgacggccaggccagcuacaagaucuucaagaucgagaaggggaagaucgucaaguccguggagaugaacgcccccaacuaccacuacgaggagugcagcugcuaccccgacuccagcgagaucacgugcgugugccgcgacaacuggcacggcuccaaccggcccugggucagcuucaaccagaaccucgaguaccagaucggguacaucugcuccggcaucuucggggacaacccgcgccccaacgacaagaccggcagcugcggccccgccuccagcaacggggccaacggcgugaagggguucuccuucaaguacggcaacgggguguggaucggccggaccaagagcaccagcucccgcaacggcuucgagaugaucugggaccccaacggguggaccggcacggacaacagcuucuccaugaagcaggacaucgucgggaucaacgaguggagcggcuacuccgggagcuucgugcagcacccggagcugaccggccuggacugcauccggcccugcuucuggguggagcucauccgcggccggcccaaggagaacaccgucuggaccuccgggagcuccaucagcuucugcggcgugaacuccgacacggucggguggagcuggcccgacggcgcggagcugccguucaccaucgacaaguga

SEQ ID NO: 87151 - RNA, 1410 nt, Artificial Sequence
  derived and/or modified CDS sequence (opt1) from neuraminidase__InfluenzaA__AFN87960
augaaccccaaccagaagaucaucaccaucggcagcgugugcaugaccaucgggauggccaaccugauccuccagaucggcaacaucaucuccaucuggaucagccacuccauccagcuggggaaccagagccagaucgagacgugcaaccaguccgucaucaccuacgagaacaacaccugggugaaccagaccuacgugaacaucagcaacacgaacuucgccgcgggccaguccgucgugagcgugaagcuggccgggaacuccagccucugcccggucuccggcugggccaucuacagcaaggacaacuccauccgcaucggcagcaagggggacguguucgugauccgggagcccuucaucuccugcagcccccuggagugccgcaccuucuuccugacccagggcgcccuccugaacgacaagcacuccaacgggaccaucaaggaccggagccccuaccgcacgcugauguccugcccgaucggcgagguccccagccccuacaacagccgguucgaguccguggccuggagcgcguccgccugccacgacgggaucaacuggcucaccaucggcaucagcggccccgacaacggggccguggccguccugaaguacaacggcaucaucaccgacaccaucaaguccuggcgcaacaacauccugcggacgcaggagagcgagugcgcgugcgugaacggguccugcuucaccaucaugaccgacggcccgagcgacggccaggccuccuacaagaucuuccgcaucgagaaggggaagaucgucaagagcguggagaugaacgcccccaacuaccacuacgaggagugcuccugcuaccccgacagcuccgagaucacgugcgugugccgggacaacuggcacggcagcaaccgccccuggguguccuucaaccagaaccucgaguaccagaucggguacaucugcagcggcaucuucggggacaacccgcggcccaacgacaagaccggcuccugcggccccgucagcuccaacggggccaacggcgugaagggguucagcuucaaguacggcaacgggguguggaucggccgcaccaagagcaucuccagccggaagggcuucgagaugaucugggaccccaacggguggaccggcaccgacaacaacuucuccaucaagcaggacaucgucgggaucaacgaguggagcggcuacuccgggagcuucgugcagcacccggagcugacgggccuggacugcauccgccccugcuucuggaucgagcucauccggggccgccccaaggagaacaccaucuggaccuccgggagcuccaucagcuucugcggcgugaacuccgacaccgucggguggagcuggcccgacggcgccgagcugccguucacgaucgacaaguga

SEQ ID NO: 87152 - RNA, 1413 nt, Artificial Sequence
  derived and/or modified CDS sequence (opt1) from neuraminidase__InfluenzaA__AFO64805
augaaccccaaccagaagaucaucaccaucggcagcaucuccaucgccaucgggaucaucagccugaugcuccagaucggcaacaucaucuccaucugggccagccacuccauccagaccgggagccagaaccacacgggcaucugcaaccagcgcaucaucaccuacgagaacuccaccugggugaaccacaccuacgucaacaucaacaacacgaacgugguggcggggaaggacaagaccagcgucacccuggccggcaacuccagccugugcuccaucagcggcugggccaucuacaccaaggacaacuccauccggaucgggagcaagggcgacguguucgugauccgcgagccguucaucuccugcagccaccucgagugccggacguucuuccugacccagggggcccugcucaacgacaagcacuccaacggcaccgucaaggaccgcagccccuaccgggcccugauguccugcccccugggggaggcgcccagcccguacaacagcaaguucgaguccguggccuggagcgccuccgccugccacgacggcaugggcuggcucaccaucgggaucagcggccccgacaacggggcgguggccguccugaaguacaacggcaucaucacggagaccaucaaguccuggaagaagcgcauccugcggacccaggagagcgagugcgugugcgugaacggcuccugcuucaccaucaugacggacgggcccaacaacggcgccgccagcuacaagaucuucaagaucgagaaggggaaggucaccaaguccaucgagcucaacgcccccaacagccacuacgaggagugcuccugcuacccggacaccggcaccgugaugugcgugugccgcgacaacuggcacgggagcaaccggcccugggucuccuucaaccagaaccuggacuaccagaucggcuacaucugcagcggcguguucggggacaacccccgccccaaggacggcgagggguccugcaacccggugacggucgacggcgcggacggggugaagggcuucagcuacaaguacggcaacgggguguggaucggccggaccaaguccaaccgccugcggaagggguucgagaugaucugggaccccaacggcuggaccgacaccgacagcgacuucuccgucaagcaggacgugguggccaucacggacuggagcggguacagcggcuccuucguccagcaccccgagcucaccggccuggacugcauccgccccugcuucuggguggagcugguccgggggcucccgcgcgagaacaccaccaucuggacgagcggcuccagcaucuccuucugcggggugaacagcgacaccgccaacugguccuggcccgacggcgccgagcugcccuucaccaucgacaaguga

SEQ ID NO: 87153 - RNA, 1413 nt, Artificial Sequence
  derived and/or modified CDS sequence (opt1) from neuraminidase__InfluenzaA__AFO64816
augaaccccaaccagaagaucaucaccaucggcagcaucugcauggccaucgggaucaucucccugauccuccagaucggcaacaucgugagcaucuggaucucccacagcauccagaccgggucccagaacuacacgggcaucugcaaccagcgcaucaucaccuacgagaacagcaccugggucaaccagaccuacgugaacaucaacaacacgaacguggucgccgggcaggacaccaccuccguggcgcuggccggcaacagcucccugugcccgaucagcggcugggccaucuacuccaaggacaacagcauccggaucggguccaagggcgacguguucgucauccgcgagcccuucaucagcugcucccaccucgagugccggaccuucuuccugacgcagggggcccugcucaacgacaagcacagcaacggcaccgugaaggaccgcucccccuaccgggcccugaugagcugccccaucggggaggcgccgucccccuacaacagccgcuucgagagcguggccugguccgccagcgccugccacgacggcaugggcuggcugaccaucgggaucuccggccccgacgacggggcggucgccgugcucaaguacaacggcaucaucaccgagacgaucaagagcuggcggcgccggauccugcgcacccaggaguccgagugcgugugcgucaacggcagcugcuucaccaucaugaccgacgggcccaacaacggcccggccuccuacaagaucuucaagaucgagaaggggaaggugaccaagagcaucgagcuggacgcccccaacucccacuacgaggagugcagcugcuaccccgacgccggcacggugaugugcgucugccgggacaacuggcacggguccaaccgccccugggugagcuucaaccagaaccucgacuaccagaucggcuacaucugcuccggcguguucggggacaacccgcggcccaaggacggcaaggggagcugcgaccccgucaccguggacggcgcggacggggugaagggcuucuccuaccgcuacggcaacggggucuggaucggccggaccaagagcaacuccagccgccggggguucgagaugaucugggaccccaacggcuggacggacaccgacuccaaguuccuggugaagcaggacguggucgccaugaccgacuggagcggguacagcggcuccuucgugcagcacccggagcugaccggccucgacugcaugcgccccugcuucugggucgagcugauccgggggcgcccccgggagaacacgaccaucuggaccagcggcuccagcaucuccuucugcggggugaacggcgacaccgccaacuggagcuggcccgacggcgccgagcugccguucacgaucgacaaguga

SEQ ID NO: 87154 - RNA, 1413 nt, Artificial Sequence
  derived and/or modified CDS sequence (opt1) from neuraminidase__InfluenzaA__AFO64827
augaaccccaaccagaagaucaucaccaucggcagcaucuccauggccaucgggaucaucagccugauccuccagaucggcaacaucaucuccaucugggugagccacuccauccagaccgggagccagaaccacacgggcaucugcaaccagcgcaucaucaccuacgagaacuccaccugggucaaccagaccuacgugaacaucaacaacacgaacgugaucgccgggaaggacaagaccagcgucacccuggcgggcaacuccagccugugcccgauccggggcugggccaucuacaccaaggacaacuccauccgcaucgggagcaagggcgacguguucgugauccgggagcccuucaucuccugcagccaccucgagugccgcacguucuuccugacccagggggcccugcucaacgacaagcacuccaacggcaccgucaaggaccggagccccuaccgcgcccugauguccugcccccugggggaggccccgagccccuacaacucccgguucgagagcguggcguggagcgccuccgccugccacgacggcaugggcuggcucaccaucgggaucagcggccccgacgacggggccguggcgguccugaaguacaacggcaucaucacggagaccaucaaguccuggaagaagcgcauccugcggacccaggagagcgagugcgugugcgugaacggcuccugcuucaccaucaugacggacgggcccagcaacggcgccgccuccuaccgcaucuucaagaucgagaaggggaaggucaccaagagcaucgagcucgacgccccgaacucccacuacgaggagugcagcugcuaccccgacaccggcaccgugaugugcgugugccgggacaacuggcacggguccaaccgccccugggucagcuucaaccagaaccuggacuaccagaucggcuacaucugcuccggcguguucggggacaacccccggccgaaggacggcaaggggagcugcgaccccgugacggucgacggcgccgacggggugaagggcuucuccuaccgcuacggcaacgggguguggaucggccggaccaagagcaaccgcuuccggaagggguucgagaugaucugggaccccaacggcuggaccgacaccgacuccgacuuccuggucaagcaggacgugguggcgaugacggacuggagcggguacuccggcagcuucguccagcaccccgagcucaccggccuggacugcaugcgcccgugcuucuggguggagcugguccgggggcgcccccgggagaacaccaccaucuggacgagcggcuccagcaucuccuucugcggggugaacagcgacaccgccaacugguccuggcccgacggcgccgagcuccccuucaccaucgacaaguga

SEQ ID NO: 87155 - RNA, 1413 nt, Artificial Sequence
  derived and/or modified CDS sequence (opt1) from neuraminidase__InfluenzaA__AFO64838
augaaccccaaccagaagaucaucaccaucggcagcaucuccauggccaucgggaucaucagccugauccuccagaucggcaacaucaucuccaucugggccagccacuccauccagaccgggagccagaaccacacgggcaucugcaaccagcgcaucaucaccuacgagaacuccaccugggugaaccagaccuacgucaacaucaacaacacgaacgugguggcggggaaggacaagaccagcgucacccuggccggcaacuccagccugugcccgauccggggcugggccaucuacaccaaggacaacuccauccgcaucgggagcaagggcgacguguucgugauccgggagcccuucaucuccugcagccaccucgagugccgcacguucuuccugacccagggggcccugcucaacgacaagcacuccaacggcaccgucaaggaccggagccccuaccgcgcccugauguccugcccccugggggaggcgccgagccccuacaacucccgguucgagagcguggccuggagcgccuccgccugccacgacggcaugggcuggcucaccaucgggaucagcggccccgacaacggggcgguggccguccugaaguacaacggcaucaucacggagaccaucaaguccuggaagaagcgcauccugcggacccaggagagcgagugcgugugcgugaacggcuccugcuucaccaucaugacggacgggcccagcaacggcgccgccuccuaccgcaucuucaagaucgagaaggggcgggucaccaagagcaucgagcucgacgccccgaacuaccacuacgaggagugcuccugcuaccccgacaccggcaccgugaugugcgugugccgcgacaacuggcacgggagcaaccggcccugggucuccuucaaccagaaccuggacuaccagaucggcuacaucugcagcggcguguucggggacaacccccgcccgaaggacggcgagggguccugcaaccccgugacggucgacggcgcggacggggugaagggcuucagcuaccgguacggcaacgggguguggaucggccgcaccaaguccaaccggcugcgcaagggguucgagaugaucugggaccccaacggcuggaccgacaccgacagcgacuucuccaugaagcaggacgucguggccaugacggacuggagcggguacuccggcagcuucgugcagcaccccgagcucaccggccuggacugcaugcggccgugcuucugggucgagcuggugcgcgggcucccccgggagaacaccaccaucuggacgagcggcuccagcaucuccuucugcggggucaacagcgacaccgccaacugguccuggcccgacggcgccgagcugcccuucaccaucgacaaguga

SEQ ID NO: 87156 - RNA, 1413 nt, Artificial Sequence
  derived and/or modified CDS sequence (opt1) from neuraminidase__InfluenzaA__AFO64849
augaaccccaaccagaagaucaucaccaucggcagcaucuccauggccaucgggaucaucagccugauccuccagaucggcaacaucaucuccaucugggccagccacuccauccagaccgggagccagaaccacacgggcaucugcaaccagcgcaucaucaccuacgagaacuccaccugggugaaccagaccuacgucaacaucaacaacacgaacgugguggcggggaaggacaagaccagcgucacccuggccggcaacuccagccugugcccgauccggggcugggccaucuacaccaaggacaacuccauccgcaucgggagcaagggcgacguguucgugauccgggagcccuucaucuccugcagccaccucgagugccgcacguucuuccugacccagggggcccugcucaacgacaagcacuccaacggcaccgucaaggaccggagccccuaccgcgcccugauguccugcccccugggggaggcgccgagccccuacaacucccgguucgagagcguggccuggagcgccuccgccugccacgacggcaugggcuggcucaccaucgggaucagcggccccgacaacggggcgguggccguccugaaguacaacggcaucaucacggagaccaucaaguccuggaagaagcagauccugcgcacccaggagagcgagugcgugugcgugaacggcuccugcuucaccaucaugacggacgggcccagcaacggcgccgccuccuaccggaucuucaagaucgagaaggggaagaucaccaagagcaucgagcucgacgccccgaacucccacuacgaggagugcagcugcuaccccgacaccggcaccgucaugugcgugugccgcgacaacuggcacggguccaaccggcccugggugagcuucaaccagaaccuggacuaccagaucggcuacaucugcuccggcgucuucggggacaacccccgcccgaaggacggcgaggggagcugcaaccccgugacgguggacggcgcggacggggucaagggcuucuccuaccgguacggcaacgggguguggaucggccgcaccaagagcaaccggcugcgcaagggguucgagaugaucugggaccccaacggcuggaccgacaccgacuccgacuucagcgugaagcaggacgucguggccaugacggacugguccggguacagcggcagcuucgugcagcaccccgagcucaccggccuggacugcaugcggccgugcuucugggucgagcuggugcgcgggcggccccgcgagaacgccaccaucuggaccuccggcagcuccaucagcuucugcggggucaacuccgacacggccaacuggagcuggcccgacggcgccgagcuccccuucaccaucgacaaguga

SEQ ID NO: 87157 - RNA, 1413 nt, Artificial Sequence; identical to SEQ ID NO: 78992
  derived and/or modified CDS sequence (opt1) from neuraminidase__InfluenzaA__AFO64860

SEQ ID NO: 87158 - RNA, 1413 nt, Artificial Sequence
  derived and/or modified CDS sequence (opt1) from neuraminidase__InfluenzaA__AFO64871
augaaccccaaccagaagaucaucaccaucggcagcaucuccaucgccaucgggaucaucagccugauccuccagaucggcaacaucaucuccaucugggccagccacuccauccagaccgggagccagaaccacacgggcgugugcaaccagcgcaucaucaccuacgagaacuccaccugggucaaccagaccuacgugaacaucaacaacacgaacguggucgcggggaaggacaagaccagcaugacccuggccggcaacuccagccugugcccgauccggggcugggccaucuacaccaaggacaacuccauccgcaucgggagcaagggcgacguguucgugauccgggagcccuucaucuccugcagccaccucgagugccgcacguucuuccugacccagggggcccugcucaacgacaagcacuccaacggcaccgucaaggaccggagccccuaccgcgcccugauguccugcccccugggggaggcgccgagccccuacaacucccgguucgagagcguggccuggagcgccuccgccugccacgacggccucggcuggcugaccaucgggaucagcggccccgacaacggggcgguggccguccugaaguacaacggcaucaucacggagaccaucaaguccuggaagaagcgcauccuccggacccaggagagcgagugcgugugcaugaacggcuccugcuucaccaucaugacggacgggcccagcaacggcgccgccuccuaccgcaucuucaagaucgagaaggggcgggugaccaagagcaucgagcuggacgccccgaacuaccacuacgaggagugcuccugcuaccccgacaccggcaccgucaugugcgugugccgcgacaacuggcacgggagcaaccggcccuggguguccuucaaccagaaccuggacuaccagaucggcuacaucugcagcggcgucuucggggacaacccccgcccgaaggacggcgagggguccugcaaccccgugacgguggacggcgcggacggggucaagggcuucagcuaccgguacggcaacgggguguggaucggccgcaccaaguccaaccggcuccgcaagggguucgagaugaucugggaccccaacggcuggaccgacaccgacagcgacuucuccaugcggcaggacaucguggccaugacggacuggagcggguacuccggcagcuucguccagcaccccgagcugaccggccuggacugcaugcgcccgugcuucuggguggagcucgugcgggggcugccccgcgagaacaccaccaucuggacgagcggcuccagcaucuccuucugcggggucaacagcgacaccgccaacugguccuggcccgacggcgccgagcugcccuucaccaucgacaaguga

SEQ ID NO: 87159 - RNA, 1413 nt, Artificial Sequence
  derived and/or modified CDS sequence (opt1) from neuraminidase__InfluenzaA__AFO64882
augaaccccaaccagaagaucaucaccaucggcagcaucuccaucgccaucgggaucaucagccugaugcuccagaucggcaacaucaucuccaucugggccagccacuccauccagaccgggagccagaaccacacgggcaucugcaaccagcgcaucaucaccuacgagaacuccaccugggugaaccacaccuacgucaacaucaacaacacgaacgugguggcggggaaggacaagaccagcgucacccuggccggcaacuccagccugugcuccaucagcggcugggccaucuacaccaaggacaacuccauccggaucgggagcaagggcgacguguucgugauccgcgagccguucaucuccugcagccaccucgagugccggacguucuuccugacccagggggcccugcucaacgacaagcacuccaacggcaccgucaaggaccgcagccccuaccgggcccugauguccugcccccugggggaggcgcccagcccguacaacagcaaguucgaguccguggccuggagcgccuccgccugccacgacggcaugggcuggcucaccaucgggaucagcggccccgacaacggggcgguggccguccugaaguacaacggcaucaucacggagaccaucaaguccuggaagaagcgcauccugcggacccaggagagcgagugcgugugcgugaacggcuccugcuucaccaucaugacggacgggcccagcaacggcgccgccuccuacaagaucuucaagaucgagaaggggaaggucaccaagagcaucgagcucaacgcccccaacucccacuacgaggagugcagcugcuacccggacaccggcaccgugaugugcgugugccgcgacaacuggcacggguccaaccggcccugggucagcuucaaccagaaccuggacuaccagaucggcuacaucugcuccggcguguucggggacaacccccgccccaaggacggcgaggggagcugcaacccggugacggucgacggcgcggacggggugaagggcuucuccuacaaguacggcaacgggguguggaucggccggaccaagagcaaccgccugcggaagggguucgagaugaucugggaccccaacggcuggaccgacaccgacuccgacuucagcgucaagcaggacgugguggccaucacggacuggagcggguacuccggcagcuucguccagcaccccgagcucaccggccuggacugcauccgccccugcuucuggguggagcugguccgggggcgcccgcgggagaacaccaccaucuggacguccggcagcuccaucagcuucugcggggugaacuccgacaccgccaacuggagcuggcccgacggcgccgagcuccccuucaccaucgacaaguga

SEQ ID NO: 87160 - RNA, 1413 nt, Artificial Sequence
  derived and/or modified CDS sequence (opt1) from neuraminidase__InfluenzaA__AFO64893
augaaccccaaccagaagaucaucaccaucggcagcaucuccguggccaucgggaucaucagccugaugcuccagaucggcaacaucaucuccaucugggccagccacuccauccagaccgggagccagaaccacacgggcaucugcaaccagcgcaucaucaccuacgagaacuccaccugggucaaccacaccuacgugaacaucaacaacacgaacguggucgcggggaaggacaagaccagcgugacccuggccggcaacuccagccugugcuccaucagcggcugggccaucuacaccaaggacaacuccauccggaucgggagcaagggcgacguguucgucauccgcgagccguucaucuccugcagccaccucgagugccggacguucuuccugacccagggggcccugcucaacgacaagcacuccaacggcaccgugaaggaccgcagccccuaccgggcccugauguccugcccccugggggaggcgcccagcccguacaacagcaaguucgaguccguggccuggagcgccuccgccugccacgacggcaugggcuggcucaccaucgggaucagcggccccgacaacggggcggucgccgugcugaaguacaacggcaucaucacggagaccaucaaguccuggaagaagcgcauccugcggacccaggagagcgagugcgugugcgucaacggcuccugcuucaccaucaugacggacgggcccagcgacggcgccgccuccuacaagaucuucaagaucgagaaggggaaggugaccaagagcaucgagcucaacgcccccaacucccacuacgaggagugcagcugcuacccggacaccggcaccgugaugugcgucugccgcgacaacuggcacggguccaaccggcccugggugagcuucaaccagaaccuggacuaccagaucggcuacaucugcuccggcguguucggggacaacccccgccccaaggacggcgaggggagcugcaacccggucacgguggacggcgcggacggggugaagggcuucuccuacaaguacggcaacggggucuggaucggccggaccaagagcaaccgcuuccggaagggguucgagaugaucugggaccccaacggcuggaccgacaccgacuccgacuucagcgugaagcaggacguggucgccaucacggacuggagcggguacuccggcagcuucgugcagcaccccgagcugaccggccucgacugcauccgccccugcuucugggucgagcuggugcgggggcgcccgcgggagaacaccaccaucuggacguccggcagcuccaucagcuucugcggggugaacuccgacaccgccaacuggagcuggcccgacggcgccgagcugcccuucaccaucgacaaguga

SEQ ID NO: 87161 - RNA, 1413 nt, Artificial Sequence
  derived and/or modified CDS sequence (opt1) from neuraminidase__InfluenzaA__AFO64904
augaaccccaaccagaagaucaucaccaucggcagcaucuccguggccaucgggaucaucagccugauccuccagaucggcaacaucaucuccaugugggccagccacuccauccagaccgggagccagaacuacacgggcaucugcaaccagcgcaucaucaccuacgagaacaacaccugggucaaccagaccuacgugaacaucaacaacacgaacguggucgcggggaaggacaagaucuccaugacccuggccggcaacagcucccugugcccgauccggggcugggccaucuacaccaaggacaacagcauccgcaucggguccaagggcgacguguucgugauccgggagcccuucaucagcugcucccaccucgagugccgcaccuucuuccugacgcagggggcccugcucaacgacaagcacagcaacggcaccgucaaggaccggucccccuaccgcgcccugaugagcugcccccugggggaggcgccgucccccuacaacagccgguucgaguccguggccuggagcgccagcgccugccacgacggccucggcuggcugaccaucgggaucuccggccccgacaacggggcgguggccguccugaaguacaacggcaucaucaccgagacgaucaagagcuggaagaagcagauccuccgcacccaggaguccgagugcgugugcgugaacggcagcugcuucaccaucaugaccgacgggcccuccaaccgggccgccagcuaccgcaucuucaagaucgagaagggccgggucacgaaguccaucgagcuggacgccccgaacuaccacuacgaggagugcagcugcuaccccgacaccgggaccgugaugugcgugugccgcgacaacuggcacggcuccaaccggcccugggucagcuucaaccagaaccuggacuaccagaucggguacaucugcuccggcguguucggcgacaacccccgcccgaaggacggggagggcagcugcaaccccgugaccgucgacggggcggacggcgugaagggguucuccuacaaguacggcaacggcguguggaucgggcggaccaagagcaaccgccuccggaagggcuucgagaugaucugggaccccaacggguggacggacaccgacuccgacuucagcaugaagcaggacgucguggccaugaccgacugguccggcuacagcggguccuucgugcagcaccccgagcugacgggccuggacugcaugcgcccgugcuucugggucgagcucgugcggggccugccccgcgagaacaccaccaucuggaccagcgggagcuccaucagcuucugcggcgucaacuccgagacggccaacuggagcuggcccgacggggccgagcugcccuucaccaucgacaaguga

SEQ ID NO: 87162 - RNA, 1413 nt, Artificial Sequence
  derived and/or modified CDS sequence (opt1) from neuraminidase__InfluenzaA__AFO65019
augaaccccaaccagaagaucaucaccaucggcagcaucuccaucgccaucgggaucaucagccugaugcuccagaucggcaacaucaucuccaucugggccagccacuccauccagaccgggagccagaaccacacgggcaucugcaaccagcgcaucaucaccuacgagaacuccaccugggugaaccacaccuacgucaacaucaacaacacgaacgugguggcggggaaggacaagaccagcgucacccuggccggcaacuccagccugugcuccaucagcggcugggccaucuacaccaaggacaacuccauccggaucgggagcaagggcgacguguucgugauccgcgagccguucaucuccugcagccaccucgagugccggacguucuuccugacccagggggcccugcucaacgacaagcacuccaacggcaccgucaaggaccgcagccccuaccgggcccugauguccugcccccugggggaggcgcccagcccguacaacagcaaguucgaguccguggccuggagcgccuccgccugccacgacggcaugggcuggcucaccaucgggaucagcggccccgacaacggggcgguggccguccugaaguacaacggcaucaucacggagaccaucaaguccuggaagaagcgcauccugcggacccaggagagcgagugcgugugcgugaacggcuccugcuucaccaucaugacggacgggcccagcaacggcgccgccuccuacaagaucuucaagaucgagaaggggaaggucaccaagagcaucgagcucaacgcccccaacucccacuacgaggagugcagcugcuacccggacaccggcaccgugaugugcgugugccgcgacaacuggcacggguccaaccggcccugggucagcuucaaccagaaccuggacuaccagaucggcuacaucugcuccggcguguucggggacaacccccgccccaaggacggcgaggggagcugcaacccggugacggcggacggcgccgacggggucaagggcuucuccuacaaguacggcaacgggguguggaucggccggaccaagagcaaccgccugcggaagggguucgagaugaucugggaccccaacggcuggaccgacaccgacuccgacuucagcgugaagcaggacgucguggccaucacggacuggagcggguacuccggcagcuucgugcagcaccccgagcucaccggccuggacugcauccgccccugcuucugggucgagcuggugcgggggcgcccgcgggagaacaccaccaucuggacguccggcagcuccaucagcuucugcggggucaacuccgacaccgccaacuggagcuggcccgacggcgccgagcuccccuucaccaucgacaaguga

SEQ ID NO: 87163 - RNA, 1413 nt, Artificial Sequence; identical to SEQ ID NO: 80477
  derived and/or modified CDS sequence (opt1) from neuraminidase__InfluenzaA__AFO65030

SEQ ID NO: 87164 - RNA, 1413 nt, Artificial Sequence
  derived and/or modified CDS sequence (opt1) from neuraminidase__InfluenzaA__AFO65041
augaaccccaaccagaagaucaucaccaucggcagcaucuccaucgccaucgggaucaucagccugaugcuccagaucggcaacaucaucuccaucugggccagccacuccauccagaccgggagccagaaccacacgggcgugugcaaccagcgcaucaucaccuacgagaacuccaccugggucaaccacaccuacgugaacaucaacaacacgaacguggucgcggggaaggacaagaccagcgugacccuggccggcaacuccagccugugcuccaucagcggcugggccaucuacaccaaggacaacuccauccggaucgggagcaagggcgacguguucgucauccgcgagccguucaucuccugcagccaccucgagugccggacguucuuccugacccagggggcccugcucaacgacaagcacuccaacggcaccgugaaggaccgcagccccuaccgggcccugauguccugcccccugggggaggcgcccagcccguacaacagcaaguucgaguccguggccuggagcgccuccgccugccacgacggcaugggcuggcucaccaucgggaucagcggccccgacaacggggcggucgccgugcugaaguacaacggcaucaucacggagaccaucaaguccuggaagaagcagauccugcgcacccaggagagcgagugcgugugcgucaacggcuccugcuucaccaucaugacggacgggcccagcaacggcgccgccuccuacaagaucuucaagaucgagaaggggaaggugaccaagagcaucgagcucaacgcccccaacuuccacuacgaggagugcuccugcuacccggacaccggcaccgugaugugcgucugccgggacaacuggcacgggagcaaccgccccuggguguccuucaaccagaaccuggacuaccagaucggcuacaucugcagcggcguguucggggacaacccccggcccaaggacggcgagggguccugcaacccggucacgguggacggcgcgaacggggugaagggcuucagcuacaaguacggcaacggggucuggaucggccgcaccaaguccaaccggcugcgcaagggguucgagaugaucugggaccccaacggcuggaccgacaccgacagcgacuucuccgugaagcaggacguggucgccaucacggacuggagcggguacagcggcuccuucgugcagcaccccgagcucaccggccuggacugcauccggcccugcuucugggucgagcuggugcgcgggcucccgcgggagaacaccaccaucuggacgagcggcuccagcaucuccuucugcggggugaacagcgacaccgccaacugguccuggcccgacggcgccgagcugcccuucaccaucgacaaguga

SEQ ID NO: 87165 - RNA, 1413 nt, Artificial Sequence
  derived and/or modified CDS sequence (opt1) from neuraminidase__InfluenzaA__AFO65052
augaaccccaaccagaagaucaucaccaucggcagcaucuccaucgccaucgggaucaucagccugaugcuccagaucggcaacaucaucuccaucugggccagccacuccauccagaccgggagccagaaccacacgggcgugugcaaccagcgcaucaucaccuacgagaacuccaccugggucaaccacaccuacgugaacaucaacaacacgaacgugaucgcggggaaggacaagaccagcaugacccuggccggcaacuccagccugugcuccaucagcggcugggccaucuacaccaaggacaacuccauccggaucgggagcaagggcgacgucuucgugauccgcgagccguucaucuccugcagccaccucgagugccggacguucuuccugacccagggggcccugcucaacgacaagcacuccaacggcaccgugaaggaccgcagccccuaccgggcccugauguccugcccccugggggaggcgcccagcccguacaacagcaaguucgaguccgucgccuggagcgccuccgccugcaacgacggcaugggcuggcucaccaucgggaucagcggccccgacaacggggcgguggccgugcugaaguacaacggcaucaucacggagaccaucaaguccuggaagaagcagauccugcgcacccaggagagcgagugcgucugcgugaacggcuccugcuucaccaucaugacggacgggcccagcaacggcgccgccuccuacaagaucuucaagaucgagaaggggaaggugaccaagagcaucgagcucaacgcccccaacuuccacuacgaggagugcuccugcuacccggacaccggcaccgucaugugcgugugccgggacaacuggcacgggagcaaccgccccuggguguccuucaaccagaaccuggacuaccagaucggcuacaucugcagcggcgucuucggggacaacccccggcccaaggacggcgagggguccugcaacccggugacgguggacggcgcgaacggggucaagggcuucagcuacaaguacggcaacgggguguggaucggccgcaccaaguccaaccggcugcgcaagggguucgagaugaucugggaccccaacggcuggaccgacaccgacagcgacuucuccgugaagcaggacgucguggccaucacggacuggagcggguacagcggcuccuucgugcagcaccccgagcucaccggccuggacugcauccggcccugcuucugggucgagcuggugcgcgggcucccgcgggagaacaccaccaucuggacgagcggcuccagcaucuccuucugcggggucaacagcgacaccgccaacugguccuggcccgacggcgccgagcugcccuucaccaucgacaaguga

SEQ ID NO: 87166 - RNA, 1413 nt, Artificial Sequence; identical to SEQ ID NO: 78852
  derived and/or modified CDS sequence (opt1) from neuraminidase__InfluenzaA__AFO66139

SEQ ID NO: 87167 - RNA, 1413 nt, Artificial Sequence
  derived and/or modified CDS sequence (opt1) from neuraminidase__InfluenzaA__AFO66150
augaaccccaaccagaagaucaucaccaucggcagcaucuccguggccaucgggaucaucagccugauccuccagaucggcaacaucaucuccaucugggccagccacuccauccagaccgggagccagaacuacacgggcaucugcaaccagcgcaucaucaccuacgagaaccggaccugggucaaccagaccuacgugaacaucaacaacacgaacguggucgcggggaaggacaagaccuccaugacccuggccggcaacagcucccugugcccgauccgcggcugggccaucuacaccaaggacaacagcauccggaucggguccaagggcgacguguucgugauccgcgagcccuucaucagcugcucccaccucgagugccggacguucuuccugacccagggggcccugcucaacgacaagcacagcaacggcaccaucaaggaccgcucccccuuccgggcccugaugagcugcccccugggggaggcgccgucccccuacaacagccgcuucgaguccgucgccuggagcgccagcgccugccacgacggccucggcuggcugaccaucgggaucuccggccccgacaacggggcgguggccgugcugaaguacaacggcaucaucacggagaccaucaagagcuggaagaagcagauccuccggacccaggaguccgagugcgucugcgugaacggcagcugcuucaccaucaugacggacgggcccuccaaccgcgccgccagcuaccggaucuucaagaucgagaagggccgcgugaccaaguccaucgagcuggacgccccgaacuaccacuacgaggagugcagcugcuaccccgacaccgggaccgucaugugcgugugccgggacaacuggcacggcuccaaccgccccugggugagcuucaaccagaaccuggacuaccagaucggguacaucugcuccggcgucuucggcgacaacccccggccgaaggacggggagggcagcugcaaccccgugacgguggacggggcggacggcgucaagggguucuccuaccgcuacggcaacggcguguggaucgggcggaccaagagcaaccgcauccggaagggcuucgagaugaucugggaccccaacggguggaccgacaccgacuccgacuucagcaugaagcaggacguggucgccaugacggacugguccggcuacagcggguccuucgugcagcaccccgagcucaccggccuggacugcaugcgcccgugcuucuggguggagcugguccggggccucccccgcgagaacaccaccaucuggacgagcgggagcuccaucagcuucugcggcgugaacuccgagaccgccaacuggagcuggcccgacggggccgagcugcccuucaccaucgacaaguga

SEQ ID NO: 87168 - RNA, 1413 nt, Artificial Sequence
  derived and/or modified CDS sequence (opt1) from neuraminidase__InfluenzaA__AFO66161
augaaccccaaccagaagaucaucaccaucggcagcaucuccaucgccaucgggaucaucagccugaugcuccagaucggcaacaucaucuccaucugggccagccacuccauccagaccgggagccagaaccacacgggcgugugcaaccagcgcaucaucaccuacgagaacuccaccugggucaaccacaccuacgugaacaucaacaacacgaacgugaucgcggggaaggacaagaccagcgucacccuggccggcaacuccagccugugcuccaucagcggcugggccaucuacaccaaggacaacuccauccggaucgggagcaagggcgacguguucgugauccgcgagccguucaucuccugcagccaccucgagugccggacguucuuccugacccagggggcccugcucaacgacaagcacuccaacggcaccgucaaggaccgcagccccuaccgggcccugauguccugcccccugggggaggcgcccagcccguacaacagcaaguucgaguccguggccuggagcgccuccgccugccacgacggcaugggcuggcucaccaucgggaucagcggccccgacaacggggcgguggccguccugaaguacaacggcaucaucacggagaccaucaaguccuggaagaagcagauccugcgcacccaggagagcgagugcgugugcgugaacggcuccugcuucaccaucaugacggacgggcccagcaacggcgccgccuccuacaagaucuucaagaucgagaaggggaaggucaccaagagcaucgagcucaacgcccccaacuuccacuacgaggagugcuccugcuacccggacaccggcaccgugaucugcgugugccgggacaacuggcacgggagcaaccgccccugggucuccuucaaccagaaccuggacuaccagaucggcuacaucugcagcggcguguucggggacaacccccggcccaaggacggcgagggguccugcaacccggugacggucgacggcgcgaacggggugaagggcuucagcuacaaguacggcaacgggguguggaucggccgcaccaaguccaaccggcugcgcaagggguucgagaugaucugggaccccaacggcuggaccgacaccgacagcgacuucuccgucaagcaggacgugguggccaucacggacuggagcggguacagcggcuccuucguccagcaccccgagcucaccggccuggacugcauccggcccugcuucuggguggagcugguccgcgggcucccgaaggagaacaccaccaucuggacgagcggcuccagcaucuccuucugcggggugaacagcgacaccgccaacugguccuggcccgacggcgccgagcugcccuucaccaucgacaaguga

SEQ ID NO: 87169 - RNA, 1413 nt, Artificial Sequence
  derived and/or modified CDS sequence (opt1) from neuraminidase__InfluenzaA__AFO66172
augaaccccaaccagaagaucaucaccaucggcagcaucuccaucgccaucgggaucaucagccugaugcuccagaucggcaacaucaucuccaucugggccagccacuccauccagaccgggagccagaaccacacgggcaucugcaaccagcgcaucaucaccuacgagaacuccaccugggugaaccacaccuacgucaacaucaacaacacgaacgugguggcggggaaggacaagaccagcgucacccuggccggcaacuccagccugugcuccaucagcggcugggccaucuacaccaaggacaacuccauccggaucgggagcaagggcgacguguucgugauccgcgagccguucaucuccugcagccaccucgagugccggacguucuuccugacccagggggcccugcucaacgacaagcacuccaacggcaccgucaaggaccgcagccccuaccgggcccugauguccugcccccugggggaggcgcccagcccguacaacagcaaguucgaguccguggccuggagcgccuccgccugccacgacggcaugggcuggcucaccaucgggaucagcggccccgacaacggggcgguggccguccugaaguacaacggcaucaucacggagaccaucaaguccuggaagaagcgcauccugcggacccaggagagcgagugcgugugcaugaacggcuccugcuucaccaucaugacggacgggcccagcaacggcgccgccuccuacaagaucuucaagaucgagaaggggaaggugaccaagagcaucgagcucaacgcccccaacuuccacuacgaggagugcuccugcuacccggacaccggcaccgucaugugcgugugccgcgacaacuggcacgggagcaaccggcccuggguguccuucaaccagaaccuggacuaccagaucggcuacaucugcagcggcgucuucggggacaacccccgccccaaggacggcgagggguccugcaacccggugacgguggacggcgcggacggggucaagggcuucagcuacaaguacggcaacgggguguggaucggccggaccaaguccaaccgccugcggaagggguucgagaugaucugggaccccaacggcuggaccgacaccgacagcgacuucuccgugaagcaggacgucguggccaucacggacuggagcggguacagcggcuccuucgugcagcaccccgagcucaccggccuggacugcauccgccccugcuucugggucgagcuggugcgggggcucccgcgcgagaacaccaccaucuggacgagcggcuccagcaucuccuucugcggggucaacagcgacaccgccaacugguccuggcccgacggcgccgagcugcccuucaccaucgacaaguga

SEQ ID NO: 87170 - RNA, 1413 nt, Artificial Sequence; identical to SEQ ID NO: 78954
  derived and/or modified CDS sequence (opt1) from neuraminidase__InfluenzaA__AFO66183

SEQ ID NO: 87171 - RNA, 1413 nt, Artificial Sequence
  derived and/or modified CDS sequence (opt1) from neuraminidase__InfluenzaA__AFO66194
augaaccccaaccagaagaucaucaccaucggcagcaucuccaucgccaucgggaucaucagccugaugcuccagaucggcaacaucaucuccaucugggccagccacuccauccagaccgggagccagaaccacacgggcgugugcaaccagcgcaucaucaccuacgagaacuccaccugggucaaccacaccuacgugaacaucaacaacacgaacgugaucgcggggaaggacaagaccagcgucacccuggccggcaacuccagccugugcuccaucagcggcugggccaucuacaccaaggacaacuccauccggaucgggagcaagggcgacguguucgugauccgcgagccguucaucuccugcagccaccucgagugccggacguucuuccugacccagggggcccugcucaacgacaagcacuccaacggcaccgucaaggaccgcagccccuaccgggcccugauguccugcccccugggggaggcgcccagcccguacaacagcaaguucgaguccguggccuggagcgccuccgccugccacgacggcaugggcuggcucaccaucgggaucagcggccccgacaacggggcgguggccguccugaaguacaacggcaucaucacggagaccaucaaguccuggaagaagcagauccugcgcacccaggagagcgagugcgugugcgugaacggcuccugcuucaccaucaugacggacgggcccagcaacggcgccgccuccuacaagaucuucaagaucgagaaggggaaggucaccaagagcaucgagcucaacgcccccaacuuccacuacgaggagugcuccugcuacccggacaccggcaccgugaugugcgugugccgggacaacuggcacgggagcaaccgccccugggucuccuucaaccagaaccuggacuaccagaucggcuacaucugcagcggcguguucggggacaacccccggcccaaggacggcgagggguccugcaacccggugacggucgacggcgcgaacggggugaagggcuucagcuacaaguacggcaacgggguguggaucggccgcaccaaguccaaccggcugcgcaagggguucgagaugaucugggaccccaacggcuggaccgacaccgacagcgacuucuccgucaagcaggacaucguggccaucacggacuggagcggguacagcggcuccuucgugcagcaccccgagcucaccggccuggacugcauccggcccugcuucugggucgagcuggugcgcgggcucccgaaggagaacaccaccaucuggacgagcggcuccagcaucuccuucugcggggucaacagcgacaccgccaacugguccuggcccgacggcgccgagcugcccuucaccaucgacaaguga

SEQ ID NO: 87172 - RNA, 1410 nt, Artificial Sequence; identical to SEQ ID NO: 80579
  derived and/or modified CDS sequence (opt1) from neuraminidase__InfluenzaA__AFO66205

SEQ ID NO: 87173 - RNA, 1413 nt, Artificial Sequence; identical to SEQ ID NO: 78439
  derived and/or modified CDS sequence (opt1) from neuraminidase__InfluenzaA__AFO66216

SEQ ID NO: 87174 - RNA, 1413 nt, Artificial Sequence; identical to SEQ ID NO: 78410
  derived and/or modified CDS sequence (opt1) from neuraminidase__InfluenzaA__AFO66227

SEQ ID NO: 87175 - RNA, 1413 nt, Artificial Sequence
  derived and/or modified CDS sequence (opt1) from neuraminidase__InfluenzaA__AFO66238
augaaccccaaccagaagaucaucaccaucggcagcaucuccaucgccaucgggaucaucagccugaugcuccagaucggcaacaucaucuccaucugggccagccacuccauccagaccgggagccagaaccacacgggcaucugcaaccagcgcaucaucaccuacgagaacuccaccugggugaaccacaccuacgucaacaucaacaacacgaacgugguggcggggaaggacaagaccagcgucacccuggccggcaacuccagccugugcuccaucagcggcugggccaucuacaccaaggacaacuccauccggaucgggagcaagggcgacguguucgugauccgcgagccguucaucuccugcagccaccucgagugccggacguucuuccugacccagggggcccugcucaacgacaagcacuccaacggcaccgucaaggaccgcagccccuaccgggcccugauguccugcccccugggggaggcgcccagcccguacaacagcaaguucgaguccguggccuggagcgccuccgccugccacgacggcaugggcuggcucaccaucgggaucagcggccccgacaacggggcgguggccguccugaaguacaacggcaucaucacggagaccaucaaguccuggaagaagcagauccugcgcacccaggagagcgagugcgugugcaugaacggcuccugcuucaccaucaugacggacgggcccagcaacggcgccgccuccuacaagaucuucaagaucgagaaggggaaggugaccaagagcaucgagcucaacgcccccaacuuccacuacgaggagugcuccugcuacccggacaccggcaccgucaugugcgugugccgggacaacuggcacgggagcaaccgccccuggguguccuucaaccagaaccuggacuaccagaucggcuacaucugcagcggcgucuucggggacaacccccggcccaaggacggcgagggguccugcaacccggugacgguggacggcgcggacggggucaagggcuucagcuacaaguacggcaacgggguguggaucggccgcaccaaguccaaccggcugcgcaagggguucgagaugaucugggaccccaacggcuggaccaacaccgacagcgacuucuccgugaagcaggacgucguggccaucacggacuggagcggguacagcggcuccuucgugcagcaccccgagcucaccggccuggacugcauccggcccugcuucugggucgagcuggugcgcgggcucccgcgggagaacaccaccaucuggacgagcggcuccagcaucuccuucugcggggucaacagcgacaccgccaacugguccuggcccgacggcgccgagcugcccuucaccaucgacaaguga

SEQ ID NO: 87176 - RNA, 1413 nt, Artificial Sequence
  derived and/or modified CDS sequence (opt1) from neuraminidase__InfluenzaA__AFO66249
augaaccccaaccagaagaucaucaccaucggcagcaucuccaucgccaucgggaucaucagccugaugcuccagaucggcaacaucaucuccaucugggccagccacuccauccagaccgggagccagaaccacacgggcaucugcaaccagcgcaucaucaccuacgagaacuccaccugggugaaccacaccuacgucaacaucaacaacacgaacgugguggcggggaaggacaagaccagcgucacccuggccggcaacuccagccugugcuccaucagcggcugggccaucuacaccaaggacaacuccauccggaucgggagcaagggcgacguguucgugauccgcgagccguucaucuccugcagccaccucgagugccggacguucuuccugacccagggggcccugcucaacgacaagcacuccaacggcaccgucaaggaccgcagccccuaccgggcccugauguccugcccccugggggaggcgcccagcccguacaacagcaaguucgaguccguggccuggagcgccuccgccugccacgacggcaugggcuggcucaccaucgggaucagcggccccgacaacggggcgguggccguccugaaguacaacggcaucaucacgggcaccaucaaguccuggaagaagcagauccugcgcacccaggagagcgagugcgugugcaugaacggguccugcuucaccaucaugacggacggccccagcaacggggccgccuccuacaagaucuucaagaucgagaagggcaaggugaccaagagcaucgagcucaacgcccccaacuuccacuacgaggagugcuccugcuacccggacaccgggaccgucaugugcgugugccgggacaacuggcacggcagcaaccgccccuggguguccuucaaccagaaccuggacuaccagaucggcuacaucugcagcggggucuucggcgacaacccccggcccaaggacggggagggcuccugcaacccggugacgguggacggggcggacggcgucaagggcuucagcuacaaguacgggaacggcguguggaucgggcgcaccaaguccaaccggcugcgcaagggcuucgagaugaucugggaccccaacggguggaccaacaccgacagcgacuucuccgugaagcaggacgucguggccaucacggacuggagcggcuacagcggcuccuucgugcagcaccccgagcucaccgggcuggacugcauccggcccugcuucugggucgagcuggugcgcggccucccgcgggagaacaccaccaucuggacgagcggguccagcaucuccuucugcggcgucaacagcgacaccgccaacugguccuggcccgacggcgccgagcugcccuucaccaucgacaaguga

SEQ ID NO: 87177 - RNA, 1413 nt, Artificial Sequence
  derived and/or modified CDS sequence (opt1) from neuraminidase__InfluenzaA__AFP33330
augaaccccaaccagaagaucaucaccaucggcagcaucuccguggccaucgggaucaucagccugauccuccagaucggcaacaucaucuccaucugggccagccacuccauccaggcggggagccagaacuacaccggcaucugcaaccagaagaucaucacguacgagaaccgcaccugggucaaccagaccuacgugaacaucaacaacaccaacguggucgccgggaaggacaagacguccaugacccuggccggcaacagcucccugugcccgauccggggcugggccaucuacaccaaggacaacagcauccgcaucggguccaagggcgacguguucgugauccgggagcccuucaucagcugcucccaccucgagugccgcaccuucuuccugacgcagggggcccugcucaacgacaagcacagcaacggcaccaucaaggaccggucccccuuccgcgcgcugaugagcugcccccugggggaggccccgucccccuacaacagccgguucgaguccgucgccuggagcgccagcgcgugccacgacggccucggcuggcugaccaucgggaucuccggccccgacaacggggccguggccgugcugaaguacaacggcaucaucaccgagacgaucaagagcuggaagaagcagauccuccgcacccaggaguccgagugcgucugcgugaacggcagcugcuucaccaucaugaccgacgggcccuccaaccgggccgccagcuaccgcaucuucaagaucgagaagggccgggugacgaaguccaucgagcuggacgcgccgaacuaccacuacgaggagugcagcugcuaccccgacaccgggaccgucaugugcgugugccgcgacaacuggcacggcuccaaccggcccugggugagcuucaaccagaaccuggacuaccagaucggguacaucugcuccggcgucuucggcgacaacccccgcccgaaggacggggagggcagcugcaaccccgugaccguggacggggccgacggcgucaagggguucuccuaccgguacggcaacggcguguggaucgggcgcaccaagagcaaccggcuccgcaagggcuucgagaugaucugggaccccaacggguggacggacaccgacuccgacuucagcaugaagcaggacguggucgccaugaccgacugguccggcuacagcggguccuucgugcagcaccccgagcugacgggccuggacugcaugcggccgugcuucuggguggagcucguccgcggccugccccgggagaacaccaccaucuggaccagcgggagcuccaucagcuucugcggcgugaacuccgagacggccaacuggagcuggcccgacggggccgagcugcccuucaccaucgacaaguga

SEQ ID NO: 87178 - RNA, 1413 nt, Artificial Sequence
  derived and/or modified CDS sequence (opt1) from neuraminidase__InfluenzaA__AFP33331
augaaccccaaccagaagaucaucaccaucggcagcaucuccaucgccaucgggaucaucagccugaugcuccagaucggcaacaucaucuccaucugggccagccacuccauccagaccgggagccagaaccacacgggcaucugcaaccagcgcaucaucaccuacgagaacuccaccugggugaaccacaccuacgucaacaucaacaacacgaacgugaucgcggggaaggacaagaccagcgugacccuggccggcaacuccagccugugcuccaucagcggcugggccaucuacaccaaggacaacuccauccggaucgggagcaagggcgacgucuucgugauccgcgagccguucaucuccugcagccaccucgagugccggacguucuuccugacccagggggcccugcucaacgacaagcacuccaacggcaccgugaaggaccgcagccccuaccgggcccugauguccugcccccugggggaggcgcccagcccguacaacagcaaguucgaguccgucgccuggagcgccuccgccugccacgacggcaugggcuggcucaccaucgggaucagcggccccgacaacggggcgguggccgugcugaaguacaacggcaucaucacggagaccaucaaguccuggaagaagcgcauccugcggacccaggagagcgagugcgucugcgugaacggcuccugcuucaccaucaugacggacgggcccagcaacggcgccgccuccuacaagaucuucaagaucgagaaggggaaggugaccaagagcaucgagcucaacgcccccaacuuccacuacgaggagugcuccugcuacccggacaccggcaccgucaugugcgugugccgcgacaacuggcacgggagcaaccggcccuggguguccuucaaccagaaccuggacuaccagaucggcuacaucugcagcggcgucuucggggacaacccccgccccaaggacggcgagggguccugcaacccggugacgguggacggcgcggacggggucaagggcuucagcuacaaguacggcaacgggguguggaucggccggaccaaguccaaccgccugcggaagggguucgagaugaucugggaccccaacggcuggaccgacaccgacagcgacuucuccgugaagcaggacgucguggccaucacggacuggagcggguacagcggcuccuucgugcagcaccccgagcucaccggccuggacugcauccgccccugcuucugggucgagcuggugcgggggcucccgcgcgagaacaccaccaucuggacgagcggcuccagcaucuccuucugcggggucaacagcgacaccgccaacugguccuggcccgacggcgccgagcugcccuucaccaucgacaaguga

SEQ ID NO: 87179 - RNA, 1410 nt, Artificial Sequence; identical to SEQ ID NO: 85167
  derived and/or modified CDS sequence (opt1) from neuraminidase__InfluenzaA__AFQ32576

SEQ ID NO: 87180 - RNA, 1410 nt, Artificial Sequence
  derived and/or modified CDS sequence (opt1) from neuraminidase__InfluenzaA__AFQ37282
augaaccccaaccagaagaucaucaccaucggcagcgugugcaugaccaucgggauggccaaccugauccuccagaucggcaacaucaucuccaucuggaucagccacuccauccagcuggggaaccagaaccagaucgagacgugcaaccagagcgucaucaccuacgagaacaacaccugggugaaccagaccuacgugaacaucuccaacacgaacuucgccgcgggccagagcgucguguccgugaagcuggccgggaacagcucccucugcccggucagcggcugggccaucuacuccaaggacaacagcauccgcaucggcuccaagggggacguguucgugauccgggagcccuucaucagcugcagcccccuggagugccgcaccuucuuccugacccagggcgcccuccugaacgacaagcacuccaacgggaccaucaaggaccggucccccuaccgcacgcugaugagcugcccgaucggcgagguccccucccccuacaacagccgguucgagagcguggccugguccgcgagcgccugccacgacgggaucaacuggcucaccaucggcaucuccggccccgacaacggggccguggccguccugaaguacaacggcaucaucaccgacaccaucaagagcuggcgcaacaacauccugcggacgcaggaguccgagugcgcgugcgugaacgggagcugcuucaccgugaugaccgacggcccguccgacggccaggccagcuacaagaucuuccgcaucgagaaggggaagaucgucaaguccguggagaugaacgcccccaacuaccacuacgaggagugcagcugcuaccccgacuccagcgagaucacgugcgugugccgggacaacuggcacggcuccaaccgccccugggucagcuucaaccagaaccucgaguaccagaucggguacaucugcuccggcaucuucggggacaacccgcggcccaacgacaagaccggcagcugcggccccguguccagcaacggggccaacggcgugaagggguucuccuucaaguacggcaacggggucuggaucggccgcaccaagagcaucagcucccggaacggcuucgagaugaucugggaccccaacggguggaccggcaccgacaacaacuucagcaucaagcaggacaucguggggaucaacgagugguccggcuacagcggguccuucgugcagcacccggagcugacgggccuggacugcauccgccccugcuucugggucgagcucauccggggccgccccaaggagaacaccaucuggaccgggggcagcuccaucagcuucugcggggugaacuccgacaccgucggcuggagcuggcccgacggcgccgagcugccguucacgaucgacaaguga

SEQ ID NO: 87181 - RNA, 1410 nt, Artificial Sequence
  derived and/or modified CDS sequence (opt1) from neuraminidase__InfluenzaA__AFQ55691
augaaccccaaccagaagaucaucaccaucggcguggucaacaccacgcugagcaccaucgcccuccugaucggggugggcaaccugguguucaacaccgucauccacgagaagaucggggaccaccagaccgugacgcacccgaccaccaccacgcccgccauccccaacugcuccgacaccaucaucaccuacaacaacaccaucaucaacaacaucacgaccaccaucaucaccgaggcggagcgccccuucaagagcccgcucccccugugccccuuccggggcuucuuccccuuccacaaggacaacgccauccgccugggggagaacaaggacgugaucgucacgcgggagccguacguguccugcgacaacgacaacugcuggagcuucgcccucgcccagggcgcccugcugggcaccaagcacuccaacgggaccaucaaggaccgcacccccuaccggagccucauccgcuuccccaucggcacggcgcccgugcuggggaacuacaaggagaucugcaucgccugguccagcuccagcugcuucgacggcaaggaguggaugcacgucugcaugaccgggaacgacaacgacgccuccgcccagaucaucuacgcgggcaagaugaccgacagcaucaaguccuggcggaaggacauccugcgcacccaggagagcgagugccagugcaucgacggcacgugcgugguggccgucaccgacgggccggccgccuccagcgccgaccaccggaucuacuggauccgcgagggcaagaucaucaaguacgaggacgugcccaagaccaagauccagcaccucgaggagugcuccugcuacguggacgucgacguguacugcaucugccgggacaacuggaaggggagcaaccgccccuggaugcggaucaacaacgagaccauccuggagacgggcuacgugugcuccaaguuccacagcgacacgccccgcccggcggaccccagcaccgucuccugcgacagccccuccaacgugaacggcgggcccggcgugaagggguucggcuucaaggccgggaacgacgucuggcugggccggaccgugagcaccuccggccgcagcggguucgagaucaucaaggugaccgagggcuggaucaacuccccgaaccacgccaagagcaucacccagacccucauguccaacaacgacuggagcggguacuccggcagcuucaucaucaagacgaaggacugcuuccagcccugcuucuacgucgagcugauccgggggcgccccaacaagaacgacgacguguccuggaccagcaacuccaucgucaccuucugcggccuggacaacgagcccggcagcgggaacuggccggacggcuccaacaucggguucaugcccaaguga

SEQ ID NO: 87182 - RNA, 1410 nt, Artificial Sequence
  derived and/or modified CDS sequence (opt1) from neuraminidase__InfluenzaA__AFR68156
augaaccccaaccagaagaucaucaccaucggcagcgugugcaugaccaucgggauggccaaccugauccuccagaucggcaacaucaucuccaucuggaucagccacuccauccagcugcgcaaccagagccagaucgagacgugcaaccaguccgucaucaccuacgagaacaacaccugggugaaccagaccuacgugaacaucagcaacacgaacuucgccgcggggcaguccgucgugagcgugaagcuggccggcaacuccagccucugcccggucuccgggugggccaucuacagcaaggacaacuccauccggaucggcagcaagggcgacguguucgugauccgcgagcccuucaucuccugcagcccccuggagugccggaccuucuuccugacccagggggcccuccugaacgacaagcacuccaacggcaccaucaaggaccgcagccccuaccggacgcugauguccugcccgaucggggagguccccagccccuacaacagccgcuucgaguccguggccuggagcgcguccgccugccacgacggcaucaacuggcucaccaucgggaucagcggccccgacaacggcgccguggccguccugaaguacaacgggaucaucaccgacaccaucaaguccuggcggaacaacauccugcgcacgcaggagagcgagugcgcgugcgugaacggcuccugcuucaccaucaugaccgacgggccgagcgacggccaggccuccuacaagaucuuccggaucgagaagggcaagaucgucaagagcguggagaugaacgcccccaacuaccacuacgaggagugcuccugcuaccccgacagcuccgagaucacgugcgugugccgcgacaacuggcacgggagcaaccggcccuggguguccuucaaccagaaccucgaguaccagaucggcuacaucugcagcgggaucuucggcgacaacccgcgccccaacgacaagaccggguccugcggccccgucagcuccaacggcgccaacggggugaagggcuucagcuucaaguacgggaacggcguguggaucgggcggaccaagagcaucuccagccgcaagggcuucgagaugaucugggaccccaacggcuggaccgggaccgacaacaacuucuccaucaagcaggacaucgucggcaucaacgaguggagcggguacuccggcagcuucgugcagcacccggagcugacggggcuggacugcauccggcccugcuucuggguggagcucauccgcggccggcccaaggagaacaccaucuggaccuccggcagcuccaucagcuucugcggggucaacuccgacaccgugggcuggagcuggcccgacggggccgagcugccguucacgaucgacaaguga

SEQ ID NO: 87183 - RNA, 1410 nt, Artificial Sequence; identical to SEQ ID NO: 87182
  derived and/or modified CDS sequence (opt1) from neuraminidase__InfluenzaA__AFR68166

SEQ ID NO: 87184 - RNA, 1410 nt, Artificial Sequence
  derived and/or modified CDS sequence (opt1) from neuraminidase__InfluenzaA__AFR68176
augaaccccaaccagaagaucaucaccaucggcagcgugucccugaccaucagcacgaucugcuucuucaugcagaucgccauccucaucaccaccgucacccugcacuucaagcaguacgaguucaacuccccgcccaacaaccaggugaugcugugcgagcccacgaucaucgagcgcaacaucaccgagaucguguaccucaccaacaccacgaucgagaaggagaucugccccaagcuggccgaguaccggaacuggagcaagccgcagugcgacaucaccggguucgcgcccuucuccaaggacaacagcauccgccuguccgccggcggggacaucugggucacccgggagcccuacgugagcugcgaccccgacaagugcuaccaguucgcccucggccaggggaccacgcugaacaacgugcacuccaacaacaccguccgcgaccggaccccguaccgcacccugcucaugaacgagcugggcgugcccuuccaccugggcacgaagcaggucugcaucgccuggagcuccagcuccugccacgacgggaaggccuggcuccacgugugcaucaccggcgacgacaagaacgcgaccgccagcuucaucuacaacgggcggcugguggacuccguggccagcugguccaaggacauccugcgcacccaggagagcgagugcgucugcaucaacggcacgugcgccguggugaugaccgacggguccgcgagcggcaaggccgacaccaagauccucuucaucaaggagggcaagaucguccacaccagcacgcuguccgggagcgcccagcacguggaggagugcuccugcuacccccgguaccccggcgugcgcugcgucugccgggacaacuggaaggggagcaaccgcccgaucguggacaucaacaucaaggaccacuccaucgugagcuccuacgucugcagcggccuggugggcgacacgccccggaagaacgacuccagcuccagcgggcacugccucgaccccaacaacgaggagggcgggcacggcgugaaggggugggccuucgacgacggcaacgacgucuggaugggccgcaccaucaacgagaccucccggcugggguacgagaccuucaaggugaucgagggcuggagcaaccccaaguccaagcugcagaucaaccgccaggucaucguggaccgggggaaccgcagcggcuacuccgggaucuucagcguggagggcaagaacugcaucaaccggugcuucuacgucgagcucauccgcggccggaaggaggagaccgaggugcuguggaccuccaacagcaucguggucuucugcgggaccagcggcacguacgggaccggcuccuggccggacggggccgaccugaaccucaugcccaucuga

SEQ ID NO: 87185 - RNA, 1410 nt, Artificial Sequence; identical to SEQ ID NO: 80762
  derived and/or modified CDS sequence (opt1) from neuraminidase__InfluenzaA__AFR84677

SEQ ID NO: 87186 - RNA, 1410 nt, Artificial Sequence; identical to SEQ ID NO: 81649
  derived and/or modified CDS sequence (opt1) from neuraminidase__InfluenzaA__AFR84687

SEQ ID NO: 87187 - RNA, 1410 nt, Artificial Sequence; identical to SEQ ID NO: 80752
  derived and/or modified CDS sequence (opt1) from neuraminidase__InfluenzaA__AFR84696

SEQ ID NO: 87188 - RNA, 1410 nt, Artificial Sequence; identical to SEQ ID NO: 80762
  derived and/or modified CDS sequence (opt1) from neuraminidase__InfluenzaA__AFR84706

SEQ ID NO: 87189 - RNA, 1410 nt, Artificial Sequence; identical to SEQ ID NO: 80752
  derived and/or modified CDS sequence (opt1) from neuraminidase__InfluenzaA__AFR84716

SEQ ID NO: 87190 - RNA, 1410 nt, Artificial Sequence; identical to SEQ ID NO: 80752
  derived and/or modified CDS sequence (opt1) from neuraminidase__InfluenzaA__AFR84726

SEQ ID NO: 87191 - RNA, 1410 nt, Artificial Sequence; identical to SEQ ID NO: 80752
  derived and/or modified CDS sequence (opt1) from neuraminidase__InfluenzaA__AFR84736

SEQ ID NO: 87192 - RNA, 1410 nt, Artificial Sequence; identical to SEQ ID NO: 80752
  derived and/or modified CDS sequence (opt1) from neuraminidase__InfluenzaA__AFR84746

SEQ ID NO: 87193 - RNA, 1410 nt, Artificial Sequence; identical to SEQ ID NO: 80752
  derived and/or modified CDS sequence (opt1) from neuraminidase__InfluenzaA__AFR84756

SEQ ID NO: 87194 - RNA, 1410 nt, Artificial Sequence; identical to SEQ ID NO: 80752
  derived and/or modified CDS sequence (opt1) from neuraminidase__InfluenzaA__AFR84766

SEQ ID NO: 87195 - RNA, 1410 nt, Artificial Sequence; identical to SEQ ID NO: 80752
  derived and/or modified CDS sequence (opt1) from neuraminidase__InfluenzaA__AFR84776

SEQ ID NO: 87196 - RNA, 1410 nt, Artificial Sequence; identical to SEQ ID NO: 80752
  derived and/or modified CDS sequence (opt1) from neuraminidase__InfluenzaA__AFR84786

SEQ ID NO: 87197 - RNA, 1410 nt, Artificial Sequence; identical to SEQ ID NO: 80752
  derived and/or modified CDS sequence (opt1) from neuraminidase__InfluenzaA__AFR84796

SEQ ID NO: 87198 - RNA, 1410 nt, Artificial Sequence; identical to SEQ ID NO: 80762
  derived and/or modified CDS sequence (opt1) from neuraminidase__InfluenzaA__AFR84806

SEQ ID NO: 87199 - RNA, 1410 nt, Artificial Sequence; identical to SEQ ID NO: 80752
  derived and/or modified CDS sequence (opt1) from neuraminidase__InfluenzaA__AFR84816

SEQ ID NO: 87200 - RNA, 1410 nt, Artificial Sequence; identical to SEQ ID NO: 80762
  derived and/or modified CDS sequence (opt1) from neuraminidase__InfluenzaA__AFR84826

SEQ ID NO: 87201 - RNA, 1410 nt, Artificial Sequence
  derived and/or modified CDS sequence (opt1) from neuraminidase__InfluenzaA__AFR84836
augaaccccaaccagaagaucaucaccaucggcagcgugugcaugaccaucgggauggccaaccugauccuccagaucggcaacaucaucuccaucuggaucagccacuccauccagcuggggaaccagaaccagaucgagacgugcaaccagagcgucaucaccuacgagaacaacaccugggugaaccagaccuacgugaacaucuccaacacgaacuucgccgcgggccagagcgucguguccgugaagcuggccgggaacagcucccucugcccggucggcggcugggccaucuacagcaaggacaacuccgugcgcaucgggagcaagggcgacguguucgucauccgggagcccuucaucuccugcagcccccuggagugccgcaccuucuuccugacccagggggcccuccugaacgacaagcacuccaacggcaccaucaaggaccggagccccuaccgcacgcugauguccugcccgaucggggaggugcccagccccuacaacucccgguucgagagcguggccuggagcgcguccgccugccacgacggcaucaacuggcucaccaucggcaucagcgggcccgacaacggcgccgucgccgugcugaaguacaacgggaucaucaccgacaccaucaaguccuggcgcaacaacauccugcggacgcaggagagcgagugcgcgugcgugaacggcuccugcuucaccgucaugaccgacggcccgagcaacgggcaggccuccuacaagaucuuccgcaucgagaagggcaagaucgucaagagcguggagaugaacgcccccaacuaccacuacgaggagugcuccugcuaccccgacagcuccgagaucacgugcgugugccgggacaacuggcacgggagcaaccgccccuggguguccuucaaccagaaccucgaguaccagaucggcuacaucugcagcgggaucuucggcgacaacccgcggcccaacgacaagaccggcuccugcgggcccgugagcuccaacggcgccaacggggucaagggcuucagcuucaaguacgggaacggcguguggaucggccgcaccaaguccaucagcagccggaacggguucgagaugaucugggaccccaacggcuggaccgagaccgacaacaacuucuccaucaagcaggacaucguggggaucaacgaguggagcggcuacuccgggagcuucguccagcacccggagcugacgggccuggacugcauccgccccugcuucuggguggagcucauccggggccgccccaaggagaacaccaucuggaccuccgggagcuccaucagcuucugcggcgucaacuccgacaccgugggguggagcuggcccgacggcgccgagcugccguucacgaucgacaaguga

SEQ ID NO: 87202 - RNA, 1410 nt, Artificial Sequence; identical to SEQ ID NO: 81566
  derived and/or modified CDS sequence (opt1) from neuraminidase__InfluenzaA__AFR84846

SEQ ID NO: 87203 - RNA, 1410 nt, Artificial Sequence; identical to SEQ ID NO: 80762
  derived and/or modified CDS sequence (opt1) from neuraminidase__InfluenzaA__AFR84856

SEQ ID NO: 87204 - RNA, 1410 nt, Artificial Sequence
  derived and/or modified CDS sequence (opt1) from neuraminidase__InfluenzaA__AFR84866
augaaccccaaccagaagaucaucaccaucggcagcgugugcaugaccaucgggauggccaaccugauccuccagaucggcaacaucaucuccaucuggaucagccacuccauccagcuggggaaccagaaccagaucgagacgugcaaccagagcgucaucaccuacgagaacaacaccugggugaaccagaccuacgugaacaucuccaacacgaacuucgccgcgggccagagcgucguguccgugaagcuggccgggaacagcucccucugcccggucagcggcugggccaucuacuccaaggacaacagcauccgcaucggcuccaagggggacguguucgugauccgggagcccuucaucagcugcagcccccuggagugccgcaccuucuuccugacccagggcgcccuccugaacgacaagcacuccaacgggaccaucaaggaccggucccccuuccgcacgcugaugagcugcccgaucggcgagguccccucccccuacaacagccgguucgagagcguggccugguccgcgagcgccugccacgacgggaucaacuggcucaccaucggcaucuccggccccgacaacggggccguggccguccugaaguacaacggcaucaucaccgacaccaucaagagcuggcgcaacaacauccugcggacgcaggaguccgagugcgcgugcgugaacgggagcugcuucaccgugaugaccgacggcccguccgacggccaggccagcuacaagaucuuccgcaucgagaaggggaagaucgucaaguccguggagaugaacgcccccaacuaccacuacgaggagugcagcugcuaccccgacuccagcgagaucacgugcgugugccgggacaacuggcacggcuccaaccgccccugggucagcuucaaccagaaccucgaguaccagaucggguacaucugcuccggcaucuucggggacaacccgcggcccaacgacaagaccggcagcugcggccccguguccagcaacggggccaacggcgugaagggguucuccuucaaguacggcaacggggucuggaucggccgcaccaagagcaucagcucccggaacggcuucgagaugaucugggaccccaacggguggaccggcaccgacaacaacuucagcaucaagcaggacaucguggggaucaacgagugguccggcuacagcggguccuucgugcagcacccggagcugacgggccuggacugcauccgccccugcuucugggucgagcucauccggggccgccccaaggagaacaccaucuggaccagcggguccagcaucuccuucugcggcgugaacagcgacaccgucgggugguccuggcccgacggcgccgagcugccguucacgaucgacaaguga

SEQ ID NO: 87205 - RNA, 1410 nt, Artificial Sequence; identical to SEQ ID NO: 81470
  derived and/or modified CDS sequence (opt1) from neuraminidase__InfluenzaA__AFR84876

SEQ ID NO: 87206 - RNA, 1410 nt, Artificial Sequence; identical to SEQ ID NO: 81566
  derived and/or modified CDS sequence (opt1) from neuraminidase__InfluenzaA__AFR84895

SEQ ID NO: 87207 - RNA, 1410 nt, Artificial Sequence; identical to SEQ ID NO: 81566
  derived and/or modified CDS sequence (opt1) from neuraminidase__InfluenzaA__AFR84905

SEQ ID NO: 87208 - RNA, 1410 nt, Artificial Sequence; identical to SEQ ID NO: 81566
  derived and/or modified CDS sequence (opt1) from neuraminidase__InfluenzaA__AFR84915

SEQ ID NO: 87209 - RNA, 1410 nt, Artificial Sequence; identical to SEQ ID NO: 81566
  derived and/or modified CDS sequence (opt1) from neuraminidase__InfluenzaA__AFR84925

SEQ ID NO: 87210 - RNA, 1353 nt, Artificial Sequence
  derived and/or modified CDS sequence (opt1) from neuraminidase__InfluenzaA__AFU83119
augaaccccaaccagaagaucaucaccaucggcagcgugucccugaccaucgccacggucugcuuccucaugcagaucgccauccuggcgaccaccgugacccugcacuucaagcagaacgagugcagcaucccguccagcaaccaggugguccccugcgagcccaucaucguggagcgcaacgugacggaguaccgggacugguccaagccccagugccagaucaccggguucgccccguucagcaaggacaacuccauccgccucagcgccggcggggacaucugggucacccgggagcccuacguguccugcagccccgacaagugcuaccaguucgcccugggccaggggaccacgcuggacaacaagcacuccaacggcaccauccacgaccgcaucccccaccggacccuccugaugaacgagcugggcgugccguuccaccucgggaccaagcaggucugcaucgccuggagcuccagcuccugccacgacggccgcgcguggcugcacgugugcgugacgggggacgaccggaacgccaccgccagcuucaucuacgacggcguccugguggacuccaucgggagcuggucccagaacauccuccgcacccaggagagcgagugcgugugcaucaacgggaccugcacggucgugaugaccgacggcagcgccuccggccgggcggacacccgcauccuguucaucaaggagggcaagaucgugcacgucagcccccuguccgggagcgcccagcacaucgaggagugcuccugcuacccccgguaccccgacgugcgcugcgugugccgggacaacuggaagggcagcaaccgcccgaucaucgacaucuccauggccgacuacggcaucgacagcuccuacgucugcagcgggcucgugggcgacacgccccggaacgacgacuccagcuccaacagcaacugcaaggaccccaacaacgagcgcgggaaccccggcgugaaggggugggccuucgacuacggcaacgacgucuggaugggccggaccaucuccaaggacagccgcuccggguacgagaccuuccgggugaucggcggguggaccaucgccaacagcaagucccaggucaaccgccaggugaucguggacaacaacaacuggagcggcuacagcgggaucuucuccgucgagggcaagagcugcaucaaccggugcuucuacguggagcugauccgcggccgcccgcaggagacccgggugugguggacguccaacagcaucgucgcguucugcgggaccuccggcaccuacgggaccggcagcuggcccgacggggccaacaucaacuucaugcccaucuga

SEQ ID NO: 87211 - RNA, 1410 nt, Artificial Sequence
  derived and/or modified CDS sequence (opt1) from neuraminidase__InfluenzaA__AFV53208
augaaccccaaccagaagaucaucaccaucggcagcgugucccugaccaucgccacggucugcuuccucauccagaucgccauccuggugaccaccgugacccugcacuucaagcagcacgagugcgacagcccggcguccaaccaggucaugcccugcgagcccaucaucaucgagcgcaacaucacggagaucguguaccucaacaacaccaccaucgagaaggagaucugccccaagguggucgaguaccggaacuggagcaagccgcagugccagaucaccggguucgcccccuucuccaaggacaacagcauccgccuguccgccggcggggacaucugggugacgcgggagcccuacgugagcugcgaccccggcaagugcuaccaguucgcccuggggcagggcaccacccucgacaacaagcacuccaacgacaccauccacgaccgcaucccgcaccggacgcugcugaugaacgagcucggcguccccuuccaccuggggacccgccaggugugcaucgccuggagcuccagcuccugccacgacggcaaggcguggcugcacgugugcaucaccggggacgacaagaacgccaccgccagcuucaucuacgacggccggcucauggacuccaucgggagcuggucccagaacauccugcgcacgcaggagagcgagugcgucugcaucaacgggaccugcaccguggugaugaccgacggcuccgccagcggccgggcggacacgcgcauccuguucaucgaggagggcaagaucguccacaucagcccccucuccgggagcgcccagcacguggaggagugcuccugcuacccccgguacccgggcgugcgcugcaucugccgggacaacuggaagggcagcaaccgccccgucaucgacaucaacauggaggacuacuccaucgacagcuccuacgugugcagcgggcuggugggcgacacgccccggaacgacgaccgcuccagcaacuccaacugccggaaccccaacaacgagcgcgggaaccagggcgucaaggggugggccuucgacaacggcgacgacguguggaugggccggaccaucagcaaggaccugcgcuccggguacgagaccuucaaggugaucggcggguggagcaccccgaacuccaagagccagaucaaccggcaggucaucguggacuccgacaaccgcagcggcuacuccgggaucuucagcgucgagggcaagagcugcaucaaccgcugcuucuacguggagcucauccggggccgcaagcaggagacccgggugugguggaccuccaacagcaucgucguguucugcgggaccuccggcacguacgggaccggcagcuggcccgacggggccaacaucaacuucaugcccaucuga

SEQ ID NO: 87212 - RNA, 1410 nt, Artificial Sequence
  derived and/or modified CDS sequence (opt1) from neuraminidase__InfluenzaA__AFV53219
augaaccccaaccagaagaccaucaccaucggcagcgugucccugacgaucgccaccgucugcuuccucaugcagaucgccauccuggcgaccaccgugacgcugcacuucaagcagcacgagugcgacagcccggccuccaaccaggugaugcccugcgagcccaucaucaucgagcgcaacaucaccgagaucgucuaccucaacaacaccaccaucgagaaggagaucugccccgaggugguggaguaccggaacuggagcaagccgcagugccagaucacgggguucgcccccuucuccaaggacaacagcauccgccuguccgccggcggggacaucugggucacccgggagcccuacgugagcugcgaccccggcaagugcuaccaguucgcccuggggcagggcaccacccucgacaacaagcacuccaacggcacgauccacgaccgcaucccgcaccggacccugcugaugaacgagcucggggugcccuuccaccugggcaccaagcaggucugcguggcguggagcuccagcuccugccacgacgggaaggccuggcugcacgugugcgucaccggcgacgaccgcaacgccacggccagcuucaucuacgacgggcggcucguggacuccaucggcagcuggucccagaacauccugcgcacccaggagagcgagugcgugugcaucaacgggaccugcaccgucgugaugacggacggcuccgcgagcggccgggccgacacccgcauccuguucaucaaggaggggaagaucgugcacaucagcccccucuccggcagcgcccagcacaucgaggagugcuccugcuacccccgguacccggacguccgcugcaucugccgggacaacuggaagggcagcaaccgccccgugaucgacaucaacauggaggacuacuccaucgacagcuccuacgugugcagcgggcuggucggcgacacgccccggaacgacgacuccagcuccaacagcaacugccgcgaccccaacaacgagcgggggaacccgggcgugaaggggugggccuucgacaacggcgacgacguguggaugggccgcaccaucaacaaggagucccggagcggguacgagaccuucaaggucaucggcgggugguccacccccaacagcaagucccaggugaaccgccaggucaucguggacaacaacaacuggagcggcuacuccgggaucuucagcguggagggcaagagcugcaucaaccggugcuucuacgucgagcugauccgcggccgcccccaggagacccgggugugguggaccuccaacagcaucguggucuucugcgggacguccggcaccuacgggaccggcagcuggcccgacggggccaacaucaacuucaugccgaucuga

SEQ ID NO: 87213 - RNA, 1410 nt, Artificial Sequence
  derived and/or modified CDS sequence (opt1) from neuraminidase__InfluenzaA__AFV53230
augaaccccaaccagaagaucaucaccaucggcagcgugucccugaccaucgccacggucugcuuccucaugcagaucgccauccuggugaccaccgugacccugcacuucaagcagcacgagugcgacagcccggcguccaaccaggucaugcccugcgagcccaucaucaucgagcgcaacaucacggagaucguguaccucaacaacaccaccaucgagaaggagaucugccccaagguggucgaguaccggaacuggagcaagccgcagugcaagaucaccggguucgcccccuucuccaaggacaacagcauccgccuguccgccggcggggacaucugggugacgcgggagcccuacgugagcugcgaccccggcaagugcuaccaguucgcccuggggcagggcaccacccucgacaacaagcacuccaacgacaccauccacgaccgcaucccgcaccggacgcugcugaugaacgagcucggcguccccuuccaccuggggacccgccaggugugcaucgccuggagcuccagcuccugccacgacggcaaggcguggcugcacgugugcgucaccggggacgacaagaacgccaccgccagcuucaucuacgacggccggcucguggacuccaucgggagcuggucccagaacauccugcgcacgcaggagagcgagugcgugugcaucaacgggaccugcaccgucgugaugaccgacggcuccgccagcggccgggcggacacgaagauccuguucaucgaggagggcaagaucgugcacaucagcccccucuccgggagcgcccagcacgucgaggagugcuccugcuacccccgcuacccggacgugcggugcaucugccgcgacaacuggaagggcagcaaccggcccguggucgacaucuccauggaggacuacagcaucgacuccagcuacgugugcuccggccuggugggggacacgccccgcaacgacgaccggagcuccaacagcaacugccgcaaccccaacaacgagcggggcaaccagggggucaagggcugggccuucgacaacggggacgacguguggaugggccgcaccaucuccaaggaccugcggagcggcuacgagaccuucaaggucaucgggggcugguccaccccgaacagcaagucccagaucaaccgccaggugaucguggacagcgacaaccgguccggguacagcggcaucuucagcgucgaggggaaguccugcaucaaccgcugcuucuacguggagcucauccgcggccggaagcaggagacccgcgugugguggaccagcaacuccaucgucguguucugcggcaccagcgggacguacggcaccggguccuggcccgacggcgccaacaucaaccugaugcccaucuga

SEQ ID NO: 87214 - RNA, 1410 nt, Artificial Sequence; identical to SEQ ID NO: 80429
  derived and/or modified CDS sequence (opt1) from neuraminidase__InfluenzaA__AFV53241

SEQ ID NO: 87215 - RNA, 1410 nt, Artificial Sequence; identical to SEQ ID NO: 78115
  derived and/or modified CDS sequence (opt1) from neuraminidase__InfluenzaA__AFV53252

SEQ ID NO: 87216 - RNA, 1413 nt, Artificial Sequence
  derived and/or modified CDS sequence (opt1) from neuraminidase__InfluenzaA__AFV53263
augaaccccaaccagaagaucaucaccaucggcagcaucugcauggccaucgggaccaucucccugauccuccagaucggcaacaucaucagcaucuggaucucccacagcauccagacggggucccagaaccacaccggcaucugcaaccagcgcaucaucaccuacgagaacaacaccugggugaaccagacguacgucaacaucagcaacaccaacgugguggccgggaaggacaccaccuccaugauccuggcgggcaacagcucccugugcccgauccggggcugggccaucuacagcaaggacaacuccauccgcaucgggagcaagggcgacgucuucgugauccgggagcccuucaucuccugcagccaccucgagugccgcacguucuuccugacccagggggcccugcucaacgacaagcacuccaacggcaccgugaaggaccggagccccuaccgcgcccugauguccugccccaucggggaggccccgagccccuacaacucccgguucgagagcgucgcguggagcgccuccgccugccacgacggcaugggcuggcugaccaucgggaucagcggccccgacgacggggccguggcggugcucaaguacaacggcaucaucacggagaucaucaaguccuggcgcaagcagauccugcggacccaggagagcgagugcgucugcgugaacggcuccugcuucaccaucaugaccgacgggcccagcaaccgcccggccuccuaccggaucuucaagaucgagaagggcaagaucaccaagagcaucgagcuggacgcccccaacucccacuacgaggagugcagcugcuaccccgacacggggaaggugaugugcgucugccgcgacaacuggcacggcuccaaccggcccugggugagcuucaaccagaaccucgacuaccagaucggguacaucugcuccggcguguucggcgacaacccgcgccccaaggacgggaagggcagcugcgaccccgucaacguggacggggccgacggcgugaagggguucuccuaccgguacggcaacggcgucuggaucgggcgcaccaagagcaacuccagccggaagggcuucgagaugaucugggaccccaacggguggaccaacacggacggcaacuucuccgugaagcaggacguggucgccaugaccgacuggagcggguacagcggcuccuucgugcagcacccggagcugaccggccuggacugcauccgccccugcuucuggguggagcucauccgggggcgcccccgggaggagaccacgaucuggaccagcggcuccagcaucuccuucugcggggucaacagcgacaccgugaacugguccuggcccgacggcgcggagcugccguucaccaucgacaaguga

SEQ ID NO: 87217 - RNA, 1410 nt, Artificial Sequence
  derived and/or modified CDS sequence (opt1) from neuraminidase__InfluenzaA__AFV53274
augaaccccaaccagaagaucaucaccaucggcagcgugucccugaucaucgccaccgucugcuuccucaugcagaucgccauccuggugacgaccgugacccugcacuucaagcagcacgagugcgacagcccggcguccaaccaggucaugcccugcgagcccaucaucaucgagcgcaacaucaccgagaucguguaccucaacaacacgaccaucgagaaggagaucugccccaagguggucgaguaccggaacuggagcaagccgcagugccagaucaccggguucgcccccuucuccaaggacaacagcauccgccuguccgccggcggggacaucugggugacccgggagcccuacgugagcugcgaccccggcaagugcuaccaguucgcccuggggcagggcacgacccucgacaacaagcacuccaacgacaccauccacgaccgcaucccgcaccggacccugcugaugaacgagcucggcguccccuuccaccuggggacgcgccaggugugcguggccuggagcuccagcuccugccacgacggcaaggcguggcugcacgucugcgugaccggggacgacaagaacgccaccgccagcuucaucuacgacggccggcucguggacuccaucgggagcuggucccagaacauccugcgcacccaggagagcgagugcgucugcaucaacggcacgugcaccguggugaugaccgacggcuccgccagcgggcgggcggacacccgcauccuguucaucgaggagggcaagaucguccacaucagcccccucuccgggagcgcccagcacguggaggagugcuccugcuacccccgguacccggacgugcgcugcaucugccgggacaacuggaagggcagcaaccgccccgucaucgacaucaacauggaggacuacuccaucgacagcuccuacgugugcagcggccuggugggggacacgccccggaacgacgaccgcuccagcaacuccaacugccggaaccccaacaacgagcgcggcaacccgggggucaagggcugggccuucgacaacggggacgacguguggaugggccggaccaucagcaaggaccugcgcuccggcuacgagaccuucaaggucaucgggggcuggagcacccccaacuccaagagccagaucaaccgccaggugaucguggacuccaacaacuggagcggguacuccggcaucuucagcgucgagggcaagagcugcaucaaccggugcuucuacguggagcucauccgcgggcggcagcaggagacgcgcgugugguggaccuccaacagcaucgucguguucugcggcaccuccgggaccuacggcacggggagcuggcccgacggcgccaacaucaacuucaugcccaucuga

SEQ ID NO: 87218 - RNA, 1410 nt, Artificial Sequence
  derived and/or modified CDS sequence (opt1) from neuraminidase__InfluenzaA__AFV53285
augaaccccaaccagaagaucaucaccaucggcagcgugucccugaccaucgccacggucugcuuccucaugcagaucgccauccuggcgaccaccgugacccugcacuucaagcagcacgagugcgacagcccggccuccaaccaggugaugcccugcgagcccaucaucaucgagcgcaacaucacggagaucgucuaccucaacaacaccaccaucgagaaggagaucugccccgaggugguggaguaccggaacuggagcaagccgcagugccagaucaccggguucgcccccuucuccaaggacaacagcauccgccuguccgccggcggggacaucugggucacgcgggagcccuacgugagcugcgaccccggcaagugcuaccaguucgcccuggggcagggcaccacccucgacaacaagcacuccaacggcaccauccacgaccgcaucccgcaccggacgcugcugaugaacgagcucggggugcccuuccaccugggcaccaagcaggucugcguggcguggagcuccagcuccugccacgacgggaaggccuggcugcacgugugcgucaccggcgacgaccgcaacgccaccgccagcuucaucuacgacgggcggcucguggacuccaucggcagcuggucccagaacauccugcgcacgcaggagagcgagugcgugugcaucaacgggaccugcaccgucgugaugaccgacggcuccgcgagcggccgggccgacacgcgcauccuguucaucaaggaggggaagaucgugcacaucagcccccucuccggcagcgcccagcacaucgaggagugcuccugcuacccccggcacccggacguccgcugcaucugccgggacaacuggaagggcagcaaccgccccgugaucaacaucaacauggaggacuacuccaucgacagcuccuacgugugcagcgggcuggucggcgacacgccccggaacgacgacuccagcuccaacagcaacugccgcgaccccaacaacgagcgggggaacccgggcgugaaggggugggccuucgacaacggcgacgacguguggaugggccgcaccaucaacaaggacucccggagcggguacgagaccuucaaggucaucggcgggugguccacccccaacagcaagucccaggugaaccgccaggucaucguggacaacaacaacuggagcggcuacuccgggaucuucagcguggagggcaagagcugcaucaaccggugcuucuacgucgagcugauccgcggccgcccccaggagacccgggugugguggaccuccaacagcaucguggucuucugcgggaccuccggcacguacgggaccggcagcuggcccgacggggccaacaucaacuucaugccgaucuga

SEQ ID NO: 87219 - RNA, 1410 nt, Artificial Sequence
  derived and/or modified CDS sequence (opt1) from neuraminidase__InfluenzaA__AFV53296
augaaccccaaccagaagaucaucaucaucggcagcgugucccugaccaucgccaccgucugcuuccucaugcagaucgccauccuggugacgaccgugacccugcacuucaagcagcacgagugcgacagcccggcguccaaccaggucaugcccugcgagcccaucaucaucgagcgcaacaucaccgagaucguguaccucaacaacacgaccaucgagaaggagaucugccccgagguggucgaguaccggaacuggagcaagccgcagugccagaucaccggguucgcccccuucuccaaggacaacagcauccgccuguccgccggcggggacaucugggugacccgggagcccuacgugagcugcgaccccuccaagugcuaccaguucgcccugggccaggggacgacccucgacaacaagcacagcaacgacaccauccacgaccgcaucccgcaccggacccugcugaugaacgagcucggcguccccuuccaccugggcacgcgccaggugugcguggccugguccagcuccagcugccacgacgggaaggcguggcugcacgucugcgugaccggcgacgacaagaacgccaccgccuccuucaucuacgacgggcggcucguggacagcaucggcuccuggagccagaacauccugcgcacccaggaguccgagugcgucugcaucaacgggacgugcaccguggugaugaccgacggcagcgccagcggccgggcggacacccgcauccuguucaucgaggaggggaagaucguccacaucagcccccucuccggcuccgcccagcacguggaggagugcagcugcuacccccgguacccggacgugcgcugcaucugccgggacaacuggaagggguccaaccgccccgucaucgacaucaacauggaggacuacagcaucgacuccagcuacgugugcuccggccuggugggcgacacgccccggaacgacgaccgcagcuccaacagcaacugccgggaccccaacaacgagcgcgggaacccgggcgucaaggggugggccuucgacaacggcgacgacguguggauggggcggaccaucuccaaggaccugcgcagcggcuacgagaccuucaaggucaucggcgggugguccacccccaacagcaagucccagaucaaccgccaggugaucguggacagcaacaacugguccggcuacagcgggaucuucagcgucgagggcaaguccugcaucaaccggugcuucuacguggagcucauccgcgggcggcagcaggagacgcgcgugugguggaccagcaacuccaucgucguguucugcggcaccagcggcaccuacgggacgggcuccuggcccgacggggccaacaucaacuucaugcccaucuga

SEQ ID NO: 87220 - RNA, 1410 nt, Artificial Sequence
  derived and/or modified CDS sequence (opt1) from neuraminidase__InfluenzaA__AFV53307
augaaccccaaccagaagaucaucaccaucggcagcgugucccugaccaucgccacggucugcuuccucaugcagaucgccauccuggcgaccaccgugacccugcacuucaagcagcacgagugcgacagcccggccuccaaccaggugaugcccugcgagcccaucaucaucgagcgcaacaucacggagaucgucuaccucaacaacaccaccaucgagaaggagaucugccccgaggugguggaguaccggaacuggagcaagccgcagugccagaucaccggguucgcccccuucuccaaggacaacagcauccgccuguccgccggcggggacaucugggucacgcgggagcccuacgugagcugcgaccccggcaagugcuaccaguucgcccuggggcagggcaccacccucgacaacaagcacuccaacggcaccauccacgaccgcaucccgcaccggacgcugcugaugaacgagcucggggugcccuuccaccugggcaccaagcaggucugcguggcguggagcuccagcuccugccacgacgggaaggccuggcugcacgugugcgucaccggcgacgaccgcaacgccaccgccagcuucaucuacgacgggcggcucguggacuccaucggcagcuggucccagaacauccugcgcacgcaggagagcgagugcgugugcaucaacgggaccugcaccgucgugaugaccgacggcuccgcgagcggccgggccgacacgcgcauccuguucaucaaggaggggaagaucgugcacaucagcccccucuccggcagcgcccagcacgucgaggagugcuccugcuacccccgguacccggacgugcgcugcaucugccgggacaacuggaagggcagcaaccgccccgugaucgacaucaacauggaggacuacuccaucgacagcuccuacgucugcagcgggcuggugggcgacacgccccggaacgacgacuccagcuccaacagcaacugccgcgaccccaacaacgagcgggggaacccgggcgugaaggggugggccuucgacaacggcgacgacgucuggaugggccgcaccaucaacaaggacucccggagcggguacgagaccuucaaggugaucggcgggugguccacccccaacagcaagucccaggucaaccgccaggugaucguggacaacaacaacuggagcggcuacuccgggaucuucagcgucgagggcaagagcugcaucaaccggugcuucuacguggagcugauccgcggccgcccccaggagacccgggugugguggaccuccaacagcaucgucguguucugcgggaccuccggcacguacgggaccggcagcuggcccgacggggccaacaucaacuucaugccgaucuga

SEQ ID NO: 87221 - RNA, 1410 nt, Artificial Sequence
  derived and/or modified CDS sequence (opt1) from neuraminidase__InfluenzaA__AFV53317
augaaccccaaccagaagaucaucaccaucggcagcgugucccugaccaucgccacggucugcuuccucaugcagaucgccauccuggcgaccaccgugacccugcacuucaagcagcacgagugcgacagcccggccuccaaccaggugaugcccugcgagcccaucaucaucgagcgcaacaucacggagaucgucuaccucaacaacaccaccaucgagaaggagaucugccccgaggugguggaguaccggaacuggagcaagccgcagugccagaucaccggguucgcccccuucuccaaggacaacagcauccgccuguccgccggcggggacaucugggucacgcgggagcccuacgugagcugcgaccccggcaagugcuaccaguucgcccuggggcagggcaccacccucgacaacaagcacuccaacggcaccauccacgaccgcagcccgcaccggacgcugcugaugaacgagcucggggugcccuuccaccugggcaccaagcaggucugcgcggccugguccagcuccagcugccacgacgggaaggccuggcugcacgugugcgugaccggcgacgaccgcaacgccaccgcguccuucaucuacgacgggcggcucgucgacagcaucggcuccuggagccagaacauccugcgcacgcaggaguccgagugcgugugcaucaacgggaccugcaccguggucaugaccgacggcagcgccagcggccgggccgacacgcgcauccuguucaucaaggaggggaagaucgugcacaucggcccccucuccggcagcgcccagcacaucgaggagugcuccugcuacccccgguacccggacgugcgcugcaucugccgggacaacuggaaggggagcaaccgccccgucaucgacaucaacauggaggacuacuccaucgacagcuccuacgugugcagcggccuggugggggacacgccccggaacgacgacuccagcuccaacagcaacugccgcgaccccaacaacgagcggggcaacccgggggucaagggcugggccuucgacaacggcgacgacguguggauggggcgcaccaucuccaaggaccugcggagcggcuacgagaccuucaaggugaucgggggcugguccacccccaacagcaagucccaggucaaccgccaggugaucgucgacaacaacaacuggagcggguacuccggcaucuucagcguggagggcaagagcugcaucaaccggugcuucuacguggagcucauccgcgggcgcccccaggagacccgggucugguggaccuccaacagcaucgugguguucugcggcaccuccgggacguacggcaccgggagcuggcccgacggcgcgaacaucaacuucaugccgaucuga

SEQ ID NO: 87222 - RNA, 1410 nt, Artificial Sequence
  derived and/or modified CDS sequence (opt1) from neuraminidase__InfluenzaA__AFV53328
augaaccccaaccagaagaucaucaccaucggcagcgugucccugaccaucgccacggucugcuuccucaugcacaucgccauccuggcgaccaccgugacccugcacuucaagcagcacgagugcgacagcccggccuccaaccaggccaugcccugcgagcccaucaucaucgagcgcaacaucacggagaucguguaccucaacaacaccaccaucgagaaggagaucugccccgaggucguggaguaccggaacuggagcaagccgcagugccagaucaccggguucgcccccuucuccaaggacaacagcauccgccuguccgccggcggggacaucugggugacgcgggagcccuacgucagcugcgaccccggcaagugcuaccaguucgcgcuggggcagggcaccacccucgacaacaagcacuccaacggcaccauccacgaccgcaucccgcaccggacgcugcugaugaacgagcucggggugcccuuccaccugggcaccaagcaggucugcguggccuggagcuccagcuccugccacgacgggaaggccuggcugcacgugugcaucaccggcgacgaccgcaacgccaccgcgagcuucaucuacgacgggcggcucguggacuccaucggcagcuggucccagaacauccugcgcacgcaggagagcgagugcgucugcaucaacgggaccugcaccguggugaugaccgacggcuccgccagcggccgggccgacacgcgcauccuguucaucaaggaggggaagaucguccacaucagcccccucuccggcagcgcccagcacaucgaggagugcuccugcuacccccgguacccggacgugcgcugcaucugccgggacaacuggaagggcagcaaccgccccgugaucgacaucaacauggaggacuacuccaucgacagcuccuacgucugcagcgggcuggugggcgacacgccccggaacgacgacuccagcuccaacagcaacugccgcgaccccaacaacgagcgggggaacccgggcgugaaggggugggccuucgacaacggcgacgacgucuggaugggccgcaccaucuccaaggaccugcggagcggguacgagaccuucaaggugaucggcgggugguccacccccaacagcaagucccaggugaaccgccaggucaucguggacaacaacaacuggagcggcuacuccgggaucuucagcgucgagggcaagagcugcaucaaccggugcuucuacguggagcucauccgcggccgcccccaggagacccgggugugguggaccuccaacagcaucgucguguucugcgggaccuccggcacguacgggaccggcagcuggcccgacggggcgaacaucaacuucaugccgaucuga

SEQ ID NO: 87223 - RNA, 1410 nt, Artificial Sequence
  derived and/or modified CDS sequence (opt1) from neuraminidase__InfluenzaA__AFV53339
augaaccccaaccagaagaucaucaccaucggcagcgccucccugaccaucgccacggugugcuuccucaugcagaucgcgauccuggucaccaccgugacccugcacuucaagcagcacgagugcgacagcccggccuccaaccaggugaugcccugcgagcccaucaucaucgagcgcaacaucacggagaucgucuaccucaacaacaccaccaucgagaaggagaucugccccaaggugguggaguaccggaacuggagcaagccgcagugcaagaucaccggguucgcccccuucuccaaggacaacagcauccgccuguccgccggcggggacaucugggucacgcgggagcccuacgugagcugcgaccccggcaagugcuaccaguucgcccuggggcagggcaccacccucgacaacaagcacuccaacgacaccauccacgaccgcaucccgcaccggacgcugcugaugaacgagcucggcgugcccuuccaccuggggacccgccaggucugcaucgcguggagcuccagcuccugccacgacggcaaggccuggcugcacgugugcgugaccggggacgacaagaacgccaccgccagcuucaucuacgacggccggcucgucgacuccaucgggagcuggucccagaacauccugcgcacgcaggagagcgagugcgugugcaucaacgggaccugcaccguggucaugaccgacggcuccgcgagcgggcgggccgacacgcgcauccuguucaucgaggagggcaagaucgugcacaugagcccccucuccgggagcgcccagcacguggaggagugcuccugcuacccccgguacccggacguccgcugcaucugccgggacaacuggaagggcagcaaccgccccgugguggacaucaacauggaggacuacuccaucgacagcuccuacgucugcagcggccuggugggggacacgccccggaacgacgaccgcuccagcaacuccaacugccggaaccccaacaacgagaagggcaaccagggggugaagggcugggccuucgacaacggggacgacgucuggaugggccgcaccaucagcaaggaccugcgguccggcuacgagaccuucaaggugaucgggggcuggagcaccccgaacuccaagagccagaucaaccgccaggucaucguggacuccgacaaccggagcggguacuccggcaucuucagcguggagggcaagagcugcaucaaccgcugcuucuacgucgagcucauccgcggccggaagcaggagacccgcgugugguggaccuccaacagcaucguggucuucugcggcaccuccgggacguacggcaccgggagcuggcccgacggcgccaacaucaaccugaugcccaucuga

SEQ ID NO: 87224 - RNA, 1410 nt, Artificial Sequence; identical to SEQ ID NO: 80762
  derived and/or modified CDS sequence (opt1) from neuraminidase__InfluenzaA__AFX96367

SEQ ID NO: 87225 - RNA, 1410 nt, Artificial Sequence; identical to SEQ ID NO: 80762
  derived and/or modified CDS sequence (opt1) from neuraminidase__InfluenzaA__AFX96386

SEQ ID NO: 87226 - RNA, 1410 nt, Artificial Sequence; identical to SEQ ID NO: 81116
  derived and/or modified CDS sequence (opt1) from neuraminidase__InfluenzaA__AFX96401

SEQ ID NO: 87227 - RNA, 1410 nt, Artificial Sequence; identical to SEQ ID NO: 81116
  derived and/or modified CDS sequence (opt1) from neuraminidase__InfluenzaA__AFX96411

SEQ ID NO: 87228 - RNA, 1410 nt, Artificial Sequence; identical to SEQ ID NO: 81116
  derived and/or modified CDS sequence (opt1) from neuraminidase__InfluenzaA__AFX96421

SEQ ID NO: 87229 - RNA, 1410 nt, Artificial Sequence; identical to SEQ ID NO: 81116
  derived and/or modified CDS sequence (opt1) from neuraminidase__InfluenzaA__AFX96431

SEQ ID NO: 87230 - RNA, 1410 nt, Artificial Sequence; identical to SEQ ID NO: 81116
  derived and/or modified CDS sequence (opt1) from neuraminidase__InfluenzaA__AFX96441

SEQ ID NO: 87231 - RNA, 1410 nt, Artificial Sequence; identical to SEQ ID NO: 81116
  derived and/or modified CDS sequence (opt1) from neuraminidase__InfluenzaA__AFX96451

SEQ ID NO: 87232 - RNA, 1410 nt, Artificial Sequence; identical to SEQ ID NO: 81116
  derived and/or modified CDS sequence (opt1) from neuraminidase__InfluenzaA__AFX96461

SEQ ID NO: 87233 - RNA, 1410 nt, Artificial Sequence; identical to SEQ ID NO: 80762
  derived and/or modified CDS sequence (opt1) from neuraminidase__InfluenzaA__AFX96471

SEQ ID NO: 87234 - RNA, 1410 nt, Artificial Sequence; identical to SEQ ID NO: 80762
  derived and/or modified CDS sequence (opt1) from neuraminidase__InfluenzaA__AFX96481

SEQ ID NO: 87235 - RNA, 1410 nt, Artificial Sequence; identical to SEQ ID NO: 80762
  derived and/or modified CDS sequence (opt1) from neuraminidase__InfluenzaA__AFX96491

SEQ ID NO: 87236 - RNA, 1410 nt, Artificial Sequence; identical to SEQ ID NO: 80762
  derived and/or modified CDS sequence (opt1) from neuraminidase__InfluenzaA__AFX96501

SEQ ID NO: 87237 - RNA, 1410 nt, Artificial Sequence; identical to SEQ ID NO: 80762
  derived and/or modified CDS sequence (opt1) from neuraminidase__InfluenzaA__AFX96511

SEQ ID NO: 87238 - RNA, 1410 nt, Artificial Sequence
  derived and/or modified CDS sequence (opt1) from neuraminidase__InfluenzaA__AFX96521
augaaccccaaccagaagaucaucaccaucggcagcgugugcaugaccaucgggauggccaaccugauccuccagaucggcaacaucaucuccaucuggaucagccacuccauccagcuggggaaccagaaccagaucgagacgugcaaccagagcgucaucaccuacgagaacaacaccugggugaaccagaccuacgugaacaucuccaacacgaacuucgccgcgcgccagagcgucguguccgugaagcuggccggcaacagcucccucugcccggucagcgggugggccaucuacuccaaggacaacagcauccggaucggcuccaagggcgacguguucgugauccgcgagcccuucaucagcugcagcccccuggagugccggaccuucuuccugacccagggggcccuccugaacgacaagcacuccaacggcaccaucaaggaccgcucccccuaccggacgcugaugagcugcccgaucggggagguccccucccccuacaacagccgcuucgagagcguggccugguccgcgagcgccugccacgacggcaucaacuggcucaccaucgggaucuccggccccgacaacggcgccguggccguccugaaguacaacgggaucaucaccgacaccaucaagagcuggcggaacaacauccugcgcacgcaggaguccgagugcgcgugcgugaacggcagcugcuucaccgugaugaccgacgggccguccgacggccaggccagcuacaagaucuuccggaucgagaagggcaagaucgucaaguccguggagaugaacgcccccaacuaccacuacgaggagugcagcugcuaccccgacuccagcgagaucacgugcgugugccgcgacaacuggcacggguccaaccggcccugggucagcuucaaccagaaccucgaguaccagaucggcuacaucugcuccgggaucuucggcgacaacccgcgccccaacgacaagaccgggagcugcggccccguguccagcaacggcgccaacggggugaagggcuucuccuucaaguacgggaacggcgucuggaucgggcggaccaagagcaucagcucccgcaacggcuucgagaugaucugggaccccaacggcuggaccgggaccgacaacaacuucagcaucaagcaggacaucgugggcaucaacgagugguccggguacagcggcuccuucgugcagcacccggagcugacggggcuggacugcauccggcccugcuucugggucgagcucauccgcggccggcccaaggagaacaccaucuggaccagcggcuccagcaucuccuucugcggggugaacagcgacaccgucggcugguccuggcccgacggggccgagcugccguucacgaucgacaaguga

SEQ ID NO: 87239 - RNA, 1410 nt, Artificial Sequence; identical to SEQ ID NO: 80762
  derived and/or modified CDS sequence (opt1) from neuraminidase__InfluenzaA__AFX96531

SEQ ID NO: 87240 - RNA, 1410 nt, Artificial Sequence; identical to SEQ ID NO: 80762
  derived and/or modified CDS sequence (opt1) from neuraminidase__InfluenzaA__AFX96541

SEQ ID NO: 87241 - RNA, 1410 nt, Artificial Sequence; identical to SEQ ID NO: 80762
  derived and/or modified CDS sequence (opt1) from neuraminidase__InfluenzaA__AFX96551

SEQ ID NO: 87242 - RNA, 1410 nt, Artificial Sequence; identical to SEQ ID NO: 85286
  derived and/or modified CDS sequence (opt1) from neuraminidase__InfluenzaA__AFX96561

SEQ ID NO: 87243 - RNA, 1410 nt, Artificial Sequence; identical to SEQ ID NO: 80762
  derived and/or modified CDS sequence (opt1) from neuraminidase__InfluenzaA__AFX96571

SEQ ID NO: 87244 - RNA, 1410 nt, Artificial Sequence; identical to SEQ ID NO: 80762
  derived and/or modified CDS sequence (opt1) from neuraminidase__InfluenzaA__AFX96581

SEQ ID NO: 87245 - RNA, 1410 nt, Artificial Sequence; identical to SEQ ID NO: 80762
  derived and/or modified CDS sequence (opt1) from neuraminidase__InfluenzaA__AFX96591

SEQ ID NO: 87246 - RNA, 1410 nt, Artificial Sequence; identical to SEQ ID NO: 80762
  derived and/or modified CDS sequence (opt1) from neuraminidase__InfluenzaA__AFX96601

SEQ ID NO: 87247 - RNA, 1410 nt, Artificial Sequence; identical to SEQ ID NO: 80762
  derived and/or modified CDS sequence (opt1) from neuraminidase__InfluenzaA__AFX96611

SEQ ID NO: 87248 - RNA, 1410 nt, Artificial Sequence; identical to SEQ ID NO: 80762
  derived and/or modified CDS sequence (opt1) from neuraminidase__InfluenzaA__AFX96621

SEQ ID NO: 87249 - RNA, 1410 nt, Artificial Sequence; identical to SEQ ID NO: 80762
  derived and/or modified CDS sequence (opt1) from neuraminidase__InfluenzaA__AFX96631

SEQ ID NO: 87250 - RNA, 1410 nt, Artificial Sequence
  derived and/or modified CDS sequence (opt1) from neuraminidase__InfluenzaA__AFX96641
augaaccccaaccagaagaucaucaccaucggcagcgugugcaugaccaucgggauggccaaccugauccuccagaucggcaacaucaucuccaucuggaucagccacuccauccagcuggggaaccagaaccagaucgagacgugcaaccagagcgucaucaccuacgagaacaacaccugggugaaccagaccuacgugaacaucuccaacacgaacuucgccgcgggccagagcgucguguccgugaagcuggccgggaacagcucccucugcccggucagcggcugggccaucuacuccaaggacaacagcauccgcaucggcuccaagggggacguguucgugauccgggagcccuucaucagcugcagcccccuggagugccgcaccuucuuccugacccagggcgcccuccugaacgacaagcacuccaacgggaccaucaaggaccggucccccuaccgcacgcugaugagcugcccgaucggcgagguccccucccccuacaacagcaaguucgagagcguggccugguccgcgagcgccugccacgacgggaucaacuggcucaccaucggcaucuccggccccgacaacggggccguggccguccugaaguacaacggcaucaucaccgacaccaucaagagcuggcggaacaacauccugcgcacgcaggaguccgagugcgcgugcgugaacgggagcugcuucaccgugaugaccgacggcccguccgacggccaggccagcuacaagaucuuccggaucgagaaggggaagaucgucaaguccguggagaugaacgcccccaacuaccacuacgaggagugcagcugcuaccccgacuccagcgagaucacgugcgugugccgcgacaacuggcacggcuccaaccggcccugggucagcuucaaccagaaccucgaguaccagaucggguacaucugcuccggcaucuucggggacaacccgcgccccaacgacaagaccggcagcugcggccccguguccagcaacggggccaacggcgugaagggguucuccuucaaguacggcaacggggucuggaucggccggaccaagagcaucagcucccgcaacggcuucgagaugaucugggaccccaacggguggaccggcaccgacaacaacuucagcaucaagcaggacaucguggggaucaacgagugguccggcuacagcggguccuucgugcagcacccggagcugacgggccuggacugcauccggcccugcuucugggucgagcucauccgcggccggcccaaggagaacaccaucuggaccagcggguccagcaucuccuucugcggcgugaacagcgacaccgucgggugguccuggcccgacggcgccgagcugccguucacgaucgacaaguga

SEQ ID NO: 87251 - RNA, 1410 nt, Artificial Sequence; identical to SEQ ID NO: 80762
  derived and/or modified CDS sequence (opt1) from neuraminidase__InfluenzaA__AFX96651

SEQ ID NO: 87252 - RNA, 1410 nt, Artificial Sequence; identical to SEQ ID NO: 80762
  derived and/or modified CDS sequence (opt1) from neuraminidase__InfluenzaA__AFX96661

SEQ ID NO: 87253 - RNA, 1410 nt, Artificial Sequence; identical to SEQ ID NO: 80762
  derived and/or modified CDS sequence (opt1) from neuraminidase__InfluenzaA__AFX96671

SEQ ID NO: 87254 - RNA, 1410 nt, Artificial Sequence; identical to SEQ ID NO: 80762
  derived and/or modified CDS sequence (opt1) from neuraminidase__InfluenzaA__AFX96681

SEQ ID NO: 87255 - RNA, 1410 nt, Artificial Sequence; identical to SEQ ID NO: 80762
  derived and/or modified CDS sequence (opt1) from neuraminidase__InfluenzaA__AFX96691

SEQ ID NO: 87256 - RNA, 1410 nt, Artificial Sequence
  derived and/or modified CDS sequence (opt1) from neuraminidase__InfluenzaA__AFX96701
augaaccccaaccagaagaucaucaccaucggcagcgugugcaugaccaucgggauggccaaccugauccuccagaucggcaacaucaucuccaucuggaucagccacuccauccagcuggggaaccagaaccagaucgagacgugcaaccagagcaucaucaccuacgagaacaacaccugggucaaccagaccuacgugaacaucuccaacacgaacuucgccgcgggccagagcguggucuccgugaagcuggccgggaacagcucccucugcccggugagcggcugggccaucuacuccaaggacaacagcauccgcaucggcuccaagggggacgucuucgugauccgggagcccuucaucagcugcagcccccuggagugccgcaccuucuuccugacccagggcgcccuccugaacgacaagcacuccaacgggaccaucaaggaccggucccccuaccgcacgcugaugagcugcccgaucggcgaggugcccucccccuacaacagccgguucgagagcgucgccugguccgcgagcgccugccacgacgggaucaacuggcucaccaucggcaucuccggccccgacaacggggccguggccgugcugaaguacaacggcaucaucaccgacaccaucaagagcuggcgcaacaacauccugcggacgcaggaguccgagugcgcgugcgucaacgggagcugcuucaccgugaugaccgacggcccguccgacggccaggccagcuacaagaucuuccgcaucgagaaggggaagaucgugaaguccgucgagaugaacgcccccaacuaccacuacgaggagugcagcugcuaccccgacuccagcgagaucacgugcgugugccgggacaacuggcacggcuccaaccgccccugggugagcuucaaccagaaccucgaguaccagaucggguacaucugcuccggcaucuucggggacaacccgcggcccaacgacaagaccggcagcugcggccccgucuccuucaacggggccaacggcgugaagggguucagcuucaaguacggcaacgggguguggaucggccgcaccaaguccaucagcagccggaacggcuucgagaugaucugggaccccaacggguggaccggcaccgacaacaacuucuccaucaagcaggacaucgucgggaucaacgaguggagcggcuacuccgggagcuucgugcagcacccggagcugacgggccuggacugcauccgccccugcuucuggguggagcucauccggggccgccccaaggagaacaccaucuggaccuccgggagcaucaucuccuucugcggcgucaacagcgacaccguggggugguccuggcccgacggcgccgagcugccguucacgaucgacaaguga

SEQ ID NO: 87257 - RNA, 1410 nt, Artificial Sequence; identical to SEQ ID NO: 80762
  derived and/or modified CDS sequence (opt1) from neuraminidase__InfluenzaA__AFX96711

SEQ ID NO: 87258 - RNA, 1410 nt, Artificial Sequence
  derived and/or modified CDS sequence (opt1) from neuraminidase__InfluenzaA__AFX96721
augaaccccaaccagaagaucaucaccaucggcagcgugugcaugaccaucgggauggccaaccugauccuccagaucggcaacaucaucuccaucuggaucagccacuccauccagcuggggaaccagaaccagaucgagacgugcaaccagagcgucaucaccuacgagaacaacaccugggugaaccagaccuacgugaacaucuccaacacgaacuucgccgcgggccagagcgucguguccgugaagcuggccgggaacagcucccucugcccggucagcggcugggccaucuacuccaaggacaacagcauccgcaucggcuccaagggggacguguucgugauccgggagcccuucaucagcugcagcccccuggagugccgcaccuucuuccugacccagggcgcccuccugaacgacaagcacuccaacgggaccaucaaggaccggucccccuaccgcacgcugaugagcugcccgaucggcgagguccccucccccuacaacagccgguucgagagcguggccugguccgcgagcgccugccacgacgggaucaacuggcucaccaucggcaucuccggccccgacaacggggccguggccguccugaaguacaacggcaucaucaccgacaccaucaagagcuggcgcaacaacauccugcggacgcaggaguccgagugcgcgugcgugaacgggagcugcuucaccgugaugaccgacggcccguccgacggccaggccagcuacaagaucuuccgcaucgagaaggggaagaucgucaaguccguggagaugaacgcccccaacuaccacuacgaggagugcagcugcuaccccgacuccagcgagaucacgugcgugugccgggacaacuggcacggcuccaaccgccccugggucagcuucaaccagaaccucgaguaccagaucggguacaucugcuccggcaucuucggggacaacccgcggcccaacgacaagaccggcagcugcggccccguguccagcaacggggccaacggcgugaagggguucuccuucaaguacggcaacggggucuggaucggccgcaccaagagcaucagcucccggaacggcuucgagaugaucugggaccccaacggguggaccggcaccgacaacaacuucagcaucaagcaggacaucguggggaucaacgagugguccggcuacagcggguccuucgugcagcacccggagcugacgggccuggacugcauccgccccugcuucugggucgagcucauccggggccgccccaaggagaacaccguguggaccagcggguccagcaucuccuucugcggcgucaacagcgacaccguggggugguccuggcccgacggcgccgagcugccguucacgaucgacaaguga

SEQ ID NO: 87259 - RNA, 1410 nt, Artificial Sequence; identical to SEQ ID NO: 87258
  derived and/or modified CDS sequence (opt1) from neuraminidase__InfluenzaA__AFX96731

SEQ ID NO: 87260 - RNA, 1410 nt, Artificial Sequence; identical to SEQ ID NO: 80762
  derived and/or modified CDS sequence (opt1) from neuraminidase__InfluenzaA__AFX96741

SEQ ID NO: 87261 - RNA, 1410 nt, Artificial Sequence; identical to SEQ ID NO: 80762
  derived and/or modified CDS sequence (opt1) from neuraminidase__InfluenzaA__AFX96751

SEQ ID NO: 87262 - RNA, 1410 nt, Artificial Sequence; identical to SEQ ID NO: 81780
  derived and/or modified CDS sequence (opt1) from neuraminidase__InfluenzaA__AFX96761

SEQ ID NO: 87263 - RNA, 1410 nt, Artificial Sequence; identical to SEQ ID NO: 80762
  derived and/or modified CDS sequence (opt1) from neuraminidase__InfluenzaA__AFX96771

SEQ ID NO: 87264 - RNA, 1410 nt, Artificial Sequence
  derived and/or modified CDS sequence (opt1) from neuraminidase__InfluenzaA__AFX96791
augaaccccaaccagaagaucaucaccaucggcagcgugugcaugaccaucgggauggccaaccugauccuccaggucggcaacaucaucuccaucuggaucagccacuccauccagcuggggaaccagaaccagaucgagacgugcaaccagagcgugaucaccuacgagaacaacaccugggugaaccagaccuacgucaacaucuccaacacgaacuucgccgcgggccagagcgugguguccgucaagcuggccgggaacagcucccucugcccggugagcggcugggccaucuacuccaaggacaacagcauccgcaucggcuccaagggggacguguucgucauccgggagcccuucaucagcugcagcccccuggagugccgcaccuucuuccugacccagggcgcccuccugaacgacaagcacuccaacgggaccaucaaggaccggucccccuaccgcacgcugaugagcugcccgaucggcgaggugcccucccccuacaacagccgguucgagagcguggccugguccgcgagcgccugccacgacgggaucaacuggcucaccaucggcaucuccggccccgacaacggggccgucgccgugcugaaguacaacggcaucaucaccgacaccaucaagagcuggcgcaacaacauccugcggacgcaggaguccgagugcgcgugcaucaacgggagcugcuucaccgugaugaccgacggcccguccgacggccaggccagcuacaagaucuuccgcaucgagaaggggaagaucgucaaguccguggagaugaacgcccccaacuaccacuacgaggagugcagcugcuaccccgacuccagcgagaucacgugcgugugccgggacaacuggcacggcuccaaccgccccugggucagcuucaaccagaaccucgaguaccagaucggguacaucugcuccggcaucuucggggacaacccgcggcccaacgacaagaccggcagcugcggccccguguccagcaacggggccaacggcgugaagggguucuccuucaaguacggcaacggggucuggaucggccgcaccaagagcaucagcucccggaacggcuucgagaugaucugggaccccaacggguggaccggcaccgacaacaacuucagcaucaagcaggacaucguggggaucaacgagugguccggcuacagcggguccuucgugcagcacccggagcugacgggccuggacugcauccgccccugcuucugggucgagcucauccggggccgccccaaggagaacaccaucuggaccagcggguccagcaucuccuucugcggcgugaacagcgacaccgucgggugguccuggcccgacggcgccgagcugccguucacgaucgacaaguga

SEQ ID NO: 87265 - RNA, 1410 nt, Artificial Sequence; identical to SEQ ID NO: 87264
  derived and/or modified CDS sequence (opt1) from neuraminidase__InfluenzaA__AFX96801

SEQ ID NO: 87266 - RNA, 1410 nt, Artificial Sequence
  derived and/or modified CDS sequence (opt1) from neuraminidase__InfluenzaA__AFX96811
augaaccccaaccagaagaucaucaccaucggcagcgugugcaugaccaucgggauggccaaccugauccuccagaucggcaacaucaucuccaucuggaucagccacuccauccagcuggggaaccagaaccagaucgagacgugcaaccagagcgucaucaccuacgagaacaacaccugggugaaccagaccuacgugaacaucuccaacacgaacuucgccgcgggccagagcgucguguccgugcgccuggccgggaacagcucccucugcccggucagcggcugggccaucuacuccaaggacaacagcauccggaucggcuccaagggggacguguucgugauccgcgagcccuucaucagcugcagcccccuggagugccggaccuucuuccugacccagggcgcccuccugaacgacaagcacuccaacgggaccaucaaggaccgcucccccuaccggacgcugaugagcugcccgaucggcgagguccccucccccuacaacagccgcuucgagagcguggccugguccgcgagcgccugccacgacgggaucaacuggcucaccaucggcaucuccggccccgacaacggggccguggccguccugaaguacaacggcaucaucaccgacaccaucaagagcuggcggaacaacauccugcgcacgcaggaguccgagugcgcgugcgugaacgggagcugcuucaccgugaugaccgacggcccguccgacggccaggccagcuacaagaucuuccggaucgagaaggggaagaucgucaaguccguggagaugaacgcccccaacuaccacuacgaggagugcagcugcuaccccgacuccagcgagaucacgugcgugugccgcgacaacuggcacggcuccaaccggcccugggucagcuucaaccagaaccucgaguaccagaucggguacaucugcuccggcaucuucggggacaacccgcgccccaacgacaagaccggcagcugcggccccguguccagcaacggggccaacggcgugaagggguucuccuucaaguacggcaacggggucuggaucggccggaccaagagcaucagcucccgcaacggcuucgagaugaucugggaccccaacggguggaccggcaccgacaacaacuucagcaucaagcaggacaucguggggaucaacgagugguccggcuacagcggguccuucgugcagcacccggagcugacgggccuggacugcauccggcccugcuucugggucgagcucauccgcggccggcccaaggagaacaccaucuggaccagcggguccagcaucuccuucugcggcgugaacagcgacaccgucgggugguccuggcccgacggcgccgagcugccguucacgaucgacaaguga

SEQ ID NO: 87267 - RNA, 1410 nt, Artificial Sequence; identical to SEQ ID NO: 80762
  derived and/or modified CDS sequence (opt1) from neuraminidase__InfluenzaA__AFX96821

SEQ ID NO: 87268 - RNA, 1410 nt, Artificial Sequence; identical to SEQ ID NO: 87264
  derived and/or modified CDS sequence (opt1) from neuraminidase__InfluenzaA__AFX96831

SEQ ID NO: 87269 - RNA, 1410 nt, Artificial Sequence
  derived and/or modified CDS sequence (opt1) from neuraminidase__InfluenzaA__AFX96841
augaaccccaaccagaagaucaucaccaucggcagcgugugcaugaccaucgggauggccaaccugauccuccagaucggcaacaucaucuccaucuggaucagccacuccauccagcuggggaaccagaaccagaucgagacgugcaaccagagcgucaucaccuacgagaacaacaccugggugaaccagaccuacgugaacaucuccaacacgaacuucgccgcgggccagagcgucguguccgugcgccuggccgggaacagcucccucugcccggucagcggcugggccaucuacuccaaggacaacagcauccggaucggcuccaagggggacguguucgugauccgcgagcccuucaucagcugcagcccccuggagugccggaccuucuuccugacccagggcgcccuccugaacgacaagcacuccaacgggaccaucaaggaccgcucccccuaccggacgcugaugagcugcccgaucggcgagguccccucccccuacaacagccgcuucgagagcguggccugguccgcgagcgccugccacgacgggaucaacuggcucaccaucggcaucuccggccccgacaacggggccguggccguccugaaguacaacggcaucaucaccgacaccaucaagagcuggcggaacaacauccugcgcacgcaggaguccgagugcgcgugcgugaacgggagcugcuucaccgugaugaccgacggcccguccgacggccaggccagcuacaagaucuuccggaucgagaaggggaagaucgucaaguccguggagaugaacgcccccaacuacuacuacgaggagugcagcugcuaccccgacuccagcgagaucacgugcgugugccgcgacaacuggcacggcuccaaccggcccugggucagcuucaaccagaaccucgaguaccagaucggguacaucugcuccggcaucuucggggacaacccgcgccccaacgacaagaccggcagcugcggccccguguccagcaacggggccaacggcgugaagggguucuccuucaaguacggcaacggggucuggaucggccggaccaagagcaucagcucccgcaacggcuucgagaugaucugggaccccaacggguggaccggcaccgacaacaacuucagcaucaagcaggacaucguggggaucaacgagugguccggcuacagcggguccuucgugcagcacccggagcugacgggccuggacugcauccggcccugcuucugggucgagcucauccgcggccggcccaaggagaacaccaucuggaccagcggguccagcaucuccuucugcggcgugaacagcgacaccgucgggugguccuggcccgacggcgccgagcugccguucacgaucgacaaguga

SEQ ID NO: 87270 - RNA, 1410 nt, Artificial Sequence; identical to SEQ ID NO: 80762
  derived and/or modified CDS sequence (opt1) from neuraminidase__InfluenzaA__AFX96859

SEQ ID NO: 87271 - RNA, 1410 nt, Artificial Sequence; identical to SEQ ID NO: 80762
  derived and/or modified CDS sequence (opt1) from neuraminidase__InfluenzaA__AFX96907

SEQ ID NO: 87272 - RNA, 1410 nt, Artificial Sequence; identical to SEQ ID NO: 80762
  derived and/or modified CDS sequence (opt1) from neuraminidase__InfluenzaA__AFX96917

SEQ ID NO: 87273 - RNA, 1410 nt, Artificial Sequence; identical to SEQ ID NO: 80762
  derived and/or modified CDS sequence (opt1) from neuraminidase__InfluenzaA__AFX96927

SEQ ID NO: 87274 - RNA, 1410 nt, Artificial Sequence
  derived and/or modified CDS sequence (opt1) from neuraminidase__InfluenzaA__AFX96937
augaaccccaaccagaagaucaucaccaucggcagcgugugcaugaccaucgggauggccaaccugauccuccagaucggcaacaucaucuccaucuggaucagccacuccauccagcuggggaaccagaaccagaucgagacgugcaaccagagcgucaucaccuacgagaacaacaccugggugaaccagaccuacgugaacaucuccagcacgaacuucgccgcgggccaguccgucgugagcgugaagcuggccgggaacuccagccucugcccggucuccggcugggccaucuacagcaaggacaacuccauccgcaucggcagcaagggggacguguucgugauccgggagcccuucaucuccugcagcccccuggagugccgcaccuucuuccugacccagggcgcccuccugaacgacaagcacuccaacgggaccaucaaggaccggagccccuaccgcacgcugauguccugcccgaucggcgagguccccagccccuacaacagccgguucgaguccguggccuggagcgcguccgccugccacgacgggaucaacuggcucaccaucggcaucagcggccccgacaacggggccguggccguccugaaguacaacggcaucaucaccgacaccaucaaguccuggcgcaacaacauccugcggacgcaggagagcgagugcgcgugcgugaacggguccugcuucaccgugaugaccgacggcccgagcgacggccaggccuccuacaagaucuuccgcaucgagaaggggaagaucgucaagagcguggagaugaacgcccccaacuaccacuacgaggagugcuccugcuaccccgacagcuccgagaucacgugcgugugccgggacaacuggcacggcagcaaccgccccugggucuccuucaaccagaaccucgaguaccagaucggguacaucugcagcggcaucuucggggacaacccgcggcccaacgacaagaccggcuccugcggccccgugagcuccaacggggccaacggcgugaagggguucagcuucaaguacggcaacggggucuggaucggccgcaccaagagcaucuccagccggaacggcuucgagaugaucugggaccccaacggguggaccggcaccgacaacaacuucuccaucaagcaggacaucguggggaucaacgaguggagcggcuacuccgggagcuucgugcagcacccggagcugacgggccuggacugcauccgccccugcuucugggucgagcucauccggggccgccccaaggagaacaccaucuggaccuccgggagcuccaucagcuucugcggcgugaacuccgacaccgucggguggagcuggcccgacggcgccgagcugccguucacgaucgacaaguga

SEQ ID NO: 87275 - RNA, 1410 nt, Artificial Sequence; identical to SEQ ID NO: 80752
  derived and/or modified CDS sequence (opt1) from neuraminidase__InfluenzaA__AFY23991

SEQ ID NO: 87276 - RNA, 1410 nt, Artificial Sequence; identical to SEQ ID NO: 80762
  derived and/or modified CDS sequence (opt1) from neuraminidase__InfluenzaA__AFY24001

SEQ ID NO: 87277 - RNA, 1410 nt, Artificial Sequence; identical to SEQ ID NO: 80762
  derived and/or modified CDS sequence (opt1) from neuraminidase__InfluenzaA__AFY24022

SEQ ID NO: 87278 - RNA, 1410 nt, Artificial Sequence; identical to SEQ ID NO: 80762
  derived and/or modified CDS sequence (opt1) from neuraminidase__InfluenzaA__AFY24043

SEQ ID NO: 87279 - RNA, 1410 nt, Artificial Sequence
  derived and/or modified CDS sequence (opt1) from neuraminidase__InfluenzaA__AFY24153
augaaccccaaccagaagaucaucaccaucggcagcgugucccugaccaucagcacgaucugcuucuucaugcagaucgccauccucaucaccaccgucacccugcacuucaagcaguacgaguucaacuccccgcccaacaaccaggugaugcugugcgagcccacgaucaucgagcgcaacaucaccgagaucguguaccucaccaacaccacgaucgagaaggagaucugccccaagcuggccgaguaccggaacuggagcaagccgcagugcaacaucaccggguucgcgcccuucuccaaggacaacagcauccgccuguccgccggcggggacaucugggucacccgggagcccuacgugagcugcgaccccgacaagugcuaccaguucgcccucggccaggggaccacgcugaacaacgugcacuccaacgacaccguccacgaccgcaccccguaccggacccugcucaugaacgagcugggcgugcccuuccaccugggcacgaagcaggucugcaucgccuggagcuccagcuccugccacgacgggaaggccuggcuccacgugugcgugaccggcgacgacaagaacgcgaccgccagcuucaucuacaacgggcgccugguggacuccaucgucagcugguccaaggagauccugcggacccaggagagcgagugcgugugcaucaacggcacgugcaccguggucaugaccgacggguccgccagcggcaaggccgacaccaagauccucuucaucgaggagggcaagaucgugcacacgagcacccuguccgggagcgcgcagcacguggaggagugcuccugcuacccccgcuaccccggcguccggugcgugugccgcgacaacuggaaggggagcaaccggccgaucguggacaucaacaucaccgacuacuccaucgucagcuccuacgugugcagcggccuggugggcgacacgccccgcaagaacgacuccagcuccagcucccacugccucgaccccaacaacgaggagggcgggcacggggucaagggcugggccuucgacgacgggaacgacguguggaugggccggaccaucagcgagaagcugcgcuccggcuacgagaccuucaaggucaucgagggguggagcaaccccaacuccaagcugcagaucaaccgccaggugaucguggaccggggcaaccggagcggguacuccggcaucuucagcgucgagggcaagagcugcaucaaccgcugcuucuacguggagcucauccgggggcgcaaggaggagaccgaggugcuguggaccuccaacagcaucgucguguucugcggcacguccgggaccuacggcaccgggagcuggccggacggcgccgacaucaaccugaugcccaucuga

SEQ ID NO: 87280 - RNA, 1410 nt, Artificial Sequence
  derived and/or modified CDS sequence (opt1) from neuraminidase__InfluenzaA__AFY24208
augaaccccaaccagaagaucaucaccaucggcagcgugucccugaccaucagcacgaucugcuucuucaugcagaucgccauccucaucaccaccgucacccugcacuucaagcaguacgaguucaacuccccgcccaacaaccaggugaugcugugcgagcccacgaucaucgagcgcaacaucaccgagaucguguaccucaccaacaccacgaucgagaaggagaucugccccaagcuggccgaguaccggaacuggagcaagccgcagugcaacaucaccggguucgcgcccuucuccaaggacaacagcauccgccuguccgccggcggggacaucugggucacccgggagcccuacgugagcugcgaccccgacaagugcuaccaguucgcccucggccaggggaccacgcugaacaacgugcacuccaacgacaccguccacaaccgcaccccguaccggacccugcucaugaacgagcugggcgugcccuuccaccugggcacgaagcaggucugcaucgccuggagcuccagcuccugccacgacgggaaggccuggcuccacgugugcgugaccggcgacgacgagaacgcgaccgccagcuucaucuacaacgggcgccugguggacuccaucgucagcugguccaagaagauccugcggacccaggagagcgagugcgugugcaucaacggcacgugcaccguggucaugaccgacggguccgccagcggcaaggccgacaccaagauccucuucaucgaggagggcaagaucgugcacacgagcacccuguccgggagcgcgcagcacguggaggagugcuccugcuacccccgcuaccccggcguccggugcgugugccgcgacaacuggaaggggagcaaccggccgaucguggacaucaacaucaaggacuacuccaucgucagcuccuacgugugcagcggccuggugggcgacacgccccgcaagaacgacuccagcuccagcucccacugccucgaccccaacaacgaggagggcgggcacggggucaagggcugggccuucgacgacgggaacgacguguggaugggccggaccaucagcgagcgccugcgguccggcuacgagaccuucaaggucaucgagggguggagcaaccccaacuccaagcugcagaucaaccgccaggugaucguggaccggggcaaccgcagcggguacuccggcaucuucagcgucgagggcaagagcugcaucaaccggugcuucuacguggagcucauccgcgggcggaagcaggagaccgaggugcuguggaccuccaacagcaucgucguguucugcggcaccuccgggacguacggcaccgggagcuggccggacggcgccgacaucaaccugaugcccaucuga

SEQ ID NO: 87281 - RNA, 1410 nt, Artificial Sequence; identical to SEQ ID NO: 79953
  derived and/or modified CDS sequence (opt1) from neuraminidase__InfluenzaA__AFY24219

SEQ ID NO: 87282 - RNA, 1410 nt, Artificial Sequence
  derived and/or modified CDS sequence (opt1) from neuraminidase__InfluenzaA__AGB12978
augaaccccaaccagcgcaucaucaccaucggcagcgugugcaugaccaucgggauggccaaccugauccuccagaucggcaacaucaucuccaucuggaucagccacuccauccagcuggggaaccagaaccagaucgagacgugcaaccagagcgucaucaccuacgagaacaacaccugggugaaccagaccuacgugaacaucuccaacacgaacuucgccgcgcggcagagcgucguguccgugaagcuggccggcaacagcucccucugcccggucagcgggugggccaucuacuccaaggacaacagcauccgcaucggcuccaagggcgacguguucgugauccgggagcccuucaucagcugcagcccccuggagugccgcaccuucuuccugacccagggggcccuccugaacgacaagcacuccaacggcaccaucaaggaccggucccccuaccgcacgcugaugagcugcccgaucggggagguccccucccccuacaacagccgguucgagagcguggccugguccgcgagcgccugccacgacggcaucaacuggcucaccaucgggaucuccggccccgacaacggcgccguggccguccugaaguacaacgggaucaucaccgacaccaucaagagcuggcgcaacaacauccugcggacgcaggaguccgagugcgcgugcgugaacggcagcugcuucaccaucaugaccgacgggccguccgacggccaggccagcuacaagaucuuccgcaucgagaagggcaagaucgugaaguccgucgagaugaacgcccccaacuaccacuacgaggagugcagcugcuaccccgacuccagcgagaucacgugcgugugccgggacaacuggcacggguccaaccgccccugggugagcuucaaccagaaccucgaguaccagaucggcuacaucugcuccgggaucuucggcgacaacccgcggcccaacgacaagaccgggagcugcggccccgucuccagcaacggcgccaacggggugaagggcuucuccuucaaguacgggaacggcguguggaucgggcgcaccaagagcaucagcucccggaagggcuucgagaugaucugggaccccaacggcuggaccgggaccgacaacaacuucagcaucaagcaggacaucgucggcaucaacgagugguccggguacagcggcuccuucgugcagcacccggagcugacggggcuggacugcauccgccccugcuucuggguggagcucauccggggccgccccaaggagaacaccaucuggaccagcggcuccagcaucuccuucugcggggucaacagcgacaccgugggcugguccuggcccgacggggccgagcugccguucacgaucgacaaguga

SEQ ID NO: 87283 - RNA, 1410 nt, Artificial Sequence; identical to SEQ ID NO: 84281
  derived and/or modified CDS sequence (opt1) from neuraminidase__InfluenzaA__AGB12989

SEQ ID NO: 87284 - RNA, 1410 nt, Artificial Sequence; identical to SEQ ID NO: 84733
  derived and/or modified CDS sequence (opt1) from neuraminidase__InfluenzaA__AGB13009

SEQ ID NO: 87285 - RNA, 1410 nt, Artificial Sequence; identical to SEQ ID NO: 84733
  derived and/or modified CDS sequence (opt1) from neuraminidase__InfluenzaA__AGB13019

SEQ ID NO: 87286 - RNA, 1410 nt, Artificial Sequence; identical to SEQ ID NO: 84733
  derived and/or modified CDS sequence (opt1) from neuraminidase__InfluenzaA__AGB13029

SEQ ID NO: 87287 - RNA, 1410 nt, Artificial Sequence; identical to SEQ ID NO: 84982
  derived and/or modified CDS sequence (opt1) from neuraminidase__InfluenzaA__AGB13039

SEQ ID NO: 87288 - RNA, 1410 nt, Artificial Sequence; identical to SEQ ID NO: 84733
  derived and/or modified CDS sequence (opt1) from neuraminidase__InfluenzaA__AGB13051

SEQ ID NO: 87289 - RNA, 1410 nt, Artificial Sequence
  derived and/or modified CDS sequence (opt1) from neuraminidase__InfluenzaA__AGB13069
augaaccccaaccagaagaucaucaccaucggcagcaucugcaugaccaucgggauggccaaccugauccuccagaucggcaacaucaucuccaucuggaucagccacuccauccagcuggggaaccagaaccagaucgagacgugcaaccagagcgugaucaccuacgagaacaacaccugggucaaccagaccuacgugaacaucuccaacacgaacuucgccgcgggccagagcguggucuccgugaagcuggccgggaacagcucccucugcccggugagcggcugggccaucuacuccaaggacaacagcauccgcaucggcuccaagggggacgucuucgugauccgggagcccuucaucagcugcagcccccuggagugccgcaccuucuuccugacccagggcgcccuccugaacgacaagcacuccaacgggaccaucaaggaccggucccccuaccgcacgcugaugagcugcccgaucggcgaggugcccucccccuacaacagccgguucgagagcgucgccugguccgcgagcgccugccacgacgggaucaacuggcucaccaucggcaucuccggccccgacaacggggccguggccgugcugaaguacaacggcaucaucaccgacaccaucaagagcuggcgcaacaacauccugcggacgcaggaguccgagugcgcgugcgucaacgggagcugcuucaccgugaugaccgacggcccguccgacggccaggccagcuacaagaucuuccgcaucgagaaggggaagaucgugaaguccgucgagaugaacgcccccaacuaccacuacgaggagugcagcugcuaccccgacuccagcgagaucacgugcgugugccgggacaacuggcacggcuccaaccgccccuggaucagcuucaaccagaaccucgaguaccagaucggguacaucugcuccggcaucuucggggacaacccgcggcccaacgacaagaccggcagcugcggccccguguccagcaacggggccaacggcgucaagggguucuccuucaaguacggcaacgggguguggaucggccgcaccaagagcaucagcucccggaacggcuucgagaugaucugggaccccaacggguggaccggcaccgacaacaacuucagcaucaagcaggacaucguggggaucaacgagugguccggcuacagcggguccuucguccagcacccggagcugacgggccuggacugcauccgccccugcuucuggguggagcucauccggggccgccccaaggagaacaccaucuggaccagcggguccagcaucuccuucugcggcgugaacagcgacaccgucgggugguccuggcccgacggcgccgagcugccguucacgaucgacaaguga

SEQ ID NO: 87290 - RNA, 1410 nt, Artificial Sequence
  derived and/or modified CDS sequence (opt1) from neuraminidase__InfluenzaA__AGB13074
augaaccccaaccagaagaucaucaccaucggcagcgugugcaugaccaucgggauggccaaccugauccuccagaucggcaacaucaucuccaucuggaucagccacuccauccagcuggggaaccagaaccagaucgagacgugcaaccagagcgucaucaccuacgagaacaacaccugggugaaccagaccuacgugaacaucuccaacacgaacuucgccgcgggccagagcgucgccuccgugaagcuggccgggaacagcucccucugcccggugagcggcugggccaucuacuccaaggacaacagcguccgcaucggcuccaagggggacguguucgugauccgggagcccuucaucagcugcagcccccuggagugccgcaccuucuuccugacccagggcgcccuccugaacgacaagcacuccaacgggaccaucaaggaccggucccccuaccgcacgcugaugagcugcccgaucggcgagguccccucccccuacaacagccgguucgagagcguggcgugguccgccagcgccugccacgacgggaucaacuggcucaccaucggcaucuccggccccgacaacggggccguggcgguccugaaguacaacggcaucaucaccgacaccaucaagagcuggcgcaacaacauccugcggacgcaggaguccgagugcgccugcgugaacgggagcugcuucaccgugaugaccgacggcccguccgacggccaggccagcuacaagaucuuccgcaucgagaaggggaagaucgucaaguccguggagaugaacgcccccaacuaccacuacgaggagugcagcugcuaccccgacuccagcgagaucacgugcgugugccgggacaacuggcacggcuccaaccgccccugggucagcuucaaccagaaccucgaguaccagaucggguacaucugcuccggcaucuucggggacaacccgcggcccaacgacaagaccggcagcugcggccccguguccagcaacggggccaacggcgugaagggguucuccuucaaguacggcaacggggucuggaucggccgcaccaagagcaucagcucccggaacggcuucgagaugaucugggaccccaacggguggaccggcaccgacaacaacuucagcaucaagcaggacaucguggggaucaacgagugguccggcuacagcggguccuucgugcagcacccggagcugacgggccuggacugcauccgccccugcuucugggucgagcucauccggggccgccccaaggagaacaccaucuggaccagcggguccagcaucuccuucugcggcgugaacagcgacaccgucgggugguccuggcccgacggcgcggagcugccguucacgaucgacaaguga

SEQ ID NO: 87291 - RNA, 1410 nt, Artificial Sequence
  derived and/or modified CDS sequence (opt1) from neuraminidase__InfluenzaA__AGB13115
augaaccccaaccagaagaucaucaccaucggcagcgugugcaugaccaucgggauggccaaccugauccuccagaucggcaacaucaucuccaucuggaucagccacuccauccagcuggggaaccagaaccagaucgagacgugcaaccagagcgucaucaccuacgagaacaacaccugggugaaccagaccuacgugaacaucuccaacacgaacuucgccgcgggccagagcgucguguccgugaagcuggccgggaacagcucccucugcccggucagcggcugggccaucuacuccaaggacaacagcauccgcaucggcuccaagggggacguguucgugcugcgggagcccuucaucagcugcagcccccuggagugccgcaccuucuuccucacccagggcgcccugcugaacgacaagcacuccaacgggaccaucaaggaccggucccccuaccgcacgcucaugagcugcccgaucggcgagguccccucccccuacaacagccgguucgagagcguggccugguccgcgagcgccugccacgacgggaucaacuggcugaccaucggcaucuccggccccgacaacggggccguggccguccugaaguacaacggcaucaucaccgacaccaucaagagcuggcgcaacaacauccuccggacgcaggaguccgagugcgcgugcgugaacgggagcugcuucaccaucaugaccgacggcccguccgacggccaggccagcuacaagaucuuccgcaucgagaaggggaagaucgugaaguccgucgagaugaacgcccccaacuaccacuacgaggagugcagcugcuaccccgacuccagcgagaucacgugcgugugccgggacaacuggcgcggcuccaaccggcccugggugagcuucaaccagaaccuggaguaccagaucggguacaucugcuccggcaucuucggggacaacccgcgccccaacgacaagaccggcagcugcggccccgucuccagcaacggggccaacggcgugaagggguucuccuucaaguacggcaacgggguguggaucggccggaccaagagcaucagcucccgcaagggcuucgagaugaucugggaccccaacggguggaccggcaccgacaacaacuucagcaucaagcaggacaucgucgggaucaacgagugguccggcuacagcggguccuucgugcagcacccggagcugacgggccucgacugcauccggcccugcuucuggguggagcugauccgcggccggcccaaggagaacaccaucuggaccagcggguccagcaucuccuucugcggcgucaacagcgacaccguggggugguccuggcccgacggcgccgagcugccguucacgaucgacaaguga

SEQ ID NO: 87292 - RNA, 1410 nt, Artificial Sequence; identical to SEQ ID NO: 84733
  derived and/or modified CDS sequence (opt1) from neuraminidase__InfluenzaA__AGB13133

SEQ ID NO: 87293 - RNA, 1410 nt, Artificial Sequence; identical to SEQ ID NO: 84281
  derived and/or modified CDS sequence (opt1) from neuraminidase__InfluenzaA__AGB13152

SEQ ID NO: 87294 - RNA, 1410 nt, Artificial Sequence; identical to SEQ ID NO: 84281
  derived and/or modified CDS sequence (opt1) from neuraminidase__InfluenzaA__AGB13162

SEQ ID NO: 87295 - RNA, 1410 nt, Artificial Sequence; identical to SEQ ID NO: 85104
  derived and/or modified CDS sequence (opt1) from neuraminidase__InfluenzaA__AGB13173

SEQ ID NO: 87296 - RNA, 1410 nt, Artificial Sequence
  derived and/or modified CDS sequence (opt1) from neuraminidase__InfluenzaA__AGB13183
augaaccccaaccagaagaucaucaccaucggcagcgugugcaugaccaucgggauggccaaccugauccuccagaucggcaacaucaucuccaucuggaucagccacuccauccagcuggggaaccagaaccagaucgagacgugcaaccagagcgucaucaccuacgagaacaacaccugggugaaccagaccuacgugaacaucuccaacacgaacuucgccgcgggccagagcgucguguccgugaagcuggccgggaacagcucccucugcccggucagcggcugggccaucuacuccaaggacaacagcauccgcaucggcuccaagggggacguguucgugauccgggagcccuucaucagcugcagcccccuggagugccgcaccuucuuccugacccagggcgcccuccugaacgacaagcacuccaacgggaccaucaaggaccggucccccuaccgcacgcugaugagcugcccgaucggcgagguccccucccccuacaacagccgguucgagagcguggccugguccgcgagcgccugccacgacgggaucaacuggcucaccaucggcaucuccggccaggacaacggggccguggccguccugaaguacaacggcaucaucaccgacaccaucaagagcuggcgcaacaacauccugcggacgcaggaguccgagugcgcgugcgugaacgggagcugcuucaccaucaugaccgacggccccuccgacggccaggccagcuacaagaucuuccgcaucgagaaggggaagaucgugaaguccgucgagaugaacgccccgaacuaccacuacgaggagugcagcugcuaccccgacuccagcgagaucacgugcgugugccgggacaacuggcacggcuccaaccgccccugggugagcuucaaccagaaccucgaguaccagaucggguacaucugcuccggcaucuucggggacaacccccggccgaacgacaagaccggcagcugcggccccgucuccagcaacggggccaacggcgugaagggguucuccuucaaguacggcaacgggguguggaucggccgcaccaagagcaucagcucccggaagggcuucgagaugaucugggaccccaacggguggaccggcaccgacaacaacuucagcaucaagcaggacaucgucgggaucaacgagugguccggcuacagcggguccuucgugcagcaccccgagcugacgggccuggacugcauccgcccgugcuucuggguggagcucauccggggccgccccaaggagaacaccaucuggaccagcggguccagcaucuccuucugcggcgucaacagcgacaccguggggugguccuggcccgacggcgccgagcugcccuucacgaucgacaaguga

SEQ ID NO: 87297 - RNA, 1410 nt, Artificial Sequence; identical to SEQ ID NO: 84733
  derived and/or modified CDS sequence (opt1) from neuraminidase__InfluenzaA__AGB13193

SEQ ID NO: 87298 - RNA, 1410 nt, Artificial Sequence; identical to SEQ ID NO: 84800
  derived and/or modified CDS sequence (opt1) from neuraminidase__InfluenzaA__AGB13203

SEQ ID NO: 87299 - RNA, 1410 nt, Artificial Sequence; identical to SEQ ID NO: 84733
  derived and/or modified CDS sequence (opt1) from neuraminidase__InfluenzaA__AGB13213

SEQ ID NO: 87300 - RNA, 1410 nt, Artificial Sequence; identical to SEQ ID NO: 84733
  derived and/or modified CDS sequence (opt1) from neuraminidase__InfluenzaA__AGB13223

SEQ ID NO: 87301 - RNA, 1410 nt, Artificial Sequence; identical to SEQ ID NO: 84733
  derived and/or modified CDS sequence (opt1) from neuraminidase__InfluenzaA__AGB13233

SEQ ID NO: 87302 - RNA, 1410 nt, Artificial Sequence
  derived and/or modified CDS sequence (opt1) from neuraminidase__InfluenzaA__AGB13243
augaaccccaaccagaagaucaucaccaucggcagcgugugcaugaccaucgggauggccaaccugauccuccagaucggcaacaucaucuccaucuggaucagccacuccauccagcuggggaaccagaaccagaucgagacgugcaaccagagcgucaucaccuacgagaacaacaccugggugaaccagaccuacgugaacaucuccaacacgaacuucgccgcgggccagagcgucguguccgugaagcuggccgggaacagcucccucugcccggucagcggcugggccaucuacuccaaggacaacagcauccgcaucggcuccaagggggacguguucgugauccgggagcccuucaucagcugcagcccccuggagugccgcaccuucuuccugacccagggcgcccuccugaacgacaagcacuccaacgggaccaucaaggaccggucccccuaccgcacgcugaugagcugcccgaucggcgagguccccucccccuacaacagccgguucgagagcguggccugguccgcgagcgccugccacgacgggaucaacuggcucaccaucggcaucuccggccccgacaacggggccguggccguccugaaguacaacggcaucaucaccgacaccaucaagagcuggcgcaacaacauccugcggacgcaggaguccgagugcgcgugcgugaacgggagcugcuucaccaucaugaccgacggcccguccgacggccaggccagcuacaagaucuuccgcaucgagcgggggaagaucgugaaguccgucgagaugaacgcccccaacuacuacuacgaggagugcagcugcuaccccgacuccagcgagaucacgugcgugugccgcgacaacuggcacggcuccaaccggcccugggugagcuucaaccagaaccucgaguaccagaucggguacaucugcuccggcgucuucggggacaacccgcgccccaacgacaagaccggcagcugcggccccguguccagcaacggggccaacggcgugaagggguucuccuucaaguacggcaacggggucuggaucggccggaccaagagcaucagcucccgcaagggcuucgagaugaucugggaccccaacggguggaccggcaccgacaacaacuucagcaucaagcaggacaucguggggaucaacgagugguccggcuacagcggguccuucgugcagcacccggagcugacgggccuggacugcauccggcccugcuucugggucgagcucauccgcggccggcccaaggagaacaccaucuggaccagcggguccagcaucuccuucugcggcgugaacagcgacaccgucgggugguccuggcccgacggcgccgagcugccguucacgaucgacaaguga

SEQ ID NO: 87303 - RNA, 1410 nt, Artificial Sequence; identical to SEQ ID NO: 84800
  derived and/or modified CDS sequence (opt1) from neuraminidase__InfluenzaA__AGB13253

SEQ ID NO: 87304 - RNA, 1410 nt, Artificial Sequence
  derived and/or modified CDS sequence (opt1) from neuraminidase__InfluenzaA__AGB13263
augaaccccaaccagaagaucaucaccaucggcagcgugugcaugaccaucgggauggccaaccugauccuccagaucggcaacaucaucuccaucuggaucagccacuccauccagcuggggaaccagaaccagacggagaccugcaaccagagcgucaucaccuacgagaacaacaccugggugaaccagacguacgugaacaucuccaacaccaacuucgccgcgggccagagcgucguguccgugaagcuggccgggaacagcucccucugcccggucagcggcugggccaucuacuccaaggacaacagcauccgcaucggcuccaagggggacguguucgugauccgggagcccuucaucagcugcagcccccuggagugccgcaccuucuuccugacccagggcgcccuccugaacgacaagcacuccaacgggacgaucaaggaccggucccccuaccgcacccugaugagcugcccgaucggcgagguccccucccccuacaacagccgguucgagagcguggccugguccgcgagcgccugccacgacgggaucaacuggcucaccaucggcaucuccggccccgacaacggggccguggccguccugaaguacaacggcaucaucaccgacacgaucaagagcuggcgcaacaacauccugcggacccaggaguccgagugcgcgugcgugaacgggagcugcuucaccgugaugaccgacggcccguccgacggccaggccagcuacaagaucuuccgcaucgagaaggggaagaucgucaaguccguggagaugaaggcccccaacuaccacuacgaggagugcagcugcuaccccgacuccagcgagaucacgugcgugugccgggacaacuggcacggcuccaaccgccccugggucagcuucaaccagaaccucgaguaccggaucggguacaucugcuccggcaucuucggggacaacccgcgccccaacgacaagaccggcagcugcggccccguguccagcaacggggccaacggcgugaagggguucuccuucaaguacggcaacggggucuggaucggccggaccaagagcaucagcucccgcaacggcuucgagaugaucugggaccccaacggguggaccggcacggacaacaacuucagcaucaagcaggacaucaucgggaucaacgagugguccggcuacagcggguccuucgugcagcacccggagcugaccggccuggacugcauccggcccugcuucuggguggagcucauccgcggccggcccaaggagaacaccaucuggaccagcggguccagcaucuccuucugcggcgucaacagcgacacgguggggugguccuggcccgacggcgccgagcugccguucaccgucgacaaguga

SEQ ID NO: 87305 - RNA, 1410 nt, Artificial Sequence; identical to SEQ ID NO: 84733
  derived and/or modified CDS sequence (opt1) from neuraminidase__InfluenzaA__AGB13273

SEQ ID NO: 87306 - RNA, 1410 nt, Artificial Sequence
  derived and/or modified CDS sequence (opt1) from neuraminidase__InfluenzaA__AGB13283
augaaccccaaccagaagaucaucaccaucggcagcgugugcaugaccaucgggauggccaaccugauccuccagaucggcaacaucaucuccaucuggaucagccacuccauccagcuggggaaccagaaccagaucgagacgugcaaccagagcgucaucaccuacgagaacaacaccugggugaaccagaccuacgugaacaucuccaacacgaacuucgccgcgggccagagcgucguguccgugaagcuggccgggaacagcucccucugcccggucagcggcugggccaucuacuccaaggacaacagcauccgcaucggcuccaagggggacguguucgugauccgggagcccuucaucagcugcagcccccuggagugccgcaccuucuuccugacccagggcgcccuccugaacgacaagcacuccaacgggaccaucaaggaccggucccccuaccgcacgcugaugagcugcccgaucggcgagguccccucccccuacaacagccgguucgagagcguggccugguccgcgagcgccugccacgacgggaucaacuggcucaccaucggcaucuccggccccgacaacggggccguggccguccugaaguacaacggcaucaucaccgacaccaucaagagcuggcgcaacaacauccugcggacgcaggaguccgagugcgcgugcgugaacgggagcugcuucaccaucaugaccgacggcccguccgacggccaggccagcuacaagaucuuccgcaucgagaaggggaagaucgugaaguccgucgagaugaacgcccccaacuaccacuacgaggagugcagcugcuaccccgacuccagcgagaucacgugcgugugccgggacaacuggcacggcuccaaccgccccugggugagcuucaaccagaaccucgaguaccagaucggguacaucugcuccggcaucuucggggacaacccgcggcccaacgacaagaccggcagcugcggccccgucuccagcaacggggccaacggcgugaagggguucuccuucaaguacggcaacgggguguggaucggccgcaccaagagcaucagcucccggcgcggcuucgagaugaucugggaccccaacggguggaccggcaccgacaacaacuucagcaucaagcaggacaucgucgggaucaacgagugguccggcuacagcggguccuucgugcagcacccggagcugacgggccuggacugcauccggcccugcuucuggguggagcucauccgcggccggcccaaggagaacaccaucuggaccagcggguccagcaucuccuucugcggcgucaacagcgacaccguggggugguccuggcccgacggcgccgagcugccguucacgaucgacaaguga

SEQ ID NO: 87307 - RNA, 1410 nt, Artificial Sequence; identical to SEQ ID NO: 84733
  derived and/or modified CDS sequence (opt1) from neuraminidase__InfluenzaA__AGB13293

SEQ ID NO: 87308 - RNA, 1410 nt, Artificial Sequence; identical to SEQ ID NO: 84733
  derived and/or modified CDS sequence (opt1) from neuraminidase__InfluenzaA__AGB13303

SEQ ID NO: 87309 - RNA, 1410 nt, Artificial Sequence
  derived and/or modified CDS sequence (opt1) from neuraminidase__InfluenzaA__AGB13313
augaaccccaaccagaagaucaucaccaucggcagcgugugcaugaccaucgggauggccaaccugauccuccagaucggcaacaucaucuccaucuggaucagccacuccauccagcuggggaaccagaaccagaucgagacgugcaaccagagcgucaucaccuacgagaacaacaccugggugaaccagaccuacgugaacaucuccaacacgaacuucgccgcgggccagagcgucguguccgccaagcuggccgggaacagcucccucugcccggugagcggcugggccaucuacuccaaggacaacagcauccgcaucggcuccaagggggacgucuucgugauccgggagcccuucaucagcugcagcccccuggagugccgcaccuucuuccugacccagggcgcccuccugaacgacaagcacuccaacgggaccaucaaggaccggucccccuaccgcacgcugaugagcugcccgaucggcgaggugcccucccccuacaacagccgguucgagagcgucgcgugguccgccagcgccugccacgacgggaucaacuggcucaccaucggcaucuccggccccgacaacggggccguggcggugcugaaguacaacggcaucaucaccgacaccaucaagagcuggcgcaacaacauccugcggacgcaggaguccgagugcgccugcgucaacgggagcugcuucaccgugaugaccgacggcccguccgacggccaggccagcuacaagaucuuccgcaucgagaaggggaagaucgugaaguccgucgagaugaacgcccccaacuaccacuacgaggagugcagcugcuaccccgacuccagcgagaucacgugcgugugccgggacaacuggcacggcuccaaccgccccugggugagcuucaaccagaaccucgaguaccagaucggguacaucugcuccggcaucuucggggacaacccgcggcccaacgacaagaagggcagcugcggccccgucuccagcaacggggccaacggcgugaagggguucuccuucaaguacggcaacgggguguggaucggccgcaccaagagcaucagcucccggaacggcuucgagaugaucugggaccccaacggguggaccggcaccgacaacaacuucagcaucaagcaggacaucgucgggaucaacgagugguccggcuacagcggguccuucgugcagcacccggagcugaccggccuggacugcauccgccccugcuucuggguggagcucauccggggccgccccaaggagaacacgaucuggaccagcggguccagcaucuccuucugcggcgucaacagcgacaccguggggugguccuggcccgacggcgcggagcugccguucaccaucgacaaguga

SEQ ID NO: 87310 - RNA, 1410 nt, Artificial Sequence; identical to SEQ ID NO: 84733
  derived and/or modified CDS sequence (opt1) from neuraminidase__InfluenzaA__AGB13323

SEQ ID NO: 87311 - RNA, 1410 nt, Artificial Sequence
  derived and/or modified CDS sequence (opt1) from neuraminidase__InfluenzaA__AGB13333
augaaccccaaccagaagaucaucaccaucggcagcgugugcaugaccaucgggauggccaaccugauccuccagaucggcaacaucaucuccaucuggaucagccacuccauccagcuggggaaccagagccagaucgagacgugcaaccaguccgucaucaccuacgagaacaacaccugggugaaccagaccuacgugaacaucagcaacacgaacuucgccgcgggccaguccgccgucagcgugaagcuggccgggaacuccagccucugcccgguguccggcugggccaucuacagcaaggacaacuccauccgcaucggcagcaagggggacgucuucgugauccgggagcccuucaucuccugcagcccccuggagugccgcaccuucuuccugacccagggcgcccuccugaacgacaagcacuccaacgggaccaucaaggaccggagccccuaccgcacgcugauguccugcccgaucggcgaggugcccagccccuacaacagccgguucgaguccgucgcguggagcgccuccgccugccacgacgggaucaacuggcucaccaucggcaucagcggccccgacaacggggccguggcggugcugaaguacaacggcaucaucaccgacaccaucaaguccuggcgcaacaacauccugcggacgcaggagagcgagugcgccugcgucaacggguccugcuucaccaucaugaccgacggcccgagcgacggccaggccuccuacaagaucuuccgcaucgagaaggggaagaucgucaagagcguggagaugaacgcccccaacuaccacuacgaggagugcuccugcuaccccgacagcuccgagaucacgugcgugugccgggacaacuggcacggcagcaaccgccccuggguguccuucaaccagaaccucgaguaccagaucggguacaucugcagcggcaucuucggggacaacccgcggcccaacgacaagaccggcuccugcggccccgugagcuccaacggggccaacggcgucaagggguucagcuucaaguacggcaacgggguguggaucggccgcaccaagagcaucuccagccggaagggcuucgagaugaucugggaccccaacggguggaccggcaccgacaacaacuucuccaucaagcaggacaucguggggaucaacgaguggagcggcuacuccgggagcuucguccagcacccggagcugacgggccuggacugcauccgccccugcuucuggguggagcucauccggggccgccccaaggagaacaccaucuggaccuccgggagcuccaucagcuucugcggcgugaacuccgacaccgucggguggagcuggcccgacggcgcggagcugccguucacgaucgacaaguga

SEQ ID NO: 87312 - RNA, 1410 nt, Artificial Sequence; identical to SEQ ID NO: 84733
  derived and/or modified CDS sequence (opt1) from neuraminidase__InfluenzaA__AGB13343

SEQ ID NO: 87313 - RNA, 1410 nt, Artificial Sequence; identical to SEQ ID NO: 84982
  derived and/or modified CDS sequence (opt1) from neuraminidase__InfluenzaA__AGB13353

SEQ ID NO: 87314 - RNA, 1410 nt, Artificial Sequence
  derived and/or modified CDS sequence (opt1) from neuraminidase__InfluenzaA__AGB13363
augaaccccaaccagaagaucaucaccaucggcagcgugugcaugaccaucgggauggccaaccugauccuccagaucggcaacaucaucuccaucuggaucagccacuccauccagcuggggaaccagaaccagaucgagacgugcaaccagagcgucaucaccuacgagaacaacaccugggugaaccagaccuacgugaacaucuccaacacgaacuucgccgcgggccagagcgucgccuccgugaagcuggccgggaacagcucccucugcagcguguccggcugggccaucuacagcaaggacaacuccauccgcaucggcagcaagggggacgucuucgugauccgggagccguucaucuccugcagcccccuggagugccgcaccuucuuccugacccagggcgcccuccugaacgacaagcacuccaacgggaccaucaaggaccggagccccuaccgcacgcugauguccugccccaucggcgaggugccgagccccuacaacagccgguucgaguccgucgcguggagcgccuccgccugccacgacgggaucaacuggcucaccaucggcaucagcggccccgacaacggggccguggcggugcugaaguacaacggcaucaucaccgacaccaucaaguccuggcgcaacaacauccugcggacgcaggagagcgagugcgccugcgucaacggguccugcuucaccaucaugaccgacggccccagcgacggccaggccuccuacaagaucuuccgcaucgagaaggggaagaucgucaagagcguggagaugaacgccccgaacuaccacuacgaggagugcuccugcuaccccgacagcuccgagaucacgugcgugugccgggacaacuggcacggcagcaaccgccccuggguguccuucaaccagaaccucgaguaccagaucggguacaucugcagcggcaucuucggggacaacccccggccgaacgacaagaccggcuccugcggccccgugagcuccaacggggccaacggcgucaagggguucagcuucaaguacggcaacgggguguggaucggccgcaccaagagcaucuccagccggaagggcuucgagaugaucugggaccccaacggguggaccggcaccgacaacaacuucuccaucaagcaggacaucguggggaucaacgaguggagcggcuacuccgggagcuucguccagcaccccgagcugacgggccuggacugcauccgcccgugcuucuggguggagcucauccggggccgccccaaggagaacaccaucuggaccuccgggagcuccaucagcuucugcggcgugaacuccgacaccgucggguggagcuggcccgacggcgcggagcugcccuucacgaucgacaaguga

SEQ ID NO: 87315 - RNA, 1410 nt, Artificial Sequence
  derived and/or modified CDS sequence (opt1) from neuraminidase__InfluenzaA__AGB13383
augaaccccaaccagaagaucaucaccaucggcagcgugugcaugaccaucgggauggccaaccugauccuccagaucggcaacaucaucuccaucuggaucagccacuccauccagcuggggaaccagaaccagaucgagacgugcaaccagagcgucaucaccuacgagaacaacaccugggugaaccagaccuacgugaacaucuccaacacgaacuucgccgcgggccagagcgucguguccgugaagcuggccgggaacagcucccucugcccggucagcggcugggccaucuacuccaaggacaacagcauccgcaucggcuccaagggggacguguucgugauccgggagcccuucaucagcugcagcccccuggagugccgcaccuucuuccugacccagggcgcccuccugaacgacaagcacuccaacgggaccaucaaggaccggucccccuaccgcacgcugaugagcugcccgaucggcgagguccccucccccuacaacagccgguucgagagcguggccugguccgcgagcgccugccacgacgggaucaacuggcucaccaucggcaucuccggccccgacaacggggccguggccguccugaaguacaacggcaucaucaccgacaccaucaagagcuggcgcaacaacauccugcggacgcaggaguccgagugcgcgugcgugaacgggagcugcuucaccaucaugaccgacggcccguccgacggccaggccagcuacaagaucuuccgcaucgagaaggggaagaucgugaaguccgucgagaugaacgcccccaacuaccacuacgaggagugcagcugcuaccccgacuccagcgagaucacgugcgugugccgggacaacuggcacggcuccaaccgccccugggugagcuucaaccagaaccucgaguaccagaucggguacaucugcuccggcaucuucggggacaacccgcggcccaacgacaagaccggcagcugcggccccgucuccagcaacggggccaacggcgugaagggguucuccuucaaguacggcagcgggguguggaucggccgcaccaagagcaucuccagccggaagggcuucgagaugaucugggaccccaacggguggaccggcaccgacaacaacuucuccaucaagcaggacaucgucgggaucaacgaguggagcggcuacuccgggagcuucgugcagcacccggagcugacgggccuggacugcauccgccccugcuucuggguggagcucauccggggccgccccaaggagaacaccaucuggaccuccgggagcuccaucagcuucugcggcgucaacuccgacaccgugggguggagcuggcccgacggcgccgagcugccguucacgaucgacaaguga

SEQ ID NO: 87316 - RNA, 1410 nt, Artificial Sequence; identical to SEQ ID NO: 84281
  derived and/or modified CDS sequence (opt1) from neuraminidase__InfluenzaA__AGB13393

SEQ ID NO: 87317 - RNA, 1410 nt, Artificial Sequence; identical to SEQ ID NO: 84981
  derived and/or modified CDS sequence (opt1) from neuraminidase__InfluenzaA__AGB13403

SEQ ID NO: 87318 - RNA, 1410 nt, Artificial Sequence; identical to SEQ ID NO: 84281
  derived and/or modified CDS sequence (opt1) from neuraminidase__InfluenzaA__AGB13413

SEQ ID NO: 87319 - RNA, 1410 nt, Artificial Sequence; identical to SEQ ID NO: 84281
  derived and/or modified CDS sequence (opt1) from neuraminidase__InfluenzaA__AGB13423

SEQ ID NO: 87320 - RNA, 1410 nt, Artificial Sequence; identical to SEQ ID NO: 84981
  derived and/or modified CDS sequence (opt1) from neuraminidase__InfluenzaA__AGB13433

SEQ ID NO: 87321 - RNA, 1410 nt, Artificial Sequence; identical to SEQ ID NO: 84981
  derived and/or modified CDS sequence (opt1) from neuraminidase__InfluenzaA__AGB13443

SEQ ID NO: 87322 - RNA, 1410 nt, Artificial Sequence
  derived and/or modified CDS sequence (opt1) from neuraminidase__InfluenzaA__AGB13453
augaaccccaaccagaagaucaucaccaucggcagcgugugcaugaccaucgggauggccaaccugauccuccagaucggcaacaucaucuccaucuggaucagccacuccauccagcuggggaaccagagccagaucgagacgugcaaccaguccgucaucaccuacgagaacaacaccugggugaaccagaccuacgugaacaucagcaacacgaacuucgccgcgggccaguccgucgugagcgugaagcuggccgggaacuccagccucugcccggucuccggcugggccaucuacagcaaggacaacuccauccgcaucggcagcaagggggacguguucgugauccgggagcccuucaucuccugcagcccccuggagugccgcaccuucuuccugacccagggcgcccuccugaacgacaagcacuccaacgggaccaucaaggaccggagccccuaccgcacgcugauguccugcccgaucggcgagguccccagccccuacaacagccgguucgaguccguggccuggagcgcguccgccugccacgacgggaucaacuggcucaccaucggcaucagcggccccgacaacggggccguggccguccugaaguacaacggcaucaucaccgacaccaucaaguccuggcgcaacaacauccugcggacgcaggagagcgagugcgcgugcgugaacggguccugcuucaccaucaugaccgacggcccgagcgacggccaggccuccuacaagaucuuccgcaucgagaaggggaagaucgucaagagcguggagaugaacgcccccaacuaccacuacgaggagugcuccugcuaccccgacagcuccgagaucacgugcgugugccgggacaacuggcacggcagcaaccgccccuggguguccuucaaccagaaccucgaguaccagaucggguacaucugcagcggcaucuucggggacaacccgcggcccaacgacaagaccggcuccugcggccccgucagcuccaacggggccaacggcgugaagggguucagcuucaaguacggcaacgggguguggaucggccgcaccaagagcuucuccagccggaagggcuucgagaugaucugggaccccaacggguggaccggcaccgacaacaacuucuccaucaagcaggacaucgucgggaucaacgaguggagcggcuacuccgggagcuucgugcagcacccggagcugacgggccuggacugcauccgccccugcuucuggguggagcucauccggggccgccccaaggagaacaccaucuggaccuccgggagcuccaucagcuucugcggcgucaacuccgacaccgugggguggagcuggcccgacggcgccgagcugccguucacgaucgacaaguga

SEQ ID NO: 87323 - RNA, 1410 nt, Artificial Sequence; identical to SEQ ID NO: 84281
  derived and/or modified CDS sequence (opt1) from neuraminidase__InfluenzaA__AGB13463

SEQ ID NO: 87324 - RNA, 1410 nt, Artificial Sequence; identical to SEQ ID NO: 84733
  derived and/or modified CDS sequence (opt1) from neuraminidase__InfluenzaA__AGB13473

SEQ ID NO: 87325 - RNA, 1410 nt, Artificial Sequence
  derived and/or modified CDS sequence (opt1) from neuraminidase__InfluenzaA__AGB13483
augaaccccaaccagaagaucaucaccaucggcagcgugugcaugaccaucgggauggccaaccugauccuccagaucggcaacaucaucuccaucuggaucagccacuccauccagcuggggaaccagagccagaucgagacgugcaaccaguccgucaucaccuacgagaacaacaccugggugaaccagaccuacgugaacaucagcaacacgaacuucgccgcgggccaguccgucgugagcgugaagcuggccgggaacuccagccucugcccggucuccggcugggccaucuacagcaaggacaacuccauccgcaucggcagcaagggggacguguucgugauccgggagcccuucaucuccugcagcccccuggagugccgcaccuucuuccugacccagggcgcccuccugaacgacaagcacuccaacgggaccaucaaggaccggagccccuaccgcacgcugauguccugcccgaucggcgagguccccagccccuacaacagccgguucgaguccguggccuggagcgcguccgccugccacgacgggaucaacuggcucaccaucggcaucagcggccccgacaacggggccguggccguccugaaguacaacggcaucaucaccgacaccaucaaguccuggcgcaacaacauccugcggacgcaggagagcgagugcgcgugcgugaacggguccugcuucaccaucaugaccgacggcccgagcgacggccaggccuccuacaagaucuuccgcaucgagaaggggaagaucgucaagagcguggagaugaacgcccccaacuaccacuacgaggagugcuccugcuaccccgacagcuccgagaucacgugcgugugccgggacaacuggcacggcagcaaccgccccuggguguccuucaaccagaaccucgaguaccagaucggguacaucugcagcggcaucuucggggacaacccgcggcccaacgacaagaccggcuccugcggccccgucagcuccaacggggccaacggcgugaagggguucagcuucaaguacggcaacgggguguggaucggccgcaccaagagcaucuccagccggaagggcuucgagaugaucugggaccccaacggguggaccggcaccgacaacaacuucuccaucaagcaggacaucgucgggaucaacgaguggagcggcuacuccgggagcuucgugcagcacccggagcugacgggccuggacugcauccgccccugcuucuggguggagcucauccggggccagcccaaggagaacaccaucuggaccuccgggagcuccaucagcuucugcggcgucaacuccgacaccgugggguggagcuggcccgacggcgccgagcugccguucacgaucgacaaguga

SEQ ID NO: 87326 - RNA, 1410 nt, Artificial Sequence; identical to SEQ ID NO: 85018
  derived and/or modified CDS sequence (opt1) from neuraminidase__InfluenzaA__AGB13493

SEQ ID NO: 87327 - RNA, 1410 nt, Artificial Sequence; identical to SEQ ID NO: 84810
  derived and/or modified CDS sequence (opt1) from neuraminidase__InfluenzaA__AGB13503

SEQ ID NO: 87328 - RNA, 1410 nt, Artificial Sequence; identical to SEQ ID NO: 82224
  derived and/or modified CDS sequence (opt1) from neuraminidase__InfluenzaA__AGB13513

SEQ ID NO: 87329 - RNA, 1410 nt, Artificial Sequence; identical to SEQ ID NO: 85016
  derived and/or modified CDS sequence (opt1) from neuraminidase__InfluenzaA__AGB13523

SEQ ID NO: 87330 - RNA, 1410 nt, Artificial Sequence; identical to SEQ ID NO: 85016
  derived and/or modified CDS sequence (opt1) from neuraminidase__InfluenzaA__AGB13533

SEQ ID NO: 87331 - RNA, 1410 nt, Artificial Sequence; identical to SEQ ID NO: 84733
  derived and/or modified CDS sequence (opt1) from neuraminidase__InfluenzaA__AGB13543

SEQ ID NO: 87332 - RNA, 1410 nt, Artificial Sequence; identical to SEQ ID NO: 84733
  derived and/or modified CDS sequence (opt1) from neuraminidase__InfluenzaA__AGB13553

SEQ ID NO: 87333 - RNA, 1410 nt, Artificial Sequence
  derived and/or modified CDS sequence (opt1) from neuraminidase__InfluenzaA__AGB13563
augaaccccaaccagaagaucaucaccaucggcagcgugugcaugaccaucggggucgccaaccugauccuccagaucggcaacaucaucuccaucuggaucagccacuccauccagcuggggaaccagaaccagaucgagacgugcaaccagagcgugaucaccuacgagaacaacaccugggugaaccagaccuacgucaacaucuccaacacgaacuucgccgcgggccagagcgugguguccgucaaccuggccgggaacagcucccucugcccggugagcggcugggccaucuacuccaaggacaacagcauccgcaucggcuccaagggggacguguucgucauccgggagcccuucaucagcugcagcccccuggagugccgcaccuucuuccugacccagggcgcccuccugaacgacaagcacuccaacgggaccaucaaggaccggucccccuaccgcacgcugaugagcugcccgaucggcgaggugcccucccccuacaacagccgguucgagagcguggccugguccgcgagcgccugccacgacgggaucaacuggcucaccaucggcaucuccggccccgacaacggggccgucgccgugcugaaguacaacggcaucaucaccgacaccaucaagagcuggcgcaacaacauccugcggacgcaggaguccgagugcgcgugcgugaacgggagcugcuucaccaucaugaccgacggcccguccgacggccaggccagcuacaagaucuuccgcaucgagaaggggaagaucgucaaguccguggagaugaacgcccccaacuaccacuacgaggagugcagcugcuaccccgacuccagcgagaucacgugcgugugccgggacaacuggcacggcuccaaccgccccugggucagcuucaaccagaaccucgaguaccagaucggguacaucugcuccggcaucuucggggacaacccgcggcccaacgacaagaccggcagcugcggccccguguccagcaacggggccaacggcgugaagggguucuccuucaaguacggcaacggggucuggaucggccgcaccaagaacaucagcagccggaagggcuucgagaugaucugggaccccaacggguggaccggcaccgacaacaacuucuccaucaagcaggacaucguggggaucaacgaguggagcggcuacuccgggagcuucgugcagcacccggagcugacgggccuggacugcauccgccccugcuucugggucgagcucauccggggccgccccaaggagaacaccaucuggaccuccgggagcuccaucagcuucugcggcgugaacuccgacaccgucggguggagcuggcccgacggcgccgagcugccguucacgaucgacaaguga

SEQ ID NO: 87334 - RNA, 1410 nt, Artificial Sequence; identical to SEQ ID NO: 84733
  derived and/or modified CDS sequence (opt1) from neuraminidase__InfluenzaA__AGB13573

SEQ ID NO: 87335 - RNA, 1410 nt, Artificial Sequence
  derived and/or modified CDS sequence (opt1) from neuraminidase__InfluenzaA__AGB13583
augaaccccaaccagaagaucaucaccaucggcagcgugugcaugaccaucgggauggccaaccugauccuccagaucggcaacaucaucuccaucuggaucagccacuccauccagcuggggaaccagaaccagaucgagacgugcaaccagagcgucaucaccuacgagaacaacaccugggugaaccagaccuacgugaacaucuccaacacgaacuucgccgcgggccagagcgucggguccgugaagcuggccggcaacagcucccucugcccggugagcggcugggccaucuacuccaaggacaacagcauccgcaucggguccaagggcgacgucuucgugauccgggagcccuucaucagcugcagcccccuggagugccgcaccuucuuccugacccagggggcccuccugaacgacaagcacuccaacggcaccaucaaggaccggucccccuaccgcacgcugaugagcugcccgaucggggaggugcccucccccuacaacagccgguucgagagcgucgccugguccgcgagcgccugccacgacggcaucaacuggcucaccaucggcaucuccgggcccgacaacggcgccguggccgugcugaaguacaacgggaucaucaccgacaccaucaagagcuggcgcaacaacauccugcggacgcaggaguccgagugcgcgugcgucaacggcagcugcuucaccaucaugaccgacggcccguccgacgggcaggccagcuacaagaucuuccgcaucgagaagggcaagaucgugaaguccguggagaugaacgcccccaacuaccacuacgaggagugcagcugcuaccccgacuccagcgagaucacgugcgucugccgggacaacuggcacggguccaaccgccccugggugagcuucaaccagaaccucgaguaccagaucggcuacaucugcuccgggaucuucggcgacaacccgcggcccaacgacaagaccggcagcugcgggcccguguccagcaacggcgccaacggggucaagggcuucuccuucaaguacgggaacggcguguggaucggccgcaccaagagcaucagcucccggaagggguucgagaugaucugggaccccaacggcuggaccgggaccgacaacaacuucagcaucaagcaggacaucgugggcaucaacgagugguccggguacagcggcuccuucguccagcacccggagcugacgggccuggacugcauccgccccugcuucuggguggagcucauccgggggcgccccaaggagaacaccaucuggaccagcggcuccagcaucuccuucugcggggugaacagcgacaccgucggcugguccuggcccgacggcgccgagcugccguucacgaucgacaaguga

SEQ ID NO: 87336 - RNA, 1410 nt, Artificial Sequence; identical to SEQ ID NO: 84733
  derived and/or modified CDS sequence (opt1) from neuraminidase__InfluenzaA__AGB13593

SEQ ID NO: 87337 - RNA, 1410 nt, Artificial Sequence; identical to SEQ ID NO: 84733
  derived and/or modified CDS sequence (opt1) from neuraminidase__InfluenzaA__AGB13603

SEQ ID NO: 87338 - RNA, 1410 nt, Artificial Sequence; identical to SEQ ID NO: 84733
  derived and/or modified CDS sequence (opt1) from neuraminidase__InfluenzaA__AGB13613

SEQ ID NO: 87339 - RNA, 1410 nt, Artificial Sequence; identical to SEQ ID NO: 84733
  derived and/or modified CDS sequence (opt1) from neuraminidase__InfluenzaA__AGB13623

SEQ ID NO: 87340 - RNA, 1410 nt, Artificial Sequence
  derived and/or modified CDS sequence (opt1) from neuraminidase__InfluenzaA__AGB13633
augaaccccaaccagaagaucaucaccaucggcagcgugugcaugaccaucgggauggccaaccugauccuccagaucggcaacaucaucuccaucuggaucagccacuccauccagcuggggaaccagagccagaucgagacgugcaaccaguccgucaucaccuacgagaacaacaccugggugaaccagaccuacgugaacaucagcaacacgaacuucgccgcgggccaguccgucgugagcgugaagcuggccgggaacuccagccucugcccggucuccggcugggccaucuacagcaaggacaacuccauccgcaucggcagcaagggggacguguucgugauccgggagcccuucaucuccugcagcccccuggagugccgcaccuucuuccugacccagggcgcccuccugaacgacaagcacuccaacgggaccaucaaggaccggagccccuaccgcacgcugauguccugcccgaucggcgagguccccagccccuacaacagccgguucgaguccguggccuggagcgcguccgccugccacgacgggaucaacuggcucaccaucggcaucagcggccccgacaacggggccguggccguccugaaguacaacggcaucaucaccgacaccaucaaguccuggcgcaacaacauccugcggacgcaggagagcgagugcgcgugcgugaacggguccugcuucaccaucaugaccgacggcccgagcgacggccaggccuccuacaagaucuuccgcaucgagaaggggaagaucgucaagagcguggagaugaacgcccccaacuaccacuacgaggagugcuccugcuaccccgacagcuccgagaucacgugcgugugccgggacaacuggcacggcagcaaccgccccuggguguccuucaaccagaaccucgaguaccagaucggguacaucugcagcggcaucuucggggacaacccgcggcccaacgacaagaccggcuccugcggccccgucagcuccaacggggccaacggcgugaagggguucagcuucaaguacggcaacgggguguggaucggccgcaccaagagcaucuccagccggaagggcuucgagaugaucugggaccccaacggguggaccggcaccgacaacaacuucuccaucaagcaggacaucgucgggaucaacgaguggagcggcuacuccgggagcuucgugcagcacccggagcugacgggccuggacugcauccgccccugcuucuggguggagcucauccggggccgccccaaggagaacaccaucuggaccuccgggagcaucaucuccuucugcggcgucaacagcgacaccguggggugguccuggcccgacggcgccgagcugccguucacgaucgacaaguga

SEQ ID NO: 87341 - RNA, 1410 nt, Artificial Sequence
  derived and/or modified CDS sequence (opt1) from neuraminidase__InfluenzaA__AGB13643
augaaccccaaccagaagaucaucaccaucggcagcgugugcaugaccaucgggauggccaaccugauccuccagaucggcaacaucaucuccaucuggaucagccacuccauccagcuggggaaccagaaccagaucgagacgugcaaccagagcgucaucaccuacgagaacaacaccugggugaaccagaccuacgugaacaucuccaacacgaacuucgccgcgggccagagcgucguguccgugaagcuggccgggaacagcucccucugcccggucagcggcugggccaucuacuccaaggacaacggcauccgcaucgggagcaagggcgacguguucgugauccgggagcccuucaucuccugcagcccccuggagugccgcaccuucuuccugacccagggggcccuccugaacgacaagcacuccaacggcaccaucaaggaccggagccccuaccgcacgcugauguccugcccgaucggggagguccccagccccuacaacucccgguucgagagcguggccuggagcgcguccgccugccacgacggcaucaacuggcucaccaucggcaucagcgggcccgacaacggcgccguggccguccugaaguacaacgggaucaucaccgacaccaucaaguccuggcgcaacaacauccugcggacgcaggagagcgagugcgugugcgugaacggcuccugcuucaccgucaugaccgacggcccgagcgacgggcaggcguccuacaagaucuuccgcaucgagaagggcaagaucgucaagagcguggagaugaacgcccccaacuaccacuacgaggagugcuccugcuaccccgacagcuccgagaucacgugcgugugccgggacaacuggcacgggagcaaccgccccuggguguccuucaaccagaaccucgaguaccagaucggcuacaucugcagcgggaucuucggcgacaacccgcggcccaacgacaagaccggcuccugcgggcccgugagcuccaacggcgccaacggggucaagggcuucagcuucaaguacgggaacggcguguggaucggccgcaccaaguccaucagcagccggaacggguucgagaugaucugggaccccaacggcuggaccgggaccgacaacaacuucuccgugaagcaggacaucaucggcaucaacgaguggagcggguacuccggcagcuucguccagcacccggagcugacgggccuggacugcauccgccccugcuucuggguggagcucauccgggggcgccccaaggagaacaccaucuggaccuccggcagcuccaucagcuucugcggggucaacuccgacaccgugggcuggagcuggcccgacggcgccgagcugccguucacgaucgacaaguga

SEQ ID NO: 87342 - RNA, 1410 nt, Artificial Sequence
  derived and/or modified CDS sequence (opt1) from neuraminidase__InfluenzaA__AGB13653
augaaccccaaccagaagaucaucaccaucggcagcgugugcaugaccaucgggauggccaaccugauccuccagaucggcaacaucaucuccaucuggaucagccacuccauccagcuggggaaccagaaccagaucgagacgugcaaccagagcgucaucaccuacgagaacaacaccugggugaaccagaccuacgugaacaucuccaacacgaacuucgccgcgggccagagcgucguguccgugaagcuggccgggaacagcucccucugcccggucagcggcugggccaucuacuccaaggacaacagcauccgcaucggcuccaagggggacguguucgugauccgggagcccuucaucagcugcagcccccuggagugccgcaccuucuuccugacccagggcgcccuccugaacgacaagcacuccaacgggaccaucaaggaccggucccccuaccgcacgcugaugagcugcccgaucggcgagguccccucccccuacaacagccgguucgagagcguggccugguccgcgagcgccugccacgacgggaucaacuggcucaccaucggcaucuccggccccgacaacggggccguggccguccugaaguacaacggcaucaucaccgacaccaucaagagcuggcgcaacaacauccugcggacgcaggaguccgagugcgugugcgugaacgggagcugcuucaccgucaugaccgacggcccguccgacggccaggcgagcuacaagaucuuccgcaucgagaaggggaagaucgugaaguccguggagaugaacgcccccaacuaccacuacgaggagugcagcugcuaccccgacuccagcgagaucacgugcgucugccgggacaacuggcacggcuccaaccgccccugggugagcuucaaccagaaccucgaguaccagaucggguacaucugcuccggcaucuucggggacaacccgcggcccaacgacaagaccggcagcugcggccccguguccagcaacggggccaacggcgucaagggguucuccuucaaguacggcaacgggguguggaucggccgcaccaagagcaucagcucccggaacggcuucgagaugaucugggaccccaacggguggaccggcaccgacaacaacuucagcgugaagcaggacaucaucgggaucaacgagugguccggcuacagcggguccuucguccagcacccggagcugacgggccuggacugcauccgccccugcuucuggguggagcucauccggggccgccccaaggagaacaccaucuggaccagcggguccagcaucuccuucugcggcgucaacagcgacaccguggggugguccuggcccgacggcgccgagcugccguucacgaucgacaaguga

SEQ ID NO: 87343 - RNA, 1410 nt, Artificial Sequence; identical to SEQ ID NO: 84281
  derived and/or modified CDS sequence (opt1) from neuraminidase__InfluenzaA__AGB13663

SEQ ID NO: 87344 - RNA, 1410 nt, Artificial Sequence; identical to SEQ ID NO: 84281
  derived and/or modified CDS sequence (opt1) from neuraminidase__InfluenzaA__AGB13724

SEQ ID NO: 87345 - RNA, 1410 nt, Artificial Sequence; identical to SEQ ID NO: 84733
  derived and/or modified CDS sequence (opt1) from neuraminidase__InfluenzaA__AGB13734

SEQ ID NO: 87346 - RNA, 1410 nt, Artificial Sequence; identical to SEQ ID NO: 81238
  derived and/or modified CDS sequence (opt1) from neuraminidase__InfluenzaA__AGB51359

SEQ ID NO: 87347 - RNA, 1410 nt, Artificial Sequence
  derived and/or modified CDS sequence (opt1) from neuraminidase__InfluenzaA__AGB97270
augaaccccaaccagaagaucaucaccaucggcagcgugugcaugaccaucgggauggccaaccugauccuccagaucggcaacaucaucuccaucuggaucagccacuccauccagcugcgcaaccagaaccagaucgagacgugcaaccagagcgucaucaccuacgagaacaacaccugggugaaccagaccuacgugaacaucuccaacacgaacuucgccgcggggcagagcgucguguccgugaagcuggccggcaacagcucccucugcccggucagcgggugggccaucuacuccaaggacaacagcauccggaucggcuccaagggcgacguguucgugauccgcgagcccuucaucagcugcagcccccuggagugccggaccuucuuccugacccagggggcccuccugaacgacaagcacuccaacggcaccaucaaggaccgcucccccuaccggacgcugaugagcugcccgaucggggagguccccucccccuacaacagccgcuucgagagcguggccugguccgcgagcgccugccacgacggcaucaacuggcucaccaucgggaucuccggccccgacaacggcgccauggccgugcugaaguacaacgggaucaucaccgacaccaucaagagcuggcggaacaacauccugcgcacgcaggaguccgagugcgcgugcgucaacggcagcugcuucaccaucaugaccgacgggccguccgacggccaggccagcuacaagaucuuccggaucgagaagggcaagaucgugaaguccguggagaugaacgcccccaacuaccacuacgaggagugcagcugcuaccccgacuccagcgagaucacgugcgucugccgcgacaacuggcacggguccaaccggcccugggugagcuucaaccagaaccucgaguaccagaucggcuacaucugcuccgggaucuucggcgacaacccgcgccccaacgacaagaccgggagcugcggccccguguccagcaacggcgccaacggggucaagggcuucuccuucaaguacgggaacggcguguggaucgggcggaccaagagcaucagcucccgcaagggcuucgagaugaucugggaccccaacggcuggaccgggaccgacaacaacuucagcaucaagcaggacaucgugggcaucaacgagugguccggguacagcggcuccuucguccagcacccggagcugacggggcuggacugcauccggcccugcuucuggguggagcucauccgcggccggcccaaggagaacaccaucuggaccagcggcuccagcaucuccuucugcggggugaacagcgacaccgucggcugguccuggcccgacggggccgagcugccguucacgaucgacaaguga

SEQ ID NO: 87348 - RNA, 1410 nt, Artificial Sequence
  derived and/or modified CDS sequence (opt1) from neuraminidase__InfluenzaA__AGB97274
augaaccccaaccagaagaucaucaccaucggcagcgugugcaugaccaucgggauggccaaccugauccuccagaucggcaacaucaucuccaucuggaucagccacuccauccagcugcgcaaccagaaccagaucgagacgugcaaccagagcgucaucaccuacgagaacaacaccugggugaaccagaccuacgugaacaucuccaacacgaacuucgccgcggggcagagcgucguguccgugaagcuggccggcaacagcucccucugcccggucagcgggugggccaucuacuccaaggacaacagcauccggaucggcuccaagggcgacguguucgugauccgcgagcccuucaucagcugcagcccccuggagugccggaccuucuuccugacccagggggcccuccugaacgacaagcacuccaacggcaccaucaaggaccgcucccccuaccggacgcugaugagcugcccgaucggggagguccccucccccuacaacagccgcuucgagagcguggccugguccgcgagcgccugccacgacggcaucaacuggcucaccaucgggaucuccggccccgacaacggcgccguggccguccugaaguacaacgggaucaucaccgacaccaucaagagcuggcggaacaacauccugcgcacgcaggaguccgagugcgcgugcgugaacggcagcugcuucaccaucaugaccgacgggccguccgacggccaggccagcuacaagaucuuccggaucgagaagggcaagaucgugaaguccgucgagaugaacgcccccaacuaccacuacgaggagugcagcugcuaccccgacuccagcgagaucacgugcgugugccgcgacaacuggcacggguccaaccggcccugggugagcuucaaccagaaccucgaguaccagaucggcuacaucugcuccgggaucuucggcgacaacccgcgccccaacgacaagaccgggagcugcggccccgucuccagcaacggcgccaacggggugaagggcuucuccuucaaguacgggaacggcguguggaucgggcggaccaagagcaucagcucccgcaagggcuucgagaugaucugggaccccaacggcuggaccgggaccgacaacaacuucagcaucaagcaggacaucgucggcaucaacgagugguccggguacagcggcuccuucgugcagcacccggagcugacggggcuggacugcauccggcccugcuucuggguggagcucauccgcggccggcccaaggagaacaccaucuggaccagcggcuccagcaucuccuucugcggggucaacagcgacaccgugggcugguccuggcccgacggggccgagcugccguucacgaucgacaaguga

SEQ ID NO: 87349 - RNA, 1410 nt, Artificial Sequence; identical to SEQ ID NO: 86170
  derived and/or modified CDS sequence (opt1) from neuraminidase__InfluenzaA__AGB97289

SEQ ID NO: 87350 - RNA, 1410 nt, Artificial Sequence
  derived and/or modified CDS sequence (opt1) from neuraminidase__InfluenzaA__AGE15475
augaaccccaaccagaagaucaucaccaucggcagcgugugcaugaccaucgggauggccaaccugauccuccagaucggcaacaucaucuccaucuggaucagccacuccauccagcuggggaaccagagccagaucgagacgugcaaccaguccgucaucaccuacgagaacaacaccugggugaaccagaccuacgugaacaucagcaacacgaacuucgccgcgggccaguccgucgugagcgugaagcuggccgggaacuccagccucugcccggucuccggcugggccaucuacagcaaggacaacuccauccgcaucggcagcaagggggacguguucgugauccgggagcccuucaucuccugcagcccccuggagugccgcaccuucuuccugacccagggcucccuccugaacgacaagcacagcaacgggaccaucaaggaccggucccccuaccgcacgcugaugagcugcccgaucggcgagguccccagccccuacaacucccgguucgagagcguggccugguccgccagcgcgugccacgacgggaucaacuggcucaccaucggcaucuccggccccgacaacggggccguggccguccugaaguacaacggcaucaucaccgacaccaucaagagcuggcgcaacaacauccugcggacgcaggaguccgagugcgccugcgugaacgggagcugcuucaccaucaugaccgacggcccguccgacggccaggcgagcuacaagaucuuccgcaucgagaaggggaagaucgugaaguccgucgagaugaacgcccccaacuaccacuacgaggagugcagcugcuaccccgacuccagcgagaucacgugcgugugccgggacaacuggcacggcuccaaccgccccugggugagcuucaaccagaaccucgaguaccagaucggguacaucugcuccggcaucuucggggacaacccgcggcccaacgacaagaccggcagcugcggccccgucuccagcaacggggccaacggcgugaagggguucagcuucaaguacggcaacgggguguggaucggccgcaccaaguccaucagcucccggaagggcuucgagaugaucugggaccccaacggguggaccggcaccgacaacuacuucagcaucaagcaggacaucgucgggaucaacgagugguccggcuacagcggguccuucgugcagcacccggagcugacgggccuggacugcauccgccccugcuucuggguggagcucauccggggccgccccaaggagaacaccaucuggaccagcggguccagcaucuccuucugcggcgucaacagcgacaccguggggugguccuggcccgacggcgccgagcugccguucagcaucgacaaguga

SEQ ID NO: 87351 - RNA, 1410 nt, Artificial Sequence
  derived and/or modified CDS sequence (opt1) from neuraminidase__InfluenzaA__AGE15476
augaaccccaaccagaagaucaucaccaucggcagcgugugcaugaccaucgggauggccaaccugauccuccagaucggcaacaucaucuccaucuggaucagccacuccauccagcuggggaaccagagccagaucgagacgugcaaccaguccgucaucaccuacgagaacaacaccugggugaaccagaccuacgugaacaucagcaacacgaacuucgccgcgggccaguccgucgugagcgugaagcuggccgggaacuccagccucugcccggucuccggcugggccaucuacagcaaggacaacuccauccgcaucggcagcaagggggacguguucgugauccgggagcccuucaucuccugcagcccccuggagugccgcaccuucuuccugacccagggcucccuccugaacgacaagcacagcaacgggaccaucaaggaccggucccccuaccgcacgcugaugagcugcccgaucggcgagguccccagccccuacaacucccgguucgagagcguggccugguccgccagcgcgugccacgacgggaucaacuggcucaccaucggcaucuccggccccgacaacggggccguggccguccugaaguacaacggcaucaucaccgacaccaucaagagcuggcgcaacaacauccugcggacgcaggaguccgagugcgccugcgugaacgggagcugcuucaccaucaugaccgacggcccguccgacggccaggcgagcuacaagaucuuccgcaucgagaaggggaagaucgugaaguccgucgagaugaacgcccccaacuaccacuacgaggagugcagcugcuaccccgacuccagcgagaucacgugcgugugccgggacaacuggcacggcuccaaccgccccugggugagcuucaaccagaaccucgaguaccagaucggguacaucugcuccggcaucuucggggacaacccgcggcccaacgacaagaccggcagcugcggccccgucuccagcaacggggccaacggcgugaagggguucagcuucaaguacggcaacgggguguggaucggccgcaccaaguccaucagcucccggaagggcuucgagaugaucugggaccccaacggguggaccggcaccgacaacuacuucagcaucaagcaggacaucgucgggaucaacgagugguccggcuacagcggguccuucgugcagcacccggagcugacgggccuggacugcauccgccccugcuucuggguggagcucauccggggccgccccaaggagaacaccaucuggaccagcggguccagcaucuccuucugcggcgucaacagcgacaccguggggugguccuggcccgacggcgccgagcugccguucacgaucgacaaguga

SEQ ID NO: 87352 - RNA, 1410 nt, Artificial Sequence; identical to SEQ ID NO: 87182
  derived and/or modified CDS sequence (opt1) from neuraminidase__InfluenzaA__AGE15477

SEQ ID NO: 87353 - RNA, 1410 nt, Artificial Sequence
  derived and/or modified CDS sequence (opt1) from neuraminidase__InfluenzaA__AGE15478
augaaccccaaccagaagaucaucaccaucggcagcgugugcaugaccaucgggauggccaaccugauccuccagaucggcaacaucaucuccaucuggaucagccacuccauccagcuggggaaccagagccagaucgagacgugcaaccaguccgucaucaccuacgagaacaacaccugggugaaccagaccuacgugaacaucagcaacacgaacuucgccgcgggccaguccgucgugagcgugaagcuggccgggaacuccagccucugcccggucuccggcugggccaucuacagcaaggacaacuccauccgcaucggcagcaagggggacguguucgugauccgggagcccuucaucuccugcagcccccuggagugccgcaccuucuuccugacccagggcucccuccugaacgacaagcacagcaacgggaccaucaaggaccggucccccuaccgcacgcugaugagcugcccgaucggcgagguccccagccccuacaacucccgguucgagagcguggccugguccgccagcgcgugccacgacgggaucaacuggcucaccaucggcaucuccggccccgacaacggggccguggccguccugaaguacaacggcaucaucaccgacaccaucaagagcuggcgcaacaacauccugcggacgcaggaguccgagugcgccugcgugaacgggagcugcuucaccaucaugaccgacggcccguccgacggccaggcgagcuacaagaucuuccgcaucgagaaggggaagaucgugaaguccgucgagaugaacgcccccaacuaccacuacgaggagugcagcugcuaccccgacuccagcgagaucacgugcgugugccgggacaacuggcacggcuccaaccgccccugggugagcuucaaccagaaccucgaguaccagaucggguacaucugcuccggcaucuucggggacaacccgcggcccaacgacaagaccggcagcugcggccccgucuccagcaacggggccaacggcgugaagggguucagcuucaaguacggcaacgggguguggaucggccgcaccaaguccaucagcucccggaagggcuucgagaugaucugggaccccaacggguggaccggcaccgacaacuacuucagcaucaagcaggacaucgucgggaucaacgagugguccggcuacagcggguccuucgugcagcacccggagcugacgggccuggacugcauccgccccugcuucuggguggagcucauccggggccgccccaaggagaacaccaucuggaccagcggguccagcaucuccuucugcggcgucaagagcgacaccguggggugguccuggcccgacggcgccgagcugccguucacgaucgacaaguga

SEQ ID NO: 87354 - RNA, 1410 nt, Artificial Sequence
  derived and/or modified CDS sequence (opt1) from neuraminidase__InfluenzaA__AGE15479
augaaccccaaccagaagaucaucaccaucggcagcgugugcaugaccaucgggauggccaaccugauccuccagaucggcaacaucaucuccaucuggaucagccacuccauccagcuggggaaccagagccagaucgagacgugcaaccaguccgucaucaccuacgagaacaacaccugggugaaccagaccuacgugaacaucagcaacacgaacuucgccgcgggccaguccgucgugagcgugaagcuggccgggaacuccagccucugcccggucuccggcugggccaucuacagcaaggacaacuccauccgcaucggcagcaagggggacguguucgugauccgggagcccuucaucuccugcagcccccuggagugccgcaccuucuuccugacccagggcucccuccugaacgacaagcacagcaacgggaccaucaaggaccggucccccuaccgcacgcugaugagcugcccgaucggcgagguccccagccccuacaacucccgguucgagagcguggccugguccgccagcgcgugccacgacgggaucaacuggcucaccaucggcaucuccggccccgacaacggggccguggccguccugaaguacaacggcaucaucaccgacaccaucaagagcuggcgcaacaacauccugcggacgcaggaguccgagugcgccugcgugaacgggagcugcuucaccaucaugaccgacggcccgaucgacggccaggcguccuacaagaucuuccgcaucgagaaggggaagaucgucaagagcguggagaugaacgcccccaacuaccacuacgaggagugcuccugcuaccccgacagcuccgagaucacgugcgugugccgggacaacuggcacggcagcaaccgccccuggguguccuucaaccagaaccucgaguaccagaucggguacaucugcagcggcaucuucggggacaacccgcggcccaacgacaagaccggcuccugcggccccgucagcuccaacggggccaacggcgugaagggguucagcuucaaguacggcaacgggguguggaucggccgcaccaagagcaucuccagccggaagggcuucgagaugaucugggaccccaacggguggaccggcaccgacaacuacuucuccaucaagcaggacaucgucgggaucaacgaguggagcggcuacuccgggagcuucgugcagcacccggagcugacgggccuggacugcauccgccccugcuucuggguggagcucauccggggccgccccaaggagaacaccaucuggaccuccgggagcuccaucagcuucugcggcgucaacuccgacaccgugggguggagcuggcccgacggcgccgagcugccguucacgaucgacaaguga

SEQ ID NO: 87355 - RNA, 1410 nt, Artificial Sequence; identical to SEQ ID NO: 87182
  derived and/or modified CDS sequence (opt1) from neuraminidase__InfluenzaA__AGE15480

SEQ ID NO: 87356 - RNA, 1410 nt, Artificial Sequence; identical to SEQ ID NO: 82224
  derived and/or modified CDS sequence (opt1) from neuraminidase__InfluenzaA__AGE89270

SEQ ID NO: 87357 - RNA, 1410 nt, Artificial Sequence; identical to SEQ ID NO: 82224
  derived and/or modified CDS sequence (opt1) from neuraminidase__InfluenzaA__AGE89280

SEQ ID NO: 87358 - RNA, 1410 nt, Artificial Sequence
  derived and/or modified CDS sequence (opt1) from neuraminidase__InfluenzaA__AGE89290
augaaccccaaccagaagaucaucaccaucggcagcgugucccugaccaucagcacgaucugcuucuucaugcagaucgccauccucaucaccaccgucacccugcacuucaagcaguacgaguucaacuccccgcccaacaaccaggugaugcugugcgagcccacgaucaucgagcgcaacaucaccgagaucguguaccucaccaacaccacgaucgagaaggagaucugccccaagcuggccgaguaccggaacuggagcaagccgcagugcgacaucaccggguucgcgcccuucuccaaggacaacagcauccgccuguccgccggcggggacaucugggucacccgggagcccuacgugagcugcgaccccgacaagugcuaccaguucgcccucggccaggggaccacgcugaacaacgugcacuccaacaacaccguccgcgaccggaccccguaccgcacccugcucaugaacgagcugggcgugcccuuccaccugggcacgaagcaggucugcaucgccuggagcuccagcuccugccacgacgggaaggccuggcuccacgugugcaucaccggcgacgacaagaacgcgaccgccagcuucaucuacaacgggaagcugguggacuccguggucagcugguccaaggagauccugcggacccaggagagcgagugcgugugcaucaacggcacgugcaucguggucaugaccgacggguccgccagcggcaaggccgacaccaagauccucuucguggaggagggcaagaucgugcacaccagcacgcuguccgggagcgcgcagcacgucgaggagugcuccugcuacccccgcuaccccggcgugcggugcgugugccgcgacaacuggaaggggagcaaccggccgaucgucgacaucaacaucaaggaccacuccaucaucagcuccuacgugugcagcggccuggugggcgacacgccccgcaagaacgacuccagcuccagcucccacugccucgaccccaacaacgaggagggcgggcacggggucaagggcugggccuucgacgacgggaacgacguguggaugggccggaccaucaacgagaccagccgccugggcuacgagaccuucaaggucaucgaggggugguccaaccccaagagcaagcugcagaucaaccgccaggugaucguggaccggggcaaccgguccggguacagcggcaucuucuccgucgagggcaagagcugcaucaaccgcugcuucuacguggagcucauccgggggcgcaaggaggagaccgaggugcuguggaccagcaacuccaucgucguguucugcggcaccagcgggacguacggcaccggguccuggccggacggcgccgaccugaaccucaugcccaucuga

SEQ ID NO: 87359 - RNA, 1410 nt, Artificial Sequence; identical to SEQ ID NO: 84281
  derived and/or modified CDS sequence (opt1) from neuraminidase__InfluenzaA__AGE89301

SEQ ID NO: 87360 - RNA, 1410 nt, Artificial Sequence
  derived and/or modified CDS sequence (opt1) from neuraminidase__InfluenzaA__AGE89311
augaaccccaaccagaagaucaucaccaucggcagcgugugcaugaccaucgggauggccaaccugauccuccagaucggcaacaucaucuccaucuggaucagccacuccauccagcuggggaaccagaaccagaucgagacgugcaaccagagcgucaucaccuacgagaacaacaccugggugaaccagaccuacgugaacaucuccaacacgaacuucgccgcgggccagagcgucguguccgugaagcuggccgggaacagcucccucugcccggucagcggcugggccaucuacuccaaggacaacagcauccgcaucggcuccaagggggacguguucgugauccgggagcccuucaucagcugcagcccccuggagugccgcaccuucuuccugacccagggcgcccuccugaacgacaagcacuccaacgggaccaucaaggaccggucccccuaccgcacgcugaugagcugcccgaucggcgagguccccucccccuacaacagccgguucgagagcguggccugguccgcgagcgccugccacgacgggaucaacuggcucaccaucggcaucuccggccccgacaacggggccguggccguccugaaguacaacggcaucaucaccgacaccaucaagagcuggaagaacaacauccugcgcacgcaggaguccgagugcgcgugcgugaacgggagcugcuucaccgugaugaccgacggcccguccgacggccaggccagcuacaagaucuuccggaucgagaaggggaagaucgucaaguccguggagaugaacgcccccaacuaccacuacgaggagugcagcugcuaccccgacuccagcgagaucacgugcgugugccgcgacaacuggcacggcuccaaccggcccugggucagcuucaaccagaaccucgaguaccgcaucggguacaucugcuccggcaucuucggggacaacccgcggcccaacgacaagaccggcagcugcggccccguguccagcaacggggccaacggcgugaagggguucuccuucaaguacggcaacggggucuggaucggccgcaccaagagcaucagcucccggaacggcuucgagaugaucugggaccccaacggguggaccggcaccgacaacaacuucagcaagaagcaggacaucaucgggaucaacgagugguccggcuacagcggguccuucgugcagcacccggagcugacgggccuggacugcauccgccccugcuucuggguggagcucauccggggccgccccaaggagaacaccaucuggaccagcggguccagcauguccuucugcggcgucaacagcgacaccguggggugguccuggcccgacggcgccgagcugccguucacgaucgacaaguga

SEQ ID NO: 87361 - RNA, 1410 nt, Artificial Sequence; identical to SEQ ID NO: 85811
  derived and/or modified CDS sequence (opt1) from neuraminidase__InfluenzaA__AGE89321

SEQ ID NO: 87362 - RNA, 1410 nt, Artificial Sequence; identical to SEQ ID NO: 85167
  derived and/or modified CDS sequence (opt1) from neuraminidase__InfluenzaA__AGE89332

SEQ ID NO: 87363 - RNA, 1410 nt, Artificial Sequence; identical to SEQ ID NO: 84281
  derived and/or modified CDS sequence (opt1) from neuraminidase__InfluenzaA__AGE89343

SEQ ID NO: 87364 - RNA, 1410 nt, Artificial Sequence
  derived and/or modified CDS sequence (opt1) from neuraminidase__InfluenzaA__AGE89353
augaaccccaaccagaagaucaucaccaucggcagcgugucccugaccaucagcacgaucugcuucuucaugcagaucgccauccucaucaccaccgucacccugcacuucaagcaguacgaguucaacuccccgcccaacaaccaggugaugcugugcgagcccacgaucaucgagcgcaacaucaccgagaucguguaccucaccaacaucaccaucgagaaggagaucugccccaagcuggccgaguaccggaacuggagcaagccgcagugcgacaucacgggguucgcgcccuucuccaaggacaacagcauccgccuguccgccggcggggacaucugggucacccgggagcccuacgugagcugcgaccccgacaagugcuaccaguucgcccucggccaggggaccacccugaacaacgugcacuccaacaacacgguccgcgaccggaccccguaccgcacccugcucaugaacgagcugggcgugcccuuccaccugggcaccaagcaggucugcaucgccuggagcuccagcuccugccacgacgggaaggccuggcuccacgugugcaucacgggcgacgacaagaacgcgaccgccagcuucaucuacaacgggcggcugguggacuccguggucagcugguccaaggagauccugcgcacccaggagagcgagugcgugugcaucaacgggaccugcacgguggucaugaccgacggguccgccagcggcaaggccgacaccaagauccucuucaucgaggagggcaagaucgugcacaccagcacgcuguccgggagcgcgcagcacguggaggagugcuccugcuacccccgguaccccggcguccgcugcgugugccgggacaacuggaaggggagcaaccgcccgaucguggacaucaacaucaaggaccacuccaucgucagcuccuacgugugcagcggccuggugggcgacacgccccggaagaacgacuccagcuccagcucccacugccucgaccccaacaacgaggagggcggccacggggucaagggcugggccuucgacgacgggaacgacguguggaugggccgcaccaucaacgagaccagccggcugggcuacgagaccuucaaggucaucgaggggugguccaaccccaagagcaagcugcagaucaaccgccaggugaucguggacaagggcaaccgguccggguacagcggcaucuucuccgucgagggcaagagcugcaucaaccgcugcuucuacguggagcucauccgggggcgcaaggaggagaccgaggugcuguggaccagcaacuccaucgucguguucugcggcaccagcgggacguacggcaccggguccuggccggacggcgccgaccugaaccucaugcccaucuga

SEQ ID NO: 87365 - RNA, 1410 nt, Artificial Sequence; identical to SEQ ID NO: 85018
  derived and/or modified CDS sequence (opt1) from neuraminidase__InfluenzaA__AGE89364

SEQ ID NO: 87366 - RNA, 1410 nt, Artificial Sequence; identical to SEQ ID NO: 85811
  derived and/or modified CDS sequence (opt1) from neuraminidase__InfluenzaA__AGE89374

SEQ ID NO: 87367 - RNA, 1410 nt, Artificial Sequence
  derived and/or modified CDS sequence (opt1) from neuraminidase__InfluenzaA__AGE89385
augaaccccaaccagaagaucaucaccaucggcagcgugugcaugaccaucgggauggccaaccugauccuccagaucggcaacaucaucuccaucuggaucagccacuccauccagcuggggaaccagaaccagaucgagacgugcaaccagagcgucaucaccuacgagaacaacaccugggugaaccagaccuacgugaacaucuccaacacgaacuucgccgcgggccagagcgucgccuccgugaagcuggccgggaacagcucccucugcccggugagcggcugggccaucuacuccaaggacaacagcauccgcaucggcuccaagggggacgucuucgugauccgggagcccuucaucagcugcagcccccuggagugccgcaccuucuuccugacccagggcgcccuccugaacgacaagcacuccaacgggaccaucaaggaccggucccccuaccgcacgcugaugagcugcccgaucggcgaggugcccucccccuacaacagccgguucgagagcgucgcgugguccgccagcgccugccacgacgggaucaacuggcucaccaucggcaucuccggccccgacaacggggccguggcggugcugaaguacaacggcaucaucaccgacaccaucaagagcuggcgcaacaacauccugcggacgcaggaguccgagugcgccugcgucaacgggagcugcuucaccaucaugaccgacggcccguccgacggccaggccagcuacaagaucuuccgcaucgagaaggggaagaucgugaaguccguggagaugaacgcccccaacuaccacuacgaggagugcagcugcuaccccgacuccagcgagaucacgugcgucugccgggacaacuggcacggcuccaaccgccccugggugagcuucaaccagaaccucgaguaccagaucggguacaucugcuccggcaucuucggggacaacccgcggcccaacgacaagaccggcagcugcggccccguguccagcaacggggccaacggcgucaagggguucuccuucaaguacggcaacgggguguggaucggccgcaccaagagcaucagcucccggaagggcuucgagaugaucugggaccccaacggguggaccggcaccgacaacaacuucagcaucaagcaggacaucguggggaucaacgagugguccggcuacagcggguccuucguccagcacccggagcugacgggccuggacugcauccgccccugcuucuggguggagcucauccggggccgccccaaggagaacaccaucuggaccagcggguccagcaucuccuucugcggcgugaacagcgacaccgucgggugguccuggcccgacggcgcggagcugccguucacgaucgacaaguga

SEQ ID NO: 87368 - RNA, 1410 nt, Artificial Sequence
  derived and/or modified CDS sequence (opt1) from neuraminidase__InfluenzaA__AGE89395
augaaccccaaccagaagaucaucaccaucggcagcgugucccugaccaucagcacgaucugcuucuucaugcagaucgccauccucaucaccaccgucacccugcacuucaagcaguacgaguucaacuccccgcccaacaaccaggugaugcugugcgagcccacgaucaucgagcgcaacaucaccgagaucguguaccucaccaacaccacgaucgagaaggagaucugccccaagccggccgaguaccggaacuggagcaagccccagugcgacaucaccggguucgcgcccuucuccaaggacaacagcauccgccuguccgccggcggggacaucugggucacccgggagcccuacgugagcugcgacccggacaagugcuaccaguucgcccugggccaggggaccacgcucaacaacgugcacuccaacaacaccguccgcgaccggacccccuaccgcacccugcugaugaacgagcucggcgugcccuuccaccugggcacgaagcaggucugcaucgccuggagcuccagcuccugccacgacgggaaggccuggcugcacgugugcaucaccggcgacgacaagaacgcgaccgccagcuucaucuacaacgggcggcucguggacuccguggucagcugguccaaggagauccugcgcacccaggagagcgagugcgugugcaucaacggcacgugcaccguggucaugaccgacggguccgccagcggcaaggccgacaccaagauccuguucaucgaggagggcaagaucgugcacacgagcacccucuccgggagcgcgcagcacguggaggagugcuccugcuacccccgguacccgggcguccgcugcgugugccgggacaacuggaaggggagcaaccgccccaucguggacaucaacaucaaggaccacuccaucgucagcuccuacgugugcagcggccuggugggcgacaccccgcggaagaacgacuccagcuccagcucccacugccuggaccccaacaacgaggagggcgggcacggggucaagggcugggccuucgacgacgggaacgacguguggaugggccgcaccaucaacgagacgagccggcucggcuacgagaccuucaaggucaucgaggggugguccaaccccaagagcaagcugcagaucaaccgccaggugaucguggaccggggcaaccgcuccggguacagcggcaucuucuccgucgagggcaagagcugcaucaaccggugcuucuacguggagcugauccgcgggcggaaggaggagaccgaggugcucuggaccagcaacuccaucgucguguucugcggcacgagcgggaccuacggcaccggguccuggcccgacggcgccgaccugaaccugaugcccaucuga

SEQ ID NO: 87369 - RNA, 1410 nt, Artificial Sequence; identical to SEQ ID NO: 82224
  derived and/or modified CDS sequence (opt1) from neuraminidase__InfluenzaA__AGE89425

SEQ ID NO: 87370 - RNA, 1410 nt, Artificial Sequence; identical to SEQ ID NO: 83542
  derived and/or modified CDS sequence (opt1) from neuraminidase__InfluenzaA__AGE89722

SEQ ID NO: 87371 - RNA, 1410 nt, Artificial Sequence
  derived and/or modified CDS sequence (opt1) from neuraminidase__InfluenzaA__AGE89733
augaaccccaaccagaagaucaucaccaucggcagcgugugcaugaccaucgggauggccaaccugauccuccagaucggcaacaucaucuccaucuggaucagccacuccauccagcuggggaaccagaaccagaucgagacgugcaaccagagcgucaucaccuacgagaacaacaccugggugaaccagaccuacgugaacaucuccaacacgaacuucgccgcgggccagagcgucguguccgugaagcuggccgggaacagcucccucugcccggucagcggcugggccaucuacuccaaggacaacagcauccgcaucggcuccaagggggacguguucgugauccgggagcccuucaucagcugcagcccccuggagugccgcaccuucuuccugacccagggcgcccuccugaacgacaagcacagcaacgggaccaucaaggaccggucccccuaccgcacgcugaugagcugcccgaucggcgagguccccucccccuacaacagccgguucgagagcguggccugguccgcgagcgccugccacgacgggaucaacuggcucaccaucggcaucuccggccccgacaacggggccguggccguccugaaguacaacggcaucaucaccgacaccaucaagagcuggcgcaacaacauccugcggacgcaggaguccgagugcgcgugcgugaacgggagcugcuucaccaucaugaccgacggcccgaacgacggccaggccuccuacaagaucuuccgcaucgagaaggggaagaucgugaaguccgucgagaugaacgcccccaacuaccacuacgaggagugcuccugcuaccccgacagcuccgagaucacgugcgugugccgggacaacuggcacggcagcaaccgccccuggguguccuucaaccagaaccucgaguaccagaucggguacaucugcagcggcaucuucggggacaacccgcggcccaacgacaagaccggcuccugcggccccgucagcuccaacggggccaacggcgugaagggguucagcuucaaguacggcaacgggguguggaucggccgcaccaaguccaucagcagccggaagggcuucgagaugaucugggaccccaacggguggaccggcaccgacaacaacuucuccaucaagcaggacaucgucgggaucaacgaguggagcggcuacuccgggagcuucgugcagcacccggagcugacgggccuggacugcauccgccccugcuucuggguggagcucauccggggccgccccaaggagaacaccaucuggaccuccgggagcuccaucagcuucugcggcgucaacuccgacaccgugggguggagcuggcccgacggcgccgagcugccguucacgaucgacaaguga

SEQ ID NO: 87372 - RNA, 1410 nt, Artificial Sequence
  derived and/or modified CDS sequence (opt1) from neuraminidase__InfluenzaA__AGE89743
augaaccccaaccagaagaucaucaccaucggcagcgugucccugaccaucagcacgaucugcuucuucaugcagaucgccauccucaucaccaccgucacccugcacuucaagcaguacgaguucaacuccccgcccaacaaccaggugaugcugugcgagcccacgaucaucgagcgcaacaucaccgagaucguguaccucaccaacaccacgaucgagaaggagaucugccccaagcuggccgaguaccggaacuggagcaagccgcagugcgacaucaccggguucgcgcccuucuccaaggacaacagcauccgccuguccgccggcggggacaucugggucacccgggagcccuacgugagcugcgaccccgacaagugcuaccaguucgcccucggccaggggaccacgcugaacaacgugcacuccaacaacaccguccgcgaccggaccccguaccgcacccugcucaugaacgagcugggcgugcccuuccaccugggcacgaagcaggucugcaucgccuggagcuccagcuccugccacgacgggaaggccuggcuccacgugugcaucaccggcgacgacaagaacgcgaccgccagcuucaucuacaacgggcggcugguggacuccguggucagcugguccaaggagauccugcgcacccaggagagcgagugcgugugcaucaacggcacgugcaccguggucaugaccgacggguccgccagcggcaaggccgacaccaagauccucuucaucgaggagggcaagaucgugcacacgagcacccuguccgggagcgcgcagcacguggaggagugcuccugcuacccccgguaccccggcguccgcugcgugugccgggacaacuggaaggggagcaaccgcccgaucguggacaucaacaucaaggaccacuccaucgucagcuccuacgugugcagcggccuggugggcgacacgccccggaagaacgacuccagcuccagcucccacugccucgaccccaacaacgaggagggcgggcacggggucaagggcugggccuucgacgacgggaacgacguguggaugggccgcaccaucaacgagaccagccggcugggcuacgagaccuucaaggucaucgaggggugguccaaccccaagagcaagcugcagaucaaccgccaggugaucguggacaaggacaaccgguccggcuacagcgggaucuucuccgucgagggcaagagcugcaucaaccgcugcuucuacguggagcucauccgggggcgcaaggaggagaccgaggugcuguggaccagcaacuccaucgucguguucugcggcacgagcggcaccuacgggaccggcuccuggccggacggggccgaccugaaccucaugcccaucuga

SEQ ID NO: 87373 - RNA, 1410 nt, Artificial Sequence; identical to SEQ ID NO: 85811
  derived and/or modified CDS sequence (opt1) from neuraminidase__InfluenzaA__AGE89754

SEQ ID NO: 87374 - RNA, 1410 nt, Artificial Sequence; identical to SEQ ID NO: 85811
  derived and/or modified CDS sequence (opt1) from neuraminidase__InfluenzaA__AGE89765

SEQ ID NO: 87375 - RNA, 1410 nt, Artificial Sequence
  derived and/or modified CDS sequence (opt1) from neuraminidase__InfluenzaA__AGG13414
augaaccccaaccagaagaucaucaccaucggcagcgugucccugaccaucagcacgaucugcuucuucaugcagaucgccauccucaucaccaccgucacccugcacuucaagcaguacgaguucaacuccccgcccaacaaccaggugaugcugugcgagcccacgaucaucgagcgcaacaucaccgagaucguguaccucaccaacaccacgaucgagaaggagaucugccccaagccggccgaguaccggaacuggagcaagccccagugcgacaucaccggguucgcgcccuucuccaaggacaacagcauccgccuguccgccggcggggacaucugggucacccgggagcccuacgugagcugcgacccggacaagugcuaccaguucgcccugggccaggggaccacgcucaacuccgugcacagcaacaacaccguccgcgaccggacccccuaccgcacccugcugaugaacgagcucggcgugcccuuccaccugggcacgaagcaggucugcaucgccugguccagcuccagcugccacgacgggaaggccuggcugcacgugugcaucaccggcgacgacaagaacgcgaccgccuccuucaucuacaacgggcggcucguggacagcguggucuccuggagcaaggagauccugcgcacccaggaguccgagugcgugugcaucaacggcacgugcaccguggucaugaccgacgggagcgccagcggcaaggccgacaccaagauccuguucaucgaggagggcaagaucgugcacacguccacccucagcggguccgcgcagcacguggaggagugcagcugcuacccccgguacccgggcguccgcugcgugugccgggacaacuggaagggguccaaccgccccaucguggacaucaacaucaaggaccacagcaucgucucccgguacgugugcagcggccuggugggcgacaccccgcgcaagaacgacuccagcuccagcucccacugccuggaccccaacaacgaggagggcgggcacggggucaagggcugggccuucgacgacgggaacgacguguggaugggccggaccaucaacgagacgagccgccucggcuacgagaccuucaaggucaucgaggggugguccaaccccaagagcaagcugcagaucaacaagcaggucaucguggaccggggcgaccgcuccggguacagcggcaucuucuccguggagggcaagagcugcaucaaccggugcuucuacguggagcugauccgcgggcggaaggaggagaccgaggugcucuggaccagcaacuccaucgucguguucugcggcacgagcgggaccuacggcaccggguccuggcccgacggcgccgaccugaaccugaugcccaucuga

SEQ ID NO: 87376 - RNA, 1410 nt, Artificial Sequence; identical to SEQ ID NO: 86170
  derived and/or modified CDS sequence (opt1) from neuraminidase__InfluenzaA__AGG13426

SEQ ID NO: 87377 - RNA, 1410 nt, Artificial Sequence; identical to SEQ ID NO: 86170
  derived and/or modified CDS sequence (opt1) from neuraminidase__InfluenzaA__AGG13438

SEQ ID NO: 87378 - RNA, 1410 nt, Artificial Sequence
  derived and/or modified CDS sequence (opt1) from neuraminidase__InfluenzaA__AGG13498
augaaccccaaccagaagaucaucaccaucggcagcgugucccugaccaucagcacgaucugcuucuucaugcagaucgccauccucaucaccaccgucacccugcacuucaagcaguacgaguucaacuccccgcccaacaaccaggugaugcugugcgagcccacgaucaucgagcgcaacaucaccgagaucguguaccucaccaacaccacgaucgagaaggagaucugccccaagcuggccgaguaccggaacuggagcaagccgcagugcgacaucaccggguucgcgcccuucuccaaggacaacagcauccgccuguccgccggcggggacaucugggucacccgggagcccuacgugagcugcgaccccgacaagugcuaccaguucgcccucggccaggggaccacgcugaacaacgugcacuccaacaacaccguccgcgaccggaccccguaccgcacccugcucaugaacgagcugggcgugcccuuccaccugggcacgaagcaggucugcaucgccuggagcuccagcuccugccacgacgggaaggccuggcuccacgugugcaucaccggcgacgacaagaacgcgaccgccagcuucaucuacaacgggcggcugguggacuccguggucagcugguccaaggacauccugcgcacccaggagagcgagugcgugugcaucaacggcacgugcgccguggucaugaccgacggguccgccagcggcaaggcggacaccaagauccucuucaucgaggagggcaagaucgugcacaccagcacgcuguccgggagcgcccagcacguggaggagugcuccugcuacccccgguaccccggcguccgcugcgugugccgggacaacuggaaggggagcaaccgcccgaucguggacaucaacaucaaggaccacuccaucgucagcuccuacgugugcagcggccuggugggcgacacgccccggaagaacgacuccagcuccagcgggcacugccucgaccccaacaacgaggagggcgggcacggcgucaaggggugggccuucgacgacggcaacgacguguggaugggccgcaccaucaacgagaccucccggcugggguacgagaccuucaaggucaucgagggcuggagcaaccccaaguccaagcugcagaucaaccgccaggugaucguggaccgggggaaccgcagcggcuacuccgggaucuucagcgucgagggcaagaacugcaucaaccggugcuucuacguggagcucauccgcggccggaaggaggagaccgaggugcuguggaccuccaacagcaucgucguguucugcgggaccagcggcacguacgggaccggcuccuggccggacggggccgaccugaaccucaugcccaucuga

SEQ ID NO: 87379 - RNA, 1410 nt, Artificial Sequence; identical to SEQ ID NO: 86170
  derived and/or modified CDS sequence (opt1) from neuraminidase__InfluenzaA__AGG13510

SEQ ID NO: 87380 - RNA, 1410 nt, Artificial Sequence; identical to SEQ ID NO: 87378
  derived and/or modified CDS sequence (opt1) from neuraminidase__InfluenzaA__AGG13522

SEQ ID NO: 87381 - RNA, 1410 nt, Artificial Sequence
  derived and/or modified CDS sequence (opt1) from neuraminidase__InfluenzaA__AGG13534
augaaccccaaccagaagaucaucaccaucggcagcgugucccugaccaucagcacggucugcuucuucaugcagaucgccauccucaucaccaccgugacccugcacuucaagcaguacgaguucaacuccccgcccaacaaccaggugaugcugugcgagcccacgaucaucgagcgcaacaucaccgagaucgucuaccucaccaacaccacgaucgagaaggagaucugccccaagccggccgaguaccggaacuggagcaagccccagugcgggaucaccggcuucgcgcccuucuccaaggacaacagcauccgccuguccgccgggggcgacaucugggugacccgggagcccuacgugagcugcgacccggacaagugcuaccaguucgcccuggggcagggcaccacgcucaacaacguccacuccaacaacaccgugcgcgaccggacccccuaccgcacccugcugaugaacgagcucggcgugcccuuccaccuggggacgaagcaggucugcaucgccuggagcuccagcuccugccacgacggcaaggccuggcugcacgugugcaucaccggggacgacaagaacgcgaccgccagcuucaucuacaacggccggcucguggacuccgucgugagcugguccaaggagauccugcgcacccaggagagcgagugcgugugcaucaacgggacgugcaccgucgugaugaccgacggcuccgccagcggcaaggccgacaccaagauccuguucaucgaggaggggaagaucgugcacacgagcacccucuccggcagcgcgcagcacgucgaggagugcuccugcuacccccgguacccgggggugcgcugcgugugccgggacaacuggaagggcagcaaccgccccaucgucgacaucaacaucaaggaccacuccaucgugagcuccuacgugugcagcggccuggucggggacaccccgcggaagaacgacuccagcuccagcucccacugccuggaccccaacaacgaggagggcgggcacggcgugaaggggugggccuucgacgacggcaacgacgucuggaugggccgcaccaucaacgagacgagccggcucggguacgagaccuucaaggugaucgagggcugguccaaccccaagagcaagcugcagaucaaccgccaggugaucgucgaccgcggggaccgguccggcuacagcgggaucuucuccguggagggcaagagcugcaucaaccggugcuucuacguggagcugauccgcggccggaaggaggagaccgagguccucuggaccagcaacuccaucgugguguucugcgggacgagcggcaccuacgggaccggcuccuggcccgacggggccgaccugaaccugaugcccaucuga

SEQ ID NO: 87382 - RNA, 1410 nt, Artificial Sequence
  derived and/or modified CDS sequence (opt1) from neuraminidase__InfluenzaA__AGG13546
augaaccccaaccagaagaucaucaccaucggcagcgugucccugaccaucagcacgaucugcuucuucaugcagaucgccauccucaucaccaccgucacccugcacuucaagcaguacgaguucaacuccccgcccaacaaccaggugaugcugugcgagcccacgaucaucgagcgcaacaucaccgagaucguguaccucaccaacaccacgaucgagaaggagaucugccccaagccggccgaguaccggaacuggagcaagccccagugcgggaucaccggcuucgcgcccuucuccaaggacaacagcauccgccuguccgccgggggcgacaucugggucacccgggagcccuacgugagcugcgacccggacaagugcuaccaguucgcccuggggcagggcaccacgcucaacaacgugcacuccaacaacaccguccgcgaccggacccccuaccgcacccugcugaugaacgagcucggcgugcccuuccaccuggggacgaagcaggucugcaucgccuggagcuccagcuccugccacgacggcaaggccuggcugcacgugugcaucaccggggacgacaagaacgcgaccgccagcuucaucuacaacggccggcucguggacuccguggucagcugguccaaggagauccugcgcacccaggagagcgagugcgugugcaucaacgggacgugcaccguggucaugaccgacggcuccgccagcggcaaggccgacaccaagauccuguucaucgaggaggggaagaucgugcacacgagcacccucuccggcagcgcgcagcacguggaggagugcuccugcuacccccgguacccggggguccgcugcgugugccgggacaacuggcgcggcagcaaccggcccaucguggacaucaacaucaaggaccacuccaucgucagcuccuacgugugcagcggccuggugggggacaccccgcgcaagaacgacuccagcuccagcucccacugccuggaccccaacaacgaggagggcgggcacggcgucaaggggugggccuucgacgacggcaacgacguguggaugggccggaccaucaacgagacgagccgccucggguacgagaccuucaaggucaucgagggcugguccaaccccaagagcaagcugcagaucaaccgccaggugaucguggaccgguccgaccggagcggguacuccggcaucuucagcgucgagggcaagagcugcaucaaccgcugcuucuacguggagcugauccgggggcgcaaggaggagaccgaggugcucuggaccuccaacagcaucgucguguucugcggcacguccgggaccuacggcaccgggagcuggcccgacggcgccgaccugaaccugaugcccaucuga

SEQ ID NO: 87383 - RNA, 1410 nt, Artificial Sequence; identical to SEQ ID NO: 86170
  derived and/or modified CDS sequence (opt1) from neuraminidase__InfluenzaA__AGG13558

SEQ ID NO: 87384 - RNA, 1410 nt, Artificial Sequence; identical to SEQ ID NO: 86170
  derived and/or modified CDS sequence (opt1) from neuraminidase__InfluenzaA__AGG13570

SEQ ID NO: 87385 - RNA, 1410 nt, Artificial Sequence
  derived and/or modified CDS sequence (opt1) from neuraminidase__InfluenzaA__AGG13582
augaaccccaaccagaagaucaucaccaucggcagcgugucccugaccaucagcacgaucugcuucuucaugcagaucgccauccucaucaccaccgucacccugcacuucaagcaguacgaguucaacuccccgcccaacaaccaggugaugcugugcgagcccacgaucaucgagcgcaacaucaccgagaucguguaccucaccaacaccacgaucgagaaggagaucugccccaagccggccgaguaccggaacuggagcaagccccagugcgggaucaccggcuucgcgcccuucuccaaggacaacagcauccgccuguccgccgggggcgacaucugggucacccgggagcccuacgugagcugcgacccggacaagugcuaccaguucgcccuggggcagggcaccacgcucaacaacgugcacuccaacaacaccguccgcgaccggacccccuaccgcacccugcugaugaacgagcucggcgugcccuuccaccuggggacgaagcaggucugcaucgccuggagcuccagcuccugccacgacggcaaggccuggcugcacgugugcaucaccggggaggacaagaacgcgaccgccagcuucaucuacaacggccggcucguggacuccguggucagcugguccaaggagacccugcgcacgcaggagagcgagugcgugugcaucaacgggaccugcaccguggucaugaccgacggcuccgccagcggcaaggccgacacgaagauccuguucaucgaggaggggaagaucgugcacaccagcacccucuccggcagcgcgcagcacguggaggagugcuccugcuacccccgguacccggggguccgcugcgugugccgggacaacuggaagggcagcaaccgccccaucguggacaucaacaucaaggaccacuccaucgucagcuccuacgugugcagcggccuggugggggacaccccgcggaagaacgacuccagcuccagcucccacugccuggaccccaacaacgaggagggcgggcacggcgucaaggggugggccuucgacgacggcaacgacguguggaugggccgcacgaucaacgagaccagccggcucggguacgagaccuucaaggucaucgagggcugguccaaccccaagagcaagcugcagaucaaccgccaggugaucguggaccgcggggaccgguccggcuacagcgggaucuucuccgucgagggcaagagcugcaucaaccggugcuucuacguggagcugauccgcggccggaaggaggagaccgaggugcucuggacgagcaacuccaucgucguguucugcgggaccagcggcaccuacgggaccggcuccuggcccgacggggccgaccugaaccugaugcccaucuga

SEQ ID NO: 87386 - RNA, 1410 nt, Artificial Sequence; identical to SEQ ID NO: 86170
  derived and/or modified CDS sequence (opt1) from neuraminidase__InfluenzaA__AGG13606

SEQ ID NO: 87387 - RNA, 1410 nt, Artificial Sequence
  derived and/or modified CDS sequence (opt1) from neuraminidase__InfluenzaA__AGG13618
augaaccccaaccagaagaucaucaccaucggcagcgugucccugaccaucagcacgaucugcuucuucaugcagaucgccauccucaucaccaccgucacccugcacuucaagcaguacgaguucaacuccccgcccaacaaccaggugaugcugugcgagcccacgaucaucgagcgcaacaucaccgagaucguguaccucaccaacaccacgaucgagaaggagaucugccccaagccggccgaguaccggaacuggagcaagccccagugcgggaucaccggcuucgcgcccuucuccaaggacaacagcauccgccuguccgccgggggcgacaucugggucacccgggagcccuacgugagcugcgacccggacaagugcuaccaguucgcccuggggcagggcaccacgcucaacaacgugcacuccaacaacaccguccgcgaccggacccccuaccgcacccugcugaugaacgagcucggcgugcccuuccaccuggggacgaagcaggucugcaucgccuggagcuccagcuccugccacgacggcaaggccuggcugcacgugugcaucaccggggacgacaagaacgcgaccgccagcuucaucuacaacggccggcucguggacuccguggucagcugguccaaggagauccugcgcacccaggagagcgagugcgugugcaucaacgggacgugcaccguggucaugaccgacggcuccgccagcggcaaggccgacaccaagauccuguucaucgaggaggggaagaucgugcacacgagcacccucuccggcagcgcgcagcacguggaggagugcuccugcuacccccgguacccggggguccgcugcgugugccgggacaacuggaagggcagcaaccgccccaucguggacaucaacaucaaggaccacuccaucgucagcuccuaccugugcagcggccuggugggggacacgccccggaagaacgacggcuccagcuccagccacugccucgaccccaacaacgaggagggcgggcacggggugaagggcugggccuucgacgacggcaacgacgucuggauggggcgcaccaucaacgagaccucccggcugggcuacgagaccuucaaggugaucgagggguggagcaacccgaaguccaagcugcagaucaaccgccagaucaucgucgaccggggcgaccgcagcggguacuccggcaucuucagcguggagggcaaguccugcaucaaccggugcuucuacguggagcucauccgcgggcggaaggaggagaccgagguccuguggaccagcaacagcaucgugguguucugcggcacguccgggaccuacggcaccgggagcuggcccgacggcgccgaccugaaccucaugcccaucuga

SEQ ID NO: 87388 - RNA, 1410 nt, Artificial Sequence
  derived and/or modified CDS sequence (opt1) from neuraminidase__InfluenzaA__AGG13630
augaaccccaaccagaagaucaucaccaucggcagcgugucccugaccaucagcacgaucugcuucuucaugcagaucgccauccucaucaccaccgucacccugcacuucaagcaguacgaguucaacuccccgcccaacaaccaggugaugcugugcgagcccacgaucaucgagcgcaacaucaccgagaucguguaccucaccaacaccacgaucgagaaggagaucugccccaagccggccgaguaccggaacuggagcaagccccagugcgggaucaccggcuucgcgcccuucuccaaggacaacagcauccgccuguccgccgggggcgacaucugggucacccgggagcccuacgugagcugcgacccggacaagugcuaccaguucgcccuggggcagggcaccacgcucaacaacgugcacuccaacaacaccguccgcgaccggacccccuaccgcacccugcugaugaacgagcucggcgugcccuuccaccuggggacgaagcaggucugcaucgccuggagcuccagcuccugccacgacggcaaggccuggcugcacgugugcaucaccggggaggacaagaacgcgaccgccagcuucaucuacaacggccggcucguggacuccguggucagcugguccaaggagauccugcgcacccaggagagcgagugcgugugcaucaacgggacgugcaccguggucaugaccgacggcuccgccagcggcaaggccgacaccaagauccuguucaucgaggaggggaagaucgugcacacgagcacccucuccggcagcgcgcagcacguggaggagugcuccugcuacccccgguacccggggguccgcugcgugugccgggacaacuggaagggcagcaaccgccccaucguggacaucaacaucaaggaccacuccaucgucagcuccuacgugugcagcggccuggugggggacaccccgcggaagaacgacuccagcuccagcucccacugccuggaccccaacaacgaggagggcgggcacggcgucaaggggugggccuucgacgacggcaacgacguguggaugggccgcaccaucaacgagacgagccggcucggguacgagaccuucaaggucaucgagggcugguccaaccccaagagcaagcugcagaucaaccgccaggugaucguggaccgcggggaccgguccggcuacagcgggaucuucuccgucgagggcaagagcugcaucaaccggugcuucuacguggagcugauccgcggccggaaggaggagaccgaggugcucuggaccagcaacuccaucgucguguucugcgggacgagcggcaccuacgggaccggcuccuggcccgacggggccgaccugaaccugaugcccaucuga

SEQ ID NO: 87389 - RNA, 1410 nt, Artificial Sequence; identical to SEQ ID NO: 86170
  derived and/or modified CDS sequence (opt1) from neuraminidase__InfluenzaA__AGG13642

SEQ ID NO: 87390 - RNA, 1410 nt, Artificial Sequence
  derived and/or modified CDS sequence (opt1) from neuraminidase__InfluenzaA__AGG13654
augaaccccaaccagaagaucaucaccaucggcagcgugucccugaccaucagcacgaucugcuucuucaugcagaucgccauccucaucaccaccgucacccugcacuucaagcaguacgaguucaacuccccgcccaacaaccaggugaugcugugcgagcccacgaucaucgagcgcaacaucaccgagaucguguaccucaccaacaccacgaucgagaaggagaucugccccaagcuggccgaguaccggaacuggagcaagccgcagugcgacaucaccggguucgcgcccuucuccaaggacaacagcauccgccuguccgccggcggggacaucugggucacccgggagcccuacgugagcugcgaccccgacaagugcuaccaguucgcccucggccaggggaccacgcugaacaacgugcacuccaacaacaccguccgcgaccggaccccguaccgcacccugcucaugaacgagcugggcgugcccuuccaccugggcacgaagcaggucugcaucgccuggagcuccagcuccugccacgacgggaaggccuggcuccacgugugcaucaccggcgacgacaagaacgcgaccgccagcuucaucuacaacgggcggcugguggacuccguggucagcugguccaaggacauccugcgcacccaggagagcgagugcgugugcaucaacggcacgugcgccguggucaugaccgacggguccgccagcggcaaggcggacaccaagauccucuucaucgaggagggcaagaucgugcagaccagcacgcuguccgggagcgcccagcacguggaggagugcuccugcuacccccgguaccccggcguccgcugcgugugccgggacaacuggaaggggagcaaccgcccgaucguggacaucaacaucaaggaccacuccaucgucagcuccuacgugugcagcggccuggugggcgacacgccccggaagaacgacuccagcuccagcgggcacugccucgaccccaacaacgaggagggcgggcacggcgucaaggggugggccuucgacgacggcaacgacguguggaugggccgcaccaucaacgagaccucccggcugggguacgagaccuucaaggucaucgagggcuggagcaaccccaaguccaagcugcagaucaaccgccaggugaucguggaccgggggaaccgcagcggcuacuccgggaucuucagcgucgagggcaagaacugcaucaaccggugcuucuacguggagcucauccgcggccggaaggaggagaucgaggugcuguggaccuccaacagcaucgucguguucugcgggaccagcggcaccuacgggacgggcuccuggccggacggggccgaccugaaccucaugcccaucuga

SEQ ID NO: 87391 - RNA, 1410 nt, Artificial Sequence; identical to SEQ ID NO: 87381
  derived and/or modified CDS sequence (opt1) from neuraminidase__InfluenzaA__AGG13666

SEQ ID NO: 87392 - RNA, 1410 nt, Artificial Sequence
  derived and/or modified CDS sequence (opt1) from neuraminidase__InfluenzaA__AGG13678
augaaccccaaccagaagaucaucaccaucggcagcgugucccugaccaucagcacgaucugcuucuucaugcagaucgccauccucaucaccaccgucacccugcacuucaagcaguacgaguucaacuccccgcccaacaaccaggugaugcugugcgagcccacgaucaucgagcgcaacaucaccgagaucguguaccucaccaacaccacgaucgagaaggagaucugccccaagccggccgaguaccggaacuggagcaagccccagugcgggaucaccggcuucgcgccccuguccaaggacaacagcauccgccuguccgccgggggcgacaucugggucacccgggagcccuacgugagcugcgacccggacaagugcuaccaguucgcccucgggcagggcaccacgcugaacaacgugcacuccaacaacaccguccgcgaccggacccccuaccgcacccugcucaugaacgagcugggcgugcccuuccaccuggggacgaagcaggucugcaucgccuggagcuccagcuccugccacgacggcaaggccuggcuccacgugugcaucaccggggacgacaagaacgcgaccgccagcuucaucuacaacggccggcugguggacuccguggucagcugguccaaggagauccugcgcacccaggagagcgagugcgugugcaucaacgggacgugcaccguggucaugaccgacggcuccgccagcggcaaggccgacaccaagauccucuucaucgaggaggggaagaucgugcacacgagcacccuguccggcagcgcgcagcacguggaggagugcuccugcuacccccgguacccggggguccgcugcgugugccgggacaacuggaagggcagcaaccgccccaucguggacaucaacaucaaggaccacuccaucgucagcuccuacgugugcagcggccuggugggggacaccccgcggaagaacgacuccagcuccagcucccacugccucggccccaacaacgaggagggcgggcacggggucaagggcugggccuucgacgacggcaacgacguguggauggggcgcaccaucaacgagacgagccggcugggcuacgagaccuucaaggucaucgaggggugguccaaccccaagagcaagcugcagaucaaccgccaggugaucguggaccggggcgaccgcuccggguacagcggcaucuucuccgucgagggcaagagcugcaucaaccggugcuucuacguggagcucauccgcgggcggaaggaggagaccgaggugcuguggaccagcaacuccaucgucguguucugcggcacggccgggaccuacggcaccgggagcuggcccgacggcgccgaccugaaccucaugcccaucuga

SEQ ID NO: 87393 - RNA, 1410 nt, Artificial Sequence; identical to SEQ ID NO: 86170
  derived and/or modified CDS sequence (opt1) from neuraminidase__InfluenzaA__AGG13690

SEQ ID NO: 87394 - RNA, 1410 nt, Artificial Sequence
  derived and/or modified CDS sequence (opt1) from neuraminidase__InfluenzaA__AGG13702
augaaccccaaccagaagaucaucaccaucggcagcgugucccugaccaucagcacgaucugcuucuucaugcagaucgccauccucaucaccaccgucacccugcacuucaagcaguacgaguucaacuccccgcccaacaaccaggugaugcugugcgagcccacgaucaucgagcgcaacaucaccgagaucguguaccucaccaacaccacgaucgagaaggagaucugccccaagccggccgaguaccggaacuggagcaagccccagugcgacaucaccggguucgcgcccuucuccaaggacaacagcauccgccuguccgccggcggggacaucugggucacccgggagcccuacgugagcugcgacccggacaagugcuaccaguucgcccugggccaggggaccacgcucaacaacgugcacuccaacaacaccguccgcgaccggacccccuaccgcacccugcugaugaacgagcucggcgugcccuuccaccugggcacgaagcaggucugcaucgccuggagcuccagcuccugccacgacgggaaggccuggcugcacgugugcaucaccggcgacgacaagaacgcgaccgccagcuucaucuacaacgggcggcucguggacuccguggucagcugguccaaggagauccugcgcacccaggagagcgagugcgugugcaucaacggcacgugcaccguggucaugaccgacggguccgccagcggcaaggccgacaccaagauccuguucaucgaggagggcaagaucgugcacacgagcacccucuccgggaacgcgcagcacguggaggagugcagcugcuacccccgguacccgggcguccgcugcgugugccgggacaacuggaagggguccaaccgccccaucguggacaucaacaucaaggaccacagcaucgucucccgguacgugugcagcggccuggugggcgacaccccgcgcaagaacgacuccagcuccagcucccacugccuggaccccaacaacgaggagggcgggcacggggucaagggcugggccuucgacgacgggaacgacguguggaugggccggaccaucaacgagacgagccgccucggcuacgagaccuucaaggucaucgaggggugguccaaccccaagagcaagcugcagaucaaccgccaggugaucguggaccggggcgaccgguccggguacagcggcaucuucuccgucgagggcaagagcugcaucaaccgcugcuucuacguggagcugauccgggggcgcaaggaggagaccgaggugcucuggaccuccaacagcaucgucguguucugcggcacgagcgggaccuacggcaccggguccuggcccgacggcgccgaccugaaccugaugcccaucuga

SEQ ID NO: 87395 - RNA, 1410 nt, Artificial Sequence; identical to SEQ ID NO: 87378
  derived and/or modified CDS sequence (opt1) from neuraminidase__InfluenzaA__AGG13714

SEQ ID NO: 87396 - RNA, 1410 nt, Artificial Sequence; identical to SEQ ID NO: 86170
  derived and/or modified CDS sequence (opt1) from neuraminidase__InfluenzaA__AGG13726

SEQ ID NO: 87397 - RNA, 1410 nt, Artificial Sequence; identical to SEQ ID NO: 86170
  derived and/or modified CDS sequence (opt1) from neuraminidase__InfluenzaA__AGG13738

SEQ ID NO: 87398 - RNA, 1410 nt, Artificial Sequence; identical to SEQ ID NO: 86170
  derived and/or modified CDS sequence (opt1) from neuraminidase__InfluenzaA__AGG13750

SEQ ID NO: 87399 - RNA, 1410 nt, Artificial Sequence
  derived and/or modified CDS sequence (opt1) from neuraminidase__InfluenzaA__AGG13762
augaaccccaaccagaagaucaucaccaucggcagcgugucccugaccaucagcacgaucugcuucuucaugcagaucgccauccucaucaccaccgucacccugcacuucaagcaguacgaguucaacuccccgcccaacaaccaggugaugcugugcgagcccacgaucaucgagcgcaacaucaccgagaucguguaccucaccaacaccacgaucgagaaggagaucugccccaagccggccgaguaccggaacuggagcaagccccagugcgacaucaccggguucgcgcccuucuccaaggacaacagcauccgccuguccgccggcggggacaucugggucacccgggagcccuacgugagcugcgacccggacaagugcuaccaguucgcccugggccaggggaccacgcucaacaacgugcacuccaacaacaccguccgcgaccggacccccuaccgcacccugcugaugaacgagcucggcgugcccuuccaccugggcacgaagcaggucugcaucgccuggagcuccagcuccugccacgacgggaaggccuggcugcacgugugcaucaccggcgacgacaagaacgcgaccgccagcuucaucuacaacgggcggcucguggacuccguggucagcugguccaaggagauccugcgcacccaggagagcgagugcgugugcaucaacggcacgugcaccguggucaugaccgacggguccgccagcggcaaggccgacaccaagauccuguucaucgaggagggcaagaucgugcacacgagcacccucuccgggagcgcgcagcacguggaggagugcuccugcuacccccgguacccgggcguccgcugcgugugccgggacaacuggaaggggagcaaccgccccaucguggacaucaacaucaaggaccacuccaucgucagccgguacgugugcuccggccuggugggcgacacgccccgcaagaacgacagcuccagcuccagccacugccuggaccccaacaacgaggagggcgggcacggggucaagggcugggccuucgacgacgggaacgacguguggaugggccggaccaucaacgagaccucccgccucggcuacgagaccuucaaggucaucgagggguggagcaacccgaaguccaagcugcagaucaaccgccaggugaucguggaccggggcgaccggagcggguacuccggcaucuucagcgucgaggggaaguccugcaucaaccgcugcuucuacguggagcugauccggggccgcaaggaggagaccgaggugcucuggaccagcaacagcaucgucguguucugcggcacguccgggaccuacggcaccgggagcuggcccgacggcgccgaccugaaccugaugcccaucuga

SEQ ID NO: 87400 - RNA, 1410 nt, Artificial Sequence
  derived and/or modified CDS sequence (opt1) from neuraminidase__InfluenzaA__AGG13774
augaaccccaaccagaagaucaucaccaucggcagcgugucccugaccaucagcacgaucugcuucuucaugcagaucgccauccucaucaccaccgucacccugcacuucaagcaguacgaguucaacuccccgcccaacaaccaggugaugcugugcgagcccacgaccaucgagcgcaacaucaccgagaucguguaccucaccaacacgaccaucgagaaggagaucugccccaagcuggccgaguaccggaacuggagcaagccgcagugcgacaucaccggguucgcgcccuucuccaaggacaacagcauccgccuguccgccggcggggacaucugggucacccgggagcccuacgugagcugcgaccccgacaagugcuaccaguucgcccucggccaggggacgacccugaacaacgugcacuccaacaacaccguccgcgaccggaccccguaccgcacgcugcucaugaacgagcugggcgugcccuuccaccugggcaccaagcaggucugcaucgccuggagcuccagcuccugccacgacgggaaggccuggcuccacgugugcaucaccggcgacgacaagaacgcgaccgccagcuucaucuacaacgggcggcugguggacuccguggucagcugguccaaggacauccugcgcacgcaggagagcgagugcgugugcaucaacgggaccugcgccguggucaugaccgacggcuccgccagcggcaaggcggacaccaagauccucuucaucgaggagggcaagaucgugcacacgagcacccuguccgggagcgcccagcacguggaggagugcuccugcuacccccgguaccccggcguccgcugcgugugccgggacaacuggaaggggagcaaccgcccgaucguggacaucaacaucaaggaccacuccaucgucagcuccuacgugugcagcggccuggugggcgacacgccccggaagaacgacuccagcuccagcgggcacugccucgaccccaacaacgaggagggcgggcacggcgucaaggggugggccuucgacgacggcaacgacguguggaugggccgcaccaucaacgagaccucccggcugggguacgagaccuucaaggucaucgagggcuggagcaaccccaaguccaagcugcagaucaaccgccaggugaucguggaccgggggaaccgcagcggcuacuccgggaucuucagcgucgagggcaagaacugcaucaaccggugcuucuacguggagcucauccgcggccggaaggaggagaccgaggugcuguggaccuccaacagcaucgucguguucugcgggacgagcggcaccuacgggaccggcuccuggccggacggggccgaccugaaccucaugcccaucuga

SEQ ID NO: 87401 - RNA, 1410 nt, Artificial Sequence
  derived and/or modified CDS sequence (opt1) from neuraminidase__InfluenzaA__AGG13786
augaaccccaaccagaagaucaucaccaucggcagcgugucccugaccaucagcacgaucugcuucuucaugcagaucgccauccucaucaccaccgucacccugcacuucaagcaguacgaguucaacuccccgcccaacaaccaggugaugcugugcgagcccacgaucaucgagcgcaacaucaccgagaucguguaccucaccaacaccacgaucgagaaggagaucugccccaagccggccgaguaccggaacuggagcaagccccagugcgggaucaccggcuucgcgcccuucuccaaggacaacagcauccgccuguccgccgggggcgacaucugggucacccgggagcccuacgugagcugcgacccggacaagugcuaccaguucgcccuggggcagggcaccacgcucaacaaccugcacuccaacaacaccgugcgcgaccggacccccuaccgcacccugcucaugaacgagcugggcguccccuuccaccuggggacgaagcaggucugcaucgccuggagcuccagcuccugccacgacggcaaggccuggcuccacgugugcaucaccggggacgacaagaacgcgaccgccagcuucaucuacaacggccggcugguggacuccguggugagcugguccaaggagauccugcgcacccaggagagcgagugcgucugcaucaacgggacgugcaccguggugaugaccgacggcuccgccagcggcaaggccgacaccaagauccucuucaucgaggaggggaagaucguccacacgagcacccuguccggcagcgcgcagcacguggaggagugcuccugcuacccccgguacccgggggugcgcugcgucugccgggacaacuggaagggcagcaaccgccccaucguggacaucaacaucaaggaccacuccaucgugagcuccuacgucugcagcggccuggugggggacaccccgcggaagaacgacuccagcuccagcucccacugccucgaccccaacaacgaggagggcgggcacggcgugaaggggugggccuucgacgacggcaacgacgucuggaugggccgcaccaucaacgagacgagccggcugggguacgagaccuucaaggugaucgagggcugguccaaccccaagagcaagcugcagaucaaccgccaggucaucguggaccgcggggaccgguccggcuacagcgggaucuucuccguggagggcaagagcugcaucaaccggugcuucuacgucgagcucauccgcggccggaaggaggagaccgaggugcuguggaccagcaacuccaucguggucuucugcgggacgagcggcaccuacgggaccggcuccuggcccgacggggccgaccugaaccucaugcccaucuga

SEQ ID NO: 87402 - RNA, 1410 nt, Artificial Sequence; identical to SEQ ID NO: 87378
  derived and/or modified CDS sequence (opt1) from neuraminidase__InfluenzaA__AGG13798

SEQ ID NO: 87403 - RNA, 1410 nt, Artificial Sequence
  derived and/or modified CDS sequence (opt1) from neuraminidase__InfluenzaA__AGG13810
augaaccccaaccagaagaucaucaccaucggcagcgugucccugaccaucagcacgaucugcuucuucaugcagaucgccauccucaucaccaccgucacccugcacuucaagcaguacgaguucaacuccccgcccaacaaccaggugaugcugugcgagcccacgaucaucgagcgcaacaucaccgagaucguguaccucaccaacaccacgaucgagaaggagaucugccccaagccggccgaguaccggaacuggagcaagccccagugcgacaucaccggguucgcgcccuucuccaaggacaacagcauccgccuguccgccggcggggacaucugggucacccgggagcccuacgugagcugcgacccggacaagugcuaccaguucgcccugggccaggggaccacgcucaacaacgugcacuccaacaacaccguccgcgaccggacccccuaccgcacccugcugaugaacgagcucggcgugcccuuccaccugggcacgaagcaggucugcaucgccuggagcuccagcuccugccacgacgggaaggccuggcugcacgugugcaucaccggcgacgacaagaacgcgaccgccagcuucaucuacaacgggcggcucguggacuccguggucagcugguccaaggagauccugcgcacccaggagagcgagugcgugugcaucaacggcacgugcaccguggucaugaccgacggguccgccagcggcaaggccgacaccaagauccuguucaucgaggagggcaagaucgugcacacgagcacccucuccgggagcgcgcagcacguggaggagugcuccugcuacccccgguacccgggcguccgcugcgugugccgggacaacuggaaggggagcaaccgccccaucguggacaucaacaucaaggaccacuccaucgucagccgguacgugugcuccggccuggugggcgacacgccccgcaagaacgacagcuccagcuccagccacugccuggggcccaacaacgaggagggcgggcacggcgucaaggggugggccuucgacgacggcaacgacguguggaugggccggaccaucaacgagaccucccgccucggguacgagaccuucaaggucaucgagggcuggagcaacccgaaguccaagcugcagaucaaccggcaggucaucguggaccgcggggaccggagcggcuacuccgggaucuucagcguggagggcaaguccugcaucaaccgcugcuucuacguggagcugauccggggccgcaaggaggagaccgaggugcucuggaccagcaacagcaucgucguguucugcgggacguccggcaccuacgggaccggcagcuggcccgacggggccgaccugaaccugaugcccaucuga

SEQ ID NO: 87404 - RNA, 1410 nt, Artificial Sequence; identical to SEQ ID NO: 87378
  derived and/or modified CDS sequence (opt1) from neuraminidase__InfluenzaA__AGG13822

SEQ ID NO: 87405 - RNA, 1410 nt, Artificial Sequence; identical to SEQ ID NO: 87378
  derived and/or modified CDS sequence (opt1) from neuraminidase__InfluenzaA__AGG13834

SEQ ID NO: 87406 - RNA, 1410 nt, Artificial Sequence; identical to SEQ ID NO: 87399
  derived and/or modified CDS sequence (opt1) from neuraminidase__InfluenzaA__AGG13846

SEQ ID NO: 87407 - RNA, 1410 nt, Artificial Sequence; identical to SEQ ID NO: 86170
  derived and/or modified CDS sequence (opt1) from neuraminidase__InfluenzaA__AGG13858

SEQ ID NO: 87408 - RNA, 1410 nt, Artificial Sequence
  derived and/or modified CDS sequence (opt1) from neuraminidase__InfluenzaA__AGG13870
augaaccccaaccagaagaucaucaccaucggcagcgugucccugaccaucagcacgaucugcuucuucaugcagaucgccauccucaucaccaccgucacccugcacuucaagcaguacgaguucaacuccccgcccaacaaccaggugaugcugugcgagcccacgaucaucgagcgcaacaucaccgagaucguguaccucaccaacaccacgaucgagaaggagaucugccccaagccggccgaguaccggaacuggagcaagccccagugcgggaucaccggcuucgcgcccuucuccaaggacaacagcauccgccuguccgccgggggcgacaucugggucacccgggagcccuacgugagcugcgacccggaccgcugcuaccaguucgcccuggggcagggcaccacgcucaacaacaugcacuccaacaacaccgugcgggaccgcacccccuaccggacccugcugaugaacgagcucggcguccccuuccaccuggggacgaagcaggucugcaucgccuggagcuccagcuccugccacgacggcaaggccuggcugcacgugugcaucaccggggacgacaagaacgcgaccgccagcuucaucuacaacggccgccucguggacuccguggugagcugguccaaggagauccugcggacccaggagagcgagugcgucugcaucaacgggacgugcaccguggugaugaccgacggcuccgccagcggcaaggccgacaccaagauccuguucaucgaggaggggaagaucguccacacgagcacccucuccggcagcgcgcagcacguggaggagugcuccugcuacccccgcuacccgggggugcggugcgucugccgcgacaacuggaagggcagcaaccggcccaucguggacaucaacaucaaggaccacuccaucgugagcuccuacgucugcagcggccuggugggggacaccccgcgcaagaacgacuccagcuccagcucccacugccuggaccccaacaacgaggagggcgggcacggcgugaaggggugggccuucgacgacggcaacgacgucuggaugggccggaccaucaacgagacgagccgccucggguacgagaccuucaaggugaucgagggcugguccaaccccaagagcaagcugcagaucaaccggcaggucaucguggaccgcggggaccgguccggcuacagcgggaucuucuccguggagggcaccagcugcaucaaccgcugcuucuacgucgagcugauccggggccgcaaggaggagaccgaggugcucuggacgagcaacuccaucguggucuucugcgggaccagcggcaccuacgggaccggcuccuggcccgacggggccgaccugaaccugaugcccaucuga

SEQ ID NO: 87409 - RNA, 1410 nt, Artificial Sequence
  derived and/or modified CDS sequence (opt1) from neuraminidase__InfluenzaA__AGG13894
augaaccccaaccagaagaucaucaccaucggcagcgugucccugaccaucagcacggucugcuucuucaugcagaucgccauccucaucaccaccgugacccugcacuucaagcaguacgaguucaacuccccgcccaacaaccaggugaugcugugcgagcccacgaucaucgagcgcaacgucaccgagaucguguaccucaccaacaccacgaucgagaaggagaucugccccaagccggccgaguaccggaacuggagcaagccccagugcgggaucaccggcuucgcgcccuucuccaaggacaacagcauccgccuguccgccgggggcgacaucugggugacccgggagcccuacgucagcugcgacccggacaagugcuaccaguucgcccuggggcagggcaccacgcucaacaacgugcacuccaacaacaccgugcgcgaccggacccccuaccgcacccugcugaugaacgagcucggcguccccuuccaccuggggacgaagcaggucugcaucgccuggagcuccagcuccugccacgacggcaaggccuggcugcacgugugcaucaccggggacgacaagaacgcgaccgccagcuucaucuacaacggccggcucguggacuccguggugagcugguccaaggagauccugcgcacccaggagagcgagugcgucugcaucaacgggacgugcaccguggugaugaccgacggcuccgccagcggcaaggccgacaccaagauccuguucaucgaggaggggaagaucguccacacgagcacccucuccggcagcgcgcagcacguggaggagugcuccugcuacccccgguacccgggggugcgcugcgucugccgggacaacuggaagggcagcaaccgccccaucguggacaucaacaucaaggaccacuccaucgugagcuccuacgucugcagcggccuggugggggacaccccgcggaagaacgacuccagcuccagcucccacugccuggaccccaacaacgaggagggcgggcacggcgucaaggggugggccuucgacgacggcaacgacguguggaugggccgcaccaucaacgagacgagccggcucggguacgagaccuucaaggugaucgagggcugguccaaccccaagagcaagcugcagaucaaccgccaggucaucguggaccgcggggaccgguccggcuacagcgggaucuucuccguggagggcaagagcugcaucaaccggugcuucuacgucgagcugauccgcggccggaaggaggagaccgaggugcucuggaccagcaacuccaucguggucuucugcgggacgagcggcaccuacgggaccggcuccuggcccgacggggccgaccugaaccugaugcccaucuga

SEQ ID NO: 87410 - RNA, 1410 nt, Artificial Sequence; identical to SEQ ID NO: 87378
  derived and/or modified CDS sequence (opt1) from neuraminidase__InfluenzaA__AGG13906

SEQ ID NO: 87411 - RNA, 1410 nt, Artificial Sequence
  derived and/or modified CDS sequence (opt1) from neuraminidase__InfluenzaA__AGG13930
augaaccccaaccagaagaucaucaccaucggcagcgugucccugaccaucagcacgaucugcuucuucaugcagaucgccauccucaucaccaccgucacccugcacuucaagcaguacgaguucaacuccccgcccaacaaccaggugaugcugugcgagcccacgaucaucgagcgcaacaucaccgagaucguguaccucaccaacaccacgaucgagaaggagaucugccccaagccggccgaguaccggaacuggagcaagccccagugcgggaucaccggcuucgcgcccuucuccaaggacaacagcauccgccuguccgccgggggcgacaucugggucacccgggagcccuacgugagcugcgacccggacaagugcuaccaguucgcccuggggcagggcaccacgcucaacaacgugcacuccaacaacaccguccgcgaccggacccccuaccgcacccugcugaugaacgagcucggcgugcccuuccaccuggggacgaagcaggucugcaucgccuggagcuccagcuccugccacgacggcaaggccuggcugcacgugugcaucaccggggacgacaagaacgcgaccgccagcuucaucuacaacggccggcucguggacuccguggucagcugguccaaggagauccugcgcacccaggagagcgagugcgugugcaucaacgggacgugcaccguggucaugaccgacggcuccgccagcggcaaggccgacaccaagauccuguucaucgaggaggggaagaucgugcacacgagcacccucuccggcagcgcgcagcacguggaggagugcuccugcuacccccgguacccggggguccgcugcgugugccgggacaacuggaagggcagcaaccgccccaucguggacaucaacaucaaggaccacuccaucgucagcuccuacgugugcagcggccuggugggggacacgccccggaagaacgaccgcuccagcuccagccacugccuggaccccaacaacgaggagggcgggcacggcgucaaggggugggccuucgacgacggcaacgacguguggaugggccggaccaucaacgagaccucccgccucggguacgagaccuucaaggucaucgagggcuggagcaacccgaaguccaagcugcagaucaaccggcaggucaucguggaccgcggggaccggagcggcuacuccgggaucuucagcguggagggcaaguccugcaucaaccgcugcuucuacguggagcugauccggggccgcaaggaggagaccgaggugcucuggaccagcaacagcaucgucguguucugcgggacguccggcaccuacgggaccggcagcuggcccgacggggccgaccugaaccugaugcccaucuga

SEQ ID NO: 87412 - RNA, 1410 nt, Artificial Sequence; identical to SEQ ID NO: 87388
  derived and/or modified CDS sequence (opt1) from neuraminidase__InfluenzaA__AGG13942

SEQ ID NO: 87413 - RNA, 1410 nt, Artificial Sequence
  derived and/or modified CDS sequence (opt1) from neuraminidase__InfluenzaA__AGG13965
augaaccccaaccagaagaucaucaccaucggcagcgugugcaugaccaucgggauggccaaccugauccuccagaucggcaacaucaucuccaucuggaucagccacuccauccagcuggggaaccagagccagaucgagacgugcaaccaguccgucaucaccuacgagaacaacaccugggugaaccagaccuacgugaacaucagcaacacgaacuucgccgcgggccaguccgucgugagcgugaagcuggccgggaacuccagccucugcccggucuccggcugggccaucuacagcaaggacaacuccgugcgcaucggcagcaagggggacguguucgucauccgggagcccuucaucuccugcagcccccuggagugccgcaccuucuuccugacccagggcgcccuccugaacgacaagcacuccaacgggaccaucaaggaccggagccccuaccgcacgcugauguccugcccgaucggcgaggugcccagccccuacaacagccgguucgaguccguggccuggagcgcguccgccugccacgacgggaucaacuggcucaccaucggcaucagcggccccgacuccggggccgucgccgugcugaaguacaacggcaucaucaccgacaccaucaagagcuggcgcaacaacauccugcggacgcaggaguccgagugcgcgugcgugaacgggagcugcuucaccaucaugaccgacggcccguccgacggccaggccagcuacaagaucuuccgcaucgagaaggggaagaucgucaaguccguggagaugaacgcccccaacuaccacuacgaggagugcagcugcuaccccgacuccagcgagaucacgugcgugugccgggacaacuggcacggcuccaaccgccccugggucagcuucaaccagaaccucgaguaccagaucggguacaucugcuccggcaucuucggggacaacccgcggcccaacgacaagaccggcagcugcggccccguguccagcaacggggccaacggcgugaagggguucagcuucaaguacggcaacggggucuggaucggccgcaccaaguccaucagcucccggaagggcuucgagaugaucugggaccccaacggguggaccggcaccgacaacaacuucagcaucaagcaggacaucguggggaucaacgagugguccggcuacagcggguccuucgugcagcacccggagcugacgggccuggacugcauccgccccugcuucugggucgagcucauccggggccgccccaaggagaacaccaucuggaccagcggguccagcaucuccuucugcggcgugaacagcgacaccgucgggugguccuggcccgacggcgccgagcugccguucacgaucgacaaguga

SEQ ID NO: 87414 - RNA, 1410 nt, Artificial Sequence; identical to SEQ ID NO: 87381
  derived and/or modified CDS sequence (opt1) from neuraminidase__InfluenzaA__AGG13976

SEQ ID NO: 87415 - RNA, 1410 nt, Artificial Sequence; identical to SEQ ID NO: 87381
  derived and/or modified CDS sequence (opt1) from neuraminidase__InfluenzaA__AGG13988

SEQ ID NO: 87416 - RNA, 1410 nt, Artificial Sequence; identical to SEQ ID NO: 87381
  derived and/or modified CDS sequence (opt1) from neuraminidase__InfluenzaA__AGG14000

SEQ ID NO: 87417 - RNA, 1410 nt, Artificial Sequence; identical to SEQ ID NO: 87381
  derived and/or modified CDS sequence (opt1) from neuraminidase__InfluenzaA__AGG14012

SEQ ID NO: 87418 - RNA, 1410 nt, Artificial Sequence; identical to SEQ ID NO: 87399
  derived and/or modified CDS sequence (opt1) from neuraminidase__InfluenzaA__AGG14024

SEQ ID NO: 87419 - RNA, 1410 nt, Artificial Sequence
  derived and/or modified CDS sequence (opt1) from neuraminidase__InfluenzaA__AGG14036
augaaccccaaccagaagaucaucaccaucggcagcgugucccugaccaucagcacgaucugcuucuucaugcagaucgccauccucaucaccaccgucacccugcacuucaagcaguacgaguucaacuccccgcccaacaaccaggugaugcugugcgagcccacgaucaucgagcgcaacaucaccgagaucguguaccucaccaacaccacgaucgagaaggagaucugccccaagcuggccgaguaccggaacuggagcaagccgcagugcgacaucaccggguucgcgcccuucuccaaggacaacagcauccgccuguccgccggcggggacaucugggucacccgggagcccuacgugagcugcgaccccgacaagugcuaccaguucgcccucggccaggggaccacgcugaacaacgugcacuccaacaacaccguccgcgaccggaccccguaccgcacccugcucaugaacgagcugggcgugcccuuccaccugggcacgaagcaggucugcaucgccuggagcuccagcuccugccacgacgggaaggccuggcuccacgugugcaucaccggcgacgacaagaacgcgaccgccagcuucaucuacaacgggcggcugguggacuccguggucagcugguccaaggacauccugcgcacccaggagagcgagugcgugugcaucaacggcacgugcgccguggucaugaccgacggguccgccagcggcaaggcggacaccaagauccucuucaucgaggagggcaagaucgugcacaccagcacgcuguccgggagcgcccagcacguggaggagugcuccugcuacccccgguaccccggcguccgcugcgugugccgggacaacuggaaggggagcaaccgcccgaucguggacaucaacaucaaggaccacuccaucgucagcuccuacaugugcagcggccuggugggcgacacgccccggaagaacgacuccagcuccagcgggcacugccucgaccccaacaacgaggagggcgggcacggcgugaaggggugggccuucgacgacggcaacgacgucuggaugggccgcaccaucaacgagaccucccggcugggguacgagaccuucaaggugaucgagggcuggagcaaccccaaguccaagcugcagaucaaccgccaggucaucguggaccgggggaaccgcagcggcuacuccgggaucuucagcguggagggcaagaacugcaucaaccggugcuucuacgucgagcucauccgcggccggaaggaggagaccgaggugcuguggaccuccaacagcaucguggucuucugcgggaccagcggcacguacgggaccggcuccuggccggacggggccgaccugaaccucaugcccaucuga

SEQ ID NO: 87420 - RNA, 1410 nt, Artificial Sequence; identical to SEQ ID NO: 87399
  derived and/or modified CDS sequence (opt1) from neuraminidase__InfluenzaA__AGG14321

SEQ ID NO: 87421 - RNA, 1410 nt, Artificial Sequence; identical to SEQ ID NO: 86170
  derived and/or modified CDS sequence (opt1) from neuraminidase__InfluenzaA__AGG14333

SEQ ID NO: 87422 - RNA, 1410 nt, Artificial Sequence; identical to SEQ ID NO: 85811
  derived and/or modified CDS sequence (opt1) from neuraminidase__InfluenzaA__AGG84182

SEQ ID NO: 87423 - RNA, 1398 nt, Artificial Sequence
  derived and/or modified CDS sequence (opt1) from neuraminidase__InfluenzaA__AGJ51955
augaaccccaaccagaagauccugugcaccagcgccaccgccaucaucaucggcgcgaucgccgugcucaucgggaucgccaaccugggccugaacaucgggcuccaccugaagccgggcugcaacugcucccacagccagcccgagacgaccaacaccucccagaccaucaucaacaacuacuacaacgagacgaacaucaccaacauccagauggaggagcgcaccagccggaacuucaacaaccugaccaaggggcucugcacgaucaacuccuggcacaucuacggcaaggacaacgccguccgcaucggcgagagcuccgacgugcuggugacccgggagcccuacgucagcugcgaccccgacgagugccgcuucuacgcccugucccaggggaccaccauccggggcaagcacagcaacgggacgauccacgaccgcucccaguaccgggcgcucaucagcuggccgcuguccagcccgcccaccguguacaacucccgcguggagugcaucggcuggagcuccaccagcugccacgacgggaagucccggaugagcaucugcaucagcggccccaacaacaacgccuccgccgucgugugguacaaccgccggcccguggccgagaucaacaccugggcgcgcaacauccugcggacgcaggagagcgagugcgucugccacaacggcgugugccccguggucuucaccgacggguccgccaccggccccgccgacacccgcaucuacuacuucaaggaggggaagauccucaagugggagagccugacgggcaccgccaagcacaucgaggagugcuccugcuacggcgagcggaccgggaucacgugcacgugccgcgacaacuggcagggcagcaaccggcccgugauccagaucgacccgguggccaugacccacaccucccaguacaucugcagccccguccugaccgacaacccccgccccaacgacccgaacaucgggaagugcaacgaccccuaccccggcaacaacaacaacggggugaagggcuucuccuaccucgacggcgcgaacaccuggcuggggcggaccaucagcaccgccucccgcagcggcuacgagaugcugaaggugcccaacgcccucaccgacgaccgguccaagccgauccaggggcagacgaucguccugaacgccgacuggagcggcuacuccgggagcuucauggacuacugggccgagggcgacugcuaccgcgcgugcuucuacguggagcugauccgcggccggcccaaggaggacaaggugcucuggaccggggacuccaucgucagcaugugcuccagcaccgaguuccugggccaguggaacuggcccgacggggccaagaucgaguacuuccuguga

SEQ ID NO: 87424 - RNA, 1398 nt, Artificial Sequence
  derived and/or modified CDS sequence (opt1) from neuraminidase__InfluenzaA__AGJ72863
augaaccccaaccagaagauccugugcaccagcgccaccgccaucaucaucggcgcgaucgccgugcucaucgggaucgccaaccugggccugaacaucgggcuccaccugaagccgggcugcaacugcucccacagccagcccgagacgaccaacaccucccagaccaucaucaacaacuacuacaacgagacgaacaucaccaacauccagauggaggagcgcaccagccggaacuucaacaaccugaccaaggggcucugcacgaucaacuccuggcacaucuacggcaaggacaacgccguccgcaucggcgagagcuccgacgugcuggugacccgggagcccuacgucagcugcgaccccgacgagugccgcuucuacgcccugucccaggggaccaccauccggggcaagcacagcaacgggacgauccacgaccgcucccaguaccgggcgcucaucagcuggccgcuguccagcccgcccaccguguacaacucccgcguggagugcaucggcuggagcuccaccagcugccacgacgggaagucccggaugagcaucugcaucagcggccccaacaacaacgccuccgccgucgugugguacaaccgccggcccguggccgagaucaacaccugggcgcgcaacauccugcggacgcaggagagcgagugcgucugccacaacggcgugugccccguggucuucaccgacggguccgccaccggccccgccgacacccgcaucuacuacuucaaggaggggaagauccucaagugggagagccugacgggcaccgccaagcacaucgaggagugcuccugcuacggcgagcggaccgggaucacgugcacgugccgcgacaacuggcagggcagcaaccggcccgugauccagaucgacccgguggccaugacccacaccucccaguacaucugcagccccguccugaccgacaacccccgccccaacgacccgaacaucgggaagugcaacgaccccuaccccggcaacaacaacaacggggugaagggcuucuccuaccucgacggcgcgaacaccuggcuggggcggaccaucagcaccgccucccgcagcggcuacgagaugcugaaggugcccaacgcccucaccgacgaccgguccaagccgauccaggggcagacgaucguccugaacgccgacuggagcggcuacuccgggagcuucauggacuacugggccgagggcgacugcuaccgcgcgugcuucuacguggaggugauccgcggccggcccaaggaggacaaggucuggugggccgggaacuccaucgugagcaugugcuccagcaccgaguuccugggccaguggaacuggcccgacggggccaagaucgaguacuuccucuga

SEQ ID NO: 87425 - RNA, 1410 nt, Artificial Sequence
  derived and/or modified CDS sequence (opt1) from neuraminidase__InfluenzaA__AGJ73328
augaaccccaaccagaagaucaucaccaucggcagcgugugcaugaccaucgggauggccaaccugauccuccagaucggcaacaucaucuccaucuggaucagccacuccauccagcuggggaaccagagccagaucgagacgugcaaccaguccgucaucaccuacgagaacaacaccugggugaaccagaccuacgugaacaucagcaacacgaacuucgccgcgggccaguccgucgugagcgugaagcuggccgggaacuccagccucugcccggucuccggcugggccaucuacagcaaggacaacuccgugcgcaucggcagcaagggggacguguucgucauccgggagcccuucaucuccugcagcccccuggagugccgcaccuucuuccugacccagggcgcccuccugaacgacaagcacuccaacgggaccaucaaggaccggagccccuaccgcacgcugauguccugcccgaucggcgaggugcccagccccuacaacagccgguucgaguccguggccuggagcgcguccgccugccacgacgggaucaacuggcucaccaucggcaucagcggccccgacuccggggccgucgccgugcugaaguacaacggcaucaucaccgacaccaucaagagcuggcgcaacaacauccugcggacgcaggaguccgagugcgcgugcgugaacgggagcugcuucaccaucaugaccgacggcccguccgacggccaggccagcuacaagaucuuccgcaucgagaaggggaagaucgucaaguccguggagaugaacgcccccaacuaccacuacgaggagugcagcugcuaccccgacuccagcgagaucacgugcgugugccgggacaacuggcacggcuccaaccgccccugggucagcuucaaccagaaccucgaguaccagaucggguacaucugcuccggcaucuucggggacaacccgcggcccaacgacaagaccggcagcugcggccccguguccagcaacggggccaacggcgugaagggguucagcuucaaguacggcaacggggucuggaucggccgcaccaaguccaucagcucccggaagggcuucgagaugaucugggaccccaacggguggaacggcaccgacaacaacuucagcaucaagcaggacaucguggggaucaacgagugguccggcuacagcggguccuucgugcagcacccggagcugaccggccuggacugcauccgccccugcuucugggucgagcucauccggggccgccccaaggagaacacgaucuggaccagcggguccagcaucuccuucugcggcgugaacagcgacaccgucgggugguccuggcccgacggcgccgagcugccguucaccaucgacaaguga

SEQ ID NO: 87426 - RNA, 1410 nt, Artificial Sequence; identical to SEQ ID NO: 84281
  derived and/or modified CDS sequence (opt1) from neuraminidase__InfluenzaA__AGJ73330

SEQ ID NO: 87427 - RNA, 1410 nt, Artificial Sequence
  derived and/or modified CDS sequence (opt1) from neuraminidase__InfluenzaA__AGJ73332
augaaccccaaccagaagaucaucaccaucggcagcgugugcaugaccaucgggauggccaaccugauccuccagaucggcaacaucaucuccaucuggaucagccacuccauccagcuggggaaccagaaccagaucgagacgugcaaccagagcgucaucaccuacgagaacaacaccugggugaaccagaccuacgugaacaucuccaacacgaacuucgccgcgggccagagcgucguguccgugaagcuggccgggaacagcucccucugcccggucagcggcugggccaucuacuccaaggacaacagcauccgcaucggcuccaagggggacguguucgugauccgggagcccuucaucagcugcagcccccuggagugccgcaccuucuuccugacccagggcgcccuccugaacgacaagcacuccaacgggaccaucaaggaccggucccccuaccgcacgcugaugagcugcccgaucggcgagguccccucccccuacaacagccgguucgagagcguggccugguccgcgagcgccugccacgacgggaucaacuggcucaccaucggcaucuccggccccgacaacggggccguggccguccugaaguacaacggcaucaucaccgacaccaucaagagcuggcgcaacaacauccugcggacgcaggaguccgagugcgcgugcgugaacgggagcugcuucaccgugaugaccgacggcccguccgacggccaggccagcuacaagaucuuccgcaucgagaaggggaagaucgucaaguccguggagaugaacgcccccaacuaccacuacgaggagugcagcugcuaccccgacuccagcgagaucacgugcgugugccgggacaacuggcacggcuccaaccgccccugggucagcuucaaccacaaccucgaguaccagaucggguacaucugcuccggcaucuucggggacaacccgcggcccaacgacaagaccggcagcugcggccccguguccagcaacggggccaacggcgugaagggguucuccuucaaguacggcaacggggucuggaucggccgcaccaagagcaucagcucccggaacggcuucgagaugaucugggaccccaacggguggaccggcaccgacaacaacuucagcaucaagcaggacaucaucgggaucaacgagugguccggcuacagcggguccuucgugcagcacccggagcugacgggccuggacugcauccgccccugcuucuggguggagcucauccggggccgccccaaggagaacaccaucuggaccagcggguccagcaucuccuucugcggcgucaacagcgacaccguggggugguccuggcccgacggcgccgagcugccguucacgaucgacaaguga

SEQ ID NO: 87428 - RNA, 1410 nt, Artificial Sequence; identical to SEQ ID NO: 84281
  derived and/or modified CDS sequence (opt1) from neuraminidase__InfluenzaA__AGJ73334

SEQ ID NO: 87429 - RNA, 1410 nt, Artificial Sequence; identical to SEQ ID NO: 84281
  derived and/or modified CDS sequence (opt1) from neuraminidase__InfluenzaA__AGJ73336

SEQ ID NO: 87430 - RNA, 1410 nt, Artificial Sequence; identical to SEQ ID NO: 84281
  derived and/or modified CDS sequence (opt1) from neuraminidase__InfluenzaA__AGJ73338

SEQ ID NO: 87431 - RNA, 1410 nt, Artificial Sequence
  derived and/or modified CDS sequence (opt1) from neuraminidase__InfluenzaA__AGJ73340
augaaccccaaccagaagaucaucaccaucggcagcgugugcaugaccaucgggauggccaaccugauccuccagaucggcaacaucaucuccaucuggaucagccacuccauccagcuggggaaccagagccagaucgagacgugcaaccaguccgucaucaccuacgagaacaacaccugggugaaccagaccuacgugaacaucagcaacacgaacuucgccgcgggccaguccgucgugagcgugaagcuggccgggaacuccagccucugcccggccuccggcugggccaucuacagcaaggacaacuccauccgcaucggcagcaagggggacgucuucgugauccgggagcccuucaucuccugcagcccccuggagugccgcaccuucuuccugacccagggcgcccuccugaacgacaagcacuccaacgggaccaucaaggaccggagccccuaccgcacgcugauguccugcccgaucggcgaggugcccagccccuacaacagccgguucgaguccgucgcguggagcgccuccgccugccacgacgggaucaacuggcucaccaucggcaucagcggccccgacaacggggccguggcggugcugaaguacaacggcaucaucaccgacaccaucaaguccuggcgcaacaacauccugcggacgcaggagagcgagugcgccugcgucaacggguccugcuucaccaucaugaccgacggcccgagcgacggccaggccuccuacaagaucuuccgcaucgagaaggggaagaucgucaagagcguggagaugaacgcccccaacuaccacuacgaggagugcuccugcuaccccgacagcuccgagaucacgugcgugugccgggacaacuggcacggcagcaaccgccccuggguguccuucaaccagaaccucgaguaccagaucggguacaucugcagcggcaucuucggggacaacccgcggcccaacgacaagaccggcuccugcggccccgugagcuccaacggggccaacggcgucaagggguucagcuucaaguacggcaacgggguguggaucggccgcaccaagagcaucuccagccggaagggcuucgagaugaucugggaccccaacggguggaccggcaccgacaacaacuucuccaucaagcaggacaucguggggaucaacgaguggagcggcuacuccgggagcuucguccagcacccggagcugacgggccuggacugcauccgccccugcuucuggguggagcucauccggggccgccccaaggagaacaccaucuggaccuccgggagcuccaucagcuucugcggcgugaacuccgacaccgucggguggagcuggcccgacggcgcggagcugccguucacgaucgacaaguga

SEQ ID NO: 87432 - RNA, 1410 nt, Artificial Sequence
  derived and/or modified CDS sequence (opt1) from neuraminidase__InfluenzaA__AGJ73342
augaaccccaaccagaagaucaucaccaucggcagcgugugcaugaccaucgggauggccaaccugauccuccagaucggcaacaucaucuccaucuggaucagccacuccauccagcuggggaaccagagccagaucgagacgugcaaccaguccgucaucaccuacgagaacaacaccugggugaaccagaccuacgugaacaucagcaacacgaacuucgccgcgggccaguccgucgugagcgugaagcuggccgggaacuccagccucugcccggucuccggcugggccaucuacagcaaggacaacuccauccgcaucggcagcaagggggacguguucgugauccgggagcccuucaucuccugcagcccccuggagugccgcaccuucuuccugacccagggcgcccuccugaacgacaagcacuccaacgggaccaucaaggaccggagccccuaccgcacgcugauguccugcccgaucggcgagguccccagccccuacaacagccgguucgaguccguggccuggagcgcguccgccugccacgacgggaucaacuggcucaccaucggcaucagcggccccgacaacggggccguggccguccugaaguacaacggcaucaucaccgacaccaucaaguccuggcgcaacaacauccugcggacgcaggagagcgagugcgcgugcgugaacggguccugcuucaccaucaugaccgacggcccgagcgacggccaggccuccuacaagaucuuccgcaucgagaaggggaagaucgucaagagcguggagaugaacgcccccaacuaccacuacgaggagugcuccugcuaccccgacagcuccgagaucacgugcgugugccgggacaacuggcacggcagcaaccgccccuggguguccuucaaccagaaccucgaguaccagaucggguacaucugcagcggcaucuucggggacaacccgcggcccaacgacaagaccggcuccugcggccccgucagcuccaacggggccaacggcgugaagggguucagcuucaaguacggcaacgggguguggaucggccgcaccaagagcaucuccagccggaagggcuucgagaugaucugggaccccaacggguggaccggcaccgacaacaacuucuccaucaagcaggacaucgucgggaucaacgaguggagcggcuacuccgggagcuucgugcagcacccggagcugacgggccuggacugcauccgccccugcuucuggguggagcucauccggggccgccccaaggagaacaccaucuggaccuccgggagcuccaucagcuucugcggcgucaacuccgggaccgugggcuggagcuggcccgacggcgccgagcugccguucacgaucgacaaguga

SEQ ID NO: 87433 - RNA, 1410 nt, Artificial Sequence; identical to SEQ ID NO: 84733
  derived and/or modified CDS sequence (opt1) from neuraminidase__InfluenzaA__AGJ73344

SEQ ID NO: 87434 - RNA, 1410 nt, Artificial Sequence
  derived and/or modified CDS sequence (opt1) from neuraminidase__InfluenzaA__AGJ73346
augaaccccaaccagaagaucaucaccaucggcagcgugugcaugaccaucgggauggccaaccugauccuccagaucggcaacaucaucuccaucuggaucagccacuccauccagcuggggaaccagaaccagaucgagaagugcaaccagagcgucaucacguacgagaacaacaccugggugaaccagaccuacgugaacaucuccaacaccaacuucgccgcgggccagagcgucguguccgugaagcuggccgggaacagcucccucugcccggucagcggcugggccaucuacuccaaggacaacagcauccgcaucggcuccaagggggacguguucgugauccgggagcccuucaucagcugcagcccccuggagugccgcacguucuuccugacccagggcgcccuccugaacgacaagcacuccaacgggaccaucaaggaccggucccccuaccgcacccugaugagcugcccgaucggcgagguccccucccccuacaacagccgguucgagagcguggccugguccgcgagcgccugccacgacgggaucaacuggcucacgaucggcaucuccggccccgacaacggggccguggccguccugaaguacaacggcaucaucaccgacaccaucaagagcuggcgcaacaacauccugcggacccaggaguccgagugcgcgugcgugaacgggagcugcuucacgaucaugaccgacggcccguccgacggccaggccagcuacaagaucuuccgcaucgagaaggggaagaucgugaaguccgucgagaugaacgcccccaacuaccacuacgaggagugcagcugcuaccccgacuccagcgagaucacgugcgugugccgggacaacuggcacggcuccaaccgccccugggugagcuucaaccagaaccucgaguaccagaucggguacaucugcuccggcaucuucggggacaacccgcggcccaacgacaagaccggcagcugcggccccgucuccagcaacggggccaacggcgugaagggguucuccuucaaguacggcaacgggguguggaucggccgcaccaagagcaucagcucccggaagggcuucgagaugaucugggaccccaacggguggaccggcaccgacaacaacuucagcaucaagcaggacaucgucgggaucaacgagugguccggcuacagcggguccuucgugcagcacccggagcugaccggccuggacugcauccgccccugcuucuggguggagcucauccggggccgccccaaggagagcacgaucuggaccuccgggagcuccaucagcuucugcggcgucaacuccgacaccgugggguggagcuggcccgacggcgccgagcugccguucaccaucgacaaguga

SEQ ID NO: 87435 - RNA, 1410 nt, Artificial Sequence
  derived and/or modified CDS sequence (opt1) from neuraminidase__InfluenzaA__AGJ73348
augaaccccaaccagaagaucaucaccaucggcagcgugugcaugaccaucgggauggccaaccugauccuccagaucggcaacaucaucuccaucuggaucagccacuccauccagcuggggaaccagaaccagaucgagacgugcaaccagagcgucaucaccuacgagaacaacaccugggugaaccagaccuacgugaacaucuccaacacgaacuucgccgcgggccagagcgucaucuccgugaagcuggccgggaacagcucccucugcccggugagcggcugggccaucuacuccaaggacaacagcauccgcaucggcuccaagggggacgucuucgugauccgggagcccuucaucagcugcagcccccuggagugccgcaccuucuuccugacccagggcgcccuccugaacgacaagcacuccaacgggaccaucaaggaccggucccccuaccgcacgcugaugagcugcccgaucggcgaggugcccucccccuacaacagccgguucgagagcgucgccugguccgcgagcgccugccacgacgggaucaacuggcucaccaucggcaucuccggccccgacaacggggccguggccgugcugaaguacaacggcaucaucaccgacaccaucaagagcuggcgcaacaacauccugcggacgcaggaguccgagugcgcgugcgucaacgggagcugcuucaccaucaugaccgacggcccguccgacggccaggccagcuacaagaucuuccgcaucgagaaggggaagaucgugaaguccguggagaugaacgcccccaacuaccacuacgaggagugcagcugcuaccccgacuccagcgagaucacgugcgucugccgggacaacuggcacggcuccaaccgccccugggugagcuucaaccagaaccucgaguaccagaucggguacaucugcuccggcaucuucggggacaacccgcggcccaacgacaagaccggcagcugcggccccguguccagcaacggggccaacggcgucaagggguucuccuucaaguacggcaacgggguguggaucggccgcaccaagagcaucagcucccggaagggcuucgagaugaucugggaccccaacggguggaccggcaccgacaacaacuucagcaucaagcaggacaucguggggaucaacgagugguccggcuacagcggguccuucguccagcacccggagcugacgggccuggacugcauccgccccugcuucuggguggagcucauccggggccgccccaaggagaacaccaucuggaccagcggguccagcaucuccuucugcggcgugaacagcgacaccgucgggugguccuggcccgacggcgccgagcugccguucacgaucgacaaguga

SEQ ID NO: 87436 - RNA, 1410 nt, Artificial Sequence
  derived and/or modified CDS sequence (opt1) from neuraminidase__InfluenzaA__AGJ73350
augaaccccaaccagaagaucaucaccaucggcagcgugugcaugaccaucgggauggccaaccugauccuccagaucggcaacaucaucuccaucuggaucagccacuccauccagcuggggaaccagaaccagaucgagacgugcaaccagagcgucaucaccuacgagaacaacaccugggugaaccagaccuacgugaacaucuccaacacgaacuucgccgcgggccagagcgucguguccgugaagcuggccgggaacagcucccucugcccggucagcggcugggccaucuacuccaaggacaacagcauccgcaucggcuccaagggggacguguucgugauccgggagcccuucaucagcugcagcccccuggagugccgcaccuucuuccugacccagggcgcccuccugaacgacgagcacuccaacgggaccaucaaggaccggucccccuaccgcacgcugaugagcugcccgaucggcgagguccccucccccuacaacagccgguucgagagcguggccugguccgcgagcgccugccacgacgggaucaacuggcucaccaucggcaucuccggccccgacaacggggccguggccguccugaaguacaacggcaucaucaccgacaccaucaagagcuggcgcaacaacauccugcggacgcaggaguccgagugcgcgugcgugaacgggagcugcuucaccaucaugaccgacggcccguccgacggccaggccagcuacaagaucuuccgcaucgagaaggggaagaucgugaaguccgucgugaugaacgcccccaacuaccacuacgaggagugcagcugcuaccccgacuccagcgagaucacgugcgugugccgggacaacuggcacggcuccaaccgccccugggucagcuucaaccagaaccucgaguaccagaucggguacaucugcuccggcaucuucggggacaacccgcggcccaacgacaagaccggcagcugcggccccguguccagcaacggggccaacggcgugaagggguucuccuucaaguacggcaacggggucuggaucggccgcaccaagagcaucagcucccggaagggcuucgagaugaucugggaccccaacggguggaccggcaccgacaacaacuucagcaucaagcaggacaucguggggaucaacgagugguccggcuacagcggguccuucgugcagcacccggagcugacgggccuggacugcauccgccccugcuucugggucgagcucauccggggccgccccaaggagaacaccaucuggaccagcggguccagcaucuccuucugcggcgugaacagcgacaccgucgggugguccuggcccgacggcgccgagcugccguucacgaucgacaaguga

SEQ ID NO: 87437 - RNA, 1410 nt, Artificial Sequence
  derived and/or modified CDS sequence (opt1) from neuraminidase__InfluenzaA__AGJ73352
augaaccccaaccagaagaucaucaccaucggcagcgugugcaugaccaucgggauggccaaccugauccuccagaucggcaacaucaucuccaucuggaucagccacuccauccagcuggggaaccagagccagaucgagacgugcaaccaguccgucaucaccuacgagaacaacaccugggugaaccagaccuacgugaacaucagcaacacgaacuucgccgcgggccaguccgucgugagcgugaagcuggucgggaacuccagccucugcccgguguccggcugggccaucuacagcaaggacaacuccauccgcaucggcagcaagggggacguguucgucauccgggagcccuucaucuccugcagcccccuggagugccgcaccuucuuccugacccagggcgcccuccugaacgacaagcacuccaacgggaccaucaaggaccggagccccuaccgcacgcugauguccugcccgaucggcgaggugcccagccccuacaacagccgguucgaguccguggccuggagcgccuccgcgugccacgacgggaucaacuggcucaccaucggcaucagcggccccgacaacggggccgucgccgugcugaaguacaacggcaucaucaccgacaccaucaaguccuggcgcaacaacauccugcggacgcaggagagcgagugcgccugcgugaacggguccugcuucaccaucaugaccgacggcccgagcgacggccaggcguccuacaagaucuuccgcaucgagaaggggaagaucgucaagagcguggagaugaacgcccccaacuaccacuacgaggagugcuccugcuaccccgacagcuccgagaucacgugcgugugccgggacaacuggcacggcagcaaccgccccugggucuccuucaaccagaaccucgaguaccagaucggguacaucugcagcggcaucuucggggacuccccgcggcccaacgacaagaccggcagcugcggccccguguccagcaacggggccaacggcgugaagggguucagcuucaaguacggcaacggggucuggaucggccgcaccaaguccaucagcucccggaagggcuucgagaugaucugggaccccaacggguggaccggcaccgacaacaacuucagcaucaagcaggacaucguggggaucaacgagugguccggcuacagcggguccuucgugcagcacccggagcugacgggccuggacugcauccgccccugcuucugggucgagcucauccggggccgccccaaggagaacaccaucuggaccagcggguccagcaucuccuucugcggcgugaacagcgacaccgucgggugguccuggcccgacggcgccgagcugccguucacgaucgacaaguga

SEQ ID NO: 87438 - RNA, 1410 nt, Artificial Sequence; identical to SEQ ID NO: 84733
  derived and/or modified CDS sequence (opt1) from neuraminidase__InfluenzaA__AGJ73354

SEQ ID NO: 87439 - RNA, 1410 nt, Artificial Sequence
  derived and/or modified CDS sequence (opt1) from neuraminidase__InfluenzaA__AGJ73356
augaaccccaaccagaagaucaucaccaucggcagcgugugcaugaccaucgggauggccaaccugauccuccagaucggcaacaucaucuccaucuggaucagccacuccauccagcuggggaaccagagccagaucgagacgugcaaccaguccgucaucaccuacgagaacaacaccugggugaaccagaccuacuucaacaucagcaacacgaacuucgccgcgggccaguccguggucagcgugaagcuggccgggaacuccagccucugcccgguguccggcugggccaucuacagcaaggacaacuccauccgcaucggcagcaagggggacgucuucgugauccgggagcccuucaucuccugcagcccccuggagugccgcaccuucuuccugacccagggcgcccuccugaacgacaagcacuccaacgggaccaucaaggaccggagccccuaccgcacgcugauguccugcccgaucggcgaggugcccagccccuacaacagccgguucgaguccgucgccuggagcgcguccgccugccacgacgggaucaacuggcucaccaucggcaucagcggccccgacaacggggccguggccgugcugaaguacaacggcaucaucaccgacaccaucaaguccuggcgcaacaacauccugcggacgcaggagagcgagugcgcgugcgucaacggguccugcuucaccaucaugaccgacggcccgagcgacggccaggccuccuacaagaucuuccgcaucgagaaggggaagaucgucaagagcguggagaugaacgcccccaacuaccacuacgaggagugcuccugcuaccccgacagcuccgagaucacgugcgugugccgggacaacuggcacggcagcaaccgccccuggguguccuucaaccagaaccucgaguaccagaucggguacaucugcagcggcaucuucggggacaacccgcggcccaacgacaagaccggcuccugcggccccgugagcuccaacggggccaacggcgucaagggguucagcuucaaguacggcaacgggguguggaucggccgcaccaagagcaucuccagccggaagggcuucgagaugaucugggaccccaacggguggaccggcaccgacaacaacuucuccaucaagcaggacaucguggggaucaacgaguggagcggcuacuccgggagcuucguccagcacccggagcugacgggccuggacugcauccgccccugcuucuggguggagcucauccggggccgccccaaggagaacaccaucuggaccuccgggagcuccaucagcuucugcggcgugaacuccgacaccgucggguggagcuggcccgacggcgccgagcugccguucacgaucgacaaguga

SEQ ID NO: 87440 - RNA, 1410 nt, Artificial Sequence; identical to SEQ ID NO: 84733
  derived and/or modified CDS sequence (opt1) from neuraminidase__InfluenzaA__AGJ73358

SEQ ID NO: 87441 - RNA, 1410 nt, Artificial Sequence; identical to SEQ ID NO: 84733
  derived and/or modified CDS sequence (opt1) from neuraminidase__InfluenzaA__AGJ73360

SEQ ID NO: 87442 - RNA, 1410 nt, Artificial Sequence
  derived and/or modified CDS sequence (opt1) from neuraminidase__InfluenzaA__AGJ73362
augaaccccaaccagaagaucaucaccaucggcagcgugugcaugaccaucgggauggccaaccugauccuccagaucggcaacaucaucuccaucuggaucagccacuccauccagcuggggaaccagagccagaucgagacgugcaaccaguccgucaucaccuacgagaacaacaccugggugaaccagaccuacgugaacaucagcaacacgaacuucgccgacggccaguccgucgugagcgugaagcuggcggggaacuccagccucugcccggucuccggcugggccaucuacagcaaggacaacuccauccgcaucggcagcaagggggacguguucgugauccgggagcccuucaucuccugcagcccccuggagugccgcaccuucuuccugacccagggcgcccuccugaacgacaagcacuccaacgggaccaucaaggaccggagccccuaccgcacgcugauguccugcccgaucggcgagguccccagccccuacaacagccgguucgaguccguggccuggagcgccuccgcgugccacgacgggaucaacuggcucaccaucggcaucagcggccccgacaacggggccguggccguccugaaguacaacggcaucaucaccgacaccaucaaguccuggcgcaacaacauccugcggacgcaggagagcgagugcgccugcgugaacggguccugcuucaccaucaugaccgacggcccgagcgacggccaggcguccuacaagaucuuccgcaucgagaaggggaagaucgucaagagcguggagaugaacgcccccaacuaccacuacgaggagugcuccugcuaccccgacagcuccgagaucacgugcgugugccgggacaacuggcacggcagcaaccgccccuggguguccuucaaccagaaccucgaguaccagaucggguacaucugcagcggcaucuucggggacaacccgcggcccaacgacaagaccggcuccugcggccccgucagcuccaacggggccaacggcgugaagggguucagcuucaaguacggcaacgggguguggaucggccgcaccaagagcaucuccagccggaagggcuucgagaugaucugggaccccaacggguggaccggcaccgacaacaacuucuccaucaagcaggacaucgucgggaucaacgaguggagcggcuacuccgggagcuucgugcagcacccggagcugacgggccuggacugcauccgccccugcuucuggguggagcucauccggggccgccccaaggagaacaccaucuggaccuccgggagcuccaucagcuucugcggcgucaacuccgacaccgugggguggagcuggcccgacggcgccgagcugccguucacgaucgacaaguga

SEQ ID NO: 87443 - RNA, 1410 nt, Artificial Sequence; identical to SEQ ID NO: 85856
  derived and/or modified CDS sequence (opt1) from neuraminidase__InfluenzaA__AGJ73364

SEQ ID NO: 87444 - RNA, 1410 nt, Artificial Sequence; identical to SEQ ID NO: 84733
  derived and/or modified CDS sequence (opt1) from neuraminidase__InfluenzaA__AGJ73366

SEQ ID NO: 87445 - RNA, 1410 nt, Artificial Sequence; identical to SEQ ID NO: 84281
  derived and/or modified CDS sequence (opt1) from neuraminidase__InfluenzaA__AGJ73370

SEQ ID NO: 87446 - RNA, 1410 nt, Artificial Sequence
  derived and/or modified CDS sequence (opt1) from neuraminidase__InfluenzaA__AGJ73372
augaaccccaaccagaagaucaucaccaucggcagcgugugcaugaccaucgggauggccaaccugauccuccagaucggcaacaucaucuccaucuggaucagccacuccauccagcuggggaaccagaaccagaucgagacgugcaaccagagcgucaucaccuacgagaacaacaccugggugaaccagaccuacgugaacaucuccaacacgaacuucgccgcgggccagagcgucguguccgugaagcuggccgggaacagcucccucugcccggucagcggcugggccaucuacuccaaggacaacagcauccgcaucggcuccaagggggacguguucgugauccgggagcccuucaucagcugcagcccccuggagugccgcaccuucuuccugacccagggcgcccuccugaacgacaagcacuccaacgggaccaucaaggaccggucccccuaccgcacgcugaugagcugcccgaucggcgagguccccucccccuacaacagccgguucgagagcguggccugguccgcgagcgccugccacgacgggaucaacuggcucaccaucggcaucuccggccccgacaacggggccguggccguccugaaguacaacggcaucaucaccgacaccaucaagagcuggcgcaacaacauccugcggacgcaggaguccgagugcgcgugcgugaacgggagcugcuucaccaucaugaccgacggcccguccgacggccaggccagcuacaagaucuuccgcaucgagaaggggaagaucgugaaguccgucgagaugaacgcccccaacuaccacuacgaggagugcagcugcuaccccgacuccagcgagaucacgugcgugugccgggacaacuggcacggcuccaaccgccccugggugagcuucaaccacaaccucgaguaccagaucggguacaucugcuccggcaucuucggggacaacccgcggcccaacgacaagaccggcagcugcggccccgucuccagcaacggggccaacggcgugaagggguucuccuucaaguacggcaacgggguguggaucggccgcaccaagagcaucagcucccggaagggcuucgagaugaucugggaccccaacggguggaccggcaccgacaacaacuucagcaucaagcaggacaucgucgggaucaacgagugguccggcuacagcggguccuucgugcagcacccggagcugacgggccuggacugcauccgccccugcuucuggguggagcucauccggggccgccccaaggagaacaccaucuggaccagcggguccagcaucuccuucugcggcgucaacagcgacaccguggggugguccuggcccgacggcgccgagcugccguucacgaucgacaaguga

SEQ ID NO: 87447 - RNA, 1410 nt, Artificial Sequence; identical to SEQ ID NO: 84281
  derived and/or modified CDS sequence (opt1) from neuraminidase__InfluenzaA__AGJ73374

SEQ ID NO: 87448 - RNA, 1410 nt, Artificial Sequence
  derived and/or modified CDS sequence (opt1) from neuraminidase__InfluenzaA__AGJ73376
augaaccccaaccagaagaucaucaccaucggcagcgugugcaugaccaucgggauggccaaccugauccuccagaucggcaacaucaucuccaucuggaucagccacuccauccagcuggggaaccagagccagaucgagacgugcaaccaguccgucaucaccuacgagaacaacaccugggugaaccagaccuacgugaacaucagcaacacgaacuucgccgcgggccaguccgucgugagcgugaagcuggccgggaacuccagccucugcccggucuccggcugggccaucuacagcaaggacaacuccgugcgcaucggcagcaagggggacguguucgucauccgggagcccuucaucuccugcagcccccuggagugccgcaccuucuuccugacccagggcgcccuccugaacgacaagcacuccaacgggaccaucaaggaccggagccccuaccgcacgcugauguccugcccgaucggcgaggugcccagccccuacaacagccgguucgaguccguggccuggagcgcguccgccugccacgacgggaucaacuggcucaccaucggcaucagcggccccgacuccggggccgucgccgugcugaaguacaacggcaucaucaccgacaccaucaagagcuggcgcaacaacauccugcggacgcaggaguccgagugcgcgugcgugaacgggagcugcuucaccaucaugaccgacggcccguccgacggccaggccagcuacaagauccuccgcaucgagaaggggaagaucgucaaguccguggagaugaacgcccccaacuaccacuacgaggagugcagcugcuaccccgacuccagcgagaucacgugcgugugccgggacaacuggcacggcuccaaccgccccugggucagcuucaaccagaaccuggaguaccagaucggguacaucugcuccggcaucuucggggacaacccgcggcccaacgacaagaccggcagcugcggccccguguccagcaacggggccaacggcgugaagggguucagcuucaaguacggcaacggggucuggaucggccgcaccaaguccaucagcucccggaagggcuucgagaugaucugggaccccaacggguggaccggcaccgacaacaacuucagcacgaagcaggacaucguggggaucaacgagugguccggcuacagcggguccuucgugcagcacccggagcugaccggccucgacugcauccgccccugcuucugggucgagcugauccggggccgccccaaggagaacaccaucuggaccagcggguccagcaucuccuucugcggcgugaacagcgacacggucgggugguccuggcccgacggcgccgagcugccguucaccaucgacaaguga

SEQ ID NO: 87449 - RNA, 1410 nt, Artificial Sequence
  derived and/or modified CDS sequence (opt1) from neuraminidase__InfluenzaA__AGJ73379
augaaccccaaccagaagaucaucaccaucggcagcgugugcaugaccaucgggauggccaaccugauccuccagaucggcaacaucaucuccaucuggaucagccacuccauccagcuggggaaccagagccagaucgagacgugcaaccaguccgucaucaccuacgagaacaacaccugggugaaccagaccuacgugaacaucagcaacacgaacuucgccgcgggccaguccgucgugagcgugaagcuggccgggaacuccagccucugcccggucuccggcugggccaucuacagcaaggacaacuccgugcgcaucggcagcaagggggacguguucgucauccgggagcccuucaucuccugcagcccccuggagugccgcaccuucuuccugacccagggcgcccuccugaacgacaagcacuccaacgggaccaucaaggaccggagccccuaccgcacgcugauguccugcccgaucggcgaggugcccagccccuacaacagccgguucgaguccguggccuggagcgcguccgccugccacgacgggaucaacuggcucaccaucggcaucagcggccccgacuccggggccgucgccgugcugaaguacaacggcaucaucaccgacaccaucaagagcuggcgcaacaacauccugcggacgcaggaguccgagugcgcgugcgugaacgggagcugcuucaccaucaugaccgacggcccguccgacggccaggccagcuacaagaucuuccgcaucgagaaggggaagaucgucaaguccguggagaugaacgcccccaacuaccacuacgaggagugcagcugcuaccccgacuccagcgagaucacgugcgugugccgggacaacuggcacggcuccaaccgccccugggucagcuucaaccagaaccucgaguaccagaucggguacaucugcuccggcaucuucggggacaacccgcggcccaacgacaagaccggcagcugcggccccguguccagcaacggggccaacggcgugaagggguucagcuucaaguacggcaacggggucuggaucggccgcaccaaguccaucagcucccggaagggcuucgagaugaucugggaccccaacggguggaccggcaccgacaacaacuucagcaucaagcaggacaucaucgggaucaacgagugguccggcuacagcggguccuucgugcagcacccggagcugacgggccuggacugcauccgccccugcuucuggguggagcucauccggggccgccccaaggagaacaccaucuggaccagcggguccagcaucuccuucugcggcgucaacagcgacaccguggggugguccuggcccgacggcgccgagcugccguucacgaucgacaaguga

SEQ ID NO: 87450 - RNA, 1410 nt, Artificial Sequence
  derived and/or modified CDS sequence (opt1) from neuraminidase__InfluenzaA__AGJ73381
augaaccccaaccagaagaucaucaccaucggcagcgugugcaugaccaucgggauggccaaccugauccuccagaucggcaacaucaucuccaucuggaucagccacuccauccagcuggggaaccagagccagaucgagacgugcaaccaguccgucaucaccuacgagaacaacaccugggugaaccagaccuacgugaacaucagcaacacgaacuucgccgcgggccaguccgucgugagcgugaagcuggccgggaacuccagccucugcccggucuccggcugggccaucuacagcaaggacaacuccgugcgcaucggcagcaagggggacguguucgucauccgggagcccuucaucuccugcagcccccuggagugccgcaccuucuuccugacccagggcgcccuccugaacgacgagcacuccaacgggaccaucaaggaccggagccccuaccgcacgcugauguccugcccgaucggcgaggugcccagccccuacaacagccgguucgaguccguggccuggagcgcguccgccugccacgacgggaucaacuggcucaccaucggcaucagcggccccgacuccggggccgucgccgugcugaaguacaacggcaucaucaccgacaccaucaagagcuggcgcaacaacauccugcggacgcaggaguccgagugcgcgugcgugaacgggagcugcuucaccaucaugaccgacggcccguccgacggccaggccagcuacaagaucuuccgcaucgagaaggggaagaucgucaaguccguggagaugaacgcccccaacuaccacuacgaggagugcagcugcuaccccgacuccagcgagaucacgugcgugugccgggacaacuggcacggcuccaaccgccccugggucagcuucaaccagaaccucgaguaccagaucggguacaucugcuccggcaucuucggggacaacccgcggcccaacgacaagaccggcagcugcggccccguguccagcaacggggccaacggcgugaagggguucagcuucaaguacggcaacggggucuggaucggccgcaccaaguccaucagcucccggaagggcuucgagaugaucugggaccccaacggguggaccggcaccgacaacaacuucagcaucaagcaggacaucguggggaucaacgagugguccggcuacagcggguccuucgugcagcacccggagcugacgggccuggacugcauccgccccugcuucugggucgagcucauccggggccgccccaaggagaacaccaucuggaccagcggguccagcaucuccuucugcggcgugaacagcgacaccgucgggugguccuggcccgacggcgccgagcugccguucacgaucgacaaguga

SEQ ID NO: 87451 - RNA, 1410 nt, Artificial Sequence
  derived and/or modified CDS sequence (opt1) from neuraminidase__InfluenzaA__AGK62992
augaaccccaaccagaagaucaucaccaucggcagcgugucccugaccaucagcacgaucugcuucuucaugcagaucgccauccucaucaccaccgucacccugcacuucaagcaguacgaguucaacuccccgcccaacaaccaggugaugcugugcgagcccacgaucaucgagcgcaacaucaccgagaucguguaccucaccaacaccacgaucgagaaggagaucugccccaagccggccgaguaccggaacuggagcaagccccagugcgacaucaccggguucgcgcccuucuccaaggacaacagcauccgccuguccgccggcggggacaucugggucacccgggagcccuacgugagcugcgacccggacaagugcuaccaguucgcccugggccaggggaccacgcucaacaacgugcacuccaacaacaccguccgcgaccggacccccuaccgcacccugcugaugaacgagcucggcgugcccuuccaccugggcacgaagcaggucugcaucgccuggagcuccagcuccugccacgacgggaaggccuggcugcacgugugcaucaccggcgacgacaagaacgcgaccgccagcuucaucuacaacgggcggcucguggacuccguggucagcugguccaaggagauccugcgcacccaggagagcgagugcgugugcaucaacggcacgugcaccguggucaugaccgacggguccgccagcggcaaggccgacaccaagauccuguucaucgaggagggcaagaucgugcacacgagcacccucuccgggagcgcgcagcacguggaggagugcuccugcuacccccgguacccgggcguccgcugcgugugccgggacaacuggaaggggagcaaccgccccaucguggacaucaacaucaaggaccacuccaucgucagcuccuacgugugcagcggccuggugggcgacaccccgcggaagaacgacuccagcuccagcucccacugccuggaccccaacaacgaggagggcgggcacggggucaagggcugggccuucgacgacgggaacgacguguggaugggccgcaccaucaacgagacgagccggcucggcuacgagaccuucaaggucaucgaggggugguccaaccccaagagcaagcugcagaucaaccgccaggugaucguggaccggggcgaccgcuccggguacagcggcaucuucuccgucgaggucaagagcugcaucaaccggugcuucuacguggagcugauccgcgggcggaaggaggagaccgaggugcucuggaccagcaacuccaucgugguguucugcggcacgagcggcaccuacgggaccggcuccuggcccgacggggccgacaucaaccugaugcccaucuga

SEQ ID NO: 87452 - RNA, 1410 nt, Artificial Sequence
  derived and/or modified CDS sequence (opt1) from neuraminidase__InfluenzaA__AGK62996
augaaccccaaccagaagaucaucaccaucggcagcgugucccugaucaucagcaccaucugcuucuucaugcagaucgccauccucaucacgaccgucacccugcacuucaagcaguacgaguucaacuccccgcccaacaaccaggugaugcugugcgagcccaccaucaucgagcgcaacaucacggagaucguguaccucaccaacaccaccaucgagaaggagaucugccccaagccggccgaguaccggaacuggagcaagccccagugcgacaucacgggguucgcgcccuucuccaaggacaacagcauccgccuguccgccggcggggacaucugggucacccgggagcccuacgugagcugcgacccggacaagugcuaccaguucgcccugggccaggggaccacccucaacaacgugcacuccaacaacacgguccgcgaccggacccccuaccgcacccugcugaugaacgagcucggcgugcccuuccaccugggcaccaagcaggucugcaucgccuggagcuccagcuccugccacgacgggaaggccuggcugcacgugugcaucacgggcgacgacaagaacgcgaccgccagcuucaucuacaacgggcggcucguggacuccguggucagcugguccaaggagauccugcgcacccaggagagcgagugcgugugcaucaacgggaccugcacgguggucaugaccgacggguccgccagcggcaaggccgacaccaagauccuguucaucgaggagggcaagaucgugcacaccagcacgcucuccgggagcgcgcagcacguggaggagugcuccugcuacccccgguacccgggcguccgcugcgugugccgggacaacuggaaggggagcaaccgccccaucguggacaucaacaucaaggaccacuccaucgucagcuccuacgugugcagcggccuggugggcgacaccccgcggaagaacgacuccagcuccagcucccacugccuggaccccaacaacgaggagggcggccacggggucaagggcugggccuucgacgacgggaacgacguguggaugggccgcaccaucaacgagaccagccggcucggcuacgagacguucaaggucaucgaggggugguccaaccccaagagcaagcugcagaucaaccgccaggugaucguggaccggggcgaccgcuccggguacagcggcaucuucuccgucgagagcaagagcugcaucaaccggugcuucuacguggagcugauccgcgggcggaaggaggagaccgaggugcucuggaccuccaacagcaucgucguguucugcggcaccuccggcacguacgggaccggcagcuggcccgacggggccgacaucaaccugaugcccaucuga

SEQ ID NO: 87453 - RNA, 1410 nt, Artificial Sequence
  derived and/or modified CDS sequence (opt1) from neuraminidase__InfluenzaA__AGK62998
augaaccccaaccagaagaucaucaccaucggcagcgugucccugaccaucgccacgaucugcuucuucaugcagaucgccauccucaucaccaccgucacccugcacuucaagcagugcgaguucaacagcccgcccaacaaccaggugaugcugugcgagcccacgaucaucgagcgcaacaucaccgagaucguguaccucaccaacaccacgaucgagaaggagaucugccccaagcuggcggaguaccggaacugguccaagccgcagugcgacaucaccggguucgcccccuucagcaaggacaacuccauccgccugagcgccggcggggacaucugggucacccgggagcccuacguguccugcgaccccgacaagugcuaccaguucgcccucggccaggggaccacgcugaacaacgugcacagcaacaacaccguccgcgaccggaccccguaccgcacccugcucaugaacgagcugggcgugcccuuccaccugggcacgaagcaggucugcauggccugguccagcuccagcugccacgacgggaaggcguggcuccacgugugcaucaccggcgacgacaagaacgccaccgccuccuucaucuacaacgggcggcugguggacagcguggucuccuggagcaaggagauccugcgcacccaggaguccgagugcgugugcaucaacggcacgugcaccguggucaugaccgacgggagcgccuccggcaaggcggacaccaagauccucuucaucgaggagggcaagaucgugcacacgagcacccugagcggguccgcccagcacguggaggagugcagcugcuacccccgguaccccggcguccgcugcgugugccgggacaacuggaagggguccaaccgcccgaucguggacaucaacaucaaggaccacagcaucgucuccagcuacgugugcuccggccugcucggcgacacgccccggaagaacgacagcuccagcuccagccacugccuggaccccaacaacgaggagggcgggcacggggugaagggcugggccuucgacgacgggaacgacgucuggaugggccgcaccaucuccgagaagucccggcugggcuacgagaccuucaaggugaucgagggguggagcaaccccaagagcaagcuccagaucaaccgccaggucaucguggaccggggcgaccgcuccggguacagcggcaucuucuccguggagagcaagagcugcaucaaccggugcuucuacgucgagcugauccgcgggcggaaggaggagaccgaggugcuguggaccuccaacagcaucguggucuucugcggcaccuccggcacguacgggaccggcagcuggccggacggggccgacaucaaccucaugcccaucuga

SEQ ID NO: 87454 - RNA, 1410 nt, Artificial Sequence
  derived and/or modified CDS sequence (opt1) from neuraminidase__InfluenzaA__AGK63000
augaaccccaaccagaagaucaucaccaucggcagcgugucccugaccaucgccacgaucugcuucuucaugcagaucgccauccucaucaccaccgucacccugcacuucaagcagugcgacuucaacagcccgcccaacaaccaggugaugcugugcgagcccacgaucaucgagcgcaacaucaccgagaucguguaccucaccaacaccacgaucgagaaggagaucugccccaagcuggcggaguaccggaacugguccaagccgcagugcgacaucaccggguucgcccccuucagcaaggacaacuccauccgccugagcgccggcggggacaucugggucacccgggagcccuacguguccugcgaccccgacaagugcuaccaguucgcccucggccaggggaccacgcugaacaacgugcacagcaacaacaccguccgcgaccggaccccguaccgcacccugcucaugaacgagcugggcgugcccuuccaccugggcacgaagcaggucugcauggccugguccagcuccagcugccacgacgggaaggcguggcuccacgugugcaucaccggcgacgacaagaacgccaccgccuccuucaucuacaacgggaagcugguggacagcguggucuccuggagcaaggagauccugcggacccaggaguccgagugcgugugcaucaacggcacgugcaccguggucaugaccgacgggagcgccuccggcaaggcggacaccaagauccucuucaucgaggagggcaagaucgugcacacgagcacccugagcggguccgcccagcacguggaggagugcagcugcuacccccgcuaccccggcguccggugcgugugccgcgacaacuggaagggguccaaccggccgaucguggacaucaacaucaaggaccacagcaucgucuccagcuacgugugcuccggccuggugggcgacacgccccgcaagaacgacagcuccagcuccagccacugccucgaccccaacaacgaggagggcgggcacggggucaagggcugggccuucgacgacgggaacgacguguggaugggccggaccaucaacgagaccucccgccugggcuacgagaccuucaaggucaucgagggguggagcaaccccaaguccaagcugcagaucaaccgccaggugaucguggaccggggcgaccggagcggguacuccggcaucuucagcgucgaggggaaguccugcaucaaccgcugcuucuacguggagcucauccggggccgcaaggaggagaccgaggugcuguggaccagcaacagcaucgucguguucugcggcacguccgggaccuacggcaccgggagcuggccggacggcgccgacaucaaccugaugcccaucuga

SEQ ID NO: 87455 - RNA, 1410 nt, Artificial Sequence
  derived and/or modified CDS sequence (opt1) from neuraminidase__InfluenzaA__AGK63002
augaaccccaaccagaagaucaucaccaucggcagcgugucccugaccaucagcacgaucugcuucuucaugcagaucgccauccucaugaccaccgucacccugcacuucaagcagugcgaguucaacuccccgcccaacaaccaggugaugcugugcgagcccacgaucaucgagcgcaacaucaccgagaucguguaccucaccaacaccacgaucgagaaggagaucugccccaagcuggccgaguaccggaacuggagcaagccgcagugcgacaucaccggguucgcgcccuucuccaaggacaacagcauccgccuguccgccggcggggacaucugggucacccgggagcccuacgugagcugcgaccccgacaagugcuaccaguucgcccucggccaggggaccacgcugaacaacgugcacuccaacaacaccguccgcgaccggaccccguaccgcacccugcucaugaacgagcugggcgugcccuuccaccugggcacgaagcaggucugcauggccuggagcuccagcuccugccacgacgggaaggccuggcuccacgugugcaucaccggcaacgacaagaacgcgaccgccagcuucaucuacaacgggcggcugguggacuccguggucagcugguccaaggagauccugcgcacccaggagagcgagugcgugugcaucaacggcacgugcaccguggucaugaccgacggguccgccagcggcaaggccgacaccaagauccucuucaucgaggagggcaagaucgugcacacgagcacccuguccgggagcgcgcagcacguggaggagugcuccugcuacccccgguaccccggcguccgcugcgugugccgggacaacuggaaggggagcaaccgcccgaucguggacaucaacaucaaggaccacuccaucgucagcuccuacgugugcagcggccuggugggcgacacgccccggaagaacgacuccagcuccagcucccacugccucgaccccaacaacgaggagggcgggcacggggucaagggcugggccuucgacgacgggaacgacguguggaugggccgcaccaucaccgagaccagccggcugggcuacgagaccuucaaggucaucgaggggugguccaaccccaagagcaagcugcagaucaaccgccaggugaucguggaccggggcgaccgcuccggguacagcggcaucuucuccgucgagggcaagagcugcaucaaccggugcuucuacguggagcucauccgcgggcggaaggaggagaccgaggugcuguggacgagcaacuccaucgucguguucugcggcaccagcgggaccuacggcaccggguccuggccggacggcgccgacaucaaccugaugcccaucuga

SEQ ID NO: 87456 - RNA, 1410 nt, Artificial Sequence
  derived and/or modified CDS sequence (opt1) from neuraminidase__InfluenzaA__AGK63004
augaaccccaaccagaagaucaucaccaucggcagcgugucccugaccaucagcacgaucugcuucuucaugcagaucgccauccucaucaccaccgucacccugcacuucaagcaguacgaguucaacuccccgcccaacaaccaggugaugcugugcgagcccacgaucaucgagcgcaacaucaccgagaucguguaccucaccaacaccacgaucgagaaggagaucugccccaagccggccgaguaccggaacuggagcaagccccagugcgacaucaccggguucgcgcccuucuccaaggacaacagcauccgccuguccgccggcggggacaucugggucacccgggagcccuacgugagcugcgacccggacaagugcuaccaguucgcccugggccaggggaccacgcucaacaacgugcacuccaacaacaccguccgcgaccggacccccuaccgcacccugcugaugaacgagcucggcgugcccuuccaccugggcacgaagcaggucugcaucgccuggagcuccagcuccugccacgacgggaaggccuggcugcacgugugcaucaccggcgacgacaagaacgcgaccgccagcuucaucuacaacgggcggcucguggacuccguggucagcugguccaaggagauccugcgcacccaggagagcgagugcgugugcaucaacggcacgugcaccguggucaugaccgacggguccgccagcggcaaggccgacaccaagauccuguucaucgaggagggcaagaucgugcacacgagcacccucuccgggagcucccagcacguggaggagugcagcugcuacccccgguacccgggcguccgcugcgugugccgggacaacuggaagggguccaaccgccccaucguggacaucaacaucaaggaccacagcaucgucuccagcuacgugugcuccggccuggugggcgacacgccccggaagaacgacagcuccagcuccagccacugccuggaccccaacaacgaggagggcgggcacggggucaagggcugggcguucgacgacgggaacgacguguggaugggccgcaccaucaacgagaccucccggcucggcuacgagaccuucaaggucaucgagggguggagcaacccgaaguccaagcugcagaucaaccgccaggugaucguggaccggggcgaccgcagcggguacuccggcaucuucagcgucgagggcaagagcugcaucaaccggugcuucuacguggagcugauccgcgggcggaaggaggagaccgaggugcucuggaccuccaacagcaucgucguguucugcggcacguccgggaccuacggcaccgggagcuggcccgacggcgccgacaucaaccugaugcccaucuga

SEQ ID NO: 87457 - RNA, 1410 nt, Artificial Sequence
  derived and/or modified CDS sequence (opt1) from neuraminidase__InfluenzaA__AGK63006
augaaccccaaccagaagaucaucaccaucggcagcgugucccugaccaucgccacgaucugcuucuucaugcagaucgccauccucaucaccaccgucacccugcacuucaagcaguacgaguucaacagcccgcccaacaaccaggugaugcugugcgagcccacgaucaucgagcgcaacaucaccgagaucguguaccucaccaacaccacgaucgagaaggagaucugccccaagccggcggaguaccggaacugguccaagccccagugcgacaucaccggguucgcccccuucagcaaggacaacuccauccgccugagcgccggcggggacaucugggucacccgggagcccuacguguccugcgacccggacaagugcuaccaguucgcccugggccaggggaccacgcucaacaacgugcacagcaacaacaccguccgcgaccggacccccuaccgcacccugcugaugaacgagcucggcgugcccuuccaccugggcacgaagcaggucugcaucgccugguccagcuccagcugccacgacgggaaggcguggcugcacgugugcaucaccggcgacgacaagaacgccaccgccuccuucaucuacaacgggcggcucguggacagcguggucuccuggagcaaggagauccugcgcacccaggaguccgagugcgugugcaucaacggcacgugcaccguggucaugaccgacgggagcgccuccgcgaaggccgacaccaagauccuguucaucgaggagggcaagaucgugcacacgagcacccucagcggcuccgcccagcacguggaggagugcagcugcuacccccgguacuccgggguccgcugcgugugccgggacaacuggaagggcagcaaccgcccgaucguggacaucaacaucaaggaccacuccaucgucagcuccuacgugugcagcgggcuggugggcgacacgccccggaagaacgacuccagcuccagcucccacugccuggaccccaacaacgaggagggcgggcacggcgucaaggggugggccuucgacgacggcaacgacguguggauggggcgcaccaucaacgagaccagccggcucggcuacgagaccuucaaggucaucgagggcugguccaaccccaagagccagcugcagaucaaccgccaggugaucguggaccgcggggaccgguccggcuacagcgggaucuucuccgucgagagcaagagcugcaucaaccggugcuucuacguggagcugauccgcggccggaaggaggagaccgaggugcucuggaccuccaacagcaucgucguguucugcgggacguccggcaccuacggcaccgggagcuggccggacggcgccgacaucaaccugaugcccaucuga

SEQ ID NO: 87458 - RNA, 1410 nt, Artificial Sequence
  derived and/or modified CDS sequence (opt1) from neuraminidase__InfluenzaA__AGK63008
augaaccccaaccagaagaucaucaccaucggcagcgugucccugaccaucgccacgaucugcuucuucaugcagaucgccauccucaucaccaccgucacccugcacuucaagcagugcgaguucaacagcccgcccaacaaccaggugaugcugugcgagcccacgaucaucgagcgcaacaucaccgagaucguguaccucaccaacaccacgaucgagaaggagaucugccccaagcuggcggaguaccggaacugguccaagccgcagugcgacaucaccggguucgcccccuucagcaaggacaacuccauccgccugagcgccggcggggacaucugggucacccgggagcccuacguguccugcgaccccgacaagugcuaccaguucgcccucggccaggggaccacgcugaacaacgugcacagcaacaacaccguccgcgaccggaccccguaccgcacccugcucaugaacgagcugggcgugcccuuccaccugggcacgaagcaggucugcauggccugguccagcuccagcugccacgacgggaaggcguggcuccacgugugcaucaccggcgacgacaagaacgccaccgccuccuucaucuacaacgggaagcugguggacagcguggucuccuggagcaaggagauccugcggacccaggaguccgagugcgugugcaucaacggcacgugcaccguggucaugaccgacgggagcgccuccggcaaggcggacaccaagauccucuucaucgaggagggcaagaucgugcacacgagcacccugagcggguccgcccagcacguggaggagugcagcugcuacccccgcuaccccggcguccggugcgugugccgcgacaacuggaagggguccaaccggccgaucguggacaucaacaucaaggaccacagcaucgucuccagcuacgugugcuccggccuggugggcgacacgccccgcaagaacgacagcuccagcuccagccacugccucgaccccaacaacgaggagggcgggcacggggucaagggcugggccuucgacgacgggaacgacguguggaugggccggaccaucaacgagaccucccgccugggcuacgagaccuucaaggucaucgagggguggagcaaccccaaguccaagcugcagaugaaccgccaggugaucguggaccggggcgaccggagcggguacuccggcaucuucagcgucgaggggaaguccugcaucaaccgcugcuucuacguggagcucauccggggccgcaaggaggagaccgaggugcuguggaccagcaacagcaucgucguguucugcggcacguccgggaccuacggcaccgggagcuggccggacggcgccgacaucaaccugaugcccaucuga

SEQ ID NO: 87459 - RNA, 1410 nt, Artificial Sequence
  derived and/or modified CDS sequence (opt1) from neuraminidase__InfluenzaA__AGK63010
augaaccccaaccagaagaucaucaccaucggcagcgugucccugaccaucgccacgaucugcuucuucaugcagaucgccauccucaucaccaccgucacccugcacuucaagcagugcgaguucaacagcccgcccaacaaccaggugaugcugugcgagcccacgaucaucgagcgcaacaucaccgagaucguguaccucaccaacaccacgaucgagaaggagaucugccccaagcuggcggaguaccggaacugguccaagccgcagugcgacaucaccggguucgcccccuucagcaaggacaacuccauccgccugagcgccggcggggacaucugggucacccgggagcccuacguguccugcgaccccgacaagugcuaccaguucgcccucggccaggggaccacgcugaacaacgugcacagcaacaacaccguccgcgaccggaccccguaccgcacccugcucaugaacgagcugggcgugcccuuccaccugggcacgaagcaggucugcauggccugguccagcuccagcugccacgacgggaaggcguggcuccacgugugcaucaccggcgacgacaagaacgccaccgccuccuucaucuacaacgggaagcugguggacagcguggucuccuggagcaaggagauccugcggacccaggaguccgagugcgugugcaucaacggcacgugcaccguggucaugaccgacgggagcgccuccggcaaggcggacaccaagauccucuucaucgaggagggcaagaucgugcacacgagcacccugagcggguccgcccagcacguggaggagugcagcugcuacccccgcuaccccggcguccggugcgugugccgcgacaacuggaagggguccaaccggccgaucguggacaucaacaucaaggaccacagcaucgucuccagcuacgugugcuccggccuggugggcgacacgccccgcaagaacgacagcuccagcuccagccacugccucgaccccaacaacgaggagggcgggcacggggucaagggcugggccuucgacgacgggaacgacguguggaugggccggaccaucaacgagaccucccgccugggcuacgagaccuucaaggucaucgagggguggagcgaccccaaguccaagcugcagaucaaccgccaggugaucguggaccggggcgaccggagcggguacuccggcaucuucagcgucgaggggaaguccugcaucaaccgcugcuucuacguggagcucauccggggccgcaaggaggagaccgaggugcuguggaccagcaacagcaucgucguguucugcggcacguccgggaccuacggcaccgggagcuggccggacggcgccgacaucaaccugaugcccaucuga

SEQ ID NO: 87460 - RNA, 1410 nt, Artificial Sequence
  derived and/or modified CDS sequence (opt1) from neuraminidase__InfluenzaA__AGK63012
augaaccccaaccagaagaucaucaccaucggcagcgugucccugaccaucagcacgaucugcuucuucaugcagaucgccauccucaucaccaccgucacccugcacuucaagcaguacgaguucaacuccccgcccaacaaccaggugaugcugugcgagcccacgaucaucgagcgcaacaucaccgagaucguguaccucaccaacaccacgaucgagaaggagaucugccccaagccggccgaguaccggaacuggagcaagccccagugcgacaucaccggguucgcgcccuucuccaaggacaacagcauccgccuguccgccggcggggacaucugggucacccgggagcccuacgugagcugcgacccggacaagugcuaccaguucgcccugggccaggggaccacgcucaacaacgugcacuccaacaacaccguccgcgaccggacccccuaccgcacccugcugaugaacgagcucggcgugcccuuccaccugggcacgaagcaggucugcaucgccuggagcuccagcuccugccacgacgggaaggccuggcugcacgugugcaucaccggcgacgacaagaacgcgaccgccagcuucaucuacaacgggcggcucguggacuccguggucagcugguccaaggagauccugcgcacccaggagagcgagugcgugugcaucaacggcacgugcaccguggucaugaccgacggguccgccagcggcaaggccgacaccaagauccuguucaucgaggagggcaagaucgugcacacgagcacccucuccgggagcgcgcagcacguggaggagugcuccugcuacccccgguacccgggcguccgcugcgugugccgggacaacuggaaggggagcaaccgccccaucguggacaucaacaucaaggaccacuccaucgucagcuccuacgugugcagcggccuggugggcgacaccccgcggaagaacgacuccagcuccagcucccacugccuggaccccaacaacgaggagggcgggcacggggucaagggcugggccuucgacgacgggaacgacguguggaugggccgcaccaucaacgagacgagccggcucggcuacgagaccuucaaggucaucgaggggugguccaaccccaagagcaagcugcagaucaaccgccaggugaucguggaccggggcuaccgcuccggguacagcggcaucuucuccgucgagggcaagagcugcaucaaccggugcuucuacguggaccugauccgcgggcggaaggaggagaccgaggugcucuggaccagcaacuccaucgucguguucugcggcacgagcgggaccuacggcaccggguccuggcccgacggcgccgacaucaaccugaugcccaucuga

SEQ ID NO: 87461 - RNA, 1410 nt, Artificial Sequence
  derived and/or modified CDS sequence (opt1) from neuraminidase__InfluenzaA__AGK63014
augaaccccaaccagaagaucaucaccaucggcagcgugucccugaccaucagcacgaucugcuucuucaugcagaucgccauccucaucaccaccgucacccugcacuucaagcaguacgaguucaacuccccgcccaacaaccaggugaugcugugcgagcccacgaucaucgagcgcaacaucaccgagaucguguaccucaccaacaccacgaucgagaaggagaucugccccaagccggccgaguaccggaacuggagcaagccccagugcgacaucaccggguucgcgcccuucuccaaggacaacagcauccgccuguccgccggcggggacaucugggucacccgggagcccuacgugagcugcgacccggacaagugcuaccaguucgcccugggccaggggaccacgcucaacaacgugcacuccaacaacaccguccgcgaccggacccccuaccgcacccugcugaugaacgagcucggcgugcccuucccccugggcacgaagcaggucugcaucgccuggagcuccagcuccugccacgacgggaaggccuggcugcacgugugcaucaccggcgacgacaagaacgcgaccgccagcuucaucuacaacgggcggcucguggacuccguggucagcugguccaaggagauccaccgcacccaggagagcgagugcgugugcaucaacggcacgugcaccguggucaugaccgacggguccgccagcggcaaggccgacaccaagauccuguucaucgaggagggcaagaucgugcacacgagcacccuguccgggagcgcgcagcacguggaggagugcuccugcuacccgcgguaccccggcguccgcugcgugugccgggacaacuggaaggggagcaaccgccccaucguggacaucaacaucaaggaccacuccaucgucagcuccuacgugugcagcggccucgugggcgacacgccccggaagaacgacuccagcuccagcucccacugccuggacccgaacaacgaggagggcgggcacggggucaagggcugggccuucgacgacgggaacgacguguggaugggccgcaccaucagcgagaagucccggcugggcuacgagaccuucaaggucaucgagggguggagcaaccccaaguccaagcuccagaucaaccgccaggugaucguggaccggggcaaccgcagcggguacuccggcaucuucagcgucgagggcaagagcugcaucaaccggugcuucuacguggagcugauccgcgggcggaaggaggagaccgaggugcuguggaccuccaacagcaucgucguguucugcggcaccuccgggacguacggcaccgggagcuggcccgacggcgccgacaucaaccucaugcccaucuga

SEQ ID NO: 87462 - RNA, 1410 nt, Artificial Sequence
  derived and/or modified CDS sequence (opt1) from neuraminidase__InfluenzaA__AGK63018
augaaccccaaccagaagaucaucaccaucggcagcgugucccugaccaucagcacgaucugcuucuucaugcagaucgccauccucaucaccaccgucacccugcacuucaagcagugcgaguucaacuccccgcccaacaaccaggugaugcugugcgagcccacgaucaucgagcgcaacaucaccgagaucguguaccucaccaacaccacgaucgagaaggagaucugccccaagcuggccgaguaccggaacuggagcaagccgcagugcgacaucaccggguucgcgcccuucuccaaggacaacagcauccgccuguccgccggcggggacaucugggucacccgggagcccuacgugagcugcgaccccgacaagugcuaccaguucgcccucggccaggggaccacgcugaacaacgugcacuccaacaacaccguccgcgaccggaccccguaccgcacccugcucaugaacgagcugggcgugcccuuccaccugggcacgaagcaggucugcauggccuggagcuccagcuccugccacgacgggaaggccuggcuccacgugugcaucaccggcgacgacaagaacgcgaccgccagcuucaucuacaacgggaagcugguggacuccguggucagcugguccaaggagauccugcggacccaggagagcgagugcgugugcaucaacggcacgugcaccguggucaugaccgacggguccgccagcggcaaggccgacaccaagauccucuucaucgaggagggcaagaucgugcacacgagcacccuguccgggagcgcgcagcacguggaggagugcuccugcuacccccgcuaccccggcguccggugcgugugccgcgacaacuggaaggggagcaaccggccgaucguggacaucaacaucaaggaccacuccaucgucagcuccuacgugugcagcggccuggugggcgacacgccccgcaagaacgacuccagcuccagcucccacugccucgaccccaacaacgaggagggcgggcacggggucaagggcugggccuucgacgacgggaacgacguguggaugggccggaccaucaacgagaccagccgccugggcuacgagaccuucaaggucaucgaggggugguccaaccccaagagcaagcugcagaucaaccgccaggugaucguggaccggggcgaccgguccggguacagcggcaucuucuccgucgagggcaagagcugcaucaaccgcugcuucuacguggagcucauccgggggcgcaaggaggagaccgaggugcuguggaccagcaacuccaucgucguguucugcggcacgagcgggaccuacggcaccggguccuggccggacggcgccgacaucaaccugaugcccaucuga

SEQ ID NO: 87463 - RNA, 1410 nt, Artificial Sequence
  derived and/or modified CDS sequence (opt1) from neuraminidase__InfluenzaA__AGK63020
augaaccccaaccagaagaucaucaccaucggcagcgugucccugaccaucagcacgaucugcuucuucaugcagaucgccauccucaucaccaccgucacccugcacuucaagcaguacgaguucaacuccccgcccaacaaccaggugaugcugugcgagcccacgaucaucgagcgcaacaucaccgagaucguguaccucaccaacaccacgaucgagaaggagaucugccccaagccggccgaguaccggaacuggagcaagccccagugcgacaucaccggguucgcgcccuucuccaaggacaacagcauccgccuguccgccggcggggacaucugggucacccgggagcccuacgugagcugcgacccggacaagugcuaccaguucgcccugggccaggggaccacgcucaacaacgugcacuccaacaacaccguccgcgaccggacccccuaccgcacccugcugaugaacgagcucggcgugcccuuccaccugggcacgaagcaggucugcaucgccuggagcuccagcuccugccacgacgggaaggccuggcugcacgugugcaucaccggcgacgacaagaacgcgaccgccagcuucaucuacaacgggcggcucguggacuccguggucagcugguccaaggagauccugcgcacccaggagagcgagugcgugugcaucaacggcacgugcaccguggucaugaccgacggguccgccagcggcaaggccgacaccaagauccuguucaucgaggagggcaagaucgugcacacgagcacccucuccgggagcgcgcagcacguggaggagugcuccugcuacccccgguacccgggcguccgcugcgugugccgggacaacuggaaggggagcaaccgccccaucguggacaucaacaucaaggaccacuccaucgucagcuccuacgugugcagcggccuggugggcgacaccccgcggaagaacgacuccagcuccagcucccacugccuggaccccaacaacgaggagggcgggcacggggucaagggcugggccuucgacgacgggaacgacguguggaugggccgcaccaucaacgagacgagccggcucggcuacgagaccuucaaggucaucgaggggugguccaaccccaagagcaagcugcagaucaaccgccaggugaucguggaccggggcgaccgcuccggguacagcggcaucuucuccgucgagggcaagagcugcaucaaccggugcuucuacguggagcugauccgcgggcggaaggaggagaccgaggugcucuggaccagcaacuccaucgucguguucugcggcacgagcgggaccuacggcaccggguccuggcccgacggcgccgacaucaaccugaugcccaucuga

SEQ ID NO: 87464 - RNA, 1410 nt, Artificial Sequence
  derived and/or modified CDS sequence (opt1) from neuraminidase__InfluenzaA__AGK63022
augaaccccaaccagaagaucaucaccaucggcagcgugucccugaccaucagcacgaucugcuucuucaugcagaucgccauccucaucaccaccgucacccugcacuucaagcagugcgaguucaacuccccgcccaacaaccaggugaugcugugcgagcccacgaucaucgagcgcaacaucaccgagaucguguaccucaccaacaccacgaucgagaaggagaucugccccaagcuggccgaguaccggaacuggagcaagccgcagugcgacaucaccggguucgcgcccuucuccaaggacaacagcauccgccuguccgccggcggggacaucugggucacccgggagcccuacgugagcugcgaccccgacaagugcuaccaguucgcccucggccaggggaccacgcugaacaacgugcacuccaacaacaccguccgcgaccggaccccguaccgcacccugcucaugaacgagcugggcgugcccuuccaccugggcacgaagcaggucugcauggccuggagcuccagcuccugccacgacgggaaggccuggcuccacgugugcaucaccggcgacgacaagaacgcgaccgccagcuucaucuacaacgggaagcugguggacuccguggucagcugguccaaggagauccugcggacccaggagagcgagugcgugugcaucaacggcacgugcaccguggucaugaccgacggguccgccagcggcaaggccgacaccaagauccucuucaucgaggagggcaagaucgugcacacgagcacccuguccgggagcgcgcagcacguggaggagugcuccugcuacccccgcuaccccggcguccggugcgugugccgcgacaacuggaaggggagcaaccggccgaucguggacaucaacaucaaggaccacuccaucgucagcuccuacgugugcagcggccuggugggcgacacgccccgcaagaacgacuccagcuccagcucccacugccucgaccccaacaacgaggagggcgggcacggggucaagggcugggccuucgacgacgggaacgacguguggaugggccggaccaucaacgagaccagccgccugggcuacgagaccuucaaggucaucgaggggugguccaaccccaagagcaagcugcagaucaaccgccaggugaucguggaccggggcgaccgguccggguacagcggcaucuucuccgucgagggcaagagcugcaucaaccgcugcuucuacguggaccucauccgggggcgcaaggaggagaccgaggugcuguggaccagcaacuccaucgucguguucugcggcacgagcgggaccuacggcaccggguccuggccggacggcgccgacaucaaccugaugcccaucuga

SEQ ID NO: 87465 - RNA, 1410 nt, Artificial Sequence; identical to SEQ ID NO: 87463
  derived and/or modified CDS sequence (opt1) from neuraminidase__InfluenzaA__AGK63024

SEQ ID NO: 87466 - RNA, 1410 nt, Artificial Sequence; identical to SEQ ID NO: 87463
  derived and/or modified CDS sequence (opt1) from neuraminidase__InfluenzaA__AGK63026

SEQ ID NO: 87467 - RNA, 1410 nt, Artificial Sequence
  derived and/or modified CDS sequence (opt1) from neuraminidase__InfluenzaA__AGK63028
augaaccccaaccagaagaucaucaccaucggcagcgugucccugaccaucagcacgaucugcuucuucaugcagaucgccauccucaucaccaccgucacccugcacuucaagcaguacgaguucaacuccccgcccaacaaccaggugaugcugugcgagcccacgaucaucgagcgcaacaagaccgagaucguguaccucaccaacaccacgaucgagaaggagaucugccccaagccggccgaguaccggaacuggagcaagccccagugcgacaucaccggguucgcgcccuucuccaaggacaacagcauccgccuguccgccggcggggacaucugggucacccgggagcccuacgugagcugcgacccggacaagugcuaccaguucgcccugggccaggggaccacgcucaacaacgugcacuccaacaacaccguccgcgaccggacccccuaccgcacccugcugaugaacgagcucggcgugcccuuccaccugggcacgaagcaggucugcaucgccuggagcuccagcuccugccacgacgggaaggccuggcugcacgugugcaucaccggcgacgacaagaacgcgaccgccagcuucaucuacaacgggcggcucguggacuccguggucagcugguccaaggagauccugcgcacccaggagagcgagugcgugugcaucaacggcacgugcaccguggucaugaccgacggguccgccagcggcaaggccgacaccaagauccuguucaucgaggagggcaagguggugcacacgagcacccucuccgggagcgcgcagcacgucgaggagugcuccugcuacccccgguacccgggcgugcgcugcgugugccgggacaacuggaaggggagcaaccgccccaucgucgacaucaacaucaaggaccacuccaucgugagcuccuacgugugcagcggccuggucggcgacaccccgcggaagaacgacuccagcuccagcucccacugccuggaccccaacaacgaggagggcgggcacggggugaagggcugggccuucgacgacgggaacgacgucuggaugggccgcaccaucaacgagacgagccggcucggcuacgagaccuucaaggugaucgaggggugguccaaccccaagagcaagcugcagaucaaccgccaggugaucgucgaccggggcgaccgcuccggguacagcggcaucuucuccguggaggccaagagcugcaucauccggugcuucuacguggagcugauccgcgggcggaaggaggagaccgagguccucuggaccagcaacuccaucgugguguucugcggcacgagcggcaccuacgggaccggcuccuggcccgacggggccgacaucaaccugaugcccaucuga

SEQ ID NO: 87468 - RNA, 1410 nt, Artificial Sequence; identical to SEQ ID NO: 87462
  derived and/or modified CDS sequence (opt1) from neuraminidase__InfluenzaA__AGK63030

SEQ ID NO: 87469 - RNA, 1410 nt, Artificial Sequence
  derived and/or modified CDS sequence (opt1) from neuraminidase__InfluenzaA__AGK63032
augaaccccaaccagaagaucaucaccaucggcagcgugucccugaccaucagcacgaucugcuucuucaugcagaucgccauccucaucaccaccgucacccugcacuucaagcaguacgaguucaacuccccgcccaacaaccaggugaugcugugcgagcccacgaucaucgagcgcaacaucaccgagaucguguaccucaccaacaccacgaucgagaaggagaucugccccaagcuggccgaguaccggaacuggagcaagccgcagugcgacaucaccggguucgcgcccuucuccaaggacaacagcauccgccuguccgccggcggggacaucugggucacccgggagcccuacgugagcugcgaccccgacaagugcuaccaguucgcccucggccaggggaccacgcugaacaacgugcacuccaacaacaccguccgcgaccggaccccguaccgcacccugcucaugaacgagcugggcgugcccuuccaccugggcacgaagcaggucugcauggccuggagcuccagcuccugccacgacgggaaggccuggcuccacgugugcaucaccggcgacgacaagaacgcgaccgccagcuucaucuacaacgggaagcugguggacuccguggucagcugguccaaggagauccugcggacccaggagagcgagugcgugugcaucaacggcacgugcaccguggucaugaccgacggguccgccagcggcaaggccgacaccaagauccucuucaucgaggagggcaagaucgugcacacgagcacccuguccgggagcgcgcagcacguggaggagugcuccugcuacccccgcuaccccggcguccggugcgugugccgcgacaacuggaaggggagcaaccggccgaucguggacaucaacaucaaggaccacuccaucgucagcuccuacgugugcagcggccuggugggcgacacgccccgcaagaacgacuccagcuccagcucccacugccucgaccccaacaacgaggagggcgggcacggggucaagggcugggccuucgacgacgggaacgacguguggaugggccggaccaucaccgagaccagccgccugggcuacgagaccuucaaggucaucgaggggugguccaaccccaagagcaagcugcagaucaaccgccaggugaucguggaccggggcaaccgguccggguacagcggcaucuucuccgucgagggcaagagcugcaucaaccgcugcuucuacguggagcucauccgggggcgcaaggaggagaccgaggugcuguggacgagcaacuccaucgucguguucugcggcaccagcgggaccuacggcaccggguccuggccggacggcgccgacaucaaccugaugcccaucuga

SEQ ID NO: 87470 - RNA, 1410 nt, Artificial Sequence
  derived and/or modified CDS sequence (opt1) from neuraminidase__InfluenzaA__AGK63034
augaaccccaaccagaagaucaucaccaucggcagcgugucccugaccaucagcacgaucugcuucuucaugcagaucgccauccucaucaccaccgucacccugcacuucaagcagugcgaguucaacuccccgcccaacaaccaggugaugcugugcgagcccacgaucaucgagcgcaacaucaccgagaucguguaccucaccaacaccacgaucgagaaggagaucugccccaagcuggccgaguaccggaacuggagcaagccgcagugcgacaucaccggguucgcgcccuucuccaaggacaacagcauccgccuguccgccggcggggacaucugggucacccgggagcccuacgugagcugcgaccccgacaagugcuaccaguucgcccucggccaggggaccacgcugaacaacgugcacuccaacaacaccguccgcgaccggaccccguaccgcacccugcucaugaacgagcugggcgugcccuuccaccugggcacgaagcaggucugcauggccuggagcuccagcuccugccacgacgggaaggccuggcuccacgugugcaucaccggcgacgacaagaacgcgaccgccagcuucaucuacaacgggaagcugguggacuccguggucagcugguccaaggagauccugcggacccaggagagcgagugcgugugcaucaacggcacgugcaccguggucaugaccgacggguccgccagcggcaaggccgacaccaagauccucuucaucgaggagggcaagaucgugcacacgagcacccuguccgggagcgcgcagcacguggaggagugcuccugcuacccccgcuaccccggcguccggugcgugugccgcgacaacuggaaggggagcaaccggccgaucguggacaucaacaucaagguccacuccaucgugagcuccuacgugugcagcggccuggucggcgacacgccccgcaagaacgacuccagcuccagcucccacugccucgaccccaacaacgaggagggcgggcacggggugaagggcugggccuucgacgacgggaacgacgucuggaugggccggaccaucaacgagaccagccgccugggcuacgagaccuucaaggugaucgaggggugguccaaccccaagagcaagcugcagaucaaccgccaggugaucgucgaccggggcgaccgguccggguacagcggcaucuucuccguggagggcaagagcugcaucaaccgcugcuucuacguggagcucauccgggggcgcaagaaggagaccgagguccuguggaccagcaacuccaucgugguguucugcggcacgagcgggaccuacggcaccggguccuggccggacggcgccgacaucaaccugaugcccaucuga

SEQ ID NO: 87471 - RNA, 1410 nt, Artificial Sequence
  derived and/or modified CDS sequence (opt1) from neuraminidase__InfluenzaA__AGK63036
augaaccccaaccagaagaucaucaccaucggcagcgugucccugaccaucagcacgaucugcuucuucaugcagaucgccauccucaucaccaccgucacccugcacuucaagcaguacgaguucaacuccccgcccaacaaccaggugaugcugugcgagcccacgaucaucgagcgcaacaucaccgagaucguguaccucaccaacaccacgaucgagaaggagaucugccccaagccggccgaguaccggaacuggagcaagccccagugcgacaucaccggguucgcgcccuucuccaaggacaacagcauccgccuguccgccggcggggacaucugggucacccgggagcccuacgugagcugcgacccggacaagugcuaccaguucgcccugggccaggggaccacgcucaacaacgugcacuccaacaacaccguccgcgaccggacccccuaccgcacccugcugaugaacgagcucggcgugcccuuccaccugggcacgaagcaggucugcaucgccuggagcuccagcuccugccacgacgggaaggccuggcugcacgugugcaucaccggcgacgacaagaacgcgaccgccagcuucaucuacaacgggcggcucguggacuccguggucagcugguccaaggagauccugcgcacccaggagagcgagugcgugugcaucaacggcacgugcaccguggucaugaccgacggguccgccagcggcaaggccgacaccaagauccuguucaucgaggagggcaagaucgugcacacgagcacccucuccgggagcgcgcagcacguggaggagugcuccugcuacccccgguacccgggcguccgcugcgugugccgggacaacuggaaggggagcaaccgccccaucguggacaucaacaucaaggaccacuccaucgucagcuccuacgugugcagcggccuggugggcgacaccccgcggaagaacgacuccagcuccagcucccacugccuggaccccaacaacgaggagggcgggcacggggucaagggcugggccuucgacgacgggaacgacguguggaugggccgcaccaucaacgagacgagccgguucggcuacgagaccaucaaggucaucgaggggugguccaaccccaagagcaaccuccagaucaaccgccaggugaucguggaccggggcaaccgcuccggguacagcggcaucuucuccgucgagggcaagagcugcaucaaccggugcuucuacguggagcugauccgcgggcggaaggaggagaccgaggugcuguggaccagcaacuccaucgucguguucugcggcacgagcgggaccuacggcaccggguccuggcccgacggcgccgacaucaaccucaugcccaucuga

SEQ ID NO: 87472 - RNA, 1410 nt, Artificial Sequence
  derived and/or modified CDS sequence (opt1) from neuraminidase__InfluenzaA__AGK63038
augaaccccaaccagaagaucaucaccaucggcagcgugucccugaccaucagcacgaucugcuucuucaugcagaucgccauccucaucaccaccgucacccugcacuucaagcaguacgaguucaacuccccgcccaacaaccaggugaugcugugcgagcccacgaucaucgagcgcaacaucaccgagaucguguaccucaccaacaccacgaucgagaaggagaucugccccaagcuggccgaguaccggaacuggagcaagccgcagugcgacaucaccggguucgcgcccuucuccaaggacaacagcauccgccuguccgccggcggggacaucugggucacccgggagcccuacgugagcugcgaccccgacaagugcuaccaguucgcccucggccaggggaccacgcugaacaacgugcacuccaacaacaccguccgcgaccggaccccguaccgcacccugcucaugaacgagcugggcgugcccuuccaccugggcacgaagcaggucugcauggccuggagcuccagcuccugccacgacgggaaggccuggcuccacgugugcaucaccggcgacgacaagaacgcgaccgccagcuucaucuacaacgggaagcugguggacuccguggucagcugguccaaggagauccugcggacccaggagagcgagugcgugugcaucaacggcacgugcaccguggucaugaccgacggguccgccagcggcaaggccgacaccaagauccucuucaucgaggagggcaagaucgugcacacgagcacccuguccgggagcgcgcagcacguggaggagugcuccugcuacccccgcuaccccggcguccggugcgugugccgcgacaacuggaaggggagcaaccggccgaucguggacaucaacaucaaggaccacuccaucgucagcuccuacgugugcagcggccuggugggcgacacgccccgcaagaacgacuccagcuccagcucccacugccucgaccccaacaacgaggagggggaccacggcgucaaggggugggccuucgacgacggcaacgacguguggauggggcggaccaucaacgagaccagccgccugggcuacgagaccuucaaggucaucgagggcugguccaaccccaagagcaagcugcagaucaaccgccaggugaucguggaccgggggaaccgguccggcuacagcgggaucuucuccgucgagagcaagagcugcaucaaccgcugcuucuacguggagcucauccggggccgcaaggaggagaccgaggugcuguggaccuccaacagcaucgucguguucugcgggacguccggcaccuacggcaccgggagcuggccggacggcgccgacaucaaccugaugcccaucuga

SEQ ID NO: 87473 - RNA, 1410 nt, Artificial Sequence
  derived and/or modified CDS sequence (opt1) from neuraminidase__InfluenzaA__AGK63040
augaaccccaaccagaagaucaucaccaucggcagcgugucccugaccaucagcacgaucugcuucuucaugcagaucgccauccucaucaccaccgucacccugcacuucaagcagugcgaguucaacuccccgcccaacaaccaggugaugcugugcgagcccacgaucaucgagcgcaacaucaccgagaucguguaccucaccaacaccacgaucgagaaggagaucugccccaagcuggccgaguaccggaacuggagcaagccgcagugcaacaucaccggguucgcgcccuucuccaaggacaacagcauccgccuguccgccggcggggacaucugggucacccgggagcccuacgugagcugcgaccccgacaagugcuaccaguucgcccucggccaggggaccacgcugaacaacgugcacuccaacaacaccguccgcgaccggaccccguaccgcacccugcucaugaacgagcugggcgugcccuuccaccugggcacgaagcaggucugcauggccuggagcuccagcuccugccacgacgggaaggccuggcuccacgugugcaucaccggcgacgacaagaacgcgaccgccagcuucaucuacaacgggaagcugguggacuccguggucagcugguccaaggagauccugcggacccaggagagcgagugcgugugcaucaacggcacgugcaccguggucaugaccgacggguccgccagcggcaaggccgacaccaagauccucuucaucgaggagggcaagaucgugcacacgagcacccuguccgggagcgcgcagcacguggaggagugcuccugcuacccccgcuaccccggcguccggugcgugugccgcgacaacuggaaggggagcaaccggccgaucguggacaucaacaucaaggaccacuccaucgucagcuccuacgugugcagcggccuggugggcgacacgccccgcaagaacgacuccagcuccagcucccacugccucgaccccaacaacgaggagggcgggcacggggucaagggcugggccuucgacgacgggaacgacguguggaugggccggaccaucaacgagaccagccgccugggcuacgagaccuucaaggucaucgaggggugguccaaccccaagagcaagcugcagaucaaccgccaggugaucguggaccggggcgaccgguccggguacagcggcaucuucuccgucgagggcaagagcugcaucaaccgcugcuucuacguggagcucauccgggggcgcaaggaggagaccgaggugcuguggaccagcaacuccaucgucguguucugcggcacgagcgggaccuacggcaccggguccuggccggacggcgccgacaucaaccugaugcccaucuga

SEQ ID NO: 87474 - RNA, 1410 nt, Artificial Sequence
  derived and/or modified CDS sequence (opt1) from neuraminidase__InfluenzaA__AGK63042
augaaccccaaccagaagaucaucaccaucggcagcgugucccugaccaucagcacgaucugcuucuucaugcagaucgccauccucaucaccaccgucacccugcacuucaagcagugcgaguucaacccgccgcccaacaaccaggugaugcugugcgagcccacgaucaucgagcgcaacaucaccgagaucguguaccucaccaacaccacgaucgagaaggagaucugccccaagcuggccgaguaccggaacugguccaagccccagugcgacaucaccggguucgcgcccuucagcaaggacaacuccauccgccugagcgccggcggggacaucugggucacccgggagcccuacguguccugcgacccggacaagugcuaccaguucgcccucggccaggggaccacgcugaacaacgugcacagcaacaacaccguccgcgaccggacccccuaccgcacccugcucaugaacgagcugggcgugcccuuccaccugggcacgaagcaggucugcauggccugguccagcuccagcugccacgacgggaaggccuggcuccacgugugcaucaccggcgacgacaagaacgcgaccgccuccuucaucuacaacgggaagcugguggacagcguggucuccuggagcaaggagauccugcggacccaggaguccgagugcgugugcaucaacggcacgugcaccguggucaugaccgacgggagcgccuccggcaaggccgacaccaagauccucuucaucgaggagggcaagaucgugcacacgagcacccugagcggguccgcgcagcacguggaggagugcagcugcuacccccgcuacccgggcguccggugcgugugccgcgacaacuggaagggguccaaccggcccaucguggacaucaacaucaaggaccacagcaucgucuccagcuacgugugcuccggccuggugggcgacacgccccgcaagaacgacagcuccagcuccagccacugccucgaccccaacaacgaggagggcgggcacggggucaagggcugggccuucgacgacgggaacgacguguggaugggccggaccaucaacgagaccucccgccugggcuacgagaccuucaaggucaucgagggguggagcaacccgaaguccaagcugcagaucaaccgccaggugaucguggaccggggcgaccggagcggguacuccggcaucuucagcgucgaggggaaguccugcaucaaccgcugcuucuacguggagcucauccggggccgcaaggaggagaccgaggugcuguggaccagcaacagcaucgucguguucugcggcacguccgggaccuacggcaccgggagcuggcccgacggcgccgacaucaaccugaugcccaucuga

SEQ ID NO: 87475 - RNA, 1410 nt, Artificial Sequence
  derived and/or modified CDS sequence (opt1) from neuraminidase__InfluenzaA__AGK63044
augaaccccaaccagaagaucaucaccaucggcagcgugucccugaccaucagcacgaucugcuucuucaugcagaucgccauccucaucaccaccgucacccugcacuucaagcagugcgaguucaacuccccgcccaacaaccaggugaugcugugcgagcccacgaucaucgagcgcaacaucaccgagaucguguaccucaccaacaccacgaucgagaaggagaucugccccaagcuggccgaguaccggaacuggagcaagccgcagugcgacaucaccggguucgcgcccuucuccaaggacaacagcauccgccuguccgccggcggggacaucugggucacccgggagcccuacgugagcugcgaccccgacaagugcuaccaguucgcccucggccaggggaccacgcugaacaacgugcacuccaacaacaccguccgcgaccggaccccguaccgcacccugcucaugaacgagcugggcgugcccuuccaccugggcacgaagcaggucugcauggccuggagcuccagcuccugccacgacgggaaggccuggcuccacgugugcaucaccggcgacgacaagaacgcgaccgccagcuucaucuacaacgggaagcugguggacuccguggucagcugguccaaggagauccugcggacccaggagagcgagugcgugugcaucaacggcacgugcaccguggucaugaccgacggguccgccagcggcaaggccgacaccaagauccucuucaucgaggagggcaagaucgugcacacgagcacccuguccgggagcgcgcagcacguggaggagugcuccugcuacccccgcuaccccggcguccggugcgugugccgcgacaacuggaaggggagcaaccggccgaucguggacaucaacaucaaggaccacuccaucgucagcuccuacgugugcagcggccuggugggcgacacgccccgcaagaacgacuccagcuccagcucccacugccucgaccccaacaacgaggagggcgggcacggggucaagggcugggccuucgacgacgggaacgacguguggaugggccggaccaucaacgagaccagccgccugggcuacgagaccuucaaggucaucgaggggugguccaaccccaagagcaagcugcagaucaaccgccaggugaucguggaccggggcuaccgguccggguacagcggcaucuucuccgucgagagcaagagcugcaucaaccgcugcuucuacguggagcuccugcgggggcgcaaggaggagaccgaggugcuguggaccuccaacagcaucgucguguucugcggcacguccggcaccuacgggaccggcagcuggccggacggggccgacaucaaccucaugcccaucuga

SEQ ID NO: 87476 - RNA, 1410 nt, Artificial Sequence
  derived and/or modified CDS sequence (opt1) from neuraminidase__InfluenzaA__AGK63046
augaaccccaaccagaagaucaucaccaucggcagcgugucccugaccaucagcacgaucugcuucuucaugcagaucgccauccucaucaccaccgucacccugcacuucaagcacuacgaguucaacuccccgcccaacaaccaggugaugcugugcgagcccacgaucaucgagcgcaacaucaccgagaucguguaccucaccaacaccacgaucgagaaggagaucugccccaagccggccgaguaccggaacuggagcaagccccagugcgacaucaccggguucgcgcccuucuccaaggacaacagcauccgccuguccgccggcggggacaucugggucacccgggagcccuacgugagcugcgacccggacaagugcuaccaguucgcccugggccaggggaccacgcucaacaacgugcacuccaacaacaccguccgcgaccggacccccuaccgcacccugcugaugaacgagcucggcgugcccuuccaccugggcacgaagcaggucugcaucgccuggagcuccagcuccugccacgacgggaaggccuggcugcacgugugcaucaccggcgacgacaagaacgcgaccgccagcuucaucuacaacgggcggcucguggacuccguggucagcugguccaaggagauccugcgcacccaggagagcgagugcgugugcaucaacggcacgugcaccguggucaugaccgacggguccgccagcggcaaggccgacaccaagauccuguucaucgaggagggcaagaucgugcacacgagcacccucuccgggagcgcgcagcacguggaggagugcuccugcuacccccgguacccgggcguccgcugcgugugccgggacaacuggaaggggagcaaccgccccaucguggacaucaacaucaaggaccacuccaucgucagcuccuacgugugcagcggccuggugggcgacaccccgcggaagaacgacuccagcuccagcucccacugccuggaccccaacaacgaggagggcgggcacggggucaagggcugggccuucgacgacgggaacgacguguggaugggccgcaccaucaacgagacgagccggcucggcuacgagaccuucaaggucaucgaggggugguccaaccccaagagcaagcugcagaucaaccgccaggugaucguggaccggggcgaccgcuccggguacagcggcaucuucuccgucgagggcaagagcugcaucaaccggugcuucuacguggaccugauccgcgggcggaaggaggagaccgaggugcucuggaccagcaacuccaucgucguguucugcggcacgagcgggaccuacggcaccggguccuggcccgacggcgccgacaucaaccugaugcccaucuga

SEQ ID NO: 87477 - RNA, 1398 nt, Artificial Sequence
  derived and/or modified CDS sequence (opt1) from neuraminidase__InfluenzaA__AGK82159
augaaccccaaccagaagauccugugcaccagcgccaccgccaucaucaucggcgcgaucgccgugcucaucgggaucgccaaccugggccugaacaucgggcuccaccugaagccgggcugcaacugcucccacagccagcccgagacgaccaacaccucccagaccaucaucaacaacuacuacaacgagacgaacaucaccaacauccagauggaggagcgcaccagccggaacuucaacaaccugaccaaggggcucugcacgaucaacuccuggcacaucuacggcaaggacaacgccguccgcaucggcgagagcuccgacgugcuggugacccgggagcccuacgucagcugcgaccccgacgagugccgcuucuacgcccugucccaggggaccaccauccggggcaagcacagcaacgagacgauccacgaccgcucccaguaccgggcgcucaucagcuggccgcuguccagcccgcccaccguguacaacucccgcguggagugcaucggguggagcuccaccagcugccacgacggcaagucccggaugagcaucugcaucagcgggcccaacaacaacgccuccgccgucgugugguacaaccgccggcccguggccgagaucaacaccugggcgcgcaacauccugcggacgcaggagagcgagugcgucugccacaacggcgugugccccguggucuucaccgacggcuccgccaccgggcccgccgacacccgcaucuacuacuucaaggagggcaagauccucaagugggagagccugacggggaccgccaagcacaucgaggagugcuccugcuacggcgagcggaccggcaucacgugcacgugccgcgacaacuggcaggggagcaaccggcccgugauccagaucgacccgguggccaugacccacaccucccaguacaucugcagccccguccugaccgacaacccccgccccaacgacccgaacaucggcaagugcaacgaccccuaccccgggaacaacaacaacggcgugaagggguucuccuaccucgacggcgcgaacaccuggcugggccggaccaucagcaccgccucccgcagcggguacgagaugcugaaggugcccaacgcccucaccgacgaccgguccaagccgauccagggccagacgaucguccugaacgccgacuggagcggguacuccggcagcuucauggacuacugggccgagggggacugcuaccgcgcgugcuucuacguggagcugauccgcggccggcccaaggaggacaaggugugguggaccuccaacagcaucgucuccaugugcagcagcaccgaguuccucggccaguggaacuggcccgacggggccaagaucgaguacuuccuguga

SEQ ID NO: 87478 - RNA, 1398 nt, Artificial Sequence
  derived and/or modified CDS sequence (opt1) from neuraminidase__InfluenzaA__AGK84858
augaaccccaaccagaagauccugugcaccagcgccaccgccaucaucaucggcgcgaucgccgugcucaucgggaucgccaaccugggccugaacaucgggcuccaccugaagccgggcugcaacugcucccacagccagcccgagacgaccaacaccucccagaccaucaucaacaacuacuacaacgagacgaacaucaccaacauccagauggaggagcgcaccagccggaacuucaacaaccugaccaaggggcucugcacgaucaacuccuggcacaucuacggcaaggacaacgccguccgcaucggcgagagcuccgacgugcuggugacccgggagcccuacgucagcugcgaccccgacgagugccgcuucuacgcccugucccaggggaccaccauccggggcaagcacagcaacgggacgauccacgaccgcucccaguaccgggcgcucaucagcuggccgcuguccagcccgcccaccguguacaacucccgcguggagugcaucggcuggagcuccaccagcugccacgacgggaagucccggaugagcaucugcaucagcggccccaacaacaacgccuccgccgucgugugguacaaccgccggcccguggccgagaucaacaccugggcgcgcaacauccugcggacgcaggagagcgagugcgucugccacaacggcgugugccccguggucuucaccgacggguccgccaccggccccgccgacacccgcaucuacuacuucaaggaggggaagauccucaagugggagagccugacgggcaccgccaagcacaucgaggagugcuccugcuacggcgagcggaccgggaucacgugcacgugccgcgacaacuggcagggcagcaaccggcccgugauccagaucgacccgguggccaugacccacaccucccaguacaucugcagccccguccugaccgacaacccccgccccaacgacccgaacaucgggaagugcaacgaccccuaccccggcaacaacaacaacggggugaagggcuucuccuaccucgacggcgcgaacaccuggcuggggcggaccaucagcaccgccucccgcagcggcuacgagaugcugaaggugcccaacgcccucaccgacgaccgguccaagccgauccaggggcagacgaucguccugaacgccgacuggagcggcuacuccgggagcuucauggacuacugggccgagggcgacugcuaccgcgcgugcuucuacguggagcugauccgcggccggcccaaggaggacaaggugugguggaccuccaacagcaucgucuccaugugcagcagcaccgaguuccucgggcaguggaacuggcccgacggcgccaagaucgaguacuuccuguga

SEQ ID NO: 87479 - RNA, 1398 nt, Artificial Sequence
  derived and/or modified CDS sequence (opt1) from neuraminidase__InfluenzaA__AGK84861
augaaccccaaccagaagauccugugcaccagcgccaccgccaucaucaucggcgcgaucgccgugcucaucgggaucgccaaccugggccugaacaucgggcuccaccugaagccguccugcaacugcagccacucccagcccgagacgaccaacaccagccagaccaucaucaacaacuacuacaacgagacgaacaucaccaacauccagauggaggagcgcaccucccggaacuucaacaaccugaccaagggccucugcacgaucaacagcuggcacaucuacgggaaggacaacgccguccgcaucggcgaguccagcgacgugcuggugacccgggagcccuacgucuccugcgaccccgacgagugccgcuucuacgcccugagccagggcaccaccauccgggggaagcacuccaacggcacgauccacgaccgcagccaguaccgggcgcucaucuccuggccgcugagcuccccgcccaccguguacaacagccgcguggagugcaucgggugguccagcaccuccugccacgacggcaagagccggaugagcaucugcaucuccgggcccaacaacaacgccagcgccgucgugugguacaaccgccggcccguggccgagaucaacaccugggcgcgcaacauccugcggacgcaggaguccgagugcgucugccacaacggcgugugccccguggucuucaccgacggcagcgccaccgggcccgccgacacccgcaucuacuacuucaaggagggcaagauccucaagugggagucccugacggggaccgccaagcacaucgaggagugcagcugcuacggcgagcggaccggcaucacgugcacgugccgcgacaacuggcagggguccaaccggcccguggugcagaucgacccggucgccaugacccacaccagccaguacaucugcucccccgugcugaccgacaacccccgccccaacgacccgaacaucggcaagugcaacgaccccuaccccgggaucaacaacaacggcgugaagggguucagcuaccucgacggcgcgaacaccuggcugggccggaccaucuccaccgccagccgcuccggguacgagaugcugaagguccccaacgcccucaccgacgaccggagcaagccgauccagggccagacgaucgugcugaacgccgacugguccggguacagcggcuccuucauggacuacugggccgagggggacugcuaccgcgcgugcuucuacguggagcugauccgcggccggcccaaggaggacaaggucugguggaccagcaacuccaucgugagcaugugcagcuccaccgaguuccucggccaguggaacuggcccgacggggccaagaucgaguacuuccuguga

SEQ ID NO: 87480 - RNA, 1398 nt, Artificial Sequence; identical to SEQ ID NO: 87478
  derived and/or modified CDS sequence (opt1) from neuraminidase__InfluenzaA__AGK84864

SEQ ID NO: 87481 - RNA, 1398 nt, Artificial Sequence
  derived and/or modified CDS sequence (opt1) from neuraminidase__InfluenzaA__AGL95090
augaaccccaaccagaagauccugugcaccagcgccaccgccaucaucaucggcgcgaucgccgugcucaucgggaucgccaaccugggccugaacaucgggcuccaccugaagccgggcugcaacugcucccacagccagcccgagacgaccaacaccucccagaccaucaucaacaacuacuacaacgagacgaacaucaacaacauccagauggaggagcgcaccagccggaacuucaacaaccugaccaaggggcucugcaccaucaacuccuggcacaucuacggcaaggacaacgccguccgcaucggcgagagcuccgacgugcuggugacgcgggagcccuacgucagcugcgaccccgacgagugccgcuucuacgcccugucccaggggaccaccauccggggcaagcacagcaacgggaccauccacgaccgcucccaguaccgggcgcucaucagcuggccgcuguccagcccgcccacgguguacaacucccgcguggagugcaucggcuggagcuccaccagcugccacgacgggaagucccggaugagcaucugcaucagcggccccaacaacaacgccuccgccgucgugugguacaaccgccggcccguggccgagaucaacaccugggcgcgcaacauccugcggacccaggagagcgagugcgucugccacaacggcgugugccccguggucuucacggacggguccgccaccggccccgccgacacccgcaucuacuacuucaaggaggggaagauccucaagugggagagccugaccggcacggccaagcacaucgaggagugcuccugcuacggcgagcggaccgggaucacgugcacgugcaaggacaacuggcagggcagcaaccgccccgugauccagaucgacccgguggccaugacccacaccucccaguacaucugcagccccguccugaccgacaacccccggcccaacgacccgaacaucgggaagugcaacgaccccuaccccggcaacaacaacaacggggugaagggcuucuccuaccucgacggcgcgaacaccuggcuggggcgcaccaucagcaccgccucccggagcggcuacgagaugcugaaggugcccaacgcccucaccgacgaccgcuccaagccgauccaggggcagaccaucguccugaacgccgacuggagcggcuacuccgggagcuucauggacuacugggccgagggcgacugcuaccgggcgugcuucuacguggagcugauccgcggccgccccaaggaggacaaggugugguggacguccaacagcaucgucuccaugugcagcagcaccgaguuccucgggcaguggaacuggcccgacggcgccaagaucgaguacuuccuguga

SEQ ID NO: 87482 - RNA, 1413 nt, Artificial Sequence; identical to SEQ ID NO: 80656
  derived and/or modified CDS sequence (opt1) from neuraminidase__InfluenzaA__AGL96802

SEQ ID NO: 87483 - RNA, 1413 nt, Artificial Sequence; identical to SEQ ID NO: 80656
  derived and/or modified CDS sequence (opt1) from neuraminidase__InfluenzaA__AGL96807

SEQ ID NO: 87484 - RNA, 1413 nt, Artificial Sequence
  derived and/or modified CDS sequence (opt1) from neuraminidase__InfluenzaA__AGL96808
augaaccccaaccagaagaucaucaccaucggcagcaucuccaucgccaucgggaucaucagccugaugcuccagaucggcaacaucaucuccaucugggccagccacuccauccagaccgggagccagaacaacacgggcaucugcaaccagcgcaucaucaccuacgagaacuccaccugggugaaccacaccuacgucaacaucaacaacacgaacgugguggcgggggaggacaagaccagcgucacccuggccggcaacuccagccugugcuccaucagcggcugggccaucuacaccaaggacaacuccauccggaucgggagcaagggcgacguguucgugauccgcgagccguucaucuccugcagccaccucgagugccggacguucuuccugacccagggggcccugcucaacgacaagcacuccaacggcaccgucaaggaccgcagccccuaccgggcccugauguccugcccccugggggaggcgcccagcccguacaacagcaaguucgaguccguggccuggagcgccuccgccugccacgacggcaugggcuggcucaccaucgggaucagcggccccgacaacggggcgguggccguccugaaguacaacggcaucaucacgggcaccaucaaguccuggaagaagcagauccugcgcacccaggagagcgagugcgugugcaugaacggguccugcuucaccaucaugacggacggccccagcaacaaggccgccuccuacaagaucuucaagaucgagaaggggaaggugaccaagagcaucgagcucaacgcccccaacuuccacuacgaggagugcuccugcuacccggacaccggcaucgucaugugcgugugccgggacaacuggcacgggagcaaccgccccuggguguccuucaaccagaaccuggacuaccagaucggcuacaucugcagcggcgucuucggggacaacccccggcccgaggacggcgagggguccugcaacccggugaccguggacggcgcgaacggggucaagggcuucagcuacaaguacgacaacggcguguggaucgggcgcacgaaguccaaccggcugcgcaagggcuucgagaugaucugggaccccaacggguggaccaacaccgacagcuucuucuccgugaagcaggacgucguggccaucaccgacuggagcggcuacagcggguccuucgugcagcaccccgagcucacgggccuggacugcauccggcccugcuucugggucgagcuggugcgcggccucccgcgggagaacaccaccaucuggaccagcggguccagcaucuccuucugcggcgucaacagcgacacggccaacugguccuggcccgacggggccgagcugcccuucaccaucgacaaguga

SEQ ID NO: 87485 - RNA, 1413 nt, Artificial Sequence
  derived and/or modified CDS sequence (opt1) from neuraminidase__InfluenzaA__AGL96809
augaaccccaaccagaagaucaucaccaucggcagcaucuccaucgccaucgggaucaucagccugaugcuccagaucggcaacaucaucuccaucugggccagccacuccauccagaccgggagccagaacaacacgggcaucugcaaccagcgcaucaucaccuacgagaacuccaccugggugaaccacaccuacgucaacaucaacaacacgaacgugguggcgggggaggacaagaccagcgucacccuggccggcaacuccagccugugcuccaucagcggcugggccaucuacaccaaggacaacuccauccggaucgggagcaagggcgacguguucgugauccgcgagccguucaucuccugcagccaccucgagugccggacguucuuccugacccagggggcccugcucaacgacaagcacuccaacggcaccgucaaggaccgcagccccuaccgggcccugauguccugcccccugggggaggcgcccagcccguacaacagcaaguucgaguccguggccuggagcgccuccgccugccacgacggcaugggcuggcucaccaucgggaucagcggccccgacaacggggcgguggccguccugaaguacaacggcaucaucacgggcaccaucaaguccuggaagaagcagauccugcgcacccaggagagcgagugcgugugcaugaacggguccugcuucaccaucaugacggacggccccagcaacaagaccgccuccuacaagaucuucaagaucgagaaggggaaggugaccaagagcaucgagcucaacgcccccaacuuccacuacgaggagugcuccugcuacccggacaccggcaucgucaugugcgugugccgggacaacuggcacgggagcaaccgccccuggguguccuucaaccagaaccuggacuaccagaucggcuacaucugcagcggcgucuucggggacaacccccggcccgaggacggcgagggguccugcaacccggugacgguggacggcgccaacggggucaagggcuucagcuacaaguacgacaacggcguguggaucgggcgcaccaaguccaaccggcugcgcaagggcuucgagaugaucugggaccccaacggguggaccaacaccgacagcgacuucuccgugaagcaggacgucguggcgaucacggacuggagcggcuacagcggguccuucgugcagcaccccgagcucaccggccuggacugcauccggcccugcuucugggucgagcuggugcgcggccucccgcgggagaacaccaccaucuggacgagcggguccagcaucuccuucugcggcgucaacagcgacaccgccaacugguccuggcccgacggggccgagcugcccuucaccaucgacaaguga

SEQ ID NO: 87486 - RNA, 1413 nt, Artificial Sequence; identical to SEQ ID NO: 80656
  derived and/or modified CDS sequence (opt1) from neuraminidase__InfluenzaA__AGL96818

SEQ ID NO: 87487 - RNA, 1413 nt, Artificial Sequence
  derived and/or modified CDS sequence (opt1) from neuraminidase__InfluenzaA__AGL96820
augaaccccaaccagaagaucaucaccaccggcagcaucuccaucgccaucgggaucaucagccugaugcuccagaucggcaacaucaucuccaucugggccagccacuccauccagacggggagccagaacaacaccggcaucugcaaccagcgcaucaucaccuacgagaacuccaccugggugaaccacacguacgucaacaucaacaacaccaacgugguggcgggggaggacaagaccagcgucacccuggccggcaacuccagccugugcuccaucagcggcugggccaucuacacgaaggacaacuccauccggaucgggagcaagggcgacguguucgugauccgcgagccguucaucuccugcagccaccucgagugccggaccuucuuccugacccagggggcccugcucaacgacaagcacuccaacggcaccgucaaggaccgcagccccuaccgggcccugauguccugcccccugggggaggcgcccagcccguacaacagcaaguucgaguccguggccuggagcgccuccgccugccacgacggcaugggcuggcucacgaucgggaucagcggccccgacaacggggcgguggccguccugaaguacaacggcaucaucaccggcaccaucaaguccuggaagaagcagauccugcgcacccaggagagcgagugcgugugcaugaacggguccugcuucacgaucaugaccgacggccccagcaacaaggccgccuccuacaagaucuucaagaucgagaaggggaaggugaccaagagcaucgagcucaacgcccccaacuuccacuacgaggagugcuccugcuacccggacaccggcaucgucaugugcgugugccgggacaacuggcacgggagcaaccgccccuggguguccuucaaccagaaccuggacuaccagaucggcuacaucugcagcggcgucuucggggacaacccccggcccgaggacggcgagggguccugcaacccggugacgguggacggcgcgaacggggucaagggcuucagcuacaaguacgacaacggcguguggaucgggcgcaccaaguccaaccggcugcgcaagggcuucgagaugaucugggaccccaacggguggaccaacaccgacagcgacuucuccgugaagcaggacgucguggccaucacggacuggagcggcuacagcggguccuucgugcagcaccccgagcucaccggccuggacugcauccggcccugcuucugggucgagcuggugcgcggccucccgcgggagaacaccaccaucuggacgagcggguccagcaucuccuucugcggcgucaacagcgacaccgccaacugguccuggcccgacggggccgagcugcccuucaccaucgacaaguga

SEQ ID NO: 87488 - RNA, 1413 nt, Artificial Sequence
  derived and/or modified CDS sequence (opt1) from neuraminidase__InfluenzaA__AGL96821
augaaccccaaccagaagaucaucaccaucggcagcaucuccaucgccaucgggaucaucagccugaugcuccagaucggcaacaucaucuccaucugggccagccacuccauccagaccgggagccagaacaacacgggcaucugcaaccagcgcaucaucaccuacgagaacuccaccugggugaaccacaccuacgucaacaucaacaacacgaacgugguggcgggggaggacaagaccagcgucacccuggccggcaacuccagccugugcuccaucagcggcugggccaucuacaccaaggacaacuccauccggaucgggagcaagggcgacguguucgugauccgcgagccguucaucuccugcagccaccucgagugccggacguucuuccugacccagggggcccugcucaacgacaagcacuccaacggcaccgucaaggaccgcagccccuaccgggcccugauguccugcccccugggggaggcgcccagcccguacaacagcaaguucgaguccguggccuggagcgccuccgccugccacgacggcaugggcuggcucaccaucgggaucagcggccccgacaacggggcgguggccguccugaaguacaacggcaucaucacgggcaccaucaaguccuggaagaagcagauccugcgcacccaggagagcgagugcgugugcaugaacggguccugcuucaccaucaugacggacggccccagcaacaaggccgccuccuacaagaucuucaagaucgagaaggggaaggugaccaagagcaucgagcucaacgcccccaacuuccacuacgaggagugcuccugcuacccggacaccggcaucgucaugugcgugugccgggacaacuggcacgggagcaaccgccccuggguguccuucaaccagaaccuggacuaccagaucggcuacaucugcagcggcgucuucggggacaacccccggcccgaggacggcgagggguccugcaacccggugagcguggacggcgcgaacggggucaagggcuucuccuacaaguacgacaacggcguguggaucgggcgcaccaagagcaaccggcugcgcaagggcuucgagaugaucugggaccccaacggguggacgaacaccgacuccgacuucagcgugaagcaggacgucguggccaucaccgacuggagcggcuacuccgggagcuucgugcagcaccccgagcucaccggccuggacugcauccggcccugcuucugggucgagcuggugcgcggccucccgcgggagaacacgaccaucuggaccuccgggagcuccaucagcuucugcggcgucaacuccgacaccgccaacuggagcuggcccgacggggccgagcugcccuucacgaucgacaaguga

SEQ ID NO: 87489 - RNA, 1410 nt, Artificial Sequence
  derived and/or modified CDS sequence (opt1) from neuraminidase__InfluenzaA__AGN69269
augaucaccaaccagcgcaucaucaccaucggcacggugugccugaucgucgggaucgugagccuccugcugcagaucggcaacaucgugucccucuggaucagccacuccauccagaccggggagaagaaccacagcgagaucugcaaccagaacaccaucaccuacgagaacaacacgugggucaaccagaccuacgugaacaucuccaacaccaacaucgccgacggccagggggugaccagcaucauccuggccggcaacuccagccugugccccaucuccggcugggcgaucuacagcaaggacaacuccauccggaucgggagcaagggcgacaucuucgucauccgcgagccguucaucuccugcagccaccucgagugccggacguucuuccugacccagggggcccugcucaacgaccgccacuccaacggcaccgugaaggaccggagccccuaccgcacccugauguccugccccaucggggaggcccccagcccguacaacucccgguucgagagcguggccuggagcgccuccgcgugccacgacggcaugggcuggaucacgaucgggaucagcggccccgacaacggggccgucgccgugcugaaguacaacggcaucaucaccgacaccaucaaguccuggcgcaacaagauccuccggacccaggagagcgagugcgugugcaucaacggcuccugcuucacgaucaugaccgacgggcccagcaacggccaggccuccuacaagaucuucaagauggagaaggggaagaucaucaagagcgucgagcuggacgcgcccaacuaccacuacgaggagugcuccugcuacccggacaccggcaagguggugugcgucugccgcgacaacuggcacgccagcaaccggcccuggguguccuucgaccagaaccuggacuaccagaucggguacaucugcagcggcguguucggcgacaacccccgcuccaacgacgggaagggcaacugcgggcccgcccucagcaacggcgccaacggggucaagggcuucuccuuccgguacggcaacgggguguggaucggccgcaccaagagcaucuccagccgguccggguucgagaugaucugggacccgaacggcuggacggagaccgacagcagcuucuccaugaagcaggacaucaucgcccugaccgacuggagcggguacuccggcagcuucgugcagcaccccgagcugaccggcaugaacugcauccgccccugcuucugggucgagcucauccgggggcagcccaaggaguccacgaucuggaccagcggcuccagcaucuccuucugcgggguggacagcgagaccgcguccuggagcuggccggacggcgccgaccugcccuucaccaucgacaaguga

SEQ ID NO: 87490 - RNA, 1410 nt, Artificial Sequence
  derived and/or modified CDS sequence (opt1) from neuraminidase__InfluenzaA__AGN69280
augaacaccaaccagcgcaucaucaccaucggcacggugugccugaucgucgggaucgugagccuccugcugcagaucggcaacaucgugucccucuggaucagccacuccauccagaccggggagaagaaccacagcgagaucugcaaccagaacaccaucaccuacgagaacaacacgugggucaaccagaccuacgugaacaucuccaacaccaacaucgccgacggccagggggugaccagcaucauccuggccggcaacuccagccugugccccaucuccggcugggcgaucuacagcaaggacaacuccauccggaucgggagcaagggcgacaucuucgucauccgcgagccguucaucuccugcagccaccucgagugccggacguucuuccugacccagggggcccugcucaacgaccgccacuccaacggcaccgugaaggaccggagccccuaccgcacccugauguccugccccaucggggaggcccccagcccguacaacucccgguucgagagcguggccuggagcgccuccgcgugccacgacggcaugggcuggcugacgaucgggaucagcggccccgacaacggggccgucgccgugcucaaguacaacggcaucaucaccgacaccaucaaguccuggcgcaacaagauccugcggacccaggagagcgagugcgugugcaucaacggcuccugcuucacgaucaugaccgacgggcccagcaacggccaggccuccuacaagaucuucaagauggagaaggggaagaucaucaagagcgucgagcuggacgcgcccaacuaccacuacgaggagugcuccugcuacccggacaccggcaagguggugugcgucugccgcgacaacuggcacgccagcaaccggcccuggguguccuucgaccagaaccucgacuaccagaucggguacaucugcagcggcguguucggcgacaacccccgcuccaacgacgggaagggcaacugcgggcccguccugagcaacggcgccaacggggugaagggcuucuccuuccgguacggcaacgggguguggaucggccgcaccaagagcaucuccagccgguccggguucgagaugaucugggacccgaacggcuggacggagaccgacagcagcuucuccaugaagcaggacaucaucgcccugaccgacuggagcggguacuccggcagcuucguccagcaccccgagcucaccggcaugaacugcauccgccccugcuucuggguggagcugauccgggggcagcccaaggaguccacgaucuggaccggcgggagcuccaucagcuucugcggcguggacuccgagaccgccagcugguccuggccggacggcgcggaccugcccuucaccaucgacaaguga

SEQ ID NO: 87491 - RNA, 1410 nt, Artificial Sequence
  derived and/or modified CDS sequence (opt1) from neuraminidase__InfluenzaA__AGN69292
augaaccccaaccagaagaucaucaccaucggcagcaucugcaugaccaucgggaucgccucccugauccuccagaucggcaacaucaucagcaucuggaucucccacagcauccagacggagaaccagaaccagccggagaucugcaaccagaacgugaucaccuacgagaacaacaccugggucaaccagaccuacgugaacaucuccaacacgaacuucguggccgagcaggcggucgccagcgugaagcuggccgggaacuccagccugugccccguguccggcugggccaucuacagcaaggacaacuccguccgcaucgggagcaagggcgacguguucgugauccgggagcccuucaucuccugcagccaccucgagugccgcaccuucuuccugacccagggcgcccugcucaacgacaagcacuccaacgggaccaucaaggaccggagccccuaccgcacgcugauguccugcccgaucggcgagguccccagccccuacaacucccgguucgagagcguggcguggagcgccuccgccugccacgacgggaccagcuggcugaccaucggcaucuccgggcccgacaacggcgccguggcgguccucaaguacaacggcaucaucaccgacacgaucaagagcuggcgcaagaacauccugcggacccaggaguccgagugcgccugcgugaacgggagcugcuucaccgugaugaccgacggcccguccaacgggcaggccagcuacaaggucuucaagaucgagaagggcaagguggugaaguccgucgagcugaacgcccccaacuaccacuacgaggagugcagcugcuaccccgaguccggcgagaucacgugcgugugccgcgacaacuggcacgggagcaaccggcccuggguguccuucaaccagaaccucgaguaccagaugggcuacaucugcagcgggaucuucggcgacaacccgcgccccaacgacaagaccggguccugcggccccgucuucagcaacggcgccaacggggugaagggcuucuccuucaaguacgggaacggcguguggaucgggcggaccaagagcaucuccagccgcaugggcuucgagaugaucugggaccccgacggcuggaccaagacggacgacaaguucagcgucaagcaggacaucaucgggaucaacgacugguccggcuacagcggguccuucgugcagcacccggagcugaccggccuggacugcaugcggcccugcuucugggucgagcucauccgcgggcggcccaaggagaacaccaucuggaccagcggcuccagcaucuccuucugcggcgugaacagcgacacgguggggugguccuggcccgacggcgcggagcugccguucaccaucgacaaguga

SEQ ID NO: 87492 - RNA, 1410 nt, Artificial Sequence
  derived and/or modified CDS sequence (opt1) from neuraminidase__InfluenzaA__AGN69316
augaaccccaaccagaagaucaucaccaucggcagcaucugcaugaccaucgggaucgccucccugauccuccagaucggcaacaucaucagcaucuggaucucccacagcauccagacggagaaccagaaccagccggagaucugcaaccagaacgugaucaccuacgagaacaacaccugggucaaccagaccuacgugaacaucuccaacacgaacuucguggccgagcaggcggucgccagcgugaagcuggccgggaacuccagccugugccccguguccggcugggccaucuacagcaaggacaacuccguccgcaucgggagcaagggcgacguguucgugauccgggagcccuucaucuccugcagccaccucgagugccgcaccuucuuccugacccagggcgcccugcucaacgacaagcacuccaacgggaccaucaaggaccggagccccuaccgcacgcugauguccugcccgaucggcgagguccccagccccuacaacucccgguucgagagcguggcguggagcgccuccgccugccacgacgggaccagcuggcugaccaucggcaucuccgggcccgacaacggcgccguggcgguccucaaguacaacggcaucaucaccgacacgaucaagagcuggcgcaagaacauccugcggacccaggaguccgagugcgccugcgugaacgggagcugcuucaccgugaugaccgacggcccguccaacgggcaggccagcuacaaggucuucaagaucgagaagggcaagguggugaagacggucgagcugaacgcccccaacuaccacuacgaggagugcuccugcuaccccgagagcggcgagaucacgugcgugugccgcgacaacuggcacggguccaaccggcccugggugagcuucaaccagaaccucgaguaccagaugggcuacaucugcuccgggaucuucggcgacaacccgcgccccaacgacaagaccgggagcugcggccccgucuucuccaacggcgccaacggggugaagggcuucagcuucaaguacgggaacggcguguggaucgggcggaccaaguccaucagcucccgcaugggcuucgagaugaucugggaccccgacggcuggaccaagaccgacgacaaguucagcgucaagcaggacaucaucgggaucaacgacuggagcggcuacuccgggagcuucgugcagcacccggagcugaccggccuggacugcaugcggcccugcuucugggucgagcucauccgcgggcggcccaaggagaacaccaucuggacguccggcagcuccaucagcuucugcggcgugaacuccgacaccgugggguggagcuggcccgacggcgcggagcugccguucaccaucgacaaguga

SEQ ID NO: 87493 - RNA, 1410 nt, Artificial Sequence; identical to SEQ ID NO: 87492
  derived and/or modified CDS sequence (opt1) from neuraminidase__InfluenzaA__AGN69328

SEQ ID NO: 87494 - RNA, 1410 nt, Artificial Sequence
  derived and/or modified CDS sequence (opt1) from neuraminidase__InfluenzaA__AGN69340
augaaccccaaccagaagaucaucaccaucggccugaucugcaugaccaucgggaucgccagccucauccugcagaucggcaacaucaucuccaucuggaucagccacuccauccagacggagaaccagaacaagccggagaucugcaaccagaacgugaucaccuacgagaacaacaccugggucaaccagaccuacgugaacgugagcaacacgaacuucgucgccgagcaggcgguggccuccgugaagcuggucgggaacagcucccucugccccgugagcggcugggccaucuacuccaaggacaacagcgugcgcaucggguccaagggcgacgucuucgugauccgggagcccuucaucagcugcucccaccuggagugccgcaccuucuuccugacccagggcgcccuccugaacgacaagcacagcaacgggaccaucaaggaccggucccccuaccgcacgcugaugagcugcccgaucggcgaggugcccucccccuacaacagccgguucgaguccgucgccuggagcgcgagcgccugccacgacgggaccuccuggcucaccaucggcaucagcgggcccgacaacggcgccguggccgugcugaaguacaacggcaucaucaccgacacgaucaaguccuggcgcaagaacauccugcggacccaggagagcgagugcgcgugcgucaacggguccugcuucaccgugaugaccgacggcccgagcaacgggcaggccuccuacaagguguucaagaucgagcgcggcaaggucgucaagagcguggagcucaacgcccccaacuaccacuacgaggagugcuccugcuaccccgagagcuccgagaucacgugcgugugccgggacaacuggcacggcagcaaccgccccuggguguccuucaaccagaaccuggaguaccagaugggguacaucugcagcggcguguucggggacaacccgcggcccaacgacaagaccggcuccugcgggcccgucuucagcaacggcgccaacggcgugaagggguucuccuucaaguacggcaacggggucuggaucggccgcaccaagagcaccuccagccggaugggguucgagaugaucugggaccccgacggcuggacgaagaccgacgacaaguucagcgugaagcaggacaucaucggcaucaccgacugguccggguacagcggcuccuucgugcagcacccggagcugaccgggcucgacugcaugcgccccugcuucugggucgagcugauccggggccgccccaaggagaacacgaucuggaccagcggguccagcaucuccuucugcggcgugaacagcgacaccgugggcugguccuggcccgacggggccgagcugccguucaccaucgacaaguga

SEQ ID NO: 87495 - RNA, 1410 nt, Artificial Sequence
  derived and/or modified CDS sequence (opt1) from neuraminidase__InfluenzaA__AGO00268
augaaccccaaccagaagaucaucaccaucggcagcaucugcaugguggucgggaucaucucccugauccuccagaucggcaacaucaucagcaucuggaucucccacagcauccagaccgggucccagaaccacacgggcaucugcaaccagagcaucaucaccuacaagaacuccaccugggugaaccagaccuacgugaacaucagcaacacgaacgucguggccgggaaggacaccaccuccaugauccuggccggcaacagcucccugugcccgauccgcggcugggcgaucuacagcaaggacaacgggauccggaucggcuccaagggggacguguucgucauccgcgagcccuucaucagcugcucccaccucgagugccggaccuucuuccugacgcagggcgcccugcucaacgacaagcacagcaacgggaccgugaaggaccgcucccccuaccgggcccugaugagcugccccgugggcgaggccccgucccccuacaacagccgcuucgagagcgucgccugguccgcgagcgccugccacgacggcaugggguggcugaccaucggcaucuccgggcccgacgacggcgccguggccgugcucaaguacaacggcaucaucaccgagacgaucaagagcuggaagaagaagauccugcggacccaggaguccgagugcgucugcgugaacgggagcugcuucaccaucaugaccgacggccccuccgacgggccggcgagcuacaagaucuucaagaucgagaagggcaaggugacgaaguccaucgagcuggacgcccccaacagccacuacgaggagugcuccugcuaccccgacaccgggaaggucaugugcgugugccgcgacaacuggcacggcagcaaccggcccuggguguccuucgaccagaaccucgacuaccagaucggcuacaucugcagcggggucuucggcgacaacccgcgccccaaggacgggaagggcuccugcgggcccguguacguggacggcgccaacggcgucaagggguucagcuaccgguacggcgacgggguguggaucggccgcaccaaguccaacagcucccggcagggguucgagaugaucugggaccccaacggcuggaccgagacggacagcagcuucuucgugaagcaggacgucguggccaugaccgacugguccggcuacagcggguccuucguccagcacccggagcugaccggccugaacugcaugcgccccugcuucuggguggagcucauccgggggcgccccaaggagaagaccaucuggacgagcggcuccagcaucuccuucugcggcgugaacagcgacaccgucgacugguccuggcccgacggggccgagcugccguucaccaucgacaaguga

SEQ ID NO: 87496 - RNA, 1410 nt, Artificial Sequence
  derived and/or modified CDS sequence (opt1) from neuraminidase__InfluenzaA__AGO00280
augaaccccaaccagaagaucaucaccaucggcagcaucugcaugguggucgggaucaucucccugauccuccagaucggcaacaucgugagcaucuggaucucccacagcauccagaccgggaaccagaaccacacggggaccugcaaccaguccaucaucaccuacaagaacagcaccugggugaaccagacguacgucaacaucuccaacaccaacgugguggccggcaaggacaccaccagcgucauccuggccggcaacuccagccugugcccgauccgcggcugggcgaucuacuccaaggacaacggggugcggaucggcagcaagggggacguguucgucauccgcgagcccuucaucuccugcagccaccucgagugccggacguucuuccugacccagggcgcccugcucaacgacaagcacuccaacgggaccgugaaggaccgcagccccuaccgggcccugauguccugccccgugggcgaggccccgagccccuacaacucccgcuucgagagcgucgccuggagcgcguccgccugccacgacggcaugggguggcugaccaucggcaucagcgggcccgacgacggcgccguggccgugcucaaguacaacggcaucaucacggagaccaucaaguccuggcggaaggagauccugcgcacccaggagagcgagugcgucugcgugaacggguccugcuucaccaucaugacggacggccccagcgggggcccggcguccuacaagaucuucaagaucgagaaggggaaggugaccaagagcaucgagcuggacgcccccaacucccacuacgaggagugcagcugcuaccccgacaccuccaaggucaugugcgugugccgggacaacuggcacggcagcaaccgccccuggguguccuucgaccagaaccucgacuaccagaugggcuacaucugcagcggggucuucggcgacaacccgcggcccaaggacgggaagggcuccugcgggcccguguacguggacggcgccaacggcgucaagggguucagcuaccgcuacggcaacgggguguggaucggccggaccaaguccaacagcucccgccagggguucgagaugaucugggaccccaacggcuggacggagaccgacagcaacuucuucaugaagcaggacgucguggccgugaccgacuggagcggcuacuccgggagcuucguccagcacccggagcugaccggccuggacugcaugcggcccugcuucuggguggagcucauccgcgggcggcccaaggagaacacgaucuggaccuccggcagcuccaucagcuucugcggcgugaacuccgacaccgucgacuggagcuggcccgacggggccgagcugccguucaccaucgacaaguga

SEQ ID NO: 87497 - RNA, 1413 nt, Artificial Sequence
  derived and/or modified CDS sequence (opt1) from neuraminidase__InfluenzaA__AGO00292
augaaccccaaccagaagaucaucaccaucggcagcaucugcaugaccaucgggacgaucucccugauccuccagaucggcaacaucaucagcaucuggaucucccacagcauccagaccgggucccagaaccacaccggcaucugcaaccagcgcaucaucaccuacgagaacaacacgugggugaaccagaccuacgucaacaucagcaacaccaacgugguggccgggaaggacaccacguccaugauccuggccggcaacagcucccugugcccgauccggggcugggcgaucuacagcaaggacaacuccauccgcaucgggagcaagggcgacgucuucgugauccgggagcccuucaucuccugcagccaccucgagugccgcaccuucuuccugacccagggggcccugcucaacgacaagcacuccaacggcaccgugaaggaccggagccccuaccgcgcccugauguccugccccaucggggaggccccgagccccuacaacucccgguucgagagcgucgccuggagcgcguccgccugccacgacggcaugggcuggcugacgaucgggaucagcggccccgacgacggggccguggccgugcucaaguacaacggcaucaucaccgagaucaucaaguccuggcgcaagcagauccugcggacccaggagagcgagugcgucugcgugaacggcuccugcuucaccaucaugacggacgggcccagcgacggcccggcguccuaccgcaucuucaagaucgagaaggggaagaucaccaagagcaucgagcuggacgcccccaacucccacuacgaggagugcagcugcuaccccgacaccggcaaggugaugugcgucugccgggacaacuggcacggguccaaccgccccugggugagcuucaaccagaaccucgacuaccagaucggcuacaucugcuccggcguguucggggacaacccgcggcccaaggacggcaaggggagcugcgaccccgucaacguggacggcgccgacggggugaagggcuucuccuaccgcuacggcgacggggucuggaucggccggaccaagagcaacuccagccgcaagggguucgagaugaucugggaccccaacggcuggacggacaccgacgacaacuuccuggugaagcaggacguggucgccaugaccgacugguccggguacagcggcagcuucgugcagcacccggagcugaccggccucgacugcauccggcccugcuucuggguggagcugauccgcgggcggccccgcgagaagacgaccaucuggaccuccggcagcuccaucagcuucugcggggucaacuccgacaccgugaacuggagcuggcccgacggcgccgagcugccguucacgaucgacauguga

SEQ ID NO: 87498 - RNA, 1413 nt, Artificial Sequence
  derived and/or modified CDS sequence (opt1) from neuraminidase__InfluenzaA__AGO00304
augaaccccaaccagaagaucaucaccaucggcagcaucugcauggccaucgggaccaucucccugauccuccagaucggcaacaucaucagcaucuggaucucccacagcauccagacggggucccagaaccacaccggcaucugcaaccagcgcaucaucaccuacgagaacaacaccugggugaaccagacguacgucaacaucagcaacaccaacgugguggccgggaaggacaccaccuccaugauccuggcgggcaacacgagccugugcccgauccggggcugggccaucuacuccaaggacaacagcauccgcaucggguccaagggcgacgucuucgugauccgggagcccuucaucagcugcucccaccucgagugccgcaccuucuuccugacccagggggcccugcucaacgacaagcacagcaacggcaccgugaaggaccggucccccuaccgcgcccugaugagcugccccaucggggaggccccgucccccuacaacagccgguucgaguccgucgcguggagcgccagcgccugccacgacggcaugggcuggcugacgaucgggaucuccggccccgacgacggggccguggcggugcucaaguacaacggcaucaucaccgagaucaucaagagcuggcgcaagcagauccugcggacccaggaguccgagugcgucugcgugaacggcagcugcuucaccaucaugacggacgggcccuccaacggcccggccagcuaccgcaucuucaagaucgagaaggggaagaucaccaaguccaucgagcuggacgcccccaacagccacuacgaggagugcuccugcuaccccgacaccggcaaggugaugugcgucugccgggacaacuggcacgggagcaaccgccccuggguguccuucaaccagaaccucgacuaccagaucggcuacaucugcagcggcguguucggggacaacccgcggcccaaggacggcaagggguccugcgaccccgucaacguggacggcgccgacggggugaagggcuucagcuaccgcuacggcaacggggucuggaucggccggaccaaguccaacagcucccgcaagggguucgagaugaucugggaccccaacggcuggacgaacaccgacgggaacuucagcgugaagcaggacguggucgccaugaccgacugguccggcuacagcggcagcuucgugcagcacccggagcugaccgggcuggacugcaugcggcccugcuucuggguggagcucauccgcggccggccccgcgagaagacgaccaucuggaccuccgggagcuccaucagcuucugcggcgucaacuccgacaccgugaacuggagcuggcccgacggcgcggagcugccguucacgaucgacaaguga

SEQ ID NO: 87499 - RNA, 1410 nt, Artificial Sequence; identical to SEQ ID NO: 86568
  derived and/or modified CDS sequence (opt1) from neuraminidase__InfluenzaA__AGO00316

SEQ ID NO: 87500 - RNA, 1410 nt, Artificial Sequence; identical to SEQ ID NO: 86012
  derived and/or modified CDS sequence (opt1) from neuraminidase__InfluenzaA__AGO00328

SEQ ID NO: 87501 - RNA, 1410 nt, Artificial Sequence; identical to SEQ ID NO: 78119
  derived and/or modified CDS sequence (opt1) from neuraminidase__InfluenzaA__AGO00340

SEQ ID NO: 87502 - RNA, 1365 nt, Artificial Sequence; identical to SEQ ID NO: 79743
  derived and/or modified CDS sequence (opt1) from neuraminidase__InfluenzaA__AGO00352

SEQ ID NO: 87503 - RNA, 1365 nt, Artificial Sequence; identical to SEQ ID NO: 79743
  derived and/or modified CDS sequence (opt1) from neuraminidase__InfluenzaA__AGO00376

SEQ ID NO: 87504 - RNA, 1365 nt, Artificial Sequence; identical to SEQ ID NO: 79743
  derived and/or modified CDS sequence (opt1) from neuraminidase__InfluenzaA__AGO00388

SEQ ID NO: 87505 - RNA, 1365 nt, Artificial Sequence; identical to SEQ ID NO: 79743
  derived and/or modified CDS sequence (opt1) from neuraminidase__InfluenzaA__AGO00400

SEQ ID NO: 87506 - RNA, 1365 nt, Artificial Sequence; identical to SEQ ID NO: 79743
  derived and/or modified CDS sequence (opt1) from neuraminidase__InfluenzaA__AGO00412

SEQ ID NO: 87507 - RNA, 1365 nt, Artificial Sequence; identical to SEQ ID NO: 79743
  derived and/or modified CDS sequence (opt1) from neuraminidase__InfluenzaA__AGO00424

SEQ ID NO: 87508 - RNA, 1365 nt, Artificial Sequence
  derived and/or modified CDS sequence (opt1) from neuraminidase__InfluenzaA__AGO00436
augaaccccaaccagaagaucaucaccaucggcagcaucugccugguggucgggcucaucucccugauccugcagaucggcaacaucaucagcaucuggaucucccacagcauccagaccgggucccagaaccacacgggcaucugcaaccagaacaucaucaccuacaagaacagcaccugggugaaggacaccacguccgugauccucaccgggaacagcucccugugcccgauccgcggcugggccaucuacagcaaggacaacuccauccggaucggcagcaagggggacgucuucgugauccgcgagcccuucaucuccugcagccaccuggagugccggaccuucuuccucacccagggcgcccugcugaacgacaagcacuccagcgggacggugaaggaccgcucccccuaccgggcgcucaugagcugccccgucggcgaggccccgucccccuacaacagccgcuucgagagcguggccugguccgccagcgccugccacgacgggaugggcuggcugaccaucggcaucuccgggcccgacaacggcgcgguggccguccugaaguacaacgggaucaucaccgagaccaucaagagcuggcggaagaagauccuccgcacgcaggaguccgagugcgccugcgugaacggcagcugcuucaccaucaugaccgacggccccuccgacgggcuggccagcuacaagaucuucaagaucgagaagggcaaggugaccaaguccaucgagcugaacgcgccgaacagcaacuacgaggagugcuccugcuaccccgacacggggaaggucaugugcgugugccgggacaacuggcacggcagcaaccgccccuggguguccuucgaccagaaccucgacuaccagaucggguacaucugcagcggcgucuucggcgacaacccccggccggaggacgggaccggcuccugcgggcccguguacguggacggcgccaacggggucaagggcuucagcuaccgcuacggcaacgggguguggaucggccggaccaagucccacagcucccgccacggguucgagaugaucugggaccccaacggcuggaccgagacggacagcaaguucagcgugcggcaggacgucguggccaugaccgacugguccggguacagcggcuccuucgugcagcaccccgagcugaccggccuggacugcaugcgcccgugcuucugggucgagcucauccgggggcgccccaaggagaagaccaucuggacgagcgccuccagcaucuccuucugcggcgugaacagcgacaccgucgacugguccuggcccgacggggccgagcugcccuucagcaucgacaaguga

SEQ ID NO: 87509 - RNA, 1365 nt, Artificial Sequence
  derived and/or modified CDS sequence (opt1) from neuraminidase__InfluenzaA__AGO00448
augaaccccaaccagaagaucaucaccaucggcagcaucugccugguggucgggcucaucucccugauccugcagaucggcaacaucaucagcaucuggaucucccacagcauccagaccgggucccagaaccacacgggcaucugcaaccagaacaucaucaccuacaagaacagcaccugggugaaggacaccacguccgugauccucaccgggaacagcucccugugcccgauccgcggcugggccaucuacagcaaggacaacuccauccggaucggcagcaagggggacgucuucgugauccgcgagcccuucaucuccugcagccaccuggagugccggaccuucuuccucacccagggcgcccugcugaacgacaagcacuccagcgggacggugaaggaccgcucccccuaccgggcgcucaugagcugccccgucggcgaggccccgucccccuacaacagccgcuucgagagcguggccugguccgccagcgccugccacgacgggaugggcuggcugaccaucggcaucuccgggcccgacaacggcgcgguggccguccugaaguacaacgggaucaucaccgagaccaucaagagcuggcggaagaagauccuccgcacgcaggaguccgagugcgccugcgugaacggcagcugcuucaccaucaugaccgacggccccuccgacgggcuggccagcuaccggaucuucaagaucgagaagggcaaggugaccaaguccaucgagcugaacgcgccgaacagccacuacgaggagugcuccugcuaccccgacacggggaaggucaugugcgugugccgcgacaacuggcacggcagcaaccggcccuggguguccuucgaccagaaccucgacuaccagaucggguacaucugcagcggcgucuucggcgacaacccccgcccggaggacgggaccggcuccugcgggcccguguacguggacggcgccaacggggucaagggcuucagcuaccgguacggcaacgggguguggaucggccgcaccaagucccacagcucccggcacggguucgagaugaucugggaccccaacggcuggaccgagacggacagcaaguucagcgugcgccaggacgucguggccaugaccgacugguccggguacagcggcuccuucgugcagcaccccgagcugaccggccuggacugcaugcggccgugcuucugggucgagcucauccgcgggcggcccaaggagaagaccaucuggacgagcgccuccagcaucuccuucugcggcgugaacagcgacaccgucgacugguccuggcccgacggggccgagcugcccuucagcaucgacaaguga

SEQ ID NO: 87510 - RNA, 1410 nt, Artificial Sequence
  derived and/or modified CDS sequence (opt1) from neuraminidase__InfluenzaA__AGQ47722
augaacaccaaccagcgcaucaucaccaucggcacgaucugccugaucguggggaucaucagccuccugcugcagaucggcaacaucaucucccucuggaucagccacuccauccagaccggggagaagucccaccccgagaucugcaaccagagcgucaucaccuacgagaacaacaccugggugaaccagacguacgugaacaucagcaacaccaacaucgccgccggccagggggucaccccgaucauccuggcgggcaacuccagccugugccccaucuccggcugggccaucuacagcaaggacaacuccauccggaucgggagcaagggcgacaucuucgugaugcgcgagcccuucaucuccugcagccaccucgagugccggaccuucuuccugacgcagggggcccugcucaacgaccgccacuccaacggcaccgugaaggaccggagccccuaccgcacccugauguccugcccgaucggggaggcccccagccccuacaacucccgguucgagagcgucgccuggagcgcguccgccugccacgacggcaugggcuggcugaccaucgggaucagcggccccgacaacggggccguggccgugcucaaguacaacggcaucaucacggacaccaucaaguccuggcgcaacaagauccugcggacccaggagagcgagugcgucugcaucaacggcuccugcuucaccaucaugacggacgggccgagcaacggccaggcguccuacaagaucuucaagauggagaaggggaagaucaucaagagcaucgagcuggacgcccccaacuaccacuacgaggagugcuccugcuaccccgacaccggcaaggugaugugcgugugccgcgacaacuggcacgccagcaaccggcccugggucuccuucgaccagaaccucgacuaccagaucggguacaucugcagcggcguguucggcgacaacccgcgcuccaacgacgggaagggcaacugcgggcccgugcugagcaacggcgccaacggggucaagggcuucuccuuccgguacggcaacgggguguggaucggccgcaccaagagcaucuccagccgguccggguucgagauggugugggaccccaacggcuggaccgagacggacagcagcuucuccaugaagcaggacaucaucgcccugaccgacuggagcggguacuccggcagcuucguccagcaccccgagcucaccggcaugaacugcauccgcccgugcuucuggguggagcugauccgggggcagcccaaggaguccaccaucuggacgagcggcuccagcaucuccuucugcggggugaacagcggcaccgcguccuggagcuggcccgacggcgccgaccugcccuucaccaucgacaaguga

SEQ ID NO: 87511 - RNA, 1413 nt, Artificial Sequence; identical to SEQ ID NO: 80477
  derived and/or modified CDS sequence (opt1) from neuraminidase__InfluenzaA__AGQ47731

SEQ ID NO: 87512 - RNA, 1377 nt, Artificial Sequence
  derived and/or modified CDS sequence (opt1) from neuraminidase__InfluenzaA__AGQ47743
augaaccccaaccagaagaucaucaccaucggcagcaucugcaugguggucgggaucaucucccugauccuccagaucggcaacaucaucagcaucuggaucucccacagcauccagaccgggaaccagaaccacaagaacuccacguggaugaaccagaccuacaucaacaucagcaacaccaacgugguggccggccaggacuccaccagcgucauccugacggggaacuccagccugugcccgauccgcggcugggccaucaacuccaaggacaacggcauccggaucgggagcaagggcgacguguucgugauccgcgagcccuucaucuccugcagccaccucgagugccggaccuucuuccugacccagggggcgcugcucaacgacaagcacuccaacggcaccgucaaggaccgcagccccuaccgggcccugauguccugccccgugggggaggccccgagccccuacaacucccgcuucgagagcguggccuggagcgccuccgcgugccacgacggcaugggcuggcugacgaucgggaucagcggccccgacaacggggccgucgccgugcucaaguacaacggcaucaucaccgagaccaucaaguccuggcggaagaagauccugcgcacccaggagagcgagugcacgugcgugaacggcuccugcuucaccaucaugaccgacgggcccagcaacggccuggccuccuacaagaucuucaagaucgagaaggggaaggucaccaagagcaucgagcucaacgcgccgaacucccacuacgaggagugcagcugcuaccccgacacgggcaaggugaugugcgugugccgggacaacuggcacggguccaaccgccccugggucagcuucgaccagaaccuggacuaccagaucggcuacaucugcuccggcguguucggggacaacccccggccgaaggacggcaccgggagcugcggccccguguccgccgacggggccaacggcgucaagggcuucagcuaccgcuacgggaacggcguguggaucgggcggaccaaguccaacagcucccgccacggcuucgagaugaucugggaccccaacggguggaccgagacggacagccgguucagcgugcgccaggacgucguggccaugaccgaccgguccggcuacagcggcuccuucgugcagcaccccgagcugaccgggcucgacugcaugcgcccgugcuucugggucgagcugauccggggccgccccgaggaggagaccaucuggacgagcggguccaucaucagcuucugcggcgugaacuccgacaccgucgacuggagcuggcccgacggcgccgagcugcccuucaccaucgacaaguga

SEQ ID NO: 87513 - RNA, 1413 nt, Artificial Sequence
  derived and/or modified CDS sequence (opt1) from neuraminidase__InfluenzaA__AGQ47755
augaaccccaaccagaagaucaucaccaucggcagcaucugcauggccaucgggaccaucucccugauccuccagaucggcaacaucaucagcaucuggaucucccacagcauccagacggggucccagaaccacaccggcaucugcaaccgccggaucgugaccuacgagaacaacaccugggucaaccagacguacgugaacaucagcaacaccaacguggucgccgagaaggacaccaccuccaugauccuggcggggaacagcucccugugcccgauccgcggcugggccaucuacagcaaggacaacuccauccggaucggcagcaagggggacguguucgugauccgcgagcccuucaucuccugcagccaccucgagugccggacguucuuccugacccagggcgcccugcucaacgacaagcacuccaacgggaccgucaaggaccgcagccccuaccgggcccugauguccugccccaucggcgaggccccgagccccuacaacucccgcuucgagagcguggcguggagcgccuccgccugccacgacgggaugggcuggcugaccaucggcaucagcgggcccgacgacggcgccguggcgguccucaaguacaacgggaucaucacggagaucaucaaguccuggcggaagcagauccugcgcacccaggagagcgagugcgugugcgugaacggcuccugcuucaccaucaugaccgacggccccagcaacgggccggccuccuaccggaucuucaagaucaagaagggcaagaucaccaagagcaucgagcuggacgcccccaacucccacuacgaggagugcagcugcuaccccgacacggggaaggucaugugcgugugccgcgacaacuggcacggcuccaaccggcccugggugagcuucaaccagaaccucgacuaccagaucggguacaucugcuccggcgucuucggcgacaacccgcgccccaaggacgggaagggcagcugcgaccccgugaacguggacggggccgacggcgucaagggguucuccuaccgguacggcaacggcguguggaucgggcgcaccaagagcaccuccagccggaagggcuucgagaugaucugggaccccaacggguggacggacaccgacggcaacuuccuggugaagcaggacgucguggccaugaccgacugguccggguacagcggcagcuucgugcagcacccggagcugaccggccucgacugcaugcgccccugcuucugggucgagcugauccgggggcgcccccgggagaagacgaccaucuggaccuccggcagcuccaucagcuucugcggggugaacuccgacaccgucaacuggagcuggcccgacggcgcggagcugccguucacgaucgacaaguga

SEQ ID NO: 87514 - RNA, 1410 nt, Artificial Sequence
  derived and/or modified CDS sequence (opt1) from neuraminidase__InfluenzaA__AGQ47767
augaaccccaaccagaagaucaucaccaucggcagcaucugcaugguggucgggaucaucucccugauccuccagaucggcaacaucgugagcaucuggaucucccacagcauccagaccgggaaccagaaccacacggggaccugcgaccaguccaucaucaccuacaagaacagcaccugggugaaccagacguacgucaacaucuccaacaccaacgugguggccggcaaggacaccaccagcgucauccuggccggcaacuccagccugugcccgauccgcggcugggcgaucuacuccaaggacaacggggugcggaucggcagcaagggggacguguucgucauccgcgagcccuucaucuccugcagccaccucgagugccggacguucuuccugacccagggcgcccugcucaacgacaagcacuccaacgggaccgugaaggaccgcagccccuaccgggcccugauguccugccccgugggcgaggccccgagccccuacaacucccgcuucgagagcgucgccuggagcgcguccgccugccacgacggcaugggguggcugaccaucggcaucagcgggcccgacgacggcgccguggccgugcucaaguacaacggcaucaucacggagaccaucaaguccuggcggaaggagauccugcgcacccaggagagcgagugcgucugcgugaacggguccugcuucaccaucaugacggacggccccagcgggggcccggcguccuacaagaucuucaagaucgagaaggggaaggugaccaagagcaucgagcuggacgcccccaacucccacuacgaggagugcagcugcuaccccgacaccuccaaggucaugugcgugugccgggacaacuggcacggcagcaaccgccccuggguguccuucgaccagaaccucgacuaccagaugggcuacaucugcagcggggucuucggcgacaacccgcggcccaaggacgggaagggcuccugcgggcccguguacguggacggcgccaacggcgucaagggguucagcuacaaguacggcaacgggguguggaucggccgcaccaaguccaacagcucccggcagggguucgagaugaucugggaccccaacggcuggacggagaccgacagcaacuucuucaccaagcaggacgucguggccgugaccgacuggagcggcuacuccgggagcuucguccagcacccggagcugacgggccuggacugcaugcgccccugcuucuggguggagcucauccgggggcgccccaaggagaacaccaucuggaccuccggcagcuccaucagcuucugcggcgugaacuccgacaccgucgacuggagcuggcccgacggggccgagcugccguucacgaucgacaaguga

SEQ ID NO: 87515 - RNA, 1410 nt, Artificial Sequence; identical to SEQ ID NO: 87496
  derived and/or modified CDS sequence (opt1) from neuraminidase__InfluenzaA__AGQ47779

SEQ ID NO: 87516 - RNA, 1413 nt, Artificial Sequence
  derived and/or modified CDS sequence (opt1) from neuraminidase__InfluenzaA__AGQ47791
augaaccccaaccagaagaucaucaccaucggcagcaucugcauggccaucgggaucaucucccugauccuccagaucggcaacaucaucagcaucugggugucccacagcauccagaccgggucccagaaccacacgggcaucugcaaccagcgcaucaucaccuacgagaacaacaccugggucaaccagacccacgugaacaucagcaacacgaacguggucgccgggaaggacaccaccuccaugauccuggcgggcaacagcucccugugcccgauccggggcugggccaucuacagcaaggacaacuccauccgcaucgggagcaagggcgacguguucgugauccgggagcccuucaucuccugcagccaccucgagugccgcaccuucuuccugacgcagggggcccugcucaacgacaagcacuccaacggcaccgucaaggaccggagccccuaccgcgcccugauguccugccccaucggggaggccccgagccccuacaacucccgguucgagagcguggcguggagcgccuccgccugccacgacggcaugggcuggcugaccaucgggaucagcggccccgacgacggggccguggcgguccucaaguacaacggcaucaucaccgagacgaucaaguccuggaagaagcagauccugcgcacccaggagagcgagugcgugugcgugaacggcuccugcuucaccaucaugaccgacgggcccagcgacggcccggccuccuaccggaucuucaagaucgagaaggggaagaucaccaagagcaucgagcuggacgcccccaacucccacuacgaggagugcagcugcuaccccgacacgggcaccgucaugugcgugugccgcgacaacuggcacggguccaaccggcccugggugagcuucaaccagaaccucgacuaccagaucggcuacaucugcuccggcgucuucggggacaacccgcgccccaaggacggcaaggggagcugcgaccccgugaacguggacggcgccgacggggucaagggcuucuccuaccgguacggcaacgggguguggaucggccgcaccaagagcaacuccagccggaagggguucgagaugaucugggaccccaacggcuggacggacaccgacgggaacuuccuggugaagcaggacgucguggccaugaccgacugguccggcuacagcggcagcuucgugcagcacccggagcugaccgggcucgacugcaugcgccccugcuucugggucgagcugauccggggccgcccccgggagaagacgaccaucuggaccuccgggagcuccaucagcuucugcggcgugaacuccgacaccgucaacuggagcuggcccgacggcgcggagcugccguucacgaucgacaaguga

SEQ ID NO: 87517 - RNA, 1410 nt, Artificial Sequence
  derived and/or modified CDS sequence (opt1) from neuraminidase__InfluenzaA__AGQ47803
augaaccccaaccagaagaucaucaccaucggcagcaucugcaugguggucgggaucaucucccugauccuccagaucggcaacaucaucagcaucuggaucucccacagcauccagaccgggucccagaaccacacgggcaucugcaaccagagcaucaucaccuacaagaacuccaccugggugaaccagaccuacgugaacaucagcaacacgaacgucguggccgggaagggcaccaccuccgugauccuggccggcaacagcucccugugcccgauccgcgggugggcgaucuacagcaaggacaacggcauccggaucggguccaagggcgacgucuucgugauccgcgagcccuucaucagcugcucccaccucgagugccggaccuucuuccugacgcagggggcccugcucaacgacaagcacagcaacggcaccgugaaggaccgcucccccuaccgggcccugaugagcugccccgucggcgaggccccgucccccuacaacagccgcuucgagagcguggccugguccgcgugcgccugccacgacgggaugggcuggcugaccaucgggaucagcggccccgacgacgaggccguggccguccucaaguacaacggcaucaucaccgagacgaucaaguccuggcggaagaagauccugcgcacccaggagagcgagugcgugugcgugaacggguccugcuucaccaucaugaccgacggccccagcgacgggccggcguccuacaagaucuucaagaucgagaagggcaaggucaccaagagcaucgagcuggacgcccccaacucccacuacgaggagugcagcugcuaccccgacacggggaaggugaugugcgugugccgggacaacuggcacggcuccaaccgccccugggucagcuucgaccagaaccucgacuaccagaucggcuacaucugcuccgggguguucggcgacaacccgcggcccaaggacgggaagggcagcugcgggcccguguacgucgacggcgccaacggcgugaagggguucuccuaccgcuacggcaacgggguguggaucggccggaccaagagcgacuccagccgccagggguucgagaugaucugggaccccaacggcuggaccgagacggacuccaacuucuucgucaagcaggacaucguggccaugaccgacuggagcggcuacagcggguccuucguccagcacccggagcugaccggccuggacugcaugcggcccugcuucuggguggagcucauccgcgggcggcccaaggagaagaccaucuggacgagcggcuccagcaucuccuucugcggcgugaacagcgacaccgucgacugguccuggcccgacggggccgagcugccguucaccaucgacaaguga

SEQ ID NO: 87518 - RNA, 1368 nt, Artificial Sequence
  derived and/or modified CDS sequence (opt1) from neuraminidase__InfluenzaA__AGQ47814
augaaccccaaccagaagaucaucaccaucggcagcaucugcauggccaucgggaucaucucccugauccuccagaucggcaacaucaucagcaucugggugucccacagcauccagaccgggucccagaaccacacgggcaucugcaaccagcgcaucaucaccuacgagaacaacaccugggucaaggacaccacgagcaugacccuggccgggaacuccagccugugcccgauccggggcugggcgaucuacuccaaggacaacagcauccgcaucggcuccaagggggacguguucgugauccgggagcccuucaucagcugcucccaccucgagugccgcaccuucuuccugacccagggcgcccugcucaacgacaagcacagcaacgggacggucaaggaccggucccccuaccgcgcccugaugagcugccccaucggcgaggccccgucccccuacaacagccgguucgaguccguggccuggagcgcgagcgccugccacgacgggaugggcuggcugaccaucggcaucuccgggcccgacgacggcgccguggccguccucaaguacaacgggaucaucaccgagaccaucaagagcuggaagaagcagauccugcgcacgcaggaguccgagugcgugugcgugaacggcagcugcuucaccaucaugaccgacggccccuccgacgggccggcgagcuaccggaucuucaagaucgagaagggcaagaucaccaaguccaucgagcuggacgcccccaacagccacuacgaggagugcuccugcuaccccgacacggggaccgucaugugcgugugccgcgacaacuggcacggcagcaaccggcccuggguguccuucaaccagaaccucgacuaccagaucggguacaucugcagcggcgucuucggcgacaacccgcgccccaaggacgggaagggcuccugcgaccccgugaacguggacggggccgacggcgucaagggguucagcuaccgguacggcaacggcguguggaucgggcgcaccaaguccaacagcucccggaagggcuucgagaugaucugggaccccaacggguggaccgacacggacggcaacuuccuggugaagcaggacgucguggccaugaccgacuggagcggguacuccggcagcuucgugcagcacccggagcugaccggccucgacugcaugcgccccugcuucugggucgagcugauccgggggcgcccccgggagaagaccacgaucuggaccagcggcuccagcaucuccuucugcggggugaacagcgacaccgugaacugguccuggcccgacggcgccgagcugccguucaccaucgacaaguga

SEQ ID NO: 87519 - RNA, 1413 nt, Artificial Sequence; identical to SEQ ID NO: 80481
  derived and/or modified CDS sequence (opt1) from neuraminidase__InfluenzaA__AGQ47826

SEQ ID NO: 87520 - RNA, 1410 nt, Artificial Sequence
  derived and/or modified CDS sequence (opt1) from neuraminidase__InfluenzaA__AGQ47838
augaaccccaaccagaagaucaucaccaucggcagcgugucccugaccaucgccacgaucugcuuccucaugcagaucgccauccuggucaccaccgugacccugcacuucaagcaguacgagugcgacagcccggcgaacaaccaggugaugcccugcgagcccaucaucaucgagcgcaacaucacggagaucgucuaccucaccaacaccaccaucgagaaggagaucugccccaagcuggugggguaccggaacugguccaagccgcagugcaagaucacgggcuucgcccccuucagcaaggacaacuccauccgccugagcgccgggggcgacaucugggugacccgggagcccuacgucuccugcgaccccgggaagugcuaccaguucgcccucggccagggcaccacccuggacaacaagcacagcaacgacacgauccacgaccgcaccccgcaccggacccugcucaugaacgagcugggggugcccuuccaccugggcaccaagcaggucugcaucgccugguccagcuccagcugccacgacgggaaggcguggcuccacgugugcgugacgggcuacgacaagaacgccaccgccuccuucaucuacgacgggcgccugguggacagcaucggcuccuggagccagaacauccugcggacccaggaguccgagugcgucugcaucaacgggaccugcacgguggugaugaccgacggcagcgccuccggccgcgcggacaccaagauccucuucaucgaggaggggaagaucguccacaucagcccccugagcggcuccgcccagcacguggaggagugcagcugcuacccccgguacccgggcgugcgcugcaucugccgggacaacuggaagggguccaaccgccccgucguggacaucaacgugaaggacuacagcaucgacuccagcuacgucugcuccggccuggugggggacacgccccggaacaacgaccgcagcuccagcuccuacugccggaaccccaacaacgagaagggcaaccacggggugaagggcugggccuucgacgacggcaacgacgucuggauggggcgcaccaucagcgaggacucccggagcggcuacgagaccuucaaggugaucgggggcugguccaccccgaacagcaagcuccagaucaaccgccaggucaucguggacuccgacaaccggagcggguacuccggcaucuucagcguggagggcaagagcugcaucaaccgcugcuucuacgucgagcugauccgggggcgcgagcaggagacccgcgugugguggacguccaacagcaucguggucuucugcggcaccuccgggaccuacggcaccgggagcuggcccgacggcgccgacaucaaccugaugcccaucuga

SEQ ID NO: 87521 - RNA, 1362 nt, Artificial Sequence
  derived and/or modified CDS sequence (opt1) from neuraminidase__InfluenzaA__AGQ47850
augaaccccaaccagaagaucaucaccaucggcagcaucugcaugguggucgggaucaucucccugauccuccagaucggcaacaucaucagcaucuggaucucccacagcauccaggccggguccagcaccugggugaaccagacguacgugaacaucuccaacaccaacgucguggccggcccggacgcgaccagcgugauccugaccgggaacuccagccugugccccauccgcggcugggccaucuacuccaaggacaacggcauccggaucgggagcaagggcgacaucuucgucauccgcgagcccuucaucuccugcagccaccucgagugccgggccuucuuccugacgcagggggcccugcucaacgacaagcacuccaacggcaccgugaaggaccgcagccccuaccgggcccugauguccugcccggugggggaggcgcccagccccuacaacucccgcuucgagagcgucgccuggagcgccuccgccugccacgacggcaugggcuggcugaccaucgggaucagcggccccgacaacggggcgguggccgugcucaaguacaacggcaucaucaccgagacgaucaaguccuggcggaagaagauccugcgcacccaggagagcgagugcgccugcgucaacggcuccugcuucaccaucaugaccgacgggccgagcgacggccccgccuccuacaagaucuucaagaucgagaaggggaaggugaccaagagcaucgagcuggacgcccccaacucccacuacgaggagugcagcugcuaccccgacacgggcaaggugaugugcgucugccgggacaacuggcacggguccaaccgcccgugggugagcuucgaccagaaccucgacuaccagaucggcuacaucugcuccggcguguucggggacagcccccggcccaaggacggcaccggguccugcggccccgucagcguggacggggcgaacggcgugaagggcuucuccuaccgcuacgggaacggcgucuggaucgggcggaccaagagcaaguccagccgccacggcuucgagaugaucugggacccgaacggguggacggagaccgacagccgguucuccgugcgccaggacguggucgccaugaccgacuggagcggcuacuccggcagcuucgugcagcaccccgagcugaccgggcuggacugcaugcggcccugcuucugggucgagcucauccgcggccagcccaaggagaagacgaucuggaccuccgggagcuccaucagcuucugcggcgugaacuccgacaccguggacuggagcuggccggacggcgccgagcugcccuucaccaucgacaaguga

SEQ ID NO: 87522 - RNA, 1410 nt, Artificial Sequence
  derived and/or modified CDS sequence (opt1) from neuraminidase__InfluenzaA__AGQ47873
augaacaccaaccagcgcaccaucacgaucggcaccaucugccugaucguggggaucaucagccuccugcugcagaucggcaacaucauccuccuguggaugucccacagcauccagaccggggagaagucccaccccaaggucugcaaccagagcgugaucaccuacgagaacaacacgugggugaaccagaccuacgucaacaucuccaacaccaacaucgccgccggccagggggugaccccgaucauccuggcgggcaacagcucccucugccccaucagcggcugggccaucuacuccaaggacaacagcauccggaucggguccaagggcgacaucuucgugaugcgcgagcccuucaucagcugcucccaccuggagugccggacguucuuccugacccagggggcccuccugaacgaccgccacagcaacggcaccgucaaggaccggucccccuaccgcacccugaugagcugcccgaucggggaggcccccucccccuacaacagccgguucgaguccguggccuggagcgcgagcgccugccacgacggcaugggcuggcucacgaucgggaucuccggccccgacaacggggccguggccguccugaaguacaacggcaucaucaccgacaccaucaagagcuggcgcaacaagauccugcggacccaggaguccgagugcgugugcaucaacggcagcugcuucacgaucaugaccgacgggccguccaacggccaggcgagcuacaagcuguucaagauggagaaggggaagaucaucaaguccaucgagcucgacgcccccaacuaccacuacgaggagugcagcugcuaccccgacaccggcaagguggucugcgugugccgcgacaacuggcacgccuccaaccggcccugggugagcuucgaccagaaccuggacuaccagaucggguacaucugcuccggcgucuucggcgacaacccgcgcagcaacgacgggaagggcaacugcgggcccgugcucuccaacggcgccaacggggugaagggcuucagcuuccgguacggcaacggggucuggaucggccgcaccaaguccaucagcucccggagcggguucgagaugaucugggaccccaacggcuggacggagaccgacuccagcuucagcaugaagcaggacaucaucgcccugaccgacugguccggguacagcggcuccuucgugcagcaccccgagcugaccggcaugaacugcauccgcccgugcuucuggguggagcucauccgggggcagcccaaggagagcacgaucuggaccuccggcagcuccaucagcuucugcggggucaacuccggcaccgcgagcugguccuggcccgacggcgccgaccugcccuucaccaucgacaaguga

SEQ ID NO: 87523 - RNA, 1410 nt, Artificial Sequence; identical to SEQ ID NO: 81238
  derived and/or modified CDS sequence (opt1) from neuraminidase__InfluenzaA__AGQ47885

SEQ ID NO: 87524 - RNA, 1410 nt, Artificial Sequence; identical to SEQ ID NO: 86004
  derived and/or modified CDS sequence (opt1) from neuraminidase__InfluenzaA__AGQ47897

SEQ ID NO: 87525 - RNA, 1410 nt, Artificial Sequence; identical to SEQ ID NO: 78119
  derived and/or modified CDS sequence (opt1) from neuraminidase__InfluenzaA__AGQ47909

SEQ ID NO: 87526 - RNA, 1410 nt, Artificial Sequence
  derived and/or modified CDS sequence (opt1) from neuraminidase__InfluenzaA__AGQ47921
augaaccccaaccagaagaucaucaccaucggcagcgugucccugaccaucgccacggucugcuuccucaugcagaccgccauccuggugaccaccgugacgcugcacuucaagcaguacgagugcgacagcccggcguccaaccaggucaugcccugcgagcccaucaucaucgagcgcaacaucaccgagaucguguaccucaacaacaccaccaucgagaaggagaucugccccaagguggucgaguaccggaacuggagcaagccgcagugccagaucacgggguucgcccccuucuccaaggacaacagcauccgccuguccgccggcggggacaucugggugacccgggagcccuacgugagcugcgaccacggcaagugcuaccaguucgcccuggggcagggcaccacccucgacaacaagcacuccaacgacacgauccacgaccgcaucccccaccggacccugcugaugaacgagcucggcgucccguuccaccuggggacccgccaggugugcaucgccuggagcuccagcuccugccacgacggcaaggcguggcugcacgugugcaucaccggggacgacaagaacgccacggccagcuucaucuacgacggccggcucgucgacuccaucgggagcuggucccagaacauccugcgcacccaggagagcgagugcgugugcaucaacgggaccugcaccguggucaugacggacggcuccgccagcggccgggcggacacccgcauccuguucaucgaggagggcaagaucgugcacaucagcccccucuccgggagcgcccagcacguggaggagugcuccugcuacccccgguaccccggcguccgcugcaucugccgggacaacuggaagggcagcaaccgcccggugguggacaucaacauggaggacuacuccaucgacagcuccuacgucugcagcgggcuggugggcgacacgccccggaacgacgaccgcuccagcaacuccaacugccggaaccccaacaacgagcgcgggaaccagggcgugaaggggugggccuucgacaacggcgacgacgucuggaugggccggaccaucagcaaggaccugcgcuccggguacgagaccuucaaggugaucggcggguggagcacccccaacuccaagagccagaucaaccggcaggucaucguggacuccgacaaccgcagcggcuacuccgggaucuucagcguggagggcaagagcugcaucaaccgcugcuucuacgucgagcucauccggggccgcaagcaggaggcccgggugugguggaccuccaacagcaucguggucuucugcgggaccuccggcacguacgggaccggcagcuggccggacggggccaacaucaacuucaugcccaucuga

SEQ ID NO: 87527 - RNA, 1365 nt, Artificial Sequence
  derived and/or modified CDS sequence (opt1) from neuraminidase__InfluenzaA__AGQ47933
augaaccccaaccagaagaucaucaccaucggcagcaucugcaugguggucgggcugaucucccucauccugcagaucggcaacaucaucagcaucuggaucucccacagcauccagaccgggucccagaaccacacgggcaucugcaaccagaacaucaucaccuacaagaacagcaccugggugaaggacaccacguccgugauccugaccgggaacagcucccucugcccgauccgcggcugggccaucuacagcaaggacaacuccauccggaucggcagcaagggggacgucuucgugauccgcgagcccuucaucuccugcagccaccuggagugccggaccuucuuccugacccagggcgcccuccugaacgaccgccacuccaacgggacggugaaggaccggagccccuaccgcgcgcugauguccugccccgucggcgaggccccgagccccuacaacucccgguucgagagcguggccuggagcgccuccgccugccacgacgggaugggcuggcucaccaucggcaucagcgggcccgacaacggcgcgguggccguccugaaguacaacgggaucaucaccgagaccaucaaguccuggcgcaagaagauccugcggacgcaggagagcgagugcgccugcgugaacggcuccugcuucaccaucaugaccgacggccccagcgacgggcucgccuccuacaagaucuucaagaucgagaagggcaaggugaccaagagcaucgagcugaacgcgccgaacucccacuacgaggagugcagcugcuaccccgacacggggaaggucaugugcgugugccgcgacaacuggcacggcuccaaccggcccugggugagcuucgaccagaaccuggacuaccagaucggguacaucugcuccggcgucuucggcgacaacccccgcccgaaggacgggaccggcagcugcgggcccguguacguggacggcgccaacggggucaagggcuucuccuaccgguacggcaacgggguguggaucggccgcaccaagagccacuccagccggcacggguucgagaugaucugggaccccaacggcuggaccgagacggacuccaaguucagcgugcgccaggacgucguggccaugaccgacuggagcggguacuccggcagcuucgugcagcaccccgagcucaccggccuggacugcauccggccgugcuucugggucgagcugauccgcgggcggcccaaggagaagaccaucuggacguccgccagcuccaucagcuucugcggcgugaacuccgacaccgucaacuggagcuggcccgacggggccgagcuccccuucaccaucgacaaguga

SEQ ID NO: 87528 - RNA, 1365 nt, Artificial Sequence; identical to SEQ ID NO: 79743
  derived and/or modified CDS sequence (opt1) from neuraminidase__InfluenzaA__AGQ47945

SEQ ID NO: 87529 - RNA, 1365 nt, Artificial Sequence; identical to SEQ ID NO: 79743
  derived and/or modified CDS sequence (opt1) from neuraminidase__InfluenzaA__AGQ47957

SEQ ID NO: 87530 - RNA, 1365 nt, Artificial Sequence; identical to SEQ ID NO: 79743
  derived and/or modified CDS sequence (opt1) from neuraminidase__InfluenzaA__AGQ47969

SEQ ID NO: 87531 - RNA, 1365 nt, Artificial Sequence; identical to SEQ ID NO: 79743
  derived and/or modified CDS sequence (opt1) from neuraminidase__InfluenzaA__AGQ47981

SEQ ID NO: 87532 - RNA, 1365 nt, Artificial Sequence
  derived and/or modified CDS sequence (opt1) from neuraminidase__InfluenzaA__AGQ48005
augaaccccaaccagaagaucaucaccaucggcagcaucugccugguggucgggcucaucucccugauccugcagaucggcaacaucaucagcaucuggaucucccacagcauccagaccgggucccagaaccacacgggcaucugcaaccagaacaucaucaccuacaagaacagcaccugggugaaggacaccacguccgugauccucaccgggaacagcucccugugcccgauccgcggcugggccaucuacagcaaggacaacuccauccggaucggcagcaagggggacgucuucgugauccgcgagcccuucaucuccugcagccaccuggagugccggaccuucuuccucacccagggcgcccugcugaacgacaagcacuccagcgggacggugaaggaccgcucccccuaccgggcgcucaugagcugccccgucggcgaggccccgucccccuacaacagccgcuucgagagcguggccugguccgccagcgccugccacgacgggaugggcuggcugaccaucggcaucuccgggcccgacaacggcgcgguggccguccugaaguacaacgggaucaucaccgagaccaucaagagcuggcggaagaagauccuccgcacgcaggaguccgagugcgccugcgugaacggcagcugcuucaccaucaugaccgacggccccuccgacgggcuggccagcuacaagaucuucaagaucgagaagggcaaggugaccaaguccaucgagcugaacgcgccgaacagccacuacgaggagugcuccugcuaccccgacacggggaaggucaugugcgugugccgggacaacuggcacggcagcaaccgccccuggguguccuucgaccagaaccucgacuaccagaucggguacaucugcagcggcgucuucggcgacaacccccggccggaggacgggaccggcuccugcgggcccguguacguggacggcgccaacggggucaagggcuucagcuaccgcuacuccaacggcguguggaucgggcggaccaagagccacuccagccgccacggcuucgagaugaucugggaccccaacggguggaccgagacggacagcaaguucuccgugcggcaggacgucguggccaugaccgacuggagcggcuacuccgggagcuucgugcagcaccccgagcugaccggccuggacugcaugcgcccgugcuucugggucgagcucauccggggccgccccaaggagaagaccaucuggacguccgccagcuccaucagcuucugcggggugaacuccgacaccgucgacuggagcuggcccgacggcgccgagcugcccuucuccaucgacaaguga

SEQ ID NO: 87533 - RNA, 1365 nt, Artificial Sequence; identical to SEQ ID NO: 87532
  derived and/or modified CDS sequence (opt1) from neuraminidase__InfluenzaA__AGQ48017

SEQ ID NO: 87534 - RNA, 1365 nt, Artificial Sequence; identical to SEQ ID NO: 79743
  derived and/or modified CDS sequence (opt1) from neuraminidase__InfluenzaA__AGQ48029

SEQ ID NO: 87535 - RNA, 1365 nt, Artificial Sequence
  derived and/or modified CDS sequence (opt1) from neuraminidase__InfluenzaA__AGQ48041
augaaccccaaccagaagaucaucaccaucggcagcaucugccugguggucgggcucaucucccugauccugcagaucggcaacaucaucagcaucuggaucucccacagcauccagaccgggucccagaaccacacgggcaucugcaaccagaacaucaucaccuacaagaacagcaccuggaucaaggacaccacguccgugauccucaccgggaacagcucccugugcccgauccgcggcugggccaucuacagcaaggacaacuccauccggaucggcagcaagggggacguguucgucauccgcgagcccuucaucuccugcagccaccuggagugccggaccuucuuccucacccagggcgcccugcugaacgacaagcacuccagcgggacggugaaggaccgcucccccuaccgggcgcucaugagcugccccgugggcgaggccccgucccccuacaacagccgcuucgagagcgucgccugguccgccagcgccugccacgacgggaugggcuggcugaccaucggcaucuccgggcccgacaacggcgcgguggccgugcugaaguacaacgggaucaucaccgagaccaucaagagcuggcggaagaagauccuccgcacgcaggaguccgagugcgccugcgucaacggcagcugcuucaccaucaugaccgacggccccuccgacgggcuggccagcuacaagaucuucaagaucgagaagggcaaggugaccaaguccaucgagcugaacgcgccgaacagccacuacgaggagugcuccugcuaccccgacacggggaaggugaugugcgucugccgggacaacuggcacggcagcaaccgccccuggguguccuucgaccagaaccucgacuaccagaucggguacaucugcagcggcguguucggcgacaacccccggccggaggacgggaccggcuccugcgggcccgucuacguggacggcgccaacggggugaagggcuucagcuaccgcuacggcaacggggucuggaucggccggaccaagucccacagcucccgccacggguucgagaugaucugggaccccaacggcuggaccgagacggacagcaaguucagcgugcggcaggacguggucgccaugaccgacugguccggguacagcggcuccuucgugcagcaccccgagcugaccggccuggacugcaugcgcccgugcuucuggguggagcucauccgggggcgccccaaggagaagaccaucuggacgagcgccuccagcaucuccuucugcggcgucaacagcgacaccguggacugguccuggcccgacggggccgagcugcccuucagcaucgacaaguga

SEQ ID NO: 87536 - RNA, 1365 nt, Artificial Sequence
  derived and/or modified CDS sequence (opt1) from neuraminidase__InfluenzaA__AGQ48053
augaaccccaaccagaagaucaucaccaucggcagcaucugccugguggucgggcucaucucccugauccugcagaucggcaacaucaucagcaucuggaucucccacagcauccagaccgggucccagaaccacacgggcaucugcaaccagaacaucaucaccuacaagaacagcaccuggaucaaggacaccacguccgugauccucaccgggaacagcucccugugcccgauccgcggcugggccaucuacagcaaggacaacuccauccggaucggcagcaagggggacguguucgucauccgcgagcccuucaucuccugcagccaccuggagugccggaccuucuuccucacccagggcgcccugcugaacgacaagcacuccagcgggacggugaaggaccgcucccccuaccgggcgcucaugagcugccccgugggcgaggccccgucccccuacaacagccgcuucgagagcgucgccugguccgccagcgccugccacgacgggaugggcuggcugaccaucggcaucuccgggcccgacaacggcgcgguggccgugcugaaguacaacgggaucaucaccgagaccaucaagagcuggcggaagaagauccuccgcacgcaggaguccgagugcgccugcgucaacggcagcugcuucaccaucaugaccgacggccccuccgacgggcuggccagcuacaagaucuucaagaucgagaagggcaaggugaccaaguccaucgagcugaacgcgccgaacagccacuacgaggagugcuccugcuaccccgacacggggaaggugaugugcgucugccgggacaacuggcacggcagcaaccgccccuggguguccuucgaccagaaccucgacuaccagaucggguacaucugcagcggcguguucggcgacaacccccggccggaggacgggaccggcuccugcgggcccgucuacguggacggcgccaacggggugaagggcuucagcuaccgcuacggcaacggggucuggaucggccggaccaagucccacagcucccgccacggguucgagaugaucugggaccccaacggcuggaccgagacggacagcaaguucagcgugcggcaggacguggucgccauggccgacugguccggguacagcggcuccuucgugcagcaccccgagcugaccggccuggacugcaugcgcccgugcuucuggguggagcucauccgggggcgccccaaggagaagaccaucuggaccagcgccuccagcaucuccuucugcggcgucaacagcgacacgguggacugguccuggcccgacggggcggagcugcccuucagcaucgacaaguga

SEQ ID NO: 87537 - RNA, 1410 nt, Artificial Sequence
  derived and/or modified CDS sequence (opt1) from neuraminidase__InfluenzaA__AGQ81707
augaaccccaaccagaagaucaucaccaucggcagcaucugcauggugaucgggaucgccucccugaugcuccagaucggcaacaugaucagcaucugggucucccacagcauccagaccgggaaccaguaccagccggagcccugcaaccaguccaucaucacguacgagaacaacaccugggugaaccagaccuacgugaacaucagcaacaccaacuuccugacggagcaggccgucaccuccguggcgcuggccggcaacagcucccucugccccaucagcgggugggccaucuacuccaaggacaacggcauccgcaucggcagcaagggggacguguucgucauccgggagcccuucaucuccugcagccaccuggagugccgcaccuucuuccugacccagggcgcccuccugaacgacaagcacuccaacgggacggugaaggaccggagcccguaccgcacccugauguccugccccgugggcgaggcccccagccccuacaacucccgguucgagagcgucgcguggagcgccuccgccugccacgacgggaucagcuggcucaccaucggcaucuccggcccggacaacggggccguggcggugcugaaguacaacggcaucaucaccgacacgaucaagagcuggcgcaacaacauccugcggacccaggaguccgagugcgccugcgucaacgggagcugcuucaccgugaugaccgacggccccuccaacggccaggccagcuacaagaucuucaagaucgagaaggggaagguggucaaguccguggagcucaacgcccccaacuaccacuacgaggagugcagcugcuaccccgacgccggcaagaucaugugcgugugccgcgacaacuggcacggguccaaccggccgugggucagcuucaaccagaaccuggaguaccagaucggcuacaucugcuccgggguguucggcgacaacccccgccccaacgacggcacggggagcugcggccccguguccagcaacggggcguacggcgucaagggguucuccuucaaguacggcaacggcguguggaucgggcggaccaagagcaccuccagccgcagcggcuucgagaugaucugggacccgaacggguggaccgagacggacuccagcuucuccgugaagcaggacaucgucgccaucaccgacuggagcggcuacuccgggagcuucgugcagcaccccgagcugaccggccucgacugcaugcggcccugcuucugggucgagcugauccgcggccggcccaaggagaacaccaucuggacguccgggagcuccaucagcuucugcggcguggacuccgacaccgugggguggagcuggccggacggcgccgagcugcccuucaccaucgacaaguga

SEQ ID NO: 87538 - RNA, 1410 nt, Artificial Sequence
  derived and/or modified CDS sequence (opt1) from neuraminidase__InfluenzaA__AGQ81715
augaaccccaaccagaagaucaucgccaucggcagcgugucccugaccaucgccaccaucugccuccugaugcagaucgcgauccuggucacgaccaugacccuccacuucaagcacaacgagugcaccaacagcuccaacaaccaggccgugccgugcgggcccaucaucaucgagcgcaacgugacggagaucguccaccugaacagcaccacccuggagaaggagaucugccccaaggccgccggcuaccgggacugguccaagccccagugccagaucaccggguucgccccguucagcaaggacaacuccauccgccucagcgcguccggcgacaucugggugacgcgggagcccuacgugagcugcgggcugggcaagugcuaccaguucgcccugggccaggggaccacccucgacaaccgccacuccaacggcaccagccacgaccggacgcccuaccgcacccugcugaugaacgagcucgggguccccuuccaccuggccaccaagcaggucugcaucgccugguccagcuccagcugccacgacggcaaggcguggcugcacgugugcgugaccggggacgaccggaacgccacggccuccaucaucuacgacggcauccucguggacagcaucggcuccuggagcaagaacauccugcgcacccaggagagcgagugcgugugcaucaacgggaccugcaccgucgugaugacggacggcuccgccagcgggaaggccgacacccggauccuguucauccgcgagggcaagaucgugcacaucuccccgcucagcggcuccgcgcagcacgucgaggagugcagcugcuacccccaguaccccgaggugcggugcgugugccgcgacaacuggcggggguccaaccgccccguccuguacaucaacauggccgacuacagcaucgacuccggcuacgugugcagcgggcuggugggcgacaccccgcggaacgacgacaucuccagcuccagcaacugcaaggaccccaacaacgagcgcggggcccccggcgucaagggcugggccuucgacuccgggaacgacaucuggaugggccggaccaucgagaaggacagccgcuccggguacgagacguuccgggugaucggcggguggaacaccgccaacagcaagucccagaccagccgccaggugaucgucgacagcggcaacuccagcggcuacuccgggaucuucagcaucgagggcaaguccugcaucaaccggugcuucuacguggagcucauccgcgggcgccccaaggagacccgggucugguggacgagcaacuccaucaucguguucugcggcaccagcgggaccuacggcaccggcuccuggccggacggggcgaacaucaacuucauggccaucuga

SEQ ID NO: 87539 - RNA, 1410 nt, Artificial Sequence
  derived and/or modified CDS sequence (opt1) from neuraminidase__InfluenzaA__AGQ81717
augaaccccaaccagaagaucaucgccaucggcagcgugucccugaccaucgccaccaucugccuccugaugcagaucgcgauccuggucacgaccaugaccccgcacuucaagcacgacgagugcaccaacagcuccaacaaccaggccgugcccugcgggcccaucaucaucgagcgcaacgugacggagaucguccacaucaacagcaccauccucgagaaggagaucugccccaaggccgccggcuaccggaacugguccaagccgcagugccagaucaucggguucgcccccuucagcaaggacaacuccauccgccugagcgcguccggcgacaucugggugacccgggagcccuacgugagcugcgggcugggcaagugcuaccaguucgcccucggccaggggaccacgcuggacaaccgccacuccaacggcaccagccacgaccggacgccccaccgcacccugcucaugaacgagcugggggucccguuccaccuggccaccaagcaggucugcaucgccugguccagcuccagcugccacgacggcaaggcguggcuccacgugugcgugaccggggacgaccggaacgccaccgccuccaucaucuacgacggcaugcugguggacagcaucggcuccuggagcaagaacauccugcgcacccaggagagcgagugcgugugcaucaacgggacgugcaccgucgugaugaccgacggcuccgccagcgggaaggccgacacccggauccucuucauccgcgagggcaagaucgugcacaucagcccccuguccggcuccgcgcagcacgucgaggagugcagcugcuacccccaguaccccgaggugcggugcgugugccgcgacaacuggcggggguccaaccgcccgguccuguacaucaacauggccgacuacagcaucgacuccggcuacgugugcagcgggcucgugggcgacacgccccggaacgacgacaucuccagcuccagcaacugcaaggaccccaacaacgagcgcggggcccccggcgucaagggcugggccuucgacuccgggaacgacaucuggaugggccggaccaucgagaaggacagccgcuccggguacgagaccuuccgggugaucggcggguggaacaccgccaacagcaagucccagacgagccgccaggugaucgucgacagcgacaacuccagcggcuacuccggcaucuucagcguggaggggaaguccugcaucaaccggugcuucuacgucgagcugauccgcggccgcccgaaggagacccgggugugguggaccagcaacuccaucaucguguucugcgggaccagcggcacguacgggaccggcuccuggcccgacggcgcgaacaucaacuucauggccaucuga

SEQ ID NO: 87540 - RNA, 1410 nt, Artificial Sequence
  derived and/or modified CDS sequence (opt1) from neuraminidase__InfluenzaA__AGQ81718
augaaccccaaccagaagaucaucgccaucggcagcgugucccugaccaucgccaccaucugccuccugaugcagaucgcgauccuggucacgaccaugacccuccacuucaagcacaacgagugcaccaacagcuccaacaaccaggccgugccgugcgggcccaucaucaucgagcgcaaccugacggagaucgugcaccugaacagcaccauccucgagaaggagaucugccccaaggccgccggcuaccggaacugguccaagccccagugccagaucaccggguucgccccguucagcaaggacaacuccauccgccugagcgcguccggcgacaucugggucacccgggagcccuacgugagcugcgggcugggcaagugcuaccaguucgcccucggccaggggacgacccuggacaaccgccacuccaacggcaccagccacgaccggacgccccaccgcacccugcucaugaacgagcugggggugcccuuccaccuguccaccaagcaggucugcaucgccuggagcuccagcuccugccacgacggcaaggccuggcuccacgugugcgugaccggggacgaccggaacgcgaccgccagcaucaucuacgacggcauccuggucgacuccaucgugagcuggagcaagaacauccugcgcacgcaggaguccgagugcgugugcaucaacgggaccugcaccgucgugaugaccgacggcagcgccuccggcaaggccgacacgcggauccucuucauccgcgaggggaagaucgugcacaucagcccgcuguccggcagcgcccagcacgucgaggagugcuccugcuacccccgguaccccgaggugcgcugcgugugccgggacaacuggcgcggcagcaaccggcccguccuguacaucaacauggcggacuacuccaucgacagcggguacgugugcuccggccucgugggggacaccccgcgcaacgacgacaccagcuccagcuccaacugccgggaccccaacaacgagcgcggcgcccccggggucaagggcugggccuucgacagcggcaacgacaucuggauggggcggaccaucgagaaggacucccgcagcggcuacgagacguuccgggugaucgggggcuggaacaccgccaacuccaagagccagaccagccgccaggugaucgucgacuccgacaacagcuccggguacagcggcguguucuccgucgagggcaagagcugcaucaaccgcugcuucuacguggagcugauccgggggcgccccaaggagacccgggugugguggacguccaacagcaucaucgucuucugcggcaccuccgggaccuacggcaccgggagcuggccggacggcgccaacaucaacuucauggcgaucuga

SEQ ID NO: 87541 - RNA, 1410 nt, Artificial Sequence
  derived and/or modified CDS sequence (opt1) from neuraminidase__InfluenzaA__AGQ81719
augaaccccaaccagaagaucaucgccaucggcagcgugucccugaccaucgccaccaucugccuccugaugcagaucgcgauccuggucacgaccaugacccuccacuucaagcacaacgagugcaccaacagcuccaacaaccaggccgugccgugcgggcccaucaucaucgagcgcaacgugacggagaucguccaccugaacagcaccacccuggagaaggagaucugcaccaaggccgccggcuaccgggacugguccaagccccagugccagaucacgggguucgcccccuucagcaaggacaacuccauccgccucagcgcguccggcgacaucugggugacccgggagccguacgugagcugcgggcugggcaagugcuaccaguucgcccugggccaggggaccacccucgacaaccgccacuccaacggcacgacccacgaccggacgccccaccgcacccugcugaugaacgagcucgggguccccuuccaccuggccaccaagcaggucugcaucgccuggagcuccagcuccugccacgacggcaaggcguggcugcacgugugcgugaccggggacgaccggaacgccaccgccagcaucaucuacgacggcauccucguggacuccaucggcagcugguccaagaacauccugcgcacccaggagagcgagugcgugugcaucaacgggacgugcaccgucgugaugaccgacggcagcgccuccgggaaggccgacacccggauccuguucauccgcgagggcaagaucgugcacaucagcccccucuccggcagcgcgcagcacgucgaggagugcuccugcuacccgcaguaccccgaggugcggugcgugugccgcgacaacuggcgggggagcaaccgccccguccuguacaucaacauggccgacuacuccaucgacagcggcuacgugugcuccgggcuggugggcgacacgccccggaacgacgacaucagcuccaacagcaacugcaaggacccgaacaacgaguccggggcccccggcgucaagggcugggccuucgacagcgggaacgacaucuggaugggccgcaccaucgagaaggacucccggagcggguacgagaccuuccgcgugaucggcggguggaacaccgccaacuccaagagccagacgucccgccaggugaucgucgacagcgacaacagcuccggcuacagcggcaucuucuccaucgagggcaagagcugcaucaaccggugcuucuacguggagcucauccgggggcgccccaaggagacccgcgucugguggaccuccaacagcaucaucguguucugcgggaccuccggcacguacgggaccggcagcuggcccgacggcgcgaacaucaacuucauggccaucuga

SEQ ID NO: 87542 - RNA, 1410 nt, Artificial Sequence
  derived and/or modified CDS sequence (opt1) from neuraminidase__InfluenzaA__AGQ81722
augaaccccaaccagaagaucaucgccaucggcagcgugucccugaccaucgccaccaucugccuccugaugcagaucgcgauccuggucacgaccaugaccccgcacuucaagcacgacgagugcaccaacagcuccaacaaccaggccgugcccugcgggcccaucaucaucgagcgcaacgugacggagaucguccacaucaacagcaccauccucgagaagggcaucugccccaaggccgccggguaccggaacugguccaagccgcagugccagaucaucggcuucgcccccuucagcaaggacaacuccauccgccugagcgcguccggggacaucugggugacccgggagcccuacgugagcugcggccugggcaagugcuaccaguucgcccucgggcagggcaccacgcuggacaaccgccacuccaacgggaccagccacgaccggacgccccaccgcacccugcucaugaacgagcugggcgucccguuccaccuggccaccaagcaggucugcaucgccugguccagcuccagcugccacgacgggaaggcguggcuccacgugugcgugaccggcgacgaccggaacgccaccgccuccaucaucuacgacggcaugcugguggacagcaucggguccuggagcaagaacauccugcgcacccaggagagcgagugcgugugcaucaacggcacgugcaccgucgugaugaccgacggguccgccagcggcaaggccgacacccggauccucuucauccgcgagggcaagaucgugcacaucagcccccuguccggguccgcgcagcacgucgaggagugcagcugcuacccccaguaccccgaggugcggugcgugugccgcgacaacuggcggggcuccaaccgcccgguccuguacaucaacauggccgacuacagcaucgacuccggguacgugugcagcggccucgugggggacacgccccggaacgacgacaccuccagcuccagcaacugcaaggaccccaacaacgagcgcggcgcccccggcgucaaggggugggccuucgacuccggcaacgacaucuggauggggcggaccaucgagaaggacagccgcuccggcuacgagaccuuccgggugaucgggggcuggaacacggccaacagcaagucccagaccagccgccaggugaucgucgacagcgacaacuccagcggcuacuccgggaucuucagcguggagggcaaguccugcaucaaccggugcuucuacgucgagcugauccgcgggcgcccgaaggagacccgggugugguggaccagcaacuccaucaucguguucugcggcacgagcgggaccuacggcaccggcuccuggcccgacggggcgaacaucaacuucauggccaucuga

SEQ ID NO: 87543 - RNA, 1410 nt, Artificial Sequence
  derived and/or modified CDS sequence (opt1) from neuraminidase__InfluenzaA__AGQ81724
augaaccccaaccagaagaucaucgccaucggcagcgugucccugaccaucgccaccaucugccuccugaugcagaucgcgauccuggucacgaccaugacccuccacuucaagcacaacgagugcagcaacuccagcaacaaccaggccgugccgugcgggcccaucaucaucgagcgcaacgugaccgagaucguccaccugaacuccacgacccuggagaaggagaucugccccaaggccgccggcuaccgggacuggagcaagccccagugccagaucaccggguucgccccguucuccaaggacaacagcauccgccucuccgcgagcggcgacaucugggugacccgggagcccuacguguccugcgggcugggcaagugcuaccaguucgcccugggccaggggacgacccucgacaaccgccacagcaacggcaccucccacgaccggacgccccaccgcacccugcugaugaacgagcucgggguccccuuccaccuggccaccaagcaggucugcaucgccuggagcuccagcuccugccacgacggcaaggcguggcugcacgugugcgugaccggggacgaccggaacgccaccgccagcaucaucuacgacggcauccucguggacuccaucggcagcuggagcaagaacauccugcgcacgcaggaguccgagugcgugugcaucaacgggaccugcaccgucgugaugaccgacggcagcgccuccgggaaggccgacacgcggauccuguucauccgcgagggcaagaucgugcacaucagcccgcucuccggcagcgcgcagcacgucgaggagugcuccugcuacccccaguaccccgaggugcggugcgugugccgcgacaacuggcgggggagcaaccgccccguccuguacaucaacauggaggacuacuccaucgacagcggcuacgugugcuccgggcuggugggcgacaccccgcggaacgacgacaucagcuccagcuccaacugcaaggaccccaacaacgagcgcggggcccccggcgucaagggcugggccuucgacagcgggaacgaccucuggaugggccggaccaucgagaaggacucccgcagcggguacgagaccuuccgggugaucggcggguggaacacggccaacuccaagagccagaccagccgccaggugaucgucgacuccgacaacagcuccggcuacagcggcaucuucuccguggagggcaagagcugcaucaaccggugcuucuacgucgagcugauccgcgggcgccccaaggagacccgggugugguggaccuccaacagcaucaucguguucugcgggacguccggcaccuacgggaccggcagcuggccggacggcgccaacaucaacuucauggcgaucuga

SEQ ID NO: 87544 - RNA, 1410 nt, Artificial Sequence
  derived and/or modified CDS sequence (opt1) from neuraminidase__InfluenzaA__AGQ81726
augaaccccaaccagaagaucaucgccaucggcagcgugucccugaccaucgccaccaucugccuccugaugcagaucgcgauccuggucacgaccaugacccuccacuucaagcacaacgagugcagcaacuccagcaacaaccaggccgugccgugcgggcccaucaucaucgagcgcaacaucaccgagaucgugcaccugaacuccacgacccuggagaaggagaucugccccaaggccgccggcuaccgggacuggagcaagccccagugccagaucaccggguucgccccguucuccaaggacaacagcauccgccucuccgcgagcggcgacaucugggucacccgggagcccuacguguccugcgggcugggcaagugcuaccaguucgcccugggccaggggacgacccucgacaaccgccacagcaacggcaccucccacgaccggacgccccaccgcacccugcugaugaacgagcucggggugcccuuccaccuggccaccaagcaggucugcaucgccuggagcuccagcuccugccacgacggcaaggcguggcugcacgugugcgugaccggggacgaccggaacgccaccgccagcaucaucuacgacggcauccucgucgacuccaucggcagcuggagcaagaacauccugcgcacgcaggaguccgagugcgugugcaucaagcggaccugcaccguggucaugaccgacgggagcgccuccggcaaggccgacacgcgcauccuguucauccgggaggggaagaucgugcacaucagcccgcucuccggcagcgcgcagcacguggaggagugcuccugcuacccccaguaccccgagguccgcugcgugugccgggacaacuggcgcggcagcaaccggcccgugcuguacaucaacauggccgacuacuccaucgacagcggguacgucugcuccggccuggugggggacaccccgcgcaacgacgacaucagcuccagcuccaacugcaaggaccccaacaacgagcggggcgcccccggggugaagggcugggccuucgacagcggcaacgaccucuggauggggcgcaccaucgagaaggagucccggagcggcuacgagaccuuccgcgucaucgggggcuggaacacggccaacuccaagagccagaccagccgccaggugaucguggacuccgacaacagcuccggguacagcggcaucuucuccgucgagggcaagagcugcaucaaccggugcuucuacguggagcugauccgcgggcggcccaaggagacccgcgucugguggaccuccaacagcaucaucguguucugcggcacguccgggaccuacggcaccgggagcuggccggacggcgcgaacaucaacuucauggccaucuga

SEQ ID NO: 87545 - RNA, 1410 nt, Artificial Sequence
  derived and/or modified CDS sequence (opt1) from neuraminidase__InfluenzaA__AGQ81727
augaaccccaaccagaagaucaucgccaucggcagcgugucccugaccaucgccaccaucugccuccugaugcaggucgcgauccuggugacgaccaugacccuccacuucaagcacaacgagugcagcaacuccagcaacaaccaggccgugccgugcgggcccaucaucaucgagcgcaacaucaccgagaucguccaccugaacuccacgacccuggagaaggagaucugccccaaggccgccggcuaccgggacuggagcaagccccagugccagaucaccggguucgccccguucuccaaggacaacagcauccgccucuccgcgagcggcgacaucugggugacccgggagcccuacguguccugcgggcugggcaagugcuaccaguucgcccugggccaggggacgacccucgacaaccgccacagcaacggcaccucccacgaccggacgccccaccgcacccugcugaugaacgagcucgggguccccuuccaccuggccaccaagcaggucugcaucgccuggagcuccagcuccugccacgacggccgggcguggcugcacgugugcgugaccggggacgaccgcaacgccaccgccagcaucaucuacgacggcauccucguggacuccaucggcagcuggagcaagaacauccugcggacgcaggaguccgagugcgugugcaucaacgggaccugcaccgucgugaugaccgacggcagcgccuccgggaaggccgacacgcgcauccuguucauccgggagggcaagaucgugcacaucagcccgcucuccggcagcgcgcagcacgucgaggagugcuccugcuacccccaguaccccgaggugcgcugcgugugccgggacaacuggcgcgggagcaaccggcccguccuguacaucaacauggccgacuacuccaucgacagcggcuacgugugcuccgggcuggugggcgacaccccgcgcaacgacgacaucagcuccagcuccaacugcaaggaccccaacaacgagcgcggggcccccggcgucaagggcugggccuucgacagcgggaacgaccucuggaugggccggaccaucgagaaggagucccggagcggguacgagaccuuccgcgugaucggcggguggaacacggccaacuccaagagccagaccagccgccaggugaucgucgacuccgacaacagcuccggcuacagcggcaucuucuccguggagggcaagagcugcaucaaccggugcuucuacgucgagcugauccgcgggcggcccaaggagacccgcgugugguggaccuccaacagcaucaucguguucugcgggacguccggcaccuacgggaccggcagcuggccggacggcgcgaacaucaacuucaugcccaucuga

SEQ ID NO: 87546 - RNA, 1410 nt, Artificial Sequence
  derived and/or modified CDS sequence (opt1) from neuraminidase__InfluenzaA__AGQ81728
augaaccccaaccagaagaucguggccaucggcagcgucucccugaccaucgccaccaugugccuccugaugcagaucgcgcuguucgccacgaccaugacccuccacuucaagcagaccgggagcacgaacuccagcgacaaccaggccgugccgugcggccccaucaucaucgagcgcaacaucaccgagaucgugcaccugaacuccaccacccuggagaaggagacgugccccaagagcgccggguaccggaacugguccaagccccagugccagaucaccggcuucgccccguucagcaaggacaacuccauccgccucagcgcgggcggcgacaucugggucacccgggagcccuacguguccugcggccuggggaagugcuaccaguucgcccugggccaggggaccacgcucgacaacaagcacagcaacggcaccaccuacgaccgcacgccccaccggacccugcugaugaacgagcucggggugcccuuccaccuggccaccaagcaggucugcaucgccugguccagcuccagcugccacgacggcaaggcguggcugcacgugugcgugaccggcgacgacaagaacgccaccgccuccaucaucuacgacgggauccucgucgacagcaucgccuccuggagcaagaacauccugcgcacgcaggagagcgagugcgugugcaucaacgggaccugcaccguggucaugaccgacggguccgccagcggccgggcggacacgcgcauccuguucauccgggagggcaagaucgugcacaucuccccgcucagcggguccgcccagcacguggaggagugcagcugcuacccccgcuaccccgagguccggugcgugugccgcgacaacuggaagggcuccaaccggcccgugcuguacaucaacauggccgacuacagcaucgacuccagcuacgucugcuccgggaucgugggcgacaccccgcgcaacgacgaccggagcuccagcuccaacugccgcgaccccaacaacgagaucggggcccccggcgugaagggcugggccuucgacagcgggaacgacaucuggaugggccggaccaucgagaaggacucccgcagcggguacgagaccuuccgggucaucggcgggugguccacggcgaacagcaagagccagaucaaccgccaggugaucguggaccgggacaacuccagcggcuacuccggcaucuucagcgucgaggggaaguccugcaucaaccgcugcuucuacguggagcugauccgcggccggcccaaggagaaccgcgucugguggaccagcaacuccaucaucguguucugcgggaccagcggcaccuacgggacgggcuccuggccggacggcgccaacaucaaccucaugcccaucuga

SEQ ID NO: 87547 - RNA, 1410 nt, Artificial Sequence
  derived and/or modified CDS sequence (opt1) from neuraminidase__InfluenzaA__AGQ81729
augaaccccaaccagaagaucaucgccaucggcagcgugucccugaccaucgccaccaucugccuccugaugcagaucgcgauccuggucgccacgaugacccuccacagcaagcacggggagugcaccaacuccagcaacaaccaggccgugccgugcggccccaucaucaucgagcgcaacgugaccgagaucguccaccugaacuccacgacccuggagaaggagaucugccccaaggccgccggguaccgggacuggagcaagccccagugccagaucaccggcuucgcgccguucuccaaggacaacagcauccgccucuccgccagcggggacaucugggugacccgggagcccuacguguccugcggccugggcaagugcuaccaguucgcccuggggcagggcacgacccucgacaaccgccacagcaacgggaccucccacgaccggacgccccaccgcacccugcugaugaacgagcucggcauccccuuccaccuggccaccaagcaggucugcaucgcguggagcuccagcuccugccacgacgggaaggccuggcugcacgugugcgugaccggcgacgaccggaacgccaccgccagcaucaucuacgacggcaugcucgucgacuccaucgggagcuggagcaagaacauccugcgcacgcaggaguccgagugcgugugcaucaacgggaccugcaccguggucaugaccgacggcagcgccuccggcaaggcggacacgcggauccuguucauccgcgagggcaagaucgugcacaucagcccgcuccugggguccgcccagcacguggaggagugcagcugcuacccccaguaccccgagguccggugcgugugccgcgacaacuggcggggcuccaaccgccccgugcuguacaucaacauggccgacuacagcgucgacuccggguacgugugcagcggccucgugggggacaccccgcggaacgacgacaccuccagcuccagcaacugcaaggaccccaacaacgagcgcggcgcccccggcgucaaggggugggccuucgacuccggcaacgacaucuggauggggcggaccaucgagaaggacagccgcuccggcuacgagacguuccgggugaucgggggcuggaacaccgcgaacagcaagucccagaccagccgccaggugaucgucgacagcgacaacuccagcggcuacuccgggaucuucagcguggagggcaaguccugcaucaaccggugcuucuacgucgagcugauccgcgggcgccccaaggagacccgggugugguggacgagcaacuccaucaucguguucugcggcaccagcgggaccuacggcaccggcuccuggccggacggggccaacaucaacuucaugcccaucuga

SEQ ID NO: 87548 - RNA, 1410 nt, Artificial Sequence
  derived and/or modified CDS sequence (opt1) from neuraminidase__InfluenzaA__AGQ81730
augaaccccaaccagaagaucaucgccaucggcagcgugucccugaccaucgccaccaucugccuccugaugcagaucgcgauccuggucacgaccaugacccuccacuucaagcacaacgagugcaucaacagcuccaacaaccagagcgugccgugcgggcccaucaucaucgagcgcaacgugaccgagaucguccaccugaacuccacgacccuggagaaggagaucugccccaaggccgccggcuaccgggacuggagcaagccccagugccagaucaccggguucgccccguucuccaaggacaacagcauccgccucuccgccagcggcgacaucugggugacccgggagcccuacguguccugcgggcugggcaagugcuaccaguucgcgcugggccaggggacgacccucgacaaccgccacagcaacggcaccucccacgaccggacgccccaccgcacccugcugaugaacgagcucgggguccccuuccaccuggccagcaagcaggucugcaucgccugguccagcuccagcugccacgacggcaaggccuggcugcacgugugcgugaccggggacgaccggaacgcgaccgccuccaucaucuacgacggcaugcucguggacagcaucggcagcugguccaagaacauccugcgcacccaggagagcgagugcgugugcaucaacgggacgugcaccgucgugaugaccgacggcuccgccagcggggaggccgacacccggauccuguucauccgcgagggcaagaucgugcacaucuccccgcucagcggcuccgcccagcacgucgaggagugcagcugcuacccccaguaccccgaggugcggugcgugugccgcgacaacuggcggggguccaaccgccccguccuguacaucaacauggcggacuacagcaucgacuccggcuacgugugcagcgggcuggugggcgacacgccgcggaacgacgacaucuccagcuccagcaacugcaaggaccccaacaacgagcgcggggcccccggcgucaagggcugggccuucgacuccgggaacgacaucuggaugggccggaccaucgagaaggacagccgcuccggguacgagaccuuccgggugaucggcggguggaacaccgccaacagcaagagccagacgucccgccaggugaucgucgacagcgacaacuccagcggcuacuccggcaucuucagcguggaggggaaguccugcaucaaccggugcuucuacgucgagcucauccgcggccgccccaaggagacccgggugugguggaccagcaacuccaucaucguguucugcgggaccagcggcacguacgggaccggcuccuggccggacggcgccaacaucaacuucauggcgaucuga

SEQ ID NO: 87549 - RNA, 1410 nt, Artificial Sequence
  derived and/or modified CDS sequence (opt1) from neuraminidase__InfluenzaA__AGQ81731
augaaccccaaccagaagaucaucgccaucggcagcgugucccugaccaucgccaccaucugccuccugaugcagaucgcgauccuggucacgaccaugacccuccacuucaagcacaacgagugcagcaacuccagcaacaaccaggccgugccgugcgggcccaucaucaucgagcgcaacaucaccgagaucgugcaccugaacuccacgacccuggagaaggagaucugccccaagaccgccggcuaccgggacuggagcaagccccagugccagaucaccggguucgccccguucuccaaggacaacagcauccgccucuccgccagcggcgacaucugggucacgcgggagcccuacguguccugcggguucggcaagugcuaccaguucgcgcugggccaggggaccacccuggacaaccgccacagcaacggcaccucccacgaccggacgccccaccgcacccuccugaugaacgagcugggggugcccuuccaccucgccaccaagcaggucugcaucgccuggagcuccagcuccugccacgacggcaaggccuggcugcacgugugcgugaccggggacgaccggaacgcgacggccagcaucaucuacgacggcauccuggucgacuccaucggcagcuggagcaagaacauccuccgcacccaggaguccgagugcgugugcaucaacgggaccugcaccguggucaugacggacggcagcgccuccgggaaggccgacacccggauccuguucauccgcgagggcaagaucgugcacaucagcccgcuguccggcagcgcccagcacguggaggagugcuccugcuacccccaguaccccgagguccggugcgugugccgcgacaacuggcgggggagcaaccgccccgugcucuacaucaacaugaccgacuacuccaucgacagcggcuacgucugcuccgggcuggugggcgacaccccgcggaacgacgacaucagcuccagcuccaacugcaaggaccccaacaacgagcgcggggcgcccggcgugaagggcugggccuucgacagcgggaacgaccuguggaugggccggacgaucgagaaggagucccgcagcggguacgagaccuuccgggucaucggcggguggaacaccgccaacuccaagagccagaccagccgccaggugaucguggacuccgacaacagcuccggcuacagcggcaucuucuccgucgagggcaagagcugcaucaaccggugcuucuacguggagcucauccgcgggcgccccaaggagacgcgggucugguggaccuccaacagcaucaucguguucugcgggaccuccggcaccuacgggacgggcagcuggccggacggcgccaacaucaacuucauggccaucuga

SEQ ID NO: 87550 - RNA, 1410 nt, Artificial Sequence
  derived and/or modified CDS sequence (opt1) from neuraminidase__InfluenzaA__AGQ81732
augaaccccaaccagaagaucaucgccaucggcagcgugucccugaccaucgccaccaucugccuccugaugcaggucgcgauccuggugacgaccaugacccuccacuucaagcacaacgagugcagcaacuccagcaacaaccaggccgugccgugcgggcccaucaucaucgagcgcaacaucaccgagaucguccaccugaacuccacgacccuggagaaggagaucugccccaaggccgccggcuaccgggacuggagcaagccccagugccagaucaccggguucgccccguucuccaaggacaacagcauccgccucuccgcgagcggcgacaucugggugacccgggagcccuacguguccugcgggcugggcaagugcuaccaguucgcccugggccaggggacgacccucgacaaccgccacagcaacggcaccucccacgaccggacgccccaccgcacccugcugaugaacgagcucgggguccccuuccaccuggccaccaagcaggucugcaucgccuggagcuccagcuccugccacgacggcaaggcguggcugcacgugugcgugaccggggacgaccggaacgccaccgccagcaucaucuacgacggcauccucguggacuccaucggcagcuggagcaagaacauccugcgcacgcaggaguccgagugcgugugcaucaacgggaccugcaccgucgugaugaccgacggcagcgccuccgggaaggccgacacgcggauccuguucauccgcgagggcaagaucgugcacaucagcccgcucuccggcagcgcgcagcacgucgaggagugcuccugcuacccccaguaccccgaggugcggugcgugugccgcgacaacuggcgggggagcaaccgccccguccuguacaucaacauggccgacuacuccaucgacagcggcuacgugugcuccgggcuggugggcgacaccccgcggaacgacgacaucagcuccagcuccaacugcaaggaccccaacaacgagcgcggggcccccggcgucaagggcugggccuucgacagcgggaacgaccucuggaugggccggaccaucgagaaggagucccgcagcggguacgagaccuuccgggugaucggcggguggaacacggccaacuccaagagccagaccagccgccaggugaucgucgacuccgacaacagcuccggcuacagcggcaucuucuccguggagggcaagagcugcaucaaccggugcuucuacgucgagcugauccgcgggcgccccaaggagacccgggugugguggaccuccaacagcaucaucguguucugcgggacguccggcaccuacgggaccggcagcuggccggacggcgcgaacaucaacuucaugcccaucuga

SEQ ID NO: 87551 - RNA, 1410 nt, Artificial Sequence
  derived and/or modified CDS sequence (opt1) from neuraminidase__InfluenzaA__AGQ81733
augaaccccaaccagaagaucaucgccaucggcagcgugucccugaccaucgccaccaucugccuccugaugcagaucgcgauccuggucacgaccaugacccuccacuucaagcacaacgagugcagcaacuccagcaacucccaggccgugccgugcgggcccaucaucaucgagcgcaacgugaccgagaucguccaccugaacagcacgacccuggagaaggagaucugccccaaggccgccgaguaccgggacugguccaagccccagugccagaucaccggcuucgccccguucagcaaggacaacuccauccgccucagcgcguccggggacaucugggugacccgggagcccuacgugagcugcggccuggggaagugcuaccaguucgcccugggccagggcacgacccucgacaaccgccacuccaacgggaccagccacgaccggacgccccaccgcacccugcugaugaacgagcucggcguccccuuccaccuggccaccaagcaggucugcaucgccugguccagcuccagcugccacgacgggaaggcguggcugcacgugugcgugaccggcgacgaccggaacgccaccgccuccaucaucuacgacgggauccucguggacagcaucggcagcugguccaagaacauccugcgcacgcaggagagcgagugcgugugcaucaacgggaccugcaccgucgugaugaccgacggcuccgccagcggcaaggccgacacgcggauccuguucauccgcgaggggaagaucgugcacaucuccccgcucagcggcuccgcgcagcacgucgaggagugcagcugcuacccccaguaccccgaggugcggugcgugugccgcgacaacuggcggggcuccaaccgccccguccuguacaucaacauggccgacuacagcaucgacuccggguacgugugcagcggccuggugggggacaccccgcggaacgacgacaucuccagcuccagcaacugcaaggaccccaacaacgagcgcggcgcccccggggucaagggcugggccuucgacuccggcaacgaccucuggauggggcggaccaucgagaaggacagccgcuccggcuacgagaccuuccgggugaucgggggcuggaacacggccaacagcaagagccagaccucccgccaggugaucgucgacagcgacaacuccagcggguacuccggcaucuucagcguggagggcaaguccugcaucaaccggugcuucuacgucgagcugauccgcgggcgccccaaggagacccgggugugguggaccagcaacuccaucaucguguucugcggcacgagcgggaccuacggcaccggguccuggccggacggcgcgaacaucaacuucaugcccaucuga

SEQ ID NO: 87552 - RNA, 1410 nt, Artificial Sequence
  derived and/or modified CDS sequence (opt1) from neuraminidase__InfluenzaA__AGQ81734
augaaccccaaccagaagaucaucgccaucggcagcgugucccugaccaucgccaccaucugccuccugaugcagaucgcgauccuggucacgaccaugacccuccacuucaagcacaacgaguacagcaacuccagcaacaaccaggccgugccgugcgggcccaucaucaucgagcgcaacaucaccgagaucgugcaccugaacuccacgacccuggagaaggagaucugccccaaggccgccggcuaccgggacuggagcaagccccagugccagaucaccggguucgccccguucuccaaggacaacagcauccgccucuccgcgagcggcgacaucugggucacccgggagcccuacguguccugcgggcugggcaagugcuaccaguucgcccugggccaggggacgacccucgacaaccgccacagcaacggcaccucccacgaccggacgccccaccgcacccugcugaugaacgagcucggggugcccuuccaccuggccaccaagcaggucugcaucgccuggagcuccagcuccugccacgacggcaaggcguggcugcacgugugcgugaccggggacgaccggaacgccaccgccagcaucaucuacgacggcauccucgucgacuccaucggcagcuggagcaagaacauccugcgcacgcaggaguccaagugcgugugcaucaagcggaccugcaccguggucaagaccgacgggagcgccuccggcaaggccgacacgcgcauccuguucauccgggaggggaagaucgugcacaucagcccgcucuccggcagcgcgcagcacguggaggagugcuccugcuacccccaguaccccgagguccgcugcgugugccgggacaacuggcgcggcagcaaccggcccgugcuguacaucaacauggccgacuacuccaucgacagcggguacgucugcuccggccuggugggggacaccccgcgcaacgacgacaucagcuccagcuccaacugcaaggaccccaacaacgagcggggcgcccccggggugaagggcugggccuucgacagcggcaacgaccucuggauggggcgcaccaucgagaaggagucccggagcggcuacgagaccuuccgcgucaucgggggcuggaacacggccaacuccaagagccagaccagccgccaggugaucguggacuccgacaacagcuccggguacagcggcaucuucuccgucgagggcaagagcugcaucaaccggugcuucuacguggagcugauccgcgggcggcccaaggagacccgcgucugguggaccuccaacagcaucaucguguucugcggcacguccgggaccuacggcaccgggagcuggccggacggcgcgaacaucaacuucauggccaucuga

SEQ ID NO: 87553 - RNA, 1410 nt, Artificial Sequence; identical to SEQ ID NO: 87551
  derived and/or modified CDS sequence (opt1) from neuraminidase__InfluenzaA__AGQ81735

SEQ ID NO: 87554 - RNA, 1410 nt, Artificial Sequence
  derived and/or modified CDS sequence (opt1) from neuraminidase__InfluenzaA__AGQ81736
augaaccccaaccagaagaucaucgccaucggcagcgugucccugaccaucgccaccaucugccuccugaugcagaucgcgauccuggucgccacgaugacccuccacagcaagcacggggagugcaccgacuccagcaacaaccaggccgugccgugcggccccaucaucaucgagcgcaacgugaccgagaucguccaccugaacuccacgacccuggagaaggagaucugccccaaggccgccggguacaaggacuggagcaagccccagugccagaucaccggcuucgcgccguucuccaaggacaacagcauccggcucuccgccagcggggacaucugggugacccgcgagcccuacguguccugcggccugggcaagugcuaccaguucgcccuggggcagggcacgacccucgacaaccggcacagcaacgggaccucccacgaccgcacgccccaccggacccugcugaugaacgagcucggcguccccuuccaccuggccaccaagcaggucugcaucgcguggagcuccagcuccugccacgacgggaaggccuggcugcacgugugcgugaccggcgacgaccgcaacgccaccgccagcaucaucuacgacggcaugcucguggacuccaucgggagcuggagcaagaacauccugcggacgcaggaguccgagugcgugugcaucaacgggaccugcaccgucgugaugaccgacggcagcgccuccggcaaggcggacacgcgcauccuguucauccgggagggcaagaucgcccacaucagcccgcucuccgggagcgcccagcacguggaggagugcuccugcuacccccaguaccccgagguccgcugcgugugccgggacaacuggcgcggcagcaaccggcccgugcuguacaucaacauggccgacuacuccgucgacagcggguacgugugcuccggccuggugggggacaccccgcgcaacgacgacaccagcuccagcuccaacugcaaggaccccaacaacgagcggggcgcccccggcgucaaggggugggcguucgacagcggcaacgacaucuggauggggcgcaccaucgagaaggacucccggagcggcuacgagacguuccgcgugaucgggggcuggaacaccgccaacuccaagagccagaccagccgccaggugaucgucgacuccgacaacagcuccggcuacagcgggaucuucuccguggagggcaagagcugcaucaaccggugcuucuacgucgagcucauccgggggcgccccaaggagacccgcgugugguggacguccaacagcaucaucguguucugcggcaccuccgggaccuacggcaccggcagcuggccggacggggccaacaucaacuucaugcccaucuga

SEQ ID NO: 87555 - RNA, 1410 nt, Artificial Sequence
  derived and/or modified CDS sequence (opt1) from neuraminidase__InfluenzaA__AGQ81737
augaaccccaaccagaagaucaucgccaucggcagcgugucccugaccaucgccaccaucugccuccugaugcagaucgcgauccuggucacgaccaugacccuccacuucaagcacaacgagugcagcaacuccagcaacaaccaggccgugccgugcgggcccaucaucaucgagcgcaacaucaccgagaucgugcaccugaacuccacgacccuggagaaggagaucugccccaaggccgccggcuaccgggacuggagcaagccccagugccagaucaccggguucgccccguucuccaaggacaacagcauccgccucuccgcgagcggcgacaucugggucacccgggagcccuacguguccugcgggcugggcaagugcuaccaguucgcccugggccaggggacgacccucgacaaccgccacagcaacggcaccucccacgaccggacgccccaccgcacccugcugaugaacgagcucggggugcccuuccaccuggccaccaagcaggucugcaucgccuggagcuccagcuccugccacgacggcaaggcguggcugcacgugugcgugaccggggacgaccggaacgccaccgccagcaucaucuacgacggcauccucgucgacuccaucggcagcuggagcaagaacauccugcgcacgcaggaguccgagugcgugugcaucaacgggaccugcaccguggucaugaccgacggcagcgccuccgggaaggccgacacgcggauccuguucauccgcgagggcaagaucgugcacaucagcccgcucuccggcagcgcgcagcacguggaggagugcuccugcuacccccaguaccccgagguccggugcgugugccgcgacaacuggcgggggagcaaccgccccgugcuguacaucaacauggccgacuacuccaucgacagcggcuacgucugcuccgggcuggugggcgacaccccgcggaacgacgacaucagcuccagcuccaacugcaaggaccccaacaacgagcgcggggcccccggcgugaagggcugggccuucgacagcgggaacgaccucuggaugggccggaccaucgagaaggagucccgcagcggguacgagaccuuccgggucaucggcggguggaacacggccaacuccaagagccagaccagccgccaggugaucguggacuccgacaacagcuccggcuacagcggcaucuucuccgucgagggcaagagcugcaucaaccggugcuucuacguggagcugauccgcgggcgccccaaggagacccgggucugguggaccuccaacagcaucaucguguucugcgggacguccggcaccuacgggaccggcagcuggccggacggcgcgaacaucaacuucauggccaucuga

SEQ ID NO: 87556 - RNA, 1410 nt, Artificial Sequence
  derived and/or modified CDS sequence (opt1) from neuraminidase__InfluenzaA__AGQ81738
augaaccccaaccagaagaucaucgccaucggcagcgugucccugaccaucgccaccaucugccuccugaugcaggucgcgauccuggugacgaccaugacccuccacuucaagcacaacgagugcagcaacuccagcaacaaccaggccgugccgugcgggcccaucaucaucgagcgcaacaucaccgagaucguccaccugaacuccacgacccuggagaaggagaucugccccaaggccgccggcuaccgggacuggagcaagccccagugccagaucaccggguucgccccguucuccaaggacaacagcauccgccucuccgcgagcggcgacaucugggugacccgggagcccuacguguccugcgggcugggcaagugcuaccaguucgcccugggccaggggacgacccucgacaaccgccacagcaacggcaccucccacgaccggacgccccaccgcacccugcugaugaacgagcucgggguccccuuccaccuggccaccaagcaggucugcaucgccuggagcuccagcuccugccacgacggcaaggcguggcugcacgugugcgugaccggggacgaccggaacgccaccgccagcaucaucuacgacggcauccucguggacuccaucggcagcuggagcaagaacauccugcgcacgcaggaguccgagugcgugugcaucaacgggaccugcaccgucgugaugaccgacggcagcgccuccgggaaggccgacacgcggauccuguucauccgcgagggcaagaucauccacaucagcccgcucuccggcagcgcgcagcacguggaggagugcuccugcuacccccaguaccccgagguccggugcgugugccgcgacaacuggcgggggagcaaccgccccgugcuguacaucaacauggccgacuacuccaucgacagcggcuacgucugcuccgggcuggugggcgacaccccgcggaacgacgacaucagcuccagcuccaacugcaaggaccccaacaacgagcgcggggcccccggcgugaagggcugggccuucgacagcgggaacgaccucuggaugggccggaccaucgagaaggagucccgcagcggguacgagaccuuccgggucaucggcggguggaacacggccaacuccaagagccagaccagccgccaggugaucguggacuccgacaacagcuccggcuacagcggcaucuucuccgucgagggcaagagcugcaucaaccggugcuucuacguggagcugauccgcgggcgccccaaggagacccgggucugguggaccuccaacagcaucaucguguucugcgggacguccggcaccuacgggaccggcagcuggccggacggcgcgaacaucaacuucaugcccaucuga

SEQ ID NO: 87557 - RNA, 1410 nt, Artificial Sequence
  derived and/or modified CDS sequence (opt1) from neuraminidase__InfluenzaA__AGQ81739
augaaccccaaccagaagaucaucgccaucggcagcgugucccugaccaucgccaccaucugccuccugaugcagaucgcgauccuggucacgaccaugacccuccacuucaagcacgacgagugcaccaacagcuccaacaaccaggccgugccgugcgagcccaucaucaucgagcgcaacgugacggagaucguccacaucaacagcaccauccuggagaaggagaucugccccaaggccgccggguaccggaacugguccaagccccagugccagaucaccggcuucgccccguucagcaaggacaacuccauccgccugagcgcguccggggacaucugggugacccgggagcccuacgugagcugcggccucgggaagugcuaccaguucgcccugggccagggcacgacccuggacaaccgccacuccaacgggacccucaacgaccggacgccccaccgcacccugcugaugaacgagcucggcguccccuuccaccuggccaccaagcaggucugcaucgccuggagcuccagcuccugccacgacgggaaggcguggcugcacgugugcgugaccggcgacgaccggaacgccaccgccagcaucaucuacgacgacaugcucguggacuccaucgggagcugguccaagaacauccugcgcacgcaggagagcgagugcgugugcaucaacgggaccugcaccgucgugaugaccgacggcagcgccuccggcaaggccgacacgcggauccuguucauccgcgagggcaagaucgugcacaucagcccgcucuccgggagcgcgcagcacgucgaggagugcuccugcuacccccaguaccccgaggugcggugcgugugccgcgacaacuggcggggcagcaaccgccccguccuguacaucaacauggccgacuacuccaucgacagcggcuacgugugcuccgggcuggugggcgacaccccgcggaacgacgacaucagcuccagcuccaacugcaaggaccccaacaacgagcgcggggcccccggcgucaaggggugggccuucgacagcggcaacgacaucuggaugggccggaccaucgagaaggacucccgcagcggguacgagaccuuccgggugaucggcggguggaacacggccaacuccaagagccagaccucccgccaggugaucgucgacagcgacaacagcuccggcuacagcgggaucuucuccguggagggcaagagcugcaucaaccggugcuucuacgucgagcucauccgcggccgccccaaggagacccgggugugguggaccuccaacagcaucaucguguucugcgggacguccggcaccuacgggaccggcagcuggccggacggggcgaacaucaacuucauggccaucuga

SEQ ID NO: 87558 - RNA, 1410 nt, Artificial Sequence
  derived and/or modified CDS sequence (opt1) from neuraminidase__InfluenzaA__AGQ81740
augaaccccaaccagaagaucguggccaucggcagcgucucccugaccaucgccaccaucugccuccugaugcagaucgcgauccuggugacgaccaugacccuccacuucaagcacggggagugcaccaacagcuccaacaaccaggccgugccgugcggccccaucaucaucgagcgcaacaucacggagaucguccaccugaacagcaccacccuggagaaggagaucugccccaaggccgccggguaccgggacugguccaagccccagugccagaucaccggcuucgccccguucagcaaggacaacuccauccgccucagcgcguccggggacaucugggugacgcgggagcccuacgugagcugcggccugggcaagugcuaccaguucgcccuggggcagggcaccacccucgacaaccgccacuccaacgggaccagccacgaccggacgccccaccgcacccugcugaugaacgagcucggcguccccuuccaccuggccaccaagcaggucugcaucgccugguccagcuccagcugccacgacgggaaggcguggcugcacgugugcgugaccggcgacgaccggaacgccacggccuccaucaucuacaacggcauccucguggacagcaucggguccuggagcaagaacauccugcgcacccaggagagcgagugcgugugcaucaacgggaccugcaccgucgugaugacggacggcuccgccagcggcaaggccgacacccggauccuguucauccgcgagggcaagaucgugcacaucuccccgcucagcggguccgcgcagcacgucgaggagugcagcugcuacccccaguaccccgaggugcggugcgugugccgcgacaacuggcggggcuccaaccgccccguccuguacaucaacauggccgacuacagcguggacuccggguacgugugcagcggccuggucggggacaccccgcggaacgacgacaccuccagcuccagcaacugcaaggaccccaacaacgagcgcggcgcccccggcgugaaggggugggccuucgacuccggcaacgacaucuggauggggcggacgaucgagaaggaccuccgcagcggcuacgagaccuuccgggugaucgggggcuggaacaccgccaacuccaagagccagaccucccgccaggucaucguggacagcgacaacagcuccggcuacagcgggaucuucuccgucgagggcaagagcugcaucaaccggugcuucuacguggagcugauccgcgggcgccccaaggagacgcgggugugguggaccuccaacagcaucaucgucuucugcggcaccuccgggaccuacggcacgggcagcuggccggacggggcgaacaucaacuucaugcccaucuga

SEQ ID NO: 87559 - RNA, 1410 nt, Artificial Sequence
  derived and/or modified CDS sequence (opt1) from neuraminidase__InfluenzaA__AGQ81741
augaaccccaaccagaagaucguggccaucggcagcgucucccugaccaucgccaccaucugccuccugaugcagaucgcgauccuggugacgaccaugacccuccacuucaagcacggggagugcaccaacagcuccaacaaccaggccgugccgugcggccccaucaucaucgagcgcaacaucacggagaucguccaccugaacagcaccacccuggacaaggagaucugccccaaggccgccggguaccgggacugguccaagccccagugccagaucaccggcuucgccccguucagcaaggacaacuccauccgccucagcgcguccggggacaucugggugacgcgggagcccuacgugagcugcggccugggcaagugcuaccaguucgcccuggggcagggcaccacccucgacaaccgccacuccaacgggaccagccacgaccggacgccccaccgcacccugcugaugaacgagcucggcguccccuuccaccuggccaccaagcaggucugcaucgccugguccagcuccagcugccacgacgggaaggcguggcugcacgugugcgugaccggcgacgaccggaacgccacggccuccaucaucuacgacggcaugcucguggacagcaucggguccuggagcaagaacauccugcgcacccaggagagcgagugcgugugcaucaacgggaccugcaccgucgugaugacggacggcuccgccagcggcaaggccgacacccggauccuguucauccgcgagggcaagaucgugcacaucuccccgcucagcggguccgcgcagcacgucgaggagugcagcugcuacccccaguaccccgaggugcggugcgugugccgcgacaacuggcggggcuccaaccgccccguccuguacaucaacauggccgacuacagcguggacuccggguacgugugcagcggccuggucggggacaccccgcggaacgacgacaccuccagcuccagcaacugcaaggaccccaacaacgagcgcggcgcccccggcgugaaggggugggccuucgacuccggcaacgacaucuggauggggcggacgaucgagaaggaccuccgcagcggcuacgagaccuuccgggugaucgggggcuggaacaccgccaacuccaagagccagaccucccgccaggucaucguggacagcgacaacagcuccggcuacagcgggaucuucuccgucgagggcaagagcugcaucaaccggugcuucuacguggagcugauccgcgggcgccccaaggagacgcgggugugguggaccuccaacagcaucaucgucuucugcggcaccuccgggaccuacggcacgggcagcuggccggacggggcgaacaucaacuucaugcccaucuga

SEQ ID NO: 87560 - RNA, 1410 nt, Artificial Sequence
  derived and/or modified CDS sequence (opt1) from neuraminidase__InfluenzaA__AGQ81742
augaaccccaaccagaagaucguggccaucggcagcgucucccugaccaucgccaccaucugccuccugaugcagaucgcgauccuggugacgaccaugacccuccacuucaagcacggggagugcaccaacagcuccaacaaccaggccgugccgugcggccccaucaucaucgagcgcaacaucacggagaucguccaccugaacagcaccacccuggagaaggagaucugccccaaggccgccgaguaccgggacugguccaagccccagugccagaucaccggguucgccccguucagcaaggacaacuccauccgccucagcgcguccggcgacaucugggugacgcgggagcccuacgugagcugcgggcugggcaagugcuaccaguucgcccugggccaggggaccacccucgacaaccgccacuccaacggcaccagccacgaccggacgccccaccgcacccugcugaugaacgagcucgggguccccuuccaccuggccaccaagcaggucugcaucgccugguccagcuccagcugccacgacggcaaggcguggcugcacgugugcgugaccggggacgaccggaacgccacggccuccaucaucuacgacggcaugcucguggacagcaucggcuccuggagcaagaacauccugcgcacccaggagagcgagugcgugugcaucaacgggaccugcaccgucgugaugacggacggcuccgccagcgggaaggccgacacccggauccuguucauccgcgagggcaagaucgugcacaucuccccgcucagcggcuccgcgcagcacgucgaggagugcagcugcuacccccaguaccccgaggugcggugcgugugccgcgacaacuggcggggguccaaccgccccguccuguacaucaacauggccgacuacagcguggacuccggcuacgugugcagcgggcuggucggcgacaccccgcggaacgacgacaccuccagcuccagcaacugcaaggaccccaacaacgagcgcggggcccccggcgugaagggcugggccuucgacuccgggaacgacaucuggaugggccggacgaucgagaaggaccuccgcagcggguacgagaccuuccgggugaucggcggguggaacaccgccaacuccaagagccagaccucccgccaggucaucguggacagcgacaacagcuccggcuacagcggcaucuucuccgucgagggcaagagcugcaucaaccggugcuucuacguggagcugauccgcgggcgccccaaggagacgcgggugugguggaccuccaacagcaucaucgucuucugcgggaccuccggcaccuacgggacgggcagcuggccggacggcgcgaacaucaacuucaugcccaucuga

SEQ ID NO: 87561 - RNA, 1410 nt, Artificial Sequence
  derived and/or modified CDS sequence (opt1) from neuraminidase__InfluenzaA__AGQ81744
augaaccccaaccagaagaucaucgccaucggcagcgugucccugaccaucgccaccaucugccuccugaugcagaucgcgauccuggucacgaccaugacccuccacuuccgccacgacgagugcaccaacagcuccaacaaccaggccgugccgugcgggcccaucaucaucgagcggaacgugacggagaucguccaccugaacagcaccacccuggagaaggagaucugccccaaggccgccgaguaccgcgacugguccaagccccagugccagaucaccggcuucgugccguucagcaaggacaacuccauccggcucagcgccgggggcgacaucugggugacgcgcgagcccuacgucuccugcgggcugggcaagugcuaccaguucgcgcugggccaggggaccacccucgacaaccggcacagcaacggcaccucccacgaccgcacgccccaccggacccugcugaugaacgagcucggggugcccuuccaccuggccaccaagcaggucugcaucgccuggagcuccagcuccugccacgacggcaaggccuggcugcacgugugcgugaccggggacgaccgcaacgcgacggccagcaucaucuacgacggcaugcucguggacuccaucggcagcugguccaagaacauccugcggacccaggagagcgagugcgucugcaucaacgggaccugcaccguggugaugacggacggcagcgccuccgggaaggccgacacccgcauccuguucauccgggagggcaagaucguccacaucagcccgcucuccggcagcgcccagcacguggaggagugcuccugcuacccccaguaccccgaggugcgcugcgucugccgggacaacuggcgcgggagcaaccggcccgugcuguacaucaacguggcggacuacuccgucgacagcggcuacgugugcuccgggcuggugggcgacaccccgcgcaacgacgacaucagcuccagcuccaacugcaaggaccccaacaacgagcgcggggcccccggcgucaagggcugggccuucgacagcgggaacgacaucuggaugggccggaccaucgagaaggacucccggagcggguacgagacguuccgcgugaucggcggguggaacaccgccaacuccaagagccagaccucccggcaggucaucguggacagcgacaaccccagcggcuacuccggcaucuucagcguggaggggaaguccugcaucaaccgcugcuucuacgucgagcucauccgcggccggccgaaggagacccgcgugugguggacgagcaacuccaucaucguguucugcgggaccagcggcaccuacgggaccggcuccuggcccgacggcgccaacaucaacuucaugcccaucuga

SEQ ID NO: 87562 - RNA, 1410 nt, Artificial Sequence
  derived and/or modified CDS sequence (opt1) from neuraminidase__InfluenzaA__AGQ81746
augaaccccaaccagaagaucaucgccaucggcagcgugucccugaccaucgccaccaucugccuccugaugcagaucgcgauccuggucacgaccaugacccuccacuucaagcacaacgagugcagcaacuccagcaacucccaggccgugccgugcgggcccaucaucaucgagcgcaacgugaccgagaucguccaccugaacagcacgacccuggagaaggagaucugccccaaggccgccgaguaccggggcugguccaagccccagugccagaucaccggguucgccccguucagcaaggacaacuccauccgccucagcgcguccggcgacaucugggugacccgggagcccuacgugagcugcgaccuggggaagugcuaccaguucgcccugggccagggcacgacccucgacaaccgccacuccaacgggaccagccacgaccggacgccccaccgcacccugcugaugaacgagcucggcguccccuuccaccuggccaccaagcaggucugcaucgccugguccagcuccagcugccacgacgggaaggcguggcugcacgugugcgugaccggcgacgaccggaacgccaccgccuccaucaucuacgacgggauccucguggacagcaucggcagcugguccaagaacauccugcgcacgcaggagagcgagugcgugugcaucaacgggaccugcaccgucgugaugaccgacggcuccgccagcggcaaggccgacacgcggauccuguucauccgcgaggggaagaucgugcacaucuccccgcucagcggcuccgcgcagcacgucgaggagugcagcugcuacccccaguaccccgaggugcggugcgugugccgcgacaacuggcggggcuccaaccgccccguccuguacaucaacauggccgacuacagcaucgacuccggguacgugugcagcggccuggugggggacaccccgcggaacgacgacaucuccagcuccagcaacugcaaggaccccaacaacgagcgcggcgcccccggggucaagggcugggccuucgacuccggcaacgaccucuggauggggcggaccaucgagaaggacagccgcuccggcuacgagaccuuccgggugaucgggggcuggaacacggccaacagcaagagccagaccucccgccaggugaucgucgacagcgacaacuccagcggguacuccggcaucuucagcguggagggcaaguccugcaucaaccggugcuucuacgucgagcugauccgcgggcgccccaaggagacccgggugugguggaccagcaacuccaucaucguguucugcggcacgagcgggaccuacggcaccggguccuggccggacggcgcgaacaucaacuucaugcccaucuga

SEQ ID NO: 87563 - RNA, 1410 nt, Artificial Sequence
  derived and/or modified CDS sequence (opt1) from neuraminidase__InfluenzaA__AGQ81747
augaaccccaaccagaagaucguggccaucggcagcgucucccugaccaucgccaccaucugccuccugaugcagaucgcgauccuggugacgaccaugacccuccacuucaagcacggggagugcaccaacagcuccaacaaccaggccgugccgugcggccccaucaucaucgagcgcaacaucacggagaucguccaccugaacagcaccacccuggagaaggagaucugccccaaggccgccggguaccgggacugguccaagccccagugccagaucaccggcuucgccccguucagcaaggacaacuccauccgccucagcgcguccggggacaucugggugacgcgggagcccuacgugagcugcggccugggcaagugcuaccaguucgcccuggggcagggcaccacccucgacaaccgccacuccaacgggaccagccacgaccggacgccccaccgcacccugcugaugaacgagcucggcguccccuuccaccuggccaccaagcaggucugcaucgccugguccagcuccagcugccacgacgggaaggcguggcugcacgugugcgugaccggcgacgaccggaacgccacggccuccaucaucuacgacggcaugcucguggacagcaucggguccuggagcaagaacauccugcgcacccaggagagcgagugcgugugcaucaacgggaccugcaccgucgugaugacggacggcuccgccagcggcaaggccgacacccggauccuguucauccgcgagggcaagaucgugcacaucuccccgcucagcggguccgcgcagcacgucgaggagugcagcugcuacccccaguaccccgaggugcggugcgugugccgcgacaacuggcggggcuccaaccgccccguccuguacaucaacauggccgacuacagcguggacuccggguacgugugcagcggccuggucggggacaccccgcggaacgacgacaccuccagcuccagcaacugcaaggaccccaacaacgagcgcggcgcccccggcgugaaggggugggccuucgacuccggcaacgacaucuggauggggcggacgaucgagaaggaccuccgcagcggcuacgagaccuuccgggugaucgggggcuggaacaccgccaacuccaagagccagaccucccgccaggucaucguggacagcgacaacagcuccggcuacagcgggaucuucuccgucgagggcaagagcugcaucaaccggugcuucuacguggagcugauccgcgggcgccccaaggagacgcgggugugguggaccuccaacagcaucaucgucuucugcggcaccuccgggaccuacggcacgggcagcuggccggacggggcgaacaucaacuucaugcccaucuga

SEQ ID NO: 87564 - RNA, 1401 nt, Artificial Sequence
  derived and/or modified CDS sequence (opt1) from neuraminidase__InfluenzaA__AGQ81749
augaaccccaaccagaagaucaucgccaucggcagcgugucccugaccaccgccaucaucugcuuccucaugcagaucgcgauccugacgaccaccaugacccugcacuucaagcagaacgagugcagcaacccguccaacaaccaggucgugcccugcgagcccaucaucaucgagcgcaacacggugcaccucaacagcaccaccaucgagaaggagaucugcuccaaggucgccgaguacaagaacuggagcaagccccagugccagaucaccggguucgccccguucuccaaggacaacagcauccggcuguccgccggcggggacaucugggugacgcgcgagcccuacgugagcugcucccugggcaagugcuaccaguucgcccucgggcagggcaccacccugaagaacaagcacagcaacggcaccacgcacgaccggaucccccaccgcacccugcucaugaacgagcuggggguccccuuccaccugggcaccaagcaggucugcaucgcgugguccagcuccagcugcuacgacgggaaggccuggcuccacaucugcgugaccggcgacgacaagaacgccacggccuccaucaucuacgacgggaugcuggcggacagcaucggcuccuggagcaagaacauccugcggacccaggagagcgagugcgugugcaucaacgggaccugcgccguggugaugaccgacggguccgccagcggcaaggccgacacgcgcauccucuucauccgggaggggcgcaucaucaacaucuccccgcugagcggcuccgcccagcacgucgaggagugcagcugcuacccccgguaccccgaggugcgcugcgugugccgggacaacuggaagggcuccaaccgccccguccuguacaucaacauggcggacuacagcguggaguccagcuacgugugcuccgggcucgucggcgacaccccgcggaacgacgacagcuccagcuccagcaacugccgcgaccccaacaacgagcggggcgcccccggcgugaaggggugggccuucgacgacggcaacgacguguggaugggccgcaccaucaagaaggacucccggagcggguacgagaccuuccgcgucaucaacggcuggacgaccgccaacuccaagagccagaucaaccgccaggugaucguggacagcgacaacugguccggguacagcggcaucuucuccgucgaggggaagaacugcaucaaccggugcuucuacguggagcugauccggggccgcccccaggagccgaaggucugguggaccagcaacuccaucaucgccuucugcggcaccagcgggacguacggcaccggguccuggcccgacggcgcgaacaucaacuucaugcccaucuga

SEQ ID NO: 87565 - RNA, 1401 nt, Artificial Sequence; identical to SEQ ID NO: 87564
  derived and/or modified CDS sequence (opt1) from neuraminidase__InfluenzaA__AGQ81750

SEQ ID NO: 87566 - RNA, 1410 nt, Artificial Sequence
  derived and/or modified CDS sequence (opt1) from neuraminidase__InfluenzaA__AGQ81751
augaaccccaaccagaagaucaucgccaucggcagcgugucccugaccaucgccaccaucugccuccugaugcagaucgcgauccuggucacgaccaugacccucuacuucaagcacaacgagugcagcaacuccagcaacaaccaggccgugccgugcgggcccaucaucaucgagcgcaacaucaccgagaucgugcaccugaacuccacgacccuggagaaggagaucugccccaaggccgccggcuaccgggacuggagcaagccccagugccagaucaccggguucgccccguucuccaaggacaacagcauccgccucuccgcgagcggcgacaucugggucacccgggagcccuacguguccugcgggcugggcaagugcuaccaguucgcccugggccaggggacgacccucgacaaccgccacagcaacggcaccucccacgaccggacgccccaccgcacccugcugaugaacgagcucggggugcccuuccaccuggccaccaagcaggucugcaucgccuggagcuccagcuccugccacgacggcaaggcguggcugcacgugugcgugaccggggacgaccggaacgccaccgccagcaucaucuacgacggcauccucgucgacuccaucggcagcuggagcaagaacauccugcgcacgcaggaguccgagugcgugugcaucaacgggaccugcaccguggucaugaccgacggcagcgccuccgggaaggccgacacgcggauccuguucauccgcgagggcaagaucgugcacaucagcccgcucuccggcagcgcgcagcacguggaggagugcuccugcuacccccaguaccccgagguccggugcgugugccgcgacaacuggcgggggagcaaccgccccgugcuguacaucaacauggccgacuacuccaucgacagcggcuacgucugcuccgggcuggugggcgacaccccgcggaacgacgacaucagcuccagcuccaacugcaaggaccccaacaacgagcgcggggcccccggcgugaagggcugggccuucgacagcgggaacgaccucuggaugggccggaccaucgagaaggagucccgcagcggguacgagaccuuccgggucaucggcggguggaacacggccaacuccaagagccagaccagccgccaggugaucguggacuccgacaacagcuccggcuacagcggcaucuucuccgucgagggcaagagcugcaucaaccggugcuucuacguggagcugauccgcgggcgccccaaggagacccgggucugguggaccuccaacagcaucaucguguucugcgggacguccggcaccuacgggaccggcagcuggccggacggcgcgaacaucaacuucaugcccaucuga

SEQ ID NO: 87567 - RNA, 1410 nt, Artificial Sequence
  derived and/or modified CDS sequence (opt1) from neuraminidase__InfluenzaA__AGQ81753
augaaccccaaccagaagaucguggccaucggcagcgucucccugaccaucgccaccaucugccuccugaugcagaucgcgauccuggugacgaccaugacccuccacuucaagcacggggagugcaccaacagcuccaacaaccaggccgugccgugcggccccaucaucaucgagcgcaacaucacggggaucguccaccugaacagcaccacccuggagaaggagaucugccccaaggccgccggcuaccgggacugguccaagccccagugccagaucaccggguucgccccguucagcaaggacaacuccauccgccucagcgcguccggcgacaucugggugacgcgggagcccuacgugagcugcggccuggggaagugcuaccaguucgcccugggccaggggaccacccucgacaaccgccacuccaacggcaccagccacgaccggacgccccaccgcacccugcugaugaacgagcucgggguccccuuccaccuggccaccaagcaggucugcaucgccugguccagcuccagcugccacgacggcaaggcguggcugcacaucugcgugaccggcgacgaccggaacgccacggccuccaucaucuacgacgggaugcucguggacagcaucggcuccuggagcaagaacauccugcgcacccaggagagcgagugcgugugcaucaacgggaccugcaccguggucaugacggacggcuccgccagcggcaaggccgacacccggauccuguucauccgcgaggggaagaucgugcacaucuccccgcucagcggcuccgcgcagcacguggaggagugcagcugcuacccccaguaccccgagguccggugcgugugccgcgacaacuggcggggguccaaccgccccgugcuguacaucaacauggccgacuacagcgucgacuccggcuacgugugcagcgggcuggugggcgacaccccgcggaacgacgacaccuccagcuccagcaacugcaaggaccccaacaacgagcgcggcgcccccggggucaagggcugggccuucgacuccgggaacgacaucuggaugggccggacgaucgagaaggaccuccgcagcggguacgagaccuuccgggugaucggcggcuggaacaccgccaacuccaagagccagaccaaccgccaggugaucgucgacuccgacaacagcagcggguacuccggcaucuucagcguggaggggaaguccugcaucaaccggugcuucuacgucgagcugauccgcggccgccccaaggagacgcgggugugguggaccagcaacuccaucaucguguucugcgggaccagcggcaccuacggcacgggguccuggccggacggcgcgaacaucaacuucaugcccaucuga

SEQ ID NO: 87568 - RNA, 1410 nt, Artificial Sequence; identical to SEQ ID NO: 87567
  derived and/or modified CDS sequence (opt1) from neuraminidase__InfluenzaA__AGQ81754

SEQ ID NO: 87569 - RNA, 1410 nt, Artificial Sequence
  derived and/or modified CDS sequence (opt1) from neuraminidase__InfluenzaA__AGQ81756
augaaccccaaccagaagaucaucgccaucggcagcaucucccugaccaucgccaccaucugccuccugauccagaucgcgauccuggugacgaccaugacccuccacuucaagcacggggagugcaccaacagcuccaacaaccaggccgucccgugcggccccaucaucaucgagcgcaacgugacggagaucgugcaccugaacagcaccacccuggagaaggagaucugccccaaggccgccggguaccgggacugguccaagccccagugccagaucaccggcuucgccccguucagcaaggacaacuccauccgccucagcgcguccggggacaucugggucacgcgggagcccuacgugagcugcggccugggcaagugcuaccaguucgcccuggggcagggcaccacccucgacaaccgccacuccaacgggaccagccacgaccggacgccccaccgcacccugcugaugaacgagcucggcgugcccuuccaccuggccaccaagcaggucugcaucgccugguccagcuccagcugccacgacgggaaggcguggcugcacgugugcgugaccggcgacgaccggaacgccacggccuccaucaucuacgacggccuccuggucgacagcaucggguccuggagcaagaacauccugcgcacccaggagagcgagugcgugugcaucaacgggaccugcaccguggucaugacggacggcuccgccagcggcaaggccgacacccggauccucuucauccgcgagggcaagaucauccacaucuccccgcugagcggguccgcgcagcacguggaggagugcagcugcuacccccaguaccccgaggugcggugcgucugccgcgacaacuggcggggcuccaaccgccccgugcuguacaucaacauggccgacuacagcguggacuccggguacgucugcagcggccucgugggggacaccccgcggaacgacgacaccuccagcuccagcaacugcaaggaccccaacaacgagcgcggcgcccccggcgugaaggggugggccuucgacuccggcaacgacaucuggauggggcggacgaucgagaaggacagccgcuccggcuacgagaccuuccgggucaucgggggcuggaacaccgccaacagcaagucccagaccagccgccaggugaucguggacagcgacaacuccagcggcuacuccgggaucuucagcgucgagggcaaguccugcaucaaccggugcuucuacguggagcugauccgcgggcgccccaaggagacgcgggucugguggaccagcaacuccaucaucguguucugcggcaccagcgggaccuacggcacgggcuccuggccggacggggcgaacaucaacuucaugcccaucuga

SEQ ID NO: 87570 - RNA, 1410 nt, Artificial Sequence
  derived and/or modified CDS sequence (opt1) from neuraminidase__InfluenzaA__AGQ81757
augaaccccaaccagaagaucaucgccaucggcagcgugucccugaccaucgccaccaucugccuccugauccagaucgcgauccuggucacgaccaugacccuccacuucaagcacggggagugcaccaacagcuccaacaaccaggccgugccgugcggccccaucaucaucgagcgcaacgugacggagaucguccaccugaacagcaccacccuggagaaggagaucugccccaaggccgccggguaccgggacugguccaagccccagugccagaucaccggcuucgccccguucagcaaggacaacuccauccgccucagcgcguccggggacaucugggugacgcgggagcccuacgugagcugcggccugggcaagugcuaccaguucgcccuggggcagggcaccacccucgacaaccgccacuccaacgggaccagccacgaccggacgccccaccgcacccugcugaugaacgagcucggcguccccuuccaccuggccaccaagcaggucugcaucgccugguccagcuccagcugccacgacgggaaggcguggcugcacgugugcgugaccggcgacgaccggaacgccacggccuccaucaucuacgacggccuccugguggacagcaucggguccuggagcaagaacauccugcgcacccaggagagcgagugcgugugcaucaacgggaccugcaccgucgugaugacggacggcuccgccagcggcaaggccgacacccggauccucuucauccgcgagggcaagaucauccacaucuccccgcugagcggguccgcgcagcacguggaggagugcagcugcuacccccaguaccccgagguccggugcgugugccgcgacaacuggcggggcuccaaccgccccgugcuguacaucaacauggccgacuacagcgucgacuccggguacgugugcagcggccucgugggggacaccccgcggaacgacgacaccuccagcuccagcaacugcaaggaccccaacaacgagcgcggcgcccccggcgucaaggggugggccuucgacuccggcaacgacaucuggauggggcggacgaucgagaaggacagccgcuccggcuacgagaccuuccgggugaucgggggcuggaacaccgccaacagcaagucccagaccagccgccaggugaucgucgacagcgacaacuccagcggcuacuccgggaucuucagcguggagggcaaguccugcaucaaccggugcuucuacgucgagcugauccgcgggcgccccaaggagacgcgggugugguggaccagcaacuccaucaucguguucugcggcaccagcgggaccuacggcacgggcuccuggccggacggggcgaacaucaacuucaugcccaucuga

SEQ ID NO: 87571 - RNA, 1401 nt, Artificial Sequence
  derived and/or modified CDS sequence (opt1) from neuraminidase__InfluenzaA__AGQ81758
augaaccccaaccagaagaucaucgccaucggcagcgugucccugaucaucgccaucaucugccuccugaugcagaucgcgauccugaccaccacgaugacccuccacuuccgccagaacgagugcagcaacccguccaacaaccaggucgugcccugcgagcccaccaucaucgagcggaacaccgugcaccugaacagcacgaccaucgagcgcgagaucugccccaaggucgccgaguacaagaacugguccaagccgcagugccagaucaccggguucgcccccuucagcaaggacaacuccauccggcugagcgccggcggggacaucugggugacccgcgagcccuacguguccugcagccucggcaagugcuaccaguucgcccuggggcagggcacgacccugaagaacaagcacuccaacggcaccacccacgaccggacgccccaccgcacccuccugaugaacgagcugggggucccguuccaccucggcaccaagcaggucugcaucgcguggagcuccagcuccugcuacgacgggaaggccuggcugcacaucugcgugaccggcgacgacgagaacgccacggccagcaucaucuacgacgggaugcugguggacuccaucggcagcugguccaagaacauccuccggacccaggagagcgagugcgugugcaucaacgggaccugcgcgguggucaugaccgacggcagcgccuccggcaaggccgacacgcgcgugcuguucauccgggaggggaagaucaucaacaucagcccccuguccggcagcgcccagcacguggaggagugcuccugcuacccccgcuaccccgagguccggugcgugugccgcgacaacuggaagggcagcaaccggccggugcucuacaucaacauggccgacuacuccaucgagagcuccuacgucugcagcgggcuggugggcgacacgccccgcaacgacgacuccagcuccagcuccaacugccgggaccccaacaacgagcgcggggcgcccggcgugaaggggugggccuucgacgacggcaacgacgucuggaugggccggaccaucaagaacgacagccgcuccggguacgagaccuuccggguggugaacggcuggaccauggccaacagcaagucccagaucaaccgccaggucaucguggacagcgacaacuggagcggguacuccggcaucuucagcgucgaggggaagaagugcaucaaccggugcuucuacguggagcugauccgcggccgcccgcaggagccccgggugugguggaccuccaacagcaucaucgucuucugcggcaccuccgggaccuacggcacggggagcuggcccgacggcgccaacaucaacuucaugcccaucuga

SEQ ID NO: 87572 - RNA, 1401 nt, Artificial Sequence
  derived and/or modified CDS sequence (opt1) from neuraminidase__InfluenzaA__AGQ81759
augaaccccaaccagaagaucaucgccaucggcagcgugucccugaccaucgccaucaucugcuuccucauccagaucgcgauccugaccacgaccaugacccugcacuuccgccagagcgagugcuccaacccgagcaacaaccaggucgugcccugcgagcccaucaucaucgagcggaacaccgugcaccucaacuccacgaucaucgagaaggagaucugccccaaggucgccgaguacaagaacuggagcaagccgcagugccagaucaccggguucgcccccuucuccaaggacaacagcauccgccuguccgccggcggggacaucugggugacccgggagcccuacgugagcugcucccugggcaagugcuaccaguucgcccucgggcagggcaccacgcugaagaacaagcacagcaacggcaccacccacgaccgcaucccccaccggacccugcucaugaacgagcugggggucccguuccaccugggcacgaagcaggucugcaucgcgugguccagcuccagcugccacgacgggaaggccuggcuccacaucugcgugaccggcgacgacaagaacgccaccgccuccaucaucuacgacgggaugcugguggacagcaucggcuccuggagcaagaacauccugcgcacccaggagagcgagugcgugugcaucaacggcacgugcgcgguggucaugaccgacggguccgccagcggcaaggccgacacccggauccucuucauccgcgaggggaagaucaucaacaucagcccccuguccggcuccgcccagcacguggaggagugcagcugcuacccccgguaccccgaggugcgcugcgucugccgggacaacuggaagggcuccaaccgcccggugcuguacaucaacauggccgacuacagcaucgaguccagcuacgugugcuccgggcucgucggcgacacgccccgggacgacgacagcuccagcuccagcaacugccgcgaccccaacaacgagcgcggggcgcccggcgugaaggggugggccuucgacgacggcaacgacaucuggaugggccggaccaucaaguccgacagccgguccggguacgagaccuuccgcgugaucaacggcuggaccaccgccaacagcaagagccagaucaaccggcaggucaucguggacuccgacagcugguccggguacagcggcaucuucuccguggaggggaagaacugcaucaaccgcugcuucuacgucgagcugauccggggccgcccgcgcgagacgcgggugugguggaccagcaacuccaucaucgucuucugcggcaccagcgggaccuacggcacgggguccuggcccgacggcgccaacaucaacuucaugcccaucuga

SEQ ID NO: 87573 - RNA, 1401 nt, Artificial Sequence
  derived and/or modified CDS sequence (opt1) from neuraminidase__InfluenzaA__AGQ81760
augaaccccaaccagaagaucaucgccaucggcagcgugucccugaccaucgccaucaucugcuuccucaugcagaucgcgauccugaccacgaccaugacccugcacuuccgccagaacgagugcagcaacccguccaacaaccaggucgugcccugcgagcccaucaucaucgagcggaacaccgugcaccucaacagcacgaccaucgagaaggagaucugccccaaggucgccgaguacaagaacugguccaagccgcagugccagaucaccggguucgcccccuucagcaaggacaacuccauccgccugagcgccggcggggacaucugggugacccgggagcccuacguguccugcagccugggcaagugcuaccaguucgcccucgggcagggcacgacccugaagaacaagcacuccaacggcaccacccacgaccgcaucccccaccggacgcugcucaugaacgagcugggggucccguuccaccugggcaccaagcaggucugcaucgcguggagcuccagcuccugccacgacgggaaggccuggcuccacaucugcgugaccggcgacgacaagaacgccaccgccagcaucaucuacgacgggaugcugguggacuccaucggcagcugguccaagaacauccugcgcacgcaggagagcgagugcgugugcaucaacgggaccugcgcgguggucaugaccgacgggagcgccuccggcaaggccgacacccggguccucuucauccgcgaggggaagaucaucaacaucagcccccuguccggcagcgcccagcacguggaggagugcuccugcuacccccgguaccccgaggugcgcugcgugugccgggacaacuggaagggcagcaaccgcccggugcuguacaucaacauggccgacuacuccaucgagagcuccuacgucugcagcgggcucgugggcgacacgccccgggacgacgacuccagcuccagcuccaacugccgcgaccccaacaacgagcggggcgcgcccggcgugaaggggugggccuucgacgacggcaacgacaucuggaugggccgcaccaucaagagcgacucccggagcggguacgagaccuuccgcgucgugaacggcuggaucaccgccaacuccaagagccagaucaaccgccaggugaucgucgacagcgacuccuggagcggguacuccggcaucuucagcguggaggggaagaacugcaucaaccggugcuucuacgucgagcugauccggggccgcccgcaggagacgcgcgugugguggaccuccaacagcaucaucguguucugcggcaccuccgggaccuacggcacggggagcuggcccgacggcgccaacaucaacuucaugcccaucuga

SEQ ID NO: 87574 - RNA, 1401 nt, Artificial Sequence
  derived and/or modified CDS sequence (opt1) from neuraminidase__InfluenzaA__AGQ81761
augaaccccaaccagaagaucaucgccaucggcagcgugucccugaccaucgccaucaucugcuuccucaugcagaucgcgauccugaccacgaccaugacccugcacuuccgccagaacgagugcagcaacccguccaacaaccaggucgugcccugcgagcccaucaucaucgagcggaacaccgugcaccucaacagcacgaccaucgagaaggagaucugccccaaggucgccgaguacaagaacugguccaagccgcagugccagaucaccggguucgcccccuucagcaaggacaacuccauccgccugagcgccggcggggacaucugggugacccgggagcccuacguguccugcagccugggcaagugcuaccaguucgcccucgggcagggcacgacccugaagaacaagcacuccaacggcaccacccacgaccgcaucccccaccggacgcugcucaugaacgagcugggggucccguuccaccugggcaccaagcaggucugcaucgcguggagcuccagcuccugccacgacgggaaggccuggcuccacaucugcgugaccggcgacgacaagaacgccaccgccagcaucaucuacgacgggaugcugguggacuccaucggcagcugguccaagaacauccugcgcacgcaggagagcgagugcgugugcaucaacgggaccugcgcgguggucaugaccgacggcagcgccuccggcaaggccgacacccggauccucuucaucaaggaggggaagaucaucaacaucagcccccuguccggcagcgcccagcacguggaggagugcuccugcuacccccgcuaccccgaggugcggugcgucugccgcgacaacuggaagggcagcaaccggccggugcuguacaucaacauggccgacuacuccaucgagagcuccuacgugugcagcgggcucgucggcgacacgccccgcgacgacgacuccagcuccagcuccaacugccgggaccccaacaacgagcgcggggcgcccggcgugaaggggugggccuucgacgacggcaacgacaucuggaugggccggaccaucaagagcgacucccgcagcggguacgagaccuuccggguggucaacggcuggaccacggccaacuccaagagccagaucaaccgccaggugaucguggacagcgacuccuggagcggguacuccggcaucuucagcgucgaggggaagaacugcaucaaccggugcuucuacguggagcugauccgcggccggccgcaggagacccgcgucugguggaccuccaacagcaucaucguguucugcggcaccuccgggacguacggcaccgggagcuggcccgacggcgccaacaucaacuucaugcccaucuga

SEQ ID NO: 87575 - RNA, 1401 nt, Artificial Sequence
  derived and/or modified CDS sequence (opt1) from neuraminidase__InfluenzaA__AGQ81763
augaaccccaaccagaagaucaucgccaucggcagcgugucccugaucaucgccaucaucugccuccugaugcagaucgcgauccugaccaccacgaugacccuccacuuccgccagaacgagugcagcaacccguccaacaaccaggucgugcccugcgagcccaucaucaucgagcggaacaccgugcaccugaacagcaccacgaucgagcgcgagaucugccccaaggucgccgaguacaagaacugguccaagccgcagugccagaucaccggguucgcccccuucagcaaggacaacuccauccggcugagcgccggcggggacaucugggugacccgcgagcccuacguguccugcagccucggcaagugcuaccaguucgcccuggggcagggcaccacgcugaagaacaagcacuccaacggcaccacccacgaccggacgccccaccgcacccuccugaugaacgagcugggggucccguuccaccucggcaccaagcaggucugcaucgcguggagcuccagcuccugcuacgacgggaaggccuggcugcacaucugcgugaccggcgacgacaagaacgccaccgccagcaucaucuacgacgggaugcugguggacuccaucggcagcugguccaagaacauccuccggacgcaggagagcgagugcgugugcaucaacgggaccugcgcgguggucaugaccgacggcagcgccuccggcaaggccgacacccgcgugcuguucauccgggaggggaagaucaucaacaucagcccccuguccggcagcgcccagcacguggaggagugcuccugcuacccccgcuaccccgagguccggugcgugugccgcgacaacuggaagggcagcaaccggccggugcucuacaucaacauggccgacuacuccaucgagagcuccuacgucugcagcgggcuggugggcgacacgccccgcaacgacgacuccagcuccagcuccaacugccgggaccccaacaacgagcgcggggcgcccggcgugaaggggugggccuucgacgacggcaacgacgucuggaugggccggaccaucaagaacgggagccgcuccggcuacgagaccuuccggguggugaacggguggaccauggccaacagcaagucccagaucaaccgccaggucaucguggacagcgacaacuggagcggcuacuccgggaucuucagcgucgagggcaagaagugcaucaaccggugcuucuacguggagcugauccgcggccgcccgcaggagccccgggugugguggacguccaacagcaucaucgucuucugcgggaccuccggcaccuacgggaccggcagcuggcccgacggggccaacaucaacuucaugcccaucuga

SEQ ID NO: 87576 - RNA, 1401 nt, Artificial Sequence
  derived and/or modified CDS sequence (opt1) from neuraminidase__InfluenzaA__AGQ81766
augaaccccaaccagaagaucaucgccaucggcagcgugucccugaccaucgccaucaucugcuuccucaugcagaucgcgauccugaccacgaccaugacccugcacuuccgccagaacgagugcagcaacccguccaacaaccaggucgugcccugcgagcccaucaucaucgagcggaacaccgugcaccucaacagcacgaccaucgagaaggagaucugccccaaggucgccgaguacaagaacugguccaagccgcagugccagaucaccggguucgcccccuucagcaaggacaacuccauccgccugagcgccggcggggacaucugggugacccgggagcccuacguguccugcagccugggcaagugcuaccaguucgcccucgggcagggcacgacccugaagaacaagcacuccaacggcaccacccacgaccgcaucccccaccggacgcugcucaugaacgagcugggggucccguuccaccugggcaccaagcaggucugcaucgcguggagcuccagcuccugccacgacgggaaggccuggcuccacaucugcgugaccggcgacgacaagaacgccaccgccagcaucaucuacgacgggaugcugguggacuccaucggcagcugguccaagaacauccugcgcacgcaggagagcgagugcgugugcaucaacgggaccugcgcgguggucaugaccgacgggagcgccuccggcaaggccgacacccggauccucuucauccgcgaggggaagaucaucaacaucagcccccuguccggcagcgcccagcacguggaggagugcuccugcuacccccgguaccccgaggugcgcugcgucugccgggacaacuggaagggcagcaaccgcccggugcuguacaucaacauggccgacuacuccaucgagagcuccuacgugugcagcgggcucgucggcgacacgccccgggacgacgacuccuucagcuccagcaacugccgcgaccccaacaacgagcggggcgcgcccggcgugaaggggugggccuucgacgacggcaacgacaucuggaugggccgcaccaucaaguccgacagccgguccggguacgagaccuuccgcguggucaacggcuggaccacggccaacagcaagucccagaucaaccgccaggugaucguggacagcgacagcugguccggguacagcggcaucuucuccgucgaggggaagaacugcaucaaccggugcuucuacguggagcugauccggggccgcccgcaggagaccaucgucugguggaccagcaacuccaucaucguguucugcggcaccagcgggacguacggcaccggguccuggcccgacggcgccaacaucaacuucaugcccaucuga

SEQ ID NO: 87577 - RNA, 1401 nt, Artificial Sequence; identical to SEQ ID NO: 87576
  derived and/or modified CDS sequence (opt1) from neuraminidase__InfluenzaA__AGQ81767

SEQ ID NO: 87578 - RNA, 1410 nt, Artificial Sequence
  derived and/or modified CDS sequence (opt1) from neuraminidase__InfluenzaA__AGQ81768
augaaccccaaccagaagaucguggccaucggcagcgucucccugaccaucgccaccaucugccuccugaugcagaucgcgauccuggugacgaccaugacccuccacuucaagcacggggagugcaccaacagcuccaacaaccaggccgugccgugcggccccaucaucaucgagcgcaacaucacggagaucguccaccugaacagcaccacccuggagaaggagaucugccccaaggccgccggguaccgggacugguccaagccccagugccagaucaccggcuucgccccguucagcaaggacaacuccauccgccucagcgcguccggggacaucugggugacgcgggagcccuacgugagcugcggccugggcaagugcuaccaguucgcccuggggcagggcaccacccucgacaaccgccacuccaacgggaccagccacgaccggacgccccaccgcacccugcugauguccgagcucggcguccccuuccaccuggccaccaagcaggucugcaucgccuggagcuccagcuccugccacgacggggaggcguggcugcacaucugcgugaccggcgacgaccggaacgccacggccagcaucaucuacgacggcaugcucguggacuccaucgggagcuggagcaagaacauccugcgcacccaggaguccgagugcgugugcaucaacgggaccugcaccguggucaugacggacggcagcgccuccggcaaggccgacacccggauccuguucauccgcgagggcaagaucgugcacaucagcccgcucuccgggagcgcgcagcacguggaggagugcuccugcuacccccaguaccccgagguccggugcgugugccgcgacaacuggcggggcagcaaccgccccgugcuguacaucaacauggccgacuacuccgucgacagcggguacgugugcuccggccuggugggggacaccccgcggaacgacgacaccagcuccagcuccaacugcaaggaccccaacaacgagcgcggcgcccccggcgucaaggggugggccuucgacagcggcaacgacaucuggauggggcggacgaucgagaaggaccuccgcuccggcuacgagaccuuccgggugaucgggggcuggaacaccgccaacagcaagucccagaccaaccgccaggugaucgucgacagcgacaacagcuccggcuacagcgggaucuucuccguggagggcaagagcugcaucaaccggugcuucuacgucgagcugauccgcgggcgccccaaggagacgcgggugugguggaccuccaacagcaucaucguguucugcggcaccuccgggaccuacggcacgggcagcuggccggacggggcgaacaucaacuucaugcccaucuga

SEQ ID NO: 87579 - RNA, 1410 nt, Artificial Sequence
  derived and/or modified CDS sequence (opt1) from neuraminidase__InfluenzaA__AGQ81769
augaaccccaaccagaagaucguggccaucggcagcgucucccugaccaucgccaccaucugccuccugaugcagaucgcgauccuggugacgaccaugacccuccacuucaagcacggggagugcaccaacagcuccaacaaccaggccgugccgugcggccccaucaucaucgagcgcaacaucacggagaucguccaccugaacagcaccacccuggagaaggagaucugccccaaggccgccggguaccgggacugguccaagccccagugccagaucaccggcuucgccccguucagcaaggacaacuccauccgccucagcgcguccggggacaucugggugacgcgggagcccuacgugagcugcggccugggcaagugcuaccaguucgcccuggggcagggcaccacccucgacaaccgccacuccaacgggaccagccacgaccggacgccccaccgcacccugcugauguccgagcucggcguccccuuccaccuggccaccaagcaggucugcaucgccuggagcuccagcuccugccacgacggggaggcguggcugcacaucugcgugaccggcgacgaccggaacgccacggccagcaucaucuacggcgggaugcucguggacuccaucggcagcuggagcaagaacauccugcgcacccaggaguccgagugcgugugcaucaacgggaccugcaccguggucaugacggacggcagcgccuccggcaaggccgacacccggauccuguucauccgcgaggggaagaucgugcacaucagcccgcucuccggcagcgcgcagcacguggaggagugcuccugcuacccccaguaccccgagguccggugcgugugccgcgacaacuggcgggggagcaaccgccccgugcuguacaucaacauggccgacuacuccgucgacagcggcuacgugugcuccgggcuggugggcgacaccccgcggaacgacgacaccagcuccagcuccaacugcaaggaccccaacaacgagcgcggcgcccccggggucaagggcugggccuucgacagcgggaacgacaucuggaugggccggacgaucgagaaggaccuccgcuccggguacgagaccuuccgggugaucggcggcuggaacaccgccaacagcaagucccagaccaaccgccaggugaucgucgacagcgacaacagcuccggguacagcggcaucuucuccguggagggcaagagcugcaucaaccggugcuucuacgucgagcugauccgcgggcgccccaaggagacgcgggugugguggaccuccaacagcaucaucguguucugcgggaccuccggcaccuacggcacggggagcuggccggacggcgcgaacaucaacuucaugcccaucuga

SEQ ID NO: 87580 - RNA, 1401 nt, Artificial Sequence
  derived and/or modified CDS sequence (opt1) from neuraminidase__InfluenzaA__AGQ81770
augaaccccaaccagaagaucaucgccaucggcagcguguccaucaccaucgccaucaucugcuucaucaugcagaucgcgauccugaccacgaccaugacccuccacuuccgccagaacgagugcagcaacccguccaacaaccaggucgugcccugcgagcccaucaucaucgagcggaacaccgugcaccugaacagcacgaccaucgagaaggagaccugccccaaggucgccgaguacaagaacugguccaagccgcagugccagaucaccggguucgcccccuucagcaaggacaacuccauccgccugagcgccggcggggacaucugggugacgcgggagcccuacguguccugcagccucggcaagugcuaccaguucgcccuggggcagggcaccacccugaagaacaagcacuccaacggcaccacgcacgaccgcaucccccaccggacccuccugaugaacgagcugggggucccguuccaccucggcaccaagcaggucugcaucgcguggagcuccagcuccugccacgacgggaaggccuggcugcacaucugcgugaccggcgacgacaagaacgccacggccagcaucaucuacgacgggaugcugguggacuccaucggcagcugguccaagaacauccuccgcacccaggagagcgagugcgugugcaucaacgggaccugcgcgguggucaugaccgacgggagcgccuccggcaaggccgacacgcgggugcuguucauccgcgaggggaagaucaucaacaucagcccccuguccggcagcgcccagcacguggaggagugcuccugcuacccccgguaccccgagguccgcugcgugugccgggacaacuggaagggcagcaaccgcccggugcucuacaucaacauggccgacuacuccgucgagagcuccuacgugugcagcgggcuggugggcgacacgccccgggacgacgacuccagcuccagcuccaacugccgcgaccccaacaacgagcggggcgcgcccggcgucaaggggugggccuucgacgacggcaacgacaucuggaugggccgcaccaucaagagcgacucccggagcggguacgagaccuuccgcguggugaacggcuggaccaccgccaacuccaagagccagaucaaccggcaggucaucguggacagcgacuccuggagcggguacuccggcaucuucagcgucgaggggaagaacugcaucaaccgcugcuucuacguggagcugauccggggccgcccgcaggagacccgcgugugguggaccuccaacagcaucaucgucuucugcggcacguccgggaccuacggcaccgggagcuggcccgacggcgccaacaucaacuucaugcccaucuga

SEQ ID NO: 87581 - RNA, 1410 nt, Artificial Sequence
  derived and/or modified CDS sequence (opt1) from neuraminidase__InfluenzaA__AGQ81772
augaaccccaaccagaagaucguggccaucggcagcgccucccugaccaucgcgaccaugugccuccugcugcagaucgcccucuucgccacgaccaugacccugcacuucaagcagaccgggugcacgaacagcuccgacaaccaggccgucccgugcggccccaucaucaucgagcgcaacaucaccgagaucgugcaccugaacagcaccacccucgagaaggagacgugccccaaguccgccggguaccggaacuggagcaagccccagugccagaucaccggcuucgcgccguucuccaaggacaacagcauccgccuggccgccgccggggacaucugggugacccgggagcccuacgucuccugcggccugggcaagugcuaccaguucgcgcucgggcagggcaccacgcuggacaacaagcacagcaacgggaccacccacgaccgcacgccccaccggacccugcucauguccgagcugggcgugcccuuccaccuggccaccaagcaggucugcaucgccuggagcuccagcuccugccacgacgggaaggccuggcuccacgugugcgugaccggcgacgacaagaacgccaccgcgagcaucaucuacgacggcauccugguggacuccaucgccagcugguccaagaacauccugcgcacgcaggagagcgagugcgucugcaucaacgggaccugcaccguggugaugaccgacggcagcgccuccgggcgggccgacacgcgcauccucuucauccgggagggcaagaucguccacaucagcccgcuguccggcagcgcccagcacguggaggagugcuccugcuacccccgcuaccccgaggugcggugcgucugccgcgacaacuggaaggggagcaaccggcccgugcuguucaucaacauggcggacuacuccaucgacagcuccuacgugugcccgggccucgucggggacacgccccgcaacgacgaccggagcuccagcuccaacugccgcgaccccaacaacgagcggggcgcccccggggugaagggcugggccuucgacagcggcaacgacaucuggauggggcgcaccaucgagaaggacucccggagcggcuacgagaccuuccgcgugaucuccggguggagcaccgccaacuccaagagccagaucaaccggcaggucaucguggaccgcgacaacagcuccggcuacagcgggaucuucuccguggagggcaagagcugcaucaaccgcugcuucuacgucgagcugauccggggccgcccgaaggagaaccgggugugguggaccuccaacagcaucaucgucuucugcgggaccuccggcaccuacgggacgggcagcuggcccgacggggccaacaucaaccugaugcccaucuga

SEQ ID NO: 87582 - RNA, 1401 nt, Artificial Sequence
  derived and/or modified CDS sequence (opt1) from neuraminidase__InfluenzaA__AGQ81773
augaaccccaaccagaagaucaucgccaucggcagcgugucccugaccaucgccaucaucugcuuccucaugcagaucgcgauccugaccacgaccaugacccugcacuuccgccagaacgagugcagcaacccguccaacaaccaggucgugcccugcgagcccaucaucaucgagcggaagaccgugcaccucaacagcacgaccaucgagaaggagaucugccccaaggucgccgaguacaagaacugguccaagccgcagugccagaucaccggguucgcccccuucagcaaggacaacuccauccgccugagcgccggcggggacaucugggugacccgggagcccuacguguccugcagccugggcaagugcuaccaguucgcccucgggcagggcacgacccugaagaacaagcacuccaacggcaccacccacgaccgcaucccccaccggacgcugcucaugaacgagcugggggucccgcugcacuggggcaccaagcaggucugcaucgcguggagcuccagcuccugccacgacgggaaggccuggcuccacaucugcgugaccggcgacgacaagaacgccaccgccagcaucaucuacgacgggaugcugguggacuccaucggcagcugguccaagaacauccugcgcacgcaggagagcgagugcgugugcaucaacgggaccugcgcgguggucaugaccgacgggagcgccuccggcaaggccgacacccggguccucuucauccgcgaggggaagaucaucaacaucagcccccuguccggcagcgcccagcacguggaggagugcuccugcuacccccgguaccccgaggugcgcugcgugugccgggacaacuggaagggcagcaaccgcccggugcuguacaucaacauggccgacuacuccaucgagagcuccuacgucugcagcgggcucgugggcgacacgccccgggacgacgacuccagcuccagcuccaacugccgcgaccccaacaacgagcggggcgcgcccggcgugaagggguggggcuucgacgacggcaacgacaucuggauggggcgcaccaucaagagcgacucccggagcggcuacgagaccuuccgcgucgugaacggguggaccacggccaacuccaagagccagaucaaccgccaggugaucgucgacagcgacuccuggagcggcuacuccgggaucuucagcguggagggcaagaacugcaucaaccggugcuucuacgucgagcugauccggggccgcccgcaggagacccgcgugugguggaccuccaacagcaucaucguguucugcgggaccuccggcacguacgggaccggcagcuggcccgacggggccaacaucaacuucaugcccaucuga

SEQ ID NO: 87583 - RNA, 1401 nt, Artificial Sequence
  derived and/or modified CDS sequence (opt1) from neuraminidase__InfluenzaA__AGQ81774
augaaccccaaccagaagaucaucgccaucggcagcgugucccugaucaucgccaucaucugccuccugaugcagaucgcgauccugaccaccacgaugacccuccacuuccgccagaacgagugcagcaacccguccaacaaccaggucaugcccugcgagcccaucaucaucgagcggaacaccgugcaccugaacagcaccacgaucgagcgcgagaucugccccaagguggccgaguacaagaacugguccaagccgcagugccagaucaccggguucgcccccuucagcaaggacaacuccauccggcugagcgccggcggggacaucugggucacccgcgagcccuacguguccugcagccucgacaagugcuaccaguucgcccugggccaggggaccacgcugaagaacaagcacuccaacggcaccacccacgaccggacgccccaccgcacccuccugaugaacgagcugggcgugccguuccaccucgggaccaagcaggucugcaucgcguggagcuccagcuccugcuacgacggcaaggccuggcugcacaucugcgugaccggggacgacaagaacgccaccgccagcaucaucuacgacggcaugcugguggacuccaucgggagcugguccaagaacauccuccggacgcaggagagcgagugcgucugcaucaacgggaccugcgcgguggugaugaccgacggcagcgccuccggcaaggccgacacccgcguccuguucauccgggagggcaagaucaucaacaucagcccccuguccgggagcgcccagcacguggaggagugcuccugcuacccccgcuaccccgaggugcggugcgucugccgcgacaacuggaagggcagcaaccggccgauccucuacaucaacauggccgacuacuccaucgagagcuccuacgugugcagcggccuggugggggacacgccccgcaacgacgacuccagcuccagcuccaacugccgggaccccaacaacgagcgcggcgcgcccggggucaagggcugggccuucgacgacgggaacgacguguggaugggccggaccaucaagaacggcagccgcuccggguacgagaccuuccggguggucaacggcuggaccaucgccaacagcaagucccagaucaaccgccaggugaucguggacagcgacgacuggagcggguacuccggcaucuucagcgucgaggggaagaagugcaucaaccggugcuucuacguggagcugauccgcggccgcccgcaggagccccgggucugguggacguccaacagcaucaucguguucugcggcaccuccgggaccuacggcaccgggagcuggcccgacggcgccaacaucaacuucaugcccaucuga

SEQ ID NO: 87584 - RNA, 1401 nt, Artificial Sequence
  derived and/or modified CDS sequence (opt1) from neuraminidase__InfluenzaA__AGQ81776
augaaccccaaccagaagaucaucgccaucggcagcgugucccugaccaucgccaucaucugcuuccucaugcagaucgcgauccugaccacgaccaugacccugcacuuccgccagaacgagugcagcaacccguccaacaaccaggucgugcccugcgagcccaucaucaucgagcggaacaccgugcaccucaacagcacgaccaucgagaaggagaucugccccaaggucgccgaguacaagaacugguccaagccgcagugccagaucaccggguucgcccccuucagcaaggacaacuccauccgccugagcgccggcggggacaucugggugacccgggagcccuacguguccugcagccugggcaagugcuaccaguucgcccucgggcagggcacgacccugaagaacaagcacuccaacggcaccacccacgaccgcaucccccaccggacgcugcucaugaacgagcugggggucccguuccaccugggcaccaagcaggucugcaucgcguggagcuccagcuccugccacgacgggaaggccuggcuccacaucugcgugaccggcgacgacaagaacgccaccgccagcaucaucuacgacgggaugcugguggacuccaucggcagcugguccaagaacauccugcgcacgcaggagagcgagugcgugugcaucaacgggaccugcgcgguggucaugaccgacgggagcgccuccggcaaggccgacacccggguccucuucauccgcgaggggaagaucaucaacaucagcccccuguccggcagcgcccagcacguggaggagugcuccugcuacccccgguaccccgaggugcgcugcgugugccgggacaacuggaagggcagcaaccgcccggugcuguacaucaacauggccgacuacuccaucgagagcuccuacgucugcagcgggcucgugggcgacacgccccgggacgacgacuccagcuccagcuccaacugccgcgaccccaacaacgagcggggcgcgcccggcgugaaggggugggccuucgacgacggcaacgacaucuggaugggccgcaccaucaagagcgacucccggagcggguacgagaccuuccgcgucaucgacggcuggaccacggccgacuccaagagccagaucaaccgccaggugaucguggacagcgacuccuggagcggguacuccggcaucuucagcgucgaggggaagaacugcaucaaccggugcuucuacguggagcugauccggggccgcccgcaggagacccgcgucugguggaccuccaacagcaucaucguguucugcggcaccuccgggacguacggcaccgggagcuggcccgacggcgccaacaucaacuucaugcccaucuga

SEQ ID NO: 87585 - RNA, 1410 nt, Artificial Sequence
  derived and/or modified CDS sequence (opt1) from neuraminidase__InfluenzaA__AGQ81777
augaaccccaaccagaagaucgugaccaucggcagcgccucccugaccaucgccacgaugugccuccugcugcagaucgcccucuucgcgaccaccaugacccugcacuucaagcagacggggugcaccaacagcuccgacaaccaggccgucccgugcggccccaucaucaucgagcgcaacaucaccgagaucgugcaccugaacagcaccacgcucgagaaggagaccugccccaaguccgccggguaccggaacuggagcaagccccagugccagaucaccggcuucgccccguucuccaaggacaacagcauccgccuggcggccgccggggacaucugggugacccgggagcccuacgucuccugcggccugggcaagugcuaccaguucgcccucgggcagggcacgacccuggacaacaagcacagcaacgggaccacccacgaccgcacgccccaccggacccugcucaugaacgagcugggcgugcccuuccaccuggcgaccaagcaggucugcaucgccugguccagcuccagcugccacgacgggaaggccuggcuccacgugugcgugaccggcgacgacaagaacgccacggccuccaucaucuacgacggcauccugguggacagcaucgcguccuggagcaagaacauccugcgcacccaggaguccgagugcgucugcaucaacgggaccugcaccguggugaugacggacggcagcgccagcgggcgggccgacacccgcauccucuucauccgggagggcaagaucguccacaucuccccgcugagcggcuccgcccagcacguggaggagugcagcugcuacccccgcuaccccgaggugcggugcgucugccgcgacaacuggaacggguccaaccggcccgugcuguucaucaacauggccgacuacagcaucgacuccagcuacgugugcuccggccucgucggggacaccccgcgcaacgacgaccggagcuccagcuccaacugccgcgaccccaacaacgagcggggcgcgcccggggugaagggcugggccuucgacagcggcaacgacaucuggauggggcgcaccaucgagaaggacucccggagcggcuacgagacguuccgcgugaucuccggguggagcaccgccaacuccaagagccagaucaaccggcaggucaucguggaccgcgacaacagcuccggcuacagcgggaucuucuccguggagggcaagagcugcaucaaccgcugcuucuacgucgagcugauccggggccgccccaaggagaaccgggugugguggaccuccaacagcaucaucgucuucugcgggaccuccggcacguacgggaccggcagcuggccggacggggccaacaucaaccugaugcccaucuga

SEQ ID NO: 87586 - RNA, 1410 nt, Artificial Sequence
  derived and/or modified CDS sequence (opt1) from neuraminidase__InfluenzaA__AGQ81778
augaaccccaaccagaagaucgugaccaucggcagcgccucccugaccaucgccacgaugugccuccugcugcagaucgcccucuucgcgaccaccaugacccugcacuucaagcagacggggugcaccaacagcuccgacaaccaggccgucccgugcggccccaucaucaucgagcgcaacaucaccgagaucgugcaccugaacagcaccacgcucgagaaggagaccugccccaaguccgccggguaccggaacuggagcaagccccagugccagaucaccggcuucgccccguucuccaaggacaacagcauccgccuggcggccgccggggacaucugggugacccgggagcccuacgucuccugcggccugggcaagugcuaccaguucgcccucgggcagggcacgacccuggacaacaagcacagcaacgggaccacccacgaccgcacgccccaccggacccugcucaugaacgagcugggcgugcccuuccaccuggcgaccaagcaggucugcaucgccugguccagcuccagcugccacgacgggaaggccuggcuccacgugugcgugaccggcgacgacaagaacgccacggccuccaucaucuacgacggcauccugguggacagcaucgcguccuggagcaagaacauccugcgcacccaggaguccgagugcgucugcaucaacgggaccugcaccguggugaugacggacggcagcgccagcgggcgggccgacacccgcauccucuucauccgggagggcaagaucguccacaucuccccgcugagcggcuccgcccagcacguggaggagugcagcugcuacccccgcuaccccgaggugcggugcgucugccgcgacaacuggaagggguccaaccggcccgugcuguucaucaacauggccgacuacagcaucgacuccagcuacgugugcuccggccucgucggggacaccccgcgcaacgacgaccggagcuccagcuccaacugccgcgaccccaacaacgagcggggcgcgcccggggugaagggcugggccuucgacagcggcaacgacaucuggauggggcgcaccaucgagaaggacucccggagcggcuacgagacguuccgcgugaucuccggguggagcaccgccaacuccaagagccagaucaaccggcaggucaucguggaccgcgacaacagcuccggcuacagcgggaucuucuccguggagggcaagagcugcaucaaccgcugcuucuacgucgagcugauccggggccgccccaaggagaaccgggugugguggaccuccaacagcaucaucgucuucugcgggaccuccggcacguacgggaccggcagcuggccggacggggccaacaucaaccugaugcccaucuga

SEQ ID NO: 87587 - RNA, 1410 nt, Artificial Sequence
  derived and/or modified CDS sequence (opt1) from neuraminidase__InfluenzaA__AGQ81779
augaaccccaaccagaagaucguggccaucggcagcgccucccugaccaucgcgaccaugugccuccugcugcagaucgcccucuucgccacgaccaugacccugcacuucaagcagaccgggugcacgaacagcuccgacaaccaggccgucccgugcggccccaucaucaucgagcgcaacaucaccgagaucgugcaccugaacagcaccacccucgagaaggagacgugccccaaguccgccggguaccggaacuggagcaagccccagugccagaucaccggcuucgcgccguucuccaaggacaacagcauccgccuggccgccgccggggacaucugggugacccgggagcccuacgucuccugcggccugggcaagugcuaccaguucgcgcucgggcagggcaccacgcuggacaacaagcacagcaacgggaccacccacgaccgcacgccccaccggacccugcucaugaacgagcugggcgugcccuuccaccuggccaccaagcaggucugcaucgccugguccagcuccagcugccacgacgggaaggccuggcuccacgugugcgugaccggcgacgacaagaacgccaccgcguccaucaucuacgacggcauccugguggacagcaucgccuccuggagcaagaacauccugcgcacgcaggaguccgagugcgucugcaucaacgggaccugcaccguggugaugaccgacggcagcgccagcgggcgggccgacacgcgcauccucuucauccgggagggcaagaucguccacaucuccccgcugagcggcuccgcccagcacguggaggagugcagcugcuacccccgcuaccccgagauccggugcgugugccgcgacaacuggaagggguccaaccggcccguccuguucaucaacauggcggacuacagcaucgacuccagcuacgugugcuccggccucgugggggacaccccgcgcaacgacgaccggagcuccagcuccaacugccgcgaccccaacaacgagcggggcgcccccggggucaagggcugggccuucgacagcggcaacgacaucuggauggggcgcaccaucgagaaggacucccggagcggcuacgagaccuuccgcgugaucuccggguggagcacggccaacuccaagagccagaucaaccgccaggugaucgucgaccgggacaacagcuccggcuacagcgggaucuucuccguggagggcaagagcugcaucaaccgcugcuucuacguggagcugauccggggccgccccaaggagaaccgggucugguggaccuccaacagcaucaucguguucugcgggaccuccggcaccuacgggacgggcagcuggccggacggggccaacaucaaccugaugcccaucuga

SEQ ID NO: 87588 - RNA, 1410 nt, Artificial Sequence
  derived and/or modified CDS sequence (opt1) from neuraminidase__InfluenzaA__AGQ81780
augaaccccaaccagaagaucguggccaucggcagcgccucccugaccaucgcgaccaugugccuccugcugcagaucgcccucuucgccacgaccaugacccugcacuucaagcagaccgggugcacgaacagcuccgacaaccaggccgucccgugcggccccaucaucaucgagcgcaacaucaccgagaucgugcaccugaacagcaccacccucgagaaggagacgugccccaaguccgccggguaccggaacuggagcaagccccagugccagaucaccggcuucgcgccguucuccaaggacaacagcauccgccuggccgccgccggggacaucugggugacccgggagcccuacgucuccugcggccugggcaagugcuaccaguucgcgcucgggcagggcaccacgcuggacaacaagcacagcaacgggaccacccacgaccgcacgccccaccggacccugcucaugaacgagcugggcgugcccuuccaccuggccaccaagcaggucugcaucgccugguccagcuccagcugccacgacgggaaggccuggcuccacgugugcgugaccggcgacgacaagaacgccaccgcguccaucaucuacgacggcauccugguggacagcaucgccuccuggagcaagaacauccugcgcacgcaggaguccgagugcgucugcaucaacgggaccugcaccguggugaugaccgacggcagcgccagcgggcgggccgacacgcgcauccucuucauccgggagggcaagaucguccacaucuccccgcugagcggcuccgcccagcacguggaggagugcagcugcuacccccgcuaccccgaggugcggugcgucugccgcgacaacuggaagggguccaaccggcccgugcuguucaucaacauggcggacuacagcaucgacuccagcuacgugugcuccggccucgucggggacaccccgcgcaacgacgaccggagcuccagcuccaacugccgcgaccccaacaacgagcggggcgccagcggggugaagggcugggccuucgacuccggcaacgacaucuggauggggcgcaccaucgagaaggacagccgguccggcuacgagaccuuccgcgugaucagcgggugguccacggccaacagcaagagccagaucaaccggcaggucaucguggaccgcgacaacuccagcggcuacuccgggaucuucagcguggagggcaaguccugcaucaaccgcugcuucuacgucgagcugauccggggccgccccaaggagaaccgggugugguggaccagcaacuccaucaucgucuucugcgggaccagcggcaccuacgggacgggcuccuggcccgacggggccaacaucaaccugaugccgaucuga

SEQ ID NO: 87589 - RNA, 1401 nt, Artificial Sequence
  derived and/or modified CDS sequence (opt1) from neuraminidase__InfluenzaA__AGQ81781
augaaccccaaccagaagaucaucgccaucggcagcgugucccugaccaucgccaucaucugcuuccucaugcagaucgcgauccugaccacgaccaugaccccgcacuuccgccagaacgagugcagcaaccccuccaacaaccaggucgugcccugcgagcccaucaucaucgagcggaacaccgugcaccugaacagcacgaccaucgagaaggagaucugcccgaaggucgccgaguacaagaacugguccaagccccagugccagaucaccggguucgcccccuucagcaaggacaacuccauccgccucagcgccggcggggacaucugggugacccgggagcccuacguguccugcagccugggcaagugcuaccaguucgcccuggggcagggcacgacccucaagaacaagcacuccaacggcaccacccacgaccgcaucccgcaccggacgcugcugaugaacgagcucgggguccccuuccaccugggcaccaagcaggucugcaucgcguggagcuccagcuccugccacgacgggaaggccuggcugcacaucugcgugaccggcgacgacaagaacgccaccgccagcaucaucuacgacgggaugcucguggacuccaucggcagcugguccaagaacauccugcgcacgcaggagagcgagugcgugugcaucaacgggaccugcgcgguggucaugaccgacgggagcgccuccggcaaggccgacacccggauccuguucauccgcgaggggaagaucaucaacaucagcccccucuccggcagcgcccagcacguggaggagugcuccugcuacccccgguacccggaggugcgcugcgucugccgggacaacuggaagggcagcaaccgccccgugcuguacaucaacauggccgacuacuccaucgagagcuccuacgugugcagcgggcuggucggcgacacgccccgggacgacgacuccagcuccagcuccaacugccgcgaccccaacaacgagcggggcgcgccgggcgugaaggggugggccuucgacgacggcaacgacaucuggaugggccgcaccaucaagagcgacucccggagcggguacgagaccuuccgcguggucaacggcuggaccacggccaacuccaagagccagaucaaccgccaggugaucguggacagcgacuccuggagcggguacuccggcaucuucagcgucgaggggaagaacugcaucaaccggugcuucuacguggagcucauccggggccgcccccaggagacccgcgucugguggaccuccaacagcaucaucguguucugcggcaccuccgggacguacggcaccgggagcuggcccgacggcgccgacaucaaccugaugcccaucuga

SEQ ID NO: 87590 - RNA, 1410 nt, Artificial Sequence
  derived and/or modified CDS sequence (opt1) from neuraminidase__InfluenzaA__AGQ81783
augaaccccaaccagaagaucgugaccaucggcagcgccucccugaccaucgccacgaugugccuccugcugcagaucgcccucuucgcgaccaccaugacccugcacuucaagcagacggggugcaccaacagcuccgacaaccaggccgucccgugcggccccaucaucaucgagcgcaacaucaccgagaucgugcaccugaacagcaccacgcucgagaaggagaccugccccaaguccgccggguaccggaacuggagcaagccccagugccagaucaccggcuucgccccguucuccaaggacaacagcauccgccuggcggccgccggggacaucugggugacccgggagcccuacgucuccugcggccugggcaagugcuaccaguucgcccucgggcagggcacgacccuggacaacaagcacagcaacgggaccacccacgaccgcacgccccaccggacccugcucaugaacgagcugggcgugcccuuccaccuggcgaccaagcaggucugcaucgccugguccagcuccagcugccacgacgggaaggccuggcuccacgugugcgugaccggcgacgacaagaacgccacggccuccaucaucuacaacggcauccugguggacagcaucgcguccuggagcaagaacauccugcgcacccaggaguccgagugcgucugcaucaacgggaccugcaccguggugaugacggacggcagcgccagcgggcgggccgacacccgcauccucuucauccgggagggcaagaucguccacaucuccccgcugagcggcuccgcccagcacguggaggagugcagcugcuacccccgcuaccccgaggugcggugcgucugccgcgacaacuggaagggguccaaccggcccgugcuguucaucaacauggccgacuacagcaucgacuccagcuacgugugcuccggccucgucggggacaccccgcgcaacgacgaccggagcuccagcuccaacugccgcgaccccaacaacgagcggggcgcgcccggggugaagggcugggccuucgacagcggcaacgacaucuggauggggcgcaccaucgagaaggacucccggagcggcuacgagacguuccgcgugaucuccggguggagcaccgccaacuccaagagccagaucaaccggcaggucaucguggaccgcgacaacagcuccggcuacagcgggaucuucuccguggagggcaagagcugcaucaaccgcugcuucuacgucgagcugauccggggccgccccaaggagaaccgggugugguggaccuccaacagcaucaucgucuucugcgggaccuccggcacguacgggaccggcagcuggccggacggggccaacaucaaccugaugcccaucuga

SEQ ID NO: 87591 - RNA, 1401 nt, Artificial Sequence
  derived and/or modified CDS sequence (opt1) from neuraminidase__InfluenzaA__AGQ81784
augaaccccaaccagaagaucaucgccaucggcagcgugucccugaccaucgccaucaucugcuuccucaugcagaucgcgauccugaccacgaccaugacccugcacuuccgccagaacgagugcagcaacccguccaacaaccaggucgugcccugcgagcccaucaucaucgagcggaacaccgugcaccucaacagcacgaccaucgagaaggagaucugccccaaggucgccgaguacaagaacugguccaagccgcagugccagaucaccggguucgcccccuucagcaaggacaacuccauccgccugagcgccggcggggacaucugggugacccgggagcccuacguguccugcagccugggcaagugcuaccaguucgcccucgggcagggcacgacccugcgcaacaagcacuccaacggcaccacccacgaccggaucccccaccgcacgcugcucaugaacgagcugggggucccguuccaccugggcaccaagcaggucugcaucgcguggagcuccagcuccugccacgacgggaaggccuggcuccacaucugcgugaccggcgacgacaagaacgccaccgccagcaucaucuacgacgggaugcugguggacuccaucggcagcugguccaagaacauccugcggacgcaggagagcgagugcgugugcaucaacgggaccugcgcgguggucaugaccgacggcaacgccagcggcaaggccgacacccgcguccucuucauccgggaggggaagaucaucaacaucagcccccuguccggcuccgcccagcacguggaggagugcagcugcuacccccgcuaccccgaggugcggugcgugugccgcgacaacuggaagggcuccaaccggccggugcuguacaucaacauggccgacuacagcaucgaguccagcuacgucugcuccgggcucgugggcgacacgccccgcgacgacgacagcuccagcuccagcaacugccgggaccccaacaacgagcgcggggcgcccggcgugaaggggugggccuucgacgacggcaacgacaucuggaugggccggaccaucaaguccgacagccgcuccggguacgagaccuuccgggucgugaacggcuggaccacggccaacagcaagucccagaucaaccgccaggugaucgucgacagcgacagcugguccggguacagcggcaucuucuccguggaggggaagaacugcaucaaccggugcuucuacgucgagcugauccgcggccgcccgcaggagacccgggugugguggaccagcaacuccaucaucguguucugcggcaccagcgggacguacggcaccggguccuggcccgacggcgccgacaucaacuucaugcccaucuga

SEQ ID NO: 87592 - RNA, 1401 nt, Artificial Sequence
  derived and/or modified CDS sequence (opt1) from neuraminidase__InfluenzaA__AGQ81785
augaaccccaaccagaagaucaucgccaucggcagcgugucccugaccaucgccaucaucugcuucaucaugcagaucgcgauccucaccacgaccaugaccccgcacuuccgccagaacgagugcagcaaccccuccaacaaccaggucgugcccugcgagcccaucaucaucgagcggaacaccgugcaccugaacagcacgaccaucgagaaggagaucugcccgaaggucgccgaguacaagaacugguccaagccccagugccagaucaccggguucgcccccuucagcaaggacaacuccauccgccugagcgccggcggggacaucugggugacccgggagcccuacguguccugcagccucggcaagugcuaccaguucgcccuggggcagggcacgacccugaagaacaagcacuccaacggcaccacccacgaccgcaucccgcaccggacgcuccugaugaacgagcuggggguccccuuccaccucggcaccaagcaggucugcaucgcguggagcuccagcuccugccacgacgggaaggccuggcugcacaucugcgugaccggcgacgacaagaacgccaccgccagcaucaucuacgacgggaugcugguggacuccaucggcagcugguccaagaacauccuccgcacgcaggagagcgagugcgugugcaucaacgggaccugcgcgguggucaugaccgacgggagcgccuccggcaaggccgacacccggauccuguucauccgcgaggggaagaucaucaacaucagcccccuguccggcagcgcccagcacguggaggagugcuccugcuacccccgguacccggaggugcgcugcgucugccgggacaacuggaagggcagcaaccgccccgugcucuacaucaacauggccgacuacuccaucgagagcuccuacgugugcagcgggcuggucggcgacacgccccgggacgacgacuccagcuccagcuccaacugccgcgaccccaacaacgagcggggcgcgccgggcgugaaggggugggccuucgacgacggcaacgacaucuggaugggccgcaccaucaagagcgacucccggagcggguacgagaccuuccgcguggucaacggcuggaccacggccaacuccaagagccagaucaaccgccaggugaucguggacagcgacuccuggagcggguacuccggcaucuucagcgucgaggggaagaacugcaucaaccggugcuucuacguggagcugauccggggccgcccccaggagacccgcgucugguggaccuccaacagcaucaucguguucugcggcaccuccgggacguacggcaccgggagcuggcccgacggcgccgacaucaaccucaugcccaucuga

SEQ ID NO: 87593 - RNA, 1401 nt, Artificial Sequence
  derived and/or modified CDS sequence (opt1) from neuraminidase__InfluenzaA__AGQ81787
augaaccccaaccagaagaucaucgccaucggcagcgugucccugaucaucgccaucaucugccuccugaugcagaucgcgauccugaccaccacgaugacccuccacuuccgccagaacgagugcagcaacccguccaacaaccaggucgugcccugcgagcccaucaucaucgagcggaacaccgugcaccugaacagcaccacgaucgagcgcgagaucugccccaaggucgccgaguacaagaacugguccaagccgcagugccagaucaccggguucgcccccuucagcaaggacaacuccauccggcugagcgccggcggggacaucugggugacccgcgagcccuacguguccugcagccucgacaagugcuaccaguucgcccugggccaggggaccacgcugaagaacaagcacuccaacggcaccacccacgaccggacgccccaccgcacccuccugaugaacgagcugggcgucccguuccaccucgggaccaagcaggucugcaucgcguggagcuccagcuccugcuacgacggcaaggccuggcugcacaucugcgugaccggggacgacaagaacgccaccgccagcaucaucuacgacggcaugcugguggacuccaucgggagcugguccaagaacauccuccggacgcaggagagcgagugcgugugcaucaacgggaccugcgcgguggucaugaccgacggcagcgccuccggcaaggccgacacccgcgugcuguucauccgggagggcaagaucaucaacaucagcccccuguccgggagcgcccagcacguggaggagugcuccugcuacccccgcuaccccgagguccggugcgugugccgcgacaacuggaagggcagcaaccggccgauccucuacaucaacauggccgacuacuccaucgagagcuccuacgugugcagcggccuggucggggacacgccccgcaacgacgacuccagcuccagcuccaacugccgggaccccaacaacgagcgcggcgcgcccggggugaagggcugggccuucgacgacgggaacgacguguggaugggccggaccaucaagaacggcagccgcuccggguacgagaccuuccgggucgugaacggcuggaccauggccaacagcaagucccagaucaaccgccaggugaucgucgacagcgacgacuggagcggguacuccggcaucuucagcguggaggggaagaagugcaucaaccggugcuucuacgucgagcugauccgcggccgcccgcaggagccccgggugugguggacguccaacagcaucaucguguucugcggcaccuccgggaccuacggcaccgggagcuggcccgacggcgccaacaucaacuucaugcccaucuga

SEQ ID NO: 87594 - RNA, 1401 nt, Artificial Sequence
  derived and/or modified CDS sequence (opt1) from neuraminidase__InfluenzaA__AGQ81789
augaaccccaaccagaagaucaucgccaucggcagcgugucccugaccaucgccaucaucugccuccugaugcagaucgcgauccugaccacgaccaugaccccgcacuuccgccagaacgagugcagcaaccccuccaacaaccaggucgugcccugcgagcccaucaucaucgagcggaacaccgugcaccucaacagcacgaccaucgagaaggagaucugcccgaaggucgccgaguacaagaacugguccaagccccagugccagaucaccggguucgcccccuucagcaaggacaacuccauccgccugagcgccggcggggacaucugggugacccgggagcccuacguguccugcagccugggcaagugcuaccaguucgcccucgggcagggcacgacccugaagaacaagcacuccaacggcaccacccacgaccgcaucccgcaccggacgcugcucaugaacgagcuggggguccccuuccaccugggcaccaagcaggucugcaucgcguggagcuccagcuccugccacgacgggaaggccuggcuccacaucugcgugaccggcgacgacaagaacgccaccgccagcaucaucuacgacgggaugcugguggacuccaucggcagcugguccaagaacauccugcgcacgcaggagagcgagugcgugugcaucaacgggaccugcgcgguggucaugaccgacgggagcgccuccggcaaggccgacacccggauccucuucauccgcgaggggaagaucaucaacaucagcccccuguccggcagcgcccagcacguggaggagugcuccugcuacccccgguacccggaggugcgcugcgucugccgggacaacuggaagggcagcaaccgccccgugcuguacaucaacauggccgacuacuccaucgagagcuccuacgugugcagcgggcucgucggcgacacgccccgggacgacgacuccagcuccagcuccaacugccgcgaccccaacaacgagcggggcgcgccgggcgugaaggggugggccuucgacgacggcaacgacaucuggaugggccgcaccaucaagagcgacucccggagcggguacgagaccuuccgcguggucaacggcuggaccacggccaacuccaagagccagaucaaccgccaggugaucguggacagcgacuccuggagcggguacuccggcaucuucagcgucgaggggaagaacugcaucaaccggugcuucuacguggagcugauccggggccgcccccaggagacccgcgucugguggaccuccaacagcaucaucguguucugcggcaccuccgggacguacggcaccgggagcuggcccgacggcgccgacaucaaccugaugcccaucuga

SEQ ID NO: 87595 - RNA, 1401 nt, Artificial Sequence
  derived and/or modified CDS sequence (opt1) from neuraminidase__InfluenzaA__AGQ81790
augaaccccaaccagaagaucaucgccaucggcagcgugucccugaucaucgccaucaucugccuccugaugcagaucgcgauccugaccaccacgaugacccuccacuuccgccagaacgagugcagcaacccguccaacaaccaggccaugcccugcgagcccaucaucaucgagcggaacaccguccaccugaacagcaccacgaucgagcgcgagaucugccccaaggugaccgaguacaagaacugguccaagccgcagugccagaucaccggguucgcccccuucagcaaggacaacuccauccggcugagcgccggcggggacaucugggugacccgcgagcccuacgucuccugcagccucgacaagugcuaccaguucgcccugggccaggggacgacccugaagaacaagcacuccaacggcaccacccacgaccggacgccccaccgcacccuccugaugaacgagcugggcgugccguuccaccucgggaccaagcaggucugcaucgcguggagcuccagcuccugcuacgacggcaaggccuggcugcacaucugcgugaccggggacgacaagaacgccacggccagcaucaucuacgacggcaugcugguggacuccaucgggagcugguccaagaacauccuccggacccaggagagcgagugcgugugcaucaacgggaccugcgcggucgugaugaccgacggcagcgccuccggccgcgccgacacgcgggugcuguucauccgcgagggcaagaucaucaacaucagcccccuguccgggaacgcccagcacgucgaggagugcagcugcuacccccgguaccccgaggugcgcugcgugugccgggacaacuggaagggcuccaaccgcccgauccucuacaucaacauggccgacuacagcaucgaguccagcuacgucugcuccggccuggugggggacacgccccggaacgacgacagcuccagcuccagcaacugccgcgaccccaacaacgagcggggcgcgcccggggugaagggcugggccuucgacgacgggaacgacgucuggaugggccgcaccaucaagaacggcucccggagcggguacgagaccuuccgcguggugaacggcuggaccauggccaacuccaagagccagaucaaccggcaggucaucguggacuccgacgaguggagcggguacagcggcaucuucuccguggaggggaagaagugcaucaaccgcugcuucuacgucgagcugauccgcggccggccgcaggagccccgcgugugguggaccagcaacuccaucaucgucuucugcggcaccagcgggaccuacggcacgggguccuggcccgacggcgccaacaucaacuucaugcccaucuga

SEQ ID NO: 87596 - RNA, 1401 nt, Artificial Sequence
  derived and/or modified CDS sequence (opt1) from neuraminidase__InfluenzaA__AGQ81792
augaaccccaaccagaagaucaucgccaucggcagcgugucccugaucaucgccaucaucugccuccugaugcagaucgcgauccugaccaccacgaugacccuccacuuccgccagaacgagugcagcaacccguccaacaaccaggucaugcccugcgagcccaucaucaucgagcggaacaccgugcaccugaacagcaccacgaucgagcgcgagaucugccccaagguggccgaguacaagaacugguccaagccgcagugccagaucaccggguucgcccccuucagcaaggacaacuccauccggcugagcgccggcggggacaucugggucacccgcgagcccuacguguccugcagccucaacaagugcuaccaguucgcccugggccaggggaccacgcuggagaacaagcacuccaacggcaccacccacgaccggacgccccaccgcacccuccugaugaacgagcugggcgugccguuccaccucgggaccaagcaggucugcauggcguggagcuccagcuccugcuacgacggcaaggccuggcugcacaucugcgugaccggggacgacaagaacgccaccgccagcgugaucuacgacggcaugcuggucgacuccaucgggagcuggucccagaacauccuccggacgcaggagagcgagugcgugugcaucaacgggaccugcgcgguggucaugaccgacggcagcgccuccggcaaggccgacacccgcgugcuguucauccgggagggcaagaucaucaacaucagcccccuguccgggagcgcccagcacguggaggagugcuccugcuacccccgcuaccccgagguccggugcgugugccgcgacaacuggaagggcagcaaccggccgauccucuacaucaacauggccgacuacuccaucgagagcuccuacgugugcagcggccuggucggggacacgccccgcaacgacgacuccagcuccagcuccaacugccgggaccccaacaacgagcgcggcgcgcccggggugaagggcugggccuucgacgacgggaacgacguguggaugggccggaccaucaagaacggcagccgcuccggguacgagaccuuccgggucgugaacggcuggaccauggccaacagcaagucccagaucaaccgccaggugaucgucgacagcgacgacuggagcggguacuccggcaucuucagcguggaggggaagaagugcaucaaccggugcuucuacgucgagcugauccgcggccgcccgcaggagccccgggugugguggacguccaacagcaucaucguguucugcggcaccuccgggaccuacggcaccgggagcuggcccgacggcgccaacaucaacuucaugcccaucuga

SEQ ID NO: 87597 - RNA, 1401 nt, Artificial Sequence
  derived and/or modified CDS sequence (opt1) from neuraminidase__InfluenzaA__AGQ81793
augaaccccaaccagaagaucaucgccaucggcagcgugucccugaucaucgccaucaucugccuccugaugcagaucgcgauccugaccaccacgaugacccuccacuuccgccagaacgagugcagcaacccguccaacaaccaggucaugcccugcgagcccaucaucaucgagcggaacaccgugcaccugaacagcaccacgaucgagcgcgagaucugccccaagguggccgaguacaagaacugguccaagccgcagugccagaucaccggguucgcccccuucagcaaggacaacuccauccggcugagcgccggcggggacaucugggucacccgcgagcccuacguguccugcagccucaacaagugcuaccaguucgcccugggccaggggaccacgcuggagaacaagcacuccaacggcaccacccacgaccggacgccccaccgcacccuccugaugaacgagcugggcgugccguuccaccucgggaccaagcaggucugcauggcguggagcuccagcuccugcuacgacggcaaggccuggcugcacaucugcgugaccggggacgacaagaacgccaccgccagcgugaucuacgacggcaugcuggucgacuccaucgggagcugguccaagaacauccuccggacgcaggagagcgagugcgugugcaucaacgggaccugcgcgguggucaugaccgacggcagcgccuccggcaaggccgacacccgcgugcuguucauccgggagggcaagaucaucaacaucagcccccuguccgggagcgcccagcacguggaggagugcuccugcuacccccgcuaccccgagguccggugcgugugccgcgacaacuggaagggcagcaaccggccgauccucuacaucaacauggccgacuacuccaucgagagcuccuacgugugcagcggccuggucggggacacgccccgcaacgacgacuccagcuccagcuccaacugccgggaccccaacaacgagcgcggcgcgcccggggugaagggcugggccuucgacgacgggaacgacguguggaugggccggaccaucaagaacggcagccgcuccggguacgagaccuuccgggucgugaacggcuggaccauggccaacagcaagucccagaucaaccgccaggugaucgucgacagcgacgacuggagcggguacuccggcaucuucagcguggaggggaagaagugcaucaaccggugcuucuacgucgagcugauccgcggccgcccgcaggagccccgggugugguggacguccaacagcaucaucguguucugcggcaccuccgggaccuacggcaccgggagcuggcccgacggcgccaacaucaacuucaugcccaucuga

SEQ ID NO: 87598 - RNA, 1401 nt, Artificial Sequence; identical to SEQ ID NO: 87597
  derived and/or modified CDS sequence (opt1) from neuraminidase__InfluenzaA__AGQ81794

SEQ ID NO: 87599 - RNA, 1401 nt, Artificial Sequence
  derived and/or modified CDS sequence (opt1) from neuraminidase__InfluenzaA__AGQ81795
augaaccccaaccagaagaucaucgccaucggcagcgugucccugaucaucgccaucaucugccuccugaugcagaucgcgauccugaccaccacgaugacccuccacuuccgccagaacgagugcaacaacccgagcaacaaccaggucaugcccugcgagcccaucaucaucgagcggaacaccgugcaccugaacuccaccacgaucgagcgcgagaucugccccaagguggccgaguacaagaacuggagcaagccgcagugccagaucaccggguucgcccccuucuccaaggacaacagcauccggcuguccgccggcggggacaucugggucacccgcgagcccuacgugagcugcucccucgacaagugcuaccaguucgcccugggccaggggaccacgcugaagaacaagcacagcaacggcaccacccacgaccggacgccccaccgcacccuccugaugaacgagcugggcgugccguuccaccucgggaccaagcaggucugcaucgcgugguccagcuccagcugcuacgacggcaaggccuggcugcacaucugcgugaccggggacgacaagaacgccaccgccuccaucaucuacgacggcaugcugguggacagcaucggguccuggagcaagaacauccuccggacgcaggaguccgagugcgucugcaucaacgggaccugcgcgguggugaugaccgacggcagcgccagcggcaaggccgacacccgcguccuguucauccgggagggcaagaucaucaacaucagcccccuguccggguccgcccagcacguggaggagugcagcugcuacccccgcuaccccgaggugcggugcgucugccgcgacaacuggaagggcuccaaccggccgauccucuacaucaacauggccgacuacagcaucgaguccagcuacgugugcuccggccuggugggggacacgccccgcaacgacgacagcuccagcuccagcaacugccgggaccccaacaacgagcgcggcgcgcccggggucaagggcugggccuucgacgacgggaacgacguguggaugggccggaccaucaagaacggcucccgcagcggguacgagaccuuccggguggucaacggcuggaccaucgccaacuccaagagccagaucaaccgccagaucaucguggacuccgacgacuggagcggguacagcggcaucuucuccguggaggggaagaagugcaucaaccggugcuucuacgucgagcugauccgcggccgcccgcaggagccccgggugugguggacgagcaacuccaucaucgucuucugcggcaccagcgggaccuacggcaccggguccuggcccgacggcgccaacaucaacuucaugcccaucuga

SEQ ID NO: 87600 - RNA, 1401 nt, Artificial Sequence
  derived and/or modified CDS sequence (opt1) from neuraminidase__InfluenzaA__AGQ81796
augaaccccaaccagaagaucaucgccaucggcagcgugucccugaucaucgccaucaucugccuccugaugcagaucgcgauccugaccaccacgaugacccuccacuuccgccagaacgagugcagcaacccguccaacaaccaggucaugcccugcgagcccaucaucaucgagcggaacaccgugcaccugaacagcaccacgaucgagcgcgagaucugccccaagguggccgaguacaagaacugguccaagccgcagugccagaucaccggguucgcccccuucagcaaggacaacuccauccggcugagcgccggcggggacaucugggucacccgcgagcccuacguguccugcagccucgacaagugcuaccaguucgcccugggccaggggaccacgcugaagaacaagcacuccaacggcaccacccacgaccggacgccccaccgcacccuccugaugaacgagcugggcgugccguuccaccucgggaccaagcaggucugcaucgcguggagcuccagcuccugcuacgacggcaaggccuggcugcacaucugcgugaccggggacgacaagaacgccaccgccagcaucaucuacgacggcaugcugguggacuccaucgggagcugguccaagaacauccuccggacgcaggagagcgagugcgucugcaucaacgggaccugcgcgguggugaugaccgacggcagcgccuccggcaaggccgacacccgcguccuguucauccgggagggcaagaucaucaacaucagcccccuguccgggagcgcccagcacguggaggagugcuccugcuacccccgcuaccccgaggugcggugcgucugccgcgacaacuggaagggcagcaaccggccgauccucuacaucaacauggccgacuacuccaucgagagcuccuacgugugcagcggccuggugggggacacgccccgcaacgacgacuccagcuccagcuccaacugccgggaccccaacaacgagcgcggcgcgcccggggucaagggcugggccuucgacgacgggaacgacaucuggaugggccggaccaucaagaacggcagccgcuccggguacgagaccuuccggguggugaacggcuggaccauggccaacagcaagucccagaucaaccgccaggucaucguggacagcgacgacuggagcggguacuccggcaucuucagcguggaggggaagaagugcaucaaccggugcuucuacgucgagcugauccgcggccgcccgcaggagccccgggugugguggacguccaacagcaucaucgucuucugcggcaccuccgggaccuacggcaccgggagcuggcccgacggcgccaacaucaacuucaugcccaucuga

SEQ ID NO: 87601 - RNA, 1401 nt, Artificial Sequence
  derived and/or modified CDS sequence (opt1) from neuraminidase__InfluenzaA__AGQ81798
augaaccccaaccagaagaucaucagcaucggcuccgugagccugaucaucgccaucaucugccuccugaugcagaucgccauccugaccaccacgaugacccuccacuuccgccagaacgagugcuccaacccgagcaacaaccaggucaugcccugcgagcccaucaucaucgagcggaacaccgugcaccugaacuccaccacgaucgagcgcgagaucugccccaagguggcggaguacaagaacuggagcaagccgcagugccagaucaccggguucgcccccuucuccaaggacaacagcauccggcuguccgccggcggggacaucugggucacccgcgagcccuacgugagcugcucccucgacaagugcuaccaguucgcccugggccaggggaccacgcugaagaacaagcacagcaacggcaccacccacgaccggacgccccaccgcacccuccugaugaacgagcugggcgugccguuccaccucgggaccaagcaggucugcaucgccugguccagcuccagcugcuacgacggcaaggcguggcugcacaucugcgugaccggggacgacaagaacgccaccgccuccaucaucuacgacggcaugcugguggacagcaucggguccuggagcaagaacauccuccggacgcaggagagcgagugcgucugcaucaacgggaccugcgccguggugaugaccgacggcuccgcgagcggcaaggccgacacccgcguccuguucauccgggagggcaagaucaucaacaucagcccccuguccggguccgcccagcacguggaggagugcagcugcuacccccgcuaccccgaggugcggugcgucugccgcgacaacuggaagggcuccaaccggccgauccucuacaucaacauggccgacuacagcaucgaguccagcuacgugugcuccggccuggugggggacacgccccgcaacgacgacagcuccagcuccagcaacugccgggaccccaacaacgagcgcggcgcccccggggucaagggcugggcguucgacgacgggaacgacguguggaugggccggaccaucaagaacggcucccgcagcggguacgagaccuuccggguggucaacggcuggaccauggccaacuccaagagccagaucaaccgccaggugaucguggacagcgacgacugguccggguacagcggcaucuucuccgucgaggggaagaagugcaucaaccggugcuucuacguggagcugauccgcggccgcccgcaggagccccgggucugguggacgagcaacuccaucaucguguucugcggcaccagcgggaccuacggcaccggguccuggcccgacggcgccaacaucaacuucaugcccaucuga

SEQ ID NO: 87602 - RNA, 1401 nt, Artificial Sequence
  derived and/or modified CDS sequence (opt1) from neuraminidase__InfluenzaA__AGQ81799
augaaccccaaccagaagaucaucgccaucggcagcgugucccugaucaucgccaucaucugccuccugaugcagaucgcgauccugaccaccacgaugacccuccacuuccgccagaacgagugcagcaacccguccaacaaccaggucaugcccugcgagcccaucaucaucgagcggaacaccgugcaccugaacagcaccacgaucgagcgcgagaucugccccaagguggccgaguacaagaacugguccaagccgcagugccagaucaccggguucgcccccuucagcaaggacaacuccauccggcugagcgccggcggggacaucugggucacccgcgagcccuacguguccugcagccucgacaagugcuaccaguucgcccugggccaggggaccacgcugaagaacaagcacuccaacggcaccacccacgaccggacgccccaccgcacccuccugaugaacgagcugggcgugccguuccaccucgggaccaagcaggucugcaucgcguggagcuccagcuccugcuacgacggcaaggccuggcugcacaucugcgugaccggggacgacaagaacgccaccgccagcaucaucuacgacggcaugcugguggacuccaucgggagcugguccaagaacauccuccggacgcaggagagcgagugcgucugcaucaacgggaccugcgcgguggugaugaccgacggcagcgccuccggcaaggccgacacccgcguccuguucauccgggagggcaagaucaucaacaucagcccccuguccgggagcgcccagcacguggaggagugcuccugcuacccccgcuaccccgaggugcggugcgucugccgcgacaacuggaagggcagcaaccggccgauccucuacaucaacauggccgacuacuccaucgagagcuccuacgugugcagcggccuggugggggacacgccccgcaacgacgacuccagcuccagcuccaacugccgggaccccaacaacgagcgcggcgcgcccggggucaagggcugggccuucgacgacgggaacgacguguggaugggccggaccaucaagaacggcagccgcuccggguacgagaccuuccggguggucaacggcuggaccauggccaacagcaagucccagaucaaccgccaggugaucguggacagcgacgacuggagcggguacuccggcaucuucagcgucgaggggaagaagugcaucaaccggugcuucuacguggagcugauccgcggccgcccgcaggagccccgggucugguggacguccaacagcaucaucguguucugcggcaccuccgggaccuacggcaccgggagcuggcccgacggcgccaacaucaacuucaugcccaucuga

SEQ ID NO: 87603 - RNA, 1401 nt, Artificial Sequence; identical to SEQ ID NO: 87602
  derived and/or modified CDS sequence (opt1) from neuraminidase__InfluenzaA__AGQ81800

SEQ ID NO: 87604 - RNA, 1401 nt, Artificial Sequence
  derived and/or modified CDS sequence (opt1) from neuraminidase__InfluenzaA__AGQ81801
augaaccccaaccagaagaucaucgccaucggcagcgugucccugaucaucgccaucaucugccuccugaugcagaucgcgauccugaccaccacgaugacccuccacuuccgccagaacgagugcagcaacccguccaacaaccaggucaugcccugcgagcccaucaucaucgagcggaacaccgugcaccugaacagcaccacgaucgagcgcgagaucugccccaagguggccgaguacaagaacugguccaagccgcagugccagaucaccggguucgcccccuucagcaaggacaacuccauccggcugagcgccuccggcgacaucugggucacccgcgagcccuacgugagcugcucccucgacaagugcuaccaguucgcccuggggcagggcaccacgcugaagaacaagcacagcaacgggaccacccacgaccggacgccccaccgcacccuccugaugaacgagcugggcgugccguuccaccucggcaccaagcaggucugcaucgcgugguccagcuccagcugcuacgacgggaaggccuggcugcacaucugcgugaccggcgacgacaagaacgccaccgccuccaucaucuacgacgggaugcugguggacagcaucggcuccuggagcaagaacauccuccggacgcaggagagcgagugcgucugcaucaacgggaccugcgcgguggugaugaccgacggcuccgccagcggcaaggccgacacccgcguccuguucauccgggaggggaagaucaucaacaucagcccccuguccggcuccgcccagcacguggaggagugcagcugcuacccccgcuaccccgaggugcggugcgucugccgcgacaacuggaagggguccaaccggccgauccucuacaucaacauggccgacuacagcaucgaguccagcuacgugugcuccggccuggugggcgacacgccccgcaacgacgacagcuccagcuccagcaacugccgggaccccaacaacgagcgcggggcgcccggcgucaaggggugggccuucgacgacggcaacgacguguggauggggcggaccaucaagaacggcucccgcagcggcuacgagaccuuccggguggucaacggguggaccauggccaacuccaagagccagaucaaccgccaggugaucguggacagcgacgacugguccggcuacagcgggaucuucuccgucgagggcaagaagugcaucaaccggugcuucuacguggagcugauccgcgggcgcccgcaggagccccgggucugguggacgagcaacuccaucaucguguucugcggcaccagcggcaccuacgggaccggcuccuggcccgacggggccaacaucaacuucaugcccaucuga

SEQ ID NO: 87605 - RNA, 1401 nt, Artificial Sequence
  derived and/or modified CDS sequence (opt1) from neuraminidase__InfluenzaA__AGQ81802
augaaccccaaccagaagaucaucgccaucggcagcgugucccugaucaucgccaucaucugccuccugaugcagaucgcgcugcucaccaccacgaugacccugcacuuccgccagaacgagugcagcaacccguccaacaaccaggucaugcccugcgagcccaucaucaucgagcggaacaccgugcaccugaacagcaccacgaucgagcgcgagaucugccccaagguggccgaguacaagaacugguccaagccgcagugccagaucaccggguucgcccccuucagcaaggacaacuccauccggcucagcgccggcggggacaucugggucacccgcgagcccuacguguccugcagccuggacaagugcuaccaguucgcccugggccaggggaccacgcucaagaacaagcacuccaacggcaccacccacgaccggacgccccaccgcacccugcugaugaacgagcucggcgugccguuccaccuggggaccaagcaggucugcaucgcguggagcuccagcuccugcuacgacggcaaggccuggcugcacaucugcgugaccggggacgacaagaacgccaccgccagcaucaucuacaacggcaugcucguggacuccaucgggagcugguccaagaacauccugcggacgcaggagagcgagugcgucugcaucaacgggaccugcgcgguggugaugaccgacggcagcgccuccggcaaggccgacacccgcguccuguucauccgggagggcgagaucaucaacaucagcccccucuccgggagcgcccagcacguggaggagugcuccugcuacccccgcuaccccgaggugcggugcgucugccgcgacaacuggaagggcagcaaccggccgauccuguacaucaacauggccgacuacuccaucgagagcuccuacgugugcagcggccuggugggggacacgccccgcaacgacgacuccagcuccagcuccaacugccgggaccccaacaacgagcgcggcgcgcccggggucaagggcugggccuucgacgacgggaacgacguguggaugggccggaccaucaagaacggcagccgcuccggguacgagaccuuccggguggucaacggcuggaccauggccaacagcaagucccagaucaaccgccaggugaucguggacagcgacgacuggagcggguacuccggcaucuucagcgucgaggggaagaagugcaucaaccggugcuucuacguggagcucauccgcggccgcccgcaggagccccgggucugguggacguccaacagcaucaucguguucugcggcaccuccgggaccuacggcaccgggagcuggcccgacggcgccaacaucaacuucaugcccaucuga

SEQ ID NO: 87606 - RNA, 1401 nt, Artificial Sequence
  derived and/or modified CDS sequence (opt1) from neuraminidase__InfluenzaA__AGQ81803
augaaccccaaccagaagaucaucgccaucggcagcgugucccugaucaucgccaucaucugccuccugaugcagaucgcgauccugaccaccacgaugacccuccacuuccgccagaacgagugcagcaacccguccaacaaccaggucaugcccugcgagcccaucaucaucgagcggaacaccgugcaccugaacagcaccacgaucgagcgcgagaucugccccaagguggccgaguacaagaacugguccaagccgcagugccagaucaccggguucgcccccuucagcaaggacaacuccauccggcugagcgccuccggcgacaucugggucacccgcgagcccuacgugagcugcucccucgacaagugcuaccaguucgcccuggggcagggcaccacgcugaagaacgagcacagcaacgggaccacccacgaccggacgccccaccgcacccuccugaugaacgagcugggcgugccguuccaccucggcaccaagcaggucugcaucgcgugguccagcuccagcugcuacgacgggaaggccuggcugcacaucugcgugaccggcgacgacaagaacgccaccgccuccaucaucuacgacgggaugcugguggacagcaucggcuccuggagcaagaacauccuccggacgcaggagagcgagugcgucugcaucaacgggaccugcgcgguggugaugaccgacggcuccgccagcggcaaggccgacacccgcguccuguucauccgggaggggaagaucaucaacaucagcccccuguccggcuccgcccagcacguggaggagugcagcugcuacccccgcuaccccgaggugcggugcgucugccgcgacaacuggaagggguccaaccggccgauccucuacaucaacauggccgacuacagcaucgaguccagcuacgugugcuccggccuggugggcgacacgccccgcaacgacgacagcuccagcuccagcaacugccgggaccccaacaacgagcgcggggcgcccggcgucaaggggugggccuucgacgacggcaacgacguguggauggggcggaccaucaagaacggcucccgcagcggcuacgagaccuuccggguggucaacggguggaucauggccaacuccaagagccagaucaaccgccaggugaucguggacagcgacgacugguccggcuacagcgggaucuucuccgucgagggcaagaagugcaucaaccggugcuucuacguggagcugauccgcgggcgcccgcaggagccccgggucugguggaccagcaacuccaucaucguguucugcggcacgagcggcaccuacgggaccggcuccuggcccgacggggccaacaucaacuucaugcccaucuga

SEQ ID NO: 87607 - RNA, 1410 nt, Artificial Sequence
  derived and/or modified CDS sequence (opt1) from neuraminidase__InfluenzaA__AGQ81804
augaaccccaaccagaagaugaucgccaucggcgccgugagccugaccaucgcgaucaucugccuccugaugcagaccgccauccuggucacgaccaugacccuccacuucaagcacaacgagugcaccaacuccagcaacaaccaggccgccccgugcgggcccaucaucaucgagcgcaacgugacggaggugguccaccugaacuccaccacccuggagaaggagaucugccccaaggccgcgggcuaccggaacuggagcaagccccagugccagaucaccggguucgccccguucuccaaggacaacagcauccgccucuccgccggcggggacaucugggugacgcgggagcccuacgugagcugcggccugggcaagugcuaccaguucgcccuggggcagggcaccacccucgacaacucccacagcaacgggaccucccacgaccgcacgccccaccggacccugcugaugaacgagcucggcguccccuuccaccugaugaccaagcaggucugcaucgcguggagcuccagcuccugccacgacgggaaggccuggcugcacgugugcgugaccggcgacgaccgcaacgccacggccagcaucaucuacggcgggauccucguggacuccaucggcagcugguccaagaacauccugcggacccaggagagcgagugcgugugcaucaacgggaccugcgccgucgugaugaccgacggcagcgcguccggcaaggccgacacgcgcauccuguucauccgggaggggaagaucgugcacaucagcccgcucuccggcagcgcccagcacgucgaggagugcuccugcuacccccaguaccccgaggugcgcugcgugugccgggacaacuggcgcgggagcaaccggcccguccuguacaucaacauggccgacuacuccaucgacagcggcuacgugugcuccgggcuggugggcgacaccccgcgcaacgacgacgucagcuccagcuccaacugcaaggaccccaacaacgagcggggcgcccccggggugaagggcugggcguucgacaacgggaacgacaucuggaugggccgcaccaucgacaaggacagccgguccggguacgagaccuuccgcgugaucgacggcuggaacacggccaacagcaagucccagaccagccggcaggucaucgugggcuccgacaacagcagcggguacuccggcaucuucagcgucgaggggaaguccugcaucaaccgcugcuucuacguggagcucauccggggccgccccaaggagacccgcgugugguggaccagcaacuccaucaucgucuucugcgggacgagcggcaccuacggcaccggguccuggccggacggcgccaacaucaacuucaugcccaucuga

SEQ ID NO: 87608 - RNA, 1401 nt, Artificial Sequence
  derived and/or modified CDS sequence (opt1) from neuraminidase__InfluenzaA__AGQ81805
augaaccccaaccagaagaucaucgccaucggcagcgugucccugaucaucgccaucaucugccuccugaugcagaucgcgcugcucaccaccacgaugacccugcacuuccgccagaacgagugcagcaacccguccaacaaccaggucaugcccugcgagcccaucaucaucgagcggaacaccgugcaccugaacagcaccacgaucgagcgcgagaucugccccaagguggccgaguacaagaacugguccaagccgcagugccagaucaccggguucgcccccuucagcaaggacaacuccauccggcucagcgccggcggggacaucugggucacccgcgagcccuacguguccugcagccuggacaagugcuaccaguucgcccugggccaggggaccacgaugaagaacaagcacuccaacggcaccacccacgaccggacgccccaccgcacccuccugaugaacgagcugggcgugccguuccaccucgggaccaagcaggucugcaucgcguggagcuccagcuccugcuacgacggcaaggccuggcugcacaucugcgugaccggggacgacaagaacgccaccgccagcaucaucuacgacggcaugcugguggacuccaucgggagcugguccaagaacauccuccggacgcaggagagcgagugcgucugcaucaacgggaccugcgcgguggugaugaccgacggcagcgccuccggcaaggccgacacccgcguccuguucauccgggagggcaagaucaucaacaucagcccccuguccgggagcgcccagcacguggaggagugcuccugcuacccccgcuaccccgaggugcggugcgucugccgcgacaacuggaagggcagcaaccggccgauccucuacaucaacauggccgacuacuccaucgagagcuccuacgugugcagcggccuggugggggacacgccccgcaacgacgacuccagcuccagcuccaacugccggggccccaacaacgagcgcggggcgcccggcgucaaggggugggccuucgacgacggcaacgacguguggaugggccggaccaucaagaacgggagccgcuccggcuacgagaccuuccggguggucaacggguggaccauggccaacagcaagucccagaucaaccgccaggugaucguggacagcgacgacuggagcggcuacuccgggaucuucagcgucgagggcaagaagugcaucaaccggugcuucuacguggagcugauccgcggccgcccgcaggagccccgggucugguggacguccaacagcaucaucguguucugcgggaccuccggcaccuacgggaccggcagcuggcccgacggggccaacaucaacuucaugcccaucuga

SEQ ID NO: 87609 - RNA, 1401 nt, Artificial Sequence
  derived and/or modified CDS sequence (opt1) from neuraminidase__InfluenzaA__AGQ81807
augaaccccaaccagaagaucaccgccaucggcagcaucucccugaucaucgccaucaucugccuccugaugcagaucgcgauccugaccacgaccaugacccuccacuuccgccagaacgagugccggaacccgagcaacaaccaggugaugcccugcgagcccgucaucaucgagcgcaacaccgugcaccugaacuccacgaccaucgagcgggagaucugccccaagguggccgaguacaagaacuggagcaagccgcagugccagaucaccggguucgcccccuucuccaaggacaacagcauccgccuguccgccagcggcgacaucugggucacccgggagcccuacguguccugcagccucaacaagugcuaccaguucgcccuggggcagggcacgacccugaagaacaagcacuccaacgggaccacccacgaccgcacgccccaccggacccuccugaugaacgagcugggcgugccguuccaccucggcaccaagcaggucugcaucgcguggagcuccagcuccugcuacgacgggaaggccuggcugcacaucugcgugaccggcgacgacaagaacgccacggccagcaucaucuacgacgggaugcugguggacuccaucggcagcugguccaagaacauccuccgcacccaggagagcgagugcgucugcaucaacgggaccugcgcgguggugaugaccgacggcagcgccuccggcaaggccgacacgcggguccuguucaucaaggaggggaagaucaucaacaucagcccccuguccggcagcgcccagcacguggaggagugcuccugcuacccccgcuaccccgaggugcggugcgucugccgcgacaacuggaaggggagcaaccggccgauccucuacaucaacauggccgacuacuccaucgagagcuccuacgugugcagcggccuggugggcgacacgccccgcaacgacgacuccagcuccagcuccaacugccgggaccccaacaacgagcgcggggcgcccggcgucaaggggugggccuucgacgacggcaacgacguguggauggggcggaccaucaagaacggcagccgcuccggcuacgagaccuuccggguggucaacggguggaucauggccaacagcaagucccagaucaaccgccaggugaucguggacagcgacgacuggagcggcuacuccgggaucuucagcgucgagggcaagaagugcaucaaccggugcuucuacguggagcugauccgcgggcgcccgcaggagccccgggucugguggaccuccaacagcaucaucguguucugcggcaccuccggcaccuacgggaccggcagcuggcccgacggggccaacaucaacuucaugcccaucuga

SEQ ID NO: 87610 - RNA, 1401 nt, Artificial Sequence
  derived and/or modified CDS sequence (opt1) from neuraminidase__InfluenzaA__AGQ81808
augaaccccaaccagaagaucaucgccaucggcagcgugucccugaccaucgccaucaucugcuuccucaugcagaucgcgauccugaccacgaccaugacccugcacuucaagcagaacgagugcagcaacccguccaacaaccaggucgugcccugcgagcccauccucaucgagcgcaacaccgugcaccugaacagcacgaccaucgagaaggaggucugccccaagguggccgaguacaagaacugguccaagccgcagugccagaucaccggguucgcccccuucagcaaggacaacuccauccggcugagcgccggcggggacaucugggugacccgcgagcccuacgucuccugcagccucggcaagugcuaccaguucgcccuggggcagggcacgacccugaagaacaaccacuccaacggcaccacccacgaccggacgccccaccgcacccuccugaugaacgagcugggggugccguuccaccucggcaccaagcaggucugcaucgcguggagcuccagcuccugcuacgacgggaaggccuggcugcacaucugcgugaccggcgacgacaagaacgccacggccagcaucaucuacgacgggaugcugguggacuccaucggcagcugguccaagaacauccuccggacccaggagagcgagugcgugugcaucaacgggaccugcgcggucgugaugaccgacggcagcgccuccggcaaggccgacacgcgcauccuguucauccgggaggggaagaucaucaacaucagcccccuguccggcagcgcccagcacguggaggagugcuccugcuacccccgcuaccccgagguccggugcgugugccgcgacaacuggaagggcagcaaccggccggugcucuacaucaacauggccgacuacuccgucgagagcuccuacgugugcagcgggcuggugggcgacacgccccgcaacgacgacuccagcuccagcuccaacugccgggaccccaacaacgagcgcggggcgcccggcgucaaggggugggccuucgacgacggcaacgacguguggaugggccggaccauccgcaacaacagccgguccggguacgagaccuuccgcguggucaacggcuggaccaccgccaacagcaagucccagaucaaccggcagaucaucguggacagcgagaacuggagcggguacuccggcaucuucagcgucgaggggaagaacugcaucaaccgcugcuucuacguggagcugauccggggccgcccgcaggagccccgcgugugguggaccuccaacagcaucaucgucuucugcggcaccuccgggacguacggcaccgggagcuggcccgacggcgccaacaucaacuucaugcccaucuga

SEQ ID NO: 87611 - RNA, 1401 nt, Artificial Sequence
  derived and/or modified CDS sequence (opt1) from neuraminidase__InfluenzaA__AGQ81809
augaaccccaaccagaagaucaccgccaucggcagcgugucccugaucaucgccaucaucugccuccugaugcagaucgcgauccugaccacgaccaugacccuccacuuccgccagaacgagugcagcaacccguccaacaaccaggucaugcccugcgagcccaucaucaucgagcggaacaccgugcaccugaacagcacgaccaucgagcgcgagaucugccccaagguggccgaguacaagaacugguccaagccgcagugccagaucaccggguucgcccccuucagcaaggacaacuccauccggcugagcgccggcggggacaucugggucacccgcgagcccuacguguccugcagccccgacaagugcuaccaguucgcccucggccaggggacgacccugaagaacaagcacuccaacggcaccacccacgaccggacgccgcaccgcacccugcucaugaacgagcugggcgugcccuuccaccuggggaccaagcaggucugcaucgcguggagcuccagcuccugcuacgacggcaaggccuggcuccacaucugcgugaccggggacgacaagaacgccacggccagcaucaucuacgacggcaugcugguggacuccaucgggagcugguccaagaacauccugcggacccaggagagcgagugcgucugcaucaacgggaccugcgcgguggugaugaccgacggcagcgccuccggggaggccgacacgcgcauccucuucauccgggagggcaagaucaucaacaucagcccccuguccgggagcgcccagcacgucgaggagugcuccugcuacccccgcuacccggaggugcggugcgugugccgcgacaacuggaagggcagcaaccggcccaucaucuacaucaacauggucgacuacuccaucggcagccgcuacgugugcuccgggcuggugggcgacacgccccggaacgacgacagcaccuccagcuccaacugccgcgaccccaacaacgagcggggcgccccgggcgucaaggggugggcguucgacgacggcaacgacguguggaugggccgcaccaucaagaacgggagccgguccggcuacgagaccuuccgcgugaucaacggguggaccauggccaacagcaagucccagaucaaccggcaggucaucguggacagcgacaacugguccggcuacagcgggaucuucagcguggagggcaagaagugcaucaaccgcugcuucuacgucgagcucauccgcggccggccccaggagccccgcgugugguggaccuccaacagcaucaucgucuucugcgggaccuccggcacguacgggaccggcagcuggcccgacggggccgacaucaacuucaugccgaucuga

SEQ ID NO: 87612 - RNA, 1401 nt, Artificial Sequence
  derived and/or modified CDS sequence (opt1) from neuraminidase__InfluenzaA__AGQ81810
augaaccccaaccagaagauccuggccaucggcagcgugucccucaccaucgccaucaucugcuuccugaugcagaucgcgauccugaccacgaccaugacccuccacuucaagcagaacgagugcagcaacccguccaacaaccaggucgugcccugcgagcccauccugaucgagcgcaacaccgugcaccugaacagcacgaccaucgagaaggaggucugccccaagguggccgaguacaagaacugguccaagccgcagugccagaucaccggguucgcccccuucagcaaggacaacuccauccggcucagcgccggcggggacaucugggugacccgcgagcccuacgucuccugcagccugggcaagugcuaccaguucgcccuggggcagggcacgacccucaagaacaaccacuccaacggcaccacccacgaccggacgccccaccgcacccugcugaugaacgagcucggggugccguuccaccugggcaccaagcaggucugcaucgcguggagcuccagcuccugcuacgacgggaaggccuggcugcacaucugcgugaccggcgacgacaagaacgccacggccagcaucaucuacgacgggaugcucguggacuccaucggcagcugguccaagaacauccugcggacccaggagagcgagugcgugugcaucaacgggaccugcgcggucgugaugaccgacggcagcgccuccggcaaggccgacacgcgcauccuguucauccgggaggggaagaucaucaacaucagcccccucuccggcagcgcccagcacguggaggagugcuccugcuacccccgcuaccccgagguccggugcgugugccgcgacaacuggaagggcagcaaccggccggugcuguacaucaacauggccgacuacuccaucgagagcuccuacgucugcagcgggcuggugggcgacacgccccgcaacgacgacuccagcuccagcuccaacugccgggaccccaacaacgagcgcggggcgcccggcgugaaggggugggccuucgacgacggcaacgacgucuggaugggccggaccauccgcaacaacagccgguccggguacgagaccuuccgcguggugaacggcuggaccaccgccaacagcaagucccagaucaaccggcaggucaucguggacagcgagaacuggagcggguacuccggcaucuucagcgucgaggggaagaacugcaucaaccgcugcuucuacguggagcucauccggggccgcccgcaggagccccgcgugugguggaccuccaacagcaucaucgucuucugcggcaccuccgggacguacggcaccgggagcuggcccgacggcgccaacaucaacuucaugcccaucuga

SEQ ID NO: 87613 - RNA, 1401 nt, Artificial Sequence
  derived and/or modified CDS sequence (opt1) from neuraminidase__InfluenzaA__AGQ81811
augaaccccaaccagaagaucaucgccaucggcagcgugucccugaccaucgccaucaucugcuuccucaugcagaucgcgauccugaccacgaccaugacccugcacuucaagcagaacgagugcagcaacccguccaacaaccaggucgugcccugcgagcccauccucaucgagcgcaacaccgugcaccugaacagcacgaccaucgagaaggaggucugccccaagguggccgaguacaagaacugguccaagccgcagugccagaucaccggguucgcccccuucagcaaggacaacuccauccggcugagcgccggcggggacaucugggugacccgcgagcccuacgucuccugcagccucggcaagugcuaccaguucgcccuggggcagggcacgacccugaagaacaagcacuccaacggcaccacccacgaccggacgccccaccgcacccuccugaugaacgagcugggggugccguuccaccucggcaccaagcaggucugcaucgcguggagcuccagcuccugcuacgacgggaaggccuggcugcacaucugcgugaccggcgacgacaagaacgccacggccagcaucaucuacgacgggaugcugguggacuccaucggcagcugguccaagaacauccuccggacccaggagagcgagugcgugugcaucaacgggaccugcgcggucgugaugaccgacggcagcgccuccggcaaggccgacacgcgcauccuguucauccgggaggggaagaucgugaacaucagcccccuguccggcagcgcccagcacgucgaggagugcuccugcuacccccgcuaccccgaggugcggugcgugugccgcgacaacuggaagggcagcaaccggccgguccucuacaucaacauggccgacuacuccguggagagcuccuacgugugcagcgggcuggucggcgacacgccccgcaacgacgacuccuucagcuccagcaacugccgggaccccaacaacgagcgcggggcgcccggcgugaaggggugggccuucgacgacggcaacgacguguggaugggccggaccauccgcaacgacucccggagcggguacgagaccuuccgcgucgugaacggcuggaccaccgccaacuccaagagccagaucaaccggcaggucaucguggacuccgagagcuggagcggguacuccggcaucuucagcguggaggggaagaacugcaucaaccgcugcuucuacgucgagcugauccggggccgcccgcaggagccccgcgugugguggaccuccaacagcaucaucguguucugcggcaccuccgggacguacggcaccgggagcuggcccgacggcgccaacaucaacuucaugcccaucuga

SEQ ID NO: 87614 - RNA, 1410 nt, Artificial Sequence
  derived and/or modified CDS sequence (opt1) from neuraminidase__InfluenzaA__AGQ81812
augaaccccaaccagaagaucaucaccaucggcagcgugucccugaccaucgccacgaucugcuuccucaugcagaucgccauccuggucaccaccaucacccugcacuucaagcagaacgagugcagcaucccguccaacaaccagguggugcccugcgagcccaucaucgucgagcgcaacaucacggagaucguguaccucaacaacaccaccaucgagaaggagcugugccccaagcugaccgaguaccgggacuggagcaagccgcagugccagaucacgggguucgcgcccuucuccaaggacaacagcauccgccucuccgccggcggggacaucugggugacccgggagcccuacgucagcugcucccccaacaagugcuaccaguucgcccugggccaggggaccacccuggacaacaagcacagcaacggcacgauccacgaccgcaucccgcaccggacccuccugaugaacgagcugggcgugcccuuccaccucgggaccaagcaggucugcaucgccugguccagcuccagcugccacgacggcaaggccuggcugcacgugugcgugaccggggacgaccgcaacgcgacggccuccuucaucuacgacggcaugcugguggacagcaucggguccuggagccagaacauccuccggacccaggaguccgagugcgucugcaucaacgggaccugcaccguggugaugacggacggcagcgccagcggccgcgccgacacccggauccuguucaucaaggagggcaagaucguccacgugagcccccuguccggguccgcgcagcacaucgaggagugcagcugcuacccccgcuacccggacgugcggugcgucugccgcgacaacuggaagggcuccaaccggcccaucaucgacaucaacguggccgacuacagcaucgacuccagcuacgugugcuccggccucgucggggacacgccccgcaacgacgacagcuccagcaacuccaacugcaaggaccccaacaacgagcggggcaacccgggggugaagggcugggccuucgacuacgggaacgacguguggaugggccgcaccaucagcaaggacucccggagcggcuacgagaccuuccgcgucaucgggggcuggaccaccgccaacuccaagagccaggugaaccggcaggucaucguggacaacaacaacugguccggguacagcggcaucuucagcguggaggggaaguccugcaucaaccgcugcuucuacgucgagcugauccggggccgcccccaggagacccgcgugugguggacgagcaacuccaucguggucuucugcggcaccagcgggaccuacggcaccggguccuggcccgacggcgccaacaucaacuucaugcccaucuga

SEQ ID NO: 87615 - RNA, 1401 nt, Artificial Sequence
  derived and/or modified CDS sequence (opt1) from neuraminidase__InfluenzaA__AGQ81814
augaaccccaaccagaagaucaucgccaucggcagcgugucccugaccaucgccaucaugugcuuccucaugcagaucgcgauccugaccacgaccaugacccugcacuucaagcagaacgagugcagcaacccguccaacaaccaggucgugcccugcgagcccauccucaucgagcgcaacaccgugcaccugaacagcacgaccaucgagaaggaggucugccccaagguggccgaguacaagaacugguccaagccgcagugccagaucaccggguucgcccccuucagcaaggacaacuccauccggcugagcgccggcggggacaucugggugacccgcgagcccuacgucuccugcagccucggcaagugcuaccaguucgcccuggggcagggcacgacccugaagaacaaccacuccaacggcaccacccacgaccggacgccccaccgcacccuccugaugaacgagcugggggugccguuccaccucggcaccaagcaggucugcaucgcguggagcuccagcuccugcuacgacgggaaggccuggcugcacaucugcgugaccggcgacgacaagaacgccacggccagcaucaucuacgacgggaugcugguggacuccaucggcagcugguccaagaacauccuccggacccaggagagcgagugcgugugcaucaacgggaccugcgcggucgugaugaccgacggcagcgccuccggcaaggccgacacgcgcauccuguucauccgggaggggaagaucaucaacaucagcccccuguccggcagcgcccagcacguggaggagugcuccugcuacccccgcuaccccgagguccggugcgugugccgcgacaacuggaagggcagcaaccggccggugcucuacaucaacauggccgacuacuccgucgagagcuccuacgugugcagcgggcuggugggcgacacgccccgcaacgacgacuccagcuccagcuccaacugccgggaccccaacaacgagcgcggggcgcccggcgucaaggggugggccuucgacgacggcaacgacguguggaugggccggaccauccgcaacaacagccgguccggguacgagaccuuccgcguggucaacggcuggaccaccgccaacagcaagucccagaucaaccgccaggugaucgucgacagcgagaacuggagcggguacuccggcaucuucagcguggaggggaagaacugcaucaaccggugcuucuacguggagcugauccggggccgcccgcaggagccccgcgucugguggaccuccaacagcaucaucguguucugcggcaccuccgggacguacggcaccgggagcuggcccgacggcgccaacaucaacuucaugcccaucuga

SEQ ID NO: 87616 - RNA, 1401 nt, Artificial Sequence
  derived and/or modified CDS sequence (opt1) from neuraminidase__InfluenzaA__AGQ81815
augaaccccaaccagaagaucaucgccaucggcagcgugucccugaccaucgccaucaucugcuuccucaugcagaucgcgauccugaccacgaccaugacccugcacuucaagcagaacgagugcagcaacccguccaacaaccaggucgugcccugcgagcccauccucaucgagcgcaacaccgugcaccugaacagcacgaccaucgagaaggaggucugccccaagguggccgaguacaagaacugguccaagccgcagugccagaucaccggguucgcccccuucagcaaggacaacuccauccggcugagcgccggcggggacaucugggugacccgcgagcccuacgucuccugcagccucggcaagugcuaccaguucgcccuggggcagggcacgacccugaagaacaagcacuccaacggcaccacccacgaccggacgccccaccgcacccuccugaugaacgagcugggggugccguuccaccucggcaccaagcaggucugcaucgcguggagcuccagcuccugcuacgacgggaaggccuggcugcacaucugcgugaccggcgacgacaagaacgccacggccagcaucaucuacgacgggaugcugguggacuccaucggcagcugguccaagaacauccuccggacccaggagagcgagugcgugugcaucaacgggaccugcgcggucgugaugaccgacggcagcgccuccggcaaggccgacacgcgcauccuguucauccgggaggggaagaucaucaacaucagcccccuguccggcagcgcccagcacguggaggagugcuccugcuacccccgcuaccccgagguccggugcgugugccgcgacaacuggaagggcagcaaccggccggugcucuacaucaacauggccgacuacuccgucgagagcuccuacgugugcagcgggcuggugggcgacacgccccgcaacgacgacuccagcuccagcuccaacugccgggaccccaacaacgagcgcgggacccccggcgucaaggggugggcguucgacgacggcaacgacguguggaugggccggaccauccgcaacgacagccgguccggguacgagaccuuccgcgugaucaacggcuggaccaccgccaacagcaagucccagaucaaccggcaggucaucguggacagcgagaacuggagcggguacuccggcaucuucagcgucgaggggaagaacugcaucaaccgcugcuucuacguggagcugauccggggccgcccgcaggagccccgcgugugguggaccuccaacagcaucaucgucuucugcggcacguccgggaccuacggcaccgggagcuggcccgacggcgccaacaucaacuacaugcccaucuga

SEQ ID NO: 87617 - RNA, 1401 nt, Artificial Sequence
  derived and/or modified CDS sequence (opt1) from neuraminidase__InfluenzaA__AGQ81816
augaaccccaaccagaagaucaucgccaucggcagcgugucccugaccaucgccaucaucugcuuccucaugcagaucgcgauccugaccacgaccaugacccugcacuucaagcagaacgggugcagcaacccguccaacaaccaggucgugcccugcgagcccauccucaucgagcgcaacaccgugcaccugaacagcacgaccaucgagaaggaggucugccccaagguggccgaguacaagaacugguccaagccgcagugccagaucaccggcuucgcccccuucagcaaggacaacuccauccggcugagcgccgggggcgacaucugggugacccgcgagcccuacgucuccugcagccucgggaagugcuaccaguucgcccugggccagggcacgacccugaagaacaagcacuccaacgggaccacccacgaccggacgccccaccgcacccuccugaugaacgagcugggcgugccguuccaccucgggaccaagcaggucugcaucgcguggagcuccagcuccugcuacgacggcaaggccuggcugcacaucugcgugaccggggacgacaagaacgccacggccagcaucaucuacgacggcaugcugguggacuccaucggcagcugguccaagaacauccuccggacccaggagagcgagugcgugugcaucaacgggaccugcgcggucgugaugaccgacggcagcgccuccgggaaggccgacacgcgcauccuguucauccgggagggcaagaucaucaacaucagcccccuguccggcagcgcccagcacguggaggagugcuccugcuacccccgcuaccccgagguccggugcgugugccgcgacaacuggaaggggagcaaccggccggugcucuacaucaacauggccgacuacuccgucgagagcuccuacgugugcagcggccuggugggggacacgccccgcaacgacgacuccagcuccagcuccaacugccgggaccccaacaacgagcgcggcacccccggggucaagggcugggcguucgacgacggcaacgacguguggauggggcggaccauccgcaacgacagccgguccggcuacgagaccuuccgcgugaucaacggguggaccaccgccaacagcaagucccagaucaaccggcaggucaucguggacagcgagaacuggagcggcuacuccgggaucuucagcgucgagggcaagaacugcaucaaccgcugcuucuacguggagcugauccggggccgcccgcaggagccccgcgugugguggaccuccaacagcaucaucgucuucugcgggacguccggcaccuacgggaccggcagcuggcccgacggggccaacaucaacuacaugcccaucuga

SEQ ID NO: 87618 - RNA, 1401 nt, Artificial Sequence; identical to SEQ ID NO: 87616
  derived and/or modified CDS sequence (opt1) from neuraminidase__InfluenzaA__AGQ81817

SEQ ID NO: 87619 - RNA, 1401 nt, Artificial Sequence; identical to SEQ ID NO: 87616
  derived and/or modified CDS sequence (opt1) from neuraminidase__InfluenzaA__AGQ81818

SEQ ID NO: 87620 - RNA, 1401 nt, Artificial Sequence; identical to SEQ ID NO: 87616
  derived and/or modified CDS sequence (opt1) from neuraminidase__InfluenzaA__AGQ81819

SEQ ID NO: 87621 - RNA, 1401 nt, Artificial Sequence
  derived and/or modified CDS sequence (opt1) from neuraminidase__InfluenzaA__AGQ81820
augaaccccaaccagaagaucaucgccaucggcagcgugucccugaccaucgccaucaucugcuuccucaugcagaucgcgauccugaccacgaccaugacccugcacuucaagcagaacgagugcagcaacccguccaacaaccaggucgugcccugcgagcccauccucaucgagcgcaacaccgugcaccugaacagcacgaccaucgagaaggaggucugccccaagguggccgaguacaagaacugguccaagccgcagugccagaucaccggguucgcccccuucagcaaggacaacuccauccggcugagcgccggcggggacaucugggugacccgcgagcccuacgucuccugcagccucggcaagugcuaccaguucgcccuggggcagggcacgacccugaagaacaagcacuccaacggcaccacccacgaccggacgccccaccgcacccuccugaugaacgagcugggggugccguuccaccucggcaccaagcaggucugcaucgcguggagcuccagcuccugcuacgacgggaaggccuggcugcacaucugcgugaccggcgacgacaagaacgccacggccagcaucaucuacgacgggaugcugguggacuccaucggcagcugguccaagaacauccuccggacccaggagagcgagugcgugugcaucaacgggaccugcgcggucgugaugaccgacggcagcgccuccggcaaggccgacacgcgcauccuguucauccgggaggggaagaucaucaacaucagcccccuguccggcagcgcccagcacguggaggagugcuccugcuacccccgcuaccccgagguccggugcgugugccgcgacaacuggaagggcagcaaccggccggugcucuacaucaacauggccgacuacuccaucgagagcuccuacgucugcagcgggcuggugggcgacacgccccgcaacgacgacuccagcuccagcuccaacugccgggaccccaacaacgagcgcgggacccccggcgugaaggggugggcguucgacgacggcaacgacgucuggaugggccggaccauccgcaacgacagccgguccggguacgagaccuuccgcgugaucaacggcuggaccaccgccaacagcaagucccagaucaaccgccaggugaucgucgacagcgagaacuggagcggguacuccggcaucuucagcguggaggggaagaacugcaucaaccggugcuucuacgucgagcugauccggggccgcccgcaggagcccaaggugugguggaccuccaacagcaucaucguguucugcggcacguccgggaccuacggcaccgggagcuggcccgacggcgccaacaucaacuucaugcccaucuga

SEQ ID NO: 87622 - RNA, 1401 nt, Artificial Sequence
  derived and/or modified CDS sequence (opt1) from neuraminidase__InfluenzaA__AGQ81822
augaaccccaaccagaagaucaucgccaucggcagcgugucccugaccaucgccaucaucugcuuccucaugcagaucgcgauccugaccacgaccaugacccugcacuucaagcagaacgagugcagcaacccguccaacaaccaggucgugcccugcgagcccauccucaucgagcgcaacaccgugcaccugaacagcacgaccaucgagaagaaggucugccccaagguggccgaguacaagaacugguccaagccgcagugccagaucaccggguucgcccccuucagcaaggacaacuccauccggcugagcgccggcggggacaucugggugacccgcgagcccuacgucuccugcagccucggcaagugcuaccaguucgcccuggggcagggcacgacccugaagaacaagcacuccaacggcaccacccacgaccggacgccccaccgcacccuccugaugaacgagcugggggugccguuccaccucggcaccaagcaggucugcaucgcguggagcuccagcuccugcuacgacgggaaggccuggcugcacaucugcgugaccggcgacgacaagaacgccacggccagcaucaucuacgacgggaugcugguggacuccaucggcagcugguccaagaacauccuccggacccaggagagcgagugcgugugcaucaacgggaccugcgcggucgugaugaccgacggcagcgccuccggcaaggccgacacgcgcauccuguucauccgggaggggaagaucaucaacaucagcccccuguccggcagcgcccagcacguggaggagugcuccugcuacccccgcuaccccgagguccggugcgugugccgcgacaacuggaagggcagcaaccggccggugcucuacaucaacauggccgacuacuccgucgagagcuccuacgugugcagcgggcuggugggcgacacgccccgcaacgacgacuccagcuccagcuccaacugccgggaccccaacaacgagcgcgggacccccggcgucaaggggugggcguucgacgacggcaacgacguguggaugggccggaccauccgcaacgacagccgguccggguacgagaccuuccgcgugaucaacggcuggaccaccgccaacagcaagucccagaucaaccggcaggucaucguggacagcgagaacuggagcggguacuccggcaucuucagcgucgaggggaagaacugcaucaaccgcugcuucuacguggagcugauccggggccgcccgcaggagccccgcgugugguggaccuccaacagcaucaucgucuucugcggcacguccgggaccuacggcaccgggagcuggcccgacggcgccaacaucaacuacaugcccaucuga

SEQ ID NO: 87623 - RNA, 1401 nt, Artificial Sequence
  derived and/or modified CDS sequence (opt1) from neuraminidase__InfluenzaA__AGQ81823
augaaccccaaccagaagaucaucgccaucggcagcgugucccugaccaucgccaucaucugcuuccucaugcagaucgcgauccugaccacgaccaugacccugcacuucaagcagaacgagugcagcaacccguccaacaaccaggucgugcccugcgagcccauccucaucgagcgcaacaccgugcaccugaacagcacgaccaucgagaaggaggucugccccaagguggccgaguacaagaacugguccaagccgcagugccagaucaccggguucgcccccuucagcaaggacaacuccauccggcugagcgccggcggggacaucugggugacccgcgagcccuacgucuccugcagccucggcaagugcuaccaguucgcccuggggcagggcacgacccugaagaacaagcacuccaacggcaccacccacgaccggacgccccaccgcacccuccugaugaacgagcugggggugccguuccaccucggcaccaagcaggucugcaucgcguggagcuccagcuccugcuacgacgggaaggccuggcugcacaucugcgugaccggcgacgacaagaacgccacggccagcaucaucuacgacgggaugcugguggacuccaucggcagcugguccaagaacauccuccggacccaggagagcgagugcgugugcaucaacgggaccugcgcggucgugaugaccgacggcagcgccuccggcaaggccgacacgcgcauccuguucauccgggaggggaagaucaucaacaucagcccccuguccggcagcgcccagcacguggaggagugcuccugcuacccccgcuaccccgagguccggugcgugugccgcgacaacuggaagggcagcaaccggccggugcucuacaucaacauggccgacuacuccgucgagagcuccuacgugugcagcgggcuggugggcgacacgccccgcaacgacgacuccagcuccagcuccaacugccgggaccccaacaacgagcgcggggcgcccggcgucaaggggugggccuucgacgacggcaacgacguguggaugggccggaccauccgcaacgacagccgguccggguacgagaccuuccgcguggucaacggcuggaccaccgccaacagcaagucccagaucaaccgccaggugaucgucgacagcgagaacuggagcggguacuccggcaucuucagcguggaggggaagaacugcaucaaccggugcuucuacguggagcugauccggggccgcccgcaggagccccgcgucugguggaccuccaacagcaucaucguguucugcggcaccuccgggacguacggcaccgggagcuggcccgacggcgccaacaucaacuucaugcccaucuga

SEQ ID NO: 87624 - RNA, 1401 nt, Artificial Sequence; identical to SEQ ID NO: 87623
  derived and/or modified CDS sequence (opt1) from neuraminidase__InfluenzaA__AGQ81824

SEQ ID NO: 87625 - RNA, 1401 nt, Artificial Sequence; identical to SEQ ID NO: 87623
  derived and/or modified CDS sequence (opt1) from neuraminidase__InfluenzaA__AGQ81825

SEQ ID NO: 87626 - RNA, 1401 nt, Artificial Sequence
  derived and/or modified CDS sequence (opt1) from neuraminidase__InfluenzaA__AGQ81831
augaaccccaaccagaagauccuggccaucggcagcgugucccucaccaucgccaucaucugcuuccugaugcagaucgcgauccugaccacgaccaugacccuccacuucaagcagaacgagugcagcaacccguccaacaaccaggucgugcccugcgagcccauccugaucgagcgcaacaccgugcaccugaacagcacgaccaucgagaaggaggucugccccaagguggccgaguacaagaacugguccaagccgcagugccagaucaccggguucgcccccuucagcaaggacaacuccauccggcucagcgccggcggggacaucugggugacccgcgagcccuacgucuccugcagccugggcaagugcuaccaguucgcccuggggcagggcacgacccucaagaacaagcacuccaacggcaccacccacgaccggacgccccaccgcacccugcugaugaacgagcucggggugccguuccaccugggcaccaagcaggucugcaucgcguggagcuccagcuccugcuacgacgggaaggccuggcugcacaucugcgugaccggcgacgacaagaacgccacggccagcaucaucuacgacgggaugcucguggacuccaucggcagcugguccaagaacauccugcggacccaggagagcgagugcgugugcaucaacgggaccugcgcggucgugaugaccgacggcagcgccuccggcaaggccgacacgcgcauccuguucauccgggaggggaagaucgugaacaucagcccccucuccggcagcgcccagcacgucgaggagugcuccugcuacccccgcuaccccgaggugcggugcgugugccgcgacaacuggaagggcagcaaccggccgguccuguacaucaacauggccgacuacuccguggagagcuccuacgugugcagcgggcuggucggcgacacgccccgcaacgacgacuccuucagcuccagcaacugccgggaccccaacaacgagcgcggggcgcccggcgugaaggggugggccuucgacgacggcaacgacguguggaugggccggaccauccgcaacgacucccggagcggguacgagaccuuccgcgucgugaacggcuggaccaccgccaacuccaagagccagaucaaccggcaggucaucguggacuccgagagcuggagcggguacuccggcaucuucagcguggaggggaagaacugcaucaaccgcugcuucuacgucgagcucauccggggccgcccgcaggagccccgcgugugguggaccuccaacagcaucaucguguucugcggcaccuccgggacguacggcaccgggagcuggcccgacggcgccaacaucaacuucaugcccaucuga

SEQ ID NO: 87627 - RNA, 1401 nt, Artificial Sequence; identical to SEQ ID NO: 87616
  derived and/or modified CDS sequence (opt1) from neuraminidase__InfluenzaA__AGQ81837

SEQ ID NO: 87628 - RNA, 1401 nt, Artificial Sequence; identical to SEQ ID NO: 87616
  derived and/or modified CDS sequence (opt1) from neuraminidase__InfluenzaA__AGQ81838

SEQ ID NO: 87629 - RNA, 1401 nt, Artificial Sequence; identical to SEQ ID NO: 87623
  derived and/or modified CDS sequence (opt1) from neuraminidase__InfluenzaA__AGQ81839

SEQ ID NO: 87630 - RNA, 1401 nt, Artificial Sequence; identical to SEQ ID NO: 87623
  derived and/or modified CDS sequence (opt1) from neuraminidase__InfluenzaA__AGQ81840

SEQ ID NO: 87631 - RNA, 1401 nt, Artificial Sequence; identical to SEQ ID NO: 87616
  derived and/or modified CDS sequence (opt1) from neuraminidase__InfluenzaA__AGQ81841

SEQ ID NO: 87632 - RNA, 1410 nt, Artificial Sequence
  derived and/or modified CDS sequence (opt1) from neuraminidase__InfluenzaA__AGQ81843
augaaccccaaccagaagaucaucaccaucggcguggucaacaccacgcugagcaccaucgcccuccugaucgggaucggcaaccugaucuucaacaccgugauccacgagaagaucggggugcaccagaccgucguguacccgacgaucaccccgcccgugauccccaacugcuccgacaccaccaucacguacaacaacaccgucgugaacaacaucaccaccacgaucaucaacaaggccgagaagcaguucaagcccagccucccccugugccccuuccgcggcuucuuccccuuccacaaggacaacgcgauccggcugggggagaacaaggacgugaucgucacccgcgagccguacguguccugcgacaacgacgacugcuggagcuucgcccucgcccagggcgcccugcugggcaccaagcacuccaacgggaccaucaaggaccggacgcccuaccgcagccucauccgguuccccaucggcaccgcccccgugcuggggaacuacaaggagaucugcgucgcgugguccagcuccagcugcuucgacggcaaggaguggaugcacgugugcaugaccgggaacgacaacgacgccuccggccagaucaucuacgccggcaagaugaccgacagcaucaaguccuggcgccgggacauccugcgcacgcaggagagcgagugccagugcaucgacgggaccugcaucguggccgucaccgacggcccggcggccuccagcgccgaccaccggaucuacuggauccgcgaggggaagaucaucaaguacgaggacauccccaagaccaagauccagcaccucgaggagugcuccugcuacguggacacggacguguacugcaucugccgggacaacuggaagggcagcaaccgccccuggaugcggaucaacaacgagaccauccuggagaccggcuacgucugcuccaaguuccacagcgacacgccccgcccggccgaccccagcaccguguccugcgacagccccuccaacaucaacgggggccccggggugaagggcuucggguuccgggccggcaacgacgucuggcugggccgcaccgugagcaccaccgggcgguccggcuucgaggugaucaaggucacggagggguggaucaacagccucaaccacgcgaaguccgugacccagacccuggucagcaacaacgacugguccggcuacagcggguccuucaucguggagaacaacggcugcuuccagccgugcuucuacaucgagcugauccgcggccggcccaaccgcaacgacgacgugagcuggaccuccaacagcaucgucacguucugcgggcucgacaacgagcccggcuccgggaacuggcccgacggcagcaacaucggguucaugccgaaguga

SEQ ID NO: 87633 - RNA, 1410 nt, Artificial Sequence
  derived and/or modified CDS sequence (opt1) from neuraminidase__InfluenzaA__AGQ81845
augaaccccaaccagaagaucaucaccaucggcguggucaacaccacgcugagcaccaucgcccuccugaucgggaucggcaaccugaucuucaacaccgugauccacgagaagaucggggugcaccagaccgucaucuacccgacgaucaccucccccguggugcccaacugcagcgacaccaccaucacguacaacaacaccgucgugaacaacaucaccaccacggugaucaacaaggccgagaagcacuucaagcccucccucccgcugugccccuucaagggcuucuuccccuuccacaaggacaacgcgauccgccugggggagaacaaggacgucaucgugacccgggagcccuacgugagcugcgacaacgacgacugcugguccuucgcccucgcccagggcgcccugcugggcaccaagcacagcaacgggaccaucaaggaccgcacgccguaccggucccucauccgcuuccccaucggcaccgcccccguccuggggaacuacaaggagaucugcguggcguggagcuccagcuccugcuucgacggcaaggaguggaugcacgugugcaugaccgggaacgacaacgacgccagcggccagaucaucuacgccggcaagaugaccgacuccaucaagagcuggcggcgcgacauccugcggacgcaggaguccgagugccagugcaucgacgggaccugcaucgucgccgugaccgacggccccgcggccaacagcgccgaccaccgcaucuacuggauccgggaggggaagaucaucaaguacgagaacaucccgaagaccaagauccagcaccucgaggagugcuccugcuacguggacacggacgucuacugcaucugccgcgacaacuggaagggcagcaaccggcccuggaugcgcaucaacaacgagaccauccuggagaccggcuacgugugcuccaaguuccacagcgacacgccccggcccgccgacccgagcaccguguccugcgacagccccuccaacaucaacgggggccccggggucaagggcuucggguuccgcaccggcaacgacguguggcugggccggaccgugagcaccacggggcgcuccggcuucgaggucaucaaggugaccgagggguggaucaacagccucaaccacgccaaguccgucacccagacccuggugagcaacuccgacuggagcggcuacuccgggagcuucaucguggagaacaacggcugcuuccagcccugcuucuacaucgagcugauccggggccgcccgaacaagaacgacgacgucuccuggacgagcaacuccaucgugaccuucugcgggcucgacaacgagcccggcagcgggaacuggcccgacggcuccaacaucggguucaugcccaaguga

SEQ ID NO: 87634 - RNA, 1410 nt, Artificial Sequence; identical to SEQ ID NO: 87633
  derived and/or modified CDS sequence (opt1) from neuraminidase__InfluenzaA__AGQ81846

SEQ ID NO: 87635 - RNA, 1410 nt, Artificial Sequence; identical to SEQ ID NO: 87633
  derived and/or modified CDS sequence (opt1) from neuraminidase__InfluenzaA__AGQ81847

SEQ ID NO: 87636 - RNA, 1410 nt, Artificial Sequence
  derived and/or modified CDS sequence (opt1) from neuraminidase__InfluenzaA__AGQ81848
augaaccccaaccagaagaucaucaccaucggcguggucaacaccacgcugagcaccaucgcccuccugaucgggaucggcaaccugaucuucaacaccgugauccacgagaagaucggggugcaccagaccgucaucuacccgacgaucaccucccccguggugcccaacugcagcgacaccaccaucacguacaacaacaccgucgugaacaacaucaccaccacggugaucaacaaggccgagaagcacuucaagcccucccucccgcugugccccuucaagggcuucuuccccuuccacaaggacaacgcgauccgccugggggagaacaaggacgucaucgugacccgggagcccuacgugagcugcgacaacgacgacugcugguccuucgcccucgcccagggcgcccugcugggcaccaagcacagcaacgggaccaucaaggaccgcacgccguaccggucccucauccgcuuccccaucggcaccgcccccguccuggggaacuacaaggagaucugcguggcguggagcuccagcuccugcuucgacggcaaggaguggaugcacgugugcaugaccgggaacgacaacgacgccagcggccagaucaucuacgccggcaagaugaccgacuccaucaagagcuggcggcgcgacauccugcggacgcaggaguccgagugccagugcaucgacgggaucugcaucgucgccgugaccgacggccccgcggccaacagcgccgaccaccgcaucuacuggauccgggaggggaagaucaucaaguacgagaacaucccgaagaccaagauccagcaccucgaggagugcuccugcuacguggacaccgacgucuacugcaucugccgcgacaacuggaagggcagcaaccggcccuggaugcgcaucaacaacgagacgauccuggagaccggcuacgugugcuccaaguuccacagcgacacgccccggcccgccgacccgagcaccguguccugcgacagccccuccaacaucaacgggggccccggggucaagggcuucggguuccgcaccggcaacgacguguggcugggccggaccgugagcaccaccgggcgcuccggcuucgaggucaucaaggugacggagggguggaucaacagccucaaccacgccaaguccgucacccagacccuggugagcaacuccgacuggagcggcuacuccgggagcuucaucguggagaacaacggcugcuuccagcccugcuucuacaucgagcugauccggggccgcccgaacaagaacgacgacgucuccuggaccagcaacuccaucgugacguucugcgggcucgacaacgagcccggcagcgggaacuggcccgacggcuccaacaucggguucaugcccaaguga

SEQ ID NO: 87637 - RNA, 1410 nt, Artificial Sequence
  derived and/or modified CDS sequence (opt1) from neuraminidase__InfluenzaA__AGQ81850
augaaccccaaccagaagaucaucaccaucggcguggucaacaccacgcugagcaccaucgcccuccugaucgggaucggcaaccugaucuucaacaccgugauccacgagaagaucggggugcaccagaccgucaucuacccgacgaucaccucccccguggugcccaacugcagcgacaccaccaucacguacaacaacaccgucgugaacaacaucaccaccacggugaucaacaaggccgagaagcacuucaagcccucccucccgcugugccccuucaagggcuucuuccccuuccacaaggacaacgcgauccgccugggggagaacaaggacgucaucgugacccgggagcccuacgugagcugcgacaacgacgacugcugguccuucgcccucgcccagggcgcccugcugggcaccaagcacagcaacgggaccaucaaggaccgcacgccguaccggucccucauccgcuuccccaucggcaccgcccccguccuggggaacuacaaggagaucugcguggcguggagcuccagcuccugcuucgacggcaaggaguggaugcacgugugcaugaccgggaacgacaacgacgccaccggccagaucaucuacgccggcaagaugacggacagcaucaaguccuggcggcgcgacauccugcggacccaggagagcgagugccagugcaucgacgggaccugcaucgucgccgugaccgacggccccgcggccaacuccgccgaccaccgcaucuacuggauccgggaggggaagaucaucaaguacgagaacaucccgaagacgaagauccagcaccucgaggagugcagcugcuacguggacaccgacgucuacugcaucugccgcgacaacuggaagggcuccaaccggcccuggaugcgcaucaacaacgagaccauccuggagaccggcuacgugugcagcaaguuccacuccgacacgccccggcccgccgacccgagcaccgugagcugcgacucccccagcaacaucaacgggggccccggggucaagggcuucggguuccgcaccggcaacgacguguggcugggccggaccguguccacgaccgggcgcagcggcuucgaggucaucaaggugaccgagggguggaucaacucccucaaccacgccaagagcgucacccagacgcugguguccaacagcgacugguccggcuacagcggguccuucaucguggagaacaacggcugcuuccagcccugcuucuacaucgagcugauccggggccgcccgaacaagaacgacgacgucagcuggaccuccaacagcaucgugaccuucugcgggcucgacaacgagcccggcuccgggaacuggcccgacggcagcaacaucggguucaugcccaaguga

SEQ ID NO: 87638 - RNA, 1410 nt, Artificial Sequence
  derived and/or modified CDS sequence (opt1) from neuraminidase__InfluenzaA__AGQ81852
augaaccccaaccagaagaucaucaccaucggcguggucaacaccacgcugagcaccaucgcccuccugaucgggaucggcaaccugaucuucaacaccgugauccacgagaagaucggggugcaccagaccgucacguacccgaccaucaccucccccguggugcccaacugcagcgacaccacgaucaccuacaacaacaccgucgugaacaacaucaccacgaccgugaucaacaaggccgagaagcacuucaagcccucccucccgcugugccccuucaagggcuucuuccccuuccacaaggacaacgcgauccgccugggggagaacaaggacgucaucgugacccgggagcccuacgugagcugcgacaacgacgacugcugguccuucgcccucgcccagggcgcccugcugggcaccaagcacagcaacgggacgaucaaggaccgcaccccguaccggucccucauccgcuuccccaucggcaccgcccccguccuggggaacuacaaggagaucugcguggcguggagcuccagcuccugcuucgacggcaaggaguggaugcacgugugcaugaccgggaacgacaacgacgccacgggccagaucaucuacgccggcaagaugaccgacagcaucaaguccuggcggcgcgacauccugcggacccaggagagcgagugccagugcaucgacgggaccugcaucgucgccgugacggacggccccgcggccaacuccgccgaccaccgcaucuacuggauccgggaggggaagaucaucaaguacgagaacaucccgaagaccaagauccagcaccucgaggagugcagcugcuacguggacaccgacgucuacugcaucugccgcgacaacuggaagggcuccaaccggcccuggaugcgcaucaacaacgagaccauccuggagacgggcuacgugugcagcaaguuccacuccgacacgccccggcccgccgacccgagcaccgugagcugcgacucccccagcaacaucaacgggggccccggggucaagggcuucggguuccgcaccggcaacgacguguggcugggccggaccguguccaccaccgggcgcagcggcuucgaggucaucaaggugaccgagggguggaucaacucccucaaccacgccaagagcgucacgcagacccugguguccaacagcgacugguccggcuacagcggguccuucaucguggagaacaacggcugcuuccagcccugcuucuacaucgagcugauccggggccgcccgaaccggaacgacgacgucagcuggaccuccaacagcaucgugaccuucugcgggcucgacaacgagcccggcuccgggaacuggcccgacggcagcaacaucggguucaugcccaaguga

SEQ ID NO: 87639 - RNA, 1410 nt, Artificial Sequence
  derived and/or modified CDS sequence (opt1) from neuraminidase__InfluenzaA__AGQ81853
augaaccccaaccagaagaucaucaccaucggcguggucaacaccacgcugagcaccaucgcccuccugaucgggaucggcaaccugaucuucaacaccgugauccacgagaagaucggggugcaccagaccgucacguacccgaccaucaccucccccguggugcccaacugcagcgacaccacgaucaccuacaacaacaccgucgugaacaacaucaccacgaccgugaucaacaaggccgagaagcacuucaagcccucccucccgcugugccccuucaagggcuucuuccccuuccacaaggacaacgcgauccgccugggggagaacaaggacgucaucgugacccgggagcccuacgugagcugcgacaacgacgacugcugguccuucgcccucgcccagggcgcccugcugggcaccaagcacagcaacgggacgaucaaggaccgcaccccguaccggucccucauccgcuuccccaucggcaccgcccccguccuggggaacuacaaggagaucugcguggcguggagcuccagcuccugcuucgacggcaaggaguggaugcacgugugcaugaccgggaacgacaacgacgccacgggccagaucaucuacgccggcaagaugaccgacagcaucaaguccuggcggcgcgacauccugcggacccaggagagcgagugccagugcaucgacgggaccugcaucgucgccgugacggacggccccgcggccaacuccgccgaccaccgcaucuacuggauccgggaggggaagaucaucaaguacgagaacaucccgaagaccaagauccagcaccucgaggagugcagcugcuacguggacaccgacgucuacugcaucugccgcgacaacuggaagggcuccaaccggcccuggaugcgcaucaacaacgagaccauccuggagacgggcuacgugugcagcaaguuccacuccgacacgccccggcccgccgacccgagcaccgugagcugcgacucccccagcaacaucaacgggggccccggggucaagggcuucggguuccgcaccggcaacgacguguggcugggccggaccguguccaccaccgggcgcagcggcuucgaggucaucaaggugaccgagggguggaucaacucccucaaccacgccaagagcgucacgcagacccugguguccaacagcgacugguccggcuacagcggguccuucaucguggagaacaacggcugcuuccagcccugcuucuacaucgagcugauccggggccgcccgaacaagaacgacgacgucagcuggaccuccaacagcaucgugaccuucugcgggcucgacaacgagcccggcuccgggaacuggcccgacggcagcaacaucggguucaugcccaaguga

SEQ ID NO: 87640 - RNA, 1410 nt, Artificial Sequence; identical to SEQ ID NO: 87639
  derived and/or modified CDS sequence (opt1) from neuraminidase__InfluenzaA__AGQ81854

SEQ ID NO: 87641 - RNA, 1410 nt, Artificial Sequence; identical to SEQ ID NO: 87639
  derived and/or modified CDS sequence (opt1) from neuraminidase__InfluenzaA__AGQ81855

SEQ ID NO: 87642 - RNA, 1410 nt, Artificial Sequence; identical to SEQ ID NO: 87632
  derived and/or modified CDS sequence (opt1) from neuraminidase__InfluenzaA__AGQ81856

SEQ ID NO: 87643 - RNA, 1410 nt, Artificial Sequence
  derived and/or modified CDS sequence (opt1) from neuraminidase__InfluenzaA__AGQ81857
augaaccccaaccagaagaucaucaccaucggcguggucaacaccacgcugagcaccaucgcccuccugaucgggaucggcaaccugaucuucaacaccgugauccacgagaagaucggggugcaccagaccgucguguacccgacgaucaccccgcccgugauccccaacugcuccgacaccaccaucacguacaacaacaccgucgugaacaacaucaccaccacgaucaucaacaaggccgagaagcaguucaagcccagccucccccugugccccuuccgcggcuucuuccccuuccacaaggacaacgcgauccggcugggggagaacaaggacgugaucgucacccgcgagccguacguguccugcgacaacgacgacugcuggagcuucgcccucgcccagggcgcccugcugggcaccaagcacuccaacgggaccaucaaggaccggacgcccuaccgcagccucauccgguuccccaucggcaccgcccccgugcuggggaacuacaaggagaucugcgucgcgugguccagcuccagcugcuucgacggcaaggaguggaugcacgugugcaugaccgggaacgacaacgacgccuccggccagaucaucuacgccggcaagaugaccgacagcaucaaguccuggcgccgggacauccugcgcacgcaggagagcgagugccagugcaucgacgggaccugcaucguggccgucaccgacggcccggcggccuccagcgccgaccaccggaucuacuggauccgcgaggggaagaucaucaaguacgaggacauccccaagaccaagauccagcaccucgaggagugcuccugcuacguggacacggacguguacugcaucugccgggacaacuggaagggcagcaaccgccccuggaugcggaucaacaacgagaccauccuggagaccggcuacgucugcuccaaguuccacagcgacacgccccgcccggccgaccccagcaccguguccugcgacagccccuccaacaucaacgggggccccggggugaagggcuucggguuccgggccggcaacgacgucuggcugggccgcaccgugagcaccaccgggcgguccggcuucgaggugaucaaggucacggagggguggaucaacagccucaaccacgcgaaguccgugacccagacccuggucagcaacaacgacugguccggcuacagcggguccuucaucguggagagcaacggcugcuuccagccgugcuucuacaucgagcugauccgcggccggcccaaccgcaacgacgacguguccuggaccagcaacuccaucgucacguucugcgggcucgacaacgagcccggcagcgggaacuggcccgacggcuccaacaucggguucaugccgaaguga

SEQ ID NO: 87644 - RNA, 1410 nt, Artificial Sequence
  derived and/or modified CDS sequence (opt1) from neuraminidase__InfluenzaA__AGQ81858
augaaccccaaccagaagaucaucaccaucggcguggucaacaccacgcugagcaccaucgcccuccugaucggggugggcaaccugaucuucaacaccgugauccacgagaagaucggggaccaccagaucgucguguacccgaccacgaccgccuccgugguccccaacugcagcgacaccaucaucaccuacaacaacacgguggugaacaacaucaccaccaccaucaucacgaaggaggagacccacuucaaguccagccucccccugugccccuuccgcggcuucuucccguuccacaaggacaacgcgauccggcugggggagaacaaggacgucaucgugacccgcgagcccuacguguccugcgacaacgacgacugcuggagcuucgcccucgcccagggcgcccugcugggcaccaagcacuccaacgggacgaucaaggaccggacccccuaccgcagccucauccgguuccccaucggcaccgccccgguccuggggaacuacaaggagaucugcguggcgugguccagcuccagcugcuucgacggcaaggaguggaugcacgugugcaugaccgggaacgacaacgacgccuccggccagaucauguacgccggcaagaugacggacagcaucaaguccuggcgcaaggacauccugcggacccaggagagcgagugccagugcaucgacgggaccugcaucgucgccgugaccgacggccccgcgacgaacuccgccgaccaccgcaucuacuggauccgggaggggaagaucaucaaguacgagaacauccccaagaccaagauccagcaccucgaggagugcagcugcuacguggacaucgacgucuacugcgugugccgcgacaacuggaagggcuccaaccggcccuggaugcgcaucaacaacgagaccauccuggagaccggcuacgugugcagcaaguuccacagcgacacgccgcggcccgccgaccccuccaccgucagcugcgacucccccagcaacgugaacgggggcccgggggugaagggcuucggguucaagaccggcaacgacgucuggcugggccgcaccguguccacgagcgggcgguccggcuucgagaucaucaaggucaccgagggguggaucaacagccccaaccacgccaaguccgugacccagacccucgugagcaacaacgacugguccggcuacagcggguccuucaucgucgagaacaacggcugcuuccagcccugcuucuacaucgagcugauccgcggccggcccaacaagaacgacgacgugagcuggacguccaacagcaucgugaccuucugcgggcuggacaacgagccgggcuccgggaacuggcccgacggcagcaacaucggguucaugcccaaguga

SEQ ID NO: 87645 - RNA, 1410 nt, Artificial Sequence
  derived and/or modified CDS sequence (opt1) from neuraminidase__InfluenzaA__AGQ81859
augaaccccaaccagaagaucaucaccaucggcguggucaacaccacgcugagcaccaucgcgcuccugaucgggaucggcaaccugaucuucaacaccgugauccacgagaagaucggggugcaccagaccgucgugugcccgacgaucaccccgcccgugguccccaacugcuccgacaccaccaucacguacaacaacaccguggugaacaacaucaccaccacgaucaucaacaaggccgagaagcaguucaagagcucccucccccugugccccuuccgcggcuucuuccccuuccacaaggacaacgcgauccggcugggggagaacaaggacgucaucgugacccgcgagcccuacgugagcugcgacaacgacgacugcugguccuucgcccucgcccagggcgcccugcugggcaccaagcacagcaacgggaccaucaaggaccggacgccguaccgcucccucauccgguuccccaucggcaccgcccccguccuggggaacuacaaggagaucugcguggcguggagcuccagcuccugcuucgacggcaaggaguggaugcacaucugcaugaccgggaacgacaacgacgccagcggccagaucaucuacgccggcaagaugaccgacuccaucaagagcuggcgccgggacauccugcgcacgcaggaguccgagugccagugcaucgacgggaccugcaucguggccaucaccgacggccccgcggccagcuccgccgaccaccggaucuacuggauccgcgaggggaagaucaucaaguacgagaacaucccgaagaccaagauccagcaccucgaggagugcagcugcuacgucgacaucgacguguacugcaucugccgggacaacuggaagggcuccaaccgccccuggaugcggaucaacaacgagacgauccuggagaccggcuacgugugcagcaaguuccacagcgacacgccccgccccgccgacccguccaccgucagcugcgacucccccagcaacaucaacgggggccccggggugaagggcuucggguuccgggccggcaacgacguguggcugggccgcaccgucuccaccaccgggcggagcggcuucgaggugaucaaggugaccgagggguggaucaacucccucaaccacgccaagagcgucacgcagacccugguguccaacagcgacugguccggcuacagcggguccuucaucgucgagaacaacggcugcuuccagcccugcuucuacaucgagcugauccgcggccggccgaaccgcaacgacgacgugagcuggaccuccaacagcaucgugaccuucugcgggcucgacaacgagcccggcuccgggaacuggcccgacggcagcaacaucggguucaugcccaaguga

SEQ ID NO: 87646 - RNA, 1413 nt, Artificial Sequence
  derived and/or modified CDS sequence (opt1) from neuraminidase__InfluenzaA__AGQ81860
augaaccccaaccagaagaucaucugcaucagcgccaccggcaugacccuguccguggucagccuccugaucgggaucgccaaccugggccucaacaucgggcugcacuacaaggugggcgacacgccggacguguccauccccaacaugaacgagaccaacagcaccaccacgaucaucaacaacaacacccagaacaacuucaccaacaucaccaacaucaucgucaacaagaacgaggagaagacguuccugaaccucaccaagccccugugcgaggugaacuccuggcacauccugagcaaggacaacgcgauccgcaucggggaggacgcccacauccucgugacccgggagcccuaccuguccugcgacccgcagggcugccgcauguucgcccugagccagggcaccacgcuccgggggcgccacgccaacggcaccauccacgaccggucccccuuccgcgcccuggucagcugggagauggggcaggcgcccucccccuacaacgugaagguggagugcgucggcuggagcuccaccagcugccacgacgggaucucccggaugagcaucugcauguccggcccgaacaacaacgccagcgccguggugugguacggcgggcgccccgucaccgagauccccuccugggccggcaacauccugcggacgcaggagagcgagugcgugugccacaaggggaucugccccguggucaugaccgacggcccggcgaacaaccgcgccgccaccaagaucaucuacuucaaggagggcaagauccagaagaucgaggagcucgccgggagcgcccagcacaucgaggagugcuccugcuacggcgcgguggaggugaucaagugcaucugccgggacaacuggaagggggccaaccgccccgucaucaccaucaaccccgagaugaugacgcacaccagcaaguaccugugcuccaaggugcugaccgacaccagccggcccaacgacccgacgaacggcaacugcgacgcccccaucaccgggggcucccccgaccccggcgugaagggguucgccuuccucgacggcgagaacagcuggcuggggcgcaccaucuccaaggacagccgguccggcuacgagaugcugaaggucccgaacgccgagaccgacacgcagagcgggcccaccucccaccaggugaucgugaacaaccagaacuggagcggcuacuccggcgcguucaucgacuacugggccaacaaggagugcuucaaccccugcuucuacgucgagcucauccgcgggcggcccaaggagagcuccgugcuguggaccagcaacuccaucgucgcccugugcggcagcaaggagcgccucggguccuggagcuggcacgacggcgccgagaucaucuacuucaaguga

SEQ ID NO: 87647 - RNA, 1413 nt, Artificial Sequence
  derived and/or modified CDS sequence (opt1) from neuraminidase__InfluenzaA__AGQ81861
augaaccccaaccagaagaucaucugcaucagcgccaccggcaugacccuguccguggucagccuccugaucgggaucgccaaccugggccucaacaucgggcugcacuacaaggugggcgacacgccggacguguccauccccaacaugaacgagaccaacagcaccaccacgaucaucaacaacaacacccagaacaacuucaccaacaccacgaacaucaucgucaacaagaacgaggagaagaccuuccugaaccucaccaagccccugugcgaggugaacuccuggcacauccugagcaaggacaacgcgauccgcaucggggaggacgcccacauccucgugacccgggagcccuaccuguccugcgacccgcagggcugccgcauguucgcccugagccagggcacgacccuccgggggcgccacgccaacggcaccauccacgaccggucccccuuccgcgcccuggucagcugggagauggggcaggcgcccucccccuacaacgugaagguggagugcgucggcuggagcuccaccagcugccacgacgggaucucccggaugagcaucugcauguccggcccgaacaacaacgccagcgccguggugugguacggcgggcgccccgucacggagauccccuccugggccggcaacauccugcggacccaggagagcgagugcgugugccacaaggggaucugccccguggucaugaccgacggcccggcgaacaaccgcgccgccaccaagaucaucuacuucaaggagggcaagauccagaagaucgaggagcucgccgggagcgcccagcacaucgaggagugcuccugcuacggcgcgguggaggugaucaagugcaucugccgggacaacuggaagggggccaaccgccccgucaucacgaucaaccccgagaugaugacccacaccagcaaguaccugugcuccaaggugcugaccgacacgagccggcccaacgacccgaccaacggcaacugcgacgcccccaucaccgggggcucccccgaccccggcgugaagggguucgccuuccucgacggcgagaacagcuggcuggggcgcaccaucuccaaggacagccgguccggcuacgagaugcugaaggucccgaacgccgagacggacacccagagcgggcccaccucccaccaggugaucgugaacaaccagaacuggagcggcuacuccggcgcguucaucgacuacugggccaacaaggagugcuucaaccccugcuucuacgucgagcucauccgcgggcggcccaaggagagcuccgugcuguggaccagcaacuccaucgucgcccugugcggcagcaaggagcgccucggguccuggagcuggcacgacggcgccgagaucaucuacuucaaguga

SEQ ID NO: 87648 - RNA, 1413 nt, Artificial Sequence
  derived and/or modified CDS sequence (opt1) from neuraminidase__InfluenzaA__AGQ81862
augaaccccaaccagaagaucaucugcaucagcgccaccggcaugacccuguccguggucagccuccugaucgggaucgccaaccugggccucaacaucgggcugcacuacaaggugggcgacacgccggacgugaacauccccuccaugaacgagaccaacagcaccaccacgaucaucaacaacaacacccagaacaacuucaccaacaucaccaacaucaucgucaacaaggaggaggggcgcacguuccugaaccucaccaagccccugugcgaggugaacuccuggcacauccugagcaaggacaacgcgauccggaucggcgaggacgcccacauccucgugacccgcgagcccuaccuguccugcgacccgcagggcugccggauguucgcccugagccaggggaccacgcuccgcggccggcacgccaacgggaccauccacgaccgcucccccuuccgggcccuggucagcugggagaugggccaggcgcccucccccuacaacgugcgcguggagugcaucggguggagcuccaccagcugccacgacggcaucucccggaugagcaucugcauguccggcccgaacaacaacgccagcgccgucgugugguacgggggccgccccgugaccgagauccccuccugggccgggaacauccugcggacgcaggagagcgagugcgucugccacaagggcaucugccccguggugaugaccgacggcccggcgaacaaccgcgccgccaccaagaucaucuacuucaaggaggggaagauccagaagaucgaggagcucgagggcaacgcccagcacaucgaggagugcagcugcuacggggccgcgggcgucaucaagugcaucugccgggacaacuggaagggggccaaccgccccgugaucaucaucgaccccgagaugaugacccacacguccaaguaccugugcagccgggugcugaccgacaccucccgccccaacgacccgaccagcggcaacugcgacgcccccaucacgggcgggucccccgaccccggcgucaagggguucgccuuccucgacggcgagaacagcuggcuggggcggaccaucuccaaggacagccgcuccggcuacgagaugcugaaggugccgaacgccgagaccgacacccagagcggccccacgucccaccaggugaucgucaacaaccagaacuggagcggguacuccggcgcguucaucgacuacugggccaacaaggagugcuucaaccccugcuucuacguggagcucauccgggggcgccccaaggagagcuccgugcuguggaccagcaacuccaucgucgcccugugcggcagcaaggagcggcucggguccuggagcuggcacgacggcgccgagaucaucuacuucaaguga

SEQ ID NO: 87649 - RNA, 1413 nt, Artificial Sequence
  derived and/or modified CDS sequence (opt1) from neuraminidase__InfluenzaA__AGQ81863
augaaccccaaccagaagaucaucugcaucagcgccaccggcaugacccuguccguggucagccuccugaucgggaucgccaaccugggccucaacaucgggcugcacuacaaggugggcgacacgccggacgugaacauccccuccaugaacgagaccaacagcaccaccacgaucaucaacaacaacacccagaacaacuucaccaacaucaccaacaucaucgucaacaaggaggaggagcgcacguuccugaaccucaccaagccccugugcgaggugaacuccuggcacauccugagcaaggacaacgcgauccggaucggggaggacgcccacauccucgugacccgcgagcccuaccuguccugcgacccgcagggcugccggauguucgcccugagccagggcaccacgcuccgcgggcggcacgccaacggcaccauccacgaccgcucccccuuccgggcccuggucagcugggagauggggcaggcgcccucccccuacaacgugcgcguggagugcaucggcuggagcuccaccagcugccacgacgggaucucccggaugagcaucugcauguccggcccgaacaacaacgccagcgccgucgugugguacggcgggcgccccgugaccgagauccccuccugggccggcaacauccugcggacgcaggagagcgagugcgucugccacaaggggaucugccccguggugaugaccgacggcccggcgaacaaccgcgccgccaccaagaucaucuacuucaaggagggcaagauccagaagaucgaggagcucgaggggaacgcccagcacaucgaggagugcagcugcuacggcgccgcgggggucaucaagugcaucugccgggacaacuggaagggcgccaaccgccccgugaucaucaucgaccccgagaugaugacccacacguccaaguaccugugcagccgggugcugaccgacaccucccgccccaacgacccgaucagcgggaacugcgacgcccccaucaccggcggcucccccgaccccggggucaagggcuucgccuuccucgacggggagaacagcuggcugggccggacgaucuccaaggacagccgcuccggguacgagaugcugaaggugccgaacgccgagaccgacacccagagcggccccaccucccaccaggugaucgucaacaaccagaacuggagcggcuacuccggggcguucaucgacuacugggccaacaaggagugcuucaaccccugcuucuacguggagcucauccggggccgccccaaggagagcuccgugcuguggacgagcaacuccaucgucgcccugugcgggagcaaggagcggcucggcuccuggagcuggcacgacggggccgagaucaucuacuucaaguga

SEQ ID NO: 87650 - RNA, 1416 nt, Artificial Sequence
  derived and/or modified CDS sequence (opt1) from neuraminidase__InfluenzaA__AGQ81864
augaaccccaaccagaagcuguucgcccucagcggcguggccaucgcgcuguccguccugaaccuccugaucgggaucagcaacgugggccugaacgugucccuccaccugaaggagaaggggccgaagcaggaggagaacagcacgugcaccaccaucaaccagaacaacaccaccaucgucgagaacaccuacgugaacaacacgaccaucaucuccaaggagaccgagcugaagccgcccaacuaccuccugcugaacaagagccucugcaacguggagggcugggucgugaucgccaaggacaacgccgugcgcuucggggaguccgagcagaucaucgucacccgggagcccuacgugagcugcgaccccacgggcugcaagauguacgcccugcaccagggcaccaccauccgcaacaagcacuccaacgggaccauccacgaccggacggccuuccgcggccugaucagcaccccgcucgggaccccgcccaccguguccaacagcgacuucaucugcgucggcugguccagcacgaccugccacgacgggaucggccggaugaccaucugcauccagggcaacaacgacaacgcgaccgccacgguguacuacaaccgccggcugaccaccaccaucaagacgugggcccgcaacauccugcggacccaggaguccgagugcgugugccacaacgggaccugcgccgucgugaugaccgacggcagcgcguccagccaggccuacacgaaggugauguacuuccacaaggggcucgucaucaaggaggaggcccugaagggcuccgcccgccacaucgaggagugcagcugcuacggccacagccagaaggcgaccugcgugugccgggacaacuggcagggggccaaccgccccaucaucgagaucgacaugaacacccuggagcacaccucccgguacgugugcacgggcauccucaccgacaccagccgccccggggacaaguccagcggcgacugcuccaaccccaucaccgggagccccggcgcccccggcgucaagggguucggcuuccugaacggggacaacacguggcugggccggaccaucucccccaagagccgcuccggguucgagaugcucaagauccccaacgccggcaccgaccccaacagccggaucgccgagcgccaggagaucguggacaacaacaacugguccggcuacagcggguccuucaucgacuacugggacaacgacagcgagugcuacaacccgugcuucuacguggagcugauccggggccgccccgaggaggccaaguacgucugguggaccuccaacagccugaucgcgcucugcgggucccccuuccccgugggcagcggguccuucccggacggcgcccagauccaguacuucagcuga

SEQ ID NO: 87651 - RNA, 1416 nt, Artificial Sequence
  derived and/or modified CDS sequence (opt1) from neuraminidase__InfluenzaA__AGQ81865
augaaccccaaccagaagcuguucgcccucagcggcguggccaucgcgcuguccguccugaaccuccugaucgggcugagcaacgugggccucaacgugucccugcaccugaaggagaccgggccgaagcaggagggcaaccugaccugcaugacgaucaaccagaacaacaccaccgucguggagaacaccuacgugaacaacacgaccaucaucaccaaggagaccgagagcgagacgcccaacuaccuccugcucaacaagucccugugcaacgucgagggguggguggugaucgccaaggacaacgccguccgcuucggcgagagcgagcagaucaucgugacccgggagcccuacguguccugcgaccccaacggcugcaagauguacgcccugcaccaggggaccaccauccgcaacaagcacagcaacggcacgauccacgaccggaccgccuuccgcgggcucaucuccaccccgcugggcaccccgcccacggucagcaacuccgacuucaucugcgugggguggagcuccacgaccugccacgacggcaucggccggaugaccaucugcauccaggggaacaacgacaacgcgaccgccaccguguacuacaaccgccggcugaccaccacgaucaagaccugggcccgcaacauccuccggacccaggagagcgagugcgucugccacaacgggaccugcgccguggugaugacggacggcuccgcgagcucccaggcccacaccaaggucauguacuuccacaagggccugguggugaaggaggaggcccugaagggcagcgcccgccacaucgaggagugcuccugcuacgggcacaaccagaaggugaccugcgucugccgggacaacuggcagggcgccaaccgccccaucaucgagaucgacaugaacacccucgagcacacgagccgguacgugugcaccgggauccugaccgacaccagccgccccggcgacaagcccacgggggacugcuccaaccccaucaccggcagccccggcgcgccgggggucaagggcuucggguuccugaacggcgggaacaccuggcucggccggaccaucagcccccgcucccgguccggcuucgagaugcugaagauccccaacgccgggaccgaccccaacagccgcaucgccgagcggcaggagaucguggacaacuccaacuggagcggcuacuccgggagcuucaucgacuacuggaacgacaacuccgagugcuacaacccgugcuucuacgucgagcugauccgcggccggcccgaggaggccaaguacgugugguggacgagcaacucccucaucgcccugugcgggagccccuuccccgugggcuccggcagcuucccggacggggcgcagauccaguacuucuccuga

SEQ ID NO: 87652 - RNA, 1416 nt, Artificial Sequence
  derived and/or modified CDS sequence (opt1) from neuraminidase__InfluenzaA__AGQ81868
augaaccccaaccagaagcuguucgcccucagcggcguggccaucgcgcuguccguccugaaccuccugaucgggaucagcaacgugggccugaacgugucccuccaccugaaggagaaggggccgaagcaggaggagaacagcacgugcaccaccaucaaccagaacaacaccaccgucguggagaacaccuacgugaacaacacgaccaucaucaccaaggagaccgagcugaagacgcccuccuaccuccugcugaacaagagccucugcaacgucgagggcuggguggugaucgccaaggacaacgccguccgcuucggggaguccgagcagaucaucgugacccgggagcccuacgugagcugcgaccccaccggcugcaagauguacgcccugcaccagggcaccacgauccgcaacaagcacuccaacgggaccauccacgaccggaccgccuuccgcggccugaucagcaccucccucgggacgccgcccaccaucagcaacuccgacuucaugugcgucggcuggagcuccacgaccugccacgacgggaucggccggaugaccaucugcauccagggcaacaacgacaacgcgaccgccaccguguacuacaaccgccggcugaccacgaccaucaagaccugggcccgcaacauccugcggacccaggagagcgagugcgugugccacaacgggaucugcgccgucgugaugacggacggcuccgcgagcucccaggccuacaccaaggugauguacuuccacaaggggcucgucgugaaggaggaggcccugaagggcagcgcccgccacaucgaggagugcagcugcuacggccacucccagaaggugaccugcgucugccgggacaacuggcagggggccaaccgccccaucaucgagaucgacaugaacacccuggagcacacgagccgguacgugugcaccggcauccucaccgacaccucccgccccggggacaagagcuccggcgacugcagcaacccgaucgcggggucccccggcgcccccggcgugaagggguucggcuuccugaacggggacaacacguggcugggccggaccaucagcccccgcucccggagcggguucgagaugcucaagaucccgaacgccggcaccgaccccaacucccgcaucgccggccggcaggagaucgucgacaacaacaacuggagcggguacuccggcagcuucaucgacuacuggaacgacaacuccgagugcuacaaccccugcuucuacguggagcugauccgcgggcggcccgaggaggccaaguacgucugguggaccagcaacucccugaucgcgcucugcggcagcccguuccccgugggguccggcagcuuccccgacggcgcccagauccaguacuucagcuga

SEQ ID NO: 87653 - RNA, 1416 nt, Artificial Sequence
  derived and/or modified CDS sequence (opt1) from neuraminidase__InfluenzaA__AGQ81869
augaaccccaaccagaagcuguucgcccucagcggcguggccaucgcgcuguccguccugaaccuccugaucgggaucagcaacgugggccugaacgugucccuccaccugaaggagaaggggccgaagcaggaggagaacagcacgugcaccaccaucaaccagaacaacaccaccaucgucgagaacaccuacgugaacaacacgaccaucaucuccaaggagaccgagcugaagacccccagcuaccuccugcugaacaagucccucugcaacguggagggcugggucgugaucgccaaggacaacgccgugcgcuucggggagagcgagcagaucaucgucacgcgggagcccuacguguccugcgaccccaccggcugcaagauguacgcccugcaccagggcaccaccauccgcaacaagcacagcaacgggacgauccacgaccggaccgccuuccgcggccugaucuccaccccgcucgggaccccgcccacggugagcaacuccgacuucaucugcgucggcuggagcuccacgaccugccacgacgggaucggccggaugaccaucugcauccagggcaacaacgacaacgcgaccgccaccguguacuacaaccgccggcugaccaccacgauccgcaccugggcccggaacauccugcgcacccaggagagcgagugcgugugccacaacgggaccugcgccgucgugaugacggacggcuccgcgagcucccaggccuacaccaaggugauguacuuccacaaggggcucgucaucaaggaggaggcccugaagggcagcgcccggcacaucgaggagugcagcugcuacggccacucccagaaggcgaccugcgugugccgcgacaacuggcagggggccaaccggcccaucaucgagaucgacaugaacacccuggagcacacgagccgcuacgugugcaccggcauccucaccgacaccucccggcccggggacaagagcuccggcgacugcagcaaccccaucacggggucccccggcgcccccggcgucaagggguucggcuuccugaacggggacaacaccuggcugggccgcaccaucagcccgcggucccgcagcggguucgagaugcucaagauccccaacgccggcaccgaccccaacucccggaucgccgagcgccaggagaucguggacaacaacaacuggagcggcuacuccgggagcuucaucgacuacuggaacaacgacuccgagugcuacaaccccugcuucuacguggagcugauccggggccgcccggaggaggccaaguacgucugguggaccagcaacucccugaucgcgcucugcgggagccccuuccccgugggcuccgggagcuuccccgacggcgcccagauccaguacuucagcuga

SEQ ID NO: 87654 - RNA, 1416 nt, Artificial Sequence
  derived and/or modified CDS sequence (opt1) from neuraminidase__InfluenzaA__AGQ81870
augaaccccaaccagaagcuguucgcccucagcggcguggccaucgcgcuguccguccugaaccuccugaucgggaucagcaacgugggccugaacgugucccuccaccugaaggagaaggggccgaagcaggaggagaacagcacgugcaccaccaucaaccagaacaacaccaccaucgucgagaacaccuacgugaacaacacgaccaucaucuccaaggagaccgagcugaagccgcccagcuaccuccugcugaacaagucccucugcaacguggagggcugggucgugaucgccaaggacaacgccgugcgcuucggggagagcgagcagaucaucgucacccgggagcccuacguguccugcgaccccacgggcugcaagauguacgcccugcaccagggcaccaccauccgcaacaagcacagcaacgggaccauccacgaccggacggccuuccgcggccugaucuccaccccgcucgggaccccgcccaccgugagcaacuccgacuucaucugcgucggcuggagcuccacgaccugccacgacgggaucggccggaugaccaucugcauccagggcaacaacgacaacgcgaccgccacgguguacuacaaccgccggcugaccaccaccauccgcacgugggcccggaacauccugcgcacccaggagagcgagugcgugugccacaacgggaccugcgccgucgugaugaccgacggcuccgcgagcucccaggccuacacgaaggugauguacuuccacaaggggcucgucaucaaggaggaggcccugaagggcagcgcccggcacaucgaggagugcagcugcuacggccacucccagaaggcgaccugcgugugccgcgacaacuggcagggggccaaccggcccaucaucgagaucgacaugaacacccuggagcacaccagccgcuacgugugcacgggcauccucaccgacaccucccggcccggggacaagagcuccggcgacugcagcaaccccaucaccgggucccccggcgcccccggcgucaagggguucggcuuccugaacggggacaacacguggcugggccgcaccaucagcccccggucccgcagcggguucgagaugcucaagauccccaacgccggcaccgaccccaacucccggaucgccgagcgccaggagaucguggacaacaacaacuggagcggcuacuccgggagcuucaucgacuacuggaacaacgacuccgagugcuacaacccgugcuucuacguggagcugauccggggccgccccgaggaggccaaguacgucugguggaccagcaacucccugaucgcgcucugcgggagccccuuccccgugggcuccgggagcuucccggacggcgcccagauccaguacuucagcuga

SEQ ID NO: 87655 - RNA, 1416 nt, Artificial Sequence
  derived and/or modified CDS sequence (opt1) from neuraminidase__InfluenzaA__AGQ81871
augaaccccaaccagaagcuguucgcccucagcggcguggccaucgcgcuguccguccugaaccuccugaucgggaucagcaacgugggccugaacgugucccuccaccugaaggagaaggggccgaagcaggaggagaacagcacgugcaccaccaucaaccagaacaacaccaccaucgucgagaacaccuacgugaacaacacgaccaucaucuccaaggagaccgagcugaagacccccagcuaccuccugcugaacaagucccucugcaacguggagggcugggucgugaucgccaaggacaacgccgugcgcuucggggagagcgagcagaucaucgucacgcgggagcccuacguguccugcgaccccaccggcugcaagauguacgcccugcaccagggcaccaccauccgcaacaagcacagcaacgggacgauccacgaccggaccgccuuccgcggccugaucuccaccccgcucgggaccccgcccacggugagcaacuccgacuucaucugcaucggcuggagcuccacgaccugccacgacgggaucggccggaugaccaucugcauccagggcaacaacgacaacgcgaccgccaccgucuacuacaaccgccggcugaccaccacgauccgcaccugggcccggaacauccugcgcacccaggagagcgagugcgugugccacaacgggaccugcgccguggucaugacggacggcuccgcgagcucccaggccuacaccaaggugauguacuuccacaaggggcucgugaucaaggaggaggcccugaagggcagcgcccggcacaucgaggagugcagcugcuacggccacucccagaaggcgaccugcgucugccgcgacaacuggcagggggccaaccggcccaucaucgagaucgacaugaacacccuggagcacacgagccgcuacgugugcaccggcauccucaccgacaccucccggcccggggacaagagcuccggcgacugcagcaaccccaucacggggucccccggcgcccccggcgugaagggguucggcuuccugaacggggacaacaccuggcugggccgcaccaucagcccgcggucccgcagcggguucgagaugcucaagauccccaacgccggcaccgaccccaacucccggaucgccgagcgccaggagaucgucgacaacaacaacuggagcggcuacuccgggagcuucaucgacuacuggaacaacgacuccgagugcuacaaccccugcuucuacguggagcugauccggggccgcccggaggaggccaaguacgugugguggaccagcaacucccugaucgcgcucugcgggagccccuuccccgucggcuccgggagcuuccccgacggcgcccagauccaguacuucagcuga

SEQ ID NO: 87656 - RNA, 1416 nt, Artificial Sequence
  derived and/or modified CDS sequence (opt1) from neuraminidase__InfluenzaA__AGQ81872
augaaccccaaccagaagcuguucgcccucagcggcguggccaucgcgcuguccguccugaaccuccugaucgggaucagcaacgugggccugaacgugucccuccaccugaaggagaaggggccgaagcaggaggagaacagcacgugcaccaccaucaaccagaacaacaccaccaucgucgagaacaccuacgugaacaacacgaccaucaucuccaaggagaccgagcugaagacccccagcuaccuccugcugaacaagucccucugcaacguggagggcugggucgugaucgccaaggacaacgccgugcgcuucggggagagcgagcagaucaucgucacgcgggagcccuacguguccugcgaccccaccggcugcaagauguacgcccugcaccagggcaccaccauccgcaacaagcacagcaacgggacgauccacgaccggaccgccuuccgcggccugaucuccaccccgcucgggaccccgcccagcguguccaacagcgacuucaucugcgucggcugguccagcacgaccugccacgacgggaucggccggaugaccaucugcauccagggcaacaacgacaacgcgaccgccacgguguacuacaaccgccggcugaccaccaccauccgcacgugggcccggaacauccugcgcacccaggaguccgagugcgugugccacaacgggaccugcgccgucgugaugaccgacggcagcgcguccagccaggccuacacgaaggugauguacuuccacaaggggcucgucaucaaggaggaggcccugaagggcagcgcccggcacaucgaggagugcuccugcuacggccacagccagaaggcgaccugcgugugccgcgacaacuggcagggggccaaccggcccaucaucgagaucgacaugaacacccuggagcacaccucccgcuacgugugcacgggcauccucaccgacaccagccggcccggggacaaguccagcggcgacugcuccaaccccaucaccgggagccccggcgcccccggcgucaagggguucggcuuccugaacggggacaacacguggcugggccgcaccaucuccccgcggagccgcuccggguucgagaugcucaagauccccaacgccggcaccgaccccaacagccggaucgccgagcgccaggagaucguggacaacaacaacugguccggcuacagcggguccuucaucgacuacuggaacaacgacagcgagugcuacaaccccugcuucuacguggagcugauccggggccgcccggaggaggccaaguacgucugguggaccuccaacagccugaucgcgcucugcgggucccccuuccccgugggcagcgggagcuuccccgacggcgcccagauccaguacuucuccuga

SEQ ID NO: 87657 - RNA, 1416 nt, Artificial Sequence
  derived and/or modified CDS sequence (opt1) from neuraminidase__InfluenzaA__AGQ81875
augaaccccaaccagaagcuguucgcccucagcggcguggccaucgcgcuguccguccugaaccuccugaucgggaucagcaacgugggccugaacgugucccuccaccugaaggagaaggggccgaagcaggaggagaacagcacgugcaugaccaucaaccagaacaacaccaccgucguggagaacaccuacgugaacaacaccacgaucaucaccaaggagaccgagcuggagacccccuccuaccuccugcugaacaagggccucugcaacgucgagggguggguggugaucgccaaggacaacgccguccgcuucggcgagacggagcagaucaucgugacccgggagcccuacgugagcugcgaccccaacggcugcaagauguacgcccugcaccaggggaccaccauccgcaacaagcacuccaacggcacgauccacgaccggaccgccuuccgcgggcugaucagcaccccgcucggcaccccgcccacggucuccaacagcgacuucaucugcguggggugguccagcacgaccugccacgacggcaucggccggaugaccaucugcauccaggggaacaacgacaacgcgaccgccaccguguacuacaaccgccggcugaccaccacgaucaagaccugggcccgcaacauccugcggacccaggaguccgagugcgucugccacaacgggaccugcgccguggugaugacggacggcagcgcguccagccaggcccacaccaaggucaucuacuuccacaagggccucaucgugaaggaggaggcccugaagggcuccgcccgccacaucgaggagugcagcugcuacgggcacucccagaaggugaccugcgucugccgggacaacuggcagggcgccaaccgccccaucaucgagaucgacaugaacacccuggagcacacgagccgguacgugugcaccgggauccucaccgacaccagccgccccggcgacaaguccacgggggacugcagcaaccccaucaccggcucccccggcgcgcccggggugaagggcuucggguaccugaacggcgacaacaccuggcuggggcggaccaucagcccgcgcucccggagcggcuucgagaugcucaagauccccaacgccggcaccgaccccaacucccgcaucacggagcggcaggagaucgucgacaacaacaacuggagcggguacuccggcagcuucguggacuacuggaacgacaacuccgagugcuacaaccccugcuucuacgucgagcugauccgcgggcggccggaggaggccaaguacgugugguggaccagcaacuccaucaucgcccugugcggcagccccuuccccgugggguccggcagcuuccccgacggcgcccagauccaguacuucuccuga

SEQ ID NO: 87658 - RNA, 1416 nt, Artificial Sequence
  derived and/or modified CDS sequence (opt1) from neuraminidase__InfluenzaA__AGQ81876
augaaccccaaccagaagcuguucgcccucagcggcguggccaucgcgcuguccguccugaaccuccugaucgggaucagcaacgugggccugaacgugucccuccaccugaaggagaaggggccgaagcaggaggagaacagcacgugcaugaccaucaaccagaacaacaccaccgucguggagaacaccuacgugaacaacaccacgaucaucaccaaggagaccgagcuggagacccccuccuaccuccugcugaacaagggccucugcaacgucgagggguggguggugaucgccaaggacaacgccguccgcuucggcgagacggagcagaucaucgugacccgggagcccuacgugagcugcgaccccaacggcugcaagauguacgcccugcaccaggggaccaccauccgcaacaagcacuccaacggcacgauccacgaccggaccgccuuccgcgggcugaucagcaccccgcucggcaccccgcccacggucuccaacagcgacuucaucugcguggggugguccagcacgaccugccacgacggcaucggccggaugaccaucugcauccagggggacaacgacaacgcgaccgccaccguguacuacaaccgccggcugaccaccacgaucaagaccugggcccgcaacauccugcggacccaggaguccgagugcgucugccacaacgggaccugcgccguggugaugacggacggcagcgcguccagccaggcccacaccaaggucaucuacuuccacaagggccucaucgugaaggaggaggcccugaagggcuccgcccgccacaucgaggagugcagcugcuacgggcacucccagaaggugaccugcgucugccgggacaacuggcagggcgccaaccgccccaucaucgagaucgacaugaacacccuggagcacacgagccgguacgugugcaccgggauccucaccgacaccagccgccccggcgacaaguccacgggggacugcagcaaccccaucaccggcucccccggcgcgcccggggugaagggcuucggguaccugaacggcgacaacaccuggcuggggcggaccaucagcccgcgcucccggagcggcuucgagaugcucaagauccccaacgccggcaccgaccccaacucccgcaucacggagcggcaggagaucgucgacaacaacaacuggagcggguacuccggcagcuucguggacuacuggaacgacaacuccgagugcuacaaccccugcuucuacgucgagcugauccgcgggcggccggaggaggccaaguacgugugguggaccagcaacuccaucaucgcccugugcggcagccccuuccccgugggguccggcagcuuccccgacggcgcccagauccaguacuucuccuga

SEQ ID NO: 87659 - RNA, 1416 nt, Artificial Sequence
  derived and/or modified CDS sequence (opt1) from neuraminidase__InfluenzaA__AGQ81877
augaaccccaaccagaagcuguucgcccucagcggcguggccaucgcgcuguccguccugaaccuccugaucgggaucagcaacgugggccugaacgugucccuccaccugaaggagaaggggccgaagcaggaggagaacagcacgugcaccaccaucaaccagaacaacaccaccgucguggagaacaccuacgugaacaacacgaccaucaucaccaaggagaccgagcugaagacgcccuccuaccuccugcugaacaagagccucugcaacgucgagggcuggguggugaucgccaaggacaacgccguccgcuucggggaguccgagcagaucaucgugacccgggagcccuacgugagcugcgaccccaccggcugcaagauguacgcccugcaccagggcaccacgauccgcaacaagcacuccaacgggaccauccacgaccggaccgccuuccgcggccugaucagcaccucccucgggacgccgcccaccaucagcaacuccgacuucaugugcgucggcuggagcuccacgaccugccacgacgggaucggccggaugaccaucugcauccagggcaacaacgacaacgcgaccgccaccguguacuacaaccgccggcugaccacgaccaucaagaccugggcccgcaacauccugcggacccaggagagcgagugcgugugccacaacgggaucugcgccgucgugaugacggacggcuccgcgagcucccaggccuacaccaaggugauguacuuccacaaggggcucgucgugaaggaggaggcccugaagggcagcgcccgccacaucgaggagugcagcugcuacggccacucccagaaggugaccugcgucugccgggacaacuggcagggggccaaccgccccaucaucgagaucgacaugaacacccuggagcacacgagccgguacgugugcaccggcauccucaccgacaccucccgccccggggacaagagcuccggcgacugcagcaacccgaucacggggucccccggcgcgcccggcgugaagggguucggcuuccugaacggggacaacaccuggcugggccggaccaucagcccccgcucccggagcggguucgagaugcucaagaucccgaacgccggcaccgaccccaacucccgcaucgccggccggcaggagaucgucgacaacaacaacuggagcggguacuccggcagcuucaucgacuacuggaacgacaacuccgagugcuacaaccccugcuucuacguggagcugauccgcgggcggcccgaggaggccaaguacgucugguggaccagcaacucccugaucgcccucugcggcagcccguuccccgugggguccggcagcuuccccgacggcgcgcagauccaguacuucagcuga

SEQ ID NO: 87660 - RNA, 1416 nt, Artificial Sequence
  derived and/or modified CDS sequence (opt1) from neuraminidase__InfluenzaA__AGQ81878
augaaccccaaccagaagcuguucgcccucagcggcguggccaucgcgcuguccguccugaaccuccugaucgggaucagcaacgugggccugaacgugucccuccaccugaaggagaaggggccgaagcaggaggagaaccugaccugcaccacgaucaaccagaacaacaccaccgucguggagaacaccuacgugaacaacacgaccaucaucaccaaggagaccgaccucaaggcccccagcuaccugcugcucaacaagucccugugcaacgucgagggcuggguggugaucgccaaggacaacgccguccgcuucggggagagcgagcagaucaucgugacgcgggagcccuacguguccugcgaccccaccggcugcaagauguacgcccugcaccagggcaccaccauccgcaacaagcacagcaacgggacgauccacgaccggaccgcguuccgcggccucaucuccaccccgcuggggaccccgcccacggucagcaacuccgacuucaugugcgugggcuggagcuccacgaccugccacgacgggaucggccggaugaccaucugcauccagggcaacaacgacaacgccaccgccaccguguacuacaaccgccggcugaccaccacgaucaagaccugggcccgcaacauccuccggacccaggagagcgagugcgucugccacaacgggaccugcgcgguggugaugacggacggcuccgccagcucccaggccuacaccaaggucauguacuuccacaaggggcugguggugaaggaggaggcccugaagggcagcgcccgccacaucgaggagugcuccugcuacggccacagccagaaggugaccugcgucugccgggacaacuggcagggggcgaaccgccccaucaucgagaucgacaugaacacccucgagcacacgagccgguacgugugcaccggcauccugaccgacaccucccgccccggggacaagagcuccggcgacugcagcaaccccaucacggggucccccggcgcccccggcgucaagggguucggcuuccugaacggggacaacaccuggcucggccggaccaucagcccgcgcucccggagcggguucgagaugcugaagauccccaacgccggcaccgaccccaacucccgcaucgccgagcggcaggagaucguggacaacaacaacuggagcggcuacuccgggagcuucaucgacuacuggaacgacaacuccgagugcuacaaccccugcuucuacgucgagcugauccgcggccggccggaggaggccaaguacgugugguggaccagcaacucccucaucgcgcugugcgggagccccuuccccaucggcuccgggagcuuccccgacggcgcccagauccaguacuucuccuga

SEQ ID NO: 87661 - RNA, 1416 nt, Artificial Sequence
  derived and/or modified CDS sequence (opt1) from neuraminidase__InfluenzaA__AGQ81882
augaaccccaaccagaagcuguucgcccucagcggcguggccaucgcgcuguccguccugaaccuccugaucgggaucagcaacgugggccugaacgugucccuccaccugaaggagaagggggccaagcaggaggagaaccugaccugcaccacgaucaaccagaacaacaccaccgucguggagaacaccuacgugaacaacacgaccgucaucaccaaggaggccgacuggaagaccccgagcuaccuccugcugaacaagucccucugcaacguggagggcuggguggucaucgccaaggacaacgccauccgcuucggggagagcgagcagaucaucgugacgcgggagcccuacguguccugcgaccccaccggcugcaagauguacgcgcugcaccagggcaccaccauccgcaacaagcacagcaacgggacgauccacgaccggaccgccuuccgcggccugaucuccacgccccucgggaccccgcccaccgucagcaacuccgacuucaugugcgugggcuggagcuccacgaccugccacgacgggaucggccggaugaccaucugcauccagggcaacaacgacaacgccaccgccaccguguacuacaacgggcgccugaccaccacgaucaagaccugggcgcggaacauccugcgcacccaggagagcgagugcgucugccacaacgggaccugcgccguggugaugacggacggcuccgccagcucccaggccuacaccaaggucauguacuuccacaagggccucgugaucaaggaggaggcccugaagggcagcgcgcggcacaucgaggagugcuccugcuacgggcacagccagaaggugaccugcgucugccgcgacaacuggcagggcgccaaccggcccaucaucgagaucgacaugaacacccuggagcacacgagccgcuacgugugcaccgggauccucaccgacaccucccggcccggcgacaagagcuccggggacugcagcaacccgaucacgggcucccccggcgcccccggggugaagggcuucggguuccugaacggcgacaacaccuggcuggggcgcaccaucagcccccggucccgcagcggcuucgagaugcucaagaucccgaacgccggcaucgaccccaacucccggaucgccgagcgccaggagaucgucgacaacaacaacuggagcggguacuccggcagcuucaucgacuacuggaacgacaacuccgagugcuacaaccccugcuucuacguggagcugauccgggggcgccccgaggaggcgaaguacgucugguggaccagcaacucccugaucgcccucugcggcagcccguuccccgugggguccggcagcuuccccgacggcgcccagauccaguacuucuccuga

SEQ ID NO: 87662 - RNA, 1416 nt, Artificial Sequence
  derived and/or modified CDS sequence (opt1) from neuraminidase__InfluenzaA__AGQ81883
augaaccccaaccagaagcuguucgcccucagcggcguggccaucgcgcuguccguccugaaccuccugaucgggaucagcaacgugggccugaacgugucccuccaccugaaggagaaggggccgaagcaggaggagaaccugaccugcaccacgaucaaccagaacaacaccaccgucguggagaacaccuacgugaacaacacgaccgucaucaccaaggaggccgacuggaagacccccagcuaccuccugcugaacaagucccucugcaacguggagggcuggguggucaucgccaaggacaacgccauccgcuucggggagagcgagcagaucaucgugacgcgggagcccuacguguccugcgaccccaccggcugcaagauguacgcccugcaccagggcaccaccauccgcaacaagcacagcaacgggacgauccacgaccggaccgcguuccgcggccugaucuccaccccgcucgggaccccgcccacggucagcaacuccgacuucaugugcgugggcuggagcuccacgaccugccacgacgggaucggccggaugaccaucugcauccagggcaacaacgacaacgccaccgccaccguguacuacaacgggcgccugaccaccacgaucaagaccugggcccggaacauccugcgcacccaggagagcgagugcgucugccacaacgggaccugcgcgguggugaugacggacggcuccgccagcucccaggccuacaccaaggucauguacuuccacaagggccucgugaucaaggaggaggcccugaagggcagcgcccggcacaucgaggagugcuccugcuacgggcacagccagaaggugaccugcgucugccgcgacaacuggcagggcgcgaaccggcccaucaucgagaucgacaugaacacccuggagcacacgagccgcuacgugugcaccgggauccucaccgacaccucccggcccggcgacaagagcuccggggacugcagcaaccccaucacgggcucccccggcgcccccggggugaagggcuucggguuccugaacggcgacaacaccuggcuggggcgcaccaucagcccgcggucccgcagcggcuucgagaugcucaagauccccaacgccggcaucgaccccaacucccggaucgccgagcgccaggagaucgucgacaacaacaacuggagcggguacuccggcagcuucaucgacuacuggaacgacaacuccgagugcuacaaccccugcuucuacguggagcugauccgggggcgcccggaggaggccaaguacgucugguggaccagcaacucccugaucgcgcucugcggcagccccuuccccgugggguccggcagcuuccccgacggcgcccagauccaguacuucuccuga

SEQ ID NO: 87663 - RNA, 1416 nt, Artificial Sequence; identical to SEQ ID NO: 87662
  derived and/or modified CDS sequence (opt1) from neuraminidase__InfluenzaA__AGQ81884

SEQ ID NO: 87664 - RNA, 1416 nt, Artificial Sequence; identical to SEQ ID NO: 87662
  derived and/or modified CDS sequence (opt1) from neuraminidase__InfluenzaA__AGQ81885

SEQ ID NO: 87665 - RNA, 1416 nt, Artificial Sequence; identical to SEQ ID NO: 87662
  derived and/or modified CDS sequence (opt1) from neuraminidase__InfluenzaA__AGQ81886

SEQ ID NO: 87666 - RNA, 1356 nt, Artificial Sequence
  derived and/or modified CDS sequence (opt1) from neuraminidase__InfluenzaA__AGQ81888
augaaccccaaccagaagcuguucgcccucagcggcguggccaucgcgcuguccguccugaaccuccugaucgggcugagcaacgugggccucaacgugucccugcaccugaaggaggccgggccgaagcaggaggagaaccugaccugcaugaccacgaaggagaccgagcucggcacccccagcuaccugcuccugaacaagucccugugcaacgucgagggguggguggugaucgccaaggacaacgccguccgcuucggcgagagcgagcagaucaucaucacccgggagcccuacguguccugcgaccccaacggcugcaagauguacgcccuccaccaggggacgaccauccgcaacaagcacagcaacggcaccauccacgaccggaccgcguuccgcgggcugaucuccacgccgcugggcaccccgcccaccgugagcaacuccgacuucaucugcgucggguggagcuccaccacgugccacgacggcaucggccggaugaccaucugcauccaggggaacaacgacaacgccaccgccaccguguacuacaaccgccggcucacgaccaccaucaagaccugggcccgcaacauccugcggacgcaggagagcgagugcgugugccacaacgggaccugcgcggucgugaugaccgacggcuccgccagcucccaggcccacaccaaggugauguacuuccacaagggccuggucgugaaggaggaggcccucaagggcagcgccaagcacaucgaggagugcuccugcuacgggcacaaccagaaggugacgugcgucugccgcgacaacuggcagggcgcgaaccggcccaucaucgagaucgacaugaacacccuggagcacaccagccgcuacgugugcaccgggauccugacggacaccagccggcccggcgacaagcccaccggggacugcuccaaccccaucaccggcagccccggcgccccgggggugaagggcuucggguuccucaacggcgacaacacguggcuggggcgcaccaucagcccccggucccgcuccggcuucgagaugcugaagauccccaacgccggcaucgaccccaacagccggaucgccgagcgccaggagaucgucgacaacuccaacuggagcggguacuccggcagcuucaucgacuacuggaacgacaacuccgagugcuacaacccgugcuucuacguggagcucauccgggggcgccccgaggaggccaaguacgugugguggaccagcaacucccugaucgcgcugugcggcagccccuuccccgucggguccggcagcuucccggacggcgcccagauccaguacuucuccuga

SEQ ID NO: 87667 - RNA, 1356 nt, Artificial Sequence
  derived and/or modified CDS sequence (opt1) from neuraminidase__InfluenzaA__AGQ81889
augaaccccaaccagaagcuguucgcccucagcggcguggccaucgcgcuguccguccugaaccuccugaucgggcugagcaacgugggccucaacgugucccugcaccugaaggagaccgggccgaagcaggaggagaaccugaccugcaugacgaccaaggagaccgagcucggcacccccagcuaccugcuccugaacaagucccugugcaacgucgagggguggguggugaucgccaaggacaacgccguccgcuucggcgagagcgagcagaucaucaucacgcgggagcccuacguguccugcgaccccaacggcugcaagauguacgcccuccaccaggggaccaccauccgcaacaagcacagcaacggcaccauccacgaccggacggccuuccgcgggcugaucuccaccccgcugggcaccccgcccaccgugagcaacuccgacuucaucugcgucggguggagcuccacgaccugccacgacggcaucggccggaugaccaucugcauccaggggaacaacgacaacgcgaccgccacgguguacuacaaccgccggcucaccaccaccaucaagacgugggcccgcaacauccugcggacccaggagagcgagugcgugugccacaacgggaccugcgccgucgugaugaccgacggcuccgcgagcucccaggcccacacgaaggugauguacuuccacaagggccuggucgugaaggaggaggcccucaagggcagcgccaagcacaucgaggagugcuccugcuacgggcacaaccagaaggugaccugcgucugccgcgacaacuggcagggcgccaaccggcccaucaucgagaucgacaugaacacccuggagcacaccagccgcuacgugugcacggggauccugaccgacaccagccggcccggcgacaagcccaccggggacugcuccaaccccaucacgggcagccccggcgcgccgggggugaagggcuucggguuccucaacggcgacaacaccuggcuggggcgcaccaucagcccccggucccgcuccggcuucgagaugcugaagauccccaacgccggcaucgaccccaacagccggaucgccgagcgccaggagaucgucgacaacuccaacuggagcggguacuccggcagcuucaucgacuacuggaacgacaacuccgagugcuacaacccgugcuucuacguggagcucauccgggggcgccccgaggaggccaaguacgugugguggaccagcaacucccugaucgcccugugcggcagccccuuccccgucggguccggcagcuucccggacggcgcgcagauccaguacuucuccuga

SEQ ID NO: 87668 - RNA, 1356 nt, Artificial Sequence; identical to SEQ ID NO: 87667
  derived and/or modified CDS sequence (opt1) from neuraminidase__InfluenzaA__AGQ81890

SEQ ID NO: 87669 - RNA, 1356 nt, Artificial Sequence; identical to SEQ ID NO: 87667
  derived and/or modified CDS sequence (opt1) from neuraminidase__InfluenzaA__AGQ81891

SEQ ID NO: 87670 - RNA, 1356 nt, Artificial Sequence
  derived and/or modified CDS sequence (opt1) from neuraminidase__InfluenzaA__AGQ81893
augaaccccaaccagaagcuguucgcccucagcggcguggccaucgcgcuguccguccugaaccuccugaucgggcugagcaacgugggccucaacgugucccugcaccugaaggagaccgggccgaagcaggaggagaaccugaccugcaugacgaccaaggagaccgagcucggcacccccagcuaccugcuccugaacaagucccugugcaacgucgagggguggguggugaucgccaaggacaacgccguccgcuucggcgagagcgagcagaucaucaucacgcgggagcccuacguguccugcgaccccaacggcugcaagauguacgcccuccaccaggggaccaccauccgcaacaagcacagcaacggcaccauccacgaccggacggccuuccgcgggcugaucuccaccccgcugggcaccccgcccaccgugagcaacuccgacuucaucugcgucggguggagcuccacgaccugccacgacggcaucggccggaugaccaucugcauccaggggaacaacgacaacgcgaccgccacgguguacuacaaccgccggcucaccaccaccaucaagacgugggcccgcaacauccugcggacccaggagagcgagugcgugugccacaacgggaccugcgccgucgugaugaccgacggcuccgcgagcucccaggcccacacgaaggugauguacuuccacaagggccuggucgugaaggaggaggcccucaagggcagcgccaagcacaucgaggagugcuccugcuacgggcacaaccagaaggugaccugcgucugccgcgacaacuggcagggcgccaaccggcccaucaucgagaucgacaugaacacccuggagcacaccagccgcuacgugugcacggggauccugaccgacaccagccggcccggcgacaagcccaccggggacugcuccaaccccaucacgggcagccccggcgcgccgggggugaagggcuucggguuccucaacggcgacaacaccuggcuggggcgcaccaucagcccccggucccgcuccggcuucgagaugcugaagauccccaacgccggcaucgaccccaacagccggaucgccgagcgccaggagaucgucgacaacuccaacuggagcggguacuccggcagcuucaucgacuacuggaacgacaacuccgagugcuacaacccgugcuucuacguggagcucauccgggggcgccccgaggaggccgaguacgugugguggaccagcaacucccugaucgcccugugcggcagccccuuccccgucggguccggcagcuucccggacggcgcgcagauccaguacuucuccuga

SEQ ID NO: 87671 - RNA, 1356 nt, Artificial Sequence; identical to SEQ ID NO: 87667
  derived and/or modified CDS sequence (opt1) from neuraminidase__InfluenzaA__AGQ81894

SEQ ID NO: 87672 - RNA, 1356 nt, Artificial Sequence; identical to SEQ ID NO: 87667
  derived and/or modified CDS sequence (opt1) from neuraminidase__InfluenzaA__AGQ81895

SEQ ID NO: 87673 - RNA, 1356 nt, Artificial Sequence; identical to SEQ ID NO: 87667
  derived and/or modified CDS sequence (opt1) from neuraminidase__InfluenzaA__AGQ81896

SEQ ID NO: 87674 - RNA, 1356 nt, Artificial Sequence; identical to SEQ ID NO: 87667
  derived and/or modified CDS sequence (opt1) from neuraminidase__InfluenzaA__AGQ81897

SEQ ID NO: 87675 - RNA, 1356 nt, Artificial Sequence; identical to SEQ ID NO: 87667
  derived and/or modified CDS sequence (opt1) from neuraminidase__InfluenzaA__AGQ81898

SEQ ID NO: 87676 - RNA, 1356 nt, Artificial Sequence; identical to SEQ ID NO: 87667
  derived and/or modified CDS sequence (opt1) from neuraminidase__InfluenzaA__AGQ81899

SEQ ID NO: 87677 - RNA, 1356 nt, Artificial Sequence; identical to SEQ ID NO: 87667
  derived and/or modified CDS sequence (opt1) from neuraminidase__InfluenzaA__AGQ81900

SEQ ID NO: 87678 - RNA, 1356 nt, Artificial Sequence; identical to SEQ ID NO: 87667
  derived and/or modified CDS sequence (opt1) from neuraminidase__InfluenzaA__AGQ81901

SEQ ID NO: 87679 - RNA, 1356 nt, Artificial Sequence; identical to SEQ ID NO: 87667
  derived and/or modified CDS sequence (opt1) from neuraminidase__InfluenzaA__AGQ81902

SEQ ID NO: 87680 - RNA, 1356 nt, Artificial Sequence; identical to SEQ ID NO: 87667
  derived and/or modified CDS sequence (opt1) from neuraminidase__InfluenzaA__AGQ81903

SEQ ID NO: 87681 - RNA, 1356 nt, Artificial Sequence
  derived and/or modified CDS sequence (opt1) from neuraminidase__InfluenzaA__AGQ81904
augaaccccaaccagaagcuguucgcccucagcggcguggccaucgcgcuguccguccugaaccuccugaucgggcugagcaacgugggccucaacgugucccugcaccugaaggagaccgggccgaagcaggaggagaaccugaccugcaugacgaccaaggagaccgagcucggcacccccagcuaccugcuccugaacaagucccugugcaacgucgagggguggguggugaucgccaaggacaacgccguccgcuucggcgagagcgagcagaucaucaucacgcgggagcccuacguguccugcgaccccaacggcugcaagauguacgcccuccaccaggggaccaccauccgcaacaagcacagcaacggcaccauccacgaccggacggccuuccgcgggcugaucuccaccccgcugggcaccccgcccaccgugagcaacuccgacuucaucugcgucggguggagcuccacgaccugccacgacggcaucggccggaugaccaucugcauccaggggaacaacgacaacgcgaccgccacgguguacuacaaccgccggcucaccaccaccaucaagacgugggcccgcaacauccugcggacccaggagagcgagugcgugugccacaacgggaccugcgccgucgugaugaccgacggcuccgcgagcucccaggcccacacgaaggugauguacuuccacaagggccuggucgugaaggaggaggcccucaagggcagcgccaagcacaucgaggagugcuccugcuacgggcacaaccagaaggugaccugcgucugccgcgacaacuggcagggcgccaaccggcccaucaucgagaucgacaugaacacccuggagcacaccagccgcuacgugugcacggggauccugaccgacaccagccggcccggcgacaagcccaccggggacugcuccaaccccaucacgggcagccccggcgcgccgggggugaagggcuucggguuccucaacggcgacaacaccuggcuggggcgcaccaucagcccccggucccgcuccggcuucgagaugcugaagauccccaacgccggcaucgaccccaacagccggaucaccgagcgccaggagaucgucgacaacuccaacuggagcggguacuccggcagcuucaucgacuacuggaacgacaacuccgagugcuacaacccgugcuucuacguggagcucauccgggggcgccccgaggaggccaaguacgugugguggacgagcaacucccugaucgcccugugcggcagccccuuccccgucggguccggcagcuucccggacggcgcccagauccaguacuucuccuga

SEQ ID NO: 87682 - RNA, 1356 nt, Artificial Sequence; identical to SEQ ID NO: 87667
  derived and/or modified CDS sequence (opt1) from neuraminidase__InfluenzaA__AGQ81905

SEQ ID NO: 87683 - RNA, 1356 nt, Artificial Sequence
  derived and/or modified CDS sequence (opt1) from neuraminidase__InfluenzaA__AGQ81906
augaaccccaaccagaagcuguucgcccucagcggcguggccaucgcgcuguccguccugaaccuccugaucgggcugagcaacgugggccucaacgugucccugcaccugaaggagaccgggccgaagcaggaggagaaccugaccugcaugacgaccaaggagaccgagcucggcacccccagcuaccugcuccugaacaagucccugugcaacgucgagggguggguggugaucgccaaggacaacgccguccgcuucggcgagagcgagcagaucaucaucacgcgggagcccuacguguccugcgaccccaacggcugcaagauguacgcccuccaccaggggaccaccauccgcaacaagcacagcaacggcaccauccacgaccggacggccuuccgcgggcugaucuccaccccgcugggcaccccgcccaccgugagcaacuccgacuucaucugcgucggguggagcuccacgaccugccacgacggcaucggccggaugaccaucugcauccaggggaacaacgacaacgcgaccgccacgguguacuacaaccgccggcucaccaccaccaucaagacgugggcccgcaacauccugcggacccaggagagcgagugcgugugccacaacgggaccugcgccgucgugaugaccgacggcuccgcgagcucccaggcccacacgaaggugauguacuuccacaagggccuggucgugaaggaggaggcccucaagggcagcgcccgccacaucgaggagugcuccugcuacgggcacaaccagaaggugaccugcgucugccgggacaacuggcagggcgccaaccgccccaucaucgagaucgacaugaacacccuggagcacaccagccgguacgugugcacggggauccugaccgacaccagccgccccggcgacaagcccaccggggacugcuccaaccccaucacgggcagccccggcgcgccgggggugaagggcuucggguuccucaacggcgacaacaccuggcuggggcggaccaucagcccccgcucccgguccggcuucgagaugcugaagauccccaacgccggcaucgaccccaacagccgcaucgccgagcggcaggagaucgucgacaacuccaacuggagcggguacuccggcagcuucaucgacuacuggaacgacaacuccgagugcuacaacccgugcuucuacguggagcucauccgcgggcggcccgaggaggccaaguacgugugguggaccagcaacucccugaucgcccugugcggcagccccuuccccgucggguccggcagcuucccggacggcgcgcagauccaguacuucuccuga

SEQ ID NO: 87684 - RNA, 1356 nt, Artificial Sequence; identical to SEQ ID NO: 87667
  derived and/or modified CDS sequence (opt1) from neuraminidase__InfluenzaA__AGQ81907

SEQ ID NO: 87685 - RNA, 1356 nt, Artificial Sequence
  derived and/or modified CDS sequence (opt1) from neuraminidase__InfluenzaA__AGQ81908
augaaccccaaccagaagcuguucgcccucagcggcguggccaucgcgcuguccguccugaaccuccugaucgggcugagcaacgugggccucaacgugucccugcaccugaaggagaccgggccgaagcaggaggagaaccugaccugcaugacgaccaaggagaccgagcucggcacccccagcuaccugcuccugaacaagucccugugcaacgucgagggguggguggugaucgccaaggacaacgccguccgcuucggcgagagcgagcagaucaucaucacgcgggagcccuacguguccugcgaccccaacggcugcaagauguacgcccuccaccaggggaccaccauccgcaacaagcacagcaacggcaccauccacgaccggacggccuuccgcgggcugaucuccaccccgcugggcaccccgcccaccgugagcaacuccgacuucaucugcgucggguggagcuccacgaccugccacgacggcaucggccggaugaccaucugcauccaggggaacaacgacaacgcgaccgccacgguguacuacaaccgccggcucaccaccaccaucaagacgugggcccgcaacauccugcggacccaggagagcgagugcgugugccacaacgggaccugcgccgucgugaugaccgacggcuccgcgagcaaccaggcccacacgaaggugauguacuuccacaagggccuggucgugaaggaggaggcccucaagggcuccgccaagcacaucgaggagugcagcugcuacgggcacaaccagaaggugaccugcgucugccgcgacaacuggcagggcgccaaccggcccaucaucgagaucgacaugaacacccuggagcacaccucccgcuacgugugcacggggauccugaccgacaccagccggcccggcgacaagcccaccggggacugcagcaaccccaucacgggcucccccggcgcgccgggggugaagggcuucggguuccucaacggcgacaacaccuggcuggggcgcaccaucagcccccggucccgcagcggcuucgagaugcugaagauccccaacgccggcaucgaccccaacucccggaucaccgagcgccaggagaucgucgacaacagcaacugguccggguacagcggcuccuucaucgacuacuggaacgacaacagcgagugcuacaacccgugcuucuacguggagcucauccgggggcgccccgaggaggccaaguacgugugguggacguccaacagccugaucgcccugugcggcucccccuuccccgucgggagcggcuccuucccggacggcgcccagauccaguacuucagcuga

SEQ ID NO: 87686 - RNA, 1356 nt, Artificial Sequence; identical to SEQ ID NO: 87667
  derived and/or modified CDS sequence (opt1) from neuraminidase__InfluenzaA__AGQ81909

SEQ ID NO: 87687 - RNA, 1356 nt, Artificial Sequence
  derived and/or modified CDS sequence (opt1) from neuraminidase__InfluenzaA__AGQ81910
augaaccccaaccagaagcuguucgcccucagcggcguggccaucgcgcuguccguccugaaccuccugaucgggcugagcaacgugggccucaacgugucccugcaccugaaggagaccgggccgaagcaggaggagaaccugaccugcaugacgaccaaggagaccgagcucggcacccccagcuaccugcuccugaacaagucccugugcaacgucgagggguggguggugaucgccaaggacaacgccguccgcuucggcgagagcgagcagaucaucaucacgcgggagcccuacguguccugcgaccccaacggcugcaagauguacgcccuccaccaggggaccaccauccgcaacaagcacagcaacggcaccauccacgaccggacggccuuccgcgggcugaucuccaccccgcugggcaccccgcccaccgugagcaacuccgacuucaucugcgucggguggagcuccacgaccugccacgacggcaucggccggaugaccaucugcauccaggggaacaacgacaacgcgaccgccacgguguacuacaaccgccggcucaccaccaccaucaagacgugggcccgcaacauccugcggacccaggagagcgagugcgugugccacaacgggaccugcgccgucgugaugaccgacggcuccgcgagcggccaggcccacacgaaggugauguacuuccacaagggccuggucgugaaggaggaggcccucaagggguccgccaagcacaucgaggagugcagcugcuacggccacaaccagaaggugaccugcgucugccgcgacaacuggcagggggccaaccggcccaucaucgagaucgacaugaacacccuggagcacaccuccagcuacgugugcacgggcauccugaccgacaccagccgccccggggacaagcccaccggcgacugcuccaaccccaucacgggcagccccggggcgccgggcgugaagggguucggcuuccucaacggggacaacaccuggcugggccggaccaucagcccccgcucccgguccggcuucgagaugcugaagauccccaacgccgggaucgaccccaacagccgcaucgccgagcggcaggagaucgucgacaacuccaacuggagcggcuacuccgggagcuucaucgacuacuggaacgacaacuccgagugcuacaacccgugcuucuacguggagcucauccgcggccggcccgaggaggccaaguacgugugguggaccagcaacucccugaucgcccugugcgggagccccuuccccgucggcuccggcagcuucccggacggggcgcagauccaguacuucuccuga

SEQ ID NO: 87688 - RNA, 1356 nt, Artificial Sequence
  derived and/or modified CDS sequence (opt1) from neuraminidase__InfluenzaA__AGQ81911
augaaccccaaccagaagcuguucgcccucagcggcguggccaucgcgcuguccguccugaaccuccugaucgggcugagcaacgugggccucaacgugucccugcaccugaaggagaccgggccgaagcaggaggagaaccugaccugcaugacgaccaaggagaccgagcucggcacccccagcuaccugcuccugaacaagucccugugcaacgucgagggguggguggugaucgccaaggacaacgccguccgcuucggcgagagcgagcagaucaucaucacgcgggagcccuacguguccugcgaccccaacggcugcaagauguacgcccuccaccaggggaccaccauccgcaacaagcacagcaacggcaccauccacgaccggacggccuuccgcgggcugaucuccaccccgcugggcaccccgcccaccgugagcaacuccgacuucaucugcgucggguggagcuccacgaccugccacgacggcaucggccggaugaccaucugcauccaggggaacaacgacaacgcgaccgccacgguguacuacaaccgccggcucaccaccaccaucaagacgugggcccgcaacauccugcggacccaggagagcgagugcgugugccacaacgggaccugcgccgucgugaugaccgacggcuccgcgagcggccaggcccacacgaaggugauguacuuccacaagggccuggucgugaaggaggaggcccucaagggguccgccaagcacaucgaggagugcagcugcuacggccacaaccagaacgugaccugcgucugccgcgacaacuggcagggggccaaccggcccaucaucgagaucgacaugaacacccuggagcacaccucccgcuacgugugcacgggcauccugaccgacaccagccggcccggggacaagcccaccggcgacugcagcaaccccaucacgggcucccccggggcgccgggcgugaagggguucggcuuccucaacggggacaacaccuggcugggccgcaccaucagcccccggucccgcagcggcuucgagaugcugaagauccccaacgccgggaucgaccccaacucccggaucgccgagcgccaggagaucgucgacaacagcaacugguccggcuacagcggguccuucaucgacuacuggaacgacaacagcgagugcuacaacccgugcuucuacguggagcucauccggggccgccccgaggaggccaaguacgugugguggaccuccaacagccugaucgcccugugcgggucccccuuccccgucggcagcggcuccuucccggacggggcgcagauccaguacuucagcuga

SEQ ID NO: 87689 - RNA, 1356 nt, Artificial Sequence; identical to SEQ ID NO: 87667
  derived and/or modified CDS sequence (opt1) from neuraminidase__InfluenzaA__AGQ81912

SEQ ID NO: 87690 - RNA, 1356 nt, Artificial Sequence
  derived and/or modified CDS sequence (opt1) from neuraminidase__InfluenzaA__AGQ81913
augaaccccaaccagaagcuguucgcccucagcggcguggccaucacccuguccguccugaaccuccugaucgggcugagcaacgugggccucaacgugucccugcaccugaaggagaccgggccgaagcaggaggagaaccucacgugcaugaccaccaaggagaccgagcugggcacgcccagcuaccugcuccugaacaagucccugugcaacgucgagggguggguggugaucgcgaaggacaacgccguccgcuucggcgagagcgagcagaucaucaucacccgggagcccuacguguccugcgaccccaacggcugcaagauguacgcccuccaccaggggaccaccauccgcaacaagcacagcaacggcacgauccacgaccggaccgccuuccgcgggcugaucuccaccccgcugggcaccccgcccacggugagcaacuccgacuucaucugcgucggguggagcuccacgaccugccacgacggcaucggccggaugaccaucugcauccaggggaacaacgacaacgccaccgcgaccguguacuacaaccgccggcucaccaccacgaucaagaccugggcccgcaacauccugcggacccaggagagcgagugcgugugccacaacgggaccugcgccgucgugaugacggacggcuccgccagcggccaggcgcacaccaaggugauguacuuccacaagggccuggucgugaaggaggaggcccucaagggguccgccaagcacaucgaggagugcagcugcuacggccacaaccagaaggugaccugcgucugccgcgacaacuggcagggggccaaccggcccaucaucgagaucgacaugaacacccuggagcacacgucccgcuacgugugcaccggcauccugaccgacaccagccggcccggggacaagcccacgggcgacugcagcaaccccaucaccggcucccccggggccccgggcgugaagggguucggcuuccucaacggggacaacaccuggcugggccgcaccaucagcccccggucccgcagcggcuucgagaugcugaagauccccaacgcggggaucgaccccaacucccggaucgccgagcgccaggagaucgucgacaacagcaacugguccggcuacagcggguccuucaucgacuacuggaacgacaacagcgagugcuacaacccgugcuucuacguggagcucauccggggccgccccgaggaggccaaguacgugugguggacguccaacagccugaucgcccugugcgggucccccuuccccgucggcagcggcuccuucccggacggggcccagauccaguacuucagcuga

SEQ ID NO: 87691 - RNA, 1356 nt, Artificial Sequence; identical to SEQ ID NO: 87667
  derived and/or modified CDS sequence (opt1) from neuraminidase__InfluenzaA__AGQ81914

SEQ ID NO: 87692 - RNA, 1356 nt, Artificial Sequence; identical to SEQ ID NO: 87667
  derived and/or modified CDS sequence (opt1) from neuraminidase__InfluenzaA__AGQ81915

SEQ ID NO: 87693 - RNA, 1416 nt, Artificial Sequence
  derived and/or modified CDS sequence (opt1) from neuraminidase__InfluenzaA__AGQ81917
augaaccccaaccagaagcuguucgcccucagcggcguggccaucgcgcuguccguccugaaccuccugaucgggcugagcaacgugggccucaacgugucccugcaccugaaggagaccgggccgaagcaggaggagaaccugaccugcaugacgaucaaccagaacaacaccaccgucguggagaacaccuacgugaacaacacgaccaucaucaccaaggagaccgagcucgagacgcccaacuaccugcuccugaacaagagccugugcaacgucgagggcugggugguggucgccaaggacaacgccgugcgcuucggggaguccgagcagaucaucgugacccgggagcccuacgucagcugcgaccccaacggcugcaagauguacgcccuccaccagggcaccaccauccgcaacaagcacuccaacgggacgauccacgaccggaccgccuuccgcggccugaucagcaccccgcuggggaccccgcccacgguguccaacagcgacuucaucugcgugggcugguccagcacgaccugccacgacgggaucggccggaugaccaucugcauccagggcaacaacgacaacgcgaccgccaccgucuacuacaaccgccggcucaccaccacgaucaagaccugggcccgcaacauccugcggacccaggaguccgagugcgugugccacaacgggaccugcgccguggucaugacggacggcagcgcguccagccaggcccacaccaaggugauguacuuccacaaggggcuggugaucaaggaggaggcccucaagggcuccgccaagcacaucgaggagugcagcugcuacggccacaaccagaaggugaccugcgucugccgcgacaacuggcagggggccaaccggcccaucaucgagaucgacaugaacacccuggagcacacgucccgcuacgugugcaccggcauccugaccgacaccagccggcccggggacaagcccacgggcgacugcagcaaccccaucaccgggucccccggcgcgccgggcgucaagggguucggcuuccucaacggggacaacaccuggcugggccgcaccaucagcccccggucccgcagcggguucgagaugcugaagauccccaacgccggcaucgaccccaacucccggaucgccgagcgccaggagaucguggacaacagcaacugguccggcuacagcggguccuucaucgacuacuggaacgacaacagcgagugcuacaacccgugcuucuacgucgagcucauccggggccgccccgaggaggccaaguacgugugguggaccuccaacagccugaucgcccugugcgggucccccuuccccgugggcagcggguccuucccggacggcgcgcagauccaguacuucagcuga

SEQ ID NO: 87694 - RNA, 1356 nt, Artificial Sequence
  derived and/or modified CDS sequence (opt1) from neuraminidase__InfluenzaA__AGQ81918
augaaccccaaccagaagcuguucgcccucagcggcguggccaucgcgcuguccguccugaaccuccugaucgggcugagcaacgugggccucaacgugucccugcaccugaaggagaccgggccgaagcaggaggagaaccugaccugcaugacgaccaaggagaccgagcucggcacccccagcuaccugcuccugaacaaggggcugugcaacgucgagggcuggguggugaucgccaaggacaacgccguccgcuucggcgaguccgagcagaucaucaucacgcgggagcccuacgugagcugcgaccccaacgggugcaagauguacgcccuccaccagggcaccaccauccgcaacaagcacuccaacgggaccauccacgaccggacggccuuccgcggccugaucagcaccccgcuggggaccccgcccaccguguccaacagcgacuucaucugcgucggcugguccagcacgaccugccacgacggcaucgggcggaugaccaucugcauccagggcaacaacgacaacgcgaccgccacgguguacuacaaccgccggcucaccaccaccaucaagacgugggcccgcaacauccugcggacccaggaguccgagugcgugugccacaacgggaccugcgccgucgugaugaccgacggcagcgcguccagccaggcccacacgaaggugauguacuuccacaagggccuggucgugaaggaggaggcccucaagggguccgccaagcacaucgaggagugcagcugcuacggccacaaccagaaggugaccugcgucugccgcgacaacuggcagggggccaaccggcccaucaucgagaucgacaugaacacccuggagcacaccucccgcuacgugugcacgggcauccugaccgacaccagccggcccggggacaagcccaccggcgacugcagcaaccccaucacgggcucccccggggcgccgggcgugaagggguucggcuuccucaacggggacaacaccuggcugggccgcaccaucagcccccggucccgcagcggcuucgagaugcugaagauccccaacgccgggaucgaccccaacucccggaucgccgagcgccaggagaucgucgacaacagcaacugguccggcuacagcggguccuucaucgacuacuggaacgacaacagcgagugcuacaacccgugcuucuacguggagcucauccggggccgccccgaggaggccaaguacgugugguggaccuccaacagccugaucgcccugugcgggucccccuuccccgucggcagcggcuccuucccggacggggcgcagauccaguacuucagcuga

SEQ ID NO: 87695 - RNA, 1356 nt, Artificial Sequence; identical to SEQ ID NO: 87667
  derived and/or modified CDS sequence (opt1) from neuraminidase__InfluenzaA__AGQ81919

SEQ ID NO: 87696 - RNA, 1356 nt, Artificial Sequence; identical to SEQ ID NO: 87667
  derived and/or modified CDS sequence (opt1) from neuraminidase__InfluenzaA__AGQ81920

SEQ ID NO: 87697 - RNA, 1356 nt, Artificial Sequence
  derived and/or modified CDS sequence (opt1) from neuraminidase__InfluenzaA__AGQ81921
augaaccccaaccagaagcuguucgcccucagcggcguggccaucgcgcuguccguccugaaccuccugaucgggcugagcaacgugggccucaacgugucccugcaccugaaggagaccgggccgaagcaggaggagaaccugaccugcaugacgaccaaggagaccgagcucggcacccccagcuaccugcuccugaacaagucccugugcaacgucgagggguggguggugaucgccaaggacaacgccguccgcuucggcgagagcgagcagaucaucaucacgcgggagcccuacguguccugcgaccccaacggcugcaagauguacgcccuccaccaggggaccaccauccgcaacaagcacagcaacggcaccauccacgaccggacggccuuccgcgggcugaucuccaccccgcugggcaccccgcccaccgugagcaacuccgacuucaucugcgucggguggagcuccacgaccugccacgacggcaucggccggaugaccaucugcauccaggggaacaacgacaacgcgaccgccacgguguacuacaaccgccggcucaccaccaccaucaagacgugggcccgcaacauccugcggacccaggagagcgagugcgugugccacaacgggaccugcgccgucgugaugaccgacggcuccgcgagcggccaggcccacacgaaggugauguacuuccacaagggccuggucgugaaggaggaggcccucaagggguccgccaagcacaucgaggagugcagcugcuacggccacaaccagaaggugaccugcgucugccgcgacaacuggcagggggccaaccggcccaucaucgagaucgacaugaacacccuggagcacaccucccgcuacgugugcacgggcauccugaccgacaccagccggcccggggacaagcccaccggcgacugcagcaaccccaucacgggcucccccggggcgccgggcgugaagggguucggcuuccucaacggggacaacaccuggcugggccgcaccaucagcccccggucccgcagcggcuucgagaugcugaagauccccaacgccgggaucgaccccaacucccggaucgccgagcgccaggagaucgucgacaacagcaacugguccggcuacagcggguccuucaucgacuacuggaacgacaacagcgagugcuacaacccgugcuucuacguggagcucauccggggccgccccgaggaggccaaguacgugugguggaccuccaacagccugaucgcccugugcgggucccccuuccccgucggcagcggcuccuucccggacggggcgcagauccaguacuucagcuga

SEQ ID NO: 87698 - RNA, 1356 nt, Artificial Sequence; identical to SEQ ID NO: 87667
  derived and/or modified CDS sequence (opt1) from neuraminidase__InfluenzaA__AGQ81922

SEQ ID NO: 87699 - RNA, 1356 nt, Artificial Sequence; identical to SEQ ID NO: 87697
  derived and/or modified CDS sequence (opt1) from neuraminidase__InfluenzaA__AGQ81923

SEQ ID NO: 87700 - RNA, 1356 nt, Artificial Sequence
  derived and/or modified CDS sequence (opt1) from neuraminidase__InfluenzaA__AGQ81924
augaaccccaaccagaagcuguucgcccucagcggcguggccaucgcgcuguccguccugaaccuccugaucgggcugagcaacgugggccucaacgugucccugcaccugaaggagaccgggccgaagcaggaggagaaccugaccugcaugacgaccaaggagaccgagcucggcacccccagcuaccugcuccugaacaagucccugugcaacgucgagggguggguggugaucgccaaggacaacgccguccgcuucggcgagagcgagcagaucaucaucacgcgggagcccuacguguccugcgaccccaacggcugcaagauguacgcccuccaccaggggaccaccauccgcaacaagcacagcaacggcaccauccacgaccggacggccuuccgcgggcugaucuccaccccgcugggcaccccgcccaccgugagcaacuccgacuucaucugcgucggguggagcuccacgaccugccacgacggcaucggccggaugaccaucugcauccaggggaacaacgacaacgcgaccgccacgguguacuacaaccgccggcucaccaccaccaucaagacgugggcccgcaacauccugcggacccaggagagcgagugcgugugccacaacgggaccugcgccgucgugaugaccgacggcuccgcgaacagccaggcccacacgaaggugauguacuuccacaagggccuggucgugaaggaggaggcccucaagggcuccgccaagcacaucgaggagugcagcugcuacgggcacaaccagaaggugaccugcgucugccgcgacaacuggcagggcgccaaccggcccaucaucgagaucgacaugaacacccuggagcacaccucccgcuacgugugcacggggauccugaccgacaccagccggcccggcgacaagcccaccggggacugcagcaaccccaucacgggcucccccggcgcgccgggggugaagggcuucggguuccucaacggcgacaacaccuggcuggggcgcaccaucagcccccggucccgcagcggcuucgagaugcugaagauccccaacgccggcaucgaccccaacucccggaucgccgagcgccaggagaucgucgacaacagcaacugguccggguacagcggcuccuucaucgacuacuggaacgacaacagcgagugcuacaacccgugcuucuacguggagcucauccgggggcgccccgaggaggccaaguacgugugguggaccuccaacagccugaucgcccugugcggcucccccuuccccgucgggagcggcuccuucccggacggcgcgcagauccaguacuucagcuga

SEQ ID NO: 87701 - RNA, 1356 nt, Artificial Sequence; identical to SEQ ID NO: 87667
  derived and/or modified CDS sequence (opt1) from neuraminidase__InfluenzaA__AGQ81925

SEQ ID NO: 87702 - RNA, 1356 nt, Artificial Sequence; identical to SEQ ID NO: 87667
  derived and/or modified CDS sequence (opt1) from neuraminidase__InfluenzaA__AGQ81926

SEQ ID NO: 87703 - RNA, 1356 nt, Artificial Sequence; identical to SEQ ID NO: 87667
  derived and/or modified CDS sequence (opt1) from neuraminidase__InfluenzaA__AGQ81927

SEQ ID NO: 87704 - RNA, 1356 nt, Artificial Sequence; identical to SEQ ID NO: 87667
  derived and/or modified CDS sequence (opt1) from neuraminidase__InfluenzaA__AGQ81928

SEQ ID NO: 87705 - RNA, 1356 nt, Artificial Sequence; identical to SEQ ID NO: 87667
  derived and/or modified CDS sequence (opt1) from neuraminidase__InfluenzaA__AGQ81929

SEQ ID NO: 87706 - RNA, 1413 nt, Artificial Sequence
  derived and/or modified CDS sequence (opt1) from neuraminidase__InfluenzaA__AGQ81930
augaaccccaaccagaagaucaucaccaucggcagcaucucccuggggcucguggucuucaacgugcugcugcacguggucagcaucaucgugaccgugcucguccugggccgcgggggcaacuccgggaucugcaacgagacgguggugcgggaguacaacgagaccguccgcaucgagaagaucacccaguggcacaacaccagcgugguggaguacgucccguacugguccgagggcaacuacaugaacaacacggaggccaucugcgacgugaagggcuucgcccccuucagcaaggacaacgggauccggaucggcucccgcgggcacguguucgucauccgggagcccuucgugagcugcucccccaccgagugccgcaccuucuuccugacccagggcagccuccugaacgacaagcacuccaacgggacggugaaggaccggagcccguuccgcacccugauguccgucgaggugggccagagccccaacguguaccaggcgcgguucgaggccgucgccugguccgccaccgccugccacgacggcaagaaguggaugaccaucggggugacgggccccgacagcaaggcgguggccgucgugcacuacgggggcguccccaccgacguggugaacuccugggccggcgacauccuccgcacccaggagagcuccugcacgugcauccaggggaacugcuacugggucaugaccgacggcccggccaaccggcaggcgcaguaccgcaucuacaaggccaaccaggggaagaucgugggccagaccgacaucagcuucaacgggggccacaucgaggagugcagcugcuaccccaacgacggcaagguggagugcgucugccgggacaacuggaccgggaccaaccgccccgugcuggugaucucccccgaccugagcuaccgggucggcuaccucugcgccgggcugccguccgacacgccccgcggcgaggacgcccaguucaccgggagcugcaccucccccaugggcaaccagggcuacggggugaagggcuucggguuccggcagggcaccgacguguggauggggcgcacgaucagccggaccucccgcagcggcuucgagauccugcggaucaagaacggcuggacccagaccuccaaggagcagguccgcaagcaggucgugguggacaaccucaacuggagcggguacuccggcagcuucacgcugcccguggagcuguccgggaaggacugccucgugccgugcuucugggucgagaugauccgcggcaagcccgaggagaagaccaucuggaccagcuccagcuccaucgugaugugcggcguggacuacgaggucgccgacuggagcuggcacgacggggcgauccugcccuucgacaucgacaagauguga

SEQ ID NO: 87707 - RNA, 1413 nt, Artificial Sequence
  derived and/or modified CDS sequence (opt1) from neuraminidase__InfluenzaA__AGQ81931
augaaccccaaccagaagaucaucaccaucggcagccugucccucgggcuggugguccugaacauccuccugcacaucaucagcaucaccaucacggugcuggugaucccgcgcaacggcaacaccggguccugcaacgagaccgucauccgggaguacaacgagaccgugcgcaucgagaagaucacgcaguggcacaacaccaacaucaucgaguacaucgagaagcccgagaacgaccucuucaugaacaacaccggcccccugugcgacgccaagggguucgcccccuucagcaaggacaacggcauccggaucggcuccaaggggcacguguucgucauccgcgagccguucgugagcugcucccccaccgagugccggacguucuuccugacccagggcagccuccugaacgacaagcacuccaacgggaccgugaaggaccgcagccccuaccggacccugauguccgucgagaucggccagagccccaacguguaccaggcgcgcuucgaggccguggccugguccgccacggccugccacgacgggaagaaguggaugaccaucggcgucaccggcccggacgcgaaggccguggccgugguccacuacgggggcauccccaccgacgugaucaacagcugggccggggacauccuccggacgcaggaguccagcugcacgugcauccagggcgagugcuacugggugaugaccgacggccccgcgaaccgccaggcccaguaccgggccuucaaggccaagcaggggaagaucaucggccagaccgagaucuccuucaacgggggccacaucgaggagugcagcugcuaccccaacgaggggaaggucgagugcgugugccgcgacaacuggaccggcaccaaccggccggugcuggucaucuccagcgaccugagcuaccgcgugggcuaccucugcgccgggcugcccuccgacacgccccggggcgaggacagccaguucaccggguccugcaccagccccaugggcaaccagggguacggcgugaagggcuucggguuccgccagggcaacgacgucuggauggggcggaccaucucccgcaccagccgguccggcuucgagauccugaagauccgcaacggguggauccagaacagcaaggagcagaucaagcgccagguggucguggacaacuccaacuggagcggcuacuccggcagcuucacccucccgguggagcugacgcggcgcaacugccugguccccugcuucuggguggagaugauccgggggaagcccgaggagaagaccaucuggaccuccagcuccagcaucgugaugugcggcgucgaccacgagaucgcgaacugguccuggcacgacggggccauccuccccuucgacaucgacaagauguga

SEQ ID NO: 87708 - RNA, 1413 nt, Artificial Sequence
  derived and/or modified CDS sequence (opt1) from neuraminidase__InfluenzaA__AGQ81932
augaaccccaaccagaagaucaucaccaucggcagcaucucccuggggcucguggucuucaacgugcugcugcacguggucagcaucaucgugaccgugcucauccugggccgcgggggcaacaacgggaucugcaacgagacggucgugcgggaguacaacgagaccgugcgcaucgagaagaucacccaguggcacaacaccuccgucguggaguacgugccguacuggaacgagggcacguacaugaacaacaccgaggccaucugcgacgucaagggcuucgcccccuucagcaaggacaacgggauccggaucggcucccgcgggcacguguucgugauccgggagcccuucgucagcugcucccccaccgagugccgcaccuucuuccugacgcagggcagccuccugaacgacaagcacuccaacgggaccgugaaggaccggagcccguuccgcacccugauguccguggaggucggccagagccccaacguguaccaggcgcgguucgaggccguggccugguccgccaccgccugccacgacggcaagaaguggaugacgaucggggucaccggcagcgacuccaaggcgguggccgugguccacuacgggggcgugcccaccgacgucgugaacagcugggccggcgacauccuccgcacccaggaguccagcugcacgugcauccaggggaacugcuacugggugaugaccgacggccccgccaaccggcaggcgcaguaccgcaucuacaaggccaaccaggggaaggucaucggccagaccgacaucuccuucaacgggggccacaucgaggagugcagcugcuacccgaacgacggcaagguggagugcgugugccgggacaacuggaccgggacgaaccgccccguccuggugaucagccccgaccuguccuaccgggugggcuaccucugcgccgggcugcccagcgacaccccgcgcggcgaggacgcccaguucaccggguccugcaccagccccaugggcaaccagggcuacggggucaagggcuucggguuccggcagggcacggacguguggauggggcgcaccaucucccagaccagccgguccggcuucgagauccugcgcgugaagaacggcuggacccagacgagcaaggagcagguccggaagcaggucgugguggacaaccucaacugguccggguacagcggcuccuucacccugcccaucgagcugagcgggaaggacugccucgugcccugcuucuggguggagaugauccgcggcaagccggaggagaaguccaucuggaccagcuccagcuccaucgucaugugcggcguggacuacgagguggccgacuggagcuggcacgacggggcgauccugcccuucgacaucgacaagauguga

SEQ ID NO: 87709 - RNA, 1413 nt, Artificial Sequence
  derived and/or modified CDS sequence (opt1) from neuraminidase__InfluenzaA__AGQ81934
augaaccccaaccagaagauccugugcaccagcgccaccgccaucgugaucggcacgaucgcgguccucaucgggaucgccaaccugggccugaacaucgggcuccaccugaagccguccugcaacugcagccacucccagcccgagaccaccaacaccagccagacgaucaucaacaacuacuacaacgagaccaacaucacccagaucuccaacaccaacauccagauggaggagcgcgccagccgggacuucaacaaccugacgaagggccucugcaccaucaacuccuggcacaucuacgggaaggacaacgccgugcgcaucggcgagaacagcgacgugcuggucacccgggagcccuacguguccugcgaccccgacgagugccgcuucuacgcccugagccagggcaccacgauccgggggaagcacuccaacggcaccauccacgaccgcagccaguaccgggcgcucaucuccuggccgcugagcuccccgcccaccguguacaacagccgcgucgagugcaucgggugguccagcaccuccugccacgacggcaagagccggaugagcaucugcaucuccgggcccaacaacaacgccagcgccguggugugguacaaccgccggcccgucgccgagaucaacacgugggcgcgcaacauccugcggacccaggaguccgagugcgugugccacaacggcgugugccccgucguguucaccgacggcagcgccaccgggcccgccgacacgcgcaucuacuacuucaaggagggccggauccucaagugggagucccugaccgggaccgccaagcacaucgaggagugcagcugcuacggcgagcgcaccggcaucacgugcacgugccgggacaacuggcagggguccaaccgccccgugauccggaucgacccggucgccaugacccacaccagccaguacaucugcucccccgugcugaccgacaacccccgccccaacgacccgaacgugggcaagugcaacgaccccuaccccgggaacaacaacaacggcgucaagggguucagcuaccucgacggcgugaacaccuggcugggccggaccaucuccaccgcgagccgcuccggguacgagaugcugaaggugcccaacgcccucacggacgaccgcagcaagccgauccagggccagaccaucguccugaacaccgacugguccggguacagcggcuccuucauggacuacugggccgagggggacugcuaccgggccugcuucuacguggagcugauccgcggccggcccaaggaggacaaggugugguggaccagcaacuccaucgucagcaugugcagcuccacggaguuccucggccagugggacuggcccgacggggccaagaucgaguacuuccuguga

SEQ ID NO: 87710 - RNA, 1413 nt, Artificial Sequence; identical to SEQ ID NO: 87709
  derived and/or modified CDS sequence (opt1) from neuraminidase__InfluenzaA__AGQ81935

SEQ ID NO: 87711 - RNA, 1413 nt, Artificial Sequence; identical to SEQ ID NO: 87709
  derived and/or modified CDS sequence (opt1) from neuraminidase__InfluenzaA__AGQ81936

SEQ ID NO: 87712 - RNA, 1413 nt, Artificial Sequence; identical to SEQ ID NO: 87709
  derived and/or modified CDS sequence (opt1) from neuraminidase__InfluenzaA__AGQ81937

SEQ ID NO: 87713 - RNA, 1413 nt, Artificial Sequence; identical to SEQ ID NO: 87709
  derived and/or modified CDS sequence (opt1) from neuraminidase__InfluenzaA__AGQ81938

SEQ ID NO: 87714 - RNA, 1413 nt, Artificial Sequence; identical to SEQ ID NO: 87709
  derived and/or modified CDS sequence (opt1) from neuraminidase__InfluenzaA__AGQ81939

SEQ ID NO: 87715 - RNA, 1413 nt, Artificial Sequence
  derived and/or modified CDS sequence (opt1) from neuraminidase__InfluenzaA__AGQ81940
augaaccccaaccagaagauccugugcaccagcgccaccgccaucaucaucggcgcgaucgccgugcucaucgggaucgccaaccugggccugaacaucgggcuccaccugaagccguccugcaacugcagccacucccagcccgagacgaccaacaccagccagaccaucaucaacaacuacuacaacgagacgaacaucacccagaucuccaacaccaacauccagauggaggagcgcgccagcaagggcuucaacaaccugaccaaggggcucugcacgaucaacuccuggcacaucuacggcaaggacaacgccguccggaucggcgagagcuccgacgugcuggugacccgcgagcccuacgucagcugcgaccccgacgagugccgguucuacgcgcugucccaggggaccaccauccgcggcaagcacagcaacgggacgauccacgaccggucccaguaccgcgcccucaucagcuggccgcuguccagcccgcccaccguguacaacucccggguggagugcaucggcuggagcuccaccagcugccacgacggcaagagccgcauguccaucugcaucagcgggcccaacaacaacgccuccgccgucgugugguacaaccggcgccccguggcggagaucaacaccugggcccggaacauccugcgcacgcaggagagcgagugcgucugccacaacggcgugugccccguggucuucaccgacggguccgccaccggccccgccgacacccggaucuacuacuucaaggaggggaagauccucaagugggagagccuggccggcacggcgaagcacaucgaggagugcuccugcuacggcgagcgcaccgggaucacgugcacgugccgggacaacuggcagggcagcaaccgccccgugauccagaucgacccgguggccaugacccacaccucccaguacaucugcagccccguccugaccgacaacccccggcccaacgacccgaacaucgggaagugcaacgaccccuaccccggcaacaacaacaacggggugaagggcuucuccuaccucgacggcgccaacaccuggcuggggcgcaccaucagcaccgccucccggagcggcuacgagaugcugaaggugcccaacgcccucaccgacgaccgcuccaagccgauccaggggcagaccaucguccugaacacggacuggagcggcuacuccgggagcuucauggacuacugggcggagggcgacugcuaccgggccugcuucuacguggagcugauccgcggccgccccaaggaggacaaggugugguggaccuccaacagcaucgucagcaugugcuccagcaccgaguuccucgggcaguggaacuggcccgacggcgccaagaucgaguacuuccuguga

SEQ ID NO: 87716 - RNA, 1413 nt, Artificial Sequence
  derived and/or modified CDS sequence (opt1) from neuraminidase__InfluenzaA__AGQ81941
augaaccccaaccagaagauccugugcaccagcgccaccgccaucaucaucggcacgaucgcggugcucaucggggucgccaaccugggccugaacaucgggcuccaccugaagccgggcugcaacugcucccacagccagcccgaggccaccaacaccucccagaccaucaucaacaacuacuacaacgagacgaacaucacccagaucagcaacaccaacauccagauggaggagcgccccaaccggggguucaacaaccugaccaagggccucugcacgaucaacuccuggcacaucuacggcaaggacaacgccgugcgcaucggggagaacagcgacgugcuggucacccgggagcccuacguguccugcgacccggacgagugccgcuucuacgcccugagccagggcaccaccauccgggggaagcacuccaacggcacgauccacgaccgcagccaguaccgggcgcucaucuccuggccccugagcuccccgcccaccguguacaacagccgcgucgagugcaucgggugguccagcaccuccugccacgacggcaagagccggauguccaucugcaucagcggccccaacaacaacgccagcgccguggugugguacaaccgccggcccgucgccgagaucaacaccugggcgcgcaacauccugcggacgcaggaguccgagugcgugugccacaacggggugugccccgucguguucaccgacggcagcgccaccgggcccgccgacacccgcguguacuacuuccgggagggcaagauccucaagugggagucccugacgggcaccgcccgccacaucgaggagugcagcugcuacggggagcggaccggcaucacgugcacgugccgcgacaacuggcagggguccaaccggccggucauccagaucgaccccguggccaugacccacaccagccaguacaucugcucccccgugcugaccgacaacccccgcccgaacgaccccaacgucggcaagugcaacgaccccuaccccgggaacaacaacaacggcgugaagggcuucagcuaccucgacggggugaacaccuggcugggccggaccaucuccaccgcgagccgcuccggguacgagaugcugaaggucccgaacgcccucaccgacgaccgcagcaagcccauccagggccagacgaucgugcugaacaccgacugguccggguacagcggcuccuucauggacuacugggccgagggcgacugcuaccgggccugcuucuacguggagcugauccgcgggcggcccaaggaggacaaggucugguggaccagcaacuccaucgugagcaugugcuccagcaccgaguuccucggccagugggacuggcccgacggggccaagaucgaguacuuccuguga

SEQ ID NO: 87717 - RNA, 1413 nt, Artificial Sequence
  derived and/or modified CDS sequence (opt1) from neuraminidase__InfluenzaA__AGQ81942
augaaccccaaccagaagauccugugcaccagcgccaccgccaucaucaucggcacgaucgcggugcucaucggggucgccaaccugggccugaacaucgggcuccaccugaagccgggcugcaacugcucccacagccagcccgaggccaccaacaccucccagaccaucaucaacaacuacuacaacgagacgaacaucacccagaucagcaacaccaacauccagauggaggagcgccccucccggggguucaacaaccugaccaagggccucugcacgaucaacagcuggcacaucuacggcaaggacaacgccgugcgcaucggggagaacuccgacgugcuggucacccgggagcccuacgugagcugcgacccggacgagugccgcuucuacgcccugucccagggcaccaccauccgggggaagcacagcaacggcacgauccacgaccgcucccaguaccgggcgcucaucagcuggccccuguccagcccgcccaccguguacaacucccgcgucgagugcaucggguggagcuccaccagcugccacgacggcaagucccggaugagcaucugcaucagcggccccaacaacaacgccuccgccaucgugugguacaaccgccggcccguggccgagaucaacaccugggcgcgcaacauccugcggacgcaggagagcgagugcgucugccacaacggggugugccccguggucuucaccgacggcuccgccaccgggcccgccgacacccgcguguacuacuuccgggagggcaagauccucaagugggagagccugacgggcaccgcccgccacaucgaggagugcuccugcuacggggagcggaccggcaucacgugcacgugccgcgacaacuggcaggggagcaaccggccggugauccagaucgaccccgucgccaugacccacaccucccaguacaucugcagccccgugcugaccgacaacccccgcccgaacgaccccaacgugggcaagugcaacgaccccuaccccgggaacaacaacaacggcgucaagggcuucuccuaccucgacggggugaacaccuggcugggccggaccaucagcaccgcgucccgcagcggguacgagaugcugaaggugccgaacgcccucaccgacgaccgcuccaagcccauccagggccagacgaucauccugaacaccgacuggagcggguacuccggcagcuucauggacuacugggccgagggcgacugcuaccgggccugcuucuacgucgagcugauccgcgggcggcccaaggaggacaaggugugguggaccuccaacagcaucguguccaugugcagcagcaccgaguuccucggccagugggacuggcccgacggggccaagaucgaguacuuccuguga

SEQ ID NO: 87718 - RNA, 1413 nt, Artificial Sequence
  derived and/or modified CDS sequence (opt1) from neuraminidase__InfluenzaA__AGQ81943
augaaccccaaccagaagauccugugcaccagcgccaccgccaucaucaucggcgcgaucgccgugcucaucgggaucgccaaccugggccugaacaucgggcuccaccugaagccguccugcaacugcagccacucccagcccgagacgaccaacaccagccagaccaucaucaacaacuacuacaacgagacgaacaucacccagaucuccaacaccaacauccagauggaggagcgcaccagccggggcuucaacaaccugacgaaggggcucugcaccaucaacuccuggcacaucuacggcaaggacaacgccauccgcaucggcgagagcuccgacguccuggugacccgggagcccuacgugagcugcgaccccgacgagugccgcuucuacgcccugucccaggggaccacgauccggggcaagcacagcaacgggaccauccacgaccgcucccaguaccgggcgcucaucagcuggccgcuguccagcccgcccaccgucuacaacucccgcguggagugcaucggcuggagcuccaccagcugccacgacggcaagagccggauguccaucugcaucagcgggcccaacaacaacgccuccgccguggucugguacaaccgccggcccguggccgagaucaacacgugggcgcgcaacauccugcggacccaggagagcgagugcgugugccacaacggcgucugccccgugguguucaccgacggguccgccaccggccccgccgacacgcgcaucuacuacuucaaggaggggcggauccucaagugggagagccugaccggcaccgccaagcacaucgaggagugcuccugcuacggcgagcgcaccgggaucacgugcacgugccgggacaacuggcagggcagcaaccgccccgucauccagaucgacccgguggccaugacccacaccucccaguacaucugcagccccgugcugaccgacaacccccggcccaacgacccgaacaucgggaagugcaacgaccccuaccccggcaacaacaacaacggggucaagggcuucuccuaccucgacggcgcgaacaccuggcuggggcgcaccaucagcaccgccucccggagcggcuacgagaugcugaaggugcccaacgcccucacggacgaccgcuccaagccgauccaggggcagaccaucgugcugaacaccgacuggagcggcuacuccgggagcuucauggacuacugggccgagggcgacugcuaccgcgccugcuucuacgucgagcugauccggggccgccccaaggaggacaaggugugguggaccuccaacagcaucgugagcaugugcuccagcacggaguuccucgggcaguggaacuggcccgacggcgcgaagaucgaguacuuccuguga

SEQ ID NO: 87719 - RNA, 1413 nt, Artificial Sequence; identical to SEQ ID NO: 87709
  derived and/or modified CDS sequence (opt1) from neuraminidase__InfluenzaA__AGQ81944

SEQ ID NO: 87720 - RNA, 1413 nt, Artificial Sequence
  derived and/or modified CDS sequence (opt1) from neuraminidase__InfluenzaA__AGQ81947
augaaccccaaccagaagauccugugcaccagcgccaccgcccucgugaucggcacgaucgcgguccugaucgggaucgccaaccugggccucaacaucgggcugcaccugaagccguccugcaacugcagccacucccagcccgaggccaccaacaccagccagaccaucaucaacaacuacuacaacgagacgaacaucacccagaucuccaacaccaacauccagauggaggagcgcgccagccgguccuucaacaaccucaccaagggccugugcacgaucaacagcuggcacaucuacgggaaggacaacgccauccgcaucggcgagaacuccgacgugcuggugacccgggagcccuacgucagcugcgaccccgacgagugccgcuucuacgcgcucucccagggcaccaccauccgggggaagcacagcaacggcacgauccacgaccgcucccaguaccgggcccugaucagcuggccgcuguccagcccgcccaccguguacaacucccgcguggagugcaucggguggagcuccaccagcugccacgacggcaagagccggauguccaucugcaucagcgggcccaacaacaacgccuccgccgucgugugguacaaccgccggcccguggcggagaucaacaccugggcccgcaacauccuccggacgcaggagagcgagugcgucugccacaacggcgugugccccguggucuucaccgacggcuccgccaccgggcccgccgacacccgcaucuacuacuucaaggagggcaagauccugaagugggagagccugacggggaccgccaagcacaucgaggagugcuccugcuacggcgagcggaccggcaucacgugcacgugccgcgacaacuggcaggggagcaaccggcccgugauccagaucgacccgguggcgaugacccacaccucccaguacaucugcagccccguccucaccgacaacccccgccccaacgacccgaacgugggcaagugcaacgaccccuaccccgggaacaacaacaacggcgugaagggguucuccuaccuggacggcgucaacaccuggcugggccggaccaucagcaccgccucccgcagcggguacgagaugcucaaggugcccaacgcccugaccgacgaccgguccaagccgauccagggccagacgaucgugcugaacaccgacuggagcggguacuccggcagcuucauggacuacugggccgagggggacugcuaccgcgccugcuucuacgucgagcucauccgcggccggcccaaggaggacaaggugugguggaccuccaacagcaucgugagcaugugcuccagcaccgaguuccugggccaguggaacuggcccgacggggcgaagaucgaguacuuccuguga

SEQ ID NO: 87721 - RNA, 1413 nt, Artificial Sequence
  derived and/or modified CDS sequence (opt1) from neuraminidase__InfluenzaA__AGQ81948
augaaccccaaccagaagauccugugcaccagcgccaccgccaucaucaucggcgcgaucgccgugcucaucgggaucgccaaccugggccugaacaucgggcuccaccugaagccguccugcaacugcagccacucccagcccgagacgaccaacaccagccagaccaucaucaacaacuacuacaacgagacgaacaucacccagaucuccaacaccaacauccagauggaggagcgcaccagccggggcuucaacaaccugacgaaggggcucugcaccaucaacuccuggcacaucuacggcaaggacaacgccauccgcaucggcgagagcuccgacguccuggugacccgggagcccuacgugagcugcgaccccgacgagugccgcuucuacgcccugucccaggggaccacgauccggggcaagcacagcaacgggaccauccacgaccgcucccaguaccgggcgcucaucagcuggccgcuguccagcccgcccaccgucuacaacucccgcguggagugcaucggcuggagcuccaccagcugccacgacggcaagagccggauguccaucugcaucagcgggcccaacaacaacgccuccgccguggucugguacaaccgccggcccguggccgagaucaacacgugggcgcgcaacauccugcggacccaggagagcgagugcgugugccacaacggcgucugccccgugguguucaccgacggguccgccaccggccccgccgacacgcgcaucuacuacuucaaggaggggcggauccucaagugggagagccugaccggcaccgccaagcacaucgaggagugcuccugcuacggcgagcgcaccgggaucacgugcacgugccgggacaacuggcagggcagcaaccgccccgucauccagaucgacccgguggccaugacccacaccucccaguacaucugcagccccgugcugaccgacaacccccggcccaacgacccgaacaucgggaagugcaacgaccccuaccccggcaacaacaacaacggggucaagggcuucuccuaccucgacggcgcgaacaccuggcuggggcgcaccaucagcaccgccucccggagcggcuacgagaugcugaaggugcccaacgcccucacggacgaccgcuccaagccgauccaggggcagaccaucgugcugaacaccgacuggagcggcuacuccgggagcuucauggacuacugggccgagggcgagugcuaccgcgccugcuucuacgucgagcugauccggggccgccccaaggaggacaaggugugguggaccuccaacagcaucgugagcaugugcuccagcacggaguuccucgggcaguggaacuggcccgacggcgcgaagaucgaguacuuccuguga

SEQ ID NO: 87722 - RNA, 1413 nt, Artificial Sequence
  derived and/or modified CDS sequence (opt1) from neuraminidase__InfluenzaA__AGQ81951
augaaccccaaccagaagauccugugcaccagcgccaccgccaucgugaucggcacgaucgcgguccucaucgggguggccaaccugggccugaacaucgggcuccaccugaagccgggcugcaacugcucccagagccagcccgaggccaccaacaccucccagaccaucaucaacaacuacuacaacgagacgaacaucacccagaucagcaacaccaacauccagauggaggagcgcgccaaccggggguucaacaaccugaccaagggccucugcacgaucaacuccuggcacaucuacggcaaggacaacgccgugcgcaucggggagaacagcgacguccuggugacccgggagcccuacguguccugcgaccccgacgagugccgcuucuacgcgcugagccagggcaccaccauccgggggaagcacuccaacggcacgauccacgaccgcagccaguaccgggcccucaucuccuggccgcugagcuccccgcccaccgucuacaacagccgcguggagugcaucgggugguccagcaccuccugccacgacggcaagagccggauguccaucugcaucagcggccccaacaacaacgccagcgccguggucugguacaaccgccggcccguggcggagaucaacaccugggcccgcaacauccugcggacgcaggaguccgagugcgugugccacaacggggucugccccgugguguucaccgacggcagcgccaccgggcccgccgacacccgcgucuacuacuuccgggagggcaagauccucaagugggagucccugacgggcaccgccaagcacaucgaggagugcagcugcuacggggagcgcaccggcaucacgugcacgugccgggacaacuggcagggguccaaccgccccgugauccagaucgacccgguggcgaugacccacaccagccaguacaucugcucccccguccugaccgacaacccccggcccaacgacccgaacgugggcaagugcaacgaccccuaccccgggaacaacaacaacggcgugaagggcuucagcuaccucgacggggucaacaccuggcugggccgcaccaucuccaccgccagccgguccggguacgagaugcugaaggugcccaacgcccucaccgacgaccgcagcaagccgauccagggccagacgaucgugcugaacaccgacugguccggguacagcggcuccuucauggacuacugggccgagggcgacugcuaccgcgccugcuucuacgucgagcugauccgggggcgccccaaggaggacaaggugugguggaccagcaacuccaucgucagcaugugcuccagcaccgaguuccucggccaguggaacuggcccgacggggcgaagaucgaguacuuccuguga

SEQ ID NO: 87723 - RNA, 1413 nt, Artificial Sequence
  derived and/or modified CDS sequence (opt1) from neuraminidase__InfluenzaA__AGQ81952
augaaccccaaccagaagauccugugcaccagcgccaccgccaucgugaucggcacgaucgcgguccucaucgggguggccaaccugggccugaacaucgggcuccaccugaagccgggcugcaacugcucccacagccagcccgaggccaccaacaccucccagaccaucaucaacaacuacuacaacgagacgaacaucacccagaucagcaacaccaacauccagauggaggagcgcgccaaccggggguucaacaaccugaccaagggccucugcacgaucaacuccuggcacaucuacggcaaggacaacgccgugcgcaucggggagaacagcgacguccuggugacccgggagcccuacguguccugcgaccccgacgagugccgcuucuacgcgcugagccagggcaccaccauccgggggaagcacuccaacggcacgauccacgaccgcagccaguaccgggcccucaucuccuggccgcugagcuccccgcccaccgucuacaacagccgcguggagugcaucgggugguccagcaccuccugccacgacggcaagagccggauguccaucugcaucagcggccccaacaacaacgccagcgccguggucugguacaaccgccggcccguggcggagaucaacaccugggcccgcaacauccugcggacgcaggaguccgagugcgugugccacaacggggucugccccgugguguucaccgacggcagcgccaccgggcccgccgacacccgcgucuacuacuuccgggagggcaagauccucaagugggagucccugacgggcaccgccaagcacaucgaggagugcagcugcuacggggagcgcaccggcaucacgugcacgugccgggacaacuggcagggguccaaccgccccgugauccagaucgacccgguggcgaugacccacaccagccaguacaucugcucccccguccugaccgacaacccccggcccaacgacccgaacgugggcaagugcaacgaccccuaccccgggaacaacaacaacggcgugaagggcuucagcuaccucgacggggucaacaccuggcugggccgcaccaucuccaccgccagccgguccggguacgagaugcugaaggugcccaacgcccucaccgacgaccgcagcaagccgauccagggccagacgaucgugcugaacaccgacugguccggguacagcggcuccuucauggacuacugggccgagggcgacugcuaccgcgccugcuucuacgucgagcugauccgggggcgccccaaggaggacaaggugugguggaccagcaacuccaucgucagcaugugcuccagcaccgaguuccucggccaguggaacuggcccgacggggcgaagaucgaguacuuccuguga

SEQ ID NO: 87724 - RNA, 1413 nt, Artificial Sequence
  derived and/or modified CDS sequence (opt1) from neuraminidase__InfluenzaA__AGQ81954
augaaccccaaccagaagauccugugcaccagcgccaccgccaucgugaucggcacgaucgcgguccucaucgggguggccaaccugggccugaacaucgggcuccaccugaagccguccugcaacugcagccacucccagcccgaggccaccaacaccagccagaccaucaucaacaacuacuacaacgagacgaacaucacccagaucuccaacaccaacauccagauggaggagcgcgccagccggggcuucaacaaccugaccaaggggcucugcacgaucaacuccuggcacaucuacggcaaggacaacgccgugcgcaucggcgagaacagcgacguccuggugacccgggagcccuacguguccugcgaccccgacgagugccgcuucuacgcgcugagccaggggaccaccauccggggcaagcacuccaacgggacgauccacgaccgcagccaguaccgggcccucaucuccuggccgcugagcuccccgcccaccgucuacaacagccgcguggagugcaucggcugguccagcaccuccugccacgacggcaagagccggaugagcaucugcaucuccgggcccaacaacaacgccagcgccguggucugguacaaccgccggcccguggcggagaucaacaccugggcccgcaacauccugcggacgcaggaguccgagugcgugugccacaacggcgucugccccgugguguucaccgacgggagcgccaccggccccgccgacacccgcgucuacuacuucaaggaggggaagauccucaagugggagucccugacgggcaccgccaagcacaucgaggagugcagcugcuacggcgagcggaccgggaucacgugcacgugccgcgacaacuggcagggcuccaaccggcccgugauccagaucgacccgguggcgaugacccacaccagccaguacaucugcucccccguccugaccgacaacccccgccccaacgacccgaacguggggaagugcaacgaccccuaccccggcaacaacaacaacggggugaagggcuucagcuaccucgacggcgucaacaccuggcuggggcggaccaucuccaccgccagccgcuccggcuacgagaugcugaaggugcccaacgcccucaccgacgaccggagcaagccgauccaggggcagacgaucgugcugaacaccgacugguccggcuacagcggguccuucauggacuacugggccgagggcgacugcuaccgcgccugcuucuacgucgagcugauccgcggccggcccaaggaggacaaggugugguggaccagcaacuccaucgucagcaugugcagcuccaccgaguuccucgggcaguggaacuggcccgacggcgcgaagaucgaguacuuccuguga

SEQ ID NO: 87725 - RNA, 1413 nt, Artificial Sequence
  derived and/or modified CDS sequence (opt1) from neuraminidase__InfluenzaA__AGQ81956
augaaccccaaccagaagauccugugcaccagcgccaccgccaucgugaucggcacgaucgcgguccucaucgggguggccaaccugggccugaacaucgggcuccaccugaagccguccugcaacugcagccacucccagcccgaggccaccaacaccagccagaccaucaucaacaacuacuacaacgagacgaacaucacccagaucuccaacaccaacauccagauggaggagcgcgccagccggggcuucaacaaccugaccaaggggcucugcacgaucaacuccuggcacaucuacggcaaggacaacgccgugcgcaucggcgagaacagcgacguccuggugacccgggagcccuacguguccugcgaccccgacgagugccgcuucuacgcgcugagccaggggaccaccauccggggcaagcacuccaacgggacgauccacgaccgcagccaguaccgggcccucaucuccuggccgcugagcuccccgcccaccgucuacaacagccgcguggagugcaucggcugguccagcaccuccugccacgacggcaagagccggaugagcaucugcaucuccgggcccaacaacaacgccagcgccaucgugugguacaaccgccggcccgucgcggagaucaacaccugggcccgcaacauccugcggacgcaggaguccgagugcgugugccacaacggcgugugccccgucguguucaccgacgggagcgccaccggccccgccgacacccgcguguacuacuucaaggaggggaagauccucaagugggagucccugacgggcaccgccaagcacaucgaggagugcagcugcuacggcgagcggaccgggaucacgugcacgugccgcgacaacuggcagggcuccaaccggcccgucauccagaucgacccgguggcgaugacccacaccagccaguacaucugcucccccgugcugaccgacaacccccgccccaacgacccgaacgucgggaagugcaacgaccccuaccccggcaacaacaacaacggggugaagggcuucagcuaccucgacggcgugaacaccuggcuggggcggaccaucuccaccgccagccgcuccggcuacgagaugcugaagguccccaacgcccucaccgacgaccggagcaagccgauccaggggcagacgaucgugcugaacaccgacugguccggcuacagcggguccuucauggacuacugggccgagggcgacugcuaccgcgccugcuucuacguggagcugauccgcggccggcccaaggaggacaaggucugguggaccagcaacuccaucgugagcaugugcagcuccaccgaguuccucgggcaguggaacuggcccgacggcgcgaagaucgaguacuuccuguga

SEQ ID NO: 87726 - RNA, 1413 nt, Artificial Sequence
  derived and/or modified CDS sequence (opt1) from neuraminidase__InfluenzaA__AGQ81957
augaaccccaaccagaagauccugugcaccagcgccaccgccaucgugaucggcacgaucgcgguccucaucgggaucgccaaccugggccugaacaucgggcuccaccugaagccguccugcaacugcagccacucccagcccgaggccaccaacaccagccagaucaucaucaacaacuacuacaacgagaccaacaucacccagguguccaacaccaacauccagauggaggagcgcgccagccggggcuucaacaaccugaccaaggggcucugcaccaucaacuccuggcacaucuacggcaaggacaacgccgugcgcaucggcgagaacagcgacguccuggugacgcgggagcccuacguguccugcgaccccgacgagugccgcuucuacgcgcugagccaggggaccaccauccggggcaagcacuccaacgggaccauccacgaccgcagccaguaccgggcccucaucuccuggccgcugagcuccccgcccacggucuacaacagccgcguggagugcaucggcugguccagcaccuccugccacgacggcaagagccggaugagcaucugcaucuccgggcccaacaacaacgccagcgccguggucugguacaaccgccggcccguggcggagaucaacaccugggcccgcaacauccugcggacccaggaguccgagugcgugugccacaacggcgucugccccgugguguucacggacgggagcgccaccggccccgccgacacccgcaucuacuacuucaaggaggggaagauccucaagugggagucccugaccggcacggccaagcacaucgaggagugcagcugcuacggcgagcggaccgggaucacgugcacgugccgcgacaacuggcagggcuccaaccggcccgucauccagaucgacccgguggcgaugacccacaccagccaguacaucugcucccccgugcugaccgacaacccccgccccaacgacccgaacgucgggaagugcaacgaccccuaccccggcaacaacaacaacggggugaagggcuucagcuaccucgacggcgugaacaccuggcuggggcggacgaucuccaccgccagccgcuccggcuacgagaugcugaagguccccaacgcccucaccgacgaccggagcaagccggugcaggggcagaccaucgugcugaacacggacugguccggcuacagcggguccuucauggacuacugggccgagggcgacugcuaccgcgccugcuucuacgucgagcugauccgcggccggcccaaggaggacaaggugugguggaccagcaacuccaucgucagcaugugcagcuccaccgaguuccucgggcaguggaacuggcccgacggcgcgaagaucgaguacuuccuguga

SEQ ID NO: 87727 - RNA, 1413 nt, Artificial Sequence; identical to SEQ ID NO: 87709
  derived and/or modified CDS sequence (opt1) from neuraminidase__InfluenzaA__AGQ81958

SEQ ID NO: 87728 - RNA, 1413 nt, Artificial Sequence; identical to SEQ ID NO: 87709
  derived and/or modified CDS sequence (opt1) from neuraminidase__InfluenzaA__AGQ81959

SEQ ID NO: 87729 - RNA, 1413 nt, Artificial Sequence
  derived and/or modified CDS sequence (opt1) from neuraminidase__InfluenzaA__AGQ81960
augaaccccaaccagaagauccugugcaccagcgccaccgccaucgugaucggcacgaucgcgguccucaucgggaucgccaaccugggccugaacaucgggcuccaccugaagccgaacugcaacugcucccgcagccagcccgagaccaccaacaccucccagacgaucaucaacaacuacuacaacgagaccaacaucacccagaucagcaacaccaacauccagauggaggagcgggccucccgcgacuucaacaaccugacgaagggccucugcaccaucaacagcuggcacaucuacgggaaggacaacgccgugcggaucggcgagaacuccgacgugcuggucacccgcgagcccuacgugagcugcgaccccaacgagugccgguucuacgcccugucccagggcaccacgauccgcgggaagcacagcaacggcaccauccacgaccggucccaguaccgcgcgcucaucagcuggccgcuguccagcccgcccaccguguacaacucccgggucgagugcaucggguggagcuccaccagcugccacgacggcaagucccgcaugagcaucugcaucagcgggcccaacaacaacgccuccgccguggugugguacaaccggcgccccgucgccgagaucaacacgugggcgcggaacauccugcgcacccaggagagcgagugcgugugccacaacggcgugugccccgucguguucaccgacggcuccgccaccgggcccgccgacacgcggaucuacuacuucaaggagggcaagauccucaagugggagagccugaccgggaccgccaagcacaucgaggagugcuccugcuacggcgagcgcaccgagaucacgugcacgugccgggacaacuggcagggcagcaaccgccccgugauccagaucgacccggucgccaugacccacaccucccaguacaucugcagccccgugcugaccgacaacccccggcccaacgacccgaacguggggaagugcaacgaccccuaccccggcaacaacaacaacggggucaagggcuucuccuaccucgacggggugaacaccuggcugggccgcaccaucagcaccgcgucccggagcggcuacgagaugcugaaggugcccaacgcccucacggacgaccgcuccaagccgauccaggggcagaccaucguccugaacaccgacuggagcggcuacuccgggagcuucauggacuacugggccgagggcgacugcuaccgcgccugcuucuacguggagcugauccgggggcgccccaaggaggacaaggugugguggaccuccaacagcaucgucuccaugugcagcagcacggaguuccucggccagugggacuggcccgacggcgccaagaucgaguacuuccuguga

SEQ ID NO: 87730 - RNA, 1413 nt, Artificial Sequence; identical to SEQ ID NO: 87722
  derived and/or modified CDS sequence (opt1) from neuraminidase__InfluenzaA__AGQ81961

SEQ ID NO: 87731 - RNA, 1413 nt, Artificial Sequence; identical to SEQ ID NO: 87722
  derived and/or modified CDS sequence (opt1) from neuraminidase__InfluenzaA__AGQ81962

SEQ ID NO: 87732 - RNA, 1413 nt, Artificial Sequence
  derived and/or modified CDS sequence (opt1) from neuraminidase__InfluenzaA__AGQ81963
augaaccccaaccagaagauccugugcaccagcgccaccgccaucgugaucggcacgaucgcgguccucaucgggaucgccaaccugggccugaacaucgggcuccaccugaagccguccugcaacugcagccacucccagcccgaggagaccaacaccagccagaccaucaucaacaacuacuacaacgagacgaacaucacccagaucuccaacaccaacauccagauggaggagcgcgccagccggggcuucaacaaccugaccaaggggcucugcacgaucaacuccuggcacaucuacggcaaggacaacgccgugcgcaucggcgagaacagcgacgugcuggucacccgggagcccuacguguccugcgaccccaacgagugccgcuucuacgcccugagccaggggaccaccauccggggcaagcacuccaacgggacgauccacgaccgcagccaguaccgggcgcucaucuccuggccgcugagcuccccgcccaccguguacaacagccgcgucgagugcaucggcugguccagcaccuccugccacgacggcaagagccggaugagcgugugcaucuccgggcccaacgacaacgccagcgccguggucugguacaaccgccggcccguggccgagaucaacaccugggcgcgcaacauccugcggacgcaggaguccgagugcgugugccacaacggcgucugccccgugguguucaccgacgggagcgccaccggccccgcccacacccgcaucuacuacuucaaggaggggaagauccucaagugggagucccugacgggcaccgccaagcacaucgaggagugcagcugcuacggcgagcggaccgggaucacgugcacgugccgcgacaacuggcagggcuccaaccggcccgucauccagaucgacccgguggccaugacccacaccagccaguacaucugcucccccgugcugaccgacaacccccgccccaacgacccgaacgucgggaagugcaacgaccccuaccccggcaacaacaacaacggggugaagggcuucagcuaccucgacggcgugaacaccuggcuggggcggaccaucuccaccgcgagccgcuccggcuacgagaugcugaagguccccaacgcccucaccgacgaccggagcaagccgauccaggggcagacgaucgugcugaacaccgacugguccggcuacagcggguccuucauggacuacuggaccgagggcgacugcuaccgcgccugcuucuacguggagcugauccgcggccggcccaaggaggacaaggucugguggaccagcaacuccaucgugagcaugugcagcuccacggaguuccucgggcagugggacuggcccgacggcgccaagaucgaguacuuccuguga

SEQ ID NO: 87733 - RNA, 1413 nt, Artificial Sequence
  derived and/or modified CDS sequence (opt1) from neuraminidase__InfluenzaA__AGQ81964
augaaccccaaccagaagauccugugcaccagcgccaccgccaucgugaucggcacgaucgcgguccucaucgggaucgccaaccugggccugaacaucgggcuccaccugaagccguccugcaacugcagccacuccaagcccgaggagaccaacgccagccagaccaucaucaacaacuacuacaacgagaccaacaucacgcagaucuccaacaccaacauccagauggaggagcgcgccagccggggcuucaacaaccugaccaaggggcucugcaccaucaacuccuggcacaucuacggcaaggacaacgccgugcgcaucggcgagagcuccgacgugcuggucacgcgggagcccuacgugagcugcgaccccgacgagugccgcuucuacgcgcugucccaggggaccaccauccggggcaagcacagcaacgggaccauccacgaccgcucccaguaccgggcccucaucagcuggccgcuguccagcccgcccacgguguacaacucccgcgucgagugcaucggcuggagcuccaccagcugccacgacggcaagagccggauguccaucugcaucagcgggcccaacaacaacgccuccgccguggugugguacaaccgccggcccgucgcggagaucaacaccugggcccgcaacauccugcggacccaggagagcgagugcgugugccacaacggcgugugccccgucguguucacggacggguccgccaccggccccgccgacacccgcaucuacuacuucaaggaggggaagauccucaagugggagagccugaccggcacggccaagcacaucgaggagugcuccugcuacggcgagcggaccgggaucacgugcacgugccgcgacaacuggcagggcagcaaccggcccgugauccagaucgacccggucgcgaugacccacaccucccaguacaucugcagccccgugcugaccgacaacccccgccccaacgacccgaacguggggaagugcaacgaccccuaccccggcaacaacaacaacggggucaagggcuucuccuaccucgacggcgugaacaccuggcuggggcggaccaccagcaccaccucccgcagcggcuacgagaugcugaaggugcccaacgcccucacggacgaccgguccaagccgauccaggggcagaccaucguccugaacaccgacuggagcggcuacuccgggagcuucauggacuacugggccgagggcgacugcuaccgcgccugcuucuacguggagcugauccgcggccggcccaaggaggacaaggugugguggaccuccaacagcaucgucagcaugugcuccagcacggaguuccucgggcaguggaacuggcccgacggcgccaagaucgaguacuuccuguga

SEQ ID NO: 87734 - RNA, 1413 nt, Artificial Sequence
  derived and/or modified CDS sequence (opt1) from neuraminidase__InfluenzaA__AGQ81966
augaaccccaaccagcgcauccugugcaccagcgccaccgccaucgugaucggcacgaucgcgguccucaucgggguggccaaccugggccugaacaucgggcuccaccugaagccgggcugcaacugcucccacagccagcccgaggccaccaacaccucccagaccaucaucaacaacuacuacaacgagacgaacaucacccagaucagcaacaccaacauccagauggaggagcgggccaaccgcggguucaacaaccugaccaagggccucugcacgaucaacuccuggcacaucuacggcaaggacaacgccgugcggaucggggagaacagcgacguccuggugacccgcgagcccuacguguccugcgaccccgacgagugccgguucuacgcgcugagccagggcaccaccauccgcgggaagcacuccaacggcacgauccacgaccggagccaguaccgcgcccucaucuccuggccgcugagcuccccgcccaccgucuacaacagccggguggagugcaucgggugguccagcaccuccugccacgacggcaagagccgcauguccaucugcaucagcggccccaacaacaacgccagcgccguggucugguacaaccggcgccccguggcggagaucaacaccugggcccggaacauccugcgcacgcaggaguccgagugcgugugccacaacggggucugccccgugguguucaccgacggcagcgccaccgggcccgccgacacccgggucuacuacuuccgcgagggcaagauccucaagugggagucccugacgggcaccgccaagcacaucgaggagugcagcugcuacggggagcggaccggcaucacgugcacgugccgcgacaacuggcagggguccaaccggcccgugauccagaucgacccgguggcgaugacccacaccagccaguacaucugcucccccguccugaccgacaacccccgccccaacgacccgaacgugggcaagugcaacgaccccuaccccgggaacaacaacaacggcgugaagggcuucagcuaccucgacggggucaacaccuggcugggccggaccaucuccaccgccagccgcuccggguacgagaugcugaaggugcccaacgcccucaccgacgaccgcagcaagccgauccagggccagacgaucgugcugaacaccgacugguccggguacagcggcuccuucauggacuacugggccgagggcgacugcuaccgggccugcuucuacgucgagcugauccgcgggcggcccaaggaggacaaggugugguggaccagcaacuccaucgucagcaugugcuccagcaccgaguuccucggccaguggaacuggcccgacggggcgaagaucgaguacuuccuguga

SEQ ID NO: 87735 - RNA, 1413 nt, Artificial Sequence
  derived and/or modified CDS sequence (opt1) from neuraminidase__InfluenzaA__AGQ81967
augaaccccaaccagaagauccugugcaccagcgccaccgccaucgugaucggcaucaucgcgguccucaucgggaucgccaaccugggccugaacaucgggcuccaccugaagccguccugcaacugcagccacucccagcccgaggccacgaacgccagccagaccaucaucaacaacuacuacaacgagaccaacaucacccagaucuccaacacgaacauccagauggaggagcgcgccagccggggcuucaacaaccugaccaaggggcucugcaccaucaacuccuggcacaucuacggcaaggacaacgcggugcgcaucggcgagaacagcgacgugcuggucacccgggagcccuacguguccugcgaccccgacgagugccgcuucuacgcccugagccaggggacgaccauccggggcaagcacuccaacgggaccauccacgaccgcagccaguaccgggcccucaucuccuggccgcugagcuccccgcccaccguguacaacagccgcgucgagugcaucggcugguccagcacguccugccacgacggcaagagccggaugagcaucugcaucuccgggcccaacaacaacgccagcgcgguggugugguacaaccgccggcccgucgccgagaucaacaccugggcccgcaacauccugcggacccaggaguccgagugcgugugccacaacggcgugugccccgucguguucaccgacgggagcgccacgggccccgccgagacccgcaucuacuacuucaaggaggggaagauccucaagugggagucccugaccggcaccgcgaagcacaucgaggagugcagcugcuacggcgagcggacggggaucacgugcacgugccgcgacaacuggcagggcuccaaccggcccgugauccagaucgacccggucgccaugacccacaccagccaguacaucugcucccccgugcugaccgacaacccccgccccaacgacccgaacguggggaagugcaacgaccccuaccccggcaacaacaacaacggggucaagggcuucagcuaccucgacggcgugaacaccuggcuggggcggaccaucuccaccgccagccgcuccggcuacgagaugcugaaggugcccaacgcccucaccgacgaccggagcaagccgauccaggggcagaucaucguccugaacaccgacugguccggcuacagcggguccuucauggacuacugggccgagggcgacugcuaccgcgcgugcuucuacguggagcugauccgcggccggcccaaggaggacaaggugugguggaccagcaacuccaucgucagcaugugcagcuccacggaguuccucgggcaguggaacuggcccgacggcgccaagaucgaguacuuccuguga

SEQ ID NO: 87736 - RNA, 1413 nt, Artificial Sequence
  derived and/or modified CDS sequence (opt1) from neuraminidase__InfluenzaA__AGQ81968
augaaccccaaccagaagauccugugcaccagcgccaccgccaucgugaucggcaucaucgcgguccucaucgggaucgccaaccugggccugaacaucgggcuccaccugaagccguccugcaacugcagccacucccagcccgaggccacgaacgccagccagaccaucaucaacaacuacuacaacgagaccaacaucacccagaucuccaacacgaacauccagauggaggagcgcgccagccggggcuucaacaaccugaccaaggggcucugcaccaucaacuccuggcacaucuacggcaaggacaacgcggugcgcaucggcgagaacagcgacauccuggugacccgggagcccuacgucuccugcgaccccgacgagugccgcuucuacgcccugagccaggggacgaccauccggggcaagcacuccaacgggaccauccacgaccgcagccaguaccggucccucaucagcuggccgcuguccagcccgcccaccguguacaacucccgcguggagugcaucggcuggagcuccacgagcugccacgacggcaagagccggauguccaucugcaucagcgggcccaacaacaacgccuccgccgucgugugguacaaccgccggcccguggcggagaucaacaccugggcccgcaacauccugcggacccaggagagcgagugcgucugccacaacggcgugugccccguggucuucaccgacggguccgccacgggccccgccgagacccgcaucuacuacuucaaggaggggaagauccucaagugggagagccugaccggcaccgccaagcacaucgaggagugcuccugcuacggcgagcggacggggaucacgugcacgugccgcgacaacuggcagggcagcaaccggcccgugauccagaucgacccgguggcgaugacccacaccucccaguacaucugcagccccguccugaccgacaacccccgccccaacgacccgaacguggggaagugcaacgaccccuaccccggcaacaacaacaacggggugaagggcuucuccuaccucgacggcgucaacaccuggcuggggcggaccaucagcaccgccucccgcagcggcuacgagaugcugaaggugcccaacgcccucaccgacgaccgguccaagccgauccaggggcagaccaucgugcugaacaccgacuggagcggcuacuccgggagcuucaucgacuacugggccgagggcgacugcuaccgcgccugcuucuacgucgagcugauccgcggccggcccaaggaggacaaggugugguggacguccaacagcaucgugagcaugugcuccagcaccgaguuccucgggcaguggaacuggcccgacggcgcgaagaucgaguacuuccuguga

SEQ ID NO: 87737 - RNA, 1413 nt, Artificial Sequence
  derived and/or modified CDS sequence (opt1) from neuraminidase__InfluenzaA__AGQ81969
augaaccccaaccagaagauccugugcaccagcgccaccgccaucgugaucggcaucaucgcgguccucaucgggaucgccaaccugggccugaacaucgggcuccaccugaagccguccugcaacugcagccacucccagcccgaggagacgaacgccagccagaccaucaucaacaacuacuacaacgagaccaacaucacccagaucuccaacacgaacauccagauggaggagcgcgccagccggggcuucaacaaccugaccaaggggcucugcaccaucaacuccuggcacaucuacggcaaggacaacgccgugcgcaucggcgagaacagcgacgugcuggucacccgggagcccuacguguccugcgaccccgacgagugccgcuucuacgcgcugagccaggggacgaccauccggggcaagcacuccaacgggaccauccacgaccgcagccaguaccgggcccucaucuccuggccgcugagcuccccgcccaccguguacaacagccgcgucgagugcaucggcugguccagcacguccugccacgacggcaagagccggaugagcaucugcaucuccgggcccaacaacaacgccagcgccguggugugguacaaccgccggcccgucgcggagaucaacaccugggcccgcaacauccugcggacccaggaguccgagugcgugugccacaacggcgugugccccgucguguucaccgacgggagcgccacgggccccgccgagacccgcaucuacuacuucaaggaggggaagauccucaagugggagucccugaccggcaccgccaagcacaucgaggagugcagcugcuacggcgagcggacggggaucacgugcacgugccgcgacaacuggcagggcuccaaccggcccgugauccagaucgacccggucgcgaugacccacaccagccaguacaucugcucccccgugcugaccgacaacccccgccccaacgacccgaacguggggaagugcaacgaccccuaccccggcaacaacaacaacggggucaagggcuucagcuaccucgacggcgugaacaccuggcuggggcggaccaucuccaccgccagccgcuccggcuacgagaugcugaaggugcccaacgcccucaccgacgaccggagcaagccgauccaggggcagaucaucguccugaacaccgacugguccggcuacagcggguccuucauggacuacugggccgagggcgacugcuaccgcgccugcuucuacguggagcugauccgcggccggcccaaggaggacaaggugugguggaccagcaacuccaucgucagcaugugcagcuccacggaguuccucgggcaguggaacuggcccgacggcgcgaagaucgaguacuuccuguga

SEQ ID NO: 87738 - RNA, 1413 nt, Artificial Sequence
  derived and/or modified CDS sequence (opt1) from neuraminidase__InfluenzaA__AGQ81970
augaaccccaaccagaagauccugugcaccagcgccaccgccaucgugaucggcacgaucgcgguccucaucgggaucgccaaccugggccugaacaucgggcuccaccugaagccguccugcaacugcagccacucccagcccgaggagaccaacgccagccagaccaucaucaacaacuacuacaacgagaccaacaucacgcagaucuccaacaccaacauccagauggaggagcgcgccagccggggcuucaacaaccugaccaaggggcucugcaccaucaacuccuggcacaucuacggcaaggacaacgccgugcgcaucggcgagaacagcgacgugcuggucacgcgggagcccuacguguccugcgaccccgacgagugccgcuucuacgcgcugagccaggggaccaccauccggggcaagcacuccaacgggaccauccacgaccgcagccaguaccgggcccucaucuccuggccgcugagcuccccgcccacgguguacaacagccgcgucgagugcaucggcugguccagcaccuccugccacgacggcaagagccggaugagcaucugcaucuccgggcccaacaacaacgccagcgccguggugugguacaacaagcgccccgucgcggagaucaacaccugggcccggaacauccugcgcacccaggaguccgagugcgugugccacaacggcgugugccccgucguguucacggacgggagcgccaccggccccgccgacacccggaucuacuacuucaaggaggggaagauccucaagugggagccccugaccggcacggccaagcacaucgaggagugcuccugcuacggcgagcgcaccgggaucacgugcacgugccgggacaacuggcagggcagcaaccgcccggugauccagaucgaccccgucgcgaugacccacaccucccaguacaucugcagccccgugcugaccgacaacccccggccgaacgaccccaacguggggaagugcaacgaccccuaccccggcaacuccaacaacggggucaagggcuucagcuaccucgacggcgugaacaccuggcuggggcgcaccaucuccaccgccagccgguccggcuacgagaugcugaaggugccgaacgcccucaccgacgaccgcagcaagcccauccaggggcagaccaucguccugaacacggacugguccggcuacagcggguccuucauggacuacugggccgagggcgacugcuaccgggccugcuucuacguggagcugauccgcggccgccccaaggaggacaaggugugguggaccagcaacuccaucgucagcaugugcagcuccaccgaguuccucgggcaguggaacuggcccgacggcgcgaagaucgaguacuuccuguga

SEQ ID NO: 87739 - RNA, 1413 nt, Artificial Sequence
  derived and/or modified CDS sequence (opt1) from neuraminidase__InfluenzaA__AGQ81971
augaaccccaaccagaagauccugugcaccagcgccaccgccaucaucaucggcgcgaucgccgugcucaucgggaucgccaaccugggccugaacaucgggcuccaccugaagccguccugcaacugcagccacucccagcccgagacgaccaacaccagccagaccaucaucaacaacuacuacaacgagacgaacaucacccagaucuccaacaccaacauccagauggaggagcgcaccagccggggcuucaacaaccugacgaaggggcucugcaccaucaacuccuggcacaucuacggcaaggacaacgccguccgcaucggcgagagcuccgacgugcuggugacccgggagcccuacgucagcugcgaccccgacgagugccgcuucuacgcccugucccaggggaccacgauccggggcaagcacagcaacgggaccauccacgaccgcucccaguaccgggcgcucaucagcuggccgcuguccagcccgcccaccguguacuccagccgcguggagugcaucggcugguccagcaccagcugccacgacgggaagucccggaugagcaucugcaucuccggccccaacaacaacgccagcgccgucgugugguacaaccgccggcccguggccgagaucaacacgugggcgcgcaacauccugcggacccaggaguccgagugcgucugccacaacggcgugugccccguggucuucaccgacgggagcgccaccggccccgccgacacgcgcaucuacuacuucaaggaggggaagauccucaagugggagucccugaccggcaccgccaagcacaucgaggagugcagcugcuacggcgagcggaccgggaucacgugcacgugccgcgacaacuggcagggcuccaaccggcccgugauccagaucgacccgguggccaugacccacaccagccaguacaucugcucccccguccugaccgacaacccccgccccaacgacccgaacaucgggaagugcaacgaccccuaccccggcaacaacaacaacggggugaagggcuucagcuaccucgacggcgcgaacaccuggcuggggcggaccaucuccaccgccagccgcuccggcuacgagaugcugaaggugcccaacgcccucacggacgaccggagcaagccgauccaggggcagaccaucguccugaacaccgacugguccggcuacagcggguccuucauggacuacugggccgagggcgacugcuaccgcgccugcuucuacguggagcugauccgcggccggcccaaggaggacaaggugugguggaccagcaacagcaucgucuccaugugcagcuccacggaguuccucgggcaguggaacuggcccgacggcgcgaagaucgaguacuuccuguga

SEQ ID NO: 87740 - RNA, 1413 nt, Artificial Sequence
  derived and/or modified CDS sequence (opt1) from neuraminidase__InfluenzaA__AGQ81972
augaaccccaaccagaagauccugugcaccagcgccaccgccaucaucaucggcgcgaucgccgugcucaucgggaucgccaaccugggccugaacaucgggcuccaccugaagccguccugcaacugcagccacucccagcccgagacgaccaacaccagccagaccaucaucaacaacuacuacaacgagacgaacaucacccagaucuccaacaccaacauccagauggaggagcgcgccagccggggcuucaacaaccugaccaaggggcucugcacgaucaacuccuggcacaucuacggcaaggacaacgccguccgcaucggcgagagcuccgacgugcuggugacccgggagcccuacgucagcugcgaccccgacgagugccgcuucuacgcgcugucccaggggaccaccauccggggcaagcacagcaacgggacgauccacgaccgcucccaguaccgggcccucaucagcuggccgcuguccagcccgcccaccguguacaacucccgcguggagugcaucggcuggagcuccaccagcugccacgacggcaagagccggauguccaucugcaucagcgggcccaacaacaacgccuccgccgucgugugguacaaccgccggcccguggcggagaucaacaccugggcccgcaacauccugcggacgcaggagagcgagugcgucugccacaacggcgugugccccguggucuucaccgacggguccgccaccggccccgccgacacccgcaucuacuacuucaaggaggggaagauccucaagugggagagccugacgggcaccgccaagcacaucgaggagugcuccugcuacggcgagcggaccgggaucacgugcacgugccgcgacaacuggcagggcagcaaccggcccgugauccagaucgacccgguggcgaugacccacaccucccaguacaucugcagccccguccugaccgacaacccccgccccaacgacccgaacaucgggaagugcaacgaccccuaccccggcaacaacaacaacggggugaagggcuucuccuaccucgacggcgccaacaccuggcuggggcggaccaucagcaccgccucccgcagcggcuacgagaugcugaaggugcccaacgcccucaccgacgaccgguccaagccgauccaggggcagacgaucguccugaacaccgacuggagcggcuacuccgggagcuucauggacuacugggccgagggcgacugcuaccgcgcgugcuucuacguggagcugauccgcggccggcccaaggaggacaaggugugguggaccuccaacagcaucgucagcaugugcuccagcaccgaguuccucgggcaguggaacuggcccgacggcgccaagaucgaguacuuccuguga

SEQ ID NO: 87741 - RNA, 1413 nt, Artificial Sequence
  derived and/or modified CDS sequence (opt1) from neuraminidase__InfluenzaA__AGQ81973
augaaccccaaccagaagauccugugcaccagcgccaccgccaucaucaucggcgcgaucgccgugcucaucgggaucgccaaccugggccugaacaucgggcuccaccugaagccguccugcaacugcagccacucccagcccgagacgaccaacaccagccagaccaucaucaacaacuacuacaacgagacgaacaucacccagaucuccaacaccaacauccagauggaggagcgcaccagccggggcuucaacaaccugacgaaggggcucugcaccaucaacuccuggcacaucuacggcaaggacaacgccguccgcaucggcgagagcuccgacgugcuggugacccgggagcccuacgucagcugcgaccccgacgagugccgcuucuacgcccugucccaggggaccacgauccggggcaagcacagcaacgggaccauccacgaccgcucccaguaccgggcgcucaucagcuggccgcuguccagcccgcccaccguguacaacucccgcguggagugcaucggcuggagcuccaccagcugccacgacggcaagagccggauguccaucugcaucagcgggcccaacaacaacgccuccgccgucgugugguacaaccgccggcccguggccgagaucaacacgugggcgcgcaacauccugcggacccaggagagcgagugcgucugccacaacggcgugugccccguggucuucaccgacggguccgccaccggccccgccgacacgcgcaucuacuacuucaaggaggggaagauccucaagugggagagccugaccggcaccgccaagcacaucgaggagugcuccugcuacggcgagcggaccgggaucacgugcacgugccgcgacaacuggcagggcagcaaccggcccgugauccagaucgacccgguggccaugacccacaccucccaguacaucugcagccccguccugaccgacaacccccgccccaacgacccgaacaucgggaagugcaacgaccccuaccccggcaacaacaacaacggggugaagggcuucuccuaccucgacggcgcgaacaccuggcuggggcggaccaucagcaccgccucccgcagcggcuacgagaugcugaaggugcccaacgcccucacggacgaccgguccaagccgauccaggggcagaccaucguccugaacaccgacuggagcggcuacuccgggagcuucauggacuacugggccgagggcgacugcuaccgcgccugcuucuacguggagcugauccgcggccggcccaaggaggacaaggugugguggaccuccaacagcaucgucagcaugugcuccagcacggaguuccucgggcaguggaacuggcccgacggcgcgaagaucgaguacuuccuguga

SEQ ID NO: 87742 - RNA, 1413 nt, Artificial Sequence; identical to SEQ ID NO: 87722
  derived and/or modified CDS sequence (opt1) from neuraminidase__InfluenzaA__AGQ81974

SEQ ID NO: 87743 - RNA, 1398 nt, Artificial Sequence
  derived and/or modified CDS sequence (opt1) from neuraminidase__InfluenzaA__AGQ81975
augaaccccaaccagaagauccugugcaccagcgccaccgccaucaucaucggcgcgaucgccgugcucaucgggaucgccaaccugggccugaacaucgggcuccaccugaagccgggcugcaacugcucccacagccagcccgagacgaccaacaccucccagaccaucaucaacaacuacuacaacgagacgaacaucaccaacauccagauggaggagcgcaccagccggaacuucaacaaccugaccaaguggcucugcacgaucaacuccuggcacaucuacgggaaggacaacgccguccgcaucggcgagaacagcgacgugcuggugacccgggagcccuacgucuccugcgaccccgacgagugccgcuucuacgcccugagccagggcaccaccauccgggggaagcacuccaacggcacgauccacgaccgcagccaguaccgggcgcucaucuccuggccgcugagcuccccgcccaccguguacaacagccgcguggagugcaucgggugguccagcaccuccugccacgacggcaagagccggauguccaucugcaucagcgggcccaacaacaacgccagcgccgucgugugguacaaccgccggcccguggccgagaucaacaccugggcgcgcaacauccugcggacgcaggaguccgagugcgucugccacaacggcgugugccccguggucuucaccgacggcagcgccaccgggcccgccgacacccgcaucuacuacuucaaggagggcaagauccucaagugggagucccugacggggaccgccaagcacaucgaggagugcagcugcuacggcgagcggaccggcaucacgugcacgugccgcgacaacuggcagggguccaaccggcccgugauccagaucgacccgguggccaugacccacaccagccaguacaucugcucccccguccugaccgacaacccccgccccgacgacccgaacaucggcaagugcaacgaccccuaccccgggaacaacaacaacggcgugaagggguucagcuaccucgacggcgcgaacaccuggcugggccggaccaucuccaccgccagccgcuccggguacgagaugcugaaggugcccaacgcccucaccgacgaccggagcaagccgauccagggccagacgaucguccugaacgccgacugguccggguacagcggcuccuucauggacuacugggccgacggggacugcuaccgcgcgugcuucuacguggagcugauccgcggccggcccaaggaggacaaggugugguggaccagcaacuccaucgucagcaugugcuccagcaccgaguuccucggccaguggaacuggcccgacggggccaagaucgaguacuuccuguga

SEQ ID NO: 87744 - RNA, 1398 nt, Artificial Sequence
  derived and/or modified CDS sequence (opt1) from neuraminidase__InfluenzaA__AGQ81977
augaaccccaaccagaagauccugugcaccagcgccaccgccaucaucaucggcgcgaucgccgugcucaucgggaucgccaaccugggccugaacaucgggcuccaccugaagccgggcugcaacugcucccacagccagcccgagacgaccaacaccucccagaccaucaucaacaacuacuacaacgagacgaacaucaccaacauccagauggaggagcgcaccagccggaacuucaacaaccugaccaaggggcucugcacgaucaacuccuggcacaucuacggcaaggacaacgccguccgcaucggcgagagcuccgacgugcuggugacccgggagcccuacgucagcugcgaccccgacgagugccgcuucuacgcccugucccaggggaccaccauccggggcaagcacagcaacgggacgauccacgaccgcucccaguaccgggcgcucaucagcuggccgcuguccagcccgcccaccguguacaacucccgcguggagugcaucggcuggagcuccaccagcugccacgacgggaagucccggaugagcaucugcaucagcggccccaacaacaacgccuccgccgucgugugguacaaccgccggcccguggccgagaucaacaccugggcgcgcaacauccugcggacgcaggagagcgagugcgucugccacaacggcgugugccccguggucuucaccgacggguccgccaccggccccgccgacacccgcaucuacuacuucaaggaggggaagauccucaagugggagagccugacgggcaccgccaagcacaucgaggagugcuccugcuacggcgagcggaccgggaucacgugcacgugccgcgacaacuggcagggcagcaaccggcccgugauccagaucgacccgguggccaugacccacaccucccaguacaucugcagccccguccugaccgacaacccccgccccgacgacccgaacaucgggaagugcaacgaccccuaccccggcaacaacaacaacggggugaagggcuucuccuaccucgacggcgcgaacaccuggcuggggcggaccaucagcaccgccucccgcagcggcuacgagaugcugaaggugcccaacgcccucaccgacgaccgguccaagccgauccaggggcagacgaucguccugaacgccgacuggagcggcuacuccgggagcuucauggacuacugggccgacggcgacugcuaccgcgcgugcuucuacguggagcugauccgcggccggcccaaggaggacaaggugugguggaccuccaacagcaucgucuccaugugcagcagcaccgaguuccucgggcaguggaacuggcccgacggcgccaagaucgaguacuuccuguga

SEQ ID NO: 87745 - RNA, 1398 nt, Artificial Sequence
  derived and/or modified CDS sequence (opt1) from neuraminidase__InfluenzaA__AGQ81979
augaaccccaaccagaagauccugugcaccagcgccaccgccaucaucaucggcgcgaucgccgcccucaucgggaucgccaaccugggccugaacaucgggcuccaccugaagccgggcugcaacugcucccacagccagcccgagacgaccaacaccucccagaccaucaucaacaacuacuacaacgagacgaacaucaccaacauccagauggaggagcgcaccagccggaacuucaacaaccugaccaaggggcucugcacgaucaacuccuggcacaucuacggcaaggacaacgccgugcgcaucggcgagagcuccgacguccuggugacccgggagcccuacgugagcugcgaccccgacgagugccgcuucuacgcgcugucccaggggaccaccauccggggcaagcacagcaacgggacgauccacgaccgcucccaguaccgggcccucaucagcuggccgcuguccagcccgcccaccgucuacaacucccgcguggagugcaucggcuggagcuccaccagcugccacgacgggaagucccggaugagcaucugcaucagcggccccaacaacaacgccuccgccguggucugguacaaccgccggcccguggcggagaucaacaccugggcccgcaacauccugcggacgcaggagagcgagugcgugugccacaacggcgucugccccgugguguucaccgacggguccgccaccggccccgccgacacccgcaucuacuacuucaaggaggggaagauccucaagugggagagccugacgggcaccgccaagcacaucgaggagugcuccugcuacggcgagcggaccgggaucacgugcacgugccgcgacaacuggcagggcagcaaccggcccgucauccagaucgacccgguggcgaugacccacaccucccaguacaucugcagccccgugcugaccgacaacccccgccccgacgacccgaacaucgggaagugcaacgaccccuaccccggcaacaacaacaacggggucaagggcuucuccuaccucgacggcgccaacaccuggcuggggcggaccaucagcaccgccucccgcagcggcuacgagaugcugaaggugcccaacgcccucaccgacgaccgguccaagccgauccaggggcagacgaucgugcugaacgccgacuggagcggcuacuccgggagcuucauggacuacugggcggacggcgacugcuaccgcgccugcuucuacgucgagcugauccgcggccggcccaaggaggacaaggugugguggaccuccaacagcaucguguccaugugcagcagcaccgaguuccucgggcaguggaacuggcccgacggcgccaagaucgaguacuuccuguga

SEQ ID NO: 87746 - RNA, 1398 nt, Artificial Sequence; identical to SEQ ID NO: 87744
  derived and/or modified CDS sequence (opt1) from neuraminidase__InfluenzaA__AGQ81980

SEQ ID NO: 87747 - RNA, 1350 nt, Artificial Sequence
  derived and/or modified CDS sequence (opt1) from neuraminidase__InfluenzaA__AGQ88501
augaaccccaaccagaagaucgugaccaucggcagcaucugcauggucaucgggaucgugucccugaugcuccagaucggcaacaugaucagcaucugggugucccacagcauccagaccgggaaccagcaccagacggagccgauccgcaacaccaacuuccugaccgagaacgccgucgccuccguggcgcugagcggcaacuccagccucugccccauccgggggugggccgugcacuccaaggacaacagcauccgcaucggcuccaagggcgacgucuucgugauccgggagcccuucaucagcugcuccaaccuggagugccgcaccuucuuccugacgcagggggcccuccugaacgacaagcacagcaacggcaccgugaaggaccggagcccccaccgcacccugauguccugcccgaucggggaggcccccucccccuacaacagccgguucgaguccgucgccuggagcgcgagcgccugccacgacggcaucuccuggcucaccaucgggaucagcggccccgacaacggcgccguggccgugcugaaguacaacgggaucaucacggacaccaucaaguccuggcgcaacaacauccugcggacccaggagagcgagugcacgugcgucaacggcuccugcuucaccgugaugaccgacgggccgagcaacggccaggcguccuacaagaucuucaagaucgagaagggcaagguggucaagagcguggagcucaacgcccccaacuaccacuacgaggagugcuccugcuaccccgacgccggggagaucaucugcgugugccgcgacaacuggcacggcagcaaccggcccugggucuccuucaaccagaaccuggaguaccagaucggguacaucugcagcggcguguucggggacaacccgcgccccaacgacggcgagggcuccugcgggcccgugagccccaacggcgccuacggggucaagggcuucuccuucaaguacgggaacggcguguggaucggccggaccaagagcacccacucccgcagcggguucgagaugaucugggacccgaacggcuggacggggaccgacuccgaguucagcaugaagcaggacaucguggccaucaccgacuggagcggcuacuccgggagcuucguccagcaccccgagcugaccggccucgacugcauccggcccugcuucuggguggagcugauccgcggccggcccaaggaguccacgaucuggaccagcggguccagcaucuccuucugcggcgucaacagcgacaccguguccuggagcuggccggacggggcggagcugcccuucaccaucgacaaguga

SEQ ID NO: 87748 - RNA, 1401 nt, Artificial Sequence; identical to SEQ ID NO: 87626
  derived and/or modified CDS sequence (opt1) from neuraminidase__InfluenzaA__AGR33906

SEQ ID NO: 87749 - RNA, 1401 nt, Artificial Sequence
  derived and/or modified CDS sequence (opt1) from neuraminidase__InfluenzaA__AGR33908
augaaccccaaccagaagaucaccgccaucggcagcgugucccugaucaucgccaucaucugccuccugaugcagaucgcgauccugaccacgaccaugacccuccacuuccgccagaacgagugcagcaacccguccaacaaccaggucaugcccugcgagcccaucaucaucgagcggaacaccgugcaccugaacagcacgaccaucgagcgcgagaucugccccaagguggccgaguacaagaacugguccaagccgcagugccagaucaccggguucgcccccuucagcaaggacaacuccauccggcugagcgccggcggggacaucugggucacccgcgagcccuacguguccugcagccccgacaagugcuaccaguucgcccucggccaggggacgacccugaagaacaagcacuccaacggcaccacccacgaccggacgccgcaccgcacccugcucaugaacgagcugggcgugcccuuccaccuggggaccaagcaggucugcaucgcguggagcuccagcuccugcuacgacggcaaggccuggcuccacaucugcgugaccggggacgacaagaacgccacggccagcaucaucuacgacggcaugcugguggacuccaucgggagcugguccaagaacauccugcggacccaggagagcgagugcgucugcaucaacgggaccugcgcgguggugaugaccgacggcagcgccuccggcgaggccgacacgcgcauccucuucauccgggagggcaagaucaucaacaucagcccccuguccgggagcgcccagcacgucgaggagugcuccugcuacccccgcuacccggaggugcggugcgugugccgcgacaacuggaagggcagcaaccggcccaucaucuacaucaacauggucgacuacuccaucgagagccgcuacgugugcuccggccuggugggggacacgccccggaacgacgacagcaccuccagcuccaacugccgcgaccccaacaacgagcggggcgccccgggggucaagggcugggcguucgacgacgggaacgacguguggaugggccgcaccaucaagaacggcagccgguccggguacgagaccuuccgcgugaucaacggcuggaccauggccaacagcaagucccagaucaaccggcaggucaucguggacagcgacaacugguccggguacagcggcaucuucagcguggaggggaagaagugcaucaaccgcugcuucuacgucgagcucauccgcggccggccccaggagccccgcgugugguggaccuccaacagcaucaucgucuucugcggcaccuccgggacguacggcaccgggagcuggcccgacggcgccgacaucaacuucaugccgaucuga

SEQ ID NO: 87750 - RNA, 1401 nt, Artificial Sequence
  derived and/or modified CDS sequence (opt1) from neuraminidase__InfluenzaA__AGR33910
augaaccccaaccagaagaucaucgccaucggcagcgugucccugaccaucgccaucaucugcuuccucaugcagaucgcgauccugaccacgaccaugacccugcacuucaagcagaacgagugcagcaagccguccaacaaccaggucgugcccugcgagcccauccucaucgagcgcaacaccgugcaccugaacagcacgaccaucgagaaggaggucugccccaagguggccgaguacaagaacugguccaagccgcagugccagaucaccggguucgcccccuucagcaaggacaacuccauccggcugagcgccggcggggacaucugggugacccgcgagcccuacgucuccugcagcuucggcaagugcuaccaguucgcccucgggcagggcacgacccugaagaacaagcacuccaacggcaccacccacgaccggacgccccaccgcacccugcucaugaacgagcugggggugccguuccaccugggcaccaagcaggucugcaucgcguggagcuccagcuccugcuacgacgggaaggccuggcuccacaucugcgugaccggcgacgacaagaacgccacggccagcaucaucuacgacgggaugcugguggacuccaucggcagcugguccaagaacauccugcggacccaggagagcgagugcgugugcaucaacgggaccugcgcggucgugaugaccgacgggagcgccuccggcaaggccgacacgcgcauccucuucauccgggaggggaagaucaucaacauccgcccccugagcggcuccgcccagcacguggaggagugcagcugcuacccccgguaccccgagguccgcugcgugugccgggacaacuggaagggcuccaaccgcccggugcuguacaucaacauggccgacuacagcgucgaguccagcuacgugugcuccgggcucgugggcgacacgccccggaacgacgacagcuccagcuccagcaacugccgcgaccccaacaacgagcggggcgcgcccggcgucaaggggugggccuucgacgacggcaacgacguguggaugggccgcaccauccggaacgacucccgcagcggguacgagaccuuccggguggucaacggcuggaccaccgccaacuccaagagccagaucaaccgccaggugaucgucgacuccgagaacuggagcggguacagcggcaucuucuccguggaggggaagaacugcaucaaccggugcuucuacguggagcugauccgcggccgcccgcaggagccccgggucugguggaccagcaacuccaucaucguguucugcggcaccagcgggacguacggcaccggguccuggcccgacggcgccaacaucaacuucaugcccaucuga

SEQ ID NO: 87751 - RNA, 1401 nt, Artificial Sequence
  derived and/or modified CDS sequence (opt1) from neuraminidase__InfluenzaA__AGR33911
augaaccccaaccagaagaucaucgccaucggcagcgugucccugaccaucgccaucaucugcuuccucaugcagaucgcgauccugaccacgaccaugacccugcacuucaagcagaacgagugcagcaacccguccaacaaccaggucgugcccugcgagcccauccucaucgagcgcaacaccgugcaccugaacagcacgaccaucgagaaggaggucugccccaagguggccgaguacaagaacugguccaagccgcagugccagaucaccggguucgcccccuucagcaaggacaacuccauccggcugagcgccggcggggacaucugggugacccgcgagcccuacgucuccugcagccucggcaagugcuaccaguucgcccuggggcagggcacgacccugaagaacaaccacuccaacggcaccacccacgaccggacgccccaccgcacccuccugaugaacgagcugggggugccguuccaccucggcaccaagcaggucugcaucgcguggagcuccagcuccugcuacgacgggaaggccuggcugcacaucugcgugaccggcgacgacaagaacgccacggccagcaucaucuacgacgggaugcugguggacuccaucggcagcugguccaagaacauccuccggacccaggagagcgagugcgugugcaucaacgggaccugcgcggucgugaugaccgacggcagcgccuccggcaaggccgacacgcgcauccuguucauccgggaggggaagaucaucaacaucagcccccuguccggcagcgcccagcacguggaggagugcuccugcuacccccgcuaccccgagguccggugcgugugccgcgacaacuggaagggcagcaaccggccggugcucuacaucaacauggccgacuacuccaucgagagcuccuacgucugcagcgggcuggugggcgacacgccccgcaacgacgacuccagcuccagcuccaacugccgggaccccaacaacgagcgcggggcgcccggcgugaaggggugggccuucgacgacggcaacgacgucuggaugggccggaccauccgcaacaacagccgguccggguacgagaccuuccgcguggugaacggcuggaccaccgccaacagcaagucccagaucaaccggcaggucaucguggacagcgagaacuggagcggguacuccggcaucuucagcgucgaggggaagaacugcaucaaccgcugcuucuacguggagcugauccggggccgcccgcaggagccccgcgugugguggaccuccaacagcaucaucgucuucugcggcaccuccgggacguacggcaccgggagcuggcccgacggcgccaacaucaacuucaugcccaucuga

SEQ ID NO: 87752 - RNA, 1356 nt, Artificial Sequence; identical to SEQ ID NO: 87667
  derived and/or modified CDS sequence (opt1) from neuraminidase__InfluenzaA__AGR33912

SEQ ID NO: 87753 - RNA, 1356 nt, Artificial Sequence; identical to SEQ ID NO: 87697
  derived and/or modified CDS sequence (opt1) from neuraminidase__InfluenzaA__AGR33913

SEQ ID NO: 87754 - RNA, 1356 nt, Artificial Sequence; identical to SEQ ID NO: 87667
  derived and/or modified CDS sequence (opt1) from neuraminidase__InfluenzaA__AGR33915

SEQ ID NO: 87755 - RNA, 1356 nt, Artificial Sequence
  derived and/or modified CDS sequence (opt1) from neuraminidase__InfluenzaA__AGR33916
augaaccccaaccagaagcuguucgccagcuccggcguggccaucgcgcucagcguccugaaccugcucaucgggcuguccaacgugggccugaacgugagccuccaccugaaggagaccgggccgaagcaggaggagaaccugaccugcaugacgaccaaggagaccgagcucggcacccccuccuaccugcugcucaacaagagccugugcaacgucgagggguggguggugaucgccaaggacaacgccguccgcuucggcgaguccgagcagaucaucaucacgcgggagcccuacgugagcugcgaccccaacggcugcaagauguacgcccugcaccaggggaccaccauccgcaacaagcacuccaacggcaccauccacgaccggacggccuuccgcgggcucaucagcaccccgcugggcaccccgcccaccguguccaacagcgacuucaucugcgucgggugguccagcacgaccugccacgacggcaucggccggaugaccaucugcauccaggggaacaacgacaacgcgaccgccacgguguacuacaaccgccggcugaccaccaccaucaagacgugggcccgcaacauccuccggacccaggaguccgagugcgugugccacaacgggaccugcgccgucgugaugaccgacggcagcgcguccagccaggcccacacgaaggugauguacuuccacaagggccuggucgugaaggaggaggcccugaagggcuccgccaagcacaucgaggagugcagcugcuacgggcacaaccagaaggugaccugcgucugccgcgacaacuggcagggcgccaaccggcccaucaucgagaucgacaugaacacccucgagcacaccagccgcuacgugugcacggggauccugaccgacaccucccggcccggcgacaagcccaccggggacugcagcaaccccaucacgggcucccccggcgcgccgggggugaagggcuucggguuccugaacggcgacaacaccuggcucgggcgcaccaucagcccccggucccgcagcggcuucgagaugcugaagauccccaacgccggcaucgaccccaacucccggaucgccgagcgccaggagaucgucgacaacagcaacugguccggguacagcggcuccuucaucgacuacuggaacgacaacagcgagugcuacaacccgugcuucuacguggagcugauccgggggcgccccgaggaggccaaguacgugugguggaccuccaacagccucaucgcccugugcggcucccccuuccccgucgggagcggcuccuucccggacggcgcgcagauccaguacuucagcuga

SEQ ID NO: 87756 - RNA, 1356 nt, Artificial Sequence; identical to SEQ ID NO: 87697
  derived and/or modified CDS sequence (opt1) from neuraminidase__InfluenzaA__AGR33917

SEQ ID NO: 87757 - RNA, 1356 nt, Artificial Sequence; identical to SEQ ID NO: 87667
  derived and/or modified CDS sequence (opt1) from neuraminidase__InfluenzaA__AGR33918

SEQ ID NO: 87758 - RNA, 1398 nt, Artificial Sequence; identical to SEQ ID NO: 87744
  derived and/or modified CDS sequence (opt1) from neuraminidase__InfluenzaA__AGR33919

SEQ ID NO: 87759 - RNA, 1413 nt, Artificial Sequence
  derived and/or modified CDS sequence (opt1) from neuraminidase__InfluenzaA__AGR45094
augaaccccaaccagaagaucaucaccaucggcagcaucuccauggccaucgggaucaucagccugauccuccagaucggcaacaucaucuccaucugggccagccacuccauccagaccgggagccagaaccacacgggcaucugcaaccagcgcaucaucaccuacgagaacuccaccugggugaaccagaccuacgucaacaucaacaacacgaacgugguggcggggaaggacaagaccagcgucacccuggccggcaacuccagccugugcccgauccggggcugggccaucuacaccaaggacaacuccauccgcaucgggagcaagggcgacguguucgugauccgggagcccuucaucuccugcagccaccucgagugccgcacguucuuccugacccagggggcccugcucaacgacaagcacuccaacggcaccgucaaggaccggagccccuaccgcgcccugauguccugcccccugggggaggcgccgagccccuacaacucccgguucgagagcguggccuggagcgccuccgccugccacgacggcaugggcuggcucaccaucgggaucagcggccccgacaacggggcgguggccguccugaaguacaacggcaucaucacggagaccaucaaguccuggaagaagcgcauccugcggacccaggagagcgagugcgugugcgugaacggcuccugcuucaccaucaugacggacgggcccagcaacggcccggccuccuaccgcaucuucaagaucgagaaggggaagaucaccaagagcaucgagcucgacgcccccaacuaccacuacgaggagugcuccugcuaccccgacaccggcaccgucaugugcgugugccgggacaacuggcacgggagcaaccgccccuggguguccuucaaccagaaccuggacuaccagaucggcuacaucugcagcggcgucuucggggacaacccgcggcccaaggacggcgagggguccugcaaccccgugacgguggacggcgccgacggggucaagggcuucagcuaccgcuacggcaacgggguguggaucggccggaccaaguccaacagcucccgcaagggguucgagaugaucugggaccccaacggcuggaccgacaccgacagcgacuucuccgugaagcaggacgucgugccgaugacggacuggagcggguacagcggcuccuucgugcagcaccccgagcugaccggccucgacugcaugcggcccugcuucugggucgagcugauccgcgggcggccccgcgagaacaccaccaucuggacgagcggcuccagcaucuccuucugcggggugaacagcgacaccgcgaacugguccuggccggacgacgccgagcugccccucaccaucgacaaguga

SEQ ID NO: 87760 - RNA, 1413 nt, Artificial Sequence; identical to SEQ ID NO: 82954
  derived and/or modified CDS sequence (opt1) from neuraminidase__InfluenzaA__AGR49780

SEQ ID NO: 87761 - RNA, 1410 nt, Artificial Sequence
  derived and/or modified CDS sequence (opt1) from neuraminidase__InfluenzaA__AGR49804
augaaccccaaccagaagaucaucaccaucggcagcgugugcaugaccaucgggauggccaaccugauccuccagaucggcaacaucaucuccaucuggaucagccacuccauccagcuggggaaccagaaccagaucgagacgugcaaccagagcgucaucaccuacgagaacaacaccugggugaaccagaccuacgugaacaucuccaacacgaacuucgccgcgggccagagcgucguguccgugaagcugaccgggaacagcucccucugcccggucagcggcugggccaucuacuccaaggacaacagcgugcgcaucggcuccaagggggacguguucgucauccgggagcccuucaucagcugcagcccccuggagugccgcaccuucuuccugacccagggcgcccuccugaacgacaagcacuccaacgggacgaucaaggaccggucccccuaccgcacccugaugagcugcccgaucggcgaggugcccucccccuacaacagccgguucgagagcguggccugguccgccagcgcgugccacgacgggaucaacuggcucaccaucggcaucuccggccccgacaacggggccgucgccgugcugaaguacaacggcaucaucaccgacacgaucaagagcuggcgcaacaacauccugcggacccaggaguccgagugcgccugcgugaacgggagcugcuucaccgucaugaccgacggcccguccaacggccaggcgagcuacaagaucuuccgcaucgagaaggggaagaucgugaaguccguggagaugaacgcccccaacuaccacuacgaggagugcagcugcuaccccgacuccagcgagaucacgugcgucugccgggacaacuggcacggcuccaaccgccccugggugagcuucaaccagaaccucgaguaccagaucggguacaucugcuccggcaucuucggggacaacccgcggcccaacgacaagaccggcagcugcggccccguguccagcaacggggccaacggcgucaagggguucuccuucaaguacggcaacgggguguggaucggccgcaccaagagcaucagcucccggaacggcuucgagaugaucugggaccccaacggguggaccggcacggacaacaacuucagcaucaagcaggacaucguggggaucaacgagugguccggcuacagcggguccuucguccagcacccggagcugaccggccuggacugcauccgccccugcuucuggguggagcucauccggggccgccccaaggagaacaccaucuggaccagcggguccagcaucuccuucugcggcgucaacagcgacacgguggggugguccuggcccgacggcgccgagcugccguucaccaucgacaaguga

SEQ ID NO: 87762 - RNA, 1413 nt, Artificial Sequence; identical to SEQ ID NO: 82954
  derived and/or modified CDS sequence (opt1) from neuraminidase__InfluenzaA__AGR49820

SEQ ID NO: 87763 - RNA, 1410 nt, Artificial Sequence; identical to SEQ ID NO: 80114
  derived and/or modified CDS sequence (opt1) from neuraminidase__InfluenzaA__AGR49832

SEQ ID NO: 87764 - RNA, 1413 nt, Artificial Sequence; identical to SEQ ID NO: 82954
  derived and/or modified CDS sequence (opt1) from neuraminidase__InfluenzaA__AGR49844

SEQ ID NO: 87765 - RNA, 1413 nt, Artificial Sequence; identical to SEQ ID NO: 82954
  derived and/or modified CDS sequence (opt1) from neuraminidase__InfluenzaA__AGR49856

SEQ ID NO: 87766 - RNA, 1413 nt, Artificial Sequence; identical to SEQ ID NO: 82954
  derived and/or modified CDS sequence (opt1) from neuraminidase__InfluenzaA__AGR49868

SEQ ID NO: 87767 - RNA, 1410 nt, Artificial Sequence; identical to SEQ ID NO: 80752
  derived and/or modified CDS sequence (opt1) from neuraminidase__InfluenzaA__AGR49880

SEQ ID NO: 87768 - RNA, 1410 nt, Artificial Sequence; identical to SEQ ID NO: 82508
  derived and/or modified CDS sequence (opt1) from neuraminidase__InfluenzaA__AGR49891

SEQ ID NO: 87769 - RNA, 1410 nt, Artificial Sequence
  derived and/or modified CDS sequence (opt1) from neuraminidase__InfluenzaA__AGR49903
augaaccccaaccagaagaucaucaccaucggcagcgugucccugaccaucagcacgaucugcuucuucaugcagaucgccauccucaucaccaccgucacccugcacuucaagcaguacgaguucaacuccccgcccaacaaccaggugaugcugugcgagcccacgaucaucgagcgcaacaucaccgagaucguguaccucaccaacaccacgaucgagaaggagaucugccccaagcuggccgaguaccggaacuggagcaagccgcagugcgacaucaccggguucgcgcccuucuccaaggacaacagcauccgccuguccgccggcggggacaucugggucacccgggagcccuacgugagcugcgaccccgacaagugcuaccaguucgcccucggccaggggaccacgcugaacaacgugcacuccaacgacaccguccacgaccgcaccccguaccggacccugcucaugaacgagcugggcgugcccuuccaccugggcacgaagcaggucugcaucgccuggagcuccagcuccugccacgacgggaaggccuggcuccacgugugcaucaccggcgacgacaagaacgcgaccgccagcuucaucuacaacgggcgccugguggacuccaucgugagcugguccaaggagauccugcggacccaggagagcgagugcgucugcaucaacggcacgugcaccguggugaugaccgacggguccgccagcggcaaggccgacaccaagauccucuucaucgaggagggcaagaucguccacacgagcacccuguccgggagcgcgcagcacguggaggagugcuccugcuacccccgcuaccccggcgugcggugcgucugccgcgacaacuggaaggggagcaaccggccgaucguggacaucaacaucaaggaccacuccaucgugagcuccuacgucugcagcggccuggugggcgacacgccccgcaagaacgacuccagcuccagcgggcacugccucgaccccaacaacgaggagggcgggcacggcgugaaggggugggccuucgacgacggcaacgacgucuggaugggccggaccaucuccgagaagucccgccugggguacgagaccuucaaggugaucgagggcuggagcaaccccaagagcaagcugcagaucaaccggcaggucaucguggaccgcgggaaccgguccggcuacagcgggaucuucuccguggagggcaagagcugcaucaaccgcugcuucuacgucgagcucauccggggccgcaaggaggagaccgaggugcuguggaccagcaacuccaucguggucuucugcgggaccagcggcacguacgggaccggcuccuggccggacggggccgacaucaaccugaugcccaucuga

SEQ ID NO: 87770 - RNA, 1410 nt, Artificial Sequence; identical to SEQ ID NO: 80114
  derived and/or modified CDS sequence (opt1) from neuraminidase__InfluenzaA__AGR49915

SEQ ID NO: 87771 - RNA, 1410 nt, Artificial Sequence; identical to SEQ ID NO: 80114
  derived and/or modified CDS sequence (opt1) from neuraminidase__InfluenzaA__AGR49927

SEQ ID NO: 87772 - RNA, 1410 nt, Artificial Sequence
  derived and/or modified CDS sequence (opt1) from neuraminidase__InfluenzaA__AGR49939
augaaccccaacaagaagaucaucaccaucggcagcgugucccugaccaucagcacgaucugcuucuucaugcagaucgccauccucaucaccaccgucacccugcacuucaagcaguacgaguucaacuccccgcccaacaaccaggugaugcugugcgagcccacgaucaucgagcgcaacaucaccgagaucguguaccucaccaacaccacgaucgagaaggagaucugccccaagcuggccgaguaccggaacuggagcaagccgcagugcgacaucaccggguucgcgcccuucuccaaggacaacagcauccgccuguccgccggcggggacaucugggucacccgggagcccuacgugagcugcgaccccgacaagugcuaccaguucgcccucggccaggggaccacgcugaacaacgugcacuccaacgacaccguccgcgaccggaccccguaccgcacccugcucaugaacgagcugggcgugcccuuccaccugggcacgaagcaggucugcaucgccuggagcuccagcuccugccacgacgggaaggccuggcuccacgugugcaucaccggcgacgacaagaacgcgaccgccagcuucaucuacaacgggcggcugguggacuccaucgugagcugguccaaggagauccugcgcacccaggagagcgagugcgucugcaucaacggcacgugcaccguggugaugaccgacggguccgccagcggcaaggccgacaccaagauccucuucaucgaggagggcaagaucguccacacgagcacccuguccgggagcgcgcagcacguggaggagugcuccugcuacccccgguaccccggcgugcgcugcgucugccgggacaacuggaaggggagcaaccgcccgaucguggacaucaacaucaaggaccacuccaucgugagcuccuacgucugcagcggccuggugggcgacacgccccggaagaacgacuccagcuccagcgggcacugccucgaccccaacaacgaggagggcgggcacggcgugaaggggugggccuucgacgacggcaacgacgucuggaugggccgcaccaucuccgagaagucccggcugggguacgagaccuucaaggugaucgagggcuggagcaaccccaagagcaagcugcagaucaaccgccaggucaucguggaccgggggaaccgcuccggcuacagcgggaucuucuccguggagggcaagagcugcaucaaccggugcuucuacgucgagcucauccgcggccggaaggaggagaccgaggugcuguggaccagcaacuccaucguggucuucugcgggaccagcggcacguacgggaccggcuccuggccggacggggccgacaucaaccugaugcccaucuga

SEQ ID NO: 87773 - RNA, 1410 nt, Artificial Sequence; identical to SEQ ID NO: 80709
  derived and/or modified CDS sequence (opt1) from neuraminidase__InfluenzaA__AGR49951

SEQ ID NO: 87774 - RNA, 1410 nt, Artificial Sequence
  derived and/or modified CDS sequence (opt1) from neuraminidase__InfluenzaA__AGR49963
augaaccccaacaagaagaucaucaccaucggcagcgugucccugaccaucagcacgaucugcuucuucaugcagaucgccauccucaucaccaccgucacccugcacuucaagcaguacgaguucaacuccccgcccaacaaccaggugaugcugugcgagcccacgaucaucgagcgcaacaucaccgagaucguguaccucaccaacaccacgaucgagaaggagaucugccccaagcuggccgaguaccggaacuggagcaagccgcagugcgacaucaccggguucgcgcccuucuccaaggacaacagcauccgccuguccgccggcggggacaucugggucacccgggagcccuacgugagcugcgaccccgacaagugcuaccaguucgcccucggccaggggaccacgcugaacaacgugcacuccaacgacaccguccgcgaccggaccccguaccgcacccugcucaugaacgagcugggcgugcccuuccaccugggcacgaagcaggucugcaucgccuggagcuccagcuccugccacgacgggaaggccuggcuccacgugugcaucaccggcgacgacaagaacgcgaccgccagcuucaucuacaacgggcggcugguggacuccaucgugagcugguccaaggagauccugcgcacccaggagagcgagugcgucugcaucaacggcacgugcaccguggugaugaccgacggguccgccagcggcaaggccgacaccaagauccucuucaucgaggagggcaagaucguccacacgagcacccuguccgggagcgcgcagcacguggaggagugcuccugcuacccccgguaccccggcgugcgcugcgucugccgggacaacuggaaggggagcaaccgcccgaucguggacaucaacaucaaggaccacuccaucgugagcuccuacgucugcagcggccuggugggcgacacgccccggaagaacgacuccagcuccagcgggcacugccucgaccccaacaacgaggagggcgggcacggcgugaaggggugggccuucgacgacggcaacgacgucuggaugggccgcaccaucuccaagaagucccggcugggguacgagaccuucaaggugaucgagggcuggagcaaccccaagagcaagcugcagaucaaccgccaggucaucguggaccgggggaaccgcuccggcuacagcgggaucuucuccguggagggcaagagcugcaucaaccggugcuucuacgucgagcucauccgcggccggaaggaggagaccgaggugcuguggaccagcaacuccaucguggucuucugcgggaccagcggcacguacgggaccggcuccuggccggacggggccgacaucaaccugaugcccaucuga

SEQ ID NO: 87775 - RNA, 1410 nt, Artificial Sequence; identical to SEQ ID NO: 80752
  derived and/or modified CDS sequence (opt1) from neuraminidase__InfluenzaA__AGR49975

SEQ ID NO: 87776 - RNA, 1413 nt, Artificial Sequence; identical to SEQ ID NO: 82954
  derived and/or modified CDS sequence (opt1) from neuraminidase__InfluenzaA__AGR49986

SEQ ID NO: 87777 - RNA, 1413 nt, Artificial Sequence; identical to SEQ ID NO: 82954
  derived and/or modified CDS sequence (opt1) from neuraminidase__InfluenzaA__AGR49998

SEQ ID NO: 87778 - RNA, 1410 nt, Artificial Sequence; identical to SEQ ID NO: 80752
  derived and/or modified CDS sequence (opt1) from neuraminidase__InfluenzaA__AGR50010

SEQ ID NO: 87779 - RNA, 1410 nt, Artificial Sequence; identical to SEQ ID NO: 80752
  derived and/or modified CDS sequence (opt1) from neuraminidase__InfluenzaA__AGR50021

SEQ ID NO: 87780 - RNA, 1410 nt, Artificial Sequence; identical to SEQ ID NO: 80762
  derived and/or modified CDS sequence (opt1) from neuraminidase__InfluenzaA__AGR50032

SEQ ID NO: 87781 - RNA, 1410 nt, Artificial Sequence
  derived and/or modified CDS sequence (opt1) from neuraminidase__InfluenzaA__AGR50043
augaaccccaaccagaagaucaucaccaucggcagcgugucccugaccaucagcacgaucugcuucuucaugcagaucgccauccucaucaccaccgucacccugcacuucaagcaguacgaguucaacuccccgcccaacaaccaggugaugcugugcgagcccacgaucaucgagcgcaacaucaccgagaucguguaccucaccaacaccacgaucgagaaggagaucugccccaagcuggccgaguaccggaacuggagcaagccgcagugcgacaucaccggguucgcgcccuucuccaaggacaacagcauccgccuguccgccggcggggacaucugggucacccgggagcccuacgugagcugcgaccccgacaagugcuaccaguucgcccucggccaggggaccacgcugaacaacgugcacuccaacaacaccguccgcgaccggaccccguaccgcacccugcucaugaacgagcugggcgugcccuuccaccugggcacgaagcaggucugcaucgccuggagcuccagcuccugccacgacgggaaggccuggcuccacgugugcaucaccggcgacgacaagaacgcgaccgccagcuucaucuacaacgggcggcugguggacuccguggucagcugguccaaggacauccugcgcacccaggagagcgagugcgugugcaucaacggcacgugcaccguggucaugaccgacggguccgccagcggcaaggccgacaccaagauccucuucaucgaggagggcaagaucgugcacacgagcacccuguccgggagcgcgcagcacguggaggagugcuccugcuacccccgguaccccggcguccgcugcgugugccgggacaacuggaaggggagcaaccgcccgaucguggacaucaacaucaaggaccacuccaucgucagcuccuacgugugcagcggccuggugggcgacacgccccggaagaacgacuccagcuccagcucccacugccucgaccccaacaacgaggagggcgggcacggggucaagggcugggccuucgacgacgggaacgacguguggaugggccgcaccaucagcgagaagucccggcugggcuacgagaccuucaaggucaucgagggguggagcaaccccaaguccaagcugcagaucaaccgccaggugaucguggaccggggcaaccgcagcggguacuccggcaucuucagcgucgagggcaagagcugcaucaaccggugcuucuacguggagcucauccgcgggcggaaggaggagaccgaggugcuguggaccuccaacagcaucgucguguucugcggcaccuccgggacguacggcaccgggagcuggccggacggcgccgaccugaaccucaugcccaucuga

SEQ ID NO: 87782 - RNA, 1410 nt, Artificial Sequence; identical to SEQ ID NO: 80752
  derived and/or modified CDS sequence (opt1) from neuraminidase__InfluenzaA__AGR50055

SEQ ID NO: 87783 - RNA, 1410 nt, Artificial Sequence
  derived and/or modified CDS sequence (opt1) from neuraminidase__InfluenzaA__AGR50066
augaaccccaaccagaagaucaucaccaucggcagcgugugcaugaccaucgggauggccaaccugauccuccagaucggcaacaucaucuccaucuggaucagccacuccauccagcuggggaaccagaaccagaucgagacgugcaaccagagcgucaucaccuacgagaacaacaccugggugaaccagaccuacgugaacaucuccaacacgaacuucgccgcgggccagagcgucguguccgugaagcuggccgggaacagcucccucugcccggucagcggcugggccaucuacuccaaggacaacagcgugcgcaucggcuccaagggggacguguucgucauccgggagcccuucaucagcugcagcccccuggagugccgcaccuucuuccugacccagggcgcccuccugaacgacaagcacuccaacgggaccaucaaggaccggucccccuaccgcacgcugaugagcugcccgaucggcgaggugcccucccccuacaacagccgguucgagagcguggccugguccgcgagcgccugccacgacgggaucaacuggcucaccaucggcaucuccggccccgacaacggggccgucgccgugcugaaguacaacggcaucaucaccgacaccaucaagagcuggcgcaacaacauccugcggacgcaggaguccgagugcgcgugcgugaacgggagcugcuucaccgucaugaccgacggcccguccaacggccaggccagcuacaagaucuucaagaucgagaaggggaagaucgugaaguccguggagaugaacgcccccaacuaccacuacgaggagugcagcugcuaccccgacuccagcgagaucacgugcgucugccgcgacaacuggcacggcuccaaccggcccugggugagcuucaaccagaaccucgaguaccagaucggguacaucugcuccggcaucuucggggacaacccgcgccccaacgacaagaccggcagcugcggccccguguccagcaacggggccaacggcgucaagggguucuccuucaaguacggcaacgggguguggaucggccggaccaagagcaucagcucccgcaacggcuucgagaugaucugggaccccaacggguggaccggcaccgacaacaacuucagcaucaagcaggacaucguggggaucaacgagugguccggcuacagcggguccuucguccagcacccggagcugacgggccuggacugcauccggcccugcuucuggguggagcucauccgcggccggcccaaggagaacaccaucuggaccagcggguccagcaucuccuucugcggcgucaacagcgacaccguggggugguccuggcccgacggcgccgagcugccguucacgaucgacaaguga

SEQ ID NO: 87784 - RNA, 1410 nt, Artificial Sequence; identical to SEQ ID NO: 80752
  derived and/or modified CDS sequence (opt1) from neuraminidase__InfluenzaA__AGR50077

SEQ ID NO: 87785 - RNA, 1410 nt, Artificial Sequence; identical to SEQ ID NO: 80752
  derived and/or modified CDS sequence (opt1) from neuraminidase__InfluenzaA__AGR50088

SEQ ID NO: 87786 - RNA, 1410 nt, Artificial Sequence; identical to SEQ ID NO: 80752
  derived and/or modified CDS sequence (opt1) from neuraminidase__InfluenzaA__AGR50099

SEQ ID NO: 87787 - RNA, 1410 nt, Artificial Sequence; identical to SEQ ID NO: 80752
  derived and/or modified CDS sequence (opt1) from neuraminidase__InfluenzaA__AGR50110

SEQ ID NO: 87788 - RNA, 1410 nt, Artificial Sequence
  derived and/or modified CDS sequence (opt1) from neuraminidase__InfluenzaA__AGR50121
augaaccccaaccagaagaucaucaccaucggcagcgugugcaugaccaucgggauggccaaccugauccuccagaucggcaacaucaucuccaucuggaucagccacuccauccagcuggggaaccagaaccagaucgagacgugcaaccagagcgucaucaccuacgagaacaacaccugggugaaccagaccuacgugaacaucuccaacacgaacuucgccgcgggccagagcgucguguccgugaagcuggccgggaacagcucccucugcccggucagcggcugggccaucuacuccaaggacaacagcgugcgcaucggcuccaagggggacguguucgucauccgggagcccuucaucagcugcagcccccuggagugccgcaccuucuuccugacccagggcgcccuccugaacgacaagcacuccaacgggaccaucaaggaccggucccccuaccgcacgcugaugagcugcccgaucggcgaggugcccucccccuacaacagccgguucgagagcguggccugguccgcgagcgccugccacgacgggaucaacuggcucaccaucggcaucuccggccccgacaacggggccgucgccgugcugaaguacaacggcaucaucaccgacaccaucaagagcuggcgcaacaacauccugcggacgcaggaguccgagugcgcgugcgugaacgggagcugcuucaccgucaugaccgacggcccguccaacggccaggccagcuacaagaucuuccgcaucgagaaggggaagaucgugaaguccguggagaugaacgcccccaacuaccacuacgaggagugcagcugcuaccccgacuccagcgagaucacgugcgucugccgggacaacuggcacggcuccaaccgccccugggugagcuucaaccagaaccucgaguaccagaucggguacaucugcuccggcaucuucggggacaacccgcggcccaacgacaagaccggcagcugcggccccgugcccuccaacggggccaacggcgucaagggguucagcuucaaguacggcaacgggguguggaucggccgcaccaaguccaucagcagccggaacggcuucgagaugaucugggacccgaacggguggaccggcaccgacaacaacuucuccaucaagcaggacaucguggggaucaacgaguggagcggcuacuccgggagcuucguccagcaccccgagcugacgggccuggacugcauccgccccugcuucuggguggagcucauccggggccgccccaaggagaacaccaucuggaccuccgggagcuccaucagcuucugcggcgucaacuccgacaccgugggguggagcuggccggacggcgccgagcugcccuucacgaucgacaaguga

SEQ ID NO: 87789 - RNA, 1410 nt, Artificial Sequence
  derived and/or modified CDS sequence (opt1) from neuraminidase__InfluenzaA__AGR50132
augaaccccaaccagaagaucaucaccaucggcagcgugugcaugaccaucgggauggccaaccugauccuccagaucggcaacaucaucuccaucuggaucagccacuccauccagcuggggaaccagaaccagaucgagacgugcaaccagagcgucaucaccuacgagaacaacaccugggugaaccagaccuacgugaacaucuccaacacgaacuucgccgcgggccagagcgucguguccgugaagcuggccgggaacagcucccucugcccggucagcggcugggccaucuacuccaaggacaacagcgugcgcaucggcuccaagggggacguguucgucauccgggagcccuucaucagcugcagcccccuggagugccgcaccuucuuccugacccagggcgcccuccugaacgacaagcacuccaacgggaccaucaaggaccggucccccuaccgcacgcugaugagcugcccgaucggcgaggugcccucccccuacaacagccgguucgagagcguggccugguccgcgagcgccugccacgacgggaucaacuggcucaccaucggcaucuccggccccgacaacggggccgucgccgugcugaaguacaacggcaucaucaccgacaccaucaagagcuggcgcaacaacauccugcggacgcaggaguccgagugcgcgugcgccaacgggagcugcuucaccgugaugaccgacggcccguccaacggccaggccagcuacaagaucuuccgcaucgagaaggggaagaucgucaaguccguggagaugaacgcccccaacuaccacuacgaggagugcagcugcuaccccgacuccagcgagaucacgugcgugugccgggacaacuggcacggcuccaaccgccccugggucagcuucaaccagaaccucgaguaccagaucggguacaucugcuccggcaucuucggggacaacccgcggcccaacgacaagaccggcagcugcggccccguguccagcaacggggccaacggcgugaagggguucuccuucaaguacggcaacggggucuggaucggccgcaccaagagcaucagcucccggaacggcuucgagaugaucugggaccccaacggguggaccggcaccgacaacaacuucagcaucaagcaggacaucguggggaucaacgagugguccggcuacagcggguccuucgugcagcacccggagcugacgggccuggacugcauccgccccugcuucugggucgagcucauccggggccgccccaaggagaacaccaucuggaccagcggguccagcaucuccuucugcggcgugaacagcgacaccgucgggugguccuggcccgacggcgcggagcugccguucacgaucgacaaguga

SEQ ID NO: 87790 - RNA, 1410 nt, Artificial Sequence; identical to SEQ ID NO: 80752
  derived and/or modified CDS sequence (opt1) from neuraminidase__InfluenzaA__AGR50143

SEQ ID NO: 87791 - RNA, 1410 nt, Artificial Sequence; identical to SEQ ID NO: 80752
  derived and/or modified CDS sequence (opt1) from neuraminidase__InfluenzaA__AGR50154

SEQ ID NO: 87792 - RNA, 1413 nt, Artificial Sequence; identical to SEQ ID NO: 82954
  derived and/or modified CDS sequence (opt1) from neuraminidase__InfluenzaA__AGR50165

SEQ ID NO: 87793 - RNA, 1410 nt, Artificial Sequence; identical to SEQ ID NO: 80752
  derived and/or modified CDS sequence (opt1) from neuraminidase__InfluenzaA__AGR50177

SEQ ID NO: 87794 - RNA, 1410 nt, Artificial Sequence; identical to SEQ ID NO: 80752
  derived and/or modified CDS sequence (opt1) from neuraminidase__InfluenzaA__AGR50188

SEQ ID NO: 87795 - RNA, 1410 nt, Artificial Sequence; identical to SEQ ID NO: 80752
  derived and/or modified CDS sequence (opt1) from neuraminidase__InfluenzaA__AGR50199

SEQ ID NO: 87796 - RNA, 1410 nt, Artificial Sequence; identical to SEQ ID NO: 80752
  derived and/or modified CDS sequence (opt1) from neuraminidase__InfluenzaA__AGR50210

SEQ ID NO: 87797 - RNA, 1410 nt, Artificial Sequence; identical to SEQ ID NO: 80752
  derived and/or modified CDS sequence (opt1) from neuraminidase__InfluenzaA__AGR50221

SEQ ID NO: 87798 - RNA, 1410 nt, Artificial Sequence
  derived and/or modified CDS sequence (opt1) from neuraminidase__InfluenzaA__AGR50232
augaaccccaaccagaagaucaucaccaucggcagcgugugcaugaccaucgggauggccaaccugauccuccagaucggcaacaucaucuccaucuggaucagccacuccauccagcuggggaaccagaaccagaucgagacgugcaaccagagcgucaucaccuacgagaacaacaccugggugaaccagaccuacgugaacaucuccaacacgaacuucgccgcgggccagagcgucguguccgugaagcuggccgggaacagcucccucugcccggucagcggcugggccaucuacuccaaggacaacagcgugcgcaucggcuccaagggggacguguucgucauccgggagcccuucaucagcugcagcccccuggagugccgcaccuucuuccugacccagggcgcccuccugaacgacaagcacagcaacgggaccaucaaggaccggucccccuaccgcacgcugaugagcugcccgaucggcgaggugcccucccccuacaacagccgguucgagagcguggccugguccgcgagcgccugccacgacgggaucaacuggcucaccaucggcaucuccggccccgacaacggggccgucgccgugcugaaguacaacggcaucaucaccgacaccaucaagagcuggcgcaacaacauccugcggacgcaggaguccgagugcgcgugcgugaacgggagcugcuucaccgucaugaccgacggcccgaacaacggccaggccuccuacaagaucuuccgcaucgagaaggggaagaucgugaaguccguggagaugaacgcccccaacuaccacuacgaggagugcuccugcuaccccgacagcuccgagaucacgugcgucugccgggacaacuggcacggcagcaaccgccccuggguguccuucaaccagaaccucgaguaccagaucggguacaucugcagcggcaucuucggggacaacccgcggcccaacgacaagaccggcuccugcggccccgugagcuccaacggggccaacggcgucaagggguucagcuucaaguacggcaacgggguguggaucggccgcaccaaguccaucagcagccggaacggcuucgagaugaucugggaccccaacggguggaccggcaccgacaacaacuucuccaucaagcaggacaucguggggaucaacgaguggagcggcuacuccgggagcuucguccagcacccggagcugacgggccuggacugcauccgccccugcuucuggguggagcucauccggggccgccccaaggagaacaccaucuggaccuccgggagcuccaucagcuucugcggcgucaacuccgacaccgugggguggagcuggcccgacggcgccgagcugccguucacgaucgacaaguga

SEQ ID NO: 87799 - RNA, 1410 nt, Artificial Sequence; identical to SEQ ID NO: 80752
  derived and/or modified CDS sequence (opt1) from neuraminidase__InfluenzaA__AGR50243

SEQ ID NO: 87800 - RNA, 1410 nt, Artificial Sequence; identical to SEQ ID NO: 80752
  derived and/or modified CDS sequence (opt1) from neuraminidase__InfluenzaA__AGR50254

SEQ ID NO: 87801 - RNA, 1410 nt, Artificial Sequence; identical to SEQ ID NO: 80752
  derived and/or modified CDS sequence (opt1) from neuraminidase__InfluenzaA__AGR50265

SEQ ID NO: 87802 - RNA, 1410 nt, Artificial Sequence
  derived and/or modified CDS sequence (opt1) from neuraminidase__InfluenzaA__AGR50276
augaaccccaaccagaagaucaucaccaucggcagcgugugcaugaccaucgggauggccaaccugauccuccagaucggcaacaucaucuccaucuggaucagccacuccauccagcuggggaaccagaaccagaucgagacgugcaaccagagcgucaucaccuacgagaacaacaccugggugaaccagaccuacgugaacaucuccaacacgaacuucgccgcggagcagagcgucguguccgugaagcuggccggcaacagcucccucugcccggucagcgggugggccaucuacuccaaggacaacagcgugcgcaucggcuccaagggcgacguguucgucauccgggagcccuucaucagcugcagcccccuggagugccgcaccuucuuccugacccagggggcccuccugaacgacaagcacuccaacggcaccaucaaggaccggucccccuaccgcacgcugaugagcugcccgaucggggaggugcccucccccuacaacagccgguucgagagcguggccugguccgcgagcgccugccacgacggcaucaacuggcucaccaucgggaucuccggccccgacaacggcgccgucgccgugcugaaguacaacgggaucaucaccgacaccaucaagagcuggcgcaacaacauccugcggacgcaggaguccgagugcgcgugcgugaacggcagcugcuucaccgucaugaccgacgggccguccaacggccaggccagcuacaagaucuuccgcaucgagaagggcaagaucgugaaguccguggagaugaacgcccccaacuaccacuacgaggagugcagcugcuaccccgacuccagcgagaucacgugcgucugccgggacaacuggcacggguccaaccgccccugggugagcuucaaccagaaccucgaguaccagaucggcuacaucugcuccgggaucuucggcgacaacccgcggcccaacgacaagaccgggagcugcggccccguguccagcaacggcgccaacggggucaagggcuucuccuucaaguacgggaacggcguguggaucgggcgcaccaagagcaucagcucccggaacggcuucgagaugaucugggaccccaacggcuggaccgggaccgacaacaacuucagcaucaagcaggacaucgugggcaucaacgagugguccggguacagcggcuccuucguccagcacccggagcugacggggcuggacugcauccgccccugcuucuggguggagcucauccggggccgccccaaggagaacaccaucuggaccagcggcuccagcaucuccuucugcggggucaacagcgacaccgugggcugguccuggcccgacggggccgagcugccguucacgaucgacaaguga

SEQ ID NO: 87803 - RNA, 1410 nt, Artificial Sequence; identical to SEQ ID NO: 80752
  derived and/or modified CDS sequence (opt1) from neuraminidase__InfluenzaA__AGR50287

SEQ ID NO: 87804 - RNA, 1410 nt, Artificial Sequence
  derived and/or modified CDS sequence (opt1) from neuraminidase__InfluenzaA__AGR50298
augaaccccaaccagaagaucaucaccaucggcagcgugugcaugaccaucgggauggccaaccugauccuccagaucggcaacacgaucuccaucuggaucagccacuccauccagccggggaaccagaaccagaucgagaccugcaaccagagcgucaucaccuacgagaacaacaccugggugaaccagacguacgugaacaucuccaacaccaacuucgccgcgggccagagcgucguguccgugaagcuggccgggaacagcucccugugccccgucagcggcugggccaucuacuccaaggacaacagcauccgcaucggcuccaagggggacguguucgugauccgggagcccuucaucagcugcagcccccucgagugccgcaccuucuuccugacccagggcgcccugcucaacgacaagcacuccaacgggacgaucaaggaccgguccccguaccgcacccugaugagcugccccaucggcgagguccccucccccuacaacagccgguucgagagcguggccugguccgcgagcgccugccacgacgggaucaacuggcugaccaucggcaucuccggcccggacaacggggccguggccguccucaaguacaacggcaucaucaccgacacgaucaagagcuggcgcaacaacauccugcggacccaggaguccgagugcgcgugcgugaacgggagcugcuucaccgugaugaccgacggccccuccgacggccaggccagcuacaagaucuuccgcaucgagaaggggaagaucgucaaguccguggagaugaacgcccccaacuaccacuacgaggagugcagcugcuaccccgacuccagcgagaucacgugcgugugccgggacaacuggcacggcuccaaccgcccgugggucagcuucaaccagaaccuggaguaccagaucggguacaucugcuccggcaucuucggggacaacccccggcccaacgacaagaccggcagcugcggccccguguccagcaacggggccaacggcgugaagggguucuccuucaaguacggcaacggggucuggaucggccgcaccaagagcaucagcucccggaacggcuucgagaugaucugggacccgaacggguggaccggcacggacaacaacuucagcaucaagcaggacaucguggggaucaacgagugguccggcuacagcggguccuucgugcagcaccccgagcucaccggccuggacugcauccgccccugcuucugggucgagcugauccggggccgccccaaggagaacaccaucuggaccagcggguccagcaucuccuucugcggcgugaacagcgacacggucgggugguccuggccggacggcgccgagcuccccuucaccaucgacaaguga

SEQ ID NO: 87805 - RNA, 1410 nt, Artificial Sequence; identical to SEQ ID NO: 80752
  derived and/or modified CDS sequence (opt1) from neuraminidase__InfluenzaA__AGR50309

SEQ ID NO: 87806 - RNA, 1410 nt, Artificial Sequence; identical to SEQ ID NO: 80752
  derived and/or modified CDS sequence (opt1) from neuraminidase__InfluenzaA__AGR50320

SEQ ID NO: 87807 - RNA, 1410 nt, Artificial Sequence; identical to SEQ ID NO: 80752
  derived and/or modified CDS sequence (opt1) from neuraminidase__InfluenzaA__AGR50331

SEQ ID NO: 87808 - RNA, 1410 nt, Artificial Sequence
  derived and/or modified CDS sequence (opt1) from neuraminidase__InfluenzaA__AGR50342
augaaccccaaccagaagaucaucaccaucggcagcgugugcaugaccaucgggauggccaaccugauccuccagaucggcaacaucaucuccaucuggaucagccacuccauccagcuggggaaccagaaccagaucgagacgugcaaccagagcgucaucaccuacgagaacaacaccugggugaaccagaccuacgugaacaucuccaacacgaacuucgccgcgggccagagcgucaucuccgugaagcuggccgggaacagcucccucugcccggugagcggcugggccaucuacuccaaggacaacagcguccgcaucggcuccaagggggacguguucgugauccgggagcccuucaucagcugcagcccccuggagugccgcaccuucuuccugacccagggcgcccuccugaacgacaagcacuccaacgggaccaucaaggaccggucccccuaccgcacgcugaugagcugcccgaucggcgagguccccucccccuacaacagccgguucgagagcguggccugguccgcgagcgccugccacgacgggaucaacuggcucaccaucggcaucuccggccccgacaacggggccguggccguccugaaguacaacggcaucaucaccgacaccaucaagagcuggcgcaacaacauccugcggacgcaggaguccgagugcgcgugcgugaacgggagcugcuucaccgugaugaccgacggcccguccaacggccaggccagcuacaagaucuuccgcaucgagaaggggaagaucgucaaguccguggagaugaacgcccccaacuaccacuacgaggagugcagcugcuaccccgacuccagcgagaucacgugcgugugccgggacaacuggcacggcuccaaccgccccugggucagcuucaaccagaaccucgaguaccagaucggguacaucugcuccggcaucuucggggacaacccgcggcccaacgacaagaccggcagcugcggccccguguccagcaacggggccaacggcgugaagggguucuccuucaaguacggcaacggggucuggaucggccgcaccaagagcaucagcucccggaacggcuucgagaugaucugggaccccaacggguggaccggcaccgacaacaacuucagcaucaagcaggacaucguggggaucaacgagugguccggcuacagcggguccuucgugcagcacccggagcugacgggccuggacugcauccgccccugcuucugggucgagcucauccggggccgccccaaggagaacaccaucuggaccagcggguccagcaucuccuucugcggcgugaacagcgacaccgucgggugguccuggcccgacggcgccgagcugccguucacgaucgacaaguga

SEQ ID NO: 87809 - RNA, 1410 nt, Artificial Sequence; identical to SEQ ID NO: 80752
  derived and/or modified CDS sequence (opt1) from neuraminidase__InfluenzaA__AGR50353

SEQ ID NO: 87810 - RNA, 1413 nt, Artificial Sequence; identical to SEQ ID NO: 82954
  derived and/or modified CDS sequence (opt1) from neuraminidase__InfluenzaA__AGR50364

SEQ ID NO: 87811 - RNA, 1410 nt, Artificial Sequence
  derived and/or modified CDS sequence (opt1) from neuraminidase__InfluenzaA__AGR55170
augaaccccaaccagaagaucaucaccaucggcagcgugucccugaccaucagcacgaucugcuucuucaugcagaucgccauccucaucaccaccgucacccugcacuucaagcaguacgaguucaacuccccgcccaacaaccaggugaugcugugcgagcccacgaucaucgagcgcaacaucaccgagaucguguaccucaccaacaccacgaucgagaaggagaucugccccaagcuggccgaguaccggaacuggagcaagccgcagugcgacaucaccggguucgcgcccuucuccaaggacaacagcauccgccuguccgccggcggggacaucugggucacccgggagcccuacgugagcugcgaccccgacaagugcuaccaguucgcccucggccaggggaccacgcugaacaacgugcacuccaacgacaccguccgcgaccggaccccguaccgcacccugcucaugaacgagcugggcgugcccuuccaccugggcacgaagcaggucugcaucgccuggagcuccagcuccugccacgacgggaaggccuggcuccacgugugcaucaccggcgacgacaagaacgcgaccgccagcuucaucuacaacgggcggcugguggacuccaucgugagcugguccaaggagauccugcgcacccaggagagcgagugcgucugcaucaacggcacgugcaccguggugaugaccgacggguccgccagcggcaaggccgacaccaagauccucuucaucgaggagggcaagaucguccacacgagcacccuguccgggagcgcgcagcacguggaggagugcuccugcuacccccgguaccccggcgugcgcugcgucugccgggacaacuggaaggggagcaaccgcccgaucguggacaucaacaucaaggaccacuccaucgugagcuccuacgucugcagcggccuggugggcgacacgccccggaagaacgacuccagcuccagcucccacugccucgaccccaacaacgaggagggcgggcacggggugaagggcugggccuucgacgacgggaacgacgucuggaugggccgcaccaucagcgagaagucccggcugggcuacgagaccuucaaggugaucgagggguggagcaaccccaacuccaagcugcagaucaaccgccagaucaucgucgaccggggcaaccgcagcggguacuccggcaucuucagcguggagggcaagagcugcaucaaccggugcuucuacguggagcucauccgcgggcggaaggaggagaccgagguccuguggaccuccaacagcaucgugguguucugcggcaccuccgggacguacggcaccgggagcuggccggacggcgccgacaucaaccugaugcccaucuga

SEQ ID NO: 87812 - RNA, 1410 nt, Artificial Sequence; identical to SEQ ID NO: 78169
  derived and/or modified CDS sequence (opt1) from neuraminidase__InfluenzaA__AGR55180

SEQ ID NO: 87813 - RNA, 1410 nt, Artificial Sequence; identical to SEQ ID NO: 78169
  derived and/or modified CDS sequence (opt1) from neuraminidase__InfluenzaA__AGR55181

SEQ ID NO: 87814 - RNA, 1410 nt, Artificial Sequence; identical to SEQ ID NO: 78169
  derived and/or modified CDS sequence (opt1) from neuraminidase__InfluenzaA__AGR55183

SEQ ID NO: 87815 - RNA, 1410 nt, Artificial Sequence
  derived and/or modified CDS sequence (opt1) from neuraminidase__InfluenzaA__AGR55184
augaaccccaaccagaagaucaucaccaucggcagcgugucccugaccaucgccacgaucugcuuccucaugcagaucgccauccuggucaccaccgugacccugcacuucaagcagcacgagugcaacagcccgcccaagaaccaggugaugcucugcgagcccacgaucaucgagcgcaacaucaccgagaucgucuaccugaccaacaccacgaucgagaaggagaucugccccaagcuggcggaguaccggaacugguccaagccgcagugcaacaucaccggguucgcccccuucagcaaggacaacuccauccgccucagcgccggcggggacaucugggugacccgggagcccuacguguccugcgaccccgacaagugcuaccaguucgcccugggccaggggaccacgcugaacaacggccacagcaacgacaccguccacgaccgcaccccguaccggacccuccugaugaacgagcugggcgugcccuuccaccucgggacgcgccaggugugcaucgccugguccagcuccagcugccacgacggcaaggcguggcugcacgucugcgugaccggggacgacaagaacgccaccgccuccuucaucuacaacggccggcugguggacagcaucggguccuggagcaagaagauccuccgcacccaggaguccgagugcgucugcaucaacggcacgugcaccguggugaugaccgacggcagcgccuccgggaaggcggacaccaagauccuguucaucgaggagggcaagaucguccacaucagcacgcugagcggguccgcccagcacguggaggagugcagcugcuacccccgguaccccggcgugcgcugcgucugccgggacaacuggaagggcuccaaccgcccgaucguggacaucaacgugaaggacuacagcaucgucuccagcuacgugugcuccgggcucgugggcgacacgccccggaagaacgacagcuucuccagcucccacugccuggaccccaacaacgaggagggcgggcacggggucaagggcugggccuucgacgacggcaacgacguguggauggggcgcaccaucagcgagaagcugcgguccggcuacgagaccuucaaggucaucgagggguggagcaagcccaacuccaagcuccagaucaaccgccaggugaucguggagcggggcaaccgcagcggguacuccggcaucuucagcgucgagggcaaguccugcaucaaccggugcuucuacguggagcugauccgcgggcggaaggaggagaccgaggugugguggaccagcaacagcaucgucguguucugcggcaccuccgggaccuacggcacggggagcuggccggacggcgccgacaucaaccugaugcccaucuga

SEQ ID NO: 87816 - RNA, 1410 nt, Artificial Sequence
  derived and/or modified CDS sequence (opt1) from neuraminidase__InfluenzaA__AGR55185
augaaccccaaccagaagaucaucaccaucggcagcgugucccugaccaucgccacgaucugcuuccucaugcagaucgccauccuggucaccaccgugacccugcacuucaagcagcacgagugcaacagcccgcccaagaaccaggugaugcucugcgagcccacgaucaucgagcgcaacaucaccgagaucgucuaccugaccaacaccacgaucgagaaggagaucugccccaagcuggcggaguaccggaacugguccaagccgcagugcaacaucaccggguucgcccccuucagcaaggacaacuccauccgccucagcgccggcggggacaucugggugacccgggagcccuacguguccugcgaccccgacaagugcuaccaguucgcccugggccaggggaccacgcugaacaacggccacagcaacgacaccguccacgaccgcaccccguaccggacccuccugaugaacgagcugggcgugcccuuccaccucgggacgcgccaggugugcaucgccugguccagcuccagcugccacgacggcaaggcguggcugcacgucugcgugaccggggacgacaagaacgccaccgccuccuucaucuacaacggccggcugguggacagcaucggguccuggagcaagaagauccuccgcacccaggaguccgagugcgucugcaucaacggcacgugcaccguggugaugaccgacggcagcgccuccgggaaggcggacaccaagauccuguucaucgaggagggcaagaucguccacaucagcacgcugagcggguccgcccagcacguggaggagugcagcugcuacccccgguaccccggcgugcgcugcgucugccgggacaacuggaagggcuccaaccgcccgaucguggacaucaacgugaaggacuacagcaucgucuccagcuacgugugcuccgggcucgugggcgacacgccccggaagaacgacagcuucuccagcucccacugccuggaccccaacaacgaggagggcgggcacggggucaagggcugggccuucgacgacggcaacgacguguggauggggcgcaccaucagcgagaagcugcgguccggcuacgagaccuucaaggucaucgagggguggagcaagcccaacuccaagcuccagaucaaccgccaggugaucguggagcggggcaaccgcagcggguacuccggcaucuucagcgucgagggcaaguccugcaucaaccggugcuucuacguggagcugauccgcgggcggaaggaggagaccgaggugugguggaccagcaacagcaucgucguguucugcggcaccucccgcaccuacgggacgggcagcuggccggacggggccgacaucaaccugaugcccaucuga

SEQ ID NO: 87817 - RNA, 1410 nt, Artificial Sequence
  derived and/or modified CDS sequence (opt1) from neuraminidase__InfluenzaA__AGR55186
augaaccccaaccagaagaucaucaccaucggcagcgugucccugaccaucagcacgaucugcuucuucaugcagaucgccauccucaucaccaccgucacccugcacuucaagcaguacgaguucaacuccccgcccaacaaccaggugaugcugugcgagcccacgaucaucgagcgcaacaucaccgagaucguguaccucaccaacaccacgaucgagaaggagaucugccccaagcuggccgaguaccggaacuggagcaagccgcagugcgacaucaccggguucgcgcccuucuccaaggacaacagcauccgccuguccgccggcggggacaucugggucacccgggagcccuacgugagcugcgaccccgacaagugcuaccaguucgcccucggccaggggaccacgcugaacaacgugcacuccaacgacaccguccacgaccgcaccccguaccggacccugcucaugaacgagcugggcgugcccuuccaccugggcacgaagcaggucugcaucgccuggagcuccagcuccugccacgacgggaaggccuggcuccacgugugcgugaccggcgacgacaagaacgcgaccgccagcuucaucuacaacgggcgccugguggacuccaucgucagcugguccaagaagauccugcggacccaggagagcgagugcgugugcaucaacggcacgugcaccguggucaugaccgacggguccgccagcggcaaggccgacaccaagauccucuucaucgaggagggcaagaucgugcacacgagcacccuguccgggagcgcgcagcacguggaggagugcuccugcuacccccgcuaccccggcguccggugcgugugccgcgacaacuggaaggggagcaaccggccgaucguggacaucaacaucaaggacuacuccaucgucagcuccuacgugugcagcggccuggugggcgacacgccccgcaagaacgacuccagcuccagcucccacugccucgagcccaacaacgaggagggcgggcacggggucaagggcugggccuucgacgacgggaacgacguguggaugggccggaccaucagcgagaagcugcgcuccggcuacgagaccuucaaggucaucgagggguggagcaaccccaacuccaagcugcagaucaaccgccaggugaucguggaccggggcaaccggagcggguacuccggcaucuucagcgucgagggcaagagcugcaucaaccgcugcuucuacguggagcucauccgggggcgcaagcaggagaccgaggugcuguggaccuccaacagcaucgucguguucugcggcaccuccgggacguacggcaccgggagcuggccggacggcgccgacaucaaccugaugcccaucuga

SEQ ID NO: 87818 - RNA, 1410 nt, Artificial Sequence; identical to SEQ ID NO: 78169
  derived and/or modified CDS sequence (opt1) from neuraminidase__InfluenzaA__AGR55187

SEQ ID NO: 87819 - RNA, 1410 nt, Artificial Sequence; identical to SEQ ID NO: 78738
  derived and/or modified CDS sequence (opt1) from neuraminidase__InfluenzaA__AGR55192

SEQ ID NO: 87820 - RNA, 1410 nt, Artificial Sequence
  derived and/or modified CDS sequence (opt1) from neuraminidase__InfluenzaA__AGR55195
augaaccccaaccagaagaucaucaccaucggcagcgugucccugaccaucagcacgaucugcuucuucaugcagaucgccauccucaucaccaccgucacccugcacuucaagcaguacgaguucaacuccccgcccaacaaccaggugaugcugugcgagcccacgaucaucgagcgcaacaucaccgagaucguguaccucaccaacaccacgaucgagaaggagaucugccccaagcuggccgaguaccggaacuggagcaagccgcagugcgacaucaccggguucgcgcccuucuccaaggacaacagcauccgccuguccgccggcggggacaucugggucacccgggagcccuacgugagcugcgaccccgacaagugcuaccaguucgcccucggccaggggaccacgcugaacaacgugcacuccaacgacaccguccacgaccgcaccccguaccggacccugcucaugaacgagcugggcgugcccuuccaccugggcacgaagcaggucugcaucgccuggagcuccagcuccugccacgacgggaaggccuggcuccacgugugcgugaccggcgacgacaagaacgcgaccgccagcuucaucuacaacgggcgccugguggacuccaucgucagcugguccaaggagauccugcggacccaggagagcgagugcgugugcaucaacggcacgugcaccguggucaugaccgacggguccgccagcggcaaggccgacaccaagauccucuucaucgaggagggcaagaucgugcacacgagcacccuguccgggagcgcgcagcacguggaggagugcuccugcuacccccgcuaccccggcguccggugcgugugccgcgaccacuggaaggggagcaaccggccgaucguggacaucaacaucaaggacuacuccaucgucagcuccuacgugugcagcggccuggugggcgacacgccccgcaagaacgacuccagcuccagcucccacugccucgaccccaacaacgaggagggcgggcacggggucaagggcugggccuucgacgacgggaacgacguguggaugggccggaccaucagcgagaagcugcgccugggcuacgagaccuucaaggucaucgaggggugguccaaccccaacagcaagcuccagaucaaccgccaggugaucguggaccggggcaaccgguccggguacagcggcaucuucuccgucgagggcaagagcugcaucaaccgcugcuucuacguggagcugauccgggggcgcaaggaggagaccgaggugcuguggaccagcaacuccaucgucguguucugcggcaccagcgggacguacggcaccggguccuggccggacggcgccgacaucaaccucaugcccaucuga

SEQ ID NO: 87821 - RNA, 1410 nt, Artificial Sequence
  derived and/or modified CDS sequence (opt1) from neuraminidase__InfluenzaA__AGR55204
augaaccccaaccagaagaucaucaccaucggcagcgugucccugaccaucagcacgaucugcuucuucaugcagaucgccauccucaucaccaccgucacccugcacuucaagcaguacgaguucaacuccccgcccaacaaccaggugaugcugugcgagcccacgaucaucgagcgcaacaucaccgagaucguguaccucaccaacaccacgaucgagaaggagaucugccccaagcuggccgaguaccggaacuggagcaagccgcagugcgacaucaccggguucgcgcccuucuccaaggacaacagcauccgccuguccgccggcggggacaucugggucacccgggagcccuacgugagcugcgaccccgacaagugcuaccaguucgcccucggccaggggaccacgcugaacaacgugcacuccaacgacaccguccgcgaccggaccccguaccgcacccugcucaugaacgagcugggcgugcccuuccaccugggcacgaagcaggucugcaucgccuggagcuccagcuccugccacgacgggaaggccuggcuccacgugugcaucaccggcgacgacaagaacgcgaccgccagcuucaucuacaacgggcggcugguggacuccaucgugagcugguccaaggagauccugcgcacccaggagagcgagugcgucugcaucaacggcacgugcaccguggugaugaccgacggguccgccagcggcgaggccgacaccaagauccucuucaucgaggagggcaagaucguccacacgagcacccuguccgggagcgcgcagcacguggaggagugcuccugcuacccccgguaccccggcgugcgcugcgucugccgggacaacuggaaggggagcaaccgcccgaucguggacaucaacaucaaggaccacuccaucgugagcuccuacgucugcagcggccuggugggcgacacgccccggaagaacgacuccagcuccagcucccacugccucgaccccaacaacgaggagggcgggcacggggugaagggcugggccuucgacgacgggaacgacgucuggaugggccgcaccaucagcgagaagucccggcugggcuacgagaccuucaaggugaucgagggguggagcaaccccaaguccaagcugcagaucaaccgccaggucaucguggaccggggcaaccgcagcggguacuccggcaucuucagcguggagggcaagagcugcaucaaccggugcuucuacgucgagcucauccgcgggcggaaggaggagaccgaggugcuguggaccuccaacagcaucguggucuucugcggcaccucccgcacguacgggaccggcagcuggccggacggggccgacaucaaccugaugcccaucuga

SEQ ID NO: 87822 - RNA, 1410 nt, Artificial Sequence
  derived and/or modified CDS sequence (opt1) from neuraminidase__InfluenzaA__AGR55218
augaaccccaaccagaagaucaucaccaucggcagcgugucccugaccaucagcacgaucugcuucuucaugcagaucgccauccucaucaccaccgucacccugcacuucaagcaguacgaguucaacuccccgcccaacaaccagguggugcugugcgagcccacgaucaucgagcgcaacaucaccgagaucgucuaccucaccaacaccacgaucgagaaggagaucugccccaagcuggccgaguaccggaacuggagcaagccgcagugcgacaucaccggguucgcgcccuucuccaaggacaacagcauccgccuguccgccggcggggacaucugggugacccgggagcccuacgugagcugcgaccccgacaagugcuaccaguucgcccucggccaggggaccacgcugaacaacguccacuccaacaacaccgugcgcgaccggaccccguaccgcacccugcucaugaacgagcugggcgugcccuuccaccugggcacgaagcaggucugcaucgccuggagcuccagcuccugccacgacgggaaggccuggcuccacgugugcaucaccggcgacgacaagaacgcgaccgccagcuucaucuacaacgggcggcugguggacuccaucgucagcugguccaaggagauccugcgcacccaggagagcgagugcgugugcaucaacggcacgugcaccguggucaugaccgacggguccgccagcggcaaggccgacaccaagauccucuucaucgaggagggcaagaucgugcacacgagcacccuguccgggagcgcgcagcacguggaggagugcuccugcuacccccgguaccccggcguccgcugcgugugccgggacaacuggaaggggagcaaccgcccgaucguggacaucaacaucaaggaccacuccaucgucagcuccuacgugugcagcggccuggugggcgacacgccccggaagaacgacuccagcuccagcucccacugccucgaccccaacaacgaggagggcgggcacggggucaagggcugggccuucgacgacgggaacgacguguggaugggccgcaccaucagcgagaagucccggcugggcuacgagaccuucaaggucaucgagggguggagcaaccccaaguccaagcugcagaucaaccgccaggugaucguggaccggggcaaccgcagcggguacuccggcaucuucagcgucgagggcaagagcugcaucaaccggugcuucuacguggagcucauccgcgggcggaaggaggagaccgaggugcuguggaccuccaacagcaucgucguguucugcggcaccuccgggacguacggcaccgggagcuggccggacggcgccgacaucaaccugaugcccaucuga

SEQ ID NO: 87823 - RNA, 1410 nt, Artificial Sequence; identical to SEQ ID NO: 87413
  derived and/or modified CDS sequence (opt1) from neuraminidase__InfluenzaA__AGT18726

SEQ ID NO: 87824 - RNA, 1410 nt, Artificial Sequence
  derived and/or modified CDS sequence (opt1) from neuraminidase__InfluenzaA__AGT18727
augaaccccaaccagaagaucaucaccaucggcagcgugugcaugaccaucgggauggccaaccugauccuccagaucggcaacaucaucuccaucuggaucagccacuccauccagcuggggagccagaaccagaucgagacgugcaaccaguccgucaucaccuacgagaacaacaccugggugaaccagaccuacgugaacaucagcaacacgaacuucgccgcgggccaguccgucgugagcgugaagcuggccgggaacuccagccucugcccggucuccggcugggccaucuacagcaaggacaacuccgugcgcaucggcagcaagggggacguguucgucauccgggagcccuucaucuccugcagcccccuggagugccgcaccuucuuccugacccagggcgcccuccugaacgacaagcacuccaacgggaccaucaaggaccggagccccuaccgcacgcugauguccugcccgaucggcgaggugcccagccccuacaacagccgguucgaguccguggccuggagcgcguccgccugccacgacgggaucaacuggcucaccaucggcaucagcggccccgacuccggggccgucgccgugcugaaguacaacggcaucaucaccgacaccaucaagagcuggcgcaacaacauccugcggacgcaggaguccgagugcgcgugcgugaacgggagcugcuucaccaucaugaccgacggcccguccgacggccaggccagcuacaagaucuuccgcaucgagaaggggaagaucgucaaguccguggagaugaacgcccccaacuaccacuacgaggagugcagcugcuaccccgacuccagcgagaucacgugcgugugccgggacaacuggcacggcuccaaccgccccugggucagcuucaaccagaaccucgaguaccagaucggguacaucugcuccggcaucuucggggacaacccgcggcccaacgacaagaccggcagcugcggccccguguccagcaacggggccaacggcgugaagggguucagcuucaaguacggcaacggggucuggaucggccgcaccaaguccaucagcucccggaagggcuucgagaugaucugggaccccaacggguggagcggcaccgacaacaacuucuccaucaagcaggacaucguggggaucaacgaguggagcggcuacuccgggagcuucgugcagcacccggagcugaccggccuggacugcauccgccccugcuucugggucgagcucauccggggccgccccaaggagaacacgaucuggaccuccgggagcuccaucagcuucugcggcgugaacuccgacaccgucggguggagcuggcccgacggcgccgagcugccguucaccaucgacaaguga

SEQ ID NO: 87825 - RNA, 1410 nt, Artificial Sequence; identical to SEQ ID NO: 87413
  derived and/or modified CDS sequence (opt1) from neuraminidase__InfluenzaA__AGT18728

SEQ ID NO: 87826 - RNA, 1410 nt, Artificial Sequence
  derived and/or modified CDS sequence (opt1) from neuraminidase__InfluenzaA__AGT18729
augaaccccaaccagaagaucaucaccaucggccaggugugcaugaccaucgggauggccaaccugauccuccagaucggcaacaucaucagcaucuggaucucccacagcauccagcuggggucccagaaccagaucgagacgugcaaccagagcgucaucaccuacgagaacaacaccugggugaaccagaccuacgugaacaucuccaacacgaacuucgccgcgggccagagcgucguguccgugaagcuggccgggaacagcucccucugcccggucagcggcugggccaucuacuccaaggacaacagcgugcgcaucggcuccaagggggacguguucgucauccgggagcccuucaucagcugcagcccccuggagugccgcaccuucuuccugacccagggcgcccuccugaacgacaagcacuccaacgggaccaucaaggaccggucccccuaccgcacgcugaugagcugcccgaucggcgaggugcccucccccuacaacagccgguucgagagcguggccugguccgcgagcgccugccacgacgggaucaacuggcucaccaucggcaucuccggccccgacagcggggccgucgccgugcugaaguacaacggcaucaucaccgacaccaucaaguccuggcgcaacaacauccugcggacgcaggagagcgagugcgcgugcgugaacggguccugcuucaccaucaugaccgacggcccgagcgacggccaggccuccuacaagaucuuccgcaucgagaaggggaagaucgucaagagcguggagaugaacgcccccaacuaccacuacgaggagugcuccugcuaccccgacagcuccgagaucacgugcgugugccgggacaacuggcacggcagcaaccgccccugggucuccuucaaccagaaccucgaguaccagaucggguacaucugcagcggcaucuucggggacaacccgcggcccaacgacaagaccggcuccugcggccccgugagcuccaacggggccaacggcgugaagggguucagcuucaaguacggcaacggggucuggaucggccgcaccaagagcaucuccagccggaagggcuucgagaugaucugggaccccaacggguggaccggcaccgacaacaacuucuccaucaagcaggacaucguggggaucaacgaguggagcggcuacuccgggagcuucgugcagcacccggagcugacgggccuggacugcauccgccccugcuucugggucgagcucauccggggccgccccaaggagaacaccaucuggaccuccgggagcuccaucagcuucugcggcgugaacuccgacaccgucggguggagcuggcccgacggcgccgagcugccguucacgaucgacaaguga

SEQ ID NO: 87827 - RNA, 1410 nt, Artificial Sequence
  derived and/or modified CDS sequence (opt1) from neuraminidase__InfluenzaA__AGT18730
augaaccccaaccagaagaucaucaccaucggcagcgugugcaugaccaucgggauggccaaccugauccuccagaucggcaacaucaucuccaucuggaucagccacuccauccagcuggggaaccagagccagaucgagacgugcaaccaguccgucaucaccuacgagaacaacaccugggugaaccagaccuacgugaacaucagcaacacgaacuucgccgcgggccaguccgucgugagcgugaagcuggccgggaacuccagccucugcccggucuccggcugggccaucuacagcaaggacaacuccgugcgcaucggcagcaagggggacguguucgucauccgggagcccuucaucuccugcagcccccuggagugccgcaccuucuuccugacccagggcgcccuccugaacgacaagcacuccaacgggaccaucaaggaccggagccccuaccgcacgcugauguccugcccgaucggcgaggugcccagccccuacaacagccgguucgaguccguggccuggagcgcguccgccugccacgacgggaucaacuggcucaccaucggcaucagcggccccgacuccggggccgucgccgugcugaaguacaacggcaucaucaccgacaccaucaagagcuggcgcaacaacauccugcggacgcaggaguccgagugcgcgugcgugaacgggagcugcuucaccaucaugaccgacggcccguccgacggccaggccagcuacaagaucuuccgcaucgagaaggggaagaucgucaaguccguggagaucaacgcccccaacuaccacuacgaggagugcagcugcuaccccgacuccagcgagaucacgugcgugugccgggacaacuggcacggcuccaaccgccccugggucagcuucaaccagaaccucgaguaccagaucggguacaucugcuccggcaucuucggggacaacccgcggcccaacgacaagaccggcagcugcggccccguguccagcaacggggccaacggcgugaagggguucagcuucaaguacggcaacggggucuggaucggccgcaccaaguccaucagcucccggaagggcuucgagaugaucugggaccccaacggguggaccggcaccgacaacaacuucagcaucaagcaggacaucguggggaucaacgagugguccggcuacagcggguccuucgugcagcacccggagcugacgggccuggacugcauccgccccugcuucugggucgagcucauccggggccgccccaaggagaacaccaucuggaccagcggguccagcaucuccuucugcggcgugaacagcgacaccgucgggugguccuggcccgacggcgccgagcugccguucacgaucgacaaguga

SEQ ID NO: 87828 - RNA, 1410 nt, Artificial Sequence; identical to SEQ ID NO: 87413
  derived and/or modified CDS sequence (opt1) from neuraminidase__InfluenzaA__AGT18731

SEQ ID NO: 87829 - RNA, 1410 nt, Artificial Sequence
  derived and/or modified CDS sequence (opt1) from neuraminidase__InfluenzaA__AGT18732
augaaccccaaccagaagaucaucaccaucggcagcgugugcaugaccaucgggauggccaaccugauccuccagaucggcaacaucaucuccaucuggaucagccacuccauccagcuggggaaccagagccagaucgagacgugcaaccaguccgucaucaccuacgagaacaacaccugggugaaccagaccuacgugaacaucagcaacacgaacuucgccgcgggccaguccgucgugagcgugaagcuggccgggaacuccagccucugcccggucuccggcugggccaucuacagcaaggacaacuccgugcgcaucggcagcaagggggacguguucgucauccgggagcccuucaucuccugcagcccccuggagugccgcaccuucuuccugacccagggcgcccuccugaacgacaagcacuccaacgggaccaucaaggaccggagccccuaccgcacgcugauguccugcccgaucggcgaggugcccagccccuacaacagccgguucgaguccguggccuggagcgcguccgccugccacgacgggaucaacuggcucaccaucggcaucagcggccccgacuccggggccgucgccgugcugaaguacaacggcaucaucaccgacaccaucaagagcuggcgcaacaacauccugcggacgcaggaguccgagugcgcgugcgugaacgggagcugcuucaccaucaugaccgacggcccguccgacggccaggccagcuacaagaucuuccgcaucgagaaggggaagaucgucaaguccguggagaugaacgcccccaacuaccacuacgaggagugcagcugcuaccccgacuccagcgagaucacgugcgugugccgggacaacuggcacggcuccaaccgccccugggucagcuucaaccagaaccucgaguaccagaucggguacaucugcuccggcaucuucggggacaacccgcggcccaacgacaagaccggcagcugcggccccguguccagcaacggggccaacggcgugaagggguucagcuucaaguacggcaacggggucuggaucggccgcaccaaguccaucagcucccggaagggcuucgagaugaucugggaccccaacggguggaccggcaccgacaacaacuucagcaucaagcaggacaucguggggaucaacgagugguccggcuacagcggguccuucgugcagcacccggagcugacgggccuggacugcauccgccccugcuucugggucgagcucauccggggccgccccaaggagaacaccaucuggacccgggggagcuccaucagcuucugcggcgugaacuccgacaccgucggguggagcuggcccgacggcgccgagcugccguucacgaucgacaaguga

SEQ ID NO: 87830 - RNA, 1410 nt, Artificial Sequence
  derived and/or modified CDS sequence (opt1) from neuraminidase__InfluenzaA__AGT18733
augaaccccaaccagaagaucaucaccaucggcagcgugugcaugaccaucgggauggccaaccugauccuccagaucggcaacaucaucuccaucuggaucagccacuccauccagcuggggaaccagagccagaucgagacgugcaaccaguccgucaucaccuacgagaacaacaccugggugaaccagaccuacgugaacaucagcaacacgaacuucgccgcgggccaguccgucgugagcgugaagcuggccgggaacuccagccucugcccggucuccggcugggccaucuacagcaaggacaacuccgugcgcaucggcagcaagggggacguguucgucauccgggagcccuucaucuccugcagcccccuggagugccgcaccuucuuccugacccagggcgcccuccugaacgacaagcacuccaacgggaccaucaaggaccggagccccuaccgcacgcugauguccugcccgaucggcgaggugcccagccccuacaacagccgguucgaguccguggccuggagcgcguccgccugccacgacgggaucaacuggcucaccaucggcaucagcggccccgacuccggggccgucgccgugcugaaguacaacggcaucaucaccgacaccaucaagagcuggcgcaacaacauccugcggacgcaggaguccgagugcgcgugcgugaacgggagcugcuucaccaucaugaccgacggcccguccgacggccaggccagcuacaagaucuuccgcaucgagaaggggaagaucgucaaguccguggagaugaacgcccccaacuaccacuacgaggagugcagcugcuaccccgacuccagcgaguccacgugcgugugccgggacaacuggcacggcagcaaccgccccugggucuccuucaaccagaaccucgaguaccagaucggguacaucugcagcggcaucuucggggacaacccgcggcccaacgacaagaccggcuccugcggccccgugagcagcaacggggccaacggcgugaagggguucuccuucaaguacggcaacggggucuggaucggccgcaccaagagcaucuccagccggaagggcuucgagaugaucugggaccccaacggguggaccggcaccgacaacaacuucuccaucaagcaggacaucguggggaucaacgaguggagcggcuacuccgggagcuucgugcagcacccggagcugacgggccuggacugcauccgccccugcuucugggucgagcucauccggggccgccccaaggagaacaccaucuggaccuccgggagcucccggagcuucugcggcgugaacuccgacaccgucggguggagcuggcccgacggcgccgagcugccguucacgaucgacaaguga

SEQ ID NO: 87831 - RNA, 1410 nt, Artificial Sequence
  derived and/or modified CDS sequence (opt1) from neuraminidase__InfluenzaA__AGT18762
augaaccccaaccagaagaucaucaccaucggcagcgugucccugaccaucagcacgaucugcuucuucaugcagaucgccauccucaucaccaccgucacccugcacuucaagcaguacgaguucaacuccccgcccaacaaccaggugacgcugugcgagcccaucaucaucgagcgcaacaucaccgagaucguguaccucaccaacaccacgaucgagaaggagaucugccccaagccggccgaguaccggaacuggagcaagccccagugcgggaucaccggcuucgcgcccuucuccaaggacaacagcauccgccuguccgccgggggcgacaucugggucacccgggagcccuacgugagcugcgacccggacaagugcuaccaguucgcccuggggcagggcaccacgcucaacaacgugcacuccaacaacaccguccgcgaccggacccccuaccgcacccugcugaugaacgagcucggcgugcccuuccaccuggggacgaagcaggucugcaucgccuggagcuccagcuccugccacgacggcaaggccuggcugcacgugugcaucaccggggacgacaagaacgcgaccgccagcuucaucuacaacggccggcucguggacuccguggucagcugguccaaggagauccugcgcacccaggagagcgagugcgugugcaucaacgggacgugcaccguggucaugaccgacggcuccgccagcggcaaggccgacaccaagauccuguucaucgaggaggggaagaucgugcacacgagcacccucuccggcagcgcgcagcacguggaggagugcuccugcuacccccgguacccggggguccgcugcgugugccgggacaacuggaagggcagcaaccgccccaucguggacaucaacaucaaggaccacuccaucgucagcuccuacgugugcagcggccuggugggggacaccccgcggaagaacgacuccagcuccagcucccacugccuggaccccaacaacgaggagggcgggcacggcgucaaggggugggccuucgacgacggcaacgacguguggaugggccgcaccaucaacgagacgagccggcucggguacgagaccuucaaggucaucgagggcugguccaaccccaagagcaagcugcagaucaaccgccaggugaucguggaccgcggggaccgguccggcuacagcgggaucuucuccgucgagggcaagagcugcaucaaccggugcuucuacguggagcugauccgcggccggaaggaggagaccgaggugcucuggaccagcaacuccaucgucguguucugcgggacgagcggcaccuacgggaccggcuccuggcccgacggggccgaccugaaccugaugcccaucuga

SEQ ID NO: 87832 - RNA, 1410 nt, Artificial Sequence
  derived and/or modified CDS sequence (opt1) from neuraminidase__InfluenzaA__AGT18764
augaaccccaaccagaugaucaucaccaucggcagcgugucccugaccagcuccacgaucugcuucuucaugcagaccgccagcuucaucaccaccgucacgcuccacaucaagcagcacgaguuccacuccccgcccaacaaccaggugaugcugugcgagcccaccaucaucgagcgcaacaucaccgagaucguguaccugaccaacacgaccaucgagaaggagaucugccccaagcucgccgaguaccggaacuggagcaagccgcagugcgacaucaccggguucgcgcccuucuccaaggacaacagcauccgccuguccgccggcggggacaucugggucacccgggagcccuacgugagcugcgaccccgacaagugcuaccaguucgcccugggccaggggacgacccucaacaacgugcacuccaacaacaccguccgcgaccggaccccguaccgcacgcugcugaugaacgagcucggcgugcccuuccaccugggcaccaagcaggucugcaucgccuggagcuccagcuccugccacgacgggaaggccuggcugcacgugugcaucaccggcgacgacaagaacgcgaccgccagcuucaucuacaacgggaagcucguggacuccguggucagcugguccaaggagauccugcggacgcaggagagcgagugcgugugcaucaacgggaccugcaccguggucaugaccgacgggagcgccuccggcaaggccgacacgaagauccuguucaucgaggagggcaagaucgugcacaccagcacccucuccgggagcgcgcagcacguggaggagugcuccugcuacccccgcuaccccggcguccggugcgugugccgcgacaacuggaaggggagcaaccggccgaucguggacaucaacaugaaggaccacuccaucgucagcuccuacgugugcagcggccuggugggcgacacgccccgcaagaacgaccgguccagcaacucccacugccuggaccccaacaacgaggagggcggccacggggucaagggcugggccuucgacgacgggaacgacguguggaugggccgcaccaucaacgagaccagccggcucggcuacgagaccuucaaggucaucgaggggugguccaaccccaagagcaagcugcagaucaaccgccaggugaucguggaccggggcaaccgcuccggguacagcggcaucuucuccgucgagggcaagagcugcaucaaccggugcuucuacguggagcugauccgcgggcggaaggaggagaccgaggugcucuggacgagcaacuccaucgucguguucugcggcaccagcgggaccuacggcaccggguccuggccggacggcgccgaccugaaccugaugcccaucuga

SEQ ID NO: 87833 - RNA, 1410 nt, Artificial Sequence
  derived and/or modified CDS sequence (opt1) from neuraminidase__InfluenzaA__AGT18765
augaaccccaaccagaagaucaucaccaucggcagcgugucccugaccaucagcacgaucugcuucuucaugcagaucgccauccucaucaccaccgucacccugcacuucaagcagcacgaguuccacuccccgcccaacaaccaggugaugcugugcgagcccacgaucaucgagcgcaacaucaccgagaucguguaccucaccaacaccacgaucgagaaggagaucugccccaagcuggccgaguaccggaacuggagcaagccgcagugcgacaucaccggguucgcgcccuucuccaaggacaacagcauccgccuguccgccggcggggacaucugggucacccgggagcccuacgugagcugcgaccccgacaagugcuaccaguucgcccucggccaggggaccacgcugaacaacgugcacuccaacaacaccguccgcgaccggaccccguaccgcacccugcucaugaacgagcugggcgugcccuuccaccugggcacgaagcaggucugcaucgccuggagcuccagcuccugccacgacgggaaggccuggcuccacgugugcaucaccggcgacgacaagaacgcgaccgccagcuucaucuacaacgggcggcugguggacuccguggucagcugguccaaggagauccugcgcacccaggagagcgagugcgugugcaucaacggcacgugcaccguggucaugaccgacggguccgccagcggcaaggccgacaccaagauccucuucaucgaggagggcaagaucgugcacacgagcacccuguccgggagcgcgcagcacguggaggagugcuccugcuacccccgguaccccggcguccgcugcgugugccgggacaacuggaaggggagcaaccgcccgaucguggacaucaacaugaaggaccacuccaucgucagcuccuacgugugcagcggccuggugggcgacacgccccggaagaacgaccgcuccagcaacucccacugccucgaccccaacaacgaggagggcgggcacggggucaagggcugggccuucgacgacgggaacgacguguggaugggccggaccaucaacgagaccagccgccugggcuacgagaccuucaaggucaucgaggggugguccaaccccaagagcaagcugcagaucaaccgccaggugaucguggaccggggcaaccgguccggguacagcggcaucuucuccgucgagggcaagagcugcaucaaccgcugcuucuacguggagcucauccgggggcgcaaggaggagaccgaggugcuguggaccuccaacagcaucgucguguucugcggcacgagcgggaccuacggcaccggguccuggccggacggcgccgaccugaaccucaugcccaucuga

SEQ ID NO: 87834 - RNA, 1410 nt, Artificial Sequence
  derived and/or modified CDS sequence (opt1) from neuraminidase__InfluenzaA__AGT18766
augaaccccaaccagaagaucaucaccaucggcagcgugucccugaccaucagcacgaucugccucuucaugcagaucgccauccugaucaccaccgucacccugcacuucaagcagcacgaguuccacuccccgcccaacaaccaggugaugcucugcgagcccacgaucaucgagcgcaacaucaccgagaucguguaccugaccaacaccacgaucgagaaggagaucugccccaagcuggccgaguaccggaacuggagcaagccgcagugcgacaucaccggguucgcgcccuucuccaaggacaacagcauccgccucuccgccggcggggacaucugggucacccgggagcccuacgugagcugcgaccccgacaagugcuaccaguucgcccugggccaggggaccacgcugaacaacgugcacuccaacaacaccguccgcgaccggaccccguaccgcacccuccugaugaacgagcugggcgugcccuuccaccucggcacgaagcaggucugcaucgccuggagcuccagcuccugccacgacgggaaggccuggcugcacgugugcaucaccggcgacgacaagaacgcgaccgccagcuucaucuacaacgggcggcugguggacuccguggucagcugguccaaggagauccuccgcacccaggagagcgagugcgugugcaucaacggcacgugcaccguggucaugaccgacggguccgccagcggcaaggccgacaccaagauccuguucaucgaggagggcaagaucgugcacacgagcacccuguccgggagcgcgcagcacguggaggagugcuccugcuacccccgguaccccggcguccgcugcgugugccgggacaacuggaaggggagcaaccgcccgaucguggacaucaacaugaaggaccacuccaucgucagcuccuacgugugcagcggccucgugggcgacacgccccggaagaacgaccgcuccagcaacucccacugccuggaccccaacaacgaggagggcgggcacggggucaagggcugggccuucgacgacgggaacgacguguggaugggccggaccaucaacgagaccagccgccugggcuacgagaccuucaaggucaucgaggggugguccaaccccaagagcaagcuccagaucaaccgccaggugaucguggaccggggcaaccgguccggguacagcggcaucuucuccgucgagggcaagagcugcaucaaccgcugcuucuacguggagcugauccgggggcgcaaggaggagaccgaggugcuguggaccuccaacagcaucgucguguucugcggcacgagcgggaccuacggcaccggguccuggccggacggcgccgaccucaaccugaagcccaucuga

SEQ ID NO: 87835 - RNA, 1410 nt, Artificial Sequence
  derived and/or modified CDS sequence (opt1) from neuraminidase__InfluenzaA__AGT18767
augaaccccaaccagaagaucaucaccaucggcagcgugucccugaccaucagcacgaucugcuucuucaugcagaccgccucccucaucaccaccgucacgcugcacuucaagcagcacgaguuccacagcccgcccaacaaccaggugaugcugugcgagcccaccaucaucgagcgcaacaucaccgagaucguguaccucaccaacacgaccaucgagaaggagaucugccccaagcuggccgaguaccggaacugguccaagccgcagugcgacaucaccggguucgcgcccuucagcaaggacaacuccauccgccugagcgccggcggggacaucugggucacccgggagcccuacguguccugcgaccccgacaagugcuaccaguucgcccucggccaggggacgacccugaacaacgugcacagcaacaacaccguccgcgaccggaccccguaccgcacgcugcucaugaacgagcugggcgugcccuuccaccugggcaccaagcaggucugcaucgccugguccagcuccagcugccacgacgggaaggccuggcuccacgugugcaucaccggcgacgacaagaacgcgaccgccuccuucaucuacaacgggcggcugguggacagcguggucuccuggagcaaggagauccugcgcacgcaggaguccgagugcgugugcaucaacgggaccugcaccguggucaugaccgacgggagcgccagcggcaaggccgacacgaagauccucuucaucgaggagggcaagaucgugcacaccuccacccugagcggguccgcgcagcacguggaggagugcagcugcuacccccgguaccccggcguccgcugcgugugccgggacaacuggaagggguccaaccgcccgaucguggacaucaacaugaaggaccacagcaucgucuccagcuacgugugcuccggccuggugggcgacacgccccggaagaacgaccgcagcuccaacagccacugccucgaccccaacaacgaggagggcggccacggggucaagggcugggccuucgacgacgggaacgacguguggaugggccggaccaucaacgagaccucccgccugggcuacgagaccuucaaggucaucgagggguggagcaaccccaaguccaagcugcagaucaaccgccaggugaucguggaccggggcaaccggagcggguacuccggcaucuucagcgucgaggggaaguccugcaucaaccgcugcuucuacguggagcucauccggggccgcaaggaggagaccgaggugcuguggacgagcaacagcaucgucguguucugcggcaccuccgggaccuacggcaccgggagcuggccggacggcgccgaccugaaccucaugcccaucuga

SEQ ID NO: 87836 - RNA, 1410 nt, Artificial Sequence
  derived and/or modified CDS sequence (opt1) from neuraminidase__InfluenzaA__AGT18768
augaaccccaaccagaagaucaucaccaucggcagcgugucccugaccaucagcacgaucugcuucuucaugcagaccgccuccuucaucaccaccgucacgcuccacuucaagcaguacgaguucaacagcccgcccaacaaccaggugaugcugugcgagcccaccaucaucgagcgcaacaucaccgagaucguguaccugaccaacacgaccaucgagaaggagaucugccccaagcucgccgaguaccggaacugguccaagccgcagugcgacaucaccggguucgcgcccuucagcaaggacaacuccauccgccugagcgccggcggggacaucugggucacccgggagcccuacguguccugcgaccccgacaagugcuaccaguucgcccugggccaggggacgacccucaacaacgugcacagcaacaacaccguccgcgaccggaccccguaccgcacgcugcugaugaacgagcucggcgugcccuuccaccugggcaccaagcaggucugcaucgccugguccagcuccagcugccacgacgggaaggccuggcugcacgugugcaucaccggcgacgacaagaacgcgaccgccuccuucaucuacaacgggcggcucguggacagcguggucuccuggagcaaggagauccugcgcacgcaggaguccgagugcgugugcaucaacgggaccugcaccguggucaugaccgacgggagcgccagcggcaaggccgacacgaagauccuguucaucgaggagggcaagaucgugcacaccuccacccucagcggguccgcgcagcacguggaggagugcagcugcuacccccgguaccccggcguccgcugcgugugccgggacaacuggaagggguccaaccgcccgaucguggacaucaacaugaaggaccacagcaucgucuccagcuacgugugcuccggccuggugggcgacacgccccggaagaacgaccgcagcuccaacagccacugccuggaccccaacaacgaggagggcggccacggggucaagggcugggccuucgacgacgggaacgacguguggaugggccggaccaucaacgagaccucccgccucggcuacgagaccuucaaggucaucgagggguggagcaaccccaaguccaagcugcagaucaaccgccaggugaucguggaccggggcaaccggagcggguacuccggcaucuucagcgucgaggggaaguccugcaucaaccgcugcuucuacguggagcugauccggggccgcaaggaggagaccgaggugcucuggacgagcaacagcaucgucguguucugcggcaccuccgggaccuacggcaccgggagcuggccggacggcgccgaccugaaccugaugcccaucuga

SEQ ID NO: 87837 - RNA, 1410 nt, Artificial Sequence; identical to SEQ ID NO: 86170
  derived and/or modified CDS sequence (opt1) from neuraminidase__InfluenzaA__AGT18769

SEQ ID NO: 87838 - RNA, 1410 nt, Artificial Sequence
  derived and/or modified CDS sequence (opt1) from neuraminidase__InfluenzaA__AGT18770
augaaccccaaccagaagaucaucaccaucggcagcgugucccugaccaucagcacgaucugcuucuucaugcagaucgccauccucaucaccaccgucacccugcacuucaagcaguacgaguucaacuccccgcccaacaacaaggugaugcugugcgagcccacgaucaucgagcgcaacaucaccgagaucguguaccucaccaacaccacgaucgagaaggagaucugccccaagccggccgaguaccggaacuggagcaagccccagugcgggaucaccggcuucgcgcccuucuccaaggacaacagcauccgccuguccgccgggggcgacaucugggucacccgggagcccuacgugagcugcgacccggacaagugcuaccaguucgcccuggggcagggcaccacgcucaacaacgugcacuccaacaacaccguccgcgaccggacccccuaccgcacccugcugaugaacgagcucggcgugcccuuccaccuggggacgaagcaggucugcaucgccuggagcuccagcuccugccacgacggcaaggccuggcugcacgugugcaucaccggggacgacaagaacgcgaccgccagcuucaucuacaacggccggcucguggacuccguggucagcugguccaaggagauccugcgcacccaggagagcgagugcgugugcaucaacgggacgugcaccguggucaugaccgacggcuccgccagcggcaaggccgacaccaagauccuguucaucgaggaggggaagaucgugcacacgagcacccucuccggcagcgcgcagcacguggaggagugcuccugcuacccccgguacccggggguccgcugcgugugccgggacaacuggaagggcagcaaccgccccaucguggacaucaacaucaaggaccacuccaucgucagcuccuacgugugcagcggccuggugggggacaccccgcggaagaacgacuccagcuccagcucccacugccuggaccccaacaacgaggagggcgggcacggcgucaaggggugggccuucgacgacggcaacgacguguggaugggccgcaccaucaacgagacgagccggcucggguacgagaccuucaaggucaucgagggcugguccaaccccaagagcaagcugcagaucaaccgccaggugaucguggaccgcggggaccgguccggcuacagcgggaucuucuccgucgagggcaagagcugcaucaaccggugcuucuacguggagcugauccgcggccggaaggaggagaccgaggugcucuggaccagcaacuccaucgucguguucugcgggacgagcggcaccuacgggaccggcuccuggcccgacggggccgaccugaaccugaugcccaucuga

SEQ ID NO: 87839 - RNA, 1410 nt, Artificial Sequence
  derived and/or modified CDS sequence (opt1) from neuraminidase__InfluenzaA__AGT18771
augaaccccaaccagaagaucaucaccaucggcagcgugucccugaccaucagcacgaucugcuucuucaugcagaucgccauccucaucaccaccgucacccugcacuucaagcaguacaaguucaacuccccgcccaacaaccaggugaugcugugcgagcccacgaucaucgagcgcaacaucaccgagaucguguaccucaccaacaccacgaucgagaaggagaucugccccaagccggccgaguaccggaacuggagcaagccccagugcgggaucaccggcuucgcgcccuucuccaaggacaacagcauccgccuguccgccgggggcgacaucugggucacccgggagcccuacgugagcugcgacccggacaagugcuaccaguucgcccuggggcagggcaccacgcucaacaacgugcacuccaacaacaccguccgcgaccggacccccuaccgcacccugcugaugaacgagcucggcgugcccuuccaccuggggacgaagcaggucugcaucgccuggagcuccagcuccugccacgacggcaaggccuggcugcacgugugcaucaccggggacgacaagaacgcgaccgccagcuucaucuacaacggccggcucguggacuccguggucagcugguccaaggagauccugcgcacccaggagagcgagugcgugugcaucaacgggacgugcaccguggucaugaccgacggcuccgccagcggcaaggccgacaccaagauccuguucaucgaggaggggaagaucgugcacacgagcacccucuccggcagcgcgcagcacguggaggagugcuccugcuacccccgguacccggggguccgcugcgugugccgggacaacuggaagggcagcaaccgccccaucguggacaucaacaucaaggaccacuccaucgucagcuccuacgugugcagcggccuggugggggacaccccgcggaagaacgacuccagcuccagcucccacugccuggaccccaacaacgaggagggcgggcacggcgucaaggggugggccuucgacgacggcaacgacguguggaugggccgcaccaucaacgagacgagccggcucggguacgagaccuucaaggucaucgagggcugguccaaccccaagagcaagcugcagaucaaccgccaggugaucguggaccgcggggaccgguccggcuacagcgggaucuucuccgucgagggcaagagcugcaucaaccggugcuucuacguggagcugauccgcggccggaaggaggagaccgaggugcucuggaccagcaacuccaucgucguguucugcgggacgagcggcaccuacgggaccggcuccuggcccgacggggccgaccugaaccugaugcccaucuga

SEQ ID NO: 87840 - RNA, 1410 nt, Artificial Sequence; identical to SEQ ID NO: 86170
  derived and/or modified CDS sequence (opt1) from neuraminidase__InfluenzaA__AGT18772

SEQ ID NO: 87841 - RNA, 1410 nt, Artificial Sequence
  derived and/or modified CDS sequence (opt1) from neuraminidase__InfluenzaA__AGT37104
augaaccccaaccagaagaucaucaccaucggcagcgugucccugaccaucgccacgaucugccuccugaugcagaucgccauccuggucaccaccgugacccuccacuucaagcaguacgagugcagcuccccgcccaacaaccaggugaugcccugcgagcccacgaucaucgagcgcaacaucaccaagaucgucuaccugaccaacaccacgaucgagcgggaggcgugcccggagcuggccgaguaccgccacuggagcaagccccagugcaagauccggggguucgcccccuucuccaaggacaacagcauccgccucuccgccggcggggacaucugggugacccgggagcccuacgugagcugcgacccgggcaagugcuaccaguucgcccuggggcagggcaccacccugaacaaccgccacuccaacgacacgguccacgaccggacccccuaccgcacccuccugaugaacgagcugggcgugcccuuccaccucgggaccaagcaggucugcaucgcguggagcuccagcuccugccacgacggcaaggccuggcugcacgugugcaucacggggcacgacaagaacgccaccgccagcuucaucuacgacggccggcugguggacuccaucgggagcuggucccagaacauccuccgcacccaggagagcgagugcgugugcaucaacgggaccugcacggucgugaugaccgacggcuccgcgagcgggcgggccgacaccaagaucauguucguggaggagggcaagaucguccacaucagcccccuggccggguccgcccagcacguggaggagugcagcugcuacccgaaguaccccggcgugcgcugcgucugccgggacaacuggaagggcuccaaccgccccaucguggacaucaacaugaaggacuacagcaucguguccagcuacgucugcuccgggcuggugggcgacacgccccggcgcaacgacagcuccagcaccuccuacugccucaacccgaacaacgaggagggcggccacggggugaagggcugggccuucgacgacggcgacgacgucuggauggggcggaccaucagcgagaagcugcgccugggcuacgagaccuucaaggugaucgggggcugguccaagcccaacagcaagcuccagaucaaccggcaggucgugguggacaucuccaaccgcagcggguacuccggcaucuucagcgucgagggcaaguccugcaucaaccggugcuucuacguggagcugauccgcgggcgcaagcaggagaacgaggugugguggaccagcaacagcaucgucguguucugcggcacguccgggaccuacggcaccgggagcuggcccgacggcgcggacaucaaccugaugcccaucuga

SEQ ID NO: 87842 - RNA, 1410 nt, Artificial Sequence
  derived and/or modified CDS sequence (opt1) from neuraminidase__InfluenzaA__AGU69973
augaaccccaaccagaagaucaucaccaucggcagcgugucccugaccaucgccacgaucugcuuccucaugcagaucgccauccuggucaccaccgugacccugcacuucaagcaguacgagugcaacagcccgcccaacaaccaggugaugcucugcgagcccacgaucaucgagcgcaacaucaccgagaucgucuaccugaccaacaccacgaucgagaaggagaucugccccaagcuggcggaguaccggaacugguccaagccgcagugcaacaucaccggguucgcccccuucagcaaggacaacuccauccgccucagcgccggcggggacaucugggugacccgggagcccuacguguccugcgaccccgacaagugcuaccaguucgcccugggccaggggaccacgcugaacaacggccacagcaacgacaccguccacgaccgcaccccguaccggacccuccugaugaacgagcugggcgugcccuuccaccucgggacgaagcaggucugcaucgccugguccagcuccagcugccacgacggcaaggcguggcugcacgugugcgugaccggggacgacgagaacgccaccgccuccuucaucuacaacggccgccugguggacagcaucggguccuggagcaagaagauccuccggacccaggaguccgagugcgucugcaucaacggcacgugcaccguggugaugaccgacggcagcgccuccgggaaggcggacaccaagauccuguucaucgaggagggcaagaucguccacacgagcccccugagcggguccgcccagcacguggaggagugcagcugcuacccccgcuacccgggcgugcggugcgucugccgcgacaacuggaagggcuccaaccggcccaucguggacaucaacgugaaggacuacagcaucgucuccagcuacgugcgcuccgggcucgugggcgacacgccccggaagaacgacagcuccagcuccagccacugccuggaccccaacaacgaggagggcgggcacggggucaagggcugggccuucgacgacggcaacgacguguggauggggcgcaccaucuccgagaagucccggagcggcuacgagaccuucaaggucaucgagggguggagcaagccgaacuccaagcugcagaucaaccgccaggugaucguggaccggggcaaccgcagcggguacuccggcaucuucagcgucgagggcaagagcugcaucaaccggugcuucuacguggagcucauccgcgggggcaagcaggagaccgaggugcuguggaccuccaacagcaucgucguguucugcgggaccuccggcaccuacgggacgggcagcuggcccgacggcgccgaccugaaccucaugcccaucuga

SEQ ID NO: 87843 - RNA, 1410 nt, Artificial Sequence
  derived and/or modified CDS sequence (opt1) from neuraminidase__InfluenzaA__AGU92648
augaaccccaaccagaagaucaucaccaucggcagcgugugcaugaccaucgggauggccaaccugauccuccagaucggcaacaucaucuccaucuggaucagccacuccauccagcugcgcaaccagagccagaucgagacgugcaaccaguccgucaucaccuacgagaacaacaccugggugaaccagaccuacgugaacaucagcaacacgaacuucgccgcggggcaguccgucgugagcgugaagcuggccggcaacuccagccucugcccggucuccgggugggccaucuacagcaaggacaacuccauccggaucggcagcaagggcgacguguucgugauccgcgagcccuucaucuccugcagcccccuggagugccggaccuucuuccugacccagggggcccuccugaacgacaagcacuccaacggcaccaucaaggaccgcagccccuaccggacgcugauguccugcccgaucggggagguccccagccccuacaacagccgcuucgaguccguggccuggagcgcguccgccugccacgacggcaucaacuggcucaccaucgggaucagcggccccgacaacggcgccguggccguccugaaguacaacgggaucaucaccgacaccaucaaguccuggcggaacaacauccugcgcacgcaggagagcgagugcgcgugcgugaacggcuccugcuucaccaucaugaccgacgggccgagcgacggccaggccuccuacaagaucuuccggaucgagaagggcaagaucgucaagagcguggagaugaacgcccccaacuaccacuacgaggagugcuccugcuaccccgacagcuccgagaucaucugcgugugccgcgacaacuggcacgggagcaaccggcccuggguguccuucaaccagaaccucgaguaccagaucggcuacaucugcagcgggaucuucggcgacaacccgcgccccaacgacaagaccggguccugcggccccgucagcuccaacggcgccaacggggugaagggcuucagcuucaaguacgggaacggcguguggaucgggcggaccaagagcaucuccagccgcaagggcuucgagaugaucugggaccccaacggcuggacggggaccgacaacaacuucuccaucaagcaggacaucgucggcaucaacgaguggagcggguacuccggcagcuucgugcagcacccggagcugaccgggcuggacugcauccggcccugcuucuggguggagcucauccgcggccggcccaaggagaacacgaucuggaccuccggcagcuccaucagcuucugcggggucaacuccgacaccgugggcuggagcuggcccgacggggccgagcugccguucaccaucgacaaguga

SEQ ID NO: 87844 - RNA, 1410 nt, Artificial Sequence
  derived and/or modified CDS sequence (opt1) from neuraminidase__InfluenzaA__AGU92670
augaaccccaaccagaagaucaucaccaucggcagcgugugcaugaccaucgggauggccaaccugauccuccagaucggcaacaucaucuccaucuggaucagccacuccauccagcugcgcaaccagagccagaucgagacgugcaaccaguccgucaucaccuacgagaacaacaccugggugaaccagaccuacgugaacaucagcaacacgaacuucgccgcggggcaguccgucgugagcgugaagcuggccggcaacuccagccucugcccggucuccgggugggccaucuacagcaaggacaacuccauccggaucggcagcaagggcgacguguucgugauccgcgagcccuucaucuccugcagcccccuggagugccggaccuucuuccugacccagggggcccuccugaacgacaagcacuccaacggcaccaucaaggaccgcagccccuaccggacgcugauguccugcccgaucggggagguccccagccccuacaacagccgcuucgaguccguggccuggagcgcguccgccugccacgacggcaucaacuggcucaccaucgggaucagcggccccgacaacggcgccguggccguccugaaguacaacgggaucaucaccgacaccaucaaguccuggcggaacaacauccugcgcacgcaggagagcgagugcgcgugcgugaacggcuccugcuucaccaucaugaccgacgggccgagcgacggccaggccuccuacaagaucuuccggaucgagaagggcaagaucgucaagagcguggagaugaacgcccccaacuaccacuacgaggagugcuccugcuaccccgacagcuccgagaucaucugcgugugccgcgacaacuggcacgggagcaaccggcccuggguguccuucaaccagaaccucgaguaccagaucggcuacaucugcagcgggaucuucggcgacaacccgcgccccgacgacaagaccggguccugcggccccgucagcuccaacggcgccaacggggugaagggcuucagcuucaaguacgggaacggcguguggaucgggcggaccaagagcaucuccagccgcaagggcuucgagaugaucugggaccccaacggcuggacggggaccgacaacaacuucuccaucaagcaggacaucgucggcaucaacgaguggagcggguacuccggcagcuucgugcagcacccggagcugaccgggcuggacugcauccggcccugcuucuggguggagcucauccgcggccggcccaaggagaacacgaucuggaccuccggcagcuccaucagcuucugcggggucaacuccgacaccgugggcuggagcuggcccgacggggccgagcugccguucaccaucgacaaguga

SEQ ID NO: 87845 - RNA, 1410 nt, Artificial Sequence
  derived and/or modified CDS sequence (opt1) from neuraminidase__InfluenzaA__AGU92681
augaaccccaaccagaagaucaucaccaucggcagcgugugcaugaccaucgggauggccaaccugauccuccagaucggcaacaucaucuccaucuggaucagccacuccauccagcugcgcaaccagagccagaucgagacgugcaaccaguccgucaucaccuacgagaacaacaccugggugaaccagaccuacgugaacaucagcaacacgaacuucgccgcggggcaguccgucgugagcgugaagcuggccggcaacuccagccucugcccggucuccgggugggccaccuacagcaaggacaacuccauccggaucggcagcaagggcgacguguucgugauccgcgagcccuucaucuccugcagcccccuggagugccggaccuucuuccugacccagggggcccuccugaacgacaagcacuccaacggcacgaucaaggaccgcagccccuaccggacccugauguccugcccgaucggggagguccccagccccuacaacagccgcuucgaguccguggccuggagcgcguccgccugccacgacggcaucaacuggcucaccaucgggaucagcggccccgacaacggcgccguggccguccugaaguacaacgggaucaucaccgacacgaucaaguccuggcggaacaacauccugcgcacccaggagagcgagugcgcgugcgugaacggcuccugcuucaccaucaugaccgacgggccgagcgacggccaggccuccuacaagaucuuccggaucgagaagggcaagaucgucaagagcguggagaugaacgcccccaacuaccacuacgaggagugcuccugcuaccccgacagcuccgagaucaucugcgugugccgcgacaacuggcacgggagcaaccggcccuggguguccuucaaccagaaccucgaguaccagaucggcuacaucugcagcgggaucuucggcgacaacccgcgccccaacgacaagacgggguccugcggccccgucagcuccaacggcgccaacggggugaagggcuucagcuucaaguacgggaacggcguguggaucgggcggaccaagagcaucuccagccgcaagggcuucgagaugaucugggaccccaacggcuggaccgggaccgacaacaacuucuccaucaagcaggacaucgucggcaucaacgaguggagcggguacuccggcagcuucgugcagcacccggagcugacggggcuggacugcauccggcccugcuucuggguggagcucauccgcggccggcccaaggagaacaccaucuggaccuccggcagcuccaucagcuucugcggggucaacuccgacaccgugggcuggagcuggcccgacggggccgagcugccguucacgaucgacaaguga

SEQ ID NO: 87846 - RNA, 1410 nt, Artificial Sequence
  derived and/or modified CDS sequence (opt1) from neuraminidase__InfluenzaA__AGU92692
augaaccccaaccagaagaucaucaccaucggcagcgugugcaugaccaucgggauggccaaccugauccuccagaucggcaacaucaucuccaucuggaucagccacuccauccagcuggggaaccagaaccagaucgagacgugcaaccagagcgucaucaccuacgagaacaacaccugggugaaccagaccuacgugaacaucuccaacacgaacuucgccgcgggccagagcgucguguccgugaagcuggccgggaacagcucccucugcccggucagcggcugggccaucuacuccaaggacaacagcgugcgcgugggcuccaagggggacgucuucgugauccgggagcccuucaucagcugcagcccccuggagugccgcaccuucuuccugacccagggcgcccuccugaacgacaagcacuccaacgggaccaucaaggaccggucccccuaccgcacgcugaugagcugcccgaucggcgaggugcccucccccuacaacagccgguucgagagcgucgccugguccgcgagcgccugccacgacgggaucaacuggcucaccaucggcaucuccggccccgacaacggggccguggccgugcugaaguacaacggcaucaucaccgacaccaucaagagcuggcgcaacaacauccugcggacgcaggaguccgagugcgcgugcgucaacgggagcugcuucaccgugaugaccgacggcccguccaacggccaggccagcuacaagaucuuccgcaucgagaaggggaagaucgugaaguccgucgagaugaacgcccccaacuaccacuacgaggagugcagcugcuaccccgacuccagcgagaucacgugcgugugccgggacaacuggcacggcuccaaccgccccugggugagcuucaaccagaaccucgaguaccagaucggguacaucugcuccggcaucuucggggacaacccgcggcccaacgacaagaccggcagcugcggccccgucuccagcaacggggccaacggcgugaagggguucuccuucaaguacggcaacgggguguggaucggccgcaccaagagcaucagcucccggaacggcuucgagaugaucugggaccccaacggguggaccggcaccgacaacaacuucagcaucaagcaggacaucgucgggaucaacgagugguccggcuacagcggguccuucauccagcacccggagcugacgggccuggacugcauccgccccugcuucuggguggagcucauccggggccgccccaaggagaacaccaucuggaccagcggguccagcaucuccuucugcggcgucaacagcgacaccguggggugguccuggcccgacggcgccgagcugccguucacgaucgacaaguga

SEQ ID NO: 87847 - RNA, 1410 nt, Artificial Sequence; identical to SEQ ID NO: 87846
  derived and/or modified CDS sequence (opt1) from neuraminidase__InfluenzaA__AGU92703

SEQ ID NO: 87848 - RNA, 1410 nt, Artificial Sequence; identical to SEQ ID NO: 87846
  derived and/or modified CDS sequence (opt1) from neuraminidase__InfluenzaA__AGU92714

SEQ ID NO: 87849 - RNA, 1410 nt, Artificial Sequence; identical to SEQ ID NO: 87846
  derived and/or modified CDS sequence (opt1) from neuraminidase__InfluenzaA__AGU92725

SEQ ID NO: 87850 - RNA, 1410 nt, Artificial Sequence; identical to SEQ ID NO: 87846
  derived and/or modified CDS sequence (opt1) from neuraminidase__InfluenzaA__AGU92736

SEQ ID NO: 87851 - RNA, 1410 nt, Artificial Sequence; identical to SEQ ID NO: 87846
  derived and/or modified CDS sequence (opt1) from neuraminidase__InfluenzaA__AGU92747

SEQ ID NO: 87852 - RNA, 1410 nt, Artificial Sequence; identical to SEQ ID NO: 87846
  derived and/or modified CDS sequence (opt1) from neuraminidase__InfluenzaA__AGU92758

SEQ ID NO: 87853 - RNA, 1410 nt, Artificial Sequence; identical to SEQ ID NO: 87843
  derived and/or modified CDS sequence (opt1) from neuraminidase__InfluenzaA__AGU92769

SEQ ID NO: 87854 - RNA, 1410 nt, Artificial Sequence; identical to SEQ ID NO: 87843
  derived and/or modified CDS sequence (opt1) from neuraminidase__InfluenzaA__AGU92780

SEQ ID NO: 87855 - RNA, 1410 nt, Artificial Sequence
  derived and/or modified CDS sequence (opt1) from neuraminidase__InfluenzaA__AGU92791
augaaccccaaccagaagaucaucaccaucggcagcgugugcaugaccaucgggauggccaaccugauccuccagaucggcaacaucaucuccaucuggaucagccacuccauccagcugcgcaaccagagccagaucgagacgugcaaccaguccgucaucaccuacgagaacaacaccugggugaaccagaccuacgugaacaucagcaacacgaacuucgccgcggggcaguccgucgugagcgugaagcuggccggcaacuccagccucugcccggucuccgggugggccaucuacagcaaggacaacuccauccggaucggcagcaagggcgacguguucgugauccgcgagcccuucaucuccugcagcccccuggagugccggaucuucuuccugacccagggggcccuccugaacgacaagcacuccaacggcaccaucaaggaccgcagccccuaccggacccugauguccugcccgaucggggagguccccagccccuacaacagccgcuucgaguccguggccuggagcgcguccgccugccacgacggcaucaacuggcucacgaucgggaucagcggccccgacaacggcgccguggccguccugaaguacaacgggaucaucaccgacaccaucaaguccuggcggaacaacauccugcgcacccaggagagcgagugcgcgugcgugaacggcuccugcuucacgaucaugaccgacgggccgagcgacggccaggccuccuacaagaucuuccggaucgagaagggcaagaucgucaagagcguggagaugaacgcccccaacuaccacuacgaggagugcuccugcuaccccgacagcuccgagaucaucugcgugugccgcgacaacuggcacgggagcaaccggcccuggguguccuucaaccagaaccucgaguaccagaucggcuacaucugcagcgggaucuucggcgacaacccgcgccccaacgacaagaccggguccugcggccccgucagcuccaacggcgccaacggggugaagggcuucagcuucaaguacgggaacggcguguggaucgggcggaccaagagcaucuccagccgcaagggcuucgagaugaucugggaccccaacggcuggacggggaccgacaacaacuucuccaucaagcaggacaucgucggcaucaacgaguggagcggguacuccggcagcuucgugcagcacccggagcugaccgggcuggacugcauccggcccugcuucuggguggagcucauccgcggccggcccaaggagaacaccaucuggacguccggcagcuccaucagcuucugcggggucaacuccgacaccgugggcuggagcuggcccgacggggccgagcugccguucaccaucgacaaguga

SEQ ID NO: 87856 - RNA, 1410 nt, Artificial Sequence; identical to SEQ ID NO: 87843
  derived and/or modified CDS sequence (opt1) from neuraminidase__InfluenzaA__AGU92802

SEQ ID NO: 87857 - RNA, 1410 nt, Artificial Sequence; identical to SEQ ID NO: 87843
  derived and/or modified CDS sequence (opt1) from neuraminidase__InfluenzaA__AGU92813

SEQ ID NO: 87858 - RNA, 1410 nt, Artificial Sequence; identical to SEQ ID NO: 87843
  derived and/or modified CDS sequence (opt1) from neuraminidase__InfluenzaA__AGU92824

SEQ ID NO: 87859 - RNA, 1410 nt, Artificial Sequence
  derived and/or modified CDS sequence (opt1) from neuraminidase__InfluenzaA__AGU92846
augaaccccaaccagaagaucaucaccaucggcagcgugugcaugaccaucgggauggccaaccugauccuccagaucggcaacaucaucuccaucuggaucagccacuccauccagcuggggaaccagaaccagaucgagacgugcaaccagagcgucaucaccuacgagaacaacaccugggugaaccagaccuacgugaacaucuccaacacgaacuucgccgcgggccagagcgucguguccgugaagcuggccgggaacagcucccucugcccggucagcggcugggccaucuacuccaaggacaacagcgugcgcgugggcuccaagggggacgucuucgugauccgggagcccuucaucagcugcagcccccuggagugccgcaccuucuuccugacccagggcgcccuccugaacgacaagcacuccaacgggaccaucaaggaccggucccccuaccgcacgcugaugagcugcccgaucggcgaggugcccucccccuacaacagccgguucgagagcgucgccugguccgcgagcgccugccacgacgggaucaacuggcucaccaucggcaucuccggccccgacaacggggccguggccgugcugaaguacaacggcaucaucaccgacaccaucaagagcuggcgcaacaacauccugcggacgcaggaguccgagugcgcgugcgucaacgggagcugcuucaccgugaugaccgacggcccguccaacggccaggccagcuacaagaucuuccgcaucgagaaggggaagaucgugaaguccgucgagaugaacgcccccaacuaccacuacgaggagugcagcugcuaccccgacuccagcgagaucacgugcgugugccgggacaacuggcacggcuccaaccgccccugggugagcuucaaccagaaccucgaguaccagaucggguacaucugcuccggcaucuucggggacaacccgcggcccaacgacaagaccggcagcugcggccccgucuccagcaacggggccaacggcgugaagggguucgccuucaaguacggcaacgggguguggaucggccgcaccaaguccaucagcagccggaacggcuucgagaugaucugggaccccaacggguggaccggcaccgacaacaacuucuccaucaagcaggacaucgucgggaucaacgaguggagcggcuacuccgggagcuucauccagcacccggagcugacgggccuggacugcauccgccccugcuucuggguggagcucauccggggccgccccaaggagaacaccaucuggaccuccgggagcuccaucagcuucugcggcgucaacuccgacaccgugggguggagcuggcccgacggcgcggagcugccguucacgaucgacaaguga

SEQ ID NO: 87860 - RNA, 1410 nt, Artificial Sequence
  derived and/or modified CDS sequence (opt1) from neuraminidase__InfluenzaA__AGU92868
augaaccccaaccagaagaucaucaccaucggcagcgugugcaugaccaucgggauggccaaccugauccuccagaucggcaacaucaucuccaucuggaucagccacuccauccagcuggggaaccagaaccagaucgagacgugcaaccagagcgucaucaccuacgagaacaacaccugggugaaccagaccuacgugaacaucuccaacacgaacuucgccgcgggccagagcgucguguccgugaaguucgccgggaacagcucccugugcccggucagcggcugggccaucuacuccaaggacaacagcgugcgcgugggcuccaagggggacgucuucgugauccgggagcccuucaucagcugcagcccccucgagugccgcaccuucuuccugacccagggcgcccugcucaacgacaagcacuccaacgggaccaucaaggaccggucccccuaccgcacgcugaugagcugcccgaucggcgaggugcccucccccuacaacagccgguucgagagcgucgccugguccgcgagcgccugccacgacgggaucaacuggcugaccaucggcaucuccggccccgacaacggggccguggccgugcucaaguacaacggcaucaucaccgacaccaucaagagcuggcgcaacaacauccugcggacgcaggaguccgagugcgcgugcgucaacgggagcugcuucaccgugaugaccgacggcccguccaacggccaggccagcuacaagaucuuccgcaucgagaaggggaagaucgugaaguccgucgagaugaacgcccccaacuaccacuacgaggagugcagcugcuaccccgacuccagcgagaucacgugcgugugccgggacaacuggcacggcuccaaccgccccugggugagcuucaaccagaaccuggaguaccagaucggguacaucugcuccggcaucuucggggacaacccgcggcccaacgacaagaccggcagcugcggccccgucuccagcaacggggccaacggcgugaagggguucuccuucaaguacggcaacgggguguggaucggccgcaccaagagcaucagcucccggaacggcuucgagaugaucugggaccccaacggguggaccggcaccgacaacaacuucagcaucaagcaggacaucgucgggaucaacgagugguccggcuacagcggguccuucauccagcacccggagcucacgggccuggacugcauccgccccugcuucuggguggagcugauccggggccgccccaaggagaacaccaucuggaccagcggguccagcaucuccuucugcggcgucaacagcgacaccguggggugguccuggcccgacggcgccgagcucccguucacgaucgacaaguga

SEQ ID NO: 87861 - RNA, 1410 nt, Artificial Sequence
  derived and/or modified CDS sequence (opt1) from neuraminidase__InfluenzaA__AGU92890
augaaccccaaccagaagaucaucaccaucggcagcgugugcaugaccaucgggauggccaaccugauccuccagaucggcaacaucaucuccaucuggaucagccacuccauccagcuggggaaccagaaccagaucgagacgugcaaccagagcgucaucaccuacgagaacaacaccugggugaaccagaccuacgugaacaucuccaacacgaacuucgccgcgggccagagcgucguguccgugaagcuggccgggaacagcucccucugcccggucagcggcugggccaucuacuccaaggacaacagcgugcgcgugggcuccaagggggacgucuucgugauccgggagcccuucaucagcugcagcccccuggagugccgcaccuucuuccugacccagggcgcccuccugaacgacaagcacuccaacgggaccaucaaggaccggucccccuaccgcacgcugaugagcugcccgaucggcgaggugcccucccccuacaacagccgguucgagagcgucgccugguccgcgagcgccugccacgacgggaucaacuggcucaccaucggcaucuccggccccgacaacggggccguggccgugcugaaguacaacggcaucaucaccgacaccaucaagagcuggcgcaacaacauccugcggacgcaggaguccgagugcgcgugcgucaacgggagcugcuucaccgugaugaccgacggcccguccaacggccaggccagcuacaagaucuuccgcaucgagaaggggaagaucgugaaguccgucgagaugaacgcccccaacuaccacuacgaggagugcagcugcuaccccgacuccagcgagaucacgugcgugugccgggacaacuggcacggcuccaaccgccccugggugagcuucaaccagaaccucgaguaccagaucggguacaucugcuccggcaucuucggggacaacccgcggcccaacgacaagaccggcagcugcggccccgucuccagcaacggggccaacggcgugaagggguucuccuucaaguacggcaacgggguguggaucggccgcaccaagagcaucagcucccggaacggcuucgagaugaucugggaccccaacggguggaccgagaccgacaacaacuucagcaucaagcaggacaucgucggcaucaacgagugguccggguacagcggcuccuucauccagcacccggagcugacggggcuggacugcauccgccccugcuucuggguggagcucauccggggccgccccaaggagaacaccaucuggaccagcggcuccagcaucuccuucugcggggucaacagcgacaccgugggcugguccuggcccgacggggccgagcugccguucacgaucgacaaguga

SEQ ID NO: 87862 - RNA, 1410 nt, Artificial Sequence; identical to SEQ ID NO: 87843
  derived and/or modified CDS sequence (opt1) from neuraminidase__InfluenzaA__AGU92901

SEQ ID NO: 87863 - RNA, 1410 nt, Artificial Sequence; identical to SEQ ID NO: 87843
  derived and/or modified CDS sequence (opt1) from neuraminidase__InfluenzaA__AGU92912

SEQ ID NO: 87864 - RNA, 1410 nt, Artificial Sequence; identical to SEQ ID NO: 87843
  derived and/or modified CDS sequence (opt1) from neuraminidase__InfluenzaA__AGU92923

SEQ ID NO: 87865 - RNA, 1410 nt, Artificial Sequence; identical to SEQ ID NO: 87846
  derived and/or modified CDS sequence (opt1) from neuraminidase__InfluenzaA__AGU92934

SEQ ID NO: 87866 - RNA, 1410 nt, Artificial Sequence; identical to SEQ ID NO: 87846
  derived and/or modified CDS sequence (opt1) from neuraminidase__InfluenzaA__AGU92945

SEQ ID NO: 87867 - RNA, 1410 nt, Artificial Sequence; identical to SEQ ID NO: 87846
  derived and/or modified CDS sequence (opt1) from neuraminidase__InfluenzaA__AGU92956

SEQ ID NO: 87868 - RNA, 1410 nt, Artificial Sequence; identical to SEQ ID NO: 87843
  derived and/or modified CDS sequence (opt1) from neuraminidase__InfluenzaA__AGU92967

SEQ ID NO: 87869 - RNA, 1410 nt, Artificial Sequence; identical to SEQ ID NO: 87843
  derived and/or modified CDS sequence (opt1) from neuraminidase__InfluenzaA__AGU92978

SEQ ID NO: 87870 - RNA, 1410 nt, Artificial Sequence
  derived and/or modified CDS sequence (opt1) from neuraminidase__InfluenzaA__AGU92989
augaaccccaaccagaagaucaucaccaucggcagcgugugcaugaccaucgggauggccaaccugauccuccagaucggcaacaucaucuccaucuggaucagccacuccauccagcuggggaaccagaaccagaucgagacgugcaaccagagcgucaucaccuacgagaacaacaccugggugaaccagaccuacgugaacaucuccaacacgaacuucgccgcgggccagagcgucguguccgugaagcuggccgggaacagcucccucugcccggucagcggcugggccaucuacuccaaggacaacagcgugcgcgugggcuccaagggggacgucuucgugauccgggagcccuucaucagcugcagcccccuggagugccgcaccuucuuccugacccagggcgcccuccugaacgacaagcacuccaacgggaccaucaaggaccggucccccuaccgcacgcugaugagcugcccgaucggcgaggugcccucccccuacaacagccgguucgagagcgucgccugguccgcgagcgccugccacgacgggaucaacuggcucaccaucggcaucuccggccccgacaacggggccguggccgugcugaaguacaacggcaucaucaccgacaccaucaagagcuggcgcaacaacauccugcggacgcaggaguccgagugcgcgugcgucaacgggagcugcuucaccgugaugaccgacggcccguccaacggccaggccagcuacaagaucuuccgcaucgagaaggggaagaucgugaaguccgucgagaugaacgcccccaacuaccacuacgaggagugcagcugcuaccccgacuccagcgagaucacgugcgugugccgggacaacuggcacggcuccaaccgccccugggugagcuucaaccagaaccucgaguaccagaucggguacaucugcuccggcaucuucggggacaacccgcggcccaacgacaagaccggcagcugcggccccgucuccagcaacggggccaacggcgugaagggguucuccuucaaguacggcaacgggguguggaucggccgcaccaagagcaucagcucccggaacggcuucgagaugaucugggaccccaacggguggaccggcaccgacaacaacuucagcaucaagcaggacaucgucgggaucaacgagugguccggcuacagcggguccuucgugcagcacccggagcugacgggccuggacugcauccgccccugcuucugggucgagcucauccggggccgccccaaggagaacaccaucuggaccagcggguccagcaucuccuucugcggcgugaacagcgacaccguggggugguccuggcccgacggcgccgagcugccguucacgaucgacaaguga

SEQ ID NO: 87871 - RNA, 1410 nt, Artificial Sequence; identical to SEQ ID NO: 87860
  derived and/or modified CDS sequence (opt1) from neuraminidase__InfluenzaA__AGU93000

SEQ ID NO: 87872 - RNA, 1410 nt, Artificial Sequence; identical to SEQ ID NO: 87861
  derived and/or modified CDS sequence (opt1) from neuraminidase__InfluenzaA__AGU93011

SEQ ID NO: 87873 - RNA, 1365 nt, Artificial Sequence; identical to SEQ ID NO: 84414
  derived and/or modified CDS sequence (opt1) from neuraminidase__InfluenzaA__AGU93022

SEQ ID NO: 87874 - RNA, 1410 nt, Artificial Sequence
  derived and/or modified CDS sequence (opt1) from neuraminidase__InfluenzaA__AGU93034
augaaccccacccagaagaucaucaccaucggcagcgugugcaugacgaucgggauggccaaccugauccuccagaucggcaacaucaucuccaucuggaucagccacuccauccagcuggggaaccagaaccagaucgagaccugcaaccagagcgucaucaccuacgagaacaacaccugggugaaccagacguacgugaacaucuccaacaccaacuucgccgcgggccagagcgucgccuccgugaagcuggccgggaacagcucccucugcccggugagcggcugggccaucuacuccaaggacaacagcauccgcaucggcuccaagggggacgucuucgugauccgggagcccuucaucagcugcagcccccuggagugccgcaccuucuuccugacccagggcgcccuccugaacgacaagcacuccaacgggacgaucaaggaccggucccccuaccgcacccugaugagcugcccgaucggcgaggugcccucccccuacaacagccgguucgagagcgucgcgugguccgccagcgccugccacgacgggaucaacuggcucaccaucggcaucuccggccccgacaacggggccguggcggugcugaaguacaacggcaucaucaccgacacgaucaagagcuggcgcaacaacauccugcggacccaggaguccgagugcgccugcgucaacgggagcugcuucaccaucaugaccgacggcccguccgacggccaggccagcuacaagaucuuccgcaucgagaaggggaagaucgugaaguccguggagaugaacgcccccaacuaccacuacgaggagugcagcugcuaccccgacuccagcgagaucacgugcgucugccgggacaacuggcacggcuccaaccgccccugggugagcuucaaccagaaccucgaguaccagaucggguacaucugcuccggcaucuucggggacaacccgcggcccaacgacaagaccggcagcugcggccccguguccagcaacggggccaacggcgucaagggguucuccuucaaguacggcaacgggguguggaucggccgcaccaagagcaucagcucccggaagggcuucgagaugaucugggaccccaacggguggaccggcacggacaacaacuucagcaucaagcaggacaucguggggaucaacgagugguccggcuacagcggguccuucguccagcacccggagcugaccggccuggacugcauccgccccugcuucuggguggagcucauccggggccgccccaaggagaacaccaucuggaccagcggguccagcaucuccuucugcggcgugaacagcgacacggucgggugguccuggcccgacggcgcggagcugccguucaccaucgacaaguga

SEQ ID NO: 87875 - RNA, 1410 nt, Artificial Sequence; identical to SEQ ID NO: 87182
  derived and/or modified CDS sequence (opt1) from neuraminidase__InfluenzaA__AGU93045

SEQ ID NO: 87876 - RNA, 1410 nt, Artificial Sequence; identical to SEQ ID NO: 87843
  derived and/or modified CDS sequence (opt1) from neuraminidase__InfluenzaA__AGU93056

SEQ ID NO: 87877 - RNA, 1410 nt, Artificial Sequence; identical to SEQ ID NO: 86170
  derived and/or modified CDS sequence (opt1) from neuraminidase__InfluenzaA__AGV98980

SEQ ID NO: 87878 - RNA, 1410 nt, Artificial Sequence; identical to SEQ ID NO: 86170
  derived and/or modified CDS sequence (opt1) from neuraminidase__InfluenzaA__AGV98993

SEQ ID NO: 87879 - RNA, 1410 nt, Artificial Sequence; identical to SEQ ID NO: 86170
  derived and/or modified CDS sequence (opt1) from neuraminidase__InfluenzaA__AGV99005

SEQ ID NO: 87880 - RNA, 1410 nt, Artificial Sequence; identical to SEQ ID NO: 86170
  derived and/or modified CDS sequence (opt1) from neuraminidase__InfluenzaA__AGV99017

SEQ ID NO: 87881 - RNA, 1410 nt, Artificial Sequence; identical to SEQ ID NO: 86170
  derived and/or modified CDS sequence (opt1) from neuraminidase__InfluenzaA__AGV99040

SEQ ID NO: 87882 - RNA, 1410 nt, Artificial Sequence
  derived and/or modified CDS sequence (opt1) from neuraminidase__InfluenzaA__AGV99052
augaaccccaaccagaagaucaucaccaucggcagcgugucccugaccaucagcacgaucugcuucuucaugcagaucgccauccucaucaccaccgucacccugcacuucaagcaguacgaguucaacuccccgcccaacaaccaggugaugcugugcgagcccacgaucaucgagcgcaacaucaccgagaucguguaccucaccaacaccacgaucgagaaggagaucugccccaagccggccgaguaccggaacuggagcaagccccagugcgggaucaccggcuucgcgcccuucuccaaggacaacagcauccgccuguccgccgggggcgacaucugggucacccgggagcccuacgugagcugcgacccggacaagugcuaccaguucgcccuggggcagggcaccacgcucaacaacgugcacuccaacaacaccguccgcgaccggacccccuaccgcacccugcugaugaacgagcucggcgugcccuuccaccuggggacgaagcaggucugcaucgccuggagcuccagcuccugccacgacggcaaggccuggcugcacgugugcaucaccggggacgacaagaacgcgaccgccagcuucaucuacaacggccggcucguggacuccguggucagcugguccaaggagauccugcgcacccaggagagcgagugcgugugcaucaacgggacgugcaccguggucaugaccgacggcuccgccagcggcaaggccgacaccaagauccuguucaucgaggaggggaagaucgugcacacgagcacccucuccggcagcgcgcagcacguggaggagugcuccugcuacccccgguacccggggguccgcugcgugugccgggacaacuggaagggcagcaaccgccccaucguggacaucaacaucaaggaccacuccgucaucagcuccuacgugugcagcggccuggugggggacaccccgcggaagaacgacuccagcuccagcucccacugccuggaccccaacaacgaggagggcgggcacggcgucaaggggugggccuucgacgacggcaacgacguguggaugggccgcaccaucaacgagacgagccggcucggguacgagaccuucaaggucaucgagggcugguccaaccccaagagcaagcugcagaucaaccgccaggugaucguggaccgcggggaccgguccggcuacagcgggaucuucuccgucgagggcaagagcugcaucaaccggugcuucuacguggagcugauccgcggccggaaggaggagaccgaggugcucuggaccagcaacuccaucgucguguucugcgggacgagcggcaccuacgggaccggcuccuggcccgacggggccgaccugaaccugaugcccaucuga

SEQ ID NO: 87883 - RNA, 1410 nt, Artificial Sequence
  derived and/or modified CDS sequence (opt1) from neuraminidase__InfluenzaA__AGV99100
augaaccccaaccagaagaucaucaccaucggcagcgugucccugaccaucagcacgaucugcuucuucaugcagaucgccauccucaucaccaccgucacccugcacuucaagcaguacgaguucaacuccccgcccaacaaccaggugaugcugugcgagcccacgaucaucgagcgcaacaucaccgagaucguguaccucaccaacaccacgaucgagaaggagaucugccccaagccggccgaguaccggaacuggagcaagccccagugcgggaucaccggcuucgcgcccuucuccaaggacaacagcauccgccuguccgccgggggcgacaucugggucacccgggagcccuacgugagcugcgacccggacaagugcuaccaguucgcccuggggcagggcaccacgcucaacaacgugcacuccaacaacaccguccgcgaccggacccccuaccgcacccugcugaugaacgagcucggcgugcccuuccaccuggggacgaagcaggucugcaucgccuggagcuccagcuccugccacgacggcaaggccuggcugcacgugugcaucaccggggacgacaagaacgcgaccgccagcuucaucuacaacggccggcucguggacuccguggucagcugguccaaggagauccugcgcacccaggagagcgagugcgugugcaucaacgggacgugcaccguggucaugaccgacggcuccgccagcggcaaggccgacaccaagauccuguucaucgaggaggggaagaucgugcacacgagcacccucuccggcagcgcgcagcacguggaggagugcuccugcuacccccgguacccggggguccgcugcgugugccgggacaacuggaagggcagcaaccgccccaucguggacaucaacaucaaggaccacuccaucgucagcuccuacgugugcagcggccuggugggggacaccccgcggaagaacgacuccagcuccagcucccacugccuggaccccaacaacgaggagggcgggcacggcgucaaggggugggccuucgacgacggcaacgacguguggaugggccgcaccaucaacgagacgagccggcucggguacgagaccuucaaggucaucgagggcugguccaaccccaagagcaagcugcagaucaaccgccaggugaucguggaccgcggggaccgguccggcuacagcgggaucuucuccgucgagggcaagagcugcgugaaccggugcuucuacguggagcugauccgcggccggaaggaggagaccgagguccucuggaccagcaacuccaucgugguguucugcgggacgagcggcaccuacgggaccggcuccuggcccgacggggccgaccugaaccugaugcccaucuga

SEQ ID NO: 87884 - RNA, 1410 nt, Artificial Sequence; identical to SEQ ID NO: 86170
  derived and/or modified CDS sequence (opt1) from neuraminidase__InfluenzaA__AGV99112

SEQ ID NO: 87885 - RNA, 1410 nt, Artificial Sequence; identical to SEQ ID NO: 86170
  derived and/or modified CDS sequence (opt1) from neuraminidase__InfluenzaA__AGV99124

SEQ ID NO: 87886 - RNA, 1410 nt, Artificial Sequence; identical to SEQ ID NO: 86170
  derived and/or modified CDS sequence (opt1) from neuraminidase__InfluenzaA__AGV99136

SEQ ID NO: 87887 - RNA, 1410 nt, Artificial Sequence; identical to SEQ ID NO: 86170
  derived and/or modified CDS sequence (opt1) from neuraminidase__InfluenzaA__AGV99148

SEQ ID NO: 87888 - RNA, 1410 nt, Artificial Sequence; identical to SEQ ID NO: 86170
  derived and/or modified CDS sequence (opt1) from neuraminidase__InfluenzaA__AGV99160

SEQ ID NO: 87889 - RNA, 1410 nt, Artificial Sequence; identical to SEQ ID NO: 86170
  derived and/or modified CDS sequence (opt1) from neuraminidase__InfluenzaA__AGV99172

SEQ ID NO: 87890 - RNA, 1410 nt, Artificial Sequence; identical to SEQ ID NO: 86170
  derived and/or modified CDS sequence (opt1) from neuraminidase__InfluenzaA__AGV99196

SEQ ID NO: 87891 - RNA, 1410 nt, Artificial Sequence; identical to SEQ ID NO: 86170
  derived and/or modified CDS sequence (opt1) from neuraminidase__InfluenzaA__AGV99208

SEQ ID NO: 87892 - RNA, 1410 nt, Artificial Sequence; identical to SEQ ID NO: 86170
  derived and/or modified CDS sequence (opt1) from neuraminidase__InfluenzaA__AGV99959

SEQ ID NO: 87893 - RNA, 1410 nt, Artificial Sequence; identical to SEQ ID NO: 87381
  derived and/or modified CDS sequence (opt1) from neuraminidase__InfluenzaA__AGW00005

SEQ ID NO: 87894 - RNA, 1410 nt, Artificial Sequence; identical to SEQ ID NO: 86170
  derived and/or modified CDS sequence (opt1) from neuraminidase__InfluenzaA__AGW00068

SEQ ID NO: 87895 - RNA, 1410 nt, Artificial Sequence
  derived and/or modified CDS sequence (opt1) from neuraminidase__InfluenzaA__AGW00080
augaaccccaaccagaagaucaucaccaucggcagcgugucccugaccaucagcacgaucugcuucuucaugcagaucgccauccucaucaccaccgucacccugcacuucaagcaguacgaguucgacuccccgcccaacaaccaggugaugcugugcgagcccacgaucaucgagcgcaacaucaccgagaucguguaccucaccaacaccacgaucgagaaggagaucugccccaagccggccgaguaccggaacuggagcaagccccagugcgggaucaccggcuucgcgcccuucuccaaggacaacagcauccgccuguccgccgggggcgacaucugggucacccgggagcccuacgugagcugcgacccggacaagugcuaccaguucgcccuggggcagggcaccacgcucaacaacgugcacuccaacaacaccguccgcgaccggacccccuaccgcacccugcugaugaacgagcucggcgugcccuuccaccuggggacgaagcaggucugcaucgccuggagcuccagcuccugccacgacggcaaggccuggcugcacgugugcaucaccggggacgacaagaacgcgaccgccagcuucaucuacaacggccggcucguggacuccguggucagcugguccaaggagauccugcgcacccaggagagcgagugcgugugcaucaacgggacgugcaccguggucaugaccgacggcuccgccagcggcaaggccgacaccaagauccuguucaucgaggaggggaagaucgugcacacgagcacccucuccggcagcgcgcagcacguggaggagugcuccugcuacccccgguacccggggguccgcugcgugugccgggacaacuggaagggcagcaaccgccccaucguggacaucaacaucaaggaccacuccaucgucagcuccuacgugugcagcggccuggugggggacaccccgcggaagaacgacuccagcuccagcucccacugccuggaccccaacaacgaggagggcgggcacggcgucaaggggugggccuucgacgacggcaacgacguguggaugggccgcaccaucaacgagacgagccggcucggguacgagaccuucaaggucaucgagggcugguccaaccccaagagcaagcugcagaucaaccgccaggugaucguggaccgcggggaccgguccggcuacagcgggaucuucuccgucgagggcaagagcugcaucaaccggugcuucuacguggagcugauccgcggccggaaggaggagaccgaggugcucuggaccagcaacuccaucgucguguucugcgggacgagcggcaccuacgggaccggcuccuggcccgacggggccgaccugaaccugaugcccaucuga

SEQ ID NO: 87896 - RNA, 1410 nt, Artificial Sequence
  derived and/or modified CDS sequence (opt1) from neuraminidase__InfluenzaA__AGW00104
augaaccccaaccagaagaucaucaccaucggcagcgugucccugaccaucagcacgaucugcuucuucaugcagaucgccauccucaucaccaccgucacccugcacuucaagcaguacgaguucaacuccccgcccaacaaccaggugaugcugugcgagcccacgaucaucgagcgcaacaucaccgagaucguguaccucaccaacaccacgaucgagaaggagaucugccccaagccggccgaguaccggaacuggagcaagccccagugcgggaucaccggcuucgcgcccuucuccaaggacaacagcauccgccuguccgccgggggcgacaucugggucacccgggagcccuacgugagcugcgacccggacaagugcuaccaguucgcccuggggcagggcaccacgcucaacaacgugcacuccaacaacaccguccgcgaccggacccccuaccgcacccugcugaugaacgagcucggcgugcccuuccaccuggggacgaagcaggucugcaucgccuggagcuccagcuccugccacgacggcaaggccuggcugcacgugugcaucaccggggacgacaagaacgcgaccgccagcuucaucuacaacggccggcucguggacuccguggucagcugguccaaggagauccugcgcacccaggagagcgagugcgugugcaucaacgggacgugcaccguggucaugaccgacggcuccgccagcggcgaggccgacaccaagauccuguucaucgaggaggggaagaucgugcacacgagcacccucuccggcagcgcgcagcacguggaggagugcuccugcuacccccgguacccggggguccgcugcgugugccgggacaacuggaagggcagcaaccgccccaucguggacaucaacaucaaggaccacuccaucgucagcuccuacgugugcagcggccuggugggggacaccccgcggaagaacgacuccagcuccagcucccacugccuggaccccaacaacgaggagggcgggcacggcgucaaggggugggccuucgacgacggcaacgacguguggaugggccgcaccaucaacgagacgagccggcucggguacgagaccuucaaggucaucgagggcugguccaaccccaagagcaagcugcagaucaaccgccaggugaucguggaccgcggggaccgguccggcuacagcgggaucuucuccgucgagggcaagagcugcaucaaccggugcuucuacguggagcugauccgcggccggaaggaggagaccgaggugcucuggaccagcaacuccaucgucguguucugcgggacgagcggcaccuacgggaccggcuccuggcccgacggggccgaccugaaccugaugcccaucuga

SEQ ID NO: 87897 - RNA, 1410 nt, Artificial Sequence; identical to SEQ ID NO: 87895
  derived and/or modified CDS sequence (opt1) from neuraminidase__InfluenzaA__AGW00116

SEQ ID NO: 87898 - RNA, 1410 nt, Artificial Sequence; identical to SEQ ID NO: 87895
  derived and/or modified CDS sequence (opt1) from neuraminidase__InfluenzaA__AGW00128

SEQ ID NO: 87899 - RNA, 1410 nt, Artificial Sequence; identical to SEQ ID NO: 86170
  derived and/or modified CDS sequence (opt1) from neuraminidase__InfluenzaA__AGW00140

SEQ ID NO: 87900 - RNA, 1410 nt, Artificial Sequence; identical to SEQ ID NO: 86170
  derived and/or modified CDS sequence (opt1) from neuraminidase__InfluenzaA__AGW00152

SEQ ID NO: 87901 - RNA, 1410 nt, Artificial Sequence; identical to SEQ ID NO: 87895
  derived and/or modified CDS sequence (opt1) from neuraminidase__InfluenzaA__AGW00164

SEQ ID NO: 87902 - RNA, 1410 nt, Artificial Sequence; identical to SEQ ID NO: 86170
  derived and/or modified CDS sequence (opt1) from neuraminidase__InfluenzaA__AGW00176

SEQ ID NO: 87903 - RNA, 1410 nt, Artificial Sequence; identical to SEQ ID NO: 86170
  derived and/or modified CDS sequence (opt1) from neuraminidase__InfluenzaA__AGW00188

SEQ ID NO: 87904 - RNA, 1410 nt, Artificial Sequence; identical to SEQ ID NO: 86170
  derived and/or modified CDS sequence (opt1) from neuraminidase__InfluenzaA__AGW00712

SEQ ID NO: 87905 - RNA, 1410 nt, Artificial Sequence; identical to SEQ ID NO: 86170
  derived and/or modified CDS sequence (opt1) from neuraminidase__InfluenzaA__AGW00724

SEQ ID NO: 87906 - RNA, 1410 nt, Artificial Sequence
  derived and/or modified CDS sequence (opt1) from neuraminidase__InfluenzaA__AGW00736
augaaccccaaccagaagaucaucaccaucggcagcgugucccugaccaucagcacgaucugcuucuucaugcagaucgccauccucaucaccaccgucacccugcacuucaagcaguacgaguucaacuccccgcccaacaaccagaugaugcugugcgagcccacgaucaucgagcgcaacaucaccgagaucguguaccucaccaacaccacgaucgagaaggagaucugccccaagccggccgaguaccggaacuggagcaagccccagugcgggaucaccggcuucgcgcccuucuccaaggacaacagcauccgccuguccgccgggggcgacaucugggugacccgggagcccuacgucagcugcgacccggacaagugcuaccaguucgcccuggggcagggcaccacgcucaacaacgugcacuccaacaacaccgugcgcgaccggacccccuaccgcacccugcugaugaacgagcucggcguccccuuccaccuggggacgaagcaggucugcaucgccuggagcuccagcuccugccacgacggcaaggccuggcugcacgugugcaucaccggggacgacaagaacgcgaccgccagcuucaucuacaacggccggcucguggacuccguggugagcugguccaaggagauccugcgcacccaggagagcgagugcgucugcaucaacgggacgugcaccguggugaugaccgacggcuccgccagcggcaaggccgacaccaagauccuguucaucgaggaggggaagaucguccacacgagcacccucuccggcagcgcgcagcacguggaggagugcuccugcuacccccgguacccgggggugcgcugcgucugccgggacaacuggaagggcagcaaccgccccaucguggacaucaacaucaaggaccacuccaucgugagcuccuacgucugcagcggccuggugggggacaccccgcggaagaacgacuccagcuccagcucccacugccuggaccccaacaacgaggagggcgggcacggcgugaaggggugggccuucgacgacggcaacgacgucuggaugggccgcaccaucaacgagacgagccggcucggguacgagaccuucaaggugaucgagggcugguccgaccccaagagcaagcugcagaucaaccgccaggucaucguggaccgcggggaccgguccggcuacagcgggaucuucuccguggagggcaagagcugcaucaaccggugcuucuacgucgagcugauccgcggccggaaggaggagaccgaggugcucuggaccagcaacuccaucguggucuucugcgggacgagcggcaccuacgggaccggcuccuggcccgacggggccgaccugaaccugaugcccaucuga

SEQ ID NO: 87907 - RNA, 1410 nt, Artificial Sequence
  derived and/or modified CDS sequence (opt1) from neuraminidase__InfluenzaA__AGW00748
augaaccccaaccagaagaucaucaccaucggcagcgugucccugaccaucagcacgaucugcuucuucaugcagaucgccauccucaucaccaccgucacccugcacuucaagcaguacgaguucaacuccccgcccaacaaccaggugaugcugugcgagcccacgaucaucgagcgcaacaucaccgagaucguguaccucaccaacaccacgaucgagaaggagaucugccccaagccggccgaguaccggaacuggagcaagccccagugcgggaucaccggcuucgcgcccuucuccaaggacaacagcauccgccuguccgccgggggcgacaucugggucacccgggagcccuacgugagcugcgacccggacaagugcuaccaguucgcccuggggcagggcaccacgcucaacaacaugcacuccaacaacaccgugcgcgaccggacccccuaccgcacccugcugaugaacgagcucggcguccccuuccaccuggggacgaagcaggucugcaucgccuggagcuccagcuccugccacgacggcaaggccuggcugcacgugugcaucaccggggacgacaagaacgcgaccgccagcuucaucuacaacggccggcucguggacuccguggugagcugguccaaggagauccugcgcacccaggagagcgagugcgucugcaucaacgggacgugcaccguggugaugaccgacggcuccgccagcggcaaggccgacaccaagauccuguucaucgaggaggggaagaucguccacacgagcacccucuccggcagcgcgcagcacguggaggagugcuccugcuacccccgguacccgggggugcgcugcgucugccgggacaacuggaagggcagcaaccgccccaucguggacaucaacaucaaggaccacuccaucgugagcuccuacgucugcagcggccuggugggggacaccccgcggaagaacgacuccagcuccagcucccacugccuggaccccaacaacgaggagggcgggcacggcgugaaggggugggccuucgacgacggcaacgacgucuggaugggccgcaccaucaacgagacgagccggcucggguacgagaccuucaaggugaucgagggcugguccaaccccaagagcaagcugcagaucaaccgccaggucaucguggaccgcggggaccgguccggcuacagcgggaucuucuccguggagggcaagagcugcaucaaccggugcuucuacgucgagcugauccgcggccggaaggaggagaccgaggugcucuggaccagcaacuccaucguggucuucugcgggacgagcggcaccuacgggaccggcuccuggcccgacggggccgaccugaaccugaugcccaucuga

SEQ ID NO: 87908 - RNA, 1410 nt, Artificial Sequence
  derived and/or modified CDS sequence (opt1) from neuraminidase__InfluenzaA__AGW00760
augaaccccaaccagaagaucaucaccaucggcagcgugucccugaccaucagcacgaucugcuucuucaugcagaucgccauccucaucaccaccgucacccugcacuucaagcaguacgaguucaacuccccgcccaacaaccaggugaugcugugcgagcccacgaucaucgagcgcaacaucaccgagaucguguaccucaccaacaccacgaucgagaaggagaucugccccaagccggccgaguaccggaacuggagcaagccccagugcgggaucaccggcuucgcgcccuucuccaaggacaacagcauccgccuguccgccgggggcgacaucugggucacccgggagcccuacgugagcugcgacccggacaagugcuaccaguucgcccuggggcagggcaccacgcucaacaacgugcacuccaacaacaccguccgcgaccggacccccuaccgcacccugcugaugaacgagcucggcgugcccuuccaccuggggacgaagcaggucugcaucgccuggagcuccagcuccugccacgacggcaaggccuggcugcacgugugcaucaccggggacgacaagaacgcgaccgccagcuucaucuacaacggccggcucguggacuccguggucagcugguccaaggagauccugcgcacccaggagagcgagugcgugugcaucaacgggacgugcaccguggucaugaccgacggcuccgccagcggcaaggccgacaccaagauccuguucaucgaggaggggaagaucgugcacacgagcacccucuccggcagcgcgcagcacguggaggagugcuccugcuacccccgguacccggggguccgcugcgugugccgggacaacuggaagggcagcaaccgccccaucguggacaucaacaucaaggaccacuccaucgucagcuccuacgugugcagcggccuggugggggacaccccgcggaagaacgacuccagcuccagcucccacugccuggaccccaacaacgaggagggcgggcacggcgucaaggggugggccuucgacgacggcaacgacguguggaugggccgcaccaucaacgagacgagccggcucggguacgagaccuucaaggucaucgagggcugguccaaccccaagagcaagcuccaggugaaccgccaggugaucgucgaccgcggggaccgguccggcuacagcgggaucuucuccguggagggcaagagcugcaucaaccggugcuucuacguggagcugauccgcggccggaaggaggagaccgagguccuguggaccagcaacuccaucgugguguucugcgggacgagcggcaccuacgggaccggcuccuggcccgacggggccgaccugaaccugaugcccaucuga

SEQ ID NO: 87909 - RNA, 1410 nt, Artificial Sequence; identical to SEQ ID NO: 86170
  derived and/or modified CDS sequence (opt1) from neuraminidase__InfluenzaA__AGW00784

SEQ ID NO: 87910 - RNA, 1410 nt, Artificial Sequence; identical to SEQ ID NO: 86170
  derived and/or modified CDS sequence (opt1) from neuraminidase__InfluenzaA__AGW00796

SEQ ID NO: 87911 - RNA, 1410 nt, Artificial Sequence; identical to SEQ ID NO: 87895
  derived and/or modified CDS sequence (opt1) from neuraminidase__InfluenzaA__AGW00808

SEQ ID NO: 87912 - RNA, 1410 nt, Artificial Sequence; identical to SEQ ID NO: 87399
  derived and/or modified CDS sequence (opt1) from neuraminidase__InfluenzaA__AGW00820

SEQ ID NO: 87913 - RNA, 1410 nt, Artificial Sequence; identical to SEQ ID NO: 86170
  derived and/or modified CDS sequence (opt1) from neuraminidase__InfluenzaA__AGW00832

SEQ ID NO: 87914 - RNA, 1410 nt, Artificial Sequence
  derived and/or modified CDS sequence (opt1) from neuraminidase__InfluenzaA__AGW00844
augaaccccaaccagaagaucaucaccaucggcagcgugucccugaccaucagcacgaucugcuucuucaugcagaucgccauccucaucaccaccgucacccugcacuucaagcaguacgaguucaacuucccgcccaacaaccaggugaugcugugcgagcccacgaucaucgagcgcaacaucaccgagaucguguaccucaccaacaccacgaucgagaaggagaucugccccaagccggccgaguaccggaacugguccaagccccagugcgggaucaccggcuucgcgcccuucagcaaggacaacuccauccgccugagcgccgggggcgacaucugggucacccgggagcccuacguguccugcgacccggacaagugcuaccaguucgcccuggggcagggcaccacgcucaacaacgugcacagcaacaacaccguccgcgaccggacccccuaccgcacccugcugaugaacgagcucggcgugcccuuccaccuggggacgaagcaggucugcaucgccugguccagcuccagcugccacgacggcaaggccuggcugcacgugugcaucaccggggacgacaagaacgcgaccgccuccuucaucuacaacggccggcucguggacagcguggucuccuggagcaaggagauccugcgcacccaggaguccgagugcgugugcaucaacgggacgugcaccguggucaugaccgacggcagcgccuccggcaaggccgacaccaagauccuguucaucgaggaggggaagaucgugcacacgagcacccucagcggcuccgcgcagcacguggaggagugcagcugcuacccccgguacccggggguccgcugcgugugccgggacaacuggaagggcuccaaccgccccaucguggacaucaacaucaaggaccacagcaucgucuccagcuacgugugcuccggccuggugggggacacgccccggaagaacgacagcuccagcuccagccacugccuggaccccaacaacgaggagggcgggcacggcgucaaggggugggccuucgacgacggcaacgacguguggaugggccgcaccaucaacgagaccucccggcucggguacgagaccuucaaggucaucgagggcuggagcaacccgaaguccaagcugcagaucaaccgccaggugaucguggaccgcggggaccggagcggcuacuccgggaucuucagcgucgagggcaaguccugcaucaaccggugcuucuacguggagcugauccgcggccggaaggaggagaccgaggugcucuggaccagcaacagcaucgucguguucugcgggacguccggcaccuacgggaccggcagcuggcccgacggggccgaccugaaccugaugcccaucuga

SEQ ID NO: 87915 - RNA, 1410 nt, Artificial Sequence; identical to SEQ ID NO: 87907
  derived and/or modified CDS sequence (opt1) from neuraminidase__InfluenzaA__AGW00868

SEQ ID NO: 87916 - RNA, 1410 nt, Artificial Sequence
  derived and/or modified CDS sequence (opt1) from neuraminidase__InfluenzaA__AGW00880
augaaccccaaccagaagaucaucaccaucggcagcgugucccugaccaucagcacgaucugcuucuucaugcagaucgccauccucaucaccaccgucacccugcacuucaagcaguacgaguucaacuccccgcccaacaaccaggugaugcugugcgagcccacgaucaucgagcgcaacaucaccgagaucguguaccucaccaacaccacgaucgagaaggagaucugccccaagccggccgaguaccggaacuggagcaagccccagugcgacaucaccggguucgcgcccuucuccaaggacaacagcauccgccuguccgccggcggggacgucugggugacccgggagcccuacgugagcugcgacccggacaagugcuaccaguucgcccugggccaggggaccacgcucaacaacguccacuccaacaacaccgugcgcgaccggacccccuaccgcacccugcugaugaacgagcucggcgugcccuuccaccugggcacgaagcaggucugcaucgccuggagcuccagcuccugccacgacgggaaggccuggcugcacgugugcaucaccggcgacgacaagaacgcgaccgccagcuucaucuacaacgggaagcucguggacuccgucgugagcugguccaaggagauccugcggacccaggagagcgagugcgugugcaucaacggcacgugcaccgucgugaugaccgacggguccgccagcggcaaggccgacaccaagauccuguucaucgaggagggcaagaucgugcacacgagcacccucuccgggagcgcgcagcacgucgaggagugcuccugcuacccccgcuacccggacgugcggugcgugugccgcgacaacuggaagggcagcaaccggcccaucgucgacaucaacaucaaggaccacuccaucgugagccgcuacgugugcuccgggcuggucggcgacacgccccggaagaacgacagcuccagcuccagccacugccuggaccccaacaacgaggagggcgggcacggcgugaaggggugggccuucgacgacggcaacgacgucuggauggggcgcaccaucaacgagaccucccggcucggcuacgagaccuucaaggugaucgagggcuggagcaacccgaaguccaagcugcagaucaaccgccaggugaucgucgaccgcggggaccggagcggcuacuccgggaucuucagcguggagggcaaguccugcaucaaccggugcuucuacguggagcugauccgcgggcggaaggaggagaccgagguccucuggaccagcaacagcaucgugguguucugcggcacguccggcaccuacgggaccggcagcuggcccgacggggccgaccugaaccugaugcccaucuga

SEQ ID NO: 87917 - RNA, 1410 nt, Artificial Sequence
  derived and/or modified CDS sequence (opt1) from neuraminidase__InfluenzaA__AGW00892
augaaccccaaccagaagaucaucaccaucggcagcgugucccugaccaucagcacgaucugcuucuucaugcagaucgccauccucaucaccaccgucacccugcacuucaagcaguacgaguucaacccgccgcccaacaaccaggugaugcugugcgagcccacgaucaucgagcgcaacaucaccgagaucguguaccucaccaacaccacgaucgagaaggagaucugccccaagcccgccgaguaccggaacugguccaagccccagugcgggaucaccggcuucgcgcccuucagcaaggacaacuccauccgccugagcgccgggggcgacaucugggucacccgggagccguacguguccugcgaccccgacaagugcuaccaguucgcccuggggcagggcaccacgcucaacaacgugcacagcaacaacaccguccgcgaccggacccccuaccgcacccugcugaugaacgagcucggcgugcccuuccaccuggggacgaagcaggucugcaucgccugguccagcuccagcugccacgacggcaaggccuggcugcacgugugcaucaccggggacgacaagaacgcgaccgccuccuucaucuacaacggccggcucguggacagcguggucuccuggagcaaggagauccugcgcacccaggaguccgagugcgugugcaucaacgggacgugcaccguggucaugaccgacggcagcgccuccggcaaggccgacaccaagauccuguucaucgaggaggggaagaucgugcacacgagcacccucagcggcuccgcgcagcacguggaggagugcagcugcuacccgcgguaccccgggguccgcugcgugugccgggacaacuggaagggcuccaaccgccccaucguggacaucaacaucaaggaccacagcaucgucuccagcuacgugugcuccggccuggugggggacacgccccggaagaacgacagcuccagcuccagccacugccuggacccgaacaacgaggagggcgggcacggcgucaaggggugggccuucgacgacggcaacgacguguggaugggccgcaccaucaacgagaccucccggcucggguacgagaccuucaaggucaucgagggcuggagcaaccccaaguccaagcugcagaugaaccgccaggugaucguggaccgcggggaccggagcggcuacuccgggaucuucagcgucgagggcaaguccugcaucaaccggugcuucuacguggagcugauccgcggccggaaggaggagaccgaggugcucuggaccagcaacagcaucgucguguucugcgggacguccggcaccuacgggaccggcagcuggcccgacggggccgaccugaaccugaugcccaucuga

SEQ ID NO: 87918 - RNA, 1410 nt, Artificial Sequence
  derived and/or modified CDS sequence (opt1) from neuraminidase__InfluenzaA__AGW00904
augaaccccaaccagaagaucaucaccaucggcagcgugucccugaccaucagcacgaucugcuucuucaugcagaucgccauccucaucaccaccgucacccugcacuucaagcaguacgaguucaacuccccgcccaacaaccaggugaugcugugcgagcccacgaucaucgagcgcaacaucaccgagaucguguaccucaccaacaccacgaucgagaaggagaucugccccaagccggccgaguaccggaacuggagcaagccccagugcgggaucaccggcuucgcgcccuucuccaaggacaacagcauccgccuguccgccgggggcgacaucugggucacccgggagcccuacgugagcugcgggccggacaagugcuaccaguucgcccugggccagggcaccacgcucaacaacaugcacuccaacaacaccgugcgcgaccggacccccuaccgcacccugcugaugaacgagcucgggguccccuuccaccugggcacgaagcaggucugcaucgccuggagcuccagcuccugccacgacgggaaggccuggcugcacgugugcaucaccggcgacgacaagaacgcgaccgccagcuucaucuacaacgggcggcucguggacuccguggugagcugguccaaggagauccugcgcacccaggagagcgagugcgucugcaucaacggcacgugcaccguggugaugaccgacggcuccgccagcgggaaggccgacaccaagauccuguucaucgaggagggcaagaucguccacacgagcacccucuccgggagcgcgcagcacguggaggagugcuccugcuacccccgguacccgggcgugcgcugcgucugccgggacaacuggaagggcagcaaccgccccaucguggacaucaacaucaaggaccacuccaucgugagcuccuacgucugcagcgggcuggugggcgacaccccgcggaagaacgacuccagcuccagcucccacugccuggaccccaacaacgaggagggcgggcacggggugaagggcugggccuucgacgacggcaacgacgucuggauggggcgcaccaucaacgagacgagccggcucggcuacgagaccuucaaggugaucgaggggugguccaaccccaagagcaagcugcagaucaaccgccaggucaucguggaccggggcgaccgcuccggguacagcggcaucuucuccguggagggcaagagcugcaucaaccggugcuucuacgucgagcugauccgcgggcggaaggaggagaccgaggugcucuggaccagcaacuccaucguggucuucugcggcacgagcgggaccuacggcaccggguccuggcccgacggcgccgaccugaaccugaugcccaucuga

SEQ ID NO: 87919 - RNA, 1410 nt, Artificial Sequence
  derived and/or modified CDS sequence (opt1) from neuraminidase__InfluenzaA__AGW00916
augaaccccaaccagaagaucaucaccaucggcagcgugucccugaccaucagcacgaucugcuucuucaugcagaucgccauccucaucaccaccgucacccugcacuucaagcaguacgaguucaacuccccgcccaacaaccaggugaugcugugcgagcccacgaucaucgagcgcaacaucaccgagaucguguaccucaccaacaccacgaucgagaaggagaucugccccaagccggccgaguaccggaacuggagcaagccccagugcgggaucaccggcuucgcgcccuucuccaaggacaacagcauccgccuguccgccgggggcgacaucugggucacccgggagcccuacgugagcugcgacccggacaagugcuaccaguucgcccuggggcagggcaccacgcucaacaacaugcacuccaacaacaccgugugcgaccgcacccccuaccggacccugcugaugaacgagcucggcguccccuuccaccuggggacgaagcaggucugcaucgccuggagcuccagcuccugccacgacggcaaggccuggcugcacgugugcaucaccggggacgacaagaacgcgaccgccagcuucaucuacaacggccgccucguggacuccguggugagcugguccaaggagauccugcggacccaggagagcgagugcgucugcaucaacgggacgugcaccguggugaugaccgacggcuccgccagcggcaaggccgacaccaagauccuguucaucgaggaggggaagaucguccacacgagcacccucuccggcagcgcgcagcacguggaggagugcuccugcuacccccgcuacccgggggugcggugcgucugccgcgacaacuggaagggcagcaaccggcccaucguggacaucaacaucaaggaccacuccaucgugagcuccuacgucugcagcggccuggugggggacaccccgcgcaagaacgacuccagcuccagcucccacugccuggaccccaacaacgaggagggcgggcacggcgugaaggggugggccuucgacgacggcaacgacgucuggaugggccggaccaucaacgagacgagccgccucggguacgagaccuucaaggugaucgagggcugguccaaccccaagagcaagcugcagaucaaccggcaggucaucguggaccgcggggaccgguccggcuacagcgggaucuucuccguggagggcaagagcugcaucaaccgcugcuucuacgucgagcugauccggggccgcaaggaggagaccgaggugcucuggaccagcaacuccaucguggucuucugcgggacgagcggcaccuacgggaccggcuccuggcccgacggggccgaccugaaccugaugcccaucuga

SEQ ID NO: 87920 - RNA, 1410 nt, Artificial Sequence; identical to SEQ ID NO: 87895
  derived and/or modified CDS sequence (opt1) from neuraminidase__InfluenzaA__AGW00934

SEQ ID NO: 87921 - RNA, 1410 nt, Artificial Sequence
  derived and/or modified CDS sequence (opt1) from neuraminidase__InfluenzaA__AGW01247
augaaccccaaccagaagaucaucaccaucggcagcgugucccugaccaucagcacgaucugcuucuucaugcagaucgccauccucaucaccaccgucacccugcacuucaagcaguacgaguucaacuccccgcccaacaaccaggugaugcugugcgagcccacgaucaucgagcgcaacaucaccgagaucguguaccucaccaacaccacgaucgagaaggagaucugccccaagccggccgaguaccggaacuggagcaagccccagugcgggaucaccggcuucgcgcccuucuccaaggacaacagcauccgccuguccgccgggggcgacaucugggucacccgggagcccuacgugagcugcgacccggacaagugcuaccaguucgcccuggggcagggcaccacgcucaacaacgugcacuccaacaacaccguccgcgaccggacccccuaccgcacccugcugaugaacgagcucggcgugcccuuccaccuggggacgaagcaggucugcaucgccuggagcuccagcuccugccacgacggcaaggccuggcugcacgugugcaucaccggggacgacaagaacgcgaccgccagcuucaucuacaacggccggcucguggacuccguggucagcugguccaaggagauccugcgcacccaggagagcgagugcgugugcaucaacgggacgugcaccguggucaugaccgacggcuccgccagcggcaaggccgacaccaagauccuguucaucgaggaggggaagaucgugcacacgagcacccucuccggcagcgcgcagcacguggaggagugcuccugcuacccccgguacccggggguccgcugcgugugccgggacaacuggaagggcagcaaccgccccaucguggacaucaacaucaaggaccacuccaucgucagcuccuacgugugcagcggccuggugggggacaccccgcggaagaaggacuccagcuccagcucccacugccuggaccccaacaacgaggagggcgggcacggcgucaaggggugggccuucgacgacggcaacgacguguggaugggccgcaccaucaacgagacgagccggcucggguacgagaccuucaaggucaucgagggcugguccaaccccaagagcaagcugcagaucaaccgccaggugaucguggaccgcggggaccgguccggcuacagcgggaucuucuccgucgagggcaagagcugcaucaaccggugcuucuacguggagcugauccgcggccggaaggaggagaccgaggugcucuggaccagcaacuccaucgucguguucugcgggacgagcggcaccuacgggaccggcuccuggcccgacggggccgaccugaaccugaugcccaucuga

SEQ ID NO: 87922 - RNA, 1410 nt, Artificial Sequence; identical to SEQ ID NO: 86170
  derived and/or modified CDS sequence (opt1) from neuraminidase__InfluenzaA__AGW01259

SEQ ID NO: 87923 - RNA, 1410 nt, Artificial Sequence; identical to SEQ ID NO: 87907
  derived and/or modified CDS sequence (opt1) from neuraminidase__InfluenzaA__AGW01298

SEQ ID NO: 87924 - RNA, 1410 nt, Artificial Sequence; identical to SEQ ID NO: 87399
  derived and/or modified CDS sequence (opt1) from neuraminidase__InfluenzaA__AGW01322

SEQ ID NO: 87925 - RNA, 1410 nt, Artificial Sequence
  derived and/or modified CDS sequence (opt1) from neuraminidase__InfluenzaA__AGW01334
augaaccccaaccagaagaucaucaccaucggcagcgugucccugaccaucagcacgaucugcuucuucaugcagaucgccauccucaucaccaccgucacccugcacuucaagcaguacgaguucaacuccccgcccaacaaccaggugaugcugugcgagcccacgaucaucgagcgcaacaucaccgagaucguguaccucaccaacaccacgaucgagaaggagaucugccccaagccggccgaguaccggaacuggagcaagccccagugcgggaucaccggcuucgcgcccuucuccaaggacaacagcauccgccuguccgccgggggcgacaucugggucacccgggagcccuacgugagcugcgacccggacaagugcuaccaguucgcccuggggcagggcaccacgcucaacaacgugcacuccaacaacaccguccgcgaccggacccccuaccgcacccugcugaugaacgagcucggcgugcccuuccaccuggggacgaagcaggucugcaucgccuggagcuccagcuccugccacgacggcaaggccuggcugcacgugugcaucaccggggacgacaagaacgcgaccgccagcuucaucuacaacggccggcucguggacuccguggucagcugguccaaggagauccugcgcacccaggagagcgagugcgugugcaucaacgggacgugcaccguggucaugaccgacggcuccgccagcggcaaggccgacaccaagauccuguucaucgaggaggggaagaucgugcacacgagcacccucuccggcagcgcgcagcacguggaggagugcuccugcuacccccgguacccggggguccgcugcgugugccgggacaacuggaagggcagcaaccgccccaucguggacaucaacaucaaggaccacuccaucgucagcuccuacgugugcagcggccuggugggggacaccccgcggaagaacgacuccagcuccagcucccacugccuggaccccaacaacgaggagggcgggcacggcgucaaggggugggccuucgacgacggcaacgacguguggaugggccgcaccaucaacgagacgagccggcucggguacgagaccuucaaggucaucgagggcugguccaaccccaagagcaagcugcagaucaaccgccaggugaucguggaccgcggggaccgguccggcuacagcgggaucuucuccgucgagggcaagagcugcaucaaccggugcuucuacguggagcugauccgcggccggaaggaggaggccgaggugcucuggaccagcaacuccaucgucguguucugcgggaccagcggcacguacgggaccggcuccuggcccgacggggccgaccugaaccugaugcccaucuga

SEQ ID NO: 87926 - RNA, 1410 nt, Artificial Sequence; identical to SEQ ID NO: 86170
  derived and/or modified CDS sequence (opt1) from neuraminidase__InfluenzaA__AGW01346

SEQ ID NO: 87927 - RNA, 1410 nt, Artificial Sequence
  derived and/or modified CDS sequence (opt1) from neuraminidase__InfluenzaA__AGW01358
augaaccccaaccagaagaucaucaccaucggcagcgugucccugaccaucagcacgaucugcuucuucaugcagaucgccauccucaucaccaccgucacccugcacuucaagcaguacgaguucaacuccccgcccaacaaccaggugaugcugugcgagcccacgaucaucgagcgcaacaucaccgagaucguguaccucaccaacaccacgaucgagaaggagaucugccccaagccgaccgaguaccggaacuggagcaagccccagugcgggaucaccggcuucgcccccuucuccaaggacaacagcauccgccuguccgccgggggcgacaucugggucacccgggagcccuacgugagcugcgacccggacaagugcuaccaguucgcgcuggggcagggcacgacccucaacaacgugcacuccaacaacaccguccgcgaccggacccccuaccgcacgcugcugaugaacgagcucggcgugcccuuccaccuggggaccaagcaggucugcaucgccuggagcuccagcuccugccacgacggcaaggccuggcugcacgugugcaucaccggggacgacaagaacgccaccgcgagcuucaucuacaacggccggcucguggacuccguggucagcugguccaaggagauccugcgcacgcaggagagcgagugcgugugcaucaacgggaccugcaccguggucaugaccgacggcuccgccagcggcaaggccgacacgaagauccuguucaucgaggaggggaagaucgugcacaccagcacccucuccggcagcgcccagcacguggaggagugcuccugcuacccccgguacccggggguccgcugcgugugccgggacaacuggaagggcagcaaccgccccaucguggacaucaacaucaaggaccacuccaucgucagcuccuacgugugcagcggccuggugggggacaccccgcggaagaacgacuccagcuccagcucccacugccuggaccccaacaacgaggagggcgggcacggcgucaaggggugggcguucgacgacggcaacgacguguggaugggccgcacgaucaacgagaccagccggcucggguacgagaccuucaaggucaucgagggcugguccaaccccaagagcaagcugcagaucaaccgccaggugaucguggaccgcggggaccgguccggcuacagcgggaucuucuccgucgagggcaagagcugcaucaaccggugcuucuacguggagcugauccgcggccggaaggaggagaccgaggugcucuggacgagcaacuccaucgucguguucugcgggaccagcggcaccuacgggaccggcuccuggcccgacggggccgaccugaaccugaugcccaucuga

SEQ ID NO: 87928 - RNA, 1410 nt, Artificial Sequence; identical to SEQ ID NO: 86170
  derived and/or modified CDS sequence (opt1) from neuraminidase__InfluenzaA__AGW01370

SEQ ID NO: 87929 - RNA, 1410 nt, Artificial Sequence; identical to SEQ ID NO: 86170
  derived and/or modified CDS sequence (opt1) from neuraminidase__InfluenzaA__AGW01382

SEQ ID NO: 87930 - RNA, 1410 nt, Artificial Sequence
  derived and/or modified CDS sequence (opt1) from neuraminidase__InfluenzaA__AGW01394
augaaccccaaccagaagaucaucaccaucggcagcgugucccugaccaucagcacgaucugcuucuucaugcagaucgccauccucaucaccaccgucacccugcacuucaagcaguacgaguucgacuccccgcccaacaaccaggugaugcugugcgagcccacgaucaucgagcgcaacaucaccgagaucguguaccucaccaacaccacgaucgagaaggagaucugccccaagccggccgaguaccggaacuggagcaagccccagugcgggaucaccggcuucgcgcccuucuccaaggacaacagcauccgccuguccgccgggggcgacaucugggucacccgggagcccuacgugagcugcgacccggacaagugcuaccaguucgcccuggggcagggcaccacgcucaacaacgugcacuccaacaacaccguccgcgaccggacccccuaccgcacccugcugaugaacgagcucggcgugcccuuccaccuggggacgaagcaggucugcaucgccuggagcuccagcuccugccacgacggcaaggccuggcugcacgugugcaucaccggggacgacaagaacgcgaccgccagcuucaucuacaacggccggcucguggacuccaucgugagcugguccaaggacauccugcgcacccaggagagcgagugcgucugcaucaacgggacgugcaccguggugaugaccgacggcuccgccagcggcaaggccgacaccaagauccuguucaucgaggaggggaagaucguccacacgagcacccucuccggcagcgcgcagcacguggaggagugcuccugcuacccccgguacccgggggugcgcugcgucugccgggacaacuggaagggcagcaaccgccccaucguggacaucaacaucaaggaccacuccaucgugagcuccuacgucugcagcggccuggugggggacaccccgcggaagaacgacuccagcuccagcucccacugccuggaccccaacaacgaggagggcgggcacggcgugaaggggugggccuucgacgacggcaacgacgucuggaugggccgcaccaucaacgagacgagccggcucggguacgagaccuucaaggugaucgagggcugguccaaccccaagagcaagcugcagaucaaccgccaggucaucguggaccgcggggaccgguccggcuacagcgggaucuucuccguggagggcaagagcugcaucaaccggugcuucuacgucgagcugauccgcggccggaaggaggagaccgaggugcucuggaccagcaacuccaucguggucuucugcgggacgagcggcaccuacgggaccggcuccuggcccgacggggccgaccugaaccugaugcccaucuga

SEQ ID NO: 87931 - RNA, 1410 nt, Artificial Sequence
  derived and/or modified CDS sequence (opt1) from neuraminidase__InfluenzaA__AGW01406
augaaccccaaccagaagaucaucaccaucggcagcgugucccugaccaucagcacgaucugcuucuucaugcagaucgccauccucaucaccaccgucacccugcacuucaagcaguacgaguucaacuccccgcccaacaaccaggugaugcugugcgagcccacgaucaucgagcgcaacaucaccgagaucguguaccucaccaacaccacgaucgagaaggagaucugccccaagccggccgaguaccggaacuggagcaagccccagugcgacaucaccggguucgcgcccuucuccaaggacaacagcauccgccuguccgccggcggggacaucugggucacccgggagcccuacgugagcugcgacccggacaagugcuaccaguucgcccugggccaggggaccacgcucaacaacaugcacuccaacaacaccgugcgcgaccggacccccuaccgcacccugcugaugaacgagcucggcguccccuuccaccugggcacgaagcaggucugcaucgccuggagcuccagcuccugccacgacgggaaggccuggcugcacgugugcaucaccggcgacgacaagaacgcgaccgccagcuucaucuacaacgggcggcucguggacuccguggugagcugguccaaggagauccugcgcacccaggagagcgagugcgucugcaucaacggcacgugcaccguggugaucaccgacggguccgccagcggcaaggccgacaccaagauccuguucaucgaggagggcaagaucguccacacgagcacccucuccgggagcgcgcagcacguggaggagugcuccugcuacccccgguacccgggcgugcgcugcgucugccgggacaacuggaaggggagcaaccgccccaucguggacaucaacaucaaggaccacuccaucgugagcuccuacgucugcagcggccuggugggcgacaccccgcggaagaacgacuccagcuccagcucccacugccuggaccccaacaacgaggagggcgggcacggggugaagggcugggccuucgacgacgggaacgacgucuggaugggccgcaccaucaacgagacgagccggcucggcuacgagaccuucaaggugaucgaggggugguccaaccccaagagcaagcugcagaucaaccgccaggucaucguggaccggggcgaccgcuccggguacagcggcaucuucuccguggagggcaagagcugcaucaaccggugcuucuacgucgagcugauccgcgggcggaaggaggagaccgaggugcucuggaccagcaacuccaucguggucuucugcggcacgagcgggaccuacggcaccggguccuggcccgacggcgccgaccugaaccugaugcccaucuga

SEQ ID NO: 87932 - RNA, 1410 nt, Artificial Sequence
  derived and/or modified CDS sequence (opt1) from neuraminidase__InfluenzaA__AGW01418
augaaccccaaccagaagaucaucaccaucggcagcgugucccugaccaucagcacgaucugcuucuucaugcagaucgccauccucaucaccaccgucacccugcacuucaagcaguacgaguucaacuccccgcccaacaaccaggugaugcugugcgagcccacgaucaucgagcgcaacaucaccgagaucguguaccucaccaacaccacgaucgagaaggagaucugccccaagccggccgaguaccggaacuggagcaagccccagugcgggaucaccggcuucgcgcccuucuccaaggacaacagcauccgccuguccgccgggggcgacaucugggucacccgggagcccuacgugagcugcgacccggacaagugcuaccaguucgcccuggggcagggcaccacgcucaacaacaugcacuccaacaacaccgugcgcgaccggacccccuaccgcacccugcugaugaacgagcucggcguccccuuccaccuggggacgaagcaggucugcaucgccuggagcuccagcuccugccacgacggcaaggccuggcugcacgugugcaucaccggggacgacaagaacgcgaccgccagcuucaucuacaacggccggcucguggacuccguggugagcugguccaaggagauccugcgcacccaggagagcgagugcgucugcaucaacgggacgugcaccguggugaugaccgacggcuccgccagcggcaaggccgacaccaagauccuguucaucgaggaggggaagaucguccacacgagcacccucuccggcagcgcgcagcacguggaggagugcuccugcuacccccgguacccgggggugcgcugcgucugccgggacaacuggaagggcagcaaccgccccaucguggacaucaacaucaaggaccacuccaucgugagcuccuacgucugcagcggccuggugggggacaccccgcggaagaacgacuccagcuccagcucccacugccuggaccccaacaacgaggagggcgggcacggcgugaaggggugggccuucgacgacggcaacgacgucuggaugggccgcaccaucaacgagacgagccggcucggguacgagaccuucaaggugaucgagggcugguccaaccccaagagcaagcugcagaucaaccgccaggucaucguggaccgcggggaccgguccggcuacagcgggaucuucuccguggagggcaagagcugcaucaaccggugcuucuacgucgagcugauccgcggccggaaggaggagaccggggugcucuggaccagcaacuccaucguggucuucugcggcacgagcgggaccuacggcaccggguccuggcccgacggcgccgaccugaaccugaugcccaucuga

SEQ ID NO: 87933 - RNA, 1410 nt, Artificial Sequence; identical to SEQ ID NO: 86170
  derived and/or modified CDS sequence (opt1) from neuraminidase__InfluenzaA__AGW01430

SEQ ID NO: 87934 - RNA, 1410 nt, Artificial Sequence; identical to SEQ ID NO: 86170
  derived and/or modified CDS sequence (opt1) from neuraminidase__InfluenzaA__AGW01442

SEQ ID NO: 87935 - RNA, 1410 nt, Artificial Sequence; identical to SEQ ID NO: 86170
  derived and/or modified CDS sequence (opt1) from neuraminidase__InfluenzaA__AGW01454

SEQ ID NO: 87936 - RNA, 1410 nt, Artificial Sequence; identical to SEQ ID NO: 87895
  derived and/or modified CDS sequence (opt1) from neuraminidase__InfluenzaA__AGW01466

SEQ ID NO: 87937 - RNA, 1410 nt, Artificial Sequence; identical to SEQ ID NO: 86170
  derived and/or modified CDS sequence (opt1) from neuraminidase__InfluenzaA__AGW01478

SEQ ID NO: 87938 - RNA, 1410 nt, Artificial Sequence
  derived and/or modified CDS sequence (opt1) from neuraminidase__InfluenzaA__AGW01490
augaaccccaaccagaagaucaucaccaucagcuccgugagccugaccaucuccacgaucugcuucuucaugcagaucgccauccucaucaccaccgucacccugcacuucaagcaguacgaguucaacagcccgcccaacaaccaggugaugcugugcgagcccacgaucaucgagcgcaacaucaccgagaucguguaccucaccaacaccacgaucgagaaggagaucugccccaagccggccgaguaccggaacugguccaagccccagugcggcaucaccggguucgcgcccuucagcaaggacaacuccauccgccugagcgccggcggggacaucugggucacccgggagcccuacguguccugcgacccggacaagugcuaccaguucgcccugggccaggggaccacgcucaacaacgugcacagcaacaacaccguccgcgaccggacccccuaccgcacccugcugaugaacgagcucggcgugcccuuccaccugggcacgaagcaggucugcaucgccugguccagcuccagcugccacgacgggaaggccuggcugcacgugugcaucaccggcgacgacaagaacgcgaccgccuccuucaucuacaacgggcggcucguggacagcguggucuccuggagcaaggagauccugcgcacccaggaguccgagugcgugugcaucaacggcacgugcaccguggucaugaccgacgggagcgccagcggcaaggccgacaccaagauccuguucaucgaggagggcaagaucgugcacacguccacccucagcggguccgcgcagcacguggaggagugcagcugcuacccccgguacccgggcguccgcugcgugugccgggacaacuggaagggguccaaccgccccaucguggacaucaacaucaaggaccacagcaucgucuccagcuacgugugcuccggccuggugggcgacacgccccggaagaacgacagcuccagcuccagccacugccuggaccccaacaacgaggagggcgggcacggggucaagggcugggccuucgacgacgggaacgacguguggaugggccgcaccaucaacgagaccucccggcucggcuacgagaccuucaaggucaucgagggguggagcaacuccaagagcaagcugcagaucaaccgccaggugaucguggaccggggcgaccgcuccggguacagcggcaucuucagcgucgaggggaaguccugcaucaaccggugcuucuacguggagcugauccgcggccggaaggaggagaccgaggugcucuggaccagcaacuccaucgucguguucugcggcacgagcgggaccuacggcaccggguccuggccggacggcgccgaccugaaccugaugcccaucuga

SEQ ID NO: 87939 - RNA, 1410 nt, Artificial Sequence; identical to SEQ ID NO: 86170
  derived and/or modified CDS sequence (opt1) from neuraminidase__InfluenzaA__AGW01538

SEQ ID NO: 87940 - RNA, 1410 nt, Artificial Sequence; identical to SEQ ID NO: 87895
  derived and/or modified CDS sequence (opt1) from neuraminidase__InfluenzaA__AGW01562

SEQ ID NO: 87941 - RNA, 1410 nt, Artificial Sequence; identical to SEQ ID NO: 86170
  derived and/or modified CDS sequence (opt1) from neuraminidase__InfluenzaA__AGW01574

SEQ ID NO: 87942 - RNA, 1410 nt, Artificial Sequence; identical to SEQ ID NO: 86170
  derived and/or modified CDS sequence (opt1) from neuraminidase__InfluenzaA__AGW01586

SEQ ID NO: 87943 - RNA, 1410 nt, Artificial Sequence; identical to SEQ ID NO: 86170
  derived and/or modified CDS sequence (opt1) from neuraminidase__InfluenzaA__AGW01598

SEQ ID NO: 87944 - RNA, 1410 nt, Artificial Sequence; identical to SEQ ID NO: 87895
  derived and/or modified CDS sequence (opt1) from neuraminidase__InfluenzaA__AGW01610

SEQ ID NO: 87945 - RNA, 1410 nt, Artificial Sequence; identical to SEQ ID NO: 86170
  derived and/or modified CDS sequence (opt1) from neuraminidase__InfluenzaA__AGW01622

SEQ ID NO: 87946 - RNA, 1410 nt, Artificial Sequence; identical to SEQ ID NO: 86170
  derived and/or modified CDS sequence (opt1) from neuraminidase__InfluenzaA__AGW01634

SEQ ID NO: 87947 - RNA, 1410 nt, Artificial Sequence
  derived and/or modified CDS sequence (opt1) from neuraminidase__InfluenzaA__AGW01646
augaaccccaaccagaagaucaucaccaucggcagcgugucccugaccaucagcacgaucugcuucuucaugcagaucgccauccucaucaccaccgucacccugcacuucaagcaguacgaguucaacuccccgcccaacaaccaggugaugcugugcgagcccacgaucaucgagcgcaacaucaccgagaucguguaccucaccaacaccacgaucgagaaggagaucugccccaagccggccgaguaccggaacuggagcaagccccagugcgggaucaccggcuucgcgcccuucuccaaggacaacagcauccgccuguccgccgggggcgacaucugggucacccgggagcccuacgugagcugcgacccggacaagugcuaccaguucgcccuggggcagggcaccacgcucaacaacgugcacuccaacaacaccguccgcgaccggacccccuaccgcacccugcugaugaacgagcucggcgugcccuuccaccuggggacgaagcaggucugcaucgccuggagcuccagcuccugccacgacggcaaggccuggcugcacgugugcaucaccggggacgacaagaacgcgaccgccagcuucaucuacaacggccggcucguggacuccguggucagcugguccaaggagauccugcgcacccaggagagcgagugcgugugcaucgacgggacgugcaccguggucaugaccgacggcuccgccagcggcaaggccgacaccaagauccuguucaucgaggaggggaagaucgugcacacgagcacccucuccggcagcgcgcagcacguggaggagugcuccugcuacccccgguacccggggguccgcugcgugugccgggacaacuggaagggcagcaaccgccccaucguggacaucaacaucaaggaccacuccaucgucagcuccuacgugugcagcggccuggugggggacaccccgcggaagaacgacuccagcuccagcucccacugccuggaccccaacaacgaggagggcgggcacggcgucaaggggugggccuucgacgacggcaacgacguguggaugggccgcaccaucaacgagacgagccggcucggguacgagaccuucaaggucaucgagggcugguccaaccccaagagcaagcugcagaucaaccgccaggugaucguggaccgcggggaccgguccggcuacagcgggaucuucuccgucgagggcaagagcugcaucaaccggugcuucuacguggagcugauccgcggccggaaggaggagaccgaggugcucuggaccagcaacuccaucgucguguucugcgggacgagcggcaccuacgggaccggcuccuggcccgacggggccgaccugaaccugaugcccaucuga

SEQ ID NO: 87948 - RNA, 1410 nt, Artificial Sequence; identical to SEQ ID NO: 86170
  derived and/or modified CDS sequence (opt1) from neuraminidase__InfluenzaA__AGW01670

SEQ ID NO: 87949 - RNA, 1410 nt, Artificial Sequence; identical to SEQ ID NO: 86170
  derived and/or modified CDS sequence (opt1) from neuraminidase__InfluenzaA__AGW01682

SEQ ID NO: 87950 - RNA, 1410 nt, Artificial Sequence; identical to SEQ ID NO: 87907
  derived and/or modified CDS sequence (opt1) from neuraminidase__InfluenzaA__AGW01704

SEQ ID NO: 87951 - RNA, 1410 nt, Artificial Sequence
  derived and/or modified CDS sequence (opt1) from neuraminidase__InfluenzaA__AGW01716
augaaccccaaccagaagaucaucaccaucggcagcgugucccugaccaucagcacgaucugcuucuucaugcagaucgccauccucaucaccaccgucacccugcacuucaagcaguacgaguucaacuccccgcccaacaaccaggugaugcugugcgagcccacgaucaucgagcgcaacaucaccgagaucguguaccucaccaacaccacgaucgagaaggagaucugccccaagccggccgaguaccggaacuggagcaagccccagugcgggaucaccggcuucgcgcccuucuccaaggacaacagcauccgccuguccgccgggggcgacaucugggucacccgggagcccuacgugagcugcgacccggacaagugcuaccaguucgcccuggggcagggcaccacgcucaacaacaugcacuccaacaacaccgugcgcgaccggacccccuaccgcacccugcugaugaacgagcucggcguccccuuccaccuggggacgaagcaggucugcaucgccuggagcuccagcuccugccacgacggcaaggccuggcugcacgugugcaucaccggggacgacaagaacgcgaccgccagcuucaucuacaacggccggcucguggacuccguggugagcugguccaaggagauccugcgcacccaggagagcgagugcgucugcaucaacgggacgugcaccguggugaugaccgacggcuccgccagcggcaaggccgacaccaagauccuguucaucgaggaggggaagaucguccacacgagcacccucuccggcagcgcgcagcacguggaggagugcuccugcuacccccgguacccgggggugcgcugcgucugccgggacaacuggaagggcagcaaccgccccaucguggacaucaacaucaaggaccacuccaucgugagcuccuacgucugcagcggccuggugggggacaccccgcggaagaacgacuccagcuccagcucccacugccuggaccccaacaacgaggagggcgggcacggcgugaaggggugggccuucgacgacggcaacgacgucuggaugggccgcaccaucaacgagacgagccggcucggguacgagaccuucaaggugaucgagggcugguccaaccccaagagcaagcugcagaucaaccgccaggucaucguggaccgcggggaccgguccggcuacagcgggaucuucuccguggagggccggagcugcaucaaccgcugcuucuacgucgagcugauccggggccgcaaggaggagaccgaggugcucuggaccagcaacuccaucguggucuucugcgggacgagcggcaccuacgggaccggcuccuggcccgacggggccgaccugaaccugaugcccaucuga

SEQ ID NO: 87952 - RNA, 1410 nt, Artificial Sequence
  derived and/or modified CDS sequence (opt1) from neuraminidase__InfluenzaA__AGW01728
augaaccccaaccagaagaucaucaccaucggcagcgugucccugaccaucagcacgaucugcuucuucaugcagaucgccauccucaucaccaccgucacccugcacuucaagcaguacgaguucaacuccccgcccaacaaccaggugaugcugugcgagcccacgaucaucgagcgcaacaucaccgagaucguguaccucaccaacaccacgaucgagaaggagaucugccccaagccggccgaguaccggaacuggagcaagccccagugcgggaucaccggcuucgcgcccuucuccaaggacaacagcauccgccuguccgccgggggcgacaucugggucacccgggagcccuacgugagcugcgacccggacaagugcuaccaguucgcccuggggcagggcaccacgcucaacaacaugcacuccaacaacaccgugcgcgaccggacccccuaccgcacccugcugaugaacgagcucggcguccccuuccaccuggggacgaagcaggucugcaucgccuggagcuccagcuccugccacgacggcaaggccuggcugcacgugugcaucaccggggacgacaagaacgcgaccgccagcuucaucuacaacggccggcucguggacuccguggugagcugguccaaggagauccugcgcacccaggagagcgagugcgucugcaucaacgggacgugcaccguggugaugaccgacggcuccgccagcggcaaggccgacaccaagauccuguucaucgaggaggggaagaucguccacacgagcacccucuccggcagcgcgcagcacguggaggagugcuccugcuacccccgguacccgggggugcgcugcgucugccgggacaacuggaagggcagcaaccgccccaucguggacaucaacaucaaggaccacuccaucgugagcuccuacgucugcagcggccuggugggggacaccccgcggaagaacgacuccagcuccagcucccacugccuggaccccaacaacgaggagggcgggcacggcgugaaggggugggccuucgacgacggcaacgacgucuggaugggccgcaccaucaacgagacgagccggcucggguacgagaccuucaaggugaucgagggcugguccaaccccaagagcaagcugcagaucaaccgccaggucaucguggaccgcggggaccgguccggcuacagcgggaucuucuccguggagggcaagagcugcaucaaccggugcuucuacgucgagcugauccgcggccggaaggaggagaccgaggugcucuggaccagcaacuccguggucguguucugcgggacgagcggcaccuacgggaccggcuccuggcccgacggggccgaccugaaccugaugcccaucuga

SEQ ID NO: 87953 - RNA, 1410 nt, Artificial Sequence; identical to SEQ ID NO: 86170
  derived and/or modified CDS sequence (opt1) from neuraminidase__InfluenzaA__AGW01740

SEQ ID NO: 87954 - RNA, 1410 nt, Artificial Sequence
  derived and/or modified CDS sequence (opt1) from neuraminidase__InfluenzaA__AGW01752
augaaccccaaccagaagaucaucaccaucggcagcgugucccugaccaucagcacgaucugcuucuucaugcagaucgccauccucaucaccaccgucacccugcacuucaagcaguacgaguucaacuccccgcccaacaaccaggugaugcugugcgagcccacgaucaucgagcgcaacaucaccgagaucguguaccucaccaacaccacgaucgagaaggagaucugccccaagccggccgaguaccggaacuggagcaagccccagugcgggaucaccggcuucgcgcccuucuccaaggacaacagcauccgccuguccgccgggggcgacaucugggucacccgggagcccuacgugagcugcgacccggacaagugcuaccaguucgcccuggggcagggcaccacgcucaacaacgugcacuccaacaacaccguccgcgaccggacccccuaccgcacccugcugaugaacgagcucggcgugcccuuccaccuggggacgaagcaggucugcaucgccuggagcuccagcuccugccacgacggcaaggccuggcugcacgugugcaucaccggggacgacaagaacgcgaccgccagcuucaucuacaacggccggcucguggacuccguggucagcugguccaaggagauccugcgcacccaggagagcgagugcgugugcaucaacgggacgugcaccguggucaugaccgacggcuccgccagcggcaaggccgacaccaagauccuguucaucgaggaggggaagaucgugcacacgagcacccucuccggcagcgcgcagcacguggaggagugcuccugcuacccccgguacccggggguccgcugcgugugccgggacaacuggaagggcagcaaccgccccaucguggacaucaacaucaaggaccacuccaucgucagcuccuacgugugcagcggccuggugggggacaccccgcggaagaacgacuccagcuccagcucccacugccuggaccccaacaacgaggagggcgggcacggcgucaaggggugggccuucgacgacggcaacgacguguggaugggccgcaccaucaacgagacgagccggcucggguacgagaccuucaaggucaucggcgggugguccaaccccaagagcaagcugcagaucaaccgccaggugaucguggaccggggcgaccgcuccggguacagcggcaucuucuccgucgagggcaagagcugcaucaaccggugcuucuacguggagcugauccgcgggcggaaggaggagaccgaggugcucuggaccagcaacuccaucgucguguucugcggcacgagcgggaccuacggcaccggguccuggcccgacggcgccgaccugaaccugaugcccaucuga

SEQ ID NO: 87955 - RNA, 1410 nt, Artificial Sequence; identical to SEQ ID NO: 86170
  derived and/or modified CDS sequence (opt1) from neuraminidase__InfluenzaA__AGW01764

SEQ ID NO: 87956 - RNA, 1410 nt, Artificial Sequence; identical to SEQ ID NO: 87907
  derived and/or modified CDS sequence (opt1) from neuraminidase__InfluenzaA__AGW01776

SEQ ID NO: 87957 - RNA, 1410 nt, Artificial Sequence; identical to SEQ ID NO: 87895
  derived and/or modified CDS sequence (opt1) from neuraminidase__InfluenzaA__AGW01788

SEQ ID NO: 87958 - RNA, 1410 nt, Artificial Sequence; identical to SEQ ID NO: 87907
  derived and/or modified CDS sequence (opt1) from neuraminidase__InfluenzaA__AGW01800

SEQ ID NO: 87959 - RNA, 1410 nt, Artificial Sequence; identical to SEQ ID NO: 87895
  derived and/or modified CDS sequence (opt1) from neuraminidase__InfluenzaA__AGW01812

SEQ ID NO: 87960 - RNA, 1410 nt, Artificial Sequence; identical to SEQ ID NO: 87895
  derived and/or modified CDS sequence (opt1) from neuraminidase__InfluenzaA__AGW01824

SEQ ID NO: 87961 - RNA, 1410 nt, Artificial Sequence; identical to SEQ ID NO: 87918
  derived and/or modified CDS sequence (opt1) from neuraminidase__InfluenzaA__AGW01848

SEQ ID NO: 87962 - RNA, 1410 nt, Artificial Sequence
  derived and/or modified CDS sequence (opt1) from neuraminidase__InfluenzaA__AGW01860
augaaccccaaccagaagaucaucaccaucggcagcgugucccugaccaucagcacgaucugcuucuucaugcagaucgccauccucaucaccaccgucacccugcacuucaagcaguacgaguucaacucccugccgaacaaccaggugaugcucugcgagcccacgaucaucgagcgcaacaucaccgagaucguguaccugaccaacaccacgaucgagaaggagaucugccccaagcccgccgaguaccggaacuggagcaagccgcagugcgggaucaccggcuucgcgcccuucuccaaggacaacagcauccgccuguccgccgggggcgacaucugggucacccgggagcccuacgugagcugcgaccccgacaagugcuaccaguucgcccucgggcagggcaccacgcugaacaacgugcacuccaacaacaccguccgcgaccggaccccguaccgcacccugcucaugaacgagcugggcgugcccuuccaccuggggacgaagcaggucugcaucgccuggagcuccagcuccugccacgacggcaaggccuggcuccacgugugcaucaccggggacgacaagaacgcgaccgccagcuucaucuacaacggccggcugguggacuccguggucagcugguccaaggagauccugcgcacccaggagagcgagugcgugugcaucaacgggacgugcaccguggucaugaccgacggcuccgccagcggcaaggccgacaccaagauccucuucaucgaggaggggaagaucgugcacacgagcacccuguccggcagcgcgcagcacguggaggagugcuccugcuacccccgguaccccgggguccgcugcgugugccgggacaacuggaagggcagcaaccgcccgaucguggacaucaacaucaaggaccacuccaucgucagcuccuacgugugcagcggccuggugggggacacgccccggaagaacgacuccagcuccagcucccacugcuucgaccccaacaacgaggagggcgggcacggcgucaaggggugggccuucgacgacggcaacgacguguggaugggccgcaccaucaacgagaccagccggcucggguacgagaccuucaaggucaucggcgggugguccaaccccaagagcaagcugcagaucaaccgccaggugaucguggaccggggcgaccgcuccggguacagcggcaucuucuccgucgagggcaagagcugcaucaaccggugcuucuacguggagcugauccgcgggcggaaggaggagaccgaggugcucuggaccagcaacuccaucaucgucuucugcggcacgagcgggaccuacggcaccggguccuggccggacggcgccgaccugaaccugaugcccaucuga

SEQ ID NO: 87963 - RNA, 1410 nt, Artificial Sequence
  derived and/or modified CDS sequence (opt1) from neuraminidase__InfluenzaA__AGW01884
augaaccccaaccagaagaucaucaccaucggcagcgugucccugaccaucagcacgaucugcuucuucaugcagaucgccauccucaucaccaccgucacccugcacuucaagcaguacgaguucaacuccccgcccaacaaccaggugaugcugugcgagcccacgaucaucgagcgcaacaucaccaagaucguguaccucaccaacaccacgaucgagaaggagaucugccccaagccggccgaguaccggaacuggagcaagccccagugcgggaucaccggcuucgcgcccuucuccaaggacaacagcauccgccuguccgccgggggcgacaucugggucacccgggagcccuacgugagcugcgacccggacaagugcuaccaguucgcccuggggcagggcaccacgcucaacaacgugcacuccaacaacaccguccgcgaccggacccccuaccgcacccugcugaugaacgagcucggcgugcccuuccaccuggggacgaagcaggucugcaucgccuggagcuccagcuccugccacgacggcaaggccuggcugcacgugugcaucaccggggacgacaagaacgcgaccgccagcuucaucuacaacggccggcucguggacuccguggucagcugguccaaggagauccugcgcacccaggagagcgagugcgugugcaucaacgggacgugcaccguggucaugaccgacggcuccgccagcggcaaggccgacaccaagauccuguucaucgaggaggggaagaucgugcacacgagcacccucuccggcagcgcgcagcacguggaggagugcuccugcuacccccgguacccggggguccgcugcgugugccgggacaacuggaagggcagcaaccgccccaucguggacaucaacaucaaggaccacuccaucgucagcuccuacgugugcagcggccuggugggggacaccccgcggaagaacgacuccagcuccagcucccacugccuggaccccaacaacgaggagggcgggcacggcgucaaggggugggccuucgacgacggcaacgacguguggaugggccgcaccaucaacgagacgagccggcucggguacgagaccuucaaggucaucgagggcugguccaaccccaagagcaagcugcagaucaaccgccaggugaucguggaccgcggggaccgguccggcuacagcgggaucuucuccgucgagggcaagagcugcaucaaccggugcuucuacguggagcugauccgcggccggaaggaggagaccgaggugcucuggaccagcaacuccaucgucguguucugcgggacgagcggcaccuacgggaccggcuccuggcccgacggggccgaccugaaccugaugcccaucuga

SEQ ID NO: 87964 - RNA, 1410 nt, Artificial Sequence; identical to SEQ ID NO: 86170
  derived and/or modified CDS sequence (opt1) from neuraminidase__InfluenzaA__AGW01896

SEQ ID NO: 87965 - RNA, 1410 nt, Artificial Sequence; identical to SEQ ID NO: 86170
  derived and/or modified CDS sequence (opt1) from neuraminidase__InfluenzaA__AGW01908

SEQ ID NO: 87966 - RNA, 1410 nt, Artificial Sequence; identical to SEQ ID NO: 86170
  derived and/or modified CDS sequence (opt1) from neuraminidase__InfluenzaA__AGW01920

SEQ ID NO: 87967 - RNA, 1410 nt, Artificial Sequence; identical to SEQ ID NO: 86170
  derived and/or modified CDS sequence (opt1) from neuraminidase__InfluenzaA__AGW01932

SEQ ID NO: 87968 - RNA, 1410 nt, Artificial Sequence
  derived and/or modified CDS sequence (opt1) from neuraminidase__InfluenzaA__AGW01944
augaaccccaaccagaagaucaucaccaucggcagcgugucccugaccaucagcacgaucugcuucuucaugcagaucgccauccucaucaccaccgucacccugcacuucaagcaguacgaguucaacuucccgcccaacaaccaggugaugcugugcgagcccacgaucaucgagcgcaacaucaccgagaucguguaccucaccaacaccacgaucgagaaggagaucugccccaagccggccgaguaccggaacugguccaagccccagugcgggaucaccggcuucgcgcccuucagcaaggacaacuccauccgccugagcgccgggggcgacaucugggucacccgggagcccuacguguccugcgacccggacaagugcuaccaguucgcccuggggcagggcaccacgcucaacaacgugcacagcaacaacaccguccgcgaccggacccccuaccgcacccugcugaugaacgagcucggcgugcccuuccaccuggggacgaagcaggucugcaucgccugguccagcuccagcugccacgacggcaaggccuggcugcacgugugcaucaccggggacgacaagaacgcgaccgccuccuucaucuacaacggccggcucguggacagcguggucuccuggagcaaggagauccugcgcacccaggaguccgagugcgugugcaucaacgggacgugcaccguggucaugaccgacggcagcgccuccggcaaggccgacaccaagauccuguucaucgaggaggggaagaucgugcacacgagcacccucagcggcuccgcgcagcacguggaggagugcagcugcuacccccgguacccggggguccgcugcgugugccgggacaacuggaagggcuccaaccgccccaucguggacaucaacaucaaggaccacagcaucgucuccagcuacgugugcuccggccuggugggggacacgccccggaagaacgacagcuccagcuccagccacugccuggcccccaacaacgaggagggcgggcacggcgucaaggggugggccuucgacgacggcaacgacguguggaugggccgcaccaucaacgagaccucccggcucggguacgagaccuucaaggucaucgagggcuggagcaacccgaaguccaagcugcagaucaaccgccaggugaucguggaccgcggggaccggagcggcuacuccgggaucuucagcgucgagggcaaguccugcaucaaccggugcuucuacguggagcugauccgcggccggaaggaggagaccgaggugcucuggaccagcaacagcaucgucguguucugcgggacguccggcaccuacgggaccggcagcuggcccgacggggccgaccugaaccugaugcccaucuga

SEQ ID NO: 87969 - RNA, 1410 nt, Artificial Sequence; identical to SEQ ID NO: 86170
  derived and/or modified CDS sequence (opt1) from neuraminidase__InfluenzaA__AGW01956

SEQ ID NO: 87970 - RNA, 1410 nt, Artificial Sequence
  derived and/or modified CDS sequence (opt1) from neuraminidase__InfluenzaA__AGW01968
augaaccccaaccagaagaucaucaccaucggcagcgugucccugaccaucagcacgaucugcuucuucaugcagaucgccauccucaucaccaccgucacccugcacuucaagcaguacgaguucaacuccccgcccaacaaccaggugaugcugugcgagcccacgaucaucgagcgcaacaucaccgagaucguguaccucaccaacaccacgaucgagaaggagaucugccccaagccggccgaguaccggaacuggagcaagccccagugcgacaucaccggguucgcgcccuucuccaaggacaacagcauccgccuguccgccggcggggacaucugggucacccgggagcccuacgugagcugcgacccggacaagugcuaccaguucgcccugggccaggggaccacgcucaacaacgugcacuccaacaacaccauccgcgaccggacccccuaccgcacccugcugaugaacgagcucggcguccccuuccaccugggcacgaagcaggucugcaucgccuggagcuccagcuccugccacgacgggaaggccuggcugcacgugugcaucaccggcgacgacgagaacgcgaccgccagcuucaucuacaacgggcggcucguggacuccguggugagcugguccaaggagauccugcgcacccaggagagcgagugcgucugcaucaacggcacgugcaccguggugaugaccgacggguccgccagcggcaaggccgacaccaagauccuguucaucgaggagggcaagaucguccacacgagcacccucuccgggagcgcgcagcacguggaggagugcuccugcuacccccgguacccgggcgugcgcugcgucugccgggacaacuggaaggggagcaaccgccccaucguggacaucaacaucaaggaccacuccaucgugagccgguacgucugcuccggccuggugggcgacacgccccgcaagaacgacagcuccagcuccagccacugccuggaccccaacaacgaggagggcgggcacggggugaagggcugggccuucgacgacgggaacgacgucuggaugggccggaccaucaacgagaccucccgccucggcuacgagaccuucaaggugaucgagggguggagcaacccgaaguccaagcugcagaucaaccggcaggucaucguggaccgcggcgaccggagcggguacuccggcaucuucagcguggaggggaaguccugcaucaaccgcugcuucuacgucgagcugauccggggccgcaaggaggagaccgaggugcucuggaccagcaacagcaucguggucuucugcggcacguccgggaccuacggcaccgggagcuggcccgacggcgccgaccugaaccugaugcccaucuga

SEQ ID NO: 87971 - RNA, 1410 nt, Artificial Sequence; identical to SEQ ID NO: 87895
  derived and/or modified CDS sequence (opt1) from neuraminidase__InfluenzaA__AGW01980

SEQ ID NO: 87972 - RNA, 1410 nt, Artificial Sequence; identical to SEQ ID NO: 86170
  derived and/or modified CDS sequence (opt1) from neuraminidase__InfluenzaA__AGW01992

SEQ ID NO: 87973 - RNA, 1410 nt, Artificial Sequence; identical to SEQ ID NO: 86170
  derived and/or modified CDS sequence (opt1) from neuraminidase__InfluenzaA__AGW02004

SEQ ID NO: 87974 - RNA, 1410 nt, Artificial Sequence; identical to SEQ ID NO: 86170
  derived and/or modified CDS sequence (opt1) from neuraminidase__InfluenzaA__AGW02016

SEQ ID NO: 87975 - RNA, 1410 nt, Artificial Sequence; identical to SEQ ID NO: 86170
  derived and/or modified CDS sequence (opt1) from neuraminidase__InfluenzaA__AGW02040

SEQ ID NO: 87976 - RNA, 1410 nt, Artificial Sequence
  derived and/or modified CDS sequence (opt1) from neuraminidase__InfluenzaA__AGW02064
augaaccccaaccagaagaucaucaccaucggcagcgugucccugaccaucagcacgaucugcuucuucaugcagaucgccauccucaucaccaccgucacccugcacuucaagcaguacgaguucgacuccccgcccaacaaccaggugaugcugugcgagcccacgaucaucgagcgcaacaucaccgagaucguguaccucaccaacaccacgaucgagaaggagaucugccccaagccggccgaguaccggaacuggagcaagccccagugcgggaucaccggcuucgcgcccuucuccaaggacaacagcauccgccuguccgccgggggcgacaucugggucacccgggagcccuacgugagcugcgacccggacaagugcuaccaguucgcccuggggcagggcaccacgcucaacaacgugcacuccaacaacaccguccgcgaccggacccccuaccgcacccugcugaugaacgagcucggcgugcccuuccaccuggggacgaagcaggucugcaucgccuggagcuccagcuccugccacgacggcaaggccuggcugcacgugugcaucaccggggacgacaagaacgcgaccgccagcuucaucuacaacggccggcucguggacuccguggucagcugguccaaggagauccugcgcacccaggagagcgagugcgugugcaucaacgggacgugcaccguggucaugaccgacggcuccgccagcggcaaggccgacaccaagauccuguucaucgaggaggggaagaucgugcacacgagcacccucuccggcagcgcgcagcacguggaggagugcuccugcuacccccgguacccggggguccgcugcgugugccgggacaacuggaagggcagcaaccgccccaucguggacaucaacaucaaggaccacuccaucgucagcuccuacgugugcagcggccuggugggggacacgccccggaagaacgacuccagcuccagcggccacugccuggaccccaacaacgaggagggcgggcacggggucaagggcugggccuucgacgacggcaacgacguguggauggggcgcaccaucaacgagaccucccggcucggcuacgagaccuucaaggucaucgagggguggagcaacccgaaguccaagcugcagaucaaccgccaggugaucguggaccggggcgaccgcagcggguacuccggcaucuucagcgucgagggcaaguccugcaucaaccggugcuucuacguggagcugauccgcgggcggaaggaggagaccgaggugcucuggaccagcaacagcaucgucguguucugcggcacguccgggaccuacggcaccgggagcuggcccgacggcgccgaccugaaccugaugcccaucuga

SEQ ID NO: 87977 - RNA, 1410 nt, Artificial Sequence; identical to SEQ ID NO: 86170
  derived and/or modified CDS sequence (opt1) from neuraminidase__InfluenzaA__AGW02076

SEQ ID NO: 87978 - RNA, 1410 nt, Artificial Sequence; identical to SEQ ID NO: 86170
  derived and/or modified CDS sequence (opt1) from neuraminidase__InfluenzaA__AGW02088

SEQ ID NO: 87979 - RNA, 1410 nt, Artificial Sequence
  derived and/or modified CDS sequence (opt1) from neuraminidase__InfluenzaA__AGW02100
augaaccccaaccagaagaucaucaccaucggcagcgugucccugaccaucagcacgaucugcuucuucaugcagaucgccauccucaucaccaccgucacccugcacuucaagcaguacgaguccaacagcccgcccaacaaccaggugaugcugugcgagcccacgaucaucgagcgcaacaucaccgagaucguguaccucaccaacaccacgaucgagaaggagaucugccccaagccggccgaguaccggaacugguccaagccccagugcgggaucaccggcuucgcgcccuucagcaaggacaacuccauccgccugagcgccgggggcgacaucugggucacccgggagcccuacguguccugcgacccggacaagugcuaccaguucgcccuggggcagggcaccacgcucaacaacgugcacagcaacaacaccguccgcgaccggacccccuaccgcacccugcugaugaacgagcucggcgugcccuuccaccuggggacgaagcaggucugcaucgccugguccagcuccagcugccacgacggcaaggccuggcugcacgugugcaucaccggggacgacaagaacgcgaccgccuccuucaucuacaacggccggcucguggacagcguggucuccuggagcaaggagauccugcgcacccaggaguccgagugcgugugcaucaacgggacgugcaccguggucaugaccgacggcagcgccagcggcaaggccgacaccaagauccuguucaucgaggaggggaagaucgugcacacguccacccucagcggcuccgcgcagcacguggaggagugcagcugcuacccccgguacccggggguccgcugcgugugccgggacaacuggaagggcuccaaccgccccaucguggacaucaacaucaaggaccacagcaucgucuccagcuacgugugcuccggccuggugggggacacgccccggaagaacgacagcuccagcuccagccacugccuggaccccaacaacgaggagggcgggcacggcgucaaggggugggccuucgacgacggcaacgacguguggaugggccgcaccaucaacgagaccucccggcucggguacgagaccuucaaggucaucgagggcuggagcaacccgaaguccaagcugcagaucaaccgccaggugaucguggaccgcggggaccggagcggcuacuccgggaucuucagcgucgagggcaagagcugcaucaaccggugcuucuacguggagcugauccgcggccggaaggaggagaccgaggugcucuggaccuccaacagcaucgucguguucugcgggacguccggcaccuacgggaccggcagcuggcccgacggggccgaccugaaccugaugcccaucuga

SEQ ID NO: 87980 - RNA, 1410 nt, Artificial Sequence; identical to SEQ ID NO: 87907
  derived and/or modified CDS sequence (opt1) from neuraminidase__InfluenzaA__AGW02112

SEQ ID NO: 87981 - RNA, 1410 nt, Artificial Sequence
  derived and/or modified CDS sequence (opt1) from neuraminidase__InfluenzaA__AGW02124
augaaccccaaccagaagaucaucaccaucggcagcgugucccugaccaucagcacgaucugcuucuucaugcagaucgccauccucaucaccaccgucacccugcacuucaagcaguacgaguucaacuccccgcccaacaaccaggugaugcugugcgagcccacgaucaucgagcgcaacaucaccgagaucguguaccucaccaacaccacgaucgagaaggagaucugccccaagccggccgaguaccggaacuggagcaagccccagugcgggaucaccggcuucgcgcccuucuccaaggacaacagcauccgccuguccgccgggggcgacaucugggucacccgggagcccuacgugagcugcgacccggacaagugcuaccaguucgcccuggggcagggcaccacgcucaacaacgugcacuccaacaacaccgucagcgaccgcacccccuaccggacccugcugaugaacgagcucggcgugcccuuccaccuggggacgaagcaggucugcaucgccugguccagcuccagcugccacgacggcaaggccuggcugcacgugugcaucaccggggacgacaagaacgcgaccgccuccuucaucuacaacggccgccucguggacagcguggucuccuggagcaaggagauccugcggacccaggaguccgagugcgugugcaucaacgggacgugcaccguggucaugaccgacggcagcgccagcggcaaggccgacaccaagauccuguucaucgaggaggggaagaucgugcacacguccacccucagcggcuccgcgcagcacguggaggagugcagcugcuacccccgcuacccggggguccggugcgugugccgcgacaacuggaagggcuccaaccggcccaucguggacaucaacaucaaggaccacagcaucgucuccagcuacgugugcuccggccuggugggggacacgccccgcaagaacgacagcuccagcuccagccacugccuggaccccaacaacgaggagggcgggcacggcgucaaggggugggccuucgacgacggcaacgacguguggaugggccggaccaucaacgagaccucccgccucggguacgagaccuucaaggucaucgagggcuggagcaacccgaaguccaagcugcagaucaaccggcaggucaucguggaccgcggggaccggagcggcuacuccgggaucuucagcguggagggcaagagcugcaucaaccgcugcuucuacguggagcugauccggggccgcaaggaggagaccgaggugcucuggaccuccaacagcaucgucguguucugcgggacguccggcaccuacgggaccggcagcuggcccgacggggccgaccugaaccugaugcccaucuga

SEQ ID NO: 87982 - RNA, 1410 nt, Artificial Sequence; identical to SEQ ID NO: 87895
  derived and/or modified CDS sequence (opt1) from neuraminidase__InfluenzaA__AGW02136

SEQ ID NO: 87983 - RNA, 1410 nt, Artificial Sequence; identical to SEQ ID NO: 87907
  derived and/or modified CDS sequence (opt1) from neuraminidase__InfluenzaA__AGW02148

SEQ ID NO: 87984 - RNA, 1410 nt, Artificial Sequence
  derived and/or modified CDS sequence (opt1) from neuraminidase__InfluenzaA__AGW02160
augaaccccaaccagaagaucaucaccaucggcagcgugucccugaccaucagcacgaucugcuucuucaugcagaucgccauccucaucaccaccgucacccugcacuucaagcaguacgaguucgacuccccgcccaacaaccaggugaugcugugcgagcccacgaucaucgagcgcaacaucaccgagaucguguaccucaccaacaccacgaucgagaaggagaucugccccaagccggccgaguaccggaacuggagcaagccccagugcgggaucaccggcuucgcgcccuucuccaaggacaacagcauccgccuguccgccgggggcgacaucugggucacccgggagcccuacgugagcugcgacccggacaagugcuaccaguucgcccuggggcagggcaccacgcucaacaacgugcacuccaacaacaccguccgcgaccggacccccuaccgcacccugcugaugaacgagcucggcgugcccuuccaccuggggacgaagcaggucugcaucgccuggagcuccagcuccugccacgacggcaaggccuggcugcacgugugcaucaccggggacgacaagaacgcgaccgccagcuucaucuacaacggccggcucguggacuccguggucagcugguccaaggagauccugcgcacccaggagagcgagugcgugugcaucaacgggacgugcaccguggucaugaccgacggcuccgccagcggcaaggccgacaccaagauccuguucaucgaggaggggaagaucgugcacacgagcacccucuccggcagcgcgcagcacguggaggagugcuccugcuacccccgguacccggggguccgcugcgugugccgggacaacuggaagggcagcaaccgccccaucguggacaucaacaucaaggaccacuccaucgucagcuccuacgugugcagcggccuggugggggacaccccgcggaagaacgacuccagcuccagcucccacugccuggaccccaacaacgaggagggcgggcacggcgucaaggggugggccuucgacgacggcaacgacguguggaugggccgcaccaucaacgagacgagccggcucggguacgagaccuucaaggucaucgagggcugguccaaccccaagagcaagcugcagaucaaccgccaggugaucguggaccgguccgaccgcagcggguacuccggcaucuucagcgucgagggcaagagcugcaucaaccggugcuucuacguggagcugauccgcgggcggaaggaggagaccgaggugcucuggaccuccaacagcaucgucguguucugcggcacguccgggaccuacggcaccgggagcuggcccgacggcgccgaccugaaccugaugcccaucuga

SEQ ID NO: 87985 - RNA, 1410 nt, Artificial Sequence; identical to SEQ ID NO: 86170
  derived and/or modified CDS sequence (opt1) from neuraminidase__InfluenzaA__AGW02172

SEQ ID NO: 87986 - RNA, 1410 nt, Artificial Sequence; identical to SEQ ID NO: 86170
  derived and/or modified CDS sequence (opt1) from neuraminidase__InfluenzaA__AGW02184

SEQ ID NO: 87987 - RNA, 1410 nt, Artificial Sequence
  derived and/or modified CDS sequence (opt1) from neuraminidase__InfluenzaA__AGW02196
augaaccccaaccagaagaucaucaccaucggcagcgugucccugaccaucagcacgaucugcuucuucaugcagaucgccauccucaucaccaccgucacccugcacuucaagcaguacgaguucaacuccccgcccaacaaccaggugaugcugugcgagcccacgaucaucgagcgcaacaucaccgagaucguguaccucaucaacaccaccaucgagaaggagaucugccccaagccggccgaguaccggaacuggagcaagccccagugcgggaucacgggcuucgcgcccuucuccaaggacaacagcauccgccuguccgccgggggcgacaucugggucacccgggagcccuacgugagcugcgacccguacaagugcuaccaguucgcccuggggcagggcaccacccucaacaacgugcacuccaacaacacgguccgcgaccggacccccuaccgcacccugcugaugaacgagcucggcgugcccuuccaccuggggaccaagcaggucugcaucgccuggagcuccagcuccugccacgacggcaaggccuggcugcacgugugcaucacgggggacgacaagaacgcgaccgccagcuucaucuacaacggccggcucguggacuccguggucagcugguccaaggagauccugcgcacccaggagagcgagugcgugugcaucaacgggaccugcacgguggucaugaccgacggcuccgccagcggcaaggccgacaccaagauccuguucaucgaggaggggaagaucgugcacaccagcacgcucuccggcagcgcgcagcacguggaggagugcuccugcuacccccgguacccggggguccgcugcgugugccgggacaacuggaagggcagcaaccgccccaucguggacaucaacaucaaggaccacuccaucgucagcuccuacgugugcagcggccuggugggggacaccccgcggaagaacgacuccagcuccagcucccacugccuggaccccaacaacgaggagggcgggcacggcgucaaggggugggccuucgacgacggcaacgacguguggaugggccgcaccaucaacgagaccagccggcucggguacgagacguucaaggucaucgagggcugguccaaccccaagagcaagcugcagaucaaccgccaggugaucguggaccgcggggaccgguccggcuacagcgggaucuucuccgucgagggcaagagcugcaucaaccggugcuucuacguggagcugauccgcggccggaaggaggagaccgaggugcucuggaccagcaacuccaucgucguguucugcgggaccagcggcacguacgggaccggcuccuggcccgacggggccgaccugaaccugaugcccaucuga

SEQ ID NO: 87988 - RNA, 1410 nt, Artificial Sequence; identical to SEQ ID NO: 87399
  derived and/or modified CDS sequence (opt1) from neuraminidase__InfluenzaA__AGW04174

SEQ ID NO: 87989 - RNA, 1410 nt, Artificial Sequence
  derived and/or modified CDS sequence (opt1) from neuraminidase__InfluenzaA__AGW25784
augaaccccaaccagaagaucaucaccaucggcagcgugucccugaucaucgccaccaucugcuuccucaugcagaucgccauccuggucacgaccgugacccugcacuucaagcaguacggguacaacagccucccgaacaaccaggugaugcugugcgagcccaccaucaucgagcgcaacaucacggagaucgucuaccugaccaacaccaccaucgagaaggagaucugccccaagcucgcggaguaccggaacugguccaagccccagugcaagaucacgggcuucgccccguucagcaaggacaacuccauccgccugagcgccgggggcgacaucugggugacccgggagcccuacguguccugcgaccccuacaagugcuaccaguucgcccuggggcagggcaccacccucaacaacaagcacagcaacgacacgguccacgaccgcacccccuaccggacccugcugaugaacgagcucggcgugccguuccaccuggggaccaagcaggucugcaucgccugguccagcuccagcugccacgacggcaaggcguggcugcacaucugcgugacggggcacgacgagaacgccaccgccuccuucaucuacgacggcaagcucguggacagcaucggguccuggagcaagaagauccugcgcacccaggaguccgagugcgugugcaucaacgggaccugcacggucgugaugaccgacggcagcgccuccgggcgggcggacaccaagauccuguucaucgaggagggcaagaucauccacaucagccagcucagcggguccgcccagcacguggaggagugcagcugcuacccccgcuaccccggcauccggugcgucugccgcgacaacuggaagggcuccaaccggcccaucguggacaucaacgugaaggacuacagcaucaccuccagcuacgucugcuccgggcuggugggcgacacgccgcgcaagaccgacaacagcuccagcucccacugccugaaccccaacaacgaggagggcggccacggggugaagggcugggccuucgacgacggcaacgacgucuggauggggcggaccaucagcgagaaguuccgcuccggcuacgagaccuucaaggugaucaagggguggagcaagcccaacuccaagcuccagaucaaccgccaggugaucgucgaccgggacaaccggagcggcuacuccgggaucuucagcguggagggcaaguccugcaucaaccgcugcuucuacgucgagcugauccggggccgcaagcgggaggccgaggugugguggacgagcaacagcaucguggucuucugcgggaccuccggcaccuacgggaccggcagcuggcccgacggggccgacaucaaccugaugccgaucuga

SEQ ID NO: 87990 - RNA, 1350 nt, Artificial Sequence
  derived and/or modified CDS sequence (opt1) from neuraminidase__InfluenzaA__AGW27062
augaaccccaaccagaagaucgugaccaucggcagcaucugcauggucaucgggaccaucucccugaugcuccagaucggcaacaucaucagcaucugggugucccacagcauccagacggggaaccagcaccagaccgagccgauccgcaacaccaacuuccugaccgagaacgccguggccuccgucacgcuggcgggcaacagcucccucugccccauccgggggugggccgugcacagcaaggacaacuccauccgcaucggcagcaagggcgacguguucgucauccgggagcccuucaucuccugcagccaccuggagugccgcaccuucuuccugacccagggggcccuccugaacgacaagcacuccaacggcaccgugaaggaccggagcccccaccgcacgcugauguccugcccgaucggggaggcccccagccccuacaacucccgguucgagagcguggccugguccgcgagcgccugccacgacggcaccagcuggcucgucaucgggaucuccggccccgacaacggcgccguggccgugcugaaguacaacgggaucaucaccgacaccauccgcagcuggcggaacaacauccugcgcacgcaggaguccgagugcgcgugcgucaacggcagcugcuucaccgugaugaccgacgggccguccaacggccaggccagcuacaagaucuucaagaucgagaagggcaagguggucaaguccguggagcucaacgcccccaacuaccacuacgaggagugcagcugcuaccccgacgccggggagaucacgugcgugugccgggacaacuggcacggcuccaaccgccccugggucagcuucaaccagaaccuggaguaccagaucggguacaucugcuccggcguguucggggacaacccgcggcccaacgacggcaccggcagcugcgggcccguguccagcaacggcgccuacggggucaagggcuucuccuucaaguacgggaacggcguguggaucggccgcaccaagagcacccacucccggagcggguucgagaugaucugggaccccaacggcuggaccgggacggacuccgaguucagcaugaagcaggacaucguggcgaucaccgacuggagcggcuacuccgggagcuucguccagcacccggagcugaccggccucgacugcauccgccccugcuucuggguggagcugauccggggccgccccaaggaguccaccaucuggacgagcggguccagcaucuccuucugcggcgucaacagcgacaccguguccuggagcuggcccgacggggccgagcugccguucaccaucgacaaguga

SEQ ID NO: 87991 - RNA, 1410 nt, Artificial Sequence
  derived and/or modified CDS sequence (opt1) from neuraminidase__InfluenzaA__AGY14472
augaaccccaaccagaagaucaucaccaucggcagcgugucccugacccucgccacgaucugcuuccugaugcagaucgccauccuggucaccaccgugacccuccacuucaagcaguacgagugcaacagcacgccgaacaaccaggugaugcugugcgagcccaccgucaucgagcgcaacaucaccaagaucguguaccugaccaacacgaccguggagaaggagaucugccccaagcccgcggaguaccggaacugguccaagccgcagugcaagaucaccggguucgcccccuucagcaaggacaacuccauccgccucagcgccggcggggacaucugggucacccgggagcccuacguguccugcgaccccaacaagugcuaccaguucgcccugggccaggggacgacccugaacaaccgccacagcaacgacaccgugcacgaccggaccccguaccgcacgcuccugaugaacgagcugggcauccccuuccaccucggcaccaagcaggucugcaucgccugguccagcuccagcugccacgacgggaaggcguggcugcacgugugcgugaccggccacgacaagaacgccaccgccuccuucaucuacgacgggaagcuggucgacagcaucggcuccuggagcaagaagauccuccggacgcaggaguccgagugcgugugcaucaacgggaccugcaccguggucaugaccgacggcagcgccuccggccgcgcggacacgaagauccuguucaucgaggaggggaagaucauccacaucagccagcugagcggcuccgcccagcacguggaggagugcagcugcuacccccgguaccccgggauccgcugcgugugccgggacaacuggaagggcuccaaccgcccgaucgucgacaucaacgugaaggacuacagcaucaccuccagcuacgugugcuccggccucgucggggacacgccccggaagaccgacaacagcuccagcucccacugccugaaccccaacaacgaggagggcgggcacggcgugaaggggugggccuucgacgacggcaacgacguguggaugggccgcaccaucagcgagaaguuccgguccggguacgagaccuucaaggucaucaagggcuggagcaagcccaacuccaagcugcagaucaaccgccaggugaucgucgaccgggacaaccgcagcggguacuccggcaucuucagcguggaggggaaguccugcaucaaccggugcuucuacguggagcucauccgcggccggaagcgcgaggccgaggucugguggaccagcaacagcaucgugguguucugcggcaccuccgggacguacggcaccgggagcuggccggacggcgccgacaucaaccugaugcccaucuga

SEQ ID NO: 87992 - RNA, 1398 nt, Artificial Sequence
  derived and/or modified CDS sequence (opt1) from neuraminidase__InfluenzaA__AHA11501
augaaccccaaccagaagauccugugcaccagcgccaccgccaucaucaucggcgcgaucgccgugcucaucgggaucgccaaccugggccugaacaucgggcuccaccugaagccgggcugcaacugcucccacagccagcccgagacgaccaacaccucccagaccaucaucaacaacuacuacaacgagacgaacaucaccaacauccagauggaggagcgcaccagccggaacuucaacaaccugaccaaggggcucugcacgaucaacuccuggcacaucuacggcaaggacaacgccguccgcaucggcgagagcuccgacgugcuggugacccgggagcccuacgucagcugcgaccccgacgagugccgcuucuacgcccugucccaggggaccaccauccggggcaagcacagcaacgggacgauccacgaccgcucccaguaccgggcgcucaucagcuggccgcuguccagcccgcccaccguguacaacucccgcguggagugcaucggcuggagcuccaccagcugccacgacgggaagucccggaugagcaucugcaucagcggccccaacaacaacgccuccgccgucgugugguacaaccgccggcccguggccgagaucaacaccugggcgcgcaacauccugcggacgcaggagagcgagugcgucugccacaacggcgugugccccaucguguucaccgacggguccgccaccggccccgccgacacccgcaucuacuacuucaaggaggggaagauccucgagugggagagccugacgggcaccgccaagcacaucgaggagugcuccugcuacggcgagcggaccgggaucacgugcacgugccgcgacaacuggcagggcagcaaccggcccgucauccagaucgacccgguggccaugacccacaccucccaguacaucugcagccccgugcugaccgacacgccccgccccaacgacccgaacaucgggaagugcaacgaccccuaccccggcaacgacaacaacggggucaagggcuucuccuaccucgacggcgcgaacaccuggcuggggcggaccaucagcaccgccucccgcagcggcuacgagaugcugaaggugcccaacgcccucaccgacgaccgguccaagccgauccaggggcagaccaucgugcugaacgccgacuggagcggcuacuccgggagcuucauggacuacugggccgagggcgacugcuaccgcgcgugcuucuacgucgagcugauccgcggccggcccaaggaggacaaggugugguggaccuccaacagcaucguguccaugugcagcagcaccgaguuccucgggcaguggaacuggcccgacggcgcccgcaucgaguacuuccuguga

SEQ ID NO: 87993 - RNA, 1410 nt, Artificial Sequence
  derived and/or modified CDS sequence (opt1) from neuraminidase__InfluenzaA__AHC57462
augaaccccaaccagaagaucaucaccaucggcagcgugucccugaccaucagcacgaucugcuucuucaugcagaucgccauccucaucaccaccgucacccugcacuucaagcaguacgaguucaacuccccgcccaacaaccaggugaugcugugcgagcccacgaucaucgagcgcaacaucaccgagaucguguaccucaccaacaccacgaucgagaaggagaucugccccaagcuggccgaguaccggaacuggagcaagccgcagugcgacaucaccggguucgcgcccuucuccaaggacaacagcauccgccuguccgccggcggggacaucugggucacccgggagcccuacgugagcugcgaccccgacaagugcuaccaguucgcccucggccaggggaccacgcugaacaacgugcacuccaacaacaccguccgcgaccggaccccguaccgcacccugcucaugaacgagcugggcgugcccuuccaccugggcacgaagcaggucugcaucgccuggagcuccagcuccugccacgacgggaaggccuggcuccacgugugcaucaccggcgacgacaagaacgcgaccgccagcuucaucuacaacgggcggcugguggacuccguggucagcugguccaaggagauccugcgcacccaggagagcgagugcgugugcaucaacggcacgugcaccguggucaugaccgacggguccgccagcggcaaggccgacaccaagauccucuucaucgaggagggcaagaucgugcacacgagcacccuguccgggagcgcgcagcacguggaggagugcuccugcuacccccgguaccccggcguccgcugcgugugccgggacaacuggaaggggagcaaccgcccgaucguggacaucaacaucaaggaccacuccaucgucagcuccuacgugugcagcggccuggugggcgacacgccccggaagaacgacuccagcuccagcucccacugcugggaccccaacaacgaggagggcgggcacggggucaagggcugggccuucgacgacgggaacgacguguggaugggccgcaccaucaacgagaccagccggcucggcuacgagaccuucaaggucaucgaggggugguccaaccccaagagcaagcuccaggugaaccgccaggugaucgucgaccggggcgaccgcuccggguacagcggcaucuucuccguggagggcaagagcugcaucaaccggugcuucuacguggagcugauccgcgggcggaaggaggagaccgagguccuguggaccagcaacuccaucgugguguucugcggcacgagcgggaccuacggcaccggguccuggccggacggcgccgaccugaaccugaugcccaucuga

SEQ ID NO: 87994 - RNA, 1410 nt, Artificial Sequence; identical to SEQ ID NO: 83542
  derived and/or modified CDS sequence (opt1) from neuraminidase__InfluenzaA__AHC57490

SEQ ID NO: 87995 - RNA, 1410 nt, Artificial Sequence
  derived and/or modified CDS sequence (opt1) from neuraminidase__InfluenzaA__AHC57514
augaaccccaaccagaagaucaucaccaucggcagcgugucccugaccaucagcacgaucugcuucuucaugcagaucgccauccucaucaccaccgucacccugcacuucaagcaguacgaguucuacuccccgcccaacaaccaggugaugcugugcgagcccacgaucaucgagcgcaacaucaccgagaucguguaccucaccaacaccacgaucgagaaggagaucugccccaagcuggccgaguaccggaacuggagcaagccgcagugcgacaucaccggguucgcgcccuucuccaaggacaacagcauccgccuguccgccggcggggacaucugggucacccgggagcccuacgugagcugcgaccccgacaagugcuaccaguucgcccucggccaggggaccacgcugaacaacgugcacuccaacaacaccguccgcgaccggaccccguaccgcacccugcucaugaacgagcugggcgugcccuuccaccugggcacgaagcaggucugcaucgccuggagcuccagcuccugccacgacgggaaggccuggcuccacgugugcaucaccggcgacgacaagaacgcgaccgccagcuucaucuacaacgggcggcugguggacuccguggucagcugguccaaggagauccugcgcacccaggagagcgagugcgugugcaucaacggcacgugcaccguggucaugaccgacggguccgccagcggcaaggccgacaccaagauccucuucaucgaggagggcaagaucgugcacacgagcacccuguccgggagcgcgcagcacguggaggagugcuccugcuacccccgguaccccggcguccgcugcgugugccgggacaacuggaaggggagcaaccgcccgaucguggacaucaacaucaaggaccacuccaucgucagcuccuacgugugcagcggccuggugggcgacacgccccggaagaacgacuccagcuccagcucccacugccucgaccccaacaacgaggagggcgggcacggggucaagggcugggccuucgacgacgggaacgacguguggaugggccgcaccaucaacgagaccagccggcugggcuacgagaccuucaaggucaucgaggggugguccaaccccaagagcaagcugcagaucaaccgccaggugaucguggaccggggcaaccgcuccggguacagcggcaucuucuccgucgagggcaagagcugcaucaaccggugcuucuacguggagcucauccgcgggcggaaggaggagaccgaggugcuguggaccagcaacuccaucgucguguucugcggcacgagcgggaccuacggcaccggguccuggccggacggcgccgaccugaaccucaugcccaucuga

SEQ ID NO: 87996 - RNA, 1410 nt, Artificial Sequence; identical to SEQ ID NO: 87995
  derived and/or modified CDS sequence (opt1) from neuraminidase__InfluenzaA__AHC57526

SEQ ID NO: 87997 - RNA, 1410 nt, Artificial Sequence; identical to SEQ ID NO: 87995
  derived and/or modified CDS sequence (opt1) from neuraminidase__InfluenzaA__AHC57806

SEQ ID NO: 87998 - RNA, 1410 nt, Artificial Sequence; identical to SEQ ID NO: 87995
  derived and/or modified CDS sequence (opt1) from neuraminidase__InfluenzaA__AHC57818

SEQ ID NO: 87999 - RNA, 1410 nt, Artificial Sequence
  derived and/or modified CDS sequence (opt1) from neuraminidase__InfluenzaA__AHC57830
augaaccccaaccagaagaucaucaccaucggcagcgugucccugaccaucagcacgaucugcuucuucaugcagaucgccauccucaucaccaccgucacccugcacuucaagcaguacgaguucaacuccccgcccaacaaccaggugaugcugugcgagcccacgaucaucgagcgcaacaucaccgagaucguguaccucaccaacaccacgaucgagaaggagaucugccccaagcuggccgaguaccggaacuggagcaagccgcagugcgacaucaccggguucgcgcccuucuccaaggacaacagcauccgccuguccgccggcggggacaucugggucacccgggagcccuacgugagcugcgaccccaacaagugcuaccaguucgcccucggccaggggaccacgcugaacaacgugcacuccaacaacaccguccgcgaccggaccccguaccgcacccugcucaugaacgagcugggcgugcccuuccaccugggcacgaagcaggucugcaucgccuggagcuccagcuccugccacgacgggaaggccuggcuccacgugugcaucaccggcgacgacaagaacgcgaccgccagcuucaucuacaacgggaagcugguggacuccguggucagcugguccaaggagauccugcggacccaggagagcgagugcgugugcaucaacggcacgugcaccguggucaugaccgacggguccgccagcggcaaggccgacaccaagauccucuucaucgaggagggcaagaucgugcacacgagcacccuguccgggagcgcgcagcacguggaggagugcuccugcuacccccgcuaccccggcguccggugcgugugccgcgacaacuggaaggggagcaaccggccgaucguggacaucaacaucaaggaccacuccaucgucagcuccuacgugugcagcggccuggugggcgacacgccccgcaagaacgacuccagcuccagcucccacugccucgaccccaacaacgaggagggcgggcacggggucaagggcugggccuucgacgacgggaacgacguguggaugggccggaccaucaacgagaccagccgccugggcuacgagaccuucaaggucaucgaggggugguccaaccccaagagcaagcugcagaucaaccgccaggugaucguggaccggggcaaccgguccggguacagcggcaucuucuccgucgagggcaagagcugcaucaaccgcugcuucuacguggagcucauccgggggcgcaaggaggagaccgaggugcuguggaccagcaacuccaucgucguguucugcggcacgagcgggaccuacggcaccggguccuggccggacggcgccgaccugaaccucaugcccaucuga

SEQ ID NO: 88000 - RNA, 1410 nt, Artificial Sequence; identical to SEQ ID NO: 87999
  derived and/or modified CDS sequence (opt1) from neuraminidase__InfluenzaA__AHC57971

SEQ ID NO: 88001 - RNA, 1410 nt, Artificial Sequence; identical to SEQ ID NO: 87995
  derived and/or modified CDS sequence (opt1) from neuraminidase__InfluenzaA__AHC57984

SEQ ID NO: 88002 - RNA, 1410 nt, Artificial Sequence
  derived and/or modified CDS sequence (opt1) from neuraminidase__InfluenzaA__AHC57996
augaaccccaaccagaagaucaucaccaucggcagcgugucccugaccaucagcacgaucugcuucuucaugcagaucgccauccucaucaccaccgucacccugcacuucaagcaguacgaguucuacuccccgcccaacaaccaggugaugcugugcgagcccacgaucaucgagcgcaacaucaccgagaucguguaccucaccaacaccacgaucgagaaggagaucugccccaagcuggccgaguaccggaacuggagcaagccgcagugcgacaucaccggguucgcgcccuucuccaaggacaacagcauccgccuguccgccggcggggacaucugggucacccgggagcccuacgugagcugcgaccccgacaagugcuaccaguucgcccucggccaggggaccacgcugaacaacgugcacuccaacaacaccguccgcgaccggaccccgcaccgcacccugcucaugaacgagcugggcgugcccuuccaccugggcacgaagcaggucugcaucgccuggagcuccagcuccugccacgacgggaaggccuggcuccacgugugcaucaccggcgacgacaagaacgcgaccgccagcuucaucuacaacgggcggcugguggacuccguggucagcugguccaaggagauccugcgcacccaggagagcgagugcgugugcaucaacggcacgugcaccguggucaugaccgacggguccgccagcggcaaggccgacaccaagauccucuucaucgaggagggcaagaucgugcacacgagcacccuguccgggagcgcgcagcacguggaggagugcuccugcuacccccgguaccccggcguccgcugcgugugccgggacaacuggaaggggagcaaccgcccgaucguggacaucaacaucaaggaccacuccaucgucagcuccuacgugugcagcggccuggugggcgacacgccccggaagaacgacuccagcuccagcucccacugccucgaccccaacaacgaggagggcgggcacggggucaagggcugggccuucgacgacgggaacgacguguggaugggccgcaccaucaacgagaccagccggcugggcuacgagaccuucaaggucaucgaggggugguccaaccccaagagcaagcugcagaucaaccgccaggugaucguggaccggggcaaccgcuccggguacagcggcaucuucuccgucgagggcaagagcugcaucaaccggugcuucuacguggagcucauccgcgggcggaaggaggagaccgaggugcuguggaccagcaacuccaucgucguguucugcggcacgagcgggaccuacggcaccggguccuggccggacggcgccgaccugaaccucaugcccaucuga

SEQ ID NO: 88003 - RNA, 1410 nt, Artificial Sequence; identical to SEQ ID NO: 86946
  derived and/or modified CDS sequence (opt1) from neuraminidase__InfluenzaA__AHC58008

SEQ ID NO: 88004 - RNA, 1410 nt, Artificial Sequence; identical to SEQ ID NO: 83542
  derived and/or modified CDS sequence (opt1) from neuraminidase__InfluenzaA__AHC58020

SEQ ID NO: 88005 - RNA, 1410 nt, Artificial Sequence
  derived and/or modified CDS sequence (opt1) from neuraminidase__InfluenzaA__AHC58032
augaaccccaaccagaagaucaucaccaucggcagcgugucccugaccaucagcacgaucugcuucuucaugcagaucgccauccucaucaccaccgucacccugcacuucaagcaguacgaguucaacuccccgcccaacaaccaggugaugcugugcgagcccacgaucaucgagcgcaacaucaccgagaucguguaccucaccaacaccacgaucgagaaggagaucugccccaagcuggccgaguaccggaacuggagcaagccgcagugcgacaucaccggguucgcgcccuucuccaaggacaacagcauccgccuguccgccggcggggacaucugggucacccgggagcccuacgugagcugcgaccccaacaagugcuaccaguucgcccucggccaggggaccacgcugaacaacgugcacuccaacaacaccguccgcgaccggaccccguaccgcacccugcucaugaacgagcugggcgugcccuuccaccugggcacgaagcaggucugcaucgccuggagcuccagcuccugccacgacgggaaggccuggcuccacgugugcaucaccggcgacgacaagaacgcgaccgccagcuucaucuacaacgggaagcugguggacuccguggucagcugguccaaggagauccugcggacccaggagagcgagugcgugugcaucaacggcacgugcaccguggucaugaccgacggguccgccagcggcaaggccgacaccaagauccucuucaucgaggagggcaagaucgugcacacgagcacccuguccgggagcgcgcagcacguggaggagugcuccugcuacccccgcuaccccggcguccggugcgugugccgcgacaacuggaaggggagcaaccggccgaucguggacaucaacaucaaggaccacuccaucgucagcuccuacgugugcagcggccuggugggcgacacgccccgcaagaacgacuccagcuccagcucccacugccucaaccccaacaacgaggagggcgggcacggggucaagggcugggccuucgacgacgggaacgacguguggaugggccggaccaucaacgagaccagccgccugggcuacgagaccuucaaggucaucgaggggugguccaaccccaagagcaagcugcagaucaaccgccaggugaucguggaccggggcaaccgguccggguacagcggcaucuucuccgucgagggcaagagcugcaucaaccgcugcuucuacguggagcucauccgggggcgcaaggaggagaccgaggugcuguggaccagcaacuccaucgucguguucugcggcacgagcgggaccuacggcaccggguccuggccggacggcgccgaccugaaccucaugcccaucuga

SEQ ID NO: 88006 - RNA, 1410 nt, Artificial Sequence; identical to SEQ ID NO: 86946
  derived and/or modified CDS sequence (opt1) from neuraminidase__InfluenzaA__AHC58053

SEQ ID NO: 88007 - RNA, 1410 nt, Artificial Sequence
  derived and/or modified CDS sequence (opt1) from neuraminidase__InfluenzaA__AHC58077
augaaccccaaccagaagaucaucaccaucggcagcgugucccugaccaucagcacgaucugcuucuucaugcagaucgccauccucaucaccaccgucacccugcacuucaagcaguacgaguucuacuccccgcccaacaaccaggugaugcugcgcgagcccacgaucaucgagcggaacaucaccgagaucguguaccucaccaacaccacgaccgagaaggagaucugccccaagcuggccgaguaccgcaacuggagcaagccgcagugcgacaucaccggguucgcgcccuucuccaaggacaacagcauccggcuguccgccggcggggacaucugggucacccgcgagcccuacgugagcugcgaccccgacaagugcuaccaguucgcccucggccaggggacgacccugaacaacgugcacuccaacaacaccguccgggaccgcaccccguaccggacgcugcucaugaacgagcugggcgugcccuuccaccugggcaccaagcaggucugcaucgccuggagcuccagcuccugccacgacgggaaggccuggcuccacgugugcaucaccggcgacgacaagaacgcgaccgccagcuucaucuacaacgggcgccugguggacuccguggucagcugguccaaggagauccugcggacgcaggagagcgagugcgugugcaucaacgggaccugcaccguggucaugaccgacggguccgccagcggcaaggccgacacgaagauccucuucaucgaggagggcaagaucgugcacaccagcacccuguccgggagcgcgcagcacguggaggagugcuccugcuacccccgcuaccccggcguccggugcgugugccgcgacaacuggaaggggagcaaccggccgaucguggacaucaacaucaaggaccacuccaucgucagcuccuacgugugcagcggccuggugggcgacacgccccgcaagaacgacuccagcuccagcucccacugccucgaccccaacaacgaggagggcggccacggggucaagggcugggccuucgacgacgggaacgacguguggaugggccggaccaucaacgagaccagccgccugggcuacgagaccuucaaggucaucgaggggugguccaaccccaagagcaagcugcagaucaaccgccaggugaucguggaccggggcaaccgguccggguacagcggcaucuucuccgucgagggcaagagcugcaucaaccgcugcuucuacguggagcucauccgggggcgcaaggaggagaccgaggugcuguggacgagcaacuccaucgucguguucugcggcaccagcgggaccuacggcaccggguccuggccggacggcgccgaccugaaccucaugcccaucuga

SEQ ID NO: 88008 - RNA, 1410 nt, Artificial Sequence; identical to SEQ ID NO: 87999
  derived and/or modified CDS sequence (opt1) from neuraminidase__InfluenzaA__AHC58089

SEQ ID NO: 88009 - RNA, 1410 nt, Artificial Sequence; identical to SEQ ID NO: 87995
  derived and/or modified CDS sequence (opt1) from neuraminidase__InfluenzaA__AHC58101

SEQ ID NO: 88010 - RNA, 1410 nt, Artificial Sequence
  derived and/or modified CDS sequence (opt1) from neuraminidase__InfluenzaA__AHC58113
augaaccccaaccagaagaucaucaccaucggcagcgugucccugaccaucagcacgaucugcuucuucaugcagaucgccauccucaucaccaccgucacccugcacuucaagcaguacgaguucuacuccccgcccaacaaccaggugaugcugugcgagcccacgaucaucgagcgcaacaucaccgagaucguguaccucaccaacaccacgaucgagaaggagaucugccccaagcuggccgaguaccggaacuggagcaagccgcagugcgacaucaccggguucgcgcccuucuccaaggacaacagcauccgccuguccgccggcggggacaucugggucacccgggagcccuacgugagcugcgaccccgacaagugcuaccaguucgcccucggccaggggaccacgcugaacaacgugcacuccaacaacaccguccgcgaccggaccccguaccgcacccugcucaugaacgagcugggcgugcccuuccaccugggcacgaagcaggucugcaucgccuggagcuccagcuccugccacgacgggaaggccuggcuccacgugugcaucaccggcgacgacaagaacgcgaccgccagcuucaucuacaacgggcggcugguggacuccguggucagcugguccaagaagauccugcgcacccaggagagcgagugcgugugcaucaacggcacgugcaccguggucaugaccgacggguccgccagcggcaaggccgacaccaagauccucuucaucgaggagggcaagaucgugcacacgagcacccuguccgggagcgcgcagcacguggaggagugcuccugcuacccccgguaccccggcguccgcugcgugugccgggacaacuggaaggggagcaaccgcccgaucguggacaucaacaucaaggaccacuccaucgucagcuccuacgugugcagcggccuggugggcgacacgccccggaagaacgacuccagcuccagcucccacugccucgaccccaacaacgaggagggcgggcacggggucaagggcugggccuucgacgacgggaacgacguguggaugggccgcaccaucaacgagaccagccggcugggcuacgagaccuucaaggucaucgaggggugguccaaccccaagagcaagcugcagaucaaccgccaggugaucguggaccggggcaaccgcuccggguacagcggcaucuucuccgucgagggcaagagcugcaucaaccggugcuucuacguggagcucauccgcgggcggaaggaggagaccgaggugcuguggaccagcaacuccaucgucguguucugcggcacgagcgggaccuacggcaccggguccuggccggacggcgccgaccugaaccucaugcccaucuga

SEQ ID NO: 88011 - RNA, 1410 nt, Artificial Sequence; identical to SEQ ID NO: 87995
  derived and/or modified CDS sequence (opt1) from neuraminidase__InfluenzaA__AHC58129

SEQ ID NO: 88012 - RNA, 1410 nt, Artificial Sequence; identical to SEQ ID NO: 87995
  derived and/or modified CDS sequence (opt1) from neuraminidase__InfluenzaA__AHC58153

SEQ ID NO: 88013 - RNA, 1410 nt, Artificial Sequence; identical to SEQ ID NO: 87995
  derived and/or modified CDS sequence (opt1) from neuraminidase__InfluenzaA__AHC58165

SEQ ID NO: 88014 - RNA, 1410 nt, Artificial Sequence; identical to SEQ ID NO: 87999
  derived and/or modified CDS sequence (opt1) from neuraminidase__InfluenzaA__AHC58177

SEQ ID NO: 88015 - RNA, 1410 nt, Artificial Sequence
  derived and/or modified CDS sequence (opt1) from neuraminidase__InfluenzaA__AHC58189
augaaccccaaccagaagaucaucaccaucggcagcgugucccugaccaucagcacgaucugcuucuucaugcagaucgccauccucaucaccaccgucacccugcacuucaagcaguacgaguucaacuccccgcccaacaaccaggugaugcugugcgagcccacgaucaucgagcgcaacaucaccgagaucguguaccucaccaacaccacgaucgagaaggagaucugccccaagccggccgaguaccggaacuggagcaagccccagugcgacaucaccggguucgcgcccuucuccaaggacaacagcauccgccuguccgccggcggggacaucugggucacccgggagcccuacgugagcugcgacccggacaagugcuaccaguucgcccugggccaggggaccacgcucaacaacgugcacuccaacaacaccguccgcgaccggacccccuaccgcacccugcugaugaacgagcucggcgugcccuuccaccugggcacgaagcaggucugcaucgccuggagcuccagcuccugccacgacgggaaggccuggcugcacgugugcaucaccggcgacgacaagaacgcgaccgccagcuucaucuacaacgggcggcucguggacuccguggucagcugguccaaggagauccugcgcacccaggagagcgagugcgugugcaucaacggcacgugcaccguggucaugaccgacggguccgccagcggcaaggccgacaccaagauccuguucaucgaggagggcaagaucgugcacacgagcacccucuccgggagcgcgcagcacguggaggagugcuccugcuacccccgguacccgggcguccgcugcgugugccgggacaacuggaaggggagcaaccgccccaucguggacaucaacaucaaggaccacuccaucgucagcuccuacgugugcagcggccuggugggcgacaccccgcggaagaacgacuccagcuccagcucccacugccuggaccccaacaacgaggagggcgggcacggggucaagggcugggccuucgacgacgggaacgacguguggaugggccgcaccaucaacgagaugagccggcucggcuacgagacguucaaggucaucgaggggugguccaaccccaagagcaagcugcagaucaaccgccaggugaucguggaccggggcgaccgcuccggguacagcggcaucuucuccgucgagggcaagagcugcaucaaccggugcuucuacguggagcugauccgcgggcggaaggaggagaccgaggugcucuggaccagcaacuccaucgucguguucugcggcaccagcgggacguacggcaccggguccuggcccgacggcgccgaccugaaccugaugcccaucuga

SEQ ID NO: 88016 - RNA, 1410 nt, Artificial Sequence; identical to SEQ ID NO: 87995
  derived and/or modified CDS sequence (opt1) from neuraminidase__InfluenzaA__AHC58201

SEQ ID NO: 88017 - RNA, 1410 nt, Artificial Sequence
  derived and/or modified CDS sequence (opt1) from neuraminidase__InfluenzaA__AHC58225
augaaccccaaccagaagaucaucaccaucggcagcgugucccugaccaucagcacgaucugcuucuucaugcagaucgccauccucaucaccaccgucacccugcacuucaagcaguacgaguucaacuccccgcccaacaaccaggugaugcugugcgagcccacgaucaucgagcgcaacaucaccgagaucguguaccucaccaacaccacgaucgagaaggagaucugccccaagccggccgaguaccggaacuggagcaagccccagugcgacaucaccggguucgcgcccuucuccaaggacaacagcauccgccuguccgccggcggggacaucugggucacccgggagcccuacgugagcugcgacccggacaagugcuaccaguucgcccugggccaggggaccacgcucaacaacgugcacuccaacaacaccguccgcgaccggacccccuaccgcacccugcugaugaacgagcucggcgugcccuuccaccugggcacgaagcaggucugcaucgccuggagcuccagcuccugccacgacgggaaggccuggcugcacgugugcaucaccggcgacgacaagaacgcgaccgccagcuucaucuacaacgggcggcucguggacuccguggucagcugguccaaggagauccugcgcacccaggagagcgagugcgugugcaucaacggcacgugcaccguggucaugaccgacggguccgccagcggcaaggccgacaccaagauccuguucaucgaggagggcaagaucgugcacacgagcacccucuccgggagcgcgcagcacguggaggagugcuccugcuacccccgguacccgggcguccgcugcgugugccgggacaacuggaaggggagcaaccgccccaucguggacaucaacaucaaggaccacuccaucgucagcuccuacgugugcagcggccuggugggcgacaccccgcggaagaacgacuccagcuccagcucccacugccuggaccccaacaacgaggagggcgggcacggggucaagggcugggccuucgacgacgggaacgacguguggaugggccgcaccaucaacgagacgagccggcucggcuacgagaccuucaaggucaucgaggggugguccaaccccaagagcaagcugcagaucaaccgccaggugaucgugaaccggggcgaccgcuccggguacagcggcaucuucuccgucgagggcaagagcugcaucaaccggugcuucuacguggagcugauccgcgggcggaaggaggagaccgaggugcucuggaccagcaacuccaucgucguguucugcggcacgagcgggaccuacggcaccggguccuggcccgacggcgccgaccugaaccugaugcccaucuga

SEQ ID NO: 88018 - RNA, 1410 nt, Artificial Sequence; identical to SEQ ID NO: 87999
  derived and/or modified CDS sequence (opt1) from neuraminidase__InfluenzaA__AHC58237

SEQ ID NO: 88019 - RNA, 1410 nt, Artificial Sequence; identical to SEQ ID NO: 87995
  derived and/or modified CDS sequence (opt1) from neuraminidase__InfluenzaA__AHC58249

SEQ ID NO: 88020 - RNA, 1410 nt, Artificial Sequence; identical to SEQ ID NO: 83542
  derived and/or modified CDS sequence (opt1) from neuraminidase__InfluenzaA__AHC58273

SEQ ID NO: 88021 - RNA, 1410 nt, Artificial Sequence; identical to SEQ ID NO: 87999
  derived and/or modified CDS sequence (opt1) from neuraminidase__InfluenzaA__AHC58363

SEQ ID NO: 88022 - RNA, 1410 nt, Artificial Sequence; identical to SEQ ID NO: 86946
  derived and/or modified CDS sequence (opt1) from neuraminidase__InfluenzaA__AHC58375

SEQ ID NO: 88023 - RNA, 1410 nt, Artificial Sequence; identical to SEQ ID NO: 87999
  derived and/or modified CDS sequence (opt1) from neuraminidase__InfluenzaA__AHC58387

SEQ ID NO: 88024 - RNA, 1410 nt, Artificial Sequence; identical to SEQ ID NO: 87999
  derived and/or modified CDS sequence (opt1) from neuraminidase__InfluenzaA__AHC58399

SEQ ID NO: 88025 - RNA, 1410 nt, Artificial Sequence; identical to SEQ ID NO: 87995
  derived and/or modified CDS sequence (opt1) from neuraminidase__InfluenzaA__AHC58411

SEQ ID NO: 88026 - RNA, 1410 nt, Artificial Sequence; identical to SEQ ID NO: 86946
  derived and/or modified CDS sequence (opt1) from neuraminidase__InfluenzaA__AHC58423

SEQ ID NO: 88027 - RNA, 1410 nt, Artificial Sequence; identical to SEQ ID NO: 87999
  derived and/or modified CDS sequence (opt1) from neuraminidase__InfluenzaA__AHC58459

SEQ ID NO: 88028 - RNA, 1410 nt, Artificial Sequence
  derived and/or modified CDS sequence (opt1) from neuraminidase__InfluenzaA__AHC58471
augaaccccaaccagaagaucaucaccaucggcagcgugugcaugaccaucgggauggccaaccugauccuccagaucggcaacaucaucuccaucuggaucagccacuccauccagcuggggaaccagaaccagaucgagacgugcaaccagagcgucaucaccuacgagaacaacaccugggugaaccagaccuacgugaacaucuccaacacgaacuucgccgcgggccagccggucgugagcgugaagcuggccgggaacuccagccucugccccgucuccggcugggccaucuacagcaaggacaacuccauccgcaucggcagcaagggggacguguucgugauccgggagcccuucaucuccugcagcccccuggagugccgcaccuucuuccugacccagggcgcccuccugaacgacaagcacuccaacgggaccaucaaggaccggagcccguaccgcacgcugauguccugccccaucggcgagguccccagccccuacaacucccgguucgagagcguggccuggagcgcguccgccugccacgacgggaucaacuggcucaccaucggcaucagcggcccggacaacggggccguggccguccugaaguacaacggcaucaucaccgacaccaucaaguccuggcgcaacaacauccugcggacgcaggagagcgagugcgcgugcgugaacggguccugcuucaccgugaugaccgacggccccagcgacggccaggccuccuacaagaucuuccgcaucgagaaggggaagaucgucaagagcguggagaugaacgcccccaacuaccacuacgaggagugcuccugcuaccccgacagcuccgagaucacgugcgugugccgggacaacuggcacggcgccaaccgcccgugggucagcuucaaccagaaccucgaguaccagaucggguacaucugcuccggcguguucggggacaacccccggcccaacgacaagaccggcagcugcggccccguguccagcaacggggccaacggcgucaagggguucuccuucaaguacggcaacgggguguggaucggccgcaccaagagcaucuccagccggaacggcuucgagaugaucugggacccgaacggguggaccggcaccgacaacaacuucagcaucaagcaggacaucguggggaucaacgagugguccggcuacagcggguccuucguccagcaccccgagcugacgggccuggacugcauccgccccugcuucuggguggagcucauccggggccgccccaaggagaacaccaucuggaccagcggguccagcaucuccuucugcggcgucaacagcgacaccguggggugguccuggccggacggcgcggagcugcccuucacgaucgacaaguga

SEQ ID NO: 88029 - RNA, 1410 nt, Artificial Sequence; identical to SEQ ID NO: 87995
  derived and/or modified CDS sequence (opt1) from neuraminidase__InfluenzaA__AHC58482

SEQ ID NO: 88030 - RNA, 1410 nt, Artificial Sequence; identical to SEQ ID NO: 87999
  derived and/or modified CDS sequence (opt1) from neuraminidase__InfluenzaA__AHC58494

SEQ ID NO: 88031 - RNA, 1410 nt, Artificial Sequence
  derived and/or modified CDS sequence (opt1) from neuraminidase__InfluenzaA__AHC58518
augaaccccaaccagaagaucaucaccaucggcagcgugucccugaccaucagcacgaucugcuucuucaugcaggucgccauccucaucaccaccgugacccugcacuucaagcaguacgaguucaacuccccgcccaacaaccaggugaugcugugcgagcccacgaucaucgagcgcaacaucaccgagaucgucuaccucaccaacaccacgaucgagaaggagaucugccccaagcuggccgaguaccggaacuggagcaagccgcagugcgacaucaccggguucgcgcccuucuccaaggacaacagcauccgccuguccgccggcggggacaucugggugacccgggagcccuacgugagcugcgaccccgacaagugcuaccaguucgcccucggccaggggaccacgcugaacaacguccacuccaacaacaccgugcgcgaccggaccccguaccgcacccugcucaugaacgagcugggcgugcccuuccaccugggcacgaagcaggucugcaucgccuggagcuccagcuccugccacgacgggaaggccuggcuccacgugugcaucaccggcgacgacaagaacgcgaccgccagcuucaucuacaacgggaagcugguggacuccgucgugagcugguccaaggagauccugcggacccaggagagcgagugcgugugcaucaacggcacgugcaccgucgugaugaccgacggguccgccagcggcaaggccgacaccaagauccucuucaucgaggagggcaagaucgugcacacgagcacccuguccgggagcgcgcagcacgucgaggagugcuccugcuacccccgcuaccccggcgugcggugcgugugccgcgacaacuggaaggggagcaaccggccgaucgucgacaucaacaucaaggaccacuccaucgugagcuccuacgugugcagcggccuggucggcgacacgccccgcaagaacgacuccagcuccagcucccacugccucgaccccaacaacgaggagggcgggcacggggugaagggcugggccuucgacgacgggaacgacgucuggaugggccggaccaucaacgagaccagccgccugggcuacgagaccuucaaggugaucgaggggugguccaaccccaagagcaagcugcagaucaaccgccaggugaucgucgaccggggcaaccgguccggguacagcggcaucuucuccguggagggcaagagcugcaucaaccgcugcuucuacguggagcucauccgggggcgcaaggaggagaccgagguccuguggaccagcaacuccaucgugguguucugcggcacgagcgggaccuacggcaccggguccuggccggacggcgccgaccugaaccucaugcccaucuga

SEQ ID NO: 88032 - RNA, 1410 nt, Artificial Sequence; identical to SEQ ID NO: 87995
  derived and/or modified CDS sequence (opt1) from neuraminidase__InfluenzaA__AHC58530

SEQ ID NO: 88033 - RNA, 1410 nt, Artificial Sequence; identical to SEQ ID NO: 87995
  derived and/or modified CDS sequence (opt1) from neuraminidase__InfluenzaA__AHC58554

SEQ ID NO: 88034 - RNA, 1410 nt, Artificial Sequence; identical to SEQ ID NO: 87995
  derived and/or modified CDS sequence (opt1) from neuraminidase__InfluenzaA__AHC58566

SEQ ID NO: 88035 - RNA, 1410 nt, Artificial Sequence
  derived and/or modified CDS sequence (opt1) from neuraminidase__InfluenzaA__AHC58578
augaaccccaaccagaagaucaucaccaucggcagcgugucccugaccgucagcacgaucugcuucuucaugcagaucgccauccucaucaccaccgugacccugcacuucaagcaguacgaguucuacuccccgcccaacaaccaggugaugcugugcgagcccacgaucaucgagcgcaacaucaccgagaucgucuaccucaccaacaccacgaucgagaaggagaucugccccaagcuggccgaguaccggaacuggagcaagccgcagugcgacaucaccggguucgcgcccuucuccaaggacaacagcauccgccuguccgccggcggggacaucugggugacccgggagcccuacgugagcugcgaccccgacaagugcuaccaguucgcccucggccaggggaccacgcugaacaacguccacuccaacaacaccgugcgcgaccggaccccguaccgcacccugcucaugaacgagcugggcgugcccuuccaccugggcacgaagcaggucugcaucgccuggagcuccagcuccugccacgacgggaaggccuggcuccacgugugcaucaccggcgacgacaagaacgcgaccgccagcuucaucuacaacgggcggcugguggacuccgucgugagcugguccaaggagauccugcgcacccaggagagcgagugcgugugcaucaacggcacgugcaccgucgugaugaccgacggguccgccagcggcaaggccgacaccaagauccucuucaucgaggagggcaagaucgugcacacgagcacccuguccgggagcgcgcagcacgucgaggagugcuccugcuacccccgguaccccggcgugcgcugcgugugccgggacaacuggaaggggagcaaccgcccgaucgucgacaucaacaucaaggaccacuccaucgugagcuccuacgugugcagcggccuggucggcgacacgccccggaagaacgacuccagcuccagcucccacugccucgaccccaacaacgaggagggcgggcacggggugaagggcugggccuucgacgacgggaacgacgucuggaugggccgcaccaucaacgagaccagccggcugggcuacgagaccuucaaggugaucgaggggugguccaaccccaagagcaagcugcagaucaaccgccaggugaucgucgaccggggcaaccgcuccggguacagcggcaucuucuccguggagggcaagagcugcaucaaccggugcuucuacguggagcucauccgcgggcggaaggaggagaccgagguccuguggaccagcaacuccaucgugguguucugcggcacgagcgggaccuacggcaccggguccuggccggacggcgccgaccugaaccucaugcccaucuga

SEQ ID NO: 88036 - RNA, 1410 nt, Artificial Sequence; identical to SEQ ID NO: 83542
  derived and/or modified CDS sequence (opt1) from neuraminidase__InfluenzaA__AHC58590

SEQ ID NO: 88037 - RNA, 1410 nt, Artificial Sequence; identical to SEQ ID NO: 88031
  derived and/or modified CDS sequence (opt1) from neuraminidase__InfluenzaA__AHC58602

SEQ ID NO: 88038 - RNA, 1410 nt, Artificial Sequence; identical to SEQ ID NO: 87995
  derived and/or modified CDS sequence (opt1) from neuraminidase__InfluenzaA__AHC58614

SEQ ID NO: 88039 - RNA, 1410 nt, Artificial Sequence; identical to SEQ ID NO: 87995
  derived and/or modified CDS sequence (opt1) from neuraminidase__InfluenzaA__AHC58626

SEQ ID NO: 88040 - RNA, 1410 nt, Artificial Sequence; identical to SEQ ID NO: 87995
  derived and/or modified CDS sequence (opt1) from neuraminidase__InfluenzaA__AHC58638

SEQ ID NO: 88041 - RNA, 1410 nt, Artificial Sequence; identical to SEQ ID NO: 87995
  derived and/or modified CDS sequence (opt1) from neuraminidase__InfluenzaA__AHC58650

SEQ ID NO: 88042 - RNA, 1410 nt, Artificial Sequence
  derived and/or modified CDS sequence (opt1) from neuraminidase__InfluenzaA__AHC58662
augaaccccaaccagaagaucaucaccaucggcagcgugucccugaccaucagcacgaucugcuucuucaugcagaccgccauccucaucaccaccgucacgcugcacuucaagcaguacgaguucaacuccccgcccaacaaccaggugaugcugugcgagcccaccaucaucgagcgcaacaucaccgagaucguguaccucaccaacacgaccaucgagaaggagaucugccccaagcuggccgaguaccggaacuggagcaagccgcagugcgacaucaccggguucgcgcccuucuccaaggacaacagcauccgccuguccgccggcggggacaucugggucacccgggagcccuacgugagcugcgaccccgacaagugcuaccaguucgcccucggccaggggacgacccugaacaacgugcacuccaacaacaccguccgcgaccggaccccguaccgcacgcugcucaugaacgagcugggcgugcccuuccaccugggcaccaagcaggucugcaucgccuggagcuccagcuccugccacgacgggaaggccuggcuccacgugugcaucaccggcgacgacaagaacgcgaccgccagcuucaucuacaacgggaagcugguggacuccguggucagcugguccaaggagauccugcggacgcaggagagcgagugcgugugcaucaacgggaccugcaccguggucaugaccgacggguccgccagcggcaaggccgacacgaagauccucuucaucgaggagggcaagaucgugcacaccagcacccuguccgggagcgcgcagcacguggaggagugcuccugcuacccccgcuaccccggcguccggugcgugugccgcgacaacuggaaggggagcaaccggccgaucguggacaucaacaucaaggaccacuccaucgucagcuccuacgugugcagcggccuggugggcgacacgccccgcaagaacgacuccagcuccagcucccacugccucgaccccaacaacgaggagggcggccacggggucaagggcugggccuucgacgacgggaacgacguguggaugggccggaccaucaacgagaccagccgccugggcuacgagaccuucaaggucaucgaggggugguccaaccccaagagcaagcugcagaucaaccgccaggugaucguggaccggggcaaccgguccggguacagcggcaucuucuccgucgagggcaagagcugcaucaaccgcugcuucuacguggagcucauccgggggcgcaaggaggagaccgaggugcuguggacgagcaacuccaucgucguguucugcggcaccagcgggaccuacggcaccggguccuggccggacggcgccgaccugaaccucaugcccaucuga

SEQ ID NO: 88043 - RNA, 1410 nt, Artificial Sequence
  derived and/or modified CDS sequence (opt1) from neuraminidase__InfluenzaA__AHC58686
augaaccccaaccagaagaucaucaccaucggcagcgugucccugaccaucagcacgaucugcuucuucaugcagaucgccauccucaucaccaccgucacccugcacuucaagcaguacgaguucaacuccccgcccaacaaccagguggugcugugcgagcccacgaucaucgagcgcaacaucaccgagaucgucuaccucaccaacaccacgaucgagaaggagaucugccccaagccggccgaguaccggaacuggagcaagccccagugcgacaucaccggguucgcgcccuucuccaaggacaacagcauccgccuguccgccggcggggacaucugggugacccgggagcccuacgugagcugcgacccggacaagugcuaccaguucgcccugggccaggggaccacgcucaacaacguccacuccaacaacaccgugcgcgaccggacccccuaccgcacccugcugaugaacgagcucggcgugcccuuccaccugggcacgaagcaggucugcaucgccuggagcuccagcuccugccacgacgggaaggccuggcugcacgugugcaucaccggcgacgacaagaacgcgaccgccagcuucaucuacaacgggcggcucguggacuccgucgugagcugguccaaggagauccugcgcacccaggagagcgagugcgugugcaucaacggcacgugcaccgucgugaugaccgacggguccgccagcggcaaggccgacaccaagauccuguucaucgaggagggcaagaucgugcacacgagcacccucuccgggagcgcgcagcacgucgaggagugcuccugcuacccccgguacccgggcgugcgcugcgugugccgggacaacuggaaggggagcaaccgccccaucgucgacaucaacaucaaggaccacuccaucgugagcuccuacgugugcagcggccuggucggcgacaccccgcggaagaacgacuccagcuccagcucccacugccuggaccccaacaacgaggagggcgggcacggggugaagggcugggccuucgacgacgggaacgacgucuggaugggccgcaccaucaacgagacgagccggcucggcuacgagaccuucaaggugaucgaggggugguccaaccccaagagcaagcugcagaucaaccgccaggugaucgucgaccggggcgaccgcuccggguacagcggcaucuucuccguggagggcaagagcugcaucaaccggugcuucuacguggagcugauccgcgggcggaaggaggagaccgagguccucuggaccagcaacuccaucgugguguucugcggcacgagcgggaccuacggcaccggguccuggcccgacggcgccgaccugaaccugaugcccaucuga

SEQ ID NO: 88044 - RNA, 1410 nt, Artificial Sequence
  derived and/or modified CDS sequence (opt1) from neuraminidase__InfluenzaA__AHC58698
augaaccccaaccagaagaucaucaccaucggcagcgugucccugaccaucagcacgaucugcuucuucaugcagaucgccauccucaucaccaccgucacccugcacuucaagcaguacgaguucaacuccccgcccaacaaccaggugaugcugugcgagcccacgaucaucgagcgcaacaucaccgagaucguguaccucaccaacaccacgaucgagaaggagaucugccccaagcuggccgaguaccggaacuggagcaagccgcagugcgacaucaccggguucgcgcccuucuccaaggacaacagcauccgccuguccgccggcggggacaucugggucacccgggagcccuacgugagcugcgaccccgacaagugcuaccaguucgcccucggccaggggaccacgcugaacaacgugcacuccaacaacaccguccgcgaccggaccccguaccgcacccugcucaugaacgagcugggcgugcccuuccaccugggcacgaagcaggucugcaucgccuggagcuccagcuccugccacgacgggaaggccuggcuccacgugugcaucaccggcgacgacaagaacgcgaccgccagcuucaucuacaacgggcggcugguggacuccguggucagcugguccaaggagauccugcgcacccaggagagcgagugcgugugcaucaacggcacgugcgccguggucaugaccgacggguccgccagcggcaaggcggacaccaagauccucuucaucgaggagggcaagaucgugcacaccagcacgcuguccgggagcgcccagcacguggaggagugcuccugcuacccccgguaccccggcguccgcugcgugugccgggacaacuggaaggggagcaaccgcccgaucguggacaucaacaucaaggaccacuccaucgucagcuccuacgugugcagcggccuggugggcgacacgccccggaagaacgacuccagcuccagcucccacugccucgaccccaacaacgaggagggcgggcacggggucaagggcugggccuucgacgacgggaacgacguguggaugggccgcaccaucaacgagaccagccggcugggcuacgagaccuucaaggucaucgaggggugguccaaccccaagagcaagcugcagaucaaccgccaggugaucguggaccggggcaaccgcuccggguacagcggcaucuucuccgucgagggcaagagcugcaucaaccggugcuucuacguggagcucauccgcgggcggaaggaggagaccgaggugcuguggaccagcaacuccaucgucguguucugcggcaccagcgggacguacggcaccggguccuggccggacggcgccgaccugaaccucaugcccaucuga

SEQ ID NO: 88045 - RNA, 1410 nt, Artificial Sequence; identical to SEQ ID NO: 86946
  derived and/or modified CDS sequence (opt1) from neuraminidase__InfluenzaA__AHC58710

SEQ ID NO: 88046 - RNA, 1410 nt, Artificial Sequence; identical to SEQ ID NO: 86946
  derived and/or modified CDS sequence (opt1) from neuraminidase__InfluenzaA__AHC58722

SEQ ID NO: 88047 - RNA, 1410 nt, Artificial Sequence
  derived and/or modified CDS sequence (opt1) from neuraminidase__InfluenzaA__AHC58734
augaaccccaaccagaagaucaucaccaucggcagcgugucccugaccaucagcacgaucugcuucuucaugcagaucgccauccucaucaccaccgucacccugcacuucaagcaguacgaguucaacuccccgcccaacaaccaggugaugcugugcgagcccacgaucaucgagcgcaacaucaccgagaucguguaccucaccaacaccacgaucgagaaggagaucugccccaagcuggccgaguaccggaacuggagcaagccgcagugcgacaucaccggguucgcgcccuucuccaaggacaacagcauccgccuguccgccggcggggacaucugggucacccgggagcccuacgugagcugcgaccccaacaagugcuaccaguucgcccucggccaggggaccacgcugaacaacgugcacuccaacaacaccguccgcgaccggaccccguaccgcacccugcucaugaacgagcugggcgugcccuuccaccugggcacgaagcaggucugcaucgccuggagcuccagcuccugccacgacgggaaggccuggcuccacgugugcaucaccggcgacgacaagaacgcgaccgccagcuucaucuacaacgggaagcugguggacuccguggucagcugguccaaggagauccugcggacccaggagagcgagugcgugugcaucaacggcacgugcaccguggucaugaccgacggguccgccagcggcaaggccgacaccaagauccucuucaucgaggagggcaagaucgugcacacgagcacccuguccgggagcgcgcagcacguggaggagugcuccugcuacccccgcuaccccggcauccggugcgucugccgcgacaacuggaaggggagcaaccggccgaucguggacaucaacaucaaggaccacuccaucgugagcuccuacgucugcagcggccuggugggcgacacgccccgcaagaacgacuccagcuccagcucccacugccucgaccccaacaacgaggagggcgggcacggggugaagggcugggccuucgacgacgggaacgacgucuggaugggccggaccaucaacgagaccagccgccugggcuacgagaccuucaaggugaucgaggggugguccaaccccaagagcaagcugcagaucaaccggcaggucaucguggaccgcggcaaccgguccggguacagcggcaucuucuccguggagggcaagagcugcaucaaccgcugcuucuacgucgagcucauccgggggcgcaaggaggagaccgaggugcuguggaccagcaacuccaucguggucuucugcggcacgagcgggaccuacggcaccggguccuggccggacggcgccgaccugaaccucaugcccaucuga

SEQ ID NO: 88048 - RNA, 1410 nt, Artificial Sequence; identical to SEQ ID NO: 87995
  derived and/or modified CDS sequence (opt1) from neuraminidase__InfluenzaA__AHC58746

SEQ ID NO: 88049 - RNA, 1410 nt, Artificial Sequence; identical to SEQ ID NO: 87999
  derived and/or modified CDS sequence (opt1) from neuraminidase__InfluenzaA__AHC58758

SEQ ID NO: 88050 - RNA, 1410 nt, Artificial Sequence; identical to SEQ ID NO: 87995
  derived and/or modified CDS sequence (opt1) from neuraminidase__InfluenzaA__AHC58770

SEQ ID NO: 88051 - RNA, 1410 nt, Artificial Sequence; identical to SEQ ID NO: 83542
  derived and/or modified CDS sequence (opt1) from neuraminidase__InfluenzaA__AHC58782

SEQ ID NO: 88052 - RNA, 1410 nt, Artificial Sequence; identical to SEQ ID NO: 87995
  derived and/or modified CDS sequence (opt1) from neuraminidase__InfluenzaA__AHC58806

SEQ ID NO: 88053 - RNA, 1410 nt, Artificial Sequence
  derived and/or modified CDS sequence (opt1) from neuraminidase__InfluenzaA__AHC58818
augaaccccaaccagaagaucaucaccaucggcagcgugucccugaccaucagcacgaucugcuucuucauccagaucgccauccucaucaccaccgucacccugcacuucaagcaguacgaguucaacuccccgcccaacaaccaggugaugcugugcgagcccacgaucaucgagcgcaacaucaccgagaucguguaccucaccaacaccacgaucgagaaggagaucugccccaagcuggccgaguaccggaacuggagcaagccgcagugcgacaucaccggguucgcgcccuucuccaaggacaacagcauccgccuguccgccggcggggacaucugggucacccgggagcccuacgugagcugcgaccccgacaagugcuaccaguucgcccucggccaggggaccacgcugaacaacgugcacuccaacaacaccguccgcgaccggaccccguaccgcacccugcucaugaacgagcugggcgugcccuuccaccugggcacgaagcaggucugcaucgccuggagcuccagcuccugccacgacgggaaggccuggcuccacgugugcaucaccggcgacgacaagaacgcgaccgccagcuucaucuacaacgggcggcugguggacuccguggucagcugguccaaggagauccugcgcacccaggagagcgagugcgugugcaucaacggcacgugcaccguggucaugaccgacggguccgccagcggcaaggccgacaccaagauccucuucaucgaggagggcaagaucgugcacacgagcacccuguccgggagcgcgcagcacguggaggagugcuccugcuacccccgguaccccggcguccgcugcgugugccgggacaacuggaaggggagcaaccgcccgaucguggacaucaacaucaaggaccacuccaucgucagcuccuacgugugcagcggccuggugggcgacacgccccggaagaacgacuccagcuccagcucccacugccucgaccccaacaacgaggagggcgggcacggggucaagggcugggccuucgacgacgggaacgacguguggaugggccgcaccaucaacgagaccagccggcugggcuacgagaccuucaaggucaucgaggggugguccaaccccaagagcaagcugcagaucaaccgccaggugaucguggaccggggcaaccgcuccggguacagcggcaucuucuccgucgagggcaagagcugcaucaaccggugcuucuacguggagcucauccgcgggcggaaggaggagaccgaggugcuguggaccagcaacuccaucgucguguucugcggcacgagcgggaccuacggcaccggguccuggccggacggcgccgaccugaaccucaugcccaucuga

SEQ ID NO: 88054 - RNA, 1410 nt, Artificial Sequence; identical to SEQ ID NO: 88044
  derived and/or modified CDS sequence (opt1) from neuraminidase__InfluenzaA__AHC58830

SEQ ID NO: 88055 - RNA, 1410 nt, Artificial Sequence; identical to SEQ ID NO: 87995
  derived and/or modified CDS sequence (opt1) from neuraminidase__InfluenzaA__AHC58842

SEQ ID NO: 88056 - RNA, 1410 nt, Artificial Sequence
  derived and/or modified CDS sequence (opt1) from neuraminidase__InfluenzaA__AHC58866
augaaccccaaccagaagaucaucaccaucggcagcgugucccugaccaucagcacgaucugcuucuucaugcagaucgccauccucaucaccaccgucacccugcacuucaagcagugcgaguucaacuccccgcccaacaaccgcgugaugcugugcgagcccacgaucaucgagcggaacaucaccgagaucguguaccucaccaacaccacgaucgagaaggagaucugccccaagcuggccgaguaccgcaacuggagcaagccgcagugcgacaucaccggguucgcgcccuucuccaaggacaacagcauccggcuguccgccggcggggacaucugggucacccgcgagcccuacgugagcugcgaccccaacaagugcuaccaguucgcccucggccaggggaccacgcugaacaacgugcacuccaacaacaccguccgggaccgcaccccguaccggacccugcucaugaacgagcugggcgugcccuuccaccugggcacgaagcaggucugcaucgccuggagcuccagcuccugccacgacgggaaggccuggcuccacgugugcaucaccggcgacgacaagaacgcgaccgccagcuucaucuacaacgggaagcugguggacuccguggucagcugguccaaggagauccugcgcacccaggagagcgagugcgugugcaucaacggcacgugcaccguggucaugaccgacggguccgccagcggcaaggccgacaccaagauccucuucaucgaggagggcaagaucgugcacacgagcacccuguccgggagcgcgcagcacguggaggagugcuccugcuacccccgguaccccggcguccgcugcgugugccgggacaacuggaaggggagcaaccgcccgaucguggacaucaacaucaaggaccacuccaucgucagcuccuacgugugcagcggccuggugggcgacacgccccggaagaacgacuccagcuccagcucccacugccucgaccccaacaacgaggagggcgggcacggggucaagggcugggccuucgacgacgggaacgacguguggaugggccgcaccaucaacgagaccagccggcugggcuacgagaccuucaaggucaucgaggggugguccaaccccaagagcaagcugcagaucaaccgccaggugaucguggaccggggcaaccgcuccggguacagcggcaucuucuccgucgagggcaagagcugcaucaaccggugcuucuacguggagcucauccgcgggcggaaggaggagaccggcgugcuguggaccagcaacuccaucgucguguucugcgggacgagcggcaccuacgggaccggcuccuggccggacggggccgaccugaaccucaugcccaucuga

SEQ ID NO: 88057 - RNA, 1410 nt, Artificial Sequence; identical to SEQ ID NO: 88044
  derived and/or modified CDS sequence (opt1) from neuraminidase__InfluenzaA__AHC58878

SEQ ID NO: 88058 - RNA, 1410 nt, Artificial Sequence; identical to SEQ ID NO: 87995
  derived and/or modified CDS sequence (opt1) from neuraminidase__InfluenzaA__AHC58890

SEQ ID NO: 88059 - RNA, 1410 nt, Artificial Sequence; identical to SEQ ID NO: 87999
  derived and/or modified CDS sequence (opt1) from neuraminidase__InfluenzaA__AHC58902

SEQ ID NO: 88060 - RNA, 1410 nt, Artificial Sequence; identical to SEQ ID NO: 87995
  derived and/or modified CDS sequence (opt1) from neuraminidase__InfluenzaA__AHC58996

SEQ ID NO: 88061 - RNA, 1410 nt, Artificial Sequence; identical to SEQ ID NO: 87995
  derived and/or modified CDS sequence (opt1) from neuraminidase__InfluenzaA__AHC59008

SEQ ID NO: 88062 - RNA, 1410 nt, Artificial Sequence; identical to SEQ ID NO: 87999
  derived and/or modified CDS sequence (opt1) from neuraminidase__InfluenzaA__AHC59020

SEQ ID NO: 88063 - RNA, 1410 nt, Artificial Sequence
  derived and/or modified CDS sequence (opt1) from neuraminidase__InfluenzaA__AHC59032
augaaccccaaccagaagaucaucaccaucggcagcgugucccugaccaucagcacgaucugcuucuucaugcagaucgccauccucaucaccaccgucacccugcacuucaagcaguacgaguucaacuccccgcccaacaaccaggugaugcugugcgagcccacgaucaucgagcgcaacaucaccgagaucguguaccucaccaacaccacgaucgagaaggagaucugccccaagcuggccgaguaccggaacuggagcaagccgcagugcgacaucaccggguucgcgcccuucuccaaggacaacagcauccgccuguccgccggcggggacaucugggucacccgggagcccuacgugagcugcgaccccaacaagugcuaccaguucgcccucggccaggggaccacgcugaacaacgugcacuccaacaacaccguccgcgaccggaccccguaccgcacccugcucaugaacgagcugggcgugcccuuccaccugggcacgaagcaggucugcaucgccuggagcuccagcuccugccacgacgggaaggccuggcuccacgugugcaucaccggcgacgacaagaacgcgaccgccagcuucaucuacaacgggaagcugguggacuccguggucagcugguccaaggagauccugcggacccaggagagcgagugcgugugcaucaacggcacgugcaccguggucaugaccgacggguccgccagcggcaaggccgacaccaagauccucuucaucgaggagggcaagaucgugcacacgagcacccuguccgggagcgcgcagcacguggaggagugcuccugcuacccccgcuaccccagcguccggugcgugugccgcgacaacuggaagggcuccaaccggccgaucguggacaucaacaucaaggaccacagcaucgucuccagcuacgugugcuccgggcuggugggcgacacgccccgcaagaacgacagcuccagcuccagccacugccucgaccccaacaacgaggagggcgggcacggcgucaaggggugggccuucgacgacggcaacgacguguggauggggcggaccaucaacgagaccucccgccugggcuacgagaccuucaaggucaucgagggcuggagcaaccccaaguccaagcugcagaucaaccgccaggugaucguggaccgggggaaccggagcggcuacuccgggaucuucagcgucgagggcaagagcugcaucaaccgcugcuucuacguggagcucauccgggggcgcaaggaggagaccgaggugcuguggaccuccaacagcaucgucguguucugcggcacguccggcaccuacgggaccggcagcuggccggacggggccgaccugaaccucaugcccaucuga

SEQ ID NO: 88064 - RNA, 1410 nt, Artificial Sequence; identical to SEQ ID NO: 88031
  derived and/or modified CDS sequence (opt1) from neuraminidase__InfluenzaA__AHC59044

SEQ ID NO: 88065 - RNA, 1410 nt, Artificial Sequence; identical to SEQ ID NO: 83542
  derived and/or modified CDS sequence (opt1) from neuraminidase__InfluenzaA__AHC59056

SEQ ID NO: 88066 - RNA, 1410 nt, Artificial Sequence; identical to SEQ ID NO: 87995
  derived and/or modified CDS sequence (opt1) from neuraminidase__InfluenzaA__AHC59068

SEQ ID NO: 88067 - RNA, 1410 nt, Artificial Sequence; identical to SEQ ID NO: 87995
  derived and/or modified CDS sequence (opt1) from neuraminidase__InfluenzaA__AHC59080

SEQ ID NO: 88068 - RNA, 1410 nt, Artificial Sequence
  derived and/or modified CDS sequence (opt1) from neuraminidase__InfluenzaA__AHC59092
augaaccccaaccagaagaucaucaccaucggcagcgugucccugaccaucagcacgaucugcuucuucaugcagaucgccauccucgucaccaccgugacccugcacuucaagcaguacgaguucaacuccccgcccaacaaccaggugaugcugugcgagcccacgaucaucgagcgcaacaucaccgagaucgucuaccucaccaacaccacgaucgagaaggagaucugccccaagccggccgaguaccggaacuggagcaagccccagugcgacaucaccggguucgcgcccuucuccaaggacaacagcauccgccuguccgccggcggggacaucugggugacccgggagcccuacgugagcugcgacccggacaagugcuaccaguucgcccugggccaggggaccacgcucaacaacguccacuccaacaacaccgugcgcgaccggacccccuaccgcacccugcugaugaacgagcucggcgugcccuuccaccugggcacgaagcaggucugcaucgccuggagcuccagcuccugccacgacgggaaggccuggcugcacgugugcaucaccggcgacgacaagaacgcgaccgccagcuucaucuacaacgggcggcucguggacuccgucgugagcugguccaaggagauccugcgcacccaggagagcgagugcgugugcaucaacggcacgugcaccgucgugaugaccgacggguccgccagcggcaaggccgacaccaagauccuguucaucgaggagggcaagaucgugcacacgagcacccucuccgggagcgcgcagcacgucgaggagugcuccugcuacccccgguacccgggcgugcgcugcgugugccgggacaacuggaaggggagcaaccgccccaucgucgacaucaacaucaaggaccacuccaucgugagcuccuacgugugcagcggccuggucggcgacacgccccggaagaacgacuccagcuccagcgggcacugccuggaccccaacaacgaggagggcgggcacggcgugaaggggugggccuucgacgacggcaacgacgucuggaugggccgcaccaucaacgagaccucccggcucggguacgagaccuucaaggugaucgagggcuggagcaacccgaaguccaagcugcagaucaaccgccaggugaucgucgaccgcggggaccggagcggcuacuccgggaucuucagcguggagggcaaguccugcaucaaccggugcuucuacguggagcugauccgcggccggaaggaggagaccgagguccucuggaccagcaacagcaucgugguguucugcgggacguccggcaccuacgggaccggcagcuggcccgacggggccgaccugaaccugaugcccaucuga

SEQ ID NO: 88069 - RNA, 1410 nt, Artificial Sequence
  derived and/or modified CDS sequence (opt1) from neuraminidase__InfluenzaA__AHC59104
augaaccccaaccagaagaucaucaccaucggcagcgugucccugaccaucagcacgaucugcuucuucaugcagaucgccauccucaucaccaccgucacccugcacuucaagcaguacgaguucuacuccccgcccaacaaccaggugaugcugugcgagcccacgaucaucaagcgcaacaucaccgagaucguguaccucaccaacaccacgaucgagaaggagaucugccccaagcuggccgaguaccggaacuggagcaagccgcagugcgacaucaccggguucgcgcccuucuccaaggacaacagcauccgccuguccgccggcggggacaucugggucacccgggagcccuacgugagcugcgaccccgacaagugcuaccaguucgcccucggccaggggaccacgcugaacaacgugcacuccaacaacaccguccgcgaccggaccccguaccgcacccugcucaugaacgagcugggcgugcccuuccaccugggcacgaagcaggucugcaucgccuggagcuccagcuccugccacgacgggaaggccuggcuccacgugugcaucaccggcgacgacaagaacgcgaccgccagcuucaucuacaacgggcggcugguggacuccguggucagcugguccaaggagauccugcgcacccaggagagcgagugcgugugcaucaacggcacgugcaccguggucaugaccgacggguccgccagcggcaaggccgacaccaagauccucuucaucgaggagggcaagaucgugcacacgagcacccuguccgggagcgcgcagcacguggaggagugcuccugcuacccccgguaccccggcguccgcugcgugugccgggacaacuggaaggggagcaaccgcccgaucguggacaucaacaucaaggaccacuccaucgucagcuccuacgugugcagcggccuggugggcgacacgccccggaagaacgacuccagcuccagcucccacugccucgaccccaacaacgaggagggcgggcacggggucaagggcugggccuucgacgacgggaacgacguguggaugggccgcaccaucaacgagaccagccggcugggcuacgagaccuucaaggucaucgaggggugguccaaccccaagagcaagcugcagaucaaccgccaggugaucguggaccggggcaaccgcuccggguacagcggcaucuucuccgucgagggcaagagcugcaucaaccggugcuucuacguggagcucauccgcgggcggaaggaggagaccgaggugcuguggaccagcaacuccaucgucguguucugcggcacgagcgggaccuacggcaccggguccuggccggacggcgccgaccugaaccucaugcccaucuga

SEQ ID NO: 88070 - RNA, 1410 nt, Artificial Sequence
  derived and/or modified CDS sequence (opt1) from neuraminidase__InfluenzaA__AHC59116
augaaccccaaccagaagaucaucaccaucggcagcgugucccugaccaucagcacgaucugcuucuucaugcagaucgccauccucaucaccaccgucacccugcacuucaagcaguacgaguucaacuccccgcccaacaaccaggugaugcugugcgagcccacgaucaucgagcgcaacaucaccgagaucguguaccucaccaacaccacgaucgagaaggagaucugccccaagcuggccgaguaccggaacuggagcaagccgcagugcgacaucaccggguucgcgcccuucuccaaggacaacagcauccgccuguccgccggcggggacaucugggucacccgggagcccuacgugagcugcgaccccaacaagugcuaccaguucgcccucggccaggggaccacgcugaacaacgugcacuccaacaacaccguccgcgaccggaccccguaccgcacccugcucaugaacgagcugggcgugcccuuccaccugggcacgaagcaggucugcaucgccuggagcuccagcuccugccacgacgggaaggccuggcuccacgugugcaucaccggcgacgacaagaacgcgaccgccagcuucaucuacaacgggaagcugguggacuccguggucagcugguccaaggagauccugcggacccaggagagcgagugcgugugcaucaacggcacgugcaccguggucaugaccgacggguccgccagcggcaaggccgacaccaagauccucuucaucgaggagggcaagaucgugcacacgagcacccuguccgggagcgcgcagcacguggaggagugcuccugcuacccccgcuaccccggcguccggugcgugugccgcgacaacuggaaggggagcaaccggccgaucguggacaucaacaucaaggaccacuccaucgucagcuccuacgugugcagcggccuggugggcgacacgccccgcaagaacgacuccagcuccagcucccacugccucgaccccaacaacgaggagggcgggcacggggucaagggcugggccuucgacgacgggaacgacguguggaugggccggaccaucaacgagaccagccgccugggcuacgagaccuucaaggucaucgaggggugguccaaccccaagagcaagcugcagaucaaccgccaggugaucguggaccggggcaaccgguccggguacagcggcaucuucuccgucgagggcaagagcugcaucaaccgcugcuucuacguggagcucauccgggggcgcgaggaggagaccgaggugcuguggaccagcaacuccaucgucguguucugcggcacgagcgggaccuacggcaccggguccuggccggacggcgccgaccugaaccucaugcccaucuga

SEQ ID NO: 88071 - RNA, 1410 nt, Artificial Sequence
  derived and/or modified CDS sequence (opt1) from neuraminidase__InfluenzaA__AHC59128
augaaccccaaccagaagaucaucaccaucggcagcgugucccugaccaucagcacgaucugcuucuucaugcagaucgccauccucaucaccaccgucacccugcacuucaagcaguacgaguucuacuccccgcccaacaaccaggugaugcugugcgagcccacgaucauggagcgcaacaucaccgagaucguguaccucaccaacaccacgaucgagaaggagaucugccccaagcuggccgaguaccggaacuggagcaagccgcagugcgacaucaccggguucgcgcccuucuccaaggacaacagcauccgccuguccgccggcggggacaucugggucacccgggagcccuacgugagcugcgaccccgacaagugcuaccaguucgcccucggccaggggaccacgcugaacaacgugcacuccaacaacaccguccgcgaccggaccccguaccgcacccugcucaugaacgagcugggcgugcccuuccaccugggcacgaagcaggucugcaucgccuggagcuccagcuccugccacgacgggaaggccuggcuccacgugugcgugaccggcgacgacaagaacgcgaccgccagcuucaucuacaacgggcggcugguggacuccgucgugagcugguccaaggagauccugcgcacccaggagagcgagugcgugugcaucaacggcacgugcaccgucgugaugaccgacggguccgccagcggcaaggccgacaccaagauccucuucaucgaggagggcaagaucgugcacacgagcacccuguccgggagcgcgcagcacgucgaggagugcuccugcuacccccgguaccccggcgugcgcugcgugugccgggacaacuggaaggggagcaaccgcccgaucgucgacaucaacaucaaggaccacuccaucgugagcuccuacgugugcagcggccuggucggcgacacgccccggaagaacgacuccagcuccagcucccacugccucgaccccaacaacgaggagggcgggcacggggugaagggcugggccuucgacgacgggaacgacgucuggaugggccgcaccaucaacgagaccagccggcugggcuacgagaccuucaaggugaucgaggggugguccaaccccaagagcaagcugcagaucaaccgccaggugaucgucgaccggggcaaccgcuccggguacagcggcaucuucuccguggagggcaagagcugcaucaaccggugcuucuacguggagcucauccgcgggcggaaggaggagaccgagguccuguggaccagcaacuccaucgugguguucugcggcacgagcgggaccuacggcaccggguccuggccggacggcgccgaccugaaccucaugcccaucuga

SEQ ID NO: 88072 - RNA, 1410 nt, Artificial Sequence
  derived and/or modified CDS sequence (opt1) from neuraminidase__InfluenzaA__AHC59152
augaaccccaaccagaagaucaucaccaucggcagcgugucccugaccaucagcacgaucugcuucuucaugcaggucgccauccucaucaccaccgugacccugcacuucaagcaguacgaguucaacuccccgcccaacaaccaggugaugcugugcgagcccacgaucaucgagcgcaacaucaccgagauccucuaccugaccaacaccacgaucgagaaggagaucugccccaagcuggccgaguaccggaacuggagcaagccgcagugcgacaucaccggguucgcgcccuucuccaaggacaacagcauccgccucuccgccggcggggacaucugggucacccgggagcccuacgugagcugcgaccccgacaagugcuaccaguucgcccugggccaggggaccacgcugaacaacgugcacuccaacaacaccguccgcgaccggaccccguaccgcacccuccugaugaacgagcugggcgugcccuuccaccucggcacgaagcaggucugcaucgccuggagcuccagcuccugccacgacgggaaggccuggcugcacgugugcaucaccggcgacgacaagaacgcgaccgccagcuucaucuacaacgggaagcugguggacuccguggucagcugguccaaggagauccuccggacccaggagagcgagugcgugugcaucaacggcacgugcaccguggucaugaccgacggguccgccagcggcaaggccgacaccaagauccuguucaucgaggagggcaagaucgugcacacgagcacccuguccgggagcgcgcagcacguggaggagugcuccugcuacccccgcuaccccggcguccggugcgugugccgcgacaacuggaaggggagcaaccggccgaucguggacaucaacaucaaggaccacuccaucgucagcuccuacgugugcagcggccucgugggcgacacgccccgcaagaacgacuccagcuccagcucccacugccuggaccccaacaacgaggagggcgggcacggggucaagggcugggccuucgacgacgggaacgacguguggaugggccggaccaucaacgagaccagccgccugggcuacgagaccuucaaggucaucgaggggugguccaaccccaagagcaagcuccagaucaaccgccaggugaucguggaccggggcaaccgguccggguacagcggcaucuucuccgucgagggcaagagcugcaucaaccgcugcuucuacguggagcugauccgggggcgcaaggaggagaccgaggugcuguggaccagcaacuccaucgucguguucugcggcacgagcgggaccuacggcaccggguccuggccggacggcgccgaccucaaccugaugcccaucuga

SEQ ID NO: 88073 - RNA, 1410 nt, Artificial Sequence
  derived and/or modified CDS sequence (opt1) from neuraminidase__InfluenzaA__AHC59188
augaaccccaaccagaagaucaucaccaucggcagcgugucccugaccaucagcacgaucugcuucuucaugcagaucgccauccucaucaccaccgucacccugcacuucaagcaguacgaguucaacccgccgcccaacaaccagguggugcugugcgagcccacgaucaucgagcgcaacaucaccgagaucgucuaccucaccaacaccacgaucgagaaggagaucugccccaagcuggccgaguaccggaacugguccaagccccagugcgacaucaccggguucgcgcccuucagcaaggacaacuccauccgccugagcgccggcggggacaucugggugacccgggagcccuacguguccugcgacccggacaagugcuaccaguucgcccucggccaggggaccacgcugaacaacguccacagcaacaacaccgugcgcgaccggacccccuaccgcacccugcucaugaacgagcugggcgugcccuuccaccugggcacgaagcaggucugcaucgccugguccagcuccagcugccacgacgggaaggccuggcuccacgugugcaucaccggcgacgacaagaacgcgaccgccuccuucaucuacaacgggcggcugguggacagcgucguguccuggagcaaggagauccugcgcacccaggaguccgagugcgugugcaucaacggcacgugcaccgucgugaugaccgacgggagcgccuccggcaaggccgacaccaagauccucuucaucgaggagggcaagaucgugcacacgagcacccugagcggguccgcgcagcacgucgaggagugcagcugcuacccccgguacccgggcgugcgcugcgugugccgggacaacuggaagggguccaaccgccccaucgucgacaucaacaucaaggaccacagcaucguguccagcuacgugugcuccggccuggucggcgacacgccccggaagaacgacagcuccagcuccagccacugccucgaccccaacaacgaggagggcgggcacggggugaagggcugggccuucgacgacgggaacgacgucuggaugggccgcaccaucaacgagaccucccggcugggcuacgagaccuucaaggugaucgagggguggagcaacccgaaguccaagcugcagaucaaccgccaggugaucgucgaccggggcgaccgcagcggguacuccggcaucuucagcguggaggggaaguccugcaucaaccggugcuucuacguggagcucauccgcggccggaaggaggagaccgagguccuguggaccagcaacagcaucgugguguucugcggcacguccgggaccuacggcaccgggagcuggcccgacggcgccgaccugaaccucaugcccaucuga

SEQ ID NO: 88074 - RNA, 1410 nt, Artificial Sequence; identical to SEQ ID NO: 83542
  derived and/or modified CDS sequence (opt1) from neuraminidase__InfluenzaA__AHC59200

SEQ ID NO: 88075 - RNA, 1410 nt, Artificial Sequence
  derived and/or modified CDS sequence (opt1) from neuraminidase__InfluenzaA__AHC59212
augaaccccaaccagaagaucaucaccaucggcagcgugucccugaccaucagcacgaucugcuucuucaugcagaucgccacccucaucaccaccgucacgcugcacuucaagcaguacgaguucaacuccccgcccaacaaccaggugaugcugugcgagcccaccaucaucgagcgcaacaucaccgagaucguguaccucaccaacacgaccaucgagaaggagaucugccccaagcuggccgaguaccggaacuggagcaagccgcagugcgacaucaccggguucgcgcccuucuccaaggacaacagcauccgccuguccgccggcggggacaucugggucacccgggagcccuacgugagcugcgaccccgacaagugcuaccaguucgcccucggccaggggacgacccugaacaacgugcacuccaacaacaccguccgcgaccggaccccguaccgcacgcugcucaugaacgagcugggcgugcccuuccaccugggcaccaagcaggucugcaucgccuggagcuccagcuccugccacgacgggaaggccuggcuccacgugugcaucaccggcgacgacaagaacgcgaccgccagcuucaucuacaacgggcggcugguggacuccguggucagcugguccaaggagauccugcgcacgcaggagagcgagugcgugugcaucaacgggaccugcaccguggucaugaccgacggguccgccagcggcaaggccgacacgaagauccucuucaucgaggagggcaagaucgugcacaccagcacccuguccgggagcgcgcagcacguggaggagugcuccugcuacccccgguaccccggcguccgcugcgugugccgggacaacuggaaggggagcaaccgcccgaucguggacaucaacaucaaggaccacuccaucgucagcuccuacgugugcagcggccuggugggcgacacgccccggaagaacgacuccagcuccagcucccacugccucgaccccaacaacgaggagggcggccacggggucaagggcugggccuucgacgacgggaacgacguguggaugggccgcaccaucaacgagaccagccggcugggcuacgagaccuucaaggucaucgaggggugguccaaccccaagagcaagcugcagaucaaccgccaggugaucguggaccggggcgaccgcuccggguacagcggcaucuucuccgucgagggcaagagcugcaucaaccggugcuucuacguggagcucauccgcgggcggaaggaggagaccgaggugcuguggacgagcaacuccaucgucguguucugcggcaccagcgggaccuacggcaccggguccuggccggacggcgccgaccugaaccucaugcccaucuga

SEQ ID NO: 88076 - RNA, 1410 nt, Artificial Sequence; identical to SEQ ID NO: 87999
  derived and/or modified CDS sequence (opt1) from neuraminidase__InfluenzaA__AHC59224

SEQ ID NO: 88077 - RNA, 1410 nt, Artificial Sequence
  derived and/or modified CDS sequence (opt1) from neuraminidase__InfluenzaA__AHC59236
augaaccccaaccagaagaucaucaccaucggcagcgugucccugaccaucagcacgaucugcuucuucaugcagaucgccauccucaucaccaccgucacccugcacuucaagcaguacgaguucuacuccccgcccaacaaccaggugaugcugugcgagcccacgaucaucgagcgcaacaucaccgagaucguguaccucaccaacaccacgaucgagaaggagaucugccccaagcuggccgaguaccggaacuggagcaagccgcagugcgacaucaccggguucgcgcccuucuccaaggacaacagcauccgccuguccgccggcggggacaucugggucacccgggagcccuacgugagcugcgaccccgacaagugcuaccaguucgcccucggccaggggaccacgcugaacaacgugcacuccaacaacaccguccacgaccgcaccccguaccggacccugcucaugaacgagcugggcgugcccuuccaccugggcacgaagcaggucugcaucgccuggagcuccagcuccugccacgacgggaaggccuggcuccacgugugcaucaccggcgacgacaagaacgcgaccgccagcuucaucuacaacgggcgccugguggacuccguggucagcugguccaaggagauccugcggacccaggagagcgagugcgugugcaucaacggcacgugcaccguggucaugaccgacggguccgccagcggcaaggccgacaccaagauccucuucaucgaggagggcaagaucgugcacacgagcacccuguccgggagcgcgcagcacguggaggagugcuccugcuacccccgcuaccccggcguccggugcgugugccgcgacaacuggaaggggagcaaccggccgaucguggacaucaacaucaaggaccacuccaucgucagcuccuacgugugcagcggccuggugggcgacacgccccgcaagaacgacuccagcuccagcucccacugccucgaccccaacaacgaggagggcgggcacggggucaagggcugggccuucgacgacgggaacgacguguggaugggccggaccaucaacgagaccagccgccugggcuacgagaccuucaaggucaucgaggggugguccaaccccaagagcaagcugcagaucaaccgccaggugaucguggaccggggcaaccgguccggguacagcggcaucuucuccgucgagggcaagagcugcaucaaccgcugcuucuacguggagcucauccgggggcgcaaggaggagaccgaggugcuguggaccagcaacuccaucgucguguucugcggcacgagcgggaccuacggcaccggguccuggccggacggcgccgaccugaaccucaugcccaucuga

SEQ ID NO: 88078 - RNA, 1410 nt, Artificial Sequence; identical to SEQ ID NO: 87999
  derived and/or modified CDS sequence (opt1) from neuraminidase__InfluenzaA__AHC59260

SEQ ID NO: 88079 - RNA, 1410 nt, Artificial Sequence; identical to SEQ ID NO: 87995
  derived and/or modified CDS sequence (opt1) from neuraminidase__InfluenzaA__AHC59272

SEQ ID NO: 88080 - RNA, 1410 nt, Artificial Sequence; identical to SEQ ID NO: 87999
  derived and/or modified CDS sequence (opt1) from neuraminidase__InfluenzaA__AHC59284

SEQ ID NO: 88081 - RNA, 1410 nt, Artificial Sequence
  derived and/or modified CDS sequence (opt1) from neuraminidase__InfluenzaA__AHC59296
augaaccccaaccagaagaucaucaccaucggcagcgugucccugaccaucagcacgaucugcuucuucaugcagaucgccauccucaucaccaccgucacccugcacuucaagcaguacgaguucaacuccccgcccaacaaccaggugaugcugugcgagcccacgaucaucgagcgcaacaucaccgagaucguguaccucaccaacaccacgaucgagaaggagaucugccccaagcuggccgaguaccggaacuggagcaagccgcagugcgacaucaccggguucgcgcccuucuccaaggacaacagcauccgccuguccgccggcggggacaucugggucacccgggagcccuacgugagcugcgaccccaacaagugcuaccaguucgcccucggccaggggaccacgcugaacaacgugcacuccaacaacaccguccgcgaccggaccccguaccgcacccugcucaugaacgagcugggcgugcccuuccaccugggcacgaagcaggucugcaucgccuggagcuccagcuccugccacgacgggaaggccuggcuccacgugugcaucaccggcgacgacaagaacgcgaccgccagcuucaucuacaacgggaagcugguggacuccguggucagcugguccaaggagauccugcggacccaggagagcgagugcgugugcaucaacggcacgugcaccguggucaugaccgacggguccgccagcggcaaggccgacaccaagauccucuucaucgaggagggcaagaucgugcacacgagcacccuguccgggagcgcgcagcacguggaggagugcuccugcuacccccgcuaccccggcguccggugcgugugccgcgacaacuggaaggggagcaaccggccgaucguggacaucaagaucaaggaccacuccaucgucagcuccuacgugugcagcggccuggugggcgacacgccccgcaagaacgacuccagcuccagcucccacugccucgaccccaacaacgaggagggcgggcacggggucaagggcugggccuucgacgacgggaacgacguguggaugggccggaccaucaacgagaccagccgccugggcuacgagaccuucaaggucaucgaggggugguccaaccccaagagcaagcugcagaucaaccgccaggugaucguggaccggggcaaccgguccggguacagcggcaucuucuccgucgagggcaagagcugcaucaaccgcugcuucuacguggagcucauccgggggcgcaaggaggagaccgaggugcuguggaccagcaacuccaucgucguguucugcggcacgagcgggaccuacggcaccggguccuggccggacggcgccgaccugaaccucaugcccaucuga

SEQ ID NO: 88082 - RNA, 1410 nt, Artificial Sequence
  derived and/or modified CDS sequence (opt1) from neuraminidase__InfluenzaA__AHC59308
augaaccccaaccagaagaucaucaccaucggcagcgugucccugaccaucagcacgaucugcuucuucaugcagaucgccauccucaucaccaccgucacccugcacuucaagcaguacgaguucaacccgccgcccaacaaccaggugaugcugugcgagcccacgaucaucgagcgcaacaucaccgagaucguguaccucaccaacaccacgaucgagaaggagaucugccccaagcuggccgaguaccggaacugguccaagccccagugcgacaucaccggguucgcgcccuucagcaaggacaacuccauccgccugagcgccggcggggacaucugggucacccgggagcccuacguguccugcgacccgaacaagugcuaccaguucgcccucggccaggggaccacgcugaacaacgugcacagcaacaacaccguccgcgaccggacccccuaccgcacccugcucaugaacgagcugggcgugcccuuccaccugggcacgaagcaggucugcaucgccugguccagcuccagcugccacgacgggaaggccuggcuccacgugugcaucaccggcgacgacaagaacgcgaccgccuccuucaucuacaacgggaagcugguggacagcguggucuccuggagcaaggagauccugcggacccaggaguccgagugcgugugcaucaacggcacgugcaccguggucaugaccgacgggagcgccuccggcaaggccgacaccaagauccucuucaucgaggagggcaagaucgugcacacgagcacccugagcggguccgcgcagcacguggaggagugcagcugcuacccccgcuacccgggcguccggugcgugugccgcgacaacuggaagggguccaaccggcccaucguggacaucaacaucaaggaccacagcaucgucuccagcuacgugugcuccggccuggugggcgacacgccccgcaagaacgacagcuccagcuccagccacugccucgaccccaacaacgaggagggcgggcacggggucaagggcugggccuucgacgacgggaacgacguguggaugggccggaccaucaacgagaccucccgccugggcuacgagaccuucaaggucaucgagggguggagcaacccgaaguccaagcugcagaucaaccgccaggugaugguggaccggggcaaccggagcggguacuccggcaucuucagcgucgaggggaaguccugcaucaaccgcugcuucuacguggagcucauccggggccgcaaggaggagaccgaggugcuguggaccagcaacagcaucgucguguucugcggcacguccgggaccuacggcaccgggagcuggcccgacggcgccgaccugaaccucaugcccaucuga

SEQ ID NO: 88083 - RNA, 1410 nt, Artificial Sequence; identical to SEQ ID NO: 87907
  derived and/or modified CDS sequence (opt1) from neuraminidase__InfluenzaA__AHC59320

SEQ ID NO: 88084 - RNA, 1410 nt, Artificial Sequence; identical to SEQ ID NO: 86170
  derived and/or modified CDS sequence (opt1) from neuraminidase__InfluenzaA__AHC59332

SEQ ID NO: 88085 - RNA, 1410 nt, Artificial Sequence; identical to SEQ ID NO: 88043
  derived and/or modified CDS sequence (opt1) from neuraminidase__InfluenzaA__AHC59344

SEQ ID NO: 88086 - RNA, 1410 nt, Artificial Sequence
  derived and/or modified CDS sequence (opt1) from neuraminidase__InfluenzaA__AHC59368
augaaccccaaccagaagaucaucaccaucggcagcgugucccugaccaucagcacgaucugcuucuucaugcagaucgccauccucaucaccaccgucacccugcacuucaagcaguacgaguucaacuccccgcccaacaaccaggugaugcugugcgagcccacgaucaucgagcgcaacaucaccgagaucguguaccucaccaacaccacgaucgagaaggagaucugccccaagcuggccgaguaccggaacuggagcaagccgcagugcgacaucaccggguucgcgcccuucuccaaggacaacagcauccgccuguccgccggcggggacaucugggucacccgggagcccuacgugagcugcgaccccaacaagugcuaccaguucgcccucggccaggggaccacgcugaacaacgugcacuccaacaacaccguccgcgaccggaccccguaccgcacccugcucaugaacgagcugggcgugcccuuccaccugggcacgaagcaggucugcaucgccuggagcuccagcuccugccacgacgggaaggccuggcuccacgugugcaucaccggcgacgacaagaacgcgaccgccagcuucaucuacaacgggaagcugguggacuccguggucagcugguccaaggagauccugcggacccaggagagcgagugcgugugcaucaacggcacgugcaccguggucaugaccgacggguccgccagcggcaaggccgacaccaagauccucuucaucgaggagggcaagaucgugcacacgagcacccuguccgggagcgcgcagcacguggaggagugcuccugcuacccccgcuaccccggcguccggugcgugugccgcgacaacuggaaggggagcaaccggccgaucguggacaucaacaucaaggaccacuccaucgucagcuccuacgugugcagcggccuggugggcgacacgccccgcaagaacgacuccagcuccagcucccacugccucgaccccaacaacgaggagggcgggcacggggucaagggcugggccuucgacgacgggaacgacguguggaugggccggaccaucgacgagaccagccgccugggcuacgagaccuucaaggucaucgaggggugguccaaccccaagagcaagcugcagaucaaccgccaggugaucguggaccggggcaaccgguccggguacagcggcaucuucuccgucgagggcaagagcugcaucaaccgcugcuucuacguggagcucauccgggggcgcaaggaggagaccgaggugcuguggaccagcaacuccaucgucguguucugcggcacgagcgggaccuacggcaccggguccuggccggacggcgccgaccugaaccucaugcccaucuga

SEQ ID NO: 88087 - RNA, 1410 nt, Artificial Sequence; identical to SEQ ID NO: 87995
  derived and/or modified CDS sequence (opt1) from neuraminidase__InfluenzaA__AHC59380

SEQ ID NO: 88088 - RNA, 1410 nt, Artificial Sequence; identical to SEQ ID NO: 86946
  derived and/or modified CDS sequence (opt1) from neuraminidase__InfluenzaA__AHC59392

SEQ ID NO: 88089 - RNA, 1410 nt, Artificial Sequence; identical to SEQ ID NO: 88031
  derived and/or modified CDS sequence (opt1) from neuraminidase__InfluenzaA__AHC59404

SEQ ID NO: 88090 - RNA, 1410 nt, Artificial Sequence; identical to SEQ ID NO: 87999
  derived and/or modified CDS sequence (opt1) from neuraminidase__InfluenzaA__AHC59416

SEQ ID NO: 88091 - RNA, 1410 nt, Artificial Sequence
  derived and/or modified CDS sequence (opt1) from neuraminidase__InfluenzaA__AHC59428
augaaccccaaccagaagaucaucaccaucggcagcgugucccugaccaucagcacgaucugcuucuucaugcagaucgccauccucaucaccaccgucacccugcacuucaagcaguacgaguucuacuccccgcccaacaaccaggugaugcugugcgagcccacgaucaucgagcgcaacaucaccgagaucguguaccucaccaacaccacgaucgagaaggagaucugccccaagcuggccgaguaccggaacuggagcaagccgcagugcgacaucaccggguucgcgcccuucuccaaggacaacagcauccgccuguccgccggcggggacaucugggucacccgggagcccuacgugagcugcgaccccgaccgcugcuaccaguucgcccucggccaggggaccacgcugaacaacgugcacuccaacaacaccguccgggaccgcaccccguaccggacccugcucaugaacgagcugggcgugcccuuccaccugggcacgaagcaggucugcaucgccuggagcuccagcuccugccacgacgggaaggccuggcuccacgugugcaucaccggcgacgacaagaacgcgaccgccagcuucaucuacaacgggcgccugguggacuccguggucagcugguccaaggagauccugcggacccaggagagcgagugcgugugcaucaacggcacgugcaccguggucaugaccgacggguccgccagcggcaaggccgacaccaagauccucuucaucgaggagggcaagaucgugcacacgagcacccuguccgggagcgcgcagcacguggaggagugcuccugcuacccccgcuaccccggcguccggugcgugugccgcgacaacuggaaggggagcaaccggccgaucguggacaucaacaucaaggaccacuccaucgucagcuccuacgugugcagcggccuggugggcgacacgccccgcaagaacgacuccagcuccagcucccacugccucgaccccaacaacgaggagggcgggcacggggucaagggcugggccuucgacgacgggaacgacguguggaugggccggaccaucaacgagaccagccgccugggcuacgagaccuucaaggucaucgaggggugguccaaccccaagagcaagcugcagaucaaccgccaggugaucguggaccggggcaaccgguccggguacagcggcaucuucuccgucgagggcaagagcugcaucaaccgcugcuucuacguggagcucauccgggggcgcaaggaggagaccgaggugcuguggaccagcaacuccaucgucguguucugcggcacgagcgggaccuacggcaccggguccuggccggacggcgccgaccugaaccucaugcccaucuga

SEQ ID NO: 88092 - RNA, 1410 nt, Artificial Sequence
  derived and/or modified CDS sequence (opt1) from neuraminidase__InfluenzaA__AHC59440
augaaccccaaccagaagaucaucaccaucggcagcgugucccugaccaucagcacgaucugcuucuucaugcagaucgccauccucaucaccaccgucacccugcacuucaagcaguacgaguucaacuccccgcccaacaaccaggugaugcugugcgagcccacgaucaucgagcgcaacaucaccgagaucguguaccucaccaacaccacgaucgagaaggagaucugccccaagccggccgaguaccggaacuggagcaagccccagugcgacaucaccggguucgcgcccuucuccaaggacaacagcauccgccuguccgccggcggggacaucugggucacccgggagcccuacgugagcugcgacccggacaagugcuaccaguucgcccugggccaggggaccacgcucaacaacgugcacuccaacaacaccguccgcgaccggacccccuaccgcacccugcugaugaacgagcucggcgugcccuuccaccugggcacgaagcaggucugcaucgccuggagcuccagcuccugccacgacgggaaggccuggcugcacgugugcaucaccggcgacgacaagaacgcgaccgccagcuucaucuacaacgggcggcucguggacuccguggucagcugguccaaggagauccugcgcacccaggagagcgagugcgugugcaucaacggcacgugcaccguggucaugaccgacggguccgccagcggcaaggccgacaccaagauccuguucaucgaggagggcaagaucgugcagacgagcacccucuccgggagcgcgcagcacguggaggagugcuccugcuacccccgguacccgggcguccgcugcgugugccgggacaacuggaaggggagcaaccgccccaucguggacaucaacaucaaggaccacuccaucgucagcuccuacgugugcagcggccuggugggcgacaccccgcggaagaacgacuccagcuccagcucccacugccuggaccccaacaacgaggagggcgggcacggggucaagggcugggccuucgacgacgggaacgacguguggaugggccgcaccaucaacgagacgagccggcucggcuacgagaccuucaaggucaucgaggggugguccaaccccaagagcaagcugcagaucaaccgccaggugaucguggaccggggcgaccgcuccggguacagcggcaucuucuccgucgagggcaagagcugcaucaaccggugcuucuacguggagcugauccgcgggcggaaggaggagaccgaggugcucuggaccagcaacuccaucgucguguucugcggcacgagcgggaccuacggcaccggguccuggcccgacggcgccgaccugaaccugaugcccaucuga

SEQ ID NO: 88093 - RNA, 1410 nt, Artificial Sequence; identical to SEQ ID NO: 87999
  derived and/or modified CDS sequence (opt1) from neuraminidase__InfluenzaA__AHC59452

SEQ ID NO: 88094 - RNA, 1410 nt, Artificial Sequence; identical to SEQ ID NO: 83542
  derived and/or modified CDS sequence (opt1) from neuraminidase__InfluenzaA__AHC59464

SEQ ID NO: 88095 - RNA, 1410 nt, Artificial Sequence; identical to SEQ ID NO: 87907
  derived and/or modified CDS sequence (opt1) from neuraminidase__InfluenzaA__AHC59476

SEQ ID NO: 88096 - RNA, 1410 nt, Artificial Sequence; identical to SEQ ID NO: 87999
  derived and/or modified CDS sequence (opt1) from neuraminidase__InfluenzaA__AHC59488

SEQ ID NO: 88097 - RNA, 1410 nt, Artificial Sequence; identical to SEQ ID NO: 87999
  derived and/or modified CDS sequence (opt1) from neuraminidase__InfluenzaA__AHC59500

SEQ ID NO: 88098 - RNA, 1410 nt, Artificial Sequence; identical to SEQ ID NO: 88044
  derived and/or modified CDS sequence (opt1) from neuraminidase__InfluenzaA__AHC59512

SEQ ID NO: 88099 - RNA, 1410 nt, Artificial Sequence; identical to SEQ ID NO: 88044
  derived and/or modified CDS sequence (opt1) from neuraminidase__InfluenzaA__AHC59524

SEQ ID NO: 88100 - RNA, 1410 nt, Artificial Sequence; identical to SEQ ID NO: 88031
  derived and/or modified CDS sequence (opt1) from neuraminidase__InfluenzaA__AHC59536

SEQ ID NO: 88101 - RNA, 1410 nt, Artificial Sequence; identical to SEQ ID NO: 87999
  derived and/or modified CDS sequence (opt1) from neuraminidase__InfluenzaA__AHC59548

SEQ ID NO: 88102 - RNA, 1410 nt, Artificial Sequence; identical to SEQ ID NO: 87999
  derived and/or modified CDS sequence (opt1) from neuraminidase__InfluenzaA__AHC59560

SEQ ID NO: 88103 - RNA, 1410 nt, Artificial Sequence; identical to SEQ ID NO: 88077
  derived and/or modified CDS sequence (opt1) from neuraminidase__InfluenzaA__AHC59572

SEQ ID NO: 88104 - RNA, 1410 nt, Artificial Sequence; identical to SEQ ID NO: 88072
  derived and/or modified CDS sequence (opt1) from neuraminidase__InfluenzaA__AHC59584

SEQ ID NO: 88105 - RNA, 1410 nt, Artificial Sequence; identical to SEQ ID NO: 88044
  derived and/or modified CDS sequence (opt1) from neuraminidase__InfluenzaA__AHC59596

SEQ ID NO: 88106 - RNA, 1410 nt, Artificial Sequence; identical to SEQ ID NO: 86946
  derived and/or modified CDS sequence (opt1) from neuraminidase__InfluenzaA__AHC59608

SEQ ID NO: 88107 - RNA, 1410 nt, Artificial Sequence; identical to SEQ ID NO: 88031
  derived and/or modified CDS sequence (opt1) from neuraminidase__InfluenzaA__AHC59620

SEQ ID NO: 88108 - RNA, 1410 nt, Artificial Sequence; identical to SEQ ID NO: 87999
  derived and/or modified CDS sequence (opt1) from neuraminidase__InfluenzaA__AHC59632

SEQ ID NO: 88109 - RNA, 1410 nt, Artificial Sequence; identical to SEQ ID NO: 87999
  derived and/or modified CDS sequence (opt1) from neuraminidase__InfluenzaA__AHC59644

SEQ ID NO: 88110 - RNA, 1410 nt, Artificial Sequence
  derived and/or modified CDS sequence (opt1) from neuraminidase__InfluenzaA__AHC59656
augaaccccaaccagaagaucaucaccaucggcagcgugucccugaccaucagcacgaucugcuucuucaugcagaucgccauccucaucaccaccgucaccaugcacuucaagcaguacgaguucaacuccccgcccaacaaccaggugaugcugugcgagcccacgaucaucgagcgcaacaucaccgagaucguguaccugaccaacaccacgaucgagaaggagaucugccccaagcucgccgaguaccggaacuggagcaagccgcagugcgacaucaccggguucgcgcccuucuccaaggacaacagcauccgccuguccgccggcggggacaucugggucacccgggagcccuacgugagcugcgaccccgugaagugcuaccaguucgcccugggccaggggaccacgcucaacaacguccacuccaacaacaccgugcgcgaccggaccccguaccgcacccugcugaugaacgagcucggcgugcccuuccaccugggcacgaagcaggucugcaucgccuggagcuccagcuccugccacgacgggaaggccuggcugcacgugugcaucaccggcgacgacaagaacgcgaccgccagcuucaucuacaacgggaagcucguggacuccgucgugagcugguccaaggagauccugcggacccaggagagcgagugcgugugcaucaacggcacgugcaccgucgugaugaccgacggguccgccagcggcaaggccgacaccaagauccuguucaucgaggagggcaagaucgugcacacgagcacccucuccgggagcgcgcagcacgucgaggagugcuccugcuacccccgcuaccccggcgugcggugcgugugccgcgacaacuggaaggggagcaaccggccgaucgucgacaucaacaucaaggaccacuccaucgugagcuccuacgugugcagcggccuggucggcgacacgccccgcaagaacgacuccagcuccagcucccacugccuggaccccaacaacgaggagggcgggcacggggugaagggcugggccuucgacgacgggaacgacgucuggaugggccggaccaucaacgagaccagccgccucggcuacgagaccuucaaggugaucgaggggugguccaaccccaagagcaagcugcagaucaaccgccaggugaucgucgaccggggcaaccgguccggguacagcggcaucuucuccguggagggcaagagcugcaucaaccgcugcuucuacguggagcugauccgggggcgcaaggaggagaccgagguccucuggaccagcaacuccaucgugguguucugcggcacgagcgggaccuacggcaccggguccuggccggacggcgccgaccugaaccugaugcccaucuga

SEQ ID NO: 88111 - RNA, 1410 nt, Artificial Sequence; identical to SEQ ID NO: 88044
  derived and/or modified CDS sequence (opt1) from neuraminidase__InfluenzaA__AHC59668

SEQ ID NO: 88112 - RNA, 1410 nt, Artificial Sequence; identical to SEQ ID NO: 88072
  derived and/or modified CDS sequence (opt1) from neuraminidase__InfluenzaA__AHC59680

SEQ ID NO: 88113 - RNA, 1410 nt, Artificial Sequence; identical to SEQ ID NO: 87999
  derived and/or modified CDS sequence (opt1) from neuraminidase__InfluenzaA__AHC59704

SEQ ID NO: 88114 - RNA, 1410 nt, Artificial Sequence; identical to SEQ ID NO: 83542
  derived and/or modified CDS sequence (opt1) from neuraminidase__InfluenzaA__AHC59716

SEQ ID NO: 88115 - RNA, 1410 nt, Artificial Sequence; identical to SEQ ID NO: 83542
  derived and/or modified CDS sequence (opt1) from neuraminidase__InfluenzaA__AHC59728

SEQ ID NO: 88116 - RNA, 1410 nt, Artificial Sequence; identical to SEQ ID NO: 88044
  derived and/or modified CDS sequence (opt1) from neuraminidase__InfluenzaA__AHC59752

SEQ ID NO: 88117 - RNA, 1410 nt, Artificial Sequence; identical to SEQ ID NO: 88031
  derived and/or modified CDS sequence (opt1) from neuraminidase__InfluenzaA__AHC59764

SEQ ID NO: 88118 - RNA, 1410 nt, Artificial Sequence
  derived and/or modified CDS sequence (opt1) from neuraminidase__InfluenzaA__AHC59776
augaaccccaaccagaagaucaucaccaucggcagcgugucccugaccaucagcacgaucugcuucuucaugcagaucgccauccucaucaccaccgucacccugcacuucaagcaguacgaguucuacuccccgcccaacaaccaggugaugcugugcgagcccacgaucaucgagcgcaacaucaccgagaucguguaccucaccaacaccacgaucgagaaggagaucugccccaagcuggccgaguaccggaacuggagcaagccgcagugcgacaucaccggguucgcgcccuucuccaaggacaacagcauccgccuguccgccggcggggacaucugggucacccgggagcccuacgugagcugcgaccccgacaagugcuaccaguucgcccucggccaggggaccacgcugaacaacgugcacuccaacaacaccguccgcgaccggaccccguaccgcacccugcucaugaacgagcugggcgugcccuuccaccugggcacgaagcaggucugcaucgccuggagcuccagcuccugccacgacgggaaggccuggcuccacgugugcaucaccggcgacgacaagaacgcgaccgccagcuucaucuacaacgggaagcugguggacuccguggucagcugguccaaggagauccugcggacccaggagagcgagugcgugugcaucaacggcacgugcaccguggucaugaccgacggguccgccagcggcaaggccgacaccaagauccucuucaucgaggagggcaagaucgugcacacgagcacccuguccgggagcgcgcagcacguggaggagugcuccugcuacccccgcuaccccggcguccggugcgugugccgcgacaacuggaaggggagcaaccggccgaucguggacaucaacaucaaggaccacuccaucgucagcuccuacgugugcagcggccuggugggcgacacgccccgcaagaacgacuccagcuccagcucccacugccucgaccccaacaacgaggagggcgggcacggggucaagggcugggccuucgacgacgggaacgacguguggaugggccggaccaucaacgagaccagccgccugggcuacgagaccuucaaggucaucgaggggugguccaaccccaagagcaagcugcagaucaaccgccaggugaucguggaccggggcaaccgguccggguacagcggcaucuucuccgucgagggcaagagcugcaucaaccgcugcuucuacguggagcucauccgggggcgcaaggaggagaccgaggugcuguggaccagcaacuccaucgucguguucugcggcacgagcgggaccuacggcaccggguccuggccggacggcgccgaccugaaccucaugcccaucuga

SEQ ID NO: 88119 - RNA, 1410 nt, Artificial Sequence; identical to SEQ ID NO: 87995
  derived and/or modified CDS sequence (opt1) from neuraminidase__InfluenzaA__AHC59788

SEQ ID NO: 88120 - RNA, 1410 nt, Artificial Sequence; identical to SEQ ID NO: 88072
  derived and/or modified CDS sequence (opt1) from neuraminidase__InfluenzaA__AHC59800

SEQ ID NO: 88121 - RNA, 1410 nt, Artificial Sequence
  derived and/or modified CDS sequence (opt1) from neuraminidase__InfluenzaA__AHC59812
augaaccccaaccagaagaucaucaccaucggcagcgugucccugaccaucagcacgaucugcuucuucaugcagaucgccauccucaucaccaccgucacccugcacuucaagcaguacgaguucaacuccccgcccaacaaccagguggugcugugcgagcccacgaucaucgagcgcaacaucaccgagaucgucuaccucaccaacaccacgaucgagaaggagaucugccccaagccggccgaguaccggaacuggagcaagccccagugcgacaucaccggguucgcgcccuucuccaaggacaacagcauccgccuguccgccggcggggacaucugggugacccgggagcccuacgugagcugcgacccggacaagugcuaccaguucgcccugggccaggggaccacgcucaacaacguccacuccaacaacaccgugcgcgaccggacccccuaccgcacccugcugaugaacgagcucggcgugcccuuccaccugggcacgaagcaggucugcaucgccuggagcuccagcuccugccacgacgggaaggccuggcugcacgugugcaucaccggcgacgacaagaacgcgaccgccagcuucaucuacaacgggcggcucguggacuccgucgugagcugguccaaggagauccugcgcacccaggagagcgagugcgugugcaucaacggcacgugcaccgucgugaugaccgacggguccgccagcggcaaggccgacaccaagauccuguucaucgaggagggcaagaucguguacacgagcacccucuccgggagcgcgcagcacgucgaggagugcuccugcuacccccgguacccgggcgugcgcugcgugugccgggacaacuggaaggggagcaaccgccccaucgucgacaucaacaucaaggaccacuccaucgugagcuccuacgugugcagcggccuggucggcgacaccccgcggaagaacgacuccagcuccagcucccacugccuggaccccaacaacgaggagggcgggcacggggugaagggcugggccuucgacgacgggaacgacgucuggaugggccgcaccaucaacgagacgagccggcucggcuacgagaccuucaaggugaucgaggggugguccaaccccaagagcaagcugcagaucaaccgccaggugaucgucgaccggggcgaccgcuccggguacagcggcaucuucuccguggagggcaagagcugcaucaaccggugcuucuacguggagcugauccgcgggcggaaggaggagaccgagguccucuggaccagcaacuccaucgugguguucugcggcacgagcgggaccuacggcaccggguccuggcccgacggcgccgaccugaaccugaugcccaucuga

SEQ ID NO: 88122 - RNA, 1410 nt, Artificial Sequence
  derived and/or modified CDS sequence (opt1) from neuraminidase__InfluenzaA__AHC59824
augaaccccaaccagaagaucaucaccaucggcagcgugucccugaccaucagcacgaucugcuucuucaugcagaucgccauccucaucaccaccgucacccugcacuucaagcaguacgaguucuacuccccgcccaacaaccaggugaugcugugcgagcccacgaucaucgagcgcaacaucaccgagaucguguaccucaccaacaccacgaucgagaaggagaucugccccaagcuggccgaguaccggaaguggagcaagccgcagugcgacaucaccggguucgcgcccuucuccaaggacaacagcauccgccuguccgccggcggggacaucugggucacccgggagcccuacgugagcugcgaccccgacaagugcuaccaguucgcccucggccaggggaccacgcugaacaacgugcacuccaacaacaccguccgcgaccggaccccguaccgcacccugcucaugaacgagcugggcgugcccuuccaccugggcacgaagcaggucugcaucgccuggagcuccagcuccugccacgacgggaaggccuggcuccacgugugcaucaccggcgacgacaagaacgcgaccgccagcuucaucuacaacgggcggcugguggacuccguggucagcugguccaaggagauccugcgcacccaggagagcgagugcgugugcaucaacggcacgugcaccguggucaugaccgacggguccgccagcggcaaggccgacaccaagauccucuucaucgaggagggcaagaucgugcacacgagcacccuguccgggagcgcgcagcacguggaggagugcuccugcuacccccgguaccccggcguccgcugcgugugccgggacaacuggaaggggagcaaccgcccgaucguggacaucaacaucaaggaccacuccaucgucagcuccuacgugugcagcggccuggugggcgacacgccccggaagaacgacuccagcuccagcucccacugccucgaccccaacaacgaggagggcgggcacggggucaagggcugggccuucgacgacgggaacgacguguggaugggccgcaccaucaacgagaccagccggcugggcuacgagaccuucaaggucaucgaggggugguccaaccccaagagcaagcugcagaucaaccgccaggugaucguggaccggggcaaccgcuccggguacagcggcaucuucuccgucgagggcaagagcugcaucaaccggugcuucuacguggagcucauccgcgggcggaaggaggagaccgaggugcuguggaccagcaacuccaucgucguguucugcggcacgagcgggaccuacggcaccggguccuggccggacggcgccgaccugaaccucaugcccaucuga

SEQ ID NO: 88123 - RNA, 1410 nt, Artificial Sequence; identical to SEQ ID NO: 87999
  derived and/or modified CDS sequence (opt1) from neuraminidase__InfluenzaA__AHC59836

SEQ ID NO: 88124 - RNA, 1410 nt, Artificial Sequence; identical to SEQ ID NO: 86946
  derived and/or modified CDS sequence (opt1) from neuraminidase__InfluenzaA__AHC59848

SEQ ID NO: 88125 - RNA, 1410 nt, Artificial Sequence; identical to SEQ ID NO: 87995
  derived and/or modified CDS sequence (opt1) from neuraminidase__InfluenzaA__AHC59860

SEQ ID NO: 88126 - RNA, 1410 nt, Artificial Sequence; identical to SEQ ID NO: 88042
  derived and/or modified CDS sequence (opt1) from neuraminidase__InfluenzaA__AHC59872

SEQ ID NO: 88127 - RNA, 1410 nt, Artificial Sequence; identical to SEQ ID NO: 88031
  derived and/or modified CDS sequence (opt1) from neuraminidase__InfluenzaA__AHC59884

SEQ ID NO: 88128 - RNA, 1410 nt, Artificial Sequence
  derived and/or modified CDS sequence (opt1) from neuraminidase__InfluenzaA__AHC59895
augaaccccaaccagaagaucaucaccaucggcagcgugucccugaccaucagcacgaucugcuucuucaugcagaucgccauccucaucaccaccgucacccugcacuucaagcaguacgaguucaacuccccgcccaacaaccaggugaugcugugcgagcccacgaucaucgagcgcaacaucaccgagaucguguaccucaccaacaccacgaucgagaaggagaucugccccaagcuggccgaguaccggaacuggagcaagccgcagugcgacaucaccggguucgcgcccuucuccaaggacaacagcauccgccuguccgccggcggggacaucugggucacccgggagcccuacgugagcugcgaccccgacaagugcuaccaguucgcccucggccaggggaccacgcugaacaacgugcacuccaacaacaccguccgcgaccggaccccguaccgcacccugcucaugaacgagcugggcgugcccuuccaccugggcacgaagcaggucugcaucgccuggagcuccagcuccugccacgacgggaaggccuggcuccacgugugcaucaccggcgacgacaagaacgcgaccgccagcuucaucuacaacgggcggcugguggacuccguggucagcugguccaaggagauccugcgcacccaggagagcgagugcgugugcaucaacggcacgugcaccguggucaugaccgacggguccgccagcggcaaggccgacaccaagauccucuucaucaaggagggcaagaucgugcacacgagcacccuguccgggagcgcgcagcacguggaggagugcuccugcuacccccgguaccccggcguccgcugcgugugccgggacaacuggaaggggagcaaccgcccgaucguggacaucaacaucaaggaccacuccaucgucagcuccuacgugugcagcggccuggugggcgacacgccccggaagaacgacuccagcuccagcucccacugccucgaccccaacaacgaggagggcgggcacggggucaagggcugggccuucgacgacgggaacgacguguggaugggccgcaccaucaacgagaccagccggcugggcuacgagaccuucaaggucaucgaggggugguccaaccccaagagcaagcugcagaucaaccgccaggugaucguggaccggggcaaccgcuccggguacagcggcaucuucuccgucgagggcaagagcugcaucaaccggugcuucuacguggagcucauccgcgggcggaaggaggagaccgaggugcuguggaccagcaacuccaucgucguguucugcggcacgagcgggaccuacggcaccggguccuggccggacggcgccgaccugaaccucaugcccaucuga

SEQ ID NO: 88129 - RNA, 1410 nt, Artificial Sequence; identical to SEQ ID NO: 87999
  derived and/or modified CDS sequence (opt1) from neuraminidase__InfluenzaA__AHC59907

SEQ ID NO: 88130 - RNA, 1410 nt, Artificial Sequence
  derived and/or modified CDS sequence (opt1) from neuraminidase__InfluenzaA__AHC59918
augaaccccaaccagaagaucaucaccaucggcagcgugucccugaccaucagcacgaucugcuucuucauccagaucgccauccucaucaccaccgucacccugcacuucaagcaguacgaguucaacuccccgcccaacaaccaggugaugcugugcgagcccacgaucaucgagcgcaacaucaccgagaucguguaccucaccaacaccacgaucgagaaggagaucugccccaagcuggccgaguaccggaacuggagcaagccgcagugcgacaucaccggguucgcgcccuucuccaaggacaacagcauccgccuguccgccggcggggacaucugggucacccgggagcccuacgugagcugcgaccccgacaagugcuaccaguucgcccucggccaggggaccacgcugaacaacgugcacuccaacaacaccguccgcgaccggaccccguaccgcacccugcucaugaacgagcugggcgugcccuuccaccugggcacgaagcaggucugcaucgccuggagcuccagcuccugccacgacgggaaggccuggcuccacgugugcaucaccggcgacgacaagaacgcgaccgccagcuucaucuacaacgggcggcugguggacuccguggucagcugguccaaggagauccugcgcacccaggagagcgagugcgugugcaucaacggcacgugcaccguggucaugaccgacggguccgccagcggcaaggccgacaccaagauccucuucaucgaggagggcaagaucgugcacacgagcacccuguccgggagcgcgcagcacguggaggagugcuccugcuacccccgguaccccggcguccgcugcgugugccgggacaacuggaaggggagcaaccgcccgaucguggacaucaacaucaaggaccacuccaucgucagcuccuacgugugcagcggccuggugggcgacacgccccggaagaacgacuccagcuccagcucccacugccucgaccccaacaacgaggagggcgggcacggggucaagggcugggccuucgacgacgggaacgacguguggaugggccgcaccaucaacgagaccagccggcugggcuacgagaccuucaaggucaucgaggggugguccaaccccaagagcaagcugcagaugaaccgccaggugaucguggaccggggcaaccgcuccggguacagcggcaucuucuccgucgagggcaagagcugcaucaaccggugcuucuacguggagcucauccgcgggcggaaggaggagaccgaggugcuguggaccagcaacuccaucgucguguucugcggcacgagcgggaccuacggcaccggguccuggccggacggcgccgaccugaaccucaugcccaucuga

SEQ ID NO: 88131 - RNA, 1410 nt, Artificial Sequence; identical to SEQ ID NO: 88130
  derived and/or modified CDS sequence (opt1) from neuraminidase__InfluenzaA__AHC59930

SEQ ID NO: 88132 - RNA, 1410 nt, Artificial Sequence; identical to SEQ ID NO: 87999
  derived and/or modified CDS sequence (opt1) from neuraminidase__InfluenzaA__AHC59942

SEQ ID NO: 88133 - RNA, 1410 nt, Artificial Sequence; identical to SEQ ID NO: 88044
  derived and/or modified CDS sequence (opt1) from neuraminidase__InfluenzaA__AHC59954

SEQ ID NO: 88134 - RNA, 1410 nt, Artificial Sequence
  derived and/or modified CDS sequence (opt1) from neuraminidase__InfluenzaA__AHC59966
augaaccccaaccagaagaucaucaccaucggcagcgugucccugaccaucagcacgaucugcuucuucaugcagaucgccauccucaucaccaccgucacccugcacuucaagcaguacgaguucaacuccagcccgaacaaccaggugaugcugugcgagcccacgaucaucgagcgcaacaucaccgagaucguguaccucaccaacaccacgaucgagaaggagaucugccccaagcccgccgaguaccggaacugguccaagccgcagugcgacaucaccggguucgcgcccuucagcaaggacaacuccauccgccugagcgccggcggggacaucugggucacccgggagcccuacguguccugcgaccccgacaagugcuaccaguucgcccugggccaggggaccacgcucaacaacgugcacagcaacaacaccguccgcgaccggaccccguaccgcacccugcugaugaacgagcucggcgugcccuuccaccugggcacgaagcaggucugcaucgccugguccagcuccagcugccacgacgggaaggccuggcugcacgugugcaucaccggcgacgacaagaacgcgaccgccuccuucaucuacaacgggcggcucguggacagcguggucuccuggagcaaggagauccugcgcacccaggaguccgagugcgugugcaucaacggcacgugcaccguggucaugaccgacgggagcgccagcggcaaggccgacaccaagauccuguucaucgaggagggcaagaucgugcacacguccacccucagcggguccgcgcagcacguggaggagugcagcugcuacccccgguaccccggcguccgcugcgugugccgggacaacuggaagggguccaaccgcccgaucguggacaucaacaucaaggaccacagcaucgucuccagcuacgugugcuccggccuggugggcgacacgccccggaagaacgacagcuccagcuccagccacugccuggaccccaacaacgaggagggcgggcacggggucaagggcugggccuucgacgacgggaacgacguguggaugggccgcaccaucaacgagaccucccggcucggcuacgagaccuucaaggucaucgagggguggagcaaccccaaguccaagcugcagaucaaccgccaggugaucguggaccggggcgacgggagcggcuacuccgggaucuucagcgucgagggcaagagcugcaucaaccgcugcuucuacguggagcugauccggggccgcaaggaggagaccgaggugcucuggaccuccaacagcaucgucguguucugcgggacguccggcaccuacgggaccggcagcuggccggacggggccgaccugaaccugaugcccaucuga

SEQ ID NO: 88135 - RNA, 1410 nt, Artificial Sequence; identical to SEQ ID NO: 86946
  derived and/or modified CDS sequence (opt1) from neuraminidase__InfluenzaA__AHC59978

SEQ ID NO: 88136 - RNA, 1410 nt, Artificial Sequence; identical to SEQ ID NO: 84908
  derived and/or modified CDS sequence (opt1) from neuraminidase__InfluenzaA__AHC59990

SEQ ID NO: 88137 - RNA, 1410 nt, Artificial Sequence; identical to SEQ ID NO: 88044
  derived and/or modified CDS sequence (opt1) from neuraminidase__InfluenzaA__AHC60002

SEQ ID NO: 88138 - RNA, 1410 nt, Artificial Sequence; identical to SEQ ID NO: 87999
  derived and/or modified CDS sequence (opt1) from neuraminidase__InfluenzaA__AHC60014

SEQ ID NO: 88139 - RNA, 1410 nt, Artificial Sequence; identical to SEQ ID NO: 83542
  derived and/or modified CDS sequence (opt1) from neuraminidase__InfluenzaA__AHC60026

SEQ ID NO: 88140 - RNA, 1410 nt, Artificial Sequence; identical to SEQ ID NO: 87995
  derived and/or modified CDS sequence (opt1) from neuraminidase__InfluenzaA__AHC60038

SEQ ID NO: 88141 - RNA, 1410 nt, Artificial Sequence; identical to SEQ ID NO: 87995
  derived and/or modified CDS sequence (opt1) from neuraminidase__InfluenzaA__AHC60050

SEQ ID NO: 88142 - RNA, 1410 nt, Artificial Sequence
  derived and/or modified CDS sequence (opt1) from neuraminidase__InfluenzaA__AHC60062
augaaccccaaccagaagaucaucaccaucggcagcgugucccugaccaucagcacgaucugcuucuucaugcagaucgccauccucaucaccaccgucaccaugcacuucaagcaguacgaguucaacuccccgcccaacaaccaggugaugcugugcgagcccacgaucaucgagcgcaacaucaccgagaucguguaccugaccaacaccacgaucgagaaggagaucugccccaagcucgccgaguaccggaacuggagcaagccgcagugcgacaucaccggguucgcgcccuucuccaaggacaacagcauccgccuguccgccggcggggacaucugggucacccgggagcccuacgugagcugcgaccccgacaagugcuaccaguucgcccugggccaggggaccacgcucaacaacgugcacuccaacaacaccguccgcgaccggaccccguaccgcacccugcugaugaacgagcucggcgugcccuuccaccugggcacgaagcaggucugcaucgccuggagcuccagcuccugccacgacgggaaggccuggcugcacgugugcaucaccggcgacgacaagaacgcgaccgccagcuucaucuacaacgggaagcucguggacuccguggucagcugguccaaggagauccugcggacccaggagagcgagugcgugugcaucaacggcacgugcaccguggucaugaccgacggguccgccagcggcaaggccgacaccaagauccuguucaucgaggagggcaagaucgugcacacgagcacccucuccgggagcgcgcagcacguggaggagugcuccugcuacccccgcuaccccggcguccggugcgugugccgcgacaacuggaaggggagcaaccggccgaucguggacaucaacaucaaggaccacuccaucgucagcuccuacgugugcagcggccuggugggcgacacgccccgcaagaacgacuccagcuccagcucccacugccuggaccccaacaacgaggagggcgggcacggggucaagggcugggccuucgacgacgggaacgacguguggaugggccggaccaucaacgagaccagccgccucggcuacgagaccuucaaggucaucgaggggugguccaaccccaagagcaagcugcagaucaaccgccaggugaucguggaccggggcaaccgguccggguacagcggcaucuucuccgucgagggcaagagcugcaucaaccgcugcuucuacguggagcugauccgggggcgcaaggaggagaccgaggugcucuggaccagcaacuccaucgucguguucugcggcacgagcgggaccuacggcaccggguccuggccggacggcgccgaccugaaccugaugcccaucuga

SEQ ID NO: 88143 - RNA, 1410 nt, Artificial Sequence; identical to SEQ ID NO: 86946
  derived and/or modified CDS sequence (opt1) from neuraminidase__InfluenzaA__AHC60074

SEQ ID NO: 88144 - RNA, 1410 nt, Artificial Sequence; identical to SEQ ID NO: 87999
  derived and/or modified CDS sequence (opt1) from neuraminidase__InfluenzaA__AHC60086

SEQ ID NO: 88145 - RNA, 1410 nt, Artificial Sequence
  derived and/or modified CDS sequence (opt1) from neuraminidase__InfluenzaA__AHC60098
augaaccccaaccagaagaucaucaccaucggcagcgugucccugaccaucagcacgaucugcuucuucaugcagaucgccauccucaucaccaccgucacccugcacuucaagcaguacgaguucuacuccccgcccaacaaccaggugaugcugugcgagcccacgaucaucgagcgcaacaucaccgagaucguguaccucaccaacaccacgaucgagaaggagaucugccccaagcuggccgaguaccggaacuggagcaagccgcagugcgacaucaccggguucgcgcccuucuccaaggacaacagcauccgccuguccgccggcggggacaucugggucacccgggagcccuacgugagcugcgaccccgacaagugcuaccaguucgcccucggccaggggaccacgcugaacaacgugcacuccaacaacaccguccgcgaccggaccccguaccgcacccugcucaugaacgagcugggcgugcccuuccaccugggcacgaagcaggucugcaucgccuggagcuccagcuccugccacgacgggaaggccuggcuccacgugugcaucaccggcgacgacaagaacgcgaccgccagcuucaucuacaacgggcggcugguggacuccguggucagcugguccaaggagauccugcgcacccaggagagcgagugcgugugcaucaacggcacgugcaccguggucaugaccgacggguccgccagcggcaaggccgacaccaagauccucuucaucgaggagggcaagaucgugcacacgagcacccuguccgggagcgcgcagcacguggaggagugcuccugcuacccccgguaccccggcguccgcugcgugugccgggacaacuggaaggggagcaaccgcccgaucguggacaucaacaucaaggaccacuccaucgucagcuccuacgugugcagcggccuggugggcgacacgccccggaagaacgacuccagcuccagcucccacugccucgaccccaacaacgaggagggcgggcacggggucaagggcugggccuucgacgacgggaacgacguguggaugggccgcaccaucgacgagaccagccggcugggcuacgagaccuucaaggucaucgaggggugguccaaccccaagagcaagcugcagaucaaccgccaggugaucguggaccggggcaaccgcuccggguacagcggcaucuucuccgucgagggcaagagcugcaucaaccggugcuucuacguggagcucauccgcgggcggaaggaggagaccgaggugcuguggaccagcaacuccaucgucguguucugcggcacgagcgggaccuacggcaccggguccuggccggacggcgccgaccugaaccucaugcccaucuga

SEQ ID NO: 88146 - RNA, 1410 nt, Artificial Sequence; identical to SEQ ID NO: 87995
  derived and/or modified CDS sequence (opt1) from neuraminidase__InfluenzaA__AHC60110

SEQ ID NO: 88147 - RNA, 1410 nt, Artificial Sequence; identical to SEQ ID NO: 88072
  derived and/or modified CDS sequence (opt1) from neuraminidase__InfluenzaA__AHC60122

SEQ ID NO: 88148 - RNA, 1410 nt, Artificial Sequence; identical to SEQ ID NO: 87999
  derived and/or modified CDS sequence (opt1) from neuraminidase__InfluenzaA__AHC60134

SEQ ID NO: 88149 - RNA, 1410 nt, Artificial Sequence; identical to SEQ ID NO: 88053
  derived and/or modified CDS sequence (opt1) from neuraminidase__InfluenzaA__AHC60146

SEQ ID NO: 88150 - RNA, 1410 nt, Artificial Sequence; identical to SEQ ID NO: 88130
  derived and/or modified CDS sequence (opt1) from neuraminidase__InfluenzaA__AHC60158

SEQ ID NO: 88151 - RNA, 1410 nt, Artificial Sequence; identical to SEQ ID NO: 87995
  derived and/or modified CDS sequence (opt1) from neuraminidase__InfluenzaA__AHC60182

SEQ ID NO: 88152 - RNA, 1410 nt, Artificial Sequence
  derived and/or modified CDS sequence (opt1) from neuraminidase__InfluenzaA__AHC60206
augaaccccaaccagaagaucaucaccaucggcagcgugucccugaccaucagcaucaucugcuucuucaugcaggucgccauccucaucacgaccgugacccugcacuucaagcaguacgaguucaacuccccgcccaacaaccaggugaugcugugcgagcccaccaucaucgagcgcaacaucacggagaucgucuaccucaccaacaccaccaucgagaaggagaucugccccaagcuggccgaguaccggaacuggagcaagccgcagugcgacaucacgggguucgcgcccuucuccaaggacaacagcauccgccuguccgccggcggggacaucugggugacccgggagcccuacgugagcugcgaccccgacaagugcuaccaguucgcccucggccaggggaccacccugaacaacguccacuccaacaacacggugcgcgaccggaccccguaccgcacccugcucaugaacgagcugggcgugcccuuccaccugggcaccaagcaggucugcaucgccuggagcuccagcuccugccacgacgggaaggccuggcuccacgugugcaucacgggcgacgacaagaacgcgaccgccagcuucaucuacaacgggaagcugguggacuccgucgugagcugguccaaggagauccugcggacccaggagagcgagugcgugugcaucaacgggaccugcacggucgugaugaccgacggguccgccagcggcaaggccgacaccaagauccucuucaucgaggagggcaagaucgugcacaccagcacgcuguccgggagcgcgcagcacgucgaggagugcuccugcuacccccgcuaccccggcgugcggugcgugugccgcgacaacuggaaggggagcaaccggccgaucgucgacaucaacaucaaggaccacuccaucgugagcuccuacgugugcagcggccuggucggcgacacgccccgcaagaacgacuccagcuccagcucccacugccucgaccccaacaacgaggagggcggccacggggugaagggcugggccuucgacgacgggaacgacgucuggaugggccggaccaucaacgagaccagccgccugggcuacgagaccuucaaggugaucgaggggugguccaaccccaagagcaagcugcagaucaaccgccaggugaucgucgaccggggcaaccgguccggguacagcggcaucuucuccguggagggcaagagcugcaucaaccgcugcuucuacguggagcucauccgggggcgcaaggaggagaccgagguccuguggaccagcaacuccaucgugguguucugcggcaccagcgggacguacggcaccggguccuggccggacggcgccgaccugaaccucaugcccaucuga

SEQ ID NO: 88153 - RNA, 1410 nt, Artificial Sequence; identical to SEQ ID NO: 86946
  derived and/or modified CDS sequence (opt1) from neuraminidase__InfluenzaA__AHC60218

SEQ ID NO: 88154 - RNA, 1410 nt, Artificial Sequence; identical to SEQ ID NO: 83542
  derived and/or modified CDS sequence (opt1) from neuraminidase__InfluenzaA__AHC60230

SEQ ID NO: 88155 - RNA, 1410 nt, Artificial Sequence; identical to SEQ ID NO: 87995
  derived and/or modified CDS sequence (opt1) from neuraminidase__InfluenzaA__AHC60242

SEQ ID NO: 88156 - RNA, 1410 nt, Artificial Sequence; identical to SEQ ID NO: 87995
  derived and/or modified CDS sequence (opt1) from neuraminidase__InfluenzaA__AHC60254

SEQ ID NO: 88157 - RNA, 1410 nt, Artificial Sequence; identical to SEQ ID NO: 87995
  derived and/or modified CDS sequence (opt1) from neuraminidase__InfluenzaA__AHC60266

SEQ ID NO: 88158 - RNA, 1410 nt, Artificial Sequence; identical to SEQ ID NO: 88044
  derived and/or modified CDS sequence (opt1) from neuraminidase__InfluenzaA__AHC60278

SEQ ID NO: 88159 - RNA, 1410 nt, Artificial Sequence; identical to SEQ ID NO: 87995
  derived and/or modified CDS sequence (opt1) from neuraminidase__InfluenzaA__AHC60290

SEQ ID NO: 88160 - RNA, 1410 nt, Artificial Sequence
  derived and/or modified CDS sequence (opt1) from neuraminidase__InfluenzaA__AHC60302
augaaccccaaccagaagaucaucaccaucggcagcgugucccugaccaucagcacgaucugcuucuucaugcagaucgccauccucaucaccaccgucacccugcacuucaagcaguacgaguucaacuccccgcccaacaaccaggugaugcugugcgagcccacgaucaucgagcgcaacaucaccgagaucguguaccucaccaacaccacgaucgagaaggagaucugccccaagcuggccgaguaccggaacuggagcaagccgcagugcgacaucaccggguucgcgcccuucuccaaggacaacagcauccgccuguccgccggcggggacaucugggucacccgggagcccuacgugagcugcgaccccaacaagugcuaccaguucgcccucggccaggggaccacgcugaacaacgugcacuccaacaacaccguccgcgaccggaccccguaccgcacccugcucaugaacgagcugggcgugcccuuccaccugggcacgaagcaggucugcaucgccuggagcuccagcuccugccacgacgggaaggccuggcuccacgugugcaucaccggcgacgacaagaacgcgaccgccagcuucaucuacaacgggaagcugguggacuccguggucagcugguccaaggagauccugcggacccaggagagcgagugcgugugcaucaacggcacgugcaccguggucaugaccgacggguccgccagcggcaaggccgacaccaagauccucuucaucgaggagggcaagaucauccacacgagcacccuguccgggagcgcgcagcacguggaggagugcuccugcuacccccgcuaccccggcgugcggugcgucugccgcgacaacuggaaggggagcaaccggccgaucguggacaucaacaucaaggaccacuccaucgugagcuccuacgucugcagcggccuggugggcgacacgccccgcaagaacgacuccagcuccagcucccacugccucgaccccaacaacgaggagggcgggcacggggugaagggcugggccuucgacgacgggaacgacgucuggaugggccggaccaucaacgagaccagccgccugggcuacgagaccuucaaggugaucgaggggugguccaaccccaagagcaagcugcagaucaaccggcaggucaucguggaccgcggcaaccgguccggguacagcggcaucuucuccguggagggcaagagcugcaucaaccgcugcuucuacgucgagcucauccgggggcgcaaggaggagaccgaggugcuguggaccagcaacuccaucguggucuucugcggcacgagcgggaccuacggcaccggguccuggccggacggcgccgaccugaaccucaugcccaucuga

SEQ ID NO: 88161 - RNA, 1410 nt, Artificial Sequence; identical to SEQ ID NO: 87995
  derived and/or modified CDS sequence (opt1) from neuraminidase__InfluenzaA__AHC60314

SEQ ID NO: 88162 - RNA, 1410 nt, Artificial Sequence; identical to SEQ ID NO: 87995
  derived and/or modified CDS sequence (opt1) from neuraminidase__InfluenzaA__AHC60326

SEQ ID NO: 88163 - RNA, 1410 nt, Artificial Sequence
  derived and/or modified CDS sequence (opt1) from neuraminidase__InfluenzaA__AHC60338
augaaccccaaccagaagaucaucaccaucggcagcgugucccugaccaucagcacgaucugcuucuucaugcagaucgccauccucaucaccaccgucacccugcacuucaagcaguacgaguucaacuccccgcccaacaaccaggugaugcugugcgagcccacgaucaucgagcgcaacaucaccgagaucguguaccucaccaacaccacgaucgagaaggagaucugccccaagccggccgaguaccggaacuggagcaagccccagugcgacaucaccggguucgcgcccuucuccaaggacaacagcauccgccuguccgccggcggggacaucugggucacccgggagcccuacgugagcugcgacccggacaagugcuaccaguucgcccugggccaggggaccacgcucaacaacgugcacuccaacaacaccguccgcgaccggacccccuaccgcacccugcugaugaacgagcucggcgugcccuuccaccugggcacgaagcaggucugcaucgccuggagcuccagcuccugccacgacgggaaggccuggcugcacgugugcaucaccggcgacgacaagaacgcgaccgccagcuucaucuacaacgggcggcucguggacuccguggucagcugguccaaggagauccugcgcacccaggagagcgagugcgugugcaucaacggcacgugcaccguggucaugaccgacggguccgccagcggcaaggccgacaccaagauccuguucaucgaggagggcaagaucgugcacacgagcacccucuccgggagcgcgcagcacguggaggagugcuccugcuacccccgguacccgggcguccgcugcgugugccgggacaacuggaaggggagcaaccgccccaucguggacaucaacaucaaggaccacuccaucgucagcuccuacgugugcagcggccuggugggcgacaccccgcggaagaacgacuccagcuccagcucccacugccuggaccccaacaacgaggagggcgggcacggggucaagggcugggccuucgacgacggggacgacguguggaugggccgcaccaucaacgagacgagccggcucggcuacgagaccuucaaggucaucgaggggugguccaaccccaagagcaagcugcagaucaaccgccaggugaucguggaccggggcgaccgcuccggguacagcggcaucuucuccgucgagggcaagagcugcaucaaccggugcuucuacguggagcugauccgcgggcggaaggaggagaccgaggugcucuggaccagcaacuccaucgucguguucugcggcacgagcgggaccuacggcaccggguccuggcccgacggcgccgaccugaaccugaugcccaucuga

SEQ ID NO: 88164 - RNA, 1410 nt, Artificial Sequence; identical to SEQ ID NO: 84908
  derived and/or modified CDS sequence (opt1) from neuraminidase__InfluenzaA__AHC60350

SEQ ID NO: 88165 - RNA, 1410 nt, Artificial Sequence
  derived and/or modified CDS sequence (opt1) from neuraminidase__InfluenzaA__AHC60362
augaaccccaaccagaagaucaucaccaucggcagcgugucccugaccaucagcacgaucugcuucuucaugcaggucgccauccucaucaccaccgugacccugcacuucaagcaguacgaguucaacuccccgcccaacaaccaggugaugcugugcaagcccacgaucaucgagcgcaacaucaccgagaucgucuaccucaccaacaccacgaucgagaaggagaucugccccaagcuggccgaguaccggaacuggagcaagccgcagugcgacaucaccggguucgcgcccuucuccaaggacaacagcauccgccuguccgccggcggggacaucugggugacccgggagcccuacgugagcugcgaccccgacaagugcuaccaguucgcccucggccaggggaccacgcugaacaacguccacuccaacaacaccgugcgcgaccggaccccguaccgcacccugcucaugaacgagcugggcgugcccuuccaccugggcacgaagcaggucugcaucgccuggagcuccagcuccugccacgacgggaaggccuggcuccacgugugcaucaccggcgacgacaagaacgcgaccgccagcuucaucuacaacgggaagcugguggacuccgucgugagcugguccaaggagauccugcggacccaggagagcgagugcgugugcaucaacggcacgugcaccgucgugaugaccgacggguccgccagcggcaaggccgacaccaagauccucuucaucgaggagggcaagaucgugcacacgagcacccuguccgggagcgcgcagcacgucgaggagugcuccugcuacccccgcuaccccggcgugcggugcgugugccgcgacaacuggaaggggagcaaccggccgaucgucgacaucaacaucaaggaccacuccaucgugagcuccuacgugugcagcggccuggucggcgacacgccccgcaagaacgacuccagcuccagcucccacugccucgaccccaacaacgaggagggcgggcacggggugaagggcugggccuucgacgacgggaacgacgucuggaugggccggaccaucaacgagaccagccgccugggcuacgagaccuucaaggugaucgaggggugguccaaccccaagagcaagcugcagaucaaccgccaggugaucgucgaccggggcaaccgguccggguacagcggcaucuucuccguggagggcaagagcugcaucaaccgcugcuucuacguggagcucauccgggggcgcaaggaggagaccgagguccuguggaccagcaacuccaucgugguguucugcggcacgagcgggaccuacggcaccggguccuggccggacggcgccgaccugaaccucaugcccaucuga

SEQ ID NO: 88166 - RNA, 1410 nt, Artificial Sequence; identical to SEQ ID NO: 87907
  derived and/or modified CDS sequence (opt1) from neuraminidase__InfluenzaA__AHC60374

SEQ ID NO: 88167 - RNA, 1410 nt, Artificial Sequence; identical to SEQ ID NO: 83542
  derived and/or modified CDS sequence (opt1) from neuraminidase__InfluenzaA__AHC60386

SEQ ID NO: 88168 - RNA, 1410 nt, Artificial Sequence; identical to SEQ ID NO: 87999
  derived and/or modified CDS sequence (opt1) from neuraminidase__InfluenzaA__AHC60398

SEQ ID NO: 88169 - RNA, 1410 nt, Artificial Sequence; identical to SEQ ID NO: 88031
  derived and/or modified CDS sequence (opt1) from neuraminidase__InfluenzaA__AHC60410

SEQ ID NO: 88170 - RNA, 1410 nt, Artificial Sequence; identical to SEQ ID NO: 83542
  derived and/or modified CDS sequence (opt1) from neuraminidase__InfluenzaA__AHC60422

SEQ ID NO: 88171 - RNA, 1410 nt, Artificial Sequence; identical to SEQ ID NO: 88031
  derived and/or modified CDS sequence (opt1) from neuraminidase__InfluenzaA__AHC60434

SEQ ID NO: 88172 - RNA, 1410 nt, Artificial Sequence; identical to SEQ ID NO: 87999
  derived and/or modified CDS sequence (opt1) from neuraminidase__InfluenzaA__AHC60446

SEQ ID NO: 88173 - RNA, 1410 nt, Artificial Sequence
  derived and/or modified CDS sequence (opt1) from neuraminidase__InfluenzaA__AHC60458
augaaccccaaccagaagaucaucaccaucggcagcgugucccugaccaucagcacgaucugcuucuucaugcagaucgccauccucaucaccaccgucacccugcacuucaagcaguacgaguucaacuccccgcccaacaaccaggugaugcugugcgagcccacgaucaucgagcgcaacaucaccgagaucguguaccucaccaacaccacgaucgagaaggagaucugccccaagcuggccgaguaccggaacuggagcaagccgcagugcgacaucaccggguucgcgcccuucuccaaggacaacagcauccgccuguccgccggcggggacaucugggucacccgggagcccuacgugagcugcgaccccgacaagugcuaccaguucgcccucggccaggggaccacgcugaacaacgugcacuccaacaacaccguccgcgaccggaccccguaccgcacccugcucaugaacgagcugggcgugcccuuccaccugggcacgaagcaggucugcaucgccuggagcuccagcuccugccacgacgggaaggccuggcuccacgugugcaucaccggcgacgacaagaacgcgaccgccagcuucaucuacaacgggcggcugguggacuccguggucagcugguccaaggagauccugcgcacccaggagagcgagugcgugugcaucaacggcacgugcgccguggucaugaccgacggguccgccagcggcaaggcggacaccaagauccucuucaucgaggagggcaagaucgugcacaccagcacgcuguccgggagcgcccagcacguggaggagugcuccugcuacccccgguaccccggcguccgcugcgugugccgggacaacuggaaggggagcaaccgcccgaucguggacaucaacaucaaggaccacuccaucgucagcuccuacgugugcagcggccuggugggcgacacgccccggaagaacgacggguccagcuccagccacugccucgaccccaacaacgaggagggcgggcacggcgucaaggggugggccuucgacgacggcaacgacguguggaugggccgcaccaucaacgagaccucccggcugggguacgagaccuucaaggucaucgagggcuggagcaaccccaaguccaagcugcagaucaaccgccaggugaucguggaccgggggaaccgcagcggcuacuccgggaucuucagcgucgagggcaaguccugcaucaaccggugcuucuacguggagcucauccgcggccggaaggaggagaccgaggugcuguggaccagcaacagcaucgucguguucugcgggaccuccggcacguacgggaccggcagcuggccggacggggccgaccugaaccucaugcccaucuga

SEQ ID NO: 88174 - RNA, 1410 nt, Artificial Sequence; identical to SEQ ID NO: 88044
  derived and/or modified CDS sequence (opt1) from neuraminidase__InfluenzaA__AHC60470

SEQ ID NO: 88175 - RNA, 1410 nt, Artificial Sequence
  derived and/or modified CDS sequence (opt1) from neuraminidase__InfluenzaA__AHC60482
augaaccccaaccagaagaucaucaccaucggcagcgugucccugaccaucagcacgaucugcuucuucaugcagaucgccauccucaccaccaccgucacgcugcacuucaagcaguacgaguucaacuccccgcccaacaaccaggugaugcugugcgagcccaccaucaucgagcgcaacaucaccgagaucguguaccucaccaacacgaccaucgagaaggagaucugccccaagccggccgaguaccggaacuggagcaagccccagugcgacaucaccggguucgcgcccuucuccaaggacaacagcauccgccuguccgccggcggggacaucugggucacccgggagcccuacgugagcugcgacccggacaagugcuaccaguucgcccugggccaggggacgacccucaacaacgugcacuccaacaacaccguccgcgaccggacccccuaccgcacgcugcugaugaacgagcucggcgugcccuuccaccugggcaccaagcaggucugcaucgccuggagcuccagcuccugccacgacgggaaggccuggcugcacgugugcaucaccggcgacgacaagaacgcgaccgccagcuucaucuacaacgggcggcucguggacuccguggucagcugguccaaggagauccugcgcacgcaggagagcgagugcgugugcaucaacgggaccugcaccguggucaugaccgacggguccgccagcggcaaggccgacacgaagauccuguucaucgaggagggcaagaucgugcacaccagcacccucuccgggagcgcgcagcacguggaggagugcuccugcuacccccgguacccgggcguccgcugcgugugccgggacaacuggaaggggagcaaccgccccaucguggacaucaacaucaaggaccacuccaucgucagcuccuacgugugcagcggccuggugggcgacaccccgcggaagaacgacuccagcuccagcucccacugccuggaccccaacaacgaggagggcggccacggggucaagggcugggccuucgacgacgggaacgacguguggaugggccgcacgaucaacgagaccagccggcucggcuacgagaccuucaaggucaucgaggggugguccaaccccaagagcaagcugcagaucaaccgccaggugaucguggaccggggcgaccgcuccggguacagcggcaucuucuccgucgagggcaagagcugcaucaaccggugcuucuacguggagcugauccgcgggcggaaggaggagaccgaggugcucuggacgagcaacuccaucgucguguucugcggcaccagcgggaccuacggcaccggguccuggcccgacggcgccgaccugaaccugaugcccaucuga

SEQ ID NO: 88176 - RNA, 1410 nt, Artificial Sequence; identical to SEQ ID NO: 87995
  derived and/or modified CDS sequence (opt1) from neuraminidase__InfluenzaA__AHC60494

SEQ ID NO: 88177 - RNA, 1410 nt, Artificial Sequence; identical to SEQ ID NO: 87995
  derived and/or modified CDS sequence (opt1) from neuraminidase__InfluenzaA__AHC60506

SEQ ID NO: 88178 - RNA, 1410 nt, Artificial Sequence; identical to SEQ ID NO: 87999
  derived and/or modified CDS sequence (opt1) from neuraminidase__InfluenzaA__AHC60518

SEQ ID NO: 88179 - RNA, 1410 nt, Artificial Sequence; identical to SEQ ID NO: 87999
  derived and/or modified CDS sequence (opt1) from neuraminidase__InfluenzaA__AHC60542

SEQ ID NO: 88180 - RNA, 1410 nt, Artificial Sequence
  derived and/or modified CDS sequence (opt1) from neuraminidase__InfluenzaA__AHC60554
augaaccccaaccagaagaucaucaccaucggcagcgugucccugaccaucagcacgaucugcuucuucaugcagaucgccauccucaucaccaccgucacccugcacuucaagcaguacgaguucuacuccccgcccaacaaccaggugaugcugugcgagcccacgaugaucgagcgcaacaucaccgagaucguguaccucaccaacaccacgaucgagaaggagaucugccccaagcuggccgaguaccggaacuggagcaagccgcagugcgacaucaccggguucgcgcccuucuccaaggacaacagcauccgccuguccgccggcggggacaucugggucacccgggagcccuacgugagcugcgaccccgacaagugcuaccaguucgcccucggccaggggaccacgcugaacaacgugcacuccaacaacaccguccgcgaccggaccccguaccgcacccugcucaugaacgagcugggcgugcccuuccaccugggcacgaagcaggucugcaucgccuggagcuccagcuccugccacgacgggaaggccuggcuccacgugugcaucaccggcgacgacaagaacgcgaccgccagcuucaucuacaacgggcggcugguggacuccguggucagcugguccaaggagauccugcgcacccaggagagcgagugcgugugcaucaacggcacgugcaccguggucaugaccgacggguccgccagcggcaaggccgacaccaagauccucuucaucgaggagggcaagaucgugcacacgagcacccuguccgggagcgcgcagcacguggaggagugcuccugcuacccccgguaccccggcguccgcugcgugugccgggacaacuggaaggggagcaaccgcccgaucguggacaucaacaucaaggaccacuccaucgucagcuccuacgugugcagcggccuggugggcgacacgccccggaagaacgacuccagcuccagcucccacugccucgaccccaacaacgaggagggcgggcacggggucaagggcugggccuucgacgacgggaacgacguguggaugggccgcaccaucaacgagaccagccggcugggcuacgagaccuucaaggucaucgaggggugguccaaccccaagagcaagcugcagaucaaccgccaggugaucguggaccggggcaaccgcuccggguacagcggcaucuucuccgucgagggcaagagcugcaucaaccggugcuucuacguggagcucauccgcgggcggaaggaggagaccgaggugcuguggaccagcaacuccaucgucguguucugcggcacgagcgggaccuacggcaccgggaccuggccggacggcgccgaccugaaccucaugcccaucuga

SEQ ID NO: 88181 - RNA, 1410 nt, Artificial Sequence
  derived and/or modified CDS sequence (opt1) from neuraminidase__InfluenzaA__AHC60566
augaaccccaaccagaagaucaucaccaucggcagcgugucccugaccaucagcacgaucugcuucuucaugcagaucgccauccucaucaccaccgucacccugcacuucaagcaguacgaguucaacuccccgcccaacaaccaggugaugcugugcgagcccacgaucaucgagcgcaacaucaccgagaucguguaccucaccaacaccacgaucgagaaggagaucugccccaagccggccgaguaccggaacuggagcaagccccagugcgacaucaccggguucgcgcccuucuccaaggacaacagcauccgccuguccgccggcggggacaucugggucacccgggagcccuacgugagcugcgacccggacaagugcuaccaguucgcccugggccaggggaccacgcucaacaacgugcacuccaacaacaccguccgcgaccggacccccuaccgcacccugcugaugaacgagcucggcgugcccuuccaccugggcacgaagcaggucugcaucgccuggagcuccagcuccugccacgacgggaaggccuggcugcacgugugcaucaccggcgacgacaagaacgcgaccgccagcuucaucuacaacgggcggcucguggacuccguggucagcugguccaaggagauccugcgcacccaggagagcgagugcgugugcaucaacggcacgugcaccguggucaugaccgacggguccgccagcggcaaggccgacaccaagauccuguucaucgaggagggcaagaucgugcacacgagcacccucuccgggagcgcgcagcacguggaggagugcuccugcuacccccgguacccgggcguccgcugcgugugccgggacaacuggaaggggagcaaccgccccaucguggacaucaacaucaaggaccacuccaucgucagcuccuacgugugcagcggccuggugggcgacaccccgcggaagaacgacuccagcuccagcucccacugccuggaccccaacaacgaggagggcgggcacggggucaagggcugggccuucgacgacgggaacgacguguggaugggccgcaccaucaacgagacgagccggcucggcuacgagaccuucaaggucaucgaggggugguccaaccccaagagcaagcuccaggugaaccgccaggugaucgucgaccggggcgaccgcuccggguacagcggcaucuucuccguggagggcaagagcugcaucaaccggugcuucuacguggagcugauccgcgggcggaaggaggagaccgagguccuguggaccagcaacuccaucgugguguucugcggcacgagcgggaccuacggcaccggguccuggcccgacggcgccgaccugaaccugaugcccaucuga

SEQ ID NO: 88182 - RNA, 1410 nt, Artificial Sequence; identical to SEQ ID NO: 86946
  derived and/or modified CDS sequence (opt1) from neuraminidase__InfluenzaA__AHC60578

SEQ ID NO: 88183 - RNA, 1410 nt, Artificial Sequence; identical to SEQ ID NO: 87995
  derived and/or modified CDS sequence (opt1) from neuraminidase__InfluenzaA__AHC60590

SEQ ID NO: 88184 - RNA, 1410 nt, Artificial Sequence
  derived and/or modified CDS sequence (opt1) from neuraminidase__InfluenzaA__AHC60602
augaaccccaaccagaagaucaucaccaucggcagcgugucccugaccaucagcacgaucugcuucuucaugcagaucgccauccucaucaccaccgucacccugcacuucaagcaguacgaguucaacccgccgcccaacaaccagguggugcugugcgagcccacgaucaucgagcgcaacaucaccgagaucgucuaccucaccaacaccacgaucgagaaggagaucugccccaagcccgccgaguaccggaacugguccaagccccagugcgacaucaccggguucgcgcccuucagcaaggacaacuccauccgccugagcgccggcggggacaucugggugacccgggagccguacguguccugcgaccccgacaagugcuaccaguucgcccugggccaggggaccacgcucaacaacguccacagcaacaacaccgugcgcgaccggacccccuaccgcacccugcugaugaacgagcucggcgugcccuuccaccugggcacgaagcaggucugcaucgccugguccagcuccagcugccacgacgggaaggccuggcugcacgugugcaucaccggcgacgacaagaacgcgaccgccuccuucaucuacaacgggcggcucguggacagcgucguguccuggagcaaggagauccugcgcacccaggaguccgagugcgugugcaucaacggcacgugcaccgucgugaugaccgacgggagcgccuccggcaaggccgacaccaagauccuguucaucgaggagggcaagaucgugcacacgagcacccucagcggguccgcgcagcacgucgaggagugcagcugcuacccgcgguaccccggcgugcgcugcgugugccgggacaacuggaagggguccaaccgccccaucgucgacaucaacaucaaggaccacagcaucguguccagcuacgugugcuccggccuggucggcgacacgccccggaagaacgacagcuccagcuccagccacugccuggacccgaacaacgaggagggcgggcacggggugaagggcugggccuucgacgacgggaacgacgucuggaugggccgcaccaucaacgagaccucccggcucggcuacgagaccuucaaggugaucgagggguggagcaaccccaaguccaagcugcagaucaaccgccaggugaucgucgaccggggcgaccgcagcggguacuccggcaucuucagcguggaggggaaguccugcaucaaccggugcuucuacguggagcugauccgcggccggaaggaggagaccgagguccucuggaccagcaacagcaucgugguguucugcggcacguccgggaccuacggcaccgggagcuggcccgacggcgccgaccugaaccugaugcccaucuga

SEQ ID NO: 88185 - RNA, 1410 nt, Artificial Sequence; identical to SEQ ID NO: 83542
  derived and/or modified CDS sequence (opt1) from neuraminidase__InfluenzaA__AHC60614

SEQ ID NO: 88186 - RNA, 1410 nt, Artificial Sequence; identical to SEQ ID NO: 86946
  derived and/or modified CDS sequence (opt1) from neuraminidase__InfluenzaA__AHC60626

SEQ ID NO: 88187 - RNA, 1410 nt, Artificial Sequence
  derived and/or modified CDS sequence (opt1) from neuraminidase__InfluenzaA__AHC60650
augaaccccaaccagaagaucaucaccaucggcagcgugucccugaccaucagcacgaucugcuucuucaugcagaucgccauccucaucaccaccgucacccugcacuucaagcaguacgaguucuacuccccgcccaacaaccaggugaugcugugcgagcccacgaucaucgagcgcaacaucaccgagaucguguaccucaccaacaccacgaucgagaaggagaucugccccaagcuggccgaguaccggaacuggagcaagccgcagugcgacaucaccggguucgcgcccuucuccaaggacaacagcauccgccuguccgccggcggggacaucugggucacccgggagcccuacgugagcugcgaccccgacaagugcuaccaguucgcccucggccaggggaccacgcugaacaacgugcacuccaacaacaccguccgcgaccggaccccguaccgcacccugcucaugaacgagcugggcgugcccuuccaccugggcacgaagcaggucugcaucgccuggagcuccagcuccugccacgacgggaaggccuggcuccacgugugcaucaccggcgacgacgagaacgcgaccgccagcuucaucuacaacgggcggcugguggacuccguggucagcugguccaaggagauccugcgcacccaggagagcgagugcgugugcaucaacggcacgugcaccguggucaugaccgacggguccgccagcggcaaggccgacaccaagauccucuucaucgaggagggcaagaucgugcacacgagcacccuguccgggagcgcgcagcacguggaggagugcuccugcuacccccgguaccccggcguccgcugcgugugccgggacaacuggaaggggagcaaccgcccgaucguggacaucaacaucaaggaccacuccaucgucagcuccuacgugugcagcggccuggugggcgacacgccccggaagaacgacuccagcuccagcucccacugccucgaccccaacaacgaggagggcgggcacggggucaagggcugggccuucgacgacgggaacgacguguggaugggccgcaccaucaacgagaccagccggcugggcuacgagaccuucaaggucaucgaggggugguccaaccccaagagcaagcugcagaucaaccgccaggugaucguggaccggggcaaccgcuccggguacagcggcaucuucuccgucgagggcaagagcugcaucaaccggugcuucuacguggagcucauccgcgggcggaaggaggagaccgaggugcuguggaccagcaacuccaucgucguguucugcggcacgagcgggaccuacggcaccggguccuggccggacggcgccgaccugaaccucaugcccaucuga

SEQ ID NO: 88188 - RNA, 1410 nt, Artificial Sequence; identical to SEQ ID NO: 88044
  derived and/or modified CDS sequence (opt1) from neuraminidase__InfluenzaA__AHC60662

SEQ ID NO: 88189 - RNA, 1410 nt, Artificial Sequence; identical to SEQ ID NO: 87999
  derived and/or modified CDS sequence (opt1) from neuraminidase__InfluenzaA__AHC60674

SEQ ID NO: 88190 - RNA, 1410 nt, Artificial Sequence; identical to SEQ ID NO: 83542
  derived and/or modified CDS sequence (opt1) from neuraminidase__InfluenzaA__AHC60686

SEQ ID NO: 88191 - RNA, 1410 nt, Artificial Sequence; identical to SEQ ID NO: 87999
  derived and/or modified CDS sequence (opt1) from neuraminidase__InfluenzaA__AHC60698

SEQ ID NO: 88192 - RNA, 1410 nt, Artificial Sequence; identical to SEQ ID NO: 87995
  derived and/or modified CDS sequence (opt1) from neuraminidase__InfluenzaA__AHC60710

SEQ ID NO: 88193 - RNA, 1410 nt, Artificial Sequence; identical to SEQ ID NO: 88044
  derived and/or modified CDS sequence (opt1) from neuraminidase__InfluenzaA__AHC60722

SEQ ID NO: 88194 - RNA, 1410 nt, Artificial Sequence
  derived and/or modified CDS sequence (opt1) from neuraminidase__InfluenzaA__AHC60734
augaaccccaaccagaagaucaucaccaucggcagcgugucccugaccaucagcacgaucugcuucuucaugcagaucgccauccucaucaccaccgucacccugcacuucaagcaguacgaguucaacuccccgcccaacaaccaggugaugcugugcgagcccacgaucaucgagcgcaacaucaccgagaucguguaccucaucaacaccaccaucgagaaggagaucugccccaagcuggccgaguaccggaacuggagcaagccgcagugcgacaucacgggguucgcgcccuucuccaaggacaacagcauccgccuguccgccggcggggacaucugggucacccgggagcccuacgugagcugcgaccccaacaagugcuaccaguucgcccucggccaggggaccacccugaacaacgugcacuccaacaacacgguccgcgaccggaccccguaccgcacccugcucaugaacgagcugggcgugcccuuccaccugggcaccaagcaggucugcaucgccuggagcuccagcuccugccacgacgggaaggccuggcuccacgugugcaucacgggcgacgacaagaacgcgaccgccagcuucaucuacaacgggaagcugguggacuccguggucagcugguccaaggagauccugcggacccaggagagcgagugcgugugcaucaacgggaccugcacgguggucaugaccgacggguccgccagcggcaaggccgacaccaagauccucuucaucgaggagggcaagaucgugcacaccagcacgcuguccgggagcgcgcagcacguggaggagugcuccugcuacccccgcuaccccggcguccggugcgugugccgcgacaacuggaaggggagcaaccggccgaucguggacaucaacaucaaggaccacuccaucgucagcuccuacgugugcagcggccuggugggcgacacgccccgcaagaacgacuccagcuccagcucccacugccucgaccccaacaacgaggagggcggccacggggucaagggcugggccuucgacgacgggaacgacguguggaugggccggaccaucaacgagaccagccgccugggcuacgagaccuucaaggucaucgaggggugguccaaccccaagagcaagcugcagaucaaccgccaggugaucguggaccggggcaaccgguccggguacagcggcaucuucuccgucgagggcaagagcugcaucaaccgcugcuucuacguggagcucauccgggggcgcaaggaggagaccgaggugcuguggaccagcaacuccaucgucguguucugcggcaccagcgggacguacggcaccggguccuggccggacggcgccgaccugaaccucaugcccaucuga

SEQ ID NO: 88195 - RNA, 1410 nt, Artificial Sequence; identical to SEQ ID NO: 88031
  derived and/or modified CDS sequence (opt1) from neuraminidase__InfluenzaA__AHC60746

SEQ ID NO: 88196 - RNA, 1410 nt, Artificial Sequence; identical to SEQ ID NO: 88130
  derived and/or modified CDS sequence (opt1) from neuraminidase__InfluenzaA__AHC60770

SEQ ID NO: 88197 - RNA, 1410 nt, Artificial Sequence
  derived and/or modified CDS sequence (opt1) from neuraminidase__InfluenzaA__AHC60782
augaaccccaaccagaagaucaucaccaucggcagcgugucccugaccaucagcacgaucugcuucuucaugcagaucgccauccucaucaccaccgucacccugcacuucaagcaguacgaguucaacuccccgcccaacaaccaggugaugcugugcgagcccacgaucaucgagcgcaacaucaccgagaucguguaccucaccaacaccacgaucgagaaggagaucugccccaagcuggccgaguaccggaacuggagcaagccgcagugcgacaucaccggguucgcgcccuucuccaaggacaacagcauccgccuguccgccggcggggacaucugggucacccgggagcccuacgugagcugcgaccccgacaagugcuaccaguucgcccucggccaggggaccacgcugaacaacgugcacuccaacaacaccguccgcgaccggaccccguaccgcacccugcucaugaacgagcugggcgugcccuuccaccugggcacgaagcaggucugcaucgccuggagcuccagcuccugccacgacgggaaggccuggcuccacgugugcaucaccggcgacgacaagaacgcgaccgccagcuucaucuacaacgggcggcugguggacuccguggucagcugguccaaggagauccugcgcacccaggagagcgagugcgugugcaucaacggcacgugcaccguggucaugaccgacggguccgccagcggcaaggccgacaccaagauccucuucaucgaggagggcaagaucgugcacacgagcacccuguccgggagcgcgcagcacguggaggagugcuccugcuacccccgguaccccggcguccgcugcgugugccgggacaacuggaaggggagcaaccgcccgaucguggacaucaacaucaaggaccacuccaucgucagcggcuacgugugcuccggccuggugggggacacgccccggaagaacgacagcuccagcuccagccacugccucgaccccaacaacgaggagggcgggcacggcgucaaggggugggccuucgacgacggcaacgacguguggaugggccgcaccaucaacgagaccucccggcugggguacgagaccuucaaggucaucgagggcuggagcaaccccaaguccaagcugcagaucaaccgccaggugaucguggaccgggggaaccgcagcggcuacuccgggaucuucagcgucgagggcaaguccugcaucaaccggugcuucuacguggagcucauccgcggccggaaggaggagaccgaggugcuguggaccagcaacagcaucgucguguucugcgggacguccggcaccuacgggaccggcagcuggccggacggggccgaccugaaccucaugcccaucuga

SEQ ID NO: 88198 - RNA, 1410 nt, Artificial Sequence; identical to SEQ ID NO: 88042
  derived and/or modified CDS sequence (opt1) from neuraminidase__InfluenzaA__AHC60794

SEQ ID NO: 88199 - RNA, 1410 nt, Artificial Sequence
  derived and/or modified CDS sequence (opt1) from neuraminidase__InfluenzaA__AHC60806
augaaccccaaccagaagaucaucaccaucggcagcgugucccugaccaucagcacgaucugcuucuucaugcagaucgccauccucaucaccaccgucacccugcacuucaagcagugcgaguucaacuccccgcccaacaaccaggugaugcugugcgagcccacgaucaucgagcgcaacaucaccgagaucguguaccucaccaacaccacgaucgagaaggagaucugccccaagcuggccgaguaccggaacuggagcaagccgcagugcgacaucaccggguucgcgcccuucuccaaggacaacagcauccgccuguccgccggcggggacaucugggucacccgggagcccuacgugagcugcgaccccaacaagugcuaccaguucgcccucggccaggggaccacgcugaacaacgugcacuccaacaacaccguccgcgaccggaccccguaccgcacccugcucaugaacgagcugggcgugcccuuccaccugggcacgaagcaggucugcaucgccuggagcuccagcuccugccacgacgggaaggccuggcuccacgugugcaucaccggcgacgacaagaacgcgaccgccagcuucaucuacaacgggaagcugguggacuccguggucagcugguccaaggagauccugcggacccaggagagcgagugcgugugcaucaacggcacgugcaccguggucaugaccgacggguccgccagcggcaaggccgacaccaagauccucuucaucgaggagggcaagaucgugcacacgagcacccuguccgggagcgcgcagcacguggaggagugcuccugcuacccccgcuaccccggcguccggugcgugugccgcgacaacuggaaggggagcaaccggccgaucguggacaucaacaucaaggaccacuccaucgucagcuccuacgugugcagcggccuggugggcgacacgccccgcaagaacgacuccagcuccagcucccacugccucgaccccaacaacgaggagggcgggcacggggucaagggcugggccuucgacgacgggaacgacguguggaugggccggaccaucaacgagaccagccgccugggcuacgagaccuucaaggucaucgaggggugguccaaccccaagagcaagcugcagaucaaccgccaggugaucguggaccggggcaaccgguccggguacagcggcaucuucuccgucgagggcaagagcugcaucaaccgcugcuucuacguggagcucauccgggggcgcaaggaggagaccggcgugcuguggaccagcaacuccaucgucguguucugcgggacgagcggcaccuacgggaccggcuccuggccggacggggccgaccugaaccucaugcccaucuga

SEQ ID NO: 88200 - RNA, 1410 nt, Artificial Sequence; identical to SEQ ID NO: 84908
  derived and/or modified CDS sequence (opt1) from neuraminidase__InfluenzaA__AHC60818

SEQ ID NO: 88201 - RNA, 1410 nt, Artificial Sequence; identical to SEQ ID NO: 87999
  derived and/or modified CDS sequence (opt1) from neuraminidase__InfluenzaA__AHC60830

SEQ ID NO: 88202 - RNA, 1410 nt, Artificial Sequence; identical to SEQ ID NO: 88180
  derived and/or modified CDS sequence (opt1) from neuraminidase__InfluenzaA__AHC60842

SEQ ID NO: 88203 - RNA, 1410 nt, Artificial Sequence; identical to SEQ ID NO: 87999
  derived and/or modified CDS sequence (opt1) from neuraminidase__InfluenzaA__AHC60854

SEQ ID NO: 88204 - RNA, 1410 nt, Artificial Sequence; identical to SEQ ID NO: 88044
  derived and/or modified CDS sequence (opt1) from neuraminidase__InfluenzaA__AHC60866

SEQ ID NO: 88205 - RNA, 1410 nt, Artificial Sequence; identical to SEQ ID NO: 88031
  derived and/or modified CDS sequence (opt1) from neuraminidase__InfluenzaA__AHC60878

SEQ ID NO: 88206 - RNA, 1410 nt, Artificial Sequence; identical to SEQ ID NO: 88031
  derived and/or modified CDS sequence (opt1) from neuraminidase__InfluenzaA__AHC60890

SEQ ID NO: 88207 - RNA, 1410 nt, Artificial Sequence; identical to SEQ ID NO: 88130
  derived and/or modified CDS sequence (opt1) from neuraminidase__InfluenzaA__AHC60902

SEQ ID NO: 88208 - RNA, 1410 nt, Artificial Sequence; identical to SEQ ID NO: 87995
  derived and/or modified CDS sequence (opt1) from neuraminidase__InfluenzaA__AHC60914

SEQ ID NO: 88209 - RNA, 1410 nt, Artificial Sequence; identical to SEQ ID NO: 87999
  derived and/or modified CDS sequence (opt1) from neuraminidase__InfluenzaA__AHC60926

SEQ ID NO: 88210 - RNA, 1410 nt, Artificial Sequence; identical to SEQ ID NO: 87995
  derived and/or modified CDS sequence (opt1) from neuraminidase__InfluenzaA__AHC60938

SEQ ID NO: 88211 - RNA, 1410 nt, Artificial Sequence; identical to SEQ ID NO: 87999
  derived and/or modified CDS sequence (opt1) from neuraminidase__InfluenzaA__AHC60950

SEQ ID NO: 88212 - RNA, 1410 nt, Artificial Sequence
  derived and/or modified CDS sequence (opt1) from neuraminidase__InfluenzaA__AHC60962
augaaccccaaccagaagaucaucaccaucggcagcgugucccugaccaucagcacgaucugcuucuucaugcagaucgccauccucaucaccaccgucacccugcacuucaagcaguacgaguucuacuccccgcccaacaaccaggugaugcugugcgagcccacgaucaucgagcgcaacaucaccgagaucguguaccucaccaacaccacgaucgagaaggagaucugccccaagcuggccgaguaccggaacuggagcaagccgcagugcgacaucaccggguucgcgcccuucuccaaggacaacagcauccgccuguccgccggcggggacaucugggucacccgggagcccuacgugagcugcgaccccgacaagugcuaccaguucgcccucggccaggggaccacgcugaacaacgugcacuccaacaacaccguccgcgaccggaccccguaccgcacccugcucaugaacgagcugggcgugcccuuccaccugggcacgaagcaggucugcaucgccuggagcuccagcuccugccacgacgggaaggccuggcuccacgugugcgugaccggcgacgacaagaacgcgaccgccagcuucaucuacaacgggcggcugguggacuccgucgugagcugguccaaggagauccugcgcacccaggagagcgagugcgugugcaucaacggcacgugcaccgucgugaugaccgacggguccgccagcggcaaggccgacaccaagauccucuucaucgaggagggcaagaucgugcacacgagcacccuguccgggagcgcgcagcacgucgaggagugcuccugcuacccccgguaccccggcgugcgcugcgugugccgggacaacuggaaggggagcaaccgcccgaucgucgacaucaacaucaaggaccacuccaucgugagcuccuacgugugcagcggccuggucggcgacacgccccggaagaacgacuccagcuccagcucccacugccucgaccccaacaacgaggagggcgggcacggggugaagggcugggccuucgacgacgggaacgacgucuggaugggccgcaccaucaacgagaccagccggcugggcuacgagaccuucaaggugaucgaggggugguccaaccccaagagcaagcugcagaucaaccgccaggugaucgucgaccggggcaaccgcuccggguacagcggcaucuucuccguggagggcaagagcugcaucaaccggugcuucuacguggagcucauccgcgggcggaaggaggagaccgagguccuguggaccagcaacuccaucgugguguucugcggcacgagcgggaccuacggcaccggguccuggccggacggcgccgaccugaaccucaugcccaucuga

SEQ ID NO: 88213 - RNA, 1410 nt, Artificial Sequence; identical to SEQ ID NO: 88044
  derived and/or modified CDS sequence (opt1) from neuraminidase__InfluenzaA__AHC60974

SEQ ID NO: 88214 - RNA, 1410 nt, Artificial Sequence; identical to SEQ ID NO: 87995
  derived and/or modified CDS sequence (opt1) from neuraminidase__InfluenzaA__AHC60986

SEQ ID NO: 88215 - RNA, 1410 nt, Artificial Sequence; identical to SEQ ID NO: 88142
  derived and/or modified CDS sequence (opt1) from neuraminidase__InfluenzaA__AHC60998

SEQ ID NO: 88216 - RNA, 1410 nt, Artificial Sequence; identical to SEQ ID NO: 88042
  derived and/or modified CDS sequence (opt1) from neuraminidase__InfluenzaA__AHC61010

SEQ ID NO: 88217 - RNA, 1410 nt, Artificial Sequence
  derived and/or modified CDS sequence (opt1) from neuraminidase__InfluenzaA__AHC61022
augaaccccaaccagaagaucaucaccaucggcagcgugucccugaccaucagcacgaucugcuucuucaugcagaucgccauccucaucaccaccgucacccugcacuucaagcaguacgaguucaacuccccgcccaacaaccaggugaugcugugcgagcccacgaucaucgagcgcaacaucaccgagaucguguaccucaccaacaccacgaucgagaaggagaucugccccaagcuggccgaguaccggaacuggagcaagccgcagugcgacaucaccggguucgcgcccuucuccaaggacaacagcauccgccuguccgccggcggggacaucugggucacccgggagcccuacgugagcugcgaccccgacaagugcuaccaguucgcccucggccaggggaccacgcugaacaacgugcacuccaacaacaccguccgcgaccggaccccguaccgcacccugcucaugaacgagcugggcgugcccuuccaccugggcacgaagcaggucugcaucgccuggagcuccagcuccugccacgacgggaaggccuggcuccacgugugcaucaccggcgacgacaagaacgcgaccgccagcuucaucuacaacgggcggcugguggacuccguggucagcugguccaaggagauccugcgcacccaggagagcgagugcgugugcaucaacggcacgugcaccguggucaugaccgacggguccgccagcggcaaggccgacaccaagauccucuucaucgaggagggcaagaucgugcacacgagcacccuguccgggagcgcgcagcacguggaggagugcuccugcuacccccgguaccccggcguccgcugcgugugccgggacaacuggaaggggagcaaccgcccgaucguggacaucaacaucaaggaccacuccaucgucagcuccuacgugugcagcggccuggugggcgacacgccccggaagaacgacuccagcuccaucagccacugccucgaccccaacaacgaggagggcgggcacggggucaagggcugggccuucgacgacgggaacgacguguggaugggccgcaccaucaacgagaccucccggcugggcuacgagaccuucaaggucaucgagggguggagcaaccccaaguccaagcugcagaucaaccgccaggugaucguggaccggggcaaccgcagcggguacuccggcaucuucagcgucgaggggaaguccugcaucaaccggugcuucuacguggagcucauccgcggccggaaggaggagaccgaggugcuguggaccagcaacagcaucgucguguucugcggcacguccgggaccuacggcaccgggagcuggccggacggcgccgaccugaaccucaugcccaucuga

SEQ ID NO: 88218 - RNA, 1410 nt, Artificial Sequence; identical to SEQ ID NO: 83542
  derived and/or modified CDS sequence (opt1) from neuraminidase__InfluenzaA__AHC61034

SEQ ID NO: 88219 - RNA, 1410 nt, Artificial Sequence; identical to SEQ ID NO: 87995
  derived and/or modified CDS sequence (opt1) from neuraminidase__InfluenzaA__AHC61046

SEQ ID NO: 88220 - RNA, 1410 nt, Artificial Sequence; identical to SEQ ID NO: 88044
  derived and/or modified CDS sequence (opt1) from neuraminidase__InfluenzaA__AHC61058

SEQ ID NO: 88221 - RNA, 1410 nt, Artificial Sequence; identical to SEQ ID NO: 87907
  derived and/or modified CDS sequence (opt1) from neuraminidase__InfluenzaA__AHC61070

SEQ ID NO: 88222 - RNA, 1410 nt, Artificial Sequence
  derived and/or modified CDS sequence (opt1) from neuraminidase__InfluenzaA__AHC61082
augaaccccaaccagaagaucaucaccaucggcagcgugucccugaccaucagcacgaucugcuucuucaugcagaucgccauccucaucaccaccgucacccugcacuucaagcaguacgaguucaacuccccgcccaacaaccagguggugcugugcgagcccacgaucaucgagcgcaacaucaccgagaucgucuaccucaccaacaccacgaucgagaaggagaucugccccaagccggccgaguaccggaacuggagcaagccccagugcgacaucaccggguucgcgcccuucuccaaggacaacagcauccgccuguccgccggcggggacaucugggugacccgggagcccuacgugagcugcgacccggacaagugcuaccaguucgcccugggccaggggaccacgcucaacaacguccacuccaacaacaccgugcgcgaccggacccccuaccgcacccugcugaugaacgagcucggcgugcccuuccaccugggcacgaagcaggucugcaucgccuggagcuccagcuccugccacgacgggaaggccuggcugcacgugugcaucaccggcgacgacaagaacgcgaccgccagcuucaucuacaacgggcggcucguggacuccgucgugagcugguccaaggagauccugcgcacccaggagagcgagugcgugugcaucaacggcacgugcaccgucgugaugaccgacggguccgccagcggcaaggccgacaccaagauccuguucaucgaggagggcaagaucgugcacacgagcacccucuccgggagcgcgcagcacgucgaggagugcuccugcuacccccgguacccgggcgugcgcugcgugugccgggacaacuggaaggggagcaaccgccccaucgucgacaucaacaucaaggaccacuccaucgugagcuccuacgugugcagcggccuggucggcgacaccccgcggaagaacgacuccagcuccagcucccacugccuggaccccaacaacgaggagggcgggcacggggugaagggcugggccuucgacgacgggaacgacgucuggaugggccgcaccaucaacgagacgagccggcucggcuacgagaccuucaaggugaucgaggggugguccaaccccaagagcaagcugcagaucaaccgccaggugaucgucgaccggggcgaccgcuccggguacagcggcaucuucuccguggagggcaagagcugcaucaaccggugcuucuacguggagcugauccgcgggcggaaggaggagaccggcguccucuggaccagcaacuccaucgugguguucugcgggacgagcggcaccuacgggaccggcuccuggcccgacggggccgaccugaaccugaugcccaucuga

SEQ ID NO: 88223 - RNA, 1410 nt, Artificial Sequence; identical to SEQ ID NO: 83542
  derived and/or modified CDS sequence (opt1) from neuraminidase__InfluenzaA__AHC61094

SEQ ID NO: 88224 - RNA, 1410 nt, Artificial Sequence; identical to SEQ ID NO: 88031
  derived and/or modified CDS sequence (opt1) from neuraminidase__InfluenzaA__AHC61106

SEQ ID NO: 88225 - RNA, 1410 nt, Artificial Sequence; identical to SEQ ID NO: 88031
  derived and/or modified CDS sequence (opt1) from neuraminidase__InfluenzaA__AHC61118

SEQ ID NO: 88226 - RNA, 1410 nt, Artificial Sequence; identical to SEQ ID NO: 87995
  derived and/or modified CDS sequence (opt1) from neuraminidase__InfluenzaA__AHC61130

SEQ ID NO: 88227 - RNA, 1410 nt, Artificial Sequence; identical to SEQ ID NO: 88142
  derived and/or modified CDS sequence (opt1) from neuraminidase__InfluenzaA__AHC61142

SEQ ID NO: 88228 - RNA, 1410 nt, Artificial Sequence; identical to SEQ ID NO: 88031
  derived and/or modified CDS sequence (opt1) from neuraminidase__InfluenzaA__AHC61154

SEQ ID NO: 88229 - RNA, 1410 nt, Artificial Sequence
  derived and/or modified CDS sequence (opt1) from neuraminidase__InfluenzaA__AHC61166
augaaccccaaccagaagaucaucaccaucggcagcgugucccugaccaucagcacgaucugcuucuucaugcaggucgccauccucaucaccaccgugacccugcacuucaagcaguacgaguucaacuccccgcccaacaaccaggugaugcugugcgagcccacgaucaucgagcgcaacaucaccgagaucgucuaccucaccaacaccacgaucgagaaggagaucugccccaagcuggccgaguaccggaacuggagcaagccgcagugcgacaucaccggguucgcgcccuucuccaaggacaacagcauccgccuguccgccggcggggacaucugggugacccgggagcccuacgugagcugcgaccccgacaagugcuaccaguucgcccucggccaggggaccacgcugaacaacguccacuccaacaacaccgugcgcgaccggaccccguaccgcacccugcucaugaacgagcugggcgugcccuuccaccugggcacgaagcaggucugcaucgccuggagcuccagcuccugccacgacgggaaggccuggcuccacgugugcaucaccggcgacgacaagaacgcgaccgccagcuucaucuacaacgggaagcugguggacuccgucgugagcugguccaaggagauccugcggacccaggagagcgagugcgugugcaucaacggcacgugcaccgucgugaugaccgacggguccgccagcggcaaggccgacaccaagauccucuucaucgaggagggcaagaucgugcacacgagcacccuguccgggagcgcgcagcacgucgaggagugcuccugcuacccccgcuaccccggcgugcggugcgugugccgcgacaacuggaaggggagcaaccggccgaucgucgacaucaacaucaaggaccacuccaucgugagcuccuacgugugcagcggccuggucggcgacacgccccgcaagaacgacuccagcuccagcucccacugccucgaccccaacaacgaggagggcgggcacggggugaagggcugggccuucgacgacgggaacgacgucuggaugggccggaccaucaacgagaccagccgccugggcuacgagaccuucaaggugaucgaggggugguccaaccccaagagcaagcugcagaccaaccgccaggugaucgucgaccggggcaaccgguccggguacagcggcaucuucuccguggagggcaagagcugcaucaaccgcugcuucuacguggagcucauccgggggcgcaaggaggagaccgagguccuguggacgagcaacuccaucgugguguucugcggcaccagcgggaccuacggcaccggguccuggccggacggcgccgaccugaaccucaugcccaucuga

SEQ ID NO: 88230 - RNA, 1410 nt, Artificial Sequence; identical to SEQ ID NO: 87995
  derived and/or modified CDS sequence (opt1) from neuraminidase__InfluenzaA__AHC61178

SEQ ID NO: 88231 - RNA, 1410 nt, Artificial Sequence; identical to SEQ ID NO: 88031
  derived and/or modified CDS sequence (opt1) from neuraminidase__InfluenzaA__AHC61190

SEQ ID NO: 88232 - RNA, 1410 nt, Artificial Sequence; identical to SEQ ID NO: 88044
  derived and/or modified CDS sequence (opt1) from neuraminidase__InfluenzaA__AHC61202

SEQ ID NO: 88233 - RNA, 1410 nt, Artificial Sequence; identical to SEQ ID NO: 87999
  derived and/or modified CDS sequence (opt1) from neuraminidase__InfluenzaA__AHC61214

SEQ ID NO: 88234 - RNA, 1410 nt, Artificial Sequence; identical to SEQ ID NO: 88044
  derived and/or modified CDS sequence (opt1) from neuraminidase__InfluenzaA__AHC61226

SEQ ID NO: 88235 - RNA, 1410 nt, Artificial Sequence; identical to SEQ ID NO: 88031
  derived and/or modified CDS sequence (opt1) from neuraminidase__InfluenzaA__AHC61238

SEQ ID NO: 88236 - RNA, 1410 nt, Artificial Sequence; identical to SEQ ID NO: 88212
  derived and/or modified CDS sequence (opt1) from neuraminidase__InfluenzaA__AHC61250

SEQ ID NO: 88237 - RNA, 1410 nt, Artificial Sequence; identical to SEQ ID NO: 87995
  derived and/or modified CDS sequence (opt1) from neuraminidase__InfluenzaA__AHC61262

SEQ ID NO: 88238 - RNA, 1410 nt, Artificial Sequence; identical to SEQ ID NO: 87999
  derived and/or modified CDS sequence (opt1) from neuraminidase__InfluenzaA__AHC61274

SEQ ID NO: 88239 - RNA, 1410 nt, Artificial Sequence; identical to SEQ ID NO: 83542
  derived and/or modified CDS sequence (opt1) from neuraminidase__InfluenzaA__AHC61286

SEQ ID NO: 88240 - RNA, 1410 nt, Artificial Sequence; identical to SEQ ID NO: 88043
  derived and/or modified CDS sequence (opt1) from neuraminidase__InfluenzaA__AHC61298

SEQ ID NO: 88241 - RNA, 1410 nt, Artificial Sequence
  derived and/or modified CDS sequence (opt1) from neuraminidase__InfluenzaA__AHC61310
augaaccccaaccagaagaucaucaccaucggcagcgugucccugaccaucagcacgaucugcuucuucaugcagaucgccauccucaucaccaccgucacccugcacuucaagcaguacgaguucaacuccccgcccaacaaccaggugaugcugugcgagcccacgaucaucgagcgcaacaucaccgagaucguguaccucaccaacaccacgaucgagaaggagaucugccccaagcuggccgaguaccggaacuggagcaagccgcagugcgacaucaccggguucgcgcccuucuccaaggacaacagcauccgccuguccgccggcggggacaucugggucacccgggagcccuacgugagcugcgaccccaacaagugcuaccaguucgcccucggccaggggaccacgcugaacaacgugcacuccaacaacaccguccgcgaccggaccccguaccgcacccugcucaugaacgagcugggcgugcccuuccaccugggcacgaagcaggucugcaucgccuggagcuccagcuccugccacgacgggaaggccuggcuccacgugugcaucaccggcgacgacaagaacgcgaccgccagcuucaucuacaacgggaagcugguggacuccguggucagcugguccaaggagauccugcggacccaggagagcgagugcgugugcaucaacggcacgugcaccguggucaugaccgacggguccgccagcggcaaggccgacaccaagauccucuucaucgaggagggcaagaucgugcacacgagcacccuguccgggagcgcgcagcacguggaggagugcuccugcuacccccgcuaccccggcguccggugcgugugccgcgacaacuggaaggggagcaaccggccgaucguggacaucaacaucaaggaccacuccaucgucagcuccuacgugugcagcggccuggugggcgacacgccccgcaagaacgacuccagcuccagcucccacugccucgaccccaacaacgaggagggcgggcacggggucaagggcugggccuucgacgacgggaacgacguguggaugggccggaccaucaacgagaccagccgccugggcuacgagaccuucaaggucaucgaggggugguccaaccccaagagcaagcugcagaucaaccgccaggugaucaucgaccggggcaaccgguccggguacagcggcaucuucuccguggagggcaagagcugcaucaaccgcugcuucuacgucgagcucauccgggggcgcaaggaggagaccgaggugcuguggaccagcuccagcaucguggucuucugcggcacguccgggaccuacggcaccgggagcuggccggacggcgccgaccugaaccucaugcccaucuga

SEQ ID NO: 88242 - RNA, 1410 nt, Artificial Sequence; identical to SEQ ID NO: 88072
  derived and/or modified CDS sequence (opt1) from neuraminidase__InfluenzaA__AHC61322

SEQ ID NO: 88243 - RNA, 1410 nt, Artificial Sequence; identical to SEQ ID NO: 88031
  derived and/or modified CDS sequence (opt1) from neuraminidase__InfluenzaA__AHC61334

SEQ ID NO: 88244 - RNA, 1410 nt, Artificial Sequence; identical to SEQ ID NO: 87999
  derived and/or modified CDS sequence (opt1) from neuraminidase__InfluenzaA__AHC61346

SEQ ID NO: 88245 - RNA, 1410 nt, Artificial Sequence
  derived and/or modified CDS sequence (opt1) from neuraminidase__InfluenzaA__AHC61358
augaaccccaaccagaagaucaucaccaucggcagcgugucccugaccaucagcacgaucugcuucuucaugcagaucgccauccucaucaccaccgucacccugcacuucaagcaguacgaguucaacuccccgcccaacaaccaggugaugcugugcgagcccacgaucaucgagcgcaacaucaccgagaucguguaccucaccaacaccacgaucgagaaggagaucugccccaagcuggccgaguaccggaacuggagcaagccgcagugcgacaucaccggguucgcgcccuucuccaaggacaacagcauccgccuguccgccggcggggacaucugggucacccgggagcccuacgugagcugcgaccccgacaagugcuaccaguucgcccucggccaggggaccacgcugaacaacgugcacuccaacaacaccguccgcgaccggaccccguaccgcacccugcucaugaacgagcugggcgugcccuuccaccugggcacgaagcaggucugcaucgccuggagcuccagcuccugccacgacgggaaggccuggcuccacgugugcaucaccggcgacgacaagaacgcgaccgccagcuucaucuacaacgggcggcugguggacuccguggucagcugguccaaggagauccugcgcacccaggagagcgagugcgugugcaucaacggcacgugcaccguggucaugaccgacggguccgccagcggcaaggccgacaccaagauccucuucaucgaggagggcaagaucgugcacacgagcacccuguccgggagcgcgcagcacguggaggagugcuccugcuacccccgguaccccggcguccgcugcgugugccgggacaacuggaaggggagcaaccgcccgaucguggacaucaacaucaaggaccacuccaucgucagcuccuacgugugcagcggccuggugggcgacacgccccggaagaacgacaucuccagcuccagccacugccucgaccccaacaacgaggagggcgggcacggggucaagggcugggccuucgacgacgggaacgacguguggaugggccgcaccaucaacgagaccucccggcugggcuacgagaccuucaaggucaucaagggguggagcaaccccaaguccaagcugcagaucaaccgccaggugaucguggaccggggcaaccgcagcggguacuccggcaucuucagcgucgaggggaaguccugcaucaaccggugcuucuacguggagcucauccgcggccggaaggaggagaccgaggugcuguggaccagcaacagcaucgucguguucugcggcacguccgggaccuacggcaccgggagcuggccggacggcgccgaccugaaccucaugcccaucuga

SEQ ID NO: 88246 - RNA, 1410 nt, Artificial Sequence; identical to SEQ ID NO: 88044
  derived and/or modified CDS sequence (opt1) from neuraminidase__InfluenzaA__AHC61370

SEQ ID NO: 88247 - RNA, 1410 nt, Artificial Sequence; identical to SEQ ID NO: 88072
  derived and/or modified CDS sequence (opt1) from neuraminidase__InfluenzaA__AHC61382

SEQ ID NO: 88248 - RNA, 1410 nt, Artificial Sequence; identical to SEQ ID NO: 88044
  derived and/or modified CDS sequence (opt1) from neuraminidase__InfluenzaA__AHC61394
